United States Patent Application Publication US 2005/0244851 A1 - sequence listing, part 39

SEQ ID NO: 1508148 - DNA, 25 bp, Homo sapien
gagttcatctccgtctgcaacaacg

SEQ ID NO: 1508149 - DNA, 25 bp, Homo sapien
tcaagtgatggagagcaatacccgg

SEQ ID NO: 1508150 - DNA, 25 bp, Homo sapien
gactaggtcctgcagcttaccctgg

SEQ ID NO: 1508151 - DNA, 25 bp, Homo sapien
tttgctaccgctggaccatgatccg

SEQ ID NO: 1508152 - DNA, 25 bp, Homo sapien
cccactttcctggtctgctaagtag

SEQ ID NO: 1508153 - DNA, 25 bp, Homo sapien
catgatccgcctggtaacgggcgtc

SEQ ID NO: 1508154 - DNA, 25 bp, Homo sapien
taactgcgggcaaacctgactgatg

SEQ ID NO: 1508155 - DNA, 25 bp, Homo sapien
aaagactcacagtcgcccaacacag

SEQ ID NO: 1508156 - DNA, 25 bp, Homo sapien
cagctgctcaaagactcacagtcgc

SEQ ID NO: 1508157 - DNA, 25 bp, Homo sapien
tgccttgcgccatggactggcagcc

SEQ ID NO: 1508158 - DNA, 25 bp, Homo sapien
cttgccttgcgccatggactggcag

SEQ ID NO: 1508159 - DNA, 25 bp, Homo sapien
tggctccctccttccgcgcgagtct

SEQ ID NO: 1508160 - DNA, 25 bp, Homo sapien
cgcagcgcgagttgccgccgctgct

SEQ ID NO: 1508161 - DNA, 25 bp, Homo sapien
tggagaagccgcagcgcgagttgcc

SEQ ID NO: 1508162 - DNA, 25 bp, Homo sapien
agaagccgcagcgcgagttgccgcc

SEQ ID NO: 1508163 - DNA, 25 bp, Homo sapien
cagagctggtccctactgaggtgga

SEQ ID NO: 1508164 - DNA, 25 bp, Homo sapien
gatgatacatccacagcacttggca

SEQ ID NO: 1508165 - DNA, 25 bp, Homo sapien
cacctcttgtggtccctgctaggga

SEQ ID NO: 1508166 - DNA, 25 bp, Homo sapien
caataaagggagctgttgccacctc

SEQ ID NO: 1508167 - DNA, 25 bp, Homo sapien
tcgggcggcgtgaacttgttcgcca

SEQ ID NO: 1508168 - DNA, 25 bp, Homo sapien
acttgttcgccaacgacggcagctt

SEQ ID NO: 1508169 - DNA, 25 bp, Homo sapien
gagccgttgggctgagtcgggatcg

SEQ ID NO: 1508170 - DNA, 25 bp, Homo sapien
tcctggagctgttcaagcggaagat

SEQ ID NO: 1508171 - DNA, 25 bp, Homo sapien
ctttgtcaacctctggtctataatt

SEQ ID NO: 1508172 - DNA, 25 bp, Homo sapien
tcaacctctggtctataattttcca

SEQ ID NO: 1508173 - DNA, 25 bp, Homo sapien
ctatcacattcctagcgaagctagg

SEQ ID NO: 1508174 - DNA, 25 bp, Homo sapien
gctaggagcatgagttaatttcctc

SEQ ID NO: 1508175 - DNA, 25 bp, Homo sapien
tggctcacgtgatccagcggagcgc

SEQ ID NO: 1508176 - DNA, 25 bp, Homo sapien
tcacgtgatccagcggagcgcacca

SEQ ID NO: 1508177 - DNA, 25 bp, Homo sapien
tgatccagcggagcgcaccatacga

SEQ ID NO: 1508178 - DNA, 25 bp, Homo sapien
cagcggagcgcaccatacgaagaac

SEQ ID NO: 1508179 - DNA, 25 bp, Homo sapien
cttcgaactcctctgcctcaacccc

SEQ ID NO: 1508180 - DNA, 25 bp, Homo sapien
aggctgcgctgctcgatgatgttgc

SEQ ID NO: 1508181 - DNA, 25 bp, Homo sapien
gatgatgttgctaagtgtaggctcc

SEQ ID NO: 1508182 - DNA, 25 bp, Homo sapien
ttgctaagtgtaggctccagcggct

SEQ ID NO: 1508183 - DNA, 25 bp, Homo sapien
cccgacgaagatccacttcaggctg

SEQ ID NO: 1508184 - DNA, 25 bp, Homo sapien
tggagcaggtgacccgaatcagcag

SEQ ID NO: 1508185 - DNA, 25 bp, Homo sapien
agtcaaaagataggggatgagggga

SEQ ID NO: 1508186 - DNA, 25 bp, Homo sapien
aaagtcaaaagataggggatgaggg

SEQ ID NO: 1508187 - DNA, 25 bp, Homo sapien
tgaggggatgggctctgttccctgg

SEQ ID NO: 1508188 - DNA, 25 bp, Homo sapien
actctcacgccccttggagagctgg

SEQ ID NO: 1508189 - DNA, 25 bp, Homo sapien
tctcacgccccttggagagctggac

SEQ ID NO: 1508190 - DNA, 25 bp, Homo sapien
acgccccttggagagctggactgcc

SEQ ID NO: 1508191 - DNA, 25 bp, Homo sapien
gaacactctcacgccccttggagag

SEQ ID NO: 1508192 - DNA, 25 bp, Homo sapien
gggggccaaagggatgagactgagg

SEQ ID NO: 1508193 - DNA, 25 bp, Homo sapien
ggccaaagggatgagactgaggttg

SEQ ID NO: 1508194 - DNA, 25 bp, Homo sapien
gggccaaagggatgagactgaggtt

SEQ ID NO: 1508195 - DNA, 25 bp, Homo sapien
ctgggggccaaagggatgagactga

SEQ ID NO: 1508196 - DNA, 25 bp, Homo sapien
tcctcgaagaactcgtcaggcagct

SEQ ID NO: 1508197 - DNA, 25 bp, Homo sapien
aagaactcgtcaggcagctccgcca

SEQ ID NO: 1508198 - DNA, 25 bp, Homo sapien
gttgtcctcctcgaagaactcgtca

SEQ ID NO: 1508199 - DNA, 25 bp, Homo sapien
ctcagcatgttgtcctcctcgaaga

SEQ ID NO: 1508200 - DNA, 25 bp, Homo sapien
tcgatgccgggaaatgcgctcatgg

SEQ ID NO: 1508201 - DNA, 25 bp, Homo sapien
catcgatgccgggaaatgcgctcat

SEQ ID NO: 1508202 - DNA, 25 bp, Homo sapien
ctcatcgatgccgggaaatgcgctc

SEQ ID NO: 1508203 - DNA, 25 bp, Homo sapien
cgatgccgggaaatgcgctcatggc

SEQ ID NO: 1508204 - DNA, 25 bp, Homo sapien
tcatgacctcggcatagctcatggc

SEQ ID NO: 1508205 - DNA, 25 bp, Homo sapien
ctcatgacctcggcatagctcatgg

SEQ ID NO: 1508206 - DNA, 25 bp, Homo sapien
tcaaataccaccaccgagaagttca

SEQ ID NO: 1508207 - DNA, 25 bp, Homo sapien
tggcccgtgggtgccgtgtcaaata

SEQ ID NO: 1508208 - DNA, 25 bp, Homo sapien
tgccgtgtcaaataccaccaccgag

SEQ ID NO: 1508209 - DNA, 25 bp, Homo sapien
tgggtgccgtgtcaaataccaccac

SEQ ID NO: 1508210 - DNA, 25 bp, Homo sapien
tggttcttgatctgcataagccggc

SEQ ID NO: 1508211 - DNA, 25 bp, Homo sapien
ttcttgatctgcataagccggccca

SEQ ID NO: 1508212 - DNA, 25 bp, Homo sapien
cttgatctgcataagccggcccagg

SEQ ID NO: 1508213 - DNA, 25 bp, Homo sapien
ggttcttgatctgcataagccggcc

SEQ ID NO: 1508214 - DNA, 25 bp, Homo sapien
ccactcccggctgcctggatggtgc

SEQ ID NO: 1508215 - DNA, 25 bp, Homo sapien
cccactcccggctgcctggatggtg

SEQ ID NO: 1508216 - DNA, 25 bp, Homo sapien
tcccactcccggctgcctggatggt

SEQ ID NO: 1508217 - DNA, 25 bp, Homo sapien
ctctgtctagggtatttagcgggca

SEQ ID NO: 1508218 - DNA, 25 bp, Homo sapien
gaggaaagacagctccgtcccatcc

SEQ ID NO: 1508219 - DNA, 25 bp, Homo sapien
ttgttagtgcgcatttgagggtctg

SEQ ID NO: 1508220 - DNA, 25 bp, Homo sapien
ggcactctcatgatctccatttgca

SEQ ID NO: 1508221 - DNA, 25 bp, Homo sapien
ctgaggcacaggtccccacagggga

SEQ ID NO: 1508222 - DNA, 25 bp, Homo sapien
caggtccccacaggggacacgcaca

SEQ ID NO: 1508223 - DNA, 25 bp, Homo sapien
gtccccacaggggacacgcacacac

SEQ ID NO: 1508224 - DNA, 25 bp, Homo sapien
acaggtccccacaggggacacgcac

SEQ ID NO: 1508225 - DNA, 25 bp, Homo sapien
ctgcaggggggatgtgggagggctc

SEQ ID NO: 1508226 - DNA, 25 bp, Homo sapien
tgcaggggggatgtgggagggctca

SEQ ID NO: 1508227 - DNA, 25 bp, Homo sapien
gcaggggggatgtgggagggctcat

SEQ ID NO: 1508228 - DNA, 25 bp, Homo sapien
ccttgaactgttcgctgactgagcg

SEQ ID NO: 1508229 - DNA, 25 bp, Homo sapien
actgttcgctgactgagcggatgac

SEQ ID NO: 1508230 - DNA, 25 bp, Homo sapien
gccagctggtctgcgttcatgtccc

SEQ ID NO: 1508231 - DNA, 25 bp, Homo sapien
agggtccttgaactgttcgctgact

SEQ ID NO: 1508232 - DNA, 25 bp, Homo sapien
gaagacgagctggttgacaattata

SEQ ID NO: 1508233 - DNA, 25 bp, Homo sapien
aggaactcagcaatgcatacgcaga

SEQ ID NO: 1508234 - DNA, 25 bp, Homo sapien
tatattgtgtgtgtcaatcttgcac

SEQ ID NO: 1508235 - DNA, 25 bp, Homo sapien
acttggcctggatcttgtgacgggc

SEQ ID NO: 1508236 - DNA, 25 bp, Homo sapien
tcacgatgtggaagtcttcatacag

SEQ ID NO: 1508237 - DNA, 25 bp, Homo sapien
agaaggtgttgaccttgtctgcccc

SEQ ID NO: 1508238 - DNA, 25 bp, Homo sapien
ggccgagaaggtgttgaccttgtct

SEQ ID NO: 1508239 - DNA, 25 bp, Homo sapien
gcacctcatggggtaacagcggcag

SEQ ID NO: 1508240 - DNA, 25 bp, Homo sapien
ccgagaaggtgttgaccttgtctgc

SEQ ID NO: 1508241 - DNA, 25 bp, Homo sapien
ggtagggggcaactacagctcccca

SEQ ID NO: 1508242 - DNA, 25 bp, Homo sapien
tatgggggggactttgtgcaaactc

SEQ ID NO: 1508243 - DNA, 25 bp, Homo sapien
gcccaagtggctccccctgtattat

SEQ ID NO: 1508244 - DNA, 25 bp, Homo sapien
ttttattgaagagcaagaggtggga

SEQ ID NO: 1508245 - DNA, 25 bp, Homo sapien
aaggtggccggtgcaaggacccaca

SEQ ID NO: 1508246 - DNA, 25 bp, Homo sapien
tgaaggtggccggtgcaaggaccca

SEQ ID NO: 1508247 - DNA, 25 bp, Homo sapien
ttgaaggtggccggtgcaaggaccc

SEQ ID NO: 1508248 - DNA, 25 bp, Homo sapien
gaaggtggccggtgcaaggacccac

SEQ ID NO: 1508249 - DNA, 25 bp, Homo sapien
ccgggaggactccggatgcattcct

SEQ ID NO: 1508250 - DNA, 25 bp, Homo sapien
gccccgggaggactccggatgcatt

SEQ ID NO: 1508251 - DNA, 25 bp, Homo sapien
ccgccccgggaggactccggatgca

SEQ ID NO: 1508252 - DNA, 25 bp, Homo sapien
cccgggaggactccggatgcattcc

SEQ ID NO: 1508253 - DNA, 25 bp, Homo sapien
cgtggcacccggcaggtgtggccaa

SEQ ID NO: 1508254 - DNA, 25 bp, Homo sapien
gtgtggccaagggagagtgggtggc

SEQ ID NO: 1508255 - DNA, 25 bp, Homo sapien
aggtgtggccaagggagagtgggtg

SEQ ID NO: 1508256 - DNA, 25 bp, Homo sapien
gcaggtgtggccaagggagagtggg

SEQ ID NO: 1508257 - DNA, 25 bp, Homo sapien
tcgccactcgggctgtgtaggtgac

SEQ ID NO: 1508258 - DNA, 25 bp, Homo sapien
tcgccacaggagtttgtagatgctc

SEQ ID NO: 1508259 - DNA, 25 bp, Homo sapien
agaagccaccgaagcgggcgttcgc

SEQ ID NO: 1508260 - DNA, 25 bp, Homo sapien
agcagctctcgccacaggagtttgt

SEQ ID NO: 1508261 - DNA, 25 bp, Homo sapien
aatcacaagcttctcgaagtagcgc

SEQ ID NO: 1508262 - DNA, 25 bp, Homo sapien
aagtagcgcttctgcccttcggtca

SEQ ID NO: 1508263 - DNA, 25 bp, Homo sapien
cttctcgaagtagcgcttctgccct

SEQ ID NO: 1508264 - DNA, 25 bp, Homo sapien
ggtcacaataaatcacaagcttctc

SEQ ID NO: 1508265 - DNA, 25 bp, Homo sapien
ggttcaccaccagcgtcacataaaa

SEQ ID NO: 1508266 - DNA, 25 bp, Homo sapien
aagcgcttgaacaccgcggtgctga

SEQ ID NO: 1508267 - DNA, 25 bp, Homo sapien
cgagagccctgcgtagcgcatgagt

SEQ ID NO: 1508268 - DNA, 25 bp, Homo sapien
catgcataggtactggctccaccag

SEQ ID NO: 1508269 - DNA, 25 bp, Homo sapien
tggtccttgcccggtctctgccctg

SEQ ID NO: 1508270 - DNA, 25 bp, Homo sapien
ggtccttgcccggtctctgccctgc

SEQ ID NO: 1508271 - DNA, 25 bp, Homo sapien
ctggtccttgcccggtctctgccct

SEQ ID NO: 1508272 - DNA, 25 bp, Homo sapien
gtccttgcccggtctctgccctgcc

SEQ ID NO: 1508273 - DNA, 25 bp, Homo sapien
gcagcagcttaagggcgctgttgtc

SEQ ID NO: 1508274 - DNA, 25 bp, Homo sapien
gatgagttcaggttttcaaacttct

SEQ ID NO: 1508275 - DNA, 25 bp, Homo sapien
ctgttgtcgcggatgcggccctcgc

SEQ ID NO: 1508276 - DNA, 25 bp, Homo sapien
cagggcacccagtacttgttgtagg

SEQ ID NO: 1508277 - DNA, 25 bp, Homo sapien
catttgccccgaaaaacattcagct

SEQ ID NO: 1508278 - DNA, 25 bp, Homo sapien
ggtacgctaatccagtcatagtgaa

SEQ ID NO: 1508279 - DNA, 25 bp, Homo sapien
tacacgaggggtacgctaatccagt

SEQ ID NO: 1508280 - DNA, 25 bp, Homo sapien
cattccacatttgccccgaaaaaca

SEQ ID NO: 1508281 - DNA, 25 bp, Homo sapien
tagctgtacagtgcgatggtcacca

SEQ ID NO: 1508282 - DNA, 25 bp, Homo sapien
cacacaggtctaggtcgtggtcttt

SEQ ID NO: 1508283 - DNA, 25 bp, Homo sapien
ggtccaggaactggcgaccaatgag

SEQ ID NO: 1508284 - DNA, 25 bp, Homo sapien
gaccaatgaggcaagccaggaagta

SEQ ID NO: 1508285 - DNA, 25 bp, Homo sapien
ctggaagtttctatcgatcagaaag

SEQ ID NO: 1508286 - DNA, 25 bp, Homo sapien
tttctatcgatcagaaagttggtct

SEQ ID NO: 1508287 - DNA, 25 bp, Homo sapien
gaagtttctatcgatcagaaagttg

SEQ ID NO: 1508288 - DNA, 25 bp, Homo sapien
agtttctatcgatcagaaagttggt

SEQ ID NO: 1508289 - DNA, 25 bp, Homo sapien
aggctgccgcagctggaagacagta

SEQ ID NO: 1508290 - DNA, 25 bp, Homo sapien
ggtcatcatacatctcgtccactgc

SEQ ID NO: 1508291 - DNA, 25 bp, Homo sapien
tggaagacagtagccgctgtgtatg

SEQ ID NO: 1508292 - DNA, 25 bp, Homo sapien
gagcctcggctgcatcccagtacaa

SEQ ID NO: 1508293 - DNA, 25 bp, Homo sapien
tttcaatcagatgtgccccgcagag

SEQ ID NO: 1508294 - DNA, 25 bp, Homo sapien
gaattgattccacttaaccttttca

SEQ ID NO: 1508295 - DNA, 25 bp, Homo sapien
tttggaatcaccactgaccggtctg

SEQ ID NO: 1508296 - DNA, 25 bp, Homo sapien
tatcttagcttctggcgttatcaca

SEQ ID NO: 1508297 - DNA, 25 bp, Homo sapien
ctgcaggaagtcgccgggcgcctct

SEQ ID NO: 1508298 - DNA, 25 bp, Homo sapien
cccatcggtccatccaagccgtcca

SEQ ID NO: 1508299 - DNA, 25 bp, Homo sapien
gccgctggaactgcatgtcttcttt

SEQ ID NO: 1508300 - DNA, 25 bp, Homo sapien
gtcgccgggcgcctctcccatcggt

SEQ ID NO: 1508301 - DNA, 25 bp, Homo sapien
tggtcacgatgctgaagggctcgac

SEQ ID NO: 1508302 - DNA, 25 bp, Homo sapien
ggacaaccgcgcatgagcagctggc

SEQ ID NO: 1508303 - DNA, 25 bp, Homo sapien
tcctcctcgccaatagggctgggca

SEQ ID NO: 1508304 - DNA, 25 bp, Homo sapien
cacgcagctgttcttgcggagtaga

SEQ ID NO: 1508305 - DNA, 25 bp, Homo sapien
ttacaaaggcacacgaggcttatgc

SEQ ID NO: 1508306 - DNA, 25 bp, Homo sapien
aggcttatgcagaccgggacacctg

SEQ ID NO: 1508307 - DNA, 25 bp, Homo sapien
gcaggacactgatagagacctctca

SEQ ID NO: 1508308 - DNA, 25 bp, Homo sapien
caactcgaggaggtagtcagtcaca

SEQ ID NO: 1508309 - DNA, 25 bp, Homo sapien
tagcaatgtgattcttgttgttgat

SEQ ID NO: 1508310 - DNA, 25 bp, Homo sapien
gagggagggcgggaggtagatatag

SEQ ID NO: 1508311 - DNA, 25 bp, Homo sapien
aatgtgattcttgttgttgattctc

SEQ ID NO: 1508312 - DNA, 25 bp, Homo sapien
tttttagcaatgtgattcttgttgt

SEQ ID NO: 1508313 - DNA, 25 bp, Homo sapien
gagacatatgaaggaagatggtcag

SEQ ID NO: 1508314 - DNA, 25 bp, Homo sapien
aggcagctggtgcactaatccaggt

SEQ ID NO: 1508315 - DNA, 25 bp, Homo sapien
gaagtgacttggttctggagacata

SEQ ID NO: 1508316 - DNA, 25 bp, Homo sapien
atccaggtgagaggtaaagatggat

SEQ ID NO: 1508317 - DNA, 25 bp, Homo sapien
gtgtcacacgccattgtgtctgcct

SEQ ID NO: 1508318 - DNA, 25 bp, Homo sapien
cacacgccattgtgtctgccttgct

SEQ ID NO: 1508319 - DNA, 25 bp, Homo sapien
tgtcacacgccattgtgtctgcctt

SEQ ID NO: 1508320 - DNA, 25 bp, Homo sapien
gtcacacgccattgtgtctgccttg

SEQ ID NO: 1508321 - DNA, 25 bp, Homo sapien
tgttcctggtgagatggtgtgtacc

SEQ ID NO: 1508322 - DNA, 25 bp, Homo sapien
taaggcttcggcttggtgtccctgg

SEQ ID NO: 1508323 - DNA, 25 bp, Homo sapien
gatctacccaatctgttgccaggtc

SEQ ID NO: 1508324 - DNA, 25 bp, Homo sapien
tgcactgggtgtgactgtctggcca

SEQ ID NO: 1508325 - DNA, 25 bp, Homo sapien
aaggatgcgggactggaattttcac

SEQ ID NO: 1508326 - DNA, 25 bp, Homo sapien
cactgggacaaataccaggacctgg

SEQ ID NO: 1508327 - DNA, 25 bp, Homo sapien
gtcccagtatgtgcgaagaaacccc

SEQ ID NO: 1508328 - DNA, 25 bp, Homo sapien
cactgtcaggaagcgcgtgtccttg

SEQ ID NO: 1508329 - DNA, 25 bp, Homo sapien
cgggtagcagccagccggcagctgt

SEQ ID NO: 1508330 - DNA, 25 bp, Homo sapien
gtcgccctctctggcgcgatagctt

SEQ ID NO: 1508331 - DNA, 25 bp, Homo sapien
actgggtgcctggtcgcgcgttctc

SEQ ID NO: 1508332 - DNA, 25 bp, Homo sapien
tccgctgcggtgaccggactgggtg

SEQ ID NO: 1508333 - DNA, 25 bp, Homo sapien
tcccgtagctgtgtatgagtcgtcg

SEQ ID NO: 1508334 - DNA, 25 bp, Homo sapien
tttgacaaagccgtcggcgaagccc

SEQ ID NO: 1508335 - DNA, 25 bp, Homo sapien
gcagatcgtccagggctttgacaaa

SEQ ID NO: 1508336 - DNA, 25 bp, Homo sapien
tcgtcgtggtagaagggctgttcca

SEQ ID NO: 1508337 - DNA, 25 bp, Homo sapien
gcgcctcccgaggacgcagaggctg

SEQ ID NO: 1508338 - DNA, 25 bp, Homo sapien
tagctgatggtggtcgtcgggtacg

SEQ ID NO: 1508339 - DNA, 25 bp, Homo sapien
ggcggcgcgtgtgggaggtagctga

SEQ ID NO: 1508340 - DNA, 25 bp, Homo sapien
tgctgaggttggtgtaaacgggagg

SEQ ID NO: 1508341 - DNA, 25 bp, Homo sapien
gcgttctcggccttgagcgtcttca

SEQ ID NO: 1508342 - DNA, 25 bp, Homo sapien
catgaccttctgtttgagctgggcc

SEQ ID NO: 1508343 - DNA, 25 bp, Homo sapien
ccgttgctgacgtgggtcatgacct

SEQ ID NO: 1508344 - DNA, 25 bp, Homo sapien
caagcagcagctgacagccgttgct

SEQ ID NO: 1508345 - DNA, 25 bp, Homo sapien
atatgaatcgagtctgtttccagca

SEQ ID NO: 1508346 - DNA, 25 bp, Homo sapien
ttttccacagtacggtgcagagagg

SEQ ID NO: 1508347 - DNA, 25 bp, Homo sapien
gactaagtgcgtgtttcttttccac

SEQ ID NO: 1508348 - DNA, 25 bp, Homo sapien
agtccagtgtggtttgcggcgcccc

SEQ ID NO: 1508349 - DNA, 25 bp, Homo sapien
accctggagggctaggccaaggcct

SEQ ID NO: 1508350 - DNA, 25 bp, Homo sapien
acctagaagctgaatagtgacgccc

SEQ ID NO: 1508351 - DNA, 25 bp, Homo sapien
aaactccacagtatgggaccctgga

SEQ ID NO: 1508352 - DNA, 25 bp, Homo sapien
tagaagctgaatagtgacgccctcc

SEQ ID NO: 1508353 - DNA, 25 bp, Homo sapien
gaggcagaagattgcttaggcccag

SEQ ID NO: 1508354 - DNA, 25 bp, Homo sapien
tggccgtggtggtgcacacttgtaa

SEQ ID NO: 1508355 - DNA, 25 bp, Homo sapien
gatcgcaccgttgtactccagcttg

SEQ ID NO: 1508356 - DNA, 25 bp, Homo sapien
tcccagctacttgagagactgaggc

SEQ ID NO: 1508357 - DNA, 25 bp, Homo sapien
aggagttcgcttgaacccaggaggc

SEQ ID NO: 1508358 - DNA, 25 bp, Homo sapien
gcaggtatgaacacccggagtgcac

SEQ ID NO: 1508359 - DNA, 25 bp, Homo sapien
ccatccgctatagtggcctcctttg

SEQ ID NO: 1508360 - DNA, 25 bp, Homo sapien
gatcctgactttagtgctggccgcc

SEQ ID NO: 1508361 - DNA, 25 bp, Homo sapien
tagcctttgcccacgcaggtatgaa

SEQ ID NO: 1508362 - DNA, 25 bp, Homo sapien
gctgccctaagtactgatagtcctg

SEQ ID NO: 1508363 - DNA, 25 bp, Homo sapien
ctgcaggagtagcagaggcgccagc

SEQ ID NO: 1508364 - DNA, 25 bp, Homo sapien
actgatagtcctggtagaccagggc

SEQ ID NO: 1508365 - DNA, 25 bp, Homo sapien
cgccctgctgccctaagtactgata

SEQ ID NO: 1508366 - DNA, 25 bp, Homo sapien
tgcagcctcagctgctcccagctgt

SEQ ID NO: 1508367 - DNA, 25 bp, Homo sapien
ctgcagcctcagctgctcccagctg

SEQ ID NO: 1508368 - DNA, 25 bp, Homo sapien
agcctcagctgctcccagctgtcac

SEQ ID NO: 1508369 - DNA, 25 bp, Homo sapien
cctttagatgctgcagcctcagctg

SEQ ID NO: 1508370 - DNA, 25 bp, Homo sapien
tcgcttgtcgttctcgctgcactgg

SEQ ID NO: 1508371 - DNA, 25 bp, Homo sapien
aatctttccatatgggactttcgct

SEQ ID NO: 1508372 - DNA, 25 bp, Homo sapien
tggtcacgggtcttctgcaatcgga

SEQ ID NO: 1508373 - DNA, 25 bp, Homo sapien
tgctattccctcttccttggacatt

SEQ ID NO: 1508374 - DNA, 25 bp, Homo sapien
ttccccacgggccaaggattgagtc

SEQ ID NO: 1508375 - DNA, 25 bp, Homo sapien
agcttctccgggtccatgaaaaccg

SEQ ID NO: 1508376 - DNA, 25 bp, Homo sapien
cggcagggccgtaactggatcagct

SEQ ID NO: 1508377 - DNA, 25 bp, Homo sapien
ggcttgcaggatggacaatcccgtt

SEQ ID NO: 1508378 - DNA, 25 bp, Homo sapien
tgcaagctctgcttcacggtctctg

SEQ ID NO: 1508379 - DNA, 25 bp, Homo sapien
actcagcttggggaattcggtggac

SEQ ID NO: 1508380 - DNA, 25 bp, Homo sapien
tcccgaagggctatggccgaacact

SEQ ID NO: 1508381 - DNA, 25 bp, Homo sapien
aattgtagtcccgaagggctatggc

SEQ ID NO: 1508382 - DNA, 25 bp, Homo sapien
cagccgacgccgacgtcgctgccgt

SEQ ID NO: 1508383 - DNA, 25 bp, Homo sapien
agccgacgccgacgtcgctgccgtg

SEQ ID NO: 1508384 - DNA, 25 bp, Homo sapien
cgacgccgacgtcgctgccgtgcgc

SEQ ID NO: 1508385 - DNA, 25 bp, Homo sapien
gccgacgtcgctgccgtgcgccctc

SEQ ID NO: 1508386 - DNA, 25 bp, Homo sapien
gcgggcagaacacgcccctggcgct

SEQ ID NO: 1508387 - DNA, 25 bp, Homo sapien
gcaggagcgggtctcggcgcgcgtt

SEQ ID NO: 1508388 - DNA, 25 bp, Homo sapien
cgcgttttccgcgggcctcgaagcg

SEQ ID NO: 1508389 - DNA, 25 bp, Homo sapien
gcttccggccaatccgcgggcagaa

SEQ ID NO: 1508390 - DNA, 25 bp, Homo sapien
cgcctcagccgccaccaccagctgc

SEQ ID NO: 1508391 - DNA, 25 bp, Homo sapien
caccaccagctgcaagaactaatac

SEQ ID NO: 1508392 - DNA, 25 bp, Homo sapien
cgccaccaccagctgcaagaactaa

SEQ ID NO: 1508393 - DNA, 25 bp, Homo sapien
ccgcctcagccgccaccaccagctg

SEQ ID NO: 1508394 - DNA, 25 bp, Homo sapien
cgacagcggcctgtattgtctctct

SEQ ID NO: 1508395 - DNA, 25 bp, Homo sapien
ggacgcaaggctccttgcggcacac

SEQ ID NO: 1508396 - DNA, 25 bp, Homo sapien
cgggcacaggcgaactcaggcgaca

SEQ ID NO: 1508397 - DNA, 25 bp, Homo sapien
tcatcgacgcccaggacgcaaggct

SEQ ID NO: 1508398 - DNA, 25 bp, Homo sapien
actgagcccgtgaaagttgccattc

SEQ ID NO: 1508399 - DNA, 25 bp, Homo sapien
gttgccattcatccctgttctatca

SEQ ID NO: 1508400 - DNA, 25 bp, Homo sapien
gggtgtcagttttctggcagccggg

SEQ ID NO: 1508401 - DNA, 25 bp, Homo sapien
tttaggtgccatcaccacgaccaca

SEQ ID NO: 1508402 - DNA, 25 bp, Homo sapien
ctgccactttcagcgcctccagatc

SEQ ID NO: 1508403 - DNA, 25 bp, Homo sapien
cactttcagcgcctccagatctgcc

SEQ ID NO: 1508404 - DNA, 25 bp, Homo sapien
aggcaggggacaataacagatggcg

SEQ ID NO: 1508405 - DNA, 25 bp, Homo sapien
ggggacaataacagatggcgtagac

SEQ ID NO: 1508406 - DNA, 25 bp, Homo sapien
tccccagacgcacacctcgggctca

SEQ ID NO: 1508407 - DNA, 25 bp, Homo sapien
ctgcccctgcacatacccaggaatc

SEQ ID NO: 1508408 - DNA, 25 bp, Homo sapien
cctgcacatacccaggaatcccttc

SEQ ID NO: 1508409 - DNA, 25 bp, Homo sapien
aatcccttccccagacgcacacctc

SEQ ID NO: 1508410 - DNA, 25 bp, Homo sapien
gctcgctctccaatagggtctttga

SEQ ID NO: 1508411 - DNA, 25 bp, Homo sapien
aagtccgtgtcctccattttcgcaa

SEQ ID NO: 1508412 - DNA, 25 bp, Homo sapien
attttcgcaaacagcctttcccgct

SEQ ID NO: 1508413 - DNA, 25 bp, Homo sapien
gcccagccgacaaagtccgtgtcct

SEQ ID NO: 1508414 - DNA, 25 bp, Homo sapien
ttcacgccctggtccaatgcatact

SEQ ID NO: 1508415 - DNA, 25 bp, Homo sapien
tccaatgcatactgtataagcccag

SEQ ID NO: 1508416 - DNA, 25 bp, Homo sapien
aagcccagtggctgtatcatgtgac

SEQ ID NO: 1508417 - DNA, 25 bp, Homo sapien
ggctgtatcatgtgacagggagttc

SEQ ID NO: 1508418 - DNA, 25 bp, Homo sapien
cctgagatgaccaaatggggacaac

SEQ ID NO: 1508419 - DNA, 25 bp, Homo sapien
atcctgagatgaccaaatggggaca

SEQ ID NO: 1508420 - DNA, 25 bp, Homo sapien
tcctgagatgaccaaatggggacaa

SEQ ID NO: 1508421 - DNA, 25 bp, Homo sapien
tcaatcccgggaaaactttgctgca

SEQ ID NO: 1508422 - DNA, 25 bp, Homo sapien
tgcagccgcgcctggtatgtctctg

SEQ ID NO: 1508423 - DNA, 25 bp, Homo sapien
tgtctctggcatccctacggtgtcc

SEQ ID NO: 1508424 - DNA, 25 bp, Homo sapien
actaaccaccgggtagagggcatct

SEQ ID NO: 1508425 - DNA, 25 bp, Homo sapien
aatcagtatccaagtcctgcagttt

SEQ ID NO: 1508426 - DNA, 25 bp, Homo sapien
cattggggtagcctgagccataatc

SEQ ID NO: 1508427 - DNA, 25 bp, Homo sapien
gggtagcctgagccataatcagtat

SEQ ID NO: 1508428 - DNA, 25 bp, Homo sapien
cataatcagtatccaagtcctgcag

SEQ ID NO: 1508429 - DNA, 25 bp, Homo sapien
tctttcactgtggagtagggtgacc

SEQ ID NO: 1508430 - DNA, 25 bp, Homo sapien
gaattcagctctatcactcactggc

SEQ ID NO: 1508431 - DNA, 25 bp, Homo sapien
ggctgtgtggccataaacaaatggc

SEQ ID NO: 1508432 - DNA, 25 bp, Homo sapien
aaatggcaccactgtctaacacttg

SEQ ID NO: 1508433 - DNA, 25 bp, Homo sapien
gcaatggtgacagtccaagttgcac

SEQ ID NO: 1508434 - DNA, 25 bp, Homo sapien
ccttcaaccacgcttttgtcttggg

SEQ ID NO: 1508435 - DNA, 25 bp, Homo sapien
gcgccagctgaaccggacaaactgg

SEQ ID NO: 1508436 - DNA, 25 bp, Homo sapien
gacaaactgggggaagccgaacaca

SEQ ID NO: 1508437 - DNA, 25 bp, Homo sapien
atggtctgggccgtgcgccagctga

SEQ ID NO: 1508438 - DNA, 25 bp, Homo sapien
ttacacagggagcaaccctctcagg

SEQ ID NO: 1508439 - DNA, 25 bp, Homo sapien
tctcaggcagggctgaacgctggcc

SEQ ID NO: 1508440 - DNA, 25 bp, Homo sapien
gtgatgacagtgaccacttacacag

SEQ ID NO: 1508441 - DNA, 25 bp, Homo sapien
gaccacttacacagggagcaaccct

SEQ ID NO: 1508442 - DNA, 25 bp, Homo sapien
tcattgaggaagtaggatgtgatct

SEQ ID NO: 1508443 - DNA, 25 bp, Homo sapien
cctgattctcggatgctgagtcctc

SEQ ID NO: 1508444 - DNA, 25 bp, Homo sapien
gctggttgctgactccaggccgcgt

SEQ ID NO: 1508445 - DNA, 25 bp, Homo sapien
cgcgttccaggaaatatcggtggga

SEQ ID NO: 1508446 - DNA, 25 bp, Homo sapien
caggtagagcgcgtagaggcagctg

SEQ ID NO: 1508447 - DNA, 25 bp, Homo sapien
gaagcaggtagagcgcgtagaggca

SEQ ID NO: 1508448 - DNA, 25 bp, Homo sapien
tggggaagcaggtagagcgcgtaga

SEQ ID NO: 1508449 - DNA, 25 bp, Homo sapien
gggaagcaggtagagcgcgtagagg

SEQ ID NO: 1508450 - DNA, 25 bp, Homo sapien
taatcaaccaacacccattctattt

SEQ ID NO: 1508451 - DNA, 25 bp, Homo sapien
ttctgtcccaaaagtacatccccta

SEQ ID NO: 1508452 - DNA, 25 bp, Homo sapien
ggctgcagagcacactcccaccttg

SEQ ID NO: 1508453 - DNA, 25 bp, Homo sapien
caaaaggaagtagctggacccggct

SEQ ID NO: 1508454 - DNA, 25 bp, Homo sapien
aacatctccatctccgcggtacctc

SEQ ID NO: 1508455 - DNA, 25 bp, Homo sapien
gggccacgccctaccggtggctgct

SEQ ID NO: 1508456 - DNA, 25 bp, Homo sapien
ggagcccgtcactgcttcaacatct

SEQ ID NO: 1508457 - DNA, 25 bp, Homo sapien
ggtacctcgtcccagaccaggacga

SEQ ID NO: 1508458 - DNA, 25 bp, Homo sapien
tctccactcgccatctccaggttcg

SEQ ID NO: 1508459 - DNA, 25 bp, Homo sapien
atgatatcacctgcggcccgacttg

SEQ ID NO: 1508460 - DNA, 25 bp, Homo sapien
tccaggttcgccaactgcgaagatg

SEQ ID NO: 1508461 - DNA, 25 bp, Homo sapien
tcgccaactgcgaagatgatatcac

SEQ ID NO: 1508462 - DNA, 25 bp, Homo sapien
tattcaccaggagcttgtcgcctca

SEQ ID NO: 1508463 - DNA, 25 bp, Homo sapien
tgttcacacaggtgaggccaaaccc

SEQ ID NO: 1508464 - DNA, 25 bp, Homo sapien
gcacatttgtgtcgccgtctcgctg

SEQ ID NO: 1508465 - DNA, 25 bp, Homo sapien
cctggcgacctatctcacgatggcg

SEQ ID NO: 1508466 - DNA, 25 bp, Homo sapien
gcggcagcggcggcgacttcggccc

SEQ ID NO: 1508467 - DNA, 25 bp, Homo sapien
ggcagcggcggcgacttcggcccgg

SEQ ID NO: 1508468 - DNA, 25 bp, Homo sapien
cagcggcggcgacttcggcccgggg

SEQ ID NO: 1508469 - DNA, 25 bp, Homo sapien
ggcggcagcggcggcgacttcggcc

SEQ ID NO: 1508470 - DNA, 25 bp, Homo sapien
gcagcctccggcggcggatgaggcc

SEQ ID NO: 1508471 - DNA, 25 bp, Homo sapien
cagcctccggcggcggatgaggccc

SEQ ID NO: 1508472 - DNA, 25 bp, Homo sapien
gaccttggcaaatgaccttccaata

SEQ ID NO: 1508473 - DNA, 25 bp, Homo sapien
gctcttaggaagtcactgtagggat

SEQ ID NO: 1508474 - DNA, 25 bp, Homo sapien
ggaaaatgagggatgtcctagacat

SEQ ID NO: 1508475 - DNA, 25 bp, Homo sapien
gccagttttctatccacagggtgag

SEQ ID NO: 1508476 - DNA, 25 bp, Homo sapien
gcagggtaagacaggcccctcttca

SEQ ID NO: 1508477 - DNA, 25 bp, Homo sapien
aagcagggtaagacaggcccctctt

SEQ ID NO: 1508478 - DNA, 25 bp, Homo sapien
agaagcagggtaagacaggcccctc

SEQ ID NO: 1508479 - DNA, 25 bp, Homo sapien
cagggtaagacaggcccctcttcag

SEQ ID NO: 1508480 - DNA, 25 bp, Homo sapien
tgaaggtcagcgtggacctgccgtt

SEQ ID NO: 1508481 - DNA, 25 bp, Homo sapien
tgctgcccacaagcattatcaactc

SEQ ID NO: 1508482 - DNA, 25 bp, Homo sapien
aacgatgaaggtcagcgtggacctg

SEQ ID NO: 1508483 - DNA, 25 bp, Homo sapien
gtggacctgccgttgctgcccacaa

SEQ ID NO: 1508484 - DNA, 25 bp, Homo sapien
tgctgcttttccggggcaggggcaa

SEQ ID NO: 1508485 - DNA, 25 bp, Homo sapien
gctgctgcgtgccggcgagccaggc

SEQ ID NO: 1508486 - DNA, 25 bp, Homo sapien
ctgctgcgtgccggcgagccaggcc

SEQ ID NO: 1508487 - DNA, 25 bp, Homo sapien
cgctgctgcgtgccggcgagccagg

SEQ ID NO: 1508488 - DNA, 25 bp, Homo sapien
gcgctgctgcgtgccggcgagccag

SEQ ID NO: 1508489 - DNA, 25 bp, Homo sapien
aaagcgcggtccagagagagtcaga

SEQ ID NO: 1508490 - DNA, 25 bp, Homo sapien
cgagaaattagaaagcgcggtccag

SEQ ID NO: 1508491 - DNA, 25 bp, Homo sapien
ttagaaagcgcggtccagagagagt

SEQ ID NO: 1508492 - DNA, 25 bp, Homo sapien
gaaggagggcatcgagaaattagaa

SEQ ID NO: 1508493 - DNA, 25 bp, Homo sapien
agcagtacccggagcggcggctttt

SEQ ID NO: 1508494 - DNA, 25 bp, Homo sapien
agctggaccgggcgcagcatcccgg

SEQ ID NO: 1508495 - DNA, 25 bp, Homo sapien
ccctgcagcagtacccggagcggcg

SEQ ID NO: 1508496 - DNA, 25 bp, Homo sapien
ccgggacaatgtctaggggatcggg

SEQ ID NO: 1508497 - DNA, 25 bp, Homo sapien
tgtgtggatcgccatgtaagtgaca

SEQ ID NO: 1508498 - DNA, 25 bp, Homo sapien
caaggctaggtatgtgtggcacctc

SEQ ID NO: 1508499 - DNA, 25 bp, Homo sapien
tgacatcatgtcctgtgtgacgctg

SEQ ID NO: 1508500 - DNA, 25 bp, Homo sapien
tactaggtgtacacgacgtggtgcc

SEQ ID NO: 1508501 - DNA, 25 bp, Homo sapien
gcttttccgattactggtgcggcag

SEQ ID NO: 1508502 - DNA, 25 bp, Homo sapien
tctcggtagcgtgggtgaagtgctg

SEQ ID NO: 1508503 - DNA, 25 bp, Homo sapien
tgaggcttttccgattactggtgcg

SEQ ID NO: 1508504 - DNA, 25 bp, Homo sapien
caggatgaggcttttccgattactg

SEQ ID NO: 1508505 - DNA, 25 bp, Homo sapien
gaggaggcaaacgagaagtgggcgg

SEQ ID NO: 1508506 - DNA, 25 bp, Homo sapien
aggaggcaaacgagaagtgggcggg

SEQ ID NO: 1508507 - DNA, 25 bp, Homo sapien
gggaggaggcaaacgagaagtgggc

SEQ ID NO: 1508508 - DNA, 25 bp, Homo sapien
ggaggaggcaaacgagaagtgggcg

SEQ ID NO: 1508509 - DNA, 25 bp, Homo sapien
taggcatcgcgcaatctgcgcttgc

SEQ ID NO: 1508510 - DNA, 25 bp, Homo sapien
gggaccaagagtccctcgataggca

SEQ ID NO: 1508511 - DNA, 25 bp, Homo sapien
tgcgcttgcgcacgtcatcttggct

SEQ ID NO: 1508512 - DNA, 25 bp, Homo sapien
ccccttgagaaacagccctagtcgt

SEQ ID NO: 1508513 - DNA, 25 bp, Homo sapien
tgacttgctcctctcacatattcac

SEQ ID NO: 1508514 - DNA, 25 bp, Homo sapien
tagccagatgaagggagcgaggcca

SEQ ID NO: 1508515 - DNA, 25 bp, Homo sapien
aggccagagaccaccggcgtccgtc

SEQ ID NO: 1508516 - DNA, 25 bp, Homo sapien
tgggcgtgttggtgccatagccaga

SEQ ID NO: 1508517 - DNA, 25 bp, Homo sapien
cgagacggtggaactgggcgtgttg

SEQ ID NO: 1508518 - DNA, 25 bp, Homo sapien
aggggcagggccggggtcagagcca

SEQ ID NO: 1508519 - DNA, 25 bp, Homo sapien
ggacaggggcagggccggggtcaga

SEQ ID NO: 1508520 - DNA, 25 bp, Homo sapien
acaggggcagggccggggtcagagc

SEQ ID NO: 1508521 - DNA, 25 bp, Homo sapien
gggcagggccggggtcagagccacc

SEQ ID NO: 1508522 - DNA, 25 bp, Homo sapien
agaggaagtggagctcgtccaccgt

SEQ ID NO: 1508523 - DNA, 25 bp, Homo sapien
catcctcgtctgtgatgctctcggt

SEQ ID NO: 1508524 - DNA, 25 bp, Homo sapien
gacggccaccatcctcgtctgtgat

SEQ ID NO: 1508525 - DNA, 25 bp, Homo sapien
gctctcggtgctcccgaagtgtttg

SEQ ID NO: 1508526 - DNA, 25 bp, Homo sapien
gattcatcatcacgatctcgttgtc

SEQ ID NO: 1508527 - DNA, 25 bp, Homo sapien
gacgtgattcatcatcacgatctcg

SEQ ID NO: 1508528 - DNA, 25 bp, Homo sapien
cttgtagacgtgattcatcatcacg

SEQ ID NO: 1508529 - DNA, 25 bp, Homo sapien
cgatctcgttgtcgtaggaggaggg

SEQ ID NO: 1508530 - DNA, 25 bp, Homo sapien
gtgaccgcctcgggtcccacctcac

SEQ ID NO: 1508531 - DNA, 25 bp, Homo sapien
cgagagtgcaggccgcctggtcacc

SEQ ID NO: 1508532 - DNA, 25 bp, Homo sapien
gataaggcgagcgagagtgcaggcc

SEQ ID NO: 1508533 - DNA, 25 bp, Homo sapien
gcgcgcggggataaggcgagcgaga

SEQ ID NO: 1508534 - DNA, 25 bp, Homo sapien
cgcgggtaaagtcgcgcagcttctc

SEQ ID NO: 1508535 - DNA, 25 bp, Homo sapien
tggatgaagctgagcacgccatcgg

SEQ ID NO: 1508536 - DNA, 25 bp, Homo sapien
ttcatagaagtagaccgtggtgatg

SEQ ID NO: 1508537 - DNA, 25 bp, Homo sapien
ccgtcacgggacttggtcaggcagt

SEQ ID NO: 1508538 - DNA, 25 bp, Homo sapien
gtgctgagcctgagatcagcccggc

SEQ ID NO: 1508539 - DNA, 25 bp, Homo sapien
gagggacagggctcataggcactct

SEQ ID NO: 1508540 - DNA, 25 bp, Homo sapien
agcccctcagagtacatactgctgc

SEQ ID NO: 1508541 - DNA, 25 bp, Homo sapien
agggctcataggcactctgcctcag

SEQ ID NO: 1508542 - DNA, 25 bp, Homo sapien
tcagagtacatactgctgctactgt

SEQ ID NO: 1508543 - DNA, 25 bp, Homo sapien
ttcaccagctgagtaacgaaggcca

SEQ ID NO: 1508544 - DNA, 25 bp, Homo sapien
tgataataagcaacttcttcaccag

SEQ ID NO: 1508545 - DNA, 25 bp, Homo sapien
agtaacgaaggccacctccaagctc

SEQ ID NO: 1508546 - DNA, 25 bp, Homo sapien
actccagcagcctcgcagggcgtga

SEQ ID NO: 1508547 - DNA, 25 bp, Homo sapien
ggcaggagtgggctcaccacaggct

SEQ ID NO: 1508548 - DNA, 25 bp, Homo sapien
gcagggcaggagtgggctcaccaca

SEQ ID NO: 1508549 - DNA, 25 bp, Homo sapien
agggcaggagtgggctcaccacagg

SEQ ID NO: 1508550 - DNA, 25 bp, Homo sapien
gcaggagtgggctcaccacaggctc

SEQ ID NO: 1508551 - DNA, 25 bp, Homo sapien
gtagcgggggatgtccgtcttcaca

SEQ ID NO: 1508552 - DNA, 25 bp, Homo sapien
agctggcggatgatgtagcggggga

SEQ ID NO: 1508553 - DNA, 25 bp, Homo sapien
gtggccctccttggcgtgtccttcg

SEQ ID NO: 1508554 - DNA, 25 bp, Homo sapien
tggcgtgtccttcggccgcctccag

SEQ ID NO: 1508555 - DNA, 25 bp, Homo sapien
accaccactgtcctgttcctccaga

SEQ ID NO: 1508556 - DNA, 25 bp, Homo sapien
aaccaccactgtcctgttcctccag

SEQ ID NO: 1508557 - DNA, 25 bp, Homo sapien
ctcagagagatcgtcttgctcaggg

SEQ ID NO: 1508558 - DNA, 25 bp, Homo sapien
cagagagatcgtcttgctcaggggt

SEQ ID NO: 1508559 - DNA, 25 bp, Homo sapien
ccgtaggcaccgttgcttatgagct

SEQ ID NO: 1508560 - DNA, 25 bp, Homo sapien
tatgagcttgatggtatcgaagtca

SEQ ID NO: 1508561 - DNA, 25 bp, Homo sapien
caccgttgcttatgagcttgatggt

SEQ ID NO: 1508562 - DNA, 25 bp, Homo sapien
tgatggtatcgaagtcattctcccc

SEQ ID NO: 1508563 - DNA, 25 bp, Homo sapien
aggtgaggatatcgcgctccacaaa

SEQ ID NO: 1508564 - DNA, 25 bp, Homo sapien
ttctcggcgaaggtgaggatatcgc

SEQ ID NO: 1508565 - DNA, 25 bp, Homo sapien
ctggttgcggaggatcaagttctgc

SEQ ID NO: 1508566 - DNA, 25 bp, Homo sapien
accatgcagaggtggcgccgagtct

SEQ ID NO: 1508567 - DNA, 25 bp, Homo sapien
caatatggagactgcggctcaggca

SEQ ID NO: 1508568 - DNA, 25 bp, Homo sapien
tggatggataatgggtcagactgaa

SEQ ID NO: 1508569 - DNA, 25 bp, Homo sapien
tagatggataaacatacaggccgac

SEQ ID NO: 1508570 - DNA, 25 bp, Homo sapien
gattagcacatcagtagatagaagg

SEQ ID NO: 1508571 - DNA, 25 bp, Homo sapien
catgatctcagcctagcctggagtg

SEQ ID NO: 1508572 - DNA, 25 bp, Homo sapien
tgcaaatactccagggctagcaccg

SEQ ID NO: 1508573 - DNA, 25 bp, Homo sapien
ctcagcaaagtacatgcgggccatc

SEQ ID NO: 1508574 - DNA, 25 bp, Homo sapien
gcaaatactccagggctagcaccgt

SEQ ID NO: 1508575 - DNA, 25 bp, Homo sapien
gcgggccatctctacgggcagcgct

SEQ ID NO: 1508576 - DNA, 25 bp, Homo sapien
tgtggccttcatataagttggtggt

SEQ ID NO: 1508577 - DNA, 25 bp, Homo sapien
tcgatgtggccttcatataagttgg

SEQ ID NO: 1508578 - DNA, 25 bp, Homo sapien
gccttcatataagttggtggtgagg

SEQ ID NO: 1508579 - DNA, 25 bp, Homo sapien
tctcgatgtggccttcatataagtt

SEQ ID NO: 1508580 - DNA, 25 bp, Homo sapien
ctgggggcaggctgtcagcccacgc

SEQ ID NO: 1508581 - DNA, 25 bp, Homo sapien
aggagggccctcaagggagagctgt

SEQ ID NO: 1508582 - DNA, 25 bp, Homo sapien
gggcaggctgtcagcccacgcccca

SEQ ID NO: 1508583 - DNA, 25 bp, Homo sapien
gggccctcaagggagagctgtgccc

SEQ ID NO: 1508584 - DNA, 25 bp, Homo sapien
cccaccaggaactcgtagaggatga

SEQ ID NO: 1508585 - DNA, 25 bp, Homo sapien
gctcctctggtgtgtctccgaagaa

SEQ ID NO: 1508586 - DNA, 25 bp, Homo sapien
tgacctcgggcgcgatgtactctgg

SEQ ID NO: 1508587 - DNA, 25 bp, Homo sapien
tagccttgacgcaggatgacctcgg

SEQ ID NO: 1508588 - DNA, 25 bp, Homo sapien
tgcaggaggctggatatgaggagtt

SEQ ID NO: 1508589 - DNA, 25 bp, Homo sapien
ggcctccgtaggtagggcctcatcc

SEQ ID NO: 1508590 - DNA, 25 bp, Homo sapien
aagcctgaccagagggttggtctgc

SEQ ID NO: 1508591 - DNA, 25 bp, Homo sapien
caagcctgaccagagggttggtctg

SEQ ID NO: 1508592 - DNA, 25 bp, Homo sapien
tgtccagtccaggtctcgaaagaaa

SEQ ID NO: 1508593 - DNA, 25 bp, Homo sapien
tcatcttccgactctaggtggggga

SEQ ID NO: 1508594 - DNA, 25 bp, Homo sapien
tgtcaaagtagctagtgtcatcttc

SEQ ID NO: 1508595 - DNA, 25 bp, Homo sapien
tcttccgactctaggtgggggatga

SEQ ID NO: 1508596 - DNA, 25 bp, Homo sapien
cctcgacccaggtcgtgcctggtgt

SEQ ID NO: 1508597 - DNA, 25 bp, Homo sapien
gacccaggtcgtgcctggtgtccca

SEQ ID NO: 1508598 - DNA, 25 bp, Homo sapien
atcccacccctcgacccaggtcgtg

SEQ ID NO: 1508599 - DNA, 25 bp, Homo sapien
acccctcgacccaggtcgtgcctgg

SEQ ID NO: 1508600 - DNA, 25 bp, Homo sapien
cacgtggtgatacctgtctgagcgg

SEQ ID NO: 1508601 - DNA, 25 bp, Homo sapien
tcataggagttcacgtggtgatacc

SEQ ID NO: 1508602 - DNA, 25 bp, Homo sapien
catcctcgtcataggagttcacgtg

SEQ ID NO: 1508603 - DNA, 25 bp, Homo sapien
tccgtcgtgtcatcctcgtcatagg

SEQ ID NO: 1508604 - DNA, 25 bp, Homo sapien
tccaggtcttctcacgcagggtcag

SEQ ID NO: 1508605 - DNA, 25 bp, Homo sapien
ttggtgctcggctcccgcttgctgc

SEQ ID NO: 1508606 - DNA, 25 bp, Homo sapien
gtcttgggctcgtgctgcgacagct

SEQ ID NO: 1508607 - DNA, 25 bp, Homo sapien
ccctgcagctgctactggggtcttg

SEQ ID NO: 1508608 - DNA, 25 bp, Homo sapien
actggcctcggacgcggagaatcgc

SEQ ID NO: 1508609 - DNA, 25 bp, Homo sapien
ggaaactggcctcggacgcggagaa

SEQ ID NO: 1508610 - DNA, 25 bp, Homo sapien
tccagcagcgccgagaaacggcggc

SEQ ID NO: 1508611 - DNA, 25 bp, Homo sapien
ttggggggcgctgaagcggctgggc

SEQ ID NO: 1508612 - DNA, 25 bp, Homo sapien
gctgatttgatgactttgcccccag

SEQ ID NO: 1508613 - DNA, 25 bp, Homo sapien
ttgcccccagttcgagaaggcctct

SEQ ID NO: 1508614 - DNA, 25 bp, Homo sapien
ggaatcatgacagataaggcagtgg

SEQ ID NO: 1508615 - DNA, 25 bp, Homo sapien
ctgatgcatccccatccttcgaggg

SEQ ID NO: 1508616 - DNA, 25 bp, Homo sapien
gatcgtggagacatgggactagcaa

SEQ ID NO: 1508617 - DNA, 25 bp, Homo sapien
aggggtgaacttccatgtgggtcca

SEQ ID NO: 1508618 - DNA, 25 bp, Homo sapien
ctggtgagtagtcccggctgggtga

SEQ ID NO: 1508619 - DNA, 25 bp, Homo sapien
aggagtcccgtgaggatgggttgga

SEQ ID NO: 1508620 - DNA, 25 bp, Homo sapien
catgtagacacggatggcacgcagt

SEQ ID NO: 1508621 - DNA, 25 bp, Homo sapien
acatccgtgtcacccatgtagacac

SEQ ID NO: 1508622 - DNA, 25 bp, Homo sapien
gatggcacgcagtgtgaagccatac

SEQ ID NO: 1508623 - DNA, 25 bp, Homo sapien
gccatacttcttgcccgagcgctgg

SEQ ID NO: 1508624 - DNA, 25 bp, Homo sapien
atcagctccacgacctcaggatgca

SEQ ID NO: 1508625 - DNA, 25 bp, Homo sapien
aggatgcaccatgccatgcacaggc

SEQ ID NO: 1508626 - DNA, 25 bp, Homo sapien
ggctccccattcacgtgggtgatga

SEQ ID NO: 1508627 - DNA, 25 bp, Homo sapien
ttaaggatcagctccacgacctcag

SEQ ID NO: 1508628 - DNA, 25 bp, Homo sapien
tttcgaagggcgttgtggtcactgc

SEQ ID NO: 1508629 - DNA, 25 bp, Homo sapien
tgcgccttgcgggaccaatgcggat

SEQ ID NO: 1508630 - DNA, 25 bp, Homo sapien
cattttagccttgtagctgctgcgc

SEQ ID NO: 1508631 - DNA, 25 bp, Homo sapien
gagggtcgcttgttcctccgagcca

SEQ ID NO: 1508632 - DNA, 25 bp, Homo sapien
gggggccaagcgtccttgacctgga

SEQ ID NO: 1508633 - DNA, 25 bp, Homo sapien
gccaagcgtccttgacctggacgcc

SEQ ID NO: 1508634 - DNA, 25 bp, Homo sapien
agcgtccttgacctggacgccagag

SEQ ID NO: 1508635 - DNA, 25 bp, Homo sapien
caagcgtccttgacctggacgccag

SEQ ID NO: 1508636 - DNA, 25 bp, Homo sapien
ttccggaagagggagctgcgcttct

SEQ ID NO: 1508637 - DNA, 25 bp, Homo sapien
tccggaagagggagctgcgcttctt

SEQ ID NO: 1508638 - DNA, 25 bp, Homo sapien
cttccggaagagggagctgcgcttc

SEQ ID NO: 1508639 - DNA, 25 bp, Homo sapien
ccggaagagggagctgcgcttcttg

SEQ ID NO: 1508640 - DNA, 25 bp, Homo sapien
cgagcccgggagactatcgctggat

SEQ ID NO: 1508641 - DNA, 25 bp, Homo sapien
acagcgagcggttcagcgacgacag

SEQ ID NO: 1508642 - DNA, 25 bp, Homo sapien
gcagcaggttcgactgcttcgtgat

SEQ ID NO: 1508643 - DNA, 25 bp, Homo sapien
gacagcgagcggctagtatgcagca

SEQ ID NO: 1508644 - DNA, 25 bp, Homo sapien
catggaagtccttgcggaaatccgg

SEQ ID NO: 1508645 - DNA, 25 bp, Homo sapien
cgtcggactcggcaaggctatgcag

SEQ ID NO: 1508646 - DNA, 25 bp, Homo sapien
tttggcgacagtccgtgcagcgtgc

SEQ ID NO: 1508647 - DNA, 25 bp, Homo sapien
tctgagtagtgtgcgagctgcccac

SEQ ID NO: 1508648 - DNA, 25 bp, Homo sapien
cggcggacggcgacctgccggggcg

SEQ ID NO: 1508649 - DNA, 25 bp, Homo sapien
gcggacggcgacctgccggggcgcg

SEQ ID NO: 1508650 - DNA, 25 bp, Homo sapien
ccggggcgcgccaaggccctcgact

SEQ ID NO: 1508651 - DNA, 25 bp, Homo sapien
aaggccctcgactgggggcgtctca

SEQ ID NO: 1508652 - DNA, 25 bp, Homo sapien
tctcgtgttcctgcaccgggctcag

SEQ ID NO: 1508653 - DNA, 25 bp, Homo sapien
ccttgctcgacactggtggcctgga

SEQ ID NO: 1508654 - DNA, 25 bp, Homo sapien
tgctgcgccggcctgtctcgtgttc

SEQ ID NO: 1508655 - DNA, 25 bp, Homo sapien
cgcaggctctacgacaatgggtacc

SEQ ID NO: 1508656 - DNA, 25 bp, Homo sapien
tggggtcactgcactgctgggtgca

SEQ ID NO: 1508657 - DNA, 25 bp, Homo sapien
gggtcactgcactgctgggtgcact

SEQ ID NO: 1508658 - DNA, 25 bp, Homo sapien
ctgagcccaagagggatgcgggtgg

SEQ ID NO: 1508659 - DNA, 25 bp, Homo sapien
cccaagagggatgcgggtgggactg

SEQ ID NO: 1508660 - DNA, 25 bp, Homo sapien
cttcagcagggcaccgggaggtcag

SEQ ID NO: 1508661 - DNA, 25 bp, Homo sapien
gcagggcaccgggaggtcagcccca

SEQ ID NO: 1508662 - DNA, 25 bp, Homo sapien
acagcttcagcagggcaccgggagg

SEQ ID NO: 1508663 - DNA, 25 bp, Homo sapien
accgggaggtcagccccacttgagg

SEQ ID NO: 1508664 - DNA, 25 bp, Homo sapien
cacggacgcactttatttatatgtg

SEQ ID NO: 1508665 - DNA, 25 bp, Homo sapien
cagcacggacgcactttatttatat

SEQ ID NO: 1508666 - DNA, 25 bp, Homo sapien
tatgtatacggaggctgtacagcgc

SEQ ID NO: 1508667 - DNA, 25 bp, Homo sapien
tgtacagcgcggggccgatgacccc

SEQ ID NO: 1508668 - DNA, 25 bp, Homo sapien
tatctggacgagagctccggaggct

SEQ ID NO: 1508669 - DNA, 25 bp, Homo sapien
gagagggctgcagtacaagtatctg

SEQ ID NO: 1508670 - DNA, 25 bp, Homo sapien
agggcactcatcaacagcccggagg

SEQ ID NO: 1508671 - DNA, 25 bp, Homo sapien
caggttcgtggtctacaagctgcca

SEQ ID NO: 1508672 - DNA, 25 bp, Homo sapien
ccacatacatccagctaaatgggag

SEQ ID NO: 1508673 - DNA, 25 bp, Homo sapien
tcgctagtctgggtggagtcatcca

SEQ ID NO: 1508674 - DNA, 25 bp, Homo sapien
ctagggaatgggtgccttgctgcaa

SEQ ID NO: 1508675 - DNA, 25 bp, Homo sapien
aggctagggttattcaagaacagtt

SEQ ID NO: 1508676 - DNA, 25 bp, Homo sapien
ctcccggttcactgccgaggctaca

SEQ ID NO: 1508677 - DNA, 25 bp, Homo sapien
agtacctcccggttcactgccgagg

SEQ ID NO: 1508678 - DNA, 25 bp, Homo sapien
tcccggttcactgccgaggctacag

SEQ ID NO: 1508679 - DNA, 25 bp, Homo sapien
tggtagtacctcccggttcactgcc

SEQ ID NO: 1508680 - DNA, 25 bp, Homo sapien
ggctggggctaccgcaccttcctta

SEQ ID NO: 1508681 - DNA, 25 bp, Homo sapien
gtgtcagagcggagctcctctcacc

SEQ ID NO: 1508682 - DNA, 25 bp, Homo sapien
ccacggctggggctaccgcaccttc

SEQ ID NO: 1508683 - DNA, 25 bp, Homo sapien
gcgggggtgtcagagcggagctcct

SEQ ID NO: 1508684 - DNA, 25 bp, Homo sapien
gctctctcagagcgagcggagcaac

SEQ ID NO: 1508685 - DNA, 25 bp, Homo sapien
agagcgagcggagcaacgacggcga

SEQ ID NO: 1508686 - DNA, 25 bp, Homo sapien
ctctcagagcgagcggagcaacgac

SEQ ID NO: 1508687 - DNA, 25 bp, Homo sapien
gagcgagcggagcaacgacggcgac

SEQ ID NO: 1508688 - DNA, 25 bp, Homo sapien
gccgacgagacccacgtgcgaagga

SEQ ID NO: 1508689 - DNA, 25 bp, Homo sapien
gcacggagacgcctctcagggccat

SEQ ID NO: 1508690 - DNA, 25 bp, Homo sapien
cccacgtgcgaaggacgtgcaggcc

SEQ ID NO: 1508691 - DNA, 25 bp, Homo sapien
agccgcacggagacgcctctcaggg

SEQ ID NO: 1508692 - DNA, 25 bp, Homo sapien
acttagccagttggctctgtgttct

SEQ ID NO: 1508693 - DNA, 25 bp, Homo sapien
gttggctctgtgttctcccgccttt

SEQ ID NO: 1508694 - DNA, 25 bp, Homo sapien
cagttggctctgtgttctcccgcct

SEQ ID NO: 1508695 - DNA, 25 bp, Homo sapien
tggctctgtgttctcccgcctttct

SEQ ID NO: 1508696 - DNA, 25 bp, Homo sapien
gcagcagacacacggtgcgaccaga

SEQ ID NO: 1508697 - DNA, 25 bp, Homo sapien
acacacggtgcgaccagaggtcctt

SEQ ID NO: 1508698 - DNA, 25 bp, Homo sapien
acacggtgcgaccagaggtccttac

SEQ ID NO: 1508699 - DNA, 25 bp, Homo sapien
cagacacacggtgcgaccagaggtc

SEQ ID NO: 1508700 - DNA, 25 bp, Homo sapien
cgctcgggcagctctcggattctgg

SEQ ID NO: 1508701 - DNA, 25 bp, Homo sapien
cccgctcgggcagctctcggattct

SEQ ID NO: 1508702 - DNA, 25 bp, Homo sapien
ctctcggattctgggacagagtcca

SEQ ID NO: 1508703 - DNA, 25 bp, Homo sapien
tcgggcagctctcggattctgggac

SEQ ID NO: 1508704 - DNA, 25 bp, Homo sapien
ggtccagtccgcaagatcactgtgc

SEQ ID NO: 1508705 - DNA, 25 bp, Homo sapien
gactgatcaggtgacttttctccgg

SEQ ID NO: 1508706 - DNA, 25 bp, Homo sapien
cccggctagtgcgagctgcaagcga

SEQ ID NO: 1508707 - DNA, 25 bp, Homo sapien
gggaattcgcctcggtccagtccgc

SEQ ID NO: 1508708 - DNA, 25 bp, Homo sapien
tgccagtcaaactcgggacgcgagg

SEQ ID NO: 1508709 - DNA, 25 bp, Homo sapien
ctgccagtcaaactcgggacgcgag

SEQ ID NO: 1508710 - DNA, 25 bp, Homo sapien
gatgcgaggcatgagtctctcctgg

SEQ ID NO: 1508711 - DNA, 25 bp, Homo sapien
cgattggccaacaggatgcgaggca

SEQ ID NO: 1508712 - DNA, 25 bp, Homo sapien
cttcgttgcgattggccaacaggat

SEQ ID NO: 1508713 - DNA, 25 bp, Homo sapien
tctctcctggcagtaggtgcggaag

SEQ ID NO: 1508714 - DNA, 25 bp, Homo sapien
ctgcaaagggaccagtgcccaaatt

SEQ ID NO: 1508715 - DNA, 25 bp, Homo sapien
ggaccagtgcccaaattcaggccca

SEQ ID NO: 1508716 - DNA, 25 bp, Homo sapien
aaagggaccagtgcccaaattcagg

SEQ ID NO: 1508717 - DNA, 25 bp, Homo sapien
caaagggaccagtgcccaaattcag

SEQ ID NO: 1508718 - DNA, 25 bp, Homo sapien
actcccccatctccgaaatgatctc

SEQ ID NO: 1508719 - DNA, 25 bp, Homo sapien
aactcccccatctccgaaatgatct

SEQ ID NO: 1508720 - DNA, 25 bp, Homo sapien
tccgaaatgatctcccgatgaaaaa

SEQ ID NO: 1508721 - DNA, 25 bp, Homo sapien
atcgcaccactgtaatccagtaatc

SEQ ID NO: 1508722 - DNA, 25 bp, Homo sapien
ccactgtaatccagtaatccaggct

SEQ ID NO: 1508723 - DNA, 25 bp, Homo sapien
aacctaggaggaggaaactgcagtg

SEQ ID NO: 1508724 - DNA, 25 bp, Homo sapien
gcaccactgtaatccagtaatccag

SEQ ID NO: 1508725 - DNA, 25 bp, Homo sapien
taggcatagatagggtgcatgacga

SEQ ID NO: 1508726 - DNA, 25 bp, Homo sapien
catgacgagggaggactggacactc

SEQ ID NO: 1508727 - DNA, 25 bp, Homo sapien
ataggccacagacgaaaccccagca

SEQ ID NO: 1508728 - DNA, 25 bp, Homo sapien
tcatcgccgacctgtagccactgtc

SEQ ID NO: 1508729 - DNA, 25 bp, Homo sapien
gagttccagacctcagagactgtct

SEQ ID NO: 1508730 - DNA, 25 bp, Homo sapien
ccttgagttccagacctcagagact

SEQ ID NO: 1508731 - DNA, 25 bp, Homo sapien
agacctcagagactgtcttccttcc

SEQ ID NO: 1508732 - DNA, 25 bp, Homo sapien
gacctcagagactgtcttccttcca

SEQ ID NO: 1508733 - DNA, 25 bp, Homo sapien
tggccagggatcagatctccaggtg

SEQ ID NO: 1508734 - DNA, 25 bp, Homo sapien
cacagaaagcatagggagatgacgg

SEQ ID NO: 1508735 - DNA, 25 bp, Homo sapien
ctttgagatagggacagaataggct

SEQ ID NO: 1508736 - DNA, 25 bp, Homo sapien
ggtccaggtggccacttatgctatc

SEQ ID NO: 1508737 - DNA, 25 bp, Homo sapien
ctgggaaggagatgttcagcttcat

SEQ ID NO: 1508738 - DNA, 25 bp, Homo sapien
agtacaaagtttgcgttcatcgtcc

SEQ ID NO: 1508739 - DNA, 25 bp, Homo sapien
caaagtttgcgttcatcgtccactt

SEQ ID NO: 1508740 - DNA, 25 bp, Homo sapien
aaagtttgcgttcatcgtccacttc

SEQ ID NO: 1508741 - DNA, 25 bp, Homo sapien
aaaagtacaaagtttgcgttcatcg

SEQ ID NO: 1508742 - DNA, 25 bp, Homo sapien
cactgattccgaccacgtaaccctt

SEQ ID NO: 1508743 - DNA, 25 bp, Homo sapien
tagcaagtggacacggccatgggtc

SEQ ID NO: 1508744 - DNA, 25 bp, Homo sapien
tcagtagcaagtggacacggccatg

SEQ ID NO: 1508745 - DNA, 25 bp, Homo sapien
tcaagacaccctgtttcaaggggaa

SEQ ID NO: 1508746 - DNA, 25 bp, Homo sapien
ccatgggtcaagacaccctgtttca

SEQ ID NO: 1508747 - DNA, 25 bp, Homo sapien
ttggcatccacgatgcaaccatgaa

SEQ ID NO: 1508748 - DNA, 25 bp, Homo sapien
tccacgatgcaaccatgaactgatc

SEQ ID NO: 1508749 - DNA, 25 bp, Homo sapien
gcatccacgatgcaaccatgaactg

SEQ ID NO: 1508750 - DNA, 25 bp, Homo sapien
acgatgcaaccatgaactgatcttc

SEQ ID NO: 1508751 - DNA, 25 bp, Homo sapien
caggtgacgaggcatcatagtctca

SEQ ID NO: 1508752 - DNA, 25 bp, Homo sapien
tgacgaggcatcatagtctcagtca

SEQ ID NO: 1508753 - DNA, 25 bp, Homo sapien
ggtgacgaggcatcatagtctcagt

SEQ ID NO: 1508754 - DNA, 25 bp, Homo sapien
ccaggtgacgaggcatcatagtctc

SEQ ID NO: 1508755 - DNA, 25 bp, Homo sapien
ctttagagagactgaaaagtttacg

SEQ ID NO: 1508756 - DNA, 25 bp, Homo sapien
ttagagagactgaaaagtttacgga

SEQ ID NO: 1508757 - DNA, 25 bp, Homo sapien
agagagactgaaaagtttacggatt

SEQ ID NO: 1508758 - DNA, 25 bp, Homo sapien
tagagagactgaaaagtttacggat

SEQ ID NO: 1508759 - DNA, 25 bp, Homo sapien
tgtggagtgacaaggcgctgaatct

SEQ ID NO: 1508760 - DNA, 25 bp, Homo sapien
caggacatgtggagtgacaaggcgc

SEQ ID NO: 1508761 - DNA, 25 bp, Homo sapien
ttaatatgcggctgcttcagagcaa

SEQ ID NO: 1508762 - DNA, 25 bp, Homo sapien
tttttcttaatatgcggctgcttca

SEQ ID NO: 1508763 - DNA, 25 bp, Homo sapien
ttttttgcgaatctgatcttatttg

SEQ ID NO: 1508764 - DNA, 25 bp, Homo sapien
ttttttttttgcgaatctgatctta

SEQ ID NO: 1508765 - DNA, 25 bp, Homo sapien
tttttttttgcgaatctgatcttat

SEQ ID NO: 1508766 - DNA, 25 bp, Homo sapien
tttgcgaatctgatcttatttgtta

SEQ ID NO: 1508767 - DNA, 25 bp, Homo sapien
tcacttccgctgttgggctctgtga

SEQ ID NO: 1508768 - DNA, 25 bp, Homo sapien
ctggggtcacttccgctgttgggct

SEQ ID NO: 1508769 - DNA, 25 bp, Homo sapien
gggtcacttccgctgttgggctctg

SEQ ID NO: 1508770 - DNA, 25 bp, Homo sapien
acttccgctgttgggctctgtgagc

SEQ ID NO: 1508771 - DNA, 25 bp, Homo sapien
atcggccataggcgagttcgtgatc

SEQ ID NO: 1508772 - DNA, 25 bp, Homo sapien
catgatgatcatgcctgtggctgag

SEQ ID NO: 1508773 - DNA, 25 bp, Homo sapien
ccacactacaaacagatcggccata

SEQ ID NO: 1508774 - DNA, 25 bp, Homo sapien
ctccacaccgtccatgatgatcatg

SEQ ID NO: 1508775 - DNA, 25 bp, Homo sapien
ggctgtgtgcaagcagaactccgaa

SEQ ID NO: 1508776 - DNA, 25 bp, Homo sapien
cgcgatgccgtaccgggcgttgttc

SEQ ID NO: 1508777 - DNA, 25 bp, Homo sapien
agcagaactccgaagctccaagcac

SEQ ID NO: 1508778 - DNA, 25 bp, Homo sapien
cgtactgccgggctgtgtgcaagca

SEQ ID NO: 1508779 - DNA, 25 bp, Homo sapien
cttcaagcggccgagctgcaggcag

SEQ ID NO: 1508780 - DNA, 25 bp, Homo sapien
ctggtccttcaagcggccgagctgc

SEQ ID NO: 1508781 - DNA, 25 bp, Homo sapien
tcctggtccttcaagcggccgagct

SEQ ID NO: 1508782 - DNA, 25 bp, Homo sapien
ttgtcctggtccttcaagcggccga

SEQ ID NO: 1508783 - DNA, 25 bp, Homo sapien
tggcacatgagggtaacaaggactg

SEQ ID NO: 1508784 - DNA, 25 bp, Homo sapien
ccagcccatcaaggacaagagggac

SEQ ID NO: 1508785 - DNA, 25 bp, Homo sapien
cagccaagctcccaatgagggacca

SEQ ID NO: 1508786 - DNA, 25 bp, Homo sapien
tggcatcccgatgctccaagcaaac

SEQ ID NO: 1508787 - DNA, 25 bp, Homo sapien
caggttcatggcgtgccggatcacg

SEQ ID NO: 1508788 - DNA, 25 bp, Homo sapien
tgatactcgtcagaaatcccattcc

SEQ ID NO: 1508789 - DNA, 25 bp, Homo sapien
ggctttcccacagttattcctcttc

SEQ ID NO: 1508790 - DNA, 25 bp, Homo sapien
cctggcgggcgatgtccagggcttt

SEQ ID NO: 1508791 - DNA, 25 bp, Homo sapien
ctgtcacttagtgataggtggagtt

SEQ ID NO: 1508792 - DNA, 25 bp, Homo sapien
tgtcacttagtgataggtggagttg

SEQ ID NO: 1508793 - DNA, 25 bp, Homo sapien
actgtcacttagtgataggtggagt

SEQ ID NO: 1508794 - DNA, 25 bp, Homo sapien
tcacttagtgataggtggagttgga

SEQ ID NO: 1508795 - DNA, 25 bp, Homo sapien
gtccaccagcctgctaggagtcggg

SEQ ID NO: 1508796 - DNA, 25 bp, Homo sapien
gcgttgattcctgcgtgtagcttcg

SEQ ID NO: 1508797 - DNA, 25 bp, Homo sapien
tgtctcttaacaaaatggagcgttg

SEQ ID NO: 1508798 - DNA, 25 bp, Homo sapien
ccatcagttacagggtgcaaacacc

SEQ ID NO: 1508799 - DNA, 25 bp, Homo sapien
tagctctcccaaggatcagggcgtg

SEQ ID NO: 1508800 - DNA, 25 bp, Homo sapien
atcagggcgtgaatgtcatgtgtac

SEQ ID NO: 1508801 - DNA, 25 bp, Homo sapien
ggattcccgtgatagctctcccaag

SEQ ID NO: 1508802 - DNA, 25 bp, Homo sapien
acttgctggccgtgaacgcctggat

SEQ ID NO: 1508803 - DNA, 25 bp, Homo sapien
tacggtccagccaggcatctctcca

SEQ ID NO: 1508804 - DNA, 25 bp, Homo sapien
gcttgagagtttcgggcccctgatg

SEQ ID NO: 1508805 - DNA, 25 bp, Homo sapien
agagcacagcgctcctacggtccag

SEQ ID NO: 1508806 - DNA, 25 bp, Homo sapien
aagctcagagcacagcgctcctacg

SEQ ID NO: 1508807 - DNA, 25 bp, Homo sapien
ccatcttctttttaaggaacacatc

SEQ ID NO: 1508808 - DNA, 25 bp, Homo sapien
cttctttttaaggaacacatctgaa

SEQ ID NO: 1508809 - DNA, 25 bp, Homo sapien
ctttttaaggaacacatctgaacga

SEQ ID NO: 1508810 - DNA, 25 bp, Homo sapien
catcttctttttaaggaacacatct

SEQ ID NO: 1508811 - DNA, 25 bp, Homo sapien
cagggtaaatggagtctgctctcat

SEQ ID NO: 1508812 - DNA, 25 bp, Homo sapien
agggcgcactgtgaactcagtgtga

SEQ ID NO: 1508813 - DNA, 25 bp, Homo sapien
tgcagcagacggagttgcttccatg

SEQ ID NO: 1508814 - DNA, 25 bp, Homo sapien
tcctctcaagagaagctgctatttc

SEQ ID NO: 1508815 - DNA, 25 bp, Homo sapien
tctgtggctgaaactacttctcagg

SEQ ID NO: 1508816 - DNA, 25 bp, Homo sapien
aaactacttctcaggtggttaccag

SEQ ID NO: 1508817 - DNA, 25 bp, Homo sapien
ccagacgtgttcgtttcttctgtgg

SEQ ID NO: 1508818 - DNA, 25 bp, Homo sapien
tggttaccagtaaaccggcctgaca

SEQ ID NO: 1508819 - DNA, 25 bp, Homo sapien
tgtggtgacagaaaggacaaagtcc

SEQ ID NO: 1508820 - DNA, 25 bp, Homo sapien
aaggacaaagtcccttgcacccctg

SEQ ID NO: 1508821 - DNA, 25 bp, Homo sapien
caaagatcagccatttggagacaga

SEQ ID NO: 1508822 - DNA, 25 bp, Homo sapien
ctcaaacaagtctgccacagcgtgg

SEQ ID NO: 1508823 - DNA, 25 bp, Homo sapien
cccagccaagagtaaatgtgaacag

SEQ ID NO: 1508824 - DNA, 25 bp, Homo sapien
tccaagagttcacccagaaaatggc

SEQ ID NO: 1508825 - DNA, 25 bp, Homo sapien
taacctggctgagcttgtactgtac

SEQ ID NO: 1508826 - DNA, 25 bp, Homo sapien
tatgcagcacacgactgtatatact

SEQ ID NO: 1508827 - DNA, 25 bp, Homo sapien
tactgtaggcacttataacatgatg

SEQ ID NO: 1508828 - DNA, 25 bp, Homo sapien
tgtgtactttcttcctaacctggct

SEQ ID NO: 1508829 - DNA, 25 bp, Homo sapien
ggtgtctgttgtacaccaggcacgg

SEQ ID NO: 1508830 - DNA, 25 bp, Homo sapien
accaggcacggtgctaggccattca

SEQ ID NO: 1508831 - DNA, 25 bp, Homo sapien
caccaggcacggtgctaggccattc

SEQ ID NO: 1508832 - DNA, 25 bp, Homo sapien
ctgatggtgtctgttgtacaccagg

SEQ ID NO: 1508833 - DNA, 25 bp, Homo sapien
caagagccggcaaaaggaccatgca

SEQ ID NO: 1508834 - DNA, 25 bp, Homo sapien
cctggccgcttcctgtactctgaga

SEQ ID NO: 1508835 - DNA, 25 bp, Homo sapien
cattgacatcctgcagaagagagcc

SEQ ID NO: 1508836 - DNA, 25 bp, Homo sapien
tcctggaagggaagtcgggactcta

SEQ ID NO: 1508837 - DNA, 25 bp, Homo sapien
ggcggtcaacatcacccagtaggtt

SEQ ID NO: 1508838 - DNA, 25 bp, Homo sapien
cagttacatgtacaacatgggacca

SEQ ID NO: 1508839 - DNA, 25 bp, Homo sapien
catgggaccaacaactttttgtgtg

SEQ ID NO: 1508840 - DNA, 25 bp, Homo sapien
gaggtgcaggtacactgtagcccca

SEQ ID NO: 1508841 - DNA, 25 bp, Homo sapien
ccctcggtggtcataagtggctggc

SEQ ID NO: 1508842 - DNA, 25 bp, Homo sapien
tatatctgttagaggccacggaggg

SEQ ID NO: 1508843 - DNA, 25 bp, Homo sapien
ccataatagatgaacgcagcgctgt

SEQ ID NO: 1508844 - DNA, 25 bp, Homo sapien
aaacattgttttgcccaagcgccag

SEQ ID NO: 1508845 - DNA, 25 bp, Homo sapien
ggccagctcctaccggcttgaaaga

SEQ ID NO: 1508846 - DNA, 25 bp, Homo sapien
tacagttcaactttctgacccggaa

SEQ ID NO: 1508847 - DNA, 25 bp, Homo sapien
gaggaagtgccttgtgccataagac

SEQ ID NO: 1508848 - DNA, 25 bp, Homo sapien
tgtttcccggccatgatgtactggg

SEQ ID NO: 1508849 - DNA, 25 bp, Homo sapien
atattgctcaggctgttctcgcact

SEQ ID NO: 1508850 - DNA, 25 bp, Homo sapien
attgctcaggctgttctcgcactcc

SEQ ID NO: 1508851 - DNA, 25 bp, Homo sapien
tattgctcaggctgttctcgcactc

SEQ ID NO: 1508852 - DNA, 25 bp, Homo sapien
catattgctcaggctgttctcgcac

SEQ ID NO: 1508853 - DNA, 25 bp, Homo sapien
acagaggactgggtagcaggttcct

SEQ ID NO: 1508854 - DNA, 25 bp, Homo sapien
gtgacatgggccactctaggacagg

SEQ ID NO: 1508855 - DNA, 25 bp, Homo sapien
tggtgggccacaaggtgaacctgca

SEQ ID NO: 1508856 - DNA, 25 bp, Homo sapien
cctgcagatggtgtatgacagtccc

SEQ ID NO: 1508857 - DNA, 25 bp, Homo sapien
tgagggaactgggaagcgatagcag

SEQ ID NO: 1508858 - DNA, 25 bp, Homo sapien
aactgggaagcgatagcaggagcta

SEQ ID NO: 1508859 - DNA, 25 bp, Homo sapien
gcgatagcaggagctagagccggtc

SEQ ID NO: 1508860 - DNA, 25 bp, Homo sapien
cgatagcaggagctagagccggtca

SEQ ID NO: 1508861 - DNA, 25 bp, Homo sapien
tgcaggtgacggctgagtctgttct

SEQ ID NO: 1508862 - DNA, 25 bp, Homo sapien
gtgcttcaagaaccagagtgatggg

SEQ ID NO: 1508863 - DNA, 25 bp, Homo sapien
gggtcagggagagcggcctggtgca

SEQ ID NO: 1508864 - DNA, 25 bp, Homo sapien
aggaaggtgcttcaagaaccagagt

SEQ ID NO: 1508865 - DNA, 25 bp, Homo sapien
acgaccctccggcagcggctctgca

SEQ ID NO: 1508866 - DNA, 25 bp, Homo sapien
taaaacgaccctccggcagcggctc

SEQ ID NO: 1508867 - DNA, 25 bp, Homo sapien
aaacgaccctccggcagcggctctg

SEQ ID NO: 1508868 - DNA, 25 bp, Homo sapien
aaaacgaccctccggcagcggctct

SEQ ID NO: 1508869 - DNA, 25 bp, Homo sapien
tagacggcaggctcggcgacggcca

SEQ ID NO: 1508870 - DNA, 25 bp, Homo sapien
agacggcaggctcggcgacggccag

SEQ ID NO: 1508871 - DNA, 25 bp, Homo sapien
ccttgaagtagacggcaggctcggc

SEQ ID NO: 1508872 - DNA, 25 bp, Homo sapien
gctccttgaagtagacggcaggctc

SEQ ID NO: 1508873 - DNA, 25 bp, Homo sapien
cagggacgcagaagagaaatcgccc

SEQ ID NO: 1508874 - DNA, 25 bp, Homo sapien
cacgtcgggtgccttcagagatcct

SEQ ID NO: 1508875 - DNA, 25 bp, Homo sapien
ccaacctctagtttgacacgtcggg

SEQ ID NO: 1508876 - DNA, 25 bp, Homo sapien
taattacgggcgacaacgcagatcc

SEQ ID NO: 1508877 - DNA, 25 bp, Homo sapien
tttatctttctcctcgtcaccgtag

SEQ ID NO: 1508878 - DNA, 25 bp, Homo sapien
tcgtcaccgtagaacttgccggaac

SEQ ID NO: 1508879 - DNA, 25 bp, Homo sapien
ggaactgagaacgaatttgccaaaa

SEQ ID NO: 1508880 - DNA, 25 bp, Homo sapien
tttggattcgatccagcgggaagtc

SEQ ID NO: 1508881 - DNA, 25 bp, Homo sapien
cagcgtctggcctttgttgctgaaa

SEQ ID NO: 1508882 - DNA, 25 bp, Homo sapien
gagcataaaagcgtgcatcctggct

SEQ ID NO: 1508883 - DNA, 25 bp, Homo sapien
gatgttgtattctgagtctccgtgc

SEQ ID NO: 1508884 - DNA, 25 bp, Homo sapien
tgctgaaaggctcgaaactggccga

SEQ ID NO: 1508885 - DNA, 25 bp, Homo sapien
ttgttgatcagcacgttcttgccct

SEQ ID NO: 1508886 - DNA, 25 bp, Homo sapien
cacgttcttgcccttgtagttgaag

SEQ ID NO: 1508887 - DNA, 25 bp, Homo sapien
tccttgttgatcagcacgttcttgc

SEQ ID NO: 1508888 - DNA, 25 bp, Homo sapien
gatgtccttgttgatcagcacgttc

SEQ ID NO: 1508889 - DNA, 25 bp, Homo sapien
caatcgtcttccaaggagccggact

SEQ ID NO: 1508890 - DNA, 25 bp, Homo sapien
ggtggcaggaagtcccaatcgtctt

SEQ ID NO: 1508891 - DNA, 25 bp, Homo sapien
tgtctggccgcacaatcagtgtgta

SEQ ID NO: 1508892 - DNA, 25 bp, Homo sapien
tctgtgggatcatcgatcttggccc

SEQ ID NO: 1508893 - DNA, 25 bp, Homo sapien
cagggatatgctcgggcttgtccca

SEQ ID NO: 1508894 - DNA, 25 bp, Homo sapien
atcagggtcagggatatgctcgggc

SEQ ID NO: 1508895 - DNA, 25 bp, Homo sapien
ttctgaatcactgggggttcccact

SEQ ID NO: 1508896 - DNA, 25 bp, Homo sapien
cttgtactcagggttctgaatcact

SEQ ID NO: 1508897 - DNA, 25 bp, Homo sapien
ggttgtcgatctgccggggcttcca

SEQ ID NO: 1508898 - DNA, 25 bp, Homo sapien
ctgggtggatccaagtgcccttgta

SEQ ID NO: 1508899 - DNA, 25 bp, Homo sapien
gcccttgtaatctgggttgtcgatc

SEQ ID NO: 1508900 - DNA, 25 bp, Homo sapien
gatccaagtgcccttgtaatctggg

SEQ ID NO: 1508901 - DNA, 25 bp, Homo sapien
tcgggagaatactcggggttgtcaa

SEQ ID NO: 1508902 - DNA, 25 bp, Homo sapien
ctgggatcgggagaatactcggggt

SEQ ID NO: 1508903 - DNA, 25 bp, Homo sapien
cgggagaatactcggggttgtcaat

SEQ ID NO: 1508904 - DNA, 25 bp, Homo sapien
gatcgggagaatactcggggttgtc

SEQ ID NO: 1508905 - DNA, 25 bp, Homo sapien
gccaaagttatcataggcatagata

SEQ ID NO: 1508906 - DNA, 25 bp, Homo sapien
tccaggcccagcacgccaaagttat

SEQ ID NO: 1508907 - DNA, 25 bp, Homo sapien
cagcacgccaaagttatcataggca

SEQ ID NO: 1508908 - DNA, 25 bp, Homo sapien
ggcccagcacgccaaagttatcata

SEQ ID NO: 1508909 - DNA, 25 bp, Homo sapien
tatgcacttgaggtaccccagggat

SEQ ID NO: 1508910 - DNA, 25 bp, Homo sapien
tgatcttatgcacttgaggtacccc

SEQ ID NO: 1508911 - DNA, 25 bp, Homo sapien
tcttatgcacttgaggtaccccagg

SEQ ID NO: 1508912 - DNA, 25 bp, Homo sapien
gatcttatgcacttgaggtacccca

SEQ ID NO: 1508913 - DNA, 25 bp, Homo sapien
aaaaattagcccggggtctgtgatg

SEQ ID NO: 1508914 - DNA, 25 bp, Homo sapien
aggtcatggcgaacggatcacttga

SEQ ID NO: 1508915 - DNA, 25 bp, Homo sapien
cccggggtctgtgatggcgcatccc

SEQ ID NO: 1508916 - DNA, 25 bp, Homo sapien
gagacagccagggacgggacgggct

SEQ ID NO: 1508917 - DNA, 25 bp, Homo sapien
tagcccttgctttggacagggtttc

SEQ ID NO: 1508918 - DNA, 25 bp, Homo sapien
ccgatagcccttgctttggacaggg

SEQ ID NO: 1508919 - DNA, 25 bp, Homo sapien
gatagcccttgctttggacagggtt

SEQ ID NO: 1508920 - DNA, 25 bp, Homo sapien
cgatagcccttgctttggacagggt

SEQ ID NO: 1508921 - DNA, 25 bp, Homo sapien
aatgggaaggatggtcagaggtgat

SEQ ID NO: 1508922 - DNA, 25 bp, Homo sapien
tgggaaggatggtcagaggtgatac

SEQ ID NO: 1508923 - DNA, 25 bp, Homo sapien
ggatgaatgggaaggatggtcagag

SEQ ID NO: 1508924 - DNA, 25 bp, Homo sapien
tgaatgggaaggatggtcagaggtg

SEQ ID NO: 1508925 - DNA, 25 bp, Homo sapien
tttgttacgccccacgtctcgttgc

SEQ ID NO: 1508926 - DNA, 25 bp, Homo sapien
gcctcatcgttggtgatgaggaagt

SEQ ID NO: 1508927 - DNA, 25 bp, Homo sapien
ccacgtctcgttgccaaactcctca

SEQ ID NO: 1508928 - DNA, 25 bp, Homo sapien
aaactcctcagcgtatgcctcatcg

SEQ ID NO: 1508929 - DNA, 25 bp, Homo sapien
gctcctcgtcctgtttgtccttcat

SEQ ID NO: 1508930 - DNA, 25 bp, Homo sapien
tctgctcctcgtcctgtttgtcctt

SEQ ID NO: 1508931 - DNA, 25 bp, Homo sapien
ctcgtcctgtttgtccttcatttgt

SEQ ID NO: 1508932 - DNA, 25 bp, Homo sapien
tcctcgtcctgtttgtccttcattt

SEQ ID NO: 1508933 - DNA, 25 bp, Homo sapien
ctggccggggacatcttcctcctca

SEQ ID NO: 1508934 - DNA, 25 bp, Homo sapien
ctcagtccagccctggaggcaggcc

SEQ ID NO: 1508935 - DNA, 25 bp, Homo sapien
tcagtccagccctggaggcaggcct

SEQ ID NO: 1508936 - DNA, 25 bp, Homo sapien
cagtccagccctggaggcaggcctc

SEQ ID NO: 1508937 - DNA, 25 bp, Homo sapien
agtccagccctggaggcaggcctct

SEQ ID NO: 1508938 - DNA, 25 bp, Homo sapien
attatttggcgcggccagctctgcg

SEQ ID NO: 1508939 - DNA, 25 bp, Homo sapien
ggcaagaaaagatgttgatcaagaa

SEQ ID NO: 1508940 - DNA, 25 bp, Homo sapien
tgatcaagaaagatgagaaccaggg

SEQ ID NO: 1508941 - DNA, 25 bp, Homo sapien
aaaaatgaaagttctcgagtctcac

SEQ ID NO: 1508942 - DNA, 25 bp, Homo sapien
caccccaaatccgaaccagcctgga

SEQ ID NO: 1508943 - DNA, 25 bp, Homo sapien
gcagatgaaatctcaggcctgtggc

SEQ ID NO: 1508944 - DNA, 25 bp, Homo sapien
tgtggcttctccacaccactgcccc

SEQ ID NO: 1508945 - DNA, 25 bp, Homo sapien
aaggagagcagatgaaatctcaggc

SEQ ID NO: 1508946 - DNA, 25 bp, Homo sapien
gttggagacaccacccccttctgct

SEQ ID NO: 1508947 - DNA, 25 bp, Homo sapien
tgagccaatctgggacccactgccc

SEQ ID NO: 1508948 - DNA, 25 bp, Homo sapien
cagtgtgagccaatctgggacccac

SEQ ID NO: 1508949 - DNA, 25 bp, Homo sapien
gtgtgagccaatctgggacccactg

SEQ ID NO: 1508950 - DNA, 25 bp, Homo sapien
tgtgagccaatctgggacccactgc

SEQ ID NO: 1508951 - DNA, 25 bp, Homo sapien
cactcagcaacctctctagcaatag

SEQ ID NO: 1508952 - DNA, 25 bp, Homo sapien
atagctgaaaaaggagatatactgg

SEQ ID NO: 1508953 - DNA, 25 bp, Homo sapien
agggtccctggaatcttgtggaaca

SEQ ID NO: 1508954 - DNA, 25 bp, Homo sapien
gaatcttgtggaacactcagcaacc

SEQ ID NO: 1508955 - DNA, 25 bp, Homo sapien
ggatcctcacacaacatgcaactca

SEQ ID NO: 1508956 - DNA, 25 bp, Homo sapien
cccgggatcctcacacaacatgcaa

SEQ ID NO: 1508957 - DNA, 25 bp, Homo sapien
aacatgcaactcacgccgccgccat

SEQ ID NO: 1508958 - DNA, 25 bp, Homo sapien
ggccccgggatcctcacacaacatg

SEQ ID NO: 1508959 - DNA, 25 bp, Homo sapien
tcgtcaggctccatgcggatcttga

SEQ ID NO: 1508960 - DNA, 25 bp, Homo sapien
cgtcaggctccatgcggatcttgaa

SEQ ID NO: 1508961 - DNA, 25 bp, Homo sapien
aggctccatgcggatcttgaaggtc

SEQ ID NO: 1508962 - DNA, 25 bp, Homo sapien
ctccatgcggatcttgaaggtctgc

SEQ ID NO: 1508963 - DNA, 25 bp, Homo sapien
tcgcccggagaccggcgcaggagcg

SEQ ID NO: 1508964 - DNA, 25 bp, Homo sapien
ccgcgagagcgctgacattggagcc

SEQ ID NO: 1508965 - DNA, 25 bp, Homo sapien
caggagcgccgcccgatcggctggg

SEQ ID NO: 1508966 - DNA, 25 bp, Homo sapien
tgcccctcccgttgggattctagcc

SEQ ID NO: 1508967 - DNA, 25 bp, Homo sapien
gattcgaccaccagtgtcccaagga

SEQ ID NO: 1508968 - DNA, 25 bp, Homo sapien
gtcccaaggagacgcctgcaaagct

SEQ ID NO: 1508969 - DNA, 25 bp, Homo sapien
cgttgttgtcgtcactactcagtat

SEQ ID NO: 1508970 - DNA, 25 bp, Homo sapien
gtatctcctggtcattactcctaga

SEQ ID NO: 1508971 - DNA, 25 bp, Homo sapien
tgcaaaaagcgccaagtacccaata

SEQ ID NO: 1508972 - DNA, 25 bp, Homo sapien
caaagccaaacacttgagcggatca

SEQ ID NO: 1508973 - DNA, 25 bp, Homo sapien
gcacagacaggtaggcaggttaact

SEQ ID NO: 1508974 - DNA, 25 bp, Homo sapien
gccagcaggcgaccggttcatttga

SEQ ID NO: 1508975 - DNA, 25 bp, Homo sapien
gatcttgccggcatagatgagtttc

SEQ ID NO: 1508976 - DNA, 25 bp, Homo sapien
tcttctcatcgatgcgatagtccct

SEQ ID NO: 1508977 - DNA, 25 bp, Homo sapien
agtttctgtccagccacggggaagg

SEQ ID NO: 1508978 - DNA, 25 bp, Homo sapien
tccctgatagggacatcgtcactca

SEQ ID NO: 1508979 - DNA, 25 bp, Homo sapien
ctgaggtaccctggccggctttggt

SEQ ID NO: 1508980 - DNA, 25 bp, Homo sapien
cagactctggggacgtcgtgggggc

SEQ ID NO: 1508981 - DNA, 25 bp, Homo sapien
caggcgggaaggatgtagaggactc

SEQ ID NO: 1508982 - DNA, 25 bp, Homo sapien
tgggggcggattcctctgatgggct

SEQ ID NO: 1508983 - DNA, 25 bp, Homo sapien
cgtggaggccgcgtcttcctctcgc

SEQ ID NO: 1508984 - DNA, 25 bp, Homo sapien
ggccgcgtcttcctctcgcccgctg

SEQ ID NO: 1508985 - DNA, 25 bp, Homo sapien
ctagcgtggaggccgcgtcttcctc

SEQ ID NO: 1508986 - DNA, 25 bp, Homo sapien
gcgtcttcctctcgcccgctgctac

SEQ ID NO: 1508987 - DNA, 25 bp, Homo sapien
tgagcagatactccacggctcggtg

SEQ ID NO: 1508988 - DNA, 25 bp, Homo sapien
catgatctccgtcagcatcgtctca

SEQ ID NO: 1508989 - DNA, 25 bp, Homo sapien
gcatcgtctcatactcagagcccgt

SEQ ID NO: 1508990 - DNA, 25 bp, Homo sapien
cgctctcgctcatagcccatggaca

SEQ ID NO: 1508991 - DNA, 25 bp, Homo sapien
tcagggcaggttttgccttcccaac

SEQ ID NO: 1508992 - DNA, 25 bp, Homo sapien
gtttagttctaatgcacagacctcc

SEQ ID NO: 1508993 - DNA, 25 bp, Homo sapien
cctcctgtgggaagcctttagtggc

SEQ ID NO: 1508994 - DNA, 25 bp, Homo sapien
gaatcactacccaaaggcttttcag

SEQ ID NO: 1508995 - DNA, 25 bp, Homo sapien
ctggacagaaccgtgttccggctcg

SEQ ID NO: 1508996 - DNA, 25 bp, Homo sapien
tggacagaaccgtgttccggctcgg

SEQ ID NO: 1508997 - DNA, 25 bp, Homo sapien
cagaaccgtgttccggctcggggct

SEQ ID NO: 1508998 - DNA, 25 bp, Homo sapien
cgtggccggctgctccgatacctgg

SEQ ID NO: 1508999 - DNA, 25 bp, Homo sapien
tgcttccgtggccggctgctccgat

SEQ ID NO: 1509000 - DNA, 25 bp, Homo sapien
tggccggctgctccgatacctggct

SEQ ID NO: 1509001 - DNA, 25 bp, Homo sapien
tccgtggccggctgctccgatacct

SEQ ID NO: 1509002 - DNA, 25 bp, Homo sapien
gttctgctgaatcacctgccgcatg

SEQ ID NO: 1509003 - DNA, 25 bp, Homo sapien
gggttctgctgaatcacctgccgca

SEQ ID NO: 1509004 - DNA, 25 bp, Homo sapien
ctgccgcatgttctggaactggggc

SEQ ID NO: 1509005 - DNA, 25 bp, Homo sapien
tgccgcatgttctggaactggggct

SEQ ID NO: 1509006 - DNA, 25 bp, Homo sapien
gggaagcatgtgcttagtcctgctt

SEQ ID NO: 1509007 - DNA, 25 bp, Homo sapien
cacaggaagcacaggggcgtggggg

SEQ ID NO: 1509008 - DNA, 25 bp, Homo sapien
ggcgtgggggaagcatgtgcttagt

SEQ ID NO: 1509009 - DNA, 25 bp, Homo sapien
aagcatgtgcttagtcctgctttcc

SEQ ID NO: 1509010 - DNA, 25 bp, Homo sapien
aagccctaccctggaagagctgatg

SEQ ID NO: 1509011 - DNA, 25 bp, Homo sapien
tggccaaacacaacatagcagtcga

SEQ ID NO: 1509012 - DNA, 25 bp, Homo sapien
tgagccaagaaataagccgggcacg

SEQ ID NO: 1509013 - DNA, 25 bp, Homo sapien
cattcagtcaggcaaatatccagag

SEQ ID NO: 1509014 - DNA, 25 bp, Homo sapien
tcacctggatgtagttcatctgcgg

SEQ ID NO: 1509015 - DNA, 25 bp, Homo sapien
agcttctttctcctgcggcgtcacc

SEQ ID NO: 1509016 - DNA, 25 bp, Homo sapien
ccccagggggctcgttcagcatctg

SEQ ID NO: 1509017 - DNA, 25 bp, Homo sapien
ttctcctgcggcgtcacctggatgt

SEQ ID NO: 1509018 - DNA, 25 bp, Homo sapien
tgggaagataggttaagtgtgagca

SEQ ID NO: 1509019 - DNA, 25 bp, Homo sapien
ctgcagtcacccctcagccaggcct

SEQ ID NO: 1509020 - DNA, 25 bp, Homo sapien
agataggttaagtgtgagcaggaga

SEQ ID NO: 1509021 - DNA, 25 bp, Homo sapien
ctgtgggaagataggttaagtgtga

SEQ ID NO: 1509022 - DNA, 25 bp, Homo sapien
tcatttttttcacacgcgaaatagg

SEQ ID NO: 1509023 - DNA, 25 bp, Homo sapien
cacacgcgaaataggcctggatgac

SEQ ID NO: 1509024 - DNA, 25 bp, Homo sapien
gttggcagccaagttctcatttttt

SEQ ID NO: 1509025 - DNA, 25 bp, Homo sapien
gaagttggcagccaagttctcattt

SEQ ID NO: 1509026 - DNA, 25 bp, Homo sapien
aagatttgggccactccaatggagg

SEQ ID NO: 1509027 - DNA, 25 bp, Homo sapien
ggcctttcaggacttgccctagatg

SEQ ID NO: 1509028 - DNA, 25 bp, Homo sapien
gatggagaggcaagcagccgccttt

SEQ ID NO: 1509029 - DNA, 25 bp, Homo sapien
ggccactttaggaggacaggaagct

SEQ ID NO: 1509030 - DNA, 25 bp, Homo sapien
tattcacttcaaaacctttatcaga

SEQ ID NO: 1509031 - DNA, 25 bp, Homo sapien
attcacttcaaaacctttatcagag

SEQ ID NO: 1509032 - DNA, 25 bp, Homo sapien
acttcaaaacctttatcagagacac

SEQ ID NO: 1509033 - DNA, 25 bp, Homo sapien
tcaaaacctttatcagagacacggt

SEQ ID NO: 1509034 - DNA, 25 bp, Homo sapien
gggaggagacaccggaagcctcaat

SEQ ID NO: 1509035 - DNA, 25 bp, Homo sapien
cttctgtttaccaacattcatctcc

SEQ ID NO: 1509036 - DNA, 25 bp, Homo sapien
aggagacaccggaagcctcaatctg

SEQ ID NO: 1509037 - DNA, 25 bp, Homo sapien
ttcatctccagtaattagccaatta

SEQ ID NO: 1509038 - DNA, 25 bp, Homo sapien
gagcgcaagcgcctcaaggaggaaa

SEQ ID NO: 1509039 - DNA, 25 bp, Homo sapien
aaggagtgcccgcttccaggagctg

SEQ ID NO: 1509040 - DNA, 25 bp, Homo sapien
gagctcctgggctaccaggtggacc

SEQ ID NO: 1509041 - DNA, 25 bp, Homo sapien
gacctagagaagaaggagcgcaagc

SEQ ID NO: 1509042 - DNA, 25 bp, Homo sapien
aagcagctggccgaagagcagaagc

SEQ ID NO: 1509043 - DNA, 25 bp, Homo sapien
aatggtacccgagcctggcgaccat

SEQ ID NO: 1509044 - DNA, 25 bp, Homo sapien
gcctggcgaccatgcaggagtcgct

SEQ ID NO: 1509045 - DNA, 25 bp, Homo sapien
gaggccgaagaacgcgaatggtacc

SEQ ID NO: 1509046 - DNA, 25 bp, Homo sapien
aggacctcctgaccccgcggtggca

SEQ ID NO: 1509047 - DNA, 25 bp, Homo sapien
tgggaccgcgctacgcggctaagca

SEQ ID NO: 1509048 - DNA, 25 bp, Homo sapien
agcagttcgcgcgttacggcgccgc

SEQ ID NO: 1509049 - DNA, 25 bp, Homo sapien
ttcgttatggccgtcgccggagcag

SEQ ID NO: 1509050 - DNA, 25 bp, Homo sapien
ctggatcagtgcagtcgcttccttc

SEQ ID NO: 1509051 - DNA, 25 bp, Homo sapien
ctgcttgtccgtgcgtctgtctgcc

SEQ ID NO: 1509052 - DNA, 25 bp, Homo sapien
gggctcaaggtcactagcagtcgac

SEQ ID NO: 1509053 - DNA, 25 bp, Homo sapien
actagcagtcgaccctgctgtctgg

SEQ ID NO: 1509054 - DNA, 25 bp, Homo sapien
tctgtctgtccggactgggctcaag

SEQ ID NO: 1509055 - DNA, 25 bp, Homo sapien
gagcctgtaggcagggccccgctaa

SEQ ID NO: 1509056 - DNA, 25 bp, Homo sapien
cacagaagagtggatagctggccaa

SEQ ID NO: 1509057 - DNA, 25 bp, Homo sapien
gcacagaagagtggatagctggcca

SEQ ID NO: 1509058 - DNA, 25 bp, Homo sapien
agggccccgctaagcaggcacagaa

SEQ ID NO: 1509059 - DNA, 25 bp, Homo sapien
ctgcaggcccaagaaggccttccag

SEQ ID NO: 1509060 - DNA, 25 bp, Homo sapien
gcccaagaaggccttccagctccca

SEQ ID NO: 1509061 - DNA, 25 bp, Homo sapien
ccaagaaggccttccagctcccaag

SEQ ID NO: 1509062 - DNA, 25 bp, Homo sapien
gcaggcccaagaaggccttccagct

SEQ ID NO: 1509063 - DNA, 25 bp, Homo sapien
ccctggatcacttcctgagggttca

SEQ ID NO: 1509064 - DNA, 25 bp, Homo sapien
ctgaacgaagggcacagccttacac

SEQ ID NO: 1509065 - DNA, 25 bp, Homo sapien
tcctgagggttcagcggcagagtca

SEQ ID NO: 1509066 - DNA, 25 bp, Homo sapien
gaacgaagggcacagccttacacat

SEQ ID NO: 1509067 - DNA, 25 bp, Homo sapien
tgaggccagaagctcaagactagct

SEQ ID NO: 1509068 - DNA, 25 bp, Homo sapien
gccagaagctcaagactagcttggg

SEQ ID NO: 1509069 - DNA, 25 bp, Homo sapien
aggccagaagctcaagactagcttg

SEQ ID NO: 1509070 - DNA, 25 bp, Homo sapien
gggcaacatagcgagactcccgtgt

SEQ ID NO: 1509071 - DNA, 25 bp, Homo sapien
cagatgatttcggaggcgtatggct

SEQ ID NO: 1509072 - DNA, 25 bp, Homo sapien
accaaagcacagatgatttcggagg

SEQ ID NO: 1509073 - DNA, 25 bp, Homo sapien
gggtccgagccagggatgtagagag

SEQ ID NO: 1509074 - DNA, 25 bp, Homo sapien
agagagaggagcaatgaccaaagca

SEQ ID NO: 1509075 - DNA, 25 bp, Homo sapien
acgggtgcccaacgcttgcgagcag

SEQ ID NO: 1509076 - DNA, 25 bp, Homo sapien
tgcccaacgcttgcgagcaggcata

SEQ ID NO: 1509077 - DNA, 25 bp, Homo sapien
gtgagacaccacaggaccacgggtg

SEQ ID NO: 1509078 - DNA, 25 bp, Homo sapien
acaggaccacgggtgcccaacgctt

SEQ ID NO: 1509079 - DNA, 25 bp, Homo sapien
ccctcgatcagcatggtggatatct

SEQ ID NO: 1509080 - DNA, 25 bp, Homo sapien
tcgatcagcatggtggatatcttca

SEQ ID NO: 1509081 - DNA, 25 bp, Homo sapien
cgatcagcatggtggatatcttcac

SEQ ID NO: 1509082 - DNA, 25 bp, Homo sapien
cctcgatcagcatggtggatatctt

SEQ ID NO: 1509083 - DNA, 25 bp, Homo sapien
tcatgcttttgggctgcagtgacac

SEQ ID NO: 1509084 - DNA, 25 bp, Homo sapien
cagagtacatcatccaggtccacgt

SEQ ID NO: 1509085 - DNA, 25 bp, Homo sapien
gactatcagtggtgcaactccagga

SEQ ID NO: 1509086 - DNA, 25 bp, Homo sapien
gattaacagtggatttgatcccagc

SEQ ID NO: 1509087 - DNA, 25 bp, Homo sapien
tctccaaggtgcgtgtctccgtgca

SEQ ID NO: 1509088 - DNA, 25 bp, Homo sapien
gccctcgcccgctgaagaccctgag

SEQ ID NO: 1509089 - DNA, 25 bp, Homo sapien
tgtccctgcgtctgtgccagacagg

SEQ ID NO: 1509090 - DNA, 25 bp, Homo sapien
gccacatgtccctgcgtctgtgcca

SEQ ID NO: 1509091 - DNA, 25 bp, Homo sapien
gccctggttccagccgcccaaagcc

SEQ ID NO: 1509092 - DNA, 25 bp, Homo sapien
ccggctggcgggctttaatacagat

SEQ ID NO: 1509093 - DNA, 25 bp, Homo sapien
ggcgggctttaatacagatgccaaa

SEQ ID NO: 1509094 - DNA, 25 bp, Homo sapien
ctggccggctggcgggctttaatac

SEQ ID NO: 1509095 - DNA, 25 bp, Homo sapien
gctttaatacagatgccaaactcat

SEQ ID NO: 1509096 - DNA, 25 bp, Homo sapien
tggaccaaatgtagaccaagggtgt

SEQ ID NO: 1509097 - DNA, 25 bp, Homo sapien
acccatccatggagggacgacaggc

SEQ ID NO: 1509098 - DNA, 25 bp, Homo sapien
tcctgaaagggctgagtccaactgg

SEQ ID NO: 1509099 - DNA, 25 bp, Homo sapien
tccagtcgggcagcttggaccaaat

SEQ ID NO: 1509100 - DNA, 25 bp, Homo sapien
actgtgggggtgctcagtccagttc

SEQ ID NO: 1509101 - DNA, 25 bp, Homo sapien
cagaacactgtgggggtgctcagtc

SEQ ID NO: 1509102 - DNA, 25 bp, Homo sapien
gtgggggtgctcagtccagttctcc

SEQ ID NO: 1509103 - DNA, 25 bp, Homo sapien
aacactgtgggggtgctcagtccag

SEQ ID NO: 1509104 - DNA, 25 bp, Homo sapien
tcagctgcacggtctcacacatcct

SEQ ID NO: 1509105 - DNA, 25 bp, Homo sapien
aggaaccccgacactctgaccctca

SEQ ID NO: 1509106 - DNA, 25 bp, Homo sapien
acatcaacgtcacactggccagcag

SEQ ID NO: 1509107 - DNA, 25 bp, Homo sapien
ggcacactgatatactcagtccgca

SEQ ID NO: 1509108 - DNA, 25 bp, Homo sapien
cactacctggccaggatgctgcggg

SEQ ID NO: 1509109 - DNA, 25 bp, Homo sapien
tgcttggcaactgagcagggctctt

SEQ ID NO: 1509110 - DNA, 25 bp, Homo sapien
tgaggtgggcaaacatctggcatgt

SEQ ID NO: 1509111 - DNA, 25 bp, Homo sapien
gggccgggcaacgtgaggctccagg

SEQ ID NO: 1509112 - DNA, 25 bp, Homo sapien
cagcagagcagtgtgggtctgtggg

SEQ ID NO: 1509113 - DNA, 25 bp, Homo sapien
tgaagaggacagcagagcagtgtgg

SEQ ID NO: 1509114 - DNA, 25 bp, Homo sapien
ctgggtgaagaggacagcagagcag

SEQ ID NO: 1509115 - DNA, 25 bp, Homo sapien
agaggcaatgtctgggggatctggg

SEQ ID NO: 1509116 - DNA, 25 bp, Homo sapien
ggtgaggcagtacggggagtacata

SEQ ID NO: 1509117 - DNA, 25 bp, Homo sapien
tacggggagtacatagctgggcgcc

SEQ ID NO: 1509118 - DNA, 25 bp, Homo sapien
cagtacggggagtacatagctgggc

SEQ ID NO: 1509119 - DNA, 25 bp, Homo sapien
gagtacatagctgggcgcccgggcg

SEQ ID NO: 1509120 - DNA, 25 bp, Homo sapien
gatacactctttgccgtgacgcaca

SEQ ID NO: 1509121 - DNA, 25 bp, Homo sapien
tatgtggacacaagttgacacggac

SEQ ID NO: 1509122 - DNA, 25 bp, Homo sapien
gagtcacatgcaggtagcacccagt

SEQ ID NO: 1509123 - DNA, 25 bp, Homo sapien
tagatgtgacgcatgtcgctgggac

SEQ ID NO: 1509124 - DNA, 25 bp, Homo sapien
caacgatggcggcgggtttggaagt

SEQ ID NO: 1509125 - DNA, 25 bp, Homo sapien
gagaaggccagagagccaacgatgg

SEQ ID NO: 1509126 - DNA, 25 bp, Homo sapien
agaaggccagagagccaacgatggc

SEQ ID NO: 1509127 - DNA, 25 bp, Homo sapien
cagagagccaacgatggcggcgggt

SEQ ID NO: 1509128 - DNA, 25 bp, Homo sapien
cgcggtccccactctccactcagca

SEQ ID NO: 1509129 - DNA, 25 bp, Homo sapien
gcggtccccactctccactcagcac

SEQ ID NO: 1509130 - DNA, 25 bp, Homo sapien
ggtccgcggtccccactctccactc

SEQ ID NO: 1509131 - DNA, 25 bp, Homo sapien
tccgcggtccccactctccactcag

SEQ ID NO: 1509132 - DNA, 25 bp, Homo sapien
tgttgaatcacggttcactagtcct

SEQ ID NO: 1509133 - DNA, 25 bp, Homo sapien
tcacggttcactagtcctttcagtt

SEQ ID NO: 1509134 - DNA, 25 bp, Homo sapien
gcgccctcgctctgttgaatcacgg

SEQ ID NO: 1509135 - DNA, 25 bp, Homo sapien
tgctaaggaagaaaagaggcgccct

SEQ ID NO: 1509136 - DNA, 25 bp, Homo sapien
cagtaagaaggaaatagatatgaca

SEQ ID NO: 1509137 - DNA, 25 bp, Homo sapien
ttcctcacagcaagcagaaagggtg

SEQ ID NO: 1509138 - DNA, 25 bp, Homo sapien
tgaggccttcgaaacacagtaagaa

SEQ ID NO: 1509139 - DNA, 25 bp, Homo sapien
tatggagcagccatgcttgaggcct

SEQ ID NO: 1509140 - DNA, 25 bp, Homo sapien
cgggcctgcggtgctatgaatagaa

SEQ ID NO: 1509141 - DNA, 25 bp, Homo sapien
gagagctcagaaagtgtccatgcca

SEQ ID NO: 1509142 - DNA, 25 bp, Homo sapien
cattagcggtgacgagggatgccaa

SEQ ID NO: 1509143 - DNA, 25 bp, Homo sapien
gggatgccaacgcaacacagctcgg

SEQ ID NO: 1509144 - DNA, 25 bp, Homo sapien
aatttgcccaatcgacaagttcacg

SEQ ID NO: 1509145 - DNA, 25 bp, Homo sapien
agacatccacgagcagccaatggct

SEQ ID NO: 1509146 - DNA, 25 bp, Homo sapien
gaccaaaaacaatttgcccaatcga

SEQ ID NO: 1509147 - DNA, 25 bp, Homo sapien
gagagcccccggcagttggagacca

SEQ ID NO: 1509148 - DNA, 25 bp, Homo sapien
ggctgccacacacgccaggtaaaca

SEQ ID NO: 1509149 - DNA, 25 bp, Homo sapien
gccacacacgccaggtaaacaaaag

SEQ ID NO: 1509150 - DNA, 25 bp, Homo sapien
gaaaggtcagggatagcaagcagag

SEQ ID NO: 1509151 - DNA, 25 bp, Homo sapien
agcgagccggctgccacacacgcca

SEQ ID NO: 1509152 - DNA, 25 bp, Homo sapien
tgaagcacccggcaaagcccaacgc

SEQ ID NO: 1509153 - DNA, 25 bp, Homo sapien
atctgaagcacccggcaaagcccaa

SEQ ID NO: 1509154 - DNA, 25 bp, Homo sapien
gcacccggcaaagcccaacgcccga

SEQ ID NO: 1509155 - DNA, 25 bp, Homo sapien
tgatctgaagcacccggcaaagccc

SEQ ID NO: 1509156 - DNA, 25 bp, Homo sapien
tctccatgttctatcgcagccgtga

SEQ ID NO: 1509157 - DNA, 25 bp, Homo sapien
gaaaatgacatccacgagcaagcga

SEQ ID NO: 1509158 - DNA, 25 bp, Homo sapien
ggcacagtgtccgtctgcacagacg

SEQ ID NO: 1509159 - DNA, 25 bp, Homo sapien
gaggaaacagatcaggcttccctct

SEQ ID NO: 1509160 - DNA, 25 bp, Homo sapien
ccccgccaggctctgtcgcgcccat

SEQ ID NO: 1509161 - DNA, 25 bp, Homo sapien
ccttgtcagcctggcgcaggcagtc

SEQ ID NO: 1509162 - DNA, 25 bp, Homo sapien
ccggagtgtggacaaagtaagccag

SEQ ID NO: 1509163 - DNA, 25 bp, Homo sapien
tgaggcgacttgtagagccgctccc

SEQ ID NO: 1509164 - DNA, 25 bp, Homo sapien
gcaggcagtcaatccgccggatctt

SEQ ID NO: 1509165 - DNA, 25 bp, Homo sapien
tgaggccttgccactttagctgaaa

SEQ ID NO: 1509166 - DNA, 25 bp, Homo sapien
gttcattcagtctcatatcccaggg

SEQ ID NO: 1509167 - DNA, 25 bp, Homo sapien
aacagctcccgcctgagtatttagg

SEQ ID NO: 1509168 - DNA, 25 bp, Homo sapien
tgcacaaagtcgataccatggccag

SEQ ID NO: 1509169 - DNA, 25 bp, Homo sapien
gctcgaggctccgagccttctgcaa

SEQ ID NO: 1509170 - DNA, 25 bp, Homo sapien
gccacactggtaagctcgaggctcc

SEQ ID NO: 1509171 - DNA, 25 bp, Homo sapien
ggcacacaccctcccaaatctggct

SEQ ID NO: 1509172 - DNA, 25 bp, Homo sapien
cttgtgcaggagtatctgatggcca

SEQ ID NO: 1509173 - DNA, 25 bp, Homo sapien
gccccacactggcagcagtcaagaa

SEQ ID NO: 1509174 - DNA, 25 bp, Homo sapien
cacactggcagcagtcaagaattcg

SEQ ID NO: 1509175 - DNA, 25 bp, Homo sapien
cccacactggcagcagtcaagaatt

SEQ ID NO: 1509176 - DNA, 25 bp, Homo sapien
cactggcagcagtcaagaattcggc

SEQ ID NO: 1509177 - DNA, 25 bp, Homo sapien
cagcccagatctggctcttcagccc

SEQ ID NO: 1509178 - DNA, 25 bp, Homo sapien
cccagatctggctcttcagccctgt

SEQ ID NO: 1509179 - DNA, 25 bp, Homo sapien
tcagcccagatctggctcttcagcc

SEQ ID NO: 1509180 - DNA, 25 bp, Homo sapien
gcccagatctggctcttcagccctg

SEQ ID NO: 1509181 - DNA, 25 bp, Homo sapien
catgtcatctcttgaagcttcatct

SEQ ID NO: 1509182 - DNA, 25 bp, Homo sapien
ttattccctctcgaacatgtcatct

SEQ ID NO: 1509183 - DNA, 25 bp, Homo sapien
ttcatctgggacataacaagggctc

SEQ ID NO: 1509184 - DNA, 25 bp, Homo sapien
ttgaagcttcatctgggacataaca

SEQ ID NO: 1509185 - DNA, 25 bp, Homo sapien
aaactttggagatagtctagcagcg

SEQ ID NO: 1509186 - DNA, 25 bp, Homo sapien
tattctgggagtggagtttcaacgc

SEQ ID NO: 1509187 - DNA, 25 bp, Homo sapien
tggcagccttttggacctagtattc

SEQ ID NO: 1509188 - DNA, 25 bp, Homo sapien
tctagcagcggttctaggccagctc

SEQ ID NO: 1509189 - DNA, 25 bp, Homo sapien
cctgggactgctacgctcaggaagc

SEQ ID NO: 1509190 - DNA, 25 bp, Homo sapien
ctgggactgctacgctcaggaagcc

SEQ ID NO: 1509191 - DNA, 25 bp, Homo sapien
gccgcagtggcctgttcaggtctat

SEQ ID NO: 1509192 - DNA, 25 bp, Homo sapien
cctgttcaggtctatatgggaagag

SEQ ID NO: 1509193 - DNA, 25 bp, Homo sapien
catgagtctgtccatacaaggagcc

SEQ ID NO: 1509194 - DNA, 25 bp, Homo sapien
cagccatgagtctgtccatacaagg

SEQ ID NO: 1509195 - DNA, 25 bp, Homo sapien
aatagcagccatgagtctgtccata

SEQ ID NO: 1509196 - DNA, 25 bp, Homo sapien
gagtctgtccatacaaggagcctgg

SEQ ID NO: 1509197 - DNA, 25 bp, Homo sapien
gatgaacgcaacacaactcaaaggc

SEQ ID NO: 1509198 - DNA, 25 bp, Homo sapien
tagtaattcaactgctaggaagcat

SEQ ID NO: 1509199 - DNA, 25 bp, Homo sapien
caaagcttggtgtaataggatgtcc

SEQ ID NO: 1509200 - DNA, 25 bp, Homo sapien
cattagctgaaggtaacaaatacag

SEQ ID NO: 1509201 - DNA, 25 bp, Homo sapien
gaggacatgtgcgaccttggcagcc

SEQ ID NO: 1509202 - DNA, 25 bp, Homo sapien
taagcatgcatattcaggcacacag

SEQ ID NO: 1509203 - DNA, 25 bp, Homo sapien
cacacagataagagtgccatggcag

SEQ ID NO: 1509204 - DNA, 25 bp, Homo sapien
cctacggcccagttttcgagatgaa

SEQ ID NO: 1509205 - DNA, 25 bp, Homo sapien
agacacccgcaggttagcacatcct

SEQ ID NO: 1509206 - DNA, 25 bp, Homo sapien
cacagacacccgcaggttagcacat

SEQ ID NO: 1509207 - DNA, 25 bp, Homo sapien
cgcaggttagcacatcctgaacacc

SEQ ID NO: 1509208 - DNA, 25 bp, Homo sapien
cacccgcaggttagcacatcctgaa

SEQ ID NO: 1509209 - DNA, 25 bp, Homo sapien
ctcagctgctgagcgaacgggaaag

SEQ ID NO: 1509210 - DNA, 25 bp, Homo sapien
tcagctcagtcctgacggtggagac

SEQ ID NO: 1509211 - DNA, 25 bp, Homo sapien
gacgcagcgccctgtaattacgaca

SEQ ID NO: 1509212 - DNA, 25 bp, Homo sapien
tagcgaggcaggttcacaaagaacc

SEQ ID NO: 1509213 - DNA, 25 bp, Homo sapien
tggcaacagactgctgagcaccgtg

SEQ ID NO: 1509214 - DNA, 25 bp, Homo sapien
caacacagtgcagttgtcaacccag

SEQ ID NO: 1509215 - DNA, 25 bp, Homo sapien
gcagtgtaggacagctagcagcatc

SEQ ID NO: 1509216 - DNA, 25 bp, Homo sapien
agaggtgggcaagagcaaattctcc

SEQ ID NO: 1509217 - DNA, 25 bp, Homo sapien
gccagggaagagcaactcaaaatgg

SEQ ID NO: 1509218 - DNA, 25 bp, Homo sapien
aaaatggattcaaggagggtgtcag

SEQ ID NO: 1509219 - DNA, 25 bp, Homo sapien
aatggtttctggcaccgaagaggaa

SEQ ID NO: 1509220 - DNA, 25 bp, Homo sapien
caagcatggtgtagtcagagccgac

SEQ ID NO: 1509221 - DNA, 25 bp, Homo sapien
tatttcctggacgaagcagccaaaa

SEQ ID NO: 1509222 - DNA, 25 bp, Homo sapien
tctggggcctagagctcaacacatg

SEQ ID NO: 1509223 - DNA, 25 bp, Homo sapien
ggcatgcaattaaccgggccggaat

SEQ ID NO: 1509224 - DNA, 25 bp, Homo sapien
cacagaccagccataccatgggcaa

SEQ ID NO: 1509225 - DNA, 25 bp, Homo sapien
cagccataccatgggcaactgcaga

SEQ ID NO: 1509226 - DNA, 25 bp, Homo sapien
tgtcttccccaagtccacagaccag

SEQ ID NO: 1509227 - DNA, 25 bp, Homo sapien
tcatcgagcagacggaacaagagga

SEQ ID NO: 1509228 - DNA, 25 bp, Homo sapien
cttcatcgagcagacggaacaagag

SEQ ID NO: 1509229 - DNA, 25 bp, Homo sapien
ttcatcgagcagacggaacaagagg

SEQ ID NO: 1509230 - DNA, 25 bp, Homo sapien
catcgagcagacggaacaagaggac

SEQ ID NO: 1509231 - DNA, 25 bp, Homo sapien
tccagatctgtccacggtagagacg

SEQ ID NO: 1509232 - DNA, 25 bp, Homo sapien
tgaccacgaagctgggatccgtgct

SEQ ID NO: 1509233 - DNA, 25 bp, Homo sapien
gaacatatcaacagaggctcggcga

SEQ ID NO: 1509234 - DNA, 25 bp, Homo sapien
gagctgggatggagttgaacctcca

SEQ ID NO: 1509235 - DNA, 25 bp, Homo sapien
gggctcctcgcacacagctaatggg

SEQ ID NO: 1509236 - DNA, 25 bp, Homo sapien
caggcacagccgtcagaacttgtca

SEQ ID NO: 1509237 - DNA, 25 bp, Homo sapien
taagtaaacaatgtcggctttccgc

SEQ ID NO: 1509238 - DNA, 25 bp, Homo sapien
cacctaagggtgacaagtgcggcct

SEQ ID NO: 1509239 - DNA, 25 bp, Homo sapien
gcttctttcagaacggagctgccct

SEQ ID NO: 1509240 - DNA, 25 bp, Homo sapien
ggccccagagcaaaacagtctagct

SEQ ID NO: 1509241 - DNA, 25 bp, Homo sapien
ggcagtgcagatcgcttcacagggc

SEQ ID NO: 1509242 - DNA, 25 bp, Homo sapien
gagtattcctaacgcacccaggatg

SEQ ID NO: 1509243 - DNA, 25 bp, Homo sapien
gattaggaacagcttgcggtgcatg

SEQ ID NO: 1509244 - DNA, 25 bp, Homo sapien
ggaaggagaagaacccactcaggcc

SEQ ID NO: 1509245 - DNA, 25 bp, Homo sapien
aacacatcccgtgatatgagggccg

SEQ ID NO: 1509246 - DNA, 25 bp, Homo sapien
atgcaccaaggaaggagctgcccgt

SEQ ID NO: 1509247 - DNA, 25 bp, Homo sapien
ttggggagccttgccttgaggtcta

SEQ ID NO: 1509248 - DNA, 25 bp, Homo sapien
ctctggacaggtgacaggagctgca

SEQ ID NO: 1509249 - DNA, 25 bp, Homo sapien
gaggtctacacctgctctggacagg

SEQ ID NO: 1509250 - DNA, 25 bp, Homo sapien
cttgccttgaggtctacacctgctc

SEQ ID NO: 1509251 - DNA, 25 bp, Homo sapien
gagaatgtatcaggagcaaagttcc

SEQ ID NO: 1509252 - DNA, 25 bp, Homo sapien
atgtatcaggagcaaagttccccat

SEQ ID NO: 1509253 - DNA, 25 bp, Homo sapien
gaatgtatcaggagcaaagttcccc

SEQ ID NO: 1509254 - DNA, 25 bp, Homo sapien
aatgtatcaggagcaaagttcccca

SEQ ID NO: 1509255 - DNA, 25 bp, Homo sapien
tctccttgctggtttgaactatctg

SEQ ID NO: 1509256 - DNA, 25 bp, Homo sapien
ttgggcagtggtttgatgtccgcat

SEQ ID NO: 1509257 - DNA, 25 bp, Homo sapien
ccttgctggtttgaactatctgatt

SEQ ID NO: 1509258 - DNA, 25 bp, Homo sapien
gtggtttgatgtccgcatctccttg

SEQ ID NO: 1509259 - DNA, 25 bp, Homo sapien
tccagaccccggaagtcacaaaaca

SEQ ID NO: 1509260 - DNA, 25 bp, Homo sapien
ctccgtcacattccagaccccggaa

SEQ ID NO: 1509261 - DNA, 25 bp, Homo sapien
tctgtgatactctcaccagctccgt

SEQ ID NO: 1509262 - DNA, 25 bp, Homo sapien
gtcacattccagaccccggaagtca

SEQ ID NO: 1509263 - DNA, 25 bp, Homo sapien
tttctttgtcatgaacagcttccca

SEQ ID NO: 1509264 - DNA, 25 bp, Homo sapien
gaacgagagggtgatgaggtttgga

SEQ ID NO: 1509265 - DNA, 25 bp, Homo sapien
ctgggaagaacgagagggtgatgag

SEQ ID NO: 1509266 - DNA, 25 bp, Homo sapien
ggaagaacgagagggtgatgaggtt

SEQ ID NO: 1509267 - DNA, 25 bp, Homo sapien
gggaggtgatggaccgccgccccag

SEQ ID NO: 1509268 - DNA, 25 bp, Homo sapien
gaagttgggccctgatgctgttgca

SEQ ID NO: 1509269 - DNA, 25 bp, Homo sapien
ctccaggtccgccagggagaagttg

SEQ ID NO: 1509270 - DNA, 25 bp, Homo sapien
tagctgggactctccaggtccgcca

SEQ ID NO: 1509271 - DNA, 25 bp, Homo sapien
aaatgaatgccaaaaatctcgcaat

SEQ ID NO: 1509272 - DNA, 25 bp, Homo sapien
aatctcgcaattaatataaacaccc

SEQ ID NO: 1509273 - DNA, 25 bp, Homo sapien
ccgagcctggcctagtcccatattt

SEQ ID NO: 1509274 - DNA, 25 bp, Homo sapien
accgagcctggcctagtcccatatt

SEQ ID NO: 1509275 - DNA, 25 bp, Homo sapien
gtcatcgatggacttggggcgcttg

SEQ ID NO: 1509276 - DNA, 25 bp, Homo sapien
tcatcgatggacttggggcgcttgg

SEQ ID NO: 1509277 - DNA, 25 bp, Homo sapien
catcgatggacttggggcgcttggt

SEQ ID NO: 1509278 - DNA, 25 bp, Homo sapien
tgtcatcgatggacttggggcgctt

SEQ ID NO: 1509279 - DNA, 25 bp, Homo sapien
gatagaacacgtcatcaacagggct

SEQ ID NO: 1509280 - DNA, 25 bp, Homo sapien
gggatagaacacgtcatcaacaggg

SEQ ID NO: 1509281 - DNA, 25 bp, Homo sapien
tgtcccgggatagaacacgtcatca

SEQ ID NO: 1509282 - DNA, 25 bp, Homo sapien
gaacacgtcatcaacagggctctcc

SEQ ID NO: 1509283 - DNA, 25 bp, Homo sapien
tgcatccacatcgttgggccacccg

SEQ ID NO: 1509284 - DNA, 25 bp, Homo sapien
ctgcatccacatcgttgggccaccc

SEQ ID NO: 1509285 - DNA, 25 bp, Homo sapien
cacaggcagcgggtggtgggtgaaa

SEQ ID NO: 1509286 - DNA, 25 bp, Homo sapien
ggtgaaagccatgcgcggggagctg

SEQ ID NO: 1509287 - DNA, 25 bp, Homo sapien
tgggtgaaagccatgcgcggggagc

SEQ ID NO: 1509288 - DNA, 25 bp, Homo sapien
caggcagcgggtggtgggtgaaagc

SEQ ID NO: 1509289 - DNA, 25 bp, Homo sapien
tctgtttccaatcagctcgctcttg

SEQ ID NO: 1509290 - DNA, 25 bp, Homo sapien
tcctgctgcctgtgtagagggcctg

SEQ ID NO: 1509291 - DNA, 25 bp, Homo sapien
tcataaaagctgaggtggagccgga

SEQ ID NO: 1509292 - DNA, 25 bp, Homo sapien
ggctgaggaaacttggcttctctct

SEQ ID NO: 1509293 - DNA, 25 bp, Homo sapien
tggtagcggatggtcgggtgcgtga

SEQ ID NO: 1509294 - DNA, 25 bp, Homo sapien
gtgcgtgaaatacgggctcgactgc

SEQ ID NO: 1509295 - DNA, 25 bp, Homo sapien
tccgagcacacaaactgcacaaact

SEQ ID NO: 1509296 - DNA, 25 bp, Homo sapien
cgactgctggatgatggacgtggag

SEQ ID NO: 1509297 - DNA, 25 bp, Homo sapien
ccatgatagacaagccctggcataa

SEQ ID NO: 1509298 - DNA, 25 bp, Homo sapien
ggaccatgatagacaagccctggca

SEQ ID NO: 1509299 - DNA, 25 bp, Homo sapien
tctccggaccatgatagacaagccc

SEQ ID NO: 1509300 - DNA, 25 bp, Homo sapien
cacctctccggaccatgatagacaa

SEQ ID NO: 1509301 - DNA, 25 bp, Homo sapien
tgctcctcactagggatggtcttcc

SEQ ID NO: 1509302 - DNA, 25 bp, Homo sapien
tacagagcactggatggtctcacac

SEQ ID NO: 1509303 - DNA, 25 bp, Homo sapien
cttgcagccccgaggtttaagagga

SEQ ID NO: 1509304 - DNA, 25 bp, Homo sapien
tctccgtggcagctatgtggatcgg

SEQ ID NO: 1509305 - DNA, 25 bp, Homo sapien
gaaagcaggtaaggtaatgttccag

SEQ ID NO: 1509306 - DNA, 25 bp, Homo sapien
gctgggcataggctggtagctcccc

SEQ ID NO: 1509307 - DNA, 25 bp, Homo sapien
catggccctaaaagtggacagagct

SEQ ID NO: 1509308 - DNA, 25 bp, Homo sapien
aggcctctctgcggcatatcccaga

SEQ ID NO: 1509309 - DNA, 25 bp, Homo sapien
tcaccttacagataaacacgtgggc

SEQ ID NO: 1509310 - DNA, 25 bp, Homo sapien
gagtcatgctctcccattgggccct

SEQ ID NO: 1509311 - DNA, 25 bp, Homo sapien
tcatgttcacttggcagtctcttcc

SEQ ID NO: 1509312 - DNA, 25 bp, Homo sapien
gctgttcagacaatgatggtaagac

SEQ ID NO: 1509313 - DNA, 25 bp, Homo sapien
cagagaaaggtgatgcgacgcctcc

SEQ ID NO: 1509314 - DNA, 25 bp, Homo sapien
taagcacgtgggatcgacttgtcct

SEQ ID NO: 1509315 - DNA, 25 bp, Homo sapien
caggtaacagtgcaggtcagagcgt

SEQ ID NO: 1509316 - DNA, 25 bp, Homo sapien
tttaaagtcacggaagcccaggctg

SEQ ID NO: 1509317 - DNA, 25 bp, Homo sapien
tggcctgcgctcttcatcctaaacc

SEQ ID NO: 1509318 - DNA, 25 bp, Homo sapien
ggcctgcgctcttcatcctaaacca

SEQ ID NO: 1509319 - DNA, 25 bp, Homo sapien
ggcctggcctgcgctcttcatccta

SEQ ID NO: 1509320 - DNA, 25 bp, Homo sapien
cctggcctgcgctcttcatcctaaa

SEQ ID NO: 1509321 - DNA, 25 bp, Homo sapien
tacaacgccctcagacgccatggat

SEQ ID NO: 1509322 - DNA, 25 bp, Homo sapien
gccatggatgctcggctgccaggat

SEQ ID NO: 1509323 - DNA, 25 bp, Homo sapien
aaatccatcgctgccagctctagtg

SEQ ID NO: 1509324 - DNA, 25 bp, Homo sapien
ctagtgcccgtgaggttcttcagga

SEQ ID NO: 1509325 - DNA, 25 bp, Homo sapien
tgtgccacctagcaaatacgtgcag

SEQ ID NO: 1509326 - DNA, 25 bp, Homo sapien
gcagctgtacctagaactctcacac

SEQ ID NO: 1509327 - DNA, 25 bp, Homo sapien
agcaggaaagatgagcgcgctcacc

SEQ ID NO: 1509328 - DNA, 25 bp, Homo sapien
gttcacctaaccaaggacggcaggc

SEQ ID NO: 1509329 - DNA, 25 bp, Homo sapien
gactttgccctggccgctaccgttg

SEQ ID NO: 1509330 - DNA, 25 bp, Homo sapien
cgggactttgccctggccgctaccg

SEQ ID NO: 1509331 - DNA, 25 bp, Homo sapien
gcggcggcggtagcaaaaatgaccc

SEQ ID NO: 1509332 - DNA, 25 bp, Homo sapien
ctttgccctggccgctaccgttggg

SEQ ID NO: 1509333 - DNA, 25 bp, Homo sapien
tggaggagtcaaggcggcgccgtct

SEQ ID NO: 1509334 - DNA, 25 bp, Homo sapien
gatttggaatcaggcataggaaggg

SEQ ID NO: 1509335 - DNA, 25 bp, Homo sapien
caaggcggcgccgtctggggcagtg

SEQ ID NO: 1509336 - DNA, 25 bp, Homo sapien
aggagtcaaggcggcgccgtctggg

SEQ ID NO: 1509337 - DNA, 25 bp, Homo sapien
gtggcaaggctcaggcctatggcat

SEQ ID NO: 1509338 - DNA, 25 bp, Homo sapien
cccaatggaggtctgagccaggtag

SEQ ID NO: 1509339 - DNA, 25 bp, Homo sapien
ggctcaggcctatggcattctcctc

SEQ ID NO: 1509340 - DNA, 25 bp, Homo sapien
ccaaagggtgcccaatggaggtctg

SEQ ID NO: 1509341 - DNA, 25 bp, Homo sapien
gggtccgatgctgacaaaccggttg

SEQ ID NO: 1509342 - DNA, 25 bp, Homo sapien
tccgatgctgacaaaccggttggca

SEQ ID NO: 1509343 - DNA, 25 bp, Homo sapien
gatgctgacaaaccggttggcagag

SEQ ID NO: 1509344 - DNA, 25 bp, Homo sapien
tgccgtcccggggtccgatgctgac

SEQ ID NO: 1509345 - DNA, 25 bp, Homo sapien
gcctgctcaggggccctggaccccc

SEQ ID NO: 1509346 - DNA, 25 bp, Homo sapien
gctcaggggccctggacccccgctg

SEQ ID NO: 1509347 - DNA, 25 bp, Homo sapien
ccgctgggactccttcctcctacct

SEQ ID NO: 1509348 - DNA, 25 bp, Homo sapien
gactccttcctcctacctcctggag

SEQ ID NO: 1509349 - DNA, 25 bp, Homo sapien
catttccttcatatcgccagcaggg

SEQ ID NO: 1509350 - DNA, 25 bp, Homo sapien
cagcttcagtccctagtagcgccag

SEQ ID NO: 1509351 - DNA, 25 bp, Homo sapien
ccatggtgctggatcctctaccctc

SEQ ID NO: 1509352 - DNA, 25 bp, Homo sapien
gatcctctaccctcagggcaccaga

SEQ ID NO: 1509353 - DNA, 25 bp, Homo sapien
gctggccttcccgtgggcactgtgc

SEQ ID NO: 1509354 - DNA, 25 bp, Homo sapien
ggctgacgacgtgtaatttttgctt

SEQ ID NO: 1509355 - DNA, 25 bp, Homo sapien
cctttcgaggaacctcttcttctca

SEQ ID NO: 1509356 - DNA, 25 bp, Homo sapien
gctgagtggctgacgacgtgtaatt

SEQ ID NO: 1509357 - DNA, 25 bp, Homo sapien
tttgtcgatcttatcagaggaacca

SEQ ID NO: 1509358 - DNA, 25 bp, Homo sapien
tgcacagctccaccgagaccccttc

SEQ ID NO: 1509359 - DNA, 25 bp, Homo sapien
cagagtccatgtcgcgtgtttcttt

SEQ ID NO: 1509360 - DNA, 25 bp, Homo sapien
ttgacagagtccatgtcgcgtgttt

SEQ ID NO: 1509361 - DNA, 25 bp, Homo sapien
ccgagaccccttccaagggctctct

SEQ ID NO: 1509362 - DNA, 25 bp, Homo sapien
gggaggaaggcagttctgcatcctt

SEQ ID NO: 1509363 - DNA, 25 bp, Homo sapien
gcagttctgcatcctttcttgcttt

SEQ ID NO: 1509364 - DNA, 25 bp, Homo sapien
aaggcagttctgcatcctttcttgc

SEQ ID NO: 1509365 - DNA, 25 bp, Homo sapien
gaggaaggcagttctgcatcctttc

SEQ ID NO: 1509366 - DNA, 25 bp, Homo sapien
gaggccaggccccttcagaattgtg

SEQ ID NO: 1509367 - DNA, 25 bp, Homo sapien
gagcattccgactttttcctacgga

SEQ ID NO: 1509368 - DNA, 25 bp, Homo sapien
tcatctttacaagctggccctccag

SEQ ID NO: 1509369 - DNA, 25 bp, Homo sapien
tgagggatctaaaccccatcatctt

SEQ ID NO: 1509370 - DNA, 25 bp, Homo sapien
gtggcaggaaggaggccctcctggc

SEQ ID NO: 1509371 - DNA, 25 bp, Homo sapien
ctcgtggcaggaaggaggccctcct

SEQ ID NO: 1509372 - DNA, 25 bp, Homo sapien
tcgtggcaggaaggaggccctcctg

SEQ ID NO: 1509373 - DNA, 25 bp, Homo sapien
cgtggcaggaaggaggccctcctgg

SEQ ID NO: 1509374 - DNA, 25 bp, Homo sapien
gggcaggaactgatggggcggagcg

SEQ ID NO: 1509375 - DNA, 25 bp, Homo sapien
ggtggtggcttagcgcggcagcggc

SEQ ID NO: 1509376 - DNA, 25 bp, Homo sapien
caggtggtggcttagcgcggcagcg

SEQ ID NO: 1509377 - DNA, 25 bp, Homo sapien
tggggcggagcgagggcacctgcat

SEQ ID NO: 1509378 - DNA, 25 bp, Homo sapien
aacaccacttgggaaaggagcagcc

SEQ ID NO: 1509379 - DNA, 25 bp, Homo sapien
aatcattgcactttgaccgcgcgtc

SEQ ID NO: 1509380 - DNA, 25 bp, Homo sapien
tgaccctgtttagccaaccgaactg

SEQ ID NO: 1509381 - DNA, 25 bp, Homo sapien
gagccgcgaggacattacaacaaaa

SEQ ID NO: 1509382 - DNA, 25 bp, Homo sapien
ttaaactcaacaaagaagggatatg

SEQ ID NO: 1509383 - DNA, 25 bp, Homo sapien
gccggagcagtccagccgccggggg

SEQ ID NO: 1509384 - DNA, 25 bp, Homo sapien
actcaacaaagaagggatatgcgta

SEQ ID NO: 1509385 - DNA, 25 bp, Homo sapien
aaactcaacaaagaagggatatgcg

SEQ ID NO: 1509386 - DNA, 25 bp, Homo sapien
caaatcgacctgtctgcgtggctgg

SEQ ID NO: 1509387 - DNA, 25 bp, Homo sapien
tgagaacaaggcactaggtcggccg

SEQ ID NO: 1509388 - DNA, 25 bp, Homo sapien
tcaagttggcgtctggctcaaagaa

SEQ ID NO: 1509389 - DNA, 25 bp, Homo sapien
gaaactaccaacttgctgagcgcgc

SEQ ID NO: 1509390 - DNA, 25 bp, Homo sapien
tgcattccgctaggacactgaaaac

SEQ ID NO: 1509391 - DNA, 25 bp, Homo sapien
tatatactgcgtttcttagcctaag

SEQ ID NO: 1509392 - DNA, 25 bp, Homo sapien
gacgggctggctgcctacttgcatt

SEQ ID NO: 1509393 - DNA, 25 bp, Homo sapien
caaaacagacagtaaactacccttg

SEQ ID NO: 1509394 - DNA, 25 bp, Homo sapien
gcaaagatggtataacagaagcgca

SEQ ID NO: 1509395 - DNA, 25 bp, Homo sapien
atacacattagccattcaatggaga

SEQ ID NO: 1509396 - DNA, 25 bp, Homo sapien
tggtataacagaagcgcagtgacgg

SEQ ID NO: 1509397 - DNA, 25 bp, Homo sapien
gccggagagagtcaggcaaagatgg

SEQ ID NO: 1509398 - DNA, 25 bp, Homo sapien
cgcggcggccattcattgtgggcca

SEQ ID NO: 1509399 - DNA, 25 bp, Homo sapien
cagccgcggcggccattcattgtgg

SEQ ID NO: 1509400 - DNA, 25 bp, Homo sapien
gcggccattcattgtgggccaggcc

SEQ ID NO: 1509401 - DNA, 25 bp, Homo sapien
gtcccggcgggctccgcagcggcgg

SEQ ID NO: 1509402 - DNA, 25 bp, Homo sapien
gatttatttagcaagctggccattt

SEQ ID NO: 1509403 - DNA, 25 bp, Homo sapien
actgcgtctgaccaacaaagccctt

SEQ ID NO: 1509404 - DNA, 25 bp, Homo sapien
tcacaaaaccctgcgattataggca

SEQ ID NO: 1509405 - DNA, 25 bp, Homo sapien
tggcttgattctccctgcttgactt

SEQ ID NO: 1509406 - DNA, 25 bp, Homo sapien
gctgttcgtctagttccccagtggc

SEQ ID NO: 1509407 - DNA, 25 bp, Homo sapien
agagcagacccatctctgggaaccc

SEQ ID NO: 1509408 - DNA, 25 bp, Homo sapien
gattagcaattggtccaaatagctc

SEQ ID NO: 1509409 - DNA, 25 bp, Homo sapien
aaatagctcagccaattagcgcacg

SEQ ID NO: 1509410 - DNA, 25 bp, Homo sapien
ggtatgtcaaccaagcagatggcct

SEQ ID NO: 1509411 - DNA, 25 bp, Homo sapien
tcctggcctacagagtgtggacatc

SEQ ID NO: 1509412 - DNA, 25 bp, Homo sapien
tgatgaactgcatcctcctttgtgg

SEQ ID NO: 1509413 - DNA, 25 bp, Homo sapien
ggacacagccctaaaaggaccagct

SEQ ID NO: 1509414 - DNA, 25 bp, Homo sapien
caaaaagtggtaaggccaagattca

SEQ ID NO: 1509415 - DNA, 25 bp, Homo sapien
tgccaccatcctacgaaaacacaaa

SEQ ID NO: 1509416 - DNA, 25 bp, Homo sapien
tggaggctggatctaggaatcccag

SEQ ID NO: 1509417 - DNA, 25 bp, Homo sapien
gatatgtcctgagctatctgctgcc

SEQ ID NO: 1509418 - DNA, 25 bp, Homo sapien
ctgagtagctgggcctacaggcgtg

SEQ ID NO: 1509419 - DNA, 25 bp, Homo sapien
gatgcggtttcaccacataggccag

SEQ ID NO: 1509420 - DNA, 25 bp, Homo sapien
ccagggtcaagtgattctcagcctc

SEQ ID NO: 1509421 - DNA, 25 bp, Homo sapien
tcccagggtcaagtgattctcagcc

SEQ ID NO: 1509422 - DNA, 25 bp, Homo sapien
cgttccgtctgaaagggctgctgtg

SEQ ID NO: 1509423 - DNA, 25 bp, Homo sapien
cagtggtcctaactgggcagagtgc

SEQ ID NO: 1509424 - DNA, 25 bp, Homo sapien
taattctatagggtctctagagggc

SEQ ID NO: 1509425 - DNA, 25 bp, Homo sapien
tcattagcaactccactcagatctg

SEQ ID NO: 1509426 - DNA, 25 bp, Homo sapien
tacatgagcaggaactggtcgccca

SEQ ID NO: 1509427 - DNA, 25 bp, Homo sapien
gaagttcgggatctccatctgcagt

SEQ ID NO: 1509428 - DNA, 25 bp, Homo sapien
gctgttcattgaggcactccaggat

SEQ ID NO: 1509429 - DNA, 25 bp, Homo sapien
tggtgtacatgttgcagatctgccg

SEQ ID NO: 1509430 - DNA, 25 bp, Homo sapien
tcagccgggagagacgccaggtctt

SEQ ID NO: 1509431 - DNA, 25 bp, Homo sapien
gtggcagcggttcccaatctggttg

SEQ ID NO: 1509432 - DNA, 25 bp, Homo sapien
aggtcttgccgaacccggatgcgat

SEQ ID NO: 1509433 - DNA, 25 bp, Homo sapien
aatctggttgataagttcagccggg

SEQ ID NO: 1509434 - DNA, 25 bp, Homo sapien
tcagctgcgcccttgtgatgtacac

SEQ ID NO: 1509435 - DNA, 25 bp, Homo sapien
aggagccgccgcagtaggaccttgt

SEQ ID NO: 1509436 - DNA, 25 bp, Homo sapien
cctgcgctgacgtggcagttcatca

SEQ ID NO: 1509437 - DNA, 25 bp, Homo sapien
cttgtgccgcgtgcctgcgctgacg

SEQ ID NO: 1509438 - DNA, 25 bp, Homo sapien
gcttccgacggggatcgttggtaga

SEQ ID NO: 1509439 - DNA, 25 bp, Homo sapien
tagaagagcggatgccggtgccgca

SEQ ID NO: 1509440 - DNA, 25 bp, Homo sapien
acagcgtggagcacgcggctgtcca

SEQ ID NO: 1509441 - DNA, 25 bp, Homo sapien
acgcggctgtccaggggcttccgac

SEQ ID NO: 1509442 - DNA, 25 bp, Homo sapien
gcatctgcgactccctctcaaaggg

SEQ ID NO: 1509443 - DNA, 25 bp, Homo sapien
tcaaaggggaaacgagtgaggccac

SEQ ID NO: 1509444 - DNA, 25 bp, Homo sapien
ggccaggtgactcccacaaggccta

SEQ ID NO: 1509445 - DNA, 25 bp, Homo sapien
ggacaccacactacgtgcacccaac

SEQ ID NO: 1509446 - DNA, 25 bp, Homo sapien
ccagctcttgcgcacgacgcggcgg

SEQ ID NO: 1509447 - DNA, 25 bp, Homo sapien
gttggtgcacatgtcggccgcgatg

SEQ ID NO: 1509448 - DNA, 25 bp, Homo sapien
tcttgcgcacgacgcggcgggcgtt

SEQ ID NO: 1509449 - DNA, 25 bp, Homo sapien
gccgcgatggcattcatctcgctct

SEQ ID NO: 1509450 - DNA, 25 bp, Homo sapien
gaaggtggtgtaggcgtcatcctca

SEQ ID NO: 1509451 - DNA, 25 bp, Homo sapien
tcatgtccggctcgatcttgcccgt

SEQ ID NO: 1509452 - DNA, 25 bp, Homo sapien
cttgcccgtttcactgatgaaggtg

SEQ ID NO: 1509453 - DNA, 25 bp, Homo sapien
tggcggtctcgaagccatgctccac

SEQ ID NO: 1509454 - DNA, 25 bp, Homo sapien
gactggagtcctaccatggaaacac

SEQ ID NO: 1509455 - DNA, 25 bp, Homo sapien
gggacaatagacacagccccattgg

SEQ ID NO: 1509456 - DNA, 25 bp, Homo sapien
cacctgaggtcggttgtgcaatttc

SEQ ID NO: 1509457 - DNA, 25 bp, Homo sapien
gacagtagctcatgaccaagatggc

SEQ ID NO: 1509458 - DNA, 25 bp, Homo sapien
ctaaggtgcttgtgctttagctggg

SEQ ID NO: 1509459 - DNA, 25 bp, Homo sapien
tttagctgggggtgtcaatatcccc

SEQ ID NO: 1509460 - DNA, 25 bp, Homo sapien
actaaggtgcttgtgctttagctgg

SEQ ID NO: 1509461 - DNA, 25 bp, Homo sapien
atatcccccactcaggccggctggg

SEQ ID NO: 1509462 - DNA, 25 bp, Homo sapien
aggcacaaccctgtctttggctctc

SEQ ID NO: 1509463 - DNA, 25 bp, Homo sapien
ggtaaggcacaaccctgtctttggc

SEQ ID NO: 1509464 - DNA, 25 bp, Homo sapien
gtggctcctggggtaaggcacaacc

SEQ ID NO: 1509465 - DNA, 25 bp, Homo sapien
caggcaggggcctacccaggacaag

SEQ ID NO: 1509466 - DNA, 25 bp, Homo sapien
tgccttatacacgtgccaacctgga

SEQ ID NO: 1509467 - DNA, 25 bp, Homo sapien
caggaagttggccaaagtatcccac

SEQ ID NO: 1509468 - DNA, 25 bp, Homo sapien
accaagcactttggagctggcctcg

SEQ ID NO: 1509469 - DNA, 25 bp, Homo sapien
agtggtgtgccatcgccgtgctagt

SEQ ID NO: 1509470 - DNA, 25 bp, Homo sapien
atccgaggaactgggccttgaaccg

SEQ ID NO: 1509471 - DNA, 25 bp, Homo sapien
tgcgcaggaacaatccgaggaactg

SEQ ID NO: 1509472 - DNA, 25 bp, Homo sapien
tgaagttgcgcaggaacaatccgag

SEQ ID NO: 1509473 - DNA, 25 bp, Homo sapien
gggaaactgaagttgcgcaggaaca

SEQ ID NO: 1509474 - DNA, 25 bp, Homo sapien
gctaacagcgcttacaacgtgccag

SEQ ID NO: 1509475 - DNA, 25 bp, Homo sapien
cagaatgcgatttacccagcaggga

SEQ ID NO: 1509476 - DNA, 25 bp, Homo sapien
gccgcttccggttgcccatattagg

SEQ ID NO: 1509477 - DNA, 25 bp, Homo sapien
catattaggacagggcccgtgatcg

SEQ ID NO: 1509478 - DNA, 25 bp, Homo sapien
acactgctaggacgctctgcccagg

SEQ ID NO: 1509479 - DNA, 25 bp, Homo sapien
ccaaccgaaggacgcatccgggctt

SEQ ID NO: 1509480 - DNA, 25 bp, Homo sapien
aggtgcactccggacaacgggctcg

SEQ ID NO: 1509481 - DNA, 25 bp, Homo sapien
ggctttccaactcgtcgcggccaaa

SEQ ID NO: 1509482 - DNA, 25 bp, Homo sapien
cacaccgacagggtcatgatgcgct

SEQ ID NO: 1509483 - DNA, 25 bp, Homo sapien
gtgatacatcttccacaccgacagg

SEQ ID NO: 1509484 - DNA, 25 bp, Homo sapien
cttggccgagaggtagagctcccgg

SEQ ID NO: 1509485 - DNA, 25 bp, Homo sapien
ccaccgcgctgcatgcgggagtgat

SEQ ID NO: 1509486 - DNA, 25 bp, Homo sapien
gcaacgacacctcgggctcgagggc

SEQ ID NO: 1509487 - DNA, 25 bp, Homo sapien
gagggcggccggcaacgacacctcg

SEQ ID NO: 1509488 - DNA, 25 bp, Homo sapien
tctcggccgtggactcggcttctcg

SEQ ID NO: 1509489 - DNA, 25 bp, Homo sapien
ctgtctcggccgtggactcggcttc

SEQ ID NO: 1509490 - DNA, 25 bp, Homo sapien
agcacgttgagcatgctgtccgccg

SEQ ID NO: 1509491 - DNA, 25 bp, Homo sapien
cattggctccggaaacgggtgctca

SEQ ID NO: 1509492 - DNA, 25 bp, Homo sapien
tgctgctgcgtcgtttgcggctgac

SEQ ID NO: 1509493 - DNA, 25 bp, Homo sapien
gatcggcgacttcggatgacgctcc

SEQ ID NO: 1509494 - DNA, 25 bp, Homo sapien
aaaatgaagtccgaccctgaggaga

SEQ ID NO: 1509495 - DNA, 25 bp, Homo sapien
tgtgaaagtagatcagtccccgctc

SEQ ID NO: 1509496 - DNA, 25 bp, Homo sapien
gaattctccgaggttggaaacgcaa

SEQ ID NO: 1509497 - DNA, 25 bp, Homo sapien
gagagcgaaaggttcacgtcccagt

SEQ ID NO: 1509498 - DNA, 25 bp, Homo sapien
ggcttcatatccaaccctcatggga

SEQ ID NO: 1509499 - DNA, 25 bp, Homo sapien
tatctgtttataaggtagtgtccgc

SEQ ID NO: 1509500 - DNA, 25 bp, Homo sapien
aaggcagcgcgcagactttagtggc

SEQ ID NO: 1509501 - DNA, 25 bp, Homo sapien
gagggaatttctggtcccaaacagc

SEQ ID NO: 1509502 - DNA, 25 bp, Homo sapien
tcccgggttcctgattatcctgagt

SEQ ID NO: 1509503 - DNA, 25 bp, Homo sapien
gggttcctgattatcctgagtcagc

SEQ ID NO: 1509504 - DNA, 25 bp, Homo sapien
gttcctgattatcctgagtcagcct

SEQ ID NO: 1509505 - DNA, 25 bp, Homo sapien
ccgggttcctgattatcctgagtca

SEQ ID NO: 1509506 - DNA, 25 bp, Homo sapien
cattccctcaccgatgtcagctgag

SEQ ID NO: 1509507 - DNA, 25 bp, Homo sapien
cagccatcgcggaggagagactgca

SEQ ID NO: 1509508 - DNA, 25 bp, Homo sapien
tgaagtacacggttactgtgatgac

SEQ ID NO: 1509509 - DNA, 25 bp, Homo sapien
tgtgatgacgaatcactcccattcc

SEQ ID NO: 1509510 - DNA, 25 bp, Homo sapien
ggccacaagggtgtcccgcagagac

SEQ ID NO: 1509511 - DNA, 25 bp, Homo sapien
ccctcggccaaaagagaccctcctg

SEQ ID NO: 1509512 - DNA, 25 bp, Homo sapien
gaccccagactctggagaggccagg

SEQ ID NO: 1509513 - DNA, 25 bp, Homo sapien
tcggccaaaagagaccctcctgggc

SEQ ID NO: 1509514 - DNA, 25 bp, Homo sapien
ggaagggcctgcacgaaccctacag

SEQ ID NO: 1509515 - DNA, 25 bp, Homo sapien
ggctccgactacgacgaggccgatg

SEQ ID NO: 1509516 - DNA, 25 bp, Homo sapien
tggccggcatctggcccgcacgtgt

SEQ ID NO: 1509517 - DNA, 25 bp, Homo sapien
acgatgattggtgctaagcccgggc

SEQ ID NO: 1509518 - DNA, 25 bp, Homo sapien
tggtaccagcactccgcggcggggc

SEQ ID NO: 1509519 - DNA, 25 bp, Homo sapien
ctggtaccagcactccgcggcgggg

SEQ ID NO: 1509520 - DNA, 25 bp, Homo sapien
taccagcactccgcggcggggccgc

SEQ ID NO: 1509521 - DNA, 25 bp, Homo sapien
ggtaccagcactccgcggcggggcc

SEQ ID NO: 1509522 - DNA, 25 bp, Homo sapien
cttctcagaggaatgatgtggtctg

SEQ ID NO: 1509523 - DNA, 25 bp, Homo sapien
gggtcagactgaaacggggccatcc

SEQ ID NO: 1509524 - DNA, 25 bp, Homo sapien
ggccaagccagggattgggtgtggg

SEQ ID NO: 1509525 - DNA, 25 bp, Homo sapien
tcagaggaatgatgtggtctgtgcc

SEQ ID NO: 1509526 - DNA, 25 bp, Homo sapien
acaagctcgctctggttgcagggca

SEQ ID NO: 1509527 - DNA, 25 bp, Homo sapien
tggtcatgtgactagacaagctcgc

SEQ ID NO: 1509528 - DNA, 25 bp, Homo sapien
taaaactgggagataggctgagcac

SEQ ID NO: 1509529 - DNA, 25 bp, Homo sapien
tgatgcaaagacagccgagaaaggc

SEQ ID NO: 1509530 - DNA, 25 bp, Homo sapien
tataaagagcttcatgtccaatcag

SEQ ID NO: 1509531 - DNA, 25 bp, Homo sapien
tcagctgggtctaaggcagccctat

SEQ ID NO: 1509532 - DNA, 25 bp, Homo sapien
ataagttaggtaagaggccaggtgc

SEQ ID NO: 1509533 - DNA, 25 bp, Homo sapien
tcccatgtgggacatgacaccctca

SEQ ID NO: 1509534 - DNA, 25 bp, Homo sapien
tctgggctaccatgctaagatggcc

SEQ ID NO: 1509535 - DNA, 25 bp, Homo sapien
caaggtggcaccctagttctgggta

SEQ ID NO: 1509536 - DNA, 25 bp, Homo sapien
catggtccctgagttccaaggtggc

SEQ ID NO: 1509537 - DNA, 25 bp, Homo sapien
ttctgggtagccattccaagacggt

SEQ ID NO: 1509538 - DNA, 25 bp, Homo sapien
ggaagctccaaggtatccacatggc

SEQ ID NO: 1509539 - DNA, 25 bp, Homo sapien
tggcgtgagtttctgtccataccca

SEQ ID NO: 1509540 - DNA, 25 bp, Homo sapien
gaaattctgtgccaaaagtgaggtc

SEQ ID NO: 1509541 - DNA, 25 bp, Homo sapien
tactggctgggcctcaagatgaacc

SEQ ID NO: 1509542 - DNA, 25 bp, Homo sapien
tcaacaacaagtcccagcgatgggt

SEQ ID NO: 1509543 - DNA, 25 bp, Homo sapien
gactttgcatgatatctgtgaacta

SEQ ID NO: 1509544 - DNA, 25 bp, Homo sapien
ggatttcatgggagtattaagctta

SEQ ID NO: 1509545 - DNA, 25 bp, Homo sapien
ggtcactgattctgcggtttgccac

SEQ ID NO: 1509546 - DNA, 25 bp, Homo sapien
ctatataaggggagctgaaggccac

SEQ ID NO: 1509547 - DNA, 25 bp, Homo sapien
gacattcttaccaggtctgttaggg

SEQ ID NO: 1509548 - DNA, 25 bp, Homo sapien
gggcaggtacgagaatgcttactcc

SEQ ID NO: 1509549 - DNA, 25 bp, Homo sapien
actccagcaccatctatataagggg

SEQ ID NO: 1509550 - DNA, 25 bp, Homo sapien
gaaacggagtctaactgagcatcca

SEQ ID NO: 1509551 - DNA, 25 bp, Homo sapien
tgtcaccagagcgtacatggcggcg

SEQ ID NO: 1509552 - DNA, 25 bp, Homo sapien
tcataccaatcagggtcctaacagg

SEQ ID NO: 1509553 - DNA, 25 bp, Homo sapien
gataacggctgtttgaggtcctcag

SEQ ID NO: 1509554 - DNA, 25 bp, Homo sapien
gctccacaggctgtgcggaaggcat

SEQ ID NO: 1509555 - DNA, 25 bp, Homo sapien
tgagggggggagtgctacaaaacca

SEQ ID NO: 1509556 - DNA, 25 bp, Homo sapien
ctccacaggctgtgcggaaggcatg

SEQ ID NO: 1509557 - DNA, 25 bp, Homo sapien
ggagtgctacaaaaccaggtctcac

SEQ ID NO: 1509558 - DNA, 25 bp, Homo sapien
gccctccggatgcaagctgacagat

SEQ ID NO: 1509559 - DNA, 25 bp, Homo sapien
gagttcttggcagtcgctttctgac

SEQ ID NO: 1509560 - DNA, 25 bp, Homo sapien
tttctgacctggacgagtggctgcc

SEQ ID NO: 1509561 - DNA, 25 bp, Homo sapien
cagagttgcacagttaacacagcgc

SEQ ID NO: 1509562 - DNA, 25 bp, Homo sapien
cttgaagccgggagaccaagatcat

SEQ ID NO: 1509563 - DNA, 25 bp, Homo sapien
ttcaaatgaggcacattgctcaaat

SEQ ID NO: 1509564 - DNA, 25 bp, Homo sapien
ggcacattgctcaaattttattact

SEQ ID NO: 1509565 - DNA, 25 bp, Homo sapien
aatgaggcacattgctcaaatttta

SEQ ID NO: 1509566 - DNA, 25 bp, Homo sapien
ttatcctttttgtctggtggttcta

SEQ ID NO: 1509567 - DNA, 25 bp, Homo sapien
ttctcactggtttttctgggggcca

SEQ ID NO: 1509568 - DNA, 25 bp, Homo sapien
tccaccttatctgagttgggaaggt

SEQ ID NO: 1509569 - DNA, 25 bp, Homo sapien
tttgattctcttgctttcttggggc

SEQ ID NO: 1509570 - DNA, 25 bp, Homo sapien
gggcaccttttccaccttatctgag

SEQ ID NO: 1509571 - DNA, 25 bp, Homo sapien
ttttcctgtggatctcaggatcttg

SEQ ID NO: 1509572 - DNA, 25 bp, Homo sapien
tcctgtggatctcaggatcttggct

SEQ ID NO: 1509573 - DNA, 25 bp, Homo sapien
ctttggacttcccattgagcccagc

SEQ ID NO: 1509574 - DNA, 25 bp, Homo sapien
actttggacttcccattgagcccag

SEQ ID NO: 1509575 - DNA, 25 bp, Homo sapien
cagtgaagacccgagcaggagatct

SEQ ID NO: 1509576 - DNA, 25 bp, Homo sapien
cttgatgttctgtctgcgctgggtg

SEQ ID NO: 1509577 - DNA, 25 bp, Homo sapien
gagatcttggccgaggctccttgat

SEQ ID NO: 1509578 - DNA, 25 bp, Homo sapien
atattgattaagctcctgggactgc

SEQ ID NO: 1509579 - DNA, 25 bp, Homo sapien
gaagaacaagaagtgtacaagtttc

SEQ ID NO: 1509580 - DNA, 25 bp, Homo sapien
aggaagaacaagaagtgtacaagtt

SEQ ID NO: 1509581 - DNA, 25 bp, Homo sapien
tctgttctggaacatcatccaactc

SEQ ID NO: 1509582 - DNA, 25 bp, Homo sapien
gaacatcatccaactcttgtccaga

SEQ ID NO: 1509583 - DNA, 25 bp, Homo sapien
gctgatggaagtcctggtaagccct

SEQ ID NO: 1509584 - DNA, 25 bp, Homo sapien
catttgttggaccttcagtctgagc

SEQ ID NO: 1509585 - DNA, 25 bp, Homo sapien
aaattaggtgcctgggatgacactc

SEQ ID NO: 1509586 - DNA, 25 bp, Homo sapien
aagtttatgttgtgtgaattttgcc

SEQ ID NO: 1509587 - DNA, 25 bp, Homo sapien
ttaaagagttttgccagcgtggtgg

SEQ ID NO: 1509588 - DNA, 25 bp, Homo sapien
taatctactaacctgtgcacttaaa

SEQ ID NO: 1509589 - DNA, 25 bp, Homo sapien
ctgggatttctgagcgaggcccgtg

SEQ ID NO: 1509590 - DNA, 25 bp, Homo sapien
ggcccgtggatgttgaagtcttcct

SEQ ID NO: 1509591 - DNA, 25 bp, Homo sapien
tgttgaagtcttcctgggtccccga

SEQ ID NO: 1509592 - DNA, 25 bp, Homo sapien
atttctgagcgaggcccgtggatgt

SEQ ID NO: 1509593 - DNA, 25 bp, Homo sapien
ccagagctcacaggaccaagggact

SEQ ID NO: 1509594 - DNA, 25 bp, Homo sapien
tttccagagctcacaggaccaaggg

SEQ ID NO: 1509595 - DNA, 25 bp, Homo sapien
gctttccagagctcacaggaccaag

SEQ ID NO: 1509596 - DNA, 25 bp, Homo sapien
aggaccaagggactgagggagagcc

SEQ ID NO: 1509597 - DNA, 25 bp, Homo sapien
ggcctcaggcttcgtgttgtttatt

SEQ ID NO: 1509598 - DNA, 25 bp, Homo sapien
gcaggtgctgtgattgttattccat

SEQ ID NO: 1509599 - DNA, 25 bp, Homo sapien
tgctgtctgttggtggaaccctgct

SEQ ID NO: 1509600 - DNA, 25 bp, Homo sapien
tgattctcagtgaagccaagcccac

SEQ ID NO: 1509601 - DNA, 25 bp, Homo sapien
ttctgcgtgttttgctgctgacgtc

SEQ ID NO: 1509602 - DNA, 25 bp, Homo sapien
cagttctgcgtgttttgctgctgac

SEQ ID NO: 1509603 - DNA, 25 bp, Homo sapien
agttctgcgtgttttgctgctgacg

SEQ ID NO: 1509604 - DNA, 25 bp, Homo sapien
tgctgctgacgtccagcctctgtgg

SEQ ID NO: 1509605 - DNA, 25 bp, Homo sapien
ctacaaaacctgctgactcccagac

SEQ ID NO: 1509606 - DNA, 25 bp, Homo sapien
tgagaatcccgcgtgctgtgcgtct

SEQ ID NO: 1509607 - DNA, 25 bp, Homo sapien
gaatcccgcgtgctgtgcgtcttcc

SEQ ID NO: 1509608 - DNA, 25 bp, Homo sapien
cgcgtgctgtgcgtcttcccacgag

SEQ ID NO: 1509609 - DNA, 25 bp, Homo sapien
gctgtgcgtcttcccacgagggctt

SEQ ID NO: 1509610 - DNA, 25 bp, Homo sapien
tgaaagagctcagctaagccctgcg

SEQ ID NO: 1509611 - DNA, 25 bp, Homo sapien
tatgctcagggttctaaaggtccag

SEQ ID NO: 1509612 - DNA, 25 bp, Homo sapien
gccctgcgggcacatttacatctgt

SEQ ID NO: 1509613 - DNA, 25 bp, Homo sapien
atgaccaaccccagtatcagtgtgg

SEQ ID NO: 1509614 - DNA, 25 bp, Homo sapien
ccgcaaagccgccattgtcatcctg

SEQ ID NO: 1509615 - DNA, 25 bp, Homo sapien
gcaaagccgccattgtcatcctggc

SEQ ID NO: 1509616 - DNA, 25 bp, Homo sapien
gcctttctattccgcaaagccgcca

SEQ ID NO: 1509617 - DNA, 25 bp, Homo sapien
ttccgcaaagccgccattgtcatcc

SEQ ID NO: 1509618 - DNA, 25 bp, Homo sapien
gaactatgggctatgtcgttcatgc

SEQ ID NO: 1509619 - DNA, 25 bp, Homo sapien
cacactgaactatgggctatgtcgt

SEQ ID NO: 1509620 - DNA, 25 bp, Homo sapien
aactatgggctatgtcgttcatgcc

SEQ ID NO: 1509621 - DNA, 25 bp, Homo sapien
cagccacactgaactatgggctatg

SEQ ID NO: 1509622 - DNA, 25 bp, Homo sapien
gagaagttttcttatccctcttagc

SEQ ID NO: 1509623 - DNA, 25 bp, Homo sapien
tcagtaccacgtgggcacccagaga

SEQ ID NO: 1509624 - DNA, 25 bp, Homo sapien
ttcagccttcgctggttgaagccag

SEQ ID NO: 1509625 - DNA, 25 bp, Homo sapien
cctggaaggcgatggtcttctccag

SEQ ID NO: 1509626 - DNA, 25 bp, Homo sapien
gctgtgaacgcctttcctacaaatg

SEQ ID NO: 1509627 - DNA, 25 bp, Homo sapien
cgagaactggaccatgatctcaaac

SEQ ID NO: 1509628 - DNA, 25 bp, Homo sapien
ctgggagacccgagaactggaccat

SEQ ID NO: 1509629 - DNA, 25 bp, Homo sapien
ctctgagatagaggctgtgaacgcc

SEQ ID NO: 1509630 - DNA, 25 bp, Homo sapien
cagtgagggttactccagggtgggc

SEQ ID NO: 1509631 - DNA, 25 bp, Homo sapien
gggcgagtcataacttttctggacc

SEQ ID NO: 1509632 - DNA, 25 bp, Homo sapien
caggcaatccccttggggcgagtca

SEQ ID NO: 1509633 - DNA, 25 bp, Homo sapien
gggcctcttccccttcacgtcctgc

SEQ ID NO: 1509634 - DNA, 25 bp, Homo sapien
tgagctcctaagtccaacactatcg

SEQ ID NO: 1509635 - DNA, 25 bp, Homo sapien
gggccaccaggcctgtcaaggttag

SEQ ID NO: 1509636 - DNA, 25 bp, Homo sapien
tctgctgagataggtacaaggctca

SEQ ID NO: 1509637 - DNA, 25 bp, Homo sapien
tcacttttatggtccggatggcgtt

SEQ ID NO: 1509638 - DNA, 25 bp, Homo sapien
tttgagaatgagtcttgctgtgttg

SEQ ID NO: 1509639 - DNA, 25 bp, Homo sapien
ttttttttgagaatgagtcttgctg

SEQ ID NO: 1509640 - DNA, 25 bp, Homo sapien
tttttttgagaatgagtcttgctgt

SEQ ID NO: 1509641 - DNA, 25 bp, Homo sapien
tttttgagaatgagtcttgctgtgt

SEQ ID NO: 1509642 - DNA, 25 bp, Homo sapien
cccaaggccacgatgaagaggaaac

SEQ ID NO: 1509643 - DNA, 25 bp, Homo sapien
cacatgtgaagaaatggataccaag

SEQ ID NO: 1509644 - DNA, 25 bp, Homo sapien
taggtaagcagtcagtcaaaagagt

SEQ ID NO: 1509645 - DNA, 25 bp, Homo sapien
aatgatgtaagagctgtgatgatgc

SEQ ID NO: 1509646 - DNA, 25 bp, Homo sapien
gacagggcttcgtcatgttggcgag

SEQ ID NO: 1509647 - DNA, 25 bp, Homo sapien
gacctcaggtaatcctcccatcttg

SEQ ID NO: 1509648 - DNA, 25 bp, Homo sapien
ctgacctcaggtaatcctcccatct

SEQ ID NO: 1509649 - DNA, 25 bp, Homo sapien
cagggcttcgtcatgttggcgaggc

SEQ ID NO: 1509650 - DNA, 25 bp, Homo sapien
atgtgccaccgcatccggctaattt

SEQ ID NO: 1509651 - DNA, 25 bp, Homo sapien
cgagtagcgaggatcacaggcatgt

SEQ ID NO: 1509652 - DNA, 25 bp, Homo sapien
ttttttacgagaccccaagcatgga

SEQ ID NO: 1509653 - DNA, 25 bp, Homo sapien
ccttttttacgagaccccaagcatg

SEQ ID NO: 1509654 - DNA, 25 bp, Homo sapien
cttttttacgagaccccaagcatgg

SEQ ID NO: 1509655 - DNA, 25 bp, Homo sapien
tacttttatgccttgtagggcctaa

SEQ ID NO: 1509656 - DNA, 25 bp, Homo sapien
gacaatattactactattcctcctg

SEQ ID NO: 1509657 - DNA, 25 bp, Homo sapien
cacctgctatatgtctggtcctggg

SEQ ID NO: 1509658 - DNA, 25 bp, Homo sapien
tgtagggcctaacagaatctatttg

SEQ ID NO: 1509659 - DNA, 25 bp, Homo sapien
tccacgctgattggctgaaggacga

SEQ ID NO: 1509660 - DNA, 25 bp, Homo sapien
ggctgaaggacgatacgccaagcgt

SEQ ID NO: 1509661 - DNA, 25 bp, Homo sapien
gctgaaggacgatacgccaagcgtt

SEQ ID NO: 1509662 - DNA, 25 bp, Homo sapien
cagctccacgctgattggctgaagg

SEQ ID NO: 1509663 - DNA, 25 bp, Homo sapien
ctcccgacgtcacgccctgaccgtg

SEQ ID NO: 1509664 - DNA, 25 bp, Homo sapien
tcctcccgacgtcacgccctgaccg

SEQ ID NO: 1509665 - DNA, 25 bp, Homo sapien
cctcctcccgacgtcacgccctgac

SEQ ID NO: 1509666 - DNA, 25 bp, Homo sapien
gccctcctcccgacgtcacgccctg

SEQ ID NO: 1509667 - DNA, 25 bp, Homo sapien
cagctcagacaagactcccgccagg

SEQ ID NO: 1509668 - DNA, 25 bp, Homo sapien
tcccgccaggcataggaggcatcca

SEQ ID NO: 1509669 - DNA, 25 bp, Homo sapien
tccctgcgaagatgtcgtgggccgt

SEQ ID NO: 1509670 - DNA, 25 bp, Homo sapien
acaggcttccctgcgaagatgtcgt

SEQ ID NO: 1509671 - DNA, 25 bp, Homo sapien
agcctcggggcggacgatcagaaac

SEQ ID NO: 1509672 - DNA, 25 bp, Homo sapien
tcagcctcggggcggacgatcagaa

SEQ ID NO: 1509673 - DNA, 25 bp, Homo sapien
cctcggggcggacgatcagaaactg

SEQ ID NO: 1509674 - DNA, 25 bp, Homo sapien
ggggcggacgatcagaaactggcct

SEQ ID NO: 1509675 - DNA, 25 bp, Homo sapien
gtctggaggatagtacttgttgacc

SEQ ID NO: 1509676 - DNA, 25 bp, Homo sapien
ggttgaagtctggaggatagtactt

SEQ ID NO: 1509677 - DNA, 25 bp, Homo sapien
cagggttgaagtctggaggatagta

SEQ ID NO: 1509678 - DNA, 25 bp, Homo sapien
tctggaggatagtacttgttgaccc

SEQ ID NO: 1509679 - DNA, 25 bp, Homo sapien
tctgacgtatggagaaactttggca

SEQ ID NO: 1509680 - DNA, 25 bp, Homo sapien
gctgggacacttgggcccttactga

SEQ ID NO: 1509681 - DNA, 25 bp, Homo sapien
ggacacagccacaataagatagatg

SEQ ID NO: 1509682 - DNA, 25 bp, Homo sapien
taaatcctatactcaggacgaggca

SEQ ID NO: 1509683 - DNA, 25 bp, Homo sapien
ccctgtgacagcttccgagcccgct

SEQ ID NO: 1509684 - DNA, 25 bp, Homo sapien
ttgtggtatcggttgagagagccat

SEQ ID NO: 1509685 - DNA, 25 bp, Homo sapien
cgaagcgggtggctgttgtggtatc

SEQ ID NO: 1509686 - DNA, 25 bp, Homo sapien
tccgagcccgctcccgaagcgggtg

SEQ ID NO: 1509687 - DNA, 25 bp, Homo sapien
cagccatcgcaccagatgttatatg

SEQ ID NO: 1509688 - DNA, 25 bp, Homo sapien
tgtggttcttgcagccatcgcacca

SEQ ID NO: 1509689 - DNA, 25 bp, Homo sapien
ccatcgcaccagatgttatatggca

SEQ ID NO: 1509690 - DNA, 25 bp, Homo sapien
ccatgccgatgtggttcttgcagcc

SEQ ID NO: 1509691 - DNA, 25 bp, Homo sapien
taattgcccaccttcttcttttctg

SEQ ID NO: 1509692 - DNA, 25 bp, Homo sapien
agatcggggttgtgtagtaattgcc

SEQ ID NO: 1509693 - DNA, 25 bp, Homo sapien
ttcttttctgcattgtaacgaacac

SEQ ID NO: 1509694 - DNA, 25 bp, Homo sapien
ggttgtgtagtaattgcccaccttc

SEQ ID NO: 1509695 - DNA, 25 bp, Homo sapien
acagaggtggcatttcatccggaac

SEQ ID NO: 1509696 - DNA, 25 bp, Homo sapien
gcatctcgatgtagttgacacagag

SEQ ID NO: 1509697 - DNA, 25 bp, Homo sapien
agcacctgctcattgtccgccatgt

SEQ ID NO: 1509698 - DNA, 25 bp, Homo sapien
cacgatcacgtagtcgcagttggcg

SEQ ID NO: 1509699 - DNA, 25 bp, Homo sapien
ctgcaacgatcagagctcggctggg

SEQ ID NO: 1509700 - DNA, 25 bp, Homo sapien
ccccaggcaggtaagtgggtggcgc

SEQ ID NO: 1509701 - DNA, 25 bp, Homo sapien
caggcaggtaagtgggtggcgctca

SEQ ID NO: 1509702 - DNA, 25 bp, Homo sapien
aacgatcagagctcggctgggcttt

SEQ ID NO: 1509703 - DNA, 25 bp, Homo sapien
cagcgccttcttgagtgtgctgcgg

SEQ ID NO: 1509704 - DNA, 25 bp, Homo sapien
gctgttgagggcgaagtcgtccttc

SEQ ID NO: 1509705 - DNA, 25 bp, Homo sapien
agtgtgctgcggtcggcctcgccat

SEQ ID NO: 1509706 - DNA, 25 bp, Homo sapien
tcgccatgctccagccggaacatgg

SEQ ID NO: 1509707 - DNA, 25 bp, Homo sapien
gcctgctcaaagctaggatgtggtg

SEQ ID NO: 1509708 - DNA, 25 bp, Homo sapien
cagccaaatttctactgtttctgtc

SEQ ID NO: 1509709 - DNA, 25 bp, Homo sapien
cagagggtacagtggcctgctcaaa

SEQ ID NO: 1509710 - DNA, 25 bp, Homo sapien
tggacccgggccttggtccaccatg

SEQ ID NO: 1509711 - DNA, 25 bp, Homo sapien
gggatgggctgggcggttccattta

SEQ ID NO: 1509712 - DNA, 25 bp, Homo sapien
atgggctgggcggttccatttattt

SEQ ID NO: 1509713 - DNA, 25 bp, Homo sapien
ggatgggctgggcggttccatttat

SEQ ID NO: 1509714 - DNA, 25 bp, Homo sapien
gatgggctgggcggttccatttatt

SEQ ID NO: 1509715 - DNA, 25 bp, Homo sapien
tgttctggacactcggcatacagtg

SEQ ID NO: 1509716 - DNA, 25 bp, Homo sapien
tctggacactcggcatacagtggca

SEQ ID NO: 1509717 - DNA, 25 bp, Homo sapien
tggacactcggcatacagtggcagg

SEQ ID NO: 1509718 - DNA, 25 bp, Homo sapien
gttctggacactcggcatacagtgg

SEQ ID NO: 1509719 - DNA, 25 bp, Homo sapien
cagagatagggggtgtcaaagccct

SEQ ID NO: 1509720 - DNA, 25 bp, Homo sapien
ctgtgttgagggccaagaacaccag

SEQ ID NO: 1509721 - DNA, 25 bp, Homo sapien
actctcggggtctcatttactcttt

SEQ ID NO: 1509722 - DNA, 25 bp, Homo sapien
actgctccaactctcggggtctcat

SEQ ID NO: 1509723 - DNA, 25 bp, Homo sapien
gtgtggaacttcagcagagccgcca

SEQ ID NO: 1509724 - DNA, 25 bp, Homo sapien
gatggtcaggctcgccttggcctgc

SEQ ID NO: 1509725 - DNA, 25 bp, Homo sapien
ttccgtctcgggcaccagcgggatg

SEQ ID NO: 1509726 - DNA, 25 bp, Homo sapien
cagagccgccagcttgcggtcatct

SEQ ID NO: 1509727 - DNA, 25 bp, Homo sapien
cagagtccactcatggctgaggacc

SEQ ID NO: 1509728 - DNA, 25 bp, Homo sapien
gaccagagtccactcatggctgagg

SEQ ID NO: 1509729 - DNA, 25 bp, Homo sapien
tccaggcaactctgagcctccctgt

SEQ ID NO: 1509730 - DNA, 25 bp, Homo sapien
gagtccactcatggctgaggacccc

SEQ ID NO: 1509731 - DNA, 25 bp, Homo sapien
aaccaggagcggctgatgatctcgg

SEQ ID NO: 1509732 - DNA, 25 bp, Homo sapien
gctctccgggacgtcccgagacctc

SEQ ID NO: 1509733 - DNA, 25 bp, Homo sapien
gatctcggtccgcttgagtttctgc

SEQ ID NO: 1509734 - DNA, 25 bp, Homo sapien
gggaggtggcaagcgcggttctgcg

SEQ ID NO: 1509735 - DNA, 25 bp, Homo sapien
ggcttgtcctgacggctcccttcct

SEQ ID NO: 1509736 - DNA, 25 bp, Homo sapien
ctccgggggacatgggccggtcctg

SEQ ID NO: 1509737 - DNA, 25 bp, Homo sapien
cagttgtttccggaggacagtctcc

SEQ ID NO: 1509738 - DNA, 25 bp, Homo sapien
gggtctcagttgtttccggaggaca

SEQ ID NO: 1509739 - DNA, 25 bp, Homo sapien
tctccgagtcggagtagtccgccac

SEQ ID NO: 1509740 - DNA, 25 bp, Homo sapien
gagactgcaggggtgccgcgtgtcg

SEQ ID NO: 1509741 - DNA, 25 bp, Homo sapien
agtccgccacgagggaggagccgag

SEQ ID NO: 1509742 - DNA, 25 bp, Homo sapien
ccgagtcggagtagtccgccacgag

SEQ ID NO: 1509743 - DNA, 25 bp, Homo sapien
tacggagtctcacaaggcacaaaca

SEQ ID NO: 1509744 - DNA, 25 bp, Homo sapien
aataaataactccacggttgcagga

SEQ ID NO: 1509745 - DNA, 25 bp, Homo sapien
taactccacggttgcaggaaggcgc

SEQ ID NO: 1509746 - DNA, 25 bp, Homo sapien
agagacaggtctttaatgtacggag

SEQ ID NO: 1509747 - DNA, 25 bp, Homo sapien
ctcggaaccacaaaagtggcagcat

SEQ ID NO: 1509748 - DNA, 25 bp, Homo sapien
ctgccaagcccgaacggagtgagcc

SEQ ID NO: 1509749 - DNA, 25 bp, Homo sapien
caagcccgaacggagtgagccgcct

SEQ ID NO: 1509750 - DNA, 25 bp, Homo sapien
gccaagcccgaacggagtgagccgc

SEQ ID NO: 1509751 - DNA, 25 bp, Homo sapien
aagcccgaacggagtgagccgcctc

SEQ ID NO: 1509752 - DNA, 25 bp, Homo sapien
gacgcggattccacgtggccgaacc

SEQ ID NO: 1509753 - DNA, 25 bp, Homo sapien
tcccaggacgcggattccacgtggc

SEQ ID NO: 1509754 - DNA, 25 bp, Homo sapien
cgtggccgaacccactccacgactc

SEQ ID NO: 1509755 - DNA, 25 bp, Homo sapien
atgcgcatccaacccgattccacgg

SEQ ID NO: 1509756 - DNA, 25 bp, Homo sapien
caagcccagcgcaactcagagggag

SEQ ID NO: 1509757 - DNA, 25 bp, Homo sapien
cagccaagcccagcgcaactcagag

SEQ ID NO: 1509758 - DNA, 25 bp, Homo sapien
agcagccaagcccagcgcaactcag

SEQ ID NO: 1509759 - DNA, 25 bp, Homo sapien
ggtgcagcagccaagcccagcgcaa

SEQ ID NO: 1509760 - DNA, 25 bp, Homo sapien
gcagggagccccgcgagtagcggat

SEQ ID NO: 1509761 - DNA, 25 bp, Homo sapien
ccgcgagtagcggatcgcctccagg

SEQ ID NO: 1509762 - DNA, 25 bp, Homo sapien
gagccccgcgagtagcggatcgcct

SEQ ID NO: 1509763 - DNA, 25 bp, Homo sapien
cgagtagcggatcgcctccagggtc

SEQ ID NO: 1509764 - DNA, 25 bp, Homo sapien
gcctcgtagcggctctgcttgggca

SEQ ID NO: 1509765 - DNA, 25 bp, Homo sapien
tgggcagcagcagctggtctaggat

SEQ ID NO: 1509766 - DNA, 25 bp, Homo sapien
cgcctcgtagcggctctgcttgggc

SEQ ID NO: 1509767 - DNA, 25 bp, Homo sapien
tgcttgggcagcagcagctggtcta

SEQ ID NO: 1509768 - DNA, 25 bp, Homo sapien
cttcatggcgcggatggcctcccag

SEQ ID NO: 1509769 - DNA, 25 bp, Homo sapien
ttcatggcgcggatggcctcccagg

SEQ ID NO: 1509770 - DNA, 25 bp, Homo sapien
gcagggatttgggcgtcggaagctg

SEQ ID NO: 1509771 - DNA, 25 bp, Homo sapien
aggcgcgggcgcactcccacctcca

SEQ ID NO: 1509772 - DNA, 25 bp, Homo sapien
ggcgcgggcgcactcccacctccaa

SEQ ID NO: 1509773 - DNA, 25 bp, Homo sapien
ggatttgggcgtcggaagctgcagg

SEQ ID NO: 1509774 - DNA, 25 bp, Homo sapien
gccatgttgacagcggtgggccggg

SEQ ID NO: 1509775 - DNA, 25 bp, Homo sapien
agcttgtcgcgcacgaaggccacga

SEQ ID NO: 1509776 - DNA, 25 bp, Homo sapien
gccgggcggtgacgaggaagctcag

SEQ ID NO: 1509777 - DNA, 25 bp, Homo sapien
ctcccggaccgcctcttccgtagcg

SEQ ID NO: 1509778 - DNA, 25 bp, Homo sapien
tccagcatgtcctcggtgcagcaga

SEQ ID NO: 1509779 - DNA, 25 bp, Homo sapien
taggtccccaatgcttcggttgtct

SEQ ID NO: 1509780 - DNA, 25 bp, Homo sapien
caatgcttcggttgtctctgaggtc

SEQ ID NO: 1509781 - DNA, 25 bp, Homo sapien
tggcgggctcctaggtccccaatgc

SEQ ID NO: 1509782 - DNA, 25 bp, Homo sapien
ctagggctgtaccatagccagcggt

SEQ ID NO: 1509783 - DNA, 25 bp, Homo sapien
cacctagccagtaacaacaatttac

SEQ ID NO: 1509784 - DNA, 25 bp, Homo sapien
gtatttacatgggactagctatgat

SEQ ID NO: 1509785 - DNA, 25 bp, Homo sapien
gctatgatatgcaatctagacacga

SEQ ID NO: 1509786 - DNA, 25 bp, Homo sapien
ctggcggaccgcctaaggtcagaag

SEQ ID NO: 1509787 - DNA, 25 bp, Homo sapien
tgctcttcccaatgctcgcatagct

SEQ ID NO: 1509788 - DNA, 25 bp, Homo sapien
ccaatgctcgcatagctccgtttca

SEQ ID NO: 1509789 - DNA, 25 bp, Homo sapien
aatgctcgcatagctccgtttcacg

SEQ ID NO: 1509790 - DNA, 25 bp, Homo sapien
ttcccaatgctcgcatagctccgtt

SEQ ID NO: 1509791 - DNA, 25 bp, Homo sapien
agacagggtggtccattggttaggg

SEQ ID NO: 1509792 - DNA, 25 bp, Homo sapien
cctagtctgggcgtggattgccaaa

SEQ ID NO: 1509793 - DNA, 25 bp, Homo sapien
tgggcgtggattgccaaaggcttac

SEQ ID NO: 1509794 - DNA, 25 bp, Homo sapien
caggctcctagtctgggcgtggatt

SEQ ID NO: 1509795 - DNA, 25 bp, Homo sapien
gcagaaggcatgctccaggcggccc

SEQ ID NO: 1509796 - DNA, 25 bp, Homo sapien
agctcaaaggccgtcagccgggctc

SEQ ID NO: 1509797 - DNA, 25 bp, Homo sapien
ccagctcaaaggccgtcagccgggc

SEQ ID NO: 1509798 - DNA, 25 bp, Homo sapien
ctgtcggtgataagggtggcgggga

SEQ ID NO: 1509799 - DNA, 25 bp, Homo sapien
taagggtggcggggatctgctcata

SEQ ID NO: 1509800 - DNA, 25 bp, Homo sapien
tgacacgcccctatgggccatggca

SEQ ID NO: 1509801 - DNA, 25 bp, Homo sapien
ctgacacgcccctatgggccatggc

SEQ ID NO: 1509802 - DNA, 25 bp, Homo sapien
acgcccctatgggccatggcagcag

SEQ ID NO: 1509803 - DNA, 25 bp, Homo sapien
acacgcccctatgggccatggcagc

SEQ ID NO: 1509804 - DNA, 25 bp, Homo sapien
tggcccggtcgctcttcaataatga

SEQ ID NO: 1509805 - DNA, 25 bp, Homo sapien
gaatgccatggtgcttggcgacaat

SEQ ID NO: 1509806 - DNA, 25 bp, Homo sapien
tccagacggaggtcacatgaagagc

SEQ ID NO: 1509807 - DNA, 25 bp, Homo sapien
aatgatctccttgccggtctccaga

SEQ ID NO: 1509808 - DNA, 25 bp, Homo sapien
ggtgtcccctttctgagggggcagc

SEQ ID NO: 1509809 - DNA, 25 bp, Homo sapien
tctgtgatgatgccaccagtgatga

SEQ ID NO: 1509810 - DNA, 25 bp, Homo sapien
tggttagggctgtccggagctcctc

SEQ ID NO: 1509811 - DNA, 25 bp, Homo sapien
catcgaaggcaggattccaaactcc

SEQ ID NO: 1509812 - DNA, 25 bp, Homo sapien
ggtccatctagggttccatccctgg

SEQ ID NO: 1509813 - DNA, 25 bp, Homo sapien
gctctagatggaaggccctgtctga

SEQ ID NO: 1509814 - DNA, 25 bp, Homo sapien
tagccattcaagaaatgtattgaaa

SEQ ID NO: 1509815 - DNA, 25 bp, Homo sapien
gggctctagatggaaggccctgtct

SEQ ID NO: 1509816 - DNA, 25 bp, Homo sapien
ctggacggtcagcttttgggtagcc

SEQ ID NO: 1509817 - DNA, 25 bp, Homo sapien
aaaccaaggcacagagaggtgaagt

SEQ ID NO: 1509818 - DNA, 25 bp, Homo sapien
tgacttgcccaagatcatacagtgg

SEQ ID NO: 1509819 - DNA, 25 bp, Homo sapien
acattttataaatgaggaaaccaag

SEQ ID NO: 1509820 - DNA, 25 bp, Homo sapien
agtgacttgcccaagatcatacagt

SEQ ID NO: 1509821 - DNA, 25 bp, Homo sapien
taacgagtgatacttgatctcaaaa

SEQ ID NO: 1509822 - DNA, 25 bp, Homo sapien
ctgggtaacgagtgatacttgatct

SEQ ID NO: 1509823 - DNA, 25 bp, Homo sapien
ctggagatgtcaccctagctccagc

SEQ ID NO: 1509824 - DNA, 25 bp, Homo sapien
gggtaacgagtgatacttgatctca

SEQ ID NO: 1509825 - DNA, 25 bp, Homo sapien
aatactgctgtaaggtcaggcacag

SEQ ID NO: 1509826 - DNA, 25 bp, Homo sapien
gtagtgcaatcaaagcacactgcat

SEQ ID NO: 1509827 - DNA, 25 bp, Homo sapien
taaaaaatactgctgtaaggtcagg

SEQ ID NO: 1509828 - DNA, 25 bp, Homo sapien
caagctcttcctatgttacccaaac

SEQ ID NO: 1509829 - DNA, 25 bp, Homo sapien
gccacgactaacatggtgtctccaa

SEQ ID NO: 1509830 - DNA, 25 bp, Homo sapien
cagccacgactaacatggtgtctcc

SEQ ID NO: 1509831 - DNA, 25 bp, Homo sapien
accagccacgactaacatggtgtct

SEQ ID NO: 1509832 - DNA, 25 bp, Homo sapien
aggccgcggggcgcggatcacccga

SEQ ID NO: 1509833 - DNA, 25 bp, Homo sapien
aagtgcggggttctagcctcttcaa

SEQ ID NO: 1509834 - DNA, 25 bp, Homo sapien
gttaaactacatcctgcagaccggc

SEQ ID NO: 1509835 - DNA, 25 bp, Homo sapien
cagaccggcagcataattttgtaaa

SEQ ID NO: 1509836 - DNA, 25 bp, Homo sapien
cagtaagctcaaggcacaagtgcgg

SEQ ID NO: 1509837 - DNA, 25 bp, Homo sapien
tgtggcactcacctctggtacagaa

SEQ ID NO: 1509838 - DNA, 25 bp, Homo sapien
caacgttttatgatctttacacata

SEQ ID NO: 1509839 - DNA, 25 bp, Homo sapien
cagactaggttagggtgtggcactc

SEQ ID NO: 1509840 - DNA, 25 bp, Homo sapien
tattgagagcttatgtgttttagaa

SEQ ID NO: 1509841 - DNA, 25 bp, Homo sapien
ggtccggcacgcagcggaagaggcg

SEQ ID NO: 1509842 - DNA, 25 bp, Homo sapien
tccggcacgcagcggaagaggcggg

SEQ ID NO: 1509843 - DNA, 25 bp, Homo sapien
ccggcacgcagcggaagaggcggga

SEQ ID NO: 1509844 - DNA, 25 bp, Homo sapien
gtccggcacgcagcggaagaggcgg

SEQ ID NO: 1509845 - DNA, 25 bp, Homo sapien
tttgtgcgcctgaaacttgcgctgc

SEQ ID NO: 1509846 - DNA, 25 bp, Homo sapien
gattcttttcagaggctgccgctgc

SEQ ID NO: 1509847 - DNA, 25 bp, Homo sapien
cttttcagaggctgccgctgccgtc

SEQ ID NO: 1509848 - DNA, 25 bp, Homo sapien
ttcttgggccccgattcttttcaga

SEQ ID NO: 1509849 - DNA, 25 bp, Homo sapien
gccccgattcttttcagaggctgcc

SEQ ID NO: 1509850 - DNA, 25 bp, Homo sapien
cacgacgcgcgccttcttgggagcg

SEQ ID NO: 1509851 - DNA, 25 bp, Homo sapien
ttttgctgctgcacgacgcgcgcct

SEQ ID NO: 1509852 - DNA, 25 bp, Homo sapien
tttgctgctgcacgacgcgcgcctt

SEQ ID NO: 1509853 - DNA, 25 bp, Homo sapien
gctgcacgacgcgcgccttcttggg

SEQ ID NO: 1509854 - DNA, 25 bp, Homo sapien
ccgggctccatctctcgcccccgca

SEQ ID NO: 1509855 - DNA, 25 bp, Homo sapien
cgggctccatctctcgcccccgcac

SEQ ID NO: 1509856 - DNA, 25 bp, Homo sapien
ggctccatctctcgcccccgcacac

SEQ ID NO: 1509857 - DNA, 25 bp, Homo sapien
gggctccatctctcgcccccgcaca

SEQ ID NO: 1509858 - DNA, 25 bp, Homo sapien
atccttcgctcctaacgcggcccct

SEQ ID NO: 1509859 - DNA, 25 bp, Homo sapien
tccatccttcgctcctaacgcggcc

SEQ ID NO: 1509860 - DNA, 25 bp, Homo sapien
ggctccatccttcgctcctaacgcg

SEQ ID NO: 1509861 - DNA, 25 bp, Homo sapien
cgggctccatccttcgctcctaacg

SEQ ID NO: 1509862 - DNA, 25 bp, Homo sapien
taaaaacaaccatagggtggctcac

SEQ ID NO: 1509863 - DNA, 25 bp, Homo sapien
aaaaacaaccatagggtggctcacg

SEQ ID NO: 1509864 - DNA, 25 bp, Homo sapien
ttaaaaacaaccatagggtggctca

SEQ ID NO: 1509865 - DNA, 25 bp, Homo sapien
ctggttgcccaggtccctaaactgc

SEQ ID NO: 1509866 - DNA, 25 bp, Homo sapien
aggcactggttgcccaggtccctaa

SEQ ID NO: 1509867 - DNA, 25 bp, Homo sapien
ttggcttctaaacctctgctcatgc

SEQ ID NO: 1509868 - DNA, 25 bp, Homo sapien
gcactggttgcccaggtccctaaac

SEQ ID NO: 1509869 - DNA, 25 bp, Homo sapien
cttcttccggattccgacttctagg

SEQ ID NO: 1509870 - DNA, 25 bp, Homo sapien
cgtcatgttcgatcttcttccggat

SEQ ID NO: 1509871 - DNA, 25 bp, Homo sapien
cacgtcatgttcgatcttcttccgg

SEQ ID NO: 1509872 - DNA, 25 bp, Homo sapien
gttcgatcttcttccggattccgac

SEQ ID NO: 1509873 - DNA, 25 bp, Homo sapien
ttcagcagtgccagcttcttgggca

SEQ ID NO: 1509874 - DNA, 25 bp, Homo sapien
ttcttggctggggccttcagcagtg

SEQ ID NO: 1509875 - DNA, 25 bp, Homo sapien
ttcttgggcaggctgctgctggctt

SEQ ID NO: 1509876 - DNA, 25 bp, Homo sapien
ttcttcttggctggggccttcagca

SEQ ID NO: 1509877 - DNA, 25 bp, Homo sapien
gtgtcttggaggaggtggcggcagc

SEQ ID NO: 1509878 - DNA, 25 bp, Homo sapien
gaaggtgtcttggaggaggtggcgg

SEQ ID NO: 1509879 - DNA, 25 bp, Homo sapien
tcaggaaggtgtcttggaggaggtg

SEQ ID NO: 1509880 - DNA, 25 bp, Homo sapien
ggtgtcttggaggaggtggcggcag

SEQ ID NO: 1509881 - DNA, 25 bp, Homo sapien
acggggacagatgaagttagtgact

SEQ ID NO: 1509882 - DNA, 25 bp, Homo sapien
gctgggttctcagcacccttggccc

SEQ ID NO: 1509883 - DNA, 25 bp, Homo sapien
gggtgggatgttggcctgcactggg

SEQ ID NO: 1509884 - DNA, 25 bp, Homo sapien
caaggtcccatatggaggtaggggg

SEQ ID NO: 1509885 - DNA, 25 bp, Homo sapien
gttctgggttaaacctgtggaggca

SEQ ID NO: 1509886 - DNA, 25 bp, Homo sapien
tgttctgggttaaacctgtggaggc

SEQ ID NO: 1509887 - DNA, 25 bp, Homo sapien
tcccctgggcacatggttgctaaag

SEQ ID NO: 1509888 - DNA, 25 bp, Homo sapien
gaaaagactctttcccggctctcag

SEQ ID NO: 1509889 - DNA, 25 bp, Homo sapien
actcatggagacttgtgggctcacc

SEQ ID NO: 1509890 - DNA, 25 bp, Homo sapien
cagaggtgtagaagcccagctgtcc

SEQ ID NO: 1509891 - DNA, 25 bp, Homo sapien
cagttggcactctttaaccaggtag

SEQ ID NO: 1509892 - DNA, 25 bp, Homo sapien
cttacagttggcactctttaaccag

SEQ ID NO: 1509893 - DNA, 25 bp, Homo sapien
tacagttggcactctttaaccaggt

SEQ ID NO: 1509894 - DNA, 25 bp, Homo sapien
ttacagttggcactctttaaccagg

SEQ ID NO: 1509895 - DNA, 25 bp, Homo sapien
gggctggcgtcagaggcacaaaggg

SEQ ID NO: 1509896 - DNA, 25 bp, Homo sapien
aaagggagccagaatgcaggattcc

SEQ ID NO: 1509897 - DNA, 25 bp, Homo sapien
gggtgctcctcgaaggggctggcgt

SEQ ID NO: 1509898 - DNA, 25 bp, Homo sapien
attcctgggctggtcgagacgccac

SEQ ID NO: 1509899 - DNA, 25 bp, Homo sapien
tccagtatggtcaccaatggccaca

SEQ ID NO: 1509900 - DNA, 25 bp, Homo sapien
ccttgaaatgggactggctgaaatt

SEQ ID NO: 1509901 - DNA, 25 bp, Homo sapien
tcatccatatggaagccctagcttt

SEQ ID NO: 1509902 - DNA, 25 bp, Homo sapien
tggccacaagtggtctctgagccct

SEQ ID NO: 1509903 - DNA, 25 bp, Homo sapien
tcagcttgtgtaggccaccgtctct

SEQ ID NO: 1509904 - DNA, 25 bp, Homo sapien
cttgtgtaggccaccgtctctggcc

SEQ ID NO: 1509905 - DNA, 25 bp, Homo sapien
ttctgactcagcttgtgtaggccac

SEQ ID NO: 1509906 - DNA, 25 bp, Homo sapien
cattttttctgactcagcttgtgta

SEQ ID NO: 1509907 - DNA, 25 bp, Homo sapien
caaagctcggttagggggttcatag

SEQ ID NO: 1509908 - DNA, 25 bp, Homo sapien
tgcgggccgcggaccccctctccag

SEQ ID NO: 1509909 - DNA, 25 bp, Homo sapien
tgagggagctcatgcgggccgcgga

SEQ ID NO: 1509910 - DNA, 25 bp, Homo sapien
ctccagaaacaaagctcggttaggg

SEQ ID NO: 1509911 - DNA, 25 bp, Homo sapien
tgggggcggaggggtcgcaggctca

SEQ ID NO: 1509912 - DNA, 25 bp, Homo sapien
tgtgggggcggaggggtcgcaggct

SEQ ID NO: 1509913 - DNA, 25 bp, Homo sapien
gggggcggaggggtcgcaggctcac

SEQ ID NO: 1509914 - DNA, 25 bp, Homo sapien
cttgtgggggcggaggggtcgcagg

SEQ ID NO: 1509915 - DNA, 25 bp, Homo sapien
gccctccttcccgtccgtcctctgc

SEQ ID NO: 1509916 - DNA, 25 bp, Homo sapien
cgtccgtcctctgcgctcggccgcc

SEQ ID NO: 1509917 - DNA, 25 bp, Homo sapien
ttcccgtccgtcctctgcgctcggc

SEQ ID NO: 1509918 - DNA, 25 bp, Homo sapien
ccttcccgtccgtcctctgcgctcg

SEQ ID NO: 1509919 - DNA, 25 bp, Homo sapien
gcatcgcgctcctcgggtcccgcgg

SEQ ID NO: 1509920 - DNA, 25 bp, Homo sapien
ccggcatcgcgctcctcgggtcccg

SEQ ID NO: 1509921 - DNA, 25 bp, Homo sapien
ggcatcgcgctcctcgggtcccgcg

SEQ ID NO: 1509922 - DNA, 25 bp, Homo sapien
ccccggcatcgcgctcctcgggtcc

SEQ ID NO: 1509923 - DNA, 25 bp, Homo sapien
ctcggctacccgcttggcgctgagg

SEQ ID NO: 1509924 - DNA, 25 bp, Homo sapien
agctctcggctacccgcttggcgct

SEQ ID NO: 1509925 - DNA, 25 bp, Homo sapien
ggctacccgcttggcgctgaggtcc

SEQ ID NO: 1509926 - DNA, 25 bp, Homo sapien
tgctcgaaggcccagctctcggcta

SEQ ID NO: 1509927 - DNA, 25 bp, Homo sapien
aggaagtgtcctgatttgggatctg

SEQ ID NO: 1509928 - DNA, 25 bp, Homo sapien
cccagggttgtaggcgggccatggg

SEQ ID NO: 1509929 - DNA, 25 bp, Homo sapien
ggtgcccagggttgtaggcgggcca

SEQ ID NO: 1509930 - DNA, 25 bp, Homo sapien
ggagaagaaggaagtgtcctgattt

SEQ ID NO: 1509931 - DNA, 25 bp, Homo sapien
ctgtccagggaccaccacccaggct

SEQ ID NO: 1509932 - DNA, 25 bp, Homo sapien
ggtaacccagcgacgagtacataca

SEQ ID NO: 1509933 - DNA, 25 bp, Homo sapien
tacatatttcccgttcactgcgtgg

SEQ ID NO: 1509934 - DNA, 25 bp, Homo sapien
tgcagcccgcgggtaaagggcaccc

SEQ ID NO: 1509935 - DNA, 25 bp, Homo sapien
tggaaacgaccaaaacacgatgcgc

SEQ ID NO: 1509936 - DNA, 25 bp, Homo sapien
tcaccaagttgatctcggagcccag

SEQ ID NO: 1509937 - DNA, 25 bp, Homo sapien
cgaacttctgcagctggtcccggtt

SEQ ID NO: 1509938 - DNA, 25 bp, Homo sapien
ggaggatctcatcagccaagcgctg

SEQ ID NO: 1509939 - DNA, 25 bp, Homo sapien
cacagtagaagaggtcgcggttgtc

SEQ ID NO: 1509940 - DNA, 25 bp, Homo sapien
tcctcgattcctgcgccggcggtgg

SEQ ID NO: 1509941 - DNA, 25 bp, Homo sapien
ggtgccagcagttggcgtcctcgat

SEQ ID NO: 1509942 - DNA, 25 bp, Homo sapien
cattggacagtagctgcttcacctg

SEQ ID NO: 1509943 - DNA, 25 bp, Homo sapien
tggctggccccgtagtagccgccat

SEQ ID NO: 1509944 - DNA, 25 bp, Homo sapien
gccaggcgcgtgtcctgcaggaact

SEQ ID NO: 1509945 - DNA, 25 bp, Homo sapien
agctgccggcacttgtccgtcatgc

SEQ ID NO: 1509946 - DNA, 25 bp, Homo sapien
atgagaatcagcatgcgcgccccgt

SEQ ID NO: 1509947 - DNA, 25 bp, Homo sapien
tgcaggaactgctcggtcatgagaa

SEQ ID NO: 1509948 - DNA, 25 bp, Homo sapien
aatatgtcagcttggtacagtggct

SEQ ID NO: 1509949 - DNA, 25 bp, Homo sapien
caaacaaaaatatgtcagcttggta

SEQ ID NO: 1509950 - DNA, 25 bp, Homo sapien
caaaaatatgtcagcttggtacagt

SEQ ID NO: 1509951 - DNA, 25 bp, Homo sapien
tatgtcagcttggtacagtggctca

SEQ ID NO: 1509952 - DNA, 25 bp, Homo sapien
gaggcacggggcaggctcaatattc

SEQ ID NO: 1509953 - DNA, 25 bp, Homo sapien
ctgaggaggcacggggcaggctcaa

SEQ ID NO: 1509954 - DNA, 25 bp, Homo sapien
gaggaggcacggggcaggctcaata

SEQ ID NO: 1509955 - DNA, 25 bp, Homo sapien
ggaggcacggggcaggctcaatatt

SEQ ID NO: 1509956 - DNA, 25 bp, Homo sapien
tcgagcttgtcccacctgctgagta

SEQ ID NO: 1509957 - DNA, 25 bp, Homo sapien
gccgtcgaaggagtagttgccctct

SEQ ID NO: 1509958 - DNA, 25 bp, Homo sapien
ctcaggacgacgcaaacccacaggg

SEQ ID NO: 1509959 - DNA, 25 bp, Homo sapien
tccagtgggcagacgtcgagcttgt

SEQ ID NO: 1509960 - DNA, 25 bp, Homo sapien
gcccttggcactcgctctttcctgg

SEQ ID NO: 1509961 - DNA, 25 bp, Homo sapien
cattttacttcacttgcccacttgg

SEQ ID NO: 1509962 - DNA, 25 bp, Homo sapien
tggcctgtacttgctataaattttt

SEQ ID NO: 1509963 - DNA, 25 bp, Homo sapien
cctggctagacaagttgggattagt

SEQ ID NO: 1509964 - DNA, 25 bp, Homo sapien
tgtagctctctagctgatgccgctg

SEQ ID NO: 1509965 - DNA, 25 bp, Homo sapien
gcaggtaggcgtcattccagtgtag

SEQ ID NO: 1509966 - DNA, 25 bp, Homo sapien
ccggagtgtgttgatgatggcactt

SEQ ID NO: 1509967 - DNA, 25 bp, Homo sapien
caaggcgcggccaaataccgtgtgg

SEQ ID NO: 1509968 - DNA, 25 bp, Homo sapien
tccagacgacaggcctccaggagcg

SEQ ID NO: 1509969 - DNA, 25 bp, Homo sapien
tgatgcaggtggagcccttctggag

SEQ ID NO: 1509970 - DNA, 25 bp, Homo sapien
acgacaggcctccaggagcgccctg

SEQ ID NO: 1509971 - DNA, 25 bp, Homo sapien
cccatccttcggtgttggtgatgca

SEQ ID NO: 1509972 - DNA, 25 bp, Homo sapien
ggcgtacagcccctccggcagggcc

SEQ ID NO: 1509973 - DNA, 25 bp, Homo sapien
ggcacaggcacgtgctggtaggcca

SEQ ID NO: 1509974 - DNA, 25 bp, Homo sapien
agcgccagcaccaagtaggactccc

SEQ ID NO: 1509975 - DNA, 25 bp, Homo sapien
accttccgcttctcggggcctgagt

SEQ ID NO: 1509976 - DNA, 25 bp, Homo sapien
tcatagctcgcagcgcgaggcgata

SEQ ID NO: 1509977 - DNA, 25 bp, Homo sapien
tcatgaggcagcagtgcggtgaaca

SEQ ID NO: 1509978 - DNA, 25 bp, Homo sapien
gcacaggtgtgcatgggcacgctct

SEQ ID NO: 1509979 - DNA, 25 bp, Homo sapien
cggtgaacaggtagcgggcacaggt

SEQ ID NO: 1509980 - DNA, 25 bp, Homo sapien
cactggtataaaaggaggatcaacg

SEQ ID NO: 1509981 - DNA, 25 bp, Homo sapien
taatattacacatttagccaggtgc

SEQ ID NO: 1509982 - DNA, 25 bp, Homo sapien
gataaccctgcttgcatccggagag

SEQ ID NO: 1509983 - DNA, 25 bp, Homo sapien
tggaaggctacgcagtgattcacgt

SEQ ID NO: 1509984 - DNA, 25 bp, Homo sapien
tgctcatgatggagtccagcgggct

SEQ ID NO: 1509985 - DNA, 25 bp, Homo sapien
gcggccgtcaacatggtggaagcca

SEQ ID NO: 1509986 - DNA, 25 bp, Homo sapien
ccagttcacactggcgggtctccag

SEQ ID NO: 1509987 - DNA, 25 bp, Homo sapien
agcggttgctcatgatggagtccag

SEQ ID NO: 1509988 - DNA, 25 bp, Homo sapien
tggctgtcttgcaggcgtcctgcgc

SEQ ID NO: 1509989 - DNA, 25 bp, Homo sapien
ctccagtgcgatgcccagcagcgtg

SEQ ID NO: 1509990 - DNA, 25 bp, Homo sapien
tggatggagcccagtaccgtgtgca

SEQ ID NO: 1509991 - DNA, 25 bp, Homo sapien
ccagcttaaagagcagggccggaga

SEQ ID NO: 1509992 - DNA, 25 bp, Homo sapien
agtcctggccccgagccaccatcgc

SEQ ID NO: 1509993 - DNA, 25 bp, Homo sapien
agtcagtcctggccccgagccacca

SEQ ID NO: 1509994 - DNA, 25 bp, Homo sapien
ctcccgcatccacctggcagccctc

SEQ ID NO: 1509995 - DNA, 25 bp, Homo sapien
atcgccctcccgcatccacctggca

SEQ ID NO: 1509996 - DNA, 25 bp, Homo sapien
acctggagtacagtggcgcgatcat

SEQ ID NO: 1509997 - DNA, 25 bp, Homo sapien
atcacacctggctaatttttaaagt

SEQ ID NO: 1509998 - DNA, 25 bp, Homo sapien
ggtcttcttgctctgttacctggag

SEQ ID NO: 1509999 - DNA, 25 bp, Homo sapien
ctacaggggtgcaccatcacacctg

SEQ ID NO: 1510000 - DNA, 25 bp, Homo sapien
cgccgccaggtcattacgttcagag

SEQ ID NO: 1510001 - DNA, 25 bp, Homo sapien
ttacgttcagagtcatccgcatcac

SEQ ID NO: 1510002 - DNA, 25 bp, Homo sapien
ggtcattacgttcagagtcatccgc

SEQ ID NO: 1510003 - DNA, 25 bp, Homo sapien
agctgaccagccagcgcaccatctc

SEQ ID NO: 1510004 - DNA, 25 bp, Homo sapien
gagtggttcttctcgcacagggtca

SEQ ID NO: 1510005 - DNA, 25 bp, Homo sapien
tggtagccgcctccactggtgtgaa

SEQ ID NO: 1510006 - DNA, 25 bp, Homo sapien
gatgaaatccccatagtgccgcggg

SEQ ID NO: 1510007 - DNA, 25 bp, Homo sapien
atgatattcatcagggcttgcgggc

SEQ ID NO: 1510008 - DNA, 25 bp, Homo sapien
ccacgtgggcctaattggagagcaa

SEQ ID NO: 1510009 - DNA, 25 bp, Homo sapien
gatttctggaaagtcctgcctccca

SEQ ID NO: 1510010 - DNA, 25 bp, Homo sapien
taataatactgaaatgccacgtggg

SEQ ID NO: 1510011 - DNA, 25 bp, Homo sapien
gcttggcgctgcacccagaaataag

SEQ ID NO: 1510012 - DNA, 25 bp, Homo sapien
tcccgcttttgatcggggtgtcttc

SEQ ID NO: 1510013 - DNA, 25 bp, Homo sapien
gggcagtcccgggtccgcccgcaca

SEQ ID NO: 1510014 - DNA, 25 bp, Homo sapien
ggcagtcccgggtccgcccgcacat

SEQ ID NO: 1510015 - DNA, 25 bp, Homo sapien
ctccaccgtcccagacctcgaggcg

SEQ ID NO: 1510016 - DNA, 25 bp, Homo sapien
cccagacctcgaggcggcgccacgg

SEQ ID NO: 1510017 - DNA, 25 bp, Homo sapien
gggtgtcctggatcgtggggtgacc

SEQ ID NO: 1510018 - DNA, 25 bp, Homo sapien
cagggtatcctgtgcttggaaaggt

SEQ ID NO: 1510019 - DNA, 25 bp, Homo sapien
tgctctgtgcagcagggtatcctgt

SEQ ID NO: 1510020 - DNA, 25 bp, Homo sapien
tgtcctggatcgtggggtgaccatg

SEQ ID NO: 1510021 - DNA, 25 bp, Homo sapien
tccccaccctgggtagtcgtggaca

SEQ ID NO: 1510022 - DNA, 25 bp, Homo sapien
cccaccctgggtagtcgtggacaga

SEQ ID NO: 1510023 - DNA, 25 bp, Homo sapien
caccctgggtagtcgtggacagaag

SEQ ID NO: 1510024 - DNA, 25 bp, Homo sapien
cctgggtagtcgtggacagaagctt

SEQ ID NO: 1510025 - DNA, 25 bp, Homo sapien
ctgaggcgctgggaatagctgatcc

SEQ ID NO: 1510026 - DNA, 25 bp, Homo sapien
gacccagaagggacacaagcaggtg

SEQ ID NO: 1510027 - DNA, 25 bp, Homo sapien
caggtgtgcttagtcctgaggcgct

SEQ ID NO: 1510028 - DNA, 25 bp, Homo sapien
gaacaagttccttgtggacccagaa

SEQ ID NO: 1510029 - DNA, 25 bp, Homo sapien
gacatacatactcggtgacatctca

SEQ ID NO: 1510030 - DNA, 25 bp, Homo sapien
cacgtgttcattttgcaccgggtcc

SEQ ID NO: 1510031 - DNA, 25 bp, Homo sapien
agttttcgaactagaggaccacgtg

SEQ ID NO: 1510032 - DNA, 25 bp, Homo sapien
tctcactgggctatgcaaaagaggc

SEQ ID NO: 1510033 - DNA, 25 bp, Homo sapien
gtggtggctcacgcctgtaatccca

SEQ ID NO: 1510034 - DNA, 25 bp, Homo sapien
gcactttggaaagccgaggtgggcg

SEQ ID NO: 1510035 - DNA, 25 bp, Homo sapien
gatcacctgaggtcaggaggtcgag

SEQ ID NO: 1510036 - DNA, 25 bp, Homo sapien
catctctacaaaaattagggccagg

SEQ ID NO: 1510037 - DNA, 25 bp, Homo sapien
ctggagggggtattcaggcataccc

SEQ ID NO: 1510038 - DNA, 25 bp, Homo sapien
gtattcaggcatacccacatgcatt

SEQ ID NO: 1510039 - DNA, 25 bp, Homo sapien
tacccacatgcattggctggccggg

SEQ ID NO: 1510040 - DNA, 25 bp, Homo sapien
gccggggtgtcctgatgcagcctgg

SEQ ID NO: 1510041 - DNA, 25 bp, Homo sapien
ggggggtagcggtacacatacatac

SEQ ID NO: 1510042 - DNA, 25 bp, Homo sapien
tgtgtctggtccacgcacacgctgt

SEQ ID NO: 1510043 - DNA, 25 bp, Homo sapien
cacatacatacccttgtgtgtctgg

SEQ ID NO: 1510044 - DNA, 25 bp, Homo sapien
tacccttgtgtgtctggtccacgca

SEQ ID NO: 1510045 - DNA, 25 bp, Homo sapien
ctctgtgagggtggaaagtatttgg

SEQ ID NO: 1510046 - DNA, 25 bp, Homo sapien
taggcaaagcgttagtgacaggctg

SEQ ID NO: 1510047 - DNA, 25 bp, Homo sapien
gcccattaggcaaagcgttagtgac

SEQ ID NO: 1510048 - DNA, 25 bp, Homo sapien
ttggtattttccgatcccagctgct

SEQ ID NO: 1510049 - DNA, 25 bp, Homo sapien
ttgtcagtgccctgactttccctac

SEQ ID NO: 1510050 - DNA, 25 bp, Homo sapien
ggctcctggtcaggcggcgcttggc

SEQ ID NO: 1510051 - DNA, 25 bp, Homo sapien
cccatcggggcggttgttattgtcg

SEQ ID NO: 1510052 - DNA, 25 bp, Homo sapien
caggttggcggctggctcgaggccc

SEQ ID NO: 1510053 - DNA, 25 bp, Homo sapien
cctctaacaatgcaagtggacgcca

SEQ ID NO: 1510054 - DNA, 25 bp, Homo sapien
gttccatgcagaccgcagctgcggg

SEQ ID NO: 1510055 - DNA, 25 bp, Homo sapien
gcaagtggacgccagatgttccatg

SEQ ID NO: 1510056 - DNA, 25 bp, Homo sapien
cagatgttccatgcagaccgcagct

SEQ ID NO: 1510057 - DNA, 25 bp, Homo sapien
agagcacagctgtcctggcatcagg

SEQ ID NO: 1510058 - DNA, 25 bp, Homo sapien
gcatcaggcacagcagctgcacttg

SEQ ID NO: 1510059 - DNA, 25 bp, Homo sapien
gcagcaggagcagcagctcttcttg

SEQ ID NO: 1510060 - DNA, 25 bp, Homo sapien
agcagctgcacttgtctgacgtccc

SEQ ID NO: 1510061 - DNA, 25 bp, Homo sapien
ctctttgcatttgcaggagccggca

SEQ ID NO: 1510062 - DNA, 25 bp, Homo sapien
ctgacgtccctttgcagatgcagcc

SEQ ID NO: 1510063 - DNA, 25 bp, Homo sapien
aaatccaggtttatataggttgctc

SEQ ID NO: 1510064 - DNA, 25 bp, Homo sapien
atagaaaaaaagatgtagcaaacgg

SEQ ID NO: 1510065 - DNA, 25 bp, Homo sapien
ttacatctgagagcacagctgtcct

SEQ ID NO: 1510066 - DNA, 25 bp, Homo sapien
cttgcaggaggtgcatttgcactct

SEQ ID NO: 1510067 - DNA, 25 bp, Homo sapien
gttcccgatcaagaggaaaacacgc

SEQ ID NO: 1510068 - DNA, 25 bp, Homo sapien
cctgaggaacaatgcagccgcgttc

SEQ ID NO: 1510069 - DNA, 25 bp, Homo sapien
tgaggaacaatgcagccgcgttcct

SEQ ID NO: 1510070 - DNA, 25 bp, Homo sapien
ctcctgaggaacaatgcagccgcgt

SEQ ID NO: 1510071 - DNA, 25 bp, Homo sapien
aggaacaatgcagccgcgttcctcc

SEQ ID NO: 1510072 - DNA, 25 bp, Homo sapien
ataggggtccatcggcctttgtcga

SEQ ID NO: 1510073 - DNA, 25 bp, Homo sapien
tggataggggtccatcggcctttgt

SEQ ID NO: 1510074 - DNA, 25 bp, Homo sapien
tggtggataggggtccatcggcctt

SEQ ID NO: 1510075 - DNA, 25 bp, Homo sapien
tgacacgatggtggtcgtgggtggt

SEQ ID NO: 1510076 - DNA, 25 bp, Homo sapien
tgggaagggtcctgcgggttccaga

SEQ ID NO: 1510077 - DNA, 25 bp, Homo sapien
tctgggaagggtcctgcgggttcca

SEQ ID NO: 1510078 - DNA, 25 bp, Homo sapien
ctgggaagggtcctgcgggttccag

SEQ ID NO: 1510079 - DNA, 25 bp, Homo sapien
gaagaattggatccctagccccaag

SEQ ID NO: 1510080 - DNA, 25 bp, Homo sapien
aattggatccctagccccaaggatg

SEQ ID NO: 1510081 - DNA, 25 bp, Homo sapien
gatccctagccccaaggatgacact

SEQ ID NO: 1510082 - DNA, 25 bp, Homo sapien
atgaagaattggatccctagcccca

SEQ ID NO: 1510083 - DNA, 25 bp, Homo sapien
tgggtaaaccggcaggctcaggacc

SEQ ID NO: 1510084 - DNA, 25 bp, Homo sapien
cctgggtaaaccggcaggctcagga

SEQ ID NO: 1510085 - DNA, 25 bp, Homo sapien
tcccctgggtaaaccggcaggctca

SEQ ID NO: 1510086 - DNA, 25 bp, Homo sapien
tgctgtcccctgggtaaaccggcag

SEQ ID NO: 1510087 - DNA, 25 bp, Homo sapien
cagacaccaggcaattgagtttgtc

SEQ ID NO: 1510088 - DNA, 25 bp, Homo sapien
tgagctggggccaccgtgtaatgtc

SEQ ID NO: 1510089 - DNA, 25 bp, Homo sapien
tgtaatgtccttctccggatgtggg

SEQ ID NO: 1510090 - DNA, 25 bp, Homo sapien
ggcaattgagtttgtcacggtgagc

SEQ ID NO: 1510091 - DNA, 25 bp, Homo sapien
gctgggagtccccacagatccctgg

SEQ ID NO: 1510092 - DNA, 25 bp, Homo sapien
atccctgggacctctctgcccttct

SEQ ID NO: 1510093 - DNA, 25 bp, Homo sapien
tgggacctctctgcccttctgaacc

SEQ ID NO: 1510094 - DNA, 25 bp, Homo sapien
ctggctgggagtccccacagatccc

SEQ ID NO: 1510095 - DNA, 25 bp, Homo sapien
gctgtgagccagcttcgggataggg

SEQ ID NO: 1510096 - DNA, 25 bp, Homo sapien
cagcttcgggataggggcctctgca

SEQ ID NO: 1510097 - DNA, 25 bp, Homo sapien
agccagcttcgggataggggcctct

SEQ ID NO: 1510098 - DNA, 25 bp, Homo sapien
ggtgctgtgagccagcttcgggata

SEQ ID NO: 1510099 - DNA, 25 bp, Homo sapien
cattaataatcactatgttcctggc

SEQ ID NO: 1510100 - DNA, 25 bp, Homo sapien
gctagccaattacaatgaagagttt

SEQ ID NO: 1510101 - DNA, 25 bp, Homo sapien
aaaggcccttagtcaatatctagtg

SEQ ID NO: 1510102 - DNA, 25 bp, Homo sapien
aaaacagactaggagcttgcctgcc

SEQ ID NO: 1510103 - DNA, 25 bp, Homo sapien
tctaactctccttcttgctgcaacg

SEQ ID NO: 1510104 - DNA, 25 bp, Homo sapien
gggcggcctctgcattcctgaactg

SEQ ID NO: 1510105 - DNA, 25 bp, Homo sapien
tcggtgtttctctacgtctaactct

SEQ ID NO: 1510106 - DNA, 25 bp, Homo sapien
ttcttgctgcaacgcatttgccggg

SEQ ID NO: 1510107 - DNA, 25 bp, Homo sapien
gccgggccgtactctcttctggcat

SEQ ID NO: 1510108 - DNA, 25 bp, Homo sapien
agggcgccagggcttccggaggtgg

SEQ ID NO: 1510109 - DNA, 25 bp, Homo sapien
ccatgaacttggccggagcagcctt

SEQ ID NO: 1510110 - DNA, 25 bp, Homo sapien
tgctgccggtaatgacaggccggag

SEQ ID NO: 1510111 - DNA, 25 bp, Homo sapien
ttgggaatatctaatcgtggctggc

SEQ ID NO: 1510112 - DNA, 25 bp, Homo sapien
tcactttcgactgcgtattaatcgg

SEQ ID NO: 1510113 - DNA, 25 bp, Homo sapien
gtatgtctgtgtatagcgtgtaatt

SEQ ID NO: 1510114 - DNA, 25 bp, Homo sapien
tgtgtgtgtcagcatcactttcgac

SEQ ID NO: 1510115 - DNA, 25 bp, Homo sapien
ccttgtgggtgacgtgtctacacac

SEQ ID NO: 1510116 - DNA, 25 bp, Homo sapien
cctggatgtccgagcccttgtgggt

SEQ ID NO: 1510117 - DNA, 25 bp, Homo sapien
actatccctggatgtccgagccctt

SEQ ID NO: 1510118 - DNA, 25 bp, Homo sapien
tcaatgggcactatccctggatgtc

SEQ ID NO: 1510119 - DNA, 25 bp, Homo sapien
tgtttctatgggtctataaataggg

SEQ ID NO: 1510120 - DNA, 25 bp, Homo sapien
gctccgtctcaagaactcttgtagg

SEQ ID NO: 1510121 - DNA, 25 bp, Homo sapien
ggcttcaggtccaagctactttgct

SEQ ID NO: 1510122 - DNA, 25 bp, Homo sapien
tgaggcttatggtgctgggtgaccc

SEQ ID NO: 1510123 - DNA, 25 bp, Homo sapien
ccacgtccagcagatcctcccattc

SEQ ID NO: 1510124 - DNA, 25 bp, Homo sapien
tgtccaggcccttccgagggaggtg

SEQ ID NO: 1510125 - DNA, 25 bp, Homo sapien
tgatcggcttctctttatccgccac

SEQ ID NO: 1510126 - DNA, 25 bp, Homo sapien
gagtggggcgccctctctcgcagct

SEQ ID NO: 1510127 - DNA, 25 bp, Homo sapien
tcagggtccactcaacggtcgatgg

SEQ ID NO: 1510128 - DNA, 25 bp, Homo sapien
cctcagggtccactcaacggtcgat

SEQ ID NO: 1510129 - DNA, 25 bp, Homo sapien
ctcagggtccactcaacggtcgatg

SEQ ID NO: 1510130 - DNA, 25 bp, Homo sapien
cagggtccactcaacggtcgatggt

SEQ ID NO: 1510131 - DNA, 25 bp, Homo sapien
gatctggaaggtcagagtcaccggc

SEQ ID NO: 1510132 - DNA, 25 bp, Homo sapien
ctggaaggtcagagtcaccggcagg

SEQ ID NO: 1510133 - DNA, 25 bp, Homo sapien
tctggaaggtcagagtcaccggcag

SEQ ID NO: 1510134 - DNA, 25 bp, Homo sapien
ctagatctggaaggtcagagtcacc

SEQ ID NO: 1510135 - DNA, 25 bp, Homo sapien
tgacaccggctccagcattggctct

SEQ ID NO: 1510136 - DNA, 25 bp, Homo sapien
cgctggcatcggctccagggctgac

SEQ ID NO: 1510137 - DNA, 25 bp, Homo sapien
caaacccaggtaatctgtccacagg

SEQ ID NO: 1510138 - DNA, 25 bp, Homo sapien
ttcaggaccctctttcccactcaga

SEQ ID NO: 1510139 - DNA, 25 bp, Homo sapien
tgtgtcctgtgtcttcgccttgtca

SEQ ID NO: 1510140 - DNA, 25 bp, Homo sapien
cttgtcaggccggaccagcttcttg

SEQ ID NO: 1510141 - DNA, 25 bp, Homo sapien
gactcgccgttgtgtttgcagaaag

SEQ ID NO: 1510142 - DNA, 25 bp, Homo sapien
ccttcagcacgtgggactggtagat

SEQ ID NO: 1510143 - DNA, 25 bp, Homo sapien
acaggtcccccccagccacctgtgc

SEQ ID NO: 1510144 - DNA, 25 bp, Homo sapien
cggacaggtcccccccagccacctg

SEQ ID NO: 1510145 - DNA, 25 bp, Homo sapien
aggtcccccccagccacctgtgcag

SEQ ID NO: 1510146 - DNA, 25 bp, Homo sapien
cccccccagccacctgtgcaggcac

SEQ ID NO: 1510147 - DNA, 25 bp, Homo sapien
gagcaggagggcgaaggctcagact

SEQ ID NO: 1510148 - DNA, 25 bp, Homo sapien
caggagggcgaaggctcagacttcc

SEQ ID NO: 1510149 - DNA, 25 bp, Homo sapien
agggcgaaggctcagacttcccggc

SEQ ID NO: 1510150 - DNA, 25 bp, Homo sapien
ggcgaaggctcagacttcccggcac

SEQ ID NO: 1510151 - DNA, 25 bp, Homo sapien
ggagtgggggcagtcgtcatagggt

SEQ ID NO: 1510152 - DNA, 25 bp, Homo sapien
agtcgtcatagggtgggtcttcctg

SEQ ID NO: 1510153 - DNA, 25 bp, Homo sapien
ggaaatccagccgagcccgggtgcc

SEQ ID NO: 1510154 - DNA, 25 bp, Homo sapien
ctggaaatccagccgagcccgggtg

SEQ ID NO: 1510155 - DNA, 25 bp, Homo sapien
caaggacagggcgatttcagctctt

SEQ ID NO: 1510156 - DNA, 25 bp, Homo sapien
ggctgactggatgcccagcactagg

SEQ ID NO: 1510157 - DNA, 25 bp, Homo sapien
gcactagggaaacggcagatggcac

SEQ ID NO: 1510158 - DNA, 25 bp, Homo sapien
atttattgagggctgactggatgcc

SEQ ID NO: 1510159 - DNA, 25 bp, Homo sapien
gaaacaggatctccctgccggctcc

SEQ ID NO: 1510160 - DNA, 25 bp, Homo sapien
gaggaaacaggatctccctgccggc

SEQ ID NO: 1510161 - DNA, 25 bp, Homo sapien
aggaaacaggatctccctgccggct

SEQ ID NO: 1510162 - DNA, 25 bp, Homo sapien
tgaggaaacaggatctccctgccgg

SEQ ID NO: 1510163 - DNA, 25 bp, Homo sapien
agaaaaatagaaggccggtgtggtg

SEQ ID NO: 1510164 - DNA, 25 bp, Homo sapien
caaaaaggatttaattcatgctggt

SEQ ID NO: 1510165 - DNA, 25 bp, Homo sapien
ttaattcatgctggtaagaaaaata

SEQ ID NO: 1510166 - DNA, 25 bp, Homo sapien
aaaggatttaattcatgctggtaag

SEQ ID NO: 1510167 - DNA, 25 bp, Homo sapien
ctcaaggggaagataaaatgactaa

SEQ ID NO: 1510168 - DNA, 25 bp, Homo sapien
atttctcaaggggaagataaaatga

SEQ ID NO: 1510169 - DNA, 25 bp, Homo sapien
aatgactaagaggaagaagctgcgg

SEQ ID NO: 1510170 - DNA, 25 bp, Homo sapien
atgactaagaggaagaagctgcgga

SEQ ID NO: 1510171 - DNA, 25 bp, Homo sapien
gagaaaccggcctatggcagctctt

SEQ ID NO: 1510172 - DNA, 25 bp, Homo sapien
gtcctcaacgacttctgtggcccag

SEQ ID NO: 1510173 - DNA, 25 bp, Homo sapien
gcgacttattcccaactgatccagg

SEQ ID NO: 1510174 - DNA, 25 bp, Homo sapien
tgatccaggcagagctcgtttctga

SEQ ID NO: 1510175 - DNA, 25 bp, Homo sapien
ctgagtcctgcactcctcgtcggcg

SEQ ID NO: 1510176 - DNA, 25 bp, Homo sapien
ttcaaggctggatgcccggaccacc

SEQ ID NO: 1510177 - DNA, 25 bp, Homo sapien
ggagcgcggccactgggctcgccgg

SEQ ID NO: 1510178 - DNA, 25 bp, Homo sapien
gcttccctgcttggccgtcccactt

SEQ ID NO: 1510179 - DNA, 25 bp, Homo sapien
ggcgggcggccgcggcgcctctgcc

SEQ ID NO: 1510180 - DNA, 25 bp, Homo sapien
ccgggggtcctttcctcttgtgcat

SEQ ID NO: 1510181 - DNA, 25 bp, Homo sapien
ctggcgggcggccgcggcgcctctg

SEQ ID NO: 1510182 - DNA, 25 bp, Homo sapien
cgggcggccgcggcgcctctgcccg

SEQ ID NO: 1510183 - DNA, 25 bp, Homo sapien
ggggagaggtcaaccagcaggccca

SEQ ID NO: 1510184 - DNA, 25 bp, Homo sapien
ctggggagaggtcaaccagcaggcc

SEQ ID NO: 1510185 - DNA, 25 bp, Homo sapien
tggggagaggtcaaccagcaggccc

SEQ ID NO: 1510186 - DNA, 25 bp, Homo sapien
gggagaggtcaaccagcaggcccag

SEQ ID NO: 1510187 - DNA, 25 bp, Homo sapien
gcccccgaccaaagccaagaactca

SEQ ID NO: 1510188 - DNA, 25 bp, Homo sapien
tccagttcttcatcgttagccccgt

SEQ ID NO: 1510189 - DNA, 25 bp, Homo sapien
agttcttcatcgttagccccgtcct

SEQ ID NO: 1510190 - DNA, 25 bp, Homo sapien
gctggcccccgaccaaagccaagaa

SEQ ID NO: 1510191 - DNA, 25 bp, Homo sapien
tcaatggcctccatcggcaagggac

SEQ ID NO: 1510192 - DNA, 25 bp, Homo sapien
atccgggtctctcatgcacaggctg

SEQ ID NO: 1510193 - DNA, 25 bp, Homo sapien
ctcatccgggtctctcatgcacagg

SEQ ID NO: 1510194 - DNA, 25 bp, Homo sapien
cagcctccaagtcgtcctcatccgt

SEQ ID NO: 1510195 - DNA, 25 bp, Homo sapien
ccacaggaggtggggtctctgaagc

SEQ ID NO: 1510196 - DNA, 25 bp, Homo sapien
tccagccccggatgaggggcctcag

SEQ ID NO: 1510197 - DNA, 25 bp, Homo sapien
tgctgtctgatagagcgccagcctc

SEQ ID NO: 1510198 - DNA, 25 bp, Homo sapien
gcttgtctggcgctttcaattgctg

SEQ ID NO: 1510199 - DNA, 25 bp, Homo sapien
gcatcttggcgctgtctccagcttg

SEQ ID NO: 1510200 - DNA, 25 bp, Homo sapien
aatggcattgcccttacggatggag

SEQ ID NO: 1510201 - DNA, 25 bp, Homo sapien
cgggatgtccgcttcgtcaatggca

SEQ ID NO: 1510202 - DNA, 25 bp, Homo sapien
tttcctatggccactggcggcggga

SEQ ID NO: 1510203 - DNA, 25 bp, Homo sapien
cagggctgtaggtaggcgtggacgc

SEQ ID NO: 1510204 - DNA, 25 bp, Homo sapien
agggcagccagcttgtagtcgcgct

SEQ ID NO: 1510205 - DNA, 25 bp, Homo sapien
cagccagcttgtagtcgcgctggcg

SEQ ID NO: 1510206 - DNA, 25 bp, Homo sapien
ccagcttgtagtcgcgctggcggct

SEQ ID NO: 1510207 - DNA, 25 bp, Homo sapien
tggagggcagccagcttgtagtcgc

SEQ ID NO: 1510208 - DNA, 25 bp, Homo sapien
gtctagcggcagcagtggtatctcc

SEQ ID NO: 1510209 - DNA, 25 bp, Homo sapien
cacgcggaagtgtctagcggcagca

SEQ ID NO: 1510210 - DNA, 25 bp, Homo sapien
agtgtctagcggcagcagtggtatc

SEQ ID NO: 1510211 - DNA, 25 bp, Homo sapien
cttagccacgcggaagtgtctagcg

SEQ ID NO: 1510212 - DNA, 25 bp, Homo sapien
ggcaggcaggagaggtccacgggct

SEQ ID NO: 1510213 - DNA, 25 bp, Homo sapien
ggtccacgggctcaccccggctcag

SEQ ID NO: 1510214 - DNA, 25 bp, Homo sapien
gctcagggcctccaagacagcatca

SEQ ID NO: 1510215 - DNA, 25 bp, Homo sapien
gggcctccaagacagcatcaaagct

SEQ ID NO: 1510216 - DNA, 25 bp, Homo sapien
gcgccgtagcgggggtcggaggctg

SEQ ID NO: 1510217 - DNA, 25 bp, Homo sapien
tgttgtggagggcgccgtagcgggg

SEQ ID NO: 1510218 - DNA, 25 bp, Homo sapien
ctgttgtggagggcgccgtagcggg

SEQ ID NO: 1510219 - DNA, 25 bp, Homo sapien
ctgcggccacctggtaccgctccat

SEQ ID NO: 1510220 - DNA, 25 bp, Homo sapien
cgtgcattcgagctttccgctggtc

SEQ ID NO: 1510221 - DNA, 25 bp, Homo sapien
cttgacgatgcgctcgtgcattcga

SEQ ID NO: 1510222 - DNA, 25 bp, Homo sapien
tggtaccgctccatccgctgctcca

SEQ ID NO: 1510223 - DNA, 25 bp, Homo sapien
cgggcaattcagcgacatccacggc

SEQ ID NO: 1510224 - DNA, 25 bp, Homo sapien
aattcagcgacatccacggctcggc

SEQ ID NO: 1510225 - DNA, 25 bp, Homo sapien
gcaattcagcgacatccacggctcg

SEQ ID NO: 1510226 - DNA, 25 bp, Homo sapien
gggcaattcagcgacatccacggct

SEQ ID NO: 1510227 - DNA, 25 bp, Homo sapien
tttcttgtagccacggggtcttgcc

SEQ ID NO: 1510228 - DNA, 25 bp, Homo sapien
tcgtccagccggtttgccaatttct

SEQ ID NO: 1510229 - DNA, 25 bp, Homo sapien
caatgtcaagctcccactgattaac

SEQ ID NO: 1510230 - DNA, 25 bp, Homo sapien
tacagtgcagacacatcatgtccaa

SEQ ID NO: 1510231 - DNA, 25 bp, Homo sapien
gttattgtgtgtcaggatggagacc

SEQ ID NO: 1510232 - DNA, 25 bp, Homo sapien
tatggtggagatgcagattcctctc

SEQ ID NO: 1510233 - DNA, 25 bp, Homo sapien
gagaccaactcacaccattatggtg

SEQ ID NO: 1510234 - DNA, 25 bp, Homo sapien
tgggtggccagtcgaggcctggtta

SEQ ID NO: 1510235 - DNA, 25 bp, Homo sapien
gacacccaccagactctgctgggtg

SEQ ID NO: 1510236 - DNA, 25 bp, Homo sapien
ccttcatcctggttggccagcttca

SEQ ID NO: 1510237 - DNA, 25 bp, Homo sapien
tcatggcagtctccaggacacccac

SEQ ID NO: 1510238 - DNA, 25 bp, Homo sapien
ttcttaggcacctcatcctcttcat

SEQ ID NO: 1510239 - DNA, 25 bp, Homo sapien
agccttgaactccttagttcaggtg

SEQ ID NO: 1510240 - DNA, 25 bp, Homo sapien
tttttaattgtcttggagatgaggt

SEQ ID NO: 1510241 - DNA, 25 bp, Homo sapien
tcaagcaattctcaccaaacacttt

SEQ ID NO: 1510242 - DNA, 25 bp, Homo sapien
cagagtatcactgtatcgtccaggc

SEQ ID NO: 1510243 - DNA, 25 bp, Homo sapien
tggtgacaacagtggtcatttagtg

SEQ ID NO: 1510244 - DNA, 25 bp, Homo sapien
aacagtggtcatttagtgggctccc

SEQ ID NO: 1510245 - DNA, 25 bp, Homo sapien
ctgatggtgacaacagtggtcattt

SEQ ID NO: 1510246 - DNA, 25 bp, Homo sapien
gacaacagtggtcatttagtgggct

SEQ ID NO: 1510247 - DNA, 25 bp, Homo sapien
agaggatgttagagatttcgtagcg

SEQ ID NO: 1510248 - DNA, 25 bp, Homo sapien
tagagatttcgtagcgcctgtgatg

SEQ ID NO: 1510249 - DNA, 25 bp, Homo sapien
ttcgtagcgcctgtgatgagtccag

SEQ ID NO: 1510250 - DNA, 25 bp, Homo sapien
gatgttagagatttcgtagcgcctg

SEQ ID NO: 1510251 - DNA, 25 bp, Homo sapien
ctttggggggcgctttggctgttgg

SEQ ID NO: 1510252 - DNA, 25 bp, Homo sapien
ggctgttggggctgatcccgactgg

SEQ ID NO: 1510253 - DNA, 25 bp, Homo sapien
gggctgatcccgactggggagttct

SEQ ID NO: 1510254 - DNA, 25 bp, Homo sapien
gctgatcccgactggggagttcttg

SEQ ID NO: 1510255 - DNA, 25 bp, Homo sapien
ccaggccacagccaggcaacaggca

SEQ ID NO: 1510256 - DNA, 25 bp, Homo sapien
gcccaggccacagccaggcaacagg

SEQ ID NO: 1510257 - DNA, 25 bp, Homo sapien
ctgcccaggccacagccaggcaaca

SEQ ID NO: 1510258 - DNA, 25 bp, Homo sapien
caggccacagccaggcaacaggcag

SEQ ID NO: 1510259 - DNA, 25 bp, Homo sapien
ctgtgggcataggagctgctatggg

SEQ ID NO: 1510260 - DNA, 25 bp, Homo sapien
tgtgggcataggagctgctatgggt

SEQ ID NO: 1510261 - DNA, 25 bp, Homo sapien
gtgggcataggagctgctatgggtg

SEQ ID NO: 1510262 - DNA, 25 bp, Homo sapien
tggcaccctccacgtcgtttttctg

SEQ ID NO: 1510263 - DNA, 25 bp, Homo sapien
ttgcgcgaggcctccagcataggct

SEQ ID NO: 1510264 - DNA, 25 bp, Homo sapien
cttggcttggcgcaggtgcatcttg

SEQ ID NO: 1510265 - DNA, 25 bp, Homo sapien
tttctgcttggctcgcagtgcggcc

SEQ ID NO: 1510266 - DNA, 25 bp, Homo sapien
ggcggcctcctgagacagacccggg

SEQ ID NO: 1510267 - DNA, 25 bp, Homo sapien
ggcaaagtcgtccttgttgacaggg

SEQ ID NO: 1510268 - DNA, 25 bp, Homo sapien
tgagttcaccatagcgccgggcggc

SEQ ID NO: 1510269 - DNA, 25 bp, Homo sapien
cgtgctgctgccgtatgagcttggt

SEQ ID NO: 1510270 - DNA, 25 bp, Homo sapien
aattggtttgagtggttcaggcaca

SEQ ID NO: 1510271 - DNA, 25 bp, Homo sapien
ctgggtgaattggtttgagtggttc

SEQ ID NO: 1510272 - DNA, 25 bp, Homo sapien
cccagctgggtgaattggtttgagt

SEQ ID NO: 1510273 - DNA, 25 bp, Homo sapien
ttcagtgatgttgcccagctgggtg

SEQ ID NO: 1510274 - DNA, 25 bp, Homo sapien
gaatgtccatgctccgcttacagtc

SEQ ID NO: 1510275 - DNA, 25 bp, Homo sapien
gaaggtcctttgctcaaagcgggcg

SEQ ID NO: 1510276 - DNA, 25 bp, Homo sapien
agaccccggacgaaggcttgcttca

SEQ ID NO: 1510277 - DNA, 25 bp, Homo sapien
tacagtcctccgccaacttttcaaa

SEQ ID NO: 1510278 - DNA, 25 bp, Homo sapien
aagttgatgcccttcacgatgaaga

SEQ ID NO: 1510279 - DNA, 25 bp, Homo sapien
tgggcaagttgatgcccttcacgat

SEQ ID NO: 1510280 - DNA, 25 bp, Homo sapien
tgggggtgtgggcaagttgatgccc

SEQ ID NO: 1510281 - DNA, 25 bp, Homo sapien
ttgatgcccttcacgatgaagagga

SEQ ID NO: 1510282 - DNA, 25 bp, Homo sapien
aagacatccagatcgccaggggaca

SEQ ID NO: 1510283 - DNA, 25 bp, Homo sapien
acatccagatcgccaggggacagtc

SEQ ID NO: 1510284 - DNA, 25 bp, Homo sapien
gacatccagatcgccaggggacagt

SEQ ID NO: 1510285 - DNA, 25 bp, Homo sapien
agacatccagatcgccaggggacag

SEQ ID NO: 1510286 - DNA, 25 bp, Homo sapien
gagtctgtgttcttgatcacactgg

SEQ ID NO: 1510287 - DNA, 25 bp, Homo sapien
cttgatcacactggtcttgtctttc

SEQ ID NO: 1510288 - DNA, 25 bp, Homo sapien
caggggagtctgtgttcttgatcac

SEQ ID NO: 1510289 - DNA, 25 bp, Homo sapien
cactggtcttgtctttctgagcttc

SEQ ID NO: 1510290 - DNA, 25 bp, Homo sapien
cagagtttgaactgctccttgaact

SEQ ID NO: 1510291 - DNA, 25 bp, Homo sapien
tggcccttcggaagccacggtggct

SEQ ID NO: 1510292 - DNA, 25 bp, Homo sapien
cccttgtgaaccacttcgaacttga

SEQ ID NO: 1510293 - DNA, 25 bp, Homo sapien
ccttggtctggatggcccttcggaa

SEQ ID NO: 1510294 - DNA, 25 bp, Homo sapien
tgtgtgtatagtggggacaggatgg

SEQ ID NO: 1510295 - DNA, 25 bp, Homo sapien
tagtggggacaggatggttggttca

SEQ ID NO: 1510296 - DNA, 25 bp, Homo sapien
gggacaggatggttggttcagagga

SEQ ID NO: 1510297 - DNA, 25 bp, Homo sapien
aggatggttggttcagaggagctcc

SEQ ID NO: 1510298 - DNA, 25 bp, Homo sapien
ccagcacccggtcagtcttgaacag

SEQ ID NO: 1510299 - DNA, 25 bp, Homo sapien
aaggatctcccggacctcacatgct

SEQ ID NO: 1510300 - DNA, 25 bp, Homo sapien
tcacatgctatctccagtgcatcca

SEQ ID NO: 1510301 - DNA, 25 bp, Homo sapien
agcacccggtcagtcttgaacagcc

SEQ ID NO: 1510302 - DNA, 25 bp, Homo sapien
tgttaacgagtagcatggccatacc

SEQ ID NO: 1510303 - DNA, 25 bp, Homo sapien
ggctgggtcaacagacaggctcata

SEQ ID NO: 1510304 - DNA, 25 bp, Homo sapien
gccataccggagcacgcggatgaat

SEQ ID NO: 1510305 - DNA, 25 bp, Homo sapien
gtactgcaagtatttagggctgggc

SEQ ID NO: 1510306 - DNA, 25 bp, Homo sapien
caggacaagggagaacaagactggt

SEQ ID NO: 1510307 - DNA, 25 bp, Homo sapien
aggacaagggagaacaagactggtt

SEQ ID NO: 1510308 - DNA, 25 bp, Homo sapien
ggccaggacaagggagaacaagact

SEQ ID NO: 1510309 - DNA, 25 bp, Homo sapien
caggaagtgactagaggcccagggc

SEQ ID NO: 1510310 - DNA, 25 bp, Homo sapien
tgccggcacagggtcaatgaccagc

SEQ ID NO: 1510311 - DNA, 25 bp, Homo sapien
ggctgtcagtggctcccgaatccgg

SEQ ID NO: 1510312 - DNA, 25 bp, Homo sapien
ctctgtcgtcgtctccaactgctgg

SEQ ID NO: 1510313 - DNA, 25 bp, Homo sapien
gaatccggaccattacctccagtcg

SEQ ID NO: 1510314 - DNA, 25 bp, Homo sapien
ctggggttgctgatgggtgggggtg

SEQ ID NO: 1510315 - DNA, 25 bp, Homo sapien
agaggagagaaccagtcctgtgagt

SEQ ID NO: 1510316 - DNA, 25 bp, Homo sapien
cagtcctgtgagtcctgggcccctg

SEQ ID NO: 1510317 - DNA, 25 bp, Homo sapien
tgggcccctgaaccaagcttccctc

SEQ ID NO: 1510318 - DNA, 25 bp, Homo sapien
agtcctgggcccctgaaccaagctt

SEQ ID NO: 1510319 - DNA, 25 bp, Homo sapien
ctgactcccttgcaggggcaggcac

SEQ ID NO: 1510320 - DNA, 25 bp, Homo sapien
tgttccctgactcccttgcaggggc

SEQ ID NO: 1510321 - DNA, 25 bp, Homo sapien
gcaggcacaggaggggccttccctt

SEQ ID NO: 1510322 - DNA, 25 bp, Homo sapien
gggcaggcacaggaggggccttccc

SEQ ID NO: 1510323 - DNA, 25 bp, Homo sapien
cgctccagacgctcttggtcaaacg

SEQ ID NO: 1510324 - DNA, 25 bp, Homo sapien
gctcttggtcaaacgccagcacact

SEQ ID NO: 1510325 - DNA, 25 bp, Homo sapien
ttggtcaaacgccagcacactgagg

SEQ ID NO: 1510326 - DNA, 25 bp, Homo sapien
cagacgctcttggtcaaacgccagc

SEQ ID NO: 1510327 - DNA, 25 bp, Homo sapien
actggctgcgttgcatgatgtcctg

SEQ ID NO: 1510328 - DNA, 25 bp, Homo sapien
ctctgccactggctgcgttgcatga

SEQ ID NO: 1510329 - DNA, 25 bp, Homo sapien
ctgccactggctgcgttgcatgatg

SEQ ID NO: 1510330 - DNA, 25 bp, Homo sapien
gccactggctgcgttgcatgatgtc

SEQ ID NO: 1510331 - DNA, 25 bp, Homo sapien
cctgctgccatcgttgcccaggcgc

SEQ ID NO: 1510332 - DNA, 25 bp, Homo sapien
gggcagcctccgtgtagaactgcag

SEQ ID NO: 1510333 - DNA, 25 bp, Homo sapien
tgccgctccagctgggctgcgtatt

SEQ ID NO: 1510334 - DNA, 25 bp, Homo sapien
cagcctccgtgtagaactgcagctg

SEQ ID NO: 1510335 - DNA, 25 bp, Homo sapien
gatgggcattcagcaggtagtccct

SEQ ID NO: 1510336 - DNA, 25 bp, Homo sapien
gggatgggcattcagcaggtagtcc

SEQ ID NO: 1510337 - DNA, 25 bp, Homo sapien
ggatgggcattcagcaggtagtccc

SEQ ID NO: 1510338 - DNA, 25 bp, Homo sapien
tatagagcgcctcctttgcagcatc

SEQ ID NO: 1510339 - DNA, 25 bp, Homo sapien
gattccgcctatagagcgcctcctt

SEQ ID NO: 1510340 - DNA, 25 bp, Homo sapien
accagattccgcctatagagcgcct

SEQ ID NO: 1510341 - DNA, 25 bp, Homo sapien
actctctaccagattccgcctatag

SEQ ID NO: 1510342 - DNA, 25 bp, Homo sapien
gggtcatggaggtgggctacgacca

SEQ ID NO: 1510343 - DNA, 25 bp, Homo sapien
catggaggtgggctacgaccacagt

SEQ ID NO: 1510344 - DNA, 25 bp, Homo sapien
gtgggctacgaccacagtgatcccc

SEQ ID NO: 1510345 - DNA, 25 bp, Homo sapien
gaggtgggctacgaccacagtgatc

SEQ ID NO: 1510346 - DNA, 25 bp, Homo sapien
tcttcccggtatcggggcctgctgc

SEQ ID NO: 1510347 - DNA, 25 bp, Homo sapien
tgattgtctgcttgtctggttcgtg

SEQ ID NO: 1510348 - DNA, 25 bp, Homo sapien
ggttcgtggctgtgtcggctcttcc

SEQ ID NO: 1510349 - DNA, 25 bp, Homo sapien
gggtgagtccagaaccgattgtccg

SEQ ID NO: 1510350 - DNA, 25 bp, Homo sapien
gaagtaaagtgcttgcaggggccct

SEQ ID NO: 1510351 - DNA, 25 bp, Homo sapien
agtaaagtgcttgcaggggccctcg

SEQ ID NO: 1510352 - DNA, 25 bp, Homo sapien
tgtgcaaacaggactctccagggcc

SEQ ID NO: 1510353 - DNA, 25 bp, Homo sapien
acaggaagtaaagtgcttgcagggg

SEQ ID NO: 1510354 - DNA, 25 bp, Homo sapien
gccctggctattttattccatgtgc

SEQ ID NO: 1510355 - DNA, 25 bp, Homo sapien
ctgtgcagggccaacaggcttcaca

SEQ ID NO: 1510356 - DNA, 25 bp, Homo sapien
tgggagggtcatgaccgcctctctg

SEQ ID NO: 1510357 - DNA, 25 bp, Homo sapien
aggcttcacatgacgagcatcgcgg

SEQ ID NO: 1510358 - DNA, 25 bp, Homo sapien
caaacctgcgtgtggtggacacggc

SEQ ID NO: 1510359 - DNA, 25 bp, Homo sapien
cctctatggcaatgggctggaccgc

SEQ ID NO: 1510360 - DNA, 25 bp, Homo sapien
cgggcctgacggagcttaacctggc

SEQ ID NO: 1510361 - DNA, 25 bp, Homo sapien
ttaacctggcctataaccgcctggc

SEQ ID NO: 1510362 - DNA, 25 bp, Homo sapien
ggcagggaatcagctaacccggctg

SEQ ID NO: 1510363 - DNA, 25 bp, Homo sapien
cattggtcctttttcgggacagcgg

SEQ ID NO: 1510364 - DNA, 25 bp, Homo sapien
ggcgaaagcccgcactcgcgctatg

SEQ ID NO: 1510365 - DNA, 25 bp, Homo sapien
tgccgcctcctcattggtccttttt

SEQ ID NO: 1510366 - DNA, 25 bp, Homo sapien
tcgcgctatgcctgtccatcaaagc

SEQ ID NO: 1510367 - DNA, 25 bp, Homo sapien
cctccctccacttccggagcaaccg

SEQ ID NO: 1510368 - DNA, 25 bp, Homo sapien
tccctccacttccggagcaaccggc

SEQ ID NO: 1510369 - DNA, 25 bp, Homo sapien
ctccctccacttccggagcaaccgg

SEQ ID NO: 1510370 - DNA, 25 bp, Homo sapien
ctccgatttcgagctgggcgccatt

SEQ ID NO: 1510371 - DNA, 25 bp, Homo sapien
cagctgcttgaggacgtgctcccgc

SEQ ID NO: 1510372 - DNA, 25 bp, Homo sapien
tccgctccgatttcgagctgggcgc

SEQ ID NO: 1510373 - DNA, 25 bp, Homo sapien
cgctgttccgctccgatttcgagct

SEQ ID NO: 1510374 - DNA, 25 bp, Homo sapien
gcttcggtaactctcactctgcggg

SEQ ID NO: 1510375 - DNA, 25 bp, Homo sapien
tactggaactcccagctcatgtgtg

SEQ ID NO: 1510376 - DNA, 25 bp, Homo sapien
tgcaagagatccacatttctgccct

SEQ ID NO: 1510377 - DNA, 25 bp, Homo sapien
aagactcagccctatccagggagct

SEQ ID NO: 1510378 - DNA, 25 bp, Homo sapien
aaggggtggccagggcacttcaggc

SEQ ID NO: 1510379 - DNA, 25 bp, Homo sapien
aggggtggccagggcacttcaggca

SEQ ID NO: 1510380 - DNA, 25 bp, Homo sapien
gggtggccagggcacttcaggcacc

SEQ ID NO: 1510381 - DNA, 25 bp, Homo sapien
ggtggccagggcacttcaggcacca

SEQ ID NO: 1510382 - DNA, 25 bp, Homo sapien
cacaatgttcttgagggacacgcac

SEQ ID NO: 1510383 - DNA, 25 bp, Homo sapien
atgttcttgagggacacgcacaccc

SEQ ID NO: 1510384 - DNA, 25 bp, Homo sapien
ttcttgagggacacgcacacccggg

SEQ ID NO: 1510385 - DNA, 25 bp, Homo sapien
cctgcatagaggaagtcctcatcca

SEQ ID NO: 1510386 - DNA, 25 bp, Homo sapien
ccgcatttggaaaagcccaggaaga

SEQ ID NO: 1510387 - DNA, 25 bp, Homo sapien
gaactcccaccagtacagatggtag

SEQ ID NO: 1510388 - DNA, 25 bp, Homo sapien
gtgtaggagaggacgtagcggccgc

SEQ ID NO: 1510389 - DNA, 25 bp, Homo sapien
tagaaggagaagtcgtcatccccac

SEQ ID NO: 1510390 - DNA, 25 bp, Homo sapien
ggccagcctggtgttgaagcctccc

SEQ ID NO: 1510391 - DNA, 25 bp, Homo sapien
gctgtgacctgctgaaccacaccat

SEQ ID NO: 1510392 - DNA, 25 bp, Homo sapien
tgccaggccctggtaatttcatatg

SEQ ID NO: 1510393 - DNA, 25 bp, Homo sapien
tggaatcttgatgatgaccccagga

SEQ ID NO: 1510394 - DNA, 25 bp, Homo sapien
tacaggtcgctgtagatctcctcgt

SEQ ID NO: 1510395 - DNA, 25 bp, Homo sapien
tcgcatacggtcaggtacaggtcgc

SEQ ID NO: 1510396 - DNA, 25 bp, Homo sapien
tcgtcctggaatagccgaacctgcc

SEQ ID NO: 1510397 - DNA, 25 bp, Homo sapien
accttggaggcgtcgctgggccact

SEQ ID NO: 1510398 - DNA, 25 bp, Homo sapien
gttcatgagcatcccgttggccgag

SEQ ID NO: 1510399 - DNA, 25 bp, Homo sapien
ccacggtgctgacgtagatgtcacg

SEQ ID NO: 1510400 - DNA, 25 bp, Homo sapien
agcacagcggcctggcggtggcacg

SEQ ID NO: 1510401 - DNA, 25 bp, Homo sapien
tcacggtggttctcgtcactcatca

SEQ ID NO: 1510402 - DNA, 25 bp, Homo sapien
gtacttggtgtgcagcatgaagcca

SEQ ID NO: 1510403 - DNA, 25 bp, Homo sapien
cgagtggacggagacggcgcaggcc

SEQ ID NO: 1510404 - DNA, 25 bp, Homo sapien
ctgccgagtggacggagacggcgca

SEQ ID NO: 1510405 - DNA, 25 bp, Homo sapien
gcgcaggccaccagggagtagctgg

SEQ ID NO: 1510406 - DNA, 25 bp, Homo sapien
gacggcgcaggccaccagggagtag

SEQ ID NO: 1510407 - DNA, 25 bp, Homo sapien
ggctaggggctcagagtgcgcacgg

SEQ ID NO: 1510408 - DNA, 25 bp, Homo sapien
gggccgcctcagggcagaagctggg

SEQ ID NO: 1510409 - DNA, 25 bp, Homo sapien
gcacggcagcggctgccagagggtc

SEQ ID NO: 1510410 - DNA, 25 bp, Homo sapien
aatggcgggcgagggctcaggagac

SEQ ID NO: 1510411 - DNA, 25 bp, Homo sapien
tctccggactccagcacatagtaca

SEQ ID NO: 1510412 - DNA, 25 bp, Homo sapien
cagcacatagtacagcttggtgtag

SEQ ID NO: 1510413 - DNA, 25 bp, Homo sapien
tacagcttggtgtagttgacatagc

SEQ ID NO: 1510414 - DNA, 25 bp, Homo sapien
ttggtgtagttgacatagccaggct

SEQ ID NO: 1510415 - DNA, 25 bp, Homo sapien
aagatcagtcaccacgaagggcagg

SEQ ID NO: 1510416 - DNA, 25 bp, Homo sapien
tggacagcagtccgctcccgcatgg

SEQ ID NO: 1510417 - DNA, 25 bp, Homo sapien
agtcaccacgaagggcagggagatc

SEQ ID NO: 1510418 - DNA, 25 bp, Homo sapien
gcaggttgcggccacgaagatcagt

SEQ ID NO: 1510419 - DNA, 25 bp, Homo sapien
cccggcagctccccgggactgtcct

SEQ ID NO: 1510420 - DNA, 25 bp, Homo sapien
acggtgccaactgccccccggcagc

SEQ ID NO: 1510421 - DNA, 25 bp, Homo sapien
gcagctccccgggactgtccttggc

SEQ ID NO: 1510422 - DNA, 25 bp, Homo sapien
ggacggtgccaactgccccccggca

SEQ ID NO: 1510423 - DNA, 25 bp, Homo sapien
gcgtcgtggcggatgacctcattga

SEQ ID NO: 1510424 - DNA, 25 bp, Homo sapien
gaacagaactgatggccccaggtag

SEQ ID NO: 1510425 - DNA, 25 bp, Homo sapien
tattcgaagtctagtgtgagctgct

SEQ ID NO: 1510426 - DNA, 25 bp, Homo sapien
tgtcatagtcgctgaaagaacagaa

SEQ ID NO: 1510427 - DNA, 25 bp, Homo sapien
gagcagcaggccaatgttgatgagg

SEQ ID NO: 1510428 - DNA, 25 bp, Homo sapien
ggagcagcaggccaatgttgatgag

SEQ ID NO: 1510429 - DNA, 25 bp, Homo sapien
cagtggagagggacataggacaaac

SEQ ID NO: 1510430 - DNA, 25 bp, Homo sapien
aacgctgggacagccgggctcctga

SEQ ID NO: 1510431 - DNA, 25 bp, Homo sapien
tggcacagggagagccttctcacgt

SEQ ID NO: 1510432 - DNA, 25 bp, Homo sapien
ttgtctttggaacagctatggaggg

SEQ ID NO: 1510433 - DNA, 25 bp, Homo sapien
cttgaggctggtgtgataggtcttt

SEQ ID NO: 1510434 - DNA, 25 bp, Homo sapien
tacactgactgtctcgaagatccct

SEQ ID NO: 1510435 - DNA, 25 bp, Homo sapien
tgttgaggtcccatgccaccttgag

SEQ ID NO: 1510436 - DNA, 25 bp, Homo sapien
gacctcagtcaggtcgcctacactg

SEQ ID NO: 1510437 - DNA, 25 bp, Homo sapien
ccagggggtgagtggctctcgtcgc

SEQ ID NO: 1510438 - DNA, 25 bp, Homo sapien
agggggtgagtggctctcgtcgcct

SEQ ID NO: 1510439 - DNA, 25 bp, Homo sapien
gccagggggtgagtggctctcgtcg

SEQ ID NO: 1510440 - DNA, 25 bp, Homo sapien
cagggggtgagtggctctcgtcgcc

SEQ ID NO: 1510441 - DNA, 25 bp, Homo sapien
ggtcatcctgttgacgtagcggccg

SEQ ID NO: 1510442 - DNA, 25 bp, Homo sapien
tcttgcggtaggagctccagacact

SEQ ID NO: 1510443 - DNA, 25 bp, Homo sapien
ttcatgaccatgtccacgcagctct

SEQ ID NO: 1510444 - DNA, 25 bp, Homo sapien
ttgtgcagcgcctcattggtcatcc

SEQ ID NO: 1510445 - DNA, 25 bp, Homo sapien
gtatatcgctcgctgtccgccagaa

SEQ ID NO: 1510446 - DNA, 25 bp, Homo sapien
gatccacgtatatcgctcgctgtcc

SEQ ID NO: 1510447 - DNA, 25 bp, Homo sapien
tgtccgccagaaccttcagggagca

SEQ ID NO: 1510448 - DNA, 25 bp, Homo sapien
tcacagcacgatccacgtatatcgc

SEQ ID NO: 1510449 - DNA, 25 bp, Homo sapien
cagctgtagccgagaaaagggcaaa

SEQ ID NO: 1510450 - DNA, 25 bp, Homo sapien
actagtgccggtcatcagtcggtgg

SEQ ID NO: 1510451 - DNA, 25 bp, Homo sapien
aataaaaagcgtccagaccctcagg

SEQ ID NO: 1510452 - DNA, 25 bp, Homo sapien
gttccgcaggctaacactagtgccg

SEQ ID NO: 1510453 - DNA, 25 bp, Homo sapien
gtgccgcgctcgtgtgtcctgaaaa

SEQ ID NO: 1510454 - DNA, 25 bp, Homo sapien
tcactgtctctggtaagtgccgcgc

SEQ ID NO: 1510455 - DNA, 25 bp, Homo sapien
tcctctcagagttgttcagatagcc

SEQ ID NO: 1510456 - DNA, 25 bp, Homo sapien
tgcaccccagcagtacatcgtggtc

SEQ ID NO: 1510457 - DNA, 25 bp, Homo sapien
gaggcgtgaaggatgggaaccagcc

SEQ ID NO: 1510458 - DNA, 25 bp, Homo sapien
ggcgtaacctttgcaggtgacgctt

SEQ ID NO: 1510459 - DNA, 25 bp, Homo sapien
tttggcatccaagagcagaacctgg

SEQ ID NO: 1510460 - DNA, 25 bp, Homo sapien
cacagggaggcgtgaaggatgggaa

SEQ ID NO: 1510461 - DNA, 25 bp, Homo sapien
cctcttcttgcccctgagtggaagg

SEQ ID NO: 1510462 - DNA, 25 bp, Homo sapien
tgcccctgagtggaagggatgaggc

SEQ ID NO: 1510463 - DNA, 25 bp, Homo sapien
gatgaggcccatgggctttgtatcc

SEQ ID NO: 1510464 - DNA, 25 bp, Homo sapien
gggatgaggcccatgggctttgtat

SEQ ID NO: 1510465 - DNA, 25 bp, Homo sapien
caccgcagcagcctaatttctgtat

SEQ ID NO: 1510466 - DNA, 25 bp, Homo sapien
caattatctggtcatgttgactgcc

SEQ ID NO: 1510467 - DNA, 25 bp, Homo sapien
tgagcagaaagtgatgttaccaatt

SEQ ID NO: 1510468 - DNA, 25 bp, Homo sapien
agtcatttgactaggaagagaacac

SEQ ID NO: 1510469 - DNA, 25 bp, Homo sapien
aaaagctaactgagcaggctgggcg

SEQ ID NO: 1510470 - DNA, 25 bp, Homo sapien
catgtaaagtgtacgcaagagcgga

SEQ ID NO: 1510471 - DNA, 25 bp, Homo sapien
gataaatcagatcgccgggaagtcc

SEQ ID NO: 1510472 - DNA, 25 bp, Homo sapien
cagagagcgcggcaaacctttggta

SEQ ID NO: 1510473 - DNA, 25 bp, Homo sapien
tgacgtcatcgaatcccgagtccgg

SEQ ID NO: 1510474 - DNA, 25 bp, Homo sapien
cagcgggtgggagctgggatcgaac

SEQ ID NO: 1510475 - DNA, 25 bp, Homo sapien
cagcggtgaccttttccggctggag

SEQ ID NO: 1510476 - DNA, 25 bp, Homo sapien
ggcggccgcgctgtctggccggctt

SEQ ID NO: 1510477 - DNA, 25 bp, Homo sapien
gagatagccgcggtcaccccggcag

SEQ ID NO: 1510478 - DNA, 25 bp, Homo sapien
ctagtccgggccctgtttctgtctc

SEQ ID NO: 1510479 - DNA, 25 bp, Homo sapien
ctcttctcgtcctgcagcacccaga

SEQ ID NO: 1510480 - DNA, 25 bp, Homo sapien
gtctcttctcgtcctgcagcaccca

SEQ ID NO: 1510481 - DNA, 25 bp, Homo sapien
tttctgtctcttctcgtcctgcagc

SEQ ID NO: 1510482 - DNA, 25 bp, Homo sapien
cattgatcctgctggttcagaaacc

SEQ ID NO: 1510483 - DNA, 25 bp, Homo sapien
gagctcctgactcaacaggtatgga

SEQ ID NO: 1510484 - DNA, 25 bp, Homo sapien
gagacctcacaatgttgcccgggct

SEQ ID NO: 1510485 - DNA, 25 bp, Homo sapien
gattgtagtggtggcaacatagctc

SEQ ID NO: 1510486 - DNA, 25 bp, Homo sapien
tgcagtatgtgctacgaggccaggc

SEQ ID NO: 1510487 - DNA, 25 bp, Homo sapien
caacatcattgacagagaggcgaga

SEQ ID NO: 1510488 - DNA, 25 bp, Homo sapien
tctgcctgaagaaagctgagtgcct

SEQ ID NO: 1510489 - DNA, 25 bp, Homo sapien
taatagcagtgaacgcccagtgcag

SEQ ID NO: 1510490 - DNA, 25 bp, Homo sapien
atgctttgaacgtgagagtgggcca

SEQ ID NO: 1510491 - DNA, 25 bp, Homo sapien
tgaacgtgagagtgggccagtgtct

SEQ ID NO: 1510492 - DNA, 25 bp, Homo sapien
gctggacggagatgctttgaacgtg

SEQ ID NO: 1510493 - DNA, 25 bp, Homo sapien
acggagatgctttgaacgtgagagt

SEQ ID NO: 1510494 - DNA, 25 bp, Homo sapien
cggtcagcacccataccgccaggag

SEQ ID NO: 1510495 - DNA, 25 bp, Homo sapien
cccggtcagcacccataccgccagg

SEQ ID NO: 1510496 - DNA, 25 bp, Homo sapien
tcagcacccataccgccaggagcag

SEQ ID NO: 1510497 - DNA, 25 bp, Homo sapien
ggtcagcacccataccgccaggagc

SEQ ID NO: 1510498 - DNA, 25 bp, Homo sapien
tgtctgatcgtctccaccgggagcc

SEQ ID NO: 1510499 - DNA, 25 bp, Homo sapien
gagcccccgcaggtgaagatgactg

SEQ ID NO: 1510500 - DNA, 25 bp, Homo sapien
gatgactgctcggatgaattctcgg

SEQ ID NO: 1510501 - DNA, 25 bp, Homo sapien
ccatagcctcgtgggccaggatgtc

SEQ ID NO: 1510502 - DNA, 25 bp, Homo sapien
gccagccactcgctggaccccatgg

SEQ ID NO: 1510503 - DNA, 25 bp, Homo sapien
ctcggctgccccgaagaaccccagg

SEQ ID NO: 1510504 - DNA, 25 bp, Homo sapien
catccagctcgcctgccagactgtc

SEQ ID NO: 1510505 - DNA, 25 bp, Homo sapien
atcagcatctgcatccgggaaggta

SEQ ID NO: 1510506 - DNA, 25 bp, Homo sapien
ggaagattcgaatgtgcccagagct

SEQ ID NO: 1510507 - DNA, 25 bp, Homo sapien
tgtaggccaggcaaacgcatggtta

SEQ ID NO: 1510508 - DNA, 25 bp, Homo sapien
caaaggaagcgtgcgtgcaaaggct

SEQ ID NO: 1510509 - DNA, 25 bp, Homo sapien
cactagttgagtggatggcaggact

SEQ ID NO: 1510510 - DNA, 25 bp, Homo sapien
gcccgaggcggcaacgggaagccga

SEQ ID NO: 1510511 - DNA, 25 bp, Homo sapien
gggtggtaccgcgtaccgcgcatcc

SEQ ID NO: 1510512 - DNA, 25 bp, Homo sapien
gcgctgctcctcttcgagctctggg

SEQ ID NO: 1510513 - DNA, 25 bp, Homo sapien
gcctccgcacctttcgctcagggtc

SEQ ID NO: 1510514 - DNA, 25 bp, Homo sapien
cacagccagaaaggggcgcccctgc

SEQ ID NO: 1510515 - DNA, 25 bp, Homo sapien
gccacagccagaaaggggcgcccct

SEQ ID NO: 1510516 - DNA, 25 bp, Homo sapien
gctggaaaagcacccacaacagagg

SEQ ID NO: 1510517 - DNA, 25 bp, Homo sapien
gaaaagcacccacaacagaggcagc

SEQ ID NO: 1510518 - DNA, 25 bp, Homo sapien
taccgttcgctctgcatacgcgtgg

SEQ ID NO: 1510519 - DNA, 25 bp, Homo sapien
gcttatcctggagcactggcgcctt

SEQ ID NO: 1510520 - DNA, 25 bp, Homo sapien
cgggaggagccgagtggcgcctgca

SEQ ID NO: 1510521 - DNA, 25 bp, Homo sapien
gggctccggttcgacctcgctgccg

SEQ ID NO: 1510522 - DNA, 25 bp, Homo sapien
caagaggctcccacgagcagttcaa

SEQ ID NO: 1510523 - DNA, 25 bp, Homo sapien
cgagcagttcaagtcgcccaagggt

SEQ ID NO: 1510524 - DNA, 25 bp, Homo sapien
aagggtccaactccgtagcactgca

SEQ ID NO: 1510525 - DNA, 25 bp, Homo sapien
ttggctctggaggtgtaactcggag

SEQ ID NO: 1510526 - DNA, 25 bp, Homo sapien
ccacagtctgggttttgttggaacg

SEQ ID NO: 1510527 - DNA, 25 bp, Homo sapien
cagacaaggagtttgtcagacatgg

SEQ ID NO: 1510528 - DNA, 25 bp, Homo sapien
ttagtgccccagacaaggagtttgt

SEQ ID NO: 1510529 - DNA, 25 bp, Homo sapien
gacatggtgagctgttcccgaggaa

SEQ ID NO: 1510530 - DNA, 25 bp, Homo sapien
tgtagtgagccacgccctccaagag

SEQ ID NO: 1510531 - DNA, 25 bp, Homo sapien
gggtgtagtgagccacgccctccaa

SEQ ID NO: 1510532 - DNA, 25 bp, Homo sapien
aagagcacccaccccgcatagagcg

SEQ ID NO: 1510533 - DNA, 25 bp, Homo sapien
accccgcatagagcgcccaccctcc

SEQ ID NO: 1510534 - DNA, 25 bp, Homo sapien
tagtggaactggcagatcagaactt

SEQ ID NO: 1510535 - DNA, 25 bp, Homo sapien
catcctcggaaaagtccacgtcagg

SEQ ID NO: 1510536 - DNA, 25 bp, Homo sapien
gggcccaatggacagtggcctccag

SEQ ID NO: 1510537 - DNA, 25 bp, Homo sapien
aggccgcctcctgacatcttcggta

SEQ ID NO: 1510538 - DNA, 25 bp, Homo sapien
ccggcagcggccatacactttgtag

SEQ ID NO: 1510539 - DNA, 25 bp, Homo sapien
ctttgtagccagtggctagctccaa

SEQ ID NO: 1510540 - DNA, 25 bp, Homo sapien
ctccaaatcttggatctcaacaggg

SEQ ID NO: 1510541 - DNA, 25 bp, Homo sapien
ggtcaggggtatggtcttcagctcc

SEQ ID NO: 1510542 - DNA, 25 bp, Homo sapien
ggacatgattggacagacttctggg

SEQ ID NO: 1510543 - DNA, 25 bp, Homo sapien
aatgagtgggacatgattggacaga

SEQ ID NO: 1510544 - DNA, 25 bp, Homo sapien
agtgggacatgattggacagacttc

SEQ ID NO: 1510545 - DNA, 25 bp, Homo sapien
ggcgtggattgagggcaagcccaga

SEQ ID NO: 1510546 - DNA, 25 bp, Homo sapien
catagaagcaaaggttcctctcctc

SEQ ID NO: 1510547 - DNA, 25 bp, Homo sapien
agaggttccctgatacccacacatc

SEQ ID NO: 1510548 - DNA, 25 bp, Homo sapien
cttccatagaagcaaaggttcctct

SEQ ID NO: 1510549 - DNA, 25 bp, Homo sapien
tcctccaggcgtcccacagaggttc

SEQ ID NO: 1510550 - DNA, 25 bp, Homo sapien
tggtctaagaaggtggaaaaccaca

SEQ ID NO: 1510551 - DNA, 25 bp, Homo sapien
gagcaagggtcaagcaatgccacct

SEQ ID NO: 1510552 - DNA, 25 bp, Homo sapien
gatactggattgtgtggtctaagaa

SEQ ID NO: 1510553 - DNA, 25 bp, Homo sapien
aaaaccacacctgtcatcgtgttcc

SEQ ID NO: 1510554 - DNA, 25 bp, Homo sapien
gcagcaggtaattccttctggactc

SEQ ID NO: 1510555 - DNA, 25 bp, Homo sapien
ccaagcagaccaaagagaggttggt

SEQ ID NO: 1510556 - DNA, 25 bp, Homo sapien
gtggcgttgacagcggacaccctgg

SEQ ID NO: 1510557 - DNA, 25 bp, Homo sapien
cactccgccccactgggaattaggg

SEQ ID NO: 1510558 - DNA, 25 bp, Homo sapien
gtgctcccagcgatgctgctgactg

SEQ ID NO: 1510559 - DNA, 25 bp, Homo sapien
ctacatgctccagtggttccccagg

SEQ ID NO: 1510560 - DNA, 25 bp, Homo sapien
taacagagcactgaggttcccaggg

SEQ ID NO: 1510561 - DNA, 25 bp, Homo sapien
gaagccggacccagttgagtttctc

SEQ ID NO: 1510562 - DNA, 25 bp, Homo sapien
cagaggccaagcctgaagcagagac

SEQ ID NO: 1510563 - DNA, 25 bp, Homo sapien
gagactgcggtcacagtgattcgat

SEQ ID NO: 1510564 - DNA, 25 bp, Homo sapien
acccccagacggaggatgcagaggc

SEQ ID NO: 1510565 - DNA, 25 bp, Homo sapien
ttcgataggggaccccgacagtgaa

SEQ ID NO: 1510566 - DNA, 25 bp, Homo sapien
cacacaaggtgtagtgggtgaggtg

SEQ ID NO: 1510567 - DNA, 25 bp, Homo sapien
tcttggagtcgccaaagcgttggcc

SEQ ID NO: 1510568 - DNA, 25 bp, Homo sapien
cgaagctggtgccttgggacctctc

SEQ ID NO: 1510569 - DNA, 25 bp, Homo sapien
tgaggtggcctcgaagctggtgcct

SEQ ID NO: 1510570 - DNA, 25 bp, Homo sapien
acccacagctcacagggaccccaag

SEQ ID NO: 1510571 - DNA, 25 bp, Homo sapien
tagatgaagccggaggatgggacca

SEQ ID NO: 1510572 - DNA, 25 bp, Homo sapien
ccctgtccagcgatggtagatgctg

SEQ ID NO: 1510573 - DNA, 25 bp, Homo sapien
ggccctgtccagcgatggtagatgc

SEQ ID NO: 1510574 - DNA, 25 bp, Homo sapien
cacaagaataggatgcccggcagaa

SEQ ID NO: 1510575 - DNA, 25 bp, Homo sapien
caagaataggatgcccggcagaact

SEQ ID NO: 1510576 - DNA, 25 bp, Homo sapien
ataggatgcccggcagaactttcca

SEQ ID NO: 1510577 - DNA, 25 bp, Homo sapien
cccacaagaataggatgcccggcag

SEQ ID NO: 1510578 - DNA, 25 bp, Homo sapien
actgctgttggcaggatcaggaact

SEQ ID NO: 1510579 - DNA, 25 bp, Homo sapien
gacccagcggggcagcactttgtgc

SEQ ID NO: 1510580 - DNA, 25 bp, Homo sapien
cttctcatacccagagtcaagcggg

SEQ ID NO: 1510581 - DNA, 25 bp, Homo sapien
ctgggaggactccataaccggcggg

SEQ ID NO: 1510582 - DNA, 25 bp, Homo sapien
tcctccacttccaggatgggcaagt

SEQ ID NO: 1510583 - DNA, 25 bp, Homo sapien
ggaagtgcttctcatacccagagtc

SEQ ID NO: 1510584 - DNA, 25 bp, Homo sapien
tcaagagggctaatccaggactggg

SEQ ID NO: 1510585 - DNA, 25 bp, Homo sapien
tacagcggaacagattttggcaggc

SEQ ID NO: 1510586 - DNA, 25 bp, Homo sapien
cagctgccactctcaatttcatgta

SEQ ID NO: 1510587 - DNA, 25 bp, Homo sapien
ggtgcaacctgcatgagcatccctc

SEQ ID NO: 1510588 - DNA, 25 bp, Homo sapien
ggtgcaatcagaggtccctgcagct

SEQ ID NO: 1510589 - DNA, 25 bp, Homo sapien
aggtccctgcagcttcgaactcctg

SEQ ID NO: 1510590 - DNA, 25 bp, Homo sapien
gtggtgcaatcagaggtccctgcag

SEQ ID NO: 1510591 - DNA, 25 bp, Homo sapien
aatcagaggtccctgcagcttcgaa

SEQ ID NO: 1510592 - DNA, 25 bp, Homo sapien
tgttgtcaagaactcagtccatgct

SEQ ID NO: 1510593 - DNA, 25 bp, Homo sapien
tccccttgggtatgaccaaagctgg

SEQ ID NO: 1510594 - DNA, 25 bp, Homo sapien
tgttatgttccagctcataggcaag

SEQ ID NO: 1510595 - DNA, 25 bp, Homo sapien
cagaccccgtgttggcatatgtcac

SEQ ID NO: 1510596 - DNA, 25 bp, Homo sapien
tgaggaatcattggagacagagaag

SEQ ID NO: 1510597 - DNA, 25 bp, Homo sapien
tagaagaaccattgggagtagagaa

SEQ ID NO: 1510598 - DNA, 25 bp, Homo sapien
cttgaggctaacacggagacaaggc

SEQ ID NO: 1510599 - DNA, 25 bp, Homo sapien
aatctagaacaagggtctagggaag

SEQ ID NO: 1510600 - DNA, 25 bp, Homo sapien
aaggaggaggaatcggcggacgcgg

SEQ ID NO: 1510601 - DNA, 25 bp, Homo sapien
gccagccaaggacgcggcgaccaag

SEQ ID NO: 1510602 - DNA, 25 bp, Homo sapien
tctgacgccagccaaggacgcggcg

SEQ ID NO: 1510603 - DNA, 25 bp, Homo sapien
ccaaggaggaggaatcggcggacgc

SEQ ID NO: 1510604 - DNA, 25 bp, Homo sapien
ctcatgtgctaggaagtttgtagcc

SEQ ID NO: 1510605 - DNA, 25 bp, Homo sapien
tcatgtgctaggaagtttgtagcca

SEQ ID NO: 1510606 - DNA, 25 bp, Homo sapien
catgtgctaggaagtttgtagccat

SEQ ID NO: 1510607 - DNA, 25 bp, Homo sapien
ggcgccgttctcctggcgggaggca

SEQ ID NO: 1510608 - DNA, 25 bp, Homo sapien
ggcacctgccacaggcctgttcatc

SEQ ID NO: 1510609 - DNA, 25 bp, Homo sapien
gaatctcctttctgcgtcgtcatat

SEQ ID NO: 1510610 - DNA, 25 bp, Homo sapien
tgttcatctgctgatagaatctcct

SEQ ID NO: 1510611 - DNA, 25 bp, Homo sapien
ggctctcacaatgtcatggaggatc

SEQ ID NO: 1510612 - DNA, 25 bp, Homo sapien
ctggctctcacaatgtcatggagga

SEQ ID NO: 1510613 - DNA, 25 bp, Homo sapien
gctctcacaatgtcatggaggatca

SEQ ID NO: 1510614 - DNA, 25 bp, Homo sapien
ctctcacaatgtcatggaggatcac

SEQ ID NO: 1510615 - DNA, 25 bp, Homo sapien
acaacgagctcgctgtggtctccgc

SEQ ID NO: 1510616 - DNA, 25 bp, Homo sapien
gatccggacaacgagctcgctgtgg

SEQ ID NO: 1510617 - DNA, 25 bp, Homo sapien
ttccagactggcgatccggacaacg

SEQ ID NO: 1510618 - DNA, 25 bp, Homo sapien
tggcgatccggacaacgagctcgct

SEQ ID NO: 1510619 - DNA, 25 bp, Homo sapien
cagctcctgtaccacgccacgcagg

SEQ ID NO: 1510620 - DNA, 25 bp, Homo sapien
ggccggggactccacttggcgcata

SEQ ID NO: 1510621 - DNA, 25 bp, Homo sapien
taccacgccacgcaggctctggttc

SEQ ID NO: 1510622 - DNA, 25 bp, Homo sapien
cggggactccacttggcgcatagga

SEQ ID NO: 1510623 - DNA, 25 bp, Homo sapien
gcccacgggcatcagcttggaggtc

SEQ ID NO: 1510624 - DNA, 25 bp, Homo sapien
gaggacttggccactaatgcaggct

SEQ ID NO: 1510625 - DNA, 25 bp, Homo sapien
cagcccgtccagctcgatagagcgc

SEQ ID NO: 1510626 - DNA, 25 bp, Homo sapien
gtccagctcgatagagcgcacacag

SEQ ID NO: 1510627 - DNA, 25 bp, Homo sapien
ctcaaatttagtgatctcctcctcc

SEQ ID NO: 1510628 - DNA, 25 bp, Homo sapien
gcacgtgctcctcaaatttagtgat

SEQ ID NO: 1510629 - DNA, 25 bp, Homo sapien
cctcaaatttagtgatctcctcctc

SEQ ID NO: 1510630 - DNA, 25 bp, Homo sapien
tctgcacgtgctcctcaaatttagt

SEQ ID NO: 1510631 - DNA, 25 bp, Homo sapien
gatcttgttgaaagctgcgatatcg

SEQ ID NO: 1510632 - DNA, 25 bp, Homo sapien
ttgttgaaagctgcgatatcgacac

SEQ ID NO: 1510633 - DNA, 25 bp, Homo sapien
cagatcttgttgaaagctgcgatat

SEQ ID NO: 1510634 - DNA, 25 bp, Homo sapien
tcttgttgaaagctgcgatatcgac

SEQ ID NO: 1510635 - DNA, 25 bp, Homo sapien
gtctttaatcgtggcagggccttac

SEQ ID NO: 1510636 - DNA, 25 bp, Homo sapien
gccggtctcagtctttaatcgtggc

SEQ ID NO: 1510637 - DNA, 25 bp, Homo sapien
agggccttacgcacgcgcacacata

SEQ ID NO: 1510638 - DNA, 25 bp, Homo sapien
tctcagtctttaatcgtggcagggc

SEQ ID NO: 1510639 - DNA, 25 bp, Homo sapien
ggcagtcccgcttggtcgtgccagc

SEQ ID NO: 1510640 - DNA, 25 bp, Homo sapien
cacagtgcgccgtgggcgcagctta

SEQ ID NO: 1510641 - DNA, 25 bp, Homo sapien
tgccaagggcactcccggattgagg

SEQ ID NO: 1510642 - DNA, 25 bp, Homo sapien
cgcagcttagcggttgcagttgaaa

SEQ ID NO: 1510643 - DNA, 25 bp, Homo sapien
tcagggcacgggacttcttggaaga

SEQ ID NO: 1510644 - DNA, 25 bp, Homo sapien
ctcagggcacgggacttcttggaag

SEQ ID NO: 1510645 - DNA, 25 bp, Homo sapien
ggttttgattcccagagcgaggaca

SEQ ID NO: 1510646 - DNA, 25 bp, Homo sapien
aagcagttcggaagcctcagttccc

SEQ ID NO: 1510647 - DNA, 25 bp, Homo sapien
ggttggaagcagttcggaagcctca

SEQ ID NO: 1510648 - DNA, 25 bp, Homo sapien
ttgattcccagagcgaggacagagg

SEQ ID NO: 1510649 - DNA, 25 bp, Homo sapien
tctggggcttcgctgtctggccctg

SEQ ID NO: 1510650 - DNA, 25 bp, Homo sapien
ctttgcggagggcttggggacctcg

SEQ ID NO: 1510651 - DNA, 25 bp, Homo sapien
tgcggagggcttggggacctcggtg

SEQ ID NO: 1510652 - DNA, 25 bp, Homo sapien
ctctcaaagcccgcagctgtggaca

SEQ ID NO: 1510653 - DNA, 25 bp, Homo sapien
gatggctcgaggacttcgctctctt

SEQ ID NO: 1510654 - DNA, 25 bp, Homo sapien
tctgcgtcctgctcgactgatggct

SEQ ID NO: 1510655 - DNA, 25 bp, Homo sapien
cttcggacggcccagggtcgtctct

SEQ ID NO: 1510656 - DNA, 25 bp, Homo sapien
ggcgcaggctctcctcgcgttcgca

SEQ ID NO: 1510657 - DNA, 25 bp, Homo sapien
gcgcagctcgacgagttcacggcct

SEQ ID NO: 1510658 - DNA, 25 bp, Homo sapien
agctgcggcggatttcgcgctcgat

SEQ ID NO: 1510659 - DNA, 25 bp, Homo sapien
tcgacgagttcacggcctgcgcggc

SEQ ID NO: 1510660 - DNA, 25 bp, Homo sapien
ggcctcgaagaagcgcttgagttcg

SEQ ID NO: 1510661 - DNA, 25 bp, Homo sapien
cgccgcggcctcgaagaagcgcttg

SEQ ID NO: 1510662 - DNA, 25 bp, Homo sapien
agcgcttgagttcgcccagcggctg

SEQ ID NO: 1510663 - DNA, 25 bp, Homo sapien
tcgaagaagcgcttgagttcgccca

SEQ ID NO: 1510664 - DNA, 25 bp, Homo sapien
ctgctccagcagtgacggagtgaaa

SEQ ID NO: 1510665 - DNA, 25 bp, Homo sapien
gaactccgcggtgccatagacgctg

SEQ ID NO: 1510666 - DNA, 25 bp, Homo sapien
tgaggctcggcgtaggctccttgaa

SEQ ID NO: 1510667 - DNA, 25 bp, Homo sapien
gtgccatagacgctgcgccgctggc

SEQ ID NO: 1510668 - DNA, 25 bp, Homo sapien
gatcacagcgagtaatggagctcca

SEQ ID NO: 1510669 - DNA, 25 bp, Homo sapien
ggagaagcaggagcccgaaaattca

SEQ ID NO: 1510670 - DNA, 25 bp, Homo sapien
gagagtccatcactcccggtggagg

SEQ ID NO: 1510671 - DNA, 25 bp, Homo sapien
agagaccccgagaatcggagggcca

SEQ ID NO: 1510672 - DNA, 25 bp, Homo sapien
gcggcagccaggatgaaaggccggc

SEQ ID NO: 1510673 - DNA, 25 bp, Homo sapien
ggcagccaggatgaaaggccggccg

SEQ ID NO: 1510674 - DNA, 25 bp, Homo sapien
gccaggatgaaaggccggccgcacc

SEQ ID NO: 1510675 - DNA, 25 bp, Homo sapien
cagccaggatgaaaggccggccgca

SEQ ID NO: 1510676 - DNA, 25 bp, Homo sapien
tgctccaggccgttctccgagacct

SEQ ID NO: 1510677 - DNA, 25 bp, Homo sapien
ccgttctccgagacctttctgcggg

SEQ ID NO: 1510678 - DNA, 25 bp, Homo sapien
tgcgggggggccagatcaccaccaa

SEQ ID NO: 1510679 - DNA, 25 bp, Homo sapien
agatcaccaccaactttccgtcgcc

SEQ ID NO: 1510680 - DNA, 25 bp, Homo sapien
gtttgggcctcaagaccaccgtctc

SEQ ID NO: 1510681 - DNA, 25 bp, Homo sapien
ggatgcgtcccagactgagttctga

SEQ ID NO: 1510682 - DNA, 25 bp, Homo sapien
acaagcgctagaggcacacgggtaa

SEQ ID NO: 1510683 - DNA, 25 bp, Homo sapien
gggaggatgcacttttccccaccaa

SEQ ID NO: 1510684 - DNA, 25 bp, Homo sapien
tcatcttccccaatgcagagagccg

SEQ ID NO: 1510685 - DNA, 25 bp, Homo sapien
ggctggtcaatttcacaaaggcaag

SEQ ID NO: 1510686 - DNA, 25 bp, Homo sapien
taacagtcaagggagagggtagttc

SEQ ID NO: 1510687 - DNA, 25 bp, Homo sapien
tctgacgcgtacgttacttccggcc

SEQ ID NO: 1510688 - DNA, 25 bp, Homo sapien
ctccagctggctgtattgcttttta

SEQ ID NO: 1510689 - DNA, 25 bp, Homo sapien
ggatctgcctgtttattttggtggg

SEQ ID NO: 1510690 - DNA, 25 bp, Homo sapien
caagatcctcttccgttcagccaga

SEQ ID NO: 1510691 - DNA, 25 bp, Homo sapien
aaaatgaaatgtggggggcttctca

SEQ ID NO: 1510692 - DNA, 25 bp, Homo sapien
cacatcaaggtgcttcagcaaggcc

SEQ ID NO: 1510693 - DNA, 25 bp, Homo sapien
gatggcttcttaggctgagcgccca

SEQ ID NO: 1510694 - DNA, 25 bp, Homo sapien
gattgctccttaaaccccaggtggc

SEQ ID NO: 1510695 - DNA, 25 bp, Homo sapien
tctgctcctcagcacgtcggtgtgg

SEQ ID NO: 1510696 - DNA, 25 bp, Homo sapien
caagtgattgaatctcccggagcct

SEQ ID NO: 1510697 - DNA, 25 bp, Homo sapien
gcctggcacggagtgaatgcgtaaa

SEQ ID NO: 1510698 - DNA, 25 bp, Homo sapien
cagtttcctccgctgtaaacgcggt

SEQ ID NO: 1510699 - DNA, 25 bp, Homo sapien
cagggtctgggattagaacagctac

SEQ ID NO: 1510700 - DNA, 25 bp, Homo sapien
tcgaggccgtctggagcgcacccgt

SEQ ID NO: 1510701 - DNA, 25 bp, Homo sapien
gtctcggagcgcttgcgctgccccg

SEQ ID NO: 1510702 - DNA, 25 bp, Homo sapien
tggagcgcacccgtctcggagcgct

SEQ ID NO: 1510703 - DNA, 25 bp, Homo sapien
ggcggcggctcgaggccgtctggag

SEQ ID NO: 1510704 - DNA, 25 bp, Homo sapien
gcttccccgcactaccaagagtgga

SEQ ID NO: 1510705 - DNA, 25 bp, Homo sapien
atcgactcgctgcgctcgcgcaagg

SEQ ID NO: 1510706 - DNA, 25 bp, Homo sapien
gagtggatcctggacaccatcgact

SEQ ID NO: 1510707 - DNA, 25 bp, Homo sapien
actaccaagagtggatcctggacac

SEQ ID NO: 1510708 - DNA, 25 bp, Homo sapien
cgatcaggtcctggcttgaagtcct

SEQ ID NO: 1510709 - DNA, 25 bp, Homo sapien
gagaaacgagcgtcaaactgccctt

SEQ ID NO: 1510710 - DNA, 25 bp, Homo sapien
agggaatttcggaccccagcgtgca

SEQ ID NO: 1510711 - DNA, 25 bp, Homo sapien
aaaaaagtgtcgctggtgttctcga

SEQ ID NO: 1510712 - DNA, 25 bp, Homo sapien
ttgtaagtttaagatacaggctggg

SEQ ID NO: 1510713 - DNA, 25 bp, Homo sapien
tattttatataggtggacagtttta

SEQ ID NO: 1510714 - DNA, 25 bp, Homo sapien
tctatatacagaaatttgtaagttt

SEQ ID NO: 1510715 - DNA, 25 bp, Homo sapien
tcatgccctataatcccacttgggg

SEQ ID NO: 1510716 - DNA, 25 bp, Homo sapien
tggtctcccagaccctgtgggtttc

SEQ ID NO: 1510717 - DNA, 25 bp, Homo sapien
catacttcaacatgcaggtggtctc

SEQ ID NO: 1510718 - DNA, 25 bp, Homo sapien
gcaaacagggcaacttaggtgtcca

SEQ ID NO: 1510719 - DNA, 25 bp, Homo sapien
gagatgttctcacacctacggcgga

SEQ ID NO: 1510720 - DNA, 25 bp, Homo sapien
aaaaataattggctagacatgttgg

SEQ ID NO: 1510721 - DNA, 25 bp, Homo sapien
acaaaaaataattggctagacatgt

SEQ ID NO: 1510722 - DNA, 25 bp, Homo sapien
aattggctagacatgttggcacaca

SEQ ID NO: 1510723 - DNA, 25 bp, Homo sapien
aataattggctagacatgttggcac

SEQ ID NO: 1510724 - DNA, 25 bp, Homo sapien
ctgttgacagacgctgaggccgcaa

SEQ ID NO: 1510725 - DNA, 25 bp, Homo sapien
ggccgcaaacgctcctcctctctct

SEQ ID NO: 1510726 - DNA, 25 bp, Homo sapien
ttgacagacgctgaggccgcaaacg

SEQ ID NO: 1510727 - DNA, 25 bp, Homo sapien
gacagacgctgaggccgcaaacgct

SEQ ID NO: 1510728 - DNA, 25 bp, Homo sapien
gcagggagtgctttcaaacttgaca

SEQ ID NO: 1510729 - DNA, 25 bp, Homo sapien
tgacacacggtggaattgcatcatg

SEQ ID NO: 1510730 - DNA, 25 bp, Homo sapien
aacgaactgcccatgctcagagaga

SEQ ID NO: 1510731 - DNA, 25 bp, Homo sapien
tctgccttaaaaagatacctgtgtc

SEQ ID NO: 1510732 - DNA, 25 bp, Homo sapien
tcttcatcaacaaggagtcggtggt

SEQ ID NO: 1510733 - DNA, 25 bp, Homo sapien
gtggtcatggcctatctcttcacca

SEQ ID NO: 1510734 - DNA, 25 bp, Homo sapien
ttcatcttcgtctttcactgcgcct

SEQ ID NO: 1510735 - DNA, 25 bp, Homo sapien
cactgcgccttacagaagaaggtga

SEQ ID NO: 1510736 - DNA, 25 bp, Homo sapien
gcgggtactttgactcccctgtcgc

SEQ ID NO: 1510737 - DNA, 25 bp, Homo sapien
gcaaatatagcctaagtggtctgga

SEQ ID NO: 1510738 - DNA, 25 bp, Homo sapien
actcggcccgctcagggctttgcag

SEQ ID NO: 1510739 - DNA, 25 bp, Homo sapien
caatgaagttggcagaggaataact

SEQ ID NO: 1510740 - DNA, 25 bp, Homo sapien
agatacccacggaagctcctctctg

SEQ ID NO: 1510741 - DNA, 25 bp, Homo sapien
tgtttctggttcatgggaggcgggc

SEQ ID NO: 1510742 - DNA, 25 bp, Homo sapien
cctgtaccttttataacatgtttct

SEQ ID NO: 1510743 - DNA, 25 bp, Homo sapien
tgtataagcatccagggcgggtggg

SEQ ID NO: 1510744 - DNA, 25 bp, Homo sapien
caggaaaaattcctcggtccaggtg

SEQ ID NO: 1510745 - DNA, 25 bp, Homo sapien
taacaacggataatgacccaacttc

SEQ ID NO: 1510746 - DNA, 25 bp, Homo sapien
agaggctcaggtcaagccgcaggaa

SEQ ID NO: 1510747 - DNA, 25 bp, Homo sapien
tggaagccaaagcaagtagacgaga

SEQ ID NO: 1510748 - DNA, 25 bp, Homo sapien
gccacaaggagtagcgacaacgcat

SEQ ID NO: 1510749 - DNA, 25 bp, Homo sapien
aaatggtgcctgctttcgccagcca

SEQ ID NO: 1510750 - DNA, 25 bp, Homo sapien
gcatgtcaagcttgtgtgcacccga

SEQ ID NO: 1510751 - DNA, 25 bp, Homo sapien
tagacagggttctcaaaagacggcc

SEQ ID NO: 1510752 - DNA, 25 bp, Homo sapien
ttctctgggccactacggaaggagg

SEQ ID NO: 1510753 - DNA, 25 bp, Homo sapien
taggttcaaggctcgactgggctct

SEQ ID NO: 1510754 - DNA, 25 bp, Homo sapien
tgtcctgggacctacaagtacctgg

SEQ ID NO: 1510755 - DNA, 25 bp, Homo sapien
tttgagtgccgagtgtaaacttccc

SEQ ID NO: 1510756 - DNA, 25 bp, Homo sapien
gaaaagacatttaattggctcatag

SEQ ID NO: 1510757 - DNA, 25 bp, Homo sapien
aggggaagcaggcacgccgtacatg

SEQ ID NO: 1510758 - DNA, 25 bp, Homo sapien
acaggaagcatagtagcttctgctt

SEQ ID NO: 1510759 - DNA, 25 bp, Homo sapien
aaagacatttaattggctcatagtt

SEQ ID NO: 1510760 - DNA, 25 bp, Homo sapien
ttcagctttcagataaacacgtttt

SEQ ID NO: 1510761 - DNA, 25 bp, Homo sapien
aaggcgggagcatcgcttgacgcca

SEQ ID NO: 1510762 - DNA, 25 bp, Homo sapien
acacgttttaaccaggcagaatggc

SEQ ID NO: 1510763 - DNA, 25 bp, Homo sapien
gaactcgtagaagcagagtagagca

SEQ ID NO: 1510764 - DNA, 25 bp, Homo sapien
tcaagcctgtgtgcgtgaatcctcc

SEQ ID NO: 1510765 - DNA, 25 bp, Homo sapien
taggatacaggatcacaccaccaag

SEQ ID NO: 1510766 - DNA, 25 bp, Homo sapien
gctaggatacaggatcacaccacca

SEQ ID NO: 1510767 - DNA, 25 bp, Homo sapien
ggatacaggatcacaccaccaagcc

SEQ ID NO: 1510768 - DNA, 25 bp, Homo sapien
ggaatctatgtcagccgtgggtttg

SEQ ID NO: 1510769 - DNA, 25 bp, Homo sapien
ctgggagcccggagcgatgactcca

SEQ ID NO: 1510770 - DNA, 25 bp, Homo sapien
tgggagcccggagcgatgactccat

SEQ ID NO: 1510771 - DNA, 25 bp, Homo sapien
cataattgtccctccaggaaattcc

SEQ ID NO: 1510772 - DNA, 25 bp, Homo sapien
cagtaactcaggctggatcgcagga

SEQ ID NO: 1510773 - DNA, 25 bp, Homo sapien
tctcagtcagtatcctccaatttga

SEQ ID NO: 1510774 - DNA, 25 bp, Homo sapien
tgtgtatccaccatgcagaccagaa

SEQ ID NO: 1510775 - DNA, 25 bp, Homo sapien
gatatatgccatgtgtacaccaagt

SEQ ID NO: 1510776 - DNA, 25 bp, Homo sapien
gctaggtatacgctaggtgtgcacc

SEQ ID NO: 1510777 - DNA, 25 bp, Homo sapien
tgtgccacgtatatgccaggtgtgc

SEQ ID NO: 1510778 - DNA, 25 bp, Homo sapien
caggtgtgcaccaggtatgtgctgt

SEQ ID NO: 1510779 - DNA, 25 bp, Homo sapien
ctctcctccatccccaccagcgtca

SEQ ID NO: 1510780 - DNA, 25 bp, Homo sapien
tctcctccatccccaccagcgtcat

SEQ ID NO: 1510781 - DNA, 25 bp, Homo sapien
ggagtcggcgttggcgggtgattga

SEQ ID NO: 1510782 - DNA, 25 bp, Homo sapien
tggtttaatatctcgcgctgcgacc

SEQ ID NO: 1510783 - DNA, 25 bp, Homo sapien
tccaggtggagccaatggagggtcc

SEQ ID NO: 1510784 - DNA, 25 bp, Homo sapien
gcgttggcgggtgattgatggttta

SEQ ID NO: 1510785 - DNA, 25 bp, Homo sapien
agcgagccgggcttgggcaggcggc

SEQ ID NO: 1510786 - DNA, 25 bp, Homo sapien
aaaactgagcgagccgggcttgggc

SEQ ID NO: 1510787 - DNA, 25 bp, Homo sapien
gaaagaaaactgagcgagccgggct

SEQ ID NO: 1510788 - DNA, 25 bp, Homo sapien
gagcgagccgggcttgggcaggcgg

SEQ ID NO: 1510789 - DNA, 25 bp, Homo sapien
aggtctgggagtcagcaccggaatc

SEQ ID NO: 1510790 - DNA, 25 bp, Homo sapien
gtctgggagtcagcaccggaatcag

SEQ ID NO: 1510791 - DNA, 25 bp, Homo sapien
ggtctgggagtcagcaccggaatca

SEQ ID NO: 1510792 - DNA, 25 bp, Homo sapien
tgcgcctggcagtggtaactcttga

SEQ ID NO: 1510793 - DNA, 25 bp, Homo sapien
cctccgggacaaggggaatctcagt

SEQ ID NO: 1510794 - DNA, 25 bp, Homo sapien
gggcacagacaagccccacgatggt

SEQ ID NO: 1510795 - DNA, 25 bp, Homo sapien
cgatggtccagcctccaaagcgcag

SEQ ID NO: 1510796 - DNA, 25 bp, Homo sapien
agcaaaccagcccttgggtgtctga

SEQ ID NO: 1510797 - DNA, 25 bp, Homo sapien
cagtttccccttctggtcacatgag

SEQ ID NO: 1510798 - DNA, 25 bp, Homo sapien
catgcctggcctcagatggcaacca

SEQ ID NO: 1510799 - DNA, 25 bp, Homo sapien
cattcttaaagctctccaggactgt

SEQ ID NO: 1510800 - DNA, 25 bp, Homo sapien
cagtgtgtgtttatctgccatgcat

SEQ ID NO: 1510801 - DNA, 25 bp, Homo sapien
cgggcttttggtctcttcgggctgt

SEQ ID NO: 1510802 - DNA, 25 bp, Homo sapien
ctgtatttatctggcacaagtgtgc

SEQ ID NO: 1510803 - DNA, 25 bp, Homo sapien
tgtgcgagcccacccggatgtctgc

SEQ ID NO: 1510804 - DNA, 25 bp, Homo sapien
gcgcagcgcttggtgtcagtgggtc

SEQ ID NO: 1510805 - DNA, 25 bp, Homo sapien
tatataggttagagctgggcgcagc

SEQ ID NO: 1510806 - DNA, 25 bp, Homo sapien
tttatataggttagagctgggcgca

SEQ ID NO: 1510807 - DNA, 25 bp, Homo sapien
gcgcttggtgtcagtgggtcttggg

SEQ ID NO: 1510808 - DNA, 25 bp, Homo sapien
tctgtccacgcgtgctctgattcca

SEQ ID NO: 1510809 - DNA, 25 bp, Homo sapien
catctgtccacgcgtgctctgattc

SEQ ID NO: 1510810 - DNA, 25 bp, Homo sapien
atctgtccacgcgtgctctgattcc

SEQ ID NO: 1510811 - DNA, 25 bp, Homo sapien
ctgtccacgcgtgctctgattccat

SEQ ID NO: 1510812 - DNA, 25 bp, Homo sapien
tcgtggtagaggggctttttggtca

SEQ ID NO: 1510813 - DNA, 25 bp, Homo sapien
ctggcccggatttggacgccagtcc

SEQ ID NO: 1510814 - DNA, 25 bp, Homo sapien
gatttggacgccagtccctgggatc

SEQ ID NO: 1510815 - DNA, 25 bp, Homo sapien
cccggatttggacgccagtccctgg

SEQ ID NO: 1510816 - DNA, 25 bp, Homo sapien
ttggacgccagtccctgggatcctg

SEQ ID NO: 1510817 - DNA, 25 bp, Homo sapien
ggcccacaggtggcgctcgctcccc

SEQ ID NO: 1510818 - DNA, 25 bp, Homo sapien
ctccccttggaggcccacaggtggc

SEQ ID NO: 1510819 - DNA, 25 bp, Homo sapien
ccacaggtggcgctcgctccccgcg

SEQ ID NO: 1510820 - DNA, 25 bp, Homo sapien
tccccttggaggcccacaggtggcg

SEQ ID NO: 1510821 - DNA, 25 bp, Homo sapien
gggtcaatatggtcagaggcaaagt

SEQ ID NO: 1510822 - DNA, 25 bp, Homo sapien
cataattggggtcaatatggtcaga

SEQ ID NO: 1510823 - DNA, 25 bp, Homo sapien
aattggggtcaatatggtcagaggc

SEQ ID NO: 1510824 - DNA, 25 bp, Homo sapien
cttaactgcataattggggtcaata

SEQ ID NO: 1510825 - DNA, 25 bp, Homo sapien
ggtccttaagaccaacccatggcca

SEQ ID NO: 1510826 - DNA, 25 bp, Homo sapien
gaatcccgctcttgcttgcggcagg

SEQ ID NO: 1510827 - DNA, 25 bp, Homo sapien
tctcctctgaatcccgctcttgctt

SEQ ID NO: 1510828 - DNA, 25 bp, Homo sapien
cggcaggcccggcaagtgtgttctc

SEQ ID NO: 1510829 - DNA, 25 bp, Homo sapien
ggctctggaaggtcgaaaactcatc

SEQ ID NO: 1510830 - DNA, 25 bp, Homo sapien
ctctggaaggtcgaaaactcatctg

SEQ ID NO: 1510831 - DNA, 25 bp, Homo sapien
aggctctggaaggtcgaaaactcat

SEQ ID NO: 1510832 - DNA, 25 bp, Homo sapien
gctctggaaggtcgaaaactcatct

SEQ ID NO: 1510833 - DNA, 25 bp, Homo sapien
tcttcttcctccttggccccatgac

SEQ ID NO: 1510834 - DNA, 25 bp, Homo sapien
ctcttcttcctccttggccccatga

SEQ ID NO: 1510835 - DNA, 25 bp, Homo sapien
tcttcctccttggccccatgaccca

SEQ ID NO: 1510836 - DNA, 25 bp, Homo sapien
cttcttcctccttggccccatgacc

SEQ ID NO: 1510837 - DNA, 25 bp, Homo sapien
tgggtttccgggagcctggcctgtc

SEQ ID NO: 1510838 - DNA, 25 bp, Homo sapien
gggcaggtcccactatggtctgttt

SEQ ID NO: 1510839 - DNA, 25 bp, Homo sapien
caggtcccactatggtctgtttgtc

SEQ ID NO: 1510840 - DNA, 25 bp, Homo sapien
tttccgggagcctggcctgtcagtg

SEQ ID NO: 1510841 - DNA, 25 bp, Homo sapien
aacaatctgccctcgagccgcatta

SEQ ID NO: 1510842 - DNA, 25 bp, Homo sapien
tgtcagccccctgagtgacttttgt

SEQ ID NO: 1510843 - DNA, 25 bp, Homo sapien
tcgagccgcattaggctgtcagccc

SEQ ID NO: 1510844 - DNA, 25 bp, Homo sapien
gccctcgagccgcattaggctgtca

SEQ ID NO: 1510845 - DNA, 25 bp, Homo sapien
caaaaaccctctgctagagtttcca

SEQ ID NO: 1510846 - DNA, 25 bp, Homo sapien
taagaatgaagtgcaacctgctttc

SEQ ID NO: 1510847 - DNA, 25 bp, Homo sapien
cctgctttcaaaaaccctctgctag

SEQ ID NO: 1510848 - DNA, 25 bp, Homo sapien
cacacgtgcactcagtaagaatgaa

SEQ ID NO: 1510849 - DNA, 25 bp, Homo sapien
ggacagggctgtcccgtctccacag

SEQ ID NO: 1510850 - DNA, 25 bp, Homo sapien
gtgggacagggctgtcccgtctcca

SEQ ID NO: 1510851 - DNA, 25 bp, Homo sapien
aaagagtgagtgggacagggctgtc

SEQ ID NO: 1510852 - DNA, 25 bp, Homo sapien
ggctgtcccgtctccacaggctagg

SEQ ID NO: 1510853 - DNA, 25 bp, Homo sapien
ctgggcctaagggaaggaatgactc

SEQ ID NO: 1510854 - DNA, 25 bp, Homo sapien
gcagattggaggtccccggaccact

SEQ ID NO: 1510855 - DNA, 25 bp, Homo sapien
catttgccccaattcaaccctggag

SEQ ID NO: 1510856 - DNA, 25 bp, Homo sapien
tccctgccgatctgggaatactggg

SEQ ID NO: 1510857 - DNA, 25 bp, Homo sapien
cagcctgccatcttcatttctcttt

SEQ ID NO: 1510858 - DNA, 25 bp, Homo sapien
gtgcccagcctgccatcttcatttc

SEQ ID NO: 1510859 - DNA, 25 bp, Homo sapien
ccagcctgccatcttcatttctctt

SEQ ID NO: 1510860 - DNA, 25 bp, Homo sapien
gcccagcctgccatcttcatttctc

SEQ ID NO: 1510861 - DNA, 25 bp, Homo sapien
ctgtggccggcctaaaaataattca

SEQ ID NO: 1510862 - DNA, 25 bp, Homo sapien
cccactccccagtgtagtgtgtgtg

SEQ ID NO: 1510863 - DNA, 25 bp, Homo sapien
tgtgggagtaaaccacatgactgct

SEQ ID NO: 1510864 - DNA, 25 bp, Homo sapien
catgactgctgtccggtgtgcctga

SEQ ID NO: 1510865 - DNA, 25 bp, Homo sapien
ctggagtcctgggtttcagctcccg

SEQ ID NO: 1510866 - DNA, 25 bp, Homo sapien
gtcctgggtttcagctcccggcaga

SEQ ID NO: 1510867 - DNA, 25 bp, Homo sapien
ggagtcctgggtttcagctcccggc

SEQ ID NO: 1510868 - DNA, 25 bp, Homo sapien
ctgggtttcagctcccggcagagtc

SEQ ID NO: 1510869 - DNA, 25 bp, Homo sapien
accctggattgcagcgacaggcggt

SEQ ID NO: 1510870 - DNA, 25 bp, Homo sapien
acaggcggtggcattgacacacgag

SEQ ID NO: 1510871 - DNA, 25 bp, Homo sapien
cagcgacaggcggtggcattgacac

SEQ ID NO: 1510872 - DNA, 25 bp, Homo sapien
gcgacaggcggtggcattgacacac

SEQ ID NO: 1510873 - DNA, 25 bp, Homo sapien
ggtgatgatctcagaaaaagagctg

SEQ ID NO: 1510874 - DNA, 25 bp, Homo sapien
cgtcacaagtctccgtcggggtggt

SEQ ID NO: 1510875 - DNA, 25 bp, Homo sapien
gtggtgatgatctcagaaaaagagc

SEQ ID NO: 1510876 - DNA, 25 bp, Homo sapien
cacaagtctccgtcggggtggtgat

SEQ ID NO: 1510877 - DNA, 25 bp, Homo sapien
catgacactttcgacggtgttgcac

SEQ ID NO: 1510878 - DNA, 25 bp, Homo sapien
attttccgcatgacactttcgacgg

SEQ ID NO: 1510879 - DNA, 25 bp, Homo sapien
tcgacggtgttgcacactcgttgat

SEQ ID NO: 1510880 - DNA, 25 bp, Homo sapien
tccagcagtccgagaattttccgca

SEQ ID NO: 1510881 - DNA, 25 bp, Homo sapien
gtgttctcgctctcattcttgaatg

SEQ ID NO: 1510882 - DNA, 25 bp, Homo sapien
ctgcacacgcagtcgtagctcccct

SEQ ID NO: 1510883 - DNA, 25 bp, Homo sapien
tgaataagtatcctggccaacgtca

SEQ ID NO: 1510884 - DNA, 25 bp, Homo sapien
caacgtcatacacttggttatcagg

SEQ ID NO: 1510885 - DNA, 25 bp, Homo sapien
ggttatcaggatttggcccaggcag

SEQ ID NO: 1510886 - DNA, 25 bp, Homo sapien
gataacgttatcacatctcacatgt

SEQ ID NO: 1510887 - DNA, 25 bp, Homo sapien
ccctctttatccctctgtgctctgc

SEQ ID NO: 1510888 - DNA, 25 bp, Homo sapien
tccctctttatccctctgtgctctg

SEQ ID NO: 1510889 - DNA, 25 bp, Homo sapien
ctccctctttatccctctgtgctct

SEQ ID NO: 1510890 - DNA, 25 bp, Homo sapien
gtcattgacggtgcgttcaggccca

SEQ ID NO: 1510891 - DNA, 25 bp, Homo sapien
gaggcatcttctccaagcaaggctg

SEQ ID NO: 1510892 - DNA, 25 bp, Homo sapien
ggtggcagcaagtctcatcctggca

SEQ ID NO: 1510893 - DNA, 25 bp, Homo sapien
tcaggcccaggaattaccagggtgg

SEQ ID NO: 1510894 - DNA, 25 bp, Homo sapien
aggtatagctgccaagggtgttgac

SEQ ID NO: 1510895 - DNA, 25 bp, Homo sapien
tcggatcctcaggtatgaacttgaa

SEQ ID NO: 1510896 - DNA, 25 bp, Homo sapien
tgcagaccttcggatcctcaggtat

SEQ ID NO: 1510897 - DNA, 25 bp, Homo sapien
ggcactggcaggtatagctgccaag

SEQ ID NO: 1510898 - DNA, 25 bp, Homo sapien
gaatcggttgccagcccgggcggca

SEQ ID NO: 1510899 - DNA, 25 bp, Homo sapien
cagcggcactgatagctgcccacgt

SEQ ID NO: 1510900 - DNA, 25 bp, Homo sapien
ttttgtccggaggtgcattcattca

SEQ ID NO: 1510901 - DNA, 25 bp, Homo sapien
gatagctgcccacgttgttgaggca

SEQ ID NO: 1510902 - DNA, 25 bp, Homo sapien
ggttatggaagcgtggagaggcctg

SEQ ID NO: 1510903 - DNA, 25 bp, Homo sapien
ggtggacgctgggttatggaagcgt

SEQ ID NO: 1510904 - DNA, 25 bp, Homo sapien
cccggcattagtgccccccttggag

SEQ ID NO: 1510905 - DNA, 25 bp, Homo sapien
gcaggttatgaatatggtgaaacgc

SEQ ID NO: 1510906 - DNA, 25 bp, Homo sapien
acccacggtgttgaagcagacggtg

SEQ ID NO: 1510907 - DNA, 25 bp, Homo sapien
tatgaacccacggtgttgaagcaga

SEQ ID NO: 1510908 - DNA, 25 bp, Homo sapien
gcagctgtatgaacccacggtgttg

SEQ ID NO: 1510909 - DNA, 25 bp, Homo sapien
gctgtatgaacccacggtgttgaag

SEQ ID NO: 1510910 - DNA, 25 bp, Homo sapien
cttcacagacagtgtccttttggtt

SEQ ID NO: 1510911 - DNA, 25 bp, Homo sapien
cagtgtccttttggttattcgggat

SEQ ID NO: 1510912 - DNA, 25 bp, Homo sapien
ttattcgggattccgtgtctgggct

SEQ ID NO: 1510913 - DNA, 25 bp, Homo sapien
tggttattcgggattccgtgtctgg

SEQ ID NO: 1510914 - DNA, 25 bp, Homo sapien
cattaggccgcttgtcagtgtgtgt

SEQ ID NO: 1510915 - DNA, 25 bp, Homo sapien
agcggctcattaggccgcttgtcag

SEQ ID NO: 1510916 - DNA, 25 bp, Homo sapien
gggaacaagacaagcggctcattag

SEQ ID NO: 1510917 - DNA, 25 bp, Homo sapien
caagacaagcggctcattaggccgc

SEQ ID NO: 1510918 - DNA, 25 bp, Homo sapien
cggggtccaggtggagaaagtcata

SEQ ID NO: 1510919 - DNA, 25 bp, Homo sapien
ggggtccaggtggagaaagtcatat

SEQ ID NO: 1510920 - DNA, 25 bp, Homo sapien
cctcgtccctgtgggggccactcac

SEQ ID NO: 1510921 - DNA, 25 bp, Homo sapien
cctcggctgagcttgtcttggagtc

SEQ ID NO: 1510922 - DNA, 25 bp, Homo sapien
acctcggctgagcttgtcttggagt

SEQ ID NO: 1510923 - DNA, 25 bp, Homo sapien
tcggctgagcttgtcttggagtctc

SEQ ID NO: 1510924 - DNA, 25 bp, Homo sapien
gacctcggctgagcttgtcttggag

SEQ ID NO: 1510925 - DNA, 25 bp, Homo sapien
gggttgggcactctctctggccaca

SEQ ID NO: 1510926 - DNA, 25 bp, Homo sapien
gaagcctccgctagctgattctaca

SEQ ID NO: 1510927 - DNA, 25 bp, Homo sapien
tatgttatgcgcatgtgtgtctctg

SEQ ID NO: 1510928 - DNA, 25 bp, Homo sapien
tcacgtgtccgggtgtgtatgtttg

SEQ ID NO: 1510929 - DNA, 25 bp, Homo sapien
ctacagaagcgtgccaccacacccg

SEQ ID NO: 1510930 - DNA, 25 bp, Homo sapien
actacagaagcgtgccaccacaccc

SEQ ID NO: 1510931 - DNA, 25 bp, Homo sapien
tatgaggtgccggacaggtggcgcc

SEQ ID NO: 1510932 - DNA, 25 bp, Homo sapien
cagttcatccaccaatttgatgaca

SEQ ID NO: 1510933 - DNA, 25 bp, Homo sapien
ttggccaggatcctcatgatatctt

SEQ ID NO: 1510934 - DNA, 25 bp, Homo sapien
cagggcctctacgtctccaggagct

SEQ ID NO: 1510935 - DNA, 25 bp, Homo sapien
gcgctgctctgacccatagtgacgt

SEQ ID NO: 1510936 - DNA, 25 bp, Homo sapien
tgccacagcccaattcagcttcatg

SEQ ID NO: 1510937 - DNA, 25 bp, Homo sapien
agcttcatgcgtgcgctgctctgac

SEQ ID NO: 1510938 - DNA, 25 bp, Homo sapien
gacccatagtgacgttcttgtcccc

SEQ ID NO: 1510939 - DNA, 25 bp, Homo sapien
gctccccctccagaccaccgctgct

SEQ ID NO: 1510940 - DNA, 25 bp, Homo sapien
gggctccccctccagaccaccgctg

SEQ ID NO: 1510941 - DNA, 25 bp, Homo sapien
ctccccctccagaccaccgctgcta

SEQ ID NO: 1510942 - DNA, 25 bp, Homo sapien
tccccctccagaccaccgctgctac

SEQ ID NO: 1510943 - DNA, 25 bp, Homo sapien
gccccatcccagcacctccatctct

SEQ ID NO: 1510944 - DNA, 25 bp, Homo sapien
cctggccccatcccagcacctccat

SEQ ID NO: 1510945 - DNA, 25 bp, Homo sapien
ccccatcccagcacctccatctctc

SEQ ID NO: 1510946 - DNA, 25 bp, Homo sapien
tggccccatcccagcacctccatct

SEQ ID NO: 1510947 - DNA, 25 bp, Homo sapien
ctggatggagaggatgcccgccacg

SEQ ID NO: 1510948 - DNA, 25 bp, Homo sapien
tggatggagaggatgcccgccacgg

SEQ ID NO: 1510949 - DNA, 25 bp, Homo sapien
tggagaggatgcccgccacggcggg

SEQ ID NO: 1510950 - DNA, 25 bp, Homo sapien
gatggagaggatgcccgccacggcg

SEQ ID NO: 1510951 - DNA, 25 bp, Homo sapien
tccccatcggaggactcaaggtggg

SEQ ID NO: 1510952 - DNA, 25 bp, Homo sapien
ggcgtctgagttggacaccacggat

SEQ ID NO: 1510953 - DNA, 25 bp, Homo sapien
tttcatatatctcctccagttcggc

SEQ ID NO: 1510954 - DNA, 25 bp, Homo sapien
cttggaatgcaggttcaaggaggca

SEQ ID NO: 1510955 - DNA, 25 bp, Homo sapien
tacttgggaggctgaggcaggagaa

SEQ ID NO: 1510956 - DNA, 25 bp, Homo sapien
aaatacaaaatcagcgaggtgtggt

SEQ ID NO: 1510957 - DNA, 25 bp, Homo sapien
atgcctgtaatcccatctacttggg

SEQ ID NO: 1510958 - DNA, 25 bp, Homo sapien
caaaatcagcgaggtgtggtggcgc

SEQ ID NO: 1510959 - DNA, 25 bp, Homo sapien
tggagctcactcttaggtcctgggc

SEQ ID NO: 1510960 - DNA, 25 bp, Homo sapien
tactagatgagtattgaccgagcgc

SEQ ID NO: 1510961 - DNA, 25 bp, Homo sapien
tgaacagggcacacacaagtaccta

SEQ ID NO: 1510962 - DNA, 25 bp, Homo sapien
gaccgagcgcctactgaatgtaaca

SEQ ID NO: 1510963 - DNA, 25 bp, Homo sapien
agtgccctcccctgtcgctgtcact

SEQ ID NO: 1510964 - DNA, 25 bp, Homo sapien
caggtggtgctgccgttcttgctgc

SEQ ID NO: 1510965 - DNA, 25 bp, Homo sapien
ggtgctgccgttcttgctgcccagc

SEQ ID NO: 1510966 - DNA, 25 bp, Homo sapien
cccctgtcgctgtcactcttccaga

SEQ ID NO: 1510967 - DNA, 25 bp, Homo sapien
ctccacgtcataatgagccataagg

SEQ ID NO: 1510968 - DNA, 25 bp, Homo sapien
cataatgagccataaggatcgcaaa

SEQ ID NO: 1510969 - DNA, 25 bp, Homo sapien
gtcataatgagccataaggatcgca

SEQ ID NO: 1510970 - DNA, 25 bp, Homo sapien
cacgtcataatgagccataaggatc

SEQ ID NO: 1510971 - DNA, 25 bp, Homo sapien
ttaattgcagttttcgacaaggccc

SEQ ID NO: 1510972 - DNA, 25 bp, Homo sapien
tactgaagtcacgtacagaaagtgg

SEQ ID NO: 1510973 - DNA, 25 bp, Homo sapien
tcagggttccttcagggcatgaggc

SEQ ID NO: 1510974 - DNA, 25 bp, Homo sapien
gacaaggcccagcttaacgatggat

SEQ ID NO: 1510975 - DNA, 25 bp, Homo sapien
caggaaagtgaggatgcacagcagc

SEQ ID NO: 1510976 - DNA, 25 bp, Homo sapien
ccctggtgatcagggtcagcttcca

SEQ ID NO: 1510977 - DNA, 25 bp, Homo sapien
cagaagagtgacagcgccagtccca

SEQ ID NO: 1510978 - DNA, 25 bp, Homo sapien
tggccgccttcgttctcgatgccgg

SEQ ID NO: 1510979 - DNA, 25 bp, Homo sapien
acgctcagaagcgagcgggcactcg

SEQ ID NO: 1510980 - DNA, 25 bp, Homo sapien
gctccaaagccagcgccctttaaag

SEQ ID NO: 1510981 - DNA, 25 bp, Homo sapien
ctacccgactgagccccgggagtgg

SEQ ID NO: 1510982 - DNA, 25 bp, Homo sapien
tccagggcccgcctacccgactgag

SEQ ID NO: 1510983 - DNA, 25 bp, Homo sapien
gctgtagatggcagccgagacgccc

SEQ ID NO: 1510984 - DNA, 25 bp, Homo sapien
ttggaacacgcgcaccacaagaaag

SEQ ID NO: 1510985 - DNA, 25 bp, Homo sapien
gggcacgccatagccgatcaggcag

SEQ ID NO: 1510986 - DNA, 25 bp, Homo sapien
aaggcggccaggaaacagtagtgca

SEQ ID NO: 1510987 - DNA, 25 bp, Homo sapien
ccaagaagctccagaggaagccctg

SEQ ID NO: 1510988 - DNA, 25 bp, Homo sapien
aaaatgatgaaggtcacaggtccca

SEQ ID NO: 1510989 - DNA, 25 bp, Homo sapien
agccctgctcaaagtccaaccagca

SEQ ID NO: 1510990 - DNA, 25 bp, Homo sapien
acaggtcccaagaagctccagagga

SEQ ID NO: 1510991 - DNA, 25 bp, Homo sapien
gcgctcgggcttcggtggagggaga

SEQ ID NO: 1510992 - DNA, 25 bp, Homo sapien
gggcctgtggcgctcgggcttcggt

SEQ ID NO: 1510993 - DNA, 25 bp, Homo sapien
gagagcgatggtccagccgggcctg

SEQ ID NO: 1510994 - DNA, 25 bp, Homo sapien
ggagcagattgtgggttagagggcg

SEQ ID NO: 1510995 - DNA, 25 bp, Homo sapien
gcttccagacggtagtcacgaaaat

SEQ ID NO: 1510996 - DNA, 25 bp, Homo sapien
tgagtgagcttccagacggtagtca

SEQ ID NO: 1510997 - DNA, 25 bp, Homo sapien
tcttcatgtctggattgatttcaga

SEQ ID NO: 1510998 - DNA, 25 bp, Homo sapien
agacggtagtcacgaaaatgacagc

SEQ ID NO: 1510999 - DNA, 25 bp, Homo sapien
ctgcgaggagcggggttgcagcgtg

SEQ ID NO: 1511000 - DNA, 25 bp, Homo sapien
tgcgaggagcggggttgcagcgtgg

SEQ ID NO: 1511001 - DNA, 25 bp, Homo sapien
gcgaggagcggggttgcagcgtggg

SEQ ID NO: 1511002 - DNA, 25 bp, Homo sapien
gcggggttgcagcgtgggcccccac

SEQ ID NO: 1511003 - DNA, 25 bp, Homo sapien
ccaacaggaagagctgcgcgatggc

SEQ ID NO: 1511004 - DNA, 25 bp, Homo sapien
ataggtcagcaccaagctccgatcg

SEQ ID NO: 1511005 - DNA, 25 bp, Homo sapien
tcgaagatgaacaggccaaagaccc

SEQ ID NO: 1511006 - DNA, 25 bp, Homo sapien
gaggatggtaaacacataggtcagc

SEQ ID NO: 1511007 - DNA, 25 bp, Homo sapien
aggcgcctcaccctggctatctttg

SEQ ID NO: 1511008 - DNA, 25 bp, Homo sapien
ggcgcctcaccctggctatctttga

SEQ ID NO: 1511009 - DNA, 25 bp, Homo sapien
caggcgcctcaccctggctatcttt

SEQ ID NO: 1511010 - DNA, 25 bp, Homo sapien
acaggcgcctcaccctggctatctt

SEQ ID NO: 1511011 - DNA, 25 bp, Homo sapien
actaggcaggcccacttccggtatt

SEQ ID NO: 1511012 - DNA, 25 bp, Homo sapien
ggtgaattctgagtacttgctcccc

SEQ ID NO: 1511013 - DNA, 25 bp, Homo sapien
tgtggccagtgccagacgtggtgga

SEQ ID NO: 1511014 - DNA, 25 bp, Homo sapien
tggtggaggtgaattctgagtactt

SEQ ID NO: 1511015 - DNA, 25 bp, Homo sapien
atatgccggactctgatgccctgag

SEQ ID NO: 1511016 - DNA, 25 bp, Homo sapien
tatgccggactctgatgccctgagg

SEQ ID NO: 1511017 - DNA, 25 bp, Homo sapien
aagcgcccttagtctgtcccgagta

SEQ ID NO: 1511018 - DNA, 25 bp, Homo sapien
tttggtgccagactatagctgccac

SEQ ID NO: 1511019 - DNA, 25 bp, Homo sapien
aaagtccaggatgggacaagcgccc

SEQ ID NO: 1511020 - DNA, 25 bp, Homo sapien
tcttcgtgtacaaagctgctgtggc

SEQ ID NO: 1511021 - DNA, 25 bp, Homo sapien
gggcctctgacatcagtcttagctt

SEQ ID NO: 1511022 - DNA, 25 bp, Homo sapien
cagggcaggcctctgtaccgtgagc

SEQ ID NO: 1511023 - DNA, 25 bp, Homo sapien
gacatcagtcttagcttaagaggga

SEQ ID NO: 1511024 - DNA, 25 bp, Homo sapien
tgtaccgtgagcctcaggcagtggc

SEQ ID NO: 1511025 - DNA, 25 bp, Homo sapien
ttacacaacgtctacaaccttcaca

SEQ ID NO: 1511026 - DNA, 25 bp, Homo sapien
aacacattacacaacgtctacaacc

SEQ ID NO: 1511027 - DNA, 25 bp, Homo sapien
cattacacaacgtctacaaccttca

SEQ ID NO: 1511028 - DNA, 25 bp, Homo sapien
cacattacacaacgtctacaacctt

SEQ ID NO: 1511029 - DNA, 25 bp, Homo sapien
taaacttgttattatggaagcctgg

SEQ ID NO: 1511030 - DNA, 25 bp, Homo sapien
acttgttattatggaagcctggctc

SEQ ID NO: 1511031 - DNA, 25 bp, Homo sapien
aaacttgttattatggaagcctggc

SEQ ID NO: 1511032 - DNA, 25 bp, Homo sapien
aacttgttattatggaagcctggct

SEQ ID NO: 1511033 - DNA, 25 bp, Homo sapien
tatttcaaggtgatgaagtattcta

SEQ ID NO: 1511034 - DNA, 25 bp, Homo sapien
tgcacatgtctgtgactacactaaa

SEQ ID NO: 1511035 - DNA, 25 bp, Homo sapien
aaattgcacatgtggtagtggttgc

SEQ ID NO: 1511036 - DNA, 25 bp, Homo sapien
tatggatacgtaaagggtacaggag

SEQ ID NO: 1511037 - DNA, 25 bp, Homo sapien
agctctgggcggatctgcattcaaa

SEQ ID NO: 1511038 - DNA, 25 bp, Homo sapien
attcaaatcctagcgctttacgcct

SEQ ID NO: 1511039 - DNA, 25 bp, Homo sapien
tgcattcaaatcctagcgctttacg

SEQ ID NO: 1511040 - DNA, 25 bp, Homo sapien
tctgcattcaaatcctagcgcttta

SEQ ID NO: 1511041 - DNA, 25 bp, Homo sapien
gggtcccgagacgaccgcacgctgc

SEQ ID NO: 1511042 - DNA, 25 bp, Homo sapien
agcgcgcgggaacccgaggagaacg

SEQ ID NO: 1511043 - DNA, 25 bp, Homo sapien
ttccacgcgttcaagccgagagcgg

SEQ ID NO: 1511044 - DNA, 25 bp, Homo sapien
gagagcggcggaggcctttgggcct

SEQ ID NO: 1511045 - DNA, 25 bp, Homo sapien
cgcggcgcgaccctccccggcgcgc

SEQ ID NO: 1511046 - DNA, 25 bp, Homo sapien
cccgctccggcctgctcggctcccg

SEQ ID NO: 1511047 - DNA, 25 bp, Homo sapien
gcctcgcctggccaggccgccgcgt

SEQ ID NO: 1511048 - DNA, 25 bp, Homo sapien
gggcggccagaggagcgcgcgtgcg

SEQ ID NO: 1511049 - DNA, 25 bp, Homo sapien
gcctcgctggctccacagtcccggc

SEQ ID NO: 1511050 - DNA, 25 bp, Homo sapien
ctgccgagaagggggcctcgctggc

SEQ ID NO: 1511051 - DNA, 25 bp, Homo sapien
gctggctccacagtcccggcccagg

SEQ ID NO: 1511052 - DNA, 25 bp, Homo sapien
tcgctggctccacagtcccggccca

SEQ ID NO: 1511053 - DNA, 25 bp, Homo sapien
ccagctcctcggcaaggccggcagg

SEQ ID NO: 1511054 - DNA, 25 bp, Homo sapien
ttgtgtgatcggcaacaccagatac

SEQ ID NO: 1511055 - DNA, 25 bp, Homo sapien
tgatcggcaacaccagatacgccca

SEQ ID NO: 1511056 - DNA, 25 bp, Homo sapien
cggcaaggccggcaggccatcagca

SEQ ID NO: 1511057 - DNA, 25 bp, Homo sapien
agtcgccaactgttattgaccatag

SEQ ID NO: 1511058 - DNA, 25 bp, Homo sapien
ctctcagtccagtcgccaactgtta

SEQ ID NO: 1511059 - DNA, 25 bp, Homo sapien
cttcctctcagtccagtcgccaact

SEQ ID NO: 1511060 - DNA, 25 bp, Homo sapien
cagtccagtcgccaactgttattga

SEQ ID NO: 1511061 - DNA, 25 bp, Homo sapien
cctgctccgaggggttattggcctc

SEQ ID NO: 1511062 - DNA, 25 bp, Homo sapien
tcctgctccgaggggttattggcct

SEQ ID NO: 1511063 - DNA, 25 bp, Homo sapien
gcccagctgctctagcagggaccag

SEQ ID NO: 1511064 - DNA, 25 bp, Homo sapien
gtggcccgccgcaggttctcagcac

SEQ ID NO: 1511065 - DNA, 25 bp, Homo sapien
agctccttgcggatttcccgccgca

SEQ ID NO: 1511066 - DNA, 25 bp, Homo sapien
cgccgggtcgggaagcaccacgtgg

SEQ ID NO: 1511067 - DNA, 25 bp, Homo sapien
gctgccattgctgtaggtctggatc

SEQ ID NO: 1511068 - DNA, 25 bp, Homo sapien
caggcccgccacgcggctcaggttg

SEQ ID NO: 1511069 - DNA, 25 bp, Homo sapien
ctcaggttggtggccgagcaggtgg

SEQ ID NO: 1511070 - DNA, 25 bp, Homo sapien
ccgccacgcggctcaggttggtggc

SEQ ID NO: 1511071 - DNA, 25 bp, Homo sapien
cttggtcttactgtcctgcaacatc

SEQ ID NO: 1511072 - DNA, 25 bp, Homo sapien
cggcggagttgcatgcggatgatgt

SEQ ID NO: 1511073 - DNA, 25 bp, Homo sapien
cagcgcccggcggagttgcatgcgg

SEQ ID NO: 1511074 - DNA, 25 bp, Homo sapien
cccggcggagttgcatgcggatgat

SEQ ID NO: 1511075 - DNA, 25 bp, Homo sapien
aaagggactcattatggagctggag

SEQ ID NO: 1511076 - DNA, 25 bp, Homo sapien
gggactcattatggagctggaggct

SEQ ID NO: 1511077 - DNA, 25 bp, Homo sapien
aagggactcattatggagctggagg

SEQ ID NO: 1511078 - DNA, 25 bp, Homo sapien
gtgagtgacacatgtggacacagtg

SEQ ID NO: 1511079 - DNA, 25 bp, Homo sapien
ccaggtgagtgacacatgtggacac

SEQ ID NO: 1511080 - DNA, 25 bp, Homo sapien
catgtggacacagtgtgactgtgag

SEQ ID NO: 1511081 - DNA, 25 bp, Homo sapien
tccttggaactgtgtctgtgttatt

SEQ ID NO: 1511082 - DNA, 25 bp, Homo sapien
tctggacaaccacagcatactacat

SEQ ID NO: 1511083 - DNA, 25 bp, Homo sapien
ttctccaagtgcctttgggaggtaa

SEQ ID NO: 1511084 - DNA, 25 bp, Homo sapien
cacagacggtgtcagtcacaaagac

SEQ ID NO: 1511085 - DNA, 25 bp, Homo sapien
gagggccatcatgatgcgattagcg

SEQ ID NO: 1511086 - DNA, 25 bp, Homo sapien
cacacattgtcacggtccctcttca

SEQ ID NO: 1511087 - DNA, 25 bp, Homo sapien
cacattgtcacggtccctcttcacc

SEQ ID NO: 1511088 - DNA, 25 bp, Homo sapien
cacacacattgtcacggtccctctt

SEQ ID NO: 1511089 - DNA, 25 bp, Homo sapien
cgacacacacattgtcacggtccct

SEQ ID NO: 1511090 - DNA, 25 bp, Homo sapien
ctcttcgatgcgcagctccacagcc

SEQ ID NO: 1511091 - DNA, 25 bp, Homo sapien
agcaggcgcagtacgttcttggcac

SEQ ID NO: 1511092 - DNA, 25 bp, Homo sapien
ctcgctgactgccttgcggtccggg

SEQ ID NO: 1511093 - DNA, 25 bp, Homo sapien
caccgcgtgctccactcggaagtgg

SEQ ID NO: 1511094 - DNA, 25 bp, Homo sapien
gcgcgggcttgcacagggtgctgta

SEQ ID NO: 1511095 - DNA, 25 bp, Homo sapien
gctgtagtgcgtggcgggaaagggc

SEQ ID NO: 1511096 - DNA, 25 bp, Homo sapien
cttctggttggattctgttaatttc

SEQ ID NO: 1511097 - DNA, 25 bp, Homo sapien
gaggaggccgcagcgagctcttctc

SEQ ID NO: 1511098 - DNA, 25 bp, Homo sapien
agcccaccactcgtacctccagggt

SEQ ID NO: 1511099 - DNA, 25 bp, Homo sapien
cacgggatggtctctgggaggtctc

SEQ ID NO: 1511100 - DNA, 25 bp, Homo sapien
cggccactgaggcttccgcttcggc

SEQ ID NO: 1511101 - DNA, 25 bp, Homo sapien
gtctctgcagcccaccactcgtacc

SEQ ID NO: 1511102 - DNA, 25 bp, Homo sapien
ctcccacctctagaacagctaggac

SEQ ID NO: 1511103 - DNA, 25 bp, Homo sapien
tcccacctctagaacagctaggact

SEQ ID NO: 1511104 - DNA, 25 bp, Homo sapien
cccacctctagaacagctaggacta

SEQ ID NO: 1511105 - DNA, 25 bp, Homo sapien
ctggagtacggtggcacaatcgcgg

SEQ ID NO: 1511106 - DNA, 25 bp, Homo sapien
gtgagccaccacgcccagccttttt

SEQ ID NO: 1511107 - DNA, 25 bp, Homo sapien
tgagccaccacgcccagcctttttt

SEQ ID NO: 1511108 - DNA, 25 bp, Homo sapien
gagtacggtggcacaatcgcggctc

SEQ ID NO: 1511109 - DNA, 25 bp, Homo sapien
gccaccatgcccacgcctggttaat

SEQ ID NO: 1511110 - DNA, 25 bp, Homo sapien
ttttttttctgtgacacagattcag

SEQ ID NO: 1511111 - DNA, 25 bp, Homo sapien
taatttttggttggcttgtcttctc

SEQ ID NO: 1511112 - DNA, 25 bp, Homo sapien
tttttctgtgacacagattcaggag

SEQ ID NO: 1511113 - DNA, 25 bp, Homo sapien
ccactgtgttatccagcttaagcac

SEQ ID NO: 1511114 - DNA, 25 bp, Homo sapien
cacatggcttccaagacgtctgccc

SEQ ID NO: 1511115 - DNA, 25 bp, Homo sapien
cagcttaagcacagtgctgacttca

SEQ ID NO: 1511116 - DNA, 25 bp, Homo sapien
tatccagcttaagcacagtgctgac

SEQ ID NO: 1511117 - DNA, 25 bp, Homo sapien
cctctcattgtccaagaaatcctcc

SEQ ID NO: 1511118 - DNA, 25 bp, Homo sapien
ccatgtccagctgcacctcatgcct

SEQ ID NO: 1511119 - DNA, 25 bp, Homo sapien
ggcacacaggccccgctggtcccgc

SEQ ID NO: 1511120 - DNA, 25 bp, Homo sapien
gctggtcccgccagaacacagccaa

SEQ ID NO: 1511121 - DNA, 25 bp, Homo sapien
gaagagccagacctaaaacatattt

SEQ ID NO: 1511122 - DNA, 25 bp, Homo sapien
tatcttccgtttctagaagagctgg

SEQ ID NO: 1511123 - DNA, 25 bp, Homo sapien
ggcagagttaaaacatatcttccgt

SEQ ID NO: 1511124 - DNA, 25 bp, Homo sapien
catattttccccttctaggaaactg

SEQ ID NO: 1511125 - DNA, 25 bp, Homo sapien
aaacatatcttatgcttctaaaaga

SEQ ID NO: 1511126 - DNA, 25 bp, Homo sapien
tacacgggtctaaaacatacctgcc

SEQ ID NO: 1511127 - DNA, 25 bp, Homo sapien
cgggtctaaaacatacctgccactt

SEQ ID NO: 1511128 - DNA, 25 bp, Homo sapien
ttctagaatacacgggtctaaaaca

SEQ ID NO: 1511129 - DNA, 25 bp, Homo sapien
ccgtcggagccgaggaatcctctca

SEQ ID NO: 1511130 - DNA, 25 bp, Homo sapien
tttcttctgccgtcggagccgagga

SEQ ID NO: 1511131 - DNA, 25 bp, Homo sapien
gtcggagccgaggaatcctctcaat

SEQ ID NO: 1511132 - DNA, 25 bp, Homo sapien
tctgccgtcggagccgaggaatcct

SEQ ID NO: 1511133 - DNA, 25 bp, Homo sapien
agccccagggctaaaggtgcctgtg

SEQ ID NO: 1511134 - DNA, 25 bp, Homo sapien
acccacgtggcgacatcgatgttca

SEQ ID NO: 1511135 - DNA, 25 bp, Homo sapien
gtggtccgggcctcggatcctggag

SEQ ID NO: 1511136 - DNA, 25 bp, Homo sapien
atctgcctagcacgctggaacgcct

SEQ ID NO: 1511137 - DNA, 25 bp, Homo sapien
aggaccctcgcaggcttcaaggggc

SEQ ID NO: 1511138 - DNA, 25 bp, Homo sapien
cttcaaggggcagccgggaccatgg

SEQ ID NO: 1511139 - DNA, 25 bp, Homo sapien
cctcgcaggcttcaaggggcagccg

SEQ ID NO: 1511140 - DNA, 25 bp, Homo sapien
gagggtgtgtctgggacccaggacc

SEQ ID NO: 1511141 - DNA, 25 bp, Homo sapien
ctggaaggaggatcccgcgagctct

SEQ ID NO: 1511142 - DNA, 25 bp, Homo sapien
gagtcagtgccgaggttcagcttct

SEQ ID NO: 1511143 - DNA, 25 bp, Homo sapien
agctgtccgagtcagtgccgaggtt

SEQ ID NO: 1511144 - DNA, 25 bp, Homo sapien
cgcgagctcttctgaggtgagctgt

SEQ ID NO: 1511145 - DNA, 25 bp, Homo sapien
gatctgggcacacgttttaaccagc

SEQ ID NO: 1511146 - DNA, 25 bp, Homo sapien
gagcaggacccctgacgctgcccag

SEQ ID NO: 1511147 - DNA, 25 bp, Homo sapien
gttttaaccagcatagagatctggg

SEQ ID NO: 1511148 - DNA, 25 bp, Homo sapien
tccagggaagttcctagtggtctct

SEQ ID NO: 1511149 - DNA, 25 bp, Homo sapien
tgcagtggccgggcatggtgactca

SEQ ID NO: 1511150 - DNA, 25 bp, Homo sapien
tgactcacacctataatcccagcac

SEQ ID NO: 1511151 - DNA, 25 bp, Homo sapien
tcacacctataatcccagcactttg

SEQ ID NO: 1511152 - DNA, 25 bp, Homo sapien
actcacacctataatcccagcactt

SEQ ID NO: 1511153 - DNA, 25 bp, Homo sapien
gggagtcagagatgccctcataacc

SEQ ID NO: 1511154 - DNA, 25 bp, Homo sapien
ggaggccagagtaaggggagtcaga

SEQ ID NO: 1511155 - DNA, 25 bp, Homo sapien
ctgtggcggagagaggaggccagag

SEQ ID NO: 1511156 - DNA, 25 bp, Homo sapien
tcagagatgccctcataaccacagc

SEQ ID NO: 1511157 - DNA, 25 bp, Homo sapien
ctcgggagcagtggattcctggatg

SEQ ID NO: 1511158 - DNA, 25 bp, Homo sapien
gcctggggtctcctgggtctccgaa

SEQ ID NO: 1511159 - DNA, 25 bp, Homo sapien
ctgcacagggcggggcctggggtct

SEQ ID NO: 1511160 - DNA, 25 bp, Homo sapien
ctggggtctcctgggtctccgaagg

SEQ ID NO: 1511161 - DNA, 25 bp, Homo sapien
gggtctcctgggtctccgaaggcag

SEQ ID NO: 1511162 - DNA, 25 bp, Homo sapien
gaacttgaaatcttcgagggtcaga

SEQ ID NO: 1511163 - DNA, 25 bp, Homo sapien
tgaaatcttcgagggtcagaggtga

SEQ ID NO: 1511164 - DNA, 25 bp, Homo sapien
aacttgaaatcttcgagggtcagag

SEQ ID NO: 1511165 - DNA, 25 bp, Homo sapien
cttgaaatcttcgagggtcagaggt

SEQ ID NO: 1511166 - DNA, 25 bp, Homo sapien
ggtggttttagcggccagccaggga

SEQ ID NO: 1511167 - DNA, 25 bp, Homo sapien
gggtctcccaattccctgccctcca

SEQ ID NO: 1511168 - DNA, 25 bp, Homo sapien
ggcaggggtggttttagcggccagc

SEQ ID NO: 1511169 - DNA, 25 bp, Homo sapien
gttttagcggccagccagggacctg

SEQ ID NO: 1511170 - DNA, 25 bp, Homo sapien
gctccccactgggccggaattcgga

SEQ ID NO: 1511171 - DNA, 25 bp, Homo sapien
cttcagagccttgatggcgaacagc

SEQ ID NO: 1511172 - DNA, 25 bp, Homo sapien
cagagccttgatggcgaacagctcc

SEQ ID NO: 1511173 - DNA, 25 bp, Homo sapien
actgggccggaattcggagaggagc

SEQ ID NO: 1511174 - DNA, 25 bp, Homo sapien
gagtactccatcacgaagcacacgt

SEQ ID NO: 1511175 - DNA, 25 bp, Homo sapien
aagcacacgtgctccggtgtctgga

SEQ ID NO: 1511176 - DNA, 25 bp, Homo sapien
aacacgtcgctgtggatgtgcagca

SEQ ID NO: 1511177 - DNA, 25 bp, Homo sapien
caatatccgcttctcacacatcagg

SEQ ID NO: 1511178 - DNA, 25 bp, Homo sapien
cagcaccacgcaggcggaataaaag

SEQ ID NO: 1511179 - DNA, 25 bp, Homo sapien
ctgtagacgatcttgtgttcgtgaa

SEQ ID NO: 1511180 - DNA, 25 bp, Homo sapien
tgtgttcgtgaagaaactgtaggcc

SEQ ID NO: 1511181 - DNA, 25 bp, Homo sapien
tgaagaaactgtaggcccagcacca

SEQ ID NO: 1511182 - DNA, 25 bp, Homo sapien
ttgacgtagccctcggtgtccagga

SEQ ID NO: 1511183 - DNA, 25 bp, Homo sapien
aagtctgcgatcttgacgtagccct

SEQ ID NO: 1511184 - DNA, 25 bp, Homo sapien
tgcgatcttgacgtagccctcggtg

SEQ ID NO: 1511185 - DNA, 25 bp, Homo sapien
gatcttgacgtagccctcggtgtcc

SEQ ID NO: 1511186 - DNA, 25 bp, Homo sapien
gaatgtgctggtccggtccccatag

SEQ ID NO: 1511187 - DNA, 25 bp, Homo sapien
agaatgtgctggtccggtccccata

SEQ ID NO: 1511188 - DNA, 25 bp, Homo sapien
cagaatgtgctggtccggtccccat

SEQ ID NO: 1511189 - DNA, 25 bp, Homo sapien
acagaatgtgctggtccggtcccca

SEQ ID NO: 1511190 - DNA, 25 bp, Homo sapien
tccacagctcgcgtgtacgacgtgt

SEQ ID NO: 1511191 - DNA, 25 bp, Homo sapien
gctcgcgtgtacgacgtgtccgtca

SEQ ID NO: 1511192 - DNA, 25 bp, Homo sapien
gtgtacgacgtgtccgtcagcacct

SEQ ID NO: 1511193 - DNA, 25 bp, Homo sapien
accagtccacagctcgcgtgtacga

SEQ ID NO: 1511194 - DNA, 25 bp, Homo sapien
acgatgctgtcgaagacctcctcct

SEQ ID NO: 1511195 - DNA, 25 bp, Homo sapien
gatgctgtcgaagacctcctcctca

SEQ ID NO: 1511196 - DNA, 25 bp, Homo sapien
atgctgtcgaagacctcctcctcat

SEQ ID NO: 1511197 - DNA, 25 bp, Homo sapien
gacgatgctgtcgaagacctcctcc

SEQ ID NO: 1511198 - DNA, 25 bp, Homo sapien
tgccgatggcttcggccgacaggaa

SEQ ID NO: 1511199 - DNA, 25 bp, Homo sapien
catgatgccgatggcttcggccgac

SEQ ID NO: 1511200 - DNA, 25 bp, Homo sapien
ctcatgatgccgatggcttcggccg

SEQ ID NO: 1511201 - DNA, 25 bp, Homo sapien
tgatgccgatggcttcggccgacag

SEQ ID NO: 1511202 - DNA, 25 bp, Homo sapien
tgtgtcaggatctgtcccctcctgg

SEQ ID NO: 1511203 - DNA, 25 bp, Homo sapien
gcatctctctcgctagatcccagcc

SEQ ID NO: 1511204 - DNA, 25 bp, Homo sapien
ctctcgctagatcccagcctccgct

SEQ ID NO: 1511205 - DNA, 25 bp, Homo sapien
atctctctcgctagatcccagcctc

SEQ ID NO: 1511206 - DNA, 25 bp, Homo sapien
tccgctctgggttcctccgaagcag

SEQ ID NO: 1511207 - DNA, 25 bp, Homo sapien
tcaaaggaggtgacgatgttgccct

SEQ ID NO: 1511208 - DNA, 25 bp, Homo sapien
ccttgaggcaaagcggctaggcatg

SEQ ID NO: 1511209 - DNA, 25 bp, Homo sapien
aggcccttgaggcgcaacgaggccc

SEQ ID NO: 1511210 - DNA, 25 bp, Homo sapien
caaaggaggtgacgatgttgccctg

SEQ ID NO: 1511211 - DNA, 25 bp, Homo sapien
tggagaagccggattaggaaaagtg

SEQ ID NO: 1511212 - DNA, 25 bp, Homo sapien
ctgcgagagcctggtggagaagccg

SEQ ID NO: 1511213 - DNA, 25 bp, Homo sapien
tggtggagaagccggattaggaaaa

SEQ ID NO: 1511214 - DNA, 25 bp, Homo sapien
agaagccggattaggaaaagtggag

SEQ ID NO: 1511215 - DNA, 25 bp, Homo sapien
gagggaagcggaggggagggtcagc

SEQ ID NO: 1511216 - DNA, 25 bp, Homo sapien
tgcaggggagggaagcggaggggag

SEQ ID NO: 1511217 - DNA, 25 bp, Homo sapien
ctgcaggggagggaagcggagggga

SEQ ID NO: 1511218 - DNA, 25 bp, Homo sapien
gcctccccggtgaactcctcgtcga

SEQ ID NO: 1511219 - DNA, 25 bp, Homo sapien
cggccggacagcgtgggcacaaagg

SEQ ID NO: 1511220 - DNA, 25 bp, Homo sapien
tcgtcgaagttgctgacgtcggtgc

SEQ ID NO: 1511221 - DNA, 25 bp, Homo sapien
tcggtgcggccggacagcgtgggca

SEQ ID NO: 1511222 - DNA, 25 bp, Homo sapien
ttaaaaactaagagctctcgggcag

SEQ ID NO: 1511223 - DNA, 25 bp, Homo sapien
aggatccggcaaatcccaaaggcct

SEQ ID NO: 1511224 - DNA, 25 bp, Homo sapien
gcaaacgtccacacctccaagcacg

SEQ ID NO: 1511225 - DNA, 25 bp, Homo sapien
tccacgccgccccttgatcctcttc

SEQ ID NO: 1511226 - DNA, 25 bp, Homo sapien
atcagtcgagactcccacgaccacc

SEQ ID NO: 1511227 - DNA, 25 bp, Homo sapien
accataagaacagccccgagtccac

SEQ ID NO: 1511228 - DNA, 25 bp, Homo sapien
gacttccgaaaccattctgctcact

SEQ ID NO: 1511229 - DNA, 25 bp, Homo sapien
taacggacttccgaaaccattctgc

SEQ ID NO: 1511230 - DNA, 25 bp, Homo sapien
cattctgctcactgcggctttgagc

SEQ ID NO: 1511231 - DNA, 25 bp, Homo sapien
gctttgagctcttccaatacagccc

SEQ ID NO: 1511232 - DNA, 25 bp, Homo sapien
cgccagagccgcaggagcaagcgca

SEQ ID NO: 1511233 - DNA, 25 bp, Homo sapien
agccgcaggagcaagcgcaccgtgc

SEQ ID NO: 1511234 - DNA, 25 bp, Homo sapien
caagcgcaccgtgcgggcggccggg

SEQ ID NO: 1511235 - DNA, 25 bp, Homo sapien
tcgagggtgccgggcccgtgggcgc

SEQ ID NO: 1511236 - DNA, 25 bp, Homo sapien
gctgcgccaactgcttcgcctcttg

SEQ ID NO: 1511237 - DNA, 25 bp, Homo sapien
gccgtgctgcgccaactgcttcgcc

SEQ ID NO: 1511238 - DNA, 25 bp, Homo sapien
tgcgccaactgcttcgcctcttgcc

SEQ ID NO: 1511239 - DNA, 25 bp, Homo sapien
gtgctgcgccaactgcttcgcctct

SEQ ID NO: 1511240 - DNA, 25 bp, Homo sapien
tccctgcagcggccactgttcctgg

SEQ ID NO: 1511241 - DNA, 25 bp, Homo sapien
gccgtcggcggctggagctctacct

SEQ ID NO: 1511242 - DNA, 25 bp, Homo sapien
gtggcgctggccgtcggcggctgga

SEQ ID NO: 1511243 - DNA, 25 bp, Homo sapien
ccactgttcctggccgtgcgccttg

SEQ ID NO: 1511244 - DNA, 25 bp, Homo sapien
cgtgggccgctatgagctgcagtac

SEQ ID NO: 1511245 - DNA, 25 bp, Homo sapien
cacgtggtgcttcatcggcctgggt

SEQ ID NO: 1511246 - DNA, 25 bp, Homo sapien
agcttgtcggtatcatggtggtgtc

SEQ ID NO: 1511247 - DNA, 25 bp, Homo sapien
tgtcgtgcatctgctggagcccaat

SEQ ID NO: 1511248 - DNA, 25 bp, Homo sapien
gggcctggcgagagaccgcagtgga

SEQ ID NO: 1511249 - DNA, 25 bp, Homo sapien
atatggagtggaaccgtgggcaccc

SEQ ID NO: 1511250 - DNA, 25 bp, Homo sapien
tggtgggcagttccgccctttcagc

SEQ ID NO: 1511251 - DNA, 25 bp, Homo sapien
caccaggatatcaaagagtggatgg

SEQ ID NO: 1511252 - DNA, 25 bp, Homo sapien
tcatcttcgaggattgagggtgatc

SEQ ID NO: 1511253 - DNA, 25 bp, Homo sapien
atcttcgaggattgagggtgatcag

SEQ ID NO: 1511254 - DNA, 25 bp, Homo sapien
cttcgaggattgagggtgatcaggg

SEQ ID NO: 1511255 - DNA, 25 bp, Homo sapien
catcttcgaggattgagggtgatca

SEQ ID NO: 1511256 - DNA, 25 bp, Homo sapien
tacctccgcatttgacacgagtctg

SEQ ID NO: 1511257 - DNA, 25 bp, Homo sapien
gagcctgttacctccgcatttgaca

SEQ ID NO: 1511258 - DNA, 25 bp, Homo sapien
gacgatggcggtgggtttttgtatc

SEQ ID NO: 1511259 - DNA, 25 bp, Homo sapien
cacgagtctgctgtgaaccccgcaa

SEQ ID NO: 1511260 - DNA, 25 bp, Homo sapien
tcgaggccattaacgggcagagcct

SEQ ID NO: 1511261 - DNA, 25 bp, Homo sapien
cctcatcagcgtgggcgacatgatc

SEQ ID NO: 1511262 - DNA, 25 bp, Homo sapien
cgacatgatcgaggccattaacggg

SEQ ID NO: 1511263 - DNA, 25 bp, Homo sapien
atcaaggagggcagcgtgatcgacc

SEQ ID NO: 1511264 - DNA, 25 bp, Homo sapien
tcgggctcaccatcacggacaacgg

SEQ ID NO: 1511265 - DNA, 25 bp, Homo sapien
tcatcttcgcccacgtgaaggggca

SEQ ID NO: 1511266 - DNA, 25 bp, Homo sapien
tgttcaagtcggaggatgcactcgg

SEQ ID NO: 1511267 - DNA, 25 bp, Homo sapien
ggaggtggaggtgttcaagtcggag

SEQ ID NO: 1511268 - DNA, 25 bp, Homo sapien
gagcaataagagaccctgactcttt

SEQ ID NO: 1511269 - DNA, 25 bp, Homo sapien
cagtgagccattatcgtgatcaccc

SEQ ID NO: 1511270 - DNA, 25 bp, Homo sapien
gcaccaggcctacaataaaatttaa

SEQ ID NO: 1511271 - DNA, 25 bp, Homo sapien
agccattatcgtgatcaccccactg

SEQ ID NO: 1511272 - DNA, 25 bp, Homo sapien
cttggaacagaacgcacggcttccc

SEQ ID NO: 1511273 - DNA, 25 bp, Homo sapien
tcacagatgccttggaacagaacgc

SEQ ID NO: 1511274 - DNA, 25 bp, Homo sapien
gtgtatactccatgggctcacagat

SEQ ID NO: 1511275 - DNA, 25 bp, Homo sapien
atgccttggaacagaacgcacggct

SEQ ID NO: 1511276 - DNA, 25 bp, Homo sapien
tcaatgaaaacttcttgtccgtaaa

SEQ ID NO: 1511277 - DNA, 25 bp, Homo sapien
tttctgttgtccactagtcgccatc

SEQ ID NO: 1511278 - DNA, 25 bp, Homo sapien
tatttcctcgtatttccaccattcc

SEQ ID NO: 1511279 - DNA, 25 bp, Homo sapien
atatttttctgttgtccactagtcg

SEQ ID NO: 1511280 - DNA, 25 bp, Homo sapien
acaggccctatggagagaggacatg

SEQ ID NO: 1511281 - DNA, 25 bp, Homo sapien
tttacatcatagtaaaacaggccct

SEQ ID NO: 1511282 - DNA, 25 bp, Homo sapien
tcatagtaaaacaggccctatggag

SEQ ID NO: 1511283 - DNA, 25 bp, Homo sapien
gtaaaacaggccctatggagagagg

SEQ ID NO: 1511284 - DNA, 25 bp, Homo sapien
attggaatgagagctaatattgtat

SEQ ID NO: 1511285 - DNA, 25 bp, Homo sapien
ttggaatgagagctaatattgtata

SEQ ID NO: 1511286 - DNA, 25 bp, Homo sapien
aattggaatgagagctaatattgta

SEQ ID NO: 1511287 - DNA, 25 bp, Homo sapien
cccgtactcatcatcagggccacac

SEQ ID NO: 1511288 - DNA, 25 bp, Homo sapien
gctttaccagccactcaaacaggaa

SEQ ID NO: 1511289 - DNA, 25 bp, Homo sapien
tttgctttaccagccactcaaacag

SEQ ID NO: 1511290 - DNA, 25 bp, Homo sapien
tgctttaccagccactcaaacagga

SEQ ID NO: 1511291 - DNA, 25 bp, Homo sapien
ggaacggtccactgcttcgcggcga

SEQ ID NO: 1511292 - DNA, 25 bp, Homo sapien
cacccgaagcggaagacgcggattg

SEQ ID NO: 1511293 - DNA, 25 bp, Homo sapien
tctggaatgtttccgtcgggtccac

SEQ ID NO: 1511294 - DNA, 25 bp, Homo sapien
cggtggtacagccagccgcggctta

SEQ ID NO: 1511295 - DNA, 25 bp, Homo sapien
ggcagccagtgctctctgtataggg

SEQ ID NO: 1511296 - DNA, 25 bp, Homo sapien
ggagcactgtggaacgtctgtaaat

SEQ ID NO: 1511297 - DNA, 25 bp, Homo sapien
gttggtgtacactcaaaacctgtcc

SEQ ID NO: 1511298 - DNA, 25 bp, Homo sapien
tgccactgccaacatgagaccaaag

SEQ ID NO: 1511299 - DNA, 25 bp, Homo sapien
tacagcggctgtaccaagaagatga

SEQ ID NO: 1511300 - DNA, 25 bp, Homo sapien
ccctgtaagggaagctcgagagaga

SEQ ID NO: 1511301 - DNA, 25 bp, Homo sapien
tattgaccatcgaagtgaagaaggg

SEQ ID NO: 1511302 - DNA, 25 bp, Homo sapien
cactgtcaggctacgcggaaatact

SEQ ID NO: 1511303 - DNA, 25 bp, Homo sapien
ttcctacgcaccattagccctaaaa

SEQ ID NO: 1511304 - DNA, 25 bp, Homo sapien
tcctgtgcccgttgatgattcaggc

SEQ ID NO: 1511305 - DNA, 25 bp, Homo sapien
gcttctgggcttgatctggagctga

SEQ ID NO: 1511306 - DNA, 25 bp, Homo sapien
cctcggagggtaaggagagcagggc

SEQ ID NO: 1511307 - DNA, 25 bp, Homo sapien
gcctgtttgttaatcttaaatagaa

SEQ ID NO: 1511308 - DNA, 25 bp, Homo sapien
aaatagaaacggagtctccttatgt

SEQ ID NO: 1511309 - DNA, 25 bp, Homo sapien
ggcctgtttgttaatcttaaataga

SEQ ID NO: 1511310 - DNA, 25 bp, Homo sapien
cggcctgtttgttaatcttaaatag

SEQ ID NO: 1511311 - DNA, 25 bp, Homo sapien
tgaggtacttgattgtgaggggcca

SEQ ID NO: 1511312 - DNA, 25 bp, Homo sapien
gaggtacttgattgtgaggggccat

SEQ ID NO: 1511313 - DNA, 25 bp, Homo sapien
ctgaggtacttgattgtgaggggcc

SEQ ID NO: 1511314 - DNA, 25 bp, Homo sapien
tcctctccttactcttgtttccaga

SEQ ID NO: 1511315 - DNA, 25 bp, Homo sapien
tgttgaaccatctggaattcacagg

SEQ ID NO: 1511316 - DNA, 25 bp, Homo sapien
ctgcccctgagctttcatgagctgt

SEQ ID NO: 1511317 - DNA, 25 bp, Homo sapien
gagctttcatgagctgttgaaccat

SEQ ID NO: 1511318 - DNA, 25 bp, Homo sapien
tacagcgctcgcaaccgcagcgata

SEQ ID NO: 1511319 - DNA, 25 bp, Homo sapien
caaccgcagcgatagactaaacgcg

SEQ ID NO: 1511320 - DNA, 25 bp, Homo sapien
acagcacaggctccctacagcgctc

SEQ ID NO: 1511321 - DNA, 25 bp, Homo sapien
cgatagactaaacgcggctctgcgt

SEQ ID NO: 1511322 - DNA, 25 bp, Homo sapien
cacggcggctactgctccgcggctg

SEQ ID NO: 1511323 - DNA, 25 bp, Homo sapien
cccacggcggctactgctccgcggc

SEQ ID NO: 1511324 - DNA, 25 bp, Homo sapien
ggctccctcccacggcggctactgc

SEQ ID NO: 1511325 - DNA, 25 bp, Homo sapien
cctcccacggcggctactgctccgc

SEQ ID NO: 1511326 - DNA, 25 bp, Homo sapien
cacggcccctgtttctcgcttctta

SEQ ID NO: 1511327 - DNA, 25 bp, Homo sapien
cgcctgcgccgtctggctcttcctt

SEQ ID NO: 1511328 - DNA, 25 bp, Homo sapien
tggcccggggcgcaacgcttgccca

SEQ ID NO: 1511329 - DNA, 25 bp, Homo sapien
gggcgcaacgcttgcccactgcgcc

SEQ ID NO: 1511330 - DNA, 25 bp, Homo sapien
caagaatactgatagcaaagcccct

SEQ ID NO: 1511331 - DNA, 25 bp, Homo sapien
tcgtggctcccatgacaaagtctgc

SEQ ID NO: 1511332 - DNA, 25 bp, Homo sapien
ataaatacttcctgcgcacatgcgc

SEQ ID NO: 1511333 - DNA, 25 bp, Homo sapien
cccaagggttgacgtagatgacctc

SEQ ID NO: 1511334 - DNA, 25 bp, Homo sapien
taagaccttggcgtcctgagttccc

SEQ ID NO: 1511335 - DNA, 25 bp, Homo sapien
gcatagtggctaggaactaagacct

SEQ ID NO: 1511336 - DNA, 25 bp, Homo sapien
gaaacaagaaatcgctcgacctgct

SEQ ID NO: 1511337 - DNA, 25 bp, Homo sapien
gaatctcaccagcacaagagtaagc

SEQ ID NO: 1511338 - DNA, 25 bp, Homo sapien
ctcaggaattaacaggctcaattac

SEQ ID NO: 1511339 - DNA, 25 bp, Homo sapien
taacaggctcaattacaagatgtag

SEQ ID NO: 1511340 - DNA, 25 bp, Homo sapien
acaagatgtagtagctgtttttcca

SEQ ID NO: 1511341 - DNA, 25 bp, Homo sapien
tacaagatgtagtagctgtttttcc

SEQ ID NO: 1511342 - DNA, 25 bp, Homo sapien
atctcagctcgtccgcgacctccac

SEQ ID NO: 1511343 - DNA, 25 bp, Homo sapien
tgttgcccaggaccggaatgcagtg

SEQ ID NO: 1511344 - DNA, 25 bp, Homo sapien
gtgcgatctcagctcgtccgcgacc

SEQ ID NO: 1511345 - DNA, 25 bp, Homo sapien
ctcccaggttcaaacgaattctcct

SEQ ID NO: 1511346 - DNA, 25 bp, Homo sapien
acttagagatgtcagcctgatatcc

SEQ ID NO: 1511347 - DNA, 25 bp, Homo sapien
gacttagagatgtcagcctgatatc

SEQ ID NO: 1511348 - DNA, 25 bp, Homo sapien
gtgacttagagatgtcagcctgata

SEQ ID NO: 1511349 - DNA, 25 bp, Homo sapien
ctgtgacttagagatgtcagcctga

SEQ ID NO: 1511350 - DNA, 25 bp, Homo sapien
ctggaatgccacaggctgctttggt

SEQ ID NO: 1511351 - DNA, 25 bp, Homo sapien
cacggagacctacaaagggctcaac

SEQ ID NO: 1511352 - DNA, 25 bp, Homo sapien
ctgctgcgttgtgacccatttccga

SEQ ID NO: 1511353 - DNA, 25 bp, Homo sapien
catttccgatgctcctcggggacag

SEQ ID NO: 1511354 - DNA, 25 bp, Homo sapien
ttgtcacacggagacctacaaaggg

SEQ ID NO: 1511355 - DNA, 25 bp, Homo sapien
tgagtgagaacagcgaccaacagtt

SEQ ID NO: 1511356 - DNA, 25 bp, Homo sapien
caatggccttgctggcggcagagtc

SEQ ID NO: 1511357 - DNA, 25 bp, Homo sapien
tctcccggctgtaaacaagcaggtt

SEQ ID NO: 1511358 - DNA, 25 bp, Homo sapien
gaccacgcgtgcatgttgaaagcca

SEQ ID NO: 1511359 - DNA, 25 bp, Homo sapien
caaaaccctcaacggcaccagcaca

SEQ ID NO: 1511360 - DNA, 25 bp, Homo sapien
aagcagcttttgagtggtcacctca

SEQ ID NO: 1511361 - DNA, 25 bp, Homo sapien
caggctgccctgaaagcagcttttg

SEQ ID NO: 1511362 - DNA, 25 bp, Homo sapien
tgagtggtcacctcaaaaccctcaa

SEQ ID NO: 1511363 - DNA, 25 bp, Homo sapien
tcccgggccaacaagctcaagttca

SEQ ID NO: 1511364 - DNA, 25 bp, Homo sapien
cgaagaagagaacagcctttttagg

SEQ ID NO: 1511365 - DNA, 25 bp, Homo sapien
tcgaagaagagaacagcctttttag

SEQ ID NO: 1511366 - DNA, 25 bp, Homo sapien
ctcgaagaagagaacagccttttta

SEQ ID NO: 1511367 - DNA, 25 bp, Homo sapien
ttgtctttgcgtccagaatctccac

SEQ ID NO: 1511368 - DNA, 25 bp, Homo sapien
agcttctcccttgtctttgcgtcca

SEQ ID NO: 1511369 - DNA, 25 bp, Homo sapien
aaacacagcttctcccttgtctttg

SEQ ID NO: 1511370 - DNA, 25 bp, Homo sapien
ccttgtctttgcgtccagaatctcc

SEQ ID NO: 1511371 - DNA, 25 bp, Homo sapien
gctcctgggctataaggattggggt

SEQ ID NO: 1511372 - DNA, 25 bp, Homo sapien
tcctgggctataaggattggggtcc

SEQ ID NO: 1511373 - DNA, 25 bp, Homo sapien
ctgggctataaggattggggtcccg

SEQ ID NO: 1511374 - DNA, 25 bp, Homo sapien
cagctcctgggctataaggattggg

SEQ ID NO: 1511375 - DNA, 25 bp, Homo sapien
aagcacaggcgcagggacgtcagct

SEQ ID NO: 1511376 - DNA, 25 bp, Homo sapien
ggaagcacaggcgcagggacgtcag

SEQ ID NO: 1511377 - DNA, 25 bp, Homo sapien
gaagcacaggcgcagggacgtcagc

SEQ ID NO: 1511378 - DNA, 25 bp, Homo sapien
ggttcttgatctccgcaatggtggc

SEQ ID NO: 1511379 - DNA, 25 bp, Homo sapien
ttgatctccgcaatggtggcgtggg

SEQ ID NO: 1511380 - DNA, 25 bp, Homo sapien
gttcttgatctccgcaatggtggcg

SEQ ID NO: 1511381 - DNA, 25 bp, Homo sapien
tcttgatctccgcaatggtggcgtg

SEQ ID NO: 1511382 - DNA, 25 bp, Homo sapien
gaccccaggactccacagctcctcc

SEQ ID NO: 1511383 - DNA, 25 bp, Homo sapien
cccaggactccacagctcctcccac

SEQ ID NO: 1511384 - DNA, 25 bp, Homo sapien
tcccagggtgcaaggaccccaggac

SEQ ID NO: 1511385 - DNA, 25 bp, Homo sapien
cccagggtgcaaggaccccaggact

SEQ ID NO: 1511386 - DNA, 25 bp, Homo sapien
actggcgggcggggtaccactgcgg

SEQ ID NO: 1511387 - DNA, 25 bp, Homo sapien
tggcgggcggggtaccactgcggat

SEQ ID NO: 1511388 - DNA, 25 bp, Homo sapien
gactggcgggcggggtaccactgcg

SEQ ID NO: 1511389 - DNA, 25 bp, Homo sapien
ctggcgggcggggtaccactgcgga

SEQ ID NO: 1511390 - DNA, 25 bp, Homo sapien
gggccgagtggacagctgtactcac

SEQ ID NO: 1511391 - DNA, 25 bp, Homo sapien
agggggcgggccgagtggacagctg

SEQ ID NO: 1511392 - DNA, 25 bp, Homo sapien
gggcgggccgagtggacagctgtac

SEQ ID NO: 1511393 - DNA, 25 bp, Homo sapien
gcgggccgagtggacagctgtactc

SEQ ID NO: 1511394 - DNA, 25 bp, Homo sapien
tcccggaagtacagtgtggccgtgg

SEQ ID NO: 1511395 - DNA, 25 bp, Homo sapien
ccaggtcccggaagtacagtgtggc

SEQ ID NO: 1511396 - DNA, 25 bp, Homo sapien
aggtcccggaagtacagtgtggccg

SEQ ID NO: 1511397 - DNA, 25 bp, Homo sapien
gtcccggaagtacagtgtggccgtg

SEQ ID NO: 1511398 - DNA, 25 bp, Homo sapien
agaggggggcaagatgagtcaccca

SEQ ID NO: 1511399 - DNA, 25 bp, Homo sapien
gaggggggcaagatgagtcacccaa

SEQ ID NO: 1511400 - DNA, 25 bp, Homo sapien
ctggacgtaaagtcatatttgtggc

SEQ ID NO: 1511401 - DNA, 25 bp, Homo sapien
gcaccactgtatgccgactggacgt

SEQ ID NO: 1511402 - DNA, 25 bp, Homo sapien
ggacgtaaagtcatatttgtggcca

SEQ ID NO: 1511403 - DNA, 25 bp, Homo sapien
tatgccgactggacgtaaagtcata

SEQ ID NO: 1511404 - DNA, 25 bp, Homo sapien
ctggtcggggggagcaggctcagct

SEQ ID NO: 1511405 - DNA, 25 bp, Homo sapien
gctggtccggcaggtcttctgcctt

SEQ ID NO: 1511406 - DNA, 25 bp, Homo sapien
tccagcaggcgcttgatgtagtgga

SEQ ID NO: 1511407 - DNA, 25 bp, Homo sapien
gcatagtgccatgggagaagcggtg

SEQ ID NO: 1511408 - DNA, 25 bp, Homo sapien
gaagcggtgcacgaagagcgtctcc

SEQ ID NO: 1511409 - DNA, 25 bp, Homo sapien
cgcttgatgtagtggaatgagtgac

SEQ ID NO: 1511410 - DNA, 25 bp, Homo sapien
acttgggccagcaccggacaaggca

SEQ ID NO: 1511411 - DNA, 25 bp, Homo sapien
cagcaccggacaaggcagatgctgc

SEQ ID NO: 1511412 - DNA, 25 bp, Homo sapien
cttgggccagcaccggacaaggcag

SEQ ID NO: 1511413 - DNA, 25 bp, Homo sapien
ggccagcaccggacaaggcagatgc

SEQ ID NO: 1511414 - DNA, 25 bp, Homo sapien
tgtagagagggtgattgatgtaata

SEQ ID NO: 1511415 - DNA, 25 bp, Homo sapien
gtaataggccatccacgcggcgaag

SEQ ID NO: 1511416 - DNA, 25 bp, Homo sapien
ggagtgtagagagggtgattgatgt

SEQ ID NO: 1511417 - DNA, 25 bp, Homo sapien
gatgtaataggccatccacgcggcg

SEQ ID NO: 1511418 - DNA, 25 bp, Homo sapien
catgaggggaggacccgctgggtgg

SEQ ID NO: 1511419 - DNA, 25 bp, Homo sapien
gaggggagcccatgaggggaggacc

SEQ ID NO: 1511420 - DNA, 25 bp, Homo sapien
ggaaggatggtctgaggccacttac

SEQ ID NO: 1511421 - DNA, 25 bp, Homo sapien
gagggaaggatggtctgaggccact

SEQ ID NO: 1511422 - DNA, 25 bp, Homo sapien
cacaaagatggcgagcgccagtttc

SEQ ID NO: 1511423 - DNA, 25 bp, Homo sapien
caaagatggcgagcgccagtttcac

SEQ ID NO: 1511424 - DNA, 25 bp, Homo sapien
tggcgagcgccagtttcacctgctg

SEQ ID NO: 1511425 - DNA, 25 bp, Homo sapien
gatggcgagcgccagtttcacctgc

SEQ ID NO: 1511426 - DNA, 25 bp, Homo sapien
gaagcaggatcagcctagggccgcc

SEQ ID NO: 1511427 - DNA, 25 bp, Homo sapien
agaagcaggatcagcctagggccgc

SEQ ID NO: 1511428 - DNA, 25 bp, Homo sapien
aggatcagcctagggccgcccagac

SEQ ID NO: 1511429 - DNA, 25 bp, Homo sapien
agcaggatcagcctagggccgccca

SEQ ID NO: 1511430 - DNA, 25 bp, Homo sapien
tggatggagaagttgccgagctggc

SEQ ID NO: 1511431 - DNA, 25 bp, Homo sapien
ggatggagaagttgccgagctggca

SEQ ID NO: 1511432 - DNA, 25 bp, Homo sapien
ggcaggcaggacagaaggagaaagt

SEQ ID NO: 1511433 - DNA, 25 bp, Homo sapien
ctggcaggcaggacagaaggagaaa

SEQ ID NO: 1511434 - DNA, 25 bp, Homo sapien
caggcaggacagaaggagaaagtca

SEQ ID NO: 1511435 - DNA, 25 bp, Homo sapien
ggagaaagtcagaccccctcaccca

SEQ ID NO: 1511436 - DNA, 25 bp, Homo sapien
gggtatgggatcttccgcgtcttgg

SEQ ID NO: 1511437 - DNA, 25 bp, Homo sapien
cttggtggggtatgggatcttccgc

SEQ ID NO: 1511438 - DNA, 25 bp, Homo sapien
gtatgggatcttccgcgtcttggac

SEQ ID NO: 1511439 - DNA, 25 bp, Homo sapien
ggtggggtatgggatcttccgcgtc

SEQ ID NO: 1511440 - DNA, 25 bp, Homo sapien
cactgcgtcatgatggcgaaaccga

SEQ ID NO: 1511441 - DNA, 25 bp, Homo sapien
ctgcgtcatgatggcgaaaccgatc

SEQ ID NO: 1511442 - DNA, 25 bp, Homo sapien
gacactgcgtcatgatggcgaaacc

SEQ ID NO: 1511443 - DNA, 25 bp, Homo sapien
cgtcatgatggcgaaaccgatccag

SEQ ID NO: 1511444 - DNA, 25 bp, Homo sapien
caggtagctgcggtgcttgcccttg

SEQ ID NO: 1511445 - DNA, 25 bp, Homo sapien
tagtcccggaactccttcaggtagc

SEQ ID NO: 1511446 - DNA, 25 bp, Homo sapien
tggcccagatggtcatctgggtgaa

SEQ ID NO: 1511447 - DNA, 25 bp, Homo sapien
cggaactccttcaggtagctgcggt

SEQ ID NO: 1511448 - DNA, 25 bp, Homo sapien
ccccagaatgccaccgggttgaggg

SEQ ID NO: 1511449 - DNA, 25 bp, Homo sapien
gcgggctttattccgggtgctggag

SEQ ID NO: 1511450 - DNA, 25 bp, Homo sapien
ggcaggcgggctttattccgggtgc

SEQ ID NO: 1511451 - DNA, 25 bp, Homo sapien
gctttattccgggtgctggagagct

SEQ ID NO: 1511452 - DNA, 25 bp, Homo sapien
ctttattccgggtgctggagagctg

SEQ ID NO: 1511453 - DNA, 25 bp, Homo sapien
gtctagcacagggaacctgacaagt

SEQ ID NO: 1511454 - DNA, 25 bp, Homo sapien
tgtctctccgactcaggcgtctggg

SEQ ID NO: 1511455 - DNA, 25 bp, Homo sapien
ccctgtctctccgactcaggcgtct

SEQ ID NO: 1511456 - DNA, 25 bp, Homo sapien
cacagggaacctgacaagtggcagc

SEQ ID NO: 1511457 - DNA, 25 bp, Homo sapien
tggtgggtccgggtacccagtgatg

SEQ ID NO: 1511458 - DNA, 25 bp, Homo sapien
tacccagtgatggaatacagattat

SEQ ID NO: 1511459 - DNA, 25 bp, Homo sapien
ggtccgggtacccagtgatggaata

SEQ ID NO: 1511460 - DNA, 25 bp, Homo sapien
cgggtacccagtgatggaatacaga

SEQ ID NO: 1511461 - DNA, 25 bp, Homo sapien
tggcttgggaggaaggtccttgtag

SEQ ID NO: 1511462 - DNA, 25 bp, Homo sapien
ctggcttgggaggaaggtccttgta

SEQ ID NO: 1511463 - DNA, 25 bp, Homo sapien
tagggaggtgttgagttctcatagt

SEQ ID NO: 1511464 - DNA, 25 bp, Homo sapien
cttagtgcagacgcccgatcgccta

SEQ ID NO: 1511465 - DNA, 25 bp, Homo sapien
gggtgtcgaactgctccgtttccaa

SEQ ID NO: 1511466 - DNA, 25 bp, Homo sapien
actgatcagcttgggggtgtcgaac

SEQ ID NO: 1511467 - DNA, 25 bp, Homo sapien
tcgcctagttcacaatcgcccagaa

SEQ ID NO: 1511468 - DNA, 25 bp, Homo sapien
gagatagaatacaggttgtgcatgg

SEQ ID NO: 1511469 - DNA, 25 bp, Homo sapien
agagatagaatacaggttgtgcatg

SEQ ID NO: 1511470 - DNA, 25 bp, Homo sapien
agatagaatacaggttgtgcatggc

SEQ ID NO: 1511471 - DNA, 25 bp, Homo sapien
tggcttgggaggaaggtccttgtag

SEQ ID NO: 1511472 - DNA, 25 bp, Homo sapien
ctggcttgggaggaaggtccttgta

SEQ ID NO: 1511473 - DNA, 25 bp, Homo sapien
tagggaggtgttgagttctcatagt

SEQ ID NO: 1511474 - DNA, 25 bp, Homo sapien
ggagcagtcgcactactgatcagct

SEQ ID NO: 1511475 - DNA, 25 bp, Homo sapien
cggctactcacaggagcagtcgcac

SEQ ID NO: 1511476 - DNA, 25 bp, Homo sapien
cagcggctactcacaggagcagtcg

SEQ ID NO: 1511477 - DNA, 25 bp, Homo sapien
gcggctactcacaggagcagtcgca

SEQ ID NO: 1511478 - DNA, 25 bp, Homo sapien
ccagcgatagtatacatgttgtgca

SEQ ID NO: 1511479 - DNA, 25 bp, Homo sapien
tggacacccagcgatagtatacatg

SEQ ID NO: 1511480 - DNA, 25 bp, Homo sapien
cacccagcgatagtatacatgttgt

SEQ ID NO: 1511481 - DNA, 25 bp, Homo sapien
gacacccagcgatagtatacatgtt

SEQ ID NO: 1511482 - DNA, 25 bp, Homo sapien
tggcttgggaggaaggtccttgtag

SEQ ID NO: 1511483 - DNA, 25 bp, Homo sapien
ctggcttgggaggaaggtccttgta

SEQ ID NO: 1511484 - DNA, 25 bp, Homo sapien
tagggaggtgttgagttctcatagt

SEQ ID NO: 1511485 - DNA, 25 bp, Homo sapien
cccttggaggtcttggtggagcact

SEQ ID NO: 1511486 - DNA, 25 bp, Homo sapien
ctgcccttggaggtcttggtggagc

SEQ ID NO: 1511487 - DNA, 25 bp, Homo sapien
cttggaggtcttggtggagcacttg

SEQ ID NO: 1511488 - DNA, 25 bp, Homo sapien
ggaggtcttggtggagcacttgaac

SEQ ID NO: 1511489 - DNA, 25 bp, Homo sapien
ctgtcatgttccggggcttgcaagg

SEQ ID NO: 1511490 - DNA, 25 bp, Homo sapien
tgtcatgttccggggcttgcaagga

SEQ ID NO: 1511491 - DNA, 25 bp, Homo sapien
acaggtgacagcggcgaggtccagg

SEQ ID NO: 1511492 - DNA, 25 bp, Homo sapien
caggtgacagcggcgaggtccaggc

SEQ ID NO: 1511493 - DNA, 25 bp, Homo sapien
gccagggatggctgcaatggagaag

SEQ ID NO: 1511494 - DNA, 25 bp, Homo sapien
gatggctgcaatggagaaggctcaa

SEQ ID NO: 1511495 - DNA, 25 bp, Homo sapien
caatggagaaggctcaagattcaca

SEQ ID NO: 1511496 - DNA, 25 bp, Homo sapien
gctgcaatggagaaggctcaagatt

SEQ ID NO: 1511497 - DNA, 25 bp, Homo sapien
cagtgagaccaaggcagcccaggaa

SEQ ID NO: 1511498 - DNA, 25 bp, Homo sapien
cagcccaggaacagggaagtcacca

SEQ ID NO: 1511499 - DNA, 25 bp, Homo sapien
gacacaggtacaccatccacctctt

SEQ ID NO: 1511500 - DNA, 25 bp, Homo sapien
ctccagacctctgattgagccaggg

SEQ ID NO: 1511501 - DNA, 25 bp, Homo sapien
tctgctgaaagcttaacattctcag

SEQ ID NO: 1511502 - DNA, 25 bp, Homo sapien
tgaaagcttaacattctcagttctt

SEQ ID NO: 1511503 - DNA, 25 bp, Homo sapien
catctgctgaaagcttaacattctc

SEQ ID NO: 1511504 - DNA, 25 bp, Homo sapien
gctgaaagcttaacattctcagttc

SEQ ID NO: 1511505 - DNA, 25 bp, Homo sapien
tcttacacgggcaatgtcatgcttc

SEQ ID NO: 1511506 - DNA, 25 bp, Homo sapien
atgtcatgcttcaggccagctagcc

SEQ ID NO: 1511507 - DNA, 25 bp, Homo sapien
gtgtcagctcttacacgggcaatgt

SEQ ID NO: 1511508 - DNA, 25 bp, Homo sapien
tcagctcttacacgggcaatgtcat

SEQ ID NO: 1511509 - DNA, 25 bp, Homo sapien
tcctggcagaacatccgggcctcat

SEQ ID NO: 1511510 - DNA, 25 bp, Homo sapien
gcttggggagaagtagtaacacttg

SEQ ID NO: 1511511 - DNA, 25 bp, Homo sapien
cccatgacttggtgcttggggagaa

SEQ ID NO: 1511512 - DNA, 25 bp, Homo sapien
tcagcaaagctattgatgatgacca

SEQ ID NO: 1511513 - DNA, 25 bp, Homo sapien
tgtcttcttaacctctgcatgatac

SEQ ID NO: 1511514 - DNA, 25 bp, Homo sapien
atgtcttcttaacctctgcatgata

SEQ ID NO: 1511515 - DNA, 25 bp, Homo sapien
ttctaatttcttgccatccagggaa

SEQ ID NO: 1511516 - DNA, 25 bp, Homo sapien
ccatccagccacctccagtcccctt

SEQ ID NO: 1511517 - DNA, 25 bp, Homo sapien
ggccctgtcattcagccccagccag

SEQ ID NO: 1511518 - DNA, 25 bp, Homo sapien
agccccagccagtacacccgtggag

SEQ ID NO: 1511519 - DNA, 25 bp, Homo sapien
gccagtacacccgtggagagccatg

SEQ ID NO: 1511520 - DNA, 25 bp, Homo sapien
ttattgggttcctctggctcccaga

SEQ ID NO: 1511521 - DNA, 25 bp, Homo sapien
attgggttcctctggctcccagaag

SEQ ID NO: 1511522 - DNA, 25 bp, Homo sapien
tattgggttcctctggctcccagaa

SEQ ID NO: 1511523 - DNA, 25 bp, Homo sapien
ggtagcacagtcctcatcgtggatg

SEQ ID NO: 1511524 - DNA, 25 bp, Homo sapien
gaacttgctgcatccagggtgccaa

SEQ ID NO: 1511525 - DNA, 25 bp, Homo sapien
aatatcggccaggtacggtgacaca

SEQ ID NO: 1511526 - DNA, 25 bp, Homo sapien
cacgaaagggcaggagattctcatc

SEQ ID NO: 1511527 - DNA, 25 bp, Homo sapien
tatatcatcaaagacgttacaaccc

SEQ ID NO: 1511528 - DNA, 25 bp, Homo sapien
gacgttacaacccacagatagctca

SEQ ID NO: 1511529 - DNA, 25 bp, Homo sapien
ggcacgtgctggcagataggtccat

SEQ ID NO: 1511530 - DNA, 25 bp, Homo sapien
gctggcagataggtccatcgttgtc

SEQ ID NO: 1511531 - DNA, 25 bp, Homo sapien
taaagaatgtgttcagtgcagagcc

SEQ ID NO: 1511532 - DNA, 25 bp, Homo sapien
aacggacagatctgcaatggccggg

SEQ ID NO: 1511533 - DNA, 25 bp, Homo sapien
tacagatccgaagtttcaagggcaa

SEQ ID NO: 1511534 - DNA, 25 bp, Homo sapien
tgttgtggagaatccagagtgtccc

SEQ ID NO: 1511535 - DNA, 25 bp, Homo sapien
taactcaaagtaagactcgcgtagg

SEQ ID NO: 1511536 - DNA, 25 bp, Homo sapien
cacaatgtgaccttagctgacaaga

SEQ ID NO: 1511537 - DNA, 25 bp, Homo sapien
tagtgtgaaacaagatgggcaactc

SEQ ID NO: 1511538 - DNA, 25 bp, Homo sapien
tcaagtcttttgtcagtccctggca

SEQ ID NO: 1511539 - DNA, 25 bp, Homo sapien
taccaccgtcgtcactttcgtcacc

SEQ ID NO: 1511540 - DNA, 25 bp, Homo sapien
tcgtcactttcgtcaccttcagccc

SEQ ID NO: 1511541 - DNA, 25 bp, Homo sapien
gctactaccaccgtcgtcactttcg

SEQ ID NO: 1511542 - DNA, 25 bp, Homo sapien
accgtcgtcactttcgtcaccttca

SEQ ID NO: 1511543 - DNA, 25 bp, Homo sapien
gccagccggagacactcccaccgtg

SEQ ID NO: 1511544 - DNA, 25 bp, Homo sapien
tgcaagccagccggagacactccca

SEQ ID NO: 1511545 - DNA, 25 bp, Homo sapien
tcccaccgtgccgtgccgcaccgcg

SEQ ID NO: 1511546 - DNA, 25 bp, Homo sapien
ggagacactcccaccgtgccgtgcc

SEQ ID NO: 1511547 - DNA, 25 bp, Homo sapien
gggtttgaggtctcagtcggtgttc

SEQ ID NO: 1511548 - DNA, 25 bp, Homo sapien
tttgaggtctcagtcggtgttctcc

SEQ ID NO: 1511549 - DNA, 25 bp, Homo sapien
ggtttgaggtctcagtcggtgttct

SEQ ID NO: 1511550 - DNA, 25 bp, Homo sapien
gtttgaggtctcagtcggtgttctc

SEQ ID NO: 1511551 - DNA, 25 bp, Homo sapien
cctctagaggtcaggcacagaagga

SEQ ID NO: 1511552 - DNA, 25 bp, Homo sapien
ttatatttctatggccacatgtgtt

SEQ ID NO: 1511553 - DNA, 25 bp, Homo sapien
tgcccggctaaatgtactgaatctt

SEQ ID NO: 1511554 - DNA, 25 bp, Homo sapien
tgttttcaataggtctcaccaggga

SEQ ID NO: 1511555 - DNA, 25 bp, Homo sapien
tccgtgcgctgtccagcaatgccca

SEQ ID NO: 1511556 - DNA, 25 bp, Homo sapien
tcctgcactggtcaagcatcctgta

SEQ ID NO: 1511557 - DNA, 25 bp, Homo sapien
ccagggtcctgcactggtcaagcat

SEQ ID NO: 1511558 - DNA, 25 bp, Homo sapien
acaggctcctccgtgcgctgtccag

SEQ ID NO: 1511559 - DNA, 25 bp, Homo sapien
tgtggcacggagaatccctcgttct

SEQ ID NO: 1511560 - DNA, 25 bp, Homo sapien
aacacctgtggcacggagaatccct

SEQ ID NO: 1511561 - DNA, 25 bp, Homo sapien
acctgtggcacggagaatccctcgt

SEQ ID NO: 1511562 - DNA, 25 bp, Homo sapien
cctgtggcacggagaatccctcgtt

SEQ ID NO: 1511563 - DNA, 25 bp, Homo sapien
catagaaggcaactcttcgggttta

SEQ ID NO: 1511564 - DNA, 25 bp, Homo sapien
ccaaaagatcctgcatagaaggcaa

SEQ ID NO: 1511565 - DNA, 25 bp, Homo sapien
aaagatcctgcatagaaggcaactc

SEQ ID NO: 1511566 - DNA, 25 bp, Homo sapien
tcctgcatagaaggcaactcttcgg

SEQ ID NO: 1511567 - DNA, 25 bp, Homo sapien
tgatgtaacaagagccccatgcctg

SEQ ID NO: 1511568 - DNA, 25 bp, Homo sapien
gcactggagccctgtactgaaagga

SEQ ID NO: 1511569 - DNA, 25 bp, Homo sapien
cagcttctctaaacgtgtgtccata

SEQ ID NO: 1511570 - DNA, 25 bp, Homo sapien
tactcacgggctggatgtcttcagg

SEQ ID NO: 1511571 - DNA, 25 bp, Homo sapien
tctctgcggttaggtctgggttcaa

SEQ ID NO: 1511572 - DNA, 25 bp, Homo sapien
ccagcagcaggttgtatgatcgtca

SEQ ID NO: 1511573 - DNA, 25 bp, Homo sapien
gcatggcctggaagggctacctaaa

SEQ ID NO: 1511574 - DNA, 25 bp, Homo sapien
catacagggtctcaatgattgtgac

SEQ ID NO: 1511575 - DNA, 25 bp, Homo sapien
cccctgaagaggctatgagacattt

SEQ ID NO: 1511576 - DNA, 25 bp, Homo sapien
ccacagggcatccatcattcacagg

SEQ ID NO: 1511577 - DNA, 25 bp, Homo sapien
caaggtcgggagatcttggttctga

SEQ ID NO: 1511578 - DNA, 25 bp, Homo sapien
cactatagaaaggtgtggcacagag

SEQ ID NO: 1511579 - DNA, 25 bp, Homo sapien
accacagctgttctcagcccgagag

SEQ ID NO: 1511580 - DNA, 25 bp, Homo sapien
ctcagcccgagagacctttggtttg

SEQ ID NO: 1511581 - DNA, 25 bp, Homo sapien
caaaagacaagagggtgctgagcag

SEQ ID NO: 1511582 - DNA, 25 bp, Homo sapien
gcaaaagacaagagggtgctgagca

SEQ ID NO: 1511583 - DNA, 25 bp, Homo sapien
atcccagagaccaaggcggctcctg

SEQ ID NO: 1511584 - DNA, 25 bp, Homo sapien
cggtcctctcgagtcaatggtgtct

SEQ ID NO: 1511585 - DNA, 25 bp, Homo sapien
ctggagagctggccggtcctctcga

SEQ ID NO: 1511586 - DNA, 25 bp, Homo sapien
ctcttctatggagggcaccagctgc

SEQ ID NO: 1511587 - DNA, 25 bp, Homo sapien
aaataacgctagcaggacttggtgg

SEQ ID NO: 1511588 - DNA, 25 bp, Homo sapien
tggaaataacgctagcaggacttgg

SEQ ID NO: 1511589 - DNA, 25 bp, Homo sapien
gttggggggtacatgcagcaggtcc

SEQ ID NO: 1511590 - DNA, 25 bp, Homo sapien
ttggaaataacgctagcaggacttg

SEQ ID NO: 1511591 - DNA, 25 bp, Homo sapien
tcaggagcagaactggagtccagga

SEQ ID NO: 1511592 - DNA, 25 bp, Homo sapien
cagaactggagtccaggagaactaa

SEQ ID NO: 1511593 - DNA, 25 bp, Homo sapien
gagtccaggagaactaacggtggct

SEQ ID NO: 1511594 - DNA, 25 bp, Homo sapien
tccaggagaactaacggtggctctg

SEQ ID NO: 1511595 - DNA, 25 bp, Homo sapien
catttaccttgtcaggatttaccca

SEQ ID NO: 1511596 - DNA, 25 bp, Homo sapien
gctgctcgctcaggaaacacgtctg

SEQ ID NO: 1511597 - DNA, 25 bp, Homo sapien
ggtcacagattagagtcaagaagct

SEQ ID NO: 1511598 - DNA, 25 bp, Homo sapien
cgtgcatatttgatcctgctttggg

SEQ ID NO: 1511599 - DNA, 25 bp, Homo sapien
cacccatgggttgcggtggcccaga

SEQ ID NO: 1511600 - DNA, 25 bp, Homo sapien
tctgaatctgcatagcggccttcag

SEQ ID NO: 1511601 - DNA, 25 bp, Homo sapien
gccacccatgggttgcggtggccca

SEQ ID NO: 1511602 - DNA, 25 bp, Homo sapien
actggtatcaccaccctctgaatct

SEQ ID NO: 1511603 - DNA, 25 bp, Homo sapien
gatctgtcactggaagtgccctccc

SEQ ID NO: 1511604 - DNA, 25 bp, Homo sapien
tgctgtggttgagtgagccctctct

SEQ ID NO: 1511605 - DNA, 25 bp, Homo sapien
aatgcaggcaggataggatacaagt

SEQ ID NO: 1511606 - DNA, 25 bp, Homo sapien
tgtatcctctctatggtgccacggc

SEQ ID NO: 1511607 - DNA, 25 bp, Homo sapien
ccacagctgagagtgaacaggccca

SEQ ID NO: 1511608 - DNA, 25 bp, Homo sapien
gaagacgacatttggacacagacat

SEQ ID NO: 1511609 - DNA, 25 bp, Homo sapien
tgctgtttaatccacccagctggtg

SEQ ID NO: 1511610 - DNA, 25 bp, Homo sapien
catctacacaccaaggagaggcttc

SEQ ID NO: 1511611 - DNA, 25 bp, Homo sapien
tgttgctggcgtccacaggttgcag

SEQ ID NO: 1511612 - DNA, 25 bp, Homo sapien
tgccttggtgtgcaacctcacccat

SEQ ID NO: 1511613 - DNA, 25 bp, Homo sapien
ttctccaacatgttgctggcgtcca

SEQ ID NO: 1511614 - DNA, 25 bp, Homo sapien
cacccattctctgggtgtcaattcc

SEQ ID NO: 1511615 - DNA, 25 bp, Homo sapien
cgcagttttagagacgaggagtcca

SEQ ID NO: 1511616 - DNA, 25 bp, Homo sapien
tctgacgctctgagaagagtccttc

SEQ ID NO: 1511617 - DNA, 25 bp, Homo sapien
tcctaacttggttacagctgcaaag

SEQ ID NO: 1511618 - DNA, 25 bp, Homo sapien
agtccaaagttaagctcagcagggc

SEQ ID NO: 1511619 - DNA, 25 bp, Homo sapien
ccactgtcccgactcagctttggga

SEQ ID NO: 1511620 - DNA, 25 bp, Homo sapien
taattcaccaggagactccaaagct

SEQ ID NO: 1511621 - DNA, 25 bp, Homo sapien
caaagagacatatagacgtgcacac

SEQ ID NO: 1511622 - DNA, 25 bp, Homo sapien
tgcaagctcttgcacacgcatgcat

SEQ ID NO: 1511623 - DNA, 25 bp, Homo sapien
ctgtgaacaggcggttggcagccca

SEQ ID NO: 1511624 - DNA, 25 bp, Homo sapien
tgtgaacaggcggttggcagcccag

SEQ ID NO: 1511625 - DNA, 25 bp, Homo sapien
tagagtccagaaacacccattcttc

SEQ ID NO: 1511626 - DNA, 25 bp, Homo sapien
gtagagtccagaaacacccattctt

SEQ ID NO: 1511627 - DNA, 25 bp, Homo sapien
ctgagtagagtccagaaacacccat

SEQ ID NO: 1511628 - DNA, 25 bp, Homo sapien
gagtagagtccagaaacacccattc

SEQ ID NO: 1511629 - DNA, 25 bp, Homo sapien
ccctgtcagtggtccactgctctcc

SEQ ID NO: 1511630 - DNA, 25 bp, Homo sapien
tcttccaaataagacaacgcattgg

SEQ ID NO: 1511631 - DNA, 25 bp, Homo sapien
gacgcccctgtcagtggtccactgc

SEQ ID NO: 1511632 - DNA, 25 bp, Homo sapien
ttccaaataagacaacgcattgggt

SEQ ID NO: 1511633 - DNA, 25 bp, Homo sapien
ctgatgctcacctgatctgcctggg

SEQ ID NO: 1511634 - DNA, 25 bp, Homo sapien
taggttgccctgataagacagtttc

SEQ ID NO: 1511635 - DNA, 25 bp, Homo sapien
tggacactccccttactgaccagag

SEQ ID NO: 1511636 - DNA, 25 bp, Homo sapien
taagacagtttccaaactggacact

SEQ ID NO: 1511637 - DNA, 25 bp, Homo sapien
ggacaggatctctgtaaaagtatct

SEQ ID NO: 1511638 - DNA, 25 bp, Homo sapien
taggaattgcctcttggggttgaca

SEQ ID NO: 1511639 - DNA, 25 bp, Homo sapien
aaagtatcttggctaggaattgcct

SEQ ID NO: 1511640 - DNA, 25 bp, Homo sapien
gacaggatctctgtaaaagtatctt

SEQ ID NO: 1511641 - DNA, 25 bp, Homo sapien
atggagtccataccatttctatcca

SEQ ID NO: 1511642 - DNA, 25 bp, Homo sapien
gagtccataccatttctatccagag

SEQ ID NO: 1511643 - DNA, 25 bp, Homo sapien
tccataccatttctatccagagttc

SEQ ID NO: 1511644 - DNA, 25 bp, Homo sapien
ggagtccataccatttctatccaga

SEQ ID NO: 1511645 - DNA, 25 bp, Homo sapien
gccttattagattcacagatattct

SEQ ID NO: 1511646 - DNA, 25 bp, Homo sapien
ccttattagattcacagatattctc

SEQ ID NO: 1511647 - DNA, 25 bp, Homo sapien
cactacggattttctcgggcacaat

SEQ ID NO: 1511648 - DNA, 25 bp, Homo sapien
gatgtgaagactgaccaaaggctcg

SEQ ID NO: 1511649 - DNA, 25 bp, Homo sapien
tgaaagacgactcaagacctgaccg

SEQ ID NO: 1511650 - DNA, 25 bp, Homo sapien
tatgggttctcatgtgtcgccggag

SEQ ID NO: 1511651 - DNA, 25 bp, Homo sapien
gggcccacagtatggatgagacatg

SEQ ID NO: 1511652 - DNA, 25 bp, Homo sapien
catgggttcttttgtgtacagtgag

SEQ ID NO: 1511653 - DNA, 25 bp, Homo sapien
tctcttcccacatgggttcttttgt

SEQ ID NO: 1511654 - DNA, 25 bp, Homo sapien
cattgatagggtctcccggcactgt

SEQ ID NO: 1511655 - DNA, 25 bp, Homo sapien
gatggttatgacttccggccaccct

SEQ ID NO: 1511656 - DNA, 25 bp, Homo sapien
tattacgagggaaagtcatagcccc

SEQ ID NO: 1511657 - DNA, 25 bp, Homo sapien
catattcatactagccaggaccgga

SEQ ID NO: 1511658 - DNA, 25 bp, Homo sapien
gaagaataagccacaccagacctaa

SEQ ID NO: 1511659 - DNA, 25 bp, Homo sapien
gaaactgctgcatacccactaatgt

SEQ ID NO: 1511660 - DNA, 25 bp, Homo sapien
aatggagactagtcccctgggtctg

SEQ ID NO: 1511661 - DNA, 25 bp, Homo sapien
cagatgactttgatagcccacctta

SEQ ID NO: 1511662 - DNA, 25 bp, Homo sapien
gcgtgacagtaccacatgttgccaa

SEQ ID NO: 1511663 - DNA, 25 bp, Homo sapien
ccaatggaatcgaggagggagccca

SEQ ID NO: 1511664 - DNA, 25 bp, Homo sapien
tgaagttggactcttttcttactcc

SEQ ID NO: 1511665 - DNA, 25 bp, Homo sapien
cagtaatcaacacaatacggtaatg

SEQ ID NO: 1511666 - DNA, 25 bp, Homo sapien
cacaatacggtaatggcataaagat

SEQ ID NO: 1511667 - DNA, 25 bp, Homo sapien
ggcaagagcatagcaactgggccca

SEQ ID NO: 1511668 - DNA, 25 bp, Homo sapien
gttgactgaaaaggcagtacaccaa

SEQ ID NO: 1511669 - DNA, 25 bp, Homo sapien
aacaccaggtgcagcccaagatgaa

SEQ ID NO: 1511670 - DNA, 25 bp, Homo sapien
gatgaacagctgatctgtcaccttg

SEQ ID NO: 1511671 - DNA, 25 bp, Homo sapien
agagtactggatgtggaaattcttc

SEQ ID NO: 1511672 - DNA, 25 bp, Homo sapien
caagagagtactggatgtggaaatt

SEQ ID NO: 1511673 - DNA, 25 bp, Homo sapien
catgcaagagagtactggatgtgga

SEQ ID NO: 1511674 - DNA, 25 bp, Homo sapien
ctgaacatgcaagagagtactggat

SEQ ID NO: 1511675 - DNA, 25 bp, Homo sapien
gaaactctagggtcagctgatggca

SEQ ID NO: 1511676 - DNA, 25 bp, Homo sapien
gattttaagtacaagaccacgccca

SEQ ID NO: 1511677 - DNA, 25 bp, Homo sapien
tatgtgactaagctcccggaagccg

SEQ ID NO: 1511678 - DNA, 25 bp, Homo sapien
gagtgtagagcccatatccccatag

SEQ ID NO: 1511679 - DNA, 25 bp, Homo sapien
gaaatcaggtttctactgctaggca

SEQ ID NO: 1511680 - DNA, 25 bp, Homo sapien
gaaaagtttctaatctcagatcggg

SEQ ID NO: 1511681 - DNA, 25 bp, Homo sapien
gttgactcagaagccgaaattccta

SEQ ID NO: 1511682 - DNA, 25 bp, Homo sapien
catagatcaagagagacacggctcc

SEQ ID NO: 1511683 - DNA, 25 bp, Homo sapien
tctcagcatatggacggccagctgt

SEQ ID NO: 1511684 - DNA, 25 bp, Homo sapien
agaaaccggaaatcttccatgccct

SEQ ID NO: 1511685 - DNA, 25 bp, Homo sapien
gtgctcatcaaactctcagcatatg

SEQ ID NO: 1511686 - DNA, 25 bp, Homo sapien
gcattcaattcctgcagaaaccgga

SEQ ID NO: 1511687 - DNA, 25 bp, Homo sapien
ggacacagatgaagctgaaaaccat

SEQ ID NO: 1511688 - DNA, 25 bp, Homo sapien
ttgcagggacacagatgaagctgaa

SEQ ID NO: 1511689 - DNA, 25 bp, Homo sapien
cacagatgaagctgaaaaccatcat

SEQ ID NO: 1511690 - DNA, 25 bp, Homo sapien
gcagggacacagatgaagctgaaaa

SEQ ID NO: 1511691 - DNA, 25 bp, Homo sapien
gcttcccgccgctgcagcgcgtgga

SEQ ID NO: 1511692 - DNA, 25 bp, Homo sapien
ctgcagcgcgtggagccagcgccat

SEQ ID NO: 1511693 - DNA, 25 bp, Homo sapien
gccgctgcagcgcgtggagccagcg

SEQ ID NO: 1511694 - DNA, 25 bp, Homo sapien
ttcccgccgctgcagcgcgtggagc

SEQ ID NO: 1511695 - DNA, 25 bp, Homo sapien
gcaaggatttccggttcccacgctc

SEQ ID NO: 1511696 - DNA, 25 bp, Homo sapien
atttcctgggcgctcagaaccacca

SEQ ID NO: 1511697 - DNA, 25 bp, Homo sapien
gacttccggtatcggaagcaaggat

SEQ ID NO: 1511698 - DNA, 25 bp, Homo sapien
ggacctcaatttcgctccctgcaaa

SEQ ID NO: 1511699 - DNA, 25 bp, Homo sapien
caaggatcgaatataagcacaggta

SEQ ID NO: 1511700 - DNA, 25 bp, Homo sapien
cagcaagattacagtcaatagactc

SEQ ID NO: 1511701 - DNA, 25 bp, Homo sapien
gggtgccaaggatcgaatataagca

SEQ ID NO: 1511702 - DNA, 25 bp, Homo sapien
cacaggtacatataagcagcaagat

SEQ ID NO: 1511703 - DNA, 25 bp, Homo sapien
cacaatgaaatctgatggcaattaa

SEQ ID NO: 1511704 - DNA, 25 bp, Homo sapien
caaatcacagtgaaacgaacttaat

SEQ ID NO: 1511705 - DNA, 25 bp, Homo sapien
aatgaaatctgatggcaattaaatt

SEQ ID NO: 1511706 - DNA, 25 bp, Homo sapien
aatcacagtgaaacgaacttaatta

SEQ ID NO: 1511707 - DNA, 25 bp, Homo sapien
acaccatcttctaggacaagtctgg

SEQ ID NO: 1511708 - DNA, 25 bp, Homo sapien
cttctaggacaagtctggtggcctc

SEQ ID NO: 1511709 - DNA, 25 bp, Homo sapien
ctaggacaagtctggtggcctcagt

SEQ ID NO: 1511710 - DNA, 25 bp, Homo sapien
tctgcagccacaccatcttctagga

SEQ ID NO: 1511711 - DNA, 25 bp, Homo sapien
tgagttttctgaaaggaaggcctcc

SEQ ID NO: 1511712 - DNA, 25 bp, Homo sapien
cttgctgagttttctgaaaggaagg

SEQ ID NO: 1511713 - DNA, 25 bp, Homo sapien
tgctgagttttctgaaaggaaggcc

SEQ ID NO: 1511714 - DNA, 25 bp, Homo sapien
gagttttctgaaaggaaggcctcca

SEQ ID NO: 1511715 - DNA, 25 bp, Homo sapien
gattgataatgactttcaaaatgag

SEQ ID NO: 1511716 - DNA, 25 bp, Homo sapien
atgaaacagatgtccgcaaaggaca

SEQ ID NO: 1511717 - DNA, 25 bp, Homo sapien
ttgggattgtagtagagatgaaaca

SEQ ID NO: 1511718 - DNA, 25 bp, Homo sapien
ctttgggattgtagtagagatgaaa

SEQ ID NO: 1511719 - DNA, 25 bp, Homo sapien
ggattgtagtagagatgaaacagat

SEQ ID NO: 1511720 - DNA, 25 bp, Homo sapien
aagctgtccagtgcttctaagagta

SEQ ID NO: 1511721 - DNA, 25 bp, Homo sapien
gagtaagctgtccagtgcttctaag

SEQ ID NO: 1511722 - DNA, 25 bp, Homo sapien
ctgtccagtgcttctaagagtacaa

SEQ ID NO: 1511723 - DNA, 25 bp, Homo sapien
ggagtaagctgtccagtgcttctaa

SEQ ID NO: 1511724 - DNA, 25 bp, Homo sapien
ctgataatccagaatgccagaacca

SEQ ID NO: 1511725 - DNA, 25 bp, Homo sapien
cccagtggccctactgcaaaataca

SEQ ID NO: 1511726 - DNA, 25 bp, Homo sapien
caagctatgtaatgaggaatccaga

SEQ ID NO: 1511727 - DNA, 25 bp, Homo sapien
aaaggtatcagaaccggcaaggcgg

SEQ ID NO: 1511728 - DNA, 25 bp, Homo sapien
agctgatgagattgcacgtatggag

SEQ ID NO: 1511729 - DNA, 25 bp, Homo sapien
gagctgatgagattgcacgtatgga

SEQ ID NO: 1511730 - DNA, 25 bp, Homo sapien
tgagctgatgagattgcacgtatgg

SEQ ID NO: 1511731 - DNA, 25 bp, Homo sapien
tgagagttttgggtaggagcagaac

SEQ ID NO: 1511732 - DNA, 25 bp, Homo sapien
gagttttgggtaggagcagaactaa

SEQ ID NO: 1511733 - DNA, 25 bp, Homo sapien
tttgggtaggagcagaactaaagta

SEQ ID NO: 1511734 - DNA, 25 bp, Homo sapien
ctgagtgagagttttgggtaggagc

SEQ ID NO: 1511735 - DNA, 25 bp, Homo sapien
agtgtacatcactgaagctgcagca

SEQ ID NO: 1511736 - DNA, 25 bp, Homo sapien
acagtgtacatcactgaagctgcag

SEQ ID NO: 1511737 - DNA, 25 bp, Homo sapien
accacagtgtacatcactgaagctg

SEQ ID NO: 1511738 - DNA, 25 bp, Homo sapien
gtgtacatcactgaagctgcagcac

SEQ ID NO: 1511739 - DNA, 25 bp, Homo sapien
gcactaccctgatgaattgattcag

SEQ ID NO: 1511740 - DNA, 25 bp, Homo sapien
aatggcactaccctgatgaattgat

SEQ ID NO: 1511741 - DNA, 25 bp, Homo sapien
tgaagaatggcactaccctgatgaa

SEQ ID NO: 1511742 - DNA, 25 bp, Homo sapien
accctgatgaattgattcagagctc

SEQ ID NO: 1511743 - DNA, 25 bp, Homo sapien
ctgaaaatcccagaagtcgaaattc

SEQ ID NO: 1511744 - DNA, 25 bp, Homo sapien
aaaatgataaccaggatgataagca

SEQ ID NO: 1511745 - DNA, 25 bp, Homo sapien
ggatgataagcaagtttccaaatac

SEQ ID NO: 1511746 - DNA, 25 bp, Homo sapien
aatacaatgatgaggtacatggata

SEQ ID NO: 1511747 - DNA, 25 bp, Homo sapien
tgaggtacatggataagaacactcc

SEQ ID NO: 1511748 - DNA, 25 bp, Homo sapien
acaggttggagagaaagaagtacat

SEQ ID NO: 1511749 - DNA, 25 bp, Homo sapien
gacaggttggagagaaagaagtaca

SEQ ID NO: 1511750 - DNA, 25 bp, Homo sapien
aaaggacaggttggagagaaagaag

SEQ ID NO: 1511751 - DNA, 25 bp, Homo sapien
ctacaaaggacaggttggagagaaa

SEQ ID NO: 1511752 - DNA, 25 bp, Homo sapien
ttgggaccctggtggaggcaaaaca

SEQ ID NO: 1511753 - DNA, 25 bp, Homo sapien
accctggtggaggcaaaacagatgt

SEQ ID NO: 1511754 - DNA, 25 bp, Homo sapien
gggaccctggtggaggcaaaacaga

SEQ ID NO: 1511755 - DNA, 25 bp, Homo sapien
gaccctggtggaggcaaaacagatg

SEQ ID NO: 1511756 - DNA, 25 bp, Homo sapien
tgcagaggtgatgactttgctctgt

SEQ ID NO: 1511757 - DNA, 25 bp, Homo sapien
cagaggtgatgactttgctctgtgc

SEQ ID NO: 1511758 - DNA, 25 bp, Homo sapien
gaggtgatgactttgctctgtgcct

SEQ ID NO: 1511759 - DNA, 25 bp, Homo sapien
ttgctctgtgcctggatattcacca

SEQ ID NO: 1511760 - DNA, 25 bp, Homo sapien
catcacagtcaggaggaagctgtcc

SEQ ID NO: 1511761 - DNA, 25 bp, Homo sapien
cacagtcaggaggaagctgtccaat

SEQ ID NO: 1511762 - DNA, 25 bp, Homo sapien
acagtcaggaggaagctgtccaatc

SEQ ID NO: 1511763 - DNA, 25 bp, Homo sapien
tcacagtcaggaggaagctgtccaa

SEQ ID NO: 1511764 - DNA, 25 bp, Homo sapien
gaaccagcaatccacagagttgagg

SEQ ID NO: 1511765 - DNA, 25 bp, Homo sapien
ggttcatgatgaccgtgtagtacag

SEQ ID NO: 1511766 - DNA, 25 bp, Homo sapien
cagaaccagcaatccacagagttga

SEQ ID NO: 1511767 - DNA, 25 bp, Homo sapien
caatccacagagttgagggttcatg

SEQ ID NO: 1511768 - DNA, 25 bp, Homo sapien
gggatttccaactctctgcataagg

SEQ ID NO: 1511769 - DNA, 25 bp, Homo sapien
ctatgtaataaggaatgcaagacac

SEQ ID NO: 1511770 - DNA, 25 bp, Homo sapien
tgcataaggacaactgcagcaccat

SEQ ID NO: 1511771 - DNA, 25 bp, Homo sapien
gcagcaccattaagctatgtaataa

SEQ ID NO: 1511772 - DNA, 25 bp, Homo sapien
ctgccagatacatcaccatgtcatt

SEQ ID NO: 1511773 - DNA, 25 bp, Homo sapien
atgtcattaagaaaggtgtcagaac

SEQ ID NO: 1511774 - DNA, 25 bp, Homo sapien
ccagatacatcaccatgtcattaag

SEQ ID NO: 1511775 - DNA, 25 bp, Homo sapien
tgtcagaacaggcaaggtggatgac

SEQ ID NO: 1511776 - DNA, 25 bp, Homo sapien
tatggaggaaactatcttagagtaa

SEQ ID NO: 1511777 - DNA, 25 bp, Homo sapien
cgagctaaggtacactcctaggctt

SEQ ID NO: 1511778 - DNA, 25 bp, Homo sapien
cactcctaggcttgtacagtaaaac

SEQ ID NO: 1511779 - DNA, 25 bp, Homo sapien
ggtacactcctaggcttgtacagta

SEQ ID NO: 1511780 - DNA, 25 bp, Homo sapien
atgcagccgagctaaggtacactcc

SEQ ID NO: 1511781 - DNA, 25 bp, Homo sapien
tcccaaagaattcttcagagccctc

SEQ ID NO: 1511782 - DNA, 25 bp, Homo sapien
ccacagtgtacctcactgaggctat

SEQ ID NO: 1511783 - DNA, 25 bp, Homo sapien
cagagccctctttatgtccttattc

SEQ ID NO: 1511784 - DNA, 25 bp, Homo sapien
ctaggacaactggcccttttctagt

SEQ ID NO: 1511785 - DNA, 25 bp, Homo sapien
ttcagggatggacggagatgtggcc

SEQ ID NO: 1511786 - DNA, 25 bp, Homo sapien
tcctctgaaagtcgaactccctgct

SEQ ID NO: 1511787 - DNA, 25 bp, Homo sapien
gatgctccagggcattgctgagcct

SEQ ID NO: 1511788 - DNA, 25 bp, Homo sapien
ggtgatggaggttcaactcagcttc

SEQ ID NO: 1511789 - DNA, 25 bp, Homo sapien
tttattaggaaggcgaaagagcctc

SEQ ID NO: 1511790 - DNA, 25 bp, Homo sapien
cagccacacaaaatttactccaaat

SEQ ID NO: 1511791 - DNA, 25 bp, Homo sapien
ccaaataagcattccccagaatgac

SEQ ID NO: 1511792 - DNA, 25 bp, Homo sapien
gctgggtttgccgagaaggaggaaa

SEQ ID NO: 1511793 - DNA, 25 bp, Homo sapien
cattccccagaatgactgcaatatc

SEQ ID NO: 1511794 - DNA, 25 bp, Homo sapien
gagaagctgcatgtcagagtcctct

SEQ ID NO: 1511795 - DNA, 25 bp, Homo sapien
gcgaatcccaggaggagaaagtttc

SEQ ID NO: 1511796 - DNA, 25 bp, Homo sapien
agagtcctctgcgaatcccaggagg

SEQ ID NO: 1511797 - DNA, 25 bp, Homo sapien
aggaacagcccatggaggagaagct

SEQ ID NO: 1511798 - DNA, 25 bp, Homo sapien
tagaaggtggtgtaactgcagaact

SEQ ID NO: 1511799 - DNA, 25 bp, Homo sapien
ccgtcatggtcaggagcaaattgtc

SEQ ID NO: 1511800 - DNA, 25 bp, Homo sapien
ccctctttgagagacgttgccctga

SEQ ID NO: 1511801 - DNA, 25 bp, Homo sapien
gcctctggcagatactcttaggacg

SEQ ID NO: 1511802 - DNA, 25 bp, Homo sapien
tctgtttcccgcagatagaccatga

SEQ ID NO: 1511803 - DNA, 25 bp, Homo sapien
cttctctgtttcccgcagatagacc

SEQ ID NO: 1511804 - DNA, 25 bp, Homo sapien
tctctgtttcccgcagatagaccat

SEQ ID NO: 1511805 - DNA, 25 bp, Homo sapien
tgtttcccgcagatagaccatgagc

SEQ ID NO: 1511806 - DNA, 25 bp, Homo sapien
caaaaactcactgctagctcctggc

SEQ ID NO: 1511807 - DNA, 25 bp, Homo sapien
cattttggacacttctctagcctga

SEQ ID NO: 1511808 - DNA, 25 bp, Homo sapien
tattagtttaacacgctgacaccaa

SEQ ID NO: 1511809 - DNA, 25 bp, Homo sapien
tggcttccacatggctctctggtga

SEQ ID NO: 1511810 - DNA, 25 bp, Homo sapien
tgtaccaagctacctgagagacgct

SEQ ID NO: 1511811 - DNA, 25 bp, Homo sapien
gagagacgcttaggaagcttcctca

SEQ ID NO: 1511812 - DNA, 25 bp, Homo sapien
gctttgttcatgaagtacgtccacc

SEQ ID NO: 1511813 - DNA, 25 bp, Homo sapien
ccagggagacacctcatgtgagatg

SEQ ID NO: 1511814 - DNA, 25 bp, Homo sapien
acaatgagttaatatgaatgaagtg

SEQ ID NO: 1511815 - DNA, 25 bp, Homo sapien
tatgaatgaagtgcttagcaccatg

SEQ ID NO: 1511816 - DNA, 25 bp, Homo sapien
ccatggctgacacctagtaagcatt

SEQ ID NO: 1511817 - DNA, 25 bp, Homo sapien
ctagtaagcattatgtaagtgttta

SEQ ID NO: 1511818 - DNA, 25 bp, Homo sapien
cgtgcctgtccaaatattttcgtat

SEQ ID NO: 1511819 - DNA, 25 bp, Homo sapien
caccgtgcctgtccaaatattttcg

SEQ ID NO: 1511820 - DNA, 25 bp, Homo sapien
ttcgtattgagtgaatgagaggtgc

SEQ ID NO: 1511821 - DNA, 25 bp, Homo sapien
tgtccaaatattttcgtattgagtg

SEQ ID NO: 1511822 - DNA, 25 bp, Homo sapien
tgcttggtctctcggcctggccggg

SEQ ID NO: 1511823 - DNA, 25 bp, Homo sapien
agggaccccaaagacacacaactct

SEQ ID NO: 1511824 - DNA, 25 bp, Homo sapien
ctggccgggaaccctaggcggagcg

SEQ ID NO: 1511825 - DNA, 25 bp, Homo sapien
cgcagcttgacgctctgctggttaa

SEQ ID NO: 1511826 - DNA, 25 bp, Homo sapien
ggttaataagcagacccttgcgcac

SEQ ID NO: 1511827 - DNA, 25 bp, Homo sapien
ttgcgcacttcgctgagcctgtggt

SEQ ID NO: 1511828 - DNA, 25 bp, Homo sapien
atcggtcagaatgtgcgcggtcctc

SEQ ID NO: 1511829 - DNA, 25 bp, Homo sapien
cttgagtaggacctctgatttttcc

SEQ ID NO: 1511830 - DNA, 25 bp, Homo sapien
tcagctcctctttctcccatgtaag

SEQ ID NO: 1511831 - DNA, 25 bp, Homo sapien
tttcctcttcatgcttttcagctcc

SEQ ID NO: 1511832 - DNA, 25 bp, Homo sapien
gatttttccatatctctctccattt

SEQ ID NO: 1511833 - DNA, 25 bp, Homo sapien
ttcagagtgtctcggcaggaggcca

SEQ ID NO: 1511834 - DNA, 25 bp, Homo sapien
gagaggttcacccatgagtggcgtc

SEQ ID NO: 1511835 - DNA, 25 bp, Homo sapien
tctggaggaggcgttttctgaccct

SEQ ID NO: 1511836 - DNA, 25 bp, Homo sapien
ggctggttcatgaggtccacggctt

SEQ ID NO: 1511837 - DNA, 25 bp, Homo sapien
ggacgtccacctcgttctttgccat

SEQ ID NO: 1511838 - DNA, 25 bp, Homo sapien
gcgaggcacacacacggtcgcttat

SEQ ID NO: 1511839 - DNA, 25 bp, Homo sapien
tggactcgaccaacaaccgcttggc

SEQ ID NO: 1511840 - DNA, 25 bp, Homo sapien
tctaccaaggtgtccttggactcga

SEQ ID NO: 1511841 - DNA, 25 bp, Homo sapien
ccctcatcagtcctaacgtcatatt

SEQ ID NO: 1511842 - DNA, 25 bp, Homo sapien
tgagaccgtgggtggtgtacaactc

SEQ ID NO: 1511843 - DNA, 25 bp, Homo sapien
tcttggttatatttcgtacaccgga

SEQ ID NO: 1511844 - DNA, 25 bp, Homo sapien
tacaccggaggatagttcccctcat

SEQ ID NO: 1511845 - DNA, 25 bp, Homo sapien
ccaggtgaactttcgacagaggacc

SEQ ID NO: 1511846 - DNA, 25 bp, Homo sapien
tccaggtgaactttcgacagaggac

SEQ ID NO: 1511847 - DNA, 25 bp, Homo sapien
tgcccacgtgtctctggtacatgcg

SEQ ID NO: 1511848 - DNA, 25 bp, Homo sapien
tgtctctggtacatgcgaaccaggg

SEQ ID NO: 1511849 - DNA, 25 bp, Homo sapien
agttgggtgcccacgtgtctctggt

SEQ ID NO: 1511850 - DNA, 25 bp, Homo sapien
tccgggagttgggtgcccacgtgtc

SEQ ID NO: 1511851 - DNA, 25 bp, Homo sapien
gcagctcgtccaggttcttttccag

SEQ ID NO: 1511852 - DNA, 25 bp, Homo sapien
cccagctgaggttcttgtgcgtggc

SEQ ID NO: 1511853 - DNA, 25 bp, Homo sapien
gatgttcttgcagttgaggccccag

SEQ ID NO: 1511854 - DNA, 25 bp, Homo sapien
ttccaggtacgtgatgtggcactgc

SEQ ID NO: 1511855 - DNA, 25 bp, Homo sapien
gctgcgcctgctcgtagcacacgtg

SEQ ID NO: 1511856 - DNA, 25 bp, Homo sapien
tgctcgtagcacacgtgcggttgcc

SEQ ID NO: 1511857 - DNA, 25 bp, Homo sapien
gctcgtagcacacgtgcggttgccg

SEQ ID NO: 1511858 - DNA, 25 bp, Homo sapien
cctgctcgtagcacacgtgcggttg

SEQ ID NO: 1511859 - DNA, 25 bp, Homo sapien
ccgcgctgctcttgctgcgcggcgg

SEQ ID NO: 1511860 - DNA, 25 bp, Homo sapien
cgctgctcttgctgcgcggcggcgg

SEQ ID NO: 1511861 - DNA, 25 bp, Homo sapien
ggtccgcgctgctcttgctgcgcgg

SEQ ID NO: 1511862 - DNA, 25 bp, Homo sapien
tccgcgctgctcttgctgcgcggcg

SEQ ID NO: 1511863 - DNA, 25 bp, Homo sapien
gtgtctgctctccgaggtcccagcc

SEQ ID NO: 1511864 - DNA, 25 bp, Homo sapien
tgtgtctgctctccgaggtcccagc

SEQ ID NO: 1511865 - DNA, 25 bp, Homo sapien
ctgtgtctgctctccgaggtcccag

SEQ ID NO: 1511866 - DNA, 25 bp, Homo sapien
cttggagggagggtgcgtcagggga

SEQ ID NO: 1511867 - DNA, 25 bp, Homo sapien
tagcatgcaaggctgcacatctgcg

SEQ ID NO: 1511868 - DNA, 25 bp, Homo sapien
gctgcacatctgcgttctctgatgt

SEQ ID NO: 1511869 - DNA, 25 bp, Homo sapien
gcacatctgcgttctctgatgtggt

SEQ ID NO: 1511870 - DNA, 25 bp, Homo sapien
cttagcatgcaaggctgcacatctg

SEQ ID NO: 1511871 - DNA, 25 bp, Homo sapien
tctagaggcagctgttcctcaaggc

SEQ ID NO: 1511872 - DNA, 25 bp, Homo sapien
actctagaggcagctgttcctcaag

SEQ ID NO: 1511873 - DNA, 25 bp, Homo sapien
ctctagaggcagctgttcctcaagg

SEQ ID NO: 1511874 - DNA, 25 bp, Homo sapien
cttttgtcatactcttggcatttcc

SEQ ID NO: 1511875 - DNA, 25 bp, Homo sapien
tgaatgtctgtccacattctccatt

SEQ ID NO: 1511876 - DNA, 25 bp, Homo sapien
agtctgaatgtctgtccacattctc

SEQ ID NO: 1511877 - DNA, 25 bp, Homo sapien
cagacagacttttgtcatactcttg

SEQ ID NO: 1511878 - DNA, 25 bp, Homo sapien
tgggtctccaatacgaaggggtcaa

SEQ ID NO: 1511879 - DNA, 25 bp, Homo sapien
ggtctccaatacgaaggggtcaatc

SEQ ID NO: 1511880 - DNA, 25 bp, Homo sapien
gtctccaatacgaaggggtcaatcc

SEQ ID NO: 1511881 - DNA, 25 bp, Homo sapien
tctcccgtgggtcattcaccagctt

SEQ ID NO: 1511882 - DNA, 25 bp, Homo sapien
ggtggactgaacttcccctgaaagc

SEQ ID NO: 1511883 - DNA, 25 bp, Homo sapien
ctgtgtctcccgtgggtcattcacc

SEQ ID NO: 1511884 - DNA, 25 bp, Homo sapien
gtggactgaacttcccctgaaagcc

SEQ ID NO: 1511885 - DNA, 25 bp, Homo sapien
tttggttgtgagtcccggctctcag

SEQ ID NO: 1511886 - DNA, 25 bp, Homo sapien
ctttggttgtgagtcccggctctca

SEQ ID NO: 1511887 - DNA, 25 bp, Homo sapien
tggttgtgagtcccggctctcagca

SEQ ID NO: 1511888 - DNA, 25 bp, Homo sapien
gttgtgagtcccggctctcagcacc

SEQ ID NO: 1511889 - DNA, 25 bp, Homo sapien
tcttccaaagaccgcggattgctca

SEQ ID NO: 1511890 - DNA, 25 bp, Homo sapien
ctcttccaaagaccgcggattgctc

SEQ ID NO: 1511891 - DNA, 25 bp, Homo sapien
cttccaaagaccgcggattgctcat

SEQ ID NO: 1511892 - DNA, 25 bp, Homo sapien
ttctgaagctaatactgagatcccg

SEQ ID NO: 1511893 - DNA, 25 bp, Homo sapien
gtttctgaagctaatactgagatcc

SEQ ID NO: 1511894 - DNA, 25 bp, Homo sapien
tctgaagctaatactgagatcccgt

SEQ ID NO: 1511895 - DNA, 25 bp, Homo sapien
agagtttctgaagctaatactgaga

SEQ ID NO: 1511896 - DNA, 25 bp, Homo sapien
ggcgggcacctgacatatcatattt

SEQ ID NO: 1511897 - DNA, 25 bp, Homo sapien
catccaggtcttcttcggaaccttc

SEQ ID NO: 1511898 - DNA, 25 bp, Homo sapien
ttttcatggtgctttcgaatctcag

SEQ ID NO: 1511899 - DNA, 25 bp, Homo sapien
tcagctgccgaaacatgtgttccag

SEQ ID NO: 1511900 - DNA, 25 bp, Homo sapien
atttttccagctcttcctggaattg

SEQ ID NO: 1511901 - DNA, 25 bp, Homo sapien
ctggaatttttccagctcttcctgg

SEQ ID NO: 1511902 - DNA, 25 bp, Homo sapien
gaatttttccagctcttcctggaat

SEQ ID NO: 1511903 - DNA, 25 bp, Homo sapien
ggaatttttccagctcttcctggaa

SEQ ID NO: 1511904 - DNA, 25 bp, Homo sapien
gatcttcccgggaatcgatggcctg

SEQ ID NO: 1511905 - DNA, 25 bp, Homo sapien
tcgacaggcctgtatgatgtacacc

SEQ ID NO: 1511906 - DNA, 25 bp, Homo sapien
gatgtacaccttgggcttagctcgc

SEQ ID NO: 1511907 - DNA, 25 bp, Homo sapien
cacgaaggcacaactgacgggatct

SEQ ID NO: 1511908 - DNA, 25 bp, Homo sapien
ggaggcaaagtcagagagaaaggta

SEQ ID NO: 1511909 - DNA, 25 bp, Homo sapien
ctgaaacaacaagaagaggaggagg

SEQ ID NO: 1511910 - DNA, 25 bp, Homo sapien
aagaggaggaggcaaagtcagagag

SEQ ID NO: 1511911 - DNA, 25 bp, Homo sapien
ggaggaggcaaagtcagagagaaag

SEQ ID NO: 1511912 - DNA, 25 bp, Homo sapien
aggcatctgtgtatgttgggatggt

SEQ ID NO: 1511913 - DNA, 25 bp, Homo sapien
taccgtggaataaacgtgcaaggca

SEQ ID NO: 1511914 - DNA, 25 bp, Homo sapien
cgtggaataaacgtgcaaggcatct

SEQ ID NO: 1511915 - DNA, 25 bp, Homo sapien
ggtttgtgggctgtctttgatgacc

SEQ ID NO: 1511916 - DNA, 25 bp, Homo sapien
cagggtctggataaagcatgagcct

SEQ ID NO: 1511917 - DNA, 25 bp, Homo sapien
ccagggtctggataaagcatgagcc

SEQ ID NO: 1511918 - DNA, 25 bp, Homo sapien
ggtctggataaagcatgagcctttc

SEQ ID NO: 1511919 - DNA, 25 bp, Homo sapien
caccagggtctggataaagcatgag

SEQ ID NO: 1511920 - DNA, 25 bp, Homo sapien
ctctgtcagaagttccaagatatgt

SEQ ID NO: 1511921 - DNA, 25 bp, Homo sapien
aagatatgtcctttcctcttcgtga

SEQ ID NO: 1511922 - DNA, 25 bp, Homo sapien
gaagttccaagatatgtcctttcct

SEQ ID NO: 1511923 - DNA, 25 bp, Homo sapien
tatgtcctttcctcttcgtgaacac

SEQ ID NO: 1511924 - DNA, 25 bp, Homo sapien
caggtgtggtgagcttggaggagtc

SEQ ID NO: 1511925 - DNA, 25 bp, Homo sapien
caacaggtgtggtgagcttggagga

SEQ ID NO: 1511926 - DNA, 25 bp, Homo sapien
cagcaacaggtgtggtgagcttgga

SEQ ID NO: 1511927 - DNA, 25 bp, Homo sapien
ctgcagcaacaggtgtggtgagctt

SEQ ID NO: 1511928 - DNA, 25 bp, Homo sapien
ctgcttctgccatccgccgggtcac

SEQ ID NO: 1511929 - DNA, 25 bp, Homo sapien
ctactgcagatacagccgtttccgg

SEQ ID NO: 1511930 - DNA, 25 bp, Homo sapien
tttccggagggtgctttggatttca

SEQ ID NO: 1511931 - DNA, 25 bp, Homo sapien
gcagatacagccgtttccggagggt

SEQ ID NO: 1511932 - DNA, 25 bp, Homo sapien
ttggctggcttgctctaataaggac

SEQ ID NO: 1511933 - DNA, 25 bp, Homo sapien
tgtgagacagaaagaatgctggaag

SEQ ID NO: 1511934 - DNA, 25 bp, Homo sapien
acaggaggacctgcatgaagggtgt

SEQ ID NO: 1511935 - DNA, 25 bp, Homo sapien
gctgcctctaaatttctgtgagaca

SEQ ID NO: 1511936 - DNA, 25 bp, Homo sapien
gatgtgcccgtaggttacttgagca

SEQ ID NO: 1511937 - DNA, 25 bp, Homo sapien
tgggctggaagtcaaaccttgtcct

SEQ ID NO: 1511938 - DNA, 25 bp, Homo sapien
ccatgagctaggaagagaacggagt

SEQ ID NO: 1511939 - DNA, 25 bp, Homo sapien
tttttagtgacgctggatgtgcccg

SEQ ID NO: 1511940 - DNA, 25 bp, Homo sapien
gggaaatggtgatagcaaaggctta

SEQ ID NO: 1511941 - DNA, 25 bp, Homo sapien
gcatctaatcctgggtgagagggaa

SEQ ID NO: 1511942 - DNA, 25 bp, Homo sapien
cagattaagggcttgttccctgccc

SEQ ID NO: 1511943 - DNA, 25 bp, Homo sapien
tgagagggaaggatcaatcagaaaa

SEQ ID NO: 1511944 - DNA, 25 bp, Homo sapien
gcctccagggttccctaacatgtta

SEQ ID NO: 1511945 - DNA, 25 bp, Homo sapien
cctccagggttccctaacatgttat

SEQ ID NO: 1511946 - DNA, 25 bp, Homo sapien
tgcctccagggttccctaacatgtt

SEQ ID NO: 1511947 - DNA, 25 bp, Homo sapien
agcctgatgtctatgggaaggattc

SEQ ID NO: 1511948 - DNA, 25 bp, Homo sapien
gggttagcctgatgtctatgggaag

SEQ ID NO: 1511949 - DNA, 25 bp, Homo sapien
tgatcgctggggttagcctgatgtc

SEQ ID NO: 1511950 - DNA, 25 bp, Homo sapien
gttagcctgatgtctatgggaagga

SEQ ID NO: 1511951 - DNA, 25 bp, Homo sapien
gctcaccaggatggcatcaccaagg

SEQ ID NO: 1511952 - DNA, 25 bp, Homo sapien
ctcaccaggatggcatcaccaaggg

SEQ ID NO: 1511953 - DNA, 25 bp, Homo sapien
ctggcagacaaagtgaggccacccc

SEQ ID NO: 1511954 - DNA, 25 bp, Homo sapien
cccaatcccgccctggatctacaaa

SEQ ID NO: 1511955 - DNA, 25 bp, Homo sapien
gaagatccctgcctctacgaaaata

SEQ ID NO: 1511956 - DNA, 25 bp, Homo sapien
cacccccaatcccgccctggatcta

SEQ ID NO: 1511957 - DNA, 25 bp, Homo sapien
tcaccacgcccgattaatttttgta

SEQ ID NO: 1511958 - DNA, 25 bp, Homo sapien
tgtgcatcaccacgcccgattaatt

SEQ ID NO: 1511959 - DNA, 25 bp, Homo sapien
cacacagagccaggtgtcagagatg

SEQ ID NO: 1511960 - DNA, 25 bp, Homo sapien
cacagagccaggtgtcagagatgcc

SEQ ID NO: 1511961 - DNA, 25 bp, Homo sapien
cagagccaggtgtcagagatgccat

SEQ ID NO: 1511962 - DNA, 25 bp, Homo sapien
ccacacagagccaggtgtcagagat

SEQ ID NO: 1511963 - DNA, 25 bp, Homo sapien
tccctggaggaagaattctgagatt

SEQ ID NO: 1511964 - DNA, 25 bp, Homo sapien
ttctggttccatgtatggtctgtga

SEQ ID NO: 1511965 - DNA, 25 bp, Homo sapien
gctctggcttttctgagagtccctg

SEQ ID NO: 1511966 - DNA, 25 bp, Homo sapien
ctgagatttcggtttgcttttctgg

SEQ ID NO: 1511967 - DNA, 25 bp, Homo sapien
cacttgccccgagtagaagggatct

SEQ ID NO: 1511968 - DNA, 25 bp, Homo sapien
catgagaaccaagtaacgctgtggg

SEQ ID NO: 1511969 - DNA, 25 bp, Homo sapien
cacgaagcggtcgatggccattact

SEQ ID NO: 1511970 - DNA, 25 bp, Homo sapien
catggtcccgaacaggtggaaggca

SEQ ID NO: 1511971 - DNA, 25 bp, Homo sapien
gggttgagcatggggatgaacaccc

SEQ ID NO: 1511972 - DNA, 25 bp, Homo sapien
ttgagcatggggatgaacaccccac

SEQ ID NO: 1511973 - DNA, 25 bp, Homo sapien
gttgagcatggggatgaacacccca

SEQ ID NO: 1511974 - DNA, 25 bp, Homo sapien
gagcatggggatgaacaccccacac

SEQ ID NO: 1511975 - DNA, 25 bp, Homo sapien
gggctgccttcatatccttgttccg

SEQ ID NO: 1511976 - DNA, 25 bp, Homo sapien
tttgccgatgagcttccccagggct

SEQ ID NO: 1511977 - DNA, 25 bp, Homo sapien
tgccttcatatccttgttccgtatg

SEQ ID NO: 1511978 - DNA, 25 bp, Homo sapien
cccagggctgccttcatatccttgt

SEQ ID NO: 1511979 - DNA, 25 bp, Homo sapien
gtctctgttcccagctagactctga

SEQ ID NO: 1511980 - DNA, 25 bp, Homo sapien
tgttcccagctagactctgaactcc

SEQ ID NO: 1511981 - DNA, 25 bp, Homo sapien
gtgtccctagcagccaacagtgatc

SEQ ID NO: 1511982 - DNA, 25 bp, Homo sapien
acagtgatcctggaacatgataaac

SEQ ID NO: 1511983 - DNA, 25 bp, Homo sapien
tcatcatgctgatacccagtaagtg

SEQ ID NO: 1511984 - DNA, 25 bp, Homo sapien
cagtaagtgaatccatgcaatctaa

SEQ ID NO: 1511985 - DNA, 25 bp, Homo sapien
gcattgttcagataataaatctcgg

SEQ ID NO: 1511986 - DNA, 25 bp, Homo sapien
gataataaatctcggttgtcatcat

SEQ ID NO: 1511987 - DNA, 25 bp, Homo sapien
gctgcccagagatatccatcacagt

SEQ ID NO: 1511988 - DNA, 25 bp, Homo sapien
tgcccagagatatccatcacagtag

SEQ ID NO: 1511989 - DNA, 25 bp, Homo sapien
cccagagatatccatcacagtagca

SEQ ID NO: 1511990 - DNA, 25 bp, Homo sapien
ccagagatatccatcacagtagcat

SEQ ID NO: 1511991 - DNA, 25 bp, Homo sapien
aatgttctcattggctgcaggtctg

SEQ ID NO: 1511992 - DNA, 25 bp, Homo sapien
taaatgttctcattggctgcaggtc

SEQ ID NO: 1511993 - DNA, 25 bp, Homo sapien
ctaaatgttctcattggctgcaggt

SEQ ID NO: 1511994 - DNA, 25 bp, Homo sapien
gttctcattggctgcaggtctgatg

SEQ ID NO: 1511995 - DNA, 25 bp, Homo sapien
cccgagcgggcgatgctgggagatg

SEQ ID NO: 1511996 - DNA, 25 bp, Homo sapien
cgagcgggcgatgctgggagatgta

SEQ ID NO: 1511997 - DNA, 25 bp, Homo sapien
gagcgggcgatgctgggagatgtag

SEQ ID NO: 1511998 - DNA, 25 bp, Homo sapien
ccgagcgggcgatgctgggagatgt

SEQ ID NO: 1511999 - DNA, 25 bp, Homo sapien
cgagccgagtgcgcgccccgggctc

SEQ ID NO: 1512000 - DNA, 25 bp, Homo sapien
gccgagccgagtgcgcgccccgggc

SEQ ID NO: 1512001 - DNA, 25 bp, Homo sapien
ccgagccgagtgcgcgccccgggct

SEQ ID NO: 1512002 - DNA, 25 bp, Homo sapien
ttttcctgagtagcggctcggccat

SEQ ID NO: 1512003 - DNA, 25 bp, Homo sapien
gcgctccttggcgtccgactttttc

SEQ ID NO: 1512004 - DNA, 25 bp, Homo sapien
gagaaggttttcctgagtagcggct

SEQ ID NO: 1512005 - DNA, 25 bp, Homo sapien
aggttttcctgagtagcggctcggc

SEQ ID NO: 1512006 - DNA, 25 bp, Homo sapien
cagccctgtgcaattgatcagtggg

SEQ ID NO: 1512007 - DNA, 25 bp, Homo sapien
ggaataggcagccacaggctagcga

SEQ ID NO: 1512008 - DNA, 25 bp, Homo sapien
ctggccggcccctgataagtcatgg

SEQ ID NO: 1512009 - DNA, 25 bp, Homo sapien
tgggtgggatgctgtgtacggccct

SEQ ID NO: 1512010 - DNA, 25 bp, Homo sapien
ccgtgcagggctccttgatgcctcg

SEQ ID NO: 1512011 - DNA, 25 bp, Homo sapien
ccatcggcggctactgggctccagg

SEQ ID NO: 1512012 - DNA, 25 bp, Homo sapien
tttgcaggtaggctccccgtgcagg

SEQ ID NO: 1512013 - DNA, 25 bp, Homo sapien
ccaggctttgcaggtaggctccccg

SEQ ID NO: 1512014 - DNA, 25 bp, Homo sapien
taccagatctcgccggcgggctccc

SEQ ID NO: 1512015 - DNA, 25 bp, Homo sapien
gtaccagatctcgccggcgggctcc

SEQ ID NO: 1512016 - DNA, 25 bp, Homo sapien
ttgtaccagatctcgccggcgggct

SEQ ID NO: 1512017 - DNA, 25 bp, Homo sapien
tgtaccagatctcgccggcgggctc

SEQ ID NO: 1512018 - DNA, 25 bp, Homo sapien
gagggtgtgaggctgatgctcctct

SEQ ID NO: 1512019 - DNA, 25 bp, Homo sapien
gaggttggtgctcctctgggaggag

SEQ ID NO: 1512020 - DNA, 25 bp, Homo sapien
tcctctgggagcatctgacggggtg

SEQ ID NO: 1512021 - DNA, 25 bp, Homo sapien
agtgtgaggctggtgctaccctgaa

SEQ ID NO: 1512022 - DNA, 25 bp, Homo sapien
ggagagcagacttcagggtccagga

SEQ ID NO: 1512023 - DNA, 25 bp, Homo sapien
tgtgtggagagcagacttcagggtc

SEQ ID NO: 1512024 - DNA, 25 bp, Homo sapien
gtggagagcagacttcagggtccag

SEQ ID NO: 1512025 - DNA, 25 bp, Homo sapien
agagcagacttcagggtccaggaac

SEQ ID NO: 1512026 - DNA, 25 bp, Homo sapien
tggtccagccgcaggaagtccggcc

SEQ ID NO: 1512027 - DNA, 25 bp, Homo sapien
cggtgagtccccgtcgctgaggtaa

SEQ ID NO: 1512028 - DNA, 25 bp, Homo sapien
ggccggtgccttctcacgccagggt

SEQ ID NO: 1512029 - DNA, 25 bp, Homo sapien
ccgagaccgtacaggtgcaggctga

SEQ ID NO: 1512030 - DNA, 25 bp, Homo sapien
gcttcatgtaccctggcctcgctgc

SEQ ID NO: 1512031 - DNA, 25 bp, Homo sapien
ccctaggcactctgcggggggtggc

SEQ ID NO: 1512032 - DNA, 25 bp, Homo sapien
tccaggccacaccttccgcccggag

SEQ ID NO: 1512033 - DNA, 25 bp, Homo sapien
gagccgggtgtgctctgaagcttca

SEQ ID NO: 1512034 - DNA, 25 bp, Homo sapien
ctcggcgctcgatctgcccaacgca

SEQ ID NO: 1512035 - DNA, 25 bp, Homo sapien
gcagcccaaagacgcggggctcagc

SEQ ID NO: 1512036 - DNA, 25 bp, Homo sapien
ccaacgcacttctggatgatgaggg

SEQ ID NO: 1512037 - DNA, 25 bp, Homo sapien
tcgatctgcccaacgcacttctgga

SEQ ID NO: 1512038 - DNA, 25 bp, Homo sapien
aaggcatcccgaagctctttcttca

SEQ ID NO: 1512039 - DNA, 25 bp, Homo sapien
tgagccacaaagacggtacagtccc

SEQ ID NO: 1512040 - DNA, 25 bp, Homo sapien
ataggcagaccgctgcactgtcccg

SEQ ID NO: 1512041 - DNA, 25 bp, Homo sapien
ggtacaggtcctcagataggcagac

SEQ ID NO: 1512042 - DNA, 25 bp, Homo sapien
tggcttctaaggctaaggagggcac

SEQ ID NO: 1512043 - DNA, 25 bp, Homo sapien
caccactggcttctaaggctaagga

SEQ ID NO: 1512044 - DNA, 25 bp, Homo sapien
actggcttctaaggctaaggagggc

SEQ ID NO: 1512045 - DNA, 25 bp, Homo sapien
gcttctaaggctaaggagggcacag

SEQ ID NO: 1512046 - DNA, 25 bp, Homo sapien
gggtgggcaactctcgaagataatc

SEQ ID NO: 1512047 - DNA, 25 bp, Homo sapien
gcctccagtaccaccttatacaggg

SEQ ID NO: 1512048 - DNA, 25 bp, Homo sapien
agccctcgggtgccctcagtggtgg

SEQ ID NO: 1512049 - DNA, 25 bp, Homo sapien
tctcgaagataatccttgaggatgc

SEQ ID NO: 1512050 - DNA, 25 bp, Homo sapien
ctgggagagggttgagaggatgtaa

SEQ ID NO: 1512051 - DNA, 25 bp, Homo sapien
tgggagagggttgagaggatgtaag

SEQ ID NO: 1512052 - DNA, 25 bp, Homo sapien
ctggccaagactgcagcaggtagtg

SEQ ID NO: 1512053 - DNA, 25 bp, Homo sapien
tggtccaggagaagcgtcagcgtgg

SEQ ID NO: 1512054 - DNA, 25 bp, Homo sapien
gtagtgcagcacctcgatgtggtgc

SEQ ID NO: 1512055 - DNA, 25 bp, Homo sapien
gaagcacacggccaagttctgtggg

SEQ ID NO: 1512056 - DNA, 25 bp, Homo sapien
gtgcaggccctgggcatgaactcac

SEQ ID NO: 1512057 - DNA, 25 bp, Homo sapien
tggtgcaggccctgggcatgaactc

SEQ ID NO: 1512058 - DNA, 25 bp, Homo sapien
ggtggtgcaggccctgggcatgaac

SEQ ID NO: 1512059 - DNA, 25 bp, Homo sapien
ctggctcagattggtggtgcaggcc

SEQ ID NO: 1512060 - DNA, 25 bp, Homo sapien
tggctgtcgtttgggtcgcaagtaa

SEQ ID NO: 1512061 - DNA, 25 bp, Homo sapien
cagaggtggctgtcgtttgggtcgc

SEQ ID NO: 1512062 - DNA, 25 bp, Homo sapien
agtaaggcgcgacatctggagattg

SEQ ID NO: 1512063 - DNA, 25 bp, Homo sapien
tttgggtcgcaagtaaggcgcgaca

SEQ ID NO: 1512064 - DNA, 25 bp, Homo sapien
gaagtcgtcttcgaagtcaccggtg

SEQ ID NO: 1512065 - DNA, 25 bp, Homo sapien
cgtcacgtggtcgtagtctggcccg

SEQ ID NO: 1512066 - DNA, 25 bp, Homo sapien
ccagatccaggatgagggcgtcgaa

SEQ ID NO: 1512067 - DNA, 25 bp, Homo sapien
gttgaagggcgcatcgaagtcgtct

SEQ ID NO: 1512068 - DNA, 25 bp, Homo sapien
tagtgtccaaataccgggccctgga

SEQ ID NO: 1512069 - DNA, 25 bp, Homo sapien
gaaagatggtcacaaccgctggtcc

SEQ ID NO: 1512070 - DNA, 25 bp, Homo sapien
taactcgctggcaaccaggagctcg

SEQ ID NO: 1512071 - DNA, 25 bp, Homo sapien
gaatgagtctcagccatacacgcga

SEQ ID NO: 1512072 - DNA, 25 bp, Homo sapien
cacaaacagtgcctcatgctagtct

SEQ ID NO: 1512073 - DNA, 25 bp, Homo sapien
caagagggccgactagaggtgactc

SEQ ID NO: 1512074 - DNA, 25 bp, Homo sapien
tagtctttgtgtcgtccaagggagg

SEQ ID NO: 1512075 - DNA, 25 bp, Homo sapien
tttgctgactagaggccaatcgtgg

SEQ ID NO: 1512076 - DNA, 25 bp, Homo sapien
caataaatatgttccgtaccagact

SEQ ID NO: 1512077 - DNA, 25 bp, Homo sapien
cacgcctgcttcagacgtgtccacg

SEQ ID NO: 1512078 - DNA, 25 bp, Homo sapien
gatggaggtgcggaaaagaagaggg

SEQ ID NO: 1512079 - DNA, 25 bp, Homo sapien
caggagggaaccgtactctcccact

SEQ ID NO: 1512080 - DNA, 25 bp, Homo sapien
tctcacgggagaacgaggatcaggt

SEQ ID NO: 1512081 - DNA, 25 bp, Homo sapien
gagtctcatcattgcttgccctggg

SEQ ID NO: 1512082 - DNA, 25 bp, Homo sapien
cgatggctccattgctgtatagggc

SEQ ID NO: 1512083 - DNA, 25 bp, Homo sapien
ctcattgggaggacggacttccgcg

SEQ ID NO: 1512084 - DNA, 25 bp, Homo sapien
gcttcctgctgttttgaggcctctg

SEQ ID NO: 1512085 - DNA, 25 bp, Homo sapien
tgctgaagttagtggagggccttca

SEQ ID NO: 1512086 - DNA, 25 bp, Homo sapien
aagccgaccggcagaaggagcagac

SEQ ID NO: 1512087 - DNA, 25 bp, Homo sapien
caggagatgtgggttccttcgtgct

SEQ ID NO: 1512088 - DNA, 25 bp, Homo sapien
tcttggcctgtccttaacggtgaaa

SEQ ID NO: 1512089 - DNA, 25 bp, Homo sapien
tgagcaaggagaccgagaagaccct

SEQ ID NO: 1512090 - DNA, 25 bp, Homo sapien
taagtggacagatccttgaacctgg

SEQ ID NO: 1512091 - DNA, 25 bp, Homo sapien
ggacttgagctcacatctgttggac

SEQ ID NO: 1512092 - DNA, 25 bp, Homo sapien
cggtgactgcggtgaagaatgctca

SEQ ID NO: 1512093 - DNA, 25 bp, Homo sapien
tggcctgtgagaaactgggcatccg

SEQ ID NO: 1512094 - DNA, 25 bp, Homo sapien
catcttcacgctggtcggtgggcac

SEQ ID NO: 1512095 - DNA, 25 bp, Homo sapien
gcttgaagggctcatgcgataaccc

SEQ ID NO: 1512096 - DNA, 25 bp, Homo sapien
cttcaggacttaggagatttaaagc

SEQ ID NO: 1512097 - DNA, 25 bp, Homo sapien
gacttaggagatttaaagcaagcct

SEQ ID NO: 1512098 - DNA, 25 bp, Homo sapien
aagccttggatgtgtagggctgtga

SEQ ID NO: 1512099 - DNA, 25 bp, Homo sapien
ggagatttaaagcaagccttggatg

SEQ ID NO: 1512100 - DNA, 25 bp, Homo sapien
cttttccttgaaagtaggtgctgtt

SEQ ID NO: 1512101 - DNA, 25 bp, Homo sapien
ttttccttgaaagtaggtgctgttc

SEQ ID NO: 1512102 - DNA, 25 bp, Homo sapien
gtaggtgctgttctttctgtcttca

SEQ ID NO: 1512103 - DNA, 25 bp, Homo sapien
ggtgctgttctttctgtcttcattt

SEQ ID NO: 1512104 - DNA, 25 bp, Homo sapien
gggccaatggaaagctgcggaaggt

SEQ ID NO: 1512105 - DNA, 25 bp, Homo sapien
catggtcttgctctggtacggcccc

SEQ ID NO: 1512106 - DNA, 25 bp, Homo sapien
gctgtgttcggagggcctgaaccta

SEQ ID NO: 1512107 - DNA, 25 bp, Homo sapien
cccgctggtgtggaaagcgagctgt

SEQ ID NO: 1512108 - DNA, 25 bp, Homo sapien
gtgcaggggccacgatcatccctgt

SEQ ID NO: 1512109 - DNA, 25 bp, Homo sapien
ggccacgatcatccctgtatcattc

SEQ ID NO: 1512110 - DNA, 25 bp, Homo sapien
gggatgcttcaagaatgcgcatgtc

SEQ ID NO: 1512111 - DNA, 25 bp, Homo sapien
tgggatgcttcaagaatgcgcatgt

SEQ ID NO: 1512112 - DNA, 25 bp, Homo sapien
actgggatcccgtgtaccgagtaca

SEQ ID NO: 1512113 - DNA, 25 bp, Homo sapien
tagtacacaggcatgactgggatcc

SEQ ID NO: 1512114 - DNA, 25 bp, Homo sapien
ttgccttgcagcgtgaccgagatag

SEQ ID NO: 1512115 - DNA, 25 bp, Homo sapien
ggcttctggtcaaaatccctgtgta

SEQ ID NO: 1512116 - DNA, 25 bp, Homo sapien
catccttgggccgaatctgtccatc

SEQ ID NO: 1512117 - DNA, 25 bp, Homo sapien
tctatatggctatctgtgggtgccc

SEQ ID NO: 1512118 - DNA, 25 bp, Homo sapien
tctgtctgtcctaggcagtccatct

SEQ ID NO: 1512119 - DNA, 25 bp, Homo sapien
gtgggtgcccctgactatctctgcc

SEQ ID NO: 1512120 - DNA, 25 bp, Homo sapien
acccctggcggcaatgcgaggcgct

SEQ ID NO: 1512121 - DNA, 25 bp, Homo sapien
tcttccgctgcgcttgcgcgcaggg

SEQ ID NO: 1512122 - DNA, 25 bp, Homo sapien
agtgctggcgcctcttcaacaacag

SEQ ID NO: 1512123 - DNA, 25 bp, Homo sapien
tgcgaccgcgagtgcaacagcccag

SEQ ID NO: 1512124 - DNA, 25 bp, Homo sapien
cggtgggcgtcccatgccagcagac

SEQ ID NO: 1512125 - DNA, 25 bp, Homo sapien
agccgttctggggtccgcgttgcga

SEQ ID NO: 1512126 - DNA, 25 bp, Homo sapien
ctgcagtgcccggtgggcgtcccat

SEQ ID NO: 1512127 - DNA, 25 bp, Homo sapien
ttgcgagcgggtggcgcgctcctgc

SEQ ID NO: 1512128 - DNA, 25 bp, Homo sapien
ttcggcgaagttggcggcgcggagg

SEQ ID NO: 1512129 - DNA, 25 bp, Homo sapien
accgccacccgtgcgggcgctgccc

SEQ ID NO: 1512130 - DNA, 25 bp, Homo sapien
ccgccgtcgcccgatgtcgccgcca

SEQ ID NO: 1512131 - DNA, 25 bp, Homo sapien
tcgcggccggccgccatggggccgg

SEQ ID NO: 1512132 - DNA, 25 bp, Homo sapien
cgcgtccccagggactgagctcatg

SEQ ID NO: 1512133 - DNA, 25 bp, Homo sapien
ccagggactgagctcatggaggaga

SEQ ID NO: 1512134 - DNA, 25 bp, Homo sapien
ccccagggactgagctcatggagga

SEQ ID NO: 1512135 - DNA, 25 bp, Homo sapien
cccgcgtccccagggactgagctca

SEQ ID NO: 1512136 - DNA, 25 bp, Homo sapien
agcagtcttggagctgaaccttgca

SEQ ID NO: 1512137 - DNA, 25 bp, Homo sapien
tgggattcctcgcatgatcggcctg

SEQ ID NO: 1512138 - DNA, 25 bp, Homo sapien
taagccaatagaaaatcgtgtctcg

SEQ ID NO: 1512139 - DNA, 25 bp, Homo sapien
gatcgcgtcgattgggcagagtcct

SEQ ID NO: 1512140 - DNA, 25 bp, Homo sapien
tgtgaccgtggctgtactgtatagt

SEQ ID NO: 1512141 - DNA, 25 bp, Homo sapien
tctccgaaatggtgtgatcgtctcc

SEQ ID NO: 1512142 - DNA, 25 bp, Homo sapien
gttggtgactccaccaaactggtgt

SEQ ID NO: 1512143 - DNA, 25 bp, Homo sapien
caatggcactgcttatctccgaaat

SEQ ID NO: 1512144 - DNA, 25 bp, Homo sapien
agcatgcccccagacagcgcggctc

SEQ ID NO: 1512145 - DNA, 25 bp, Homo sapien
ccagcatgcccccagacagcgcggc

SEQ ID NO: 1512146 - DNA, 25 bp, Homo sapien
cagcatgcccccagacagcgcggct

SEQ ID NO: 1512147 - DNA, 25 bp, Homo sapien
ctttaggcatctggtcctgggggtc

SEQ ID NO: 1512148 - DNA, 25 bp, Homo sapien
taggcatctggtcctgggggtctgc

SEQ ID NO: 1512149 - DNA, 25 bp, Homo sapien
cctttaggcatctggtcctgggggt

SEQ ID NO: 1512150 - DNA, 25 bp, Homo sapien
tttaggcatctggtcctgggggtct

SEQ ID NO: 1512151 - DNA, 25 bp, Homo sapien
tgtacaattaccatcctatgtaaag

SEQ ID NO: 1512152 - DNA, 25 bp, Homo sapien
gtgaagctgtgcacttcctgtcttg

SEQ ID NO: 1512153 - DNA, 25 bp, Homo sapien
gatcacaccgtacttgaggccatct

SEQ ID NO: 1512154 - DNA, 25 bp, Homo sapien
tgaagattgtcatggaataaagatc

SEQ ID NO: 1512155 - DNA, 25 bp, Homo sapien
ttcttgttggcagcctcctgtgcag

SEQ ID NO: 1512156 - DNA, 25 bp, Homo sapien
tgtgcaggaagtgccagccgggcct

SEQ ID NO: 1512157 - DNA, 25 bp, Homo sapien
cttgttggcagcctcctgtgcagga

SEQ ID NO: 1512158 - DNA, 25 bp, Homo sapien
cgggcctcgacgcaccagctggctg

SEQ ID NO: 1512159 - DNA, 25 bp, Homo sapien
gccagagaggacagtgcccactcac

SEQ ID NO: 1512160 - DNA, 25 bp, Homo sapien
cttggtgccccaggaacagccagag

SEQ ID NO: 1512161 - DNA, 25 bp, Homo sapien
ttggtgccccaggaacagccagaga

SEQ ID NO: 1512162 - DNA, 25 bp, Homo sapien
gaacagccagagaggacagtgccca

SEQ ID NO: 1512163 - DNA, 25 bp, Homo sapien
gttgaacttgaaagctcattagact

SEQ ID NO: 1512164 - DNA, 25 bp, Homo sapien
cattagacttaagctgtcacctgtg

SEQ ID NO: 1512165 - DNA, 25 bp, Homo sapien
catctggcagagaacgttcagggct

SEQ ID NO: 1512166 - DNA, 25 bp, Homo sapien
ggtcctttcaacctcgctgtccagg

SEQ ID NO: 1512167 - DNA, 25 bp, Homo sapien
gattaccagtgtcgggcctgcatgc

SEQ ID NO: 1512168 - DNA, 25 bp, Homo sapien
cagattcccacaggacaattgggga

SEQ ID NO: 1512169 - DNA, 25 bp, Homo sapien
tgtgttcctgttgcagtcccgcctg

SEQ ID NO: 1512170 - DNA, 25 bp, Homo sapien
ttgccaaacaaactattctcagctg

SEQ ID NO: 1512171 - DNA, 25 bp, Homo sapien
tcccggggccctgcattgatgctca

SEQ ID NO: 1512172 - DNA, 25 bp, Homo sapien
attgatgctcaggagttcctgggct

SEQ ID NO: 1512173 - DNA, 25 bp, Homo sapien
tgggctgctcttgatcctttctggg

SEQ ID NO: 1512174 - DNA, 25 bp, Homo sapien
gctcttgatcctttctgggcatcca

SEQ ID NO: 1512175 - DNA, 25 bp, Homo sapien
gagcagctgcaactgccccagattt

SEQ ID NO: 1512176 - DNA, 25 bp, Homo sapien
gcctgggaactctggcagctctcct

SEQ ID NO: 1512177 - DNA, 25 bp, Homo sapien
ctgcctgggaactctggcagctctc

SEQ ID NO: 1512178 - DNA, 25 bp, Homo sapien
agctccttgggcttgagcagctgca

SEQ ID NO: 1512179 - DNA, 25 bp, Homo sapien
ctggaagtgggctatcaccatgggc

SEQ ID NO: 1512180 - DNA, 25 bp, Homo sapien
ctggaactggaagtgggctatcacc

SEQ ID NO: 1512181 - DNA, 25 bp, Homo sapien
ggaactggaagtgggctatcaccat

SEQ ID NO: 1512182 - DNA, 25 bp, Homo sapien
tggaactggaagtgggctatcacca

SEQ ID NO: 1512183 - DNA, 25 bp, Homo sapien
aaaagcttaagttgcctggtgggca

SEQ ID NO: 1512184 - DNA, 25 bp, Homo sapien
gactctgagccttttggagtctttc

SEQ ID NO: 1512185 - DNA, 25 bp, Homo sapien
tggtgccctgtaaggctcgagccac

SEQ ID NO: 1512186 - DNA, 25 bp, Homo sapien
ggagtctttcctccttcgtctccat

SEQ ID NO: 1512187 - DNA, 25 bp, Homo sapien
aggaggaagggctggcatcgccttc

SEQ ID NO: 1512188 - DNA, 25 bp, Homo sapien
ctcctttcttgtagacccaggagga

SEQ ID NO: 1512189 - DNA, 25 bp, Homo sapien
acccaggaggaagggctggcatcgc

SEQ ID NO: 1512190 - DNA, 25 bp, Homo sapien
ccaggaggaagggctggcatcgcct

SEQ ID NO: 1512191 - DNA, 25 bp, Homo sapien
cagccagcatttgcagctggaggga

SEQ ID NO: 1512192 - DNA, 25 bp, Homo sapien
gacttgaagatagggcagtagcctt

SEQ ID NO: 1512193 - DNA, 25 bp, Homo sapien
ccagggagtagcacgtcggttgcat

SEQ ID NO: 1512194 - DNA, 25 bp, Homo sapien
tctgctacgtgggtgggaacaagcc

SEQ ID NO: 1512195 - DNA, 25 bp, Homo sapien
cagagggggcgtagctccttcagca

SEQ ID NO: 1512196 - DNA, 25 bp, Homo sapien
tgtccatggcccgttacaggcagct

SEQ ID NO: 1512197 - DNA, 25 bp, Homo sapien
ggaatcccggcagccctgatgtcca

SEQ ID NO: 1512198 - DNA, 25 bp, Homo sapien
tgggtccaggaatcccggcagccct

SEQ ID NO: 1512199 - DNA, 25 bp, Homo sapien
tgcatgcagaatgccgtgggcagct

SEQ ID NO: 1512200 - DNA, 25 bp, Homo sapien
gctaaccctcaataatcagtgcatg

SEQ ID NO: 1512201 - DNA, 25 bp, Homo sapien
tcgtgccaaggaagattgaggaccc

SEQ ID NO: 1512202 - DNA, 25 bp, Homo sapien
cacctcgggccttgtcagtattcct

SEQ ID NO: 1512203 - DNA, 25 bp, Homo sapien
ttagagcccaccttctgagcagcag

SEQ ID NO: 1512204 - DNA, 25 bp, Homo sapien
agccccgtgggtctgcacgttggac

SEQ ID NO: 1512205 - DNA, 25 bp, Homo sapien
cctccccagagtgtgctcgttgctg

SEQ ID NO: 1512206 - DNA, 25 bp, Homo sapien
tggaccctgggttccccattagagc

SEQ ID NO: 1512207 - DNA, 25 bp, Homo sapien
tggacacaggcctcaatctcaaggg

SEQ ID NO: 1512208 - DNA, 25 bp, Homo sapien
gaatgtagagtttaccaaggccact

SEQ ID NO: 1512209 - DNA, 25 bp, Homo sapien
ggatgtctgtcacaccacagacact

SEQ ID NO: 1512210 - DNA, 25 bp, Homo sapien
agtagagtttcttcctacacacggg

SEQ ID NO: 1512211 - DNA, 25 bp, Homo sapien
caaaacacacctgtctcaagtgggt

SEQ ID NO: 1512212 - DNA, 25 bp, Homo sapien
cactcttgccgagaagtcgctgtca

SEQ ID NO: 1512213 - DNA, 25 bp, Homo sapien
caccagagccgtaagagccttctag

SEQ ID NO: 1512214 - DNA, 25 bp, Homo sapien
tctagctgcagagtggttgtttcca

SEQ ID NO: 1512215 - DNA, 25 bp, Homo sapien
tgtccctccagttgctggcagcttt

SEQ ID NO: 1512216 - DNA, 25 bp, Homo sapien
tgagccacttgtccctccagttgct

SEQ ID NO: 1512217 - DNA, 25 bp, Homo sapien
acttgtccctccagttgctggcagc

SEQ ID NO: 1512218 - DNA, 25 bp, Homo sapien
tttgcagtgaaaagatgctgcagca

SEQ ID NO: 1512219 - DNA, 25 bp, Homo sapien
aattttgcatcctgcatttctgatg

SEQ ID NO: 1512220 - DNA, 25 bp, Homo sapien
tgcatcctgcatttctgatgtaaca

SEQ ID NO: 1512221 - DNA, 25 bp, Homo sapien
tctgtaattttgcatcctgcatttc

SEQ ID NO: 1512222 - DNA, 25 bp, Homo sapien
atcctgcatttctgatgtaacatca

SEQ ID NO: 1512223 - DNA, 25 bp, Homo sapien
gacagacaccaagaggccagtatgg

SEQ ID NO: 1512224 - DNA, 25 bp, Homo sapien
caggtagaagtggacagacaccaag

SEQ ID NO: 1512225 - DNA, 25 bp, Homo sapien
gtagaagtggacagacaccaagagg

SEQ ID NO: 1512226 - DNA, 25 bp, Homo sapien
tggacagacaccaagaggccagtat

SEQ ID NO: 1512227 - DNA, 25 bp, Homo sapien
agtgaacttaggttgtgtgatggac

SEQ ID NO: 1512228 - DNA, 25 bp, Homo sapien
cttgagtctgcaagatgccaacttg

SEQ ID NO: 1512229 - DNA, 25 bp, Homo sapien
tccaaggctcccttgtggcacagca

SEQ ID NO: 1512230 - DNA, 25 bp, Homo sapien
gtgatggactcttgagtctgcaaga

SEQ ID NO: 1512231 - DNA, 25 bp, Homo sapien
taagtggctgttactcctcagtgga

SEQ ID NO: 1512232 - DNA, 25 bp, Homo sapien
aagtggctgttactcctcagtggac

SEQ ID NO: 1512233 - DNA, 25 bp, Homo sapien
gttaagtggctgttactcctcagtg

SEQ ID NO: 1512234 - DNA, 25 bp, Homo sapien
cagttaagtggctgttactcctcag

SEQ ID NO: 1512235 - DNA, 25 bp, Homo sapien
tggccaccctcgggcgttgacttcc

SEQ ID NO: 1512236 - DNA, 25 bp, Homo sapien
tgtgtagcaccagctgctcggctgc

SEQ ID NO: 1512237 - DNA, 25 bp, Homo sapien
gcaggcacccgccacggcttagtgg

SEQ ID NO: 1512238 - DNA, 25 bp, Homo sapien
ccttcggcggccctgtgtgtctgct

SEQ ID NO: 1512239 - DNA, 25 bp, Homo sapien
aatgtcactcgagcaggaggaggcc

SEQ ID NO: 1512240 - DNA, 25 bp, Homo sapien
aatctccaatggatcctcagtgaag

SEQ ID NO: 1512241 - DNA, 25 bp, Homo sapien
tcttggtgttaaatgtcactcgagc

SEQ ID NO: 1512242 - DNA, 25 bp, Homo sapien
aggcctcgatgggagcttcttttta

SEQ ID NO: 1512243 - DNA, 25 bp, Homo sapien
ctgggtgcctgtcgtccagatgtgt

SEQ ID NO: 1512244 - DNA, 25 bp, Homo sapien
ggtgcctgtcgtccagatgtgtcca

SEQ ID NO: 1512245 - DNA, 25 bp, Homo sapien
cgtccagatgtgtccagagcagcca

SEQ ID NO: 1512246 - DNA, 25 bp, Homo sapien
tgtcgtccagatgtgtccagagcag

SEQ ID NO: 1512247 - DNA, 25 bp, Homo sapien
gatccttttggctccctgtccactt

SEQ ID NO: 1512248 - DNA, 25 bp, Homo sapien
atccagatccttttggctccctgtc

SEQ ID NO: 1512249 - DNA, 25 bp, Homo sapien
ccttttggctccctgtccacttcag

SEQ ID NO: 1512250 - DNA, 25 bp, Homo sapien
ccagatccttttggctccctgtcca

SEQ ID NO: 1512251 - DNA, 25 bp, Homo sapien
ctggcttcatacagaggaagtgagg

SEQ ID NO: 1512252 - DNA, 25 bp, Homo sapien
aagtgaggacgcctggttagagtcc

SEQ ID NO: 1512253 - DNA, 25 bp, Homo sapien
cctggttagagtccacagctgtatt

SEQ ID NO: 1512254 - DNA, 25 bp, Homo sapien
ccacagctgtattccatttgccagc

SEQ ID NO: 1512255 - DNA, 25 bp, Homo sapien
tttccagctggtttctgcctcttac

SEQ ID NO: 1512256 - DNA, 25 bp, Homo sapien
tgtgccggcagaagagggttgttgc

SEQ ID NO: 1512257 - DNA, 25 bp, Homo sapien
tgcaagtgtttgtggtgccaccatg

SEQ ID NO: 1512258 - DNA, 25 bp, Homo sapien
ggcagaagagggttgttgctacacc

SEQ ID NO: 1512259 - DNA, 25 bp, Homo sapien
agtgtttgtggtgccaccatgactg

SEQ ID NO: 1512260 - DNA, 25 bp, Homo sapien
tttggctgctcagcacatcccctgg

SEQ ID NO: 1512261 - DNA, 25 bp, Homo sapien
cactcagggaaagttggcgcttaac

SEQ ID NO: 1512262 - DNA, 25 bp, Homo sapien
gcttactacaagcatcatggccagg

SEQ ID NO: 1512263 - DNA, 25 bp, Homo sapien
agttgttgctcgtacattgtctgcc

SEQ ID NO: 1512264 - DNA, 25 bp, Homo sapien
ctgatgccaaacgtagtgcggccac

SEQ ID NO: 1512265 - DNA, 25 bp, Homo sapien
tataggtgctcacttccgcgcccag

SEQ ID NO: 1512266 - DNA, 25 bp, Homo sapien
tggtagtacccactccttggaggtc

SEQ ID NO: 1512267 - DNA, 25 bp, Homo sapien
gcaccatgcaatatagcccagaact

SEQ ID NO: 1512268 - DNA, 25 bp, Homo sapien
atgcatgaccccactgctgataggt

SEQ ID NO: 1512269 - DNA, 25 bp, Homo sapien
acatgcatgaccccactgctgatag

SEQ ID NO: 1512270 - DNA, 25 bp, Homo sapien
catgcatgaccccactgctgatagg

SEQ ID NO: 1512271 - DNA, 25 bp, Homo sapien
tgcatgaccccactgctgataggta

SEQ ID NO: 1512272 - DNA, 25 bp, Homo sapien
tatcccctatcgatggttcaggcag

SEQ ID NO: 1512273 - DNA, 25 bp, Homo sapien
tcatgtgctaggagactgcagggca

SEQ ID NO: 1512274 - DNA, 25 bp, Homo sapien
catcatggagtttttccggcaagca

SEQ ID NO: 1512275 - DNA, 25 bp, Homo sapien
gatagcccctgagttcctaaggcag

SEQ ID NO: 1512276 - DNA, 25 bp, Homo sapien
agcagggttttgggagcaggactgg

SEQ ID NO: 1512277 - DNA, 25 bp, Homo sapien
tccattttgtgagcagggttttggg

SEQ ID NO: 1512278 - DNA, 25 bp, Homo sapien
ccattttgtgagcagggttttggga

SEQ ID NO: 1512279 - DNA, 25 bp, Homo sapien
cattcagtaggaaattggctctgaa

SEQ ID NO: 1512280 - DNA, 25 bp, Homo sapien
ttcagtaggaaattggctctgaata

SEQ ID NO: 1512281 - DNA, 25 bp, Homo sapien
tcattcagtaggaaattggctctga

SEQ ID NO: 1512282 - DNA, 25 bp, Homo sapien
tcagtaggaaattggctctgaatac

SEQ ID NO: 1512283 - DNA, 25 bp, Homo sapien
ctttgacttcgtaaaatgacacgtg

SEQ ID NO: 1512284 - DNA, 25 bp, Homo sapien
ttctttgacttcgtaaaatgacacg

SEQ ID NO: 1512285 - DNA, 25 bp, Homo sapien
ttttctttgacttcgtaaaatgaca

SEQ ID NO: 1512286 - DNA, 25 bp, Homo sapien
tgacttcgtaaaatgacacgtgatc

SEQ ID NO: 1512287 - DNA, 25 bp, Homo sapien
acaggtgtgccctgaaggattttac

SEQ ID NO: 1512288 - DNA, 25 bp, Homo sapien
tcatttaacaggtgtgccctgaagg

SEQ ID NO: 1512289 - DNA, 25 bp, Homo sapien
tttaacaggtgtgccctgaaggatt

SEQ ID NO: 1512290 - DNA, 25 bp, Homo sapien
aacaggtgtgccctgaaggatttta

SEQ ID NO: 1512291 - DNA, 25 bp, Homo sapien
gattgttgcacaagatcctaatacc

SEQ ID NO: 1512292 - DNA, 25 bp, Homo sapien
caacatccatgtccaatgcgtgtgc

SEQ ID NO: 1512293 - DNA, 25 bp, Homo sapien
gggatcctaatgtctccggtggtga

SEQ ID NO: 1512294 - DNA, 25 bp, Homo sapien
gatgtacttggtaatcagacactgt

SEQ ID NO: 1512295 - DNA, 25 bp, Homo sapien
gaggcttcactatattttcagactg

SEQ ID NO: 1512296 - DNA, 25 bp, Homo sapien
gatgaggcttcactatattttcaga

SEQ ID NO: 1512297 - DNA, 25 bp, Homo sapien
tgaggcttcactatattttcagact

SEQ ID NO: 1512298 - DNA, 25 bp, Homo sapien
atgaggcttcactatattttcagac

SEQ ID NO: 1512299 - DNA, 25 bp, Homo sapien
cagacttggtcacttcactgccaca

SEQ ID NO: 1512300 - DNA, 25 bp, Homo sapien
gtccagtttctgtgtcaaccatgat

SEQ ID NO: 1512301 - DNA, 25 bp, Homo sapien
catgcctgttttaaagtggtggagc

SEQ ID NO: 1512302 - DNA, 25 bp, Homo sapien
tggtggagccagacatccatcagtc

SEQ ID NO: 1512303 - DNA, 25 bp, Homo sapien
gctacaccaagcagtgtacacagtg

SEQ ID NO: 1512304 - DNA, 25 bp, Homo sapien
gtttagggatatcgacatgctacac

SEQ ID NO: 1512305 - DNA, 25 bp, Homo sapien
tacaccaagcagtgtacacagtgcc

SEQ ID NO: 1512306 - DNA, 25 bp, Homo sapien
tatcgacatgctacaccaagcagtg

SEQ ID NO: 1512307 - DNA, 25 bp, Homo sapien
tggcatactgccgatcgactttggg

SEQ ID NO: 1512308 - DNA, 25 bp, Homo sapien
cagctggatgtgtggaggtcctgac

SEQ ID NO: 1512309 - DNA, 25 bp, Homo sapien
tgtggaggtcctgactgggagtctg

SEQ ID NO: 1512310 - DNA, 25 bp, Homo sapien
tcctgactgggagtctggcatactg

SEQ ID NO: 1512311 - DNA, 25 bp, Homo sapien
gcttggtgaaaggattctggtcccc

SEQ ID NO: 1512312 - DNA, 25 bp, Homo sapien
ggcttggtgaaaggattctggtccc

SEQ ID NO: 1512313 - DNA, 25 bp, Homo sapien
gctctgattctgattgtattggcat

SEQ ID NO: 1512314 - DNA, 25 bp, Homo sapien
ggctctgattctgattgtattggca

SEQ ID NO: 1512315 - DNA, 25 bp, Homo sapien
tggctctgattctgattgtattggc

SEQ ID NO: 1512316 - DNA, 25 bp, Homo sapien
gaaaacctggttatctgaacacaaa

SEQ ID NO: 1512317 - DNA, 25 bp, Homo sapien
ccatcttatgaaaacctggttatct

SEQ ID NO: 1512318 - DNA, 25 bp, Homo sapien
cttatgaaaacctggttatctgaac

SEQ ID NO: 1512319 - DNA, 25 bp, Homo sapien
gcactggtgggccaaagtttttcca

SEQ ID NO: 1512320 - DNA, 25 bp, Homo sapien
tccagaggtgccacgtcttccaagt

SEQ ID NO: 1512321 - DNA, 25 bp, Homo sapien
gcccaccaggtgccttccagaggtg

SEQ ID NO: 1512322 - DNA, 25 bp, Homo sapien
catggtactgggtgacactacagcc

SEQ ID NO: 1512323 - DNA, 25 bp, Homo sapien
gaggtgccacgtcttccaagtgagc

SEQ ID NO: 1512324 - DNA, 25 bp, Homo sapien
ccaatcagagcttgacagggtcttg

SEQ ID NO: 1512325 - DNA, 25 bp, Homo sapien
tacgagcccagtccagtcttaactg

SEQ ID NO: 1512326 - DNA, 25 bp, Homo sapien
cctgcccagagttggactttgtttc

SEQ ID NO: 1512327 - DNA, 25 bp, Homo sapien
cttaactggaatgctctagggaggg

SEQ ID NO: 1512328 - DNA, 25 bp, Homo sapien
ccttctggcacccaggtcgttttgc

SEQ ID NO: 1512329 - DNA, 25 bp, Homo sapien
gctttgttttgctcggtccgtgctc

SEQ ID NO: 1512330 - DNA, 25 bp, Homo sapien
ggcgtccttgcaacggcctatttta

SEQ ID NO: 1512331 - DNA, 25 bp, Homo sapien
ccctggaggcgagcttggcccgctt

SEQ ID NO: 1512332 - DNA, 25 bp, Homo sapien
gtttgttctggtctcccgcagccga

SEQ ID NO: 1512333 - DNA, 25 bp, Homo sapien
cgcgcgcgcagcgtgcgcggtgacg

SEQ ID NO: 1512334 - DNA, 25 bp, Homo sapien
agccgaggagccgaagcagtggcgg

SEQ ID NO: 1512335 - DNA, 25 bp, Homo sapien
gaggagccgaagcagtggcggcggc

SEQ ID NO: 1512336 - DNA, 25 bp, Homo sapien
gatcatcttctgcataattgccagg

SEQ ID NO: 1512337 - DNA, 25 bp, Homo sapien
gagccagaagatattcacaaatttc

SEQ ID NO: 1512338 - DNA, 25 bp, Homo sapien
tgatcatcttctgcataattgccag

SEQ ID NO: 1512339 - DNA, 25 bp, Homo sapien
ttgccaggggtgcaaaattaggagc

SEQ ID NO: 1512340 - DNA, 25 bp, Homo sapien
tgcattctagcttgagcaatatagt

SEQ ID NO: 1512341 - DNA, 25 bp, Homo sapien
ctatacattgatacacattgatgca

SEQ ID NO: 1512342 - DNA, 25 bp, Homo sapien
tgatacacattgatgcatagaatta

SEQ ID NO: 1512343 - DNA, 25 bp, Homo sapien
gatataggatgatcccttttgttta

SEQ ID NO: 1512344 - DNA, 25 bp, Homo sapien
agaatcccaacagcatgcttggtaa

SEQ ID NO: 1512345 - DNA, 25 bp, Homo sapien
ttagaagaatcccaacagcatgctt

SEQ ID NO: 1512346 - DNA, 25 bp, Homo sapien
ccagttttgcatgataacagttgtg

SEQ ID NO: 1512347 - DNA, 25 bp, Homo sapien
gaagaatcccaacagcatgcttggt

SEQ ID NO: 1512348 - DNA, 25 bp, Homo sapien
ggagtgcagaggctcaattgtggct

SEQ ID NO: 1512349 - DNA, 25 bp, Homo sapien
tgcagaggctcaattgtggctcact

SEQ ID NO: 1512350 - DNA, 25 bp, Homo sapien
gtctggagtgcagaggctcaattgt

SEQ ID NO: 1512351 - DNA, 25 bp, Homo sapien
agtgcagaggctcaattgtggctca

SEQ ID NO: 1512352 - DNA, 25 bp, Homo sapien
ttccggaagtgctggaatttcaggt

SEQ ID NO: 1512353 - DNA, 25 bp, Homo sapien
tcagcttccggaagtgctggaattt

SEQ ID NO: 1512354 - DNA, 25 bp, Homo sapien
agcttccggaagtgctggaatttca

SEQ ID NO: 1512355 - DNA, 25 bp, Homo sapien
atttcaggtgtgagccaccgcgagc

SEQ ID NO: 1512356 - DNA, 25 bp, Homo sapien
aaggaactgtgactcctccgacttt

SEQ ID NO: 1512357 - DNA, 25 bp, Homo sapien
aataaataaggaactgtgactcctc

SEQ ID NO: 1512358 - DNA, 25 bp, Homo sapien
taaataaggaactgtgactcctccg

SEQ ID NO: 1512359 - DNA, 25 bp, Homo sapien
aataaggaactgtgactcctccgac

SEQ ID NO: 1512360 - DNA, 25 bp, Homo sapien
tgggattacaaaattgtgccaccac

SEQ ID NO: 1512361 - DNA, 25 bp, Homo sapien
tcatgttggccaagttggtctcgaa

SEQ ID NO: 1512362 - DNA, 25 bp, Homo sapien
atcatgttggccaagttggtctcga

SEQ ID NO: 1512363 - DNA, 25 bp, Homo sapien
attacaaaattgtgccaccacgcct

SEQ ID NO: 1512364 - DNA, 25 bp, Homo sapien
cattctaggaattgggccctgctca

SEQ ID NO: 1512365 - DNA, 25 bp, Homo sapien
catgaggagccttagtggagattcc

SEQ ID NO: 1512366 - DNA, 25 bp, Homo sapien
tcaagaaccagactgtgcagagggc

SEQ ID NO: 1512367 - DNA, 25 bp, Homo sapien
cacatgttgggaaacgctggccact

SEQ ID NO: 1512368 - DNA, 25 bp, Homo sapien
ccgcggatgctgaagtggaacaaac

SEQ ID NO: 1512369 - DNA, 25 bp, Homo sapien
tctcacggcttgtctcatgcagtcg

SEQ ID NO: 1512370 - DNA, 25 bp, Homo sapien
tgaagtacattgtccttagcggctg

SEQ ID NO: 1512371 - DNA, 25 bp, Homo sapien
gaaatggcgccgagacaatggcagc

SEQ ID NO: 1512372 - DNA, 25 bp, Homo sapien
ctccatctcccaaattctcatgcct

SEQ ID NO: 1512373 - DNA, 25 bp, Homo sapien
atgcctcagtctcctgagtagctgg

SEQ ID NO: 1512374 - DNA, 25 bp, Homo sapien
gattacgggtgtgcaccaccacacc

SEQ ID NO: 1512375 - DNA, 25 bp, Homo sapien
aacctccatctcccaaattctcatg

SEQ ID NO: 1512376 - DNA, 25 bp, Homo sapien
gagtggtgacgactcttggcatgct

SEQ ID NO: 1512377 - DNA, 25 bp, Homo sapien
agggagatttggcagtgtttgtgtc

SEQ ID NO: 1512378 - DNA, 25 bp, Homo sapien
ggtgacgactcttggcatgctgcct

SEQ ID NO: 1512379 - DNA, 25 bp, Homo sapien
ttagggagtggtgacgactcttggc

SEQ ID NO: 1512380 - DNA, 25 bp, Homo sapien
tgttcactgcctaaggagtcagctc

SEQ ID NO: 1512381 - DNA, 25 bp, Homo sapien
tccccaagtccttagagtcacacag

SEQ ID NO: 1512382 - DNA, 25 bp, Homo sapien
taggaatctctgtaaacctgctgat

SEQ ID NO: 1512383 - DNA, 25 bp, Homo sapien
gccaccccagtgtagattctgatcc

SEQ ID NO: 1512384 - DNA, 25 bp, Homo sapien
ggccgatcttctcgagctgcctgct

SEQ ID NO: 1512385 - DNA, 25 bp, Homo sapien
cactaggatttagcgcttggcctgc

SEQ ID NO: 1512386 - DNA, 25 bp, Homo sapien
cttggcctgcagtagggccgatctt

SEQ ID NO: 1512387 - DNA, 25 bp, Homo sapien
gccttttgggagcaaagtttgccca

SEQ ID NO: 1512388 - DNA, 25 bp, Homo sapien
tataaagctggaaacctgatgtgcc

SEQ ID NO: 1512389 - DNA, 25 bp, Homo sapien
tgttcgtataaagctggaaacctga

SEQ ID NO: 1512390 - DNA, 25 bp, Homo sapien
gctgagtgttcgtataaagctggaa

SEQ ID NO: 1512391 - DNA, 25 bp, Homo sapien
gggcagatgctgagtgttcgtataa

SEQ ID NO: 1512392 - DNA, 25 bp, Homo sapien
tcgggcctttagtccccggtgcagc

SEQ ID NO: 1512393 - DNA, 25 bp, Homo sapien
tgctgccggcgcgagagtcagcctc

SEQ ID NO: 1512394 - DNA, 25 bp, Homo sapien
ccagggcgcctgtcccggaagccgt

SEQ ID NO: 1512395 - DNA, 25 bp, Homo sapien
tcccggaagccgtcgggctgcgcgg

SEQ ID NO: 1512396 - DNA, 25 bp, Homo sapien
gggccgtgtagggtctccgctgggc

SEQ ID NO: 1512397 - DNA, 25 bp, Homo sapien
cgcggggccgtgtagggtctccgct

SEQ ID NO: 1512398 - DNA, 25 bp, Homo sapien
ggccgtgtagggtctccgctgggct

SEQ ID NO: 1512399 - DNA, 25 bp, Homo sapien
cggggccgtgtagggtctccgctgg

SEQ ID NO: 1512400 - DNA, 25 bp, Homo sapien
taggggggcggagctacagcgtggg

SEQ ID NO: 1512401 - DNA, 25 bp, Homo sapien
cagcgtggggttgtgaggtcggacc

SEQ ID NO: 1512402 - DNA, 25 bp, Homo sapien
gcggaccgcgggggccgcctctctc

SEQ ID NO: 1512403 - DNA, 25 bp, Homo sapien
ttcctcttccgaagacgccacaaaa

SEQ ID NO: 1512404 - DNA, 25 bp, Homo sapien
gcggagtccttccggcccccagcga

SEQ ID NO: 1512405 - DNA, 25 bp, Homo sapien
ctcttccgaagacgccacaaaatgg

SEQ ID NO: 1512406 - DNA, 25 bp, Homo sapien
ttccgaagacgccacaaaatggcgg

SEQ ID NO: 1512407 - DNA, 25 bp, Homo sapien
tgaacgcatgcgtgctgtggtcgcc

SEQ ID NO: 1512408 - DNA, 25 bp, Homo sapien
taggccacggagctggatcgtagca

SEQ ID NO: 1512409 - DNA, 25 bp, Homo sapien
tcttccagtagtcgatggcggaggt

SEQ ID NO: 1512410 - DNA, 25 bp, Homo sapien
gcgtcgaagacatggaccagggcta

SEQ ID NO: 1512411 - DNA, 25 bp, Homo sapien
catggtggcccgcagtattctcaac

SEQ ID NO: 1512412 - DNA, 25 bp, Homo sapien
tggccgaagctggaaaccaaaccta

SEQ ID NO: 1512413 - DNA, 25 bp, Homo sapien
ggcagcaacttgtagggcactcaga

SEQ ID NO: 1512414 - DNA, 25 bp, Homo sapien
ttctctgttactgtgccgcgcgggc

SEQ ID NO: 1512415 - DNA, 25 bp, Homo sapien
acccttgcatgactgggaataattc

SEQ ID NO: 1512416 - DNA, 25 bp, Homo sapien
aatacggaaacagttgatcctccca

SEQ ID NO: 1512417 - DNA, 25 bp, Homo sapien
cacccttgcatgactgggaataatt

SEQ ID NO: 1512418 - DNA, 25 bp, Homo sapien
aagaaagttggctggatatagtggc

SEQ ID NO: 1512419 - DNA, 25 bp, Homo sapien
aaagttggctggatatagtggctta

SEQ ID NO: 1512420 - DNA, 25 bp, Homo sapien
gaaagttggctggatatagtggctt

SEQ ID NO: 1512421 - DNA, 25 bp, Homo sapien
gttggctggatatagtggcttatac

SEQ ID NO: 1512422 - DNA, 25 bp, Homo sapien
cgcacgaaccccaaggtgcactggg

SEQ ID NO: 1512423 - DNA, 25 bp, Homo sapien
atcagagactcaaggtccaaggcgc

SEQ ID NO: 1512424 - DNA, 25 bp, Homo sapien
aggccgggcctgtctgcggctgagc

SEQ ID NO: 1512425 - DNA, 25 bp, Homo sapien
ctcagaagctctggcgctaggtcac

SEQ ID NO: 1512426 - DNA, 25 bp, Homo sapien
gagaccgcatggtggaaaggtaacc

SEQ ID NO: 1512427 - DNA, 25 bp, Homo sapien
caggcaagaagagtcaggacaagca

SEQ ID NO: 1512428 - DNA, 25 bp, Homo sapien
tgaaaatggccagaccaagcgcaag

SEQ ID NO: 1512429 - DNA, 25 bp, Homo sapien
caagcgcaagttgcaggcaggcaag

SEQ ID NO: 1512430 - DNA, 25 bp, Homo sapien
gagccttggatctatagatctatca

SEQ ID NO: 1512431 - DNA, 25 bp, Homo sapien
aattcatgctgagattttgagtgag

SEQ ID NO: 1512432 - DNA, 25 bp, Homo sapien
agattttgagtgagagagccttgga

SEQ ID NO: 1512433 - DNA, 25 bp, Homo sapien
gcctcgcccagcaatgcagtcttga

SEQ ID NO: 1512434 - DNA, 25 bp, Homo sapien
ctggtcttgaattccccatctcagg

SEQ ID NO: 1512435 - DNA, 25 bp, Homo sapien
ttcaagctattcttgtgccttggcc

SEQ ID NO: 1512436 - DNA, 25 bp, Homo sapien
tcccaaatagctggtattacaggca

SEQ ID NO: 1512437 - DNA, 25 bp, Homo sapien
agattcaagctattcttgtgccttg

SEQ ID NO: 1512438 - DNA, 25 bp, Homo sapien
cttggtccttgcgagcaggcagcag

SEQ ID NO: 1512439 - DNA, 25 bp, Homo sapien
cagcaggctcggctgccgtcgccat

SEQ ID NO: 1512440 - DNA, 25 bp, Homo sapien
aggccttggtccttgcgagcaggca

SEQ ID NO: 1512441 - DNA, 25 bp, Homo sapien
tcaggccttggtccttgcgagcagg

SEQ ID NO: 1512442 - DNA, 25 bp, Homo sapien
ttctagtgagacacatgcacccctg

SEQ ID NO: 1512443 - DNA, 25 bp, Homo sapien
cagttgaggctagaggagcttatca

SEQ ID NO: 1512444 - DNA, 25 bp, Homo sapien
tactaaacggtcaagtgctggagag

SEQ ID NO: 1512445 - DNA, 25 bp, Homo sapien
gagccactggctcctttgcgatgtt

SEQ ID NO: 1512446 - DNA, 25 bp, Homo sapien
caggcggccagcgtgtgtttttctg

SEQ ID NO: 1512447 - DNA, 25 bp, Homo sapien
gcggccagcgtgtgtttttctgtca

SEQ ID NO: 1512448 - DNA, 25 bp, Homo sapien
tctgtcaagtggacaggctggcatt

SEQ ID NO: 1512449 - DNA, 25 bp, Homo sapien
gtgtttttctgtcaagtggacaggc

SEQ ID NO: 1512450 - DNA, 25 bp, Homo sapien
cacggaaatccttgttggctgcccc

SEQ ID NO: 1512451 - DNA, 25 bp, Homo sapien
ctgagcccacaatgccacggaaatc

SEQ ID NO: 1512452 - DNA, 25 bp, Homo sapien
ggttgaacgaccacatcatgccacg

SEQ ID NO: 1512453 - DNA, 25 bp, Homo sapien
tattttgcaatcctgggccagctag

SEQ ID NO: 1512454 - DNA, 25 bp, Homo sapien
tcagcccatgcccacctggtccagc

SEQ ID NO: 1512455 - DNA, 25 bp, Homo sapien
agcagccaggtctctgatggcagcc

SEQ ID NO: 1512456 - DNA, 25 bp, Homo sapien
agccaggtctctgatggcagccggt

SEQ ID NO: 1512457 - DNA, 25 bp, Homo sapien
gcagcagccaggtctctgatggcag

SEQ ID NO: 1512458 - DNA, 25 bp, Homo sapien
gagcaagccaaaacctcaaaccggc

SEQ ID NO: 1512459 - DNA, 25 bp, Homo sapien
agatcccctctcgtgccacctctgt

SEQ ID NO: 1512460 - DNA, 25 bp, Homo sapien
tttccgtttccaaaggagcaagcca

SEQ ID NO: 1512461 - DNA, 25 bp, Homo sapien
ccttgggggccgggcacactacagc

SEQ ID NO: 1512462 - DNA, 25 bp, Homo sapien
cccagacatcacttgtcaagttcgt

SEQ ID NO: 1512463 - DNA, 25 bp, Homo sapien
gaggcgaggacaccaatgacctaca

SEQ ID NO: 1512464 - DNA, 25 bp, Homo sapien
tctacaccctcaaatgcaggtaggc

SEQ ID NO: 1512465 - DNA, 25 bp, Homo sapien
ggagaccacctgagtggaccttggt

SEQ ID NO: 1512466 - DNA, 25 bp, Homo sapien
agccagcccgccaggcaccgtgaag

SEQ ID NO: 1512467 - DNA, 25 bp, Homo sapien
ccatggccgtgacagtgacaagcgg

SEQ ID NO: 1512468 - DNA, 25 bp, Homo sapien
caccgtgaaggctgaggagcaccag

SEQ ID NO: 1512469 - DNA, 25 bp, Homo sapien
gtgacagtgacaagcggccgtccct

SEQ ID NO: 1512470 - DNA, 25 bp, Homo sapien
catccgctgcgagttctgtggtgag

SEQ ID NO: 1512471 - DNA, 25 bp, Homo sapien
tgagttcttcgagaaccgcaagggc

SEQ ID NO: 1512472 - DNA, 25 bp, Homo sapien
catctgcggcaaatgggcgtgaccg

SEQ ID NO: 1512473 - DNA, 25 bp, Homo sapien
cacgctgcgggagatcctgaagaga

SEQ ID NO: 1512474 - DNA, 25 bp, Homo sapien
tgtaggttctcgcttcagctgcccc

SEQ ID NO: 1512475 - DNA, 25 bp, Homo sapien
tgatgtggagccgtctcctctcaac

SEQ ID NO: 1512476 - DNA, 25 bp, Homo sapien
ggttctgcccagagatcttgttggc

SEQ ID NO: 1512477 - DNA, 25 bp, Homo sapien
catgacccttcctgagaatgaaggc

SEQ ID NO: 1512478 - DNA, 25 bp, Homo sapien
tgcatgactatgagtctggactcct

SEQ ID NO: 1512479 - DNA, 25 bp, Homo sapien
gtgggacaacaggaaccgaggacat

SEQ ID NO: 1512480 - DNA, 25 bp, Homo sapien
gctgtggttccagatcggctccagg

SEQ ID NO: 1512481 - DNA, 25 bp, Homo sapien
cccagctggctactggaagaccagg

SEQ ID NO: 1512482 - DNA, 25 bp, Homo sapien
ggaagatctaccgagcaaatggaaa

SEQ ID NO: 1512483 - DNA, 25 bp, Homo sapien
gaagatctaccgagcaaatggaaaa

SEQ ID NO: 1512484 - DNA, 25 bp, Homo sapien
tggaggaagatctaccgagcaaatg

SEQ ID NO: 1512485 - DNA, 25 bp, Homo sapien
gaggaagatctaccgagcaaatgga

SEQ ID NO: 1512486 - DNA, 25 bp, Homo sapien
gatccggatccaccggcgccactac

SEQ ID NO: 1512487 - DNA, 25 bp, Homo sapien
atccaccggcgccactacctgggat

SEQ ID NO: 1512488 - DNA, 25 bp, Homo sapien
actacctgggatctgaccgcgccgt

SEQ ID NO: 1512489 - DNA, 25 bp, Homo sapien
cctgccctcgatccggatccaccgg

SEQ ID NO: 1512490 - DNA, 25 bp, Homo sapien
caggccagagttaatgttactgttc

SEQ ID NO: 1512491 - DNA, 25 bp, Homo sapien
gacaccaggccagagttaatgttac

SEQ ID NO: 1512492 - DNA, 25 bp, Homo sapien
caccaggccagagttaatgttactg

SEQ ID NO: 1512493 - DNA, 25 bp, Homo sapien
accaggccagagttaatgttactgt

SEQ ID NO: 1512494 - DNA, 25 bp, Homo sapien
ggacctctcatgagatcctctgagc

SEQ ID NO: 1512495 - DNA, 25 bp, Homo sapien
ctctcagccgcctctgatcagccat

SEQ ID NO: 1512496 - DNA, 25 bp, Homo sapien
gagcaagtggactatctttccagag

SEQ ID NO: 1512497 - DNA, 25 bp, Homo sapien
tccaggttgaatacaaagacttccc

SEQ ID NO: 1512498 - DNA, 25 bp, Homo sapien
ccacctcccaaagtgctaggattac

SEQ ID NO: 1512499 - DNA, 25 bp, Homo sapien
tcctcacctcaggccatccacccac

SEQ ID NO: 1512500 - DNA, 25 bp, Homo sapien
ctccacctcccaaagtgctaggatt

SEQ ID NO: 1512501 - DNA, 25 bp, Homo sapien
tcaggccatccacccacctccacct

SEQ ID NO: 1512502 - DNA, 25 bp, Homo sapien
caggtccttgctttagggccagctc

SEQ ID NO: 1512503 - DNA, 25 bp, Homo sapien
cttccttgctggtattttctgttat

SEQ ID NO: 1512504 - DNA, 25 bp, Homo sapien
caattcttttgggttcactgtcttc

SEQ ID NO: 1512505 - DNA, 25 bp, Homo sapien
aaaattacttgcactcaggtccttg

SEQ ID NO: 1512506 - DNA, 25 bp, Homo sapien
gggtcggtgccatgcacaagacgat

SEQ ID NO: 1512507 - DNA, 25 bp, Homo sapien
cggtgccatgcacaagacgatgacc

SEQ ID NO: 1512508 - DNA, 25 bp, Homo sapien
agggtcagggggtcggtgccatgca

SEQ ID NO: 1512509 - DNA, 25 bp, Homo sapien
catgcacaagacgatgacccatggg

SEQ ID NO: 1512510 - DNA, 25 bp, Homo sapien
agaagggtggacaccgcgtatatgc

SEQ ID NO: 1512511 - DNA, 25 bp, Homo sapien
gacaccgcgtatatgcggaacgccg

SEQ ID NO: 1512512 - DNA, 25 bp, Homo sapien
gtatatgcggaacgccgtcttctcc

SEQ ID NO: 1512513 - DNA, 25 bp, Homo sapien
cagcagcaggcggaacaggaagaag

SEQ ID NO: 1512514 - DNA, 25 bp, Homo sapien
gatgtaatcagggtgcaccagaacc

SEQ ID NO: 1512515 - DNA, 25 bp, Homo sapien
tacatggtgcatgttgtccagtacc

SEQ ID NO: 1512516 - DNA, 25 bp, Homo sapien
accagaaccaacagcggcaggacag

SEQ ID NO: 1512517 - DNA, 25 bp, Homo sapien
ggacaggtcccatccataccaagag

SEQ ID NO: 1512518 - DNA, 25 bp, Homo sapien
ctagccaaggttttaggaagccata

SEQ ID NO: 1512519 - DNA, 25 bp, Homo sapien
agccatagaagaggtcatccttggg

SEQ ID NO: 1512520 - DNA, 25 bp, Homo sapien
caaggttttaggaagccatagaaga

SEQ ID NO: 1512521 - DNA, 25 bp, Homo sapien
taggaagccatagaagaggtcatcc

SEQ ID NO: 1512522 - DNA, 25 bp, Homo sapien
gtcaaagtggaaggcgggtgtcagc

SEQ ID NO: 1512523 - DNA, 25 bp, Homo sapien
tcagcgctctggttgaagatcttca

SEQ ID NO: 1512524 - DNA, 25 bp, Homo sapien
gtaaggcttcaggatgtcaaagtgg

SEQ ID NO: 1512525 - DNA, 25 bp, Homo sapien
gtgtcagcaggcgacggtgccggct

SEQ ID NO: 1512526 - DNA, 25 bp, Homo sapien
tatcaagggagaccgctgagccctc

SEQ ID NO: 1512527 - DNA, 25 bp, Homo sapien
cctctgccagatgccgccatttagc

SEQ ID NO: 1512528 - DNA, 25 bp, Homo sapien
caaacatatcaagggagaccgctga

SEQ ID NO: 1512529 - DNA, 25 bp, Homo sapien
acatatcaagggagaccgctgagcc

SEQ ID NO: 1512530 - DNA, 25 bp, Homo sapien
tccgccgagcggtagtaaatgaagt

SEQ ID NO: 1512531 - DNA, 25 bp, Homo sapien
aagtggtgcaccatgtcacaggcct

SEQ ID NO: 1512532 - DNA, 25 bp, Homo sapien
gtgcaagcgatactggcgccggaca

SEQ ID NO: 1512533 - DNA, 25 bp, Homo sapien
ccggacagacagagcgctcagttca

SEQ ID NO: 1512534 - DNA, 25 bp, Homo sapien
ggctcggatatcctcgtctgacagt

SEQ ID NO: 1512535 - DNA, 25 bp, Homo sapien
gtctgcttcggctcggatatcctcg

SEQ ID NO: 1512536 - DNA, 25 bp, Homo sapien
ggatatcctcgtctgacagttcctt

SEQ ID NO: 1512537 - DNA, 25 bp, Homo sapien
catgaaggtgtctgcttcggctcgg

SEQ ID NO: 1512538 - DNA, 25 bp, Homo sapien
atgagggtatctgaatggaggctgc

SEQ ID NO: 1512539 - DNA, 25 bp, Homo sapien
tattccggatactttgccaaattga

SEQ ID NO: 1512540 - DNA, 25 bp, Homo sapien
gctcccggcctttcatgacttcctg

SEQ ID NO: 1512541 - DNA, 25 bp, Homo sapien
acttcctgaatctcttctcggcatt

SEQ ID NO: 1512542 - DNA, 25 bp, Homo sapien
aacagcatccaagagatcccactgg

SEQ ID NO: 1512543 - DNA, 25 bp, Homo sapien
tggagatataactagaggccgagcc

SEQ ID NO: 1512544 - DNA, 25 bp, Homo sapien
gatataactagaggccgagccacca

SEQ ID NO: 1512545 - DNA, 25 bp, Homo sapien
ggagaatggagatataactagaggc

SEQ ID NO: 1512546 - DNA, 25 bp, Homo sapien
gaatggagatataactagaggccga

SEQ ID NO: 1512547 - DNA, 25 bp, Homo sapien
tgacaggtgggtactggcgcaggct

SEQ ID NO: 1512548 - DNA, 25 bp, Homo sapien
gagcttgatgtcctccgtgcattgg

SEQ ID NO: 1512549 - DNA, 25 bp, Homo sapien
gcgcccatctgggagcttgatgtcc

SEQ ID NO: 1512550 - DNA, 25 bp, Homo sapien
cattggcgagagacaagagtgacag

SEQ ID NO: 1512551 - DNA, 25 bp, Homo sapien
tgggttccatagatgctgaccaagc

SEQ ID NO: 1512552 - DNA, 25 bp, Homo sapien
gtgggttccatagatgctgaccaag

SEQ ID NO: 1512553 - DNA, 25 bp, Homo sapien
ggtgggttccatagatgctgaccaa

SEQ ID NO: 1512554 - DNA, 25 bp, Homo sapien
tggtgggttccatagatgctgacca

SEQ ID NO: 1512555 - DNA, 25 bp, Homo sapien
ggtcctgcagagaagggcacatagg

SEQ ID NO: 1512556 - DNA, 25 bp, Homo sapien
gctgtgggttgtccgggtcaaagcg

SEQ ID NO: 1512557 - DNA, 25 bp, Homo sapien
tcctgcagagaagggcacataggcc

SEQ ID NO: 1512558 - DNA, 25 bp, Homo sapien
cgctgctgtgggttgtccgggtcaa

SEQ ID NO: 1512559 - DNA, 25 bp, Homo sapien
aagtgagaccccacggatcgctcaa

SEQ ID NO: 1512560 - DNA, 25 bp, Homo sapien
gtgtgtcctggatacacagcgcccc

SEQ ID NO: 1512561 - DNA, 25 bp, Homo sapien
gagtgtctgaatcccagtacagcct

SEQ ID NO: 1512562 - DNA, 25 bp, Homo sapien
gatcgctcaattaatgtgaccttgg

SEQ ID NO: 1512563 - DNA, 25 bp, Homo sapien
ggtccacgctcaggcggaaacgtag

SEQ ID NO: 1512564 - DNA, 25 bp, Homo sapien
gcccgttctccgtgcgcagtatgag

SEQ ID NO: 1512565 - DNA, 25 bp, Homo sapien
catggcgaagctctgtccgatgcaa

SEQ ID NO: 1512566 - DNA, 25 bp, Homo sapien
gtgttagtgccacaaccacgcgcaa

SEQ ID NO: 1512567 - DNA, 25 bp, Homo sapien
ggcccgcggaggcagcggctccacc

SEQ ID NO: 1512568 - DNA, 25 bp, Homo sapien
cgcggaggcagcggctccaccttga

SEQ ID NO: 1512569 - DNA, 25 bp, Homo sapien
cccgcggaggcagcggctccacctt

SEQ ID NO: 1512570 - DNA, 25 bp, Homo sapien
tcaggcccgcggaggcagcggctcc

SEQ ID NO: 1512571 - DNA, 25 bp, Homo sapien
cataggtgggtcttaggtcctctga

SEQ ID NO: 1512572 - DNA, 25 bp, Homo sapien
tgctcaacagcggtgcctggtcatc

SEQ ID NO: 1512573 - DNA, 25 bp, Homo sapien
caaacaggacaggtgcgagaagtca

SEQ ID NO: 1512574 - DNA, 25 bp, Homo sapien
gatgtccgagttaaaagctctgacg

SEQ ID NO: 1512575 - DNA, 25 bp, Homo sapien
caggggcagccaatccccgtaggcc

SEQ ID NO: 1512576 - DNA, 25 bp, Homo sapien
aggggcagccaatccccgtaggcca

SEQ ID NO: 1512577 - DNA, 25 bp, Homo sapien
ggggcagccaatccccgtaggccat

SEQ ID NO: 1512578 - DNA, 25 bp, Homo sapien
tcaggggcagccaatccccgtaggc

SEQ ID NO: 1512579 - DNA, 25 bp, Homo sapien
agcagccatggggatgctgccaccg

SEQ ID NO: 1512580 - DNA, 25 bp, Homo sapien
agccaggacaggctcagcagcgaca

SEQ ID NO: 1512581 - DNA, 25 bp, Homo sapien
catggggatgctgccaccggcccga

SEQ ID NO: 1512582 - DNA, 25 bp, Homo sapien
cagccatggggatgctgccaccggc

SEQ ID NO: 1512583 - DNA, 25 bp, Homo sapien
gttccgttttggaggctgctggaaa

SEQ ID NO: 1512584 - DNA, 25 bp, Homo sapien
aaagcagttccgttttggaggctgc

SEQ ID NO: 1512585 - DNA, 25 bp, Homo sapien
cagttccgttttggaggctgctgga

SEQ ID NO: 1512586 - DNA, 25 bp, Homo sapien
tcaaaagcagttccgttttggaggc

SEQ ID NO: 1512587 - DNA, 25 bp, Homo sapien
cgtagggtggacgagatgcaggaca

SEQ ID NO: 1512588 - DNA, 25 bp, Homo sapien
tgcaggacagggtagaaagacccaa

SEQ ID NO: 1512589 - DNA, 25 bp, Homo sapien
ccaccagagttggacatcacggaag

SEQ ID NO: 1512590 - DNA, 25 bp, Homo sapien
agtagtggcccagatcctccatcag

SEQ ID NO: 1512591 - DNA, 25 bp, Homo sapien
gaaactcatatccttgagtgcaaca

SEQ ID NO: 1512592 - DNA, 25 bp, Homo sapien
aaactcatatccttgagtgcaacag

SEQ ID NO: 1512593 - DNA, 25 bp, Homo sapien
tagaaactcatatccttgagtgcaa

SEQ ID NO: 1512594 - DNA, 25 bp, Homo sapien
atagaaactcatatccttgagtgca

SEQ ID NO: 1512595 - DNA, 25 bp, Homo sapien
aagggccatgggcaaggacagcacc

SEQ ID NO: 1512596 - DNA, 25 bp, Homo sapien
gggccatgggcaaggacagcacctt

SEQ ID NO: 1512597 - DNA, 25 bp, Homo sapien
ctagtagaggcagccaagggccatg

SEQ ID NO: 1512598 - DNA, 25 bp, Homo sapien
gcagccaagggccatgggcaaggac

SEQ ID NO: 1512599 - DNA, 25 bp, Homo sapien
tcaccggcactaatcaggagcccat

SEQ ID NO: 1512600 - DNA, 25 bp, Homo sapien
acttgtcaccggcactaatcaggag

SEQ ID NO: 1512601 - DNA, 25 bp, Homo sapien
gcatgatgttcgtgctctcattgaa

SEQ ID NO: 1512602 - DNA, 25 bp, Homo sapien
tggcggtgccatctccacttgtcac

SEQ ID NO: 1512603 - DNA, 25 bp, Homo sapien
catttccagacggacactgccctcc

SEQ ID NO: 1512604 - DNA, 25 bp, Homo sapien
tcaaacatttccagacggacactgc

SEQ ID NO: 1512605 - DNA, 25 bp, Homo sapien
caaacatttccagacggacactgcc

SEQ ID NO: 1512606 - DNA, 25 bp, Homo sapien
ctgcagaagcgtcgcccattgggag

SEQ ID NO: 1512607 - DNA, 25 bp, Homo sapien
gtcgcccattgggagtgaggaagta

SEQ ID NO: 1512608 - DNA, 25 bp, Homo sapien
gaagtacaagaagtccgtgagcagg

SEQ ID NO: 1512609 - DNA, 25 bp, Homo sapien
ctggtgccgtttcagactgagggca

SEQ ID NO: 1512610 - DNA, 25 bp, Homo sapien
ttggcctgcaggaagtcatcgacac

SEQ ID NO: 1512611 - DNA, 25 bp, Homo sapien
ggccagcaagagcacgtcaatgaag

SEQ ID NO: 1512612 - DNA, 25 bp, Homo sapien
gcatctgtgaagttgtgcactatgt

SEQ ID NO: 1512613 - DNA, 25 bp, Homo sapien
caagagcacgtcaatgaagtccaaa

SEQ ID NO: 1512614 - DNA, 25 bp, Homo sapien
gacctctaaattacaccagccatga

SEQ ID NO: 1512615 - DNA, 25 bp, Homo sapien
cctctaaattacaccagccatgaag

SEQ ID NO: 1512616 - DNA, 25 bp, Homo sapien
agacaagacaagacctctaaattac

SEQ ID NO: 1512617 - DNA, 25 bp, Homo sapien
gagacaagacaagacctctaaatta

SEQ ID NO: 1512618 - DNA, 25 bp, Homo sapien
gtgtcagcctccgctcttatgttct

SEQ ID NO: 1512619 - DNA, 25 bp, Homo sapien
tcagcctccgctcttatgttctcat

SEQ ID NO: 1512620 - DNA, 25 bp, Homo sapien
gtcagcctccgctcttatgttctca

SEQ ID NO: 1512621 - DNA, 25 bp, Homo sapien
cagcctccgctcttatgttctcatc

SEQ ID NO: 1512622 - DNA, 25 bp, Homo sapien
tggacagcacccatgtattgaggcc

SEQ ID NO: 1512623 - DNA, 25 bp, Homo sapien
gtggacagcacccatgtattgaggc

SEQ ID NO: 1512624 - DNA, 25 bp, Homo sapien
tctttaggatcaccgttcttcagga

SEQ ID NO: 1512625 - DNA, 25 bp, Homo sapien
tttaggatcaccgttcttcaggagc

SEQ ID NO: 1512626 - DNA, 25 bp, Homo sapien
aggatcaccgttcttcaggagctct

SEQ ID NO: 1512627 - DNA, 25 bp, Homo sapien
tctctttaggatcaccgttcttcag

SEQ ID NO: 1512628 - DNA, 25 bp, Homo sapien
agcagcggtggatcctggagactgg

SEQ ID NO: 1512629 - DNA, 25 bp, Homo sapien
ccatccgggagcaccccgtcctggg

SEQ ID NO: 1512630 - DNA, 25 bp, Homo sapien
gcagcagcggtggatcctggagact

SEQ ID NO: 1512631 - DNA, 25 bp, Homo sapien
atgacccggccatccgggagcaccc

SEQ ID NO: 1512632 - DNA, 25 bp, Homo sapien
ctacacgatgggacctccaccctgc

SEQ ID NO: 1512633 - DNA, 25 bp, Homo sapien
acacgatgggacctccaccctgccc

SEQ ID NO: 1512634 - DNA, 25 bp, Homo sapien
tacacgatgggacctccaccctgcc

SEQ ID NO: 1512635 - DNA, 25 bp, Homo sapien
cgggtccggccagactgaagggttg

SEQ ID NO: 1512636 - DNA, 25 bp, Homo sapien
ctccgggtccggccagactgaaggg

SEQ ID NO: 1512637 - DNA, 25 bp, Homo sapien
ctgaagggttgtgatggatcccaaa

SEQ ID NO: 1512638 - DNA, 25 bp, Homo sapien
agactgaagggttgtgatggatccc

SEQ ID NO: 1512639 - DNA, 25 bp, Homo sapien
gatggagaaggcggaaggggtagca

SEQ ID NO: 1512640 - DNA, 25 bp, Homo sapien
ggatggagaaggcggaaggggtagc

SEQ ID NO: 1512641 - DNA, 25 bp, Homo sapien
atggagaaggcggaaggggtagcac

SEQ ID NO: 1512642 - DNA, 25 bp, Homo sapien
caggccccgggatggagaaggcgga

SEQ ID NO: 1512643 - DNA, 25 bp, Homo sapien
aaaagccagaggtgatgtcttctgg

SEQ ID NO: 1512644 - DNA, 25 bp, Homo sapien
tgatgtcttctggagattttctggg

SEQ ID NO: 1512645 - DNA, 25 bp, Homo sapien
agattttctgggtcgaagcgaaagg

SEQ ID NO: 1512646 - DNA, 25 bp, Homo sapien
ctgggcactgctgagaagggaataa

SEQ ID NO: 1512647 - DNA, 25 bp, Homo sapien
cggccccatcgcgccgggaacctcg

SEQ ID NO: 1512648 - DNA, 25 bp, Homo sapien
tggccgatgcagttcccgggggagg

SEQ ID NO: 1512649 - DNA, 25 bp, Homo sapien
ctggccgatgcagttcccgggggag

SEQ ID NO: 1512650 - DNA, 25 bp, Homo sapien
ggctccgcgtggtccggcaggacgc

SEQ ID NO: 1512651 - DNA, 25 bp, Homo sapien
acccgtagccaaagtccatcctccg

SEQ ID NO: 1512652 - DNA, 25 bp, Homo sapien
cgcgcgcacgatcagctccagcttc

SEQ ID NO: 1512653 - DNA, 25 bp, Homo sapien
cgcgtggtccggcaggacgcggaag

SEQ ID NO: 1512654 - DNA, 25 bp, Homo sapien
gatgtagtgccgctctggttttcct

SEQ ID NO: 1512655 - DNA, 25 bp, Homo sapien
actgtgctcaaccagagaggctgtc

SEQ ID NO: 1512656 - DNA, 25 bp, Homo sapien
gtgggactcaggcacagattgattc

SEQ ID NO: 1512657 - DNA, 25 bp, Homo sapien
cagtgactcagagcctcaaacctgc

SEQ ID NO: 1512658 - DNA, 25 bp, Homo sapien
gccgccggaaggtgggtgacgtgtg

SEQ ID NO: 1512659 - DNA, 25 bp, Homo sapien
agtgtcttcggccgccggaaggtgg

SEQ ID NO: 1512660 - DNA, 25 bp, Homo sapien
aggagcttccttcttcactttcggc

SEQ ID NO: 1512661 - DNA, 25 bp, Homo sapien
agcttccttcttcactttcggcacc

SEQ ID NO: 1512662 - DNA, 25 bp, Homo sapien
tcttgtacagcttcttgttaccctc

SEQ ID NO: 1512663 - DNA, 25 bp, Homo sapien
ttcttgtacagcttcttgttaccct

SEQ ID NO: 1512664 - DNA, 25 bp, Homo sapien
ggagaaggttgtcccgcacaacctc

SEQ ID NO: 1512665 - DNA, 25 bp, Homo sapien
tgtcaggagaaggttgtcccgcaca

SEQ ID NO: 1512666 - DNA, 25 bp, Homo sapien
caggagaaggttgtcccgcacaacc

SEQ ID NO: 1512667 - DNA, 25 bp, Homo sapien
tcaggagaaggttgtcccgcacaac

SEQ ID NO: 1512668 - DNA, 25 bp, Homo sapien
gatgggtaaacatggttaagagcat

SEQ ID NO: 1512669 - DNA, 25 bp, Homo sapien
agacagcctcatctagaaccaccag

SEQ ID NO: 1512670 - DNA, 25 bp, Homo sapien
caccagccaacttgacctctggtta

SEQ ID NO: 1512671 - DNA, 25 bp, Homo sapien
gattcagggaatctcaggggaagag

SEQ ID NO: 1512672 - DNA, 25 bp, Homo sapien
ggctgcgggaaacaccggaggcggc

SEQ ID NO: 1512673 - DNA, 25 bp, Homo sapien
aggcccaggtgacccaagaaccagt

SEQ ID NO: 1512674 - DNA, 25 bp, Homo sapien
cggaggcggcggccgttgtgataga

SEQ ID NO: 1512675 - DNA, 25 bp, Homo sapien
cgttgtgatagaaggcataggtcca

SEQ ID NO: 1512676 - DNA, 25 bp, Homo sapien
gagtgatggggcccaaccacctcac

SEQ ID NO: 1512677 - DNA, 25 bp, Homo sapien
tgtcagggtggcacaagttgatgat

SEQ ID NO: 1512678 - DNA, 25 bp, Homo sapien
tattgatgacagatcggacgatgtc

SEQ ID NO: 1512679 - DNA, 25 bp, Homo sapien
ggcacaagttgatgatgggagtgat

SEQ ID NO: 1512680 - DNA, 25 bp, Homo sapien
cacagaagctttggggatgagatct

SEQ ID NO: 1512681 - DNA, 25 bp, Homo sapien
gatctagaagccctccaatgttctc

SEQ ID NO: 1512682 - DNA, 25 bp, Homo sapien
gagtactacaagagctgcacagaag

SEQ ID NO: 1512683 - DNA, 25 bp, Homo sapien
gggctgagtactacaagagctgcac

SEQ ID NO: 1512684 - DNA, 25 bp, Homo sapien
tcctggcccattctgaaccccatga

SEQ ID NO: 1512685 - DNA, 25 bp, Homo sapien
tggttcccagaacaacacggaggtg

SEQ ID NO: 1512686 - DNA, 25 bp, Homo sapien
catgaagttggggatgtctctgtac

SEQ ID NO: 1512687 - DNA, 25 bp, Homo sapien
cagggccttggattaaggcttctcg

SEQ ID NO: 1512688 - DNA, 25 bp, Homo sapien
gaatgtcatggaaatagcagcctag

SEQ ID NO: 1512689 - DNA, 25 bp, Homo sapien
tagaaggaatcgacccacaagaggt

SEQ ID NO: 1512690 - DNA, 25 bp, Homo sapien
caatgaacatatggtggaagtgcca

SEQ ID NO: 1512691 - DNA, 25 bp, Homo sapien
tggcccggagccttgaatactaaca

SEQ ID NO: 1512692 - DNA, 25 bp, Homo sapien
ggtcttgtagaagactatgtccttg

SEQ ID NO: 1512693 - DNA, 25 bp, Homo sapien
tcttgtagaagactatgtccttgtc

SEQ ID NO: 1512694 - DNA, 25 bp, Homo sapien
gtcttgtagaagactatgtccttgt

SEQ ID NO: 1512695 - DNA, 25 bp, Homo sapien
agggtcttgtagaagactatgtcct

SEQ ID NO: 1512696 - DNA, 25 bp, Homo sapien
atcttcccctggccacaaaagttgg

SEQ ID NO: 1512697 - DNA, 25 bp, Homo sapien
tgtgggcaagggcagaatcttcccc

SEQ ID NO: 1512698 - DNA, 25 bp, Homo sapien
tacggcagccaaaggctgtgggcaa

SEQ ID NO: 1512699 - DNA, 25 bp, Homo sapien
ctagtacggcagccaaaggctgtgg

SEQ ID NO: 1512700 - DNA, 25 bp, Homo sapien
gtcaccaacacttaacaagagccca

SEQ ID NO: 1512701 - DNA, 25 bp, Homo sapien
caccaacacttaacaagagcccatc

SEQ ID NO: 1512702 - DNA, 25 bp, Homo sapien
tgtcaccaacacttaacaagagccc

SEQ ID NO: 1512703 - DNA, 25 bp, Homo sapien
ccaacacttaacaagagcccatccc

SEQ ID NO: 1512704 - DNA, 25 bp, Homo sapien
ggcaggcgtcacaagcgacggtggt

SEQ ID NO: 1512705 - DNA, 25 bp, Homo sapien
caggcgtcacaagcgacggtggtgt

SEQ ID NO: 1512706 - DNA, 25 bp, Homo sapien
cgtcacaagcgacggtggtgtctcc

SEQ ID NO: 1512707 - DNA, 25 bp, Homo sapien
ggaaggcaggcgtcacaagcgacgg

SEQ ID NO: 1512708 - DNA, 25 bp, Homo sapien
tgggaaatctctctaacctctctgg

SEQ ID NO: 1512709 - DNA, 25 bp, Homo sapien
tcctctacttcacaaggcggtgtaa

SEQ ID NO: 1512710 - DNA, 25 bp, Homo sapien
tcctcagggaggactacgcttgggt

SEQ ID NO: 1512711 - DNA, 25 bp, Homo sapien
tgtgattcctaagctgtgtgtaccc

SEQ ID NO: 1512712 - DNA, 25 bp, Homo sapien
gggccaggccttggctcctctgagt

SEQ ID NO: 1512713 - DNA, 25 bp, Homo sapien
caggccttggctcctctgagtcccc

SEQ ID NO: 1512714 - DNA, 25 bp, Homo sapien
ctggccagagaagggagcagggctg

SEQ ID NO: 1512715 - DNA, 25 bp, Homo sapien
gccaggccttggctcctctgagtcc

SEQ ID NO: 1512716 - DNA, 25 bp, Homo sapien
gtgctcaaacacatccagacaggtg

SEQ ID NO: 1512717 - DNA, 25 bp, Homo sapien
tgtgctcaaacacatccagacaggt

SEQ ID NO: 1512718 - DNA, 25 bp, Homo sapien
tgctcaaacacatccagacaggtgc

SEQ ID NO: 1512719 - DNA, 25 bp, Homo sapien
tccttgccttgacccaaacagttcc

SEQ ID NO: 1512720 - DNA, 25 bp, Homo sapien
caaacagttccacttgtttggagga

SEQ ID NO: 1512721 - DNA, 25 bp, Homo sapien
gttcatcttagcctccttgccttga

SEQ ID NO: 1512722 - DNA, 25 bp, Homo sapien
tctgttcatcttagcctccttgcct

SEQ ID NO: 1512723 - DNA, 25 bp, Homo sapien
gagtccagtgtccaagctcagtact

SEQ ID NO: 1512724 - DNA, 25 bp, Homo sapien
gaaccttggataaaatgcatctccc

SEQ ID NO: 1512725 - DNA, 25 bp, Homo sapien
cctccatggctccttaggaaccttg

SEQ ID NO: 1512726 - DNA, 25 bp, Homo sapien
gtcaatcttccatagagtcccatag

SEQ ID NO: 1512727 - DNA, 25 bp, Homo sapien
atctgctcctgcctattattactca

SEQ ID NO: 1512728 - DNA, 25 bp, Homo sapien
gcctattattactcagtttctccca

SEQ ID NO: 1512729 - DNA, 25 bp, Homo sapien
gccagaatcccaggaccacattcca

SEQ ID NO: 1512730 - DNA, 25 bp, Homo sapien
gggtgtcctgcaagcgcacttcact

SEQ ID NO: 1512731 - DNA, 25 bp, Homo sapien
ctgcagggccagtccagagagagga

SEQ ID NO: 1512732 - DNA, 25 bp, Homo sapien
agggccagtccagagagaggaagca

SEQ ID NO: 1512733 - DNA, 25 bp, Homo sapien
ggccagtccagagagaggaagcagc

SEQ ID NO: 1512734 - DNA, 25 bp, Homo sapien
ccagtccagagagaggaagcagctc

SEQ ID NO: 1512735 - DNA, 25 bp, Homo sapien
tctgcaggccctgtggaagcgccgt

SEQ ID NO: 1512736 - DNA, 25 bp, Homo sapien
cactgagctccatgatcgcagtaat

SEQ ID NO: 1512737 - DNA, 25 bp, Homo sapien
gccgtccacagggagtgaggaagta

SEQ ID NO: 1512738 - DNA, 25 bp, Homo sapien
gttattccgtttcactacaagggca

SEQ ID NO: 1512739 - DNA, 25 bp, Homo sapien
atcaataaagtccaaagtcttggac

SEQ ID NO: 1512740 - DNA, 25 bp, Homo sapien
cgctcagcaggagcacatcaataaa

SEQ ID NO: 1512741 - DNA, 25 bp, Homo sapien
acatcaataaagtccaaagtcttgg

SEQ ID NO: 1512742 - DNA, 25 bp, Homo sapien
ctcgctcagcaggagcacatcaata

SEQ ID NO: 1512743 - DNA, 25 bp, Homo sapien
ttatcccagaaggatccctcccttg

SEQ ID NO: 1512744 - DNA, 25 bp, Homo sapien
attatcccagaaggatccctccctt

SEQ ID NO: 1512745 - DNA, 25 bp, Homo sapien
gtcactggagtctaaactgaaacag

SEQ ID NO: 1512746 - DNA, 25 bp, Homo sapien
caatcacactagttctggggtcact

SEQ ID NO: 1512747 - DNA, 25 bp, Homo sapien
tgtcagcttctgctcttatgtcctc

SEQ ID NO: 1512748 - DNA, 25 bp, Homo sapien
cttctgctcttatgtcctcatctga

SEQ ID NO: 1512749 - DNA, 25 bp, Homo sapien
atctgacaactctttaccattttta

SEQ ID NO: 1512750 - DNA, 25 bp, Homo sapien
ctccaaacatgaaagtgtcagcttc

SEQ ID NO: 1512751 - DNA, 25 bp, Homo sapien
tattctgggtgcctcgcgaggttgt

SEQ ID NO: 1512752 - DNA, 25 bp, Homo sapien
gccggcagcgttcttggtattctgg

SEQ ID NO: 1512753 - DNA, 25 bp, Homo sapien
cctgccggcagcgttcttggtattc

SEQ ID NO: 1512754 - DNA, 25 bp, Homo sapien
acctcctgccggcagcgttcttggt

SEQ ID NO: 1512755 - DNA, 25 bp, Homo sapien
caaaacaatattcagagggtgtctc

SEQ ID NO: 1512756 - DNA, 25 bp, Homo sapien
ctcttaaaagtattcattccggcgg

SEQ ID NO: 1512757 - DNA, 25 bp, Homo sapien
taaagttcatcaagggctaggtcaa

SEQ ID NO: 1512758 - DNA, 25 bp, Homo sapien
ttatccagagagcatacacggccct

SEQ ID NO: 1512759 - DNA, 25 bp, Homo sapien
ggtcaggaagggcaactgggccagg

SEQ ID NO: 1512760 - DNA, 25 bp, Homo sapien
tcaggaagggcaactgggccaggtc

SEQ ID NO: 1512761 - DNA, 25 bp, Homo sapien
ggaagggcaactgggccaggtcgtc

SEQ ID NO: 1512762 - DNA, 25 bp, Homo sapien
caggaagggcaactgggccaggtcg

SEQ ID NO: 1512763 - DNA, 25 bp, Homo sapien
gccgcgggcgaatgtagggattggg

SEQ ID NO: 1512764 - DNA, 25 bp, Homo sapien
tctgggagcaccacgtcctgggtgc

SEQ ID NO: 1512765 - DNA, 25 bp, Homo sapien
tcctgggtgcagccgcgggcgaatg

SEQ ID NO: 1512766 - DNA, 25 bp, Homo sapien
gctgtctgggagcaccacgtcctgg

SEQ ID NO: 1512767 - DNA, 25 bp, Homo sapien
cagtaagaacaaggtccgagctgcc

SEQ ID NO: 1512768 - DNA, 25 bp, Homo sapien
acagtaagaacaaggtccgagctgc

SEQ ID NO: 1512769 - DNA, 25 bp, Homo sapien
taagaacaaggtccgagctgcctgc

SEQ ID NO: 1512770 - DNA, 25 bp, Homo sapien
aacaaggtccgagctgcctgctggg

SEQ ID NO: 1512771 - DNA, 25 bp, Homo sapien
aagatgttgatgttacagacattcc

SEQ ID NO: 1512772 - DNA, 25 bp, Homo sapien
gatggattgcgaagatgttgatgtt

SEQ ID NO: 1512773 - DNA, 25 bp, Homo sapien
tgcgaagatgttgatgttacagaca

SEQ ID NO: 1512774 - DNA, 25 bp, Homo sapien
ttgtgatggattgcgaagatgttga

SEQ ID NO: 1512775 - DNA, 25 bp, Homo sapien
cagccacccccacataaaacagatg

SEQ ID NO: 1512776 - DNA, 25 bp, Homo sapien
gtggagtagagagggagtatctggt

SEQ ID NO: 1512777 - DNA, 25 bp, Homo sapien
agtagagagggagtatctggttttc

SEQ ID NO: 1512778 - DNA, 25 bp, Homo sapien
aaaacagatgtgggtggagtagaga

SEQ ID NO: 1512779 - DNA, 25 bp, Homo sapien
aaaagccataggtgacctcttctgg

SEQ ID NO: 1512780 - DNA, 25 bp, Homo sapien
cataggtgacctcttctgggcgttt

SEQ ID NO: 1512781 - DNA, 25 bp, Homo sapien
gtgacctcttctgggcgttttctgg

SEQ ID NO: 1512782 - DNA, 25 bp, Homo sapien
cttctgggcgttttctgggtcgaag

SEQ ID NO: 1512783 - DNA, 25 bp, Homo sapien
cgtcctgcgtggctccctgtggtcg

SEQ ID NO: 1512784 - DNA, 25 bp, Homo sapien
gcaaaacaatctccggcgtcctgcg

SEQ ID NO: 1512785 - DNA, 25 bp, Homo sapien
caaagtccgtcctccgcacgcaaaa

SEQ ID NO: 1512786 - DNA, 25 bp, Homo sapien
ctgtggtcgggcaggatgcggaagc

SEQ ID NO: 1512787 - DNA, 25 bp, Homo sapien
tgcaaaggtaggtgatgcaaaggta

SEQ ID NO: 1512788 - DNA, 25 bp, Homo sapien
cacagatttattaccggaaatctga

SEQ ID NO: 1512789 - DNA, 25 bp, Homo sapien
ttggtgcaaaggtaggtgatgcaaa

SEQ ID NO: 1512790 - DNA, 25 bp, Homo sapien
tctgaaaaggtagttggtgcaaagg

SEQ ID NO: 1512791 - DNA, 25 bp, Homo sapien
tacttagactctgggagatcccacc

SEQ ID NO: 1512792 - DNA, 25 bp, Homo sapien
ctgggcgacgagagacaccatgtct

SEQ ID NO: 1512793 - DNA, 25 bp, Homo sapien
agatgctgaatcaacacaggtgccc

SEQ ID NO: 1512794 - DNA, 25 bp, Homo sapien
tatcgcagctctaatcacaatagcg

SEQ ID NO: 1512795 - DNA, 25 bp, Homo sapien
ggttgccatgcatcccaaagcttga

SEQ ID NO: 1512796 - DNA, 25 bp, Homo sapien
taatctcacttacgaaggcagagcc

SEQ ID NO: 1512797 - DNA, 25 bp, Homo sapien
gcaggttcagtgtcaactaagggcc

SEQ ID NO: 1512798 - DNA, 25 bp, Homo sapien
catagatggcaccttgcacgtgtct

SEQ ID NO: 1512799 - DNA, 25 bp, Homo sapien
cgtgcctctctggaaaaattaattt

SEQ ID NO: 1512800 - DNA, 25 bp, Homo sapien
tcgtgcctctctggaaaaattaatt

SEQ ID NO: 1512801 - DNA, 25 bp, Homo sapien
tctaggtccagaacatcttcaccac

SEQ ID NO: 1512802 - DNA, 25 bp, Homo sapien
cagcatatcgtgtgagtagcccaaa

SEQ ID NO: 1512803 - DNA, 25 bp, Homo sapien
caggaaatcctgaccccattagcac

SEQ ID NO: 1512804 - DNA, 25 bp, Homo sapien
gcacagtgttgtggaaacttcacca

SEQ ID NO: 1512805 - DNA, 25 bp, Homo sapien
aattctcaagcctcagcctcgcaag

SEQ ID NO: 1512806 - DNA, 25 bp, Homo sapien
acaggctcatgccaccacgcccagc

SEQ ID NO: 1512807 - DNA, 25 bp, Homo sapien
tacaggctcatgccaccacgcccag

SEQ ID NO: 1512808 - DNA, 25 bp, Homo sapien
caattctcaagcctcagcctcgcaa

SEQ ID NO: 1512809 - DNA, 25 bp, Homo sapien
tgaggggatggataatctattctcc

SEQ ID NO: 1512810 - DNA, 25 bp, Homo sapien
taattagacctataataagacctac

SEQ ID NO: 1512811 - DNA, 25 bp, Homo sapien
gaattaattagacctataataagac

SEQ ID NO: 1512812 - DNA, 25 bp, Homo sapien
gaaagaattaattagacctataata

SEQ ID NO: 1512813 - DNA, 25 bp, Homo sapien
tcatctgctcctgataaagagtgcc

SEQ ID NO: 1512814 - DNA, 25 bp, Homo sapien
tgtgtgacacctgctcttaaagagt

SEQ ID NO: 1512815 - DNA, 25 bp, Homo sapien
cactgctgcctgctctacataaaga

SEQ ID NO: 1512816 - DNA, 25 bp, Homo sapien
gatgccacctgctctatataaagag

SEQ ID NO: 1512817 - DNA, 25 bp, Homo sapien
ttgcctgcgctacataaaaagtgcc

SEQ ID NO: 1512818 - DNA, 25 bp, Homo sapien
ctcttgcctgcgctacataaaaagt

SEQ ID NO: 1512819 - DNA, 25 bp, Homo sapien
cattgaatgccacttgctctagata

SEQ ID NO: 1512820 - DNA, 25 bp, Homo sapien
agagagagagcccattgaatgccac

SEQ ID NO: 1512821 - DNA, 25 bp, Homo sapien
ccacacaacctcctctccccttctt

SEQ ID NO: 1512822 - DNA, 25 bp, Homo sapien
ttctgtcaggagcaccttgtcccac

SEQ ID NO: 1512823 - DNA, 25 bp, Homo sapien
gtcaggagcaccttgtcccacacaa

SEQ ID NO: 1512824 - DNA, 25 bp, Homo sapien
tctgtcaggagcaccttgtcccaca

SEQ ID NO: 1512825 - DNA, 25 bp, Homo sapien
ctgcagggcagatggggtggtgagt

SEQ ID NO: 1512826 - DNA, 25 bp, Homo sapien
cagggcagatggggtggtgagtgag

SEQ ID NO: 1512827 - DNA, 25 bp, Homo sapien
ggcagatggggtggtgagtgaggtc

SEQ ID NO: 1512828 - DNA, 25 bp, Homo sapien
tgcagggcagatggggtggtgagtg

SEQ ID NO: 1512829 - DNA, 25 bp, Homo sapien
ccagcgaggacaggctcagctgtgg

SEQ ID NO: 1512830 - DNA, 25 bp, Homo sapien
gcgaggacaggctcagctgtggcat

SEQ ID NO: 1512831 - DNA, 25 bp, Homo sapien
tggccaaaggcccagcgaggacagg

SEQ ID NO: 1512832 - DNA, 25 bp, Homo sapien
gccaaaggcccagcgaggacaggct

SEQ ID NO: 1512833 - DNA, 25 bp, Homo sapien
tcatagaaggtataggtccaggcca

SEQ ID NO: 1512834 - DNA, 25 bp, Homo sapien
gcccaggtgacccaagaaccaattc

SEQ ID NO: 1512835 - DNA, 25 bp, Homo sapien
gttgcgggaaacaccggaggcggca

SEQ ID NO: 1512836 - DNA, 25 bp, Homo sapien
caccggaggcggcagcagttgtcat

SEQ ID NO: 1512837 - DNA, 25 bp, Homo sapien
ccctcatgccctgctccgtgggggt

SEQ ID NO: 1512838 - DNA, 25 bp, Homo sapien
tgagtcaggaccctcatgccctgct

SEQ ID NO: 1512839 - DNA, 25 bp, Homo sapien
ctgagtcaggaccctcatgccctgc

SEQ ID NO: 1512840 - DNA, 25 bp, Homo sapien
tcatgccctgctccgtgggggtgac

SEQ ID NO: 1512841 - DNA, 25 bp, Homo sapien
tgttggggtggcaaaaacggatgac

SEQ ID NO: 1512842 - DNA, 25 bp, Homo sapien
ctgaggcgttgatgacagaccggat

SEQ ID NO: 1512843 - DNA, 25 bp, Homo sapien
gcaaaaacggatgacggggaagatg

SEQ ID NO: 1512844 - DNA, 25 bp, Homo sapien
atggggcccatccagaccttaaagc

SEQ ID NO: 1512845 - DNA, 25 bp, Homo sapien
atcctccatgcaggactctccagtc

SEQ ID NO: 1512846 - DNA, 25 bp, Homo sapien
caggctttgtgtgtataggagacct

SEQ ID NO: 1512847 - DNA, 25 bp, Homo sapien
tcaccgaaggtgcatgccaggcttt

SEQ ID NO: 1512848 - DNA, 25 bp, Homo sapien
tgtataggagaccttcctccgagct

SEQ ID NO: 1512849 - DNA, 25 bp, Homo sapien
cggacgattgcgtgccagggcccca

SEQ ID NO: 1512850 - DNA, 25 bp, Homo sapien
gaagaccttgtcctttggtacaatg

SEQ ID NO: 1512851 - DNA, 25 bp, Homo sapien
accttgtcctttggtacaatggcag

SEQ ID NO: 1512852 - DNA, 25 bp, Homo sapien
ggaagctgtagaagaccttgtcctt

SEQ ID NO: 1512853 - DNA, 25 bp, Homo sapien
tgtagaagaccttgtcctttggtac

SEQ ID NO: 1512854 - DNA, 25 bp, Homo sapien
tgttcccaaccctgttcacctacag

SEQ ID NO: 1512855 - DNA, 25 bp, Homo sapien
aaccctgttcacctacagatactca

SEQ ID NO: 1512856 - DNA, 25 bp, Homo sapien
ggccatgggcaagggcatctccctc

SEQ ID NO: 1512857 - DNA, 25 bp, Homo sapien
gcagccaagggccatgggcaagggc

SEQ ID NO: 1512858 - DNA, 25 bp, Homo sapien
gcgtcagcatccgacggtggcggct

SEQ ID NO: 1512859 - DNA, 25 bp, Homo sapien
gtcagcatccgacggtggcggctcc

SEQ ID NO: 1512860 - DNA, 25 bp, Homo sapien
cgtcagcatccgacggtggcggctc

SEQ ID NO: 1512861 - DNA, 25 bp, Homo sapien
ggcgtcagcatccgacggtggcggc

SEQ ID NO: 1512862 - DNA, 25 bp, Homo sapien
agctgggaccttggcttcaaataac

SEQ ID NO: 1512863 - DNA, 25 bp, Homo sapien
gctgcagctgggaccttggcttcaa

SEQ ID NO: 1512864 - DNA, 25 bp, Homo sapien
gcagctgggaccttggcttcaaata

SEQ ID NO: 1512865 - DNA, 25 bp, Homo sapien
ggctgcagctgggaccttggcttca

SEQ ID NO: 1512866 - DNA, 25 bp, Homo sapien
tactatgcgccagagacatgactcc

SEQ ID NO: 1512867 - DNA, 25 bp, Homo sapien
tcttgagtttacagggttcgggtga

SEQ ID NO: 1512868 - DNA, 25 bp, Homo sapien
aattccagactagatctgtctgtgg

SEQ ID NO: 1512869 - DNA, 25 bp, Homo sapien
cgggtgacgcgaacatagaaacaga

SEQ ID NO: 1512870 - DNA, 25 bp, Homo sapien
aaggggacagagctggggcaggtcc

SEQ ID NO: 1512871 - DNA, 25 bp, Homo sapien
ctagccagagaaggggacagagctg

SEQ ID NO: 1512872 - DNA, 25 bp, Homo sapien
gaaggggacagagctggggcaggtc

SEQ ID NO: 1512873 - DNA, 25 bp, Homo sapien
gggacagagctggggcaggtccctt

SEQ ID NO: 1512874 - DNA, 25 bp, Homo sapien
tccagacgggcactaccctctgagg

SEQ ID NO: 1512875 - DNA, 25 bp, Homo sapien
agacgggcactaccctctgaggcca

SEQ ID NO: 1512876 - DNA, 25 bp, Homo sapien
cgggcactaccctctgaggccagga

SEQ ID NO: 1512877 - DNA, 25 bp, Homo sapien
gtccagacgggcactaccctctgag

SEQ ID NO: 1512878 - DNA, 25 bp, Homo sapien
tggcaatggctgtcaaagctgaaga

SEQ ID NO: 1512879 - DNA, 25 bp, Homo sapien
tcctggcaatggctgtcaaagctga

SEQ ID NO: 1512880 - DNA, 25 bp, Homo sapien
acatttctgcagactgtccaaggtc

SEQ ID NO: 1512881 - DNA, 25 bp, Homo sapien
ccaaggtcatgaggctgatgtgctc

SEQ ID NO: 1512882 - DNA, 25 bp, Homo sapien
ggcatctgtgaagtcgtgcaccagg

SEQ ID NO: 1512883 - DNA, 25 bp, Homo sapien
ggtgtcagcttctgctcttatgtcc

SEQ ID NO: 1512884 - DNA, 25 bp, Homo sapien
tgctcttatgtcctcatcggacaac

SEQ ID NO: 1512885 - DNA, 25 bp, Homo sapien
cctcatcggacaacttcttcccatc

SEQ ID NO: 1512886 - DNA, 25 bp, Homo sapien
tcatcggacaacttcttcccatctt

SEQ ID NO: 1512887 - DNA, 25 bp, Homo sapien
tgttcctggaatggagatatccaag

SEQ ID NO: 1512888 - DNA, 25 bp, Homo sapien
gaatggagatatccaagtccccact

SEQ ID NO: 1512889 - DNA, 25 bp, Homo sapien
cctgttcctggaatggagatatcca

SEQ ID NO: 1512890 - DNA, 25 bp, Homo sapien
ctggaatggagatatccaagtcccc

SEQ ID NO: 1512891 - DNA, 25 bp, Homo sapien
ggctgcttcagcacccgagggtgta

SEQ ID NO: 1512892 - DNA, 25 bp, Homo sapien
tgcttcagcacccgagggtgtacag

SEQ ID NO: 1512893 - DNA, 25 bp, Homo sapien
tcagcacccgagggtgtacagcaac

SEQ ID NO: 1512894 - DNA, 25 bp, Homo sapien
cttcagcacccgagggtgtacagca

SEQ ID NO: 1512895 - DNA, 25 bp, Homo sapien
tttgcaaggtggtacaggacccagg

SEQ ID NO: 1512896 - DNA, 25 bp, Homo sapien
gctttgcaaggtggtacaggaccca

SEQ ID NO: 1512897 - DNA, 25 bp, Homo sapien
ggtgctttgcaaggtggtacaggac

SEQ ID NO: 1512898 - DNA, 25 bp, Homo sapien
tgctttgcaaggtggtacaggaccc

SEQ ID NO: 1512899 - DNA, 25 bp, Homo sapien
tatgagagtatttgctgaacgagga

SEQ ID NO: 1512900 - DNA, 25 bp, Homo sapien
gacaagaatggatgaattttacccc

SEQ ID NO: 1512901 - DNA, 25 bp, Homo sapien
gtctcccttataaatccctggactg

SEQ ID NO: 1512902 - DNA, 25 bp, Homo sapien
gagcacctggaaaatagatccctgg

SEQ ID NO: 1512903 - DNA, 25 bp, Homo sapien
gtcaggaagggcagctgggccaggt

SEQ ID NO: 1512904 - DNA, 25 bp, Homo sapien
caggaagggcagctgggccaggtcg

SEQ ID NO: 1512905 - DNA, 25 bp, Homo sapien
ggtcaggaagggcagctgggccagg

SEQ ID NO: 1512906 - DNA, 25 bp, Homo sapien
gaagggcagctgggccaggtcgtcc

SEQ ID NO: 1512907 - DNA, 25 bp, Homo sapien
gacccggccgtctgggagcacaatg

SEQ ID NO: 1512908 - DNA, 25 bp, Homo sapien
tgacccggccgtctgggagcacaat

SEQ ID NO: 1512909 - DNA, 25 bp, Homo sapien
agagaagggggcagtcaggacaatg

SEQ ID NO: 1512910 - DNA, 25 bp, Homo sapien
ctgaggggcccctcttcctacccag

SEQ ID NO: 1512911 - DNA, 25 bp, Homo sapien
gaagggggcagtcaggacaatgctc

SEQ ID NO: 1512912 - DNA, 25 bp, Homo sapien
aagggggcagtcaggacaatgctcc

SEQ ID NO: 1512913 - DNA, 25 bp, Homo sapien
gctgggttgtgatgggttccaaaaa

SEQ ID NO: 1512914 - DNA, 25 bp, Homo sapien
tcagggtccggccacacggctgggt

SEQ ID NO: 1512915 - DNA, 25 bp, Homo sapien
tgggttccaaaaacactgatgaggc

SEQ ID NO: 1512916 - DNA, 25 bp, Homo sapien
cacacggctgggttgtgatgggttc

SEQ ID NO: 1512917 - DNA, 25 bp, Homo sapien
gatgttctttgggtcaaagcgaaag

SEQ ID NO: 1512918 - DNA, 25 bp, Homo sapien
gacctctccttgatgttctttgggt

SEQ ID NO: 1512919 - DNA, 25 bp, Homo sapien
ctccttgatgttctttgggtcaaag

SEQ ID NO: 1512920 - DNA, 25 bp, Homo sapien
cttgatgttctttgggtcaaagcga

SEQ ID NO: 1512921 - DNA, 25 bp, Homo sapien
ccctctgcgcgcaggaccagctccg

SEQ ID NO: 1512922 - DNA, 25 bp, Homo sapien
gtatatatgagctgtaatagcatgt

SEQ ID NO: 1512923 - DNA, 25 bp, Homo sapien
ttcaaccattctaaagtgtccaatt

SEQ ID NO: 1512924 - DNA, 25 bp, Homo sapien
aaaaagtatatatgagctgtaatag

SEQ ID NO: 1512925 - DNA, 25 bp, Homo sapien
taatagcatgtttaggtagaattca

SEQ ID NO: 1512926 - DNA, 25 bp, Homo sapien
gatacctcaagccattaaagtgcca

SEQ ID NO: 1512927 - DNA, 25 bp, Homo sapien
taggcacccctgtcaaagtcttgtc

SEQ ID NO: 1512928 - DNA, 25 bp, Homo sapien
gcaagagagttaacgtccagtccat

SEQ ID NO: 1512929 - DNA, 25 bp, Homo sapien
gcctagggcagagacttactttgaa

SEQ ID NO: 1512930 - DNA, 25 bp, Homo sapien
gggagcctaagttctcattgctgtt

SEQ ID NO: 1512931 - DNA, 25 bp, Homo sapien
cattgctgttagaatgagatggctg

SEQ ID NO: 1512932 - DNA, 25 bp, Homo sapien
acatgataacaaactatcaaactgg

SEQ ID NO: 1512933 - DNA, 25 bp, Homo sapien
ctaagtgtacgtataacatgataac

SEQ ID NO: 1512934 - DNA, 25 bp, Homo sapien
tataggagtgtcaaataggcacagg

SEQ ID NO: 1512935 - DNA, 25 bp, Homo sapien
cacaggaaggcacgagtggttcaac

SEQ ID NO: 1512936 - DNA, 25 bp, Homo sapien
taaaatctcagggatatgccacagc

SEQ ID NO: 1512937 - DNA, 25 bp, Homo sapien
tggttcaacacccttagtcactgga

SEQ ID NO: 1512938 - DNA, 25 bp, Homo sapien
tataatgcaacagtgactagggcag

SEQ ID NO: 1512939 - DNA, 25 bp, Homo sapien
caagactgtcatggtgaaaactaca

SEQ ID NO: 1512940 - DNA, 25 bp, Homo sapien
ttcagagactaggaagaagacttgc

SEQ ID NO: 1512941 - DNA, 25 bp, Homo sapien
catgacctccagttaagcaaagagt

SEQ ID NO: 1512942 - DNA, 25 bp, Homo sapien
atgatgttcacactctcatcgaaaa

SEQ ID NO: 1512943 - DNA, 25 bp, Homo sapien
tgcatgatgttcacactctcatcga

SEQ ID NO: 1512944 - DNA, 25 bp, Homo sapien
catcgaaaatcttcatatagggctt

SEQ ID NO: 1512945 - DNA, 25 bp, Homo sapien
gatgttcacactctcatcgaaaatc

SEQ ID NO: 1512946 - DNA, 25 bp, Homo sapien
taggaccttagcttcaaataactca

SEQ ID NO: 1512947 - DNA, 25 bp, Homo sapien
aggaccttagcttcaaataactcac

SEQ ID NO: 1512948 - DNA, 25 bp, Homo sapien
ctaggaccttagcttcaaataactc

SEQ ID NO: 1512949 - DNA, 25 bp, Homo sapien
gcattgtgctccaaggtcaagaggt

SEQ ID NO: 1512950 - DNA, 25 bp, Homo sapien
catgtcgagacaggcattgtgctcc

SEQ ID NO: 1512951 - DNA, 25 bp, Homo sapien
tgctcaaacatgtcgagacaggcat

SEQ ID NO: 1512952 - DNA, 25 bp, Homo sapien
gagacaggcattgtgctccaaggtc

SEQ ID NO: 1512953 - DNA, 25 bp, Homo sapien
tttgctaatcaggagcacatcaatg

SEQ ID NO: 1512954 - DNA, 25 bp, Homo sapien
gcagcgtctgcaaagtcatgcccca

SEQ ID NO: 1512955 - DNA, 25 bp, Homo sapien
gaagtgccgcccatcatgggtgaga

SEQ ID NO: 1512956 - DNA, 25 bp, Homo sapien
tgtggaagtgccgcccatcatgggt

SEQ ID NO: 1512957 - DNA, 25 bp, Homo sapien
ctgcttcagcacaacagggtggaca

SEQ ID NO: 1512958 - DNA, 25 bp, Homo sapien
tcagcacaacagggtggacagcacc

SEQ ID NO: 1512959 - DNA, 25 bp, Homo sapien
gcacaacagggtggacagcacccat

SEQ ID NO: 1512960 - DNA, 25 bp, Homo sapien
tgcttcagcacaacagggtggacag

SEQ ID NO: 1512961 - DNA, 25 bp, Homo sapien
ggcagccaggcagtcttgggtctct

SEQ ID NO: 1512962 - DNA, 25 bp, Homo sapien
gaggggcagccaggcagtcttgggt

SEQ ID NO: 1512963 - DNA, 25 bp, Homo sapien
ctgaggggcagccaggcagtcttgg

SEQ ID NO: 1512964 - DNA, 25 bp, Homo sapien
cagccaggcagtcttgggtctctgg

SEQ ID NO: 1512965 - DNA, 25 bp, Homo sapien
ggcattctgggtgcattgcaaggtt

SEQ ID NO: 1512966 - DNA, 25 bp, Homo sapien
gaccttcagaaactcttgcctttcc

SEQ ID NO: 1512967 - DNA, 25 bp, Homo sapien
gcattgcaaggttgtactggaccca

SEQ ID NO: 1512968 - DNA, 25 bp, Homo sapien
ccagaccttcagaaactcttgcctt

SEQ ID NO: 1512969 - DNA, 25 bp, Homo sapien
cttaggctcagggagcaaagccagg

SEQ ID NO: 1512970 - DNA, 25 bp, Homo sapien
aaagccaggggttgatgaacaggca

SEQ ID NO: 1512971 - DNA, 25 bp, Homo sapien
cttcttaggctcagggagcaaagcc

SEQ ID NO: 1512972 - DNA, 25 bp, Homo sapien
caggggttgatgaacaggcagggtc

SEQ ID NO: 1512973 - DNA, 25 bp, Homo sapien
cttgtcccacacaacctcttctcct

SEQ ID NO: 1512974 - DNA, 25 bp, Homo sapien
gtcccacacaacctcttctcctctt

SEQ ID NO: 1512975 - DNA, 25 bp, Homo sapien
cttctgtcgggagcagcttgtccca

SEQ ID NO: 1512976 - DNA, 25 bp, Homo sapien
ttctgtcgggagcagcttgtcccac

SEQ ID NO: 1512977 - DNA, 25 bp, Homo sapien
gggagtttgctaggagtccagttac

SEQ ID NO: 1512978 - DNA, 25 bp, Homo sapien
cagccttaggcagtcccctcttcat

SEQ ID NO: 1512979 - DNA, 25 bp, Homo sapien
ccttgggagtttgctaggagtccag

SEQ ID NO: 1512980 - DNA, 25 bp, Homo sapien
agtttgctaggagtccagttaccag

SEQ ID NO: 1512981 - DNA, 25 bp, Homo sapien
ccaagccaggatgcgggcgagtagc

SEQ ID NO: 1512982 - DNA, 25 bp, Homo sapien
acgttgccaccggtctgaggcccag

SEQ ID NO: 1512983 - DNA, 25 bp, Homo sapien
gcagcaggagtagccatggggacgt

SEQ ID NO: 1512984 - DNA, 25 bp, Homo sapien
ggtccaagccaggatgcgggcgagt

SEQ ID NO: 1512985 - DNA, 25 bp, Homo sapien
gctcctctggaagtccatccaccct

SEQ ID NO: 1512986 - DNA, 25 bp, Homo sapien
tcttcaagccctcctctgtaggagt

SEQ ID NO: 1512987 - DNA, 25 bp, Homo sapien
cagggtggcataaaacgatgaaggg

SEQ ID NO: 1512988 - DNA, 25 bp, Homo sapien
ctgacatgaacgaggaccatcaggg

SEQ ID NO: 1512989 - DNA, 25 bp, Homo sapien
gacatgaacgaggaccatcaggggc

SEQ ID NO: 1512990 - DNA, 25 bp, Homo sapien
tgacatgaacgaggaccatcagggg

SEQ ID NO: 1512991 - DNA, 25 bp, Homo sapien
gccagggcttcaggaacctgatgaa

SEQ ID NO: 1512992 - DNA, 25 bp, Homo sapien
tcaggaacctgatgaagagattatc

SEQ ID NO: 1512993 - DNA, 25 bp, Homo sapien
ccagccagggcttcaggaacctgat

SEQ ID NO: 1512994 - DNA, 25 bp, Homo sapien
agggcttcaggaacctgatgaagag

SEQ ID NO: 1512995 - DNA, 25 bp, Homo sapien
gcagccaaggacagtgggcaagagc

SEQ ID NO: 1512996 - DNA, 25 bp, Homo sapien
tgtccccaacccctttcacctgcag

SEQ ID NO: 1512997 - DNA, 25 bp, Homo sapien
aacccctttcacctgcaggtactca

SEQ ID NO: 1512998 - DNA, 25 bp, Homo sapien
gggcaagagcagcacttcccctacc

SEQ ID NO: 1512999 - DNA, 25 bp, Homo sapien
cttgttgaagatcgttatataggac

SEQ ID NO: 1513000 - DNA, 25 bp, Homo sapien
gatcgttatataggacttcaggatg

SEQ ID NO: 1513001 - DNA, 25 bp, Homo sapien
gcactcttgttgaagatcgttatat

SEQ ID NO: 1513002 - DNA, 25 bp, Homo sapien
atgtttgcactcttgttgaagatcg

SEQ ID NO: 1513003 - DNA, 25 bp, Homo sapien
ctttcaagtagggattatcatcccc

SEQ ID NO: 1513004 - DNA, 25 bp, Homo sapien
agaggaagagcaatggcccagtgcc

SEQ ID NO: 1513005 - DNA, 25 bp, Homo sapien
gggacccagacttcaagggactcac

SEQ ID NO: 1513006 - DNA, 25 bp, Homo sapien
catctgggacccagacttcaaggga

SEQ ID NO: 1513007 - DNA, 25 bp, Homo sapien
gagataaggcaatgactcctcctgg

SEQ ID NO: 1513008 - DNA, 25 bp, Homo sapien
tgcgtatgccaccaatgcaagactg

SEQ ID NO: 1513009 - DNA, 25 bp, Homo sapien
gaggcacttcttcatcagccctgag

SEQ ID NO: 1513010 - DNA, 25 bp, Homo sapien
catgagcaggctaatgtagaggccc

SEQ ID NO: 1513011 - DNA, 25 bp, Homo sapien
aaacatgtccagacaactgctgccc

SEQ ID NO: 1513012 - DNA, 25 bp, Homo sapien
tcaaacatgtccagacaactgctgc

SEQ ID NO: 1513013 - DNA, 25 bp, Homo sapien
atgtgctcaaacatgtccagacaac

SEQ ID NO: 1513014 - DNA, 25 bp, Homo sapien
aaagctgaagatgcatttctgtaga

SEQ ID NO: 1513015 - DNA, 25 bp, Homo sapien
gatgacagcgtctgtgaagtcatgc

SEQ ID NO: 1513016 - DNA, 25 bp, Homo sapien
cggatgacagcgtctgtgaagtcat

SEQ ID NO: 1513017 - DNA, 25 bp, Homo sapien
cccggatgacagcgtctgtgaagtc

SEQ ID NO: 1513018 - DNA, 25 bp, Homo sapien
atgacagcgtctgtgaagtcatgca

SEQ ID NO: 1513019 - DNA, 25 bp, Homo sapien
gaaggagcatatgagctagctgtcc

SEQ ID NO: 1513020 - DNA, 25 bp, Homo sapien
tgtgggctgcatgcaataaagtcat

SEQ ID NO: 1513021 - DNA, 25 bp, Homo sapien
tcagaattagcagtgccctgtgggc

SEQ ID NO: 1513022 - DNA, 25 bp, Homo sapien
ttatactatctctgagactccggag

SEQ ID NO: 1513023 - DNA, 25 bp, Homo sapien
cttatatcctcatctgacaatgcct

SEQ ID NO: 1513024 - DNA, 25 bp, Homo sapien
atatcctcatctgacaatgccttcc

SEQ ID NO: 1513025 - DNA, 25 bp, Homo sapien
gctcttatatcctcatctgacaatg

SEQ ID NO: 1513026 - DNA, 25 bp, Homo sapien
gcctctgctcttatatcctcatctg

SEQ ID NO: 1513027 - DNA, 25 bp, Homo sapien
gcaccggagggtggacagcgcccag

SEQ ID NO: 1513028 - DNA, 25 bp, Homo sapien
gtaagcttggcttcagcaccggagg

SEQ ID NO: 1513029 - DNA, 25 bp, Homo sapien
aggagcagccaggtaagcttggctt

SEQ ID NO: 1513030 - DNA, 25 bp, Homo sapien
tggacagcgcccagatattgaggcc

SEQ ID NO: 1513031 - DNA, 25 bp, Homo sapien
tttaggatcgcggtccttcagaagc

SEQ ID NO: 1513032 - DNA, 25 bp, Homo sapien
ctgtcggcagcgctcctggtattct

SEQ ID NO: 1513033 - DNA, 25 bp, Homo sapien
ctcgcaaggttgtacaggacccagg

SEQ ID NO: 1513034 - DNA, 25 bp, Homo sapien
ggtattctgggtgcctcgcaaggtt

SEQ ID NO: 1513035 - DNA, 25 bp, Homo sapien
actctgtatgtatttgtgtcctcac

SEQ ID NO: 1513036 - DNA, 25 bp, Homo sapien
tagcatttgggatataagtggtttg

SEQ ID NO: 1513037 - DNA, 25 bp, Homo sapien
tcccaaagatatattgttaatgtgc

SEQ ID NO: 1513038 - DNA, 25 bp, Homo sapien
aaccttgctctccgagtctccaaag

SEQ ID NO: 1513039 - DNA, 25 bp, Homo sapien
actcggccatctgggagaacaatgt

SEQ ID NO: 1513040 - DNA, 25 bp, Homo sapien
agctgggggatgtaacctcaggctc

SEQ ID NO: 1513041 - DNA, 25 bp, Homo sapien
gactcggccatctgggagaacaatg

SEQ ID NO: 1513042 - DNA, 25 bp, Homo sapien
tcggccatctgggagaacaatgtcc

SEQ ID NO: 1513043 - DNA, 25 bp, Homo sapien
ggacccctataatatcgatgaggca

SEQ ID NO: 1513044 - DNA, 25 bp, Homo sapien
tgtgatggacccctataatatcgat

SEQ ID NO: 1513045 - DNA, 25 bp, Homo sapien
ataatatcgatgaggcaggtaatgc

SEQ ID NO: 1513046 - DNA, 25 bp, Homo sapien
cctataatatcgatgaggcaggtaa

SEQ ID NO: 1513047 - DNA, 25 bp, Homo sapien
ggtggtggtggtgaatggggaaggc

SEQ ID NO: 1513048 - DNA, 25 bp, Homo sapien
acaaaagtagaggatgggggtggtg

SEQ ID NO: 1513049 - DNA, 25 bp, Homo sapien
tggtggtggtgaatggggaaggcag

SEQ ID NO: 1513050 - DNA, 25 bp, Homo sapien
gtggtggtgaatggggaaggcagca

SEQ ID NO: 1513051 - DNA, 25 bp, Homo sapien
cctccactaggaaccttggaattca

SEQ ID NO: 1513052 - DNA, 25 bp, Homo sapien
gccagtgggatttcctatgtccagc

SEQ ID NO: 1513053 - DNA, 25 bp, Homo sapien
agacaaagaaggtttgccagtggga

SEQ ID NO: 1513054 - DNA, 25 bp, Homo sapien
cagccttggagagacacttgtgtgt

SEQ ID NO: 1513055 - DNA, 25 bp, Homo sapien
gccctgcggagaaaggaataaaagc

SEQ ID NO: 1513056 - DNA, 25 bp, Homo sapien
gaataaaagccagaggtgacctccc

SEQ ID NO: 1513057 - DNA, 25 bp, Homo sapien
aaaagccagaggtgacctccccttg

SEQ ID NO: 1513058 - DNA, 25 bp, Homo sapien
ccttgctgttctctgggtcaaagcg

SEQ ID NO: 1513059 - DNA, 25 bp, Homo sapien
gccctcggcgcgcatgatcaattcc

SEQ ID NO: 1513060 - DNA, 25 bp, Homo sapien
tcggcgcgcatgatcaattccagct

SEQ ID NO: 1513061 - DNA, 25 bp, Homo sapien
ggcgcgcatgatcaattccagcttc

SEQ ID NO: 1513062 - DNA, 25 bp, Homo sapien
cctcggcgcgcatgatcaattccag

SEQ ID NO: 1513063 - DNA, 25 bp, Homo sapien
gcaaaaaaacaggtggatgggtcag

SEQ ID NO: 1513064 - DNA, 25 bp, Homo sapien
caaaaaaacaggtggatgggtcaga

SEQ ID NO: 1513065 - DNA, 25 bp, Homo sapien
ctgcaaaaaaacaggtggatgggtc

SEQ ID NO: 1513066 - DNA, 25 bp, Homo sapien
aaaaacaggtggatgggtcagaaag

SEQ ID NO: 1513067 - DNA, 25 bp, Homo sapien
acagcaccgttttattcatgacaat

SEQ ID NO: 1513068 - DNA, 25 bp, Homo sapien
gacagcaccgttttattcatgacaa

SEQ ID NO: 1513069 - DNA, 25 bp, Homo sapien
gtccacaggataaagtccatacttg

SEQ ID NO: 1513070 - DNA, 25 bp, Homo sapien
ggctccacattgtccacaggataaa

SEQ ID NO: 1513071 - DNA, 25 bp, Homo sapien
aagtccatacttgggctctgagaga

SEQ ID NO: 1513072 - DNA, 25 bp, Homo sapien
aaaaacctcccatggctccacattg

SEQ ID NO: 1513073 - DNA, 25 bp, Homo sapien
caaggtgactgagtgtaacaaggga

SEQ ID NO: 1513074 - DNA, 25 bp, Homo sapien
tataggcaactgatctttcacaaga

SEQ ID NO: 1513075 - DNA, 25 bp, Homo sapien
gagttccaaggaagtacaatggccc

SEQ ID NO: 1513076 - DNA, 25 bp, Homo sapien
tagacccacgttaagtataggcaac

SEQ ID NO: 1513077 - DNA, 25 bp, Homo sapien
tattatcaaataaaacggtggagaa

SEQ ID NO: 1513078 - DNA, 25 bp, Homo sapien
tccagatagcttattatcaaataaa

SEQ ID NO: 1513079 - DNA, 25 bp, Homo sapien
cgaaatgaaactgcaccttcaaagc

SEQ ID NO: 1513080 - DNA, 25 bp, Homo sapien
tagatattctctattcctcgaaatg

SEQ ID NO: 1513081 - DNA, 25 bp, Homo sapien
atagagaggagggacacagctccct

SEQ ID NO: 1513082 - DNA, 25 bp, Homo sapien
tagagaggagggacacagctccctc

SEQ ID NO: 1513083 - DNA, 25 bp, Homo sapien
gatagagaggagggacacagctccc

SEQ ID NO: 1513084 - DNA, 25 bp, Homo sapien
tgacaaagcacacgtggttcctcca

SEQ ID NO: 1513085 - DNA, 25 bp, Homo sapien
tccaacttcagctgacaaagcacac

SEQ ID NO: 1513086 - DNA, 25 bp, Homo sapien
ctgacaaagcacacgtggttcctcc

SEQ ID NO: 1513087 - DNA, 25 bp, Homo sapien
gattcttgagtacatttgccttcct

SEQ ID NO: 1513088 - DNA, 25 bp, Homo sapien
gggattcttgagtacatttgccttc

SEQ ID NO: 1513089 - DNA, 25 bp, Homo sapien
tctgggggattcttgagtacatttg

SEQ ID NO: 1513090 - DNA, 25 bp, Homo sapien
cttgagtacatttgccttccttcag

SEQ ID NO: 1513091 - DNA, 25 bp, Homo sapien
tgtgcagacagttgtcccattggga

SEQ ID NO: 1513092 - DNA, 25 bp, Homo sapien
tcaaggctctaaccatgttcttctc

SEQ ID NO: 1513093 - DNA, 25 bp, Homo sapien
attgttatgcagtggagtttggcga

SEQ ID NO: 1513094 - DNA, 25 bp, Homo sapien
cgatgtgcactgagagctttagagc

SEQ ID NO: 1513095 - DNA, 25 bp, Homo sapien
agccgacgaggatgaattcagacat

SEQ ID NO: 1513096 - DNA, 25 bp, Homo sapien
gaaggcagagaagccgacgaggatg

SEQ ID NO: 1513097 - DNA, 25 bp, Homo sapien
gcagagaagccgacgaggatgaatt

SEQ ID NO: 1513098 - DNA, 25 bp, Homo sapien
acagcaggaagagcatcagttggag

SEQ ID NO: 1513099 - DNA, 25 bp, Homo sapien
tgcccagcagcgtgaacaggtacat

SEQ ID NO: 1513100 - DNA, 25 bp, Homo sapien
tgggtgaagccgaagctgaaggaga

SEQ ID NO: 1513101 - DNA, 25 bp, Homo sapien
gaacatctgactggcacaggccagg

SEQ ID NO: 1513102 - DNA, 25 bp, Homo sapien
tgatggccacggtgtagaggatctc

SEQ ID NO: 1513103 - DNA, 25 bp, Homo sapien
gaaagtcagttggaaaatggccgag

SEQ ID NO: 1513104 - DNA, 25 bp, Homo sapien
tgcacaatgaccacaataaggtgag

SEQ ID NO: 1513105 - DNA, 25 bp, Homo sapien
gcagtgccatgatacataccaagcc

SEQ ID NO: 1513106 - DNA, 25 bp, Homo sapien
ggtacattatttccacaggccaact

SEQ ID NO: 1513107 - DNA, 25 bp, Homo sapien
tggagaaagtcttgtgccggccctc

SEQ ID NO: 1513108 - DNA, 25 bp, Homo sapien
ccaaactgtggccatgataagaagg

SEQ ID NO: 1513109 - DNA, 25 bp, Homo sapien
ggtcacgtagtgatcatagcccatg

SEQ ID NO: 1513110 - DNA, 25 bp, Homo sapien
taggagcttagagggcagaaccttc

SEQ ID NO: 1513111 - DNA, 25 bp, Homo sapien
tatgaatgggtgtgggatttcgtca

SEQ ID NO: 1513112 - DNA, 25 bp, Homo sapien
cagtgcaatattgaaaagtagtgac

SEQ ID NO: 1513113 - DNA, 25 bp, Homo sapien
tattgcatttagtacttccagtgca

SEQ ID NO: 1513114 - DNA, 25 bp, Homo sapien
ctagtctggtttctaaccttagtgg

SEQ ID NO: 1513115 - DNA, 25 bp, Homo sapien
gtcctagagggtccgcagagtgctc

SEQ ID NO: 1513116 - DNA, 25 bp, Homo sapien
ggggatggggtgataggtgcgaggg

SEQ ID NO: 1513117 - DNA, 25 bp, Homo sapien
tgataggtgcgagggtcgaaaaagg

SEQ ID NO: 1513118 - DNA, 25 bp, Homo sapien
tctgcgggacccaggtaagggccac

SEQ ID NO: 1513119 - DNA, 25 bp, Homo sapien
tgaccatgtgcgtgaaggagagcct

SEQ ID NO: 1513120 - DNA, 25 bp, Homo sapien
tcccagatggtagggtcatccccaa

SEQ ID NO: 1513121 - DNA, 25 bp, Homo sapien
ttgccttaggtacgacctggcccag

SEQ ID NO: 1513122 - DNA, 25 bp, Homo sapien
caacccaactgtgtgaccggatcct

SEQ ID NO: 1513123 - DNA, 25 bp, Homo sapien
caagggttatccttgacattcctgc

SEQ ID NO: 1513124 - DNA, 25 bp, Homo sapien
tctcacaggtaattaaggtcgcgtg

SEQ ID NO: 1513125 - DNA, 25 bp, Homo sapien
gacattacagataagacaagggtta

SEQ ID NO: 1513126 - DNA, 25 bp, Homo sapien
caccatgcatgtaataggtctcaaa

SEQ ID NO: 1513127 - DNA, 25 bp, Homo sapien
aggacttgtcgctggtggtgattct

SEQ ID NO: 1513128 - DNA, 25 bp, Homo sapien
ggtcagttccttctaccttatcctg

SEQ ID NO: 1513129 - DNA, 25 bp, Homo sapien
tgacatccatctatgatgggtcagt

SEQ ID NO: 1513130 - DNA, 25 bp, Homo sapien
cttcagcctagagcggtaggaggac

SEQ ID NO: 1513131 - DNA, 25 bp, Homo sapien
gggaccttgggattgccctctccat

SEQ ID NO: 1513132 - DNA, 25 bp, Homo sapien
cagtggcacgttcccagaggtgtct

SEQ ID NO: 1513133 - DNA, 25 bp, Homo sapien
gatgcagggtaatcgaagtccaagg

SEQ ID NO: 1513134 - DNA, 25 bp, Homo sapien
aggcgtcttccccagtggcacgttc

SEQ ID NO: 1513135 - DNA, 25 bp, Homo sapien
ccaggcctgtaatggccctgggcac

SEQ ID NO: 1513136 - DNA, 25 bp, Homo sapien
cttcatcagagacctttagggacgc

SEQ ID NO: 1513137 - DNA, 25 bp, Homo sapien
tcagagacctttagggacgccttgc

SEQ ID NO: 1513138 - DNA, 25 bp, Homo sapien
gacctttagggacgccttgcagcca

SEQ ID NO: 1513139 - DNA, 25 bp, Homo sapien
tgctgagctggttgccactcatcct

SEQ ID NO: 1513140 - DNA, 25 bp, Homo sapien
caaggctgccagctgacgttgtcgt

SEQ ID NO: 1513141 - DNA, 25 bp, Homo sapien
cgttgtcgtgatcatctctgtcatc

SEQ ID NO: 1513142 - DNA, 25 bp, Homo sapien
tgagctggttgccactcatccttgc

SEQ ID NO: 1513143 - DNA, 25 bp, Homo sapien
caaggttagcccaatgcttggagga

SEQ ID NO: 1513144 - DNA, 25 bp, Homo sapien
tcagagccaaggttagcccaatgct

SEQ ID NO: 1513145 - DNA, 25 bp, Homo sapien
tagcccaatgcttggaggactcaga

SEQ ID NO: 1513146 - DNA, 25 bp, Homo sapien
ctaactatctctcagagccaaggtt

SEQ ID NO: 1513147 - DNA, 25 bp, Homo sapien
tgcccagcagcgtgaacaggtacat

SEQ ID NO: 1513148 - DNA, 25 bp, Homo sapien
tgggtgaagccgaagctgaaggaga

SEQ ID NO: 1513149 - DNA, 25 bp, Homo sapien
tgatggccacggtgtagaggatctc

SEQ ID NO: 1513150 - DNA, 25 bp, Homo sapien
gaacatctgactggcacaggccagg

SEQ ID NO: 1513151 - DNA, 25 bp, Homo sapien
cagatggccacgtagcggtcgtagc

SEQ ID NO: 1513152 - DNA, 25 bp, Homo sapien
ggcagatggccacgtagcggtcgta

SEQ ID NO: 1513153 - DNA, 25 bp, Homo sapien
gttgtaacgcagggggtggcagatg

SEQ ID NO: 1513154 - DNA, 25 bp, Homo sapien
gatggccacgtagcggtcgtagccc

SEQ ID NO: 1513155 - DNA, 25 bp, Homo sapien
tgaggaccgtgtaggtgatgcccat

SEQ ID NO: 1513156 - DNA, 25 bp, Homo sapien
tcttcatggcgaccttcagctcctt

SEQ ID NO: 1513157 - DNA, 25 bp, Homo sapien
agcagggccgtgatacacaccaagc

SEQ ID NO: 1513158 - DNA, 25 bp, Homo sapien
tcaggtaaatgacggaggcaaagcc

SEQ ID NO: 1513159 - DNA, 25 bp, Homo sapien
taaaggtggttatctgttgtcagca

SEQ ID NO: 1513160 - DNA, 25 bp, Homo sapien
caagtgtcaagcatgtccgtataga

SEQ ID NO: 1513161 - DNA, 25 bp, Homo sapien
gatctcttcacggaatgagggccag

SEQ ID NO: 1513162 - DNA, 25 bp, Homo sapien
cctggcccagattttggcaccaagt

SEQ ID NO: 1513163 - DNA, 25 bp, Homo sapien
tggttttaaaggagtgcctagaggc

SEQ ID NO: 1513164 - DNA, 25 bp, Homo sapien
taaaggagtgcctagaggctgtggt

SEQ ID NO: 1513165 - DNA, 25 bp, Homo sapien
gcttctgaggcgatcgggcagcatc

SEQ ID NO: 1513166 - DNA, 25 bp, Homo sapien
ctgtgatggtccaaggggcttctga

SEQ ID NO: 1513167 - DNA, 25 bp, Homo sapien
catctgtgatggtccaaggggcttc

SEQ ID NO: 1513168 - DNA, 25 bp, Homo sapien
cttctgaggcgatcgggcagcatca

SEQ ID NO: 1513169 - DNA, 25 bp, Homo sapien
cgtcaatacccacggcagttacggg

SEQ ID NO: 1513170 - DNA, 25 bp, Homo sapien
ccgtcaatacccacggcagttacgg

SEQ ID NO: 1513171 - DNA, 25 bp, Homo sapien
gccgtcaatacccacggcagttacg

SEQ ID NO: 1513172 - DNA, 25 bp, Homo sapien
tattgataatggaagagccttgtgt

SEQ ID NO: 1513173 - DNA, 25 bp, Homo sapien
caagagagcagcattaaggagggcc

SEQ ID NO: 1513174 - DNA, 25 bp, Homo sapien
tcctttagcaataagatcagttggt

SEQ ID NO: 1513175 - DNA, 25 bp, Homo sapien
gcattcctttggcgacagagagtgc

SEQ ID NO: 1513176 - DNA, 25 bp, Homo sapien
cagacacgcggcatatgaataaagt

SEQ ID NO: 1513177 - DNA, 25 bp, Homo sapien
ccaatcttgtgtcggaggaaatcca

SEQ ID NO: 1513178 - DNA, 25 bp, Homo sapien
tagcctttcagagctagtgggaaag

SEQ ID NO: 1513179 - DNA, 25 bp, Homo sapien
ggcctcgacccatccggtgaaggta

SEQ ID NO: 1513180 - DNA, 25 bp, Homo sapien
gcttctcaaggacaggccctaattc

SEQ ID NO: 1513181 - DNA, 25 bp, Homo sapien
tggtgtctggaacaagattgtggct

SEQ ID NO: 1513182 - DNA, 25 bp, Homo sapien
ttctcaaggacaggccctaattctg

SEQ ID NO: 1513183 - DNA, 25 bp, Homo sapien
gagtaagaaggtgcatccatataaa

SEQ ID NO: 1513184 - DNA, 25 bp, Homo sapien
tgtttgtctgatcggctctcggcct

SEQ ID NO: 1513185 - DNA, 25 bp, Homo sapien
tataggcggcaggtcttaagagatg

SEQ ID NO: 1513186 - DNA, 25 bp, Homo sapien
tgatggttgccagcctaagcgtttt

SEQ ID NO: 1513187 - DNA, 25 bp, Homo sapien
tccagaggaacggatgaagcctgct

SEQ ID NO: 1513188 - DNA, 25 bp, Homo sapien
ttgccaaatatgtggaactggcccc

SEQ ID NO: 1513189 - DNA, 25 bp, Homo sapien
ggaactggccccatatgcgtgtact

SEQ ID NO: 1513190 - DNA, 25 bp, Homo sapien
ctggccccatatgcgtgtactgttg

SEQ ID NO: 1513191 - DNA, 25 bp, Homo sapien
ctggttgccaaatatgtggaactgg

SEQ ID NO: 1513192 - DNA, 25 bp, Homo sapien
tgtctcctggattaagctgaggctg

SEQ ID NO: 1513193 - DNA, 25 bp, Homo sapien
tcctggattaagctgaggctggcaa

SEQ ID NO: 1513194 - DNA, 25 bp, Homo sapien
tttgtctcctggattaagctgaggc

SEQ ID NO: 1513195 - DNA, 25 bp, Homo sapien
tctcctggattaagctgaggctggc

SEQ ID NO: 1513196 - DNA, 25 bp, Homo sapien
ggtgtgagtggcggtctgaatggag

SEQ ID NO: 1513197 - DNA, 25 bp, Homo sapien
tgagtggcggtctgaatggagaagt

SEQ ID NO: 1513198 - DNA, 25 bp, Homo sapien
tgtgagtggcggtctgaatggagaa

SEQ ID NO: 1513199 - DNA, 25 bp, Homo sapien
ccttttcccataggtgtgagtggcg

SEQ ID NO: 1513200 - DNA, 25 bp, Homo sapien
aatagtattccctgttgctaagccg

SEQ ID NO: 1513201 - DNA, 25 bp, Homo sapien
ccccattttccatcatacgaatagt

SEQ ID NO: 1513202 - DNA, 25 bp, Homo sapien
tccatcatacgaatagtattccctg

SEQ ID NO: 1513203 - DNA, 25 bp, Homo sapien
tgttgctaagccgatgatacattac

SEQ ID NO: 1513204 - DNA, 25 bp, Homo sapien
tattagctttaatgtaggtggcgat

SEQ ID NO: 1513205 - DNA, 25 bp, Homo sapien
atattagctttaatgtaggtggcga

SEQ ID NO: 1513206 - DNA, 25 bp, Homo sapien
attagctttaatgtaggtggcgatg

SEQ ID NO: 1513207 - DNA, 25 bp, Homo sapien
ttagctttaatgtaggtggcgatga

SEQ ID NO: 1513208 - DNA, 25 bp, Homo sapien
aatggctaagcttcagctcacaggc

SEQ ID NO: 1513209 - DNA, 25 bp, Homo sapien
ttttatgtagctaacaaggtgccag

SEQ ID NO: 1513210 - DNA, 25 bp, Homo sapien
cgtatttttgagcttggaactgccc

SEQ ID NO: 1513211 - DNA, 25 bp, Homo sapien
gatatttctccggactgcttcaagt

SEQ ID NO: 1513212 - DNA, 25 bp, Homo sapien
tacaaaagcctttgtgccgctactt

SEQ ID NO: 1513213 - DNA, 25 bp, Homo sapien
ttgaggttcctgtcacgcgtgtccg

SEQ ID NO: 1513214 - DNA, 25 bp, Homo sapien
ggaacaagtcataatggtggacaag

SEQ ID NO: 1513215 - DNA, 25 bp, Homo sapien
cgtatagaagacacccaatcaggct

SEQ ID NO: 1513216 - DNA, 25 bp, Homo sapien
cccggaagccggaaatgctgagtgt

SEQ ID NO: 1513217 - DNA, 25 bp, Homo sapien
gggtctttgctgctcgcgcaggccc

SEQ ID NO: 1513218 - DNA, 25 bp, Homo sapien
cctgagtcttccaaaaggtgtgcga

SEQ ID NO: 1513219 - DNA, 25 bp, Homo sapien
tatccaatcaggagcgtagccgtag

SEQ ID NO: 1513220 - DNA, 25 bp, Homo sapien
tcccctttgggatcatgtacagtac

SEQ ID NO: 1513221 - DNA, 25 bp, Homo sapien
gggaacggaccctgtgcactgtagt

SEQ ID NO: 1513222 - DNA, 25 bp, Homo sapien
tgtgcccagaagcagctcacttggt

SEQ ID NO: 1513223 - DNA, 25 bp, Homo sapien
ggccccaggccattgattcttgtgc

SEQ ID NO: 1513224 - DNA, 25 bp, Homo sapien
ctcatctgcccgcaggatctgcatg

SEQ ID NO: 1513225 - DNA, 25 bp, Homo sapien
ccaggatgcgggtcttgggcacagt

SEQ ID NO: 1513226 - DNA, 25 bp, Homo sapien
cgccgtggccgagatgaaggtggtc

SEQ ID NO: 1513227 - DNA, 25 bp, Homo sapien
ggcaccacatggagcccggcaggaa

SEQ ID NO: 1513228 - DNA, 25 bp, Homo sapien
gaatgaagcagtgatccctactaca

SEQ ID NO: 1513229 - DNA, 25 bp, Homo sapien
cctactacactgtggatgaaccttg

SEQ ID NO: 1513230 - DNA, 25 bp, Homo sapien
tcatggcggccctattcacagtagc

SEQ ID NO: 1513231 - DNA, 25 bp, Homo sapien
tgggactgaggagcgactgctaatc

SEQ ID NO: 1513232 - DNA, 25 bp, Homo sapien
tcccacacgggctctgtggtggagt

SEQ ID NO: 1513233 - DNA, 25 bp, Homo sapien
catcatccagccgtatcgcctggag

SEQ ID NO: 1513234 - DNA, 25 bp, Homo sapien
agcactggctgatcgagagcgccca

SEQ ID NO: 1513235 - DNA, 25 bp, Homo sapien
gagtccaaggtcaagcaatcaggag

SEQ ID NO: 1513236 - DNA, 25 bp, Homo sapien
gtacgccaggtcttcaggagtctac

SEQ ID NO: 1513237 - DNA, 25 bp, Homo sapien
tacaggagatgttctcggggacccg

SEQ ID NO: 1513238 - DNA, 25 bp, Homo sapien
ctcgtacgccaggtcttcaggagtc

SEQ ID NO: 1513239 - DNA, 25 bp, Homo sapien
caggagtctacaggagatgttctcg

SEQ ID NO: 1513240 - DNA, 25 bp, Homo sapien
ctttccccaggagttcgtgtgggag

SEQ ID NO: 1513241 - DNA, 25 bp, Homo sapien
ccccaggagttcgtgtgggaggcct

SEQ ID NO: 1513242 - DNA, 25 bp, Homo sapien
ccaggagttcgtgtgggaggcctcc

SEQ ID NO: 1513243 - DNA, 25 bp, Homo sapien
ttccccaggagttcgtgtgggaggc

SEQ ID NO: 1513244 - DNA, 25 bp, Homo sapien
cctgcagattgagaagcgcctccgg

SEQ ID NO: 1513245 - DNA, 25 bp, Homo sapien
attgagaagcgcctccgggagctga

SEQ ID NO: 1513246 - DNA, 25 bp, Homo sapien
tgcagattgagaagcgcctccggga

SEQ ID NO: 1513247 - DNA, 25 bp, Homo sapien
agattgagaagcgcctccgggagct

SEQ ID NO: 1513248 - DNA, 25 bp, Homo sapien
aggtgttccgtaggcaggacgccca

SEQ ID NO: 1513249 - DNA, 25 bp, Homo sapien
tggaagccttcatcacccgcaaggt

SEQ ID NO: 1513250 - DNA, 25 bp, Homo sapien
gatgcaacggcctacagcattatgc

SEQ ID NO: 1513251 - DNA, 25 bp, Homo sapien
cagacagtgatgaccgtggtgtacg

SEQ ID NO: 1513252 - DNA, 25 bp, Homo sapien
caatatagagatagaatgcaattcc

SEQ ID NO: 1513253 - DNA, 25 bp, Homo sapien
caagtagttgaaagttctctgcaag

SEQ ID NO: 1513254 - DNA, 25 bp, Homo sapien
gactctactactaaaagcaatatag

SEQ ID NO: 1513255 - DNA, 25 bp, Homo sapien
ctaaaattcgtgtggtatcacagaa

SEQ ID NO: 1513256 - DNA, 25 bp, Homo sapien
gggcaaggatgtcaaattttccctg

SEQ ID NO: 1513257 - DNA, 25 bp, Homo sapien
tatatagaacaagtatacctaacaa

SEQ ID NO: 1513258 - DNA, 25 bp, Homo sapien
caaggatgtcaaattttccctgttt

SEQ ID NO: 1513259 - DNA, 25 bp, Homo sapien
gtatagaacaagcatacataacaaa

SEQ ID NO: 1513260 - DNA, 25 bp, Homo sapien
caagtatactttctgacggcaagga

SEQ ID NO: 1513261 - DNA, 25 bp, Homo sapien
tgacagaatagttcatgcaacagct

SEQ ID NO: 1513262 - DNA, 25 bp, Homo sapien
tggagagaccacacattgggctaca

SEQ ID NO: 1513263 - DNA, 25 bp, Homo sapien
gactcccatacaataatagttgcag

SEQ ID NO: 1513264 - DNA, 25 bp, Homo sapien
caaaggatgcttcttagtgaaatga

SEQ ID NO: 1513265 - DNA, 25 bp, Homo sapien
gaaaaagacaattgacatggatgac

SEQ ID NO: 1513266 - DNA, 25 bp, Homo sapien
caagagtcttgaaattaagggcaca

SEQ ID NO: 1513267 - DNA, 25 bp, Homo sapien
cactcattgttcttaccagggttag

SEQ ID NO: 1513268 - DNA, 25 bp, Homo sapien
gagacacaaaccaacattatggaag

SEQ ID NO: 1513269 - DNA, 25 bp, Homo sapien
tcccatagctatgagacacaaacca

SEQ ID NO: 1513270 - DNA, 25 bp, Homo sapien
gtttctttaggaaggttcatctcag

SEQ ID NO: 1513271 - DNA, 25 bp, Homo sapien
ctgtttctttaggaaggttcatctc

SEQ ID NO: 1513272 - DNA, 25 bp, Homo sapien
gaggcataggatctggagccagact

SEQ ID NO: 1513273 - DNA, 25 bp, Homo sapien
tcggttccctcaaccatataatgga

SEQ ID NO: 1513274 - DNA, 25 bp, Homo sapien
tggagacaacagcattacctatatc

SEQ ID NO: 1513275 - DNA, 25 bp, Homo sapien
tatcagggttttcctgaggtctcaa

SEQ ID NO: 1513276 - DNA, 25 bp, Homo sapien
gtagctgtactatccatccatttcc

SEQ ID NO: 1513277 - DNA, 25 bp, Homo sapien
tacatggatgagtgcacctgtctcc

SEQ ID NO: 1513278 - DNA, 25 bp, Homo sapien
gcagctttgccatgctacatttgtt

SEQ ID NO: 1513279 - DNA, 25 bp, Homo sapien
tgagctccctattccattctttggt

SEQ ID NO: 1513280 - DNA, 25 bp, Homo sapien
tgtagacgctacatggagcagacat

SEQ ID NO: 1513281 - DNA, 25 bp, Homo sapien
catggtgtccaagctatgctctggg

SEQ ID NO: 1513282 - DNA, 25 bp, Homo sapien
agtgaatatattgccgccatcttgg

SEQ ID NO: 1513283 - DNA, 25 bp, Homo sapien
tcctgatgggcagtagcttctagct

SEQ ID NO: 1513284 - DNA, 25 bp, Homo sapien
tctcagagacggagagggtgcacaa

SEQ ID NO: 1513285 - DNA, 25 bp, Homo sapien
tgaggtggaaaactatcgttgtcac

SEQ ID NO: 1513286 - DNA, 25 bp, Homo sapien
tgggatacacacgtagaaaatgtct

SEQ ID NO: 1513287 - DNA, 25 bp, Homo sapien
gaaaatgtcttgtgccggccttcgg

SEQ ID NO: 1513288 - DNA, 25 bp, Homo sapien
gagttgcacttgctgagcccttagt

SEQ ID NO: 1513289 - DNA, 25 bp, Homo sapien
ggtgctgctgaaacgcccatttata

SEQ ID NO: 1513290 - DNA, 25 bp, Homo sapien
cccatttatagacgtgaaggagcac

SEQ ID NO: 1513291 - DNA, 25 bp, Homo sapien
accatgaccttgtgaggcgggtgct

SEQ ID NO: 1513292 - DNA, 25 bp, Homo sapien
ggtgaagcccctgagcgcagaccca

SEQ ID NO: 1513293 - DNA, 25 bp, Homo sapien
gtatgcagagggcggactttggctg

SEQ ID NO: 1513294 - DNA, 25 bp, Homo sapien
ctttggctgtgggtgaagcccctga

SEQ ID NO: 1513295 - DNA, 25 bp, Homo sapien
atgcagagggcggactttggctgtg

SEQ ID NO: 1513296 - DNA, 25 bp, Homo sapien
caggaactgcattgggcaggcgttt

SEQ ID NO: 1513297 - DNA, 25 bp, Homo sapien
gcttccgtgtctgtccagaccacat

SEQ ID NO: 1513298 - DNA, 25 bp, Homo sapien
agccccgcaggaagccggaggtcat

SEQ ID NO: 1513299 - DNA, 25 bp, Homo sapien
cattgggcaggcgtttgcaatggct

SEQ ID NO: 1513300 - DNA, 25 bp, Homo sapien
aggcggctgagtcatccccaaaggt

SEQ ID NO: 1513301 - DNA, 25 bp, Homo sapien
gtgctcccaggcggctgagtcatcc

SEQ ID NO: 1513302 - DNA, 25 bp, Homo sapien
tgtgctcccaggcggctgagtcatc

SEQ ID NO: 1513303 - DNA, 25 bp, Homo sapien
cggctgagtcatccccaaaggtgcc

SEQ ID NO: 1513304 - DNA, 25 bp, Homo sapien
cttcctgaccatgtacattaaggac

SEQ ID NO: 1513305 - DNA, 25 bp, Homo sapien
gaccatgtacattaaggacagcctg

SEQ ID NO: 1513306 - DNA, 25 bp, Homo sapien
cagtccctgtcatctcccgatgctg

SEQ ID NO: 1513307 - DNA, 25 bp, Homo sapien
tctcccgatgctgcacccaggacat

SEQ ID NO: 1513308 - DNA, 25 bp, Homo sapien
agagttgtgtctttgctaccttgat

SEQ ID NO: 1513309 - DNA, 25 bp, Homo sapien
ggagagttgtgtctttgctaccttg

SEQ ID NO: 1513310 - DNA, 25 bp, Homo sapien
gagagttgtgtctttgctaccttga

SEQ ID NO: 1513311 - DNA, 25 bp, Homo sapien
tggagagttgtgtctttgctacctt

SEQ ID NO: 1513312 - DNA, 25 bp, Homo sapien
agagaacatctgaaccgctcccggg

SEQ ID NO: 1513313 - DNA, 25 bp, Homo sapien
gtgagacaacatcgcccaaaggcaa

SEQ ID NO: 1513314 - DNA, 25 bp, Homo sapien
cctgctcctgtgcaagtagggtagc

SEQ ID NO: 1513315 - DNA, 25 bp, Homo sapien
aaaggcaacgctgcacctgagcgct

SEQ ID NO: 1513316 - DNA, 25 bp, Homo sapien
ctctcgagggagcagcccgacctgt

SEQ ID NO: 1513317 - DNA, 25 bp, Homo sapien
ctctctcgagggagcagcccgacct

SEQ ID NO: 1513318 - DNA, 25 bp, Homo sapien
tctcgagggagcagcccgacctgta

SEQ ID NO: 1513319 - DNA, 25 bp, Homo sapien
ctcgagggagcagcccgacctgtac

SEQ ID NO: 1513320 - DNA, 25 bp, Homo sapien
cagaggggtccagagtgagggggct

SEQ ID NO: 1513321 - DNA, 25 bp, Homo sapien
gacccagaggggtccagagtgaggg

SEQ ID NO: 1513322 - DNA, 25 bp, Homo sapien
tgggacccagaggggtccagagtga

SEQ ID NO: 1513323 - DNA, 25 bp, Homo sapien
gaggggtccagagtgagggggctga

SEQ ID NO: 1513324 - DNA, 25 bp, Homo sapien
gatcggtaactttgtaagctgtcca

SEQ ID NO: 1513325 - DNA, 25 bp, Homo sapien
tgcagaatctcgaggcgatcggtaa

SEQ ID NO: 1513326 - DNA, 25 bp, Homo sapien
cgaggcgatcggtaactttgtaagc

SEQ ID NO: 1513327 - DNA, 25 bp, Homo sapien
gaatctcgaggcgatcggtaacttt

SEQ ID NO: 1513328 - DNA, 25 bp, Homo sapien
cagggtagccagctggcattcctac

SEQ ID NO: 1513329 - DNA, 25 bp, Homo sapien
agatgagcctcgcagctctggcctg

SEQ ID NO: 1513330 - DNA, 25 bp, Homo sapien
ccaagatccctagatgagcctcgca

SEQ ID NO: 1513331 - DNA, 25 bp, Homo sapien
ctgctgcagaccacctgcagggtag

SEQ ID NO: 1513332 - DNA, 25 bp, Homo sapien
acgagggtgagcaagagccccgcgg

SEQ ID NO: 1513333 - DNA, 25 bp, Homo sapien
gagatgccagaggtgacgagggtga

SEQ ID NO: 1513334 - DNA, 25 bp, Homo sapien
tcggggctgtcgtccatccatcagt

SEQ ID NO: 1513335 - DNA, 25 bp, Homo sapien
acagccccgtctccaaactcagctg

SEQ ID NO: 1513336 - DNA, 25 bp, Homo sapien
ttgccgctcctatgtcgctggcagt

SEQ ID NO: 1513337 - DNA, 25 bp, Homo sapien
tgtgtccctcatctcctgatgtctt

SEQ ID NO: 1513338 - DNA, 25 bp, Homo sapien
tgtcgctggcagtcgagaagcacct

SEQ ID NO: 1513339 - DNA, 25 bp, Homo sapien
ctggcagtcgagaagcacctggagc

SEQ ID NO: 1513340 - DNA, 25 bp, Homo sapien
ctgtagaaagtggtcacggggccct

SEQ ID NO: 1513341 - DNA, 25 bp, Homo sapien
actctgtagaaagtggtcacggggc

SEQ ID NO: 1513342 - DNA, 25 bp, Homo sapien
cctgactctgtagaaagtggtcacg

SEQ ID NO: 1513343 - DNA, 25 bp, Homo sapien
tgactctgtagaaagtggtcacggg

SEQ ID NO: 1513344 - DNA, 25 bp, Homo sapien
tgggaggaccgtcctgggacaccac

SEQ ID NO: 1513345 - DNA, 25 bp, Homo sapien
tccaaactcatttcgtgacgagagc

SEQ ID NO: 1513346 - DNA, 25 bp, Homo sapien
aatgtttcctgggaggaccgtcctg

SEQ ID NO: 1513347 - DNA, 25 bp, Homo sapien
aagagggcttctcggatccaaactc

SEQ ID NO: 1513348 - DNA, 25 bp, Homo sapien
tcagcgtaaacgtggaattatgggc

SEQ ID NO: 1513349 - DNA, 25 bp, Homo sapien
aaacgtggaattatgggcacgcagc

SEQ ID NO: 1513350 - DNA, 25 bp, Homo sapien
ttatgggcacgcagctcatctttgt

SEQ ID NO: 1513351 - DNA, 25 bp, Homo sapien
gaggagtcagcgtaaacgtggaatt

SEQ ID NO: 1513352 - DNA, 25 bp, Homo sapien
gtctgtcccgcgtgttcccctggat

SEQ ID NO: 1513353 - DNA, 25 bp, Homo sapien
tgctagccatccagaacgtagctgc

SEQ ID NO: 1513354 - DNA, 25 bp, Homo sapien
tgtgccttcggtacatgctagccat

SEQ ID NO: 1513355 - DNA, 25 bp, Homo sapien
ctcgggcacgccaggacttaactct

SEQ ID NO: 1513356 - DNA, 25 bp, Homo sapien
gtggactctgtgtctgagaggtctc

SEQ ID NO: 1513357 - DNA, 25 bp, Homo sapien
gggtcatgtcgagggtggactctgt

SEQ ID NO: 1513358 - DNA, 25 bp, Homo sapien
gggtggactctgtgtctgagaggtc

SEQ ID NO: 1513359 - DNA, 25 bp, Homo sapien
tcatccgggtcatgtcgagggtgga

SEQ ID NO: 1513360 - DNA, 25 bp, Homo sapien
gcagtgctgggtccttttcgggcca

SEQ ID NO: 1513361 - DNA, 25 bp, Homo sapien
tgggagaggttggtgtccacaccct

SEQ ID NO: 1513362 - DNA, 25 bp, Homo sapien
gttggtgtccacaccctgtttccac

SEQ ID NO: 1513363 - DNA, 25 bp, Homo sapien
cacaccctgtttccaccatggcccc

SEQ ID NO: 1513364 - DNA, 25 bp, Homo sapien
gaaggtgcctgagcgccatggcatc

SEQ ID NO: 1513365 - DNA, 25 bp, Homo sapien
gagacatgaaggtgcctgagcgcca

SEQ ID NO: 1513366 - DNA, 25 bp, Homo sapien
cctcatcagtaaccccatggagaca

SEQ ID NO: 1513367 - DNA, 25 bp, Homo sapien
tcctcatcagtaaccccatggagac

SEQ ID NO: 1513368 - DNA, 25 bp, Homo sapien
tcagcgagcttcgagggcaaaagca

SEQ ID NO: 1513369 - DNA, 25 bp, Homo sapien
ccctgggccagggatactgattctc

SEQ ID NO: 1513370 - DNA, 25 bp, Homo sapien
ctgtggatgctgcaggtagggctgt

SEQ ID NO: 1513371 - DNA, 25 bp, Homo sapien
gcttgttgtcctgatgctcttggag

SEQ ID NO: 1513372 - DNA, 25 bp, Homo sapien
tctttttctggagaggctgcctgca

SEQ ID NO: 1513373 - DNA, 25 bp, Homo sapien
tttataacggtggtacaggcccagc

SEQ ID NO: 1513374 - DNA, 25 bp, Homo sapien
tctacgagagtaaaaggcatccgca

SEQ ID NO: 1513375 - DNA, 25 bp, Homo sapien
gttattatcacagtgtccggcaggg

SEQ ID NO: 1513376 - DNA, 25 bp, Homo sapien
ttatttcaaccaacagatctgccca

SEQ ID NO: 1513377 - DNA, 25 bp, Homo sapien
actgaagccgagtgtgtgttgtcac

SEQ ID NO: 1513378 - DNA, 25 bp, Homo sapien
tgaagaggtgatgctctagccgcct

SEQ ID NO: 1513379 - DNA, 25 bp, Homo sapien
ttcaagacacttgcgtgaagaggtg

SEQ ID NO: 1513380 - DNA, 25 bp, Homo sapien
tataaaccaattattcctgccttca

SEQ ID NO: 1513381 - DNA, 25 bp, Homo sapien
acagtataaaccaattattcctgcc

SEQ ID NO: 1513382 - DNA, 25 bp, Homo sapien
gacttaccagtaatacttctattta

SEQ ID NO: 1513383 - DNA, 25 bp, Homo sapien
aaaccaattattcctgccttcagta

SEQ ID NO: 1513384 - DNA, 25 bp, Homo sapien
cctttaggtgacagatttagaaact

SEQ ID NO: 1513385 - DNA, 25 bp, Homo sapien
cagtaagtttgacttcacggcaaca

SEQ ID NO: 1513386 - DNA, 25 bp, Homo sapien
cacggcaacagtagataatttaacc

SEQ ID NO: 1513387 - DNA, 25 bp, Homo sapien
tgaccatcgcggtacccagggattt

SEQ ID NO: 1513388 - DNA, 25 bp, Homo sapien
cttggtcaagcggttaatgccagtg

SEQ ID NO: 1513389 - DNA, 25 bp, Homo sapien
ataaccgacgagtagagagggtcag

SEQ ID NO: 1513390 - DNA, 25 bp, Homo sapien
gtcaagcggttaatgccagtgtctg

SEQ ID NO: 1513391 - DNA, 25 bp, Homo sapien
acctaggaataaccgacgagtagag

SEQ ID NO: 1513392 - DNA, 25 bp, Homo sapien
ggacccactgatggcctaggtctcc

SEQ ID NO: 1513393 - DNA, 25 bp, Homo sapien
ccaggacccactgatggcctaggtc

SEQ ID NO: 1513394 - DNA, 25 bp, Homo sapien
actgatggcctaggtctccactgac

SEQ ID NO: 1513395 - DNA, 25 bp, Homo sapien
ccactgatggcctaggtctccactg

SEQ ID NO: 1513396 - DNA, 25 bp, Homo sapien
ccccgatgaccaggtttattgattg

SEQ ID NO: 1513397 - DNA, 25 bp, Homo sapien
ctctgactaggagcctgctgaccag

SEQ ID NO: 1513398 - DNA, 25 bp, Homo sapien
ggtttattgattgggctccctctga

SEQ ID NO: 1513399 - DNA, 25 bp, Homo sapien
ggagcctgctgaccaggatgtcact

SEQ ID NO: 1513400 - DNA, 25 bp, Homo sapien
tgaggccggttgaatagagaattac

SEQ ID NO: 1513401 - DNA, 25 bp, Homo sapien
taggaaataaagagcgaacatggtg

SEQ ID NO: 1513402 - DNA, 25 bp, Homo sapien
gatggttttgtgctcaactgaggcc

SEQ ID NO: 1513403 - DNA, 25 bp, Homo sapien
taggcatcggtactacggaagttcc

SEQ ID NO: 1513404 - DNA, 25 bp, Homo sapien
acggcagaacaaaaattgctatcaa

SEQ ID NO: 1513405 - DNA, 25 bp, Homo sapien
tacggcagaacaaaaattgctatca

SEQ ID NO: 1513406 - DNA, 25 bp, Homo sapien
ctacggcagaacaaaaattgctatc

SEQ ID NO: 1513407 - DNA, 25 bp, Homo sapien
ccagtagagacttgagatcacagat

SEQ ID NO: 1513408 - DNA, 25 bp, Homo sapien
tcaggagcgcgggacacgagttctt

SEQ ID NO: 1513409 - DNA, 25 bp, Homo sapien
aagtgacccagaattcggaaccagc

SEQ ID NO: 1513410 - DNA, 25 bp, Homo sapien
ccagctcttcacaaaaatggagtgt

SEQ ID NO: 1513411 - DNA, 25 bp, Homo sapien
cccttgaaccggctggatgcgtgtc

SEQ ID NO: 1513412 - DNA, 25 bp, Homo sapien
gatgcgtgtctagtgaagttcccag

SEQ ID NO: 1513413 - DNA, 25 bp, Homo sapien
gccgcctggtgttggtgcaatgcca

SEQ ID NO: 1513414 - DNA, 25 bp, Homo sapien
aagagcctgatttgcgggatgagcc

SEQ ID NO: 1513415 - DNA, 25 bp, Homo sapien
gccttcgtgcttggcgaggcgttgg

SEQ ID NO: 1513416 - DNA, 25 bp, Homo sapien
cttcgtgcttggcgaggcgttgggc

SEQ ID NO: 1513417 - DNA, 25 bp, Homo sapien
ttcgtgcttggcgaggcgttgggct

SEQ ID NO: 1513418 - DNA, 25 bp, Homo sapien
aggccttcgtgcttggcgaggcgtt

SEQ ID NO: 1513419 - DNA, 25 bp, Homo sapien
aacctcaaccgctactctgccttca

SEQ ID NO: 1513420 - DNA, 25 bp, Homo sapien
tccctgggtccccacgtgggcagga

SEQ ID NO: 1513421 - DNA, 25 bp, Homo sapien
ggagctcgacggctccctgggtccc

SEQ ID NO: 1513422 - DNA, 25 bp, Homo sapien
ggagctcggtcactgtgagccgcaa

SEQ ID NO: 1513423 - DNA, 25 bp, Homo sapien
gcaagtggtctgcaaccctggactg

SEQ ID NO: 1513424 - DNA, 25 bp, Homo sapien
tgtaccacccagaggtttcaaggcc

SEQ ID NO: 1513425 - DNA, 25 bp, Homo sapien
tttccaggcggtagggatgccctga

SEQ ID NO: 1513426 - DNA, 25 bp, Homo sapien
catgacggtgaacgatccaggtgca

SEQ ID NO: 1513427 - DNA, 25 bp, Homo sapien
catgccaaagcttccgatggagcag

SEQ ID NO: 1513428 - DNA, 25 bp, Homo sapien
tggtatgaccttgaacagggatgct

SEQ ID NO: 1513429 - DNA, 25 bp, Homo sapien
tgaactggcggtacctctggtggaa

SEQ ID NO: 1513430 - DNA, 25 bp, Homo sapien
ccctggatcggctaaacggcttcat

SEQ ID NO: 1513431 - DNA, 25 bp, Homo sapien
tgggtgccgtgagcccacaatgtca

SEQ ID NO: 1513432 - DNA, 25 bp, Homo sapien
cgcacacgtcgacagttcaggaggg

SEQ ID NO: 1513433 - DNA, 25 bp, Homo sapien
cgatcagtccggcttagtcaacagg

SEQ ID NO: 1513434 - DNA, 25 bp, Homo sapien
tggtcagcacagaacacgatcagtc

SEQ ID NO: 1513435 - DNA, 25 bp, Homo sapien
tgaacctgtgatccctcggagttga

SEQ ID NO: 1513436 - DNA, 25 bp, Homo sapien
gggcccagttggcacaggattaaaa

SEQ ID NO: 1513437 - DNA, 25 bp, Homo sapien
gatctccttacgaagcagagacagc

SEQ ID NO: 1513438 - DNA, 25 bp, Homo sapien
gttgaccgggcaagaagatctcctt

SEQ ID NO: 1513439 - DNA, 25 bp, Homo sapien
ctggattgagaaacgcaccctgcga

SEQ ID NO: 1513440 - DNA, 25 bp, Homo sapien
aaaactttccaacgtgatgacaccg

SEQ ID NO: 1513441 - DNA, 25 bp, Homo sapien
aaaacgaactcacggccaaggactg

SEQ ID NO: 1513442 - DNA, 25 bp, Homo sapien
ccaacagtgaatccaggtggcacta

SEQ ID NO: 1513443 - DNA, 25 bp, Homo sapien
taaatgatacctaaaacgtggttga

SEQ ID NO: 1513444 - DNA, 25 bp, Homo sapien
accaataggatctagccttggcaac

SEQ ID NO: 1513445 - DNA, 25 bp, Homo sapien
tagtaagttatgagaatgatgaaac

SEQ ID NO: 1513446 - DNA, 25 bp, Homo sapien
cgtggttgaacacgtaatagtaagt

SEQ ID NO: 1513447 - DNA, 25 bp, Homo sapien
ctaattggctacaccctatgaaggg

SEQ ID NO: 1513448 - DNA, 25 bp, Homo sapien
ctaatgttgcctagaagtggctgcc

SEQ ID NO: 1513449 - DNA, 25 bp, Homo sapien
atgcttgtgccttaacccgtggtta

SEQ ID NO: 1513450 - DNA, 25 bp, Homo sapien
tgtggcctggatactgcctaatgtt

SEQ ID NO: 1513451 - DNA, 25 bp, Homo sapien
tgagaggcgggtcagtaacactggg

SEQ ID NO: 1513452 - DNA, 25 bp, Homo sapien
cgtcacattgttgagagtggcgtct

SEQ ID NO: 1513453 - DNA, 25 bp, Homo sapien
tgggtcagggcattcctgaatgcga

SEQ ID NO: 1513454 - DNA, 25 bp, Homo sapien
acccactcgtaggtgcagagtgaga

SEQ ID NO: 1513455 - DNA, 25 bp, Homo sapien
tggatgcatcaataacatgggatat

SEQ ID NO: 1513456 - DNA, 25 bp, Homo sapien
gcatcaataacatgggatattgcct

SEQ ID NO: 1513457 - DNA, 25 bp, Homo sapien
ataacatgggatattgccttcttcc

SEQ ID NO: 1513458 - DNA, 25 bp, Homo sapien
tcaataacatgggatattgccttct

SEQ ID NO: 1513459 - DNA, 25 bp, Homo sapien
tcttgaccactaagtccccatcttt

SEQ ID NO: 1513460 - DNA, 25 bp, Homo sapien
tgtggacttttatctgtggattctt

SEQ ID NO: 1513461 - DNA, 25 bp, Homo sapien
tctttgtggacttttatctgtggat

SEQ ID NO: 1513462 - DNA, 25 bp, Homo sapien
tttgtggacttttatctgtggattc

SEQ ID NO: 1513463 - DNA, 25 bp, Homo sapien
gagctccagggaacaccccaggagc

SEQ ID NO: 1513464 - DNA, 25 bp, Homo sapien
ccctggtcagggccgggagggtcat

SEQ ID NO: 1513465 - DNA, 25 bp, Homo sapien
cagggaacaccccaggagccctggt

SEQ ID NO: 1513466 - DNA, 25 bp, Homo sapien
atcccctctgggcatgagctccagg

SEQ ID NO: 1513467 - DNA, 25 bp, Homo sapien
cttgtccctggtacggtttcttgca

SEQ ID NO: 1513468 - DNA, 25 bp, Homo sapien
tcatggccttgtagggaagaccctt

SEQ ID NO: 1513469 - DNA, 25 bp, Homo sapien
gatatctgcgtgcttcatggccttg

SEQ ID NO: 1513470 - DNA, 25 bp, Homo sapien
tcggaaagagattcctcccgcagga

SEQ ID NO: 1513471 - DNA, 25 bp, Homo sapien
ggattcctagacagactcctggact

SEQ ID NO: 1513472 - DNA, 25 bp, Homo sapien
tccttcaaggcccagatgcaatggc

SEQ ID NO: 1513473 - DNA, 25 bp, Homo sapien
ttcgctgcctaggaaacttctattc

SEQ ID NO: 1513474 - DNA, 25 bp, Homo sapien
ccttcctggattcctagacagactc

SEQ ID NO: 1513475 - DNA, 25 bp, Homo sapien
gtgtcctagcagcgcacactcagca

SEQ ID NO: 1513476 - DNA, 25 bp, Homo sapien
tcctagcagcgcacactcagcatgt

SEQ ID NO: 1513477 - DNA, 25 bp, Homo sapien
gctgggtcttgtctgtggtcttctg

SEQ ID NO: 1513478 - DNA, 25 bp, Homo sapien
catttatgagatgtgaactctttgg

SEQ ID NO: 1513479 - DNA, 25 bp, Homo sapien
ctcgccttatttggacctaggattt

SEQ ID NO: 1513480 - DNA, 25 bp, Homo sapien
ccctcgccttatttggacctaggat

SEQ ID NO: 1513481 - DNA, 25 bp, Homo sapien
cctcgccttatttggacctaggatt

SEQ ID NO: 1513482 - DNA, 25 bp, Homo sapien
ctgcggcagtcaggggctgtggctg

SEQ ID NO: 1513483 - DNA, 25 bp, Homo sapien
tgcggcagtcaggggctgtggctgt

SEQ ID NO: 1513484 - DNA, 25 bp, Homo sapien
gggtgcgcggcgggctctgtggggg

SEQ ID NO: 1513485 - DNA, 25 bp, Homo sapien
tggggtgcgcggcgggctctgtggg

SEQ ID NO: 1513486 - DNA, 25 bp, Homo sapien
gcacttgtcctcagcggctttctta

SEQ ID NO: 1513487 - DNA, 25 bp, Homo sapien
cttgcacttgtcctcagcggctttc

SEQ ID NO: 1513488 - DNA, 25 bp, Homo sapien
tgtcctcagcggctttcttatccgc

SEQ ID NO: 1513489 - DNA, 25 bp, Homo sapien
cctccgcctgctccgcgcggtcgat

SEQ ID NO: 1513490 - DNA, 25 bp, Homo sapien
gaaaccttgacatgctggtctctga

SEQ ID NO: 1513491 - DNA, 25 bp, Homo sapien
tggtctctgagcattccggcagctg

SEQ ID NO: 1513492 - DNA, 25 bp, Homo sapien
cagggtcagagtctatagggcctga

SEQ ID NO: 1513493 - DNA, 25 bp, Homo sapien
gagcctggaagcctgactccaaatc

SEQ ID NO: 1513494 - DNA, 25 bp, Homo sapien
gtcggaggccttcttctccgtgagc

SEQ ID NO: 1513495 - DNA, 25 bp, Homo sapien
gtttcttctggaggtgcgtcagctc

SEQ ID NO: 1513496 - DNA, 25 bp, Homo sapien
gaatatttatccagctcgtcctctg

SEQ ID NO: 1513497 - DNA, 25 bp, Homo sapien
ccttcaggtcctcggaatatttatc

SEQ ID NO: 1513498 - DNA, 25 bp, Homo sapien
gggagggcctgacgtcggcaccgct

SEQ ID NO: 1513499 - DNA, 25 bp, Homo sapien
gaccgccgacgtcagcaccgctggg

SEQ ID NO: 1513500 - DNA, 25 bp, Homo sapien
aagcctttgcctgcgcgggggccgc

SEQ ID NO: 1513501 - DNA, 25 bp, Homo sapien
gcgatgaggtcacccggccggaccg

SEQ ID NO: 1513502 - DNA, 25 bp, Homo sapien
gaggcgcacgggcagcggcggacgc

SEQ ID NO: 1513503 - DNA, 25 bp, Homo sapien
acgggcagcggcggacgctcggctg

SEQ ID NO: 1513504 - DNA, 25 bp, Homo sapien
gggcagcggcggacgctcggctggg

SEQ ID NO: 1513505 - DNA, 25 bp, Homo sapien
gcgcagaggcgcacgggcagcggcg

SEQ ID NO: 1513506 - DNA, 25 bp, Homo sapien
tgcgcgcggtcttccgcctcgtccg

SEQ ID NO: 1513507 - DNA, 25 bp, Homo sapien
cagggcctggatcttgcgtttcacc

SEQ ID NO: 1513508 - DNA, 25 bp, Homo sapien
gcgctcgccgtccagctcccgctgc

SEQ ID NO: 1513509 - DNA, 25 bp, Homo sapien
gccctgcgcgcggtcttccgcctcg

SEQ ID NO: 1513510 - DNA, 25 bp, Homo sapien
tatcagtcctactcgcagatgggaa

SEQ ID NO: 1513511 - DNA, 25 bp, Homo sapien
tgattatttacaaagcgccaggctc

SEQ ID NO: 1513512 - DNA, 25 bp, Homo sapien
gattagaggcttcaaccaaggccca

SEQ ID NO: 1513513 - DNA, 25 bp, Homo sapien
gaccggctaccgattgaggcttaca

SEQ ID NO: 1513514 - DNA, 25 bp, Homo sapien
tgtcttaagaaacgtcactgaggcc

SEQ ID NO: 1513515 - DNA, 25 bp, Homo sapien
tgaaaaactgctagtcacggccgag

SEQ ID NO: 1513516 - DNA, 25 bp, Homo sapien
aatctaaacgaaaccagctgtcggg

SEQ ID NO: 1513517 - DNA, 25 bp, Homo sapien
cacggccgagtcattttgggttcca

SEQ ID NO: 1513518 - DNA, 25 bp, Homo sapien
tcaaacgggcctcaaccgagaggaa

SEQ ID NO: 1513519 - DNA, 25 bp, Homo sapien
gctacgaggcaaggcgagttttcca

SEQ ID NO: 1513520 - DNA, 25 bp, Homo sapien
gaaaggcatctcttactgccacggt

SEQ ID NO: 1513521 - DNA, 25 bp, Homo sapien
tgtaactccagagggtggcgccgct

SEQ ID NO: 1513522 - DNA, 25 bp, Homo sapien
ccatgcaattaccaaggtgggacga

SEQ ID NO: 1513523 - DNA, 25 bp, Homo sapien
gataaatgcaagactatggagccct

SEQ ID NO: 1513524 - DNA, 25 bp, Homo sapien
gaagcattaaaccaggaactccagg

SEQ ID NO: 1513525 - DNA, 25 bp, Homo sapien
cacgtagagagttctagggctcact

SEQ ID NO: 1513526 - DNA, 25 bp, Homo sapien
ctgtagttccacatgctcaggaggc

SEQ ID NO: 1513527 - DNA, 25 bp, Homo sapien
gaggcagaagaatcacttgaacccg

SEQ ID NO: 1513528 - DNA, 25 bp, Homo sapien
ggaggcggaggttgccgtgagctga

SEQ ID NO: 1513529 - DNA, 25 bp, Homo sapien
tgtagttccacatgctcaggaggct

SEQ ID NO: 1513530 - DNA, 25 bp, Homo sapien
ctcaacgagctggatgcgtcggttg

SEQ ID NO: 1513531 - DNA, 25 bp, Homo sapien
tcaacgagctggatgcgtcggttga

SEQ ID NO: 1513532 - DNA, 25 bp, Homo sapien
tactttcacaccagctctgcgaggt

SEQ ID NO: 1513533 - DNA, 25 bp, Homo sapien
tggtttacaaagtgctgtcatgcac

SEQ ID NO: 1513534 - DNA, 25 bp, Homo sapien
ctacccatggagtgatggtttacaa

SEQ ID NO: 1513535 - DNA, 25 bp, Homo sapien
tgcctggccacggataaacatctct

SEQ ID NO: 1513536 - DNA, 25 bp, Homo sapien
gagaaaatacgagaagcagtgcttt

SEQ ID NO: 1513537 - DNA, 25 bp, Homo sapien
gcatccggcctacctgaaatttggt

SEQ ID NO: 1513538 - DNA, 25 bp, Homo sapien
gaaatttggtgtctagagaacacta

SEQ ID NO: 1513539 - DNA, 25 bp, Homo sapien
ctttcagagaaaatacgagaagcag

SEQ ID NO: 1513540 - DNA, 25 bp, Homo sapien
ccttcatctttactaccaggcactt

SEQ ID NO: 1513541 - DNA, 25 bp, Homo sapien
cttcatctttactaccaggcacttt

SEQ ID NO: 1513542 - DNA, 25 bp, Homo sapien
cccttcatctttactaccaggcact

SEQ ID NO: 1513543 - DNA, 25 bp, Homo sapien
cggtcagcctcttccgcaatgtgct

SEQ ID NO: 1513544 - DNA, 25 bp, Homo sapien
ctcctcgtatttgcggtcagcctct

SEQ ID NO: 1513545 - DNA, 25 bp, Homo sapien
tcatggcccggttttctatcacctt

SEQ ID NO: 1513546 - DNA, 25 bp, Homo sapien
agcctcttccgcaatgtgcttggcc

SEQ ID NO: 1513547 - DNA, 25 bp, Homo sapien
gatagtttcctagccaagtggttgt

SEQ ID NO: 1513548 - DNA, 25 bp, Homo sapien
gaaactccatggcttgggaccacaa

SEQ ID NO: 1513549 - DNA, 25 bp, Homo sapien
tacgttagacaagcgtccgcagcac

SEQ ID NO: 1513550 - DNA, 25 bp, Homo sapien
caaacatatgttcacgcaggaggac

SEQ ID NO: 1513551 - DNA, 25 bp, Homo sapien
ttcagacacctccgcacgctcctct

SEQ ID NO: 1513552 - DNA, 25 bp, Homo sapien
ccaggatgaccagcttacgagctac

SEQ ID NO: 1513553 - DNA, 25 bp, Homo sapien
cctccaggatgaccagcttacgagc

SEQ ID NO: 1513554 - DNA, 25 bp, Homo sapien
agacacctccgcacgctcctctgcc

SEQ ID NO: 1513555 - DNA, 25 bp, Homo sapien
aaagggtcaacacgtgggcagtgct

SEQ ID NO: 1513556 - DNA, 25 bp, Homo sapien
aaaagatgagccatgagcccctgac

SEQ ID NO: 1513557 - DNA, 25 bp, Homo sapien
cagtgttctgttaagatggcacagc

SEQ ID NO: 1513558 - DNA, 25 bp, Homo sapien
ggcagtaagaacaagtcaccacctc

SEQ ID NO: 1513559 - DNA, 25 bp, Homo sapien
tcagattgttagtaacattcttgag

SEQ ID NO: 1513560 - DNA, 25 bp, Homo sapien
cagattgttagtaacattcttgagt

SEQ ID NO: 1513561 - DNA, 25 bp, Homo sapien
tttcagattgttagtaacattcttg

SEQ ID NO: 1513562 - DNA, 25 bp, Homo sapien
gatttcagattgttagtaacattct

SEQ ID NO: 1513563 - DNA, 25 bp, Homo sapien
actgctttaagaaaaggaggcccag

SEQ ID NO: 1513564 - DNA, 25 bp, Homo sapien
ctttaagaaaaggaggcccagccag

SEQ ID NO: 1513565 - DNA, 25 bp, Homo sapien
tgctttaagaaaaggaggcccagcc

SEQ ID NO: 1513566 - DNA, 25 bp, Homo sapien
ctgtgggagaaaccaaaacactgct

SEQ ID NO: 1513567 - DNA, 25 bp, Homo sapien
ctctttcagtttgtcagacagaagt

SEQ ID NO: 1513568 - DNA, 25 bp, Homo sapien
ttcagtttgtcagacagaagtttaa

SEQ ID NO: 1513569 - DNA, 25 bp, Homo sapien
gtttgtcagacagaagtttaatttc

SEQ ID NO: 1513570 - DNA, 25 bp, Homo sapien
cttcttcatatttgtcctccttttc

SEQ ID NO: 1513571 - DNA, 25 bp, Homo sapien
tccagttttgcaaccgttctctctg

SEQ ID NO: 1513572 - DNA, 25 bp, Homo sapien
ccagttttgcaaccgttctctctgc

SEQ ID NO: 1513573 - DNA, 25 bp, Homo sapien
gggcaaggcaaacatttagatggta

SEQ ID NO: 1513574 - DNA, 25 bp, Homo sapien
cactatgcgctttactttcctaagg

SEQ ID NO: 1513575 - DNA, 25 bp, Homo sapien
tgacatcactatgcgctttactttc

SEQ ID NO: 1513576 - DNA, 25 bp, Homo sapien
aaacattccccaactgtccgtggat

SEQ ID NO: 1513577 - DNA, 25 bp, Homo sapien
tctgaggccgaatgttaaacactgg

SEQ ID NO: 1513578 - DNA, 25 bp, Homo sapien
ggaagattccatttgaaccccaaga

SEQ ID NO: 1513579 - DNA, 25 bp, Homo sapien
gataagctttgagctccctgggaca

SEQ ID NO: 1513580 - DNA, 25 bp, Homo sapien
actagtctttattgcagtccctaca

SEQ ID NO: 1513581 - DNA, 25 bp, Homo sapien
tcaggctatggttaagggcacacag

SEQ ID NO: 1513582 - DNA, 25 bp, Homo sapien
gagagaggctaaccacccactttgt

SEQ ID NO: 1513583 - DNA, 25 bp, Homo sapien
ttatttcggttgtagagtcacagac

SEQ ID NO: 1513584 - DNA, 25 bp, Homo sapien
aagaaggctctgacgttcaaaccag

SEQ ID NO: 1513585 - DNA, 25 bp, Homo sapien
gtaagcccacgttctcttctttggc

SEQ ID NO: 1513586 - DNA, 25 bp, Homo sapien
tgatgtaagcccacgttctcttctt

SEQ ID NO: 1513587 - DNA, 25 bp, Homo sapien
tccagtgtctgatgtaagcccacgt

SEQ ID NO: 1513588 - DNA, 25 bp, Homo sapien
tgtctgatgtaagcccacgttctct

SEQ ID NO: 1513589 - DNA, 25 bp, Homo sapien
ggctgcctattctcccaggaaccaa

SEQ ID NO: 1513590 - DNA, 25 bp, Homo sapien
tccacgactagatactggggtctgt

SEQ ID NO: 1513591 - DNA, 25 bp, Homo sapien
tttggtcatgtattcataatttgct

SEQ ID NO: 1513592 - DNA, 25 bp, Homo sapien
atatccacgactagatactggggtc

SEQ ID NO: 1513593 - DNA, 25 bp, Homo sapien
tagtttgaccaacagttgacccaaa

SEQ ID NO: 1513594 - DNA, 25 bp, Homo sapien
tctcctatagtttgaccaacagttg

SEQ ID NO: 1513595 - DNA, 25 bp, Homo sapien
ctggtctctcctatagtttgaccaa

SEQ ID NO: 1513596 - DNA, 25 bp, Homo sapien
cctatagtttgaccaacagttgacc

SEQ ID NO: 1513597 - DNA, 25 bp, Homo sapien
gaagatgtttgtcctgcatggtgga

SEQ ID NO: 1513598 - DNA, 25 bp, Homo sapien
gggccaggattcttaggttgatcta

SEQ ID NO: 1513599 - DNA, 25 bp, Homo sapien
tctacgttgactgcttgagaagatg

SEQ ID NO: 1513600 - DNA, 25 bp, Homo sapien
gatggaaaatccctacccatgtgat

SEQ ID NO: 1513601 - DNA, 25 bp, Homo sapien
gataaaaactcttttgctcaactta

SEQ ID NO: 1513602 - DNA, 25 bp, Homo sapien
ctcttttgctcaacttagtaatgac

SEQ ID NO: 1513603 - DNA, 25 bp, Homo sapien
gaggccctttctgctaatagataaa

SEQ ID NO: 1513604 - DNA, 25 bp, Homo sapien
agtgggtcattactggaatgagaca

SEQ ID NO: 1513605 - DNA, 25 bp, Homo sapien
agccctgtctacagaatccttcatt

SEQ ID NO: 1513606 - DNA, 25 bp, Homo sapien
tcaaacaaagccgatacgtgcagcc

SEQ ID NO: 1513607 - DNA, 25 bp, Homo sapien
agaagtcaaacaaagccgatacgtg

SEQ ID NO: 1513608 - DNA, 25 bp, Homo sapien
aaacaaagccgatacgtgcagccct

SEQ ID NO: 1513609 - DNA, 25 bp, Homo sapien
tatttcctgggtagtgtggtgctga

SEQ ID NO: 1513610 - DNA, 25 bp, Homo sapien
tccattgcacaatttgctagtgtat

SEQ ID NO: 1513611 - DNA, 25 bp, Homo sapien
agtgtatttcctgggtagtgtggtg

SEQ ID NO: 1513612 - DNA, 25 bp, Homo sapien
tttattccattgcacaatttgctag

SEQ ID NO: 1513613 - DNA, 25 bp, Homo sapien
tttgaccaaaatgtagaaaaagtga

SEQ ID NO: 1513614 - DNA, 25 bp, Homo sapien
ccaaaatgtagaaaaagtgatacta

SEQ ID NO: 1513615 - DNA, 25 bp, Homo sapien
gaaaaagtgatactattacatatga

SEQ ID NO: 1513616 - DNA, 25 bp, Homo sapien
gaccaaaatgtagaaaaagtgatac

SEQ ID NO: 1513617 - DNA, 25 bp, Homo sapien
ccccttattggctccaggcccgctg

SEQ ID NO: 1513618 - DNA, 25 bp, Homo sapien
cattggccggcactagggagagcac

SEQ ID NO: 1513619 - DNA, 25 bp, Homo sapien
gagcccgccccttattggctccagg

SEQ ID NO: 1513620 - DNA, 25 bp, Homo sapien
gcagcccgagcgcacctcccattgg

SEQ ID NO: 1513621 - DNA, 25 bp, Homo sapien
cccgacgggaagtgcggccagcgcc

SEQ ID NO: 1513622 - DNA, 25 bp, Homo sapien
ccgacgggaagtgcggccagcgcct

SEQ ID NO: 1513623 - DNA, 25 bp, Homo sapien
tctccccgacgggaagtgcggccag

SEQ ID NO: 1513624 - DNA, 25 bp, Homo sapien
ctctctccccgacgggaagtgcggc

SEQ ID NO: 1513625 - DNA, 25 bp, Homo sapien
tgaacaggtaatcgtaggtcttcgc

SEQ ID NO: 1513626 - DNA, 25 bp, Homo sapien
cagcttgaacaggtaatcgtaggtc

SEQ ID NO: 1513627 - DNA, 25 bp, Homo sapien
acaggtaatcgtaggtcttcgccat

SEQ ID NO: 1513628 - DNA, 25 bp, Homo sapien
cagcagcttgaacaggtaatcgtag

SEQ ID NO: 1513629 - DNA, 25 bp, Homo sapien
caaaagaaccgcttcgagggctgct

SEQ ID NO: 1513630 - DNA, 25 bp, Homo sapien
taacacgccctaacgagcgggctga

SEQ ID NO: 1513631 - DNA, 25 bp, Homo sapien
tgtcagacgggctcataacagcact

SEQ ID NO: 1513632 - DNA, 25 bp, Homo sapien
tgaaaatgcacgtgaagcacttggc

SEQ ID NO: 1513633 - DNA, 25 bp, Homo sapien
ctgctctaaagacagcagggctcag

SEQ ID NO: 1513634 - DNA, 25 bp, Homo sapien
taggctgggcagacagtgtcactcc

SEQ ID NO: 1513635 - DNA, 25 bp, Homo sapien
tgcccaggctgaattaacgccactt

SEQ ID NO: 1513636 - DNA, 25 bp, Homo sapien
ttggttggagcacaagaattaccct

SEQ ID NO: 1513637 - DNA, 25 bp, Homo sapien
cgagctctatggtcctaattttaaa

SEQ ID NO: 1513638 - DNA, 25 bp, Homo sapien
ctctatggtcctaattttaaagtca

SEQ ID NO: 1513639 - DNA, 25 bp, Homo sapien
gctctatggtcctaattttaaagtc

SEQ ID NO: 1513640 - DNA, 25 bp, Homo sapien
gagctctatggtcctaattttaaag

SEQ ID NO: 1513641 - DNA, 25 bp, Homo sapien
atctgcagtttaattctcttgccat

SEQ ID NO: 1513642 - DNA, 25 bp, Homo sapien
catatctgcagtttaattctcttgc

SEQ ID NO: 1513643 - DNA, 25 bp, Homo sapien
tatctgcagtttaattctcttgcca

SEQ ID NO: 1513644 - DNA, 25 bp, Homo sapien
atatctgcagtttaattctcttgcc

SEQ ID NO: 1513645 - DNA, 25 bp, Homo sapien
tttctggttcacagaagagccagtc

SEQ ID NO: 1513646 - DNA, 25 bp, Homo sapien
gcttccagggaattctccctggagt

SEQ ID NO: 1513647 - DNA, 25 bp, Homo sapien
ttgcttccagggaattctccctgga

SEQ ID NO: 1513648 - DNA, 25 bp, Homo sapien
ctggagtttctggttcacagaagag

SEQ ID NO: 1513649 - DNA, 25 bp, Homo sapien
tgtgatcgtccgaaaccgttcctga

SEQ ID NO: 1513650 - DNA, 25 bp, Homo sapien
cattgcacccctgtagtaggccgtt

SEQ ID NO: 1513651 - DNA, 25 bp, Homo sapien
taggccgttgtgatcgtccgaaacc

SEQ ID NO: 1513652 - DNA, 25 bp, Homo sapien
ctgtagtaggccgttgtgatcgtcc

SEQ ID NO: 1513653 - DNA, 25 bp, Homo sapien
cctgggtgacggatataacggccga

SEQ ID NO: 1513654 - DNA, 25 bp, Homo sapien
cctggaagatcttcaagcttttggt

SEQ ID NO: 1513655 - DNA, 25 bp, Homo sapien
ctggaagatcttcaagcttttggta

SEQ ID NO: 1513656 - DNA, 25 bp, Homo sapien
tgacggatataacggccgacagccc

SEQ ID NO: 1513657 - DNA, 25 bp, Homo sapien
cctctgacggtctgtgtggttctcg

SEQ ID NO: 1513658 - DNA, 25 bp, Homo sapien
acggtctgtgtggttctcgatgtcc

SEQ ID NO: 1513659 - DNA, 25 bp, Homo sapien
gtgccatcacaagtccccctttgtt

SEQ ID NO: 1513660 - DNA, 25 bp, Homo sapien
tgtgtggttctcgatgtccttgtgg

SEQ ID NO: 1513661 - DNA, 25 bp, Homo sapien
gaagacacaggtgcctgatcggctg

SEQ ID NO: 1513662 - DNA, 25 bp, Homo sapien
gagaagacacaggtgcctgatcggc

SEQ ID NO: 1513663 - DNA, 25 bp, Homo sapien
acaggtgcctgatcggctgcaggct

SEQ ID NO: 1513664 - DNA, 25 bp, Homo sapien
acacaggtgcctgatcggctgcagg

SEQ ID NO: 1513665 - DNA, 25 bp, Homo sapien
ctcgttggtgatgtcgtagaccagc

SEQ ID NO: 1513666 - DNA, 25 bp, Homo sapien
ctcctcaatgttgcgaatccagttc

SEQ ID NO: 1513667 - DNA, 25 bp, Homo sapien
gaaggacttctcgttggtgatgtcg

SEQ ID NO: 1513668 - DNA, 25 bp, Homo sapien
ccagttccggatgttgtcgaaggac

SEQ ID NO: 1513669 - DNA, 25 bp, Homo sapien
tcttttcgacgtctgcagaggcgtg

SEQ ID NO: 1513670 - DNA, 25 bp, Homo sapien
ggaaacttgtctcttgtcattcaca

SEQ ID NO: 1513671 - DNA, 25 bp, Homo sapien
ttccttggaaacttgtctcttgtca

SEQ ID NO: 1513672 - DNA, 25 bp, Homo sapien
atcacacttgttcccgagtatcatc

SEQ ID NO: 1513673 - DNA, 25 bp, Homo sapien
tgatgttggccttcgcgctggtctc

SEQ ID NO: 1513674 - DNA, 25 bp, Homo sapien
tttccacattgatgttggccttcgc

SEQ ID NO: 1513675 - DNA, 25 bp, Homo sapien
catgaacttgattccatagtcgagg

SEQ ID NO: 1513676 - DNA, 25 bp, Homo sapien
acttgattccatagtcgagggccag

SEQ ID NO: 1513677 - DNA, 25 bp, Homo sapien
tatctctggcgagagtgaaaaatgc

SEQ ID NO: 1513678 - DNA, 25 bp, Homo sapien
gatatctctggcgagagtgaaaaat

SEQ ID NO: 1513679 - DNA, 25 bp, Homo sapien
atatctctggcgagagtgaaaaatg

SEQ ID NO: 1513680 - DNA, 25 bp, Homo sapien
ccctttcccagcaatgtcccatggg

SEQ ID NO: 1513681 - DNA, 25 bp, Homo sapien
ccagcaatgtcccatggggtctggc

SEQ ID NO: 1513682 - DNA, 25 bp, Homo sapien
ttcccagcaatgtcccatggggtct

SEQ ID NO: 1513683 - DNA, 25 bp, Homo sapien
agcaatgtcccatggggtctggctg

SEQ ID NO: 1513684 - DNA, 25 bp, Homo sapien
tctggcccttgagtggaatggaaaa

SEQ ID NO: 1513685 - DNA, 25 bp, Homo sapien
ggaaaaggccgtgtgctccctgcta

SEQ ID NO: 1513686 - DNA, 25 bp, Homo sapien
ggattcaccgggcacggccttgtct

SEQ ID NO: 1513687 - DNA, 25 bp, Homo sapien
gccttgtctgcttgggcagcgtccc

SEQ ID NO: 1513688 - DNA, 25 bp, Homo sapien
gctgtcacaacttgtagcatctggg

SEQ ID NO: 1513689 - DNA, 25 bp, Homo sapien
ctgtcacaacttgtagcatctgggg

SEQ ID NO: 1513690 - DNA, 25 bp, Homo sapien
tctgaggttatcactgagaatcagc

SEQ ID NO: 1513691 - DNA, 25 bp, Homo sapien
catccattaccattccagccatcca

SEQ ID NO: 1513692 - DNA, 25 bp, Homo sapien
aaccaactaaccaacgagccatcca

SEQ ID NO: 1513693 - DNA, 25 bp, Homo sapien
gagaatcagcactacgtctcacaat

SEQ ID NO: 1513694 - DNA, 25 bp, Homo sapien
gtgattttgactccctggttgctcc

SEQ ID NO: 1513695 - DNA, 25 bp, Homo sapien
catcggaaaaagctgctcctcttct

SEQ ID NO: 1513696 - DNA, 25 bp, Homo sapien
gaacacatcggaaaaagctgctcct

SEQ ID NO: 1513697 - DNA, 25 bp, Homo sapien
tcctcttctgctggtccggtgtgat

SEQ ID NO: 1513698 - DNA, 25 bp, Homo sapien
tgggcccgttcagcagatgttacag

SEQ ID NO: 1513699 - DNA, 25 bp, Homo sapien
caattgcattctggtggccgtgggc

SEQ ID NO: 1513700 - DNA, 25 bp, Homo sapien
gaatatacaacgtgtgggtgggccc

SEQ ID NO: 1513701 - DNA, 25 bp, Homo sapien
gaagtgggcgccaaatctcctgggt

SEQ ID NO: 1513702 - DNA, 25 bp, Homo sapien
tgacggctgaaaatcaagccagact

SEQ ID NO: 1513703 - DNA, 25 bp, Homo sapien
aaaacagaacccaatgatgacggct

SEQ ID NO: 1513704 - DNA, 25 bp, Homo sapien
gtcccagtcgcagtccctatgggac

SEQ ID NO: 1513705 - DNA, 25 bp, Homo sapien
gccagactgctgtgcggtcagcttg

SEQ ID NO: 1513706 - DNA, 25 bp, Homo sapien
gctggtgacacccccctggcgtggt

SEQ ID NO: 1513707 - DNA, 25 bp, Homo sapien
ggtgacacccccctggcgtggttga

SEQ ID NO: 1513708 - DNA, 25 bp, Homo sapien
gtgacacccccctggcgtggttgac

SEQ ID NO: 1513709 - DNA, 25 bp, Homo sapien
tggtgacacccccctggcgtggttg

SEQ ID NO: 1513710 - DNA, 25 bp, Homo sapien
ttcaaaagaaacgatgatgccaatg

SEQ ID NO: 1513711 - DNA, 25 bp, Homo sapien
catttatcgatgtaaacagagcatg

SEQ ID NO: 1513712 - DNA, 25 bp, Homo sapien
taagtgcatttatcgatgtaaacag

SEQ ID NO: 1513713 - DNA, 25 bp, Homo sapien
catgttagagattcccggggagagc

SEQ ID NO: 1513714 - DNA, 25 bp, Homo sapien
tttccttaagtgcatttatcgatgt

SEQ ID NO: 1513715 - DNA, 25 bp, Homo sapien
tcctagggaatgactggacctgggt

SEQ ID NO: 1513716 - DNA, 25 bp, Homo sapien
tgtgagtacagctctctgccaagtc

SEQ ID NO: 1513717 - DNA, 25 bp, Homo sapien
tccgtgtggcctacagggaaaatgt

SEQ ID NO: 1513718 - DNA, 25 bp, Homo sapien
tgccagaagccaggtgacgcaggct

SEQ ID NO: 1513719 - DNA, 25 bp, Homo sapien
agcacctcgtctgccctctgtggtc

SEQ ID NO: 1513720 - DNA, 25 bp, Homo sapien
gcagcacctcgtctgccctctgtgg

SEQ ID NO: 1513721 - DNA, 25 bp, Homo sapien
cacctcgtctgccctctgtggtcaa

SEQ ID NO: 1513722 - DNA, 25 bp, Homo sapien
acctcgtctgccctctgtggtcaac

SEQ ID NO: 1513723 - DNA, 25 bp, Homo sapien
tgcagtcttgaactgctggactcaa

SEQ ID NO: 1513724 - DNA, 25 bp, Homo sapien
tacaggcacacaccaccacacctga

SEQ ID NO: 1513725 - DNA, 25 bp, Homo sapien
actgcagtcttgaactgctggactc

SEQ ID NO: 1513726 - DNA, 25 bp, Homo sapien
tcactgcagtcttgaactgctggac

SEQ ID NO: 1513727 - DNA, 25 bp, Homo sapien
gattcaaggtctgcacgtcaatggg

SEQ ID NO: 1513728 - DNA, 25 bp, Homo sapien
tgccccgaggcagttcctgtttcct

SEQ ID NO: 1513729 - DNA, 25 bp, Homo sapien
gcaggagcctgggtttcgattcaag

SEQ ID NO: 1513730 - DNA, 25 bp, Homo sapien
tggccgaggccctcgctgtagctgt

SEQ ID NO: 1513731 - DNA, 25 bp, Homo sapien
gtgcacaaaccagtccagccgtggg

SEQ ID NO: 1513732 - DNA, 25 bp, Homo sapien
catctgggtgtgcacaaaccagtcc

SEQ ID NO: 1513733 - DNA, 25 bp, Homo sapien
agattgcaccatggaaccactcggg

SEQ ID NO: 1513734 - DNA, 25 bp, Homo sapien
gagattgcaccatggaaccactcgg

SEQ ID NO: 1513735 - DNA, 25 bp, Homo sapien
agctgcttggagtactgtgttcaga

SEQ ID NO: 1513736 - DNA, 25 bp, Homo sapien
gctgcttggagtactgtgttcagaa

SEQ ID NO: 1513737 - DNA, 25 bp, Homo sapien
ggagactttggtcctgcactgttca

SEQ ID NO: 1513738 - DNA, 25 bp, Homo sapien
gtgagccaccgaaatcagtctattt

SEQ ID NO: 1513739 - DNA, 25 bp, Homo sapien
tgggacaagctggggagactttggt

SEQ ID NO: 1513740 - DNA, 25 bp, Homo sapien
agactttggtcctgcactgttcaat

SEQ ID NO: 1513741 - DNA, 25 bp, Homo sapien
gcatgacagctgctacctggtaagt

SEQ ID NO: 1513742 - DNA, 25 bp, Homo sapien
gatgcattcgagttcataacccagc

SEQ ID NO: 1513743 - DNA, 25 bp, Homo sapien
tgatgaccttgatctcaggccagac

SEQ ID NO: 1513744 - DNA, 25 bp, Homo sapien
gagagtaaactccacttccaaggct

SEQ ID NO: 1513745 - DNA, 25 bp, Homo sapien
gaaaggatcccagtggctgtgactc

SEQ ID NO: 1513746 - DNA, 25 bp, Homo sapien
gagtgtgtagcccacatggctgtga

SEQ ID NO: 1513747 - DNA, 25 bp, Homo sapien
agtgtgtagcccacatggctgtgac

SEQ ID NO: 1513748 - DNA, 25 bp, Homo sapien
tgatgagaaaggatcccagtggctg

SEQ ID NO: 1513749 - DNA, 25 bp, Homo sapien
taacacaggagtacaaaggctggcc

SEQ ID NO: 1513750 - DNA, 25 bp, Homo sapien
tgccactacggacaaaagcttcact

SEQ ID NO: 1513751 - DNA, 25 bp, Homo sapien
tcattgcttggctagcagctcccgt

SEQ ID NO: 1513752 - DNA, 25 bp, Homo sapien
gagaagctatgacatgaagcacccc

SEQ ID NO: 1513753 - DNA, 25 bp, Homo sapien
ggatcatgaaagtcccatcatccaa

SEQ ID NO: 1513754 - DNA, 25 bp, Homo sapien
tctccccggggatcatgaaagtccc

SEQ ID NO: 1513755 - DNA, 25 bp, Homo sapien
gagcttcaccatgaaatggcagcag

SEQ ID NO: 1513756 - DNA, 25 bp, Homo sapien
ccaagagcttcaccatgaaatggca

SEQ ID NO: 1513757 - DNA, 25 bp, Homo sapien
cgcggctcaattggcttctgctggt

SEQ ID NO: 1513758 - DNA, 25 bp, Homo sapien
cctgcgcggctcaattggcttctgc

SEQ ID NO: 1513759 - DNA, 25 bp, Homo sapien
tccctgcgcggctcaattggcttct

SEQ ID NO: 1513760 - DNA, 25 bp, Homo sapien
agctccctgcgcggctcaattggct

SEQ ID NO: 1513761 - DNA, 25 bp, Homo sapien
acatgaacccttataaaaaatcagc

SEQ ID NO: 1513762 - DNA, 25 bp, Homo sapien
cctggagggcggagccatggggaag

SEQ ID NO: 1513763 - DNA, 25 bp, Homo sapien
ctggcacatgaacccttataaaaaa

SEQ ID NO: 1513764 - DNA, 25 bp, Homo sapien
gggaagcaggaaccacaacggagac

SEQ ID NO: 1513765 - DNA, 25 bp, Homo sapien
caggcccactgagtcctataaggaa

SEQ ID NO: 1513766 - DNA, 25 bp, Homo sapien
caacagtttcttgggcgctaggtca

SEQ ID NO: 1513767 - DNA, 25 bp, Homo sapien
tttcttagggattgggacacaccca

SEQ ID NO: 1513768 - DNA, 25 bp, Homo sapien
gcacgttcttgggagctaggccaca

SEQ ID NO: 1513769 - DNA, 25 bp, Homo sapien
tgcagggcggaaggggcctgtagct

SEQ ID NO: 1513770 - DNA, 25 bp, Homo sapien
gcagggcggaaggggcctgtagctc

SEQ ID NO: 1513771 - DNA, 25 bp, Homo sapien
ggaagagatcctcgtaatccacgtt

SEQ ID NO: 1513772 - DNA, 25 bp, Homo sapien
cgtaatccacgtttgcgggatcctt

SEQ ID NO: 1513773 - DNA, 25 bp, Homo sapien
tcctcggccactgcgttggagtaga

SEQ ID NO: 1513774 - DNA, 25 bp, Homo sapien
ggagtagaggaagagatcctcgtaa

SEQ ID NO: 1513775 - DNA, 25 bp, Homo sapien
tctcggtgttgcaaaagcactggaa

SEQ ID NO: 1513776 - DNA, 25 bp, Homo sapien
gtttgaattttaatctcggtgttgc

SEQ ID NO: 1513777 - DNA, 25 bp, Homo sapien
gatcgcattctcattctagaaggag

SEQ ID NO: 1513778 - DNA, 25 bp, Homo sapien
gcaccaagctgtaggatcgcattct

SEQ ID NO: 1513779 - DNA, 25 bp, Homo sapien
aacaacagacggtatggcagcaggg

SEQ ID NO: 1513780 - DNA, 25 bp, Homo sapien
ccccgaggctagcttggtgtgtctg

SEQ ID NO: 1513781 - DNA, 25 bp, Homo sapien
cagagaccccgaggctagcttggtg

SEQ ID NO: 1513782 - DNA, 25 bp, Homo sapien
gcttggtgtgtctgaacaacagacg

SEQ ID NO: 1513783 - DNA, 25 bp, Homo sapien
cgagcctagactgtgccattccact

SEQ ID NO: 1513784 - DNA, 25 bp, Homo sapien
gcagcgagcctagactgtgccattc

SEQ ID NO: 1513785 - DNA, 25 bp, Homo sapien
ccactccagcttggtcgacaaagca

SEQ ID NO: 1513786 - DNA, 25 bp, Homo sapien
attccactccagcttggtcgacaaa

SEQ ID NO: 1513787 - DNA, 25 bp, Homo sapien
cggatgccagaggtcacacgtgaac

SEQ ID NO: 1513788 - DNA, 25 bp, Homo sapien
tttgcaggctgtaccatccgtctca

SEQ ID NO: 1513789 - DNA, 25 bp, Homo sapien
ctggcctggcaaacttcttttacaa

SEQ ID NO: 1513790 - DNA, 25 bp, Homo sapien
ccgtctcaattatgtagctctgctg

SEQ ID NO: 1513791 - DNA, 25 bp, Homo sapien
tttctggcgggtctctccaagaggg

SEQ ID NO: 1513792 - DNA, 25 bp, Homo sapien
gatgtggccacacagggatccgtgt

SEQ ID NO: 1513793 - DNA, 25 bp, Homo sapien
tgacgacaagttcacagtggcgagg

SEQ ID NO: 1513794 - DNA, 25 bp, Homo sapien
tccggacatccaagagtgacgacaa

SEQ ID NO: 1513795 - DNA, 25 bp, Homo sapien
gggtcacctcaatgcagctgaccga

SEQ ID NO: 1513796 - DNA, 25 bp, Homo sapien
tctcactaccatttggtgccaactc

SEQ ID NO: 1513797 - DNA, 25 bp, Homo sapien
ggtcacctcaatgcagctgaccgac

SEQ ID NO: 1513798 - DNA, 25 bp, Homo sapien
ctgggaggatagggctctcactacc

SEQ ID NO: 1513799 - DNA, 25 bp, Homo sapien
tccgggagctggtcgttctcaggct

SEQ ID NO: 1513800 - DNA, 25 bp, Homo sapien
gttgttggtactcctccgggagctg

SEQ ID NO: 1513801 - DNA, 25 bp, Homo sapien
cgggagctggtcgttctcaggctct

SEQ ID NO: 1513802 - DNA, 25 bp, Homo sapien
tcctccgggagctggtcgttctcag

SEQ ID NO: 1513803 - DNA, 25 bp, Homo sapien
gaagaaatgttaaggcattcaggag

SEQ ID NO: 1513804 - DNA, 25 bp, Homo sapien
cagcccctggcagcgagtcccagag

SEQ ID NO: 1513805 - DNA, 25 bp, Homo sapien
gggtggacctgttctctagcagtac

SEQ ID NO: 1513806 - DNA, 25 bp, Homo sapien
aagacccccggatgccatggtgtgg

SEQ ID NO: 1513807 - DNA, 25 bp, Homo sapien
cttcaaaacatggaggatgaccctc

SEQ ID NO: 1513808 - DNA, 25 bp, Homo sapien
aaataaccagctcaccccatgggtg

SEQ ID NO: 1513809 - DNA, 25 bp, Homo sapien
gaaaagggctcggattcacctggct

SEQ ID NO: 1513810 - DNA, 25 bp, Homo sapien
tgcagtgtgcttttagacaacagaa

SEQ ID NO: 1513811 - DNA, 25 bp, Homo sapien
caggccctcaacacaactcgtctcc

SEQ ID NO: 1513812 - DNA, 25 bp, Homo sapien
actgatgatgtccaagtgcctactg

SEQ ID NO: 1513813 - DNA, 25 bp, Homo sapien
cactgatgatgtccaagtgcctact

SEQ ID NO: 1513814 - DNA, 25 bp, Homo sapien
ccctcaacacaactcgtctccttca

SEQ ID NO: 1513815 - DNA, 25 bp, Homo sapien
ccttctcctcgctagcttgcttccc

SEQ ID NO: 1513816 - DNA, 25 bp, Homo sapien
cagtccagtctccctttgtcctgtg

SEQ ID NO: 1513817 - DNA, 25 bp, Homo sapien
ggacccagtatacctcagtgtgcag

SEQ ID NO: 1513818 - DNA, 25 bp, Homo sapien
tgttcttggggacccagtatacctc

SEQ ID NO: 1513819 - DNA, 25 bp, Homo sapien
tatccttacccatggacacattcag

SEQ ID NO: 1513820 - DNA, 25 bp, Homo sapien
ccagacactggtacacaacagcctg

SEQ ID NO: 1513821 - DNA, 25 bp, Homo sapien
ggcagatgtggcctccccactgagg

SEQ ID NO: 1513822 - DNA, 25 bp, Homo sapien
cctggctgtaatttgagtctcatca

SEQ ID NO: 1513823 - DNA, 25 bp, Homo sapien
gacactctccagtgcttcggtagct

SEQ ID NO: 1513824 - DNA, 25 bp, Homo sapien
tcctgtttgcaaacactatttccgc

SEQ ID NO: 1513825 - DNA, 25 bp, Homo sapien
ggtagctggagtgccacacttcctg

SEQ ID NO: 1513826 - DNA, 25 bp, Homo sapien
gcaaacactatttccgcccgaatgg

SEQ ID NO: 1513827 - DNA, 25 bp, Homo sapien
tctgcgacgcctttcagcttcaggg

SEQ ID NO: 1513828 - DNA, 25 bp, Homo sapien
ttttggacctgctcgtaggcctcca

SEQ ID NO: 1513829 - DNA, 25 bp, Homo sapien
actcccagctctgcgacgcctttca

SEQ ID NO: 1513830 - DNA, 25 bp, Homo sapien
ccttttggacctgctcgtaggcctc

SEQ ID NO: 1513831 - DNA, 25 bp, Homo sapien
tggaaaaagacatgaggaggcggcg

SEQ ID NO: 1513832 - DNA, 25 bp, Homo sapien
atgaagacggaatcccgcgggccct

SEQ ID NO: 1513833 - DNA, 25 bp, Homo sapien
gggatgaagacggaatcccgcgggc

SEQ ID NO: 1513834 - DNA, 25 bp, Homo sapien
gcggcgggtcggaggatcagggcca

SEQ ID NO: 1513835 - DNA, 25 bp, Homo sapien
tctttttgctcgttcccattgcttc

SEQ ID NO: 1513836 - DNA, 25 bp, Homo sapien
cattttctcgaaggccgcctgggcc

SEQ ID NO: 1513837 - DNA, 25 bp, Homo sapien
tcgttctttttgctcgttcccattg

SEQ ID NO: 1513838 - DNA, 25 bp, Homo sapien
tcctgcattttctcgaaggccgcct

SEQ ID NO: 1513839 - DNA, 25 bp, Homo sapien
aaacaaagtcgtcatgggcatggcc

SEQ ID NO: 1513840 - DNA, 25 bp, Homo sapien
tacaatacaaacaaagtcgtcatgg

SEQ ID NO: 1513841 - DNA, 25 bp, Homo sapien
tcgtcatgggcatggccattcaata

SEQ ID NO: 1513842 - DNA, 25 bp, Homo sapien
catggccattcaatatcaacagctg

SEQ ID NO: 1513843 - DNA, 25 bp, Homo sapien
tggccgtggactcagttaactcgaa

SEQ ID NO: 1513844 - DNA, 25 bp, Homo sapien
tgctgtgcaggaagtctgatggccc

SEQ ID NO: 1513845 - DNA, 25 bp, Homo sapien
taactcgaaggaacacagtaccagt

SEQ ID NO: 1513846 - DNA, 25 bp, Homo sapien
taccagttctgggtccatgcataag

SEQ ID NO: 1513847 - DNA, 25 bp, Homo sapien
ggttttggatgccttctttaggatc

SEQ ID NO: 1513848 - DNA, 25 bp, Homo sapien
tctgcttgtgggttttggatgcctt

SEQ ID NO: 1513849 - DNA, 25 bp, Homo sapien
ctccactctctgcttgtgggttttg

SEQ ID NO: 1513850 - DNA, 25 bp, Homo sapien
tggatgccttctttaggatcctttc

SEQ ID NO: 1513851 - DNA, 25 bp, Homo sapien
tttgggaatgtcgtaatgctccgtg

SEQ ID NO: 1513852 - DNA, 25 bp, Homo sapien
aatgtcgtaatgctccgtgagtgtg

SEQ ID NO: 1513853 - DNA, 25 bp, Homo sapien
agtgtgtccaggtgtctgttgaagt

SEQ ID NO: 1513854 - DNA, 25 bp, Homo sapien
ggaatgtcgtaatgctccgtgagtg

SEQ ID NO: 1513855 - DNA, 25 bp, Homo sapien
tccagaatgagggtacacagcttcg

SEQ ID NO: 1513856 - DNA, 25 bp, Homo sapien
aagatgcaagggtgtgtgtagccat

SEQ ID NO: 1513857 - DNA, 25 bp, Homo sapien
caaggacgatcttactttaatcaag

SEQ ID NO: 1513858 - DNA, 25 bp, Homo sapien
cagcttcgaaaagcagtctgtagca

SEQ ID NO: 1513859 - DNA, 25 bp, Homo sapien
aacgaaaagggtgtatcttctgtat

SEQ ID NO: 1513860 - DNA, 25 bp, Homo sapien
catccaaacgaaaagggtgtatctt

SEQ ID NO: 1513861 - DNA, 25 bp, Homo sapien
tccatccaaacgaaaagggtgtatc

SEQ ID NO: 1513862 - DNA, 25 bp, Homo sapien
ccaaacgaaaagggtgtatcttctg

SEQ ID NO: 1513863 - DNA, 25 bp, Homo sapien
tgtcacccctgagacgtccgtaagg

SEQ ID NO: 1513864 - DNA, 25 bp, Homo sapien
gagcgttacatgcaactcgggtgaa

SEQ ID NO: 1513865 - DNA, 25 bp, Homo sapien
taaggtaggaatgccaaacaggatc

SEQ ID NO: 1513866 - DNA, 25 bp, Homo sapien
tggcaacacccattagaagcacctg

SEQ ID NO: 1513867 - DNA, 25 bp, Homo sapien
cacttccggttcggggagccgcgcg

SEQ ID NO: 1513868 - DNA, 25 bp, Homo sapien
ccgcccgcgacagctcacctccact

SEQ ID NO: 1513869 - DNA, 25 bp, Homo sapien
ctgctgggcgttgagcaaggccggg

SEQ ID NO: 1513870 - DNA, 25 bp, Homo sapien
ctgggcgttgagcaaggccgggcgc

SEQ ID NO: 1513871 - DNA, 25 bp, Homo sapien
gaggcctcggcagcggccgagggcg

SEQ ID NO: 1513872 - DNA, 25 bp, Homo sapien
ccagcacgtagacggcgctggcgga

SEQ ID NO: 1513873 - DNA, 25 bp, Homo sapien
cttgcccttcaggtccagcacgtag

SEQ ID NO: 1513874 - DNA, 25 bp, Homo sapien
ttgcccttcaggtccagcacgtaga

SEQ ID NO: 1513875 - DNA, 25 bp, Homo sapien
ttcaggtccagcacgtagacggcgc

SEQ ID NO: 1513876 - DNA, 25 bp, Homo sapien
tggaactgaagtggtccccttggtc

SEQ ID NO: 1513877 - DNA, 25 bp, Homo sapien
acaggaggtccgtgggtcgtggaat

SEQ ID NO: 1513878 - DNA, 25 bp, Homo sapien
tgggtcgtggaataagaaagggcat

SEQ ID NO: 1513879 - DNA, 25 bp, Homo sapien
gaggtccgtgggtcgtggaataaga

SEQ ID NO: 1513880 - DNA, 25 bp, Homo sapien
gtgggtcgtggaataagaaagggca

SEQ ID NO: 1513881 - DNA, 25 bp, Homo sapien
aggcacgcgtaggcctgagccgctc

SEQ ID NO: 1513882 - DNA, 25 bp, Homo sapien
atggggaggcacgcgtaggcctgag

SEQ ID NO: 1513883 - DNA, 25 bp, Homo sapien
gaggcacgcgtaggcctgagccgct

SEQ ID NO: 1513884 - DNA, 25 bp, Homo sapien
gggaggcacgcgtaggcctgagccg

SEQ ID NO: 1513885 - DNA, 25 bp, Homo sapien
gaagtgctccacctctgacatgtcc

SEQ ID NO: 1513886 - DNA, 25 bp, Homo sapien
catcaggatgggcatgaagtgctcc

SEQ ID NO: 1513887 - DNA, 25 bp, Homo sapien
tgtttgatccacatgaaacggaccc

SEQ ID NO: 1513888 - DNA, 25 bp, Homo sapien
tgacatgtccacgtcgccacggtag

SEQ ID NO: 1513889 - DNA, 25 bp, Homo sapien
gggagcacccccagcaaagggatac

SEQ ID NO: 1513890 - DNA, 25 bp, Homo sapien
aatgcttgcgctgtgcacaaaccag

SEQ ID NO: 1513891 - DNA, 25 bp, Homo sapien
acaaaccagccctgcttgcaggcgt

SEQ ID NO: 1513892 - DNA, 25 bp, Homo sapien
tgcaggcgtgtggatatgcacacac

SEQ ID NO: 1513893 - DNA, 25 bp, Homo sapien
tgcattgtctgcctgtctccgcagg

SEQ ID NO: 1513894 - DNA, 25 bp, Homo sapien
ctgcagtgaggggtcgttgttccca

SEQ ID NO: 1513895 - DNA, 25 bp, Homo sapien
actgaactgtgggaaggtgagggat

SEQ ID NO: 1513896 - DNA, 25 bp, Homo sapien
cagtgaggggtcgttgttcccactg

SEQ ID NO: 1513897 - DNA, 25 bp, Homo sapien
gaactgtgggaaggtgagggatccc

SEQ ID NO: 1513898 - DNA, 25 bp, Homo sapien
ctgcaccaccttatagaggaaagaa

SEQ ID NO: 1513899 - DNA, 25 bp, Homo sapien
gaaagaaaagaccagcgacacgcac

SEQ ID NO: 1513900 - DNA, 25 bp, Homo sapien
gacacgcacgcgttcttcttggatg

SEQ ID NO: 1513901 - DNA, 25 bp, Homo sapien
caccaccttatagaggaaagaaaag

SEQ ID NO: 1513902 - DNA, 25 bp, Homo sapien
ggtccacaagcagagccaagacaac

SEQ ID NO: 1513903 - DNA, 25 bp, Homo sapien
cacggcccctccgagcgagactcac

SEQ ID NO: 1513904 - DNA, 25 bp, Homo sapien
acaagcagagccaagacaacctcca

SEQ ID NO: 1513905 - DNA, 25 bp, Homo sapien
gcccacggcccctccgagcgagact

SEQ ID NO: 1513906 - DNA, 25 bp, Homo sapien
cagagaggctgctttagatcaaacc

SEQ ID NO: 1513907 - DNA, 25 bp, Homo sapien
tgggcgtcaggcatctgtgccttga

SEQ ID NO: 1513908 - DNA, 25 bp, Homo sapien
actacctttcatcagaagtggaatg

SEQ ID NO: 1513909 - DNA, 25 bp, Homo sapien
gcctggcgtgtcagctctctccaag

SEQ ID NO: 1513910 - DNA, 25 bp, Homo sapien
tgggggtagccgaagtccatgagct

SEQ ID NO: 1513911 - DNA, 25 bp, Homo sapien
cagctccttgaagtactcggaaaac

SEQ ID NO: 1513912 - DNA, 25 bp, Homo sapien
gctcgtagatgataacaaagttgtc

SEQ ID NO: 1513913 - DNA, 25 bp, Homo sapien
gctccttgaagtactcggaaaacac

SEQ ID NO: 1513914 - DNA, 25 bp, Homo sapien
gtgaaggaggtggtacccgcaccaa

SEQ ID NO: 1513915 - DNA, 25 bp, Homo sapien
gggcaggttctgaccgacttgaaaa

SEQ ID NO: 1513916 - DNA, 25 bp, Homo sapien
aatagcccttggatttcagcagctc

SEQ ID NO: 1513917 - DNA, 25 bp, Homo sapien
tggccttgacatttcggcagggttg

SEQ ID NO: 1513918 - DNA, 25 bp, Homo sapien
caagaggttgacagactcgatgacg

SEQ ID NO: 1513919 - DNA, 25 bp, Homo sapien
ttcggaccgccaggacaccgcgttg

SEQ ID NO: 1513920 - DNA, 25 bp, Homo sapien
gaacacctcattcttccgatacttg

SEQ ID NO: 1513921 - DNA, 25 bp, Homo sapien
actcgatgacgtccaagaacacctc

SEQ ID NO: 1513922 - DNA, 25 bp, Homo sapien
tacagaagaaggaaagaaaagaggc

SEQ ID NO: 1513923 - DNA, 25 bp, Homo sapien
cagaagaaggaaagaaaagaggcct

SEQ ID NO: 1513924 - DNA, 25 bp, Homo sapien
ctacagaagaaggaaagaaaagagg

SEQ ID NO: 1513925 - DNA, 25 bp, Homo sapien
atttctatcgtggaagagataaaac

SEQ ID NO: 1513926 - DNA, 25 bp, Homo sapien
tttctatcgtggaagagataaaacc

SEQ ID NO: 1513927 - DNA, 25 bp, Homo sapien
tttatttctatcgtggaagagataa

SEQ ID NO: 1513928 - DNA, 25 bp, Homo sapien
tatttctatcgtggaagagataaaa

SEQ ID NO: 1513929 - DNA, 25 bp, Homo sapien
tgttaccacacagaacggctctcgg

SEQ ID NO: 1513930 - DNA, 25 bp, Homo sapien
ggattctcagtcagcataaatgcta

SEQ ID NO: 1513931 - DNA, 25 bp, Homo sapien
catttcaatgagtggcccaaactga

SEQ ID NO: 1513932 - DNA, 25 bp, Homo sapien
aataatgtgcatgtatggattctca

SEQ ID NO: 1513933 - DNA, 25 bp, Homo sapien
tgtcctcatctcgcaagcggctccc

SEQ ID NO: 1513934 - DNA, 25 bp, Homo sapien
ctcatctcgcaagcggctccctgat

SEQ ID NO: 1513935 - DNA, 25 bp, Homo sapien
atctcgcaagcggctccctgatccc

SEQ ID NO: 1513936 - DNA, 25 bp, Homo sapien
tcctcatctcgcaagcggctccctg

SEQ ID NO: 1513937 - DNA, 25 bp, Homo sapien
aaactgaggtgccaagcaaatgaca

SEQ ID NO: 1513938 - DNA, 25 bp, Homo sapien
aactgaggtgccaagcaaatgacag

SEQ ID NO: 1513939 - DNA, 25 bp, Homo sapien
actgaggtgccaagcaaatgacagc

SEQ ID NO: 1513940 - DNA, 25 bp, Homo sapien
ctgaggtgccaagcaaatgacagcc

SEQ ID NO: 1513941 - DNA, 25 bp, Homo sapien
ccacgcctggctgagggtccccagg

SEQ ID NO: 1513942 - DNA, 25 bp, Homo sapien
acgcctggctgagggtccccaggct

SEQ ID NO: 1513943 - DNA, 25 bp, Homo sapien
gcctggctgagggtccccaggctca

SEQ ID NO: 1513944 - DNA, 25 bp, Homo sapien
cctggctgagggtccccaggctcac

SEQ ID NO: 1513945 - DNA, 25 bp, Homo sapien
tcgctgcgcaggacattgccgttgg

SEQ ID NO: 1513946 - DNA, 25 bp, Homo sapien
aagaggaccttgtcgttgaggccca

SEQ ID NO: 1513947 - DNA, 25 bp, Homo sapien
atggagcccacgatctcgctgcgca

SEQ ID NO: 1513948 - DNA, 25 bp, Homo sapien
tgcccgagaggaagactcgcatctt

SEQ ID NO: 1513949 - DNA, 25 bp, Homo sapien
tgttgagacggtaggacatgagctc

SEQ ID NO: 1513950 - DNA, 25 bp, Homo sapien
atgagctcgaactcgccgtcgggtg

SEQ ID NO: 1513951 - DNA, 25 bp, Homo sapien
tctcgaagcgtgatagccgcacaca

SEQ ID NO: 1513952 - DNA, 25 bp, Homo sapien
agctccacggatttgcttttgccgc

SEQ ID NO: 1513953 - DNA, 25 bp, Homo sapien
gtgcttctcgatcaccgactcgatc

SEQ ID NO: 1513954 - DNA, 25 bp, Homo sapien
cttgatcatgtactcgatgcggctg

SEQ ID NO: 1513955 - DNA, 25 bp, Homo sapien
cgatgcggctgtgggagtgcttctc

SEQ ID NO: 1513956 - DNA, 25 bp, Homo sapien
gactcgatccatatcaaaggcttga

SEQ ID NO: 1513957 - DNA, 25 bp, Homo sapien
tcttgaacttgggtgagtcggcatc

SEQ ID NO: 1513958 - DNA, 25 bp, Homo sapien
gggaaggacttgatggaccacacga

SEQ ID NO: 1513959 - DNA, 25 bp, Homo sapien
cattgggcacgggaatgtggatctc

SEQ ID NO: 1513960 - DNA, 25 bp, Homo sapien
tgttgaccgccgcttgaactggctt

SEQ ID NO: 1513961 - DNA, 25 bp, Homo sapien
gaaagggccttggacctgccagtgt

SEQ ID NO: 1513962 - DNA, 25 bp, Homo sapien
tgccagtgtggacggggctccttca

SEQ ID NO: 1513963 - DNA, 25 bp, Homo sapien
ggctgagcctgcacagaaagggcct

SEQ ID NO: 1513964 - DNA, 25 bp, Homo sapien
caggcagccgttccccttgatggca

SEQ ID NO: 1513965 - DNA, 25 bp, Homo sapien
aaacccactcgacgccacaaaggca

SEQ ID NO: 1513966 - DNA, 25 bp, Homo sapien
gaagaacaggcattgacaggcgtgc

SEQ ID NO: 1513967 - DNA, 25 bp, Homo sapien
cattgacaggcgtgctgccaaaggc

SEQ ID NO: 1513968 - DNA, 25 bp, Homo sapien
gctccccgggtaggaagaacaggca

SEQ ID NO: 1513969 - DNA, 25 bp, Homo sapien
ctggatgccggaggtagtgaagtaa

SEQ ID NO: 1513970 - DNA, 25 bp, Homo sapien
tgtcttcggcctccacactaggcag

SEQ ID NO: 1513971 - DNA, 25 bp, Homo sapien
ggcccgcatcaggtactccttgccg

SEQ ID NO: 1513972 - DNA, 25 bp, Homo sapien
gatctcgaacttgacactgatcggg

SEQ ID NO: 1513973 - DNA, 25 bp, Homo sapien
gaggccatgacgacaggatgagcac

SEQ ID NO: 1513974 - DNA, 25 bp, Homo sapien
gccatgacgacaggatgagcacagg

SEQ ID NO: 1513975 - DNA, 25 bp, Homo sapien
ggccatgacgacaggatgagcacag

SEQ ID NO: 1513976 - DNA, 25 bp, Homo sapien
gggaggccatgacgacaggatgagc

SEQ ID NO: 1513977 - DNA, 25 bp, Homo sapien
agggccctgagcaccgcaggctccc

SEQ ID NO: 1513978 - DNA, 25 bp, Homo sapien
ccttaatctttcctgctggggcagc

SEQ ID NO: 1513979 - DNA, 25 bp, Homo sapien
gcaggctcccgccctgttggtcccc

SEQ ID NO: 1513980 - DNA, 25 bp, Homo sapien
gggcacaggtagcagggccctgagc

SEQ ID NO: 1513981 - DNA, 25 bp, Homo sapien
ctccattctgcgtgatataacgcac

SEQ ID NO: 1513982 - DNA, 25 bp, Homo sapien
cattctgcgtgatataacgcaccca

SEQ ID NO: 1513983 - DNA, 25 bp, Homo sapien
tctgcgtgatataacgcacccaggg

SEQ ID NO: 1513984 - DNA, 25 bp, Homo sapien
gtgatataacgcacccagggcaggg

SEQ ID NO: 1513985 - DNA, 25 bp, Homo sapien
caggagggaggcgtcatgctgggct

SEQ ID NO: 1513986 - DNA, 25 bp, Homo sapien
acccgacccgatggctccaccctgg

SEQ ID NO: 1513987 - DNA, 25 bp, Homo sapien
cacagaggacccctcagtacaaccc

SEQ ID NO: 1513988 - DNA, 25 bp, Homo sapien
cctgctttcgggacccgacccgatg

SEQ ID NO: 1513989 - DNA, 25 bp, Homo sapien
gggtaacacaaacagcaacgaatgc

SEQ ID NO: 1513990 - DNA, 25 bp, Homo sapien
gcttctgagacgagtgtcgacggca

SEQ ID NO: 1513991 - DNA, 25 bp, Homo sapien
caagctttttggtacctgggagctc

SEQ ID NO: 1513992 - DNA, 25 bp, Homo sapien
taaaaggctgtaacctctacacgga

SEQ ID NO: 1513993 - DNA, 25 bp, Homo sapien
gagtgacagcatctcgtgacccagg

SEQ ID NO: 1513994 - DNA, 25 bp, Homo sapien
caggtgccagcctcgacgtgtaaat

SEQ ID NO: 1513995 - DNA, 25 bp, Homo sapien
agcaggcagacgctacagtggcccc

SEQ ID NO: 1513996 - DNA, 25 bp, Homo sapien
tcgacgtgtaaatggcccgctgcgg

SEQ ID NO: 1513997 - DNA, 25 bp, Homo sapien
ttaatgtaactatgacataaacaca

SEQ ID NO: 1513998 - DNA, 25 bp, Homo sapien
tgggtgacacgtggccccgctctct

SEQ ID NO: 1513999 - DNA, 25 bp, Homo sapien
tgaccaagcgcagacgtgggtgaca

SEQ ID NO: 1514000 - DNA, 25 bp, Homo sapien
ctcagtgggaaaaagtctgaggctg

SEQ ID NO: 1514001 - DNA, 25 bp, Homo sapien
ccgatgcccaaagtcctatctgcca

SEQ ID NO: 1514002 - DNA, 25 bp, Homo sapien
gtatcatgaccctcgaggatcccag

SEQ ID NO: 1514003 - DNA, 25 bp, Homo sapien
tccaagagcaactccggtgtgagcc

SEQ ID NO: 1514004 - DNA, 25 bp, Homo sapien
gtgtgagcccccacggtgtcttccg

SEQ ID NO: 1514005 - DNA, 25 bp, Homo sapien
gctgttaggatcttccctgagtctg

SEQ ID NO: 1514006 - DNA, 25 bp, Homo sapien
catgcccggcttgtcctacctttta

SEQ ID NO: 1514007 - DNA, 25 bp, Homo sapien
aggtgggctcagaattctagactgc

SEQ ID NO: 1514008 - DNA, 25 bp, Homo sapien
tctcagtaatttgaagccatgctct

SEQ ID NO: 1514009 - DNA, 25 bp, Homo sapien
tctccaagccgtggtttctgacccg

SEQ ID NO: 1514010 - DNA, 25 bp, Homo sapien
cgtggtttctgacccgtggatgccc

SEQ ID NO: 1514011 - DNA, 25 bp, Homo sapien
ctggccgggtgggtctccaagccgt

SEQ ID NO: 1514012 - DNA, 25 bp, Homo sapien
caagccgtggtttctgacccgtgga

SEQ ID NO: 1514013 - DNA, 25 bp, Homo sapien
gtggccctgctcctcctgcgcagtg

SEQ ID NO: 1514014 - DNA, 25 bp, Homo sapien
ccgtggccctgctcctcctgcgcag

SEQ ID NO: 1514015 - DNA, 25 bp, Homo sapien
ggccctgctcctcctgcgcagtggc

SEQ ID NO: 1514016 - DNA, 25 bp, Homo sapien
ccctgctcctcctgcgcagtggcat

SEQ ID NO: 1514017 - DNA, 25 bp, Homo sapien
cgggcccagcggccttatctgtgac

SEQ ID NO: 1514018 - DNA, 25 bp, Homo sapien
ccgcgcttcctgtcctgccaagatg

SEQ ID NO: 1514019 - DNA, 25 bp, Homo sapien
ccaagatgtttcctgccgatagccg

SEQ ID NO: 1514020 - DNA, 25 bp, Homo sapien
tgccaagatgtttcctgccgatagc

SEQ ID NO: 1514021 - DNA, 25 bp, Homo sapien
tgccgcagaacatgaagcctgaggc

SEQ ID NO: 1514022 - DNA, 25 bp, Homo sapien
gggaacagcttggagccgagttggg

SEQ ID NO: 1514023 - DNA, 25 bp, Homo sapien
tcccaaaatatctggccgctgatag

SEQ ID NO: 1514024 - DNA, 25 bp, Homo sapien
cactctgtcccgctcagctcctgag

SEQ ID NO: 1514025 - DNA, 25 bp, Homo sapien
agacagagcctccacgcagttccca

SEQ ID NO: 1514026 - DNA, 25 bp, Homo sapien
agagcctccacgcagttcccaaatg

SEQ ID NO: 1514027 - DNA, 25 bp, Homo sapien
aaatgcatccatgctgttccatgca

SEQ ID NO: 1514028 - DNA, 25 bp, Homo sapien
tcccaaatgcatccatgctgttcca

SEQ ID NO: 1514029 - DNA, 25 bp, Homo sapien
aacatcacaagtcccagcgctttgc

SEQ ID NO: 1514030 - DNA, 25 bp, Homo sapien
aggagtcctgggctcggacagggcc

SEQ ID NO: 1514031 - DNA, 25 bp, Homo sapien
cactccacaaatagctccaaattgg

SEQ ID NO: 1514032 - DNA, 25 bp, Homo sapien
ggctcatgctaccaaacatcacaag

SEQ ID NO: 1514033 - DNA, 25 bp, Homo sapien
taacggcagaagaacacgcctccct

SEQ ID NO: 1514034 - DNA, 25 bp, Homo sapien
agaagaacacgcctccctggaaggg

SEQ ID NO: 1514035 - DNA, 25 bp, Homo sapien
gggctctgccctaacggcagaagaa

SEQ ID NO: 1514036 - DNA, 25 bp, Homo sapien
tgccctaacggcagaagaacacgcc

SEQ ID NO: 1514037 - DNA, 25 bp, Homo sapien
tgtcaccacggctgatgtacagata

SEQ ID NO: 1514038 - DNA, 25 bp, Homo sapien
caccacggctgatgtacagataagg

SEQ ID NO: 1514039 - DNA, 25 bp, Homo sapien
cctgggggccgccatcagggagttg

SEQ ID NO: 1514040 - DNA, 25 bp, Homo sapien
agagctggtgcagtttgaggattgt

SEQ ID NO: 1514041 - DNA, 25 bp, Homo sapien
cacctgcatggatcgaccgtggctg

SEQ ID NO: 1514042 - DNA, 25 bp, Homo sapien
ctgcatggatcgaccgtggctggaa

SEQ ID NO: 1514043 - DNA, 25 bp, Homo sapien
caaccacctgcatggatcgaccgtg

SEQ ID NO: 1514044 - DNA, 25 bp, Homo sapien
tggatcgaccgtggctggaagtttc

SEQ ID NO: 1514045 - DNA, 25 bp, Homo sapien
cacagccagagtcagaactgattgg

SEQ ID NO: 1514046 - DNA, 25 bp, Homo sapien
gctgcacagccagagtcagaactga

SEQ ID NO: 1514047 - DNA, 25 bp, Homo sapien
cagagtcagaactgattggtttttc

SEQ ID NO: 1514048 - DNA, 25 bp, Homo sapien
cagccagagtcagaactgattggtt

SEQ ID NO: 1514049 - DNA, 25 bp, Homo sapien
ttggcctggtgggtactgagtcacc

SEQ ID NO: 1514050 - DNA, 25 bp, Homo sapien
gggtactgagtcaccagcgaagcca

SEQ ID NO: 1514051 - DNA, 25 bp, Homo sapien
tggtgggtactgagtcaccagcgaa

SEQ ID NO: 1514052 - DNA, 25 bp, Homo sapien
catcaccaccttcaaggggcgggtc

SEQ ID NO: 1514053 - DNA, 25 bp, Homo sapien
tgcccgggccatttaccaggcttgt

SEQ ID NO: 1514054 - DNA, 25 bp, Homo sapien
aaaggttttacaaagcgctggctgc

SEQ ID NO: 1514055 - DNA, 25 bp, Homo sapien
tcaggttcaaagaggaccacttgga

SEQ ID NO: 1514056 - DNA, 25 bp, Homo sapien
tgccacaaagggttttgccccagac

SEQ ID NO: 1514057 - DNA, 25 bp, Homo sapien
cgggcccgcccaagccttataggcg

SEQ ID NO: 1514058 - DNA, 25 bp, Homo sapien
acgcggacggggacaccggtgagtg

SEQ ID NO: 1514059 - DNA, 25 bp, Homo sapien
aacgcgtcccggatggggacgagct

SEQ ID NO: 1514060 - DNA, 25 bp, Homo sapien
ccaagccttataggcgcggcgcgcg

SEQ ID NO: 1514061 - DNA, 25 bp, Homo sapien
aggccgcgctcgcggcacgggctgg

SEQ ID NO: 1514062 - DNA, 25 bp, Homo sapien
cgcgctcgcggcacgggctggcgaa

SEQ ID NO: 1514063 - DNA, 25 bp, Homo sapien
gccgcgctcgcggcacgggctggcg

SEQ ID NO: 1514064 - DNA, 25 bp, Homo sapien
tgcaggccgcgctcgcggcacgggc

SEQ ID NO: 1514065 - DNA, 25 bp, Homo sapien
tcggggggcgctgcttgccttttac

SEQ ID NO: 1514066 - DNA, 25 bp, Homo sapien
gcaatgggcgtgagcgggcggcggg

SEQ ID NO: 1514067 - DNA, 25 bp, Homo sapien
ctcggggggcgctgcttgcctttta

SEQ ID NO: 1514068 - DNA, 25 bp, Homo sapien
cgggcgacagggcaatgggcgtgag

SEQ ID NO: 1514069 - DNA, 25 bp, Homo sapien
tccagcacgctgttgaggtcgtcgt

SEQ ID NO: 1514070 - DNA, 25 bp, Homo sapien
cggactcgggttcggcgcgcggcca

SEQ ID NO: 1514071 - DNA, 25 bp, Homo sapien
gtcgtcgtcggtgccgccggactcg

SEQ ID NO: 1514072 - DNA, 25 bp, Homo sapien
cagcacgctgttgaggtcgtcgtcg

SEQ ID NO: 1514073 - DNA, 25 bp, Homo sapien
ttcggggtaatagaacgcaggcggc

SEQ ID NO: 1514074 - DNA, 25 bp, Homo sapien
tcggggtaatagaacgcaggcggcg

SEQ ID NO: 1514075 - DNA, 25 bp, Homo sapien
agcggcgcatccagctcgggtcgca

SEQ ID NO: 1514076 - DNA, 25 bp, Homo sapien
gccgggcggcgccagcagaaagcgg

SEQ ID NO: 1514077 - DNA, 25 bp, Homo sapien
atccagctcgggtcgcagcagctca

SEQ ID NO: 1514078 - DNA, 25 bp, Homo sapien
aagcggccgtgcagtgcgggcccca

SEQ ID NO: 1514079 - DNA, 25 bp, Homo sapien
cgccgccgtccgcttcagggggctc

SEQ ID NO: 1514080 - DNA, 25 bp, Homo sapien
ccgtccgcttcagggggctcggcct

SEQ ID NO: 1514081 - DNA, 25 bp, Homo sapien
ccgcttcagggggctcggccttgac

SEQ ID NO: 1514082 - DNA, 25 bp, Homo sapien
ccgccgccgtccgcttcagggggct

SEQ ID NO: 1514083 - DNA, 25 bp, Homo sapien
ccctcgcgcttgaggccgcgcggtc

SEQ ID NO: 1514084 - DNA, 25 bp, Homo sapien
caggcggcgcgtaatgcaggccggg

SEQ ID NO: 1514085 - DNA, 25 bp, Homo sapien
ccgggacctcgcatgcacgaagccg

SEQ ID NO: 1514086 - DNA, 25 bp, Homo sapien
gctgagcggcggtgtgtcgggcggc

SEQ ID NO: 1514087 - DNA, 25 bp, Homo sapien
gcaggcggcgtgaggagaccgcggg

SEQ ID NO: 1514088 - DNA, 25 bp, Homo sapien
gacgcaggcggcgtgaggagaccgc

SEQ ID NO: 1514089 - DNA, 25 bp, Homo sapien
acgcaggcggcgtgaggagaccgcg

SEQ ID NO: 1514090 - DNA, 25 bp, Homo sapien
ggacgcaggcggcgtgaggagaccg

SEQ ID NO: 1514091 - DNA, 25 bp, Homo sapien
gtgtgagtggcggtgcgtttgcggg

SEQ ID NO: 1514092 - DNA, 25 bp, Homo sapien
aagagcggcggccgcgctttggctt

SEQ ID NO: 1514093 - DNA, 25 bp, Homo sapien
gccgcgctttggcttggcctccagc

SEQ ID NO: 1514094 - DNA, 25 bp, Homo sapien
gcggcggccgcgctttggcttggcc

SEQ ID NO: 1514095 - DNA, 25 bp, Homo sapien
tgcgccttcagatgcgaactcttgg

SEQ ID NO: 1514096 - DNA, 25 bp, Homo sapien
cagatgcgccttcagatgcgaactc

SEQ ID NO: 1514097 - DNA, 25 bp, Homo sapien
tcagatgcgaactcttggtgtaggt

SEQ ID NO: 1514098 - DNA, 25 bp, Homo sapien
gccttcagatgcgaactcttggtgt

SEQ ID NO: 1514099 - DNA, 25 bp, Homo sapien
gacgggtcctaagcatgcaccctct

SEQ ID NO: 1514100 - DNA, 25 bp, Homo sapien
tagccacgcctccaggaggttttct

SEQ ID NO: 1514101 - DNA, 25 bp, Homo sapien
agccccggggattctgagccaagtg

SEQ ID NO: 1514102 - DNA, 25 bp, Homo sapien
acacggaatctctcaaggtttccca

SEQ ID NO: 1514103 - DNA, 25 bp, Homo sapien
ggggcgagagtaagcgtcagttccc

SEQ ID NO: 1514104 - DNA, 25 bp, Homo sapien
agggagggggcgagagtaagcgtca

SEQ ID NO: 1514105 - DNA, 25 bp, Homo sapien
ggagggggcgagagtaagcgtcagt

SEQ ID NO: 1514106 - DNA, 25 bp, Homo sapien
tgcagggagggggcgagagtaagcg

SEQ ID NO: 1514107 - DNA, 25 bp, Homo sapien
cacgatcgcacagatggcactggaa

SEQ ID NO: 1514108 - DNA, 25 bp, Homo sapien
gcgtgagctcgtctgagcgcgcaaa

SEQ ID NO: 1514109 - DNA, 25 bp, Homo sapien
ccgtttcatgtgcagcgccaggtga

SEQ ID NO: 1514110 - DNA, 25 bp, Homo sapien
ccgtcccagttgcagtggtagggct

SEQ ID NO: 1514111 - DNA, 25 bp, Homo sapien
cctctagtgtagacccggtgggaga

SEQ ID NO: 1514112 - DNA, 25 bp, Homo sapien
cgcagacagtacaaattaaggccct

SEQ ID NO: 1514113 - DNA, 25 bp, Homo sapien
caaggaggatcgtggtcttttccca

SEQ ID NO: 1514114 - DNA, 25 bp, Homo sapien
cgtcgtcgtcatcgagggagaccct

SEQ ID NO: 1514115 - DNA, 25 bp, Homo sapien
ttccaatgcacacaacaggtgggtc

SEQ ID NO: 1514116 - DNA, 25 bp, Homo sapien
gaattttttgcaccaggagacctac

SEQ ID NO: 1514117 - DNA, 25 bp, Homo sapien
taaaaatatagagctggcactccag

SEQ ID NO: 1514118 - DNA, 25 bp, Homo sapien
ttttcaacgtagaggaggccacgtc

SEQ ID NO: 1514119 - DNA, 25 bp, Homo sapien
agagagggccaggcgtgcgcccagg

SEQ ID NO: 1514120 - DNA, 25 bp, Homo sapien
tcagagagggccaggcgtgcgccca

SEQ ID NO: 1514121 - DNA, 25 bp, Homo sapien
cagccctggtgggagggagctgtgg

SEQ ID NO: 1514122 - DNA, 25 bp, Homo sapien
agagggccaggcgtgcgcccagggc

SEQ ID NO: 1514123 - DNA, 25 bp, Homo sapien
tgtgaagtgtgtctctcgatcttgg

SEQ ID NO: 1514124 - DNA, 25 bp, Homo sapien
ggctgtgaagtgtgtctctcgatct

SEQ ID NO: 1514125 - DNA, 25 bp, Homo sapien
tgtctctcgatcttgggacagtccc

SEQ ID NO: 1514126 - DNA, 25 bp, Homo sapien
gaagtgtgtctctcgatcttgggac

SEQ ID NO: 1514127 - DNA, 25 bp, Homo sapien
tccccatgaggtgttggaaaattcc

SEQ ID NO: 1514128 - DNA, 25 bp, Homo sapien
cagcaggccggttacttggtcgttc

SEQ ID NO: 1514129 - DNA, 25 bp, Homo sapien
ttggaaacacagacccgtcaaggga

SEQ ID NO: 1514130 - DNA, 25 bp, Homo sapien
ttgaaccggtcgactctgaaggcac

SEQ ID NO: 1514131 - DNA, 25 bp, Homo sapien
gaggaaatgatcagatagtgtactt

SEQ ID NO: 1514132 - DNA, 25 bp, Homo sapien
gaagggatgggttgagtgaagacag

SEQ ID NO: 1514133 - DNA, 25 bp, Homo sapien
cagatagtgtacttcagccactctg

SEQ ID NO: 1514134 - DNA, 25 bp, Homo sapien
ttaaaatgttctgatagagacaagg

SEQ ID NO: 1514135 - DNA, 25 bp, Homo sapien
tagatgcttcgactcctgggatggc

SEQ ID NO: 1514136 - DNA, 25 bp, Homo sapien
tgtaacatgccgtcgcttcaaggag

SEQ ID NO: 1514137 - DNA, 25 bp, Homo sapien
aagcacccgatttgtttctgagccg

SEQ ID NO: 1514138 - DNA, 25 bp, Homo sapien
gccttttcggaagcaaatctcggga

SEQ ID NO: 1514139 - DNA, 25 bp, Homo sapien
tctgcctcgggctttgcagacttca

SEQ ID NO: 1514140 - DNA, 25 bp, Homo sapien
cttggttccgcagactttcccgagg

SEQ ID NO: 1514141 - DNA, 25 bp, Homo sapien
ggtaaaagtacacctgtaagccagc

SEQ ID NO: 1514142 - DNA, 25 bp, Homo sapien
gcagctaaaccttctaaggcctctg

SEQ ID NO: 1514143 - DNA, 25 bp, Homo sapien
tgggcccgcttttcacagagctgac

SEQ ID NO: 1514144 - DNA, 25 bp, Homo sapien
ctggcatttgtggtatgctgggccc

SEQ ID NO: 1514145 - DNA, 25 bp, Homo sapien
agaggccagtgccacgggaagcaga

SEQ ID NO: 1514146 - DNA, 25 bp, Homo sapien
acatggggcagtattggctggcatt

SEQ ID NO: 1514147 - DNA, 25 bp, Homo sapien
caagaggccagcagttgatgtgccc

SEQ ID NO: 1514148 - DNA, 25 bp, Homo sapien
tatttgaaccttctgtaccgtggca

SEQ ID NO: 1514149 - DNA, 25 bp, Homo sapien
taacaacggtttcggcaacagagca

SEQ ID NO: 1514150 - DNA, 25 bp, Homo sapien
tcaaagcgtctggtcattagcaagg

SEQ ID NO: 1514151 - DNA, 25 bp, Homo sapien
gtataaaaccctggcgtgggtgcgc

SEQ ID NO: 1514152 - DNA, 25 bp, Homo sapien
gggtgcgcgtggcagcttttgcttc

SEQ ID NO: 1514153 - DNA, 25 bp, Homo sapien
agtataaaaccctggcgtgggtgcg

SEQ ID NO: 1514154 - DNA, 25 bp, Homo sapien
gcgtgggtgcgcgtggcagcttttg

SEQ ID NO: 1514155 - DNA, 25 bp, Homo sapien
gatggcatcgaaccaggtgccagga

SEQ ID NO: 1514156 - DNA, 25 bp, Homo sapien
gaaatgcgcgtcagtaaagctctct

SEQ ID NO: 1514157 - DNA, 25 bp, Homo sapien
gtctgctgtggtccccggtagttcc

SEQ ID NO: 1514158 - DNA, 25 bp, Homo sapien
ggtagttcccgctgcaaatatctag

SEQ ID NO: 1514159 - DNA, 25 bp, Homo sapien
ggtacaccgcttgggtaactgttga

SEQ ID NO: 1514160 - DNA, 25 bp, Homo sapien
ctccctgcggtaggcagtcagcaca

SEQ ID NO: 1514161 - DNA, 25 bp, Homo sapien
cccctgttaatgaagtctccctgcg

SEQ ID NO: 1514162 - DNA, 25 bp, Homo sapien
cctgtgtgtggtttcggtacaccgc

SEQ ID NO: 1514163 - DNA, 25 bp, Homo sapien
caaagccgcataggtgatggtgatg

SEQ ID NO: 1514164 - DNA, 25 bp, Homo sapien
aacaaagccgcataggtgatggtga

SEQ ID NO: 1514165 - DNA, 25 bp, Homo sapien
taaacaaagccgcataggtgatggt

SEQ ID NO: 1514166 - DNA, 25 bp, Homo sapien
ctcctaaacaaagccgcataggtga

SEQ ID NO: 1514167 - DNA, 25 bp, Homo sapien
ctcccccaggtaaacaatggtatat

SEQ ID NO: 1514168 - DNA, 25 bp, Homo sapien
gttccggtcacagcgtacagctgag

SEQ ID NO: 1514169 - DNA, 25 bp, Homo sapien
gaacctgcagaggttcctcgaggga

SEQ ID NO: 1514170 - DNA, 25 bp, Homo sapien
ggtgtgggcactaagttcttcttgc

SEQ ID NO: 1514171 - DNA, 25 bp, Homo sapien
tgtctccatctaagccagaaagtgc

SEQ ID NO: 1514172 - DNA, 25 bp, Homo sapien
gacagtcacaggtggacccctccac

SEQ ID NO: 1514173 - DNA, 25 bp, Homo sapien
agtgtgggtgcacgggcagacaggt

SEQ ID NO: 1514174 - DNA, 25 bp, Homo sapien
attgacatttggtgtggctggcatg

SEQ ID NO: 1514175 - DNA, 25 bp, Homo sapien
acaggtgttgacctggacagtcaca

SEQ ID NO: 1514176 - DNA, 25 bp, Homo sapien
tactgtgggcttcgaaagcagaaaa

SEQ ID NO: 1514177 - DNA, 25 bp, Homo sapien
ttgcacaatttgagacccagggggt

SEQ ID NO: 1514178 - DNA, 25 bp, Homo sapien
tgatggttgctgtgccactcggtgc

SEQ ID NO: 1514179 - DNA, 25 bp, Homo sapien
gctcctttactcgtggcacaggcca

SEQ ID NO: 1514180 - DNA, 25 bp, Homo sapien
tacacggccacgtctgtgtgactag

SEQ ID NO: 1514181 - DNA, 25 bp, Homo sapien
ctttggcagccgcatctgtgtgact

SEQ ID NO: 1514182 - DNA, 25 bp, Homo sapien
gacactggagctttagctggctgca

SEQ ID NO: 1514183 - DNA, 25 bp, Homo sapien
tagacggccgcatctgtgtaaccag

SEQ ID NO: 1514184 - DNA, 25 bp, Homo sapien
gaggcagtagccacaagcagaacac

SEQ ID NO: 1514185 - DNA, 25 bp, Homo sapien
gatgaggtgtgtcccgtccctgaca

SEQ ID NO: 1514186 - DNA, 25 bp, Homo sapien
ccaggcattatccacgctgcgggaa

SEQ ID NO: 1514187 - DNA, 25 bp, Homo sapien
gcagcggtcgcaacttgtgatcaca

SEQ ID NO: 1514188 - DNA, 25 bp, Homo sapien
tatagccgtcatgtgaatttcatac

SEQ ID NO: 1514189 - DNA, 25 bp, Homo sapien
tagcacttcttatagctcaggtcga

SEQ ID NO: 1514190 - DNA, 25 bp, Homo sapien
gccagcatgtcttatgttatagccg

SEQ ID NO: 1514191 - DNA, 25 bp, Homo sapien
tgctttaggaaatatcatgtacagc

SEQ ID NO: 1514192 - DNA, 25 bp, Homo sapien
tgtggcctatgttggtgaacaaacc

SEQ ID NO: 1514193 - DNA, 25 bp, Homo sapien
tgggatattacgtacattttcaact

SEQ ID NO: 1514194 - DNA, 25 bp, Homo sapien
tcaagggttgttgtttgtggcctat

SEQ ID NO: 1514195 - DNA, 25 bp, Homo sapien
gaattctgttcacttatggattact

SEQ ID NO: 1514196 - DNA, 25 bp, Homo sapien
gaagttactgtggttgcccatccca

SEQ ID NO: 1514197 - DNA, 25 bp, Homo sapien
cctctgcaagctccgtggccttggt

SEQ ID NO: 1514198 - DNA, 25 bp, Homo sapien
cactgctgaaacctccgtggaagtt

SEQ ID NO: 1514199 - DNA, 25 bp, Homo sapien
gctccggtgctgtccacggccgcga

SEQ ID NO: 1514200 - DNA, 25 bp, Homo sapien
cactggccggcgcgggtctgtttct

SEQ ID NO: 1514201 - DNA, 25 bp, Homo sapien
agagccccccaggcaaaagtcaatg

SEQ ID NO: 1514202 - DNA, 25 bp, Homo sapien
ggtgcactggccggcgcgggtctgt

SEQ ID NO: 1514203 - DNA, 25 bp, Homo sapien
tgcactggccggcgcgggtctgttt

SEQ ID NO: 1514204 - DNA, 25 bp, Homo sapien
gacaatgtggggtttgctgatcttg

SEQ ID NO: 1514205 - DNA, 25 bp, Homo sapien
aatgtggggtttgctgatcttgttc

SEQ ID NO: 1514206 - DNA, 25 bp, Homo sapien
caagggacaatgtggggtttgctga

SEQ ID NO: 1514207 - DNA, 25 bp, Homo sapien
ggacaatgtggggtttgctgatctt

SEQ ID NO: 1514208 - DNA, 25 bp, Homo sapien
agcacagagttgcagtggcctgtca

SEQ ID NO: 1514209 - DNA, 25 bp, Homo sapien
cagcacagagttgcagtggcctgtc

SEQ ID NO: 1514210 - DNA, 25 bp, Homo sapien
gcacagagttgcagtggcctgtcac

SEQ ID NO: 1514211 - DNA, 25 bp, Homo sapien
acacaggtgctgagacaatgccagt

SEQ ID NO: 1514212 - DNA, 25 bp, Homo sapien
gacacaggtgctgagacaatgccag

SEQ ID NO: 1514213 - DNA, 25 bp, Homo sapien
cttggacacaggtgctgagacaatg

SEQ ID NO: 1514214 - DNA, 25 bp, Homo sapien
tggacacaggtgctgagacaatgcc

SEQ ID NO: 1514215 - DNA, 25 bp, Homo sapien
agctggagcctgggtgctctgcatg

SEQ ID NO: 1514216 - DNA, 25 bp, Homo sapien
ctctggtgtaggtcttgacaaggtg

SEQ ID NO: 1514217 - DNA, 25 bp, Homo sapien
gagcctgggtgctctgcatggagac

SEQ ID NO: 1514218 - DNA, 25 bp, Homo sapien
ctggagcctgggtgctctgcatgga

SEQ ID NO: 1514219 - DNA, 25 bp, Homo sapien
ctgacgaccttcctggtccatgtca

SEQ ID NO: 1514220 - DNA, 25 bp, Homo sapien
gttctgacgaccttcctggtccatg

SEQ ID NO: 1514221 - DNA, 25 bp, Homo sapien
tgtgttctgacgaccttcctggtcc

SEQ ID NO: 1514222 - DNA, 25 bp, Homo sapien
attctgtgttctgacgaccttcctg

SEQ ID NO: 1514223 - DNA, 25 bp, Homo sapien
agacccatcccaaccgagtcctggg

SEQ ID NO: 1514224 - DNA, 25 bp, Homo sapien
cactgtcaggaacaccccgacagga

SEQ ID NO: 1514225 - DNA, 25 bp, Homo sapien
ctctgttagggagtagtagatggca

SEQ ID NO: 1514226 - DNA, 25 bp, Homo sapien
ggaacaccccgacaggaggccagac

SEQ ID NO: 1514227 - DNA, 25 bp, Homo sapien
tttgatgccctgactatgatgctcc

SEQ ID NO: 1514228 - DNA, 25 bp, Homo sapien
tgatgccctgactatgatgctccat

SEQ ID NO: 1514229 - DNA, 25 bp, Homo sapien
ggctttgatgccctgactatgatgc

SEQ ID NO: 1514230 - DNA, 25 bp, Homo sapien
gctttgatgccctgactatgatgct

SEQ ID NO: 1514231 - DNA, 25 bp, Homo sapien
ccagctcttgatactacaagctttg

SEQ ID NO: 1514232 - DNA, 25 bp, Homo sapien
tgtctcggatttccatctgcactgc

SEQ ID NO: 1514233 - DNA, 25 bp, Homo sapien
cataggagtcccagctcttgatact

SEQ ID NO: 1514234 - DNA, 25 bp, Homo sapien
ggcttttcccttcataggagtccca

SEQ ID NO: 1514235 - DNA, 25 bp, Homo sapien
tcttcccacgccgtccattcgcaga

SEQ ID NO: 1514236 - DNA, 25 bp, Homo sapien
cattcgcagaggcagccgccacatt

SEQ ID NO: 1514237 - DNA, 25 bp, Homo sapien
acgccgtccattcgcagaggcagcc

SEQ ID NO: 1514238 - DNA, 25 bp, Homo sapien
ttcgcagaggcagccgccacattca

SEQ ID NO: 1514239 - DNA, 25 bp, Homo sapien
aaaacatcacgcatgggacggctgg

SEQ ID NO: 1514240 - DNA, 25 bp, Homo sapien
cagcatcggcggtcattgagtcaga

SEQ ID NO: 1514241 - DNA, 25 bp, Homo sapien
tgacgttagcgctgctgaagccttg

SEQ ID NO: 1514242 - DNA, 25 bp, Homo sapien
tctgggacgcgagttcgagtgcacc

SEQ ID NO: 1514243 - DNA, 25 bp, Homo sapien
ttaaacagacagtgcaattagcggg

SEQ ID NO: 1514244 - DNA, 25 bp, Homo sapien
tacctggctgatacctaaaagttct

SEQ ID NO: 1514245 - DNA, 25 bp, Homo sapien
ggagcatgagaccaagaccacaggt

SEQ ID NO: 1514246 - DNA, 25 bp, Homo sapien
gaccacagctgaagcaatctaccca

SEQ ID NO: 1514247 - DNA, 25 bp, Homo sapien
ggtacagtaaatgctctcagttgag

SEQ ID NO: 1514248 - DNA, 25 bp, Homo sapien
tacagtaaatgctctcagttgagat

SEQ ID NO: 1514249 - DNA, 25 bp, Homo sapien
cagtaaatgctctcagttgagatgg

SEQ ID NO: 1514250 - DNA, 25 bp, Homo sapien
ctgggtacagtaaatgctctcagtt

SEQ ID NO: 1514251 - DNA, 25 bp, Homo sapien
tgtgatgtctgagaaggctttgcgc

SEQ ID NO: 1514252 - DNA, 25 bp, Homo sapien
tgactctgtgggtagtctgctcttg

SEQ ID NO: 1514253 - DNA, 25 bp, Homo sapien
tgagcgagtgctgtgaagggttctg

SEQ ID NO: 1514254 - DNA, 25 bp, Homo sapien
aaggctttgcgctggagagttccac

SEQ ID NO: 1514255 - DNA, 25 bp, Homo sapien
agtttgaaaaggcgcctgtgatgga

SEQ ID NO: 1514256 - DNA, 25 bp, Homo sapien
gtttgaaaaggcgcctgtgatggaa

SEQ ID NO: 1514257 - DNA, 25 bp, Homo sapien
tgagtttgaaaaggcgcctgtgatg

SEQ ID NO: 1514258 - DNA, 25 bp, Homo sapien
ctgagtttgaaaaggcgcctgtgat

SEQ ID NO: 1514259 - DNA, 25 bp, Homo sapien
ttcccggggaggacacaagcttgac

SEQ ID NO: 1514260 - DNA, 25 bp, Homo sapien
aggacacaagcttgacatgccccat

SEQ ID NO: 1514261 - DNA, 25 bp, Homo sapien
gggaggacacaagcttgacatgccc

SEQ ID NO: 1514262 - DNA, 25 bp, Homo sapien
ccggggaggacacaagcttgacatg

SEQ ID NO: 1514263 - DNA, 25 bp, Homo sapien
gagccagaccgtcaagcgataaaat

SEQ ID NO: 1514264 - DNA, 25 bp, Homo sapien
ccagaccgtcaagcgataaaatatt

SEQ ID NO: 1514265 - DNA, 25 bp, Homo sapien
ttcctgttccaaatcggagttctca

SEQ ID NO: 1514266 - DNA, 25 bp, Homo sapien
gctggagccagaccgtcaagcgata

SEQ ID NO: 1514267 - DNA, 25 bp, Homo sapien
gcgtcttcagtacggcatgtccacg

SEQ ID NO: 1514268 - DNA, 25 bp, Homo sapien
gatgtgggcacggagtattctaaac

SEQ ID NO: 1514269 - DNA, 25 bp, Homo sapien
gcaggaatcctgatggtgtgacgca

SEQ ID NO: 1514270 - DNA, 25 bp, Homo sapien
tattctaaacagaactgtggcgtct

SEQ ID NO: 1514271 - DNA, 25 bp, Homo sapien
gacgcctcggctctgaagattttgc

SEQ ID NO: 1514272 - DNA, 25 bp, Homo sapien
gagatgctccgagacctcgctctca

SEQ ID NO: 1514273 - DNA, 25 bp, Homo sapien
attttgccagctgttttttgtctct

SEQ ID NO: 1514274 - DNA, 25 bp, Homo sapien
gcagaagccgagctggcactgagat

SEQ ID NO: 1514275 - DNA, 25 bp, Homo sapien
caaagcgtccagtgttctgtcaaga

SEQ ID NO: 1514276 - DNA, 25 bp, Homo sapien
tcaagagactccttggaatgggcgg

SEQ ID NO: 1514277 - DNA, 25 bp, Homo sapien
tgaagaggattcagacaaagcgtcc

SEQ ID NO: 1514278 - DNA, 25 bp, Homo sapien
aaaatcctccgaataagctgagctg

SEQ ID NO: 1514279 - DNA, 25 bp, Homo sapien
ccttggtccactcgtaggtgaaggc

SEQ ID NO: 1514280 - DNA, 25 bp, Homo sapien
tggtccactcgtaggtgaaggcagg

SEQ ID NO: 1514281 - DNA, 25 bp, Homo sapien
cttcacaagcactcttgtcacgtgc

SEQ ID NO: 1514282 - DNA, 25 bp, Homo sapien
cttggtccactcgtaggtgaaggca

SEQ ID NO: 1514283 - DNA, 25 bp, Homo sapien
cttggttctgatccttctgaatgct

SEQ ID NO: 1514284 - DNA, 25 bp, Homo sapien
cctagtccttggttctgatccttct

SEQ ID NO: 1514285 - DNA, 25 bp, Homo sapien
tctgatccttctgaatgcttcaggg

SEQ ID NO: 1514286 - DNA, 25 bp, Homo sapien
ggttctgatccttctgaatgcttca

SEQ ID NO: 1514287 - DNA, 25 bp, Homo sapien
cacgggtatcctagctgggtgcagc

SEQ ID NO: 1514288 - DNA, 25 bp, Homo sapien
cttggctcaaggcacgggtatccta

SEQ ID NO: 1514289 - DNA, 25 bp, Homo sapien
agcccttcttctaagggtcactgtt

SEQ ID NO: 1514290 - DNA, 25 bp, Homo sapien
tcacggtggctgcagtcgagagcag

SEQ ID NO: 1514291 - DNA, 25 bp, Homo sapien
gataacatgattggcgatgggtgtc

SEQ ID NO: 1514292 - DNA, 25 bp, Homo sapien
gatgggtgtcgggtccacgtaggcg

SEQ ID NO: 1514293 - DNA, 25 bp, Homo sapien
gtgtcgggtccacgtaggcgcctcc

SEQ ID NO: 1514294 - DNA, 25 bp, Homo sapien
atctgcactgataacatgattggcg

SEQ ID NO: 1514295 - DNA, 25 bp, Homo sapien
agacagaaggttcaagggcatccac

SEQ ID NO: 1514296 - DNA, 25 bp, Homo sapien
gcacatcatggagtgccagcacggc

SEQ ID NO: 1514297 - DNA, 25 bp, Homo sapien
cagcacatcatggagtgccagcacg

SEQ ID NO: 1514298 - DNA, 25 bp, Homo sapien
acatcatggagtgccagcacggccg

SEQ ID NO: 1514299 - DNA, 25 bp, Homo sapien
tcagcacatcatggagtgccagcac

SEQ ID NO: 1514300 - DNA, 25 bp, Homo sapien
gtgccggctggcctggatgaactgc

SEQ ID NO: 1514301 - DNA, 25 bp, Homo sapien
ggaaggagtccgcgtccagggagcg

SEQ ID NO: 1514302 - DNA, 25 bp, Homo sapien
tgccggctggcctggatgaactgct

SEQ ID NO: 1514303 - DNA, 25 bp, Homo sapien
gtagtggaaggagtccgcgtccagg

SEQ ID NO: 1514304 - DNA, 25 bp, Homo sapien
catcctccatggtcagtggggcagg

SEQ ID NO: 1514305 - DNA, 25 bp, Homo sapien
tccagggcatcctccatggtcagtg

SEQ ID NO: 1514306 - DNA, 25 bp, Homo sapien
cagggcatcctccatggtcagtggg

SEQ ID NO: 1514307 - DNA, 25 bp, Homo sapien
ggcatcctccatggtcagtggggca

SEQ ID NO: 1514308 - DNA, 25 bp, Homo sapien
tttgttaagacgtcacgtcaagctc

SEQ ID NO: 1514309 - DNA, 25 bp, Homo sapien
cttttgttaagacgtcacgtcaagc

SEQ ID NO: 1514310 - DNA, 25 bp, Homo sapien
ttgttaagacgtcacgtcaagctcc

SEQ ID NO: 1514311 - DNA, 25 bp, Homo sapien
ttttgttaagacgtcacgtcaagct

SEQ ID NO: 1514312 - DNA, 25 bp, Homo sapien
cactggcctgtggtgtcatagagct

SEQ ID NO: 1514313 - DNA, 25 bp, Homo sapien
taaagacctttctcccgcacatgtg

SEQ ID NO: 1514314 - DNA, 25 bp, Homo sapien
catgtcctggtttgagctgtgcagc

SEQ ID NO: 1514315 - DNA, 25 bp, Homo sapien
tgtaagtcagaagtgtgcacgggct

SEQ ID NO: 1514316 - DNA, 25 bp, Homo sapien
tgcccgcggattgaaaaacagaaac

SEQ ID NO: 1514317 - DNA, 25 bp, Homo sapien
taattcttcgaaggcgtactggccc

SEQ ID NO: 1514318 - DNA, 25 bp, Homo sapien
gagtaaattcttcagccacgaaggg

SEQ ID NO: 1514319 - DNA, 25 bp, Homo sapien
taagacacttcaggttgagcgctgc

SEQ ID NO: 1514320 - DNA, 25 bp, Homo sapien
cagatccaagagtcgagggcgttct

SEQ ID NO: 1514321 - DNA, 25 bp, Homo sapien
taagtgctgcgctggtaactctggg

SEQ ID NO: 1514322 - DNA, 25 bp, Homo sapien
caggctcggccacactatttaggaa

SEQ ID NO: 1514323 - DNA, 25 bp, Homo sapien
tactcccgctccagatctaggtagg

SEQ ID NO: 1514324 - DNA, 25 bp, Homo sapien
ggctggaccccagcaccctgacttc

SEQ ID NO: 1514325 - DNA, 25 bp, Homo sapien
ccccatggcttcaacgggcagcccc

SEQ ID NO: 1514326 - DNA, 25 bp, Homo sapien
gccaccgcatgcctcatcctggcat

SEQ ID NO: 1514327 - DNA, 25 bp, Homo sapien
tggcatcaacgagcacccgccttgg

SEQ ID NO: 1514328 - DNA, 25 bp, Homo sapien
caccatgcctagtatctttgttatt

SEQ ID NO: 1514329 - DNA, 25 bp, Homo sapien
accatgcctagtatctttgttattg

SEQ ID NO: 1514330 - DNA, 25 bp, Homo sapien
ccatgcctagtatctttgttattga

SEQ ID NO: 1514331 - DNA, 25 bp, Homo sapien
agttttgccgccctgatgaggcccg

SEQ ID NO: 1514332 - DNA, 25 bp, Homo sapien
acttccctgccggtgagtgtacggg

SEQ ID NO: 1514333 - DNA, 25 bp, Homo sapien
aaatcaatacttggcgtggtgtcgg

SEQ ID NO: 1514334 - DNA, 25 bp, Homo sapien
gcagagccagtaggaaaaggttcct

SEQ ID NO: 1514335 - DNA, 25 bp, Homo sapien
ttagaaaggcgctgtgccctctagg

SEQ ID NO: 1514336 - DNA, 25 bp, Homo sapien
taaatacgtccagctgcaatcccag

SEQ ID NO: 1514337 - DNA, 25 bp, Homo sapien
tagcaggctgtgtgcaagctcaggt

SEQ ID NO: 1514338 - DNA, 25 bp, Homo sapien
tcggacgtccacagcagaaatttgc

SEQ ID NO: 1514339 - DNA, 25 bp, Homo sapien
ttcaccatggcgagactcactgcag

SEQ ID NO: 1514340 - DNA, 25 bp, Homo sapien
ccagatccgttcaagtgaggaagca

SEQ ID NO: 1514341 - DNA, 25 bp, Homo sapien
tatttgtcctatgtcacccaacagg

SEQ ID NO: 1514342 - DNA, 25 bp, Homo sapien
aacaggccctttgctatagctggga

SEQ ID NO: 1514343 - DNA, 25 bp, Homo sapien
taccttttatctcccagcgagcgag

SEQ ID NO: 1514344 - DNA, 25 bp, Homo sapien
ggaatatgacaagaccccagtaggt

SEQ ID NO: 1514345 - DNA, 25 bp, Homo sapien
cgtgaagagtcaatcccaaagggtg

SEQ ID NO: 1514346 - DNA, 25 bp, Homo sapien
gcttcatgaaaggaccgtgccctca

SEQ ID NO: 1514347 - DNA, 25 bp, Homo sapien
tcgaagcttcgagagaagcttcaaa

SEQ ID NO: 1514348 - DNA, 25 bp, Homo sapien
tgacacgttttggtatttagtagga

SEQ ID NO: 1514349 - DNA, 25 bp, Homo sapien
tgatgcctgtctgacacgttttggt

SEQ ID NO: 1514350 - DNA, 25 bp, Homo sapien
gtgtttcgaagcttcgagagaagct

SEQ ID NO: 1514351 - DNA, 25 bp, Homo sapien
ggactggcctatgcatcgaaaatct

SEQ ID NO: 1514352 - DNA, 25 bp, Homo sapien
gaaggatcttcgagaaatcgtgttc

SEQ ID NO: 1514353 - DNA, 25 bp, Homo sapien
cattatgggatgcattaggactggc

SEQ ID NO: 1514354 - DNA, 25 bp, Homo sapien
aatcgtgttcagtatttcaagctct

SEQ ID NO: 1514355 - DNA, 25 bp, Homo sapien
cagaccaagtacgatgcaaaccagc

SEQ ID NO: 1514356 - DNA, 25 bp, Homo sapien
gaaccgctatgatgtgtagagtcca

SEQ ID NO: 1514357 - DNA, 25 bp, Homo sapien
gaattacgagctcttatgccccggg

SEQ ID NO: 1514358 - DNA, 25 bp, Homo sapien
tacggccgcaacaacatcttaacag

SEQ ID NO: 1514359 - DNA, 25 bp, Homo sapien
ggctgccctcgaatgattttttttc

SEQ ID NO: 1514360 - DNA, 25 bp, Homo sapien
caggctgccctcgaatgattttttt

SEQ ID NO: 1514361 - DNA, 25 bp, Homo sapien
ttttttccttagcctcccagagtgc

SEQ ID NO: 1514362 - DNA, 25 bp, Homo sapien
cccaggctgccctcgaatgattttt

SEQ ID NO: 1514363 - DNA, 25 bp, Homo sapien
gcgccagtagcgtcaaggaagagaa

SEQ ID NO: 1514364 - DNA, 25 bp, Homo sapien
tcagcagcgacttggtgagttgtac

SEQ ID NO: 1514365 - DNA, 25 bp, Homo sapien
tgatcccaggtgctgatagctgctg

SEQ ID NO: 1514366 - DNA, 25 bp, Homo sapien
taatgcctcacggtgacgatgcacg

SEQ ID NO: 1514367 - DNA, 25 bp, Homo sapien
cggcaagtacttcgcgtccgtgtca

SEQ ID NO: 1514368 - DNA, 25 bp, Homo sapien
gcaacgtggtcaacaaggtgatcct

SEQ ID NO: 1514369 - DNA, 25 bp, Homo sapien
ttcccggtgaccgtgtcgctgtgcc

SEQ ID NO: 1514370 - DNA, 25 bp, Homo sapien
tgtcagcgcacgtcagcatctggaa

SEQ ID NO: 1514371 - DNA, 25 bp, Homo sapien
catgattccagggatcgggtgctcc

SEQ ID NO: 1514372 - DNA, 25 bp, Homo sapien
cccgaaaaagttggaggcacacgat

SEQ ID NO: 1514373 - DNA, 25 bp, Homo sapien
tgcagagcgagtttagcccaagagc

SEQ ID NO: 1514374 - DNA, 25 bp, Homo sapien
tgaaatgcggacagtgatacctacc

SEQ ID NO: 1514375 - DNA, 25 bp, Homo sapien
cgcgatttgcaaaaacaaggagcct

SEQ ID NO: 1514376 - DNA, 25 bp, Homo sapien
tcttacaaggtatggcccagaggct

SEQ ID NO: 1514377 - DNA, 25 bp, Homo sapien
gaagacctgtctgtacgctggaaac

SEQ ID NO: 1514378 - DNA, 25 bp, Homo sapien
tcaggacgcagaagggagcaacttt

SEQ ID NO: 1514379 - DNA, 25 bp, Homo sapien
cctttgaccccatgacgagacagat

SEQ ID NO: 1514380 - DNA, 25 bp, Homo sapien
gaaggagctgtcacgcaacgagatc

SEQ ID NO: 1514381 - DNA, 25 bp, Homo sapien
gacgacgggcgcttgaacattctgc

SEQ ID NO: 1514382 - DNA, 25 bp, Homo sapien
tgcatgtgctggtgcctcaaagccc

SEQ ID NO: 1514383 - DNA, 25 bp, Homo sapien
tgtgatgcctatgacctgagaccag

SEQ ID NO: 1514384 - DNA, 25 bp, Homo sapien
tgggcgagaagttgtcccctccatg

SEQ ID NO: 1514385 - DNA, 25 bp, Homo sapien
gacctcttgtggtcttgggcgagaa

SEQ ID NO: 1514386 - DNA, 25 bp, Homo sapien
tggaaggatgaccacaaaagagccc

SEQ ID NO: 1514387 - DNA, 25 bp, Homo sapien
tggctggccacagaagtaggggtca

SEQ ID NO: 1514388 - DNA, 25 bp, Homo sapien
gccacagaagtaggggtcagggctg

SEQ ID NO: 1514389 - DNA, 25 bp, Homo sapien
ggagcctctgattggctggccacag

SEQ ID NO: 1514390 - DNA, 25 bp, Homo sapien
ctctgattggctggccacagaagta

SEQ ID NO: 1514391 - DNA, 25 bp, Homo sapien
tcactgagggccgtaggaggatttc

SEQ ID NO: 1514392 - DNA, 25 bp, Homo sapien
tgcttggcccacctacagagtcggc

SEQ ID NO: 1514393 - DNA, 25 bp, Homo sapien
agagtcggcgccagccaagcagggc

SEQ ID NO: 1514394 - DNA, 25 bp, Homo sapien
gattggtgggcatcagttgcctgct

SEQ ID NO: 1514395 - DNA, 25 bp, Homo sapien
gacaggttccttgtccagatggtgt

SEQ ID NO: 1514396 - DNA, 25 bp, Homo sapien
tgctgggacagttctcgtgatcgta

SEQ ID NO: 1514397 - DNA, 25 bp, Homo sapien
tccagatggtgtctgcgcctttgca

SEQ ID NO: 1514398 - DNA, 25 bp, Homo sapien
ttgccgggcttcaggccacagacag

SEQ ID NO: 1514399 - DNA, 25 bp, Homo sapien
ttggaacgtgtgcagacggagatct

SEQ ID NO: 1514400 - DNA, 25 bp, Homo sapien
atgctgaaggctcgcggccccagaa

SEQ ID NO: 1514401 - DNA, 25 bp, Homo sapien
gagatgtattggaacgtgtgcagac

SEQ ID NO: 1514402 - DNA, 25 bp, Homo sapien
aacgtgtgcagacggagatctggcc

SEQ ID NO: 1514403 - DNA, 25 bp, Homo sapien
tagcctatagccgaaagcgtgattc

SEQ ID NO: 1514404 - DNA, 25 bp, Homo sapien
cacagagtcaaatagcctatagccg

SEQ ID NO: 1514405 - DNA, 25 bp, Homo sapien
tcaaatagcctatagccgaaagcgt

SEQ ID NO: 1514406 - DNA, 25 bp, Homo sapien
tagccgaaagcgtgattctgaaggc

SEQ ID NO: 1514407 - DNA, 25 bp, Homo sapien
gagcctccataagcatccctgtctt

SEQ ID NO: 1514408 - DNA, 25 bp, Homo sapien
gtaaccggtctgacttgcctgtcat

SEQ ID NO: 1514409 - DNA, 25 bp, Homo sapien
aggcatcctggtctgatctttcccg

SEQ ID NO: 1514410 - DNA, 25 bp, Homo sapien
gcagtgcttcctgtaaccggtctga

SEQ ID NO: 1514411 - DNA, 25 bp, Homo sapien
tcacgctgtccgagtgcaggtgctg

SEQ ID NO: 1514412 - DNA, 25 bp, Homo sapien
ctggttaaaccacagactccatttg

SEQ ID NO: 1514413 - DNA, 25 bp, Homo sapien
gggacctcgctgtcacgctgtccga

SEQ ID NO: 1514414 - DNA, 25 bp, Homo sapien
cttcttgttctggttaaaccacaga

SEQ ID NO: 1514415 - DNA, 25 bp, Homo sapien
tctcctgatgtgaccgccaaatagt

SEQ ID NO: 1514416 - DNA, 25 bp, Homo sapien
acctctcctgatgtgaccgccaaat

SEQ ID NO: 1514417 - DNA, 25 bp, Homo sapien
tgatgtgaccgccaaatagttgggc

SEQ ID NO: 1514418 - DNA, 25 bp, Homo sapien
tgaccgccaaatagttgggccttgg

SEQ ID NO: 1514419 - DNA, 25 bp, Homo sapien
ggagaagaatagtggatccagtgtc

SEQ ID NO: 1514420 - DNA, 25 bp, Homo sapien
gagaagaatagtggatccagtgtcc

SEQ ID NO: 1514421 - DNA, 25 bp, Homo sapien
ttaacgggagaagaatagtggatcc

SEQ ID NO: 1514422 - DNA, 25 bp, Homo sapien
acgggagaagaatagtggatccagt

SEQ ID NO: 1514423 - DNA, 25 bp, Homo sapien
ggatgttcccaggagacatcaaggt

SEQ ID NO: 1514424 - DNA, 25 bp, Homo sapien
cctgaatctgctgtgggttccaccc

SEQ ID NO: 1514425 - DNA, 25 bp, Homo sapien
ccaaacagtcccacaatagagggga

SEQ ID NO: 1514426 - DNA, 25 bp, Homo sapien
tgctgtgggttccacccaaacagtc

SEQ ID NO: 1514427 - DNA, 25 bp, Homo sapien
gtggagactcgggtattcgtgtgct

SEQ ID NO: 1514428 - DNA, 25 bp, Homo sapien
catggttttatagggcgttggctgt

SEQ ID NO: 1514429 - DNA, 25 bp, Homo sapien
gcacagcatggttttatagggcgtt

SEQ ID NO: 1514430 - DNA, 25 bp, Homo sapien
actcgggtattcgtgtgctgggtgc

SEQ ID NO: 1514431 - DNA, 25 bp, Homo sapien
tggtgagaaagtagggtgctgcttt

SEQ ID NO: 1514432 - DNA, 25 bp, Homo sapien
cacatcggtggtgcccagcatggaa

SEQ ID NO: 1514433 - DNA, 25 bp, Homo sapien
tccattgcgtcttccaaggtgtacc

SEQ ID NO: 1514434 - DNA, 25 bp, Homo sapien
gatgtcagagggcttaactacgaca

SEQ ID NO: 1514435 - DNA, 25 bp, Homo sapien
cagcatggaagctgaactccattgc

SEQ ID NO: 1514436 - DNA, 25 bp, Homo sapien
actgaggtttctgggtggtcctcag

SEQ ID NO: 1514437 - DNA, 25 bp, Homo sapien
accagcatgtggtcaggggctttgt

SEQ ID NO: 1514438 - DNA, 25 bp, Homo sapien
gaggtttctgggtggtcctcagaat

SEQ ID NO: 1514439 - DNA, 25 bp, Homo sapien
gtttctgggtggtcctcagaatatg

SEQ ID NO: 1514440 - DNA, 25 bp, Homo sapien
tgtatgcaccccataaagctccttc

SEQ ID NO: 1514441 - DNA, 25 bp, Homo sapien
gaactggtgtatgcaccccataaag

SEQ ID NO: 1514442 - DNA, 25 bp, Homo sapien
tccacagggtgggattgggaactgg

SEQ ID NO: 1514443 - DNA, 25 bp, Homo sapien
gctccttccagatctaagttcagat

SEQ ID NO: 1514444 - DNA, 25 bp, Homo sapien
gtcaggaactgacctaatatccaca

SEQ ID NO: 1514445 - DNA, 25 bp, Homo sapien
acttagctattgcttgcaaaatcgg

SEQ ID NO: 1514446 - DNA, 25 bp, Homo sapien
tgcaaaatcggtgtcaggaactgac

SEQ ID NO: 1514447 - DNA, 25 bp, Homo sapien
tatgggcatgcaattatggttaaca

SEQ ID NO: 1514448 - DNA, 25 bp, Homo sapien
gggcagcccggcagcgctcggtacg

SEQ ID NO: 1514449 - DNA, 25 bp, Homo sapien
cctcgagggccgctgccatccctgc

SEQ ID NO: 1514450 - DNA, 25 bp, Homo sapien
atccctgcctctcgcttctcgggcc

SEQ ID NO: 1514451 - DNA, 25 bp, Homo sapien
ctcggtacgtgaggccgaggcttcc

SEQ ID NO: 1514452 - DNA, 25 bp, Homo sapien
aatacaagactaacaggtgtcgggc

SEQ ID NO: 1514453 - DNA, 25 bp, Homo sapien
cacgtgcagaagcagccgtttttgc

SEQ ID NO: 1514454 - DNA, 25 bp, Homo sapien
caagaccagaatatgcctgaggaag

SEQ ID NO: 1514455 - DNA, 25 bp, Homo sapien
gagagaattatctccgaatgggcca

SEQ ID NO: 1514456 - DNA, 25 bp, Homo sapien
taagggacctgtcattgaggacgaa

SEQ ID NO: 1514457 - DNA, 25 bp, Homo sapien
tgaggacgaaccatcacagcaagag

SEQ ID NO: 1514458 - DNA, 25 bp, Homo sapien
caagaggaattatctcgtgccgcat

SEQ ID NO: 1514459 - DNA, 25 bp, Homo sapien
tgaactgcagtatctaccctggacc

SEQ ID NO: 1514460 - DNA, 25 bp, Homo sapien
gtctcttaactccttacctcaaatg

SEQ ID NO: 1514461 - DNA, 25 bp, Homo sapien
ctcttaactccttacctcaaatgat

SEQ ID NO: 1514462 - DNA, 25 bp, Homo sapien
tggtctcttaactccttacctcaaa

SEQ ID NO: 1514463 - DNA, 25 bp, Homo sapien
gctggtctcttaactccttacctca

SEQ ID NO: 1514464 - DNA, 25 bp, Homo sapien
aaagctttagcctggactgggtaga

SEQ ID NO: 1514465 - DNA, 25 bp, Homo sapien
tagtctgcctaatagaaaagccacc

SEQ ID NO: 1514466 - DNA, 25 bp, Homo sapien
gagatcagaacaatcccagcgcttg

SEQ ID NO: 1514467 - DNA, 25 bp, Homo sapien
gcatggaccctgacacatcgtaggt

SEQ ID NO: 1514468 - DNA, 25 bp, Homo sapien
taccactgtactccagcctgggtga

SEQ ID NO: 1514469 - DNA, 25 bp, Homo sapien
agtgagtcgaggtcataccactgta

SEQ ID NO: 1514470 - DNA, 25 bp, Homo sapien
cagtgagtcgaggtcataccactgt

SEQ ID NO: 1514471 - DNA, 25 bp, Homo sapien
cactgtactccagcctgggtgacag

SEQ ID NO: 1514472 - DNA, 25 bp, Homo sapien
gcagtgccacatcttaaaggaccga

SEQ ID NO: 1514473 - DNA, 25 bp, Homo sapien
taatgctaatactgctggtccacgg

SEQ ID NO: 1514474 - DNA, 25 bp, Homo sapien
tcctaaggagctccctggtaatgct

SEQ ID NO: 1514475 - DNA, 25 bp, Homo sapien
gaaagttctaattgggcagtgccac

SEQ ID NO: 1514476 - DNA, 25 bp, Homo sapien
gcagttggtggtaaacctaggcaaa

SEQ ID NO: 1514477 - DNA, 25 bp, Homo sapien
ttcctgttcattggtgtctagttta

SEQ ID NO: 1514478 - DNA, 25 bp, Homo sapien
catcttactagtggatcctgtttcc

SEQ ID NO: 1514479 - DNA, 25 bp, Homo sapien
gccaagggaactgtggaaatgttag

SEQ ID NO: 1514480 - DNA, 25 bp, Homo sapien
aaaagttgtattagaatctggccac

SEQ ID NO: 1514481 - DNA, 25 bp, Homo sapien
cagggaatcatctgtacccttgtgg

SEQ ID NO: 1514482 - DNA, 25 bp, Homo sapien
aacttcaaagtggagtagtggcaca

SEQ ID NO: 1514483 - DNA, 25 bp, Homo sapien
tttgccaaccgctcaactagggtgt

SEQ ID NO: 1514484 - DNA, 25 bp, Homo sapien
caagagtgttgagctagttcctggt

SEQ ID NO: 1514485 - DNA, 25 bp, Homo sapien
tgcagctgcgattaaccctaaaggc

SEQ ID NO: 1514486 - DNA, 25 bp, Homo sapien
tcacatcccaacagggtctgcttgg

SEQ ID NO: 1514487 - DNA, 25 bp, Homo sapien
gagacaccagccttcctgtatagac

SEQ ID NO: 1514488 - DNA, 25 bp, Homo sapien
tggaaaagtgttcgccgaggtgtgc

SEQ ID NO: 1514489 - DNA, 25 bp, Homo sapien
cagaaagtccaagctcgtggtgggt

SEQ ID NO: 1514490 - DNA, 25 bp, Homo sapien
gaaaagtgttcgccgaggtgtgcat

SEQ ID NO: 1514491 - DNA, 25 bp, Homo sapien
gtggaaaagtgttcgccgaggtgtg

SEQ ID NO: 1514492 - DNA, 25 bp, Homo sapien
tttcccgggatgccgagtctccatt

SEQ ID NO: 1514493 - DNA, 25 bp, Homo sapien
ttcccgggatgccgagtctccattc

SEQ ID NO: 1514494 - DNA, 25 bp, Homo sapien
cccgggatgccgagtctccattcct

SEQ ID NO: 1514495 - DNA, 25 bp, Homo sapien
gggatgccgagtctccattcctcca

SEQ ID NO: 1514496 - DNA, 25 bp, Homo sapien
tctctcattctcgtctttcctgtgc

SEQ ID NO: 1514497 - DNA, 25 bp, Homo sapien
ttctctcattctcgtctttcctgtg

SEQ ID NO: 1514498 - DNA, 25 bp, Homo sapien
agggaagaagtcagcatgcttctca

SEQ ID NO: 1514499 - DNA, 25 bp, Homo sapien
cacttcctaccgttataatgttctg

SEQ ID NO: 1514500 - DNA, 25 bp, Homo sapien
agacctccctgatgtgagcactcac

SEQ ID NO: 1514501 - DNA, 25 bp, Homo sapien
tctctttaattgagcgtgtgtgtga

SEQ ID NO: 1514502 - DNA, 25 bp, Homo sapien
gagaatgtgctagcctttctgccta

SEQ ID NO: 1514503 - DNA, 25 bp, Homo sapien
gcctgcccgcctgccgggtgccacc

SEQ ID NO: 1514504 - DNA, 25 bp, Homo sapien
cgcctgcccgcctgccgggtgccac

SEQ ID NO: 1514505 - DNA, 25 bp, Homo sapien
gaagctgagcgccagttcgcccagg

SEQ ID NO: 1514506 - DNA, 25 bp, Homo sapien
aagagcggcacccgcgagaagctga

SEQ ID NO: 1514507 - DNA, 25 bp, Homo sapien
gctcatacttgaggtagaggatgga

SEQ ID NO: 1514508 - DNA, 25 bp, Homo sapien
atgaagtaactgaggtcgaagacgg

SEQ ID NO: 1514509 - DNA, 25 bp, Homo sapien
actgattcttagagtcaagcagacc

SEQ ID NO: 1514510 - DNA, 25 bp, Homo sapien
tcctcagccctgataacagacatca

SEQ ID NO: 1514511 - DNA, 25 bp, Homo sapien
gatagcttagccactatttcctgtt

SEQ ID NO: 1514512 - DNA, 25 bp, Homo sapien
ggctgagtcccgaggctgcaactga

SEQ ID NO: 1514513 - DNA, 25 bp, Homo sapien
acctccttcagccccatgattctga

SEQ ID NO: 1514514 - DNA, 25 bp, Homo sapien
gccacctccttcagccccatgattc

SEQ ID NO: 1514515 - DNA, 25 bp, Homo sapien
ctccttcagccccatgattctgagt

SEQ ID NO: 1514516 - DNA, 25 bp, Homo sapien
tgtgagccacctccttcagccccat

SEQ ID NO: 1514517 - DNA, 25 bp, Homo sapien
cagccaggacgcgatggggtggcgc

SEQ ID NO: 1514518 - DNA, 25 bp, Homo sapien
gccaggacgcgatggggtggcgccg

SEQ ID NO: 1514519 - DNA, 25 bp, Homo sapien
tggcgccgggacagttcgactgctc

SEQ ID NO: 1514520 - DNA, 25 bp, Homo sapien
gggtggcgccgggacagttcgactg

SEQ ID NO: 1514521 - DNA, 25 bp, Homo sapien
caggatgtagctcccgaagcaatgc

SEQ ID NO: 1514522 - DNA, 25 bp, Homo sapien
agtaatcgatcagtggctccccaag

SEQ ID NO: 1514523 - DNA, 25 bp, Homo sapien
ggatgctggagttgttgctgaagta

SEQ ID NO: 1514524 - DNA, 25 bp, Homo sapien
cagccaggatgtagctcccgaagca

SEQ ID NO: 1514525 - DNA, 25 bp, Homo sapien
cttttggggagagaacagtgagtgc

SEQ ID NO: 1514526 - DNA, 25 bp, Homo sapien
catggccacgaagatgagtttcaca

SEQ ID NO: 1514527 - DNA, 25 bp, Homo sapien
gacccacccagttgcaatcatgacg

SEQ ID NO: 1514528 - DNA, 25 bp, Homo sapien
gtgatggatgcccaccgcgatcttg

SEQ ID NO: 1514529 - DNA, 25 bp, Homo sapien
aatcatgacgaaccacccgtggtgg

SEQ ID NO: 1514530 - DNA, 25 bp, Homo sapien
gatgcccaccgcgatcttgcggact

SEQ ID NO: 1514531 - DNA, 25 bp, Homo sapien
gaggtttgaacacctactgcagtct

SEQ ID NO: 1514532 - DNA, 25 bp, Homo sapien
catttaccctaaaggtatcggctga

SEQ ID NO: 1514533 - DNA, 25 bp, Homo sapien
cacacgaaagggtctgtaggcttca

SEQ ID NO: 1514534 - DNA, 25 bp, Homo sapien
cctctaggaggcgtttagcaatgtc

SEQ ID NO: 1514535 - DNA, 25 bp, Homo sapien
ttggacatgagggcgacaccagaac

SEQ ID NO: 1514536 - DNA, 25 bp, Homo sapien
gcaggatctcgttggtctctggctt

SEQ ID NO: 1514537 - DNA, 25 bp, Homo sapien
aagacatgtgcaggatctcgttggt

SEQ ID NO: 1514538 - DNA, 25 bp, Homo sapien
catgtgcaggatctcgttggtctct

SEQ ID NO: 1514539 - DNA, 25 bp, Homo sapien
cgtgcccagcctaatgatgataatt

SEQ ID NO: 1514540 - DNA, 25 bp, Homo sapien
ccagcctaatgatgataattctctc

SEQ ID NO: 1514541 - DNA, 25 bp, Homo sapien
tgcccagcctaatgatgataattct

SEQ ID NO: 1514542 - DNA, 25 bp, Homo sapien
gcctaatgatgataattctctctaa

SEQ ID NO: 1514543 - DNA, 25 bp, Homo sapien
tggctccatacaggctggccttggt

SEQ ID NO: 1514544 - DNA, 25 bp, Homo sapien
agggtgaagaggatggctccataca

SEQ ID NO: 1514545 - DNA, 25 bp, Homo sapien
gaggatggctccatacaggctggcc

SEQ ID NO: 1514546 - DNA, 25 bp, Homo sapien
cagcgggtctgctggagggtgaaga

SEQ ID NO: 1514547 - DNA, 25 bp, Homo sapien
agatgtagccctccagggcatcaaa

SEQ ID NO: 1514548 - DNA, 25 bp, Homo sapien
gcatcaaagggggagctgtgtgagt

SEQ ID NO: 1514549 - DNA, 25 bp, Homo sapien
agcacggggcagatgtagccctcca

SEQ ID NO: 1514550 - DNA, 25 bp, Homo sapien
gtgagtgggtggctgtcagaaacac

SEQ ID NO: 1514551 - DNA, 25 bp, Homo sapien
tgtgggacccaccatggttgtcgtg

SEQ ID NO: 1514552 - DNA, 25 bp, Homo sapien
tcctccttggacttggcgggcatgg

SEQ ID NO: 1514553 - DNA, 25 bp, Homo sapien
cttggcgggcatggccgaatgctga

SEQ ID NO: 1514554 - DNA, 25 bp, Homo sapien
ggacccaccatggttgtcgtggtga

SEQ ID NO: 1514555 - DNA, 25 bp, Homo sapien
ccaggaaaggatagatctgagcgca

SEQ ID NO: 1514556 - DNA, 25 bp, Homo sapien
ttctgtgaacccctccaaaagctgt

SEQ ID NO: 1514557 - DNA, 25 bp, Homo sapien
caactaagaatatcatgccaaccag

SEQ ID NO: 1514558 - DNA, 25 bp, Homo sapien
tgctgccaggattctgtgaacccct

SEQ ID NO: 1514559 - DNA, 25 bp, Homo sapien
cttgctggagacaggtcttattggc

SEQ ID NO: 1514560 - DNA, 25 bp, Homo sapien
ttgctggagacaggtcttattggcc

SEQ ID NO: 1514561 - DNA, 25 bp, Homo sapien
tgctggagacaggtcttattggcca

SEQ ID NO: 1514562 - DNA, 25 bp, Homo sapien
ctggagacaggtcttattggccagg

SEQ ID NO: 1514563 - DNA, 25 bp, Homo sapien
gaagagactttgaaatggcagcacc

SEQ ID NO: 1514564 - DNA, 25 bp, Homo sapien
ttttaactgcagcttcgcatcggcc

SEQ ID NO: 1514565 - DNA, 25 bp, Homo sapien
tgaaaatgtctagccactgaggagc

SEQ ID NO: 1514566 - DNA, 25 bp, Homo sapien
aagagtcgggactttctggccacgt

SEQ ID NO: 1514567 - DNA, 25 bp, Homo sapien
tagcctttgctggtagttgaacgac

SEQ ID NO: 1514568 - DNA, 25 bp, Homo sapien
tcttgtctggtaaggctggcgtgcc

SEQ ID NO: 1514569 - DNA, 25 bp, Homo sapien
acagaggccctttgcagtgtcagcg

SEQ ID NO: 1514570 - DNA, 25 bp, Homo sapien
tctgtcccacgagaaagtgaattcc

SEQ ID NO: 1514571 - DNA, 25 bp, Homo sapien
gctgatgatcgcaggaggataagag

SEQ ID NO: 1514572 - DNA, 25 bp, Homo sapien
gatgatcgcaggaggataagagtct

SEQ ID NO: 1514573 - DNA, 25 bp, Homo sapien
tgatcgcaggaggataagagtcttt

SEQ ID NO: 1514574 - DNA, 25 bp, Homo sapien
tgatgatcgcaggaggataagagtc

SEQ ID NO: 1514575 - DNA, 25 bp, Homo sapien
gaattcacttcagcgcctggccacg

SEQ ID NO: 1514576 - DNA, 25 bp, Homo sapien
gataccacagtttagctgcagcctg

SEQ ID NO: 1514577 - DNA, 25 bp, Homo sapien
agcaggctccttggacccgaattca

SEQ ID NO: 1514578 - DNA, 25 bp, Homo sapien
ctgcagcctgctgatctcactgagg

SEQ ID NO: 1514579 - DNA, 25 bp, Homo sapien
tgagcctggttggaatgccggctcc

SEQ ID NO: 1514580 - DNA, 25 bp, Homo sapien
gaggacttaagcaagtggtctccct

SEQ ID NO: 1514581 - DNA, 25 bp, Homo sapien
cttggcatccgtgagcctggttgga

SEQ ID NO: 1514582 - DNA, 25 bp, Homo sapien
tcctggaggacttaagcaagtggtc

SEQ ID NO: 1514583 - DNA, 25 bp, Homo sapien
tgatgaagatggtcacaccgctggg

SEQ ID NO: 1514584 - DNA, 25 bp, Homo sapien
tactcgggctgagagggcccacgct

SEQ ID NO: 1514585 - DNA, 25 bp, Homo sapien
ctgagactgtggaactgatgaagat

SEQ ID NO: 1514586 - DNA, 25 bp, Homo sapien
ttcaccccgcagaagccgccggcgg

SEQ ID NO: 1514587 - DNA, 25 bp, Homo sapien
tctggcacttcagggtaggcagtgc

SEQ ID NO: 1514588 - DNA, 25 bp, Homo sapien
cagaaggtctggcacttcagggtag

SEQ ID NO: 1514589 - DNA, 25 bp, Homo sapien
tcaaacatcaagccgtgcctctggc

SEQ ID NO: 1514590 - DNA, 25 bp, Homo sapien
acatcaagccgtgcctctggcagaa

SEQ ID NO: 1514591 - DNA, 25 bp, Homo sapien
gttcaggtaggcaaagctgaccctg

SEQ ID NO: 1514592 - DNA, 25 bp, Homo sapien
tcaggtaggcaaagctgaccctgtg

SEQ ID NO: 1514593 - DNA, 25 bp, Homo sapien
ttcaggtaggcaaagctgaccctgt

SEQ ID NO: 1514594 - DNA, 25 bp, Homo sapien
caggtaggcaaagctgaccctgtgg

SEQ ID NO: 1514595 - DNA, 25 bp, Homo sapien
tccttggcaaccgcacgcttgcagt

SEQ ID NO: 1514596 - DNA, 25 bp, Homo sapien
ttggcaaccgcacgcttgcagttca

SEQ ID NO: 1514597 - DNA, 25 bp, Homo sapien
aggtctccttggcaaccgcacgctt

SEQ ID NO: 1514598 - DNA, 25 bp, Homo sapien
ggtctccttggcaaccgcacgcttg

SEQ ID NO: 1514599 - DNA, 25 bp, Homo sapien
atgttccgaataccccacctcagat

SEQ ID NO: 1514600 - DNA, 25 bp, Homo sapien
tggcttcaatgttccgaatacccca

SEQ ID NO: 1514601 - DNA, 25 bp, Homo sapien
tggatgttttccaacaccggtcaac

SEQ ID NO: 1514602 - DNA, 25 bp, Homo sapien
aaagctggccctatggatgttttcc

SEQ ID NO: 1514603 - DNA, 25 bp, Homo sapien
gactctagctgcttttgtgggtcct

SEQ ID NO: 1514604 - DNA, 25 bp, Homo sapien
aataaatgtatatcggccaggcgcg

SEQ ID NO: 1514605 - DNA, 25 bp, Homo sapien
tccttatgagggttcttatgccatg

SEQ ID NO: 1514606 - DNA, 25 bp, Homo sapien
ctcactacattacccgggctggtat

SEQ ID NO: 1514607 - DNA, 25 bp, Homo sapien
cgtaggtgggaggaaacgcattctc

SEQ ID NO: 1514608 - DNA, 25 bp, Homo sapien
catcgatccgcgagggaatcagaca

SEQ ID NO: 1514609 - DNA, 25 bp, Homo sapien
gctccagagcgtaggacagaagtta

SEQ ID NO: 1514610 - DNA, 25 bp, Homo sapien
tcgtccctctggaagtatcgtgcca

SEQ ID NO: 1514611 - DNA, 25 bp, Homo sapien
gaacagactaatacggcccctgtgc

SEQ ID NO: 1514612 - DNA, 25 bp, Homo sapien
ggaacatggctgaactatcttggat

SEQ ID NO: 1514613 - DNA, 25 bp, Homo sapien
acagcctttctcagagccgagggac

SEQ ID NO: 1514614 - DNA, 25 bp, Homo sapien
gatggatattctgaacacgtggtca

SEQ ID NO: 1514615 - DNA, 25 bp, Homo sapien
gctgcttgctgtcatcgtgcctgag

SEQ ID NO: 1514616 - DNA, 25 bp, Homo sapien
tcctggcgtccgcagaaggtctgaa

SEQ ID NO: 1514617 - DNA, 25 bp, Homo sapien
ggatctcttggtagagccacgccaa

SEQ ID NO: 1514618 - DNA, 25 bp, Homo sapien
ctaagggcgcagtcttcaaggatgt

SEQ ID NO: 1514619 - DNA, 25 bp, Homo sapien
gagctcatttgtgacgtccccagca

SEQ ID NO: 1514620 - DNA, 25 bp, Homo sapien
tgcagagttggtgcgtggcttcctc

SEQ ID NO: 1514621 - DNA, 25 bp, Homo sapien
caggcacggtgaaagaggcccattt

SEQ ID NO: 1514622 - DNA, 25 bp, Homo sapien
caggtcatccatagcatccagcagg

SEQ ID NO: 1514623 - DNA, 25 bp, Homo sapien
caagtagtatcccagatcccgacga

SEQ ID NO: 1514624 - DNA, 25 bp, Homo sapien
cacgggccgccgggccaagtagtat

SEQ ID NO: 1514625 - DNA, 25 bp, Homo sapien
gcggggtccaatctcggtacacatc

SEQ ID NO: 1514626 - DNA, 25 bp, Homo sapien
tcgtcgtccagggacaaaacatcct

SEQ ID NO: 1514627 - DNA, 25 bp, Homo sapien
gagcttcttggtaccctggctccag

SEQ ID NO: 1514628 - DNA, 25 bp, Homo sapien
cacaagtggcagagtgatgagcttc

SEQ ID NO: 1514629 - DNA, 25 bp, Homo sapien
ttggctctctcggatcctgacaggt

SEQ ID NO: 1514630 - DNA, 25 bp, Homo sapien
tccctgagaagaagtcggccaggac

SEQ ID NO: 1514631 - DNA, 25 bp, Homo sapien
tccaggcggcccgagtgaagcaggt

SEQ ID NO: 1514632 - DNA, 25 bp, Homo sapien
tatgtgagaaccacagaggctgcgg

SEQ ID NO: 1514633 - DNA, 25 bp, Homo sapien
tgaagcaggtgatagggcaactcct

SEQ ID NO: 1514634 - DNA, 25 bp, Homo sapien
tccgcaggtttgcaaccgtatgtga

SEQ ID NO: 1514635 - DNA, 25 bp, Homo sapien
agcaggtcttcaatgcccccagaga

SEQ ID NO: 1514636 - DNA, 25 bp, Homo sapien
agggcttcacggaccaggccaacct

SEQ ID NO: 1514637 - DNA, 25 bp, Homo sapien
caggtcttcaatgcccccagagatg

SEQ ID NO: 1514638 - DNA, 25 bp, Homo sapien
gagctggagggcttcacggaccagg

SEQ ID NO: 1514639 - DNA, 25 bp, Homo sapien
atgtgaggtggcgaagaaatggagt

SEQ ID NO: 1514640 - DNA, 25 bp, Homo sapien
agttctgtgtacaggaggctcctct

SEQ ID NO: 1514641 - DNA, 25 bp, Homo sapien
tgaggtggcgaagaaatggagtctg

SEQ ID NO: 1514642 - DNA, 25 bp, Homo sapien
ggcgaagaaatggagtctggccagc

SEQ ID NO: 1514643 - DNA, 25 bp, Homo sapien
ggcaccagcacagggtgtgcgcaca

SEQ ID NO: 1514644 - DNA, 25 bp, Homo sapien
tgacagccgctgagagttgcccgga

SEQ ID NO: 1514645 - DNA, 25 bp, Homo sapien
tgtgacagccgctgagagttgcccg

SEQ ID NO: 1514646 - DNA, 25 bp, Homo sapien
tgtgcgcacaactggaaccagctct

SEQ ID NO: 1514647 - DNA, 25 bp, Homo sapien
catgtggatcacatgctgctcttcc

SEQ ID NO: 1514648 - DNA, 25 bp, Homo sapien
tgtgtgtccagttagcatgtggatc

SEQ ID NO: 1514649 - DNA, 25 bp, Homo sapien
atgtcccacacagccatgatgccat

SEQ ID NO: 1514650 - DNA, 25 bp, Homo sapien
catcctgggtgccaatcaccagcag

SEQ ID NO: 1514651 - DNA, 25 bp, Homo sapien
caagtgcagcgtgtaatcctttgaa

SEQ ID NO: 1514652 - DNA, 25 bp, Homo sapien
gaggttcagcgggattttttgagcc

SEQ ID NO: 1514653 - DNA, 25 bp, Homo sapien
cagagagtaagttccacaagtgcag

SEQ ID NO: 1514654 - DNA, 25 bp, Homo sapien
gcctcatccacatgaaggttccaga

SEQ ID NO: 1514655 - DNA, 25 bp, Homo sapien
gctggacatatgttgcttcccctga

SEQ ID NO: 1514656 - DNA, 25 bp, Homo sapien
ggatatggaataccggctctgcagt

SEQ ID NO: 1514657 - DNA, 25 bp, Homo sapien
gaagttttcccgtagctgagctcca

SEQ ID NO: 1514658 - DNA, 25 bp, Homo sapien
gcttctggactgagacggcacaggt

SEQ ID NO: 1514659 - DNA, 25 bp, Homo sapien
gatggagccattgctaaacccggta

SEQ ID NO: 1514660 - DNA, 25 bp, Homo sapien
atggagccattgctaaacccggtaa

SEQ ID NO: 1514661 - DNA, 25 bp, Homo sapien
tggagccattgctaaacccggtaac

SEQ ID NO: 1514662 - DNA, 25 bp, Homo sapien
aggaacctcacagcatctggaagct

SEQ ID NO: 1514663 - DNA, 25 bp, Homo sapien
accaggaacctcacagcatctggaa

SEQ ID NO: 1514664 - DNA, 25 bp, Homo sapien
cggcgaggagggactcatcttcaga

SEQ ID NO: 1514665 - DNA, 25 bp, Homo sapien
ctgcggcgaggagggactcatcttc

SEQ ID NO: 1514666 - DNA, 25 bp, Homo sapien
atgaatcggcgaaagcccctcgagt

SEQ ID NO: 1514667 - DNA, 25 bp, Homo sapien
gttctcagtaccaaaaacagccgtc

SEQ ID NO: 1514668 - DNA, 25 bp, Homo sapien
ctgaatgagcgcatcaagggacccc

SEQ ID NO: 1514669 - DNA, 25 bp, Homo sapien
ctcgagtccgccaagaatatccgca

SEQ ID NO: 1514670 - DNA, 25 bp, Homo sapien
gagatcccagaccttgaaagatgag

SEQ ID NO: 1514671 - DNA, 25 bp, Homo sapien
tgcggtccagaaatggtgcaggcac

SEQ ID NO: 1514672 - DNA, 25 bp, Homo sapien
agtagacgtagcttccattgtggga

SEQ ID NO: 1514673 - DNA, 25 bp, Homo sapien
gacctatgagcatcgctgagatccc

SEQ ID NO: 1514674 - DNA, 25 bp, Homo sapien
tgtcttttatgtagagacgtctggt

SEQ ID NO: 1514675 - DNA, 25 bp, Homo sapien
tcttttatgtagagacgtctggtct

SEQ ID NO: 1514676 - DNA, 25 bp, Homo sapien
tttgtcttttatgtagagacgtctg

SEQ ID NO: 1514677 - DNA, 25 bp, Homo sapien
gtcttttatgtagagacgtctggtc

SEQ ID NO: 1514678 - DNA, 25 bp, Homo sapien
tagaccacgcggtagtccgtcagaa

SEQ ID NO: 1514679 - DNA, 25 bp, Homo sapien
gaatgcatatcacgtcctgcctgga

SEQ ID NO: 1514680 - DNA, 25 bp, Homo sapien
taaataggagcttgcgctgctcagc

SEQ ID NO: 1514681 - DNA, 25 bp, Homo sapien
gcagttgattgctttccgggcctcg

SEQ ID NO: 1514682 - DNA, 25 bp, Homo sapien
cacctggcctaccattgctgagctt

SEQ ID NO: 1514683 - DNA, 25 bp, Homo sapien
ttgcttctgagacaaatgcctcact

SEQ ID NO: 1514684 - DNA, 25 bp, Homo sapien
tgtactacagcctcgtgacagtggg

SEQ ID NO: 1514685 - DNA, 25 bp, Homo sapien
ctttgaactttgtagccaggtccgg

SEQ ID NO: 1514686 - DNA, 25 bp, Homo sapien
gagttgctgtgcctaatctagactt

SEQ ID NO: 1514687 - DNA, 25 bp, Homo sapien
cctaatctagacttacaaggccttc

SEQ ID NO: 1514688 - DNA, 25 bp, Homo sapien
tgtgcctaatctagacttacaaggc

SEQ ID NO: 1514689 - DNA, 25 bp, Homo sapien
tgctgtgcctaatctagacttacaa

SEQ ID NO: 1514690 - DNA, 25 bp, Homo sapien
agcaagcacattggacccctctgca

SEQ ID NO: 1514691 - DNA, 25 bp, Homo sapien
gcaagcacattggacccctctgcag

SEQ ID NO: 1514692 - DNA, 25 bp, Homo sapien
tccaaacaagtatagagcgatcctt

SEQ ID NO: 1514693 - DNA, 25 bp, Homo sapien
taagcccacgtacacatacttgtca

SEQ ID NO: 1514694 - DNA, 25 bp, Homo sapien
caagtatagagcgatcctttaagcc

SEQ ID NO: 1514695 - DNA, 25 bp, Homo sapien
gagcgatcctttaagcccacgtaca

SEQ ID NO: 1514696 - DNA, 25 bp, Homo sapien
ggctcctcagggttctatgctggaa

SEQ ID NO: 1514697 - DNA, 25 bp, Homo sapien
gctgcttctaacatctataaggcgg

SEQ ID NO: 1514698 - DNA, 25 bp, Homo sapien
ggaatgtagtgatgtaaccagcccc

SEQ ID NO: 1514699 - DNA, 25 bp, Homo sapien
tactagtgacttgaccctcttctca

SEQ ID NO: 1514700 - DNA, 25 bp, Homo sapien
ggatcagataaccatgcctggtggg

SEQ ID NO: 1514701 - DNA, 25 bp, Homo sapien
tgctgaaaggcactggaaattctct

SEQ ID NO: 1514702 - DNA, 25 bp, Homo sapien
gtttaccacagcatggacaaactgg

SEQ ID NO: 1514703 - DNA, 25 bp, Homo sapien
tgaagttcttaagagggtcctgcgg

SEQ ID NO: 1514704 - DNA, 25 bp, Homo sapien
cctgcagctgcaactagctcctctc

SEQ ID NO: 1514705 - DNA, 25 bp, Homo sapien
ttgtgagcatttgtttgatttggtt

SEQ ID NO: 1514706 - DNA, 25 bp, Homo sapien
catttgtttgatttggtttcatttc

SEQ ID NO: 1514707 - DNA, 25 bp, Homo sapien
gatttggtttcatttccctgggcac

SEQ ID NO: 1514708 - DNA, 25 bp, Homo sapien
tgtttgatttggtttcatttccctg

SEQ ID NO: 1514709 - DNA, 25 bp, Homo sapien
gagacagcagcatattggccaccat

SEQ ID NO: 1514710 - DNA, 25 bp, Homo sapien
gttttactgccagcgtgagtcctga

SEQ ID NO: 1514711 - DNA, 25 bp, Homo sapien
tgggacagaaggctcactctcagag

SEQ ID NO: 1514712 - DNA, 25 bp, Homo sapien
gcagtagggtcttgttcagctcaaa

SEQ ID NO: 1514713 - DNA, 25 bp, Homo sapien
ctgcggagcccgagcgaccccagcg

SEQ ID NO: 1514714 - DNA, 25 bp, Homo sapien
cccgagcgaccccagcgggcgccgc

SEQ ID NO: 1514715 - DNA, 25 bp, Homo sapien
cggagcccgagcgaccccagcgggc

SEQ ID NO: 1514716 - DNA, 25 bp, Homo sapien
ccgagcgaccccagcgggcgccgct

SEQ ID NO: 1514717 - DNA, 25 bp, Homo sapien
ctggtccagataggtgagggcgtct

SEQ ID NO: 1514718 - DNA, 25 bp, Homo sapien
tggtccagataggtgagggcgtctt

SEQ ID NO: 1514719 - DNA, 25 bp, Homo sapien
ggtcgctgccaaagcggatcttcac

SEQ ID NO: 1514720 - DNA, 25 bp, Homo sapien
tggcagggtcgctgccaaagcggat

SEQ ID NO: 1514721 - DNA, 25 bp, Homo sapien
taggtggcagggtcgctgccaaagc

SEQ ID NO: 1514722 - DNA, 25 bp, Homo sapien
tccaggaagccgttgtaggtggcag

SEQ ID NO: 1514723 - DNA, 25 bp, Homo sapien
agaggcgactgtatgtttaacttgc

SEQ ID NO: 1514724 - DNA, 25 bp, Homo sapien
gaatccaacaatgaggtcagggtgc

SEQ ID NO: 1514725 - DNA, 25 bp, Homo sapien
tgcgagacacgtctgatgactccag

SEQ ID NO: 1514726 - DNA, 25 bp, Homo sapien
tgctcgtggaagagctgcgagacac

SEQ ID NO: 1514727 - DNA, 25 bp, Homo sapien
caaggcaaggctccagtaagaagct

SEQ ID NO: 1514728 - DNA, 25 bp, Homo sapien
ccaaggcctgaattaccagacagta

SEQ ID NO: 1514729 - DNA, 25 bp, Homo sapien
ggactcaccgtcaaccaaggaagga

SEQ ID NO: 1514730 - DNA, 25 bp, Homo sapien
gagctgacattacaaccaaggcctg

SEQ ID NO: 1514731 - DNA, 25 bp, Homo sapien
gacaactagcgggacttcccccaga

SEQ ID NO: 1514732 - DNA, 25 bp, Homo sapien
gcctctgaataaaccccagggcctg

SEQ ID NO: 1514733 - DNA, 25 bp, Homo sapien
aagaatcgacttgttgacaactagc

SEQ ID NO: 1514734 - DNA, 25 bp, Homo sapien
cagggggctccctttgaatgtcgag

SEQ ID NO: 1514735 - DNA, 25 bp, Homo sapien
aattccacggaatcggactccaggg

SEQ ID NO: 1514736 - DNA, 25 bp, Homo sapien
tctttatacggcacctgctgcttga

SEQ ID NO: 1514737 - DNA, 25 bp, Homo sapien
ccgtccccgtggttgtgcgaattct

SEQ ID NO: 1514738 - DNA, 25 bp, Homo sapien
ttattcacatagctgatggcgttgt

SEQ ID NO: 1514739 - DNA, 25 bp, Homo sapien
gtacgtgtgcaggatctccaggaat

SEQ ID NO: 1514740 - DNA, 25 bp, Homo sapien
tgtgcaggatctccaggaatgacct

SEQ ID NO: 1514741 - DNA, 25 bp, Homo sapien
atttctgggtggtctaggaagcggg

SEQ ID NO: 1514742 - DNA, 25 bp, Homo sapien
gaatgacctgtagatttctgggtgg

SEQ ID NO: 1514743 - DNA, 25 bp, Homo sapien
aaaaactagacaacctgaggctgga

SEQ ID NO: 1514744 - DNA, 25 bp, Homo sapien
actagacaacctgaggctggagtca

SEQ ID NO: 1514745 - DNA, 25 bp, Homo sapien
aatgcagatgccatccagctgggta

SEQ ID NO: 1514746 - DNA, 25 bp, Homo sapien
tttaaaatgcagatgccatccagct

SEQ ID NO: 1514747 - DNA, 25 bp, Homo sapien
aacaagaggcaatagcaccggagcc

SEQ ID NO: 1514748 - DNA, 25 bp, Homo sapien
tatggcgtggcttccagagtcccac

SEQ ID NO: 1514749 - DNA, 25 bp, Homo sapien
cccggataatatggcgtggcttcca

SEQ ID NO: 1514750 - DNA, 25 bp, Homo sapien
aatagcaccggagcctcccggataa

SEQ ID NO: 1514751 - DNA, 25 bp, Homo sapien
ttcagacatgcctcggaatggccgg

SEQ ID NO: 1514752 - DNA, 25 bp, Homo sapien
cctcttcagacatgcctcggaatgg

SEQ ID NO: 1514753 - DNA, 25 bp, Homo sapien
aatggccggcccctcgtgttcagct

SEQ ID NO: 1514754 - DNA, 25 bp, Homo sapien
agacatgcctcggaatggccggccc

SEQ ID NO: 1514755 - DNA, 25 bp, Homo sapien
tggcttcgggcaggaactgtccaaa

SEQ ID NO: 1514756 - DNA, 25 bp, Homo sapien
ttggcttcgggcaggaactgtccaa

SEQ ID NO: 1514757 - DNA, 25 bp, Homo sapien
cagttcacatggttcttgcttttca

SEQ ID NO: 1514758 - DNA, 25 bp, Homo sapien
tgaacatctgagctagatggacccc

SEQ ID NO: 1514759 - DNA, 25 bp, Homo sapien
ttccccaacagttcacatggttctt

SEQ ID NO: 1514760 - DNA, 25 bp, Homo sapien
caggtatagcagatcttccccaaca

SEQ ID NO: 1514761 - DNA, 25 bp, Homo sapien
cagcaagatgctcacattccaaggt

SEQ ID NO: 1514762 - DNA, 25 bp, Homo sapien
ccgtccatgcgtgaggtgactccag

SEQ ID NO: 1514763 - DNA, 25 bp, Homo sapien
cattccaaggtaaccgaatcatcac

SEQ ID NO: 1514764 - DNA, 25 bp, Homo sapien
caggccagatgctccgtccatgcgt

SEQ ID NO: 1514765 - DNA, 25 bp, Homo sapien
tgcacgctgtgcatctcgcacggcc

SEQ ID NO: 1514766 - DNA, 25 bp, Homo sapien
tctcgcacggcccgtttcctgtgaa

SEQ ID NO: 1514767 - DNA, 25 bp, Homo sapien
gggtcttgtcgtgctcgttcttctg

SEQ ID NO: 1514768 - DNA, 25 bp, Homo sapien
ggccgggagcgcttcctgctgtgct

SEQ ID NO: 1514769 - DNA, 25 bp, Homo sapien
catgctgggaaggcccgatttgctg

SEQ ID NO: 1514770 - DNA, 25 bp, Homo sapien
ccggtccagccccgaacccctgctg

SEQ ID NO: 1514771 - DNA, 25 bp, Homo sapien
actgccggtgaacctcacacagccc

SEQ ID NO: 1514772 - DNA, 25 bp, Homo sapien
agagctgacttccaacggtcccact

SEQ ID NO: 1514773 - DNA, 25 bp, Homo sapien
tgcagagtcccgtacttccccactg

SEQ ID NO: 1514774 - DNA, 25 bp, Homo sapien
cactgcagcgatggacaggtctttg

SEQ ID NO: 1514775 - DNA, 25 bp, Homo sapien
ttccccactgcagcgatggacaggt

SEQ ID NO: 1514776 - DNA, 25 bp, Homo sapien
tggacaggtctttggtaccacgaag

SEQ ID NO: 1514777 - DNA, 25 bp, Homo sapien
cagctggacatggcatccccaagat

SEQ ID NO: 1514778 - DNA, 25 bp, Homo sapien
tcctggctcttcagcacccggcgga

SEQ ID NO: 1514779 - DNA, 25 bp, Homo sapien
ctcctggctcttcagcacccggcgg

SEQ ID NO: 1514780 - DNA, 25 bp, Homo sapien
cctggctcttcagcacccggcggac

SEQ ID NO: 1514781 - DNA, 25 bp, Homo sapien
ctcctggttgaagagtgcgatgcag

SEQ ID NO: 1514782 - DNA, 25 bp, Homo sapien
tgaagagtgcgatgcagcggaggaa

SEQ ID NO: 1514783 - DNA, 25 bp, Homo sapien
ccagaaatgggctgacgagctgcag

SEQ ID NO: 1514784 - DNA, 25 bp, Homo sapien
cccagaaatgggctgacgagctgca

SEQ ID NO: 1514785 - DNA, 25 bp, Homo sapien
caagaatgacgttcctacggcgtat

SEQ ID NO: 1514786 - DNA, 25 bp, Homo sapien
tccactcagaccagaaatgaatgtc

SEQ ID NO: 1514787 - DNA, 25 bp, Homo sapien
gaaaaggcattactcgaggacccac

SEQ ID NO: 1514788 - DNA, 25 bp, Homo sapien
ggagactcaccgcttaacctagact

SEQ ID NO: 1514789 - DNA, 25 bp, Homo sapien
gaagctactcttagacctgacctgc

SEQ ID NO: 1514790 - DNA, 25 bp, Homo sapien
tactcttagacctgacctgctaatg

SEQ ID NO: 1514791 - DNA, 25 bp, Homo sapien
tagaagctactcttagacctgacct

SEQ ID NO: 1514792 - DNA, 25 bp, Homo sapien
aggttagaagctactcttagacctg

SEQ ID NO: 1514793 - DNA, 25 bp, Homo sapien
tctcaggaaccccacataggtcggt

SEQ ID NO: 1514794 - DNA, 25 bp, Homo sapien
gatccaagtttgtgacttacatcat

SEQ ID NO: 1514795 - DNA, 25 bp, Homo sapien
tcttcgattctttaggaaagatcca

SEQ ID NO: 1514796 - DNA, 25 bp, Homo sapien
caccctagtcacagggctgatgtgc

SEQ ID NO: 1514797 - DNA, 25 bp, Homo sapien
gaaaagggctaaggactgaatggac

SEQ ID NO: 1514798 - DNA, 25 bp, Homo sapien
caaagttgatatatgacagcaatgc

SEQ ID NO: 1514799 - DNA, 25 bp, Homo sapien
aatggactgatcatgttaatatgtg

SEQ ID NO: 1514800 - DNA, 25 bp, Homo sapien
agtgctgtcaactactatccctggg

SEQ ID NO: 1514801 - DNA, 25 bp, Homo sapien
atctgtcgctcatgggtggcgcgaa

SEQ ID NO: 1514802 - DNA, 25 bp, Homo sapien
tggcgcgaaggacagctcttttacc

SEQ ID NO: 1514803 - DNA, 25 bp, Homo sapien
ggatcctatgcgcttgcaggatgca

SEQ ID NO: 1514804 - DNA, 25 bp, Homo sapien
gcataatcaatttcccggcttatcc

SEQ ID NO: 1514805 - DNA, 25 bp, Homo sapien
tgcagatggctgtcctcccactgca

SEQ ID NO: 1514806 - DNA, 25 bp, Homo sapien
tgcacttgggctgctggtaggtttt

SEQ ID NO: 1514807 - DNA, 25 bp, Homo sapien
ggctgtcctcccactgcacttgggc

SEQ ID NO: 1514808 - DNA, 25 bp, Homo sapien
actgcacttgggctgctggtaggtt

SEQ ID NO: 1514809 - DNA, 25 bp, Homo sapien
tgtccacgaaccctggagaagtgtc

SEQ ID NO: 1514810 - DNA, 25 bp, Homo sapien
tccggagggccgatttcatttcaga

SEQ ID NO: 1514811 - DNA, 25 bp, Homo sapien
tgacccctgcactatatcctggaat

SEQ ID NO: 1514812 - DNA, 25 bp, Homo sapien
gattttgcaggccatcccagatgaa

SEQ ID NO: 1514813 - DNA, 25 bp, Homo sapien
gactttggtcaagtggacactccct

SEQ ID NO: 1514814 - DNA, 25 bp, Homo sapien
gatttactgttagccagtgtagaaa

SEQ ID NO: 1514815 - DNA, 25 bp, Homo sapien
ccttatacaaatgggaaggtgcata

SEQ ID NO: 1514816 - DNA, 25 bp, Homo sapien
catcctgatacataataccaactgc

SEQ ID NO: 1514817 - DNA, 25 bp, Homo sapien
ccaagaggaaatgccgtgaatgacg

SEQ ID NO: 1514818 - DNA, 25 bp, Homo sapien
gcaccaagaggaaatgccgtgaatg

SEQ ID NO: 1514819 - DNA, 25 bp, Homo sapien
accaagaggaaatgccgtgaatgac

SEQ ID NO: 1514820 - DNA, 25 bp, Homo sapien
ctgcaccaagaggaaatgccgtgaa

SEQ ID NO: 1514821 - DNA, 25 bp, Homo sapien
aggagacccaggtgtcgttcagtac

SEQ ID NO: 1514822 - DNA, 25 bp, Homo sapien
tcttcttggagctgacgaacgtgga

SEQ ID NO: 1514823 - DNA, 25 bp, Homo sapien
gctcgtcctcacagcggtgaagctg

SEQ ID NO: 1514824 - DNA, 25 bp, Homo sapien
ggtgaagctgctcctcgtacggtgt

SEQ ID NO: 1514825 - DNA, 25 bp, Homo sapien
agagaggagcctgggacctcagaga

SEQ ID NO: 1514826 - DNA, 25 bp, Homo sapien
tcagagaccagaggatttttttggg

SEQ ID NO: 1514827 - DNA, 25 bp, Homo sapien
cccacgtagctaggaatataggtgt

SEQ ID NO: 1514828 - DNA, 25 bp, Homo sapien
gccactggggaactcaagaggcctc

SEQ ID NO: 1514829 - DNA, 25 bp, Homo sapien
cgataaatggcacggcgctggatca

SEQ ID NO: 1514830 - DNA, 25 bp, Homo sapien
tggccaggttcgtctccaggacaac

SEQ ID NO: 1514831 - DNA, 25 bp, Homo sapien
ccaacacacggattgtggccaggtt

SEQ ID NO: 1514832 - DNA, 25 bp, Homo sapien
acagcggtgacagggttcttcttga

SEQ ID NO: 1514833 - DNA, 25 bp, Homo sapien
agggccttggtgtcgttctgcttga

SEQ ID NO: 1514834 - DNA, 25 bp, Homo sapien
tcgttgagcaagctcttggagcgca

SEQ ID NO: 1514835 - DNA, 25 bp, Homo sapien
tactgctcccgccagatcttgttga

SEQ ID NO: 1514836 - DNA, 25 bp, Homo sapien
acagcctggtggtcaagggacttga

SEQ ID NO: 1514837 - DNA, 25 bp, Homo sapien
aataggctgtagacatcgtccaggg

SEQ ID NO: 1514838 - DNA, 25 bp, Homo sapien
cacaaagatgaggtgcggctcgcta

SEQ ID NO: 1514839 - DNA, 25 bp, Homo sapien
tcggtccgatactccagaagctgct

SEQ ID NO: 1514840 - DNA, 25 bp, Homo sapien
tgcgcctggcggtagatcttcagca

SEQ ID NO: 1514841 - DNA, 25 bp, Homo sapien
gagacacaccgcctcatccatatgc

SEQ ID NO: 1514842 - DNA, 25 bp, Homo sapien
tgcggagacacaccgcctcatccat

SEQ ID NO: 1514843 - DNA, 25 bp, Homo sapien
ctgcggagacacaccgcctcatcca

SEQ ID NO: 1514844 - DNA, 25 bp, Homo sapien
cggagacacaccgcctcatccatat

SEQ ID NO: 1514845 - DNA, 25 bp, Homo sapien
cgcgtagggtgtcctcgtactgcgt

SEQ ID NO: 1514846 - DNA, 25 bp, Homo sapien
aggccgggtagtactcctccagctc

SEQ ID NO: 1514847 - DNA, 25 bp, Homo sapien
gaaggccgggtagtactcctccagc

SEQ ID NO: 1514848 - DNA, 25 bp, Homo sapien
atggtgaacatctcgcgtagggtgt

SEQ ID NO: 1514849 - DNA, 25 bp, Homo sapien
ggtttgtcaacagggacacggaaca

SEQ ID NO: 1514850 - DNA, 25 bp, Homo sapien
aaaacgtagctacccacgcaatgga

SEQ ID NO: 1514851 - DNA, 25 bp, Homo sapien
tgaagcacgagggaaatacagaggc

SEQ ID NO: 1514852 - DNA, 25 bp, Homo sapien
caatctctataaggcagccacagcc

SEQ ID NO: 1514853 - DNA, 25 bp, Homo sapien
gaggaaagcaggtggtgcggccacc

SEQ ID NO: 1514854 - DNA, 25 bp, Homo sapien
gccaccccgcctcctgcgggagtcc

SEQ ID NO: 1514855 - DNA, 25 bp, Homo sapien
tcctgcgggagtccccacctcaccc

SEQ ID NO: 1514856 - DNA, 25 bp, Homo sapien
agaggaagtcgacaaaggccagaaa

SEQ ID NO: 1514857 - DNA, 25 bp, Homo sapien
ggtctccctagcagcgcggacgcag

SEQ ID NO: 1514858 - DNA, 25 bp, Homo sapien
ctggtagctggtctccctagcagcg

SEQ ID NO: 1514859 - DNA, 25 bp, Homo sapien
ggacaggttcccaccagcggcaccc

SEQ ID NO: 1514860 - DNA, 25 bp, Homo sapien
ccccgcttcttctcgttcaggtaga

SEQ ID NO: 1514861 - DNA, 25 bp, Homo sapien
ttctcgtcggccatgcagcgctcag

SEQ ID NO: 1514862 - DNA, 25 bp, Homo sapien
ttgaagcagttctcgtcggccatgc

SEQ ID NO: 1514863 - DNA, 25 bp, Homo sapien
agcagttctcgtcggccatgcagcg

SEQ ID NO: 1514864 - DNA, 25 bp, Homo sapien
gttctcgtcggccatgcagcgctca

SEQ ID NO: 1514865 - DNA, 25 bp, Homo sapien
tccacagggtcctccgtctgggcct

SEQ ID NO: 1514866 - DNA, 25 bp, Homo sapien
tcggtgtccaggagctcgatggtca

SEQ ID NO: 1514867 - DNA, 25 bp, Homo sapien
tcacctgccctttgcgctgcaggaa

SEQ ID NO: 1514868 - DNA, 25 bp, Homo sapien
tggtcatgatcacctgccctttgcg

SEQ ID NO: 1514869 - DNA, 25 bp, Homo sapien
ccaggacgttgagggaatagacttc

SEQ ID NO: 1514870 - DNA, 25 bp, Homo sapien
tcattgtggtggtagccccaggaaa

SEQ ID NO: 1514871 - DNA, 25 bp, Homo sapien
catctgtccccgcaaaaattgtgac

SEQ ID NO: 1514872 - DNA, 25 bp, Homo sapien
tgagtaatgtgcacacacactggac

SEQ ID NO: 1514873 - DNA, 25 bp, Homo sapien
tatagctcttgacagaggacccagt

SEQ ID NO: 1514874 - DNA, 25 bp, Homo sapien
gggctatggccactcttactctgga

SEQ ID NO: 1514875 - DNA, 25 bp, Homo sapien
gagagccgctgcagaggactctgat

SEQ ID NO: 1514876 - DNA, 25 bp, Homo sapien
tgacggagaccccaacagactatag

SEQ ID NO: 1514877 - DNA, 25 bp, Homo sapien
gaagccctcagtgggcgagctggac

SEQ ID NO: 1514878 - DNA, 25 bp, Homo sapien
actgctccacgtaccgagccaggtg

SEQ ID NO: 1514879 - DNA, 25 bp, Homo sapien
tccccacatactgctccacgtaccg

SEQ ID NO: 1514880 - DNA, 25 bp, Homo sapien
acatactgctccacgtaccgagcca

SEQ ID NO: 1514881 - DNA, 25 bp, Homo sapien
agggcccgcgcctgctcgctctgcc

SEQ ID NO: 1514882 - DNA, 25 bp, Homo sapien
agcggcagtccacgtcgcaggcgct

SEQ ID NO: 1514883 - DNA, 25 bp, Homo sapien
agcttgaagcggcagtccacgtcgc

SEQ ID NO: 1514884 - DNA, 25 bp, Homo sapien
agtgctgagcttgaagcggcagtcc

SEQ ID NO: 1514885 - DNA, 25 bp, Homo sapien
agagggtcccgcgacggtacatgta

SEQ ID NO: 1514886 - DNA, 25 bp, Homo sapien
agggtcccgcgacggtacatgtagt

SEQ ID NO: 1514887 - DNA, 25 bp, Homo sapien
tgtagtcctcggagttcacgatgaa

SEQ ID NO: 1514888 - DNA, 25 bp, Homo sapien
cctcggagttcacgatgaacaccat

SEQ ID NO: 1514889 - DNA, 25 bp, Homo sapien
cggctgtgccactcctcaaagtgct

SEQ ID NO: 1514890 - DNA, 25 bp, Homo sapien
tgtactgcacgcggtagcgggtcac

SEQ ID NO: 1514891 - DNA, 25 bp, Homo sapien
ggtagcgggtcacgggcaggccgtg

SEQ ID NO: 1514892 - DNA, 25 bp, Homo sapien
ctgtctcacacagcgtcttgcaggg

SEQ ID NO: 1514893 - DNA, 25 bp, Homo sapien
ggagatgcctctcacgtcgttcaag

SEQ ID NO: 1514894 - DNA, 25 bp, Homo sapien
cagggatttggcacatgtgacggac

SEQ ID NO: 1514895 - DNA, 25 bp, Homo sapien
aacaatgatccctggagtggccgcg

SEQ ID NO: 1514896 - DNA, 25 bp, Homo sapien
tcaagaacggaaaagaggcgctccc

SEQ ID NO: 1514897 - DNA, 25 bp, Homo sapien
tatctctggataatgaatgtggctc

SEQ ID NO: 1514898 - DNA, 25 bp, Homo sapien
cagcacagcggagacatcttcaggg

SEQ ID NO: 1514899 - DNA, 25 bp, Homo sapien
tctttgtctgctctcctgggaccag

SEQ ID NO: 1514900 - DNA, 25 bp, Homo sapien
tcatatcacctcatcaaggccatgg

SEQ ID NO: 1514901 - DNA, 25 bp, Homo sapien
tcaacgtctaaaaactgggcctaga

SEQ ID NO: 1514902 - DNA, 25 bp, Homo sapien
ggtttgccctagtgcttagcatggc

SEQ ID NO: 1514903 - DNA, 25 bp, Homo sapien
cactaggtgtagagagcaggaatct

SEQ ID NO: 1514904 - DNA, 25 bp, Homo sapien
ttgctgtgcaactcagatggccatt

SEQ ID NO: 1514905 - DNA, 25 bp, Homo sapien
gtcactcccagggtcgcacggacag

SEQ ID NO: 1514906 - DNA, 25 bp, Homo sapien
tcactcccagggtcgcacggacagc

SEQ ID NO: 1514907 - DNA, 25 bp, Homo sapien
gatcgcgccggtagagataaaccag

SEQ ID NO: 1514908 - DNA, 25 bp, Homo sapien
gagcagatcgcgccggtagagataa

SEQ ID NO: 1514909 - DNA, 25 bp, Homo sapien
gcgccggtagagataaaccaggaag

SEQ ID NO: 1514910 - DNA, 25 bp, Homo sapien
aggcggacgagcagatcgcgccggt

SEQ ID NO: 1514911 - DNA, 25 bp, Homo sapien
ccggtgctcccgctctcgtcgtaga

SEQ ID NO: 1514912 - DNA, 25 bp, Homo sapien
tgggggtctgggtgccgccagacag

SEQ ID NO: 1514913 - DNA, 25 bp, Homo sapien
tcccgctctcgtcgtagacgctggg

SEQ ID NO: 1514914 - DNA, 25 bp, Homo sapien
gccacaggagcagtcgcccccacat

SEQ ID NO: 1514915 - DNA, 25 bp, Homo sapien
cgtcatggcagagcacgcgatcgga

SEQ ID NO: 1514916 - DNA, 25 bp, Homo sapien
tgcccgtgagctgtccgggagctcc

SEQ ID NO: 1514917 - DNA, 25 bp, Homo sapien
catgagccaagcagccatgcagagt

SEQ ID NO: 1514918 - DNA, 25 bp, Homo sapien
tacatgtgaccatagagtgcggccg

SEQ ID NO: 1514919 - DNA, 25 bp, Homo sapien
gcccaacagcgccaggcaggtgaag

SEQ ID NO: 1514920 - DNA, 25 bp, Homo sapien
caggcaggtgaaggccggttgccag

SEQ ID NO: 1514921 - DNA, 25 bp, Homo sapien
cagggtggccccgtagcacagcagc

SEQ ID NO: 1514922 - DNA, 25 bp, Homo sapien
gcgcgtggccgtagcgccggccgct

SEQ ID NO: 1514923 - DNA, 25 bp, Homo sapien
tcgggtccgagtaatgcagcagcag

SEQ ID NO: 1514924 - DNA, 25 bp, Homo sapien
gcagcaggttgctgggcacgaagaa

SEQ ID NO: 1514925 - DNA, 25 bp, Homo sapien
ctcgggtccgagtaatgcagcagca

SEQ ID NO: 1514926 - DNA, 25 bp, Homo sapien
aggttgctgggcacgaagaaggcca

SEQ ID NO: 1514927 - DNA, 25 bp, Homo sapien
agctgttgagggtgctcagcgccag

SEQ ID NO: 1514928 - DNA, 25 bp, Homo sapien
acacgtagtagtagatgaagggatc

SEQ ID NO: 1514929 - DNA, 25 bp, Homo sapien
tgggcacgtaggcaccatagaggtt

SEQ ID NO: 1514930 - DNA, 25 bp, Homo sapien
ttgtccctgaactcggccgacacgt

SEQ ID NO: 1514931 - DNA, 25 bp, Homo sapien
cggcgaccgttggaagagccctgcc

SEQ ID NO: 1514932 - DNA, 25 bp, Homo sapien
tggaggccacggtgtcccccggcga

SEQ ID NO: 1514933 - DNA, 25 bp, Homo sapien
cccggcgaccgttggaagagccctg

SEQ ID NO: 1514934 - DNA, 25 bp, Homo sapien
ccccggctgcccccttccgcagagg

SEQ ID NO: 1514935 - DNA, 25 bp, Homo sapien
tgtcccgtgcaaggcttacaaccgg

SEQ ID NO: 1514936 - DNA, 25 bp, Homo sapien
ccttagtttgtgtccgtccgcatca

SEQ ID NO: 1514937 - DNA, 25 bp, Homo sapien
tctcagacaccagtgcgtcgtgggc

SEQ ID NO: 1514938 - DNA, 25 bp, Homo sapien
tccaaagtgacctccgctagtgaca

SEQ ID NO: 1514939 - DNA, 25 bp, Homo sapien
taaaaaatgggaccgaggcggatca

SEQ ID NO: 1514940 - DNA, 25 bp, Homo sapien
taaagtcaggagaacgcagcataga

SEQ ID NO: 1514941 - DNA, 25 bp, Homo sapien
gaggccactcgcttctacaacgtca

SEQ ID NO: 1514942 - DNA, 25 bp, Homo sapien
agaggccacctgagacgttttccca

SEQ ID NO: 1514943 - DNA, 25 bp, Homo sapien
cagagggcaagtttcccgcgatgac

SEQ ID NO: 1514944 - DNA, 25 bp, Homo sapien
gatgactctcgctagcctccgtttt

SEQ ID NO: 1514945 - DNA, 25 bp, Homo sapien
gagggagacccctagactcagacat

SEQ ID NO: 1514946 - DNA, 25 bp, Homo sapien
gattgtacctacacccgcttcagtg

SEQ ID NO: 1514947 - DNA, 25 bp, Homo sapien
gatctggtctgtcttcgctcactgt

SEQ ID NO: 1514948 - DNA, 25 bp, Homo sapien
ttacagctggaagcctacatcctgg

SEQ ID NO: 1514949 - DNA, 25 bp, Homo sapien
gtttaacccataacagcgactgcct

SEQ ID NO: 1514950 - DNA, 25 bp, Homo sapien
gtagcccaccttctgcaagatctgg

SEQ ID NO: 1514951 - DNA, 25 bp, Homo sapien
agtagctggaactacaggtgcctga

SEQ ID NO: 1514952 - DNA, 25 bp, Homo sapien
gctggaactacaggtgcctgacaca

SEQ ID NO: 1514953 - DNA, 25 bp, Homo sapien
gtgattggtgtgcctcagcctccag

SEQ ID NO: 1514954 - DNA, 25 bp, Homo sapien
ggaactacaggtgcctgacacacac

SEQ ID NO: 1514955 - DNA, 25 bp, Homo sapien
agttccgccctcacacaacagggcc

SEQ ID NO: 1514956 - DNA, 25 bp, Homo sapien
ctaatgcagccagttccgccctcac

SEQ ID NO: 1514957 - DNA, 25 bp, Homo sapien
gccagttccgccctcacacaacagg

SEQ ID NO: 1514958 - DNA, 25 bp, Homo sapien
gctaatgcagccagttccgccctca

SEQ ID NO: 1514959 - DNA, 25 bp, Homo sapien
gtcccccgatggcctgcgtacactc

SEQ ID NO: 1514960 - DNA, 25 bp, Homo sapien
tcccccgatggcctgcgtacactcc

SEQ ID NO: 1514961 - DNA, 25 bp, Homo sapien
gtctacacctgggttggacaggcca

SEQ ID NO: 1514962 - DNA, 25 bp, Homo sapien
gcccctagcatgtgcttggaactgc

SEQ ID NO: 1514963 - DNA, 25 bp, Homo sapien
cggtccaggttgtgtccggaacatt

SEQ ID NO: 1514964 - DNA, 25 bp, Homo sapien
tagctccaatagacagaggcctcct

SEQ ID NO: 1514965 - DNA, 25 bp, Homo sapien
tcagacggatcttatttgctggccc

SEQ ID NO: 1514966 - DNA, 25 bp, Homo sapien
acacatgcgcttcacctcagagggt

SEQ ID NO: 1514967 - DNA, 25 bp, Homo sapien
tagggcatgtgaaaatccgcctccc

SEQ ID NO: 1514968 - DNA, 25 bp, Homo sapien
tcaatcccactttacctggccaggg

SEQ ID NO: 1514969 - DNA, 25 bp, Homo sapien
gtcatttttgagctaatggggactc

SEQ ID NO: 1514970 - DNA, 25 bp, Homo sapien
ggactctaggtgaagtgaggatcaa

SEQ ID NO: 1514971 - DNA, 25 bp, Homo sapien
tcaaatatgctataagacgtgtcct

SEQ ID NO: 1514972 - DNA, 25 bp, Homo sapien
tcccttttctagcctacttctcagt

SEQ ID NO: 1514973 - DNA, 25 bp, Homo sapien
ccgctgctcgagccgctccgccccg

SEQ ID NO: 1514974 - DNA, 25 bp, Homo sapien
tccctcctgattaagaactgactgg

SEQ ID NO: 1514975 - DNA, 25 bp, Homo sapien
gagcgtctcctccaatcaaggtaaa

SEQ ID NO: 1514976 - DNA, 25 bp, Homo sapien
tcattctaagacgaggacagttcct

SEQ ID NO: 1514977 - DNA, 25 bp, Homo sapien
ttgtcttgctttgccgagaggccgc

SEQ ID NO: 1514978 - DNA, 25 bp, Homo sapien
taccacggtctggtacaggacatca

SEQ ID NO: 1514979 - DNA, 25 bp, Homo sapien
tcataccacggtctggtacaggaca

SEQ ID NO: 1514980 - DNA, 25 bp, Homo sapien
gtctggtacaggacatcacaggaat

SEQ ID NO: 1514981 - DNA, 25 bp, Homo sapien
cacggtctggtacaggacatcacag

SEQ ID NO: 1514982 - DNA, 25 bp, Homo sapien
cagtttggcggaggattcggaattt

SEQ ID NO: 1514983 - DNA, 25 bp, Homo sapien
tagccgtttcgtttatataaggcca

SEQ ID NO: 1514984 - DNA, 25 bp, Homo sapien
gcctccagaaagtgtggcgtagccg

SEQ ID NO: 1514985 - DNA, 25 bp, Homo sapien
tactggagaataaaggcctccggac

SEQ ID NO: 1514986 - DNA, 25 bp, Homo sapien
tatacatgtggtccgcctctgggct

SEQ ID NO: 1514987 - DNA, 25 bp, Homo sapien
cccaagtggatgtgaaacctgccct

SEQ ID NO: 1514988 - DNA, 25 bp, Homo sapien
cagagaatgttctcactcggcaggg

SEQ ID NO: 1514989 - DNA, 25 bp, Homo sapien
gagacctgggacctggaaattagtc

SEQ ID NO: 1514990 - DNA, 25 bp, Homo sapien
tgaaggccacatggacggctgcact

SEQ ID NO: 1514991 - DNA, 25 bp, Homo sapien
tcatggaatcacaagggctgaaggc

SEQ ID NO: 1514992 - DNA, 25 bp, Homo sapien
tccagggactgctgatggagcacca

SEQ ID NO: 1514993 - DNA, 25 bp, Homo sapien
tgcacttgagactgctccgtgtcct

SEQ ID NO: 1514994 - DNA, 25 bp, Homo sapien
gcggcatgagtcaaccaagaatggc

SEQ ID NO: 1514995 - DNA, 25 bp, Homo sapien
catttgcttctgaaggttgcaagaa

SEQ ID NO: 1514996 - DNA, 25 bp, Homo sapien
gctgagattatagggatgagtgact

SEQ ID NO: 1514997 - DNA, 25 bp, Homo sapien
tggatcaagagccataaatgcggca

SEQ ID NO: 1514998 - DNA, 25 bp, Homo sapien
ttcagcatgcctcccaggctcgggg

SEQ ID NO: 1514999 - DNA, 25 bp, Homo sapien
ccggccgcctggcttcagcatgcct

SEQ ID NO: 1515000 - DNA, 25 bp, Homo sapien
cctggcttcagcatgcctcccaggc

SEQ ID NO: 1515001 - DNA, 25 bp, Homo sapien
aggctcggggcgcgcgtgtcctgga

SEQ ID NO: 1515002 - DNA, 25 bp, Homo sapien
tccttgatgacgtccgaggtggtgc

SEQ ID NO: 1515003 - DNA, 25 bp, Homo sapien
gagatcacgatgcactggttcacgc

SEQ ID NO: 1515004 - DNA, 25 bp, Homo sapien
cataacatttggtgccgtccagccg

SEQ ID NO: 1515005 - DNA, 25 bp, Homo sapien
catggtgtagtaggccacgtcggcc

SEQ ID NO: 1515006 - DNA, 25 bp, Homo sapien
accgagcttggcctgaaacccgcat

SEQ ID NO: 1515007 - DNA, 25 bp, Homo sapien
gcctgaaacccgcattttccaaaca

SEQ ID NO: 1515008 - DNA, 25 bp, Homo sapien
ccaccgagcttggcctgaaacccgc

SEQ ID NO: 1515009 - DNA, 25 bp, Homo sapien
gagcttggcctgaaacccgcatttt

SEQ ID NO: 1515010 - DNA, 25 bp, Homo sapien
gggacttgccttccatatgcaaacc

SEQ ID NO: 1515011 - DNA, 25 bp, Homo sapien
tcctagagatggtttgggacttgcc

SEQ ID NO: 1515012 - DNA, 25 bp, Homo sapien
cgggaactgtgagtaacaaactctc

SEQ ID NO: 1515013 - DNA, 25 bp, Homo sapien
ggcagttgcatcctgaccagttggc

SEQ ID NO: 1515014 - DNA, 25 bp, Homo sapien
cagagggcatgaggcataagagcct

SEQ ID NO: 1515015 - DNA, 25 bp, Homo sapien
caatgatgggtgctgtgtggtcacc

SEQ ID NO: 1515016 - DNA, 25 bp, Homo sapien
tggccacaagactcacccacagtgg

SEQ ID NO: 1515017 - DNA, 25 bp, Homo sapien
ccctagaaatgtcccgttgtgaagc

SEQ ID NO: 1515018 - DNA, 25 bp, Homo sapien
cgttgttctgagacatgtggatgca

SEQ ID NO: 1515019 - DNA, 25 bp, Homo sapien
gtggatgcaccttgtcctacaatcc

SEQ ID NO: 1515020 - DNA, 25 bp, Homo sapien
tctgagacatgtggatgcaccttgt

SEQ ID NO: 1515021 - DNA, 25 bp, Homo sapien
gcgatggttgcgttgttctgagaca

SEQ ID NO: 1515022 - DNA, 25 bp, Homo sapien
cactgggactccaactacagacagc

SEQ ID NO: 1515023 - DNA, 25 bp, Homo sapien
tagtaacagtaccaacgtagagttg

SEQ ID NO: 1515024 - DNA, 25 bp, Homo sapien
cactctgtgacactccaacggcaga

SEQ ID NO: 1515025 - DNA, 25 bp, Homo sapien
tctgaaaagcctgcaacactgggac

SEQ ID NO: 1515026 - DNA, 25 bp, Homo sapien
aatggctgttgaaggcatactggag

SEQ ID NO: 1515027 - DNA, 25 bp, Homo sapien
ggtccccaggacaatcgcggatctg

SEQ ID NO: 1515028 - DNA, 25 bp, Homo sapien
cacaagatgtcaccaagtgggactt

SEQ ID NO: 1515029 - DNA, 25 bp, Homo sapien
ttgaaggcatactggagactgtgca

SEQ ID NO: 1515030 - DNA, 25 bp, Homo sapien
gaaaaaatccccaatcgatgcagcg

SEQ ID NO: 1515031 - DNA, 25 bp, Homo sapien
tctcctttcggggagctgagaaaaa

SEQ ID NO: 1515032 - DNA, 25 bp, Homo sapien
gcgagttgtgctgatctccggcttt

SEQ ID NO: 1515033 - DNA, 25 bp, Homo sapien
cccaatcgatgcagcgagttgtgct

SEQ ID NO: 1515034 - DNA, 25 bp, Homo sapien
tggctccagccattagcacgcccga

SEQ ID NO: 1515035 - DNA, 25 bp, Homo sapien
cagccattagcacgcccgaagcagc

SEQ ID NO: 1515036 - DNA, 25 bp, Homo sapien
gctccagccattagcacgcccgaag

SEQ ID NO: 1515037 - DNA, 25 bp, Homo sapien
tccagccattagcacgcccgaagca

SEQ ID NO: 1515038 - DNA, 25 bp, Homo sapien
gaccttcagtagcttgcggtcaggg

SEQ ID NO: 1515039 - DNA, 25 bp, Homo sapien
ggtcagggccacattgtacctcctc

SEQ ID NO: 1515040 - DNA, 25 bp, Homo sapien
ttctgtccttgcaccaccctgtctt

SEQ ID NO: 1515041 - DNA, 25 bp, Homo sapien
ctcagggaccttcagtagcttgcgg

SEQ ID NO: 1515042 - DNA, 25 bp, Homo sapien
ggagaacgccggactgaaactgctt

SEQ ID NO: 1515043 - DNA, 25 bp, Homo sapien
ggttgatgtgtaactccaatggcac

SEQ ID NO: 1515044 - DNA, 25 bp, Homo sapien
cacaatcgtgccgaatttggtcggg

SEQ ID NO: 1515045 - DNA, 25 bp, Homo sapien
catacagttggcctaaaacagcagt

SEQ ID NO: 1515046 - DNA, 25 bp, Homo sapien
acatgcctgatcgtgggtgagcagt

SEQ ID NO: 1515047 - DNA, 25 bp, Homo sapien
acacgaggacatgcctgatcgtggg

SEQ ID NO: 1515048 - DNA, 25 bp, Homo sapien
catcatcggtgacacgaggacatgc

SEQ ID NO: 1515049 - DNA, 25 bp, Homo sapien
ctagggccgcttcatcatcggtgac

SEQ ID NO: 1515050 - DNA, 25 bp, Homo sapien
tggatcagaaaaccggcaaacctct

SEQ ID NO: 1515051 - DNA, 25 bp, Homo sapien
cattgtaagacgtcactcagtgcac

SEQ ID NO: 1515052 - DNA, 25 bp, Homo sapien
tcagtgcaggcggaagtcctaaaat

SEQ ID NO: 1515053 - DNA, 25 bp, Homo sapien
cttaaaggagcgagacctgagccac

SEQ ID NO: 1515054 - DNA, 25 bp, Homo sapien
agtgagttagctccgccgaaccctg

SEQ ID NO: 1515055 - DNA, 25 bp, Homo sapien
agctccgccgaaccctgtgggacat

SEQ ID NO: 1515056 - DNA, 25 bp, Homo sapien
gacagagtgagttagctccgccgaa

SEQ ID NO: 1515057 - DNA, 25 bp, Homo sapien
gagagacagagtgagttagctccgc

SEQ ID NO: 1515058 - DNA, 25 bp, Homo sapien
gcatgggctgtactaccactcccag

SEQ ID NO: 1515059 - DNA, 25 bp, Homo sapien
tagccaggtcccaaatgcatgggct

SEQ ID NO: 1515060 - DNA, 25 bp, Homo sapien
tgccagcctagccaggtcccaaatg

SEQ ID NO: 1515061 - DNA, 25 bp, Homo sapien
tcaaggcaaggagggaaccccgcac

SEQ ID NO: 1515062 - DNA, 25 bp, Homo sapien
tgcaggcaggatgcacgcgatctca

SEQ ID NO: 1515063 - DNA, 25 bp, Homo sapien
tcactctcccttaaaagaggtggcc

SEQ ID NO: 1515064 - DNA, 25 bp, Homo sapien
gaatgctgccgggtcacaatgacca

SEQ ID NO: 1515065 - DNA, 25 bp, Homo sapien
tctgggcccacaggttccatgatcc

SEQ ID NO: 1515066 - DNA, 25 bp, Homo sapien
catttttcagcttggagcggcctct

SEQ ID NO: 1515067 - DNA, 25 bp, Homo sapien
gtgccccatttttcagcttggagcg

SEQ ID NO: 1515068 - DNA, 25 bp, Homo sapien
gcttggagcggcctctctgcggtct

SEQ ID NO: 1515069 - DNA, 25 bp, Homo sapien
tttcagcttggagcggcctctctgc

SEQ ID NO: 1515070 - DNA, 25 bp, Homo sapien
tcgccgatagacagatgggtcccct

SEQ ID NO: 1515071 - DNA, 25 bp, Homo sapien
gcgaggcctgcagaaatcggatcta

SEQ ID NO: 1515072 - DNA, 25 bp, Homo sapien
tccaaggagacctttttatggtgct

SEQ ID NO: 1515073 - DNA, 25 bp, Homo sapien
gggtgtcccagaccttacacttcag

SEQ ID NO: 1515074 - DNA, 25 bp, Homo sapien
cctgccaccacgcttggctaatttt

SEQ ID NO: 1515075 - DNA, 25 bp, Homo sapien
caacttctgactcccgggttcaagc

SEQ ID NO: 1515076 - DNA, 25 bp, Homo sapien
acttctgactcccgggttcaagcca

SEQ ID NO: 1515077 - DNA, 25 bp, Homo sapien
ctgccaccacgcttggctaattttt

SEQ ID NO: 1515078 - DNA, 25 bp, Homo sapien
catatgatacaaagacccttgctgc

SEQ ID NO: 1515079 - DNA, 25 bp, Homo sapien
tgagcccagagggatcatatgatac

SEQ ID NO: 1515080 - DNA, 25 bp, Homo sapien
gatgtgagcctgaatggcccttcat

SEQ ID NO: 1515081 - DNA, 25 bp, Homo sapien
ttgggcgctcactccaacgctgaat

SEQ ID NO: 1515082 - DNA, 25 bp, Homo sapien
aaggctactgctgggcaatttgggc

SEQ ID NO: 1515083 - DNA, 25 bp, Homo sapien
gcaggtggtgaatatttttggctcc

SEQ ID NO: 1515084 - DNA, 25 bp, Homo sapien
caggttgcaggctacttctgctgag

SEQ ID NO: 1515085 - DNA, 25 bp, Homo sapien
ggcaaattagttcacggctcttgga

SEQ ID NO: 1515086 - DNA, 25 bp, Homo sapien
gacactgacagcagtcagacccaga

SEQ ID NO: 1515087 - DNA, 25 bp, Homo sapien
ctgtgaccctgagcgccggtggctc

SEQ ID NO: 1515088 - DNA, 25 bp, Homo sapien
cagtcagacccagacgagagctgtg

SEQ ID NO: 1515089 - DNA, 25 bp, Homo sapien
agagctgtgaccctgagcgccggtg

SEQ ID NO: 1515090 - DNA, 25 bp, Homo sapien
gaaacagcactcgtcccgaggccac

SEQ ID NO: 1515091 - DNA, 25 bp, Homo sapien
aacagcactcgtcccgaggccacgg

SEQ ID NO: 1515092 - DNA, 25 bp, Homo sapien
cgaggccacggagtaggtgacgccc

SEQ ID NO: 1515093 - DNA, 25 bp, Homo sapien
aggccacggagtaggtgacgcccac

SEQ ID NO: 1515094 - DNA, 25 bp, Homo sapien
aataactgaaaagttcaccaggtct

SEQ ID NO: 1515095 - DNA, 25 bp, Homo sapien
gaaaagttcaccaggtctggtggta

SEQ ID NO: 1515096 - DNA, 25 bp, Homo sapien
ctcttggttggaatgcctggtaaca

SEQ ID NO: 1515097 - DNA, 25 bp, Homo sapien
gaggccatggattcaggaccagctg

SEQ ID NO: 1515098 - DNA, 25 bp, Homo sapien
tatccatgcatagaggctgctccca

SEQ ID NO: 1515099 - DNA, 25 bp, Homo sapien
ccggtgacctcacgcgtctggtatg

SEQ ID NO: 1515100 - DNA, 25 bp, Homo sapien
tctggtatgcggtctcagcacactg

SEQ ID NO: 1515101 - DNA, 25 bp, Homo sapien
tgcgattacccgattaccccgtgca

SEQ ID NO: 1515102 - DNA, 25 bp, Homo sapien
catgggaggcccagatactcccttg

SEQ ID NO: 1515103 - DNA, 25 bp, Homo sapien
gatactcccttggagaaggctccat

SEQ ID NO: 1515104 - DNA, 25 bp, Homo sapien
ggcagagcttgaagcccggacagtt

SEQ ID NO: 1515105 - DNA, 25 bp, Homo sapien
tggctggacccatgtgcgggtcaca

SEQ ID NO: 1515106 - DNA, 25 bp, Homo sapien
ggatgaatttcccaaaccggctgga

SEQ ID NO: 1515107 - DNA, 25 bp, Homo sapien
tctcacgatgccactctctaggtag

SEQ ID NO: 1515108 - DNA, 25 bp, Homo sapien
gatgaatttcccaaaccggctggag

SEQ ID NO: 1515109 - DNA, 25 bp, Homo sapien
ctctaggtagctgacttggatgaat

SEQ ID NO: 1515110 - DNA, 25 bp, Homo sapien
tcaggatcatcctcaataatccagg

SEQ ID NO: 1515111 - DNA, 25 bp, Homo sapien
caataatccaggagggccctaaatc

SEQ ID NO: 1515112 - DNA, 25 bp, Homo sapien
ggccattaagttaaaggcctcagga

SEQ ID NO: 1515113 - DNA, 25 bp, Homo sapien
aaaaaggatctttgcagaggccatt

SEQ ID NO: 1515114 - DNA, 25 bp, Homo sapien
gacacacacgatgcacaggtggctt

SEQ ID NO: 1515115 - DNA, 25 bp, Homo sapien
tgcaggtctggcatcaaaatgtcgc

SEQ ID NO: 1515116 - DNA, 25 bp, Homo sapien
catgtttcaatctcagcctgtggcc

SEQ ID NO: 1515117 - DNA, 25 bp, Homo sapien
aaatgtcgcttgacagatgatggcc

SEQ ID NO: 1515118 - DNA, 25 bp, Homo sapien
tgcagtagcacgataatggctcaat

SEQ ID NO: 1515119 - DNA, 25 bp, Homo sapien
cagtagcacgataatggctcaatgc

SEQ ID NO: 1515120 - DNA, 25 bp, Homo sapien
ggaatgcagtagcacgataatggct

SEQ ID NO: 1515121 - DNA, 25 bp, Homo sapien
gaatgcagtagcacgataatggctc

SEQ ID NO: 1515122 - DNA, 25 bp, Homo sapien
gacaccaggcgagacttttcaagca

SEQ ID NO: 1515123 - DNA, 25 bp, Homo sapien
gcgagacttttcaagcagatatttc

SEQ ID NO: 1515124 - DNA, 25 bp, Homo sapien
cctgagacaccaggcgagacttttc

SEQ ID NO: 1515125 - DNA, 25 bp, Homo sapien
ctcatccttctcctgagacaccagg

SEQ ID NO: 1515126 - DNA, 25 bp, Homo sapien
tgagagtcgcctcaggcatgagaat

SEQ ID NO: 1515127 - DNA, 25 bp, Homo sapien
tgaggcatgagagtcgcctcaggca

SEQ ID NO: 1515128 - DNA, 25 bp, Homo sapien
catgagagtcgcctcaggcatgaga

SEQ ID NO: 1515129 - DNA, 25 bp, Homo sapien
atgtgatcctgcctcttaggcctcc

SEQ ID NO: 1515130 - DNA, 25 bp, Homo sapien
aggctgcttgagctgaaattcttgg

SEQ ID NO: 1515131 - DNA, 25 bp, Homo sapien
ttcctcgctgaccccaagtaacaaa

SEQ ID NO: 1515132 - DNA, 25 bp, Homo sapien
attcttggcgctcttcctcgctgac

SEQ ID NO: 1515133 - DNA, 25 bp, Homo sapien
gctgaaattcttggcgctcttcctc

SEQ ID NO: 1515134 - DNA, 25 bp, Homo sapien
tccccatcttcaatcttcaagttat

SEQ ID NO: 1515135 - DNA, 25 bp, Homo sapien
ccccatcttcaatcttcaagttatg

SEQ ID NO: 1515136 - DNA, 25 bp, Homo sapien
cctcagagtgactggtaagggccat

SEQ ID NO: 1515137 - DNA, 25 bp, Homo sapien
tcatgtgatcgctgctattgggcca

SEQ ID NO: 1515138 - DNA, 25 bp, Homo sapien
cctatggcggcactgttcaggacac

SEQ ID NO: 1515139 - DNA, 25 bp, Homo sapien
cactgggttgcaggttagacctcag

SEQ ID NO: 1515140 - DNA, 25 bp, Homo sapien
ttcagaagctgcgacagggtgtcca

SEQ ID NO: 1515141 - DNA, 25 bp, Homo sapien
agcacctcgggtggcccgacctcca

SEQ ID NO: 1515142 - DNA, 25 bp, Homo sapien
tctcttcttataagtgacgttgccc

SEQ ID NO: 1515143 - DNA, 25 bp, Homo sapien
gatggccgagaggacggcaaaaatc

SEQ ID NO: 1515144 - DNA, 25 bp, Homo sapien
cctcgtactgagagatagccagcgg

SEQ ID NO: 1515145 - DNA, 25 bp, Homo sapien
tcagctgacgtaggaagttctgggt

SEQ ID NO: 1515146 - DNA, 25 bp, Homo sapien
gaagttctgggtatggtccctcgta

SEQ ID NO: 1515147 - DNA, 25 bp, Homo sapien
tgagagatagccagcggccctgagc

SEQ ID NO: 1515148 - DNA, 25 bp, Homo sapien
cccgcactgccaagctccctttcag

SEQ ID NO: 1515149 - DNA, 25 bp, Homo sapien
ccctccccgcactgccaagctccct

SEQ ID NO: 1515150 - DNA, 25 bp, Homo sapien
cctccccgcactgccaagctccctt

SEQ ID NO: 1515151 - DNA, 25 bp, Homo sapien
tccccgcactgccaagctccctttc

SEQ ID NO: 1515152 - DNA, 25 bp, Homo sapien
taagcttgtcgttgacggtcaccgt

SEQ ID NO: 1515153 - DNA, 25 bp, Homo sapien
tttggtcagaacctccaccaagatt

SEQ ID NO: 1515154 - DNA, 25 bp, Homo sapien
ctcgctgaggctgtagggaaggata

SEQ ID NO: 1515155 - DNA, 25 bp, Homo sapien
tttcttttggtcagaacctccacca

SEQ ID NO: 1515156 - DNA, 25 bp, Homo sapien
gacaccagtgctgctcgggtcttgg

SEQ ID NO: 1515157 - DNA, 25 bp, Homo sapien
gacccatgtgggctcagaatgtccc

SEQ ID NO: 1515158 - DNA, 25 bp, Homo sapien
gaatgtccccggtgcctgtttgaaa

SEQ ID NO: 1515159 - DNA, 25 bp, Homo sapien
tatgcagcaatatcacgtggtgccc

SEQ ID NO: 1515160 - DNA, 25 bp, Homo sapien
gctggggctatggcgcacaacacca

SEQ ID NO: 1515161 - DNA, 25 bp, Homo sapien
ctggggctatggcgcacaacaccac

SEQ ID NO: 1515162 - DNA, 25 bp, Homo sapien
caatccagtcgaacagggcgctgta

SEQ ID NO: 1515163 - DNA, 25 bp, Homo sapien
tggttgatccgcagcacaatccagt

SEQ ID NO: 1515164 - DNA, 25 bp, Homo sapien
gcgctgtacagagacttggccatgg

SEQ ID NO: 1515165 - DNA, 25 bp, Homo sapien
ccttcttgttgaggagtgcgtggtt

SEQ ID NO: 1515166 - DNA, 25 bp, Homo sapien
ctgttcctctcgaagtcttcaaacc

SEQ ID NO: 1515167 - DNA, 25 bp, Homo sapien
gatcgcctaaacctcagcgtttgag

SEQ ID NO: 1515168 - DNA, 25 bp, Homo sapien
taaggtactgagaccgtgtatgttc

SEQ ID NO: 1515169 - DNA, 25 bp, Homo sapien
tcatcaacgtgaaggagaagacatg

SEQ ID NO: 1515170 - DNA, 25 bp, Homo sapien
taaggatggttgactatttagctgc

SEQ ID NO: 1515171 - DNA, 25 bp, Homo sapien
gatgttgtgccacgtgatcccctcg

SEQ ID NO: 1515172 - DNA, 25 bp, Homo sapien
gccgacattgtctgtgtagccgatg

SEQ ID NO: 1515173 - DNA, 25 bp, Homo sapien
tagaagaggcccgtgggtttcttgc

SEQ ID NO: 1515174 - DNA, 25 bp, Homo sapien
cttgctgatgagatggatgcagccg

SEQ ID NO: 1515175 - DNA, 25 bp, Homo sapien
gtctgccttcacagcgccctgtgga

SEQ ID NO: 1515176 - DNA, 25 bp, Homo sapien
tgtctgccttcacagcgccctgtgg

SEQ ID NO: 1515177 - DNA, 25 bp, Homo sapien
ctgtctgccttcacagcgccctgtg

SEQ ID NO: 1515178 - DNA, 25 bp, Homo sapien
tccctgcgaagtgctggatgatgaa

SEQ ID NO: 1515179 - DNA, 25 bp, Homo sapien
gcccaggaagtacttattgtcctca

SEQ ID NO: 1515180 - DNA, 25 bp, Homo sapien
agcagggtctggctcgtggcgtggg

SEQ ID NO: 1515181 - DNA, 25 bp, Homo sapien
gatgaaagctggctccatgaccggg

SEQ ID NO: 1515182 - DNA, 25 bp, Homo sapien
cggtcactcggggatagtcactcac

SEQ ID NO: 1515183 - DNA, 25 bp, Homo sapien
actcggggatagtcactcaccggcg

SEQ ID NO: 1515184 - DNA, 25 bp, Homo sapien
cactcaccggcgcctaccaaagacc

SEQ ID NO: 1515185 - DNA, 25 bp, Homo sapien
tgggggatggatgtgggcggtcact

SEQ ID NO: 1515186 - DNA, 25 bp, Homo sapien
ccgcagcagggccacgatgtctggc

SEQ ID NO: 1515187 - DNA, 25 bp, Homo sapien
gatgtctggccgcatgtagtccatg

SEQ ID NO: 1515188 - DNA, 25 bp, Homo sapien
atgccgatgagctcccgcacgtagg

SEQ ID NO: 1515189 - DNA, 25 bp, Homo sapien
atggcccggatagcagcccggagca

SEQ ID NO: 1515190 - DNA, 25 bp, Homo sapien
ttaagatgaactcaggatgtgcccc

SEQ ID NO: 1515191 - DNA, 25 bp, Homo sapien
ttttgtgggttcacgccccagctcc

SEQ ID NO: 1515192 - DNA, 25 bp, Homo sapien
tttaagatgaactcaggatgtgccc

SEQ ID NO: 1515193 - DNA, 25 bp, Homo sapien
cccctctcgacagtgacgcttttgt

SEQ ID NO: 1515194 - DNA, 25 bp, Homo sapien
ctttgggcaccagggctgctcatac

SEQ ID NO: 1515195 - DNA, 25 bp, Homo sapien
ttccgaaggggtgctggctcctctt

SEQ ID NO: 1515196 - DNA, 25 bp, Homo sapien
gctcctcttggcagctcttctgggt

SEQ ID NO: 1515197 - DNA, 25 bp, Homo sapien
ttttccgaaggggtgctggctcctc

SEQ ID NO: 1515198 - DNA, 25 bp, Homo sapien
tcctcttggcagctcttctgggtga

SEQ ID NO: 1515199 - DNA, 25 bp, Homo sapien
ggtcagaagtcactttgtctttggg

SEQ ID NO: 1515200 - DNA, 25 bp, Homo sapien
ttaacatgctccttgggcgggacct

SEQ ID NO: 1515201 - DNA, 25 bp, Homo sapien
tgtataaacttaacatgctccttgg

SEQ ID NO: 1515202 - DNA, 25 bp, Homo sapien
gctgcttctgctaccgcaggtcaga

SEQ ID NO: 1515203 - DNA, 25 bp, Homo sapien
gaaagcaatgatgtcctcaaaagcg

SEQ ID NO: 1515204 - DNA, 25 bp, Homo sapien
gcgttaatatcgaactcctcagagc

SEQ ID NO: 1515205 - DNA, 25 bp, Homo sapien
tcctcagagccgtcaaatgagaaat

SEQ ID NO: 1515206 - DNA, 25 bp, Homo sapien
cttgctttcatagaaagcaatgatg

SEQ ID NO: 1515207 - DNA, 25 bp, Homo sapien
tctatatgcgagtggccttcacacc

SEQ ID NO: 1515208 - DNA, 25 bp, Homo sapien
gaatgaggcccatgactttggccca

SEQ ID NO: 1515209 - DNA, 25 bp, Homo sapien
cctgctggcagtcgttcaaagcaca

SEQ ID NO: 1515210 - DNA, 25 bp, Homo sapien
catgttttagctctcggcaggtggc

SEQ ID NO: 1515211 - DNA, 25 bp, Homo sapien
gaaagacactgtgctcaatgctgcc

SEQ ID NO: 1515212 - DNA, 25 bp, Homo sapien
agaaatggggactgggccagcctcc

SEQ ID NO: 1515213 - DNA, 25 bp, Homo sapien
gatggagttagaagcaggcctgcca

SEQ ID NO: 1515214 - DNA, 25 bp, Homo sapien
cactgaagccaaaacatgcagctgg

SEQ ID NO: 1515215 - DNA, 25 bp, Homo sapien
ggcaatcctttgatgctcttgatca

SEQ ID NO: 1515216 - DNA, 25 bp, Homo sapien
tttctggagccgactgagggactgg

SEQ ID NO: 1515217 - DNA, 25 bp, Homo sapien
gccctgccagggcaatcctttgatg

SEQ ID NO: 1515218 - DNA, 25 bp, Homo sapien
tgccagggcaatcctttgatgctct

SEQ ID NO: 1515219 - DNA, 25 bp, Homo sapien
tggcaaaggcgggagcaagctttgc

SEQ ID NO: 1515220 - DNA, 25 bp, Homo sapien
ggcaaaggcgggagcaagctttgct

SEQ ID NO: 1515221 - DNA, 25 bp, Homo sapien
gtggcaaaggcgggagcaagctttg

SEQ ID NO: 1515222 - DNA, 25 bp, Homo sapien
agtggcaaaggcgggagcaagcttt

SEQ ID NO: 1515223 - DNA, 25 bp, Homo sapien
tggctgccccaaagctgagtaaagt

SEQ ID NO: 1515224 - DNA, 25 bp, Homo sapien
aatctacagggtgggacgtgcatcc

SEQ ID NO: 1515225 - DNA, 25 bp, Homo sapien
tgagaaggcgcaagtgcaacaaggc

SEQ ID NO: 1515226 - DNA, 25 bp, Homo sapien
cctggcgggttagactgagagacac

SEQ ID NO: 1515227 - DNA, 25 bp, Homo sapien
atgatctgcttttgtttgatacctt

SEQ ID NO: 1515228 - DNA, 25 bp, Homo sapien
gaagcaagatatcttggaacgtgtc

SEQ ID NO: 1515229 - DNA, 25 bp, Homo sapien
gaagtgaaagctctcaagacgggca

SEQ ID NO: 1515230 - DNA, 25 bp, Homo sapien
gttgcagaagtgaaagctctcaaga

SEQ ID NO: 1515231 - DNA, 25 bp, Homo sapien
tcaagacgggcagagaagcaagata

SEQ ID NO: 1515232 - DNA, 25 bp, Homo sapien
ttccgggagggctgatgacagcctc

SEQ ID NO: 1515233 - DNA, 25 bp, Homo sapien
ctggttccgggagggctgatgacag

SEQ ID NO: 1515234 - DNA, 25 bp, Homo sapien
cttgcacacagcgctggttccggga

SEQ ID NO: 1515235 - DNA, 25 bp, Homo sapien
cgggagggctgatgacagcctcttt

SEQ ID NO: 1515236 - DNA, 25 bp, Homo sapien
gggacttggtggtgcggtcgtgcag

SEQ ID NO: 1515237 - DNA, 25 bp, Homo sapien
tgcggtcgtgcagagtcatgctgat

SEQ ID NO: 1515238 - DNA, 25 bp, Homo sapien
cttggtggtgcggtcgtgcagagtc

SEQ ID NO: 1515239 - DNA, 25 bp, Homo sapien
tggaactgggcgctgatgcttggtg

SEQ ID NO: 1515240 - DNA, 25 bp, Homo sapien
tagagacgggctgtgctcggtgtcg

SEQ ID NO: 1515241 - DNA, 25 bp, Homo sapien
gctcggtgtcgggtgaagctacaca

SEQ ID NO: 1515242 - DNA, 25 bp, Homo sapien
gctacacaagcctgaggctgagctg

SEQ ID NO: 1515243 - DNA, 25 bp, Homo sapien
aagcctgaggctgagctgaccgcca

SEQ ID NO: 1515244 - DNA, 25 bp, Homo sapien
cctccaagagcttgttaagggatgt

SEQ ID NO: 1515245 - DNA, 25 bp, Homo sapien
ttccccagtgcctccaagagcttgt

SEQ ID NO: 1515246 - DNA, 25 bp, Homo sapien
gcggataaagaagggctccgccttc

SEQ ID NO: 1515247 - DNA, 25 bp, Homo sapien
ttttcagcattggaacggatgcagc

SEQ ID NO: 1515248 - DNA, 25 bp, Homo sapien
ggaccagctcgtcgtcaaagcacag

SEQ ID NO: 1515249 - DNA, 25 bp, Homo sapien
cacggtctccagcatgccggtgtag

SEQ ID NO: 1515250 - DNA, 25 bp, Homo sapien
tccggatgcgcacggtctccagcat

SEQ ID NO: 1515251 - DNA, 25 bp, Homo sapien
gaacgtgtacttggcgctgtaccct

SEQ ID NO: 1515252 - DNA, 25 bp, Homo sapien
ttggtcttcccgatctggtagttcc

SEQ ID NO: 1515253 - DNA, 25 bp, Homo sapien
tggtcttcccgatctggtagttcct

SEQ ID NO: 1515254 - DNA, 25 bp, Homo sapien
cttggtcttcccgatctggtagttc

SEQ ID NO: 1515255 - DNA, 25 bp, Homo sapien
tttctggtgccggtagagcttccgc

SEQ ID NO: 1515256 - DNA, 25 bp, Homo sapien
aggaagtgccgacgctccagcacca

SEQ ID NO: 1515257 - DNA, 25 bp, Homo sapien
gacggcggcccgcttcatctgcagg

SEQ ID NO: 1515258 - DNA, 25 bp, Homo sapien
gctctgcaggcggatgatgctctgt

SEQ ID NO: 1515259 - DNA, 25 bp, Homo sapien
ttgttctggaacttgacgtgctcca

SEQ ID NO: 1515260 - DNA, 25 bp, Homo sapien
gggactttctcgtgactttcagccg

SEQ ID NO: 1515261 - DNA, 25 bp, Homo sapien
cttctcaggtgaggagtgctctagg

SEQ ID NO: 1515262 - DNA, 25 bp, Homo sapien
cgtctctacgactagaagggtttca

SEQ ID NO: 1515263 - DNA, 25 bp, Homo sapien
cgccacagttccacggcgctggcca

SEQ ID NO: 1515264 - DNA, 25 bp, Homo sapien
agccgctcggcgtccaggtaccgct

SEQ ID NO: 1515265 - DNA, 25 bp, Homo sapien
ccaggtaccgctggatctgcgtgga

SEQ ID NO: 1515266 - DNA, 25 bp, Homo sapien
actggctgagcatggcactagggct

SEQ ID NO: 1515267 - DNA, 25 bp, Homo sapien
ctgcgagatcacagaaacatggctt

SEQ ID NO: 1515268 - DNA, 25 bp, Homo sapien
ggttcttgggttctcacttgggcag

SEQ ID NO: 1515269 - DNA, 25 bp, Homo sapien
tacttctggcctctggtgagtggag

SEQ ID NO: 1515270 - DNA, 25 bp, Homo sapien
ggatgctactcaataccctacagag

SEQ ID NO: 1515271 - DNA, 25 bp, Homo sapien
tggagacgtcgctcgtggagaagga

SEQ ID NO: 1515272 - DNA, 25 bp, Homo sapien
gaggagcttggagacgtcgctcgtg

SEQ ID NO: 1515273 - DNA, 25 bp, Homo sapien
agacgtcgctcgtggagaaggaggt

SEQ ID NO: 1515274 - DNA, 25 bp, Homo sapien
gcttggagacgtcgctcgtggagaa

SEQ ID NO: 1515275 - DNA, 25 bp, Homo sapien
gagggaggatgcgtcgcctggcttc

SEQ ID NO: 1515276 - DNA, 25 bp, Homo sapien
gacagctggctttttcgcacttcgc

SEQ ID NO: 1515277 - DNA, 25 bp, Homo sapien
ttagagtcgacctgagagcccgggg

SEQ ID NO: 1515278 - DNA, 25 bp, Homo sapien
gcacttcgctctccgtccgtggttt

SEQ ID NO: 1515279 - DNA, 25 bp, Homo sapien
cacgtgcccggacactgcattctcc

SEQ ID NO: 1515280 - DNA, 25 bp, Homo sapien
ccacgtgcccggacactgcattctc

SEQ ID NO: 1515281 - DNA, 25 bp, Homo sapien
accacgtgcccggacactgcattct

SEQ ID NO: 1515282 - DNA, 25 bp, Homo sapien
gcaccacgtgcccggacactgcatt

SEQ ID NO: 1515283 - DNA, 25 bp, Homo sapien
ctcctggttccttggtgcgcttctc

SEQ ID NO: 1515284 - DNA, 25 bp, Homo sapien
tgcagcgtggcgatgctgctgtccg

SEQ ID NO: 1515285 - DNA, 25 bp, Homo sapien
tggttccttggtgcgcttctcacct

SEQ ID NO: 1515286 - DNA, 25 bp, Homo sapien
cgtggcgatgctgctgtccggaggg

SEQ ID NO: 1515287 - DNA, 25 bp, Homo sapien
ccaggtacttgagctcattggcgtt

SEQ ID NO: 1515288 - DNA, 25 bp, Homo sapien
cgttggtgatctggcggaacaccga

SEQ ID NO: 1515289 - DNA, 25 bp, Homo sapien
caatcttgacatttcggttcttctt

SEQ ID NO: 1515290 - DNA, 25 bp, Homo sapien
gatctggcggaacaccgattcccgc

SEQ ID NO: 1515291 - DNA, 25 bp, Homo sapien
gataaacaagctctcaatgggcgtc

SEQ ID NO: 1515292 - DNA, 25 bp, Homo sapien
cgggacagagtacatcgttttgatg

SEQ ID NO: 1515293 - DNA, 25 bp, Homo sapien
gtcttctgggaacggaggtcattta

SEQ ID NO: 1515294 - DNA, 25 bp, Homo sapien
gatgttgctcctgaacttctcggtg

SEQ ID NO: 1515295 - DNA, 25 bp, Homo sapien
ttcactggctcgaagtcgttcttgg

SEQ ID NO: 1515296 - DNA, 25 bp, Homo sapien
tcttggtgtagccacgggtgaactc

SEQ ID NO: 1515297 - DNA, 25 bp, Homo sapien
ggtgaactcatctagcagtgactgg

SEQ ID NO: 1515298 - DNA, 25 bp, Homo sapien
caggttgctgacgacgatctggtag

SEQ ID NO: 1515299 - DNA, 25 bp, Homo sapien
cttccgcttcttcttctgagctttg

SEQ ID NO: 1515300 - DNA, 25 bp, Homo sapien
cacgctcctgcttccgcttcttctt

SEQ ID NO: 1515301 - DNA, 25 bp, Homo sapien
agcacgctcctgcttccgcttcttc

SEQ ID NO: 1515302 - DNA, 25 bp, Homo sapien
tccgcttcttcttctgagctttgct

SEQ ID NO: 1515303 - DNA, 25 bp, Homo sapien
acatacgcgtgcagacgggcccatg

SEQ ID NO: 1515304 - DNA, 25 bp, Homo sapien
tcctgccaatgttcgcctgctcgga

SEQ ID NO: 1515305 - DNA, 25 bp, Homo sapien
cgtgtccacgcacacatacgcgtgc

SEQ ID NO: 1515306 - DNA, 25 bp, Homo sapien
tctcatctatgtgcagcctactcac

SEQ ID NO: 1515307 - DNA, 25 bp, Homo sapien
gccactggtggatgacgacccatgg

SEQ ID NO: 1515308 - DNA, 25 bp, Homo sapien
gatgacgacccatgggatctcaggg

SEQ ID NO: 1515309 - DNA, 25 bp, Homo sapien
gggtgacttattcaagactacggct

SEQ ID NO: 1515310 - DNA, 25 bp, Homo sapien
aagactacggctccgtatatgccgg

SEQ ID NO: 1515311 - DNA, 25 bp, Homo sapien
gctaacctggtagctggcgaacacg

SEQ ID NO: 1515312 - DNA, 25 bp, Homo sapien
atataggagaggcactgctcgcacg

SEQ ID NO: 1515313 - DNA, 25 bp, Homo sapien
gggccttgtccatgagccagatata

SEQ ID NO: 1515314 - DNA, 25 bp, Homo sapien
gcacgactgcgggatgctaacctgg

SEQ ID NO: 1515315 - DNA, 25 bp, Homo sapien
ctgggtcccgcatccttatctcagg

SEQ ID NO: 1515316 - DNA, 25 bp, Homo sapien
ttatctcaggaccatgacaactgac

SEQ ID NO: 1515317 - DNA, 25 bp, Homo sapien
gccttgcagagggtacactggttac

SEQ ID NO: 1515318 - DNA, 25 bp, Homo sapien
caactgactgttggacagatgtggg

SEQ ID NO: 1515319 - DNA, 25 bp, Homo sapien
gccaacttctaaacccacactgcag

SEQ ID NO: 1515320 - DNA, 25 bp, Homo sapien
ctccaaggtggccattcatggcctc

SEQ ID NO: 1515321 - DNA, 25 bp, Homo sapien
gcctggctagcggaaccatgagcag

SEQ ID NO: 1515322 - DNA, 25 bp, Homo sapien
gggacctgtgacatccttgccccaa

SEQ ID NO: 1515323 - DNA, 25 bp, Homo sapien
tcctcccgtaggtgtaggagcagtg

SEQ ID NO: 1515324 - DNA, 25 bp, Homo sapien
cacgcacttcttgtggcaggtcatc

SEQ ID NO: 1515325 - DNA, 25 bp, Homo sapien
cttcctcccgtaggtgtaggagcag

SEQ ID NO: 1515326 - DNA, 25 bp, Homo sapien
cagtggctctgaatcttgtgcacgc

SEQ ID NO: 1515327 - DNA, 25 bp, Homo sapien
tgtctacgcacacgccgaagtggcc

SEQ ID NO: 1515328 - DNA, 25 bp, Homo sapien
tgtcgctggtcaggctgtctacgca

SEQ ID NO: 1515329 - DNA, 25 bp, Homo sapien
ttggcagcacccgacttgcggtaga

SEQ ID NO: 1515330 - DNA, 25 bp, Homo sapien
tagaggccctcggtgtacaggccgt

SEQ ID NO: 1515331 - DNA, 25 bp, Homo sapien
tcgccgtactgtgcgaaggtcatga

SEQ ID NO: 1515332 - DNA, 25 bp, Homo sapien
gccactgcttcagcacccctgtgat

SEQ ID NO: 1515333 - DNA, 25 bp, Homo sapien
acggctcggaggaagtcgccgtact

SEQ ID NO: 1515334 - DNA, 25 bp, Homo sapien
gaagttctccagcttgactgctgcg

SEQ ID NO: 1515335 - DNA, 25 bp, Homo sapien
aggacggcatagatggcagccagct

SEQ ID NO: 1515336 - DNA, 25 bp, Homo sapien
ggtgctccaggacggcatagatggc

SEQ ID NO: 1515337 - DNA, 25 bp, Homo sapien
ctctccagggagttgtggttggctt

SEQ ID NO: 1515338 - DNA, 25 bp, Homo sapien
ctccagggagttgtggttggcttct

SEQ ID NO: 1515339 - DNA, 25 bp, Homo sapien
acagccactggcagttagaggatgg

SEQ ID NO: 1515340 - DNA, 25 bp, Homo sapien
ggtgatcttgaggacgtccttcatg

SEQ ID NO: 1515341 - DNA, 25 bp, Homo sapien
gtgcgaagataatggccagcgcccc

SEQ ID NO: 1515342 - DNA, 25 bp, Homo sapien
tgacatgcggttgacatcctcgagc

SEQ ID NO: 1515343 - DNA, 25 bp, Homo sapien
ttcatgctggtcagcgggtccgagt

SEQ ID NO: 1515344 - DNA, 25 bp, Homo sapien
tggagctgtcgtggggtcctgggtg

SEQ ID NO: 1515345 - DNA, 25 bp, Homo sapien
ggatggatggagctgtcgtggggtc

SEQ ID NO: 1515346 - DNA, 25 bp, Homo sapien
tgccctgagcatgcctccggggcag

SEQ ID NO: 1515347 - DNA, 25 bp, Homo sapien
cgctgcactcggctctggacttttc

SEQ ID NO: 1515348 - DNA, 25 bp, Homo sapien
ccgcaggtcatctgcccgtctcggt

SEQ ID NO: 1515349 - DNA, 25 bp, Homo sapien
tcccgaccgcaggtcatctgcccgt

SEQ ID NO: 1515350 - DNA, 25 bp, Homo sapien
cgaccgcaggtcatctgcccgtctc

SEQ ID NO: 1515351 - DNA, 25 bp, Homo sapien
gcaggtcatctgcccgtctcggtct

SEQ ID NO: 1515352 - DNA, 25 bp, Homo sapien
cattttgtcgcaggagcgaaagcct

SEQ ID NO: 1515353 - DNA, 25 bp, Homo sapien
gctccttgatcagcatctccacgca

SEQ ID NO: 1515354 - DNA, 25 bp, Homo sapien
agcattttgtcgcaggagcgaaagc

SEQ ID NO: 1515355 - DNA, 25 bp, Homo sapien
tttgtcgcaggagcgaaagcctgcg

SEQ ID NO: 1515356 - DNA, 25 bp, Homo sapien
gcccagagcccgttccccactaaca

SEQ ID NO: 1515357 - DNA, 25 bp, Homo sapien
gggatacatccaatgaccggtacca

SEQ ID NO: 1515358 - DNA, 25 bp, Homo sapien
tccaatgaccggtaccaagataggg

SEQ ID NO: 1515359 - DNA, 25 bp, Homo sapien
caggcatgagctggggatacatcca

SEQ ID NO: 1515360 - DNA, 25 bp, Homo sapien
ctcatagggagacgaaaaccccagt

SEQ ID NO: 1515361 - DNA, 25 bp, Homo sapien
cctcatagggagacgaaaaccccag

SEQ ID NO: 1515362 - DNA, 25 bp, Homo sapien
caggaccccctcatagggagacgaa

SEQ ID NO: 1515363 - DNA, 25 bp, Homo sapien
tccggaaggttaggacaggctctgt

SEQ ID NO: 1515364 - DNA, 25 bp, Homo sapien
gccgattagtcgtcctgagcacaga

SEQ ID NO: 1515365 - DNA, 25 bp, Homo sapien
tactgccggaggtgtgagcagatcc

SEQ ID NO: 1515366 - DNA, 25 bp, Homo sapien
acatctctgagtgggcgaggttact

SEQ ID NO: 1515367 - DNA, 25 bp, Homo sapien
tccagcagcacctccagctcctcct

SEQ ID NO: 1515368 - DNA, 25 bp, Homo sapien
ctccagctcctcctcctggatgtcc

SEQ ID NO: 1515369 - DNA, 25 bp, Homo sapien
ctccagcagcacctccagctcctcc

SEQ ID NO: 1515370 - DNA, 25 bp, Homo sapien
cacctccagctcctcctcctggatg

SEQ ID NO: 1515371 - DNA, 25 bp, Homo sapien
tggatccgttcaatgagaatctcct

SEQ ID NO: 1515372 - DNA, 25 bp, Homo sapien
gagaatctccttttcccggtcctca

SEQ ID NO: 1515373 - DNA, 25 bp, Homo sapien
gatccgttcaatgagaatctccttt

SEQ ID NO: 1515374 - DNA, 25 bp, Homo sapien
tccttttcccggtcctcatcgccgc

SEQ ID NO: 1515375 - DNA, 25 bp, Homo sapien
ctaaacatgaaggactgagggaggg

SEQ ID NO: 1515376 - DNA, 25 bp, Homo sapien
aacatgaaggactgagggaggggac

SEQ ID NO: 1515377 - DNA, 25 bp, Homo sapien
taaacatgaaggactgagggagggg

SEQ ID NO: 1515378 - DNA, 25 bp, Homo sapien
aaacatgaaggactgagggagggga

SEQ ID NO: 1515379 - DNA, 25 bp, Homo sapien
ggtagtggtgtccaaggccacccca

SEQ ID NO: 1515380 - DNA, 25 bp, Homo sapien
gtagtggtgtccaaggccaccccac

SEQ ID NO: 1515381 - DNA, 25 bp, Homo sapien
tggtgtccaaggccaccccaccgga

SEQ ID NO: 1515382 - DNA, 25 bp, Homo sapien
agtggtgtccaaggccaccccaccg

SEQ ID NO: 1515383 - DNA, 25 bp, Homo sapien
tggccgacgtctccgagtccaggtt

SEQ ID NO: 1515384 - DNA, 25 bp, Homo sapien
cggtgctggccgacgtctccgagtc

SEQ ID NO: 1515385 - DNA, 25 bp, Homo sapien
gccgacgtctccgagtccaggttct

SEQ ID NO: 1515386 - DNA, 25 bp, Homo sapien
tcgtccgagccccttgggtccagct

SEQ ID NO: 1515387 - DNA, 25 bp, Homo sapien
ccccgcccggcccgctcctccagca

SEQ ID NO: 1515388 - DNA, 25 bp, Homo sapien
cccggcccgctcctccagcaggctc

SEQ ID NO: 1515389 - DNA, 25 bp, Homo sapien
cgcccggcccgctcctccagcaggc

SEQ ID NO: 1515390 - DNA, 25 bp, Homo sapien
ccggcccgctcctccagcaggctct

SEQ ID NO: 1515391 - DNA, 25 bp, Homo sapien
gacagatggcagggttactgcagct

SEQ ID NO: 1515392 - DNA, 25 bp, Homo sapien
cagatggcagggttactgcagcttc

SEQ ID NO: 1515393 - DNA, 25 bp, Homo sapien
gggcctgctgggatggacgggaagg

SEQ ID NO: 1515394 - DNA, 25 bp, Homo sapien
tgctgggatggacgggaaggagaaa

SEQ ID NO: 1515395 - DNA, 25 bp, Homo sapien
cgcgccggggcaagggagagcaggc

SEQ ID NO: 1515396 - DNA, 25 bp, Homo sapien
ggtgggcgcgccggggcaagggaga

SEQ ID NO: 1515397 - DNA, 25 bp, Homo sapien
cttcgtcgtggaggggcggccacgg

SEQ ID NO: 1515398 - DNA, 25 bp, Homo sapien
ctcggggtgggcgcgccggggcaag

SEQ ID NO: 1515399 - DNA, 25 bp, Homo sapien
tctgaccgttacgaaggacgacggc

SEQ ID NO: 1515400 - DNA, 25 bp, Homo sapien
tacacggaatgtatctggtccgggc

SEQ ID NO: 1515401 - DNA, 25 bp, Homo sapien
tctgccccgggcgtgatgtacacgg

SEQ ID NO: 1515402 - DNA, 25 bp, Homo sapien
ccggtgcccagcgaggcaggtggga

SEQ ID NO: 1515403 - DNA, 25 bp, Homo sapien
agccattggtctggcccgaggcggg

SEQ ID NO: 1515404 - DNA, 25 bp, Homo sapien
ggcagtacgttgggggatccgagta

SEQ ID NO: 1515405 - DNA, 25 bp, Homo sapien
gcagtacgttgggggatccgagtac

SEQ ID NO: 1515406 - DNA, 25 bp, Homo sapien
tcagccattggtctggcccgaggcg

SEQ ID NO: 1515407 - DNA, 25 bp, Homo sapien
ttcaagtctccctggcacgtgaggt

SEQ ID NO: 1515408 - DNA, 25 bp, Homo sapien
aaaactctcatggagggtcccagcc

SEQ ID NO: 1515409 - DNA, 25 bp, Homo sapien
tctctgagggccgaacactagctct

SEQ ID NO: 1515410 - DNA, 25 bp, Homo sapien
cagatttgtggccacgtgtccaggt

SEQ ID NO: 1515411 - DNA, 25 bp, Homo sapien
tcgcagcgggatagcagccgcacca

SEQ ID NO: 1515412 - DNA, 25 bp, Homo sapien
ttctccaggcgccactcgtccgggt

SEQ ID NO: 1515413 - DNA, 25 bp, Homo sapien
gctgccatcgcctcgcagcgggata

SEQ ID NO: 1515414 - DNA, 25 bp, Homo sapien
catcgcctcgcagcgggatagcagc

SEQ ID NO: 1515415 - DNA, 25 bp, Homo sapien
ctggggaggaaaagtggattgtcac

SEQ ID NO: 1515416 - DNA, 25 bp, Homo sapien
tggggaggaaaagtggattgtcacc

SEQ ID NO: 1515417 - DNA, 25 bp, Homo sapien
gcctgcaacatgtcctctagggctc

SEQ ID NO: 1515418 - DNA, 25 bp, Homo sapien
tcagggcctgcaacatgtcctctag

SEQ ID NO: 1515419 - DNA, 25 bp, Homo sapien
agggcctgcaacatgtcctctaggg

SEQ ID NO: 1515420 - DNA, 25 bp, Homo sapien
ttcagggcctgcaacatgtcctcta

SEQ ID NO: 1515421 - DNA, 25 bp, Homo sapien
ggtcccagctgggatagcggtactg

SEQ ID NO: 1515422 - DNA, 25 bp, Homo sapien
gatagcggtactgggatgtccagta

SEQ ID NO: 1515423 - DNA, 25 bp, Homo sapien
tgtccagtagcacagccacgtgctg

SEQ ID NO: 1515424 - DNA, 25 bp, Homo sapien
cgtgctgatgtgaaagccctgaggc

SEQ ID NO: 1515425 - DNA, 25 bp, Homo sapien
caccttccaggaatattcattgatc

SEQ ID NO: 1515426 - DNA, 25 bp, Homo sapien
ctcggcttgcagcatccccttcaga

SEQ ID NO: 1515427 - DNA, 25 bp, Homo sapien
atccaccttccaggaatattcattg

SEQ ID NO: 1515428 - DNA, 25 bp, Homo sapien
aaaatccaccttccaggaatattca

SEQ ID NO: 1515429 - DNA, 25 bp, Homo sapien
atctcgctggtgtaccgcgcccgtg

SEQ ID NO: 1515430 - DNA, 25 bp, Homo sapien
gtgcctagtagctcactccgcatct

SEQ ID NO: 1515431 - DNA, 25 bp, Homo sapien
ggcactcgctctctggctgtggttg

SEQ ID NO: 1515432 - DNA, 25 bp, Homo sapien
gcaccgtctttgtggcgggcactcg

SEQ ID NO: 1515433 - DNA, 25 bp, Homo sapien
ccgttggcttctgaccatgcttgaa

SEQ ID NO: 1515434 - DNA, 25 bp, Homo sapien
tccaggtgtagtttggtgatgctcc

SEQ ID NO: 1515435 - DNA, 25 bp, Homo sapien
tgctgggtctactgcttggaatgct

SEQ ID NO: 1515436 - DNA, 25 bp, Homo sapien
catgtcttgtcctagtcagctggcc

SEQ ID NO: 1515437 - DNA, 25 bp, Homo sapien
gcaaaacaggccaagcaaaaaaggc

SEQ ID NO: 1515438 - DNA, 25 bp, Homo sapien
caaaacaggccaagcaaaaaaggcg

SEQ ID NO: 1515439 - DNA, 25 bp, Homo sapien
ttctcttccttacgtccatctcagg

SEQ ID NO: 1515440 - DNA, 25 bp, Homo sapien
tctcttccttacgtccatctcaggc

SEQ ID NO: 1515441 - DNA, 25 bp, Homo sapien
ctcttccttacgtccatctcaggct

SEQ ID NO: 1515442 - DNA, 25 bp, Homo sapien
tttggccactgctaccccgtccctg

SEQ ID NO: 1515443 - DNA, 25 bp, Homo sapien
aattgccactactgccccagggccg

SEQ ID NO: 1515444 - DNA, 25 bp, Homo sapien
tagatccttgtggtagtgcctcggt

SEQ ID NO: 1515445 - DNA, 25 bp, Homo sapien
gcctcggtggtccagggtttggcca

SEQ ID NO: 1515446 - DNA, 25 bp, Homo sapien
ctgcttctcactcactggctgggac

SEQ ID NO: 1515447 - DNA, 25 bp, Homo sapien
ctcactggctgggaccctgccactc

SEQ ID NO: 1515448 - DNA, 25 bp, Homo sapien
cactggctgggaccctgccactcca

SEQ ID NO: 1515449 - DNA, 25 bp, Homo sapien
cactcactggctgggaccctgccac

SEQ ID NO: 1515450 - DNA, 25 bp, Homo sapien
tcctggaggttctgatgtcgctgca

SEQ ID NO: 1515451 - DNA, 25 bp, Homo sapien
tctgggcggccagggtattggtctt

SEQ ID NO: 1515452 - DNA, 25 bp, Homo sapien
ttcttgatgacactctgggcggcca

SEQ ID NO: 1515453 - DNA, 25 bp, Homo sapien
aggctccgggccagtcctagcatct

SEQ ID NO: 1515454 - DNA, 25 bp, Homo sapien
gaaaaggtgtcaacaggactggggc

SEQ ID NO: 1515455 - DNA, 25 bp, Homo sapien
ggcctctctctacttccctgggact

SEQ ID NO: 1515456 - DNA, 25 bp, Homo sapien
actcctattcatcccgcaaagcccc

SEQ ID NO: 1515457 - DNA, 25 bp, Homo sapien
caaagccccagccacaatgctcctg

SEQ ID NO: 1515458 - DNA, 25 bp, Homo sapien
cagacgataatgagcatggcccaga

SEQ ID NO: 1515459 - DNA, 25 bp, Homo sapien
gacgctctgactccgtcttcagttt

SEQ ID NO: 1515460 - DNA, 25 bp, Homo sapien
ccagttgactgacttctgcgtgtgc

SEQ ID NO: 1515461 - DNA, 25 bp, Homo sapien
gattcgaatgaagaggatcatgcta

SEQ ID NO: 1515462 - DNA, 25 bp, Homo sapien
ggttggagtgcagtactgggatctc

SEQ ID NO: 1515463 - DNA, 25 bp, Homo sapien
gattctcgtgcctaagcctcccaag

SEQ ID NO: 1515464 - DNA, 25 bp, Homo sapien
tgggatctcagctcactgcaacctc

SEQ ID NO: 1515465 - DNA, 25 bp, Homo sapien
cacctcctgggttcaagtgattctc

SEQ ID NO: 1515466 - DNA, 25 bp, Homo sapien
tcggctacaagtctgccagtcggag

SEQ ID NO: 1515467 - DNA, 25 bp, Homo sapien
ctgaaggcactgtgttcggctacaa

SEQ ID NO: 1515468 - DNA, 25 bp, Homo sapien
tctgccagtcggaggctcctagggc

SEQ ID NO: 1515469 - DNA, 25 bp, Homo sapien
actgtgttcggctacaagtctgcca

SEQ ID NO: 1515470 - DNA, 25 bp, Homo sapien
gtgagcactgggcacgacccatgtg

SEQ ID NO: 1515471 - DNA, 25 bp, Homo sapien
tgactgtgagggatctgtagtgtcc

SEQ ID NO: 1515472 - DNA, 25 bp, Homo sapien
ctgtagtgtcccgagagctgaggct

SEQ ID NO: 1515473 - DNA, 25 bp, Homo sapien
cccatgtgtgtttgtcgagtgactg

SEQ ID NO: 1515474 - DNA, 25 bp, Homo sapien
tgtccccacaatgccgtcaatgctg

SEQ ID NO: 1515475 - DNA, 25 bp, Homo sapien
cctcagttgctctcacaggctgtgc

SEQ ID NO: 1515476 - DNA, 25 bp, Homo sapien
aaggattttacacccacgtcagtgg

SEQ ID NO: 1515477 - DNA, 25 bp, Homo sapien
ggtccactgggcacctccaagtgtc

SEQ ID NO: 1515478 - DNA, 25 bp, Homo sapien
caggatggacccgactggcggggtc

SEQ ID NO: 1515479 - DNA, 25 bp, Homo sapien
gatggacccgactggcggggtcgct

SEQ ID NO: 1515480 - DNA, 25 bp, Homo sapien
ttactgcaggatggacccgactggc

SEQ ID NO: 1515481 - DNA, 25 bp, Homo sapien
tactgcaggatggacccgactggcg

SEQ ID NO: 1515482 - DNA, 25 bp, Homo sapien
ctgtcggagaggcacttccgtccgg

SEQ ID NO: 1515483 - DNA, 25 bp, Homo sapien
tctgctgtcggagaggcacttccgt

SEQ ID NO: 1515484 - DNA, 25 bp, Homo sapien
gaggcacttccgtccgggttgtgca

SEQ ID NO: 1515485 - DNA, 25 bp, Homo sapien
agaggcacttccgtccgggttgtgc

SEQ ID NO: 1515486 - DNA, 25 bp, Homo sapien
gcaaggccgtccggctcgctaccgc

SEQ ID NO: 1515487 - DNA, 25 bp, Homo sapien
tccggctcgctaccgccccgggtca

SEQ ID NO: 1515488 - DNA, 25 bp, Homo sapien
caaggccgtccggctcgctaccgcc

SEQ ID NO: 1515489 - DNA, 25 bp, Homo sapien
tgcaaggccgtccggctcgctaccg

SEQ ID NO: 1515490 - DNA, 25 bp, Homo sapien
gctcggccgaagagcggccaactct

SEQ ID NO: 1515491 - DNA, 25 bp, Homo sapien
ctgacgacgcgcacggagaaaggac

SEQ ID NO: 1515492 - DNA, 25 bp, Homo sapien
tccccagaacgaccgctatttgcat

SEQ ID NO: 1515493 - DNA, 25 bp, Homo sapien
cccgcgggagcagagttccccagaa

SEQ ID NO: 1515494 - DNA, 25 bp, Homo sapien
tgtgggtggacacgcggagaggaca

SEQ ID NO: 1515495 - DNA, 25 bp, Homo sapien
gggtggacacgcggagaggacacgc

SEQ ID NO: 1515496 - DNA, 25 bp, Homo sapien
gtgggtggacacgcggagaggacac

SEQ ID NO: 1515497 - DNA, 25 bp, Homo sapien
ctgtgggtggacacgcggagaggac

SEQ ID NO: 1515498 - DNA, 25 bp, Homo sapien
caggcgggtgagtatgcaggtgccc

SEQ ID NO: 1515499 - DNA, 25 bp, Homo sapien
tttccgggctgatgggcgggtcctg

SEQ ID NO: 1515500 - DNA, 25 bp, Homo sapien
ccgggtgggcatcggcctccgggag

SEQ ID NO: 1515501 - DNA, 25 bp, Homo sapien
agaagcagctcaggggtttccgggc

SEQ ID NO: 1515502 - DNA, 25 bp, Homo sapien
gggctaaatcttttgcctagaggcc

SEQ ID NO: 1515503 - DNA, 25 bp, Homo sapien
tcttttgcctagaggcccggcctgg

SEQ ID NO: 1515504 - DNA, 25 bp, Homo sapien
actggaggggctaaatcttttgcct

SEQ ID NO: 1515505 - DNA, 25 bp, Homo sapien
taaatcttttgcctagaggcccggc

SEQ ID NO: 1515506 - DNA, 25 bp, Homo sapien
ggcgctggttttgaggcctcggggc

SEQ ID NO: 1515507 - DNA, 25 bp, Homo sapien
gttttgaggcctcggggcgccagtc

SEQ ID NO: 1515508 - DNA, 25 bp, Homo sapien
cgctggttttgaggcctcggggcgc

SEQ ID NO: 1515509 - DNA, 25 bp, Homo sapien
tggttttgaggcctcggggcgccag

SEQ ID NO: 1515510 - DNA, 25 bp, Homo sapien
ctcaaacacaatcttcttggtcttt

SEQ ID NO: 1515511 - DNA, 25 bp, Homo sapien
atcttcttggtctttgccttgtggg

SEQ ID NO: 1515512 - DNA, 25 bp, Homo sapien
aacacaatcttcttggtctttgcct

SEQ ID NO: 1515513 - DNA, 25 bp, Homo sapien
tctttgccttgtggggtcccggctg

SEQ ID NO: 1515514 - DNA, 25 bp, Homo sapien
ccttagggatggctccaataggctt

SEQ ID NO: 1515515 - DNA, 25 bp, Homo sapien
ggcctaggcttatgccccttaggga

SEQ ID NO: 1515516 - DNA, 25 bp, Homo sapien
gcctaggcttatgccccttagggat

SEQ ID NO: 1515517 - DNA, 25 bp, Homo sapien
aataggcttcttggcgcccaggagg

SEQ ID NO: 1515518 - DNA, 25 bp, Homo sapien
tgatcagcaagggatcctttccttt

SEQ ID NO: 1515519 - DNA, 25 bp, Homo sapien
tggcttattcacagggacaatccca

SEQ ID NO: 1515520 - DNA, 25 bp, Homo sapien
cagcaagggatcctttcctttctac

SEQ ID NO: 1515521 - DNA, 25 bp, Homo sapien
tgcagtggcttattcacagggacaa

SEQ ID NO: 1515522 - DNA, 25 bp, Homo sapien
aacactgcgacatagcggctccgtt

SEQ ID NO: 1515523 - DNA, 25 bp, Homo sapien
aactctccgtactggtcctggaaca

SEQ ID NO: 1515524 - DNA, 25 bp, Homo sapien
gagctccaagaactctccgtactgg

SEQ ID NO: 1515525 - DNA, 25 bp, Homo sapien
cgtgctggagctccaagaactctcc

SEQ ID NO: 1515526 - DNA, 25 bp, Homo sapien
ccagctgcctgagctttgcctgtgc

SEQ ID NO: 1515527 - DNA, 25 bp, Homo sapien
tgcctgagctttgcctgtgcacacc

SEQ ID NO: 1515528 - DNA, 25 bp, Homo sapien
agctgcctgagctttgcctgtgcac

SEQ ID NO: 1515529 - DNA, 25 bp, Homo sapien
ctgagctttgcctgtgcacacccca

SEQ ID NO: 1515530 - DNA, 25 bp, Homo sapien
cctccaaacccgggctgcaacttgg

SEQ ID NO: 1515531 - DNA, 25 bp, Homo sapien
ctccctccaaacccgggctgcaact

SEQ ID NO: 1515532 - DNA, 25 bp, Homo sapien
ccctccaaacccgggctgcaacttg

SEQ ID NO: 1515533 - DNA, 25 bp, Homo sapien
tcacagaagtctcaggggtgcaaga

SEQ ID NO: 1515534 - DNA, 25 bp, Homo sapien
ctcacagaagtctcaggggtgcaag

SEQ ID NO: 1515535 - DNA, 25 bp, Homo sapien
cacagaagtctcaggggtgcaagac

SEQ ID NO: 1515536 - DNA, 25 bp, Homo sapien
cagggcgagacccggaagtctttgc

SEQ ID NO: 1515537 - DNA, 25 bp, Homo sapien
ttcattctccgagcctcaattttct

SEQ ID NO: 1515538 - DNA, 25 bp, Homo sapien
acccggaagtctttgcagcagtctg

SEQ ID NO: 1515539 - DNA, 25 bp, Homo sapien
tgcctttcattctccgagcctcaat

SEQ ID NO: 1515540 - DNA, 25 bp, Homo sapien
tcagtttacccttcaggtagtggca

SEQ ID NO: 1515541 - DNA, 25 bp, Homo sapien
tgtctccttggtcatcgaatttctg

SEQ ID NO: 1515542 - DNA, 25 bp, Homo sapien
tttacccttcaggtagtggcagcga

SEQ ID NO: 1515543 - DNA, 25 bp, Homo sapien
tttctggatctgagtcttgagatgc

SEQ ID NO: 1515544 - DNA, 25 bp, Homo sapien
aatgcaagggacctgcatccccatg

SEQ ID NO: 1515545 - DNA, 25 bp, Homo sapien
tgcaagaggaaaagctgagagatac

SEQ ID NO: 1515546 - DNA, 25 bp, Homo sapien
ggaaaagctgagagataccaagaaa

SEQ ID NO: 1515547 - DNA, 25 bp, Homo sapien
agaaatgcaagggacctgcatcccc

SEQ ID NO: 1515548 - DNA, 25 bp, Homo sapien
gagtccctgtagggtcagagctaga

SEQ ID NO: 1515549 - DNA, 25 bp, Homo sapien
ctgagtccaaactgaagaggcattt

SEQ ID NO: 1515550 - DNA, 25 bp, Homo sapien
ttcactgggatggagagcaggccct

SEQ ID NO: 1515551 - DNA, 25 bp, Homo sapien
aatccaggagaaagcgacccctggt

SEQ ID NO: 1515552 - DNA, 25 bp, Homo sapien
gactttgaaatgtgggcttcactgg

SEQ ID NO: 1515553 - DNA, 25 bp, Homo sapien
caaactagccagtgagattgcacgg

SEQ ID NO: 1515554 - DNA, 25 bp, Homo sapien
caactggtttatggaggccctggga

SEQ ID NO: 1515555 - DNA, 25 bp, Homo sapien
aagccatacctgaaacccttgggtg

SEQ ID NO: 1515556 - DNA, 25 bp, Homo sapien
gcacccctagcatgaacttgtggga

SEQ ID NO: 1515557 - DNA, 25 bp, Homo sapien
cctgtccaggatggagggtccaatc

SEQ ID NO: 1515558 - DNA, 25 bp, Homo sapien
gatcctctggacacgtaacctatgt

SEQ ID NO: 1515559 - DNA, 25 bp, Homo sapien
caaaaagagactgatcatccaggcc

SEQ ID NO: 1515560 - DNA, 25 bp, Homo sapien
tcaccgagtatgtgcgggcgcagta

SEQ ID NO: 1515561 - DNA, 25 bp, Homo sapien
agctgttcttcatgcgcctggtggg

SEQ ID NO: 1515562 - DNA, 25 bp, Homo sapien
ggaagacgcccattgagacactgat

SEQ ID NO: 1515563 - DNA, 25 bp, Homo sapien
cggcccacgttgagagcctgcagga

SEQ ID NO: 1515564 - DNA, 25 bp, Homo sapien
catcgacaacgtgtgcgagctggcg

SEQ ID NO: 1515565 - DNA, 25 bp, Homo sapien
agccggtgtccgaactgatcgcgca

SEQ ID NO: 1515566 - DNA, 25 bp, Homo sapien
actcggccgagtatggctgcctcaa

SEQ ID NO: 1515567 - DNA, 25 bp, Homo sapien
cgtggctttcatggaccaggtgcgc

SEQ ID NO: 1515568 - DNA, 25 bp, Homo sapien
aggaccggccgcaggaagttgctgc

SEQ ID NO: 1515569 - DNA, 25 bp, Homo sapien
cggcccgcgcctctagcgtgcccct

SEQ ID NO: 1515570 - DNA, 25 bp, Homo sapien
gaccagttccgcccgggcgcgagga

SEQ ID NO: 1515571 - DNA, 25 bp, Homo sapien
cgcacgcgtgggaaagttggcctgg

SEQ ID NO: 1515572 - DNA, 25 bp, Homo sapien
agccggaagttgtacggcgcagccc

SEQ ID NO: 1515573 - DNA, 25 bp, Homo sapien
cagccccgacgcctcctgggaaatg

SEQ ID NO: 1515574 - DNA, 25 bp, Homo sapien
taggaagccgccatctttacagccg

SEQ ID NO: 1515575 - DNA, 25 bp, Homo sapien
tctttacagccggaagttgtacggc

SEQ ID NO: 1515576 - DNA, 25 bp, Homo sapien
ctccttctaaatcagccgccgactc

SEQ ID NO: 1515577 - DNA, 25 bp, Homo sapien
tccttctaaatcagccgccgactca

SEQ ID NO: 1515578 - DNA, 25 bp, Homo sapien
ccttctaaatcagccgccgactcac

SEQ ID NO: 1515579 - DNA, 25 bp, Homo sapien
cccttggagagaaacaggacgcgaa

SEQ ID NO: 1515580 - DNA, 25 bp, Homo sapien
taaaaagcgaaatggtctccaccga

SEQ ID NO: 1515581 - DNA, 25 bp, Homo sapien
tttaacgtagtgctagccccatgcc

SEQ ID NO: 1515582 - DNA, 25 bp, Homo sapien
aaaacaaggctttagcggcagcaag

SEQ ID NO: 1515583 - DNA, 25 bp, Homo sapien
agatggaacacggacaggggaagcc

SEQ ID NO: 1515584 - DNA, 25 bp, Homo sapien
ctagatggaacacggacaggggaag

SEQ ID NO: 1515585 - DNA, 25 bp, Homo sapien
aacacggacaggggaagccagaatc

SEQ ID NO: 1515586 - DNA, 25 bp, Homo sapien
tggaacacggacaggggaagccaga

SEQ ID NO: 1515587 - DNA, 25 bp, Homo sapien
tcctcctcctcttcagtggggctgc

SEQ ID NO: 1515588 - DNA, 25 bp, Homo sapien
ctcctcttcagtggggctgctgggc

SEQ ID NO: 1515589 - DNA, 25 bp, Homo sapien
tcctcctcttcagtggggctgctgg

SEQ ID NO: 1515590 - DNA, 25 bp, Homo sapien
ctcctcctcttcagtggggctgctg

SEQ ID NO: 1515591 - DNA, 25 bp, Homo sapien
agttgacccttggtgtccgaatttg

SEQ ID NO: 1515592 - DNA, 25 bp, Homo sapien
tggtgtccgaatttggacctcaggg

SEQ ID NO: 1515593 - DNA, 25 bp, Homo sapien
tgccaggacttagggccggctcctg

SEQ ID NO: 1515594 - DNA, 25 bp, Homo sapien
ccccttcaggattggagcgagtgcg

SEQ ID NO: 1515595 - DNA, 25 bp, Homo sapien
gttgaacgactccagctttggcagt

SEQ ID NO: 1515596 - DNA, 25 bp, Homo sapien
ccgttgaacgactccagctttggca

SEQ ID NO: 1515597 - DNA, 25 bp, Homo sapien
cgttgaacgactccagctttggcag

SEQ ID NO: 1515598 - DNA, 25 bp, Homo sapien
ttgaacgactccagctttggcagtg

SEQ ID NO: 1515599 - DNA, 25 bp, Homo sapien
tcttctgggagacattgagggcgtt

SEQ ID NO: 1515600 - DNA, 25 bp, Homo sapien
ttgtcgatcttgtgttttgtccgca

SEQ ID NO: 1515601 - DNA, 25 bp, Homo sapien
tctcaatcatcttctgggagacatt

SEQ ID NO: 1515602 - DNA, 25 bp, Homo sapien
tttgtccgcacgaacatctcaatca

SEQ ID NO: 1515603 - DNA, 25 bp, Homo sapien
gtgtcatcgttcaccaccaccagtg

SEQ ID NO: 1515604 - DNA, 25 bp, Homo sapien
accaccaccagtgcaaactcgtggc

SEQ ID NO: 1515605 - DNA, 25 bp, Homo sapien
ccaggccgtgtcatcgttcaccacc

SEQ ID NO: 1515606 - DNA, 25 bp, Homo sapien
aggccgtgtcatcgttcaccaccac

SEQ ID NO: 1515607 - DNA, 25 bp, Homo sapien
cgtctccagatcatagaggcagcta

SEQ ID NO: 1515608 - DNA, 25 bp, Homo sapien
ggtggaacaggaggccgtctccaga

SEQ ID NO: 1515609 - DNA, 25 bp, Homo sapien
ggaggccgtctccagatcatagagg

SEQ ID NO: 1515610 - DNA, 25 bp, Homo sapien
gaacaggaggccgtctccagatcat

SEQ ID NO: 1515611 - DNA, 25 bp, Homo sapien
accatgcccggaccaaatcaggtac

SEQ ID NO: 1515612 - DNA, 25 bp, Homo sapien
cagatctgagatctgaacctcagcc

SEQ ID NO: 1515613 - DNA, 25 bp, Homo sapien
gagtcatgacttagactttcctggg

SEQ ID NO: 1515614 - DNA, 25 bp, Homo sapien
ttgcttctgtattgttacagcatct

SEQ ID NO: 1515615 - DNA, 25 bp, Homo sapien
atgaggctgaaaagtccttccagat

SEQ ID NO: 1515616 - DNA, 25 bp, Homo sapien
ggcatcccataagcggttccctctg

SEQ ID NO: 1515617 - DNA, 25 bp, Homo sapien
tgaggcatcccataagcggttccct

SEQ ID NO: 1515618 - DNA, 25 bp, Homo sapien
tgtgaggcatcccataagcggttcc

SEQ ID NO: 1515619 - DNA, 25 bp, Homo sapien
ctgtgaggcatcccataagcggttc

SEQ ID NO: 1515620 - DNA, 25 bp, Homo sapien
cgggcaggtgaggccccactgatgt

SEQ ID NO: 1515621 - DNA, 25 bp, Homo sapien
gtgggggtctgcccctcttatcacc

SEQ ID NO: 1515622 - DNA, 25 bp, Homo sapien
agggagcagtcagagcagcctgtgg

SEQ ID NO: 1515623 - DNA, 25 bp, Homo sapien
ctgtgggggtctgcccctcttatca

SEQ ID NO: 1515624 - DNA, 25 bp, Homo sapien
tgcatacccgggaggagggagcagt

SEQ ID NO: 1515625 - DNA, 25 bp, Homo sapien
ctgtgaccggaagctcagttttctg

SEQ ID NO: 1515626 - DNA, 25 bp, Homo sapien
caaggtggacggctgtagacaagga

SEQ ID NO: 1515627 - DNA, 25 bp, Homo sapien
tgtagacaaggatggtgcggaccac

SEQ ID NO: 1515628 - DNA, 25 bp, Homo sapien
aaggatggtgcggaccacatatggc

SEQ ID NO: 1515629 - DNA, 25 bp, Homo sapien
catatggcgggggaatcgtctgcac

SEQ ID NO: 1515630 - DNA, 25 bp, Homo sapien
ggctgcaggcacccctccctctccc

SEQ ID NO: 1515631 - DNA, 25 bp, Homo sapien
cctccctctcccaggcctcacccac

SEQ ID NO: 1515632 - DNA, 25 bp, Homo sapien
atggctgcaggcacccctccctctc

SEQ ID NO: 1515633 - DNA, 25 bp, Homo sapien
ctgcaggcacccctccctctcccag

SEQ ID NO: 1515634 - DNA, 25 bp, Homo sapien
aaacaacgtcaaagaagaaatatgg

SEQ ID NO: 1515635 - DNA, 25 bp, Homo sapien
tgtggatgtaaacaacgtcaaagaa

SEQ ID NO: 1515636 - DNA, 25 bp, Homo sapien
cattgtggatgtaaacaacgtcaaa

SEQ ID NO: 1515637 - DNA, 25 bp, Homo sapien
ggatgtaaacaacgtcaaagaagaa

SEQ ID NO: 1515638 - DNA, 25 bp, Homo sapien
caggctggtccgaactcccaactca

SEQ ID NO: 1515639 - DNA, 25 bp, Homo sapien
acagggtttcgctgttgttcccagg

SEQ ID NO: 1515640 - DNA, 25 bp, Homo sapien
tcaggctggtccgaactcccaactc

SEQ ID NO: 1515641 - DNA, 25 bp, Homo sapien
agacagggtttcgctgttgttccca

SEQ ID NO: 1515642 - DNA, 25 bp, Homo sapien
aagcagaaaccattcacacattcag

SEQ ID NO: 1515643 - DNA, 25 bp, Homo sapien
tgaagaggagtttgccaagcagaaa

SEQ ID NO: 1515644 - DNA, 25 bp, Homo sapien
taaggatctgaagaggtcccagtca

SEQ ID NO: 1515645 - DNA, 25 bp, Homo sapien
gccatggacccagtgttaaggatct

SEQ ID NO: 1515646 - DNA, 25 bp, Homo sapien
gcatggctctggcaaggccgctgca

SEQ ID NO: 1515647 - DNA, 25 bp, Homo sapien
cagtgccacctcatacttgtagctg

SEQ ID NO: 1515648 - DNA, 25 bp, Homo sapien
aacagtttcgccatgcagttgtgca

SEQ ID NO: 1515649 - DNA, 25 bp, Homo sapien
ggtacccttggtatccaggctgccc

SEQ ID NO: 1515650 - DNA, 25 bp, Homo sapien
ggctttaggccaaggacttccttgc

SEQ ID NO: 1515651 - DNA, 25 bp, Homo sapien
caaggctttaggccaaggacttcct

SEQ ID NO: 1515652 - DNA, 25 bp, Homo sapien
ctttaggccaaggacttccttgcac

SEQ ID NO: 1515653 - DNA, 25 bp, Homo sapien
aggctttaggccaaggacttccttg

SEQ ID NO: 1515654 - DNA, 25 bp, Homo sapien
ctggaatcctgggtttccctcctag

SEQ ID NO: 1515655 - DNA, 25 bp, Homo sapien
tccctcctaggaccctgcaaggtac

SEQ ID NO: 1515656 - DNA, 25 bp, Homo sapien
ttccctcctaggaccctgcaaggta

SEQ ID NO: 1515657 - DNA, 25 bp, Homo sapien
ccgccgataagagcccgggtgggag

SEQ ID NO: 1515658 - DNA, 25 bp, Homo sapien
cgggtgtgccactatctcatttaaa

SEQ ID NO: 1515659 - DNA, 25 bp, Homo sapien
tggagctacgattaagaaagtccgg

SEQ ID NO: 1515660 - DNA, 25 bp, Homo sapien
aaacgcgaaggcacccggctcgagt

SEQ ID NO: 1515661 - DNA, 25 bp, Homo sapien
ttgacacccggaggcgctcaagcag

SEQ ID NO: 1515662 - DNA, 25 bp, Homo sapien
gcctggtcggtcgatttcctacttc

SEQ ID NO: 1515663 - DNA, 25 bp, Homo sapien
ttcgagagctttagtgtcctcaggg

SEQ ID NO: 1515664 - DNA, 25 bp, Homo sapien
gggcttgtgggcatgcgccgctcct

SEQ ID NO: 1515665 - DNA, 25 bp, Homo sapien
agccaggcgggcctccgagcacatg

SEQ ID NO: 1515666 - DNA, 25 bp, Homo sapien
agcacatgccctggctgggtccgaa

SEQ ID NO: 1515667 - DNA, 25 bp, Homo sapien
ctccgagcacatgccctggctgggt

SEQ ID NO: 1515668 - DNA, 25 bp, Homo sapien
tgccctggctgggtccgaagcgcac

SEQ ID NO: 1515669 - DNA, 25 bp, Homo sapien
cacggctcctcctcccgcagcgcat

SEQ ID NO: 1515670 - DNA, 25 bp, Homo sapien
tgcgccgtcctctagcaccaaatta

SEQ ID NO: 1515671 - DNA, 25 bp, Homo sapien
gctccggccgccaagtgcacagccg

SEQ ID NO: 1515672 - DNA, 25 bp, Homo sapien
tagcaccaaattagggtccgcgccg

SEQ ID NO: 1515673 - DNA, 25 bp, Homo sapien
cttggcgcagtagggccccgaggca

SEQ ID NO: 1515674 - DNA, 25 bp, Homo sapien
cagcggcgtcagtgcctcgacagat

SEQ ID NO: 1515675 - DNA, 25 bp, Homo sapien
ccgggtccgctccttggctcagcag

SEQ ID NO: 1515676 - DNA, 25 bp, Homo sapien
cggccacatgcagcggcgtcagtgc

SEQ ID NO: 1515677 - DNA, 25 bp, Homo sapien
acgcggcggccacatgcagcggcgt

SEQ ID NO: 1515678 - DNA, 25 bp, Homo sapien
tctttgcccgcgcagtgcctcccaa

SEQ ID NO: 1515679 - DNA, 25 bp, Homo sapien
ctttgcccgcgcagtgcctcccaac

SEQ ID NO: 1515680 - DNA, 25 bp, Homo sapien
aggactcgcgcgcactccaggtgtc

SEQ ID NO: 1515681 - DNA, 25 bp, Homo sapien
cgcgtgtcgagatcctgcaggactc

SEQ ID NO: 1515682 - DNA, 25 bp, Homo sapien
tggtccgcgtgtcgagatcctgcag

SEQ ID NO: 1515683 - DNA, 25 bp, Homo sapien
agtctctgccccgatccgggtccgg

SEQ ID NO: 1515684 - DNA, 25 bp, Homo sapien
acaggcagtggcagtcagaagctcc

SEQ ID NO: 1515685 - DNA, 25 bp, Homo sapien
gccgagctcccatgtttgtccacag

SEQ ID NO: 1515686 - DNA, 25 bp, Homo sapien
tcaaccgctgtgacgaaagaggcgt

SEQ ID NO: 1515687 - DNA, 25 bp, Homo sapien
tccagcgtctcatcggtaggtccag

SEQ ID NO: 1515688 - DNA, 25 bp, Homo sapien
aactccaagtcagacacagtggaga

SEQ ID NO: 1515689 - DNA, 25 bp, Homo sapien
gcaactccaagtcagacacagtgga

SEQ ID NO: 1515690 - DNA, 25 bp, Homo sapien
ttcagcaactccaagtcagacacag

SEQ ID NO: 1515691 - DNA, 25 bp, Homo sapien
tcagcaactccaagtcagacacagt

SEQ ID NO: 1515692 - DNA, 25 bp, Homo sapien
gctgctggtggtacaactgcctggt

SEQ ID NO: 1515693 - DNA, 25 bp, Homo sapien
ctgctggtggtacaactgcctggtg

SEQ ID NO: 1515694 - DNA, 25 bp, Homo sapien
ctggtgaagggtgtgatggggtgag

SEQ ID NO: 1515695 - DNA, 25 bp, Homo sapien
ggtccagcagcagataggtgaagct

SEQ ID NO: 1515696 - DNA, 25 bp, Homo sapien
gccagcgcgtcttcatctgcctgga

SEQ ID NO: 1515697 - DNA, 25 bp, Homo sapien
tggacatctggaatacagcccgtcc

SEQ ID NO: 1515698 - DNA, 25 bp, Homo sapien
taggtgaagctagacttcacgaccc

SEQ ID NO: 1515699 - DNA, 25 bp, Homo sapien
cccagaggtggacatatggccgggc

SEQ ID NO: 1515700 - DNA, 25 bp, Homo sapien
ctgttttcttgaccgcccatggtga

SEQ ID NO: 1515701 - DNA, 25 bp, Homo sapien
cacggatgaaagtctgaaggcgctc

SEQ ID NO: 1515702 - DNA, 25 bp, Homo sapien
cctttgcccacgtagaagatggcac

SEQ ID NO: 1515703 - DNA, 25 bp, Homo sapien
cacaatacacgcctcccgtgtataa

SEQ ID NO: 1515704 - DNA, 25 bp, Homo sapien
tggaagcaatgtagggacacaacac

SEQ ID NO: 1515705 - DNA, 25 bp, Homo sapien
tccacagcgaccacgtgctggaagc

SEQ ID NO: 1515706 - DNA, 25 bp, Homo sapien
gatgtccaagatctgacgcaccttg

SEQ ID NO: 1515707 - DNA, 25 bp, Homo sapien
cgggcctggatgtcctggggatgaa

SEQ ID NO: 1515708 - DNA, 25 bp, Homo sapien
cccaagcgccggcgacgagcaggtg

SEQ ID NO: 1515709 - DNA, 25 bp, Homo sapien
agacaaggagggcacggtgcagcag

SEQ ID NO: 1515710 - DNA, 25 bp, Homo sapien
caccactccatagcagtgcccttgc

SEQ ID NO: 1515711 - DNA, 25 bp, Homo sapien
taacgtcctgatgttgatgtggcat

SEQ ID NO: 1515712 - DNA, 25 bp, Homo sapien
aaacgcctcttacagaagcaccgga

SEQ ID NO: 1515713 - DNA, 25 bp, Homo sapien
gatcccgtgacttagaatgctttaa

SEQ ID NO: 1515714 - DNA, 25 bp, Homo sapien
gggcagctggaacattcaaacattt

SEQ ID NO: 1515715 - DNA, 25 bp, Homo sapien
gctgggagctatttttgcccaaggg

SEQ ID NO: 1515716 - DNA, 25 bp, Homo sapien
agccgggaccctcacggaagatgac

SEQ ID NO: 1515717 - DNA, 25 bp, Homo sapien
cggaagatgaccttgtacagaagct

SEQ ID NO: 1515718 - DNA, 25 bp, Homo sapien
tcgaggccccatcccgttatccgag

SEQ ID NO: 1515719 - DNA, 25 bp, Homo sapien
tggtgatgctggaatgccctgagac

SEQ ID NO: 1515720 - DNA, 25 bp, Homo sapien
gctgctccacgaattcctgctctgg

SEQ ID NO: 1515721 - DNA, 25 bp, Homo sapien
aaggctctaccggagccactgccgg

SEQ ID NO: 1515722 - DNA, 25 bp, Homo sapien
ttcctgaagctcatcgacgagggca

SEQ ID NO: 1515723 - DNA, 25 bp, Homo sapien
gggcttgaccactaccaagtggcct

SEQ ID NO: 1515724 - DNA, 25 bp, Homo sapien
cagggcttgaccactaccaagtggc

SEQ ID NO: 1515725 - DNA, 25 bp, Homo sapien
cccagggcttgaccactaccaagtg

SEQ ID NO: 1515726 - DNA, 25 bp, Homo sapien
ggcttgaccactaccaagtggcctc

SEQ ID NO: 1515727 - DNA, 25 bp, Homo sapien
tgtgagttagtgagtgcatacctgg

SEQ ID NO: 1515728 - DNA, 25 bp, Homo sapien
catattttagatgccttaggaggcc

SEQ ID NO: 1515729 - DNA, 25 bp, Homo sapien
catacctggatgagttagtgagtta

SEQ ID NO: 1515730 - DNA, 25 bp, Homo sapien
gttagtgtatacctgaatggatgag

SEQ ID NO: 1515731 - DNA, 25 bp, Homo sapien
cttagcggcgcccaacctggggtag

SEQ ID NO: 1515732 - DNA, 25 bp, Homo sapien
gtagccggcgaacggcgccttctga

SEQ ID NO: 1515733 - DNA, 25 bp, Homo sapien
caggtagccggcgaacggcgccttc

SEQ ID NO: 1515734 - DNA, 25 bp, Homo sapien
gagcaagcgcgtgcgcacaaggcat

SEQ ID NO: 1515735 - DNA, 25 bp, Homo sapien
gccttctgagcaagcgcgtgcgcac

SEQ ID NO: 1515736 - DNA, 25 bp, Homo sapien
ctggaacaaaggattatgggaaatg

SEQ ID NO: 1515737 - DNA, 25 bp, Homo sapien
gaggcgcgccagtctatatccgcgg

SEQ ID NO: 1515738 - DNA, 25 bp, Homo sapien
ctaacgtgcaaaaaagaggccgttg

SEQ ID NO: 1515739 - DNA, 25 bp, Homo sapien
gaaatgtagtttctcctaacgtgca

SEQ ID NO: 1515740 - DNA, 25 bp, Homo sapien
tcccgcagtaccggctgcgggcgat

SEQ ID NO: 1515741 - DNA, 25 bp, Homo sapien
agtgggtcccgcagtaccggctgcg

SEQ ID NO: 1515742 - DNA, 25 bp, Homo sapien
gtgggtcccgcagtaccggctgcgg

SEQ ID NO: 1515743 - DNA, 25 bp, Homo sapien
cgcagtaccggctgcgggcgattcc

SEQ ID NO: 1515744 - DNA, 25 bp, Homo sapien
caacagggatccagccaagacagcc

SEQ ID NO: 1515745 - DNA, 25 bp, Homo sapien
ctcgtggggcccaacagggatccag

SEQ ID NO: 1515746 - DNA, 25 bp, Homo sapien
actcgtggggcccaacagggatcca

SEQ ID NO: 1515747 - DNA, 25 bp, Homo sapien
gggcccaacagggatccagccaaga

SEQ ID NO: 1515748 - DNA, 25 bp, Homo sapien
ctgcgtgggtagagggacggcgaga

SEQ ID NO: 1515749 - DNA, 25 bp, Homo sapien
tcagacggggcgctgggtgaccttg

SEQ ID NO: 1515750 - DNA, 25 bp, Homo sapien
gagggacggcgagaaaggtcagacg

SEQ ID NO: 1515751 - DNA, 25 bp, Homo sapien
tgaccttggcgctcaacctctctga

SEQ ID NO: 1515752 - DNA, 25 bp, Homo sapien
cccaggcgtctgggaaccccagcca

SEQ ID NO: 1515753 - DNA, 25 bp, Homo sapien
aggcgtctgggaaccccagccaggc

SEQ ID NO: 1515754 - DNA, 25 bp, Homo sapien
tggggaggccccaggcgtctgggaa

SEQ ID NO: 1515755 - DNA, 25 bp, Homo sapien
gccccaggcgtctgggaaccccagc

SEQ ID NO: 1515756 - DNA, 25 bp, Homo sapien
tcggctgatactcattcccgcgagc

SEQ ID NO: 1515757 - DNA, 25 bp, Homo sapien
ggacccagccgtgcttgttcttgcg

SEQ ID NO: 1515758 - DNA, 25 bp, Homo sapien
ccggacccagccgtgcttgttcttg

SEQ ID NO: 1515759 - DNA, 25 bp, Homo sapien
tgttcttgcgtttgatgttgctcgg

SEQ ID NO: 1515760 - DNA, 25 bp, Homo sapien
ggctcagcgacttgcggcccttgag

SEQ ID NO: 1515761 - DNA, 25 bp, Homo sapien
cgacttgcggcccttgagcattcgg

SEQ ID NO: 1515762 - DNA, 25 bp, Homo sapien
ccttgagcattcggcgaaggatgac

SEQ ID NO: 1515763 - DNA, 25 bp, Homo sapien
caatggctcagcgacttgcggccct

SEQ ID NO: 1515764 - DNA, 25 bp, Homo sapien
cagcttcaaaagaactcaggatggg

SEQ ID NO: 1515765 - DNA, 25 bp, Homo sapien
caatatggagagcactcaggtccga

SEQ ID NO: 1515766 - DNA, 25 bp, Homo sapien
gcctaaaaagggacttggcaagctc

SEQ ID NO: 1515767 - DNA, 25 bp, Homo sapien
tgttgcgcaggttcgaaatgcttcc

SEQ ID NO: 1515768 - DNA, 25 bp, Homo sapien
tattacacgtttaataatatttcaa

SEQ ID NO: 1515769 - DNA, 25 bp, Homo sapien
caaaattattgataattcttttgga

SEQ ID NO: 1515770 - DNA, 25 bp, Homo sapien
ttattacacgtttaataatatttca

SEQ ID NO: 1515771 - DNA, 25 bp, Homo sapien
attattgataattcttttggatgtg

SEQ ID NO: 1515772 - DNA, 25 bp, Homo sapien
ccgccttcttagccgccgcctcaca

SEQ ID NO: 1515773 - DNA, 25 bp, Homo sapien
agagccgccttcttagccgccgcct

SEQ ID NO: 1515774 - DNA, 25 bp, Homo sapien
gccgccttcttagccgccgcctcac

SEQ ID NO: 1515775 - DNA, 25 bp, Homo sapien
accagagccgccttcttagccgccg

SEQ ID NO: 1515776 - DNA, 25 bp, Homo sapien
agggcgcagtgtgaggtgcaaggca

SEQ ID NO: 1515777 - DNA, 25 bp, Homo sapien
ctcgagggcgcagtgtgaggtgcaa

SEQ ID NO: 1515778 - DNA, 25 bp, Homo sapien
agggtgcctcgagggcgcagtgtga

SEQ ID NO: 1515779 - DNA, 25 bp, Homo sapien
tgcaggacagggtgcctcgagggcg

SEQ ID NO: 1515780 - DNA, 25 bp, Homo sapien
gaggctttgcacacggagtccgcgt

SEQ ID NO: 1515781 - DNA, 25 bp, Homo sapien
gttgtagacaggcagtcctttcaaa

SEQ ID NO: 1515782 - DNA, 25 bp, Homo sapien
gcgtgaaatcgactaaaattgcttt

SEQ ID NO: 1515783 - DNA, 25 bp, Homo sapien
cggagtccgcgtgaaatcgactaaa

SEQ ID NO: 1515784 - DNA, 25 bp, Homo sapien
gcaggtagactgagggccgtcggtt

SEQ ID NO: 1515785 - DNA, 25 bp, Homo sapien
tctgttcagacgggtactcgcgggt

SEQ ID NO: 1515786 - DNA, 25 bp, Homo sapien
ggtactcgcgggtaggcaggtagac

SEQ ID NO: 1515787 - DNA, 25 bp, Homo sapien
tactcgcgggtaggcaggtagactg

SEQ ID NO: 1515788 - DNA, 25 bp, Homo sapien
tggaactcagtacccccaactccag

SEQ ID NO: 1515789 - DNA, 25 bp, Homo sapien
ggaaagatagagaaagtcgcagacg

SEQ ID NO: 1515790 - DNA, 25 bp, Homo sapien
aaagatagagaaagtcgcagacgcc

SEQ ID NO: 1515791 - DNA, 25 bp, Homo sapien
gatagagaaagtcgcagacgcctcc

SEQ ID NO: 1515792 - DNA, 25 bp, Homo sapien
caggtagcgcaggaggatgtttgtc

SEQ ID NO: 1515793 - DNA, 25 bp, Homo sapien
ggtagcgcaggaggatgtttgtctt

SEQ ID NO: 1515794 - DNA, 25 bp, Homo sapien
tgcaggtagcgcaggaggatgtttg

SEQ ID NO: 1515795 - DNA, 25 bp, Homo sapien
cattgctgatgcaggtagcgcagga

SEQ ID NO: 1515796 - DNA, 25 bp, Homo sapien
gatgactcttcgctgcaactacacc

SEQ ID NO: 1515797 - DNA, 25 bp, Homo sapien
aggcgggagatgactcttcgctgca

SEQ ID NO: 1515798 - DNA, 25 bp, Homo sapien
tcgctgcaactacaccctcttattt

SEQ ID NO: 1515799 - DNA, 25 bp, Homo sapien
gaagaaaaatatcccgtgtgcagag

SEQ ID NO: 1515800 - DNA, 25 bp, Homo sapien
aggtgcggagctctcgccttccagc

SEQ ID NO: 1515801 - DNA, 25 bp, Homo sapien
cctggtctctcttcttggcagcgtt

SEQ ID NO: 1515802 - DNA, 25 bp, Homo sapien
taagtgtcctcgtgcatgtctgggc

SEQ ID NO: 1515803 - DNA, 25 bp, Homo sapien
tgggctgtcggtccgcgccaccttg

SEQ ID NO: 1515804 - DNA, 25 bp, Homo sapien
ggtgggcgaccgaggagcagacctg

SEQ ID NO: 1515805 - DNA, 25 bp, Homo sapien
gtgggcgaccgaggagcagacctgg

SEQ ID NO: 1515806 - DNA, 25 bp, Homo sapien
ctcaagagaaagatcccaagggccg

SEQ ID NO: 1515807 - DNA, 25 bp, Homo sapien
gaccgagtctcaatggcctggaccg

SEQ ID NO: 1515808 - DNA, 25 bp, Homo sapien
tcacactactgggtctgatgtcccc

SEQ ID NO: 1515809 - DNA, 25 bp, Homo sapien
cgaagcgtgggacaagaccgagtct

SEQ ID NO: 1515810 - DNA, 25 bp, Homo sapien
tattggggtggacacggagcacgca

SEQ ID NO: 1515811 - DNA, 25 bp, Homo sapien
ttttattggggtggacacggagcac

SEQ ID NO: 1515812 - DNA, 25 bp, Homo sapien
tttattggggtggacacggagcacg

SEQ ID NO: 1515813 - DNA, 25 bp, Homo sapien
ttattggggtggacacggagcacgc

SEQ ID NO: 1515814 - DNA, 25 bp, Homo sapien
tctcaaagaggacagcgcggtggtt

SEQ ID NO: 1515815 - DNA, 25 bp, Homo sapien
tatgactcaggaacaggaacgtggc

SEQ ID NO: 1515816 - DNA, 25 bp, Homo sapien
tatatttcaacagtgcccgaggtca

SEQ ID NO: 1515817 - DNA, 25 bp, Homo sapien
tccaaaggcttaaggctcagagacc

SEQ ID NO: 1515818 - DNA, 25 bp, Homo sapien
tctcacattccaaacagcgtctcca

SEQ ID NO: 1515819 - DNA, 25 bp, Homo sapien
gaaactcggaataaagcgctgatgg

SEQ ID NO: 1515820 - DNA, 25 bp, Homo sapien
ccaggacagcactgaaactcggaat

SEQ ID NO: 1515821 - DNA, 25 bp, Homo sapien
cactgaaactcggaataaagcgctg

SEQ ID NO: 1515822 - DNA, 25 bp, Homo sapien
taaagcgctgatggtggaattccag

SEQ ID NO: 1515823 - DNA, 25 bp, Homo sapien
cggtcagtctctggctccccgaaag

SEQ ID NO: 1515824 - DNA, 25 bp, Homo sapien
tctgccgttccctcggcttcggatg

SEQ ID NO: 1515825 - DNA, 25 bp, Homo sapien
gctttttccggaactctccagattc

SEQ ID NO: 1515826 - DNA, 25 bp, Homo sapien
gacaaactcgtcttcaaggcctagc

SEQ ID NO: 1515827 - DNA, 25 bp, Homo sapien
tctttacgttcaggttcagaccgga

SEQ ID NO: 1515828 - DNA, 25 bp, Homo sapien
cagccttaggcgtggcaaggaccta

SEQ ID NO: 1515829 - DNA, 25 bp, Homo sapien
gaaactcagagcatctcggtgaccg

SEQ ID NO: 1515830 - DNA, 25 bp, Homo sapien
gagggacgagtactggagaacccac

SEQ ID NO: 1515831 - DNA, 25 bp, Homo sapien
taggtgtagcgaaatgttgttcccc

SEQ ID NO: 1515832 - DNA, 25 bp, Homo sapien
tccccgggcaacatgagaccaaatt

SEQ ID NO: 1515833 - DNA, 25 bp, Homo sapien
gcagcgaggctgacaataggaataa

SEQ ID NO: 1515834 - DNA, 25 bp, Homo sapien
tgaagatactcgcttccattggctg

SEQ ID NO: 1515835 - DNA, 25 bp, Homo sapien
gtatcttaggatacgtcctgcccac

SEQ ID NO: 1515836 - DNA, 25 bp, Homo sapien
taaagtgctcaactattctcgacca

SEQ ID NO: 1515837 - DNA, 25 bp, Homo sapien
cccactccgcggcttgactagtaaa

SEQ ID NO: 1515838 - DNA, 25 bp, Homo sapien
aactattctcgaccaccattgggta

SEQ ID NO: 1515839 - DNA, 25 bp, Homo sapien
tacaacctgcgacccgcctgcccga

SEQ ID NO: 1515840 - DNA, 25 bp, Homo sapien
tttacaacctgcgacccgcctgccc

SEQ ID NO: 1515841 - DNA, 25 bp, Homo sapien
ggatttacaacctgcgacccgcctg

SEQ ID NO: 1515842 - DNA, 25 bp, Homo sapien
gatttacaacctgcgacccgcctgc

SEQ ID NO: 1515843 - DNA, 25 bp, Homo sapien
ccgcttgggccgccagggtccaaag

SEQ ID NO: 1515844 - DNA, 25 bp, Homo sapien
gccagggtccaaagcccccgccaca

SEQ ID NO: 1515845 - DNA, 25 bp, Homo sapien
gcttgggccgccagggtccaaagcc

SEQ ID NO: 1515846 - DNA, 25 bp, Homo sapien
ccagggtccaaagcccccgccacat

SEQ ID NO: 1515847 - DNA, 25 bp, Homo sapien
tctgccgcagggaattgggccccta

SEQ ID NO: 1515848 - DNA, 25 bp, Homo sapien
gaagaacgcgaatgattgctctgcc

SEQ ID NO: 1515849 - DNA, 25 bp, Homo sapien
gaacgattgaggcacggaagaacgc

SEQ ID NO: 1515850 - DNA, 25 bp, Homo sapien
cgaatgattgctctgccgcagggaa

SEQ ID NO: 1515851 - DNA, 25 bp, Homo sapien
atatgggctctgccgcaagggtcat

SEQ ID NO: 1515852 - DNA, 25 bp, Homo sapien
gatatgggctctgccgcaagggtca

SEQ ID NO: 1515853 - DNA, 25 bp, Homo sapien
tgggggatgcacaaattggatgttc

SEQ ID NO: 1515854 - DNA, 25 bp, Homo sapien
caaattggatgttctgaaggccgaa

SEQ ID NO: 1515855 - DNA, 25 bp, Homo sapien
tctgaaggccgaagggtgaccggat

SEQ ID NO: 1515856 - DNA, 25 bp, Homo sapien
atgttctgaaggccgaagggtgacc

SEQ ID NO: 1515857 - DNA, 25 bp, Homo sapien
gaggctcagcctcagtgtcaagtag

SEQ ID NO: 1515858 - DNA, 25 bp, Homo sapien
accgagggctcgatgatcgcgagat

SEQ ID NO: 1515859 - DNA, 25 bp, Homo sapien
caagtagaccgagggctcgatgatc

SEQ ID NO: 1515860 - DNA, 25 bp, Homo sapien
tcagtgtcaagtagaccgagggctc

SEQ ID NO: 1515861 - DNA, 25 bp, Homo sapien
ggaaccggaggggaggcgaatcagc

SEQ ID NO: 1515862 - DNA, 25 bp, Homo sapien
ccggaggggaggcgaatcagcgcac

SEQ ID NO: 1515863 - DNA, 25 bp, Homo sapien
ctggaaccggaggggaggcgaatca

SEQ ID NO: 1515864 - DNA, 25 bp, Homo sapien
aaccggaggggaggcgaatcagcgc

SEQ ID NO: 1515865 - DNA, 25 bp, Homo sapien
agcttagcgcgaagatggtggcgcc

SEQ ID NO: 1515866 - DNA, 25 bp, Homo sapien
gccgctggtccggatcactgcgatg

SEQ ID NO: 1515867 - DNA, 25 bp, Homo sapien
ggaaccagagcaccagtgcgcggtc

SEQ ID NO: 1515868 - DNA, 25 bp, Homo sapien
tgagaattcggagggcgtggccgct

SEQ ID NO: 1515869 - DNA, 25 bp, Homo sapien
acagacaggtgacaggaggacagca

SEQ ID NO: 1515870 - DNA, 25 bp, Homo sapien
taatgtgacagacaggtgacaggag

SEQ ID NO: 1515871 - DNA, 25 bp, Homo sapien
acaggtgacaggaggacagcacagc

SEQ ID NO: 1515872 - DNA, 25 bp, Homo sapien
ctaatgtgacagacaggtgacagga

SEQ ID NO: 1515873 - DNA, 25 bp, Homo sapien
actgccgggcctccatgcacgtgga

SEQ ID NO: 1515874 - DNA, 25 bp, Homo sapien
gggcctccatgcacgtggaactcca

SEQ ID NO: 1515875 - DNA, 25 bp, Homo sapien
tcctcaccggtgaaactctggggac

SEQ ID NO: 1515876 - DNA, 25 bp, Homo sapien
catgcacgtggaactccacgcagtc

SEQ ID NO: 1515877 - DNA, 25 bp, Homo sapien
ccaaggcctgcaggacgccgctcac

SEQ ID NO: 1515878 - DNA, 25 bp, Homo sapien
ttcggtcaggttcagcttcccattg

SEQ ID NO: 1515879 - DNA, 25 bp, Homo sapien
aacgcccgtctggtgaactcgcctg

SEQ ID NO: 1515880 - DNA, 25 bp, Homo sapien
tttccgcgtggataaggtccgccag

SEQ ID NO: 1515881 - DNA, 25 bp, Homo sapien
ttcccattggcgaacgcccgtctgg

SEQ ID NO: 1515882 - DNA, 25 bp, Homo sapien
tctcatgcaggggttgcacagatgg

SEQ ID NO: 1515883 - DNA, 25 bp, Homo sapien
gcagggaatgaatgcgggattgaga

SEQ ID NO: 1515884 - DNA, 25 bp, Homo sapien
gattgagagggggtctcatgcaggg

SEQ ID NO: 1515885 - DNA, 25 bp, Homo sapien
cagggaatgaatgcgggattgagag

SEQ ID NO: 1515886 - DNA, 25 bp, Homo sapien
cacacccaatttgtccagcccgact

SEQ ID NO: 1515887 - DNA, 25 bp, Homo sapien
tggcggctcataggccggaagcttt

SEQ ID NO: 1515888 - DNA, 25 bp, Homo sapien
ccaatttgtccagcccgacttcagg

SEQ ID NO: 1515889 - DNA, 25 bp, Homo sapien
ccagaatggcggctcataggccgga

SEQ ID NO: 1515890 - DNA, 25 bp, Homo sapien
cctcgccgaaatcgatataggcctc

SEQ ID NO: 1515891 - DNA, 25 bp, Homo sapien
gccgaaatcgatataggcctccacg

SEQ ID NO: 1515892 - DNA, 25 bp, Homo sapien
tcgccgaaatcgatataggcctcca

SEQ ID NO: 1515893 - DNA, 25 bp, Homo sapien
gaaatcgatataggcctccacgtgg

SEQ ID NO: 1515894 - DNA, 25 bp, Homo sapien
ttgagggctgatatgaggtgtcttc

SEQ ID NO: 1515895 - DNA, 25 bp, Homo sapien
cctttgagggctgatatgaggtgtc

SEQ ID NO: 1515896 - DNA, 25 bp, Homo sapien
ggctgatatgaggtgtcttcctccc

SEQ ID NO: 1515897 - DNA, 25 bp, Homo sapien
agggctgatatgaggtgtcttcctc

SEQ ID NO: 1515898 - DNA, 25 bp, Homo sapien
cgcgcctggcatctcgtagatgtgc

SEQ ID NO: 1515899 - DNA, 25 bp, Homo sapien
acgtgcacccctgagcggagcctct

SEQ ID NO: 1515900 - DNA, 25 bp, Homo sapien
tgcagtgcccgtacttcgatgtcgg

SEQ ID NO: 1515901 - DNA, 25 bp, Homo sapien
catctcgtagatgtgcacccagggc

SEQ ID NO: 1515902 - DNA, 25 bp, Homo sapien
gcaggttcactaggctgctcttgcc

SEQ ID NO: 1515903 - DNA, 25 bp, Homo sapien
gttcactaggctgctcttgcccgca

SEQ ID NO: 1515904 - DNA, 25 bp, Homo sapien
tgagcaggttcactaggctgctctt

SEQ ID NO: 1515905 - DNA, 25 bp, Homo sapien
ctaggctgctcttgcccgcattggg

SEQ ID NO: 1515906 - DNA, 25 bp, Homo sapien
aatccggccaggtcgactggggtct

SEQ ID NO: 1515907 - DNA, 25 bp, Homo sapien
tcccgcaacccagccgtgtcgctca

SEQ ID NO: 1515908 - DNA, 25 bp, Homo sapien
ggtctccagcacgtcacgggtggtc

SEQ ID NO: 1515909 - DNA, 25 bp, Homo sapien
agcacgtcacgggtggtccctggct

SEQ ID NO: 1515910 - DNA, 25 bp, Homo sapien
caggttgagcaattgaaggcactgg

SEQ ID NO: 1515911 - DNA, 25 bp, Homo sapien
ctgcgggagcaaggtcaactgagcg

SEQ ID NO: 1515912 - DNA, 25 bp, Homo sapien
atcccaggttgagcaattgaaggca

SEQ ID NO: 1515913 - DNA, 25 bp, Homo sapien
caactgagcggggatcccaggttga

SEQ ID NO: 1515914 - DNA, 25 bp, Homo sapien
gcatggccagaatgaggtcagcctg

SEQ ID NO: 1515915 - DNA, 25 bp, Homo sapien
cagaatgaggtcagcctgctctagc

SEQ ID NO: 1515916 - DNA, 25 bp, Homo sapien
gagaggccaggtcagaagcatccag

SEQ ID NO: 1515917 - DNA, 25 bp, Homo sapien
ccagcatggccagaatgaggtcagc

SEQ ID NO: 1515918 - DNA, 25 bp, Homo sapien
cagaggctacgacggtggccaggaa

SEQ ID NO: 1515919 - DNA, 25 bp, Homo sapien
ttgttcagcaccaggaggaggcgct

SEQ ID NO: 1515920 - DNA, 25 bp, Homo sapien
ctcccacagaggctacgacggtggc

SEQ ID NO: 1515921 - DNA, 25 bp, Homo sapien
tacgacggtggccaggaagttgcaa

SEQ ID NO: 1515922 - DNA, 25 bp, Homo sapien
ggcaggtcaggaccgggacctgggc

SEQ ID NO: 1515923 - DNA, 25 bp, Homo sapien
cctctcccgtcagacaggacagcag

SEQ ID NO: 1515924 - DNA, 25 bp, Homo sapien
gcaggtcaggaccgggacctgggcc

SEQ ID NO: 1515925 - DNA, 25 bp, Homo sapien
cccctctcccgtcagacaggacagc

SEQ ID NO: 1515926 - DNA, 25 bp, Homo sapien
ttttgactgcttgtagtggccgagg

SEQ ID NO: 1515927 - DNA, 25 bp, Homo sapien
cctgtgagccgggtcaggtgacccc

SEQ ID NO: 1515928 - DNA, 25 bp, Homo sapien
gccaggtcttttgactgcttgtagt

SEQ ID NO: 1515929 - DNA, 25 bp, Homo sapien
cttgtagtggccgagggcatccagg

SEQ ID NO: 1515930 - DNA, 25 bp, Homo sapien
caggcgaatgagaatcccaattggc

SEQ ID NO: 1515931 - DNA, 25 bp, Homo sapien
ccagcatcaagggtcgaacgggacc

SEQ ID NO: 1515932 - DNA, 25 bp, Homo sapien
gaatcaagttctttcccaggcgaat

SEQ ID NO: 1515933 - DNA, 25 bp, Homo sapien
cagctgtgttgcttcactatttgag

SEQ ID NO: 1515934 - DNA, 25 bp, Homo sapien
ttaagccatgacaaccacagaaggg

SEQ ID NO: 1515935 - DNA, 25 bp, Homo sapien
tacacaagacaaacatatttgaaag

SEQ ID NO: 1515936 - DNA, 25 bp, Homo sapien
atgatacacaagacaaacatatttg

SEQ ID NO: 1515937 - DNA, 25 bp, Homo sapien
aagccatgacaaccacagaagggct

SEQ ID NO: 1515938 - DNA, 25 bp, Homo sapien
gtcagaaactctgcgggcctcctta

SEQ ID NO: 1515939 - DNA, 25 bp, Homo sapien
tgccaccaggtgaatgcggaaggcc

SEQ ID NO: 1515940 - DNA, 25 bp, Homo sapien
gatcctgattctcttcgagactcag

SEQ ID NO: 1515941 - DNA, 25 bp, Homo sapien
agttaaccattcacatgccaccagg

SEQ ID NO: 1515942 - DNA, 25 bp, Homo sapien
agggaaggcaggcggggccccagca

SEQ ID NO: 1515943 - DNA, 25 bp, Homo sapien
aaaaggattgtagccaaggacctca

SEQ ID NO: 1515944 - DNA, 25 bp, Homo sapien
tcttggaaaaaaaggattgtagcca

SEQ ID NO: 1515945 - DNA, 25 bp, Homo sapien
aggattgtagccaaggacctcaggc

SEQ ID NO: 1515946 - DNA, 25 bp, Homo sapien
ccgcaggaagcgctcagctggggct

SEQ ID NO: 1515947 - DNA, 25 bp, Homo sapien
tcaccgcaggaagcgctcagctggg

SEQ ID NO: 1515948 - DNA, 25 bp, Homo sapien
accgcaggaagcgctcagctggggc

SEQ ID NO: 1515949 - DNA, 25 bp, Homo sapien
caccgcaggaagcgctcagctgggg

SEQ ID NO: 1515950 - DNA, 25 bp, Homo sapien
ggcaccaacatcacatgcacgcatg

SEQ ID NO: 1515951 - DNA, 25 bp, Homo sapien
acacgggccaaggtacccacaggat

SEQ ID NO: 1515952 - DNA, 25 bp, Homo sapien
agaacaggaagccattcacctccgc

SEQ ID NO: 1515953 - DNA, 25 bp, Homo sapien
gacaacgacacctatagatatggca

SEQ ID NO: 1515954 - DNA, 25 bp, Homo sapien
agacgcggcgatggcatcacacaga

SEQ ID NO: 1515955 - DNA, 25 bp, Homo sapien
catattaatgtcacacagacgcggc

SEQ ID NO: 1515956 - DNA, 25 bp, Homo sapien
gtcgacgtcacacatattaatgtca

SEQ ID NO: 1515957 - DNA, 25 bp, Homo sapien
tcacacagacggtgatgatgtcaca

SEQ ID NO: 1515958 - DNA, 25 bp, Homo sapien
ggaacttggcatgacgtcacaccga

SEQ ID NO: 1515959 - DNA, 25 bp, Homo sapien
ggcgctgacgtcacatatcaccgtg

SEQ ID NO: 1515960 - DNA, 25 bp, Homo sapien
tagacgtcacgaagagatatagcga

SEQ ID NO: 1515961 - DNA, 25 bp, Homo sapien
tatagcgatggcgtcgtgcagatgc

SEQ ID NO: 1515962 - DNA, 25 bp, Homo sapien
tcctggggaggttcaacacatgagc

SEQ ID NO: 1515963 - DNA, 25 bp, Homo sapien
gaggttcaacacatgagcgtctcat

SEQ ID NO: 1515964 - DNA, 25 bp, Homo sapien
cacatgagcgtctcatggagaggct

SEQ ID NO: 1515965 - DNA, 25 bp, Homo sapien
cgtctcatggagaggctgaacccga

SEQ ID NO: 1515966 - DNA, 25 bp, Homo sapien
gatttaggatggatactgtgatgac

SEQ ID NO: 1515967 - DNA, 25 bp, Homo sapien
ggtagagtttggaattaggaatgac

SEQ ID NO: 1515968 - DNA, 25 bp, Homo sapien
ggctgtccgccctacagatggttat

SEQ ID NO: 1515969 - DNA, 25 bp, Homo sapien
tattggcattaggattagggtagag

SEQ ID NO: 1515970 - DNA, 25 bp, Homo sapien
caccagggtgctcgatctgggtcca

SEQ ID NO: 1515971 - DNA, 25 bp, Homo sapien
caagagctgcgatggtgagtgctaa

SEQ ID NO: 1515972 - DNA, 25 bp, Homo sapien
cgggcaggtcatctacacgaacaat

SEQ ID NO: 1515973 - DNA, 25 bp, Homo sapien
gaacaatcagaggtacatggctgcc

SEQ ID NO: 1515974 - DNA, 25 bp, Homo sapien
cagaatctcactatgctgctgaggc

SEQ ID NO: 1515975 - DNA, 25 bp, Homo sapien
tgacctggtgccctggctaactttt

SEQ ID NO: 1515976 - DNA, 25 bp, Homo sapien
ttttaaactgtaagtatattccatg

SEQ ID NO: 1515977 - DNA, 25 bp, Homo sapien
tccatgcaatatttgagatataatt

SEQ ID NO: 1515978 - DNA, 25 bp, Homo sapien
ccccaaactcttattcattctgcag

SEQ ID NO: 1515979 - DNA, 25 bp, Homo sapien
actcttattcattctgcagtaccca

SEQ ID NO: 1515980 - DNA, 25 bp, Homo sapien
tctgcagtacccagctctgggaacc

SEQ ID NO: 1515981 - DNA, 25 bp, Homo sapien
cacacctggcccgattccccaaact

SEQ ID NO: 1515982 - DNA, 25 bp, Homo sapien
agtcgggttgacccagggctgtctc

SEQ ID NO: 1515983 - DNA, 25 bp, Homo sapien
ggacaatgagtcccccctcttgtct

SEQ ID NO: 1515984 - DNA, 25 bp, Homo sapien
agagcctccctccggacaatgagtc

SEQ ID NO: 1515985 - DNA, 25 bp, Homo sapien
gcctccctccggacaatgagtcccc

SEQ ID NO: 1515986 - DNA, 25 bp, Homo sapien
ctcctttctgggaaactgaaactga

SEQ ID NO: 1515987 - DNA, 25 bp, Homo sapien
tcctttctgggaaactgaaactgaa

SEQ ID NO: 1515988 - DNA, 25 bp, Homo sapien
tggcacggcctaggcactcagtaac

SEQ ID NO: 1515989 - DNA, 25 bp, Homo sapien
tgcctcttcaggtcatagtacagat

SEQ ID NO: 1515990 - DNA, 25 bp, Homo sapien
tggagaccggaccaacagtgatggc

SEQ ID NO: 1515991 - DNA, 25 bp, Homo sapien
tacagatgaatacaggctggcacgg

SEQ ID NO: 1515992 - DNA, 25 bp, Homo sapien
tcctgcaggtgccaagacagagacc

SEQ ID NO: 1515993 - DNA, 25 bp, Homo sapien
ggtcggtctcccagttttcagctgg

SEQ ID NO: 1515994 - DNA, 25 bp, Homo sapien
ctggaagtaggagcttgtttcctgc

SEQ ID NO: 1515995 - DNA, 25 bp, Homo sapien
acagagaccgacattgtttgttggc

SEQ ID NO: 1515996 - DNA, 25 bp, Homo sapien
gctgcaaaatttagagaggacatca

SEQ ID NO: 1515997 - DNA, 25 bp, Homo sapien
atcaatgctaagagaggaaattcat

SEQ ID NO: 1515998 - DNA, 25 bp, Homo sapien
acaaactttcggtttgcagggctgg

SEQ ID NO: 1515999 - DNA, 25 bp, Homo sapien
ggcctccaatgtgcaattcatgcaa

SEQ ID NO: 1516000 - DNA, 25 bp, Homo sapien
tgagccacacaacactgaagttcct

SEQ ID NO: 1516001 - DNA, 25 bp, Homo sapien
ggctgttgcttcctgattgtgttaa

SEQ ID NO: 1516002 - DNA, 25 bp, Homo sapien
tgaagttcctttcccgaatgcatgg

SEQ ID NO: 1516003 - DNA, 25 bp, Homo sapien
ggtctggagactgagccacacaaca

SEQ ID NO: 1516004 - DNA, 25 bp, Homo sapien
ttgttgctcacactagtcttgatct

SEQ ID NO: 1516005 - DNA, 25 bp, Homo sapien
tttgttgctcacactagtcttgatc

SEQ ID NO: 1516006 - DNA, 25 bp, Homo sapien
tgttgctcacactagtcttgatctt

SEQ ID NO: 1516007 - DNA, 25 bp, Homo sapien
agcccacgctggagtgcaatggtgc

SEQ ID NO: 1516008 - DNA, 25 bp, Homo sapien
tttttccttttgagacagagtcttg

SEQ ID NO: 1516009 - DNA, 25 bp, Homo sapien
agagtcttgttctgtagcccacgct

SEQ ID NO: 1516010 - DNA, 25 bp, Homo sapien
gacaggtgaattctgaattcttttt

SEQ ID NO: 1516011 - DNA, 25 bp, Homo sapien
tgctgcctaagaacgaggtcctcct

SEQ ID NO: 1516012 - DNA, 25 bp, Homo sapien
cagatggcgttcgtcaggctttccc

SEQ ID NO: 1516013 - DNA, 25 bp, Homo sapien
tgttgattgaccatggacccaggga

SEQ ID NO: 1516014 - DNA, 25 bp, Homo sapien
ggaaatatctgcagtgggttaagga

SEQ ID NO: 1516015 - DNA, 25 bp, Homo sapien
caattcatgagcctcaattcctggg

SEQ ID NO: 1516016 - DNA, 25 bp, Homo sapien
tatatattgatgatctaaagtcgac

SEQ ID NO: 1516017 - DNA, 25 bp, Homo sapien
cgactagaggtcgtctgttccagtt

SEQ ID NO: 1516018 - DNA, 25 bp, Homo sapien
tacaacccatctacacaaaatggag

SEQ ID NO: 1516019 - DNA, 25 bp, Homo sapien
gaaatgctacggcacaggaccaaga

SEQ ID NO: 1516020 - DNA, 25 bp, Homo sapien
gaaatcatctgtgggatacgcagct

SEQ ID NO: 1516021 - DNA, 25 bp, Homo sapien
gattgcccggaagcgcagtatacgc

SEQ ID NO: 1516022 - DNA, 25 bp, Homo sapien
taaagagcgagtactatggaccatc

SEQ ID NO: 1516023 - DNA, 25 bp, Homo sapien
cgagccgagcgccgaaggcggggtc

SEQ ID NO: 1516024 - DNA, 25 bp, Homo sapien
gcgagccgagcgccgaaggcggggt

SEQ ID NO: 1516025 - DNA, 25 bp, Homo sapien
tgcgagccgagcgccgaaggcgggg

SEQ ID NO: 1516026 - DNA, 25 bp, Homo sapien
gagccgagcgccgaaggcggggtcg

SEQ ID NO: 1516027 - DNA, 25 bp, Homo sapien
cggcgggggtgcagaggccgacgac

SEQ ID NO: 1516028 - DNA, 25 bp, Homo sapien
ggccagccagcggcgccgagtctgt

SEQ ID NO: 1516029 - DNA, 25 bp, Homo sapien
gctgaacccccgcggcgggggtgca

SEQ ID NO: 1516030 - DNA, 25 bp, Homo sapien
gcgggggtgcagaggccgacgacca

SEQ ID NO: 1516031 - DNA, 25 bp, Homo sapien
gtgccccctcgacggtgcaggagat

SEQ ID NO: 1516032 - DNA, 25 bp, Homo sapien
gctcttgccaaagctggcgggtgcc

SEQ ID NO: 1516033 - DNA, 25 bp, Homo sapien
gagaactaaggcacaggaagtagcc

SEQ ID NO: 1516034 - DNA, 25 bp, Homo sapien
tagccagatttctgcgcgaagctct

SEQ ID NO: 1516035 - DNA, 25 bp, Homo sapien
tgggcagaccctggtggttccgaag

SEQ ID NO: 1516036 - DNA, 25 bp, Homo sapien
tggttccgaaggtgggcacctctta

SEQ ID NO: 1516037 - DNA, 25 bp, Homo sapien
gacacggcgagggtggctagcagcg

SEQ ID NO: 1516038 - DNA, 25 bp, Homo sapien
gcacctggcatagggcaccgtgaat

SEQ ID NO: 1516039 - DNA, 25 bp, Homo sapien
gggggctcttgtccaccacgatctg

SEQ ID NO: 1516040 - DNA, 25 bp, Homo sapien
cgatctggatatcggccaccacgtt

SEQ ID NO: 1516041 - DNA, 25 bp, Homo sapien
tccaccacgatctggatatcggcca

SEQ ID NO: 1516042 - DNA, 25 bp, Homo sapien
accacgatctggatatcggccacca

SEQ ID NO: 1516043 - DNA, 25 bp, Homo sapien
gcttggctatggtgtaaaaagacac

SEQ ID NO: 1516044 - DNA, 25 bp, Homo sapien
caggtggcgtggactgaacacttaa

SEQ ID NO: 1516045 - DNA, 25 bp, Homo sapien
gacacaagtagcacaacagtagtga

SEQ ID NO: 1516046 - DNA, 25 bp, Homo sapien
ttaactcgaggatgcaggctgtgcc

SEQ ID NO: 1516047 - DNA, 25 bp, Homo sapien
aaaaaggtttgccaactctagtatg

SEQ ID NO: 1516048 - DNA, 25 bp, Homo sapien
tgacatctgacggaggacggagaat

SEQ ID NO: 1516049 - DNA, 25 bp, Homo sapien
ctgcactagggttgtgggcccagaa

SEQ ID NO: 1516050 - DNA, 25 bp, Homo sapien
atgaatgaatatagcctgagtcaaa

SEQ ID NO: 1516051 - DNA, 25 bp, Homo sapien
caccaagcctaaggcctggtttcat

SEQ ID NO: 1516052 - DNA, 25 bp, Homo sapien
catacagctgatgtgttaagagtga

SEQ ID NO: 1516053 - DNA, 25 bp, Homo sapien
accacaccaagcctaaggcctggtt

SEQ ID NO: 1516054 - DNA, 25 bp, Homo sapien
tacagctgatgtgttaagagtgatt

SEQ ID NO: 1516055 - DNA, 25 bp, Homo sapien
gaatcggacagagctgggtgcccat

SEQ ID NO: 1516056 - DNA, 25 bp, Homo sapien
taggaaccgctggagtaggctgatc

SEQ ID NO: 1516057 - DNA, 25 bp, Homo sapien
tatagaggttggacaactagcaccc

SEQ ID NO: 1516058 - DNA, 25 bp, Homo sapien
gatgactctaggatgaggctcgcca

SEQ ID NO: 1516059 - DNA, 25 bp, Homo sapien
cagcttcacacacatgcgtttcttc

SEQ ID NO: 1516060 - DNA, 25 bp, Homo sapien
tgtcttggtcttcccactcagccgg

SEQ ID NO: 1516061 - DNA, 25 bp, Homo sapien
tattcgaaggtatccaggcactgtc

SEQ ID NO: 1516062 - DNA, 25 bp, Homo sapien
tcagccggacatcaaacacagccgt

SEQ ID NO: 1516063 - DNA, 25 bp, Homo sapien
tggctagacactggggggtggccct

SEQ ID NO: 1516064 - DNA, 25 bp, Homo sapien
ggctagacactggggggtggcccta

SEQ ID NO: 1516065 - DNA, 25 bp, Homo sapien
gctagacactggggggtggccctac

SEQ ID NO: 1516066 - DNA, 25 bp, Homo sapien
acacccgaagcaccacaccaaacta

SEQ ID NO: 1516067 - DNA, 25 bp, Homo sapien
atcttgacccacacccgaagcacca

SEQ ID NO: 1516068 - DNA, 25 bp, Homo sapien
caccaaactaatactgctgggttca

SEQ ID NO: 1516069 - DNA, 25 bp, Homo sapien
caaatcaccgttctgtctactttat

SEQ ID NO: 1516070 - DNA, 25 bp, Homo sapien
gagaggccctgcatgtcccggctga

SEQ ID NO: 1516071 - DNA, 25 bp, Homo sapien
ccagatggcaaagccgcccatgtcc

SEQ ID NO: 1516072 - DNA, 25 bp, Homo sapien
tgcatgtcccggctgagacctcggg

SEQ ID NO: 1516073 - DNA, 25 bp, Homo sapien
cagagagaggccctgcatgtcccgg

SEQ ID NO: 1516074 - DNA, 25 bp, Homo sapien
tggatgcccgagagcccagccttga

SEQ ID NO: 1516075 - DNA, 25 bp, Homo sapien
tgagatgccatagaggctggaggcc

SEQ ID NO: 1516076 - DNA, 25 bp, Homo sapien
ctggaggcctcgtagatggagtcat

SEQ ID NO: 1516077 - DNA, 25 bp, Homo sapien
attcctccgcagagtggatgcccga

SEQ ID NO: 1516078 - DNA, 25 bp, Homo sapien
agctcttgccctcaaatcgtgggtg

SEQ ID NO: 1516079 - DNA, 25 bp, Homo sapien
tcttgccctcaaatcgtgggtggag

SEQ ID NO: 1516080 - DNA, 25 bp, Homo sapien
gctgcagctcttgccctcaaatcgt

SEQ ID NO: 1516081 - DNA, 25 bp, Homo sapien
ccctcaaatcgtgggtggagtgtga

SEQ ID NO: 1516082 - DNA, 25 bp, Homo sapien
cttgatggtcaggtccccaaaagca

SEQ ID NO: 1516083 - DNA, 25 bp, Homo sapien
ctcaatgtccgccagagacttgatg

SEQ ID NO: 1516084 - DNA, 25 bp, Homo sapien
gagacttgatggtcaggtccccaaa

SEQ ID NO: 1516085 - DNA, 25 bp, Homo sapien
cgccagagacttgatggtcaggtcc

SEQ ID NO: 1516086 - DNA, 25 bp, Homo sapien
ttctccaccacgaagccgtagttat

SEQ ID NO: 1516087 - DNA, 25 bp, Homo sapien
cttctccaccacgaagccgtagtta

SEQ ID NO: 1516088 - DNA, 25 bp, Homo sapien
tctccaccacgaagccgtagttata

SEQ ID NO: 1516089 - DNA, 25 bp, Homo sapien
tcttctccaccacgaagccgtagtt

SEQ ID NO: 1516090 - DNA, 25 bp, Homo sapien
gctctttccgcggaagggtgaggga

SEQ ID NO: 1516091 - DNA, 25 bp, Homo sapien
aggatgcagtgagtgggggtggccc

SEQ ID NO: 1516092 - DNA, 25 bp, Homo sapien
caggatgcagtgagtgggggtggcc

SEQ ID NO: 1516093 - DNA, 25 bp, Homo sapien
ccagtggctgaagatagcaaacgcc

SEQ ID NO: 1516094 - DNA, 25 bp, Homo sapien
accccagagggttttgacacaaatg

SEQ ID NO: 1516095 - DNA, 25 bp, Homo sapien
caaacgccttgcagggcgaaggttc

SEQ ID NO: 1516096 - DNA, 25 bp, Homo sapien
aaatgacttaaaggcactggcttct

SEQ ID NO: 1516097 - DNA, 25 bp, Homo sapien
aagtatgacagccttagttcttctt

SEQ ID NO: 1516098 - DNA, 25 bp, Homo sapien
agtatgacagccttagttcttcttt

SEQ ID NO: 1516099 - DNA, 25 bp, Homo sapien
tatgacagccttagttcttcttttt

SEQ ID NO: 1516100 - DNA, 25 bp, Homo sapien
ccaagtatgacagccttagttcttc

SEQ ID NO: 1516101 - DNA, 25 bp, Homo sapien
gctgaaccgggcagatcacttgaag

SEQ ID NO: 1516102 - DNA, 25 bp, Homo sapien
cagatcacttgaagtcgggagttca

SEQ ID NO: 1516103 - DNA, 25 bp, Homo sapien
gtcatggccaggcgctgtggctcac

SEQ ID NO: 1516104 - DNA, 25 bp, Homo sapien
acctgtaatcccaacactttgggag

SEQ ID NO: 1516105 - DNA, 25 bp, Homo sapien
tatctcagccagaatcaggtgaggc

SEQ ID NO: 1516106 - DNA, 25 bp, Homo sapien
gttccaacttgggaggcccggctga

SEQ ID NO: 1516107 - DNA, 25 bp, Homo sapien
tggcgtgcggctttcagagtgttcc

SEQ ID NO: 1516108 - DNA, 25 bp, Homo sapien
tccaggcacctgatatgggtttggc

SEQ ID NO: 1516109 - DNA, 25 bp, Homo sapien
tgatcctcctgactcagcatccaga

SEQ ID NO: 1516110 - DNA, 25 bp, Homo sapien
gagatggtgttttgctatattgccc

SEQ ID NO: 1516111 - DNA, 25 bp, Homo sapien
gtagctgggactgcaggcatgcacc

SEQ ID NO: 1516112 - DNA, 25 bp, Homo sapien
accacacctggttaatctttgtatt

SEQ ID NO: 1516113 - DNA, 25 bp, Homo sapien
taggcagtgattctctaagtgtctc

SEQ ID NO: 1516114 - DNA, 25 bp, Homo sapien
cagaacagagcgaaatggccatacc

SEQ ID NO: 1516115 - DNA, 25 bp, Homo sapien
gaaatgtggctgtccagatggatga

SEQ ID NO: 1516116 - DNA, 25 bp, Homo sapien
tgtcctcaaggttgcctcgtggcac

SEQ ID NO: 1516117 - DNA, 25 bp, Homo sapien
gagagaatcacttgggtataaagag

SEQ ID NO: 1516118 - DNA, 25 bp, Homo sapien
aaaaaaggctattatgaggaaggag

SEQ ID NO: 1516119 - DNA, 25 bp, Homo sapien
aaaaggctattatgaggaaggagga

SEQ ID NO: 1516120 - DNA, 25 bp, Homo sapien
tcacttgggtataaagagtttgaga

SEQ ID NO: 1516121 - DNA, 25 bp, Homo sapien
cagccatccgtatctgggcagtgag

SEQ ID NO: 1516122 - DNA, 25 bp, Homo sapien
ccttggactgtatggtggaactctc

SEQ ID NO: 1516123 - DNA, 25 bp, Homo sapien
tactattattccagccaacatgcag

SEQ ID NO: 1516124 - DNA, 25 bp, Homo sapien
tctgtaaatcataccaggttgccct

SEQ ID NO: 1516125 - DNA, 25 bp, Homo sapien
actgctgtggcgcatctgtgaaatg

SEQ ID NO: 1516126 - DNA, 25 bp, Homo sapien
ccctggtgctgcctgatgcttcatg

SEQ ID NO: 1516127 - DNA, 25 bp, Homo sapien
tgggtgcattgagtctgggcgtggt

SEQ ID NO: 1516128 - DNA, 25 bp, Homo sapien
ttggaaaattgacccagctcaggac

SEQ ID NO: 1516129 - DNA, 25 bp, Homo sapien
tctaactagagtgaatgagcagccc

SEQ ID NO: 1516130 - DNA, 25 bp, Homo sapien
ccccagggagcttagagccgagtga

SEQ ID NO: 1516131 - DNA, 25 bp, Homo sapien
cagcccctgtgtgccagtccatata

SEQ ID NO: 1516132 - DNA, 25 bp, Homo sapien
ccgagtgagaggaacagatgcaaaa

SEQ ID NO: 1516133 - DNA, 25 bp, Homo sapien
ggagatgtggtttcattatatgttg

SEQ ID NO: 1516134 - DNA, 25 bp, Homo sapien
caccgcgcccagtccccccattttg

SEQ ID NO: 1516135 - DNA, 25 bp, Homo sapien
tagtggagatgtggtttcattatat

SEQ ID NO: 1516136 - DNA, 25 bp, Homo sapien
gtggagatgtggtttcattatatgt

SEQ ID NO: 1516137 - DNA, 25 bp, Homo sapien
cctggacccttcttgggtgcgctgt

SEQ ID NO: 1516138 - DNA, 25 bp, Homo sapien
tgtgcctactgtgcgggcttctgct

SEQ ID NO: 1516139 - DNA, 25 bp, Homo sapien
gctgcaagccgtgccttcagtctcc

SEQ ID NO: 1516140 - DNA, 25 bp, Homo sapien
tcttgggtgcgctgtgcctactgtg

SEQ ID NO: 1516141 - DNA, 25 bp, Homo sapien
gcagagagagctgaggccgcgggcc

SEQ ID NO: 1516142 - DNA, 25 bp, Homo sapien
gagagagctgaggccgcgggccgct

SEQ ID NO: 1516143 - DNA, 25 bp, Homo sapien
aagcagagagagctgaggccgcggg

SEQ ID NO: 1516144 - DNA, 25 bp, Homo sapien
agagagagctgaggccgcgggccgc

SEQ ID NO: 1516145 - DNA, 25 bp, Homo sapien
tcgcctcgcggtcttgcagacgatg

SEQ ID NO: 1516146 - DNA, 25 bp, Homo sapien
agcagccacaacagcgccagcgaga

SEQ ID NO: 1516147 - DNA, 25 bp, Homo sapien
aagaggtctcgcctcgcggtcttgc

SEQ ID NO: 1516148 - DNA, 25 bp, Homo sapien
agacgatgcgcaggaagcgccagcc

SEQ ID NO: 1516149 - DNA, 25 bp, Homo sapien
gacagcaaatccagtacaaagacac

SEQ ID NO: 1516150 - DNA, 25 bp, Homo sapien
tttacaacagaaaactgggcagcct

SEQ ID NO: 1516151 - DNA, 25 bp, Homo sapien
gagggatgacctatacaatggattg

SEQ ID NO: 1516152 - DNA, 25 bp, Homo sapien
tcattgtagcttccaaagtgcagaa

SEQ ID NO: 1516153 - DNA, 25 bp, Homo sapien
ggggacagcgtcactggtgccctgc

SEQ ID NO: 1516154 - DNA, 25 bp, Homo sapien
aggggacagcgtcactggtgccctg

SEQ ID NO: 1516155 - DNA, 25 bp, Homo sapien
gaggggacagcgtcactggtgccct

SEQ ID NO: 1516156 - DNA, 25 bp, Homo sapien
tgcactaccgcctgaaagatgcgcg

SEQ ID NO: 1516157 - DNA, 25 bp, Homo sapien
agctccaggcgcacgcggatcagca

SEQ ID NO: 1516158 - DNA, 25 bp, Homo sapien
gtaggcgtccagctgcgcaaaggtc

SEQ ID NO: 1516159 - DNA, 25 bp, Homo sapien
agaggttggctaccgcattggagta

SEQ ID NO: 1516160 - DNA, 25 bp, Homo sapien
agcgcggcctccatgcccgccttgg

SEQ ID NO: 1516161 - DNA, 25 bp, Homo sapien
ggctcgcgccgcaggttcacgttga

SEQ ID NO: 1516162 - DNA, 25 bp, Homo sapien
atcagggccttagcgcccgaggtgc

SEQ ID NO: 1516163 - DNA, 25 bp, Homo sapien
cctccaaagatcagggccttagcgc

SEQ ID NO: 1516164 - DNA, 25 bp, Homo sapien
aacacatgggtcatggtcaccgccg

SEQ ID NO: 1516165 - DNA, 25 bp, Homo sapien
atgggtcatggtcaccgccggacag

SEQ ID NO: 1516166 - DNA, 25 bp, Homo sapien
ctgtggtccccaacacatgggtcat

SEQ ID NO: 1516167 - DNA, 25 bp, Homo sapien
ggcatacccagaccgtgcacctcat

SEQ ID NO: 1516168 - DNA, 25 bp, Homo sapien
agatgcccgctcacttcggccaccg

SEQ ID NO: 1516169 - DNA, 25 bp, Homo sapien
ggtccaggaggtgggtgtccggcaa

SEQ ID NO: 1516170 - DNA, 25 bp, Homo sapien
ggaggtgggtgtccggcaagatgcc

SEQ ID NO: 1516171 - DNA, 25 bp, Homo sapien
gtgtccggcaagatgccctcgggcc

SEQ ID NO: 1516172 - DNA, 25 bp, Homo sapien
ctgcaggagatacaggtgttagggg

SEQ ID NO: 1516173 - DNA, 25 bp, Homo sapien
ggtggggcctgagcattggggggtg

SEQ ID NO: 1516174 - DNA, 25 bp, Homo sapien
gagcattggggggtggggcctggaa

SEQ ID NO: 1516175 - DNA, 25 bp, Homo sapien
caggagatacaggtgttaggggtgg

SEQ ID NO: 1516176 - DNA, 25 bp, Homo sapien
cagcccggtggtccccgacgtgtag

SEQ ID NO: 1516177 - DNA, 25 bp, Homo sapien
tgtgcacgacaatggcagccttggg

SEQ ID NO: 1516178 - DNA, 25 bp, Homo sapien
cccgacgtgtagatgtagaaaagac

SEQ ID NO: 1516179 - DNA, 25 bp, Homo sapien
ctgctgtgcacgacaatggcagcct

SEQ ID NO: 1516180 - DNA, 25 bp, Homo sapien
tattctgagggtcacggtagatgca

SEQ ID NO: 1516181 - DNA, 25 bp, Homo sapien
tagctgctgacaggagctgggccat

SEQ ID NO: 1516182 - DNA, 25 bp, Homo sapien
tgatttaggattttcaaacctcctg

SEQ ID NO: 1516183 - DNA, 25 bp, Homo sapien
cacgcctagcccgagagagggtttt

SEQ ID NO: 1516184 - DNA, 25 bp, Homo sapien
agaggctgggacctaaatcccccag

SEQ ID NO: 1516185 - DNA, 25 bp, Homo sapien
ggcagaggctgggacctaaatcccc

SEQ ID NO: 1516186 - DNA, 25 bp, Homo sapien
aaatcccccagggtacaggcatggg

SEQ ID NO: 1516187 - DNA, 25 bp, Homo sapien
cctaaatcccccagggtacaggcat

SEQ ID NO: 1516188 - DNA, 25 bp, Homo sapien
gccgaaggctgccatgcggtagtac

SEQ ID NO: 1516189 - DNA, 25 bp, Homo sapien
gtggtggccgaaggctgccatgcgg

SEQ ID NO: 1516190 - DNA, 25 bp, Homo sapien
tcagccgcctgcatgcggtaggcgt

SEQ ID NO: 1516191 - DNA, 25 bp, Homo sapien
cagtcatagagcacgtcagccgcct

SEQ ID NO: 1516192 - DNA, 25 bp, Homo sapien
tacttgatgcagtcgtcccagaagc

SEQ ID NO: 1516193 - DNA, 25 bp, Homo sapien
aatttcttgcggaggacgactgtca

SEQ ID NO: 1516194 - DNA, 25 bp, Homo sapien
tcccagaagcggctggccgagaatt

SEQ ID NO: 1516195 - DNA, 25 bp, Homo sapien
tcagcccatagatgagacactgccc

SEQ ID NO: 1516196 - DNA, 25 bp, Homo sapien
aacatgcagattagtaattttccca

SEQ ID NO: 1516197 - DNA, 25 bp, Homo sapien
ccttgtggtataccccaagatgctc

SEQ ID NO: 1516198 - DNA, 25 bp, Homo sapien
agcacagctgtggaccttgtggtat

SEQ ID NO: 1516199 - DNA, 25 bp, Homo sapien
catgcagattagtaattttcccaag

SEQ ID NO: 1516200 - DNA, 25 bp, Homo sapien
acagaattgagccactgcccagatt

SEQ ID NO: 1516201 - DNA, 25 bp, Homo sapien
tgtgaatgccaccaaattactgact

SEQ ID NO: 1516202 - DNA, 25 bp, Homo sapien
cacaaaaggcgacagtgtctgactc

SEQ ID NO: 1516203 - DNA, 25 bp, Homo sapien
tgcccagattcctgatgacactgag

SEQ ID NO: 1516204 - DNA, 25 bp, Homo sapien
tatgagcggaacagcctaaggatga

SEQ ID NO: 1516205 - DNA, 25 bp, Homo sapien
cccagagtgggaataaaacagttgc

SEQ ID NO: 1516206 - DNA, 25 bp, Homo sapien
tggagataccacatccctgtctgag

SEQ ID NO: 1516207 - DNA, 25 bp, Homo sapien
tgtgcctggccggatgcaacttcta

SEQ ID NO: 1516208 - DNA, 25 bp, Homo sapien
tcccagatggcaggacgcagcccgt

SEQ ID NO: 1516209 - DNA, 25 bp, Homo sapien
ttggcgtacgccgaagcgctccgtg

SEQ ID NO: 1516210 - DNA, 25 bp, Homo sapien
tcggtggcgccgtagaactccccga

SEQ ID NO: 1516211 - DNA, 25 bp, Homo sapien
aatgctgcagttgcactcggtggcg

SEQ ID NO: 1516212 - DNA, 25 bp, Homo sapien
gccccggggccctgccggtgtgcac

SEQ ID NO: 1516213 - DNA, 25 bp, Homo sapien
tgccccggggccctgccggtgtgca

SEQ ID NO: 1516214 - DNA, 25 bp, Homo sapien
ctgccccggggccctgccggtgtgc

SEQ ID NO: 1516215 - DNA, 25 bp, Homo sapien
cagcgtctgggaagtctagtctagc

SEQ ID NO: 1516216 - DNA, 25 bp, Homo sapien
gacagtggtcttccctgaactccga

SEQ ID NO: 1516217 - DNA, 25 bp, Homo sapien
gctacagtgagcaaaagtgccctgg

SEQ ID NO: 1516218 - DNA, 25 bp, Homo sapien
aataacagcacggtacacagagccc

SEQ ID NO: 1516219 - DNA, 25 bp, Homo sapien
ctgcccgccgccctgcttggcatgg

SEQ ID NO: 1516220 - DNA, 25 bp, Homo sapien
tggttctatgaacagaaatgcttct

SEQ ID NO: 1516221 - DNA, 25 bp, Homo sapien
aaatgcttctccaacatgtttgagc

SEQ ID NO: 1516222 - DNA, 25 bp, Homo sapien
gcttggcatggttctatgaacagaa

SEQ ID NO: 1516223 - DNA, 25 bp, Homo sapien
gctccattgtgtcctcattgacctt

SEQ ID NO: 1516224 - DNA, 25 bp, Homo sapien
ccttcaccagccggatggggtacac

SEQ ID NO: 1516225 - DNA, 25 bp, Homo sapien
ggctgttgaaaccacaggagccgac

SEQ ID NO: 1516226 - DNA, 25 bp, Homo sapien
tgcggctgttgaaaccacaggagcc

SEQ ID NO: 1516227 - DNA, 25 bp, Homo sapien
tgttggttgatctgacccacaagga

SEQ ID NO: 1516228 - DNA, 25 bp, Homo sapien
ggcgctgtcgcccttgctgaagacg

SEQ ID NO: 1516229 - DNA, 25 bp, Homo sapien
atctgacccacaaggaggccaggct

SEQ ID NO: 1516230 - DNA, 25 bp, Homo sapien
tggtggcgctctcgctgacatagcc

SEQ ID NO: 1516231 - DNA, 25 bp, Homo sapien
tagacggccacgtctgtctggccca

SEQ ID NO: 1516232 - DNA, 25 bp, Homo sapien
ttctcccctcgccagcggaaggtgt

SEQ ID NO: 1516233 - DNA, 25 bp, Homo sapien
cagctcatccatcactagcacgtca

SEQ ID NO: 1516234 - DNA, 25 bp, Homo sapien
tacggtcccggaagtacatgtagcc

SEQ ID NO: 1516235 - DNA, 25 bp, Homo sapien
catgcctcaggaccaccccctgcaa

SEQ ID NO: 1516236 - DNA, 25 bp, Homo sapien
atgcctcaggaccaccccctgcaac

SEQ ID NO: 1516237 - DNA, 25 bp, Homo sapien
ctaagccccttttggctgagctccc

SEQ ID NO: 1516238 - DNA, 25 bp, Homo sapien
taagccccttttggctgagctccct

SEQ ID NO: 1516239 - DNA, 25 bp, Homo sapien
gccccttttggctgagctccctcag

SEQ ID NO: 1516240 - DNA, 25 bp, Homo sapien
ccttttggctgagctccctcaggac

SEQ ID NO: 1516241 - DNA, 25 bp, Homo sapien
ggaccagatacactgtcaagcagta

SEQ ID NO: 1516242 - DNA, 25 bp, Homo sapien
aagcagtagcccctggtctgtaatc

SEQ ID NO: 1516243 - DNA, 25 bp, Homo sapien
cctggtctgtaatctccagtctctc

SEQ ID NO: 1516244 - DNA, 25 bp, Homo sapien
accagcaggaccagatacactgtca

SEQ ID NO: 1516245 - DNA, 25 bp, Homo sapien
gctgtgggggtctgcgacggccgcc

SEQ ID NO: 1516246 - DNA, 25 bp, Homo sapien
tgtgggggtctgcgacggccgccat

SEQ ID NO: 1516247 - DNA, 25 bp, Homo sapien
tggtatatcgcgttggggtccagca

SEQ ID NO: 1516248 - DNA, 25 bp, Homo sapien
ctggtatatcgcgttggggtccagc

SEQ ID NO: 1516249 - DNA, 25 bp, Homo sapien
tgggccgggcatagggtgccagcac

SEQ ID NO: 1516250 - DNA, 25 bp, Homo sapien
agatgggccgggcatagggtgccag

SEQ ID NO: 1516251 - DNA, 25 bp, Homo sapien
gccgggcatagggtgccagcacctt

SEQ ID NO: 1516252 - DNA, 25 bp, Homo sapien
cgggcatagggtgccagcaccttct

SEQ ID NO: 1516253 - DNA, 25 bp, Homo sapien
gaatagcaatcgaggctgtatggcc

SEQ ID NO: 1516254 - DNA, 25 bp, Homo sapien
tgcttttgcacaagaatagcagtgt

SEQ ID NO: 1516255 - DNA, 25 bp, Homo sapien
tgttgaatagcaatcgaggctgtat

SEQ ID NO: 1516256 - DNA, 25 bp, Homo sapien
caagaatagcagtgttgaatagcaa

SEQ ID NO: 1516257 - DNA, 25 bp, Homo sapien
tcatttaagggcaggtagtggccct

SEQ ID NO: 1516258 - DNA, 25 bp, Homo sapien
cgcccgagcagatgcgagtgtagac

SEQ ID NO: 1516259 - DNA, 25 bp, Homo sapien
aagaagagccggtctgaggtctggc

SEQ ID NO: 1516260 - DNA, 25 bp, Homo sapien
ggtctggcgtgggtcaaagccctct

SEQ ID NO: 1516261 - DNA, 25 bp, Homo sapien
agagtttgtggccagtagaggaaca

SEQ ID NO: 1516262 - DNA, 25 bp, Homo sapien
gcgctgtctggctcaagctggcctc

SEQ ID NO: 1516263 - DNA, 25 bp, Homo sapien
cccagagtttgtggccagtagagga

SEQ ID NO: 1516264 - DNA, 25 bp, Homo sapien
tgggcagcgctgtctggctcaagct

SEQ ID NO: 1516265 - DNA, 25 bp, Homo sapien
tccagtttctcagtccaggatgggc

SEQ ID NO: 1516266 - DNA, 25 bp, Homo sapien
caagtggtcacagtcaattccggaa

SEQ ID NO: 1516267 - DNA, 25 bp, Homo sapien
aaagttcacatgagacgccacggtg

SEQ ID NO: 1516268 - DNA, 25 bp, Homo sapien
gatgttcgagatgagccaccagcga

SEQ ID NO: 1516269 - DNA, 25 bp, Homo sapien
ggtcaactcatctttggcaacggtg

SEQ ID NO: 1516270 - DNA, 25 bp, Homo sapien
cggtgccaggactattcaaaaagaa

SEQ ID NO: 1516271 - DNA, 25 bp, Homo sapien
taagatggcagtactccacaaattg

SEQ ID NO: 1516272 - DNA, 25 bp, Homo sapien
ccacaaattggtctacggatgcaat

SEQ ID NO: 1516273 - DNA, 25 bp, Homo sapien
ggaggaagcgctccctacggccgtc

SEQ ID NO: 1516274 - DNA, 25 bp, Homo sapien
aagcgctccctacggccgtcgctag

SEQ ID NO: 1516275 - DNA, 25 bp, Homo sapien
gaagcgctccctacggccgtcgcta

SEQ ID NO: 1516276 - DNA, 25 bp, Homo sapien
gggaggaggaagcgctccctacggc

SEQ ID NO: 1516277 - DNA, 25 bp, Homo sapien
ctcctgggaactcgagaacaccgag

SEQ ID NO: 1516278 - DNA, 25 bp, Homo sapien
gggaactcgagaacaccgagatgag

SEQ ID NO: 1516279 - DNA, 25 bp, Homo sapien
aactcgagaacaccgagatgaggcc

SEQ ID NO: 1516280 - DNA, 25 bp, Homo sapien
ctcgagaacaccgagatgaggcccg

SEQ ID NO: 1516281 - DNA, 25 bp, Homo sapien
gtagctcgcgggctagcatcgagac

SEQ ID NO: 1516282 - DNA, 25 bp, Homo sapien
cccgacaggccgagcgcgaaacggg

SEQ ID NO: 1516283 - DNA, 25 bp, Homo sapien
ggctagcatcgagacgaggctcccg

SEQ ID NO: 1516284 - DNA, 25 bp, Homo sapien
ctgccaggcagcatgctgcgcgctg

SEQ ID NO: 1516285 - DNA, 25 bp, Homo sapien
gcacgaggcgctcgtcgcagaagcc

SEQ ID NO: 1516286 - DNA, 25 bp, Homo sapien
gaagcccagcgtccagcgcgctaag

SEQ ID NO: 1516287 - DNA, 25 bp, Homo sapien
ccggtagaggccgtacgtgctctcg

SEQ ID NO: 1516288 - DNA, 25 bp, Homo sapien
ctctcggcgtgatcgaagggcacga

SEQ ID NO: 1516289 - DNA, 25 bp, Homo sapien
tggctgtggccctctcggcgtgatc

SEQ ID NO: 1516290 - DNA, 25 bp, Homo sapien
gtggcccccgtagccgaggtgcaga

SEQ ID NO: 1516291 - DNA, 25 bp, Homo sapien
acagtgggcgcggccctttcggcat

SEQ ID NO: 1516292 - DNA, 25 bp, Homo sapien
tagccggggtgtaggcggtggctgt

SEQ ID NO: 1516293 - DNA, 25 bp, Homo sapien
gggcgtgaccatctcggcatgaccc

SEQ ID NO: 1516294 - DNA, 25 bp, Homo sapien
cagtggcccccgtagccgagggcaa

SEQ ID NO: 1516295 - DNA, 25 bp, Homo sapien
aggcagtgggcgtgaccatctcggc

SEQ ID NO: 1516296 - DNA, 25 bp, Homo sapien
gcggcccccgtagtcgaggtgcagg

SEQ ID NO: 1516297 - DNA, 25 bp, Homo sapien
ggaagacggactgcaagtagaccat

SEQ ID NO: 1516298 - DNA, 25 bp, Homo sapien
gtagaccatttctagccctgcctag

SEQ ID NO: 1516299 - DNA, 25 bp, Homo sapien
tatgggcatcgtttgacatgggcca

SEQ ID NO: 1516300 - DNA, 25 bp, Homo sapien
tctgcctggccaccggatgaagcag

SEQ ID NO: 1516301 - DNA, 25 bp, Homo sapien
agagccatcagagcggcaaagctgc

SEQ ID NO: 1516302 - DNA, 25 bp, Homo sapien
agccatcagagcggcaaagctgccc

SEQ ID NO: 1516303 - DNA, 25 bp, Homo sapien
gcagagccatcagagcggcaaagct

SEQ ID NO: 1516304 - DNA, 25 bp, Homo sapien
ccatcagagcggcaaagctgcccag

SEQ ID NO: 1516305 - DNA, 25 bp, Homo sapien
gagcgcgctcctctgattctataga

SEQ ID NO: 1516306 - DNA, 25 bp, Homo sapien
gcgcgctcctctgattctatagaat

SEQ ID NO: 1516307 - DNA, 25 bp, Homo sapien
tcctctgattctatagaatcctgag

SEQ ID NO: 1516308 - DNA, 25 bp, Homo sapien
aagagcgcgctcctctgattctata

SEQ ID NO: 1516309 - DNA, 25 bp, Homo sapien
gggtgtcccttgacgctgccagact

SEQ ID NO: 1516310 - DNA, 25 bp, Homo sapien
taacatctcataggctgtggtacgg

SEQ ID NO: 1516311 - DNA, 25 bp, Homo sapien
tatgcaaagagaagacggcacaccc

SEQ ID NO: 1516312 - DNA, 25 bp, Homo sapien
gaattgatgcatataaagcgttcag

SEQ ID NO: 1516313 - DNA, 25 bp, Homo sapien
aatgtgtacccaactacgaagtcag

SEQ ID NO: 1516314 - DNA, 25 bp, Homo sapien
atctcggttcactgatcatgcctca

SEQ ID NO: 1516315 - DNA, 25 bp, Homo sapien
tggctgcccctctggtcactagatg

SEQ ID NO: 1516316 - DNA, 25 bp, Homo sapien
aggcaggatcacaccctggctgccc

SEQ ID NO: 1516317 - DNA, 25 bp, Homo sapien
aggtgagccacgaagtaaacgcagg

SEQ ID NO: 1516318 - DNA, 25 bp, Homo sapien
gctgaggcaatgctaaggtgagcca

SEQ ID NO: 1516319 - DNA, 25 bp, Homo sapien
gagatggcgtccatgtctcggtgcc

SEQ ID NO: 1516320 - DNA, 25 bp, Homo sapien
tccatagttggaaagaccactctgc

SEQ ID NO: 1516321 - DNA, 25 bp, Homo sapien
ccctcctaaggctgcctgggaaact

SEQ ID NO: 1516322 - DNA, 25 bp, Homo sapien
ctgcctgggaaactcatatacatcc

SEQ ID NO: 1516323 - DNA, 25 bp, Homo sapien
cagcacctgtggctagcgcacagta

SEQ ID NO: 1516324 - DNA, 25 bp, Homo sapien
gaaactcatatacatccctcaggcc

SEQ ID NO: 1516325 - DNA, 25 bp, Homo sapien
ccagggagtttatgacagtaccgtc

SEQ ID NO: 1516326 - DNA, 25 bp, Homo sapien
gggacaatgtcaccaacagtaacgt

SEQ ID NO: 1516327 - DNA, 25 bp, Homo sapien
ccctcctgggtgaatcgggatcatg

SEQ ID NO: 1516328 - DNA, 25 bp, Homo sapien
caaggtccttcggttggtgagtgac

SEQ ID NO: 1516329 - DNA, 25 bp, Homo sapien
gcttcttggcgtagtcctcagccgc

SEQ ID NO: 1516330 - DNA, 25 bp, Homo sapien
tctcagcttcttggcgtagtcctca

SEQ ID NO: 1516331 - DNA, 25 bp, Homo sapien
tccacaggcagctcggggttaatgg

SEQ ID NO: 1516332 - DNA, 25 bp, Homo sapien
aatggtgatcacctggctttctggg

SEQ ID NO: 1516333 - DNA, 25 bp, Homo sapien
tggccgcttcgtggatgtgactccc

SEQ ID NO: 1516334 - DNA, 25 bp, Homo sapien
tggtgacaatcagaaggccgctctg

SEQ ID NO: 1516335 - DNA, 25 bp, Homo sapien
ctgctggtgacaatcagaaggccgc

SEQ ID NO: 1516336 - DNA, 25 bp, Homo sapien
gggtgtggccgcttcgtggatgtga

SEQ ID NO: 1516337 - DNA, 25 bp, Homo sapien
ggattcctcaaagggatctgccagt

SEQ ID NO: 1516338 - DNA, 25 bp, Homo sapien
ggggattcctcaaagggatctgcca

SEQ ID NO: 1516339 - DNA, 25 bp, Homo sapien
attcctcaaagggatctgccagtga

SEQ ID NO: 1516340 - DNA, 25 bp, Homo sapien
gcaacagaggccgagtggccttcag

SEQ ID NO: 1516341 - DNA, 25 bp, Homo sapien
cagaggacacagaaacagttgtcag

SEQ ID NO: 1516342 - DNA, 25 bp, Homo sapien
cacagaaacagttgtcagataaaaa

SEQ ID NO: 1516343 - DNA, 25 bp, Homo sapien
aaaaaatacaagtagctgtggctgg

SEQ ID NO: 1516344 - DNA, 25 bp, Homo sapien
atacaagtagctgtggctgggcatg

SEQ ID NO: 1516345 - DNA, 25 bp, Homo sapien
tcagcaggtcgaaaaccgggatgga

SEQ ID NO: 1516346 - DNA, 25 bp, Homo sapien
agcaggtgtgaccatcggggcccac

SEQ ID NO: 1516347 - DNA, 25 bp, Homo sapien
gatcagcaggtcgaaaaccgggatg

SEQ ID NO: 1516348 - DNA, 25 bp, Homo sapien
gtgagcaggtgtgaccatcggggcc

SEQ ID NO: 1516349 - DNA, 25 bp, Homo sapien
ttcagcttcttggacacttacacac

SEQ ID NO: 1516350 - DNA, 25 bp, Homo sapien
tcagcttcttggacacttacacaca

SEQ ID NO: 1516351 - DNA, 25 bp, Homo sapien
cagcttcttggacacttacacacac

SEQ ID NO: 1516352 - DNA, 25 bp, Homo sapien
acaggtagtgtgagggtcacacgct

SEQ ID NO: 1516353 - DNA, 25 bp, Homo sapien
ccacaaagatgacagttcgtgctgc

SEQ ID NO: 1516354 - DNA, 25 bp, Homo sapien
gtcacacgctgtggcggtggcttcg

SEQ ID NO: 1516355 - DNA, 25 bp, Homo sapien
cgtgctgcattcaggacaggtagtg

SEQ ID NO: 1516356 - DNA, 25 bp, Homo sapien
ccaggactagaaccctcagctgtta

SEQ ID NO: 1516357 - DNA, 25 bp, Homo sapien
agcacaataatgtctggggccattt

SEQ ID NO: 1516358 - DNA, 25 bp, Homo sapien
gaacttcccaggactagaaccctca

SEQ ID NO: 1516359 - DNA, 25 bp, Homo sapien
acctttcaacccaagaatgactgag

SEQ ID NO: 1516360 - DNA, 25 bp, Homo sapien
tggtcttttcaatgaaggcaactaa

SEQ ID NO: 1516361 - DNA, 25 bp, Homo sapien
gtcttttcaatgaaggcaactaaaa

SEQ ID NO: 1516362 - DNA, 25 bp, Homo sapien
tcttttcaatgaaggcaactaaaac

SEQ ID NO: 1516363 - DNA, 25 bp, Homo sapien
ggtcttttcaatgaaggcaactaaa

SEQ ID NO: 1516364 - DNA, 25 bp, Homo sapien
aaggtcaaggagtattattcatttg

SEQ ID NO: 1516365 - DNA, 25 bp, Homo sapien
acaaggtcaaggagtattattcatt

SEQ ID NO: 1516366 - DNA, 25 bp, Homo sapien
caaggtcaaggagtattattcattt

SEQ ID NO: 1516367 - DNA, 25 bp, Homo sapien
aggtcaaggagtattattcatttga

SEQ ID NO: 1516368 - DNA, 25 bp, Homo sapien
gtgtgatggcgtgatggtgcgatct

SEQ ID NO: 1516369 - DNA, 25 bp, Homo sapien
gaactctcgatcttatcccccaggc

SEQ ID NO: 1516370 - DNA, 25 bp, Homo sapien
gtgatggcgtgatggtgcgatcttg

SEQ ID NO: 1516371 - DNA, 25 bp, Homo sapien
tgtgatggcgtgatggtgcgatctt

SEQ ID NO: 1516372 - DNA, 25 bp, Homo sapien
caagaaccagcacagtttcccggtg

SEQ ID NO: 1516373 - DNA, 25 bp, Homo sapien
aaccagcacagtttcccggtgtggg

SEQ ID NO: 1516374 - DNA, 25 bp, Homo sapien
cggccgcctcgtccaagaaccagca

SEQ ID NO: 1516375 - DNA, 25 bp, Homo sapien
gaaccagcacagtttcccggtgtgg

SEQ ID NO: 1516376 - DNA, 25 bp, Homo sapien
aagtggaatgcttctcgaagggcac

SEQ ID NO: 1516377 - DNA, 25 bp, Homo sapien
agagcccggagagtggcggccagca

SEQ ID NO: 1516378 - DNA, 25 bp, Homo sapien
tgctggccggaggctgttggcttcc

SEQ ID NO: 1516379 - DNA, 25 bp, Homo sapien
gcagcacgacgtggctttttgaaag

SEQ ID NO: 1516380 - DNA, 25 bp, Homo sapien
atgggccgcgtgcctggtcccagct

SEQ ID NO: 1516381 - DNA, 25 bp, Homo sapien
tggcctgccgggacaagacgttgaa

SEQ ID NO: 1516382 - DNA, 25 bp, Homo sapien
gcctctgcgcaggtttcaattccca

SEQ ID NO: 1516383 - DNA, 25 bp, Homo sapien
actctcacatctgagtggcctgccg

SEQ ID NO: 1516384 - DNA, 25 bp, Homo sapien
tttctgtggtttcggctccactctc

SEQ ID NO: 1516385 - DNA, 25 bp, Homo sapien
gaccggccagcagtcgttgtgtatg

SEQ ID NO: 1516386 - DNA, 25 bp, Homo sapien
caggaccggccagcagtcgttgtgt

SEQ ID NO: 1516387 - DNA, 25 bp, Homo sapien
agaaagaaaatcatagctcgtcttg

SEQ ID NO: 1516388 - DNA, 25 bp, Homo sapien
aatcatagctcgtcttggaggaggg

SEQ ID NO: 1516389 - DNA, 25 bp, Homo sapien
gcctgcgttcctcggctcaggggca

SEQ ID NO: 1516390 - DNA, 25 bp, Homo sapien
accaccgcctgcgttcctcggctca

SEQ ID NO: 1516391 - DNA, 25 bp, Homo sapien
accgcctgcgttcctcggctcaggg

SEQ ID NO: 1516392 - DNA, 25 bp, Homo sapien
cacgaccaccgcctgcgttcctcgg

SEQ ID NO: 1516393 - DNA, 25 bp, Homo sapien
gctgctgcttgtccagagggctcga

SEQ ID NO: 1516394 - DNA, 25 bp, Homo sapien
gtccagagggctcgaaggccgccca

SEQ ID NO: 1516395 - DNA, 25 bp, Homo sapien
tgcttgtccagagggctcgaaggcc

SEQ ID NO: 1516396 - DNA, 25 bp, Homo sapien
tgctgcttgtccagagggctcgaag

SEQ ID NO: 1516397 - DNA, 25 bp, Homo sapien
ttccggtcggctcctgagggcccag

SEQ ID NO: 1516398 - DNA, 25 bp, Homo sapien
tttgctgcgtagcaactggcttccg

SEQ ID NO: 1516399 - DNA, 25 bp, Homo sapien
agctctcgagagatctgccgcagga

SEQ ID NO: 1516400 - DNA, 25 bp, Homo sapien
ccacggtagcaaggcaggaagttcc

SEQ ID NO: 1516401 - DNA, 25 bp, Homo sapien
tggctgaaccactctaggcggccgt

SEQ ID NO: 1516402 - DNA, 25 bp, Homo sapien
ggtcctcggtgctcacggactcggg

SEQ ID NO: 1516403 - DNA, 25 bp, Homo sapien
gccgtccccacgcagaacacagaag

SEQ ID NO: 1516404 - DNA, 25 bp, Homo sapien
aacacagaagatcggctgccaccgg

SEQ ID NO: 1516405 - DNA, 25 bp, Homo sapien
ggctgaagggatctatttgcctcag

SEQ ID NO: 1516406 - DNA, 25 bp, Homo sapien
ctgaagggatctatttgcctcagcc

SEQ ID NO: 1516407 - DNA, 25 bp, Homo sapien
tgggctgaagggatctatttgcctc

SEQ ID NO: 1516408 - DNA, 25 bp, Homo sapien
cgtgcctggccctaggttttgtatt

SEQ ID NO: 1516409 - DNA, 25 bp, Homo sapien
tgtgtcccaactataccatcaaggg

SEQ ID NO: 1516410 - DNA, 25 bp, Homo sapien
gtcccaactataccatcaagggaag

SEQ ID NO: 1516411 - DNA, 25 bp, Homo sapien
aactataccatcaagggaagatttc

SEQ ID NO: 1516412 - DNA, 25 bp, Homo sapien
gcttctgtgtcccaactataccatc

SEQ ID NO: 1516413 - DNA, 25 bp, Homo sapien
gttgagccaaggcagtggcccccgt

SEQ ID NO: 1516414 - DNA, 25 bp, Homo sapien
ccaaggcagtggcccccgttttcat

SEQ ID NO: 1516415 - DNA, 25 bp, Homo sapien
ctgttgagccaaggcagtggccccc

SEQ ID NO: 1516416 - DNA, 25 bp, Homo sapien
tgagccaaggcagtggcccccgttt

SEQ ID NO: 1516417 - DNA, 25 bp, Homo sapien
atccaaaaggcggagatattctcgc

SEQ ID NO: 1516418 - DNA, 25 bp, Homo sapien
aagtcaggagcgtgtatcctgtcag

SEQ ID NO: 1516419 - DNA, 25 bp, Homo sapien
gatattctcgctgggaagtcaggag

SEQ ID NO: 1516420 - DNA, 25 bp, Homo sapien
cggagatattctcgctgggaagtca

SEQ ID NO: 1516421 - DNA, 25 bp, Homo sapien
tgcttactgccctgctgtacacggg

SEQ ID NO: 1516422 - DNA, 25 bp, Homo sapien
ctggccccacatgttaatgatgctg

SEQ ID NO: 1516423 - DNA, 25 bp, Homo sapien
tagggatgctcacccgtagcaacgc

SEQ ID NO: 1516424 - DNA, 25 bp, Homo sapien
tcacccttgcaagagtgggtgtttg

SEQ ID NO: 1516425 - DNA, 25 bp, Homo sapien
tggcctcatgaggtctcctcctgac

SEQ ID NO: 1516426 - DNA, 25 bp, Homo sapien
caggctggcctcatgaggtctcctc

SEQ ID NO: 1516427 - DNA, 25 bp, Homo sapien
gctggcctcatgaggtctcctcctg

SEQ ID NO: 1516428 - DNA, 25 bp, Homo sapien
gtcaggctggcctcatgaggtctcc

SEQ ID NO: 1516429 - DNA, 25 bp, Homo sapien
gatcccttgggcccaggagttccag

SEQ ID NO: 1516430 - DNA, 25 bp, Homo sapien
cagcacctttggaggctgaagtggg

SEQ ID NO: 1516431 - DNA, 25 bp, Homo sapien
gaggatcccttgggcccaggagttc

SEQ ID NO: 1516432 - DNA, 25 bp, Homo sapien
gtgggaggatcccttgggcccagga

SEQ ID NO: 1516433 - DNA, 25 bp, Homo sapien
agaagcagaggtgccggcggaaggg

SEQ ID NO: 1516434 - DNA, 25 bp, Homo sapien
gccctgaagccggatgccaccctgc

SEQ ID NO: 1516435 - DNA, 25 bp, Homo sapien
gggaagctcacaggcacttccaaga

SEQ ID NO: 1516436 - DNA, 25 bp, Homo sapien
tgctgcaggaacagcgggaagctca

SEQ ID NO: 1516437 - DNA, 25 bp, Homo sapien
gtgcctgctggtagctcccctgcct

SEQ ID NO: 1516438 - DNA, 25 bp, Homo sapien
tgcctggctcccgatggcccgggga

SEQ ID NO: 1516439 - DNA, 25 bp, Homo sapien
ctgctggtagctcccctgcctggct

SEQ ID NO: 1516440 - DNA, 25 bp, Homo sapien
ctcagtgcctgctggtagctcccct

SEQ ID NO: 1516441 - DNA, 25 bp, Homo sapien
tcgtcgccaaagtggccttggtgct

SEQ ID NO: 1516442 - DNA, 25 bp, Homo sapien
tgccggtagagtcggacggcgtcca

SEQ ID NO: 1516443 - DNA, 25 bp, Homo sapien
ctcggcgtctgagcctagggtcacg

SEQ ID NO: 1516444 - DNA, 25 bp, Homo sapien
ggtcacgtcgtcgtcgccaaagtgg

SEQ ID NO: 1516445 - DNA, 25 bp, Homo sapien
gcagcgcgggaagttgctcccgcat

SEQ ID NO: 1516446 - DNA, 25 bp, Homo sapien
ctcgcagcgcgggaagttgctcccg

SEQ ID NO: 1516447 - DNA, 25 bp, Homo sapien
gtctgggctcgcagcgcgggaagtt

SEQ ID NO: 1516448 - DNA, 25 bp, Homo sapien
cgggaagttgctcccgcatcagcac

SEQ ID NO: 1516449 - DNA, 25 bp, Homo sapien
gacagctgcgtgaacggcgtctaga

SEQ ID NO: 1516450 - DNA, 25 bp, Homo sapien
cagctgcgtgaacggcgtctagaag

SEQ ID NO: 1516451 - DNA, 25 bp, Homo sapien
ctggaaggcgcagagcccggcggag

SEQ ID NO: 1516452 - DNA, 25 bp, Homo sapien
gccccggccaggacagctgcgtgaa

SEQ ID NO: 1516453 - DNA, 25 bp, Homo sapien
acgtccgggcggatcgtcttctcca

SEQ ID NO: 1516454 - DNA, 25 bp, Homo sapien
gtcttctccagcgacgcaagcagct

SEQ ID NO: 1516455 - DNA, 25 bp, Homo sapien
gctggtccacgtccgggcggatcgt

SEQ ID NO: 1516456 - DNA, 25 bp, Homo sapien
gggcggatcgtcttctccagcgacg

SEQ ID NO: 1516457 - DNA, 25 bp, Homo sapien
gagcagggacgctgagcgccctctt

SEQ ID NO: 1516458 - DNA, 25 bp, Homo sapien
accgctgcccatgtatcagccttta

SEQ ID NO: 1516459 - DNA, 25 bp, Homo sapien
gggcgggcccagtcaggattcccac

SEQ ID NO: 1516460 - DNA, 25 bp, Homo sapien
ctggagtcccctccgcaaggtgcct

SEQ ID NO: 1516461 - DNA, 25 bp, Homo sapien
tccatgccttgagccaggagggtcc

SEQ ID NO: 1516462 - DNA, 25 bp, Homo sapien
ttccacggtgcgcagcagggtctgc

SEQ ID NO: 1516463 - DNA, 25 bp, Homo sapien
gactcgagcggtcccctgatatccg

SEQ ID NO: 1516464 - DNA, 25 bp, Homo sapien
cgcctcgagcgaggcttccacggtg

SEQ ID NO: 1516465 - DNA, 25 bp, Homo sapien
ggtgacctgccttgagcagaattct

SEQ ID NO: 1516466 - DNA, 25 bp, Homo sapien
agatgcactgaggtgacctgccttg

SEQ ID NO: 1516467 - DNA, 25 bp, Homo sapien
gagcagaattctctgggttgttgcc

SEQ ID NO: 1516468 - DNA, 25 bp, Homo sapien
tcagatgcactgaggtgacctgcct

SEQ ID NO: 1516469 - DNA, 25 bp, Homo sapien
tccgctcggcctcacggtagcatgt

SEQ ID NO: 1516470 - DNA, 25 bp, Homo sapien
ccagaaagccaaacggtgctgccag

SEQ ID NO: 1516471 - DNA, 25 bp, Homo sapien
gggccccaaacacgaggctctgcat

SEQ ID NO: 1516472 - DNA, 25 bp, Homo sapien
tgctgtgcaagatcttgggccccaa

SEQ ID NO: 1516473 - DNA, 25 bp, Homo sapien
tgagggccgtcgtcagacactggtc

SEQ ID NO: 1516474 - DNA, 25 bp, Homo sapien
ccgtcgtcagacactggtcagccag

SEQ ID NO: 1516475 - DNA, 25 bp, Homo sapien
cagcctggtcacagttgagggccgt

SEQ ID NO: 1516476 - DNA, 25 bp, Homo sapien
ctggtcacagttgagggccgtcgtc

SEQ ID NO: 1516477 - DNA, 25 bp, Homo sapien
acacacccagcggtgcgtccagcaa

SEQ ID NO: 1516478 - DNA, 25 bp, Homo sapien
catgccaccccgtacccacagaaca

SEQ ID NO: 1516479 - DNA, 25 bp, Homo sapien
cagcggtgcgtccagcaaccatctg

SEQ ID NO: 1516480 - DNA, 25 bp, Homo sapien
aggcccactgccaccccatgccacc

SEQ ID NO: 1516481 - DNA, 25 bp, Homo sapien
tcggatgaacctcctctgcgccaac

SEQ ID NO: 1516482 - DNA, 25 bp, Homo sapien
cgagttggctcagcacaaaaggtaa

SEQ ID NO: 1516483 - DNA, 25 bp, Homo sapien
gccaacccgctgtccgatttgaatt

SEQ ID NO: 1516484 - DNA, 25 bp, Homo sapien
agagaccccagcctcggatgaacct

SEQ ID NO: 1516485 - DNA, 25 bp, Homo sapien
tgtcagaccctcttgcacacttccc

SEQ ID NO: 1516486 - DNA, 25 bp, Homo sapien
catggtgatgctgtcagaccctctt

SEQ ID NO: 1516487 - DNA, 25 bp, Homo sapien
gcattcttgcccactttaagtggat

SEQ ID NO: 1516488 - DNA, 25 bp, Homo sapien
ggtgatgctgtcagaccctcttgca

SEQ ID NO: 1516489 - DNA, 25 bp, Homo sapien
tggtggcgggttgtgggcggcaagc

SEQ ID NO: 1516490 - DNA, 25 bp, Homo sapien
cattaatgattagttggtagcagtt

SEQ ID NO: 1516491 - DNA, 25 bp, Homo sapien
aatgattagttggtagcagttactc

SEQ ID NO: 1516492 - DNA, 25 bp, Homo sapien
taatgattagttggtagcagttact

SEQ ID NO: 1516493 - DNA, 25 bp, Homo sapien
gcgggttaggggctcggatggagag

SEQ ID NO: 1516494 - DNA, 25 bp, Homo sapien
tggcgggttaggggctcggatggag

SEQ ID NO: 1516495 - DNA, 25 bp, Homo sapien
atggcgggttaggggctcggatgga

SEQ ID NO: 1516496 - DNA, 25 bp, Homo sapien
ggcgggttaggggctcggatggaga

SEQ ID NO: 1516497 - DNA, 25 bp, Homo sapien
ccccggatgacgtcctcatagatgc

SEQ ID NO: 1516498 - DNA, 25 bp, Homo sapien
ccggatgacgtcctcatagatgccc

SEQ ID NO: 1516499 - DNA, 25 bp, Homo sapien
aagcacccccggatgacgtcctcat

SEQ ID NO: 1516500 - DNA, 25 bp, Homo sapien
acccccggatgacgtcctcatagat

SEQ ID NO: 1516501 - DNA, 25 bp, Homo sapien
tgttcccatgggacctccaagcagc

SEQ ID NO: 1516502 - DNA, 25 bp, Homo sapien
caggatacatcattggcaccaaggg

SEQ ID NO: 1516503 - DNA, 25 bp, Homo sapien
agagtgcaggatacatcattggcac

SEQ ID NO: 1516504 - DNA, 25 bp, Homo sapien
ctgttcccatgggacctccaagcag

SEQ ID NO: 1516505 - DNA, 25 bp, Homo sapien
attctgttccgtccatgaacccaca

SEQ ID NO: 1516506 - DNA, 25 bp, Homo sapien
atgtttcagaagcctgtgaagttcc

SEQ ID NO: 1516507 - DNA, 25 bp, Homo sapien
tgacaatcccatacaccccatgtgg

SEQ ID NO: 1516508 - DNA, 25 bp, Homo sapien
taaggagacaaagtgcattctgttc

SEQ ID NO: 1516509 - DNA, 25 bp, Homo sapien
cctgggtttagagggtccctctgtg

SEQ ID NO: 1516510 - DNA, 25 bp, Homo sapien
tcagagcctgggtttagagggtccc

SEQ ID NO: 1516511 - DNA, 25 bp, Homo sapien
agcctgggtttagagggtccctctg

SEQ ID NO: 1516512 - DNA, 25 bp, Homo sapien
tgtcagagcctgggtttagagggtc

SEQ ID NO: 1516513 - DNA, 25 bp, Homo sapien
cacaaattcaccacaatctcagccc

SEQ ID NO: 1516514 - DNA, 25 bp, Homo sapien
ctcagccccccagggctgagctcac

SEQ ID NO: 1516515 - DNA, 25 bp, Homo sapien
atctcagccccccagggctgagctc

SEQ ID NO: 1516516 - DNA, 25 bp, Homo sapien
caatctcagccccccagggctgagc

SEQ ID NO: 1516517 - DNA, 25 bp, Homo sapien
tggatctgggcaccagagtctggct

SEQ ID NO: 1516518 - DNA, 25 bp, Homo sapien
tggctggatctgggcaccagagtct

SEQ ID NO: 1516519 - DNA, 25 bp, Homo sapien
agctccggaatgttcctggagaagg

SEQ ID NO: 1516520 - DNA, 25 bp, Homo sapien
tcagctccggaatgttcctggagaa

SEQ ID NO: 1516521 - DNA, 25 bp, Homo sapien
caaaagcctaaagatggcacatccg

SEQ ID NO: 1516522 - DNA, 25 bp, Homo sapien
ggcacatccgttttggcccagaaat

SEQ ID NO: 1516523 - DNA, 25 bp, Homo sapien
ggctggacatagtggatcactccta

SEQ ID NO: 1516524 - DNA, 25 bp, Homo sapien
ccaaaaggctcacagcaagcggaga

SEQ ID NO: 1516525 - DNA, 25 bp, Homo sapien
tgccaatatccagttagcagatgac

SEQ ID NO: 1516526 - DNA, 25 bp, Homo sapien
ccaggaaacttgacaccaagttaag

SEQ ID NO: 1516527 - DNA, 25 bp, Homo sapien
tccagttagcagatgactttgctgg

SEQ ID NO: 1516528 - DNA, 25 bp, Homo sapien
gaagtcggtaaaagcttgtctccca

SEQ ID NO: 1516529 - DNA, 25 bp, Homo sapien
gaatccctgtggaacccactccgga

SEQ ID NO: 1516530 - DNA, 25 bp, Homo sapien
cctgtggaacccactccggaagcag

SEQ ID NO: 1516531 - DNA, 25 bp, Homo sapien
ccctgtggaacccactccggaagca

SEQ ID NO: 1516532 - DNA, 25 bp, Homo sapien
atccctgtggaacccactccggaag

SEQ ID NO: 1516533 - DNA, 25 bp, Homo sapien
gagtgtgaaagtccctctgcaagct

SEQ ID NO: 1516534 - DNA, 25 bp, Homo sapien
tggggtaggccgaaaactccagaca

SEQ ID NO: 1516535 - DNA, 25 bp, Homo sapien
ccagggagtgtgaaagtccctctgc

SEQ ID NO: 1516536 - DNA, 25 bp, Homo sapien
gaggaaacggtctccagggagtgtg

SEQ ID NO: 1516537 - DNA, 25 bp, Homo sapien
tctggaaggatttagacccaagggc

SEQ ID NO: 1516538 - DNA, 25 bp, Homo sapien
tgagcaaatgtatttcggaaggtgg

SEQ ID NO: 1516539 - DNA, 25 bp, Homo sapien
cttgtagctgcaattgttccagaat

SEQ ID NO: 1516540 - DNA, 25 bp, Homo sapien
taaaaggaagacagctaaagaagcc

SEQ ID NO: 1516541 - DNA, 25 bp, Homo sapien
ggaacccgcgcttcctccaggcgcc

SEQ ID NO: 1516542 - DNA, 25 bp, Homo sapien
ctcggagcgcgtggaagggatgtta

SEQ ID NO: 1516543 - DNA, 25 bp, Homo sapien
cttaaaggcacatagcgctcggagc

SEQ ID NO: 1516544 - DNA, 25 bp, Homo sapien
aggcgcctcctaccactgagacctc

SEQ ID NO: 1516545 - DNA, 25 bp, Homo sapien
tggccgcgccttaaaggggtcatag

SEQ ID NO: 1516546 - DNA, 25 bp, Homo sapien
cgccacgcgtctcctttaagtcgtt

SEQ ID NO: 1516547 - DNA, 25 bp, Homo sapien
gcgccacgcgtctcctttaagtcgt

SEQ ID NO: 1516548 - DNA, 25 bp, Homo sapien
agtcgtttttctgcgggaggactct

SEQ ID NO: 1516549 - DNA, 25 bp, Homo sapien
cgccggcccgcgcgtggggccgccg

SEQ ID NO: 1516550 - DNA, 25 bp, Homo sapien
cccccggcggcagtggcgccagcag

SEQ ID NO: 1516551 - DNA, 25 bp, Homo sapien
cgccaggagcggctgcccgcgccgc

SEQ ID NO: 1516552 - DNA, 25 bp, Homo sapien
cggcagtggcgccagcagcagaagc

SEQ ID NO: 1516553 - DNA, 25 bp, Homo sapien
ggggcgactccgggctccagcgctc

SEQ ID NO: 1516554 - DNA, 25 bp, Homo sapien
gcaggggcgactccgggctccagcg

SEQ ID NO: 1516555 - DNA, 25 bp, Homo sapien
aggggcgactccgggctccagcgct

SEQ ID NO: 1516556 - DNA, 25 bp, Homo sapien
ctgcaggggcgactccgggctccag

SEQ ID NO: 1516557 - DNA, 25 bp, Homo sapien
agcgtggtgggcaacgcgtgggccg

SEQ ID NO: 1516558 - DNA, 25 bp, Homo sapien
gcgtgggccgcgtttcgcgccaaca

SEQ ID NO: 1516559 - DNA, 25 bp, Homo sapien
caacagcgcgatgagcacgcgcggc

SEQ ID NO: 1516560 - DNA, 25 bp, Homo sapien
gtgccgcagccgctcgagtgcgccc

SEQ ID NO: 1516561 - DNA, 25 bp, Homo sapien
cctttggaggtgtacgtgccccaga

SEQ ID NO: 1516562 - DNA, 25 bp, Homo sapien
aactcggtcccgcttgtgttgtggg

SEQ ID NO: 1516563 - DNA, 25 bp, Homo sapien
caggctgagttcaagcttaagggca

SEQ ID NO: 1516564 - DNA, 25 bp, Homo sapien
ccctagtagggtccagcaggcagaa

SEQ ID NO: 1516565 - DNA, 25 bp, Homo sapien
ctggccgccactccacggaatggta

SEQ ID NO: 1516566 - DNA, 25 bp, Homo sapien
cccgcagcacagttgacgtgttatc

SEQ ID NO: 1516567 - DNA, 25 bp, Homo sapien
gaatggtacaaactcttcacggcca

SEQ ID NO: 1516568 - DNA, 25 bp, Homo sapien
tatccatgttgtggtccgtagccac

SEQ ID NO: 1516569 - DNA, 25 bp, Homo sapien
catgctcgtagcgtgagtcagacca

SEQ ID NO: 1516570 - DNA, 25 bp, Homo sapien
agaccagtgtttcgggccttcctcg

SEQ ID NO: 1516571 - DNA, 25 bp, Homo sapien
cacatgtctcgagctgatttcaggg

SEQ ID NO: 1516572 - DNA, 25 bp, Homo sapien
ggctgcctggcgcaacttcatgaca

SEQ ID NO: 1516573 - DNA, 25 bp, Homo sapien
tgttctcagcgatgagcaggctcag

SEQ ID NO: 1516574 - DNA, 25 bp, Homo sapien
ggatcaggttgtccgcatctacaaa

SEQ ID NO: 1516575 - DNA, 25 bp, Homo sapien
agttggagtacgcagcccgggaatc

SEQ ID NO: 1516576 - DNA, 25 bp, Homo sapien
gcgaccaccgtcttgttctcagcga

SEQ ID NO: 1516577 - DNA, 25 bp, Homo sapien
ggaaggtcgagtgcaccatgggaac

SEQ ID NO: 1516578 - DNA, 25 bp, Homo sapien
ccccggcggtctcgcttgcggatag

SEQ ID NO: 1516579 - DNA, 25 bp, Homo sapien
tccgcaggtcgatcaggaaggtcga

SEQ ID NO: 1516580 - DNA, 25 bp, Homo sapien
tcaaaggaccaggtgtagtcagggt

SEQ ID NO: 1516581 - DNA, 25 bp, Homo sapien
tctcggcctcatcctggagggtgct

SEQ ID NO: 1516582 - DNA, 25 bp, Homo sapien
ggcgcgcaatggcactggcaagaat

SEQ ID NO: 1516583 - DNA, 25 bp, Homo sapien
ggcaagaatccgtactcctccttgt

SEQ ID NO: 1516584 - DNA, 25 bp, Homo sapien
tccagctgcacatgcatgaagctct

SEQ ID NO: 1516585 - DNA, 25 bp, Homo sapien
gtcttggtgggagccgagatgaagc

SEQ ID NO: 1516586 - DNA, 25 bp, Homo sapien
gtgtcttggtgggagccgagatgaa

SEQ ID NO: 1516587 - DNA, 25 bp, Homo sapien
ctcgtcgaagcccatcttgtccggt

SEQ ID NO: 1516588 - DNA, 25 bp, Homo sapien
catcttgtccggtgtcttggtggga

SEQ ID NO: 1516589 - DNA, 25 bp, Homo sapien
gcagcatgcgctcccgccggtcctg

SEQ ID NO: 1516590 - DNA, 25 bp, Homo sapien
caccagccggcactcgatctcctgt

SEQ ID NO: 1516591 - DNA, 25 bp, Homo sapien
cggcactcgatctcctgtgcctgca

SEQ ID NO: 1516592 - DNA, 25 bp, Homo sapien
cggcctccaccagccggcactcgat

SEQ ID NO: 1516593 - DNA, 25 bp, Homo sapien
agcgcctccacctggctggtgttca

SEQ ID NO: 1516594 - DNA, 25 bp, Homo sapien
ctggatccccagcgcctccacctgg

SEQ ID NO: 1516595 - DNA, 25 bp, Homo sapien
gcctccacctggctggtgttcatgg

SEQ ID NO: 1516596 - DNA, 25 bp, Homo sapien
ctccacctggctggtgttcatggct

SEQ ID NO: 1516597 - DNA, 25 bp, Homo sapien
cacccttggtgaggggccggccgtg

SEQ ID NO: 1516598 - DNA, 25 bp, Homo sapien
gtaggggtcccggtagccaggcagc

SEQ ID NO: 1516599 - DNA, 25 bp, Homo sapien
aagcagcccagctcacccttggtga

SEQ ID NO: 1516600 - DNA, 25 bp, Homo sapien
agatgttgtagtggctcaggaagca

SEQ ID NO: 1516601 - DNA, 25 bp, Homo sapien
gctgtccagtctgcagtgcagtggc

SEQ ID NO: 1516602 - DNA, 25 bp, Homo sapien
accatgcccggccctgatggcccaa

SEQ ID NO: 1516603 - DNA, 25 bp, Homo sapien
atgcccggccctgatggcccaagtt

SEQ ID NO: 1516604 - DNA, 25 bp, Homo sapien
ctcaagccactctcccactttagcc

SEQ ID NO: 1516605 - DNA, 25 bp, Homo sapien
cacatcccgcatgaggttcatcaga

SEQ ID NO: 1516606 - DNA, 25 bp, Homo sapien
aagaagatctcaaaacgcaggtcat

SEQ ID NO: 1516607 - DNA, 25 bp, Homo sapien
aaacacaagcgatttctgcagcccc

SEQ ID NO: 1516608 - DNA, 25 bp, Homo sapien
catcagacgtctcttgaagaagatc

SEQ ID NO: 1516609 - DNA, 25 bp, Homo sapien
ctggaaacatgttggtggcactccc

SEQ ID NO: 1516610 - DNA, 25 bp, Homo sapien
gacaaaccagcccacttacagaaga

SEQ ID NO: 1516611 - DNA, 25 bp, Homo sapien
ttacagaagagaaggacggctccag

SEQ ID NO: 1516612 - DNA, 25 bp, Homo sapien
tgagttctgggtgatccttccaacg

SEQ ID NO: 1516613 - DNA, 25 bp, Homo sapien
agtgggggtggaggtgggcgaggtg

SEQ ID NO: 1516614 - DNA, 25 bp, Homo sapien
aggacagtgggggtggaggtgggcg

SEQ ID NO: 1516615 - DNA, 25 bp, Homo sapien
agaggacagtgggggtggaggtggg

SEQ ID NO: 1516616 - DNA, 25 bp, Homo sapien
acagtgggggtggaggtgggcgagg

SEQ ID NO: 1516617 - DNA, 25 bp, Homo sapien
tttccaaagggcgtgagggagccat

SEQ ID NO: 1516618 - DNA, 25 bp, Homo sapien
ggagagcaggatcacgcagacgttc

SEQ ID NO: 1516619 - DNA, 25 bp, Homo sapien
aggatcacgcagacgttctctgagg

SEQ ID NO: 1516620 - DNA, 25 bp, Homo sapien
agagcaggatcacgcagacgttctc

SEQ ID NO: 1516621 - DNA, 25 bp, Homo sapien
ctggggtgcaagatcgggcctgtca

SEQ ID NO: 1516622 - DNA, 25 bp, Homo sapien
gcaagatcgggcctgtcactctcct

SEQ ID NO: 1516623 - DNA, 25 bp, Homo sapien
gggtgcaagatcgggcctgtcactc

SEQ ID NO: 1516624 - DNA, 25 bp, Homo sapien
tcccgccctccggagggagcttgcc

SEQ ID NO: 1516625 - DNA, 25 bp, Homo sapien
cagcatcttggagagcggctcagca

SEQ ID NO: 1516626 - DNA, 25 bp, Homo sapien
agccagcagtttgcgggcgccttgc

SEQ ID NO: 1516627 - DNA, 25 bp, Homo sapien
ccttgcagggagatcacgtaggcca

SEQ ID NO: 1516628 - DNA, 25 bp, Homo sapien
tttgtcgaacatgacgggcaggaac

SEQ ID NO: 1516629 - DNA, 25 bp, Homo sapien
tagccatcgtctcctgtgtagtgtg

SEQ ID NO: 1516630 - DNA, 25 bp, Homo sapien
cattgttccatacgactgaggtctc

SEQ ID NO: 1516631 - DNA, 25 bp, Homo sapien
tggagcacgtccgagttcttggcct

SEQ ID NO: 1516632 - DNA, 25 bp, Homo sapien
gaggtctcggtgtcactcacatagc

SEQ ID NO: 1516633 - DNA, 25 bp, Homo sapien
tatctcaatattcccagagcctggg

SEQ ID NO: 1516634 - DNA, 25 bp, Homo sapien
gaaacaagaattgctggacgctggg

SEQ ID NO: 1516635 - DNA, 25 bp, Homo sapien
ctaagcaagttatccccaagagggt

SEQ ID NO: 1516636 - DNA, 25 bp, Homo sapien
gatgtcctcagtaagcacgtggagc

SEQ ID NO: 1516637 - DNA, 25 bp, Homo sapien
tgattctaccccgtcggtccagtgt

SEQ ID NO: 1516638 - DNA, 25 bp, Homo sapien
cagccatagtggctctctggagaca

SEQ ID NO: 1516639 - DNA, 25 bp, Homo sapien
caaacgagaagtggtcatgaatgca

SEQ ID NO: 1516640 - DNA, 25 bp, Homo sapien
tgactgtgtcaagtaacaccccacc

SEQ ID NO: 1516641 - DNA, 25 bp, Homo sapien
ccccatgtgctgtcgattttgcaga

SEQ ID NO: 1516642 - DNA, 25 bp, Homo sapien
gaaggatctgttcactcttaccagt

SEQ ID NO: 1516643 - DNA, 25 bp, Homo sapien
ccagtctgtcctcgaatgatttgca

SEQ ID NO: 1516644 - DNA, 25 bp, Homo sapien
tctcggctgggatctcagagccttt

SEQ ID NO: 1516645 - DNA, 25 bp, Homo sapien
gtgagaatacacatccgcatgcatg

SEQ ID NO: 1516646 - DNA, 25 bp, Homo sapien
gacagggagtctacgcctagtggaa

SEQ ID NO: 1516647 - DNA, 25 bp, Homo sapien
tggacatggctgagacacggacaga

SEQ ID NO: 1516648 - DNA, 25 bp, Homo sapien
gacctcgctttatgcaaggagctgg

SEQ ID NO: 1516649 - DNA, 25 bp, Homo sapien
cacgaggggtacatcattccacaga

SEQ ID NO: 1516650 - DNA, 25 bp, Homo sapien
cgcgaagccagcaaagcacgggatg

SEQ ID NO: 1516651 - DNA, 25 bp, Homo sapien
ttgtccgaggaaccttcccctgcag

SEQ ID NO: 1516652 - DNA, 25 bp, Homo sapien
tgagagccaaaggagattcaaccac

SEQ ID NO: 1516653 - DNA, 25 bp, Homo sapien
ccaagccgtggggatgtaagatata

SEQ ID NO: 1516654 - DNA, 25 bp, Homo sapien
agagtgcggtgggagggttctccaa

SEQ ID NO: 1516655 - DNA, 25 bp, Homo sapien
cgcggacccggctggaaattcgaag

SEQ ID NO: 1516656 - DNA, 25 bp, Homo sapien
cccggctggaaattcgaaggagagt

SEQ ID NO: 1516657 - DNA, 25 bp, Homo sapien
accaggtttttagagggtcagtgag

SEQ ID NO: 1516658 - DNA, 25 bp, Homo sapien
aagagtctgggctcggtagtttgat

SEQ ID NO: 1516659 - DNA, 25 bp, Homo sapien
ctgtgtagaccaggtttttagaggg

SEQ ID NO: 1516660 - DNA, 25 bp, Homo sapien
cggtagtttgattgaagcctgcagg

SEQ ID NO: 1516661 - DNA, 25 bp, Homo sapien
tagcccttgtcgacgcagctgggcc

SEQ ID NO: 1516662 - DNA, 25 bp, Homo sapien
tctacccggaaacgatctagactgg

SEQ ID NO: 1516663 - DNA, 25 bp, Homo sapien
acatgtctctgctttgcgttggagg

SEQ ID NO: 1516664 - DNA, 25 bp, Homo sapien
tgatccgtgtagacgcggcagggct

SEQ ID NO: 1516665 - DNA, 25 bp, Homo sapien
tgagcccgacccgacagagccggcc

SEQ ID NO: 1516666 - DNA, 25 bp, Homo sapien
gcccccggtgctgaaccaagatggc

SEQ ID NO: 1516667 - DNA, 25 bp, Homo sapien
gcatcagcgccacgtcaggcgctgt

SEQ ID NO: 1516668 - DNA, 25 bp, Homo sapien
ccaagatggccggtggcggccgggc

SEQ ID NO: 1516669 - DNA, 25 bp, Homo sapien
caggaatgtccatgcatgggtggcg

SEQ ID NO: 1516670 - DNA, 25 bp, Homo sapien
ttgcttgagtattgcagggaggcgt

SEQ ID NO: 1516671 - DNA, 25 bp, Homo sapien
gcccaggttaccagggcaggaatgt

SEQ ID NO: 1516672 - DNA, 25 bp, Homo sapien
ggcacgtgcaccatttcagtgcagg

SEQ ID NO: 1516673 - DNA, 25 bp, Homo sapien
gcccaaggagacatctgtctggagg

SEQ ID NO: 1516674 - DNA, 25 bp, Homo sapien
gtctggaggaagatcagctggacac

SEQ ID NO: 1516675 - DNA, 25 bp, Homo sapien
tgtctggaggaagatcagctggaca

SEQ ID NO: 1516676 - DNA, 25 bp, Homo sapien
cggtctcagtcctggtgcccaagga

SEQ ID NO: 1516677 - DNA, 25 bp, Homo sapien
tgggcttcgagtaaacacatgtagt

SEQ ID NO: 1516678 - DNA, 25 bp, Homo sapien
gggcatgggcttcgagtaaacacat

SEQ ID NO: 1516679 - DNA, 25 bp, Homo sapien
tcttcacaaccacctggggcatggg

SEQ ID NO: 1516680 - DNA, 25 bp, Homo sapien
tggggcatgggcttcgagtaaacac

SEQ ID NO: 1516681 - DNA, 25 bp, Homo sapien
tgatgctagtggtggggcgattcac

SEQ ID NO: 1516682 - DNA, 25 bp, Homo sapien
tgggtgctgatgctagtggtggggc

SEQ ID NO: 1516683 - DNA, 25 bp, Homo sapien
gtgttgacaacattcctgttctggg

SEQ ID NO: 1516684 - DNA, 25 bp, Homo sapien
gttgacaacattcctgttctgggtg

SEQ ID NO: 1516685 - DNA, 25 bp, Homo sapien
tcgctgcccaccacgaggagcagtg

SEQ ID NO: 1516686 - DNA, 25 bp, Homo sapien
caccacgaggagcagtgagctcgga

SEQ ID NO: 1516687 - DNA, 25 bp, Homo sapien
ctctttcgagctcctccaggacgta

SEQ ID NO: 1516688 - DNA, 25 bp, Homo sapien
agctcctccaggacgtaggtgagga

SEQ ID NO: 1516689 - DNA, 25 bp, Homo sapien
tcctcaagcacatgaaccgaggtgc

SEQ ID NO: 1516690 - DNA, 25 bp, Homo sapien
tttacatgcaatgaaacgccaggtc

SEQ ID NO: 1516691 - DNA, 25 bp, Homo sapien
ccaggtccagatgctccgagggatg

SEQ ID NO: 1516692 - DNA, 25 bp, Homo sapien
aaccgaggtgcgtgttcctgtccca

SEQ ID NO: 1516693 - DNA, 25 bp, Homo sapien
ccccacctgttcctactggccaggg

SEQ ID NO: 1516694 - DNA, 25 bp, Homo sapien
acctcctcgctgctcctatgccctg

SEQ ID NO: 1516695 - DNA, 25 bp, Homo sapien
gcaccttcgggtgctaagactgact

SEQ ID NO: 1516696 - DNA, 25 bp, Homo sapien
ctatgccctgccagacccgtttcca

SEQ ID NO: 1516697 - DNA, 25 bp, Homo sapien
ggttgcagacgccaggatcgacatc

SEQ ID NO: 1516698 - DNA, 25 bp, Homo sapien
ccaggatcgacatcccaagaccgga

SEQ ID NO: 1516699 - DNA, 25 bp, Homo sapien
agacgccaggatcgacatcccaaga

SEQ ID NO: 1516700 - DNA, 25 bp, Homo sapien
atcaaggttgcagacgccaggatcg

SEQ ID NO: 1516701 - DNA, 25 bp, Homo sapien
ctggagaaggtggcagagtgtcggg

SEQ ID NO: 1516702 - DNA, 25 bp, Homo sapien
gcagagtgtcgggacacaaagacct

SEQ ID NO: 1516703 - DNA, 25 bp, Homo sapien
ggcagagtgtcgggacacaaagacc

SEQ ID NO: 1516704 - DNA, 25 bp, Homo sapien
agagtgtcgggacacaaagaccttg

SEQ ID NO: 1516705 - DNA, 25 bp, Homo sapien
ggttcaggaggaccagggtctccag

SEQ ID NO: 1516706 - DNA, 25 bp, Homo sapien
catacagggacttgtctgatgggtt

SEQ ID NO: 1516707 - DNA, 25 bp, Homo sapien
ggtctccaggttgtctccacggtgg

SEQ ID NO: 1516708 - DNA, 25 bp, Homo sapien
tccaggttgtctccacggtggtgca

SEQ ID NO: 1516709 - DNA, 25 bp, Homo sapien
cccagccaacaccagtagcttgtga

SEQ ID NO: 1516710 - DNA, 25 bp, Homo sapien
agaggcagggtccaacagaaggttc

SEQ ID NO: 1516711 - DNA, 25 bp, Homo sapien
tagcttgtgagaggcagggtccaac

SEQ ID NO: 1516712 - DNA, 25 bp, Homo sapien
aggaagtggtgaggcgagaagcccc

SEQ ID NO: 1516713 - DNA, 25 bp, Homo sapien
gtatggaggaggagtggtaagggac

SEQ ID NO: 1516714 - DNA, 25 bp, Homo sapien
ctgtatggaggaggagtggtaaggg

SEQ ID NO: 1516715 - DNA, 25 bp, Homo sapien
tatggaggaggagtggtaagggacc

SEQ ID NO: 1516716 - DNA, 25 bp, Homo sapien
tggaggaggagtggtaagggaccac

SEQ ID NO: 1516717 - DNA, 25 bp, Homo sapien
agctggagccggagcgccccctgaa

SEQ ID NO: 1516718 - DNA, 25 bp, Homo sapien
agctgagcccagtcaccgaaggtgg

SEQ ID NO: 1516719 - DNA, 25 bp, Homo sapien
ctgcgccggggggttcagccgcagc

SEQ ID NO: 1516720 - DNA, 25 bp, Homo sapien
gatggtgagtatgggcggctgcaca

SEQ ID NO: 1516721 - DNA, 25 bp, Homo sapien
ggctccagagactcagccacgtact

SEQ ID NO: 1516722 - DNA, 25 bp, Homo sapien
cagtgaagccattgacggcgaagaa

SEQ ID NO: 1516723 - DNA, 25 bp, Homo sapien
agcacggcatccacgcggtccaggt

SEQ ID NO: 1516724 - DNA, 25 bp, Homo sapien
aagatgtagcagcagggccggccca

SEQ ID NO: 1516725 - DNA, 25 bp, Homo sapien
cagtttgcgccgcagcaggctgttg

SEQ ID NO: 1516726 - DNA, 25 bp, Homo sapien
gatgagcctgcgcagcctgtcgtcc

SEQ ID NO: 1516727 - DNA, 25 bp, Homo sapien
tggcagaggcgtgatgcccagctgc

SEQ ID NO: 1516728 - DNA, 25 bp, Homo sapien
agagcacggtgggtttggctggcac

SEQ ID NO: 1516729 - DNA, 25 bp, Homo sapien
acgggctctcgcaggaacctcaagt

SEQ ID NO: 1516730 - DNA, 25 bp, Homo sapien
gtgcaaccggggaacagcacgcgca

SEQ ID NO: 1516731 - DNA, 25 bp, Homo sapien
tgctgcaggcggaccaggccgtcca

SEQ ID NO: 1516732 - DNA, 25 bp, Homo sapien
gggtgccacaccagcagggcgcaca

SEQ ID NO: 1516733 - DNA, 25 bp, Homo sapien
agctggcggccaaaggcagctccag

SEQ ID NO: 1516734 - DNA, 25 bp, Homo sapien
cttgggtgccgcctgggcattcgtc

SEQ ID NO: 1516735 - DNA, 25 bp, Homo sapien
tcgtcttcttgaggttgggcacaga

SEQ ID NO: 1516736 - DNA, 25 bp, Homo sapien
tggcttctccacatcggaggctggg

SEQ ID NO: 1516737 - DNA, 25 bp, Homo sapien
ggactcaggggagggtgtgcgtggc

SEQ ID NO: 1516738 - DNA, 25 bp, Homo sapien
ggtgggactcaggggagggtgtgcg

SEQ ID NO: 1516739 - DNA, 25 bp, Homo sapien
tgggactcaggggagggtgtgcgtg

SEQ ID NO: 1516740 - DNA, 25 bp, Homo sapien
ctccggtgggactcaggggagggtg

SEQ ID NO: 1516741 - DNA, 25 bp, Homo sapien
tgaccgatgtgggtggcgtctcctc

SEQ ID NO: 1516742 - DNA, 25 bp, Homo sapien
tcaaaggacaccgacagggactcgt

SEQ ID NO: 1516743 - DNA, 25 bp, Homo sapien
cgatgctcaaattcacagggtgaca

SEQ ID NO: 1516744 - DNA, 25 bp, Homo sapien
cattggcaccgccttgcgatgctca

SEQ ID NO: 1516745 - DNA, 25 bp, Homo sapien
ttccgggtgcggctgacgttctccg

SEQ ID NO: 1516746 - DNA, 25 bp, Homo sapien
tcactccgggcactgagtggtcggc

SEQ ID NO: 1516747 - DNA, 25 bp, Homo sapien
tgtgtcttcgtctgagtctgccgca

SEQ ID NO: 1516748 - DNA, 25 bp, Homo sapien
tctccgtttgccgtgctgtcttggg

SEQ ID NO: 1516749 - DNA, 25 bp, Homo sapien
tcctaaaactcagcaacggaaaaca

SEQ ID NO: 1516750 - DNA, 25 bp, Homo sapien
ggcaatcatttattgggtctgacat

SEQ ID NO: 1516751 - DNA, 25 bp, Homo sapien
gaaaaaaaatcgatgtggcaatcat

SEQ ID NO: 1516752 - DNA, 25 bp, Homo sapien
tcagcaacggaaaacaactcaattt

SEQ ID NO: 1516753 - DNA, 25 bp, Homo sapien
tggatgcggatgagacagcagctct

SEQ ID NO: 1516754 - DNA, 25 bp, Homo sapien
aaatgcataccctcagccgaaatgg

SEQ ID NO: 1516755 - DNA, 25 bp, Homo sapien
aatgaaaggatacggctgggtctcg

SEQ ID NO: 1516756 - DNA, 25 bp, Homo sapien
tttaacagaacctcatgggcaccag

SEQ ID NO: 1516757 - DNA, 25 bp, Homo sapien
caggtccaggtagaccggggacttg

SEQ ID NO: 1516758 - DNA, 25 bp, Homo sapien
ttgctggccagtagcgcgtccagga

SEQ ID NO: 1516759 - DNA, 25 bp, Homo sapien
gcgcgcgcacgcgctggaagaactc

SEQ ID NO: 1516760 - DNA, 25 bp, Homo sapien
tagcgcgtccaggacggcccgcatg

SEQ ID NO: 1516761 - DNA, 25 bp, Homo sapien
gtcacggtcccaatgctgcttgctg

SEQ ID NO: 1516762 - DNA, 25 bp, Homo sapien
accagaggccctggggtgacacgca

SEQ ID NO: 1516763 - DNA, 25 bp, Homo sapien
ccagaggccctggggtgacacgcac

SEQ ID NO: 1516764 - DNA, 25 bp, Homo sapien
caccagaggccctggggtgacacgc

SEQ ID NO: 1516765 - DNA, 25 bp, Homo sapien
tggcctgggcccaagtcgccttcct

SEQ ID NO: 1516766 - DNA, 25 bp, Homo sapien
tctgcaatgggtggtcagcccgtct

SEQ ID NO: 1516767 - DNA, 25 bp, Homo sapien
tccctgatcttgtgtgctccacctt

SEQ ID NO: 1516768 - DNA, 25 bp, Homo sapien
ggcatttgagacccctcctggcttt

SEQ ID NO: 1516769 - DNA, 25 bp, Homo sapien
gtaccacgtatgcatggccaccgag

SEQ ID NO: 1516770 - DNA, 25 bp, Homo sapien
tgcatggccaccgagtcgaaagtgg

SEQ ID NO: 1516771 - DNA, 25 bp, Homo sapien
tctgcgtaccacgtatgcatggcca

SEQ ID NO: 1516772 - DNA, 25 bp, Homo sapien
gcgtgcgtctctgcgtaccacgtat

SEQ ID NO: 1516773 - DNA, 25 bp, Homo sapien
gagtggggggcgtgtcggcgatggg

SEQ ID NO: 1516774 - DNA, 25 bp, Homo sapien
cccgcgcggccccccattgggccat

SEQ ID NO: 1516775 - DNA, 25 bp, Homo sapien
gcgggctctgatcccgcgcggcccc

SEQ ID NO: 1516776 - DNA, 25 bp, Homo sapien
gaggcagggcgggctctgatcccgc

SEQ ID NO: 1516777 - DNA, 25 bp, Homo sapien
agggcgggctctgatcccgcgcggc

SEQ ID NO: 1516778 - DNA, 25 bp, Homo sapien
gcttggtcgctgacaccggagcccg

SEQ ID NO: 1516779 - DNA, 25 bp, Homo sapien
cgctcgccgccacctgcggcttggt

SEQ ID NO: 1516780 - DNA, 25 bp, Homo sapien
ctgcggcttggtcgctgacaccgga

SEQ ID NO: 1516781 - DNA, 25 bp, Homo sapien
acctgcggcttggtcgctgacaccg

SEQ ID NO: 1516782 - DNA, 25 bp, Homo sapien
agcagccccagaacagataaaacaa

SEQ ID NO: 1516783 - DNA, 25 bp, Homo sapien
gtgagcagccccagaacagataaaa

SEQ ID NO: 1516784 - DNA, 25 bp, Homo sapien
tgagcagccccagaacagataaaac

SEQ ID NO: 1516785 - DNA, 25 bp, Homo sapien
acaaaggcaagacccgagctcccat

SEQ ID NO: 1516786 - DNA, 25 bp, Homo sapien
tcctcccccgcccgatcagcaccca

SEQ ID NO: 1516787 - DNA, 25 bp, Homo sapien
cacctttcctcccccgcccgatcag

SEQ ID NO: 1516788 - DNA, 25 bp, Homo sapien
tttcctcccccgcccgatcagcacc

SEQ ID NO: 1516789 - DNA, 25 bp, Homo sapien
cctttcctcccccgcccgatcagca

SEQ ID NO: 1516790 - DNA, 25 bp, Homo sapien
gcgccaggagacagccacgaggcca

SEQ ID NO: 1516791 - DNA, 25 bp, Homo sapien
ccaggagacagccacgaggccactt

SEQ ID NO: 1516792 - DNA, 25 bp, Homo sapien
gcaggcgccaggagacagccacgag

SEQ ID NO: 1516793 - DNA, 25 bp, Homo sapien
aggcgccaggagacagccacgaggc

SEQ ID NO: 1516794 - DNA, 25 bp, Homo sapien
gtagcgagtgggatggggcccctgt

SEQ ID NO: 1516795 - DNA, 25 bp, Homo sapien
gacagggtagcgagtgggatggggc

SEQ ID NO: 1516796 - DNA, 25 bp, Homo sapien
ggtagcgagtgggatggggcccctg

SEQ ID NO: 1516797 - DNA, 25 bp, Homo sapien
cagggtagcgagtgggatggggccc

SEQ ID NO: 1516798 - DNA, 25 bp, Homo sapien
cagctccgtgcctcagtttccccat

SEQ ID NO: 1516799 - DNA, 25 bp, Homo sapien
ggtgtctgagtcactgtccagctcc

SEQ ID NO: 1516800 - DNA, 25 bp, Homo sapien
gtccagctccgtgcctcagtttccc

SEQ ID NO: 1516801 - DNA, 25 bp, Homo sapien
ctggtgtctgagtcactgtccagct

SEQ ID NO: 1516802 - DNA, 25 bp, Homo sapien
tgtgatgacccagctggcattgctg

SEQ ID NO: 1516803 - DNA, 25 bp, Homo sapien
aaccctgccctcaaaagccagtgtt

SEQ ID NO: 1516804 - DNA, 25 bp, Homo sapien
attgctgcccccacgagtcccaacc

SEQ ID NO: 1516805 - DNA, 25 bp, Homo sapien
cagagctcactcctcactgtgatga

SEQ ID NO: 1516806 - DNA, 25 bp, Homo sapien
cacagctaggaagggacagtagatt

SEQ ID NO: 1516807 - DNA, 25 bp, Homo sapien
ggctgagcccagacctgagctctca

SEQ ID NO: 1516808 - DNA, 25 bp, Homo sapien
atttgcactctggactggctgagcc

SEQ ID NO: 1516809 - DNA, 25 bp, Homo sapien
ggacagtagatttgcactctggact

SEQ ID NO: 1516810 - DNA, 25 bp, Homo sapien
cctgcaggccccgtccagtgcctgt

SEQ ID NO: 1516811 - DNA, 25 bp, Homo sapien
atggtctctgtggagacccctgcag

SEQ ID NO: 1516812 - DNA, 25 bp, Homo sapien
ctgatggtctctgtggagacccctg

SEQ ID NO: 1516813 - DNA, 25 bp, Homo sapien
acccctgcaggccccgtccagtgcc

SEQ ID NO: 1516814 - DNA, 25 bp, Homo sapien
aaaaatgctccccaaaatacgacat

SEQ ID NO: 1516815 - DNA, 25 bp, Homo sapien
caaaaatgctccccaaaatacgaca

SEQ ID NO: 1516816 - DNA, 25 bp, Homo sapien
ctttcaggggcaaatcggggagtct

SEQ ID NO: 1516817 - DNA, 25 bp, Homo sapien
cagcctttcaggggcaaatcgggga

SEQ ID NO: 1516818 - DNA, 25 bp, Homo sapien
agcctttcaggggcaaatcggggag

SEQ ID NO: 1516819 - DNA, 25 bp, Homo sapien
tcaggggcaaatcggggagtctgac

SEQ ID NO: 1516820 - DNA, 25 bp, Homo sapien
tggaattggacacctttagatttgg

SEQ ID NO: 1516821 - DNA, 25 bp, Homo sapien
ccgctgttggaattggacaccttta

SEQ ID NO: 1516822 - DNA, 25 bp, Homo sapien
tagatttggacttaaaactcaccat

SEQ ID NO: 1516823 - DNA, 25 bp, Homo sapien
cctctgcgcccgctgttggaattgg

SEQ ID NO: 1516824 - DNA, 25 bp, Homo sapien
ccggatgaagtccgccagctccttg

SEQ ID NO: 1516825 - DNA, 25 bp, Homo sapien
caggacctcaaagccatgatttttc

SEQ ID NO: 1516826 - DNA, 25 bp, Homo sapien
ctgcttcacgctgtggtacaggacc

SEQ ID NO: 1516827 - DNA, 25 bp, Homo sapien
tgtggtacaggacctcaaagccatg

SEQ ID NO: 1516828 - DNA, 25 bp, Homo sapien
gggtcccgttgctggccagcttgga

SEQ ID NO: 1516829 - DNA, 25 bp, Homo sapien
cagcttggagagtttcgccatcgcc

SEQ ID NO: 1516830 - DNA, 25 bp, Homo sapien
tcgccttcgagtaggtctcctcgat

SEQ ID NO: 1516831 - DNA, 25 bp, Homo sapien
gagtttcgccatcgccttcgagtag

SEQ ID NO: 1516832 - DNA, 25 bp, Homo sapien
cgccgtagcggagaacgtccttgat

SEQ ID NO: 1516833 - DNA, 25 bp, Homo sapien
acttccgtgtcagttccaggtggca

SEQ ID NO: 1516834 - DNA, 25 bp, Homo sapien
tcttgagctgttcctcgccgtagcg

SEQ ID NO: 1516835 - DNA, 25 bp, Homo sapien
tgatgagatcctgtaacttccgtgt

SEQ ID NO: 1516836 - DNA, 25 bp, Homo sapien
taacggaattctcggaggcggacat

SEQ ID NO: 1516837 - DNA, 25 bp, Homo sapien
gacatccgcaggttataaagcccca

SEQ ID NO: 1516838 - DNA, 25 bp, Homo sapien
tcttagctgtacaaacattggtggg

SEQ ID NO: 1516839 - DNA, 25 bp, Homo sapien
tgaaattcaacaacgctcaggtccg

SEQ ID NO: 1516840 - DNA, 25 bp, Homo sapien
tggtgtgtcgcgatctcaactgact

SEQ ID NO: 1516841 - DNA, 25 bp, Homo sapien
ccgggctggagtggtgtgtcgcgat

SEQ ID NO: 1516842 - DNA, 25 bp, Homo sapien
cgggctggagtggtgtgtcgcgatc

SEQ ID NO: 1516843 - DNA, 25 bp, Homo sapien
tggagtggtgtgtcgcgatctcaac

SEQ ID NO: 1516844 - DNA, 25 bp, Homo sapien
tggctggtactctccctccgcagcc

SEQ ID NO: 1516845 - DNA, 25 bp, Homo sapien
ccgagagtacctgcacagcatccaa

SEQ ID NO: 1516846 - DNA, 25 bp, Homo sapien
tagttctcgcgggacttgggcagga

SEQ ID NO: 1516847 - DNA, 25 bp, Homo sapien
gctcctggtccatgcaacggttcag

SEQ ID NO: 1516848 - DNA, 25 bp, Homo sapien
tctgccgccttcttggttttagtct

SEQ ID NO: 1516849 - DNA, 25 bp, Homo sapien
tatttttccactgagcgccgcaggc

SEQ ID NO: 1516850 - DNA, 25 bp, Homo sapien
tgctcaaagtcagctcgggctgagt

SEQ ID NO: 1516851 - DNA, 25 bp, Homo sapien
cagctcgggctgagttgtatttttc

SEQ ID NO: 1516852 - DNA, 25 bp, Homo sapien
gtgagcatatgagcccagcagtgcc

SEQ ID NO: 1516853 - DNA, 25 bp, Homo sapien
cagtgccttcatgtgcctcaggtgt

SEQ ID NO: 1516854 - DNA, 25 bp, Homo sapien
tgcccaatctgcacgtgcgtgtcct

SEQ ID NO: 1516855 - DNA, 25 bp, Homo sapien
gtgtcctccaccgagtgagcatatg

SEQ ID NO: 1516856 - DNA, 25 bp, Homo sapien
tccacgctgacgttctcgatgttct

SEQ ID NO: 1516857 - DNA, 25 bp, Homo sapien
gcaaacttcctgagtagcatctcca

SEQ ID NO: 1516858 - DNA, 25 bp, Homo sapien
tgagtagcatctccacgctgacgtt

SEQ ID NO: 1516859 - DNA, 25 bp, Homo sapien
tgtgcccttactctctgcaaacttc

SEQ ID NO: 1516860 - DNA, 25 bp, Homo sapien
caaagcacaggtcctaggtcacaca

SEQ ID NO: 1516861 - DNA, 25 bp, Homo sapien
taaggagtgggaactctctcccaag

SEQ ID NO: 1516862 - DNA, 25 bp, Homo sapien
gacttgaggacgtaactgtatacca

SEQ ID NO: 1516863 - DNA, 25 bp, Homo sapien
gaagtctgatcagccaagcctggca

SEQ ID NO: 1516864 - DNA, 25 bp, Homo sapien
gcagccgcactgtatgcctcgaagt

SEQ ID NO: 1516865 - DNA, 25 bp, Homo sapien
gccgcactgtatgcctcgaagtcca

SEQ ID NO: 1516866 - DNA, 25 bp, Homo sapien
gggcagccgcactgtatgcctcgaa

SEQ ID NO: 1516867 - DNA, 25 bp, Homo sapien
agggcagccgcactgtatgcctcga

SEQ ID NO: 1516868 - DNA, 25 bp, Homo sapien
ccccatggtccagcctgggcatcca

SEQ ID NO: 1516869 - DNA, 25 bp, Homo sapien
cctgggcatccaggcccagacgtac

SEQ ID NO: 1516870 - DNA, 25 bp, Homo sapien
ccatggtccagcctgggcatccagg

SEQ ID NO: 1516871 - DNA, 25 bp, Homo sapien
agcctgggcatccaggcccagacgt

SEQ ID NO: 1516872 - DNA, 25 bp, Homo sapien
ggatagattggggggcacctgagca

SEQ ID NO: 1516873 - DNA, 25 bp, Homo sapien
ctgaggatagattggggggcacctg

SEQ ID NO: 1516874 - DNA, 25 bp, Homo sapien
tgaggatagattggggggcacctga

SEQ ID NO: 1516875 - DNA, 25 bp, Homo sapien
aggatagattggggggcacctgagc

SEQ ID NO: 1516876 - DNA, 25 bp, Homo sapien
gccggcttagtcctggaaggcgaaa

SEQ ID NO: 1516877 - DNA, 25 bp, Homo sapien
ccttggctccccgcaaacgtttcat

SEQ ID NO: 1516878 - DNA, 25 bp, Homo sapien
ccgctcccgccggcttagtcctgga

SEQ ID NO: 1516879 - DNA, 25 bp, Homo sapien
tggaaggcgaaaggccttggctccc

SEQ ID NO: 1516880 - DNA, 25 bp, Homo sapien
ccctgaatcgggctccaggaaatct

SEQ ID NO: 1516881 - DNA, 25 bp, Homo sapien
tgggtcacatcaggccggacagtga

SEQ ID NO: 1516882 - DNA, 25 bp, Homo sapien
catcaggccggacagtgaaaccttc

SEQ ID NO: 1516883 - DNA, 25 bp, Homo sapien
cacatcaggccggacagtgaaacct

SEQ ID NO: 1516884 - DNA, 25 bp, Homo sapien
caggccggacagtgaaaccttcttc

SEQ ID NO: 1516885 - DNA, 25 bp, Homo sapien
ccggggcaggcttgatgtgcacata

SEQ ID NO: 1516886 - DNA, 25 bp, Homo sapien
aaggatgaggctgcccgcggtggcc

SEQ ID NO: 1516887 - DNA, 25 bp, Homo sapien
ctcttcatcgtcgaagtcggagtcg

SEQ ID NO: 1516888 - DNA, 25 bp, Homo sapien
cacatagaacttgcggggctcttca

SEQ ID NO: 1516889 - DNA, 25 bp, Homo sapien
gtgaagaatggcgtttcatggtgcc

SEQ ID NO: 1516890 - DNA, 25 bp, Homo sapien
ctgggggcagaccgaggtctctggg

SEQ ID NO: 1516891 - DNA, 25 bp, Homo sapien
gtctctggggtttcccagcagcgtc

SEQ ID NO: 1516892 - DNA, 25 bp, Homo sapien
gcagaccgaggtctctggggtttcc

SEQ ID NO: 1516893 - DNA, 25 bp, Homo sapien
tctctggggtttcccagcagcgtcc

SEQ ID NO: 1516894 - DNA, 25 bp, Homo sapien
ggcggcccaaagaggttcttggaca

SEQ ID NO: 1516895 - DNA, 25 bp, Homo sapien
ctgtaaaatcttcgtggtcaaaggc

SEQ ID NO: 1516896 - DNA, 25 bp, Homo sapien
gcggcccaaagaggttcttggacac

SEQ ID NO: 1516897 - DNA, 25 bp, Homo sapien
tcttcgtggtcaaaggctgactcca

SEQ ID NO: 1516898 - DNA, 25 bp, Homo sapien
atgccctccaatcccttatccccat

SEQ ID NO: 1516899 - DNA, 25 bp, Homo sapien
gccctccaatcccttatccccatca

SEQ ID NO: 1516900 - DNA, 25 bp, Homo sapien
ccatgccctccaatcccttatcccc

SEQ ID NO: 1516901 - DNA, 25 bp, Homo sapien
ccctccaatcccttatccccatcac

SEQ ID NO: 1516902 - DNA, 25 bp, Homo sapien
tcgcccactcagagtccctgcccat

SEQ ID NO: 1516903 - DNA, 25 bp, Homo sapien
gagggaagcgggcggtcagctccga

SEQ ID NO: 1516904 - DNA, 25 bp, Homo sapien
cggccacgtcgagggaaggtcaggg

SEQ ID NO: 1516905 - DNA, 25 bp, Homo sapien
cattcaaagtccttgtgcacgcccc

SEQ ID NO: 1516906 - DNA, 25 bp, Homo sapien
gggtggcgccctacagctgggcggg

SEQ ID NO: 1516907 - DNA, 25 bp, Homo sapien
atcctccacgttttcgggcgacgag

SEQ ID NO: 1516908 - DNA, 25 bp, Homo sapien
gtgccgcgtgggacggagagtccag

SEQ ID NO: 1516909 - DNA, 25 bp, Homo sapien
ggctgcggcgagtctggcagaggcg

SEQ ID NO: 1516910 - DNA, 25 bp, Homo sapien
ggacaccttcctagagcgaagtctc

SEQ ID NO: 1516911 - DNA, 25 bp, Homo sapien
ccttcctagagcgaagtctcctggg

SEQ ID NO: 1516912 - DNA, 25 bp, Homo sapien
tcctagagcgaagtctcctgggtgg

SEQ ID NO: 1516913 - DNA, 25 bp, Homo sapien
caggtccccattgctacgtgtgaga

SEQ ID NO: 1516914 - DNA, 25 bp, Homo sapien
cgtgtcctgtctgggataagaagct

SEQ ID NO: 1516915 - DNA, 25 bp, Homo sapien
aagctgggccgttccaaggcagtgc

SEQ ID NO: 1516916 - DNA, 25 bp, Homo sapien
ggataagaagctgggccgttccaag

SEQ ID NO: 1516917 - DNA, 25 bp, Homo sapien
ttccaaggcagtgctggcggctgaa

SEQ ID NO: 1516918 - DNA, 25 bp, Homo sapien
ccagaccagagaaggtgacactgag

SEQ ID NO: 1516919 - DNA, 25 bp, Homo sapien
aagccaggcccaggaccgccctcac

SEQ ID NO: 1516920 - DNA, 25 bp, Homo sapien
agaccagagaaggtgacactgaggc

SEQ ID NO: 1516921 - DNA, 25 bp, Homo sapien
caaagccaggcccaggaccgccctc

SEQ ID NO: 1516922 - DNA, 25 bp, Homo sapien
gctgtggccacggaagtaggcgtgg

SEQ ID NO: 1516923 - DNA, 25 bp, Homo sapien
gccacggaagtaggcgtggacatac

SEQ ID NO: 1516924 - DNA, 25 bp, Homo sapien
taggcgtggacatactctgtgaagg

SEQ ID NO: 1516925 - DNA, 25 bp, Homo sapien
gacatactctgtgaaggctgtggct

SEQ ID NO: 1516926 - DNA, 25 bp, Homo sapien
ctgaacagcagatcggcgttgggct

SEQ ID NO: 1516927 - DNA, 25 bp, Homo sapien
cacgatgccagcagggaaggtcatg

SEQ ID NO: 1516928 - DNA, 25 bp, Homo sapien
tacaagccggaagctgaggacaggt

SEQ ID NO: 1516929 - DNA, 25 bp, Homo sapien
caatagcggttgtgtgtacaagccg

SEQ ID NO: 1516930 - DNA, 25 bp, Homo sapien
gcaccacgttgtagtaggaggcagt

SEQ ID NO: 1516931 - DNA, 25 bp, Homo sapien
agcagcaccacgttgtagtaggagg

SEQ ID NO: 1516932 - DNA, 25 bp, Homo sapien
gcgctgcagggcttcggtcagagct

SEQ ID NO: 1516933 - DNA, 25 bp, Homo sapien
tcggtcagagctgccatgttgagcc

SEQ ID NO: 1516934 - DNA, 25 bp, Homo sapien
gcagaggcacagactggggacccgg

SEQ ID NO: 1516935 - DNA, 25 bp, Homo sapien
ctgcagaggcacagactggggaccc

SEQ ID NO: 1516936 - DNA, 25 bp, Homo sapien
gaggcacagactggggacccgggcg

SEQ ID NO: 1516937 - DNA, 25 bp, Homo sapien
agaggcacagactggggacccgggc

SEQ ID NO: 1516938 - DNA, 25 bp, Homo sapien
tgcaagcggacgttggtcacaggct

SEQ ID NO: 1516939 - DNA, 25 bp, Homo sapien
tgggcacagccgtggcaccgggccg

SEQ ID NO: 1516940 - DNA, 25 bp, Homo sapien
cagcaggatctggacgttcgtgagt

SEQ ID NO: 1516941 - DNA, 25 bp, Homo sapien
gtagccgtactccactgagacctgg

SEQ ID NO: 1516942 - DNA, 25 bp, Homo sapien
ctggaagcctccaagtgagccgctt

SEQ ID NO: 1516943 - DNA, 25 bp, Homo sapien
gcctgcctcggacacatctggaagc

SEQ ID NO: 1516944 - DNA, 25 bp, Homo sapien
gaagcctccaagtgagccgcttctc

SEQ ID NO: 1516945 - DNA, 25 bp, Homo sapien
agcctccaagtgagccgcttctcct

SEQ ID NO: 1516946 - DNA, 25 bp, Homo sapien
gagtggtcccctcgctggtgaactg

SEQ ID NO: 1516947 - DNA, 25 bp, Homo sapien
agttccaagtccacgcccgacagag

SEQ ID NO: 1516948 - DNA, 25 bp, Homo sapien
atgcggtaaccgctgcccaccagtt

SEQ ID NO: 1516949 - DNA, 25 bp, Homo sapien
agcgacatgcggtaaccgctgccca

SEQ ID NO: 1516950 - DNA, 25 bp, Homo sapien
cagcaccagggcgcagtgtagagct

SEQ ID NO: 1516951 - DNA, 25 bp, Homo sapien
caccagggcgcagtgtagagctggg

SEQ ID NO: 1516952 - DNA, 25 bp, Homo sapien
catgagggggaggagcgaatctcgg

SEQ ID NO: 1516953 - DNA, 25 bp, Homo sapien
ctctccgtggagtatgggcctcagg

SEQ ID NO: 1516954 - DNA, 25 bp, Homo sapien
cattaggtctctcgtatccatccac

SEQ ID NO: 1516955 - DNA, 25 bp, Homo sapien
gagggaggtacattaggtctctcgt

SEQ ID NO: 1516956 - DNA, 25 bp, Homo sapien
ccagaatggccctgtaccggttgag

SEQ ID NO: 1516957 - DNA, 25 bp, Homo sapien
cctgtaccggttgagcgcagtgcag

SEQ ID NO: 1516958 - DNA, 25 bp, Homo sapien
cccagacgacagtcccgcctctgcc

SEQ ID NO: 1516959 - DNA, 25 bp, Homo sapien
ctcagctcgcgagccgaagaaagag

SEQ ID NO: 1516960 - DNA, 25 bp, Homo sapien
tcctctcagctcgcgagccgaagaa

SEQ ID NO: 1516961 - DNA, 25 bp, Homo sapien
tgctcctctcagctcgcgagccgaa

SEQ ID NO: 1516962 - DNA, 25 bp, Homo sapien
cctggaacagagaagcaccaaggcc

SEQ ID NO: 1516963 - DNA, 25 bp, Homo sapien
aggttccgaggacacagccaagatg

SEQ ID NO: 1516964 - DNA, 25 bp, Homo sapien
atgatggagagaaacactcgtgtgc

SEQ ID NO: 1516965 - DNA, 25 bp, Homo sapien
ctcgtgtgcccaggacgctgataca

SEQ ID NO: 1516966 - DNA, 25 bp, Homo sapien
ctagcgtatgccacatctgggtcta

SEQ ID NO: 1516967 - DNA, 25 bp, Homo sapien
gccagccagggtctggggtcggcct

SEQ ID NO: 1516968 - DNA, 25 bp, Homo sapien
cagccagggtctggggtcggcctga

SEQ ID NO: 1516969 - DNA, 25 bp, Homo sapien
ctggccagccagggtctggggtcgg

SEQ ID NO: 1516970 - DNA, 25 bp, Homo sapien
gcctgaggagcctcctgggcggctc

SEQ ID NO: 1516971 - DNA, 25 bp, Homo sapien
gagggtggcattgggccgccggtgc

SEQ ID NO: 1516972 - DNA, 25 bp, Homo sapien
tgggtggtgacactagcagactgaa

SEQ ID NO: 1516973 - DNA, 25 bp, Homo sapien
gccgccggtgccggagatacttcat

SEQ ID NO: 1516974 - DNA, 25 bp, Homo sapien
tgaaagcgccgatggccagaatgag

SEQ ID NO: 1516975 - DNA, 25 bp, Homo sapien
catagaggtgttggcatggcacggg

SEQ ID NO: 1516976 - DNA, 25 bp, Homo sapien
ctgcggctgcgtggcgaagtccggg

SEQ ID NO: 1516977 - DNA, 25 bp, Homo sapien
gtggcggcagtgtctgtacaggagg

SEQ ID NO: 1516978 - DNA, 25 bp, Homo sapien
aggaagttctgaacgtgctgcggct

SEQ ID NO: 1516979 - DNA, 25 bp, Homo sapien
gaggggggcacgtcctgcagcaggg

SEQ ID NO: 1516980 - DNA, 25 bp, Homo sapien
cttagaggggggcacgtcctgcagc

SEQ ID NO: 1516981 - DNA, 25 bp, Homo sapien
tagaggggggcacgtcctgcagcag

SEQ ID NO: 1516982 - DNA, 25 bp, Homo sapien
ttagaggggggcacgtcctgcagca

SEQ ID NO: 1516983 - DNA, 25 bp, Homo sapien
taggggaggacttgatcaccagcag

SEQ ID NO: 1516984 - DNA, 25 bp, Homo sapien
cagctcgcggcgcacatagttgcta

SEQ ID NO: 1516985 - DNA, 25 bp, Homo sapien
ccggttgaccttgcgggcctcgtgc

SEQ ID NO: 1516986 - DNA, 25 bp, Homo sapien
ggatgtctccgtgagtctgtgcctc

SEQ ID NO: 1516987 - DNA, 25 bp, Homo sapien
cctgacctgtgtgattgttaacatc

SEQ ID NO: 1516988 - DNA, 25 bp, Homo sapien
gacctgtgtgattgttaacatcccc

SEQ ID NO: 1516989 - DNA, 25 bp, Homo sapien
tgccagtgcttcacgggtgctgggt

SEQ ID NO: 1516990 - DNA, 25 bp, Homo sapien
tctcccaccaaacactggacttccc

SEQ ID NO: 1516991 - DNA, 25 bp, Homo sapien
gtgtgtgcaaagacgtcatcatccc

SEQ ID NO: 1516992 - DNA, 25 bp, Homo sapien
aagacgtcatcatccccgttgagca

SEQ ID NO: 1516993 - DNA, 25 bp, Homo sapien
cccgttgagcacgaagctggcgttg

SEQ ID NO: 1516994 - DNA, 25 bp, Homo sapien
tggcgttggcgcaccttgtctcctg

SEQ ID NO: 1516995 - DNA, 25 bp, Homo sapien
ccagcagcaggtctcggtagaagca

SEQ ID NO: 1516996 - DNA, 25 bp, Homo sapien
tctcataaggtaggaagcggtgcac

SEQ ID NO: 1516997 - DNA, 25 bp, Homo sapien
tttggatcagttgccccacgaagag

SEQ ID NO: 1516998 - DNA, 25 bp, Homo sapien
tacttgctccaaaaagcccggatgg

SEQ ID NO: 1516999 - DNA, 25 bp, Homo sapien
tctgtgtctgattgccgcaggtgag

SEQ ID NO: 1517000 - DNA, 25 bp, Homo sapien
tgaggttgggctggttcagcgcatc

SEQ ID NO: 1517001 - DNA, 25 bp, Homo sapien
tcagtagatctgtgtctgattgccg

SEQ ID NO: 1517002 - DNA, 25 bp, Homo sapien
tagatctgtgtctgattgccgcagg

SEQ ID NO: 1517003 - DNA, 25 bp, Homo sapien
cacagttggaactctagcacaggca

SEQ ID NO: 1517004 - DNA, 25 bp, Homo sapien
actttgactcaaacgggacggatgc

SEQ ID NO: 1517005 - DNA, 25 bp, Homo sapien
catttgatcccacaagtaaggaggg

SEQ ID NO: 1517006 - DNA, 25 bp, Homo sapien
catatgcctgttggccttgggccca

SEQ ID NO: 1517007 - DNA, 25 bp, Homo sapien
ggcacatgcctgtaacctgtaatcc

SEQ ID NO: 1517008 - DNA, 25 bp, Homo sapien
cacatgcctgtaacctgtaatccca

SEQ ID NO: 1517009 - DNA, 25 bp, Homo sapien
gctacttgggaggctgaggcaggag

SEQ ID NO: 1517010 - DNA, 25 bp, Homo sapien
aattgtttgaatctgggaggcggaa

SEQ ID NO: 1517011 - DNA, 25 bp, Homo sapien
taaggtgggtctgtatcagctgacc

SEQ ID NO: 1517012 - DNA, 25 bp, Homo sapien
catccaatccagctaagagcatctc

SEQ ID NO: 1517013 - DNA, 25 bp, Homo sapien
caaagctcttattgctcccgggaac

SEQ ID NO: 1517014 - DNA, 25 bp, Homo sapien
ccaaccagggaaggcaagcctggta

SEQ ID NO: 1517015 - DNA, 25 bp, Homo sapien
ccataagtgggcactaccacactgg

SEQ ID NO: 1517016 - DNA, 25 bp, Homo sapien
cataagtgggcactaccacactggg

SEQ ID NO: 1517017 - DNA, 25 bp, Homo sapien
gaccataagtgggcactaccacact

SEQ ID NO: 1517018 - DNA, 25 bp, Homo sapien
taagtgggcactaccacactgggct

SEQ ID NO: 1517019 - DNA, 25 bp, Homo sapien
cctggcccagtcatcggatttaggg

SEQ ID NO: 1517020 - DNA, 25 bp, Homo sapien
ccctgatggcaatagggagccacag

SEQ ID NO: 1517021 - DNA, 25 bp, Homo sapien
gacactactcaatccagtggagcag

SEQ ID NO: 1517022 - DNA, 25 bp, Homo sapien
tcagacatgaattcttgccagacac

SEQ ID NO: 1517023 - DNA, 25 bp, Homo sapien
aataaataccctggtgtggtcgctc

SEQ ID NO: 1517024 - DNA, 25 bp, Homo sapien
tagctgggcattgtattgcaggcct

SEQ ID NO: 1517025 - DNA, 25 bp, Homo sapien
tatgatcctgccattacaggccaac

SEQ ID NO: 1517026 - DNA, 25 bp, Homo sapien
aacccagagagatcctatgtcaaaa

SEQ ID NO: 1517027 - DNA, 25 bp, Homo sapien
taagacaatagcgaagacttggccg

SEQ ID NO: 1517028 - DNA, 25 bp, Homo sapien
gagacagagcttcggatgggacacc

SEQ ID NO: 1517029 - DNA, 25 bp, Homo sapien
cgtgtcaggcgccttgagaagacct

SEQ ID NO: 1517030 - DNA, 25 bp, Homo sapien
gacttggccgtgtgtggtgcctcac

SEQ ID NO: 1517031 - DNA, 25 bp, Homo sapien
tcagagtaaggaggttaagagccca

SEQ ID NO: 1517032 - DNA, 25 bp, Homo sapien
ttcacgcaatcaagggaaggaaagg

SEQ ID NO: 1517033 - DNA, 25 bp, Homo sapien
taatggtatctgagtgtcctagggc

SEQ ID NO: 1517034 - DNA, 25 bp, Homo sapien
gaacagcatgccaagcgtgagaagg

SEQ ID NO: 1517035 - DNA, 25 bp, Homo sapien
gccgccacccgcaaaaggaagtgtc

SEQ ID NO: 1517036 - DNA, 25 bp, Homo sapien
cgtgctctccgcgttcgccgccacc

SEQ ID NO: 1517037 - DNA, 25 bp, Homo sapien
ccacccgcaaaaggaagtgtcctct

SEQ ID NO: 1517038 - DNA, 25 bp, Homo sapien
gcgttcgccgccacccgcaaaagga

SEQ ID NO: 1517039 - DNA, 25 bp, Homo sapien
tagggcctctatgctgcgcgactta

SEQ ID NO: 1517040 - DNA, 25 bp, Homo sapien
gccacgtccacgttgcagaaaggaa

SEQ ID NO: 1517041 - DNA, 25 bp, Homo sapien
tatgctgcgcgacttattccttccc

SEQ ID NO: 1517042 - DNA, 25 bp, Homo sapien
aaacagaaacttggcggctcgacga

SEQ ID NO: 1517043 - DNA, 25 bp, Homo sapien
gctggagatctggacataatacacc

SEQ ID NO: 1517044 - DNA, 25 bp, Homo sapien
tccagtatgtaccacagcgttaagc

SEQ ID NO: 1517045 - DNA, 25 bp, Homo sapien
tatctctgcgccatagagccgtttg

SEQ ID NO: 1517046 - DNA, 25 bp, Homo sapien
cctcggcacacgttcaggaagggaa

SEQ ID NO: 1517047 - DNA, 25 bp, Homo sapien
tccaggcagaactaggacaagacct

SEQ ID NO: 1517048 - DNA, 25 bp, Homo sapien
tcttctttcaccctgaggcccagtg

SEQ ID NO: 1517049 - DNA, 25 bp, Homo sapien
gaattgctttgcagtcgccgtcaaa

SEQ ID NO: 1517050 - DNA, 25 bp, Homo sapien
tctagtgaccacagattcgggaagc

SEQ ID NO: 1517051 - DNA, 25 bp, Homo sapien
gcgacccactaccttgtactctcgt

SEQ ID NO: 1517052 - DNA, 25 bp, Homo sapien
ttcgcatgcggtagaggggcggcgt

SEQ ID NO: 1517053 - DNA, 25 bp, Homo sapien
gcatgcggtagaggggcggcgtgtg

SEQ ID NO: 1517054 - DNA, 25 bp, Homo sapien
tgggcaggcagcgacccactacctt

SEQ ID NO: 1517055 - DNA, 25 bp, Homo sapien
gaaatggcacataagctctgctcca

SEQ ID NO: 1517056 - DNA, 25 bp, Homo sapien
tgagatgcacgatgtcccaagaggc

SEQ ID NO: 1517057 - DNA, 25 bp, Homo sapien
tcctcacttaacagacagggcccag

SEQ ID NO: 1517058 - DNA, 25 bp, Homo sapien
gagcgtgaggtaagggaacttccca

SEQ ID NO: 1517059 - DNA, 25 bp, Homo sapien
ggagtcatagcgcagccagatcccg

SEQ ID NO: 1517060 - DNA, 25 bp, Homo sapien
gatcccgaagttcttcacccgcagg

SEQ ID NO: 1517061 - DNA, 25 bp, Homo sapien
caggtcccggtattcccggtacatg

SEQ ID NO: 1517062 - DNA, 25 bp, Homo sapien
cagcgcctgcggtggtcaggtcccg

SEQ ID NO: 1517063 - DNA, 25 bp, Homo sapien
tgtgatttacaaccgagcctggcag

SEQ ID NO: 1517064 - DNA, 25 bp, Homo sapien
ggatcccagtctaaacaaggtgcag

SEQ ID NO: 1517065 - DNA, 25 bp, Homo sapien
tcaattcggttctcagtgggtccca

SEQ ID NO: 1517066 - DNA, 25 bp, Homo sapien
gggctctcagaaaagcgccatctgg

SEQ ID NO: 1517067 - DNA, 25 bp, Homo sapien
aattcactttgaggggcacggccac

SEQ ID NO: 1517068 - DNA, 25 bp, Homo sapien
ccaaattcactttgaggggcacggc

SEQ ID NO: 1517069 - DNA, 25 bp, Homo sapien
cgacaagatccgcttgctgtttgca

SEQ ID NO: 1517070 - DNA, 25 bp, Homo sapien
aaaggcgacaagatccgcttgctgt

SEQ ID NO: 1517071 - DNA, 25 bp, Homo sapien
gggaagcgagatagcccaaggcctg

SEQ ID NO: 1517072 - DNA, 25 bp, Homo sapien
tgttggtcacagcaactgcctgagg

SEQ ID NO: 1517073 - DNA, 25 bp, Homo sapien
ggtccctgcagtcactggccactag

SEQ ID NO: 1517074 - DNA, 25 bp, Homo sapien
caatgacctgacacatcctgttggt

SEQ ID NO: 1517075 - DNA, 25 bp, Homo sapien
tcatgatctgaatggagtgggctcg

SEQ ID NO: 1517076 - DNA, 25 bp, Homo sapien
ttcatgatctgaatggagtgggctc

SEQ ID NO: 1517077 - DNA, 25 bp, Homo sapien
gtgggctcgggcgcggtgccgggca

SEQ ID NO: 1517078 - DNA, 25 bp, Homo sapien
cggtgccgggcacccatgtctcggt

SEQ ID NO: 1517079 - DNA, 25 bp, Homo sapien
agagcaggcacttccctccagggga

SEQ ID NO: 1517080 - DNA, 25 bp, Homo sapien
caggggagtcccccagggcactcac

SEQ ID NO: 1517081 - DNA, 25 bp, Homo sapien
tcagagcaggcacttccctccaggg

SEQ ID NO: 1517082 - DNA, 25 bp, Homo sapien
gcaggcacttccctccaggggagtc

SEQ ID NO: 1517083 - DNA, 25 bp, Homo sapien
ggcttgtgctgacggcgcaggaccc

SEQ ID NO: 1517084 - DNA, 25 bp, Homo sapien
gtggcttgtgctgacggcgcaggac

SEQ ID NO: 1517085 - DNA, 25 bp, Homo sapien
cccggtggggcagcgggaacttgat

SEQ ID NO: 1517086 - DNA, 25 bp, Homo sapien
agcgtggcttgtgctgacggcgcag

SEQ ID NO: 1517087 - DNA, 25 bp, Homo sapien
tgagtttatttggggcacacccgga

SEQ ID NO: 1517088 - DNA, 25 bp, Homo sapien
ttcctgagtttatttggggcacacc

SEQ ID NO: 1517089 - DNA, 25 bp, Homo sapien
cctgagtttatttggggcacacccg

SEQ ID NO: 1517090 - DNA, 25 bp, Homo sapien
tcctgagtttatttggggcacaccc

SEQ ID NO: 1517091 - DNA, 25 bp, Homo sapien
cagaatgggtgcttgtgtgctgacc

SEQ ID NO: 1517092 - DNA, 25 bp, Homo sapien
gctacagtaagccacgatctctcca

SEQ ID NO: 1517093 - DNA, 25 bp, Homo sapien
tcaggcctgggtcttacgcagaatg

SEQ ID NO: 1517094 - DNA, 25 bp, Homo sapien
tctgtggtctacagggctgtcctca

SEQ ID NO: 1517095 - DNA, 25 bp, Homo sapien
tcgatgtccgtgtcggcctccctgt

SEQ ID NO: 1517096 - DNA, 25 bp, Homo sapien
tgctcagcgctgacagctggaggtc

SEQ ID NO: 1517097 - DNA, 25 bp, Homo sapien
gaatctatgggctgtcgatgtccgt

SEQ ID NO: 1517098 - DNA, 25 bp, Homo sapien
tctgggttccgctgtcccatgcagc

SEQ ID NO: 1517099 - DNA, 25 bp, Homo sapien
gaggatgctcggcagcctgtccccg

SEQ ID NO: 1517100 - DNA, 25 bp, Homo sapien
gggcgggtgggaggatgctcggcag

SEQ ID NO: 1517101 - DNA, 25 bp, Homo sapien
tgtccccgctccgtctggggtggga

SEQ ID NO: 1517102 - DNA, 25 bp, Homo sapien
cctgcgtgctcaagcgggggaagct

SEQ ID NO: 1517103 - DNA, 25 bp, Homo sapien
tgcacggccgacatgaagctggcag

SEQ ID NO: 1517104 - DNA, 25 bp, Homo sapien
gaacttgaggccatagcgataggcc

SEQ ID NO: 1517105 - DNA, 25 bp, Homo sapien
ggtgaagaagtcctcagcgctgcgc

SEQ ID NO: 1517106 - DNA, 25 bp, Homo sapien
tgaggaccgagttcagaagctggcc

SEQ ID NO: 1517107 - DNA, 25 bp, Homo sapien
gcacagtgtagacagtgccccgggc

SEQ ID NO: 1517108 - DNA, 25 bp, Homo sapien
aggactggtccatgcgtgtgcacgc

SEQ ID NO: 1517109 - DNA, 25 bp, Homo sapien
gacgtggcccgcaagcgcacagtgt

SEQ ID NO: 1517110 - DNA, 25 bp, Homo sapien
gtgcctgtgcgtaccccgtggacct

SEQ ID NO: 1517111 - DNA, 25 bp, Homo sapien
cagattcttgcacgtgggggccccg

SEQ ID NO: 1517112 - DNA, 25 bp, Homo sapien
tccggaagccaaccgcgcccgccag

SEQ ID NO: 1517113 - DNA, 25 bp, Homo sapien
aaccgcgcccgccagattcttgcac

SEQ ID NO: 1517114 - DNA, 25 bp, Homo sapien
cgcccgccagattcttgcacgtggg

SEQ ID NO: 1517115 - DNA, 25 bp, Homo sapien
cgcagagccgcactgcgcggctgaa

SEQ ID NO: 1517116 - DNA, 25 bp, Homo sapien
atgtactgcaaagtcccgcagagcc

SEQ ID NO: 1517117 - DNA, 25 bp, Homo sapien
tgtactgcaaagtcccgcagagccg

SEQ ID NO: 1517118 - DNA, 25 bp, Homo sapien
actgcgcggctgaagcgcatctcca

SEQ ID NO: 1517119 - DNA, 25 bp, Homo sapien
ctgtagacagagtgtggggcgggtg

SEQ ID NO: 1517120 - DNA, 25 bp, Homo sapien
tgtagacagagtgtggggcgggtga

SEQ ID NO: 1517121 - DNA, 25 bp, Homo sapien
gtgcgtagattacgatgccggtgta

SEQ ID NO: 1517122 - DNA, 25 bp, Homo sapien
gtagattacgatgccggtgtacagc

SEQ ID NO: 1517123 - DNA, 25 bp, Homo sapien
ccggtgcgtagattacgatgccggt

SEQ ID NO: 1517124 - DNA, 25 bp, Homo sapien
ggatgagggccggtgcgtagattac

SEQ ID NO: 1517125 - DNA, 25 bp, Homo sapien
cacagccgtgtagaaggtgcagata

SEQ ID NO: 1517126 - DNA, 25 bp, Homo sapien
ataattccggtggacaggagcgacg

SEQ ID NO: 1517127 - DNA, 25 bp, Homo sapien
aggagcgacgcccagatgtccagcc

SEQ ID NO: 1517128 - DNA, 25 bp, Homo sapien
gaaggtgcagataattccggtggac

SEQ ID NO: 1517129 - DNA, 25 bp, Homo sapien
acaagcatgacaccgcgtgccagga

SEQ ID NO: 1517130 - DNA, 25 bp, Homo sapien
cagaagccacttagcatcaccacga

SEQ ID NO: 1517131 - DNA, 25 bp, Homo sapien
aacacatcagtccagaccacagcct

SEQ ID NO: 1517132 - DNA, 25 bp, Homo sapien
tcaccacgacctggaacacatcagt

SEQ ID NO: 1517133 - DNA, 25 bp, Homo sapien
gtggttctgggccagcgtgagcacc

SEQ ID NO: 1517134 - DNA, 25 bp, Homo sapien
gttgatccgggagtggttctgggcc

SEQ ID NO: 1517135 - DNA, 25 bp, Homo sapien
tggttctgggccagcgtgagcacct

SEQ ID NO: 1517136 - DNA, 25 bp, Homo sapien
gaggttgatccgggagtggttctgg

SEQ ID NO: 1517137 - DNA, 25 bp, Homo sapien
tatagcggctcctcgggtcagggtt

SEQ ID NO: 1517138 - DNA, 25 bp, Homo sapien
gcctgcttctctgtgcggcaagcca

SEQ ID NO: 1517139 - DNA, 25 bp, Homo sapien
cctggttcacgccatacatggagag

SEQ ID NO: 1517140 - DNA, 25 bp, Homo sapien
caaaagtccagaatgtatagcggct

SEQ ID NO: 1517141 - DNA, 25 bp, Homo sapien
cagtcagtgtagaacacaaacatga

SEQ ID NO: 1517142 - DNA, 25 bp, Homo sapien
gacacgatcaggaacaggccgacct

SEQ ID NO: 1517143 - DNA, 25 bp, Homo sapien
cgatcaggaacaggccgacctggtt

SEQ ID NO: 1517144 - DNA, 25 bp, Homo sapien
ggaggagagggtcgcagtcagtgta

SEQ ID NO: 1517145 - DNA, 25 bp, Homo sapien
gatcttcgaagatgtccagcaccag

SEQ ID NO: 1517146 - DNA, 25 bp, Homo sapien
tcttcgaagatgtccagcaccagca

SEQ ID NO: 1517147 - DNA, 25 bp, Homo sapien
atcttcgaagatgtccagcaccagc

SEQ ID NO: 1517148 - DNA, 25 bp, Homo sapien
ggtcttctacagtgactgcagccat

SEQ ID NO: 1517149 - DNA, 25 bp, Homo sapien
tgcagccatagcattgatgctggtg

SEQ ID NO: 1517150 - DNA, 25 bp, Homo sapien
tgatgaggtcttctacagtgactgc

SEQ ID NO: 1517151 - DNA, 25 bp, Homo sapien
ctccgcagccgaggtttgatgaggt

SEQ ID NO: 1517152 - DNA, 25 bp, Homo sapien
gctgccacggtgagacaggccgatc

SEQ ID NO: 1517153 - DNA, 25 bp, Homo sapien
agacaggccgatccgtagatgagtg

SEQ ID NO: 1517154 - DNA, 25 bp, Homo sapien
cacggtgagacaggccgatccgtag

SEQ ID NO: 1517155 - DNA, 25 bp, Homo sapien
cacctcctccgagcagtgaggacag

SEQ ID NO: 1517156 - DNA, 25 bp, Homo sapien
gatgactcccatgacggtgaaggag

SEQ ID NO: 1517157 - DNA, 25 bp, Homo sapien
tgactcccatgacggtgaaggagcc

SEQ ID NO: 1517158 - DNA, 25 bp, Homo sapien
tgcaggccggcaggaacattcccaa

SEQ ID NO: 1517159 - DNA, 25 bp, Homo sapien
cggtgtgttgcaggccggcaggaac

SEQ ID NO: 1517160 - DNA, 25 bp, Homo sapien
tcatggtctgctcgctgggtgggta

SEQ ID NO: 1517161 - DNA, 25 bp, Homo sapien
ccagaggcgttgactgagagagcca

SEQ ID NO: 1517162 - DNA, 25 bp, Homo sapien
agccgacgatggcaggaccctcatg

SEQ ID NO: 1517163 - DNA, 25 bp, Homo sapien
tggagtcgttagcagggaggagagc

SEQ ID NO: 1517164 - DNA, 25 bp, Homo sapien
gcccagggcaccgtaatagagatag

SEQ ID NO: 1517165 - DNA, 25 bp, Homo sapien
cagcacagtggtcagcgtgcccagg

SEQ ID NO: 1517166 - DNA, 25 bp, Homo sapien
gggtcggctggcgtccattcctgag

SEQ ID NO: 1517167 - DNA, 25 bp, Homo sapien
taggagatggcatagaagctgtcag

SEQ ID NO: 1517168 - DNA, 25 bp, Homo sapien
ctgatgctgtctgccgtgcgaggtc

SEQ ID NO: 1517169 - DNA, 25 bp, Homo sapien
acaacaatcccggggccagggtgct

SEQ ID NO: 1517170 - DNA, 25 bp, Homo sapien
gtcatccaggatggccacttcttcc

SEQ ID NO: 1517171 - DNA, 25 bp, Homo sapien
cttgaccaagttgtcatccaggatg

SEQ ID NO: 1517172 - DNA, 25 bp, Homo sapien
ccttctgccccaagaaaaacagacg

SEQ ID NO: 1517173 - DNA, 25 bp, Homo sapien
ttccagtggggagttcttcaggacc

SEQ ID NO: 1517174 - DNA, 25 bp, Homo sapien
catgtccaacacagggggtccaaga

SEQ ID NO: 1517175 - DNA, 25 bp, Homo sapien
aacagacgatcctcattggtgggca

SEQ ID NO: 1517176 - DNA, 25 bp, Homo sapien
gggacacaacccaattcgagagcct

SEQ ID NO: 1517177 - DNA, 25 bp, Homo sapien
tcgagagcctccattgtcaggtgag

SEQ ID NO: 1517178 - DNA, 25 bp, Homo sapien
aatccttgggttctccgactcgtag

SEQ ID NO: 1517179 - DNA, 25 bp, Homo sapien
cagggctgcagcgtctaatactggg

SEQ ID NO: 1517180 - DNA, 25 bp, Homo sapien
gtaaaaattagagttcaccagtcca

SEQ ID NO: 1517181 - DNA, 25 bp, Homo sapien
tggcctagggtggaaactttagcac

SEQ ID NO: 1517182 - DNA, 25 bp, Homo sapien
taaactggttccagccaaccaggtg

SEQ ID NO: 1517183 - DNA, 25 bp, Homo sapien
ggtgaccacattctacatggggttc

SEQ ID NO: 1517184 - DNA, 25 bp, Homo sapien
tatctactgtcagatccagccattt

SEQ ID NO: 1517185 - DNA, 25 bp, Homo sapien
ccaaaagaacgcaggttttgatcaa

SEQ ID NO: 1517186 - DNA, 25 bp, Homo sapien
cttctagataccccaagaaaaatga

SEQ ID NO: 1517187 - DNA, 25 bp, Homo sapien
tattacttgtcccaagtaagcaaag

SEQ ID NO: 1517188 - DNA, 25 bp, Homo sapien
gagagtcttgagtctgtgacccaac

SEQ ID NO: 1517189 - DNA, 25 bp, Homo sapien
aacctacaggtccagccttctgcag

SEQ ID NO: 1517190 - DNA, 25 bp, Homo sapien
cagcctgtgcttccgtgcaggatgg

SEQ ID NO: 1517191 - DNA, 25 bp, Homo sapien
tcagagttggagacaaacctacagg

SEQ ID NO: 1517192 - DNA, 25 bp, Homo sapien
gtggtccggcggcttcagcctggag

SEQ ID NO: 1517193 - DNA, 25 bp, Homo sapien
ctttaccaagatggccgatgcccgg

SEQ ID NO: 1517194 - DNA, 25 bp, Homo sapien
ccgatgcccggatgaaagatggcag

SEQ ID NO: 1517195 - DNA, 25 bp, Homo sapien
gggcagaggcgaaaatctagaacat

SEQ ID NO: 1517196 - DNA, 25 bp, Homo sapien
ttaatatgttgatgaaccaggaggg

SEQ ID NO: 1517197 - DNA, 25 bp, Homo sapien
ctgggcctcggacccaagccagggt

SEQ ID NO: 1517198 - DNA, 25 bp, Homo sapien
tccgtgacgtcatcatggggcctgc

SEQ ID NO: 1517199 - DNA, 25 bp, Homo sapien
ggcgcgcactcattgcgcctcagta

SEQ ID NO: 1517200 - DNA, 25 bp, Homo sapien
cagtaccgccgccattttggtaaag

SEQ ID NO: 1517201 - DNA, 25 bp, Homo sapien
cacaagccctctggggttagtgagg

SEQ ID NO: 1517202 - DNA, 25 bp, Homo sapien
cttagaagcgaatcaagacccatgg

SEQ ID NO: 1517203 - DNA, 25 bp, Homo sapien
gagcccaggcggtacccagggagtg

SEQ ID NO: 1517204 - DNA, 25 bp, Homo sapien
gcccaatctatgggtcacacaagcc

SEQ ID NO: 1517205 - DNA, 25 bp, Homo sapien
tagcgctctccttgtaaaagtttat

SEQ ID NO: 1517206 - DNA, 25 bp, Homo sapien
aagggctttggacttagcgctctcc

SEQ ID NO: 1517207 - DNA, 25 bp, Homo sapien
tgacaccaaatgagctcatttaggc

SEQ ID NO: 1517208 - DNA, 25 bp, Homo sapien
ttcacatcatgacaccaaatgagct

SEQ ID NO: 1517209 - DNA, 25 bp, Homo sapien
tccttcctcatgacgtgtttgtcgt

SEQ ID NO: 1517210 - DNA, 25 bp, Homo sapien
ttcttggcatcagcggccgccttgg

SEQ ID NO: 1517211 - DNA, 25 bp, Homo sapien
ggccgctgccgacttggtgttctca

SEQ ID NO: 1517212 - DNA, 25 bp, Homo sapien
tgtttgtcgtcgtccttccagtagg

SEQ ID NO: 1517213 - DNA, 25 bp, Homo sapien
attcacccacattgacataatgacc

SEQ ID NO: 1517214 - DNA, 25 bp, Homo sapien
ttggccacaaggcatgcgggccgcg

SEQ ID NO: 1517215 - DNA, 25 bp, Homo sapien
gctcagagggccctctcgctattca

SEQ ID NO: 1517216 - DNA, 25 bp, Homo sapien
tccctcctggcctttcagaccaaag

SEQ ID NO: 1517217 - DNA, 25 bp, Homo sapien
tgaagtgaggagaggtatcactggt

SEQ ID NO: 1517218 - DNA, 25 bp, Homo sapien
aactcacgggggctgagaatattct

SEQ ID NO: 1517219 - DNA, 25 bp, Homo sapien
tatgagggaaactcacgggggctga

SEQ ID NO: 1517220 - DNA, 25 bp, Homo sapien
tgcctggccaatgcatgatgtttga

SEQ ID NO: 1517221 - DNA, 25 bp, Homo sapien
gttccagctggtcgaggcgccgctt

SEQ ID NO: 1517222 - DNA, 25 bp, Homo sapien
tccagctggtcgaggcgccgcttct

SEQ ID NO: 1517223 - DNA, 25 bp, Homo sapien
cgaggcgccgcttctccttctcctc

SEQ ID NO: 1517224 - DNA, 25 bp, Homo sapien
gtcgaggcgccgcttctccttctcc

SEQ ID NO: 1517225 - DNA, 25 bp, Homo sapien
gccttgccgcccttgagcttggagt

SEQ ID NO: 1517226 - DNA, 25 bp, Homo sapien
tcctcctccagtaggcgctgcgtct

SEQ ID NO: 1517227 - DNA, 25 bp, Homo sapien
agtaggcgctgcgtctccttcttac

SEQ ID NO: 1517228 - DNA, 25 bp, Homo sapien
cttgctggacgtggccacccgcggc

SEQ ID NO: 1517229 - DNA, 25 bp, Homo sapien
agctgatggtctcggcgcagcgtgt

SEQ ID NO: 1517230 - DNA, 25 bp, Homo sapien
atggtctcggcgcagcgtgtcctcg

SEQ ID NO: 1517231 - DNA, 25 bp, Homo sapien
tgatggtctcggcgcagcgtgtcct

SEQ ID NO: 1517232 - DNA, 25 bp, Homo sapien
tgagctgatggtctcggcgcagcgt

SEQ ID NO: 1517233 - DNA, 25 bp, Homo sapien
tgcagctccagagcgggatgccgcc

SEQ ID NO: 1517234 - DNA, 25 bp, Homo sapien
gggctaatggactcaaggtccactg

SEQ ID NO: 1517235 - DNA, 25 bp, Homo sapien
tctgcagtgggcaaaagtgcagctc

SEQ ID NO: 1517236 - DNA, 25 bp, Homo sapien
tgggcaaaagtgcagctccagagcg

SEQ ID NO: 1517237 - DNA, 25 bp, Homo sapien
gcaccacgtggagccccggcagctt

SEQ ID NO: 1517238 - DNA, 25 bp, Homo sapien
tgcaccacgtggagccccggcagct

SEQ ID NO: 1517239 - DNA, 25 bp, Homo sapien
cctgcaccacgtggagccccggcag

SEQ ID NO: 1517240 - DNA, 25 bp, Homo sapien
accacgtggagccccggcagcttct

SEQ ID NO: 1517241 - DNA, 25 bp, Homo sapien
tccagcggcacctccagatggctct

SEQ ID NO: 1517242 - DNA, 25 bp, Homo sapien
cactgcaatggcgtcctcgatggtg

SEQ ID NO: 1517243 - DNA, 25 bp, Homo sapien
ctgagcactgcaatggcgtcctcga

SEQ ID NO: 1517244 - DNA, 25 bp, Homo sapien
caatggcgtcctcgatggtgcgcgc

SEQ ID NO: 1517245 - DNA, 25 bp, Homo sapien
gagagcggagccactccttcttgag

SEQ ID NO: 1517246 - DNA, 25 bp, Homo sapien
ggttctcttgtttgagccgcggcag

SEQ ID NO: 1517247 - DNA, 25 bp, Homo sapien
tcctcaaaggctgtgaaggctgccc

SEQ ID NO: 1517248 - DNA, 25 bp, Homo sapien
cattgaagggcacggcccgctggtt

SEQ ID NO: 1517249 - DNA, 25 bp, Homo sapien
tggaccacccgtgggtgaactggct

SEQ ID NO: 1517250 - DNA, 25 bp, Homo sapien
ctggtgataagagcatggccccggg

SEQ ID NO: 1517251 - DNA, 25 bp, Homo sapien
agctgacctggcctaagggcgtgca

SEQ ID NO: 1517252 - DNA, 25 bp, Homo sapien
gcgtgcagagtcgtgacctggacca

SEQ ID NO: 1517253 - DNA, 25 bp, Homo sapien
tgccgccacctttattgggcactca

SEQ ID NO: 1517254 - DNA, 25 bp, Homo sapien
cttgccgccacctttattgggcact

SEQ ID NO: 1517255 - DNA, 25 bp, Homo sapien
gccttgccgccacctttattgggca

SEQ ID NO: 1517256 - DNA, 25 bp, Homo sapien
gccgccacctttattgggcactcag

SEQ ID NO: 1517257 - DNA, 25 bp, Homo sapien
ggaacgacaatagcccagattaggg

SEQ ID NO: 1517258 - DNA, 25 bp, Homo sapien
gagggtccgcacagctttcgaaaag

SEQ ID NO: 1517259 - DNA, 25 bp, Homo sapien
gatagggacagatggtgtgtaaatt

SEQ ID NO: 1517260 - DNA, 25 bp, Homo sapien
gacaaaggcgtcttccgcgagggtc

SEQ ID NO: 1517261 - DNA, 25 bp, Homo sapien
ttgcgctttcccctgcctagcccgg

SEQ ID NO: 1517262 - DNA, 25 bp, Homo sapien
ttcaaggccaggaggacggcagatg

SEQ ID NO: 1517263 - DNA, 25 bp, Homo sapien
cccggactcgacttcaggctgttgt

SEQ ID NO: 1517264 - DNA, 25 bp, Homo sapien
ggctgttgttcaaggccaggaggac

SEQ ID NO: 1517265 - DNA, 25 bp, Homo sapien
ttgtgtgtgagatgcgctcagaggg

SEQ ID NO: 1517266 - DNA, 25 bp, Homo sapien
tgagatgcgctcagagggagccgcc

SEQ ID NO: 1517267 - DNA, 25 bp, Homo sapien
aggggaggaggccttcgggtctgca

SEQ ID NO: 1517268 - DNA, 25 bp, Homo sapien
gtgtgagatgcgctcagagggagcc

SEQ ID NO: 1517269 - DNA, 25 bp, Homo sapien
ttcagccttggtggggaccttcagc

SEQ ID NO: 1517270 - DNA, 25 bp, Homo sapien
tcagccttggtggggaccttcagcc

SEQ ID NO: 1517271 - DNA, 25 bp, Homo sapien
cttcagccttggtggggaccttcag

SEQ ID NO: 1517272 - DNA, 25 bp, Homo sapien
agccttggtggggaccttcagccac

SEQ ID NO: 1517273 - DNA, 25 bp, Homo sapien
aacagaaagcgtggctccagctcag

SEQ ID NO: 1517274 - DNA, 25 bp, Homo sapien
ctccagctctccgagtccgtagggc

SEQ ID NO: 1517275 - DNA, 25 bp, Homo sapien
tccgtagggccgccggatatgtctt

SEQ ID NO: 1517276 - DNA, 25 bp, Homo sapien
cctccaacagaaagcgtggctccag

SEQ ID NO: 1517277 - DNA, 25 bp, Homo sapien
gcagctggcgacgttgaccgggctg

SEQ ID NO: 1517278 - DNA, 25 bp, Homo sapien
ggcagctggcgacgttgaccgggct

SEQ ID NO: 1517279 - DNA, 25 bp, Homo sapien
ccgccgcagccggagtccctgcgcc

SEQ ID NO: 1517280 - DNA, 25 bp, Homo sapien
gctgactcccgggatcggtgttgga

SEQ ID NO: 1517281 - DNA, 25 bp, Homo sapien
ctttgaattcccggagtcgggcaag

SEQ ID NO: 1517282 - DNA, 25 bp, Homo sapien
ggagctgactcccgggatcggtgtt

SEQ ID NO: 1517283 - DNA, 25 bp, Homo sapien
ctcccgggatcggtgttggaggcgg

SEQ ID NO: 1517284 - DNA, 25 bp, Homo sapien
agggggacttggtgctgaccctagc

SEQ ID NO: 1517285 - DNA, 25 bp, Homo sapien
cagggggacttggtgctgaccctag

SEQ ID NO: 1517286 - DNA, 25 bp, Homo sapien
ctgggatcggggcaatggtcacctt

SEQ ID NO: 1517287 - DNA, 25 bp, Homo sapien
caggacctgggatcggggcaatggt

SEQ ID NO: 1517288 - DNA, 25 bp, Homo sapien
ctggtgaccacttgactgggagaga

SEQ ID NO: 1517289 - DNA, 25 bp, Homo sapien
tggtgaccacttgactgggagagag

SEQ ID NO: 1517290 - DNA, 25 bp, Homo sapien
gctggtgaccacttgactgggagag

SEQ ID NO: 1517291 - DNA, 25 bp, Homo sapien
cagcgagaccacgagagccgggaag

SEQ ID NO: 1517292 - DNA, 25 bp, Homo sapien
gcgagaccacgagagccgggaagta

SEQ ID NO: 1517293 - DNA, 25 bp, Homo sapien
gagaccacgagagccgggaagtaga

SEQ ID NO: 1517294 - DNA, 25 bp, Homo sapien
gaccacgagagccgggaagtagagg

SEQ ID NO: 1517295 - DNA, 25 bp, Homo sapien
gggtgggctctgatctaacaactgt

SEQ ID NO: 1517296 - DNA, 25 bp, Homo sapien
caaacagggagaaggtcatgtgaaa

SEQ ID NO: 1517297 - DNA, 25 bp, Homo sapien
tgctttggcccacccaatgaagagg

SEQ ID NO: 1517298 - DNA, 25 bp, Homo sapien
cgaagcccatatgaggatacagatg

SEQ ID NO: 1517299 - DNA, 25 bp, Homo sapien
aaacttagccgggtgtggcgtggtg

SEQ ID NO: 1517300 - DNA, 25 bp, Homo sapien
gggcgcctgtaatcccaactactct

SEQ ID NO: 1517301 - DNA, 25 bp, Homo sapien
tactctggcggctgaggcaggagaa

SEQ ID NO: 1517302 - DNA, 25 bp, Homo sapien
tggcgtgaacccaggaggcggagct

SEQ ID NO: 1517303 - DNA, 25 bp, Homo sapien
tgaaaagacctgtgcttgttctcct

SEQ ID NO: 1517304 - DNA, 25 bp, Homo sapien
ttgttctcctttgcattcacctgcc

SEQ ID NO: 1517305 - DNA, 25 bp, Homo sapien
ctccctctgaaaagacctgtgcttg

SEQ ID NO: 1517306 - DNA, 25 bp, Homo sapien
cattcacctgccctgagggatcggg

SEQ ID NO: 1517307 - DNA, 25 bp, Homo sapien
tcagacaggacctttgttccctccc

SEQ ID NO: 1517308 - DNA, 25 bp, Homo sapien
tgtccagactgctctgcacaaggcc

SEQ ID NO: 1517309 - DNA, 25 bp, Homo sapien
gggtggtcccggtcagatccacaga

SEQ ID NO: 1517310 - DNA, 25 bp, Homo sapien
ctggagagcccgttcctcatcccag

SEQ ID NO: 1517311 - DNA, 25 bp, Homo sapien
ccagcgggcgcagccagagtccggg

SEQ ID NO: 1517312 - DNA, 25 bp, Homo sapien
ttgtgggtccccagcgggcgcagcc

SEQ ID NO: 1517313 - DNA, 25 bp, Homo sapien
gttgtgggtccccagcgggcgcagc

SEQ ID NO: 1517314 - DNA, 25 bp, Homo sapien
cgcagccagagtccgggtgtccctg

SEQ ID NO: 1517315 - DNA, 25 bp, Homo sapien
ggcttccgggtaccacaaccagatc

SEQ ID NO: 1517316 - DNA, 25 bp, Homo sapien
tccgggtaccacaaccagatcagca

SEQ ID NO: 1517317 - DNA, 25 bp, Homo sapien
ttccgggtaccacaaccagatcagc

SEQ ID NO: 1517318 - DNA, 25 bp, Homo sapien
gcttccgggtaccacaaccagatca

SEQ ID NO: 1517319 - DNA, 25 bp, Homo sapien
tcagcggctgggctcctgcactgac

SEQ ID NO: 1517320 - DNA, 25 bp, Homo sapien
gctcagcggctgggctcctgcactg

SEQ ID NO: 1517321 - DNA, 25 bp, Homo sapien
ggctcagcggctgggctcctgcact

SEQ ID NO: 1517322 - DNA, 25 bp, Homo sapien
ctcagcggctgggctcctgcactga

SEQ ID NO: 1517323 - DNA, 25 bp, Homo sapien
tgcaggggttgggctcgctgcaggc

SEQ ID NO: 1517324 - DNA, 25 bp, Homo sapien
gtgcaggggttgggctcgctgcagg

SEQ ID NO: 1517325 - DNA, 25 bp, Homo sapien
ggtgcaggggttgggctcgctgcag

SEQ ID NO: 1517326 - DNA, 25 bp, Homo sapien
agctcggtctccgtcaccatgacga

SEQ ID NO: 1517327 - DNA, 25 bp, Homo sapien
agggcatagtcgctgaggcgcttcc

SEQ ID NO: 1517328 - DNA, 25 bp, Homo sapien
gccccacgctgccattgtagctgtg

SEQ ID NO: 1517329 - DNA, 25 bp, Homo sapien
gacgacgatgccaaacatgccgaaa

SEQ ID NO: 1517330 - DNA, 25 bp, Homo sapien
cgggcttggtggaacctccctggag

SEQ ID NO: 1517331 - DNA, 25 bp, Homo sapien
aggcgggcttggtggaacctccctg

SEQ ID NO: 1517332 - DNA, 25 bp, Homo sapien
ttggtggaacctccctggagtgcct

SEQ ID NO: 1517333 - DNA, 25 bp, Homo sapien
agtgcctgggggaggaccacgccta

SEQ ID NO: 1517334 - DNA, 25 bp, Homo sapien
ccagatggacgctggaggcggtggg

SEQ ID NO: 1517335 - DNA, 25 bp, Homo sapien
tttgagtgcgaatgagtacagagac

SEQ ID NO: 1517336 - DNA, 25 bp, Homo sapien
gcatttgagtgcgaatgagtacaga

SEQ ID NO: 1517337 - DNA, 25 bp, Homo sapien
tgagtgcgaatgagtacagagactc

SEQ ID NO: 1517338 - DNA, 25 bp, Homo sapien
tgaggcatttgagtgcgaatgagta

SEQ ID NO: 1517339 - DNA, 25 bp, Homo sapien
agaggacaacgagacccagcaggat

SEQ ID NO: 1517340 - DNA, 25 bp, Homo sapien
catggtagaggacaacgagacccag

SEQ ID NO: 1517341 - DNA, 25 bp, Homo sapien
gacccagcaggatggccgtggagag

SEQ ID NO: 1517342 - DNA, 25 bp, Homo sapien
atctcccgggcatggtagaggacaa

SEQ ID NO: 1517343 - DNA, 25 bp, Homo sapien
ccgcgcccccagagagtgacgtcag

SEQ ID NO: 1517344 - DNA, 25 bp, Homo sapien
atgggtgtcagacacgcgccgcgct

SEQ ID NO: 1517345 - DNA, 25 bp, Homo sapien
gggaaccagccatgggtgtcagaca

SEQ ID NO: 1517346 - DNA, 25 bp, Homo sapien
agagagtgacgtcagcctggcctga

SEQ ID NO: 1517347 - DNA, 25 bp, Homo sapien
gggtgaatggcgcacactgccagct

SEQ ID NO: 1517348 - DNA, 25 bp, Homo sapien
tcgaggcgtccgtgaagattttgct

SEQ ID NO: 1517349 - DNA, 25 bp, Homo sapien
tgtcttcatgacgaagcgcgtgttg

SEQ ID NO: 1517350 - DNA, 25 bp, Homo sapien
ccagctctagcgagatgaggaacac

SEQ ID NO: 1517351 - DNA, 25 bp, Homo sapien
gaaatcagccacatggcccccagga

SEQ ID NO: 1517352 - DNA, 25 bp, Homo sapien
catgtcgccgtagccaatggagagg

SEQ ID NO: 1517353 - DNA, 25 bp, Homo sapien
gatggaaatcagccacatggccccc

SEQ ID NO: 1517354 - DNA, 25 bp, Homo sapien
tgtcgccgtagccaatggagaggaa

SEQ ID NO: 1517355 - DNA, 25 bp, Homo sapien
ccgcttggtgagctgagtgtccatc

SEQ ID NO: 1517356 - DNA, 25 bp, Homo sapien
tgagctgagtgtccatcatgaagtt

SEQ ID NO: 1517357 - DNA, 25 bp, Homo sapien
cttggtgagctgagtgtccatcatg

SEQ ID NO: 1517358 - DNA, 25 bp, Homo sapien
ggtgagctgagtgtccatcatgaag

SEQ ID NO: 1517359 - DNA, 25 bp, Homo sapien
tagatgagccacgtctccctgagaa

SEQ ID NO: 1517360 - DNA, 25 bp, Homo sapien
ttcaccagcctggtatgtttgtaga

SEQ ID NO: 1517361 - DNA, 25 bp, Homo sapien
ggtatgtttgtagatgagccacgtc

SEQ ID NO: 1517362 - DNA, 25 bp, Homo sapien
cctgagaacgttagcagcggcgttt

SEQ ID NO: 1517363 - DNA, 25 bp, Homo sapien
tgatggatggcttggaggaacttac

SEQ ID NO: 1517364 - DNA, 25 bp, Homo sapien
cagcttcccttgctcgatcttcaca

SEQ ID NO: 1517365 - DNA, 25 bp, Homo sapien
tcggtaagcgtgttagcctggtcgt

SEQ ID NO: 1517366 - DNA, 25 bp, Homo sapien
cttggctaggtcggtaagcgtgtta

SEQ ID NO: 1517367 - DNA, 25 bp, Homo sapien
gtgttagcctggtcgttcagcttcc

SEQ ID NO: 1517368 - DNA, 25 bp, Homo sapien
tggggctgacgttgctccaggctgg

SEQ ID NO: 1517369 - DNA, 25 bp, Homo sapien
ttggggctgacgttgctccaggctg

SEQ ID NO: 1517370 - DNA, 25 bp, Homo sapien
tttggggctgacgttgctccaggct

SEQ ID NO: 1517371 - DNA, 25 bp, Homo sapien
gtttggggctgacgttgctccaggc

SEQ ID NO: 1517372 - DNA, 25 bp, Homo sapien
tcgtgctgagcgtgcagctccgata

SEQ ID NO: 1517373 - DNA, 25 bp, Homo sapien
cagcgcatccaagcggctttccagg

SEQ ID NO: 1517374 - DNA, 25 bp, Homo sapien
caaggtcgtacatgacggtctgggt

SEQ ID NO: 1517375 - DNA, 25 bp, Homo sapien
gcatccaagcggctttccagggtgg

SEQ ID NO: 1517376 - DNA, 25 bp, Homo sapien
cacgggcgtccaccggcagggggag

SEQ ID NO: 1517377 - DNA, 25 bp, Homo sapien
tggcttgggcgatgaggccaggcag

SEQ ID NO: 1517378 - DNA, 25 bp, Homo sapien
ggcgtatggcttgggcgatgaggcc

SEQ ID NO: 1517379 - DNA, 25 bp, Homo sapien
gggtgggcgtatggcttgggcgatg

SEQ ID NO: 1517380 - DNA, 25 bp, Homo sapien
gccacacgatggccaagatttaggg

SEQ ID NO: 1517381 - DNA, 25 bp, Homo sapien
tcagcgttggcttcttgaactccaa

SEQ ID NO: 1517382 - DNA, 25 bp, Homo sapien
aggcgccactgtacaaggcttcccg

SEQ ID NO: 1517383 - DNA, 25 bp, Homo sapien
tccactcagcctgactcagcgttgg

SEQ ID NO: 1517384 - DNA, 25 bp, Homo sapien
aggcgggtcctgctttattcagaac

SEQ ID NO: 1517385 - DNA, 25 bp, Homo sapien
cctgctttattcagaaccagcacgg

SEQ ID NO: 1517386 - DNA, 25 bp, Homo sapien
ttattcagaaccagcacggacccct

SEQ ID NO: 1517387 - DNA, 25 bp, Homo sapien
gcgggtcctgctttattcagaacca

SEQ ID NO: 1517388 - DNA, 25 bp, Homo sapien
gaatgcaccatccttcctcgcagtg

SEQ ID NO: 1517389 - DNA, 25 bp, Homo sapien
taggctaggattctaggctaggccg

SEQ ID NO: 1517390 - DNA, 25 bp, Homo sapien
cacagtgggtgtccatcaacgcggt

SEQ ID NO: 1517391 - DNA, 25 bp, Homo sapien
tgctgtctgagggatctcagcgcca

SEQ ID NO: 1517392 - DNA, 25 bp, Homo sapien
cagggctcagcatctgccaagtaaa

SEQ ID NO: 1517393 - DNA, 25 bp, Homo sapien
atacccttctcgtgcgtgggcccaa

SEQ ID NO: 1517394 - DNA, 25 bp, Homo sapien
tagttatctcgttgagccaggcgat

SEQ ID NO: 1517395 - DNA, 25 bp, Homo sapien
tcctcggctatgcacagcgtcgtct

SEQ ID NO: 1517396 - DNA, 25 bp, Homo sapien
cggcgaacttgggccggcgccggtg

SEQ ID NO: 1517397 - DNA, 25 bp, Homo sapien
gcgcgcctgcagatccccggggttt

SEQ ID NO: 1517398 - DNA, 25 bp, Homo sapien
gagagaaggcacacggcccgggcgc

SEQ ID NO: 1517399 - DNA, 25 bp, Homo sapien
cgcgcggctggggacacggtttgga

SEQ ID NO: 1517400 - DNA, 25 bp, Homo sapien
cgcgccttcacctcgagcgctcgca

SEQ ID NO: 1517401 - DNA, 25 bp, Homo sapien
agcacccggccgcacagccgctccc

SEQ ID NO: 1517402 - DNA, 25 bp, Homo sapien
tgcgaccctccaaccagtgggtggc

SEQ ID NO: 1517403 - DNA, 25 bp, Homo sapien
agctccagcgcgaagctgcgcacgc

SEQ ID NO: 1517404 - DNA, 25 bp, Homo sapien
tccgcggccgcgtagtcgctggata

SEQ ID NO: 1517405 - DNA, 25 bp, Homo sapien
ctgccgacgccgcaggtaggtctcc

SEQ ID NO: 1517406 - DNA, 25 bp, Homo sapien
gcaggtaggtctccgcggccgcgta

SEQ ID NO: 1517407 - DNA, 25 bp, Homo sapien
ccgcggccgcgtagtcgctggatac

SEQ ID NO: 1517408 - DNA, 25 bp, Homo sapien
cgggggcggcgcgacgagtgtctca

SEQ ID NO: 1517409 - DNA, 25 bp, Homo sapien
tcacccgaccgcataggttctaagt

SEQ ID NO: 1517410 - DNA, 25 bp, Homo sapien
ccctgaagagggtcgcggccgaggg

SEQ ID NO: 1517411 - DNA, 25 bp, Homo sapien
gttctaagttgagaggcttccggcc

SEQ ID NO: 1517412 - DNA, 25 bp, Homo sapien
gtggctcttgtgtgcccaaaacttc

SEQ ID NO: 1517413 - DNA, 25 bp, Homo sapien
tgtggctcttgtgtgcccaaaactt

SEQ ID NO: 1517414 - DNA, 25 bp, Homo sapien
gtgtgcccaaaacttctattgcccg

SEQ ID NO: 1517415 - DNA, 25 bp, Homo sapien
tgcccaaaacttctattgcccgcag

SEQ ID NO: 1517416 - DNA, 25 bp, Homo sapien
atttcaggcgcccaccagcacgccc

SEQ ID NO: 1517417 - DNA, 25 bp, Homo sapien
gggatttcaggcgcccaccagcacg

SEQ ID NO: 1517418 - DNA, 25 bp, Homo sapien
tggagacaaagtttcaccatgttgg

SEQ ID NO: 1517419 - DNA, 25 bp, Homo sapien
gtggagacaaagtttcaccatgttg

SEQ ID NO: 1517420 - DNA, 25 bp, Homo sapien
ggccgccatcccacctaggaagtga

SEQ ID NO: 1517421 - DNA, 25 bp, Homo sapien
cggccgccatcccacctaggaagtg

SEQ ID NO: 1517422 - DNA, 25 bp, Homo sapien
acagagtctcgttaactcagtgctc

SEQ ID NO: 1517423 - DNA, 25 bp, Homo sapien
gcagacagagtctcgttaactcagt

SEQ ID NO: 1517424 - DNA, 25 bp, Homo sapien
tcagcccgtgatggggatcggaaca

SEQ ID NO: 1517425 - DNA, 25 bp, Homo sapien
gggcggtcataaacaaacacggtca

SEQ ID NO: 1517426 - DNA, 25 bp, Homo sapien
cataaacaaacacggtcaccctcag

SEQ ID NO: 1517427 - DNA, 25 bp, Homo sapien
caggaacgacggagttggaggcaca

SEQ ID NO: 1517428 - DNA, 25 bp, Homo sapien
gtcccgccacagagctgaatgcagg

SEQ ID NO: 1517429 - DNA, 25 bp, Homo sapien
ggcgccctctcgtggcagcgtaatg

SEQ ID NO: 1517430 - DNA, 25 bp, Homo sapien
ccaggagcggtacctacgaaatgat

SEQ ID NO: 1517431 - DNA, 25 bp, Homo sapien
tccccaaagaaaagtcgcatggagt

SEQ ID NO: 1517432 - DNA, 25 bp, Homo sapien
cgaggcatgtccagcccgatttggg

SEQ ID NO: 1517433 - DNA, 25 bp, Homo sapien
cgcccctcgttgacgtgactcgagg

SEQ ID NO: 1517434 - DNA, 25 bp, Homo sapien
tgacgtgactcgaggcatgtccagc

SEQ ID NO: 1517435 - DNA, 25 bp, Homo sapien
ggccagagagcctatgactgttcca

SEQ ID NO: 1517436 - DNA, 25 bp, Homo sapien
gactccaccaatagcgcgacaaggg

SEQ ID NO: 1517437 - DNA, 25 bp, Homo sapien
cgccgtgcgtcggcgccgcttttat

SEQ ID NO: 1517438 - DNA, 25 bp, Homo sapien
cgccgcttttatacggcagggcggg

SEQ ID NO: 1517439 - DNA, 25 bp, Homo sapien
cggagcagaaaatccccgcgccgtg

SEQ ID NO: 1517440 - DNA, 25 bp, Homo sapien
agaacgcaaaatcgccgtcaacgcg

SEQ ID NO: 1517441 - DNA, 25 bp, Homo sapien
ctgcagcctcagaacgcaaaatcgc

SEQ ID NO: 1517442 - DNA, 25 bp, Homo sapien
gcctcagaacgcaaaatcgccgtca

SEQ ID NO: 1517443 - DNA, 25 bp, Homo sapien
aaaatcgccgtcaacgcgcaggcgc

SEQ ID NO: 1517444 - DNA, 25 bp, Homo sapien
gaaccggcagctcaagatgccgacg

SEQ ID NO: 1517445 - DNA, 25 bp, Homo sapien
gaacccacgacaggcggaacctggc

SEQ ID NO: 1517446 - DNA, 25 bp, Homo sapien
tggcctcgaactcgcgaaccggcag

SEQ ID NO: 1517447 - DNA, 25 bp, Homo sapien
ggtgcgaacccacgacaggcggaac

SEQ ID NO: 1517448 - DNA, 25 bp, Homo sapien
tggccgccgctaaacacgggctcga

SEQ ID NO: 1517449 - DNA, 25 bp, Homo sapien
tgcgcgactcggtccagtgcacgtg

SEQ ID NO: 1517450 - DNA, 25 bp, Homo sapien
tcactgtagctctgcgtgtaagccg

SEQ ID NO: 1517451 - DNA, 25 bp, Homo sapien
gagaacgctttcaccttgtcgaata

SEQ ID NO: 1517452 - DNA, 25 bp, Homo sapien
tggagcaggggtcctccatccgtac

SEQ ID NO: 1517453 - DNA, 25 bp, Homo sapien
aaaaaggaggcgactgagcggttgc

SEQ ID NO: 1517454 - DNA, 25 bp, Homo sapien
ggaggcacacaactggtgttggagc

SEQ ID NO: 1517455 - DNA, 25 bp, Homo sapien
ctgacggaggtaccgccgtccaggt

SEQ ID NO: 1517456 - DNA, 25 bp, Homo sapien
ggcagcgtcgtggtctccccggtat

SEQ ID NO: 1517457 - DNA, 25 bp, Homo sapien
tgaacaggaactcatggcgcccagg

SEQ ID NO: 1517458 - DNA, 25 bp, Homo sapien
acaggaactcatggcgcccaggagg

SEQ ID NO: 1517459 - DNA, 25 bp, Homo sapien
aggcagcgtcgtggtctccccggta

SEQ ID NO: 1517460 - DNA, 25 bp, Homo sapien
tattggaggtaccaatctggaaggg

SEQ ID NO: 1517461 - DNA, 25 bp, Homo sapien
aaggagacacagacactccgggggc

SEQ ID NO: 1517462 - DNA, 25 bp, Homo sapien
ctagggtggagggacgggacttcag

SEQ ID NO: 1517463 - DNA, 25 bp, Homo sapien
cagaggtgcccagatatccagtatt

SEQ ID NO: 1517464 - DNA, 25 bp, Homo sapien
tttgccctcgaaggatgtcaccagg

SEQ ID NO: 1517465 - DNA, 25 bp, Homo sapien
tccacaggctcgatgacagtgaaca

SEQ ID NO: 1517466 - DNA, 25 bp, Homo sapien
gatacagtagcggacactaccgtgt

SEQ ID NO: 1517467 - DNA, 25 bp, Homo sapien
gctggcgtgttgatgtccacaggct

SEQ ID NO: 1517468 - DNA, 25 bp, Homo sapien
gaactatccgttaaatagagccagg

SEQ ID NO: 1517469 - DNA, 25 bp, Homo sapien
ttattggttggtgtcgcccagcagc

SEQ ID NO: 1517470 - DNA, 25 bp, Homo sapien
tcacacggcaaatgggtgcagatcc

SEQ ID NO: 1517471 - DNA, 25 bp, Homo sapien
tcagagagggcttcaagacacttgc

SEQ ID NO: 1517472 - DNA, 25 bp, Homo sapien
tagcccttgcggtcgatcttggccg

SEQ ID NO: 1517473 - DNA, 25 bp, Homo sapien
cgatcttggccgaaagggagactag

SEQ ID NO: 1517474 - DNA, 25 bp, Homo sapien
caggatcgggcaaccttttcccgag

SEQ ID NO: 1517475 - DNA, 25 bp, Homo sapien
gggagactaggccacggttacagta

SEQ ID NO: 1517476 - DNA, 25 bp, Homo sapien
tcccaacccagtccggtccgcctgc

SEQ ID NO: 1517477 - DNA, 25 bp, Homo sapien
caacccagtccggtccgcctgctac

SEQ ID NO: 1517478 - DNA, 25 bp, Homo sapien
ttcccctcctgcaaccccaacacca

SEQ ID NO: 1517479 - DNA, 25 bp, Homo sapien
ctgcaaccccaacaccagcccccgt

SEQ ID NO: 1517480 - DNA, 25 bp, Homo sapien
tagtccacgtgtagaacgcggcagt

SEQ ID NO: 1517481 - DNA, 25 bp, Homo sapien
tgtcgatctcggcaaagacagggat

SEQ ID NO: 1517482 - DNA, 25 bp, Homo sapien
cgtttctgctttcgggcgcctcggg

SEQ ID NO: 1517483 - DNA, 25 bp, Homo sapien
gcctcgggccatgaacgtctgtgtc

SEQ ID NO: 1517484 - DNA, 25 bp, Homo sapien
gtgaatgtaggcactgtcccccagg

SEQ ID NO: 1517485 - DNA, 25 bp, Homo sapien
ttcccccagtctgagggaatacagg

SEQ ID NO: 1517486 - DNA, 25 bp, Homo sapien
tctgagggaatacagggtgaatgta

SEQ ID NO: 1517487 - DNA, 25 bp, Homo sapien
cccagtctgagggaatacagggtga

SEQ ID NO: 1517488 - DNA, 25 bp, Homo sapien
acgctggaggaacggctgccaaaag

SEQ ID NO: 1517489 - DNA, 25 bp, Homo sapien
tgcaagggaatggtgccgatcacca

SEQ ID NO: 1517490 - DNA, 25 bp, Homo sapien
cagcagcttggacgttcctgggata

SEQ ID NO: 1517491 - DNA, 25 bp, Homo sapien
ggaagctggcgtggctgcccacgct

SEQ ID NO: 1517492 - DNA, 25 bp, Homo sapien
ggtgagagagttgacccggcatcca

SEQ ID NO: 1517493 - DNA, 25 bp, Homo sapien
cctctgcatgcaagcagggtgggag

SEQ ID NO: 1517494 - DNA, 25 bp, Homo sapien
atccacctctccgtgtatccaccca

SEQ ID NO: 1517495 - DNA, 25 bp, Homo sapien
ggctgccaggctgtatgtcctttgg

SEQ ID NO: 1517496 - DNA, 25 bp, Homo sapien
cttcaaggctcatgtcggggtcctg

SEQ ID NO: 1517497 - DNA, 25 bp, Homo sapien
caaggctcatgtcggggtcctgcgg

SEQ ID NO: 1517498 - DNA, 25 bp, Homo sapien
tcaaggctcatgtcggggtcctgcg

SEQ ID NO: 1517499 - DNA, 25 bp, Homo sapien
ttcaaggctcatgtcggggtcctgc

SEQ ID NO: 1517500 - DNA, 25 bp, Homo sapien
gtggcgggcggtagcggaactcttg

SEQ ID NO: 1517501 - DNA, 25 bp, Homo sapien
tcttggatgtaggcgaagaacgggc

SEQ ID NO: 1517502 - DNA, 25 bp, Homo sapien
cagagtacaggggtggcgggcggta

SEQ ID NO: 1517503 - DNA, 25 bp, Homo sapien
ggcggtagcggaactcttggatgta

SEQ ID NO: 1517504 - DNA, 25 bp, Homo sapien
tagccatctcccaactcccgccctt

SEQ ID NO: 1517505 - DNA, 25 bp, Homo sapien
gccatctcccaactcccgcccttga

SEQ ID NO: 1517506 - DNA, 25 bp, Homo sapien
aactcccgcccttgaccagggatga

SEQ ID NO: 1517507 - DNA, 25 bp, Homo sapien
ttgaccagggatgaggccatcagga

SEQ ID NO: 1517508 - DNA, 25 bp, Homo sapien
tcagcaagtcatgcagcgcggcctc

SEQ ID NO: 1517509 - DNA, 25 bp, Homo sapien
gcggcctcatgtcccccaagagtgg

SEQ ID NO: 1517510 - DNA, 25 bp, Homo sapien
catgtcccccaagagtgggtttgga

SEQ ID NO: 1517511 - DNA, 25 bp, Homo sapien
gcaagtcatgcagcgcggcctcatg

SEQ ID NO: 1517512 - DNA, 25 bp, Homo sapien
tgtcccatgtgatatccgaaaggcc

SEQ ID NO: 1517513 - DNA, 25 bp, Homo sapien
ggattccaaacgtcactcagctctg

SEQ ID NO: 1517514 - DNA, 25 bp, Homo sapien
tcaatgcctcacaaggacagcggtc

SEQ ID NO: 1517515 - DNA, 25 bp, Homo sapien
gggattccagcaccaccaattggct

SEQ ID NO: 1517516 - DNA, 25 bp, Homo sapien
cccagcgtggcaggcactgatggcc

SEQ ID NO: 1517517 - DNA, 25 bp, Homo sapien
cactgatggccaccggctgagtcac

SEQ ID NO: 1517518 - DNA, 25 bp, Homo sapien
tgtggatcctcccagatcgggccgc

SEQ ID NO: 1517519 - DNA, 25 bp, Homo sapien
atcgggccgcgcagtccacccagcc

SEQ ID NO: 1517520 - DNA, 25 bp, Homo sapien
cttcaccagtgtccttgggactctg

SEQ ID NO: 1517521 - DNA, 25 bp, Homo sapien
ggcctctcaggaccctccagccttc

SEQ ID NO: 1517522 - DNA, 25 bp, Homo sapien
tccacagggatctgaggttgtgtga

SEQ ID NO: 1517523 - DNA, 25 bp, Homo sapien
tgactccacagggatctgaggttgt

SEQ ID NO: 1517524 - DNA, 25 bp, Homo sapien
caaggttgaaaggactgctttgagg

SEQ ID NO: 1517525 - DNA, 25 bp, Homo sapien
gacaagcagaaggagaatctaacca

SEQ ID NO: 1517526 - DNA, 25 bp, Homo sapien
ttcacatttagctgagtagcctata

SEQ ID NO: 1517527 - DNA, 25 bp, Homo sapien
tcaatattgatctgaacttcacatt

SEQ ID NO: 1517528 - DNA, 25 bp, Homo sapien
gccgggcggccgcagtaagtaaagc

SEQ ID NO: 1517529 - DNA, 25 bp, Homo sapien
gggcggccgcagtaagtaaagccat

SEQ ID NO: 1517530 - DNA, 25 bp, Homo sapien
cgggcggccgcagtaagtaaagcca

SEQ ID NO: 1517531 - DNA, 25 bp, Homo sapien
gagccgggcggccgcagtaagtaaa

SEQ ID NO: 1517532 - DNA, 25 bp, Homo sapien
tccttaggtatgaggtcagccaata

SEQ ID NO: 1517533 - DNA, 25 bp, Homo sapien
ctgctccttaggtatgaggtcagcc

SEQ ID NO: 1517534 - DNA, 25 bp, Homo sapien
gctccttaggtatgaggtcagccaa

SEQ ID NO: 1517535 - DNA, 25 bp, Homo sapien
cttaggtatgaggtcagccaatatg

SEQ ID NO: 1517536 - DNA, 25 bp, Homo sapien
ttcatagaccaatcccttcatgcct

SEQ ID NO: 1517537 - DNA, 25 bp, Homo sapien
catcaggatcaagaactgatgtttc

SEQ ID NO: 1517538 - DNA, 25 bp, Homo sapien
caagaactgatgtttcatagaccaa

SEQ ID NO: 1517539 - DNA, 25 bp, Homo sapien
ctgatgtttcatagaccaatccctt

SEQ ID NO: 1517540 - DNA, 25 bp, Homo sapien
ttgggatacatccagttaccagcag

SEQ ID NO: 1517541 - DNA, 25 bp, Homo sapien
ggaaagttgtccagcatggtgacca

SEQ ID NO: 1517542 - DNA, 25 bp, Homo sapien
cacccttagccttgggtagcagttt

SEQ ID NO: 1517543 - DNA, 25 bp, Homo sapien
tttgagagccaagatacctgttcct

SEQ ID NO: 1517544 - DNA, 25 bp, Homo sapien
tttcactgttgagggctgtaacagc

SEQ ID NO: 1517545 - DNA, 25 bp, Homo sapien
gttgagggctgtaacagctgcactg

SEQ ID NO: 1517546 - DNA, 25 bp, Homo sapien
cactgttgagggctgtaacagctgc

SEQ ID NO: 1517547 - DNA, 25 bp, Homo sapien
tgagggctgtaacagctgcactgag

SEQ ID NO: 1517548 - DNA, 25 bp, Homo sapien
cccgtgcatatgcttgggcaaagtt

SEQ ID NO: 1517549 - DNA, 25 bp, Homo sapien
ctgataccccgtgcatatgcttggg

SEQ ID NO: 1517550 - DNA, 25 bp, Homo sapien
taccccgtgcatatgcttgggcaaa

SEQ ID NO: 1517551 - DNA, 25 bp, Homo sapien
cgtgcatatgcttgggcaaagttac

SEQ ID NO: 1517552 - DNA, 25 bp, Homo sapien
ccaggttagagtcaatggccccaat

SEQ ID NO: 1517553 - DNA, 25 bp, Homo sapien
ggttagagtcaatggccccaatacc

SEQ ID NO: 1517554 - DNA, 25 bp, Homo sapien
aggttagagtcaatggccccaatac

SEQ ID NO: 1517555 - DNA, 25 bp, Homo sapien
caggttagagtcaatggccccaata

SEQ ID NO: 1517556 - DNA, 25 bp, Homo sapien
tctgaaaggccactgcccaccaagt

SEQ ID NO: 1517557 - DNA, 25 bp, Homo sapien
gtctgaaaggccactgcccaccaag

SEQ ID NO: 1517558 - DNA, 25 bp, Homo sapien
ctgaaaggccactgcccaccaagtg

SEQ ID NO: 1517559 - DNA, 25 bp, Homo sapien
caggtatatcgtggatcagtcttcc

SEQ ID NO: 1517560 - DNA, 25 bp, Homo sapien
ctgacaggtatatcgtggatcagtc

SEQ ID NO: 1517561 - DNA, 25 bp, Homo sapien
ttccttagtactgcatggccatagc

SEQ ID NO: 1517562 - DNA, 25 bp, Homo sapien
tatatcgtggatcagtcttccttag

SEQ ID NO: 1517563 - DNA, 25 bp, Homo sapien
caacttaaacatggggtcattaggc

SEQ ID NO: 1517564 - DNA, 25 bp, Homo sapien
cttaaacatggggtcattaggcagg

SEQ ID NO: 1517565 - DNA, 25 bp, Homo sapien
taaacatggggtcattaggcaggtg

SEQ ID NO: 1517566 - DNA, 25 bp, Homo sapien
aaacatggggtcattaggcaggtgt

SEQ ID NO: 1517567 - DNA, 25 bp, Homo sapien
ttaccctgctctaagaggacattgg

SEQ ID NO: 1517568 - DNA, 25 bp, Homo sapien
aatgctcgtgacaccccaaacagga

SEQ ID NO: 1517569 - DNA, 25 bp, Homo sapien
cagtacacccaatgctcgtgacacc

SEQ ID NO: 1517570 - DNA, 25 bp, Homo sapien
accctgctctaagaggacattgggc

SEQ ID NO: 1517571 - DNA, 25 bp, Homo sapien
gagaagaagctaaagctccgaagtg

SEQ ID NO: 1517572 - DNA, 25 bp, Homo sapien
attccggagtccctgttctatgccc

SEQ ID NO: 1517573 - DNA, 25 bp, Homo sapien
gaagaagctaaagctccgaagtgac

SEQ ID NO: 1517574 - DNA, 25 bp, Homo sapien
tggtcattccggagtccctgttcta

SEQ ID NO: 1517575 - DNA, 25 bp, Homo sapien
ttgaggtgtcaagcacagagcaggc

SEQ ID NO: 1517576 - DNA, 25 bp, Homo sapien
cctgggccatggatgatcgggacat

SEQ ID NO: 1517577 - DNA, 25 bp, Homo sapien
cagtgggtcaccaagcatagtgtag

SEQ ID NO: 1517578 - DNA, 25 bp, Homo sapien
ccttggcaatgacagtggaacagct

SEQ ID NO: 1517579 - DNA, 25 bp, Homo sapien
ctctggggttccataccaggcacca

SEQ ID NO: 1517580 - DNA, 25 bp, Homo sapien
tggggtatggaagccccacattgcc

SEQ ID NO: 1517581 - DNA, 25 bp, Homo sapien
ggcaccaggatcatatttggggtat

SEQ ID NO: 1517582 - DNA, 25 bp, Homo sapien
caggctctggggttccataccaggc

SEQ ID NO: 1517583 - DNA, 25 bp, Homo sapien
ttccatccacacctttaatggcagt

SEQ ID NO: 1517584 - DNA, 25 bp, Homo sapien
tccacacctttaatggcagtgatag

SEQ ID NO: 1517585 - DNA, 25 bp, Homo sapien
ccatccacacctttaatggcagtga

SEQ ID NO: 1517586 - DNA, 25 bp, Homo sapien
catccacacctttaatggcagtgat

SEQ ID NO: 1517587 - DNA, 25 bp, Homo sapien
tcatcctccgtgagtctcccgccct

SEQ ID NO: 1517588 - DNA, 25 bp, Homo sapien
tctcatcctccgtgagtctcccgcc

SEQ ID NO: 1517589 - DNA, 25 bp, Homo sapien
cctccgtgagtctcccgccctcttg

SEQ ID NO: 1517590 - DNA, 25 bp, Homo sapien
catctcatcctccgtgagtctcccg

SEQ ID NO: 1517591 - DNA, 25 bp, Homo sapien
tatgggccggaatcttcttcggttg

SEQ ID NO: 1517592 - DNA, 25 bp, Homo sapien
tgcatccctctatgggccggaatct

SEQ ID NO: 1517593 - DNA, 25 bp, Homo sapien
gggccggaatcttcttcggttgctc

SEQ ID NO: 1517594 - DNA, 25 bp, Homo sapien
agaagtggtgcatccctctatgggc

SEQ ID NO: 1517595 - DNA, 25 bp, Homo sapien
cggagaaagccaggccctttagcct

SEQ ID NO: 1517596 - DNA, 25 bp, Homo sapien
gccctttagcctggcgctcgaggcc

SEQ ID NO: 1517597 - DNA, 25 bp, Homo sapien
tttagcctggcgctcgaggccccag

SEQ ID NO: 1517598 - DNA, 25 bp, Homo sapien
cgccctcggagaaagccaggccctt

SEQ ID NO: 1517599 - DNA, 25 bp, Homo sapien
ttagatgatcctcagcgacgttagg

SEQ ID NO: 1517600 - DNA, 25 bp, Homo sapien
acatggagggaagctcggccctcct

SEQ ID NO: 1517601 - DNA, 25 bp, Homo sapien
cctcctcgggctgaaggtctctctc

SEQ ID NO: 1517602 - DNA, 25 bp, Homo sapien
gcgacgttagggtctcttgccacat

SEQ ID NO: 1517603 - DNA, 25 bp, Homo sapien
cgccgcaggaggctcgactcgtcca

SEQ ID NO: 1517604 - DNA, 25 bp, Homo sapien
gccgcaggaggctcgactcgtccat

SEQ ID NO: 1517605 - DNA, 25 bp, Homo sapien
caggaaatctgattggctcgcatca

SEQ ID NO: 1517606 - DNA, 25 bp, Homo sapien
tatgcgtctggattggccggtcagc

SEQ ID NO: 1517607 - DNA, 25 bp, Homo sapien
ttgtcaccaccggagaggacgccct

SEQ ID NO: 1517608 - DNA, 25 bp, Homo sapien
cagcacccgtttgtgaatggactct

SEQ ID NO: 1517609 - DNA, 25 bp, Homo sapien
ctgcacacagccaacagcacgcctc

SEQ ID NO: 1517610 - DNA, 25 bp, Homo sapien
tgcacacagccaacagcacgcctca

SEQ ID NO: 1517611 - DNA, 25 bp, Homo sapien
gcacacagccaacagcacgcctcac

SEQ ID NO: 1517612 - DNA, 25 bp, Homo sapien
gccaggccggatcctttttcagacc

SEQ ID NO: 1517613 - DNA, 25 bp, Homo sapien
cgttatgcgtgaggctgagtttaac

SEQ ID NO: 1517614 - DNA, 25 bp, Homo sapien
gttacccggtgcctgcacacgttat

SEQ ID NO: 1517615 - DNA, 25 bp, Homo sapien
tggacccagggctgtcgcaaactgg

SEQ ID NO: 1517616 - DNA, 25 bp, Homo sapien
ggagaagacatagcacagcaggagc

SEQ ID NO: 1517617 - DNA, 25 bp, Homo sapien
ggaggagaataatctacccctcgaa

SEQ ID NO: 1517618 - DNA, 25 bp, Homo sapien
tgctctgcgctcagaaaaccaagct

SEQ ID NO: 1517619 - DNA, 25 bp, Homo sapien
caagctgtcacgatgggaggagaat

SEQ ID NO: 1517620 - DNA, 25 bp, Homo sapien
aatctacccctcgaaggtctctctg

SEQ ID NO: 1517621 - DNA, 25 bp, Homo sapien
tccaggctgcccacgtcgtgatctg

SEQ ID NO: 1517622 - DNA, 25 bp, Homo sapien
atagcaaccagtgacgccatcggcc

SEQ ID NO: 1517623 - DNA, 25 bp, Homo sapien
catcggcccctacagccaattggag

SEQ ID NO: 1517624 - DNA, 25 bp, Homo sapien
gatctgggtgttcgccatagcaacc

SEQ ID NO: 1517625 - DNA, 25 bp, Homo sapien
ctgggtgccctcaccgcatgaagga

SEQ ID NO: 1517626 - DNA, 25 bp, Homo sapien
tcaccgcatgaaggatagaaagccg

SEQ ID NO: 1517627 - DNA, 25 bp, Homo sapien
ggatagaaagccgtgagcttgtgtt

SEQ ID NO: 1517628 - DNA, 25 bp, Homo sapien
catgaaggatagaaagccgtgagct

SEQ ID NO: 1517629 - DNA, 25 bp, Homo sapien
gtcctcggcgtggcaggctcagctc

SEQ ID NO: 1517630 - DNA, 25 bp, Homo sapien
cacgtcctcggcgtggcaggctcag

SEQ ID NO: 1517631 - DNA, 25 bp, Homo sapien
ccacgtcctcggcgtggcaggctca

SEQ ID NO: 1517632 - DNA, 25 bp, Homo sapien
cgtcctcggcgtggcaggctcagct

SEQ ID NO: 1517633 - DNA, 25 bp, Homo sapien
gggagccgcgggtgccgccctgtct

SEQ ID NO: 1517634 - DNA, 25 bp, Homo sapien
gcgagggtcgcgcagcgggaaaggg

SEQ ID NO: 1517635 - DNA, 25 bp, Homo sapien
ccctgtctgccgcagggacgccgag

SEQ ID NO: 1517636 - DNA, 25 bp, Homo sapien
cagcgagggtcgcgcagcgggaaag

SEQ ID NO: 1517637 - DNA, 25 bp, Homo sapien
ggcagaggccgcctctgtgcggcgg

SEQ ID NO: 1517638 - DNA, 25 bp, Homo sapien
gcctctgtgcggcggggtaccgacg

SEQ ID NO: 1517639 - DNA, 25 bp, Homo sapien
gcagaggccgcctctgtgcggcggg

SEQ ID NO: 1517640 - DNA, 25 bp, Homo sapien
tctgtgcggcggggtaccgacgccc

SEQ ID NO: 1517641 - DNA, 25 bp, Homo sapien
tcgagggtcagcgccgggatgtgca

SEQ ID NO: 1517642 - DNA, 25 bp, Homo sapien
gcagcttgtccctgcgggacttcat

SEQ ID NO: 1517643 - DNA, 25 bp, Homo sapien
ggtcagcgccgggatgtgcagcttg

SEQ ID NO: 1517644 - DNA, 25 bp, Homo sapien
atgtgcagcttgtccctgcgggact

SEQ ID NO: 1517645 - DNA, 25 bp, Homo sapien
gccccttcgtgtggccgaatccgga

SEQ ID NO: 1517646 - DNA, 25 bp, Homo sapien
gaatccggatctccggatggcggct

SEQ ID NO: 1517647 - DNA, 25 bp, Homo sapien
gcggctgcggttccctcagggagta

SEQ ID NO: 1517648 - DNA, 25 bp, Homo sapien
tctgggttcagctcaggacgtgagg

SEQ ID NO: 1517649 - DNA, 25 bp, Homo sapien
ctgcaaagaaagaggccggggacgg

SEQ ID NO: 1517650 - DNA, 25 bp, Homo sapien
cgggctctggctgctcggagacaga

SEQ ID NO: 1517651 - DNA, 25 bp, Homo sapien
ctgctgggacccagcagggacgggc

SEQ ID NO: 1517652 - DNA, 25 bp, Homo sapien
gacccagcagggacgggctctggct

SEQ ID NO: 1517653 - DNA, 25 bp, Homo sapien
gacgggctctggctgctcggagaca

SEQ ID NO: 1517654 - DNA, 25 bp, Homo sapien
ctccaggggtgcaggcccaaggagg

SEQ ID NO: 1517655 - DNA, 25 bp, Homo sapien
tccaggggtgcaggcccaaggaggg

SEQ ID NO: 1517656 - DNA, 25 bp, Homo sapien
ccaggggtgcaggcccaaggagggg

SEQ ID NO: 1517657 - DNA, 25 bp, Homo sapien
cgtgccggcgagtgggcggggcgct

SEQ ID NO: 1517658 - DNA, 25 bp, Homo sapien
ccgcgtgccggcgagtgggcggggc

SEQ ID NO: 1517659 - DNA, 25 bp, Homo sapien
gccggcgagtgggcggggcgctgcc

SEQ ID NO: 1517660 - DNA, 25 bp, Homo sapien
cgcgtgccggcgagtgggcggggcg

SEQ ID NO: 1517661 - DNA, 25 bp, Homo sapien
ctcggcggtgggatcggccccagga

SEQ ID NO: 1517662 - DNA, 25 bp, Homo sapien
gagccccgcggagccggacagggag

SEQ ID NO: 1517663 - DNA, 25 bp, Homo sapien
cggcggtgggatcggccccaggagc

SEQ ID NO: 1517664 - DNA, 25 bp, Homo sapien
aggagccccgcggagccggacaggg

SEQ ID NO: 1517665 - DNA, 25 bp, Homo sapien
tgcttccctttgtgccgccgcagcc

SEQ ID NO: 1517666 - DNA, 25 bp, Homo sapien
gcttccctttgtgccgccgcagccg

SEQ ID NO: 1517667 - DNA, 25 bp, Homo sapien
cgccttttgccaggcggctccgatg

SEQ ID NO: 1517668 - DNA, 25 bp, Homo sapien
gccaccgccgtccagtagctggggt

SEQ ID NO: 1517669 - DNA, 25 bp, Homo sapien
ccgtccagtagctggggtcggacat

SEQ ID NO: 1517670 - DNA, 25 bp, Homo sapien
gctgcagcagcgcgccttttgccag

SEQ ID NO: 1517671 - DNA, 25 bp, Homo sapien
ctaccaccaagctcttgcggttccc

SEQ ID NO: 1517672 - DNA, 25 bp, Homo sapien
ccaccaagctcttgcggttcccgct

SEQ ID NO: 1517673 - DNA, 25 bp, Homo sapien
ccgttgggaccgacaatggcgacag

SEQ ID NO: 1517674 - DNA, 25 bp, Homo sapien
cgacaatggcgacaggggccgggag

SEQ ID NO: 1517675 - DNA, 25 bp, Homo sapien
agaggcagccgagaaattccgagga

SEQ ID NO: 1517676 - DNA, 25 bp, Homo sapien
gcagaggcagccgagaaattccgag

SEQ ID NO: 1517677 - DNA, 25 bp, Homo sapien
agggcagaggcagccgagaaattcc

SEQ ID NO: 1517678 - DNA, 25 bp, Homo sapien
ttagggcagaggcagccgagaaatt

SEQ ID NO: 1517679 - DNA, 25 bp, Homo sapien
gtgtgttggttccatagccggaaga

SEQ ID NO: 1517680 - DNA, 25 bp, Homo sapien
agagacgcgagggaccatcttctgc

SEQ ID NO: 1517681 - DNA, 25 bp, Homo sapien
gacgcgagggaccatcttctgccgt

SEQ ID NO: 1517682 - DNA, 25 bp, Homo sapien
tccatagccggaagatgggagagac

SEQ ID NO: 1517683 - DNA, 25 bp, Homo sapien
gtagagagtggtggggatcagagcc

SEQ ID NO: 1517684 - DNA, 25 bp, Homo sapien
cagagccatgagttcaccgtcagtg

SEQ ID NO: 1517685 - DNA, 25 bp, Homo sapien
gatcagagccatgagttcaccgtca

SEQ ID NO: 1517686 - DNA, 25 bp, Homo sapien
gagagtggtggggatcagagccatg

SEQ ID NO: 1517687 - DNA, 25 bp, Homo sapien
gccgccttcctcatcaagcacattc

SEQ ID NO: 1517688 - DNA, 25 bp, Homo sapien
gcttggacaggaagtgcagctcgtc

SEQ ID NO: 1517689 - DNA, 25 bp, Homo sapien
gctggtggagacgttcccgggagga

SEQ ID NO: 1517690 - DNA, 25 bp, Homo sapien
ctcgtccggcgtcggctggaaggga

SEQ ID NO: 1517691 - DNA, 25 bp, Homo sapien
ctgcgagagcggggtcggaggcggg

SEQ ID NO: 1517692 - DNA, 25 bp, Homo sapien
gactgcgagagcggggtcggaggcg

SEQ ID NO: 1517693 - DNA, 25 bp, Homo sapien
gagactgcgagagcggggtcggagg

SEQ ID NO: 1517694 - DNA, 25 bp, Homo sapien
ctgagactgcgagagcggggtcgga

SEQ ID NO: 1517695 - DNA, 25 bp, Homo sapien
cctgagaccaaccccaggggaggat

SEQ ID NO: 1517696 - DNA, 25 bp, Homo sapien
aaggaggagccacaacttgggcctc

SEQ ID NO: 1517697 - DNA, 25 bp, Homo sapien
gaaggaggagccacaacttgggcct

SEQ ID NO: 1517698 - DNA, 25 bp, Homo sapien
aggaggagccacaacttgggcctcc

SEQ ID NO: 1517699 - DNA, 25 bp, Homo sapien
gacaatctcattgtcgaaggtcccc

SEQ ID NO: 1517700 - DNA, 25 bp, Homo sapien
attgtcgaaggtccccgttgcacgg

SEQ ID NO: 1517701 - DNA, 25 bp, Homo sapien
gaacctctcccggtacacgtgattc

SEQ ID NO: 1517702 - DNA, 25 bp, Homo sapien
tctcattgtcgaaggtccccgttgc

SEQ ID NO: 1517703 - DNA, 25 bp, Homo sapien
gacttggccaagcagtctcgggcca

SEQ ID NO: 1517704 - DNA, 25 bp, Homo sapien
tctctaggaagtagcgggaggtgac

SEQ ID NO: 1517705 - DNA, 25 bp, Homo sapien
ggatgaagcccaagacgccatcagc

SEQ ID NO: 1517706 - DNA, 25 bp, Homo sapien
gaggtgacgaggttctcgccagact

SEQ ID NO: 1517707 - DNA, 25 bp, Homo sapien
tcctcactgtccgaacgctcatggg

SEQ ID NO: 1517708 - DNA, 25 bp, Homo sapien
gacgatgaagctgacctcctcactg

SEQ ID NO: 1517709 - DNA, 25 bp, Homo sapien
gcagtttccggacaagctggacgat

SEQ ID NO: 1517710 - DNA, 25 bp, Homo sapien
agacactccagcagccgagctggcc

SEQ ID NO: 1517711 - DNA, 25 bp, Homo sapien
gatgtactgtggaaggtcagtctta

SEQ ID NO: 1517712 - DNA, 25 bp, Homo sapien
ggtcagtcttaatgccttggccctc

SEQ ID NO: 1517713 - DNA, 25 bp, Homo sapien
caggtggtaaaattcctcagggtca

SEQ ID NO: 1517714 - DNA, 25 bp, Homo sapien
ctgtggaaggtcagtcttaatgcct

SEQ ID NO: 1517715 - DNA, 25 bp, Homo sapien
tgttcttcttcgaggtgactcagtg

SEQ ID NO: 1517716 - DNA, 25 bp, Homo sapien
ttcgaggtgactcagtggcaccatc

SEQ ID NO: 1517717 - DNA, 25 bp, Homo sapien
tcttcttcgaggtgactcagtggca

SEQ ID NO: 1517718 - DNA, 25 bp, Homo sapien
gggctgttcttcttcgaggtgactc

SEQ ID NO: 1517719 - DNA, 25 bp, Homo sapien
acatgcaagacctcggcaaacccag

SEQ ID NO: 1517720 - DNA, 25 bp, Homo sapien
gctacatgcaagacctcggcaaacc

SEQ ID NO: 1517721 - DNA, 25 bp, Homo sapien
gatgctaattaagctacatgcaaga

SEQ ID NO: 1517722 - DNA, 25 bp, Homo sapien
cctccaaagtcaccgatgctaatta

SEQ ID NO: 1517723 - DNA, 25 bp, Homo sapien
ttcctccgtgactggccgaccaggg

SEQ ID NO: 1517724 - DNA, 25 bp, Homo sapien
ccataggctccgttgctaatgagtt

SEQ ID NO: 1517725 - DNA, 25 bp, Homo sapien
tctcaaagtcgctttcgcatggctt

SEQ ID NO: 1517726 - DNA, 25 bp, Homo sapien
ccgttgctaatgagtttgatggtct

SEQ ID NO: 1517727 - DNA, 25 bp, Homo sapien
tgttgaacaacatcacctagacatg

SEQ ID NO: 1517728 - DNA, 25 bp, Homo sapien
gatttcaagaccctaagctgctacc

SEQ ID NO: 1517729 - DNA, 25 bp, Homo sapien
caaaattttagccactgagagcctg

SEQ ID NO: 1517730 - DNA, 25 bp, Homo sapien
aggcttatgctatgagggacttccc

SEQ ID NO: 1517731 - DNA, 25 bp, Homo sapien
gaatgtcacgctccacaaagacctg

SEQ ID NO: 1517732 - DNA, 25 bp, Homo sapien
accatacataggtggcgccgggtct

SEQ ID NO: 1517733 - DNA, 25 bp, Homo sapien
cacgtattccatgaccatacatagg

SEQ ID NO: 1517734 - DNA, 25 bp, Homo sapien
tggttacgcaggatcaagttctgtt

SEQ ID NO: 1517735 - DNA, 25 bp, Homo sapien
acgggcagcgggcccatgttcttca

SEQ ID NO: 1517736 - DNA, 25 bp, Homo sapien
gatgccatagttatgcaggtactcc

SEQ ID NO: 1517737 - DNA, 25 bp, Homo sapien
tctcggcgaagtacaggcgggccat

SEQ ID NO: 1517738 - DNA, 25 bp, Homo sapien
ttcttcaggagcgtggcgcagtcgc

SEQ ID NO: 1517739 - DNA, 25 bp, Homo sapien
tcgatgtggccctcatagaggttgg

SEQ ID NO: 1517740 - DNA, 25 bp, Homo sapien
tgaggccgatcttggacaggccgaa

SEQ ID NO: 1517741 - DNA, 25 bp, Homo sapien
tcatagaggttggtggccatgctca

SEQ ID NO: 1517742 - DNA, 25 bp, Homo sapien
tgcttgtcgatgaactctcgggcgt

SEQ ID NO: 1517743 - DNA, 25 bp, Homo sapien
agcccaagagaggtcccaggagaga

SEQ ID NO: 1517744 - DNA, 25 bp, Homo sapien
aggaggaggcatcccggggctgccc

SEQ ID NO: 1517745 - DNA, 25 bp, Homo sapien
ccccagcccaagagaggtcccagga

SEQ ID NO: 1517746 - DNA, 25 bp, Homo sapien
ccagcccaagagaggtcccaggaga

SEQ ID NO: 1517747 - DNA, 25 bp, Homo sapien
tcacctcgggggctatgtactccgg

SEQ ID NO: 1517748 - DNA, 25 bp, Homo sapien
gggctatgtactccggcgtcccaca

SEQ ID NO: 1517749 - DNA, 25 bp, Homo sapien
acctcgggggctatgtactccggcg

SEQ ID NO: 1517750 - DNA, 25 bp, Homo sapien
tcgggggctatgtactccggcgtcc

SEQ ID NO: 1517751 - DNA, 25 bp, Homo sapien
gaaactcatagaggacgacgcccat

SEQ ID NO: 1517752 - DNA, 25 bp, Homo sapien
cgctgaccacctgaccgaagagttc

SEQ ID NO: 1517753 - DNA, 25 bp, Homo sapien
agaaaggcacgcagcccaccagaaa

SEQ ID NO: 1517754 - DNA, 25 bp, Homo sapien
ccacctgaccgaagagttcctcggg

SEQ ID NO: 1517755 - DNA, 25 bp, Homo sapien
gtgcccagacggtccagcgggctct

SEQ ID NO: 1517756 - DNA, 25 bp, Homo sapien
agtgcccagacggtccagcgggctc

SEQ ID NO: 1517757 - DNA, 25 bp, Homo sapien
gggctctgccggagcaacctggtga

SEQ ID NO: 1517758 - DNA, 25 bp, Homo sapien
ctctgccggagcaacctggtgatga

SEQ ID NO: 1517759 - DNA, 25 bp, Homo sapien
tcacccgccacaggatgccccccta

SEQ ID NO: 1517760 - DNA, 25 bp, Homo sapien
cctcacccgccacaggatgcccccc

SEQ ID NO: 1517761 - DNA, 25 bp, Homo sapien
ctcacccgccacaggatgcccccct

SEQ ID NO: 1517762 - DNA, 25 bp, Homo sapien
cacccgccacaggatgcccccctac

SEQ ID NO: 1517763 - DNA, 25 bp, Homo sapien
gaaaaaggggtgctgcttcacttcg

SEQ ID NO: 1517764 - DNA, 25 bp, Homo sapien
acgaactcggctttgtgtcggagaa

SEQ ID NO: 1517765 - DNA, 25 bp, Homo sapien
ttcgagctggggcacgaactcggct

SEQ ID NO: 1517766 - DNA, 25 bp, Homo sapien
ggtatcatcctcagcttcgagctgg

SEQ ID NO: 1517767 - DNA, 25 bp, Homo sapien
ctcggagcccagatggcggtaacgt

SEQ ID NO: 1517768 - DNA, 25 bp, Homo sapien
catcattggtctcgtcgtcctcgga

SEQ ID NO: 1517769 - DNA, 25 bp, Homo sapien
cagatggcggtaacgttccgaacgt

SEQ ID NO: 1517770 - DNA, 25 bp, Homo sapien
ggatctctgtggacgattcttcatc

SEQ ID NO: 1517771 - DNA, 25 bp, Homo sapien
gaagctcctttcagcgaaggtagga

SEQ ID NO: 1517772 - DNA, 25 bp, Homo sapien
ccaggaactcagagctgctgtagac

SEQ ID NO: 1517773 - DNA, 25 bp, Homo sapien
cggatgtcagcactcagccggcggc

SEQ ID NO: 1517774 - DNA, 25 bp, Homo sapien
ggcggccatagtccacttcgctgcg

SEQ ID NO: 1517775 - DNA, 25 bp, Homo sapien
tgacaggaggatccagaggatgtcc

SEQ ID NO: 1517776 - DNA, 25 bp, Homo sapien
ctgatggtattcaggagagatgggc

SEQ ID NO: 1517777 - DNA, 25 bp, Homo sapien
tccagaggatgtccaggacctcagc

SEQ ID NO: 1517778 - DNA, 25 bp, Homo sapien
caaacttgggcattgtgtccaggct

SEQ ID NO: 1517779 - DNA, 25 bp, Homo sapien
gcatcactggggtggccgctggtgg

SEQ ID NO: 1517780 - DNA, 25 bp, Homo sapien
cgatgctattgctccgtaggcgggc

SEQ ID NO: 1517781 - DNA, 25 bp, Homo sapien
ccttggtgtggagtgtcgggcgccg

SEQ ID NO: 1517782 - DNA, 25 bp, Homo sapien
tgtcgggcgccgatgctattgctcc

SEQ ID NO: 1517783 - DNA, 25 bp, Homo sapien
cggcatccagaggccttggtgtgga

SEQ ID NO: 1517784 - DNA, 25 bp, Homo sapien
cgggttcgaggacagagagcgcggg

SEQ ID NO: 1517785 - DNA, 25 bp, Homo sapien
tcggcgaagagtcacgggacgacgg

SEQ ID NO: 1517786 - DNA, 25 bp, Homo sapien
gggacgacgggttcgaggacagaga

SEQ ID NO: 1517787 - DNA, 25 bp, Homo sapien
gacgggtctcggctcggcgaagagt

SEQ ID NO: 1517788 - DNA, 25 bp, Homo sapien
atgtagacgcggatcgcccgcaggc

SEQ ID NO: 1517789 - DNA, 25 bp, Homo sapien
gctgaagccgtacttcttgccagag

SEQ ID NO: 1517790 - DNA, 25 bp, Homo sapien
ccagacgacgtggtgcacagtgtag

SEQ ID NO: 1517791 - DNA, 25 bp, Homo sapien
tagacgtcgctatcacccatgtaga

SEQ ID NO: 1517792 - DNA, 25 bp, Homo sapien
cagcactgactccccgttgatgtgg

SEQ ID NO: 1517793 - DNA, 25 bp, Homo sapien
cactgactccccgttgatgtgggtg

SEQ ID NO: 1517794 - DNA, 25 bp, Homo sapien
actccccgttgatgtgggtgatgag

SEQ ID NO: 1517795 - DNA, 25 bp, Homo sapien
gcagcagctccacgacgtccatgtg

SEQ ID NO: 1517796 - DNA, 25 bp, Homo sapien
tccagggctgtggtccgcagggata

SEQ ID NO: 1517797 - DNA, 25 bp, Homo sapien
tccgcagggatatcttgttgccgct

SEQ ID NO: 1517798 - DNA, 25 bp, Homo sapien
gctgtggtccgcagggatatcttgt

SEQ ID NO: 1517799 - DNA, 25 bp, Homo sapien
gtggtccgcagggatatcttgttgc

SEQ ID NO: 1517800 - DNA, 25 bp, Homo sapien
tcctgcgtgccatgcggcccttggc

SEQ ID NO: 1517801 - DNA, 25 bp, Homo sapien
gctcctgcgtgccatgcggcccttg

SEQ ID NO: 1517802 - DNA, 25 bp, Homo sapien
cttgctcctgcgtgccatgcggccc

SEQ ID NO: 1517803 - DNA, 25 bp, Homo sapien
ggtctcccgccgacggctcctcttg

SEQ ID NO: 1517804 - DNA, 25 bp, Homo sapien
ctccctggtggtcactgccgcgcac

SEQ ID NO: 1517805 - DNA, 25 bp, Homo sapien
gctccctggtggtcactgccgcgca

SEQ ID NO: 1517806 - DNA, 25 bp, Homo sapien
cgctccctggtggtcactgccgcgc

SEQ ID NO: 1517807 - DNA, 25 bp, Homo sapien
tggagtccggaggagaagctgcggc

SEQ ID NO: 1517808 - DNA, 25 bp, Homo sapien
ggagatcttcttgaaaagtgacttc

SEQ ID NO: 1517809 - DNA, 25 bp, Homo sapien
gatcttcttgaaaagtgacttccgc

SEQ ID NO: 1517810 - DNA, 25 bp, Homo sapien
gctgggcttcggcagggagtggtgg

SEQ ID NO: 1517811 - DNA, 25 bp, Homo sapien
ggatgcgctgggtggggatgcagtg

SEQ ID NO: 1517812 - DNA, 25 bp, Homo sapien
gatgcgctgggtggggatgcagtgg

SEQ ID NO: 1517813 - DNA, 25 bp, Homo sapien
tgctggtggacttgcggcggccagt

SEQ ID NO: 1517814 - DNA, 25 bp, Homo sapien
gggcgcggagatgggcgggcaggcc

SEQ ID NO: 1517815 - DNA, 25 bp, Homo sapien
gccagtcttggggcggggtggccca

SEQ ID NO: 1517816 - DNA, 25 bp, Homo sapien
ggcggggtggcccaagcttggcagc

SEQ ID NO: 1517817 - DNA, 25 bp, Homo sapien
cgccccgcctccccatccagccgct

SEQ ID NO: 1517818 - DNA, 25 bp, Homo sapien
ctggcccacgagtgcgccgccccgc

SEQ ID NO: 1517819 - DNA, 25 bp, Homo sapien
tggcccacgagtgcgccgccccgcc

SEQ ID NO: 1517820 - DNA, 25 bp, Homo sapien
cccgcctccccatccagccgctccc

SEQ ID NO: 1517821 - DNA, 25 bp, Homo sapien
ccacggcgatctgtggcactgaggt

SEQ ID NO: 1517822 - DNA, 25 bp, Homo sapien
tcctcctgcggctcatcgaagctaa

SEQ ID NO: 1517823 - DNA, 25 bp, Homo sapien
tcatcgaagctaacctcctgcacgg

SEQ ID NO: 1517824 - DNA, 25 bp, Homo sapien
tctcggcgctcggacaggtgcagcc

SEQ ID NO: 1517825 - DNA, 25 bp, Homo sapien
tcagtctcttccggtgggcccgaga

SEQ ID NO: 1517826 - DNA, 25 bp, Homo sapien
cagtctcttccggtgggcccgagag

SEQ ID NO: 1517827 - DNA, 25 bp, Homo sapien
agtctcttccggtgggcccgagagc

SEQ ID NO: 1517828 - DNA, 25 bp, Homo sapien
gattgacaccagaacacaagcgatg

SEQ ID NO: 1517829 - DNA, 25 bp, Homo sapien
tgtttcagacacatcacggccaagg

SEQ ID NO: 1517830 - DNA, 25 bp, Homo sapien
gctctgacatatggagggaacccct

SEQ ID NO: 1517831 - DNA, 25 bp, Homo sapien
taatcccgcaggactggcatactgg

SEQ ID NO: 1517832 - DNA, 25 bp, Homo sapien
aatcccgcgggactggtggactaga

SEQ ID NO: 1517833 - DNA, 25 bp, Homo sapien
cactggcacaactgaggctgatccc

SEQ ID NO: 1517834 - DNA, 25 bp, Homo sapien
ggaaatggccgaacactctctacgg

SEQ ID NO: 1517835 - DNA, 25 bp, Homo sapien
gacagccgagcgtttccagaggtag

SEQ ID NO: 1517836 - DNA, 25 bp, Homo sapien
ctgcgtggacccggccacccggcta

SEQ ID NO: 1517837 - DNA, 25 bp, Homo sapien
tgcgtggacccggccacccggctag

SEQ ID NO: 1517838 - DNA, 25 bp, Homo sapien
ttgggtctgcgtggacccggccacc

SEQ ID NO: 1517839 - DNA, 25 bp, Homo sapien
cacttgggtctgcgtggacccggcc

SEQ ID NO: 1517840 - DNA, 25 bp, Homo sapien
gacaagggagccaagggtgcaggct

SEQ ID NO: 1517841 - DNA, 25 bp, Homo sapien
accatgctcggccagctgaggacgc

SEQ ID NO: 1517842 - DNA, 25 bp, Homo sapien
acacggagggccatgggcgcccaag

SEQ ID NO: 1517843 - DNA, 25 bp, Homo sapien
tcacacggagggccatgggcgccca

SEQ ID NO: 1517844 - DNA, 25 bp, Homo sapien
ttacaagggccactcgtcactgggt

SEQ ID NO: 1517845 - DNA, 25 bp, Homo sapien
ggtcactgggccattgagtcctcca

SEQ ID NO: 1517846 - DNA, 25 bp, Homo sapien
ccactggccccattggttgaagcag

SEQ ID NO: 1517847 - DNA, 25 bp, Homo sapien
aattattccatgacccttacaaggg

SEQ ID NO: 1517848 - DNA, 25 bp, Homo sapien
gtacagagcgcggtactggaagccc

SEQ ID NO: 1517849 - DNA, 25 bp, Homo sapien
ggctcactaccagcacgtcgccggg

SEQ ID NO: 1517850 - DNA, 25 bp, Homo sapien
tgcgctcgttgaggccgggcatcca

SEQ ID NO: 1517851 - DNA, 25 bp, Homo sapien
ctcccggcggaacgggtacagagcg

SEQ ID NO: 1517852 - DNA, 25 bp, Homo sapien
tccacataggtgccagggaagtcac

SEQ ID NO: 1517853 - DNA, 25 bp, Homo sapien
ctccacataggtgccagggaagtca

SEQ ID NO: 1517854 - DNA, 25 bp, Homo sapien
gtacggcatttgacggccttgcact

SEQ ID NO: 1517855 - DNA, 25 bp, Homo sapien
tggcctccctgggtgaccaactggt

SEQ ID NO: 1517856 - DNA, 25 bp, Homo sapien
ttgggcaatgtcaccctggcacaaa

SEQ ID NO: 1517857 - DNA, 25 bp, Homo sapien
tggagataccagatgcctggaggct

SEQ ID NO: 1517858 - DNA, 25 bp, Homo sapien
gtggggagaactgctcgggcaagtc

SEQ ID NO: 1517859 - DNA, 25 bp, Homo sapien
caagcttcaccagaagagggggagc

SEQ ID NO: 1517860 - DNA, 25 bp, Homo sapien
gggagaactgctcgggcaagtcggg

SEQ ID NO: 1517861 - DNA, 25 bp, Homo sapien
ttcaccagaagagggggagccacat

SEQ ID NO: 1517862 - DNA, 25 bp, Homo sapien
gtgaaggggacaggcgagtcagctc

SEQ ID NO: 1517863 - DNA, 25 bp, Homo sapien
ggtgaaggggacaggcgagtcagct

SEQ ID NO: 1517864 - DNA, 25 bp, Homo sapien
tgaaggggacaggcgagtcagctct

SEQ ID NO: 1517865 - DNA, 25 bp, Homo sapien
cagctccgggcggtagtgagattcg

SEQ ID NO: 1517866 - DNA, 25 bp, Homo sapien
cggtagtgagattcgctgtccagcc

SEQ ID NO: 1517867 - DNA, 25 bp, Homo sapien
gctccgggcggtagtgagattcgct

SEQ ID NO: 1517868 - DNA, 25 bp, Homo sapien
cgggcggtagtgagattcgctgtcc

SEQ ID NO: 1517869 - DNA, 25 bp, Homo sapien
tcctcccaaccccattgaggctccc

SEQ ID NO: 1517870 - DNA, 25 bp, Homo sapien
tgcaggggggcacacgtccaactca

SEQ ID NO: 1517871 - DNA, 25 bp, Homo sapien
acacgtccaactcatgtgtactggg

SEQ ID NO: 1517872 - DNA, 25 bp, Homo sapien
caaccccattgaggctccccttcac

SEQ ID NO: 1517873 - DNA, 25 bp, Homo sapien
gggtcacgagcggcgcgggcagtgc

SEQ ID NO: 1517874 - DNA, 25 bp, Homo sapien
agggctgccgtgtcccactgatcca

SEQ ID NO: 1517875 - DNA, 25 bp, Homo sapien
tgatccacgtcgctcagggaccagt

SEQ ID NO: 1517876 - DNA, 25 bp, Homo sapien
ggaagctcttaatgccgtcagccag

SEQ ID NO: 1517877 - DNA, 25 bp, Homo sapien
gcggtgcagcggcagcgtcggtggc

SEQ ID NO: 1517878 - DNA, 25 bp, Homo sapien
ggcagcgtcggtggctccagcgccg

SEQ ID NO: 1517879 - DNA, 25 bp, Homo sapien
tgcagcggcagcgtcggtggctcca

SEQ ID NO: 1517880 - DNA, 25 bp, Homo sapien
cgcgcggtgcagcggcagcgtcggt

SEQ ID NO: 1517881 - DNA, 25 bp, Homo sapien
gcggcccaaaggtggcgcccagggc

SEQ ID NO: 1517882 - DNA, 25 bp, Homo sapien
tcccttcttagggtctagacgccgc

SEQ ID NO: 1517883 - DNA, 25 bp, Homo sapien
ccttcttagggtctagacgccgctc

SEQ ID NO: 1517884 - DNA, 25 bp, Homo sapien
ggagcccaggtctccgctccgtcat

SEQ ID NO: 1517885 - DNA, 25 bp, Homo sapien
cgtcatcacaagaacgcagcttctc

SEQ ID NO: 1517886 - DNA, 25 bp, Homo sapien
catgtgcacaggattgtgcgtgcgc

SEQ ID NO: 1517887 - DNA, 25 bp, Homo sapien
gcccacgcatgtgcacaggattgtg

SEQ ID NO: 1517888 - DNA, 25 bp, Homo sapien
acaggattgtgcgtgcgcttgcacg

SEQ ID NO: 1517889 - DNA, 25 bp, Homo sapien
tgtccgcccacgcatgtgcacagga

SEQ ID NO: 1517890 - DNA, 25 bp, Homo sapien
tgggggcgcaacctcctgctcttcc

SEQ ID NO: 1517891 - DNA, 25 bp, Homo sapien
gggggcgcaacctcctgctcttcca

SEQ ID NO: 1517892 - DNA, 25 bp, Homo sapien
ccagcagcgccgggaagtcagggct

SEQ ID NO: 1517893 - DNA, 25 bp, Homo sapien
caccagcagcgccgggaagtcaggg

SEQ ID NO: 1517894 - DNA, 25 bp, Homo sapien
tgccttggggggtttaggcggcagc

SEQ ID NO: 1517895 - DNA, 25 bp, Homo sapien
caggactgtggaggccggctttgcc

SEQ ID NO: 1517896 - DNA, 25 bp, Homo sapien
ggactgtggaggccggctttgcctt

SEQ ID NO: 1517897 - DNA, 25 bp, Homo sapien
aggactgtggaggccggctttgcct

SEQ ID NO: 1517898 - DNA, 25 bp, Homo sapien
gatcttgctagaagcatctcggact

SEQ ID NO: 1517899 - DNA, 25 bp, Homo sapien
tgagggtcagcgtgtactcgccctg

SEQ ID NO: 1517900 - DNA, 25 bp, Homo sapien
gagtgtcccggagtttctcgttcac

SEQ ID NO: 1517901 - DNA, 25 bp, Homo sapien
catctcggactaggaaggtgccatc

SEQ ID NO: 1517902 - DNA, 25 bp, Homo sapien
cctccattcttgaaaccgcacatgt

SEQ ID NO: 1517903 - DNA, 25 bp, Homo sapien
cggttatccttgcagggacaggccc

SEQ ID NO: 1517904 - DNA, 25 bp, Homo sapien
tgtgacccccggttatccttgcagg

SEQ ID NO: 1517905 - DNA, 25 bp, Homo sapien
gcacatgttctatcccctctgaact

SEQ ID NO: 1517906 - DNA, 25 bp, Homo sapien
gccatagtgcccatctcggtggaag

SEQ ID NO: 1517907 - DNA, 25 bp, Homo sapien
ccagagactcgtggcggtagtgatt

SEQ ID NO: 1517908 - DNA, 25 bp, Homo sapien
gatgaggtccacaacggagcagaag

SEQ ID NO: 1517909 - DNA, 25 bp, Homo sapien
tgctggtatttggacacagggtaga

SEQ ID NO: 1517910 - DNA, 25 bp, Homo sapien
gggaggtccgtgtgtactcttcata

SEQ ID NO: 1517911 - DNA, 25 bp, Homo sapien
gtgatagaccttaagctgggcgccc

SEQ ID NO: 1517912 - DNA, 25 bp, Homo sapien
tactcgcggctcttgtcctggtact

SEQ ID NO: 1517913 - DNA, 25 bp, Homo sapien
cataaagctggtcatactcgcggct

SEQ ID NO: 1517914 - DNA, 25 bp, Homo sapien
aggagggggcgcagctcagcacctc

SEQ ID NO: 1517915 - DNA, 25 bp, Homo sapien
tcagcacctcctgggactccccaaa

SEQ ID NO: 1517916 - DNA, 25 bp, Homo sapien
gaggagggggcgcagctcagcacct

SEQ ID NO: 1517917 - DNA, 25 bp, Homo sapien
ctggaggagggggcgcagctcagca

SEQ ID NO: 1517918 - DNA, 25 bp, Homo sapien
gatcttgatagtctcattgaaggcc

SEQ ID NO: 1517919 - DNA, 25 bp, Homo sapien
aattgcagtacgcttcatctgcagc

SEQ ID NO: 1517920 - DNA, 25 bp, Homo sapien
tttctcgttgccctcacgccggaag

SEQ ID NO: 1517921 - DNA, 25 bp, Homo sapien
agcgctccaggtattccttgctgca

SEQ ID NO: 1517922 - DNA, 25 bp, Homo sapien
cctactttgcaccagactatgtgct

SEQ ID NO: 1517923 - DNA, 25 bp, Homo sapien
ggttttctcaaggacctactttgca

SEQ ID NO: 1517924 - DNA, 25 bp, Homo sapien
ttgcaccagactatgtgcttccagc

SEQ ID NO: 1517925 - DNA, 25 bp, Homo sapien
tttctcaaggacctactttgcacca

SEQ ID NO: 1517926 - DNA, 25 bp, Homo sapien
aggtactggtctcggatcttgcgca

SEQ ID NO: 1517927 - DNA, 25 bp, Homo sapien
tctcatggatctcggcaatgcggga

SEQ ID NO: 1517928 - DNA, 25 bp, Homo sapien
cgcagctgcatgaggtccggcttga

SEQ ID NO: 1517929 - DNA, 25 bp, Homo sapien
gatctctctgttgtccgaggcctgg

SEQ ID NO: 1517930 - DNA, 25 bp, Homo sapien
ttctgccgggcgcctttctgggtga

SEQ ID NO: 1517931 - DNA, 25 bp, Homo sapien
tcttctgccgggcgcctttctgggt

SEQ ID NO: 1517932 - DNA, 25 bp, Homo sapien
tgccgggcgcctttctgggtgagcc

SEQ ID NO: 1517933 - DNA, 25 bp, Homo sapien
ccgggcgcctttctgggtgagccac

SEQ ID NO: 1517934 - DNA, 25 bp, Homo sapien
ctctcgcggatgaggaaggtgccat

SEQ ID NO: 1517935 - DNA, 25 bp, Homo sapien
acggagcaggcgtagcagccccgct

SEQ ID NO: 1517936 - DNA, 25 bp, Homo sapien
tgcctgcgtgcggttgatcttgccc

SEQ ID NO: 1517937 - DNA, 25 bp, Homo sapien
taccaagtgcgttcctcgtggtgcg

SEQ ID NO: 1517938 - DNA, 25 bp, Homo sapien
gcagtgcttggtgtcgccgtccact

SEQ ID NO: 1517939 - DNA, 25 bp, Homo sapien
ccgtgcggtagatgacgcagtgctt

SEQ ID NO: 1517940 - DNA, 25 bp, Homo sapien
ggttgtagggctccgcgaagccgaa

SEQ ID NO: 1517941 - DNA, 25 bp, Homo sapien
tcagcgacccgtacaggttgtaggg

SEQ ID NO: 1517942 - DNA, 25 bp, Homo sapien
gcgtgctggtagtgcagcaccagct

SEQ ID NO: 1517943 - DNA, 25 bp, Homo sapien
cagcgaggcgtgctggtagtgcagc

SEQ ID NO: 1517944 - DNA, 25 bp, Homo sapien
cgaggcgtgctggtagtgcagcacc

SEQ ID NO: 1517945 - DNA, 25 bp, Homo sapien
ggcgtgctggtagtgcagcaccagc

SEQ ID NO: 1517946 - DNA, 25 bp, Homo sapien
gggtgcgccagggtgacggtgagcg

SEQ ID NO: 1517947 - DNA, 25 bp, Homo sapien
gacggtgagcgcgtcgttgtgctgc

SEQ ID NO: 1517948 - DNA, 25 bp, Homo sapien
ccagggtgacggtgagcgcgtcgtt

SEQ ID NO: 1517949 - DNA, 25 bp, Homo sapien
cggtgagcgcgtcgttgtgctgcac

SEQ ID NO: 1517950 - DNA, 25 bp, Homo sapien
agcgggcggcaggcggcgggccggg

SEQ ID NO: 1517951 - DNA, 25 bp, Homo sapien
cagcgggcggcaggcggcgggccgg

SEQ ID NO: 1517952 - DNA, 25 bp, Homo sapien
tcagcgggcggcaggcggcgggccg

SEQ ID NO: 1517953 - DNA, 25 bp, Homo sapien
aaatgaggacccctggatgtggctg

SEQ ID NO: 1517954 - DNA, 25 bp, Homo sapien
gatgtggctggtctggtccgtggct

SEQ ID NO: 1517955 - DNA, 25 bp, Homo sapien
gcaatgcccggaggacacgtagata

SEQ ID NO: 1517956 - DNA, 25 bp, Homo sapien
gttaggacccccaacatggagagag

SEQ ID NO: 1517957 - DNA, 25 bp, Homo sapien
gccctctgtaaacatggcaggtgca

SEQ ID NO: 1517958 - DNA, 25 bp, Homo sapien
aaacatggcaggtgcagccagaagg

SEQ ID NO: 1517959 - DNA, 25 bp, Homo sapien
tgtaaacatggcaggtgcagccaga

SEQ ID NO: 1517960 - DNA, 25 bp, Homo sapien
ctctgtaaacatggcaggtgcagcc

SEQ ID NO: 1517961 - DNA, 25 bp, Homo sapien
aatgtcacggccgaggttctcggaa

SEQ ID NO: 1517962 - DNA, 25 bp, Homo sapien
acggccgaggttctcggaagcagca

SEQ ID NO: 1517963 - DNA, 25 bp, Homo sapien
gtgggtgaacttctcgcagcggccc

SEQ ID NO: 1517964 - DNA, 25 bp, Homo sapien
cggccccgaatgtcacggccgaggt

SEQ ID NO: 1517965 - DNA, 25 bp, Homo sapien
ataagcgcctttaaccaggcggcgg

SEQ ID NO: 1517966 - DNA, 25 bp, Homo sapien
aataagcgcctttaaccaggcggcg

SEQ ID NO: 1517967 - DNA, 25 bp, Homo sapien
tgcctgggaaataagcgcctttaac

SEQ ID NO: 1517968 - DNA, 25 bp, Homo sapien
gcggctgcctgggaaataagcgcct

SEQ ID NO: 1517969 - DNA, 25 bp, Homo sapien
aacagcagaagtggcgacagggtca

SEQ ID NO: 1517970 - DNA, 25 bp, Homo sapien
aaagaagtctaacgcttgcagaggg

SEQ ID NO: 1517971 - DNA, 25 bp, Homo sapien
cttgtagttaactggtggcccattc

SEQ ID NO: 1517972 - DNA, 25 bp, Homo sapien
tggcccattcccaaagaagtctaac

SEQ ID NO: 1517973 - DNA, 25 bp, Homo sapien
taataggtcccaaagacacgcgagc

SEQ ID NO: 1517974 - DNA, 25 bp, Homo sapien
tctgagctgagcaagggatccacgt

SEQ ID NO: 1517975 - DNA, 25 bp, Homo sapien
taggcgctcattgaacccttgggcg

SEQ ID NO: 1517976 - DNA, 25 bp, Homo sapien
cagatgcgggatgcgaaagcgaaac

SEQ ID NO: 1517977 - DNA, 25 bp, Homo sapien
gtttccgtagggcaccagcgtgaca

SEQ ID NO: 1517978 - DNA, 25 bp, Homo sapien
agcggtgcattggacttcttcaggg

SEQ ID NO: 1517979 - DNA, 25 bp, Homo sapien
tagagggtcacattgacaagcggtg

SEQ ID NO: 1517980 - DNA, 25 bp, Homo sapien
cacagtgcttcatagtagagggtca

SEQ ID NO: 1517981 - DNA, 25 bp, Homo sapien
ctccaccttgttgaatttgcactcc

SEQ ID NO: 1517982 - DNA, 25 bp, Homo sapien
ccaccttgttgaatttgcactcctc

SEQ ID NO: 1517983 - DNA, 25 bp, Homo sapien
tgctggcacttgaactcccacctgc

SEQ ID NO: 1517984 - DNA, 25 bp, Homo sapien
atgctggcacttgaactcccacctg

SEQ ID NO: 1517985 - DNA, 25 bp, Homo sapien
tgtcaagttcatccaacacgcaggc

SEQ ID NO: 1517986 - DNA, 25 bp, Homo sapien
cagacaatggtcaggaaggctagct

SEQ ID NO: 1517987 - DNA, 25 bp, Homo sapien
tggtcaggaaggctagctccatgtc

SEQ ID NO: 1517988 - DNA, 25 bp, Homo sapien
gaaggctagctccatgtcaagttca

SEQ ID NO: 1517989 - DNA, 25 bp, Homo sapien
cattgacggtgacccagggcacata

SEQ ID NO: 1517990 - DNA, 25 bp, Homo sapien
cagggcacatactcgtgtggtggct

SEQ ID NO: 1517991 - DNA, 25 bp, Homo sapien
gtgcatgagctgcatgccgcggtcc

SEQ ID NO: 1517992 - DNA, 25 bp, Homo sapien
catgatagtgtctggcgacagccct

SEQ ID NO: 1517993 - DNA, 25 bp, Homo sapien
gatggactcctactcacctttcaaa

SEQ ID NO: 1517994 - DNA, 25 bp, Homo sapien
tcaagctgagggctaaaaagattct

SEQ ID NO: 1517995 - DNA, 25 bp, Homo sapien
tccatgggactatgagtgtcaagct

SEQ ID NO: 1517996 - DNA, 25 bp, Homo sapien
gaaagggctgcacatattcccaagt

SEQ ID NO: 1517997 - DNA, 25 bp, Homo sapien
agctgggtctgatcttccaagggtt

SEQ ID NO: 1517998 - DNA, 25 bp, Homo sapien
gctgggtctgatcttccaagggttt

SEQ ID NO: 1517999 - DNA, 25 bp, Homo sapien
gagctgggtctgatcttccaagggt

SEQ ID NO: 1518000 - DNA, 25 bp, Homo sapien
gaggtgaaggccatgagttggggtc

SEQ ID NO: 1518001 - DNA, 25 bp, Homo sapien
ctggaggtgaaggccatgagttggg

SEQ ID NO: 1518002 - DNA, 25 bp, Homo sapien
ggtgaaggccatgagttggggtcct

SEQ ID NO: 1518003 - DNA, 25 bp, Homo sapien
tgaaggccatgagttggggtcctgg

SEQ ID NO: 1518004 - DNA, 25 bp, Homo sapien
gaggaagggcagacatccggcttct

SEQ ID NO: 1518005 - DNA, 25 bp, Homo sapien
aggaagggcagacatccggcttctt

SEQ ID NO: 1518006 - DNA, 25 bp, Homo sapien
ggaagggcagacatccggcttcttg

SEQ ID NO: 1518007 - DNA, 25 bp, Homo sapien
ccactcgccttccatgagctctccg

SEQ ID NO: 1518008 - DNA, 25 bp, Homo sapien
cgccttccatgagctctccgcagct

SEQ ID NO: 1518009 - DNA, 25 bp, Homo sapien
atgagctctccgcagctcaccggcc

SEQ ID NO: 1518010 - DNA, 25 bp, Homo sapien
tccatgagctctccgcagctcaccg

SEQ ID NO: 1518011 - DNA, 25 bp, Homo sapien
tttccagttggtaagtagcaggtgc

SEQ ID NO: 1518012 - DNA, 25 bp, Homo sapien
catgggatgcataaaattttccagt

SEQ ID NO: 1518013 - DNA, 25 bp, Homo sapien
ccagttggtaagtagcaggtgccga

SEQ ID NO: 1518014 - DNA, 25 bp, Homo sapien
tcatgggatgcataaaattttccag

SEQ ID NO: 1518015 - DNA, 25 bp, Homo sapien
tttactttagcaccattcttagtgg

SEQ ID NO: 1518016 - DNA, 25 bp, Homo sapien
catggggtggaattttgtgtatctg

SEQ ID NO: 1518017 - DNA, 25 bp, Homo sapien
tttagcaccattcttagtggagcag

SEQ ID NO: 1518018 - DNA, 25 bp, Homo sapien
gattcttgatcatggggtggaattt

SEQ ID NO: 1518019 - DNA, 25 bp, Homo sapien
gagagcgggttttgccaggcctggg

SEQ ID NO: 1518020 - DNA, 25 bp, Homo sapien
aagggggaatggctgacttatcaaa

SEQ ID NO: 1518021 - DNA, 25 bp, Homo sapien
gtagagagcgggttttgccaggcct

SEQ ID NO: 1518022 - DNA, 25 bp, Homo sapien
gaagggggaatggctgacttatcaa

SEQ ID NO: 1518023 - DNA, 25 bp, Homo sapien
gcaggcgttctatcccaaggtcgag

SEQ ID NO: 1518024 - DNA, 25 bp, Homo sapien
taaggatcttcagtccgcaggtccg

SEQ ID NO: 1518025 - DNA, 25 bp, Homo sapien
cgttacgtcccgcatgccgattggt

SEQ ID NO: 1518026 - DNA, 25 bp, Homo sapien
tgtgccagcctatgggaaaccgtcg

SEQ ID NO: 1518027 - DNA, 25 bp, Homo sapien
ataacaggcggcgtagccggcgcca

SEQ ID NO: 1518028 - DNA, 25 bp, Homo sapien
aatagaagctgccccgcggataaca

SEQ ID NO: 1518029 - DNA, 25 bp, Homo sapien
cccgcggataacaggcggcgtagcc

SEQ ID NO: 1518030 - DNA, 25 bp, Homo sapien
aagctgccccgcggataacaggcgg

SEQ ID NO: 1518031 - DNA, 25 bp, Homo sapien
gcgcggatctcccaggactggcgca

SEQ ID NO: 1518032 - DNA, 25 bp, Homo sapien
ccagcgtgttagtgacgagcagcgc

SEQ ID NO: 1518033 - DNA, 25 bp, Homo sapien
gagcgccgtgggtcgaaaacctggc

SEQ ID NO: 1518034 - DNA, 25 bp, Homo sapien
cgccgcagcccagcgtgttagtgac

SEQ ID NO: 1518035 - DNA, 25 bp, Homo sapien
tcgggtgtcgggatcaaaggtcgcc

SEQ ID NO: 1518036 - DNA, 25 bp, Homo sapien
aaggactaagcagcgtggcgtcctc

SEQ ID NO: 1518037 - DNA, 25 bp, Homo sapien
gggtgaaggactaagcagcgtggcg

SEQ ID NO: 1518038 - DNA, 25 bp, Homo sapien
cccgcagtcgggtgtcgggatcaaa

SEQ ID NO: 1518039 - DNA, 25 bp, Homo sapien
gaggcgcggtcagggcaagggtcct

SEQ ID NO: 1518040 - DNA, 25 bp, Homo sapien
ggagaggcgcggtcagggcaagggt

SEQ ID NO: 1518041 - DNA, 25 bp, Homo sapien
gcgcggtcagggcaagggtcctgcg

SEQ ID NO: 1518042 - DNA, 25 bp, Homo sapien
gcggtcagggcaagggtcctgcggg

SEQ ID NO: 1518043 - DNA, 25 bp, Homo sapien
ttcttccactacaagccccaccagg

SEQ ID NO: 1518044 - DNA, 25 bp, Homo sapien
cattcttccactacaagccccacca

SEQ ID NO: 1518045 - DNA, 25 bp, Homo sapien
tgcattcttccactacaagccccac

SEQ ID NO: 1518046 - DNA, 25 bp, Homo sapien
cttccactacaagccccaccaggag

SEQ ID NO: 1518047 - DNA, 25 bp, Homo sapien
ggtcgggccggcaagttcctcagtc

SEQ ID NO: 1518048 - DNA, 25 bp, Homo sapien
taaggcctgggtaagcccaatgcca

SEQ ID NO: 1518049 - DNA, 25 bp, Homo sapien
tccctccctggctaaggcctgggta

SEQ ID NO: 1518050 - DNA, 25 bp, Homo sapien
gggccggcaagttcctcagtccatt

SEQ ID NO: 1518051 - DNA, 25 bp, Homo sapien
gacatttgggaagcctcggaggcca

SEQ ID NO: 1518052 - DNA, 25 bp, Homo sapien
caatggagaggctaccagctgatcc

SEQ ID NO: 1518053 - DNA, 25 bp, Homo sapien
ccagacgcagggaataggcggtcca

SEQ ID NO: 1518054 - DNA, 25 bp, Homo sapien
accagtagtgcaggaagggacccat

SEQ ID NO: 1518055 - DNA, 25 bp, Homo sapien
cagctctcacccactgtctgaccct

SEQ ID NO: 1518056 - DNA, 25 bp, Homo sapien
tcctggcagctctcacccactgtct

SEQ ID NO: 1518057 - DNA, 25 bp, Homo sapien
ctggcagctctcacccactgtctga

SEQ ID NO: 1518058 - DNA, 25 bp, Homo sapien
tggcagctctcacccactgtctgac

SEQ ID NO: 1518059 - DNA, 25 bp, Homo sapien
tgcgcagcaggccacacgcaccagt

SEQ ID NO: 1518060 - DNA, 25 bp, Homo sapien
ctgcgcagcaggccacacgcaccag

SEQ ID NO: 1518061 - DNA, 25 bp, Homo sapien
gggggcacgaagaggaagttcacga

SEQ ID NO: 1518062 - DNA, 25 bp, Homo sapien
gtacttcaagtaggacaggtacgtg

SEQ ID NO: 1518063 - DNA, 25 bp, Homo sapien
agtaggacaggtacgtgtcccagcc

SEQ ID NO: 1518064 - DNA, 25 bp, Homo sapien
ttcaagtaggacaggtacgtgtccc

SEQ ID NO: 1518065 - DNA, 25 bp, Homo sapien
caccgcgcccggcatgggtcttttt

SEQ ID NO: 1518066 - DNA, 25 bp, Homo sapien
ccaccgcgcccggcatgggtctttt

SEQ ID NO: 1518067 - DNA, 25 bp, Homo sapien
actgcagcctctgcctcctgggttc

SEQ ID NO: 1518068 - DNA, 25 bp, Homo sapien
ctgcagcctctgcctcctgggttca

SEQ ID NO: 1518069 - DNA, 25 bp, Homo sapien
cagtctgctcgggtgtccagggcca

SEQ ID NO: 1518070 - DNA, 25 bp, Homo sapien
agtctgctcgggtgtccagggccac

SEQ ID NO: 1518071 - DNA, 25 bp, Homo sapien
tcagtctgctcgggtgtccagggcc

SEQ ID NO: 1518072 - DNA, 25 bp, Homo sapien
gacatcttggtcacaggtcgcatga

SEQ ID NO: 1518073 - DNA, 25 bp, Homo sapien
gagcccattccccttctgtcagagg

SEQ ID NO: 1518074 - DNA, 25 bp, Homo sapien
ggatcagtcatgtccccgccttagt

SEQ ID NO: 1518075 - DNA, 25 bp, Homo sapien
tcaagacccgagcttgctgcaggag

SEQ ID NO: 1518076 - DNA, 25 bp, Homo sapien
gacctcatgagtgtcaaacgtgccc

SEQ ID NO: 1518077 - DNA, 25 bp, Homo sapien
gatgtcatgacaacactacacgcac

SEQ ID NO: 1518078 - DNA, 25 bp, Homo sapien
tacacgcacccaataaagcgaatgg

SEQ ID NO: 1518079 - DNA, 25 bp, Homo sapien
gctgtgggtattcaccaccctggga

SEQ ID NO: 1518080 - DNA, 25 bp, Homo sapien
tcttcttgatgacggggcgcaggga

SEQ ID NO: 1518081 - DNA, 25 bp, Homo sapien
ttccgggacaggtcgcttctctgtc

SEQ ID NO: 1518082 - DNA, 25 bp, Homo sapien
tgtccctgctaaaccttttcttcga

SEQ ID NO: 1518083 - DNA, 25 bp, Homo sapien
gtttccgggacaggtcgcttctctg

SEQ ID NO: 1518084 - DNA, 25 bp, Homo sapien
gggaggagggagcaaacatgttacc

SEQ ID NO: 1518085 - DNA, 25 bp, Homo sapien
tttctctgcagtggattggtgatac

SEQ ID NO: 1518086 - DNA, 25 bp, Homo sapien
tacttctatagtccgagtgggggag

SEQ ID NO: 1518087 - DNA, 25 bp, Homo sapien
ttggtgatacttctatagtccgagt

SEQ ID NO: 1518088 - DNA, 25 bp, Homo sapien
gcaccatgctcaagcctagggttcg

SEQ ID NO: 1518089 - DNA, 25 bp, Homo sapien
gagctcgtcctgctggtcgggcctc

SEQ ID NO: 1518090 - DNA, 25 bp, Homo sapien
gtcgggcctccgagcggactgggca

SEQ ID NO: 1518091 - DNA, 25 bp, Homo sapien
tccggaagcctcagtatccatccct

SEQ ID NO: 1518092 - DNA, 25 bp, Homo sapien
tgctttaagtcgctttattttctgt

SEQ ID NO: 1518093 - DNA, 25 bp, Homo sapien
tccatactgggtcccctacgtgttc

SEQ ID NO: 1518094 - DNA, 25 bp, Homo sapien
tgctttctctgtccgcagaactcca

SEQ ID NO: 1518095 - DNA, 25 bp, Homo sapien
ttggtgtctctggatgtaggagccc

SEQ ID NO: 1518096 - DNA, 25 bp, Homo sapien
caagctcttagttataggtggctcc

SEQ ID NO: 1518097 - DNA, 25 bp, Homo sapien
tcgacaaccagaggacttagggcca

SEQ ID NO: 1518098 - DNA, 25 bp, Homo sapien
ctgggcttctatccctgtgaggaga

SEQ ID NO: 1518099 - DNA, 25 bp, Homo sapien
tcccagggtctaattggaggcacct

SEQ ID NO: 1518100 - DNA, 25 bp, Homo sapien
agcgggacgggcctgacagattcca

SEQ ID NO: 1518101 - DNA, 25 bp, Homo sapien
acaggacctgctggacacgctggag

SEQ ID NO: 1518102 - DNA, 25 bp, Homo sapien
gacacgctggaggacaatcgagagt

SEQ ID NO: 1518103 - DNA, 25 bp, Homo sapien
agagtggtaccagagcaagatcccc

SEQ ID NO: 1518104 - DNA, 25 bp, Homo sapien
gcatcatggccgagttcttccagca

SEQ ID NO: 1518105 - DNA, 25 bp, Homo sapien
ggcctggacatcagtcccatgtgtg

SEQ ID NO: 1518106 - DNA, 25 bp, Homo sapien
tcagtggagaagtcccaggttggca

SEQ ID NO: 1518107 - DNA, 25 bp, Homo sapien
catgtgtgacaagcatacggcctca

SEQ ID NO: 1518108 - DNA, 25 bp, Homo sapien
gctgcagggaaccgtgattgcacca

SEQ ID NO: 1518109 - DNA, 25 bp, Homo sapien
gttgaggctgcagggaaccgtgatt

SEQ ID NO: 1518110 - DNA, 25 bp, Homo sapien
cctgggtgacagcaagaccctgtct

SEQ ID NO: 1518111 - DNA, 25 bp, Homo sapien
gaggctgcagggaaccgtgattgca

SEQ ID NO: 1518112 - DNA, 25 bp, Homo sapien
ttgatgtgttcaaggtggcggagct

SEQ ID NO: 1518113 - DNA, 25 bp, Homo sapien
ccctcacagctatcatattcagcat

SEQ ID NO: 1518114 - DNA, 25 bp, Homo sapien
caaggtggcggagctaagtgggaac

SEQ ID NO: 1518115 - DNA, 25 bp, Homo sapien
gctaagtgggaaccggcccctcaca

SEQ ID NO: 1518116 - DNA, 25 bp, Homo sapien
tccagactgaccaggaggagcaact

SEQ ID NO: 1518117 - DNA, 25 bp, Homo sapien
cagaccagcagaccgaggtggagct

SEQ ID NO: 1518118 - DNA, 25 bp, Homo sapien
tgtcccggatcagtggcctacatgg

SEQ ID NO: 1518119 - DNA, 25 bp, Homo sapien
cccaaggtgaccgctgaggaggccc

SEQ ID NO: 1518120 - DNA, 25 bp, Homo sapien
ctgaaccgggagttgacccacctgt

SEQ ID NO: 1518121 - DNA, 25 bp, Homo sapien
agatcgctgagctcacctgcctcgg

SEQ ID NO: 1518122 - DNA, 25 bp, Homo sapien
cgccccagttcaagcggatcctgaa

SEQ ID NO: 1518123 - DNA, 25 bp, Homo sapien
caggtgtccgagtacatctcccgga

SEQ ID NO: 1518124 - DNA, 25 bp, Homo sapien
tcagggtcctagagaggtcccatga

SEQ ID NO: 1518125 - DNA, 25 bp, Homo sapien
gaggcttctcgggtaccccattgct

SEQ ID NO: 1518126 - DNA, 25 bp, Homo sapien
gagcccagtacccatgtggtgttca

SEQ ID NO: 1518127 - DNA, 25 bp, Homo sapien
ggattctggcttggcccctgtgagc

SEQ ID NO: 1518128 - DNA, 25 bp, Homo sapien
caccgtgccctactgagcatgctat

SEQ ID NO: 1518129 - DNA, 25 bp, Homo sapien
gccctactgagcatgctattattag

SEQ ID NO: 1518130 - DNA, 25 bp, Homo sapien
caatgtgtactgtggaccaggcact

SEQ ID NO: 1518131 - DNA, 25 bp, Homo sapien
tttctgcaatgtgtactgtggacca

SEQ ID NO: 1518132 - DNA, 25 bp, Homo sapien
ttgcatggatgaaaggctgaaggct

SEQ ID NO: 1518133 - DNA, 25 bp, Homo sapien
gcatcctagttacttctgaaagcca

SEQ ID NO: 1518134 - DNA, 25 bp, Homo sapien
tgtgctgtgctccaggctatgcatc

SEQ ID NO: 1518135 - DNA, 25 bp, Homo sapien
catcagggtggcttgacagtgtccc

SEQ ID NO: 1518136 - DNA, 25 bp, Homo sapien
taatttaagcctgtctccattgata

SEQ ID NO: 1518137 - DNA, 25 bp, Homo sapien
gatgcctggatatcatgcccttgta

SEQ ID NO: 1518138 - DNA, 25 bp, Homo sapien
tgtagcagaacctctaccaatcact

SEQ ID NO: 1518139 - DNA, 25 bp, Homo sapien
cagcctggacgccatttctgatgcc

SEQ ID NO: 1518140 - DNA, 25 bp, Homo sapien
gttttgctacgagtccacattcctg

SEQ ID NO: 1518141 - DNA, 25 bp, Homo sapien
gaacagagtgttcgattctgcccta

SEQ ID NO: 1518142 - DNA, 25 bp, Homo sapien
ctgtttgtaatccttggttcgcccg

SEQ ID NO: 1518143 - DNA, 25 bp, Homo sapien
aaagtctcgttacgccagctcggct

SEQ ID NO: 1518144 - DNA, 25 bp, Homo sapien
acatggacacgcaggagcgcatcaa

SEQ ID NO: 1518145 - DNA, 25 bp, Homo sapien
gtctacgcgaacctgagcagctacg

SEQ ID NO: 1518146 - DNA, 25 bp, Homo sapien
gcatctcgcgcctggaagagaaagt

SEQ ID NO: 1518147 - DNA, 25 bp, Homo sapien
tcaagcagaaagtcctcagccacgt

SEQ ID NO: 1518148 - DNA, 25 bp, Homo sapien
tcatccagtccaacgggctggtcac

SEQ ID NO: 1518149 - DNA, 25 bp, Homo sapien
ccgagggcttcgtcaaggccctgga

SEQ ID NO: 1518150 - DNA, 25 bp, Homo sapien
gccgacgagctcacagttcctctac

SEQ ID NO: 1518151 - DNA, 25 bp, Homo sapien
tggaggatttacacaagcagaacca

SEQ ID NO: 1518152 - DNA, 25 bp, Homo sapien
gatcaggatccaagcgctttcagca

SEQ ID NO: 1518153 - DNA, 25 bp, Homo sapien
tctaagggtggacaagagctcaggc

SEQ ID NO: 1518154 - DNA, 25 bp, Homo sapien
caaggagttatttagccatgcggga

SEQ ID NO: 1518155 - DNA, 25 bp, Homo sapien
ctgtgactcctagctaactctcggg

SEQ ID NO: 1518156 - DNA, 25 bp, Homo sapien
taccaagcagagagcatagcacgtg

SEQ ID NO: 1518157 - DNA, 25 bp, Homo sapien
gaggtacgattagtcctgcaactgg

SEQ ID NO: 1518158 - DNA, 25 bp, Homo sapien
agcaggctcagcataggcaatgtcc

SEQ ID NO: 1518159 - DNA, 25 bp, Homo sapien
tccattctatgcgaggccctgtcag

SEQ ID NO: 1518160 - DNA, 25 bp, Homo sapien
ccaggcctgggcatacaggaagtgc

SEQ ID NO: 1518161 - DNA, 25 bp, Homo sapien
gaagtgcacattaaatgcatgctgg

SEQ ID NO: 1518162 - DNA, 25 bp, Homo sapien
taaatgcatgctggataagtgcagg

SEQ ID NO: 1518163 - DNA, 25 bp, Homo sapien
tccagtatctacctgtgaaacggcc

SEQ ID NO: 1518164 - DNA, 25 bp, Homo sapien
atgtggtcggatgcaggcaaaaccc

SEQ ID NO: 1518165 - DNA, 25 bp, Homo sapien
agccacgagtatgtggtcggatgca

SEQ ID NO: 1518166 - DNA, 25 bp, Homo sapien
agtatgtggtcggatgcaggcaaaa

SEQ ID NO: 1518167 - DNA, 25 bp, Homo sapien
ctggaaaagccacgagtatgtggtc

SEQ ID NO: 1518168 - DNA, 25 bp, Homo sapien
ttgtcctagagcttaaggcctgccc

SEQ ID NO: 1518169 - DNA, 25 bp, Homo sapien
cactcaataaatgggcttgtcctag

SEQ ID NO: 1518170 - DNA, 25 bp, Homo sapien
gggccgttcctttggcctcgatata

SEQ ID NO: 1518171 - DNA, 25 bp, Homo sapien
ggcctcgatatacccactcaataaa

SEQ ID NO: 1518172 - DNA, 25 bp, Homo sapien
acagggtgctatgagcgtaggccaa

SEQ ID NO: 1518173 - DNA, 25 bp, Homo sapien
tctggtggaggaacttgtccagtcc

SEQ ID NO: 1518174 - DNA, 25 bp, Homo sapien
cgtgccggccgggtaccagatgctg

SEQ ID NO: 1518175 - DNA, 25 bp, Homo sapien
tgcctctgccgctgagtcagcatca

SEQ ID NO: 1518176 - DNA, 25 bp, Homo sapien
ctgcaagcacggagcctctgaactt

SEQ ID NO: 1518177 - DNA, 25 bp, Homo sapien
tcaaaccaagtctcgagtggacaag

SEQ ID NO: 1518178 - DNA, 25 bp, Homo sapien
cacacagagagagccggaacaggtg

SEQ ID NO: 1518179 - DNA, 25 bp, Homo sapien
tggaggaactgcaagcacggagcct

SEQ ID NO: 1518180 - DNA, 25 bp, Homo sapien
tgcctgcgtaattgtggcttcttgc

SEQ ID NO: 1518181 - DNA, 25 bp, Homo sapien
tggcccgtgacttgagccgcagagt

SEQ ID NO: 1518182 - DNA, 25 bp, Homo sapien
ttcttgccggcgcagccagacgcag

SEQ ID NO: 1518183 - DNA, 25 bp, Homo sapien
cgcagagtcccctcgtctgcctctg

SEQ ID NO: 1518184 - DNA, 25 bp, Homo sapien
ccttttgagcttctgggtgcaccta

SEQ ID NO: 1518185 - DNA, 25 bp, Homo sapien
tgttcatgctgggactgacagcctg

SEQ ID NO: 1518186 - DNA, 25 bp, Homo sapien
tccgagcagcaaccagacgggagat

SEQ ID NO: 1518187 - DNA, 25 bp, Homo sapien
ccaaaactggctggattcctagaag

SEQ ID NO: 1518188 - DNA, 25 bp, Homo sapien
tggtggtgcccatctgtccaggccg

SEQ ID NO: 1518189 - DNA, 25 bp, Homo sapien
ccccaccggagatgatgaattggca

SEQ ID NO: 1518190 - DNA, 25 bp, Homo sapien
cacttggaacctggcgtggctctat

SEQ ID NO: 1518191 - DNA, 25 bp, Homo sapien
aggccgctggcaactccacttggaa

SEQ ID NO: 1518192 - DNA, 25 bp, Homo sapien
gcggcatgggcggcgctggccgagg

SEQ ID NO: 1518193 - DNA, 25 bp, Homo sapien
catgggcggcgctggccgaggtggg

SEQ ID NO: 1518194 - DNA, 25 bp, Homo sapien
gcgctggccgaggtgggtctcccct

SEQ ID NO: 1518195 - DNA, 25 bp, Homo sapien
gcagcagaaaggccgcggcatgggc

SEQ ID NO: 1518196 - DNA, 25 bp, Homo sapien
gggcgagtgttctgccttccctgca

SEQ ID NO: 1518197 - DNA, 25 bp, Homo sapien
ctgtggggtggggcgagtgttctgc

SEQ ID NO: 1518198 - DNA, 25 bp, Homo sapien
gggtggggcgagtgttctgccttcc

SEQ ID NO: 1518199 - DNA, 25 bp, Homo sapien
ggcgagtgttctgccttccctgcat

SEQ ID NO: 1518200 - DNA, 25 bp, Homo sapien
gttccctgtcgtcagggcagggcca

SEQ ID NO: 1518201 - DNA, 25 bp, Homo sapien
acaggatacacacttccagttccct

SEQ ID NO: 1518202 - DNA, 25 bp, Homo sapien
acttccagttccctgtcgtcagggc

SEQ ID NO: 1518203 - DNA, 25 bp, Homo sapien
gatacacacttccagttccctgtcg

SEQ ID NO: 1518204 - DNA, 25 bp, Homo sapien
gagtagccgagaatggacaagccat

SEQ ID NO: 1518205 - DNA, 25 bp, Homo sapien
cctggaggagtagccgagaatggac

SEQ ID NO: 1518206 - DNA, 25 bp, Homo sapien
ggaggagtagccgagaatggacaag

SEQ ID NO: 1518207 - DNA, 25 bp, Homo sapien
aggagtagccgagaatggacaagcc

SEQ ID NO: 1518208 - DNA, 25 bp, Homo sapien
aatcagtctccgctgagcattaggg

SEQ ID NO: 1518209 - DNA, 25 bp, Homo sapien
gagcttcctgaggtcgatggagtca

SEQ ID NO: 1518210 - DNA, 25 bp, Homo sapien
catcgacgggagtgttgaagtgagg

SEQ ID NO: 1518211 - DNA, 25 bp, Homo sapien
tgggtagtgtcagctgatccgtcaa

SEQ ID NO: 1518212 - DNA, 25 bp, Homo sapien
tactccgcgtggattggttgaccgc

SEQ ID NO: 1518213 - DNA, 25 bp, Homo sapien
tgactggcttgcgtctctgccactt

SEQ ID NO: 1518214 - DNA, 25 bp, Homo sapien
cttcgagcccggtgctgactggctt

SEQ ID NO: 1518215 - DNA, 25 bp, Homo sapien
ttctttcagcttagtggcgcgcggc

SEQ ID NO: 1518216 - DNA, 25 bp, Homo sapien
cttaagttttttttggagagatgag

SEQ ID NO: 1518217 - DNA, 25 bp, Homo sapien
cgcccagctaattcttcttaagttt

SEQ ID NO: 1518218 - DNA, 25 bp, Homo sapien
tgaggtctcgctatgttccccaggc

SEQ ID NO: 1518219 - DNA, 25 bp, Homo sapien
cacgcccagctaattcttcttaagt

SEQ ID NO: 1518220 - DNA, 25 bp, Homo sapien
tcacggatgtgtatcgctgcgctgg

SEQ ID NO: 1518221 - DNA, 25 bp, Homo sapien
ggatcacggatgtgtatcgctgcgc

SEQ ID NO: 1518222 - DNA, 25 bp, Homo sapien
atctccgtttccaacctaggctggt

SEQ ID NO: 1518223 - DNA, 25 bp, Homo sapien
catctccgtttccaacctaggctgg

SEQ ID NO: 1518224 - DNA, 25 bp, Homo sapien
gacctgcttctgttgcgactggcgc

SEQ ID NO: 1518225 - DNA, 25 bp, Homo sapien
tgcttctgttgcgactggcgcgaca

SEQ ID NO: 1518226 - DNA, 25 bp, Homo sapien
gcctcggacctgcttctgttgcgac

SEQ ID NO: 1518227 - DNA, 25 bp, Homo sapien
ttctgttgcgactggcgcgacagct

SEQ ID NO: 1518228 - DNA, 25 bp, Homo sapien
tcactaccaccgccttcctcggctg

SEQ ID NO: 1518229 - DNA, 25 bp, Homo sapien
ccgtcactaccaccgccttcctcgg

SEQ ID NO: 1518230 - DNA, 25 bp, Homo sapien
actaccaccgccttcctcggctgct

SEQ ID NO: 1518231 - DNA, 25 bp, Homo sapien
taccaccgccttcctcggctgctcc

SEQ ID NO: 1518232 - DNA, 25 bp, Homo sapien
aatccaactggcgttcacggtgtgt

SEQ ID NO: 1518233 - DNA, 25 bp, Homo sapien
actgcaatccaactggcgttcacgg

SEQ ID NO: 1518234 - DNA, 25 bp, Homo sapien
ctgaactgcaatccaactggcgttc

SEQ ID NO: 1518235 - DNA, 25 bp, Homo sapien
ccaactggcgttcacggtgtgttcc

SEQ ID NO: 1518236 - DNA, 25 bp, Homo sapien
tccatcccgttcacgaagtgggcag

SEQ ID NO: 1518237 - DNA, 25 bp, Homo sapien
cagaggttactttaaatcaggcagc

SEQ ID NO: 1518238 - DNA, 25 bp, Homo sapien
ccaggaattcagacacccggctttg

SEQ ID NO: 1518239 - DNA, 25 bp, Homo sapien
tctctggccacaagataaaaagctg

SEQ ID NO: 1518240 - DNA, 25 bp, Homo sapien
taggggagacgggacacacgagaca

SEQ ID NO: 1518241 - DNA, 25 bp, Homo sapien
aggggagacgggacacacgagacac

SEQ ID NO: 1518242 - DNA, 25 bp, Homo sapien
gagaggtaggggagacgggacacac

SEQ ID NO: 1518243 - DNA, 25 bp, Homo sapien
aggtaggggagacgggacacacgag

SEQ ID NO: 1518244 - DNA, 25 bp, Homo sapien
ctgcacctcctcggaagagaaacac

SEQ ID NO: 1518245 - DNA, 25 bp, Homo sapien
tgcacctcctcggaagagaaacaca

SEQ ID NO: 1518246 - DNA, 25 bp, Homo sapien
ctgatggcagggctcggtggctcac

SEQ ID NO: 1518247 - DNA, 25 bp, Homo sapien
ggccgaggtggaaggatcatttgag

SEQ ID NO: 1518248 - DNA, 25 bp, Homo sapien
ccagccagggcaatatagtgagatc

SEQ ID NO: 1518249 - DNA, 25 bp, Homo sapien
acctataatcccagcttctttggga

SEQ ID NO: 1518250 - DNA, 25 bp, Homo sapien
tggactgtttggtactcaaccggaa

SEQ ID NO: 1518251 - DNA, 25 bp, Homo sapien
caaccggaatctcgtacacatgcag

SEQ ID NO: 1518252 - DNA, 25 bp, Homo sapien
gtacacatgcaggtccacgctgtcg

SEQ ID NO: 1518253 - DNA, 25 bp, Homo sapien
tgtcgccaaggcctagcttttctag

SEQ ID NO: 1518254 - DNA, 25 bp, Homo sapien
caggggcaggacttaacatggcctg

SEQ ID NO: 1518255 - DNA, 25 bp, Homo sapien
taacatggcctgcccgtgggactca

SEQ ID NO: 1518256 - DNA, 25 bp, Homo sapien
cagacaggggcaggacttaacatgg

SEQ ID NO: 1518257 - DNA, 25 bp, Homo sapien
catggcctgcccgtgggactcagag

SEQ ID NO: 1518258 - DNA, 25 bp, Homo sapien
ctgacacccccacatgcaccaccag

SEQ ID NO: 1518259 - DNA, 25 bp, Homo sapien
cctgacacccccacatgcaccacca

SEQ ID NO: 1518260 - DNA, 25 bp, Homo sapien
gcctgacacccccacatgcaccacc

SEQ ID NO: 1518261 - DNA, 25 bp, Homo sapien
cgtggtgactcgcttgcacacagca

SEQ ID NO: 1518262 - DNA, 25 bp, Homo sapien
aaaagcggcagttgtccagcccctt

SEQ ID NO: 1518263 - DNA, 25 bp, Homo sapien
gagtcaatgctttcaggcccgtcct

SEQ ID NO: 1518264 - DNA, 25 bp, Homo sapien
gcatcctgcgagatggtcaccgaca

SEQ ID NO: 1518265 - DNA, 25 bp, Homo sapien
cagaaggaaccagtcctgctaccac

SEQ ID NO: 1518266 - DNA, 25 bp, Homo sapien
tgaccttggacttctgacttccaag

SEQ ID NO: 1518267 - DNA, 25 bp, Homo sapien
gaccttggacttctgacttccaagg

SEQ ID NO: 1518268 - DNA, 25 bp, Homo sapien
agcacctccagaaggaaccagtcct

SEQ ID NO: 1518269 - DNA, 25 bp, Homo sapien
acgggcgtgggccacaccacgtctg

SEQ ID NO: 1518270 - DNA, 25 bp, Homo sapien
aagaggtgtagtaggtaaagtcgca

SEQ ID NO: 1518271 - DNA, 25 bp, Homo sapien
gtagtaggtaaagtcgcagagatat

SEQ ID NO: 1518272 - DNA, 25 bp, Homo sapien
caaagaggtgtagtaggtaaagtcg

SEQ ID NO: 1518273 - DNA, 25 bp, Homo sapien
ctggtacaaagaggtgtagtaggta

SEQ ID NO: 1518274 - DNA, 25 bp, Homo sapien
tagttgattttgccctctgactgct

SEQ ID NO: 1518275 - DNA, 25 bp, Homo sapien
cagtgtttgtggcaatagttgattt

SEQ ID NO: 1518276 - DNA, 25 bp, Homo sapien
tgcccagctggtccgcgttgtacgg

SEQ ID NO: 1518277 - DNA, 25 bp, Homo sapien
ggacgaaggctgatcgaccgtgact

SEQ ID NO: 1518278 - DNA, 25 bp, Homo sapien
caaaagtggcatcaccctggtgggc

SEQ ID NO: 1518279 - DNA, 25 bp, Homo sapien
cagccgtggtatcgcagctcatgga

SEQ ID NO: 1518280 - DNA, 25 bp, Homo sapien
gaaagcaggtgaacatatggcccca

SEQ ID NO: 1518281 - DNA, 25 bp, Homo sapien
gagcacagttcaaggtcgaggacgc

SEQ ID NO: 1518282 - DNA, 25 bp, Homo sapien
gacaaaatccgcctttccacaggtg

SEQ ID NO: 1518283 - DNA, 25 bp, Homo sapien
gaagtttacgtcatctcatccctgc

SEQ ID NO: 1518284 - DNA, 25 bp, Homo sapien
tcacactcagggaagcagtatagcc

SEQ ID NO: 1518285 - DNA, 25 bp, Homo sapien
ggctgaacttacatcatctgaggaa

SEQ ID NO: 1518286 - DNA, 25 bp, Homo sapien
ggtgcttagctcagttcaggcctgg

SEQ ID NO: 1518287 - DNA, 25 bp, Homo sapien
catcggaactggagacaaggaaggt

SEQ ID NO: 1518288 - DNA, 25 bp, Homo sapien
gaccagacctttgaggaatagagca

SEQ ID NO: 1518289 - DNA, 25 bp, Homo sapien
tgttccccacattcaaaagaggcca

SEQ ID NO: 1518290 - DNA, 25 bp, Homo sapien
gatattttaagccaagacccaacaa

SEQ ID NO: 1518291 - DNA, 25 bp, Homo sapien
gatcatggctcactggggcttcaac

SEQ ID NO: 1518292 - DNA, 25 bp, Homo sapien
gcttcaacctcccaggcataggtga

SEQ ID NO: 1518293 - DNA, 25 bp, Homo sapien
tcatggctcactggggcttcaacct

SEQ ID NO: 1518294 - DNA, 25 bp, Homo sapien
ttcaacctcccaggcataggtgatc

SEQ ID NO: 1518295 - DNA, 25 bp, Homo sapien
taaaagtgcgcagacttgggcatct

SEQ ID NO: 1518296 - DNA, 25 bp, Homo sapien
tccagcccttgattggagcaggtgg

SEQ ID NO: 1518297 - DNA, 25 bp, Homo sapien
tccttgccgagaaactactgccatc

SEQ ID NO: 1518298 - DNA, 25 bp, Homo sapien
tcaagttggtcagggtaccaggtgc

SEQ ID NO: 1518299 - DNA, 25 bp, Homo sapien
tctccaaaagggacgtctaggttca

SEQ ID NO: 1518300 - DNA, 25 bp, Homo sapien
tgtgcgggacagatttccatgagcc

SEQ ID NO: 1518301 - DNA, 25 bp, Homo sapien
tctaggttcagacgccacaagaggc

SEQ ID NO: 1518302 - DNA, 25 bp, Homo sapien
tgtttctatgccagcaacgagcaga

SEQ ID NO: 1518303 - DNA, 25 bp, Homo sapien
ccgggaattagctttccagacgtgg

SEQ ID NO: 1518304 - DNA, 25 bp, Homo sapien
ttagctttccagacgtgggcactgg

SEQ ID NO: 1518305 - DNA, 25 bp, Homo sapien
gggaattagctttccagacgtgggc

SEQ ID NO: 1518306 - DNA, 25 bp, Homo sapien
agctttccagacgtgggcactgggc

SEQ ID NO: 1518307 - DNA, 25 bp, Homo sapien
actcagcttgtgacaactgtcctgg

SEQ ID NO: 1518308 - DNA, 25 bp, Homo sapien
gtgggactgggtccctcaagtcctg

SEQ ID NO: 1518309 - DNA, 25 bp, Homo sapien
ggactgggtccctcaagtcctggga

SEQ ID NO: 1518310 - DNA, 25 bp, Homo sapien
ccccactcagcttgtgacaactgtc

SEQ ID NO: 1518311 - DNA, 25 bp, Homo sapien
ctggatcgtcaggagccacggccac

SEQ ID NO: 1518312 - DNA, 25 bp, Homo sapien
cggccactacccagtgaccaattcc

SEQ ID NO: 1518313 - DNA, 25 bp, Homo sapien
aggagccacggccactacccagtga

SEQ ID NO: 1518314 - DNA, 25 bp, Homo sapien
ggccagacgctggtctggatcgtca

SEQ ID NO: 1518315 - DNA, 25 bp, Homo sapien
aaaaacctgagatgttagaggagcc

SEQ ID NO: 1518316 - DNA, 25 bp, Homo sapien
gagtgaactcggcttccaaaggctc

SEQ ID NO: 1518317 - DNA, 25 bp, Homo sapien
tgccacaggccttggcaagcagaaa

SEQ ID NO: 1518318 - DNA, 25 bp, Homo sapien
ccctatgtggaatctccttgagaca

SEQ ID NO: 1518319 - DNA, 25 bp, Homo sapien
ggccctccttcggcggcagaaaaca

SEQ ID NO: 1518320 - DNA, 25 bp, Homo sapien
ctccttcggcggcagaaaacacagt

SEQ ID NO: 1518321 - DNA, 25 bp, Homo sapien
cctccttcggcggcagaaaacacag

SEQ ID NO: 1518322 - DNA, 25 bp, Homo sapien
gaccgggccctccttcggcggcaga

SEQ ID NO: 1518323 - DNA, 25 bp, Homo sapien
gaatccggcatatccttctccgcct

SEQ ID NO: 1518324 - DNA, 25 bp, Homo sapien
cagccccaggcagaatccggcatat

SEQ ID NO: 1518325 - DNA, 25 bp, Homo sapien
cggcatatccttctccgcctggggg

SEQ ID NO: 1518326 - DNA, 25 bp, Homo sapien
cccaggcagaatccggcatatcctt

SEQ ID NO: 1518327 - DNA, 25 bp, Homo sapien
ggagggcaggttttacgttgccagc

SEQ ID NO: 1518328 - DNA, 25 bp, Homo sapien
gattgagtctaatttgttgtcccct

SEQ ID NO: 1518329 - DNA, 25 bp, Homo sapien
aaaagtttgaaattgtgattgagtc

SEQ ID NO: 1518330 - DNA, 25 bp, Homo sapien
gatatattgacatccaaaagtttga

SEQ ID NO: 1518331 - DNA, 25 bp, Homo sapien
ggtgcccccaacaacatctgtaaca

SEQ ID NO: 1518332 - DNA, 25 bp, Homo sapien
agggtgcccccaacaacatctgtaa

SEQ ID NO: 1518333 - DNA, 25 bp, Homo sapien
tcagggtgcccccaacaacatctgt

SEQ ID NO: 1518334 - DNA, 25 bp, Homo sapien
agagtcagggtgccccctcagggtg

SEQ ID NO: 1518335 - DNA, 25 bp, Homo sapien
tggagtcatccggatcagagtgctt

SEQ ID NO: 1518336 - DNA, 25 bp, Homo sapien
gtcatccggatcagagtgcttgtcc

SEQ ID NO: 1518337 - DNA, 25 bp, Homo sapien
gagtcatccggatcagagtgcttgt

SEQ ID NO: 1518338 - DNA, 25 bp, Homo sapien
tccggatcagagtgcttgtccgagg

SEQ ID NO: 1518339 - DNA, 25 bp, Homo sapien
cctggtggcgtttctgcaactcctg

SEQ ID NO: 1518340 - DNA, 25 bp, Homo sapien
tgctctgaaggtcctggtggcgttt

SEQ ID NO: 1518341 - DNA, 25 bp, Homo sapien
tgaaggtcctggtggcgtttctgca

SEQ ID NO: 1518342 - DNA, 25 bp, Homo sapien
ctaactggtgctctgaaggtcctgg

SEQ ID NO: 1518343 - DNA, 25 bp, Homo sapien
gtgcttttggatgaggttggggccc

SEQ ID NO: 1518344 - DNA, 25 bp, Homo sapien
cttttggatgaggttggggcccagc

SEQ ID NO: 1518345 - DNA, 25 bp, Homo sapien
tttggatgaggttggggcccagctc

SEQ ID NO: 1518346 - DNA, 25 bp, Homo sapien
gatgaggttggggcccagctcctcc

SEQ ID NO: 1518347 - DNA, 25 bp, Homo sapien
tctcaccctgtcatgttggccagtc

SEQ ID NO: 1518348 - DNA, 25 bp, Homo sapien
aagatggggtctcaccctgtcatgt

SEQ ID NO: 1518349 - DNA, 25 bp, Homo sapien
aggcatgagccaccacgcctggccc

SEQ ID NO: 1518350 - DNA, 25 bp, Homo sapien
ggggtctcaccctgtcatgttggcc

SEQ ID NO: 1518351 - DNA, 25 bp, Homo sapien
gagctgggactgaccagatgctgcc

SEQ ID NO: 1518352 - DNA, 25 bp, Homo sapien
gggcgctcctagtaaagctagggca

SEQ ID NO: 1518353 - DNA, 25 bp, Homo sapien
tgcagagtaaacactccaatgacca

SEQ ID NO: 1518354 - DNA, 25 bp, Homo sapien
tcttcctcgatatgaggacaccatt

SEQ ID NO: 1518355 - DNA, 25 bp, Homo sapien
ccattcaccgtcctgagttcttgcc

SEQ ID NO: 1518356 - DNA, 25 bp, Homo sapien
tgagagccattcaccgtcctgagtt

SEQ ID NO: 1518357 - DNA, 25 bp, Homo sapien
ctgagagccattcaccgtcctgagt

SEQ ID NO: 1518358 - DNA, 25 bp, Homo sapien
gagagccattcaccgtcctgagttc

SEQ ID NO: 1518359 - DNA, 25 bp, Homo sapien
cgggaaacttgcgcggctcgcctcg

SEQ ID NO: 1518360 - DNA, 25 bp, Homo sapien
ggagtcttcggagtgcaactctgag

SEQ ID NO: 1518361 - DNA, 25 bp, Homo sapien
ctctcggaatctggagtcttcggag

SEQ ID NO: 1518362 - DNA, 25 bp, Homo sapien
catgcggcagccacgagagcaccag

SEQ ID NO: 1518363 - DNA, 25 bp, Homo sapien
tggttggcccgcagcctggttagca

SEQ ID NO: 1518364 - DNA, 25 bp, Homo sapien
gcaggtcctcgtagcgtttccgcaa

SEQ ID NO: 1518365 - DNA, 25 bp, Homo sapien
gacgaggtcggtgttcgaatcttcc

SEQ ID NO: 1518366 - DNA, 25 bp, Homo sapien
ttctggcgtgagtatccggactgca

SEQ ID NO: 1518367 - DNA, 25 bp, Homo sapien
gtgctgtgcacattcaggagggtcc

SEQ ID NO: 1518368 - DNA, 25 bp, Homo sapien
caggatattcctacccagggcacag

SEQ ID NO: 1518369 - DNA, 25 bp, Homo sapien
gctcaaaggtaggtctgggcttttc

SEQ ID NO: 1518370 - DNA, 25 bp, Homo sapien
tgggtgcaaatcaggcatcggctac

SEQ ID NO: 1518371 - DNA, 25 bp, Homo sapien
gatggggaaaatactctcctcctcc

SEQ ID NO: 1518372 - DNA, 25 bp, Homo sapien
tgttctggcctaaagcgatgctccc

SEQ ID NO: 1518373 - DNA, 25 bp, Homo sapien
cacacggcacagatgggtttagggc

SEQ ID NO: 1518374 - DNA, 25 bp, Homo sapien
gagggtgccttaacctagttgctag

SEQ ID NO: 1518375 - DNA, 25 bp, Homo sapien
taatcccgagaaatgaagagtgcca

SEQ ID NO: 1518376 - DNA, 25 bp, Homo sapien
gcggcggcgcctttgcacaagttat

SEQ ID NO: 1518377 - DNA, 25 bp, Homo sapien
taacacgccaagctggatctcacca

SEQ ID NO: 1518378 - DNA, 25 bp, Homo sapien
aagagcatttctccgtgcgggcgcg

SEQ ID NO: 1518379 - DNA, 25 bp, Homo sapien
tatttcccctaccaagagcatttct

SEQ ID NO: 1518380 - DNA, 25 bp, Homo sapien
gacagccggaacagagcccggtgaa

SEQ ID NO: 1518381 - DNA, 25 bp, Homo sapien
gcagcggtcgtgtcacgtcccacga

SEQ ID NO: 1518382 - DNA, 25 bp, Homo sapien
gcccgagagatacgcaggtgcaggt

SEQ ID NO: 1518383 - DNA, 25 bp, Homo sapien
accttgacgccgtcggggacagccg

SEQ ID NO: 1518384 - DNA, 25 bp, Homo sapien
gcgacagtcgcaggtgcagcgcggg

SEQ ID NO: 1518385 - DNA, 25 bp, Homo sapien
gcttgcggccgcaagtgcaactcca

SEQ ID NO: 1518386 - DNA, 25 bp, Homo sapien
ccagcagttggtccgactgcgacgg

SEQ ID NO: 1518387 - DNA, 25 bp, Homo sapien
ggccgtgcggacgaagattctgcca

SEQ ID NO: 1518388 - DNA, 25 bp, Homo sapien
tcatcataggtctggagcgacaccc

SEQ ID NO: 1518389 - DNA, 25 bp, Homo sapien
tatgcagtggcagtctttggctaac

SEQ ID NO: 1518390 - DNA, 25 bp, Homo sapien
tgatctgcgcgtgcatgtttgccgc

SEQ ID NO: 1518391 - DNA, 25 bp, Homo sapien
cccggtgtcggtcttttgaatgagc

SEQ ID NO: 1518392 - DNA, 25 bp, Homo sapien
gaatcgggtgtctcaggaaccttga

SEQ ID NO: 1518393 - DNA, 25 bp, Homo sapien
cagctgtttgggcaggaatcgggtg

SEQ ID NO: 1518394 - DNA, 25 bp, Homo sapien
aggacaactgaggtcgcgtcctccg

SEQ ID NO: 1518395 - DNA, 25 bp, Homo sapien
cccattccacagggcaggacaactg

SEQ ID NO: 1518396 - DNA, 25 bp, Homo sapien
aatacacagttccatcagaccagcc

SEQ ID NO: 1518397 - DNA, 25 bp, Homo sapien
taaatacacagttccatcagaccag

SEQ ID NO: 1518398 - DNA, 25 bp, Homo sapien
aataaatacacagttccatcagacc

SEQ ID NO: 1518399 - DNA, 25 bp, Homo sapien
aaataaatacacagttccatcagac

SEQ ID NO: 1518400 - DNA, 25 bp, Homo sapien
cattcgcagcgacactcaacatagc

SEQ ID NO: 1518401 - DNA, 25 bp, Homo sapien
gctgctggaacgactgcggatagcc

SEQ ID NO: 1518402 - DNA, 25 bp, Homo sapien
agcaaaagtgtaccccgctgctgga

SEQ ID NO: 1518403 - DNA, 25 bp, Homo sapien
gacattgggtgtctcaccccgcaga

SEQ ID NO: 1518404 - DNA, 25 bp, Homo sapien
gcacggcaggcatcgtccgcgcggg

SEQ ID NO: 1518405 - DNA, 25 bp, Homo sapien
ttcctccgcgcgggctgttccggga

SEQ ID NO: 1518406 - DNA, 25 bp, Homo sapien
ggctgttccgggaaacgcgcgctcc

SEQ ID NO: 1518407 - DNA, 25 bp, Homo sapien
gcgggcacggcaggcatcgtccgcg

SEQ ID NO: 1518408 - DNA, 25 bp, Homo sapien
cgggccgcgcttgccgtcgccatag

SEQ ID NO: 1518409 - DNA, 25 bp, Homo sapien
gccgcgcttgccgtcgccatagcta

SEQ ID NO: 1518410 - DNA, 25 bp, Homo sapien
ccgcgggccgcgcttgccgtcgcca

SEQ ID NO: 1518411 - DNA, 25 bp, Homo sapien
tcgccatagctaccccgcgccccgg

SEQ ID NO: 1518412 - DNA, 25 bp, Homo sapien
ctggctgtcggagggcacggccgaa

SEQ ID NO: 1518413 - DNA, 25 bp, Homo sapien
gctgtcggagggcacggccgaaccc

SEQ ID NO: 1518414 - DNA, 25 bp, Homo sapien
ctgtcggagggcacggccgaaccct

SEQ ID NO: 1518415 - DNA, 25 bp, Homo sapien
ggcctggctgtcggagggcacggcc

SEQ ID NO: 1518416 - DNA, 25 bp, Homo sapien
gaagagcgcggacgccgagccccgc

SEQ ID NO: 1518417 - DNA, 25 bp, Homo sapien
agcccacggaagagcgcggacgccg

SEQ ID NO: 1518418 - DNA, 25 bp, Homo sapien
cccacggaagagcgcggacgccgag

SEQ ID NO: 1518419 - DNA, 25 bp, Homo sapien
agagcgcggacgccgagccccgccc

SEQ ID NO: 1518420 - DNA, 25 bp, Homo sapien
gggccctcagtatgcactcttcagt

SEQ ID NO: 1518421 - DNA, 25 bp, Homo sapien
tcagtggtatcaagagagcggctcc

SEQ ID NO: 1518422 - DNA, 25 bp, Homo sapien
ctgcgggacggtcactgctccaagc

SEQ ID NO: 1518423 - DNA, 25 bp, Homo sapien
ttcaaatgctttccacccggagagc

SEQ ID NO: 1518424 - DNA, 25 bp, Homo sapien
gtgaacgatcccgattcccactggg

SEQ ID NO: 1518425 - DNA, 25 bp, Homo sapien
tcagtgaacgatcccgattcccact

SEQ ID NO: 1518426 - DNA, 25 bp, Homo sapien
gatcccgattcccactgggtgggtg

SEQ ID NO: 1518427 - DNA, 25 bp, Homo sapien
gaacgatcccgattcccactgggtg

SEQ ID NO: 1518428 - DNA, 25 bp, Homo sapien
gctctctttcagacaactgtgtcca

SEQ ID NO: 1518429 - DNA, 25 bp, Homo sapien
cagctctctttcagacaactgtgtc

SEQ ID NO: 1518430 - DNA, 25 bp, Homo sapien
ctctctttcagacaactgtgtccac

SEQ ID NO: 1518431 - DNA, 25 bp, Homo sapien
ccagctctctttcagacaactgtgt

SEQ ID NO: 1518432 - DNA, 25 bp, Homo sapien
ctgtcaagagaggtgagctctgtgg

SEQ ID NO: 1518433 - DNA, 25 bp, Homo sapien
gctctgtggcagcttggaaggcgct

SEQ ID NO: 1518434 - DNA, 25 bp, Homo sapien
gtcaagagaggtgagctctgtggca

SEQ ID NO: 1518435 - DNA, 25 bp, Homo sapien
tgtggcagcttggaaggcgctgagg

SEQ ID NO: 1518436 - DNA, 25 bp, Homo sapien
tgcctcccctccttcgttcattcac

SEQ ID NO: 1518437 - DNA, 25 bp, Homo sapien
gaagtgccttttgcgcagtgcacac

SEQ ID NO: 1518438 - DNA, 25 bp, Homo sapien
ccagcatccatgaagtgccttttgc

SEQ ID NO: 1518439 - DNA, 25 bp, Homo sapien
ccctgtcctggaggccatgttcttg

SEQ ID NO: 1518440 - DNA, 25 bp, Homo sapien
gcaggtactcataaacgtacagcgc

SEQ ID NO: 1518441 - DNA, 25 bp, Homo sapien
tgcagcaggtactcataaacgtaca

SEQ ID NO: 1518442 - DNA, 25 bp, Homo sapien
gacttctgggcaccgatgtgcagca

SEQ ID NO: 1518443 - DNA, 25 bp, Homo sapien
gtactcataaacgtacagcgccaac

SEQ ID NO: 1518444 - DNA, 25 bp, Homo sapien
gggggctcccccagcgtgatgttct

SEQ ID NO: 1518445 - DNA, 25 bp, Homo sapien
ggggctcccccagcgtgatgttctt

SEQ ID NO: 1518446 - DNA, 25 bp, Homo sapien
gggctcccccagcgtgatgttcttc

SEQ ID NO: 1518447 - DNA, 25 bp, Homo sapien
ccggagtgctcgcaggcctctcttc

SEQ ID NO: 1518448 - DNA, 25 bp, Homo sapien
aggccttggcctcgccggagtgctc

SEQ ID NO: 1518449 - DNA, 25 bp, Homo sapien
ctcgccggagtgctcgcaggcctct

SEQ ID NO: 1518450 - DNA, 25 bp, Homo sapien
gaaggccttggcctcgccggagtgc

SEQ ID NO: 1518451 - DNA, 25 bp, Homo sapien
cctggagcccctgagtccctggggc

SEQ ID NO: 1518452 - DNA, 25 bp, Homo sapien
gccctggagcccctgagtccctggg

SEQ ID NO: 1518453 - DNA, 25 bp, Homo sapien
ctcccgccctggagcccctgagtcc

SEQ ID NO: 1518454 - DNA, 25 bp, Homo sapien
cccgccctggagcccctgagtccct

SEQ ID NO: 1518455 - DNA, 25 bp, Homo sapien
tcccccgcctcggagggcgagagag

SEQ ID NO: 1518456 - DNA, 25 bp, Homo sapien
agcaacggaggcgacggcccggcat

SEQ ID NO: 1518457 - DNA, 25 bp, Homo sapien
ctccgtgcaggctcggcgggcaagg

SEQ ID NO: 1518458 - DNA, 25 bp, Homo sapien
cccagttagagcgagagcaacggag

SEQ ID NO: 1518459 - DNA, 25 bp, Homo sapien
caatcatccctgaagaggagccggc

SEQ ID NO: 1518460 - DNA, 25 bp, Homo sapien
gtcaatcatccctgaagaggagccg

SEQ ID NO: 1518461 - DNA, 25 bp, Homo sapien
tcaatcatccctgaagaggagccgg

SEQ ID NO: 1518462 - DNA, 25 bp, Homo sapien
aatcatccctgaagaggagccggcc

SEQ ID NO: 1518463 - DNA, 25 bp, Homo sapien
tctgaggttagcctcaagcctcccg

SEQ ID NO: 1518464 - DNA, 25 bp, Homo sapien
ctgtccaccccgcagggagggcaat

SEQ ID NO: 1518465 - DNA, 25 bp, Homo sapien
aacaaatccttcgaaagccctcgtg

SEQ ID NO: 1518466 - DNA, 25 bp, Homo sapien
gggctgcgggttgaccccttcctgc

SEQ ID NO: 1518467 - DNA, 25 bp, Homo sapien
ctgtctgtatggtccaggccaagcc

SEQ ID NO: 1518468 - DNA, 25 bp, Homo sapien
acagggaggggagaacttctctcct

SEQ ID NO: 1518469 - DNA, 25 bp, Homo sapien
acagcgagctggcattggtcagtga

SEQ ID NO: 1518470 - DNA, 25 bp, Homo sapien
agcacactggggttgtcggcctgag

SEQ ID NO: 1518471 - DNA, 25 bp, Homo sapien
ggtggccggccccatgggacagcga

SEQ ID NO: 1518472 - DNA, 25 bp, Homo sapien
cactggggttgtcggcctgaggatc

SEQ ID NO: 1518473 - DNA, 25 bp, Homo sapien
atggagcctgcggccattgtgtcac

SEQ ID NO: 1518474 - DNA, 25 bp, Homo sapien
gccatggagcctgcggccattgtgt

SEQ ID NO: 1518475 - DNA, 25 bp, Homo sapien
agccgccatggagcctgcggccatt

SEQ ID NO: 1518476 - DNA, 25 bp, Homo sapien
ccgccatggagcctgcggccattgt

SEQ ID NO: 1518477 - DNA, 25 bp, Homo sapien
cctcaaacgcatgttcagccagagt

SEQ ID NO: 1518478 - DNA, 25 bp, Homo sapien
gaggccccatcatgggggcgttggg

SEQ ID NO: 1518479 - DNA, 25 bp, Homo sapien
accgtgaggccccatcatgggggcg

SEQ ID NO: 1518480 - DNA, 25 bp, Homo sapien
tgaccgtgaggccccatcatggggg

SEQ ID NO: 1518481 - DNA, 25 bp, Homo sapien
cgtgaggccccatcatgggggcgtt

SEQ ID NO: 1518482 - DNA, 25 bp, Homo sapien
ccctgggaagcgcggtgacatgaag

SEQ ID NO: 1518483 - DNA, 25 bp, Homo sapien
ctgggaagcgcggtgacatgaaggg

SEQ ID NO: 1518484 - DNA, 25 bp, Homo sapien
cccctgggaagcgcggtgacatgaa

SEQ ID NO: 1518485 - DNA, 25 bp, Homo sapien
ccccctgggaagcgcggtgacatga

SEQ ID NO: 1518486 - DNA, 25 bp, Homo sapien
tgcggcggcactgagtgtggggtgc

SEQ ID NO: 1518487 - DNA, 25 bp, Homo sapien
gtgcggcggcactgagtgtggggtg

SEQ ID NO: 1518488 - DNA, 25 bp, Homo sapien
gagtgtggggtgctccctccccggc

SEQ ID NO: 1518489 - DNA, 25 bp, Homo sapien
ggtgcggcggcactgagtgtggggt

SEQ ID NO: 1518490 - DNA, 25 bp, Homo sapien
ctgggctcgtggggagggctccatg

SEQ ID NO: 1518491 - DNA, 25 bp, Homo sapien
tgggagccagggaggcctgcgggag

SEQ ID NO: 1518492 - DNA, 25 bp, Homo sapien
ggagggctccatggcgccagggagg

SEQ ID NO: 1518493 - DNA, 25 bp, Homo sapien
cgtggggagggctccatggcgccag

SEQ ID NO: 1518494 - DNA, 25 bp, Homo sapien
gcattgggccgcccatgctcggatg

SEQ ID NO: 1518495 - DNA, 25 bp, Homo sapien
attgggccgcccatgctcggatgcc

SEQ ID NO: 1518496 - DNA, 25 bp, Homo sapien
cattgggccgcccatgctcggatgc

SEQ ID NO: 1518497 - DNA, 25 bp, Homo sapien
cctgggccggcgagggagttgggtg

SEQ ID NO: 1518498 - DNA, 25 bp, Homo sapien
ggtgggggtcgcatgccacctccat

SEQ ID NO: 1518499 - DNA, 25 bp, Homo sapien
ggggtcgcatgccacctccatagct

SEQ ID NO: 1518500 - DNA, 25 bp, Homo sapien
gcaggcaggcctgggccggcgaggg

SEQ ID NO: 1518501 - DNA, 25 bp, Homo sapien
gctggcccacgggccacgaactcct

SEQ ID NO: 1518502 - DNA, 25 bp, Homo sapien
ctggcccacgggccacgaactcctg

SEQ ID NO: 1518503 - DNA, 25 bp, Homo sapien
tggcccacgggccacgaactcctgg

SEQ ID NO: 1518504 - DNA, 25 bp, Homo sapien
ctgtgagcagtcagccaggcggctc

SEQ ID NO: 1518505 - DNA, 25 bp, Homo sapien
tgagcagtcagccaggcggctcacc

SEQ ID NO: 1518506 - DNA, 25 bp, Homo sapien
gctgtgagcagtcagccaggcggct

SEQ ID NO: 1518507 - DNA, 25 bp, Homo sapien
tgtgagcagtcagccaggcggctca

SEQ ID NO: 1518508 - DNA, 25 bp, Homo sapien
tgtagctgccgggggatgaggagga

SEQ ID NO: 1518509 - DNA, 25 bp, Homo sapien
tagctgccgggggatgaggaggagt

SEQ ID NO: 1518510 - DNA, 25 bp, Homo sapien
ctgccgggggatgaggaggagtagg

SEQ ID NO: 1518511 - DNA, 25 bp, Homo sapien
tgccgggggatgaggaggagtaggg

SEQ ID NO: 1518512 - DNA, 25 bp, Homo sapien
cagggctaggcatgatgggtgttcc

SEQ ID NO: 1518513 - DNA, 25 bp, Homo sapien
tccagggctaggcatgatgggtgtt

SEQ ID NO: 1518514 - DNA, 25 bp, Homo sapien
ggctaggcatgatgggtgttccagg

SEQ ID NO: 1518515 - DNA, 25 bp, Homo sapien
agggctaggcatgatgggtgttcca

SEQ ID NO: 1518516 - DNA, 25 bp, Homo sapien
cgatggggttcatgatagtgtacat

SEQ ID NO: 1518517 - DNA, 25 bp, Homo sapien
gcccgatggggttcatgatagtgta

SEQ ID NO: 1518518 - DNA, 25 bp, Homo sapien
ggttcatgatagtgtacatgttttc

SEQ ID NO: 1518519 - DNA, 25 bp, Homo sapien
gggttcatgatagtgtacatgtttt

SEQ ID NO: 1518520 - DNA, 25 bp, Homo sapien
cctcgagaagcacccctgcaagccc

SEQ ID NO: 1518521 - DNA, 25 bp, Homo sapien
agcacccctgcaagcccccactcac

SEQ ID NO: 1518522 - DNA, 25 bp, Homo sapien
accgcctcgagaagcacccctgcaa

SEQ ID NO: 1518523 - DNA, 25 bp, Homo sapien
aagcacccctgcaagcccccactca

SEQ ID NO: 1518524 - DNA, 25 bp, Homo sapien
ggatccgttcacgtggtgaggctcc

SEQ ID NO: 1518525 - DNA, 25 bp, Homo sapien
ccagggatccgttcacgtggtgagg

SEQ ID NO: 1518526 - DNA, 25 bp, Homo sapien
tggtgaggctccatcgcgctcatgg

SEQ ID NO: 1518527 - DNA, 25 bp, Homo sapien
gtgaggctccatcgcgctcatggcg

SEQ ID NO: 1518528 - DNA, 25 bp, Homo sapien
ctccacccggcaggcgggctgacgg

SEQ ID NO: 1518529 - DNA, 25 bp, Homo sapien
gccagggagcgcacgggcccggaag

SEQ ID NO: 1518530 - DNA, 25 bp, Homo sapien
gggctcaggacgccactagacgcct

SEQ ID NO: 1518531 - DNA, 25 bp, Homo sapien
ccggaaggcaacgtgggcgggagca

SEQ ID NO: 1518532 - DNA, 25 bp, Homo sapien
gggccaacgaccctcgcaagctgcc

SEQ ID NO: 1518533 - DNA, 25 bp, Homo sapien
gtttggtcgctggatccccctccag

SEQ ID NO: 1518534 - DNA, 25 bp, Homo sapien
tggtttggtcgctggatccccctcc

SEQ ID NO: 1518535 - DNA, 25 bp, Homo sapien
ctccaggggccaacgaccctcgcaa

SEQ ID NO: 1518536 - DNA, 25 bp, Homo sapien
cacgggcaccggctcagacgtgctg

SEQ ID NO: 1518537 - DNA, 25 bp, Homo sapien
cggacagacacgggcaccggctcag

SEQ ID NO: 1518538 - DNA, 25 bp, Homo sapien
agacacgggcaccggctcagacgtg

SEQ ID NO: 1518539 - DNA, 25 bp, Homo sapien
accggctcagacgtgctggcgccat

SEQ ID NO: 1518540 - DNA, 25 bp, Homo sapien
cttcggcaacccgtccatgtcgccc

SEQ ID NO: 1518541 - DNA, 25 bp, Homo sapien
tcggcaacccgtccatgtcgcccga

SEQ ID NO: 1518542 - DNA, 25 bp, Homo sapien
ggcaacccgtccatgtcgcccgagc

SEQ ID NO: 1518543 - DNA, 25 bp, Homo sapien
ttcggcaacccgtccatgtcgcccg

SEQ ID NO: 1518544 - DNA, 25 bp, Homo sapien
gctttcgctcgggaacgggtgcagg

SEQ ID NO: 1518545 - DNA, 25 bp, Homo sapien
ctttcgctcgggaacgggtgcagga

SEQ ID NO: 1518546 - DNA, 25 bp, Homo sapien
cgcggggggggagtcgacgcagtcg

SEQ ID NO: 1518547 - DNA, 25 bp, Homo sapien
gcccgccgcggtcacggtcttgctc

SEQ ID NO: 1518548 - DNA, 25 bp, Homo sapien
ctggcccgccgcggtcacggtcttg

SEQ ID NO: 1518549 - DNA, 25 bp, Homo sapien
cggggggggagtcgacgcagtcgct

SEQ ID NO: 1518550 - DNA, 25 bp, Homo sapien
cgcgcaggggccgagttcagctccg

SEQ ID NO: 1518551 - DNA, 25 bp, Homo sapien
ttcagctccggaagaggctgggacc

SEQ ID NO: 1518552 - DNA, 25 bp, Homo sapien
ccgagttcagctccggaagaggctg

SEQ ID NO: 1518553 - DNA, 25 bp, Homo sapien
aggggccgagttcagctccggaaga

SEQ ID NO: 1518554 - DNA, 25 bp, Homo sapien
cgctcatggtcatccctggcgagta

SEQ ID NO: 1518555 - DNA, 25 bp, Homo sapien
acacgctcatggtcatccctggcga

SEQ ID NO: 1518556 - DNA, 25 bp, Homo sapien
tcacacgctcatggtcatccctggc

SEQ ID NO: 1518557 - DNA, 25 bp, Homo sapien
cacgctcatggtcatccctggcgag

SEQ ID NO: 1518558 - DNA, 25 bp, Homo sapien
tgggcagaagcctaggcccgcagag

SEQ ID NO: 1518559 - DNA, 25 bp, Homo sapien
tttctctctgggacaaaatacaaat

SEQ ID NO: 1518560 - DNA, 25 bp, Homo sapien
agggtccatacagaaaagaacgtct

SEQ ID NO: 1518561 - DNA, 25 bp, Homo sapien
gggtccatacagaaaagaacgtctc

SEQ ID NO: 1518562 - DNA, 25 bp, Homo sapien
caccccctgacgtcctggggagagg

SEQ ID NO: 1518563 - DNA, 25 bp, Homo sapien
gaggtgttcgtacccttcagcgcgg

SEQ ID NO: 1518564 - DNA, 25 bp, Homo sapien
gtttacatccccgaattcatcgcgg

SEQ ID NO: 1518565 - DNA, 25 bp, Homo sapien
aacgacctcgtgttcgatggtgggc

SEQ ID NO: 1518566 - DNA, 25 bp, Homo sapien
caggctgggacatctcgtcgctgaa

SEQ ID NO: 1518567 - DNA, 25 bp, Homo sapien
gcttggtgggagtccttgcgggcgg

SEQ ID NO: 1518568 - DNA, 25 bp, Homo sapien
cctgtagtgggcgagggacctgcag

SEQ ID NO: 1518569 - DNA, 25 bp, Homo sapien
tgtagtgggcgagggacctgcaggg

SEQ ID NO: 1518570 - DNA, 25 bp, Homo sapien
ggaggcctgtagtgggcgagggacc

SEQ ID NO: 1518571 - DNA, 25 bp, Homo sapien
agccctaagccaactgcccagcaat

SEQ ID NO: 1518572 - DNA, 25 bp, Homo sapien
ccctccaacgccagccctaagccaa

SEQ ID NO: 1518573 - DNA, 25 bp, Homo sapien
ccggccctccaacgccagccctaag

SEQ ID NO: 1518574 - DNA, 25 bp, Homo sapien
aactgcccagcaatactctggccat

SEQ ID NO: 1518575 - DNA, 25 bp, Homo sapien
tcccctgtgccactagtggggatgg

SEQ ID NO: 1518576 - DNA, 25 bp, Homo sapien
gggccatggagaacataacactcaa

SEQ ID NO: 1518577 - DNA, 25 bp, Homo sapien
catcccctgtgccactagtggggat

SEQ ID NO: 1518578 - DNA, 25 bp, Homo sapien
aaaaggcctgacgggagcggcggtg

SEQ ID NO: 1518579 - DNA, 25 bp, Homo sapien
tgttacaattgaaaggcatctatct

SEQ ID NO: 1518580 - DNA, 25 bp, Homo sapien
ggtggacaaagttctagctgattaa

SEQ ID NO: 1518581 - DNA, 25 bp, Homo sapien
ggatgatttcaggaggtcccagccc

SEQ ID NO: 1518582 - DNA, 25 bp, Homo sapien
ttgtacactaaacaggtgaatgctg

SEQ ID NO: 1518583 - DNA, 25 bp, Homo sapien
tcctgacagcttccaaagagctgac

SEQ ID NO: 1518584 - DNA, 25 bp, Homo sapien
ggtctgaggcgtgtgttcccattta

SEQ ID NO: 1518585 - DNA, 25 bp, Homo sapien
tgtggagggcccacagtgtatccca

SEQ ID NO: 1518586 - DNA, 25 bp, Homo sapien
ccgccaaggtttgcactcagggagg

SEQ ID NO: 1518587 - DNA, 25 bp, Homo sapien
tccacactgttgagaccttgtggtc

SEQ ID NO: 1518588 - DNA, 25 bp, Homo sapien
tccaagttgagactcggccgcagcg

SEQ ID NO: 1518589 - DNA, 25 bp, Homo sapien
ggccgcagcggcgtcagacttttct

SEQ ID NO: 1518590 - DNA, 25 bp, Homo sapien
ttttctttgcgatgtcctcggtttc

SEQ ID NO: 1518591 - DNA, 25 bp, Homo sapien
tccaaggacacgaaaactggcattt

SEQ ID NO: 1518592 - DNA, 25 bp, Homo sapien
catggtgttgtgctcttgtgatccc

SEQ ID NO: 1518593 - DNA, 25 bp, Homo sapien
tcattattgctccttgcagggcagg

SEQ ID NO: 1518594 - DNA, 25 bp, Homo sapien
gcccagagtagccagtgtctcgttg

SEQ ID NO: 1518595 - DNA, 25 bp, Homo sapien
gcttcgtgtatatcaaagcagggcc

SEQ ID NO: 1518596 - DNA, 25 bp, Homo sapien
tgtccaaacccgatctgtccctggt

SEQ ID NO: 1518597 - DNA, 25 bp, Homo sapien
cagtgcaggccgttagcctagtgca

SEQ ID NO: 1518598 - DNA, 25 bp, Homo sapien
gcagtttttgacaccatggcttcgt

SEQ ID NO: 1518599 - DNA, 25 bp, Homo sapien
aaagcctgtcatgagccataaaaat

SEQ ID NO: 1518600 - DNA, 25 bp, Homo sapien
tcccgtcgaaggaaactgttgccaa

SEQ ID NO: 1518601 - DNA, 25 bp, Homo sapien
ttgacctactaatctggcttctggg

SEQ ID NO: 1518602 - DNA, 25 bp, Homo sapien
gggtgggatattactcaactgttaa

SEQ ID NO: 1518603 - DNA, 25 bp, Homo sapien
tgaagggagctcgatggagtcatca

SEQ ID NO: 1518604 - DNA, 25 bp, Homo sapien
ggggatgtgcctcacccagactggt

SEQ ID NO: 1518605 - DNA, 25 bp, Homo sapien
tgtgacttcccctggacagctcgtc

SEQ ID NO: 1518606 - DNA, 25 bp, Homo sapien
catcagatgtgggacctgcattggc

SEQ ID NO: 1518607 - DNA, 25 bp, Homo sapien
tgaaggacgccaaccgccatgccct

SEQ ID NO: 1518608 - DNA, 25 bp, Homo sapien
ctgcatcctgaaggacgccaaccgc

SEQ ID NO: 1518609 - DNA, 25 bp, Homo sapien
tccccttttcgccagcagcacgaca

SEQ ID NO: 1518610 - DNA, 25 bp, Homo sapien
cactctcccgagcatcagctttgag

SEQ ID NO: 1518611 - DNA, 25 bp, Homo sapien
cccctggatggtgttccttcatgga

SEQ ID NO: 1518612 - DNA, 25 bp, Homo sapien
tgcactgggctcatcgttgtcggaa

SEQ ID NO: 1518613 - DNA, 25 bp, Homo sapien
ggtgttccttcatggatccagtcag

SEQ ID NO: 1518614 - DNA, 25 bp, Homo sapien
gctgttagctttggggctcttggtc

SEQ ID NO: 1518615 - DNA, 25 bp, Homo sapien
agccggaaaccatcctcccctatgg

SEQ ID NO: 1518616 - DNA, 25 bp, Homo sapien
ccttccaccatccatagaaaaattg

SEQ ID NO: 1518617 - DNA, 25 bp, Homo sapien
tggatcagtttcagccggaaaccat

SEQ ID NO: 1518618 - DNA, 25 bp, Homo sapien
gcctgaccaacgtagagaaacgcgt

SEQ ID NO: 1518619 - DNA, 25 bp, Homo sapien
caggacttagcctggttggtggttt

SEQ ID NO: 1518620 - DNA, 25 bp, Homo sapien
acttagcctggttggtggtttcagg

SEQ ID NO: 1518621 - DNA, 25 bp, Homo sapien
agacaggacttagcctggttggtgg

SEQ ID NO: 1518622 - DNA, 25 bp, Homo sapien
ggacttagcctggttggtggtttca

SEQ ID NO: 1518623 - DNA, 25 bp, Homo sapien
tgtctctgatactgtcgcaggtgtg

SEQ ID NO: 1518624 - DNA, 25 bp, Homo sapien
agctgctccgcttaccccgggtctt

SEQ ID NO: 1518625 - DNA, 25 bp, Homo sapien
gggtaggtgttgtctctgatactgt

SEQ ID NO: 1518626 - DNA, 25 bp, Homo sapien
cctctccagactcaagtagtgcttt

SEQ ID NO: 1518627 - DNA, 25 bp, Homo sapien
cccttgtcgcagtagcacagtggcc

SEQ ID NO: 1518628 - DNA, 25 bp, Homo sapien
ttcctgagctgctctagacgagccc

SEQ ID NO: 1518629 - DNA, 25 bp, Homo sapien
tagcaaaggtcattcagatgctgct

SEQ ID NO: 1518630 - DNA, 25 bp, Homo sapien
ggcccttgtgactgcagcagctgtt

SEQ ID NO: 1518631 - DNA, 25 bp, Homo sapien
gtgccatgagtttgtgggggctccc

SEQ ID NO: 1518632 - DNA, 25 bp, Homo sapien
atgaggactggtgccatgagtttgt

SEQ ID NO: 1518633 - DNA, 25 bp, Homo sapien
aggactggtgccatgagtttgtggg

SEQ ID NO: 1518634 - DNA, 25 bp, Homo sapien
tggtgccatgagtttgtgggggctc

SEQ ID NO: 1518635 - DNA, 25 bp, Homo sapien
gcagctgctgcactgagttcctgct

SEQ ID NO: 1518636 - DNA, 25 bp, Homo sapien
gctgctgcactgagttcctgctcca

SEQ ID NO: 1518637 - DNA, 25 bp, Homo sapien
tccctcctccagaatacccttccca

SEQ ID NO: 1518638 - DNA, 25 bp, Homo sapien
gctgcactgagttcctgctccagtc

SEQ ID NO: 1518639 - DNA, 25 bp, Homo sapien
acctggatagtgtccaaaaaccctg

SEQ ID NO: 1518640 - DNA, 25 bp, Homo sapien
ctggatagtgtccaaaaaccctgca

SEQ ID NO: 1518641 - DNA, 25 bp, Homo sapien
tggcatccggggaatatccagggag

SEQ ID NO: 1518642 - DNA, 25 bp, Homo sapien
caggtgggcggtggcatccggggaa

SEQ ID NO: 1518643 - DNA, 25 bp, Homo sapien
catcttgggtgggtctgttgtacat

SEQ ID NO: 1518644 - DNA, 25 bp, Homo sapien
ctgggtcacagagtacatcttgggt

SEQ ID NO: 1518645 - DNA, 25 bp, Homo sapien
ctgggtcacatccacagtggacact

SEQ ID NO: 1518646 - DNA, 25 bp, Homo sapien
cacagtggacactcccaggaccgca

SEQ ID NO: 1518647 - DNA, 25 bp, Homo sapien
tggaagcatcggaggtgtcagcatg

SEQ ID NO: 1518648 - DNA, 25 bp, Homo sapien
ggcatgtagctgacggtggaggcca

SEQ ID NO: 1518649 - DNA, 25 bp, Homo sapien
ggtggaagcatcggaggtgtcagca

SEQ ID NO: 1518650 - DNA, 25 bp, Homo sapien
tggcatgtagctgacggtggaggcc

SEQ ID NO: 1518651 - DNA, 25 bp, Homo sapien
gtaatagaagatcccgttgttccga

SEQ ID NO: 1518652 - DNA, 25 bp, Homo sapien
gctcctgagtgttcggattctgaaa

SEQ ID NO: 1518653 - DNA, 25 bp, Homo sapien
ttgttccgaaggtaagcacctgggc

SEQ ID NO: 1518654 - DNA, 25 bp, Homo sapien
agattgtaccgggaaggctctactt

SEQ ID NO: 1518655 - DNA, 25 bp, Homo sapien
tgaaggcaggtgacaaaacgttctg

SEQ ID NO: 1518656 - DNA, 25 bp, Homo sapien
caaaacgttctgtaaaaagagcagc

SEQ ID NO: 1518657 - DNA, 25 bp, Homo sapien
cgaaattgggcgcttttatttgaag

SEQ ID NO: 1518658 - DNA, 25 bp, Homo sapien
cttgagccgaaattgggcgctttta

SEQ ID NO: 1518659 - DNA, 25 bp, Homo sapien
ctcgcaccccaatcagtgagatgct

SEQ ID NO: 1518660 - DNA, 25 bp, Homo sapien
caggtggatcccaggaggatctaga

SEQ ID NO: 1518661 - DNA, 25 bp, Homo sapien
caccccaatcagtgagatgctcaca

SEQ ID NO: 1518662 - DNA, 25 bp, Homo sapien
gccctcacagttggaaagcctctct

SEQ ID NO: 1518663 - DNA, 25 bp, Homo sapien
gggcccttattctgttgtcctagtg

SEQ ID NO: 1518664 - DNA, 25 bp, Homo sapien
agtgcgcgtctgggcccttattctg

SEQ ID NO: 1518665 - DNA, 25 bp, Homo sapien
ctgttgtcctagtgctaggccatca

SEQ ID NO: 1518666 - DNA, 25 bp, Homo sapien
tattctgttgtcctagtgctaggcc

SEQ ID NO: 1518667 - DNA, 25 bp, Homo sapien
gctggccccgcgtgcaggtggctgg

SEQ ID NO: 1518668 - DNA, 25 bp, Homo sapien
ctggctggccccgcgtgcaggtggc

SEQ ID NO: 1518669 - DNA, 25 bp, Homo sapien
ggctggccccgcgtgcaggtggctg

SEQ ID NO: 1518670 - DNA, 25 bp, Homo sapien
ctggccccgcgtgcaggtggctgga

SEQ ID NO: 1518671 - DNA, 25 bp, Homo sapien
ttgtggtctggtctcggaggggaag

SEQ ID NO: 1518672 - DNA, 25 bp, Homo sapien
acccttgtggtctggtctcggaggg

SEQ ID NO: 1518673 - DNA, 25 bp, Homo sapien
tcacccttgtggtctggtctcggag

SEQ ID NO: 1518674 - DNA, 25 bp, Homo sapien
ttccctctgcttgtcactgttggct

SEQ ID NO: 1518675 - DNA, 25 bp, Homo sapien
tgtgttcagggccttcttttggaaa

SEQ ID NO: 1518676 - DNA, 25 bp, Homo sapien
ttttggaaagggctgtcctggtcac

SEQ ID NO: 1518677 - DNA, 25 bp, Homo sapien
tcttcctcttgactgtgttcagggc

SEQ ID NO: 1518678 - DNA, 25 bp, Homo sapien
aaaccaccctcatgaggccccagga

SEQ ID NO: 1518679 - DNA, 25 bp, Homo sapien
ctctccacggatgatggctccaggg

SEQ ID NO: 1518680 - DNA, 25 bp, Homo sapien
tctccacggatgatggctccaggga

SEQ ID NO: 1518681 - DNA, 25 bp, Homo sapien
gctctccacggatgatggctccagg

SEQ ID NO: 1518682 - DNA, 25 bp, Homo sapien
ctggagggtgcgggagacagggccc

SEQ ID NO: 1518683 - DNA, 25 bp, Homo sapien
gaccccataatgtaggaatcgcttc

SEQ ID NO: 1518684 - DNA, 25 bp, Homo sapien
ctcccactggtcgagggccatgtgc

SEQ ID NO: 1518685 - DNA, 25 bp, Homo sapien
ccttgtagataggaagtggagccgt

SEQ ID NO: 1518686 - DNA, 25 bp, Homo sapien
aatcgcttccatcttgtaggccagc

SEQ ID NO: 1518687 - DNA, 25 bp, Homo sapien
cagcggggaggtgcaccataaacca

SEQ ID NO: 1518688 - DNA, 25 bp, Homo sapien
ggaggtgcaccataaaccagcaaca

SEQ ID NO: 1518689 - DNA, 25 bp, Homo sapien
atggcccacttcttcgcagcgggga

SEQ ID NO: 1518690 - DNA, 25 bp, Homo sapien
cacttcttcgcagcggggaggtgca

SEQ ID NO: 1518691 - DNA, 25 bp, Homo sapien
ccacaggcctgaggagggtaagctg

SEQ ID NO: 1518692 - DNA, 25 bp, Homo sapien
cctgctgtggatcttgtagccccta

SEQ ID NO: 1518693 - DNA, 25 bp, Homo sapien
aacagtgacttttcggggtacaatg

SEQ ID NO: 1518694 - DNA, 25 bp, Homo sapien
gggtacaatgagcttcctgctgtgg

SEQ ID NO: 1518695 - DNA, 25 bp, Homo sapien
cgcacccggcccatgcgtagctaat

SEQ ID NO: 1518696 - DNA, 25 bp, Homo sapien
cttggttctggggatgtccggatgc

SEQ ID NO: 1518697 - DNA, 25 bp, Homo sapien
gttctggggatgtccggatgctgca

SEQ ID NO: 1518698 - DNA, 25 bp, Homo sapien
tattcttcgggcatttttgtgttct

SEQ ID NO: 1518699 - DNA, 25 bp, Homo sapien
tcagtattcttcgggcatttttgtg

SEQ ID NO: 1518700 - DNA, 25 bp, Homo sapien
gcctcgaactaccaccctcctgctt

SEQ ID NO: 1518701 - DNA, 25 bp, Homo sapien
agcctcgaactaccaccctcctgct

SEQ ID NO: 1518702 - DNA, 25 bp, Homo sapien
cctcgaactaccaccctcctgcttc

SEQ ID NO: 1518703 - DNA, 25 bp, Homo sapien
ccaattgcaacttgtggagagggct

SEQ ID NO: 1518704 - DNA, 25 bp, Homo sapien
tgtggacaactctatcacccagaag

SEQ ID NO: 1518705 - DNA, 25 bp, Homo sapien
acttttctaaggcacggcagctccg

SEQ ID NO: 1518706 - DNA, 25 bp, Homo sapien
gccagcttggctactttcgaattta

SEQ ID NO: 1518707 - DNA, 25 bp, Homo sapien
gggtgggtctagtctcgggctcaga

SEQ ID NO: 1518708 - DNA, 25 bp, Homo sapien
ggtctagtctcgggctcagagagcc

SEQ ID NO: 1518709 - DNA, 25 bp, Homo sapien
agatgaccagtggtcaggtcccgag

SEQ ID NO: 1518710 - DNA, 25 bp, Homo sapien
cagaagttgcagatgaccagtggtc

SEQ ID NO: 1518711 - DNA, 25 bp, Homo sapien
ccccagtgggccctaccttgaggct

SEQ ID NO: 1518712 - DNA, 25 bp, Homo sapien
ccagtgggccctaccttgaggctgc

SEQ ID NO: 1518713 - DNA, 25 bp, Homo sapien
cccagtgggccctaccttgaggctg

SEQ ID NO: 1518714 - DNA, 25 bp, Homo sapien
cagcctgtgatgcatctggagtcac

SEQ ID NO: 1518715 - DNA, 25 bp, Homo sapien
gcagtttccacggactcctgagctt

SEQ ID NO: 1518716 - DNA, 25 bp, Homo sapien
acaacatactcactttacagaggag

SEQ ID NO: 1518717 - DNA, 25 bp, Homo sapien
tctccgggcacaacatactcacttt

SEQ ID NO: 1518718 - DNA, 25 bp, Homo sapien
tccttaccccgctgggctaggtctc

SEQ ID NO: 1518719 - DNA, 25 bp, Homo sapien
gactgaggccctctaggaggaaagc

SEQ ID NO: 1518720 - DNA, 25 bp, Homo sapien
ggccctcattccttcagacccagtt

SEQ ID NO: 1518721 - DNA, 25 bp, Homo sapien
ccgctgggctaggtctccgccaggg

SEQ ID NO: 1518722 - DNA, 25 bp, Homo sapien
cagggcacgcctagcagagggattt

SEQ ID NO: 1518723 - DNA, 25 bp, Homo sapien
tacatggatgtcctcggagactggg

SEQ ID NO: 1518724 - DNA, 25 bp, Homo sapien
agtcgaaggtggaactcaagctgga

SEQ ID NO: 1518725 - DNA, 25 bp, Homo sapien
ggattttattttgcatacatggatg

SEQ ID NO: 1518726 - DNA, 25 bp, Homo sapien
tcaattggctccctaggagggatgg

SEQ ID NO: 1518727 - DNA, 25 bp, Homo sapien
ctggctaccttgtgctctgcgccat

SEQ ID NO: 1518728 - DNA, 25 bp, Homo sapien
tcagcttgtgaagaccctcatgacg

SEQ ID NO: 1518729 - DNA, 25 bp, Homo sapien
tgtgctctgcgccatcaattggctc

SEQ ID NO: 1518730 - DNA, 25 bp, Homo sapien
cctgtttttgaaggctttgttctca

SEQ ID NO: 1518731 - DNA, 25 bp, Homo sapien
caggagtggctgcttgtgtagcttc

SEQ ID NO: 1518732 - DNA, 25 bp, Homo sapien
tactgtgtgcggagttctgcagaga

SEQ ID NO: 1518733 - DNA, 25 bp, Homo sapien
ccagctgggatttattaaggacata

SEQ ID NO: 1518734 - DNA, 25 bp, Homo sapien
atgacctgagtgagctgccaccgct

SEQ ID NO: 1518735 - DNA, 25 bp, Homo sapien
gcccgagagttccttgctgccatgg

SEQ ID NO: 1518736 - DNA, 25 bp, Homo sapien
catggcatcgtgtgctgaaccctct

SEQ ID NO: 1518737 - DNA, 25 bp, Homo sapien
ggtcccaccgctcgaggacttcgag

SEQ ID NO: 1518738 - DNA, 25 bp, Homo sapien
tcaaggaggtgctgggtacaaatca

SEQ ID NO: 1518739 - DNA, 25 bp, Homo sapien
tctggaaggagtaactgctaggaag

SEQ ID NO: 1518740 - DNA, 25 bp, Homo sapien
gagggatggtccctccaaccacaag

SEQ ID NO: 1518741 - DNA, 25 bp, Homo sapien
catttattgagcttctatagatgcc

SEQ ID NO: 1518742 - DNA, 25 bp, Homo sapien
tactccaggctcggtaacagaggga

SEQ ID NO: 1518743 - DNA, 25 bp, Homo sapien
cgctcgcaggatcggtgcgtggtga

SEQ ID NO: 1518744 - DNA, 25 bp, Homo sapien
acttaacgcacgcaagcggctccag

SEQ ID NO: 1518745 - DNA, 25 bp, Homo sapien
aagcgcgagcaaggccgccagatgt

SEQ ID NO: 1518746 - DNA, 25 bp, Homo sapien
acgcaagcggctccagggtacgtcc

SEQ ID NO: 1518747 - DNA, 25 bp, Homo sapien
tgcgtggtgacgtttcgccggcgcg

SEQ ID NO: 1518748 - DNA, 25 bp, Homo sapien
ggcgccatcccggaagcgcgagcaa

SEQ ID NO: 1518749 - DNA, 25 bp, Homo sapien
accgatcctgcgagcgcgcgtggcg

SEQ ID NO: 1518750 - DNA, 25 bp, Homo sapien
ttgctcgcgcttccgggatggcgcc

SEQ ID NO: 1518751 - DNA, 25 bp, Homo sapien
ccctggagccgcttgcgtgcgttaa

SEQ ID NO: 1518752 - DNA, 25 bp, Homo sapien
ggacgtaccctggagccgcttgcgt

SEQ ID NO: 1518753 - DNA, 25 bp, Homo sapien
acatctggcggccttgctcgcgctt

SEQ ID NO: 1518754 - DNA, 25 bp, Homo sapien
gaaacgtcaccacgcaccgatcctg

SEQ ID NO: 1518755 - DNA, 25 bp, Homo sapien
cgccgctaccgacgccggggccgag

SEQ ID NO: 1518756 - DNA, 25 bp, Homo sapien
gtgccgccgctaccgacgccggggc

SEQ ID NO: 1518757 - DNA, 25 bp, Homo sapien
tgccgccgctaccgacgccggggcc

SEQ ID NO: 1518758 - DNA, 25 bp, Homo sapien
ggccccggcgtcggtagcggcggca

SEQ ID NO: 1518759 - DNA, 25 bp, Homo sapien
ctcggccccggcgtcggtagcggcg

SEQ ID NO: 1518760 - DNA, 25 bp, Homo sapien
gccccggcgtcggtagcggcggcac

SEQ ID NO: 1518761 - DNA, 25 bp, Homo sapien
cagtttccccgtctgctcaatggat

SEQ ID NO: 1518762 - DNA, 25 bp, Homo sapien
tgtaacctggagctgggcgttgccc

SEQ ID NO: 1518763 - DNA, 25 bp, Homo sapien
gctcaatggatacgcaggcggcgct

SEQ ID NO: 1518764 - DNA, 25 bp, Homo sapien
gcgttgcccggtttgtgcctcagtt

SEQ ID NO: 1518765 - DNA, 25 bp, Homo sapien
tgttctgggtgtgtcgtgtaacctg

SEQ ID NO: 1518766 - DNA, 25 bp, Homo sapien
ggtcattcctgctgcgcacaggcct

SEQ ID NO: 1518767 - DNA, 25 bp, Homo sapien
cctgcgtatccattgagcagacggg

SEQ ID NO: 1518768 - DNA, 25 bp, Homo sapien
gggcaacgcccagctccaggttaca

SEQ ID NO: 1518769 - DNA, 25 bp, Homo sapien
aggcctgtgcgcagcaggaatgacc

SEQ ID NO: 1518770 - DNA, 25 bp, Homo sapien
gtagcgccgcctgcgtatccattga

SEQ ID NO: 1518771 - DNA, 25 bp, Homo sapien
aggttacacgacacacccagaacac

SEQ ID NO: 1518772 - DNA, 25 bp, Homo sapien
aactgaggcacaaaccgggcaacgc

SEQ ID NO: 1518773 - DNA, 25 bp, Homo sapien
tgagctccagtcgttatcacctttg

SEQ ID NO: 1518774 - DNA, 25 bp, Homo sapien
gagcctcagtttcactcggagatga

SEQ ID NO: 1518775 - DNA, 25 bp, Homo sapien
gaagtgctctacaagtgtttgcccg

SEQ ID NO: 1518776 - DNA, 25 bp, Homo sapien
cgtaatatattcttagaggcccctg

SEQ ID NO: 1518777 - DNA, 25 bp, Homo sapien
ggcccctgggatgctctcaaaatgt

SEQ ID NO: 1518778 - DNA, 25 bp, Homo sapien
gattgtgtctgcctcgtaacggtga

SEQ ID NO: 1518779 - DNA, 25 bp, Homo sapien
gagtgtgaagaagtcccgggaatca

SEQ ID NO: 1518780 - DNA, 25 bp, Homo sapien
tcaccgttacgaggcagacacaatc

SEQ ID NO: 1518781 - DNA, 25 bp, Homo sapien
ggctgtttctccaagaggagtgtga

SEQ ID NO: 1518782 - DNA, 25 bp, Homo sapien
tattacgggcaaacacttgtagagc

SEQ ID NO: 1518783 - DNA, 25 bp, Homo sapien
caaaggtgataacgactggagctca

SEQ ID NO: 1518784 - DNA, 25 bp, Homo sapien
tcatctccgagtgaaactgaggctc

SEQ ID NO: 1518785 - DNA, 25 bp, Homo sapien
tgtctcactggtactagctatgggc

SEQ ID NO: 1518786 - DNA, 25 bp, Homo sapien
cctctgtagcccacactagaatgca

SEQ ID NO: 1518787 - DNA, 25 bp, Homo sapien
ggaggagtgtatcccagaaggtccc

SEQ ID NO: 1518788 - DNA, 25 bp, Homo sapien
gaaggtcccagtactgtgtctcact

SEQ ID NO: 1518789 - DNA, 25 bp, Homo sapien
ggtactagctatgggcctccctctc

SEQ ID NO: 1518790 - DNA, 25 bp, Homo sapien
gttttgaaggaggagtgtatcccag

SEQ ID NO: 1518791 - DNA, 25 bp, Homo sapien
agagggaggcccatagctagtacca

SEQ ID NO: 1518792 - DNA, 25 bp, Homo sapien
catagctagtaccagtgagacacag

SEQ ID NO: 1518793 - DNA, 25 bp, Homo sapien
tgcattctagtgtgggctacagagg

SEQ ID NO: 1518794 - DNA, 25 bp, Homo sapien
tctgggatacactcctccttcaaaa

SEQ ID NO: 1518795 - DNA, 25 bp, Homo sapien
gggaccttctgggatacactcctcc

SEQ ID NO: 1518796 - DNA, 25 bp, Homo sapien
agtgagacacagtactgggaccttc

SEQ ID NO: 1518797 - DNA, 25 bp, Homo sapien
attacaggcatgagcacccggtcca

SEQ ID NO: 1518798 - DNA, 25 bp, Homo sapien
ttcaccaggctagtcttgaactcat

SEQ ID NO: 1518799 - DNA, 25 bp, Homo sapien
gttcaccaggctagtcttgaactca

SEQ ID NO: 1518800 - DNA, 25 bp, Homo sapien
ttacaggcatgagcacccggtccag

SEQ ID NO: 1518801 - DNA, 25 bp, Homo sapien
caccaggctagtcttgaactcatga

SEQ ID NO: 1518802 - DNA, 25 bp, Homo sapien
caggtgatccaccagccttggcttc

SEQ ID NO: 1518803 - DNA, 25 bp, Homo sapien
tggaccgggtgctcatgcctgtaat

SEQ ID NO: 1518804 - DNA, 25 bp, Homo sapien
atgagttcaagactagcctggtgaa

SEQ ID NO: 1518805 - DNA, 25 bp, Homo sapien
ctggaccgggtgctcatgcctgtaa

SEQ ID NO: 1518806 - DNA, 25 bp, Homo sapien
tgagttcaagactagcctggtgaac

SEQ ID NO: 1518807 - DNA, 25 bp, Homo sapien
gaagccaaggctggtggatcacctg

SEQ ID NO: 1518808 - DNA, 25 bp, Homo sapien
tcatgagttcaagactagcctggtg

SEQ ID NO: 1518809 - DNA, 25 bp, Homo sapien
gatacagatcacaaatagatgctct

SEQ ID NO: 1518810 - DNA, 25 bp, Homo sapien
gctcttggcctccatgatatcttgg

SEQ ID NO: 1518811 - DNA, 25 bp, Homo sapien
tttctagaaggtgctgcaaaccact

SEQ ID NO: 1518812 - DNA, 25 bp, Homo sapien
gcaaaccactgaccagatacagatc

SEQ ID NO: 1518813 - DNA, 25 bp, Homo sapien
catttgtcaatgaggcaatttccca

SEQ ID NO: 1518814 - DNA, 25 bp, Homo sapien
aatgtggagactgggtgtctctgca

SEQ ID NO: 1518815 - DNA, 25 bp, Homo sapien
tgacaaatgtcagcaatcaatactt

SEQ ID NO: 1518816 - DNA, 25 bp, Homo sapien
caagatatcatggaggccaagagca

SEQ ID NO: 1518817 - DNA, 25 bp, Homo sapien
cagtggtttgcagcaccttctagaa

SEQ ID NO: 1518818 - DNA, 25 bp, Homo sapien
tgcagagacacccagtctccacatt

SEQ ID NO: 1518819 - DNA, 25 bp, Homo sapien
tgggaaattgcctcattgacaaatg

SEQ ID NO: 1518820 - DNA, 25 bp, Homo sapien
gatctgtatctggtcagtggtttgc

SEQ ID NO: 1518821 - DNA, 25 bp, Homo sapien
gctgctgtaagaagccactgtcctg

SEQ ID NO: 1518822 - DNA, 25 bp, Homo sapien
cagctggatattgtgcacctgttca

SEQ ID NO: 1518823 - DNA, 25 bp, Homo sapien
tctgatccagtagaagttcgtctct

SEQ ID NO: 1518824 - DNA, 25 bp, Homo sapien
cacacctttgtgagacccgtgggct

SEQ ID NO: 1518825 - DNA, 25 bp, Homo sapien
gatcctagatttttcctgaactccc

SEQ ID NO: 1518826 - DNA, 25 bp, Homo sapien
ggctgtggccgtttgttgtgactta

SEQ ID NO: 1518827 - DNA, 25 bp, Homo sapien
ggagttcaggaaaaatctaggatct

SEQ ID NO: 1518828 - DNA, 25 bp, Homo sapien
tgaacctaagtcacaacaaacggcc

SEQ ID NO: 1518829 - DNA, 25 bp, Homo sapien
cagcccacgggtctcacaaaggtgt

SEQ ID NO: 1518830 - DNA, 25 bp, Homo sapien
caggacagtggcttcttacagcagc

SEQ ID NO: 1518831 - DNA, 25 bp, Homo sapien
gagacgaacttctactggatcagaa

SEQ ID NO: 1518832 - DNA, 25 bp, Homo sapien
tgaacaggtgcacaatatccagctg

SEQ ID NO: 1518833 - DNA, 25 bp, Homo sapien
cagcaaaactgggaacctcagaacc

SEQ ID NO: 1518834 - DNA, 25 bp, Homo sapien
cctcagaaccatctggattgctggg

SEQ ID NO: 1518835 - DNA, 25 bp, Homo sapien
ttacggtcatctgtgtgccagcaaa

SEQ ID NO: 1518836 - DNA, 25 bp, Homo sapien
tgcctgccattacggtcatctgtgt

SEQ ID NO: 1518837 - DNA, 25 bp, Homo sapien
agggtcagtgctgtagcccctccta

SEQ ID NO: 1518838 - DNA, 25 bp, Homo sapien
gccattacggtcatctgtgtgccag

SEQ ID NO: 1518839 - DNA, 25 bp, Homo sapien
ggttctgaggttcccagttttgctg

SEQ ID NO: 1518840 - DNA, 25 bp, Homo sapien
cacagatgaccgtaatggcaggcag

SEQ ID NO: 1518841 - DNA, 25 bp, Homo sapien
gggccccagcaatccagatggttct

SEQ ID NO: 1518842 - DNA, 25 bp, Homo sapien
tttgctggcacacagatgaccgtaa

SEQ ID NO: 1518843 - DNA, 25 bp, Homo sapien
taggaggggctacagcactgaccct

SEQ ID NO: 1518844 - DNA, 25 bp, Homo sapien
ccagcaatccagatggttctgaggt

SEQ ID NO: 1518845 - DNA, 25 bp, Homo sapien
gtcgggttctggtgacagacacacc

SEQ ID NO: 1518846 - DNA, 25 bp, Homo sapien
gcccttccccacaacaacattctgg

SEQ ID NO: 1518847 - DNA, 25 bp, Homo sapien
cgggttctggtgacagacacacctc

SEQ ID NO: 1518848 - DNA, 25 bp, Homo sapien
ctaataaaagtgtcacgtcagagct

SEQ ID NO: 1518849 - DNA, 25 bp, Homo sapien
tatgagccagactccgggtcgggtt

SEQ ID NO: 1518850 - DNA, 25 bp, Homo sapien
cttgctatgagccagactccgggtc

SEQ ID NO: 1518851 - DNA, 25 bp, Homo sapien
ggtgtgtctgtcaccagaacccgac

SEQ ID NO: 1518852 - DNA, 25 bp, Homo sapien
gaacccgacccggagtctggctcat

SEQ ID NO: 1518853 - DNA, 25 bp, Homo sapien
gaaggagtagaggtgtgtctgtcac

SEQ ID NO: 1518854 - DNA, 25 bp, Homo sapien
gacccggagtctggctcatagcaag

SEQ ID NO: 1518855 - DNA, 25 bp, Homo sapien
agctctgacgtgacacttttattag

SEQ ID NO: 1518856 - DNA, 25 bp, Homo sapien
gaggtgtgtctgtcaccagaacccg

SEQ ID NO: 1518857 - DNA, 25 bp, Homo sapien
ggttgcgctaagccaagatcgcgcc

SEQ ID NO: 1518858 - DNA, 25 bp, Homo sapien
tgcgctaagccaagatcgcgccatt

SEQ ID NO: 1518859 - DNA, 25 bp, Homo sapien
gttgcgctaagccaagatcgcgcca

SEQ ID NO: 1518860 - DNA, 25 bp, Homo sapien
ttgcgctaagccaagatcgcgccat

SEQ ID NO: 1518861 - DNA, 25 bp, Homo sapien
gcgctaagccaagatcgcgccattg

SEQ ID NO: 1518862 - DNA, 25 bp, Homo sapien
cgctaagccaagatcgcgccattgc

SEQ ID NO: 1518863 - DNA, 25 bp, Homo sapien
atggcgcgatcttggcttagcgcaa

SEQ ID NO: 1518864 - DNA, 25 bp, Homo sapien
ggcgcgatcttggcttagcgcaacc

SEQ ID NO: 1518865 - DNA, 25 bp, Homo sapien
gcaatggcgcgatcttggcttagcg

SEQ ID NO: 1518866 - DNA, 25 bp, Homo sapien
caatggcgcgatcttggcttagcgc

SEQ ID NO: 1518867 - DNA, 25 bp, Homo sapien
aatggcgcgatcttggcttagcgca

SEQ ID NO: 1518868 - DNA, 25 bp, Homo sapien
tggcgcgatcttggcttagcgcaac

SEQ ID NO: 1518869 - DNA, 25 bp, Homo sapien
cgttcagcttgtgaggacagcagtt

SEQ ID NO: 1518870 - DNA, 25 bp, Homo sapien
aagcagccacacacgttcagcttgt

SEQ ID NO: 1518871 - DNA, 25 bp, Homo sapien
tgaggacagcagttgttaggcaggg

SEQ ID NO: 1518872 - DNA, 25 bp, Homo sapien
cacgttcagcttgtgaggacagcag

SEQ ID NO: 1518873 - DNA, 25 bp, Homo sapien
gctgaagcagccacacacgttcagc

SEQ ID NO: 1518874 - DNA, 25 bp, Homo sapien
tgaagcagccacacacgttcagctt

SEQ ID NO: 1518875 - DNA, 25 bp, Homo sapien
aacgaggtcaagtagtaagagaagc

SEQ ID NO: 1518876 - DNA, 25 bp, Homo sapien
cggtaagagtgacgggaacaggagt

SEQ ID NO: 1518877 - DNA, 25 bp, Homo sapien
gtcattgacctcttgggagaggaga

SEQ ID NO: 1518878 - DNA, 25 bp, Homo sapien
ggtcaagtagtaagagaagcggtaa

SEQ ID NO: 1518879 - DNA, 25 bp, Homo sapien
caagtagtaagagaagcggtaagag

SEQ ID NO: 1518880 - DNA, 25 bp, Homo sapien
caggagtcattgacctcttgggaga

SEQ ID NO: 1518881 - DNA, 25 bp, Homo sapien
tctcccaagaggtcaatgactcctg

SEQ ID NO: 1518882 - DNA, 25 bp, Homo sapien
gcttctcttactacttgacctcgtt

SEQ ID NO: 1518883 - DNA, 25 bp, Homo sapien
actcctgttcccgtcactcttaccg

SEQ ID NO: 1518884 - DNA, 25 bp, Homo sapien
ttaccgcttctcttactacttgacc

SEQ ID NO: 1518885 - DNA, 25 bp, Homo sapien
tctcctctcccaagaggtcaatgac

SEQ ID NO: 1518886 - DNA, 25 bp, Homo sapien
ctcttaccgcttctcttactacttg

SEQ ID NO: 1518887 - DNA, 25 bp, Homo sapien
gctgaacgtgtgtggctgcttcagc

SEQ ID NO: 1518888 - DNA, 25 bp, Homo sapien
caagctgaacgtgtgtggctgcttc

SEQ ID NO: 1518889 - DNA, 25 bp, Homo sapien
tcatcccctgcctaacaactgctgt

SEQ ID NO: 1518890 - DNA, 25 bp, Homo sapien
aactgctgtcctcacaagctgaacg

SEQ ID NO: 1518891 - DNA, 25 bp, Homo sapien
acaagctgaacgtgtgtggctgctt

SEQ ID NO: 1518892 - DNA, 25 bp, Homo sapien
ctgctgtcctcacaagctgaacgtg

SEQ ID NO: 1518893 - DNA, 25 bp, Homo sapien
tcacctggtgactagtgcagaccac

SEQ ID NO: 1518894 - DNA, 25 bp, Homo sapien
tctaatgtgcttgggtacagtttac

SEQ ID NO: 1518895 - DNA, 25 bp, Homo sapien
gaccactctgttcttgcctgtttca

SEQ ID NO: 1518896 - DNA, 25 bp, Homo sapien
tacaacctctcttagtttgcccaat

SEQ ID NO: 1518897 - DNA, 25 bp, Homo sapien
cactgtaggataccaccacggttgg

SEQ ID NO: 1518898 - DNA, 25 bp, Homo sapien
cacggttgggttaggttccagcaca

SEQ ID NO: 1518899 - DNA, 25 bp, Homo sapien
agagtggtctgcactagtcaccagg

SEQ ID NO: 1518900 - DNA, 25 bp, Homo sapien
tgtgctggaacctaacccaaccgtg

SEQ ID NO: 1518901 - DNA, 25 bp, Homo sapien
ggtgtgccaccccaggaatttggag

SEQ ID NO: 1518902 - DNA, 25 bp, Homo sapien
tgaaacaggcaagaacagagtggtc

SEQ ID NO: 1518903 - DNA, 25 bp, Homo sapien
caaccgtggtggtatcctacagtgg

SEQ ID NO: 1518904 - DNA, 25 bp, Homo sapien
gtaaactgtacccaagcacattaga

SEQ ID NO: 1518905 - DNA, 25 bp, Homo sapien
cgagggtcttctgcggccgcatcct

SEQ ID NO: 1518906 - DNA, 25 bp, Homo sapien
gcctcgagggtcttctgcggccgca

SEQ ID NO: 1518907 - DNA, 25 bp, Homo sapien
actcggcctcgagggtcttctgcgg

SEQ ID NO: 1518908 - DNA, 25 bp, Homo sapien
acagatgatgtcaacgccatcatcc

SEQ ID NO: 1518909 - DNA, 25 bp, Homo sapien
agatgatgtcaacgccatcatcctg

SEQ ID NO: 1518910 - DNA, 25 bp, Homo sapien
ccggactcggcctcgagggtcttct

SEQ ID NO: 1518911 - DNA, 25 bp, Homo sapien
cgcagaagaccctcgaggccgagtc

SEQ ID NO: 1518912 - DNA, 25 bp, Homo sapien
ggatgatggcgttgacatcatctgt

SEQ ID NO: 1518913 - DNA, 25 bp, Homo sapien
caggatgatggcgttgacatcatct

SEQ ID NO: 1518914 - DNA, 25 bp, Homo sapien
agaagaccctcgaggccgagtccgg

SEQ ID NO: 1518915 - DNA, 25 bp, Homo sapien
atgcggccgcagaagaccctcgagg

SEQ ID NO: 1518916 - DNA, 25 bp, Homo sapien
aggatgcggccgcagaagaccctcg

SEQ ID NO: 1518917 - DNA, 25 bp, Homo sapien
cctgcagcagatgagcgaacgcttc

SEQ ID NO: 1518918 - DNA, 25 bp, Homo sapien
gaagaccaatgagatgctgctcaac

SEQ ID NO: 1518919 - DNA, 25 bp, Homo sapien
tgctcaacttcaacaacctgtccag

SEQ ID NO: 1518920 - DNA, 25 bp, Homo sapien
gatgagcgaacgcttcctgcaccac

SEQ ID NO: 1518921 - DNA, 25 bp, Homo sapien
agatgaaacgggacctggacagcat

SEQ ID NO: 1518922 - DNA, 25 bp, Homo sapien
cacgaggaccctagtagagatgaaa

SEQ ID NO: 1518923 - DNA, 25 bp, Homo sapien
gacaggttgttgaagttgagcagca

SEQ ID NO: 1518924 - DNA, 25 bp, Homo sapien
tgtggtgcaggaagcgttcgctcat

SEQ ID NO: 1518925 - DNA, 25 bp, Homo sapien
tttcatctctactagggtcctcgtg

SEQ ID NO: 1518926 - DNA, 25 bp, Homo sapien
gttgagcagcatctcattggtcttc

SEQ ID NO: 1518927 - DNA, 25 bp, Homo sapien
tgctgtccaggtcccgtttcatctc

SEQ ID NO: 1518928 - DNA, 25 bp, Homo sapien
gaagcgttcgctcatctgctgcagg

SEQ ID NO: 1518929 - DNA, 25 bp, Homo sapien
cactgcgcacttaagtgtctgggac

SEQ ID NO: 1518930 - DNA, 25 bp, Homo sapien
gcacttaagtgtctgggacaattcc

SEQ ID NO: 1518931 - DNA, 25 bp, Homo sapien
gcgcacttaagtgtctgggacaatt

SEQ ID NO: 1518932 - DNA, 25 bp, Homo sapien
gcttcactgcgcacttaagtgtctg

SEQ ID NO: 1518933 - DNA, 25 bp, Homo sapien
ctgcgcacttaagtgtctgggacaa

SEQ ID NO: 1518934 - DNA, 25 bp, Homo sapien
ttcactgcgcacttaagtgtctggg

SEQ ID NO: 1518935 - DNA, 25 bp, Homo sapien
ggaattgtcccagacacttaagtgc

SEQ ID NO: 1518936 - DNA, 25 bp, Homo sapien
cagacacttaagtgcgcagtgaagc

SEQ ID NO: 1518937 - DNA, 25 bp, Homo sapien
cccagacacttaagtgcgcagtgaa

SEQ ID NO: 1518938 - DNA, 25 bp, Homo sapien
aattgtcccagacacttaagtgcgc

SEQ ID NO: 1518939 - DNA, 25 bp, Homo sapien
gtcccagacacttaagtgcgcagtg

SEQ ID NO: 1518940 - DNA, 25 bp, Homo sapien
ttgtcccagacacttaagtgcgcag

SEQ ID NO: 1518941 - DNA, 25 bp, Homo sapien
tggcagcaggggcttgtggccagca

SEQ ID NO: 1518942 - DNA, 25 bp, Homo sapien
gcaggttaagccctgtgtgccttct

SEQ ID NO: 1518943 - DNA, 25 bp, Homo sapien
caggttaagccctgtgtgccttctc

SEQ ID NO: 1518944 - DNA, 25 bp, Homo sapien
agaaggcacacagggcttaacctgc

SEQ ID NO: 1518945 - DNA, 25 bp, Homo sapien
gagaaggcacacagggcttaacctg

SEQ ID NO: 1518946 - DNA, 25 bp, Homo sapien
tgctggccacaagcccctgctgcca

SEQ ID NO: 1518947 - DNA, 25 bp, Homo sapien
gcaggttaagccctgtgtgccttct

SEQ ID NO: 1518948 - DNA, 25 bp, Homo sapien
gggcttgtggccagcaccaggccca

SEQ ID NO: 1518949 - DNA, 25 bp, Homo sapien
cagcctacctgctcagcaggttaag

SEQ ID NO: 1518950 - DNA, 25 bp, Homo sapien
cagcaggggcttgtggccagcacca

SEQ ID NO: 1518951 - DNA, 25 bp, Homo sapien
caggttaagccctgtgtgccttctc

SEQ ID NO: 1518952 - DNA, 25 bp, Homo sapien
gttaagccctgtgtgccttctctcc

SEQ ID NO: 1518953 - DNA, 25 bp, Homo sapien
agaaggcacacagggcttaacctgc

SEQ ID NO: 1518954 - DNA, 25 bp, Homo sapien
ctgggcctggtgctggccacaagcc

SEQ ID NO: 1518955 - DNA, 25 bp, Homo sapien
ttaacctgctgagcaggtaggctgg

SEQ ID NO: 1518956 - DNA, 25 bp, Homo sapien
ggagagaaggcacacagggcttaac

SEQ ID NO: 1518957 - DNA, 25 bp, Homo sapien
gagaaggcacacagggcttaacctg

SEQ ID NO: 1518958 - DNA, 25 bp, Homo sapien
tggtgctggccacaagcccctgctg

SEQ ID NO: 1518959 - DNA, 25 bp, Homo sapien
aggcagcacccagaggccttcagcc

SEQ ID NO: 1518960 - DNA, 25 bp, Homo sapien
agggaaactggccaggcagcaccca

SEQ ID NO: 1518961 - DNA, 25 bp, Homo sapien
cgctgaaagggaaactggccaggca

SEQ ID NO: 1518962 - DNA, 25 bp, Homo sapien
ctgaaagggaaactggccaggcagc

SEQ ID NO: 1518963 - DNA, 25 bp, Homo sapien
tgaaagggaaactggccaggcagca

SEQ ID NO: 1518964 - DNA, 25 bp, Homo sapien
acgctgaaagggaaactggccaggc

SEQ ID NO: 1518965 - DNA, 25 bp, Homo sapien
ggctgaaggcctctgggtgctgcct

SEQ ID NO: 1518966 - DNA, 25 bp, Homo sapien
gcctggccagtttccctttcagcgt

SEQ ID NO: 1518967 - DNA, 25 bp, Homo sapien
tgggtgctgcctggccagtttccct

SEQ ID NO: 1518968 - DNA, 25 bp, Homo sapien
gctgcctggccagtttccctttcag

SEQ ID NO: 1518969 - DNA, 25 bp, Homo sapien
tgcctggccagtttccctttcagcg

SEQ ID NO: 1518970 - DNA, 25 bp, Homo sapien
tgctgcctggccagtttccctttca

SEQ ID NO: 1518971 - DNA, 25 bp, Homo sapien
cagggttcctgctcccgagcacgtc

SEQ ID NO: 1518972 - DNA, 25 bp, Homo sapien
gacgtgctcgggagcaggaaccctg

SEQ ID NO: 1518973 - DNA, 25 bp, Homo sapien
gcagggttcctgctcccgagcacgt

SEQ ID NO: 1518974 - DNA, 25 bp, Homo sapien
gtcacgcagggttcctgctcccgag

SEQ ID NO: 1518975 - DNA, 25 bp, Homo sapien
aagtgtcacgcagggttcctgctcc

SEQ ID NO: 1518976 - DNA, 25 bp, Homo sapien
gtaagtgtcacgcagggttcctgct

SEQ ID NO: 1518977 - DNA, 25 bp, Homo sapien
taagtgtcacgcagggttcctgctc

SEQ ID NO: 1518978 - DNA, 25 bp, Homo sapien
cagggttcctgctcccgagcacgtc

SEQ ID NO: 1518979 - DNA, 25 bp, Homo sapien
gacgtgctcgggagcaggaaccctg

SEQ ID NO: 1518980 - DNA, 25 bp, Homo sapien
acgtgctcgggagcaggaaccctgc

SEQ ID NO: 1518981 - DNA, 25 bp, Homo sapien
gagcaggaaccctgcgtgacactta

SEQ ID NO: 1518982 - DNA, 25 bp, Homo sapien
ctcgggagcaggaaccctgcgtgac

SEQ ID NO: 1518983 - DNA, 25 bp, Homo sapien
agcaggaaccctgcgtgacacttac

SEQ ID NO: 1518984 - DNA, 25 bp, Homo sapien
ggagcaggaaccctgcgtgacactt

SEQ ID NO: 1518985 - DNA, 25 bp, Homo sapien
atcaacggccgcagccagacagatg

SEQ ID NO: 1518986 - DNA, 25 bp, Homo sapien
gccagacagatgacgaggagatgac

SEQ ID NO: 1518987 - DNA, 25 bp, Homo sapien
accattgccacctcagaacagagca

SEQ ID NO: 1518988 - DNA, 25 bp, Homo sapien
agagcacgggctcatgtgacaccag

SEQ ID NO: 1518989 - DNA, 25 bp, Homo sapien
ttgccacctcagaacagagcacggg

SEQ ID NO: 1518990 - DNA, 25 bp, Homo sapien
ccgcagccagacagatgacgaggag

SEQ ID NO: 1518991 - DNA, 25 bp, Homo sapien
gtcatctcctcgtcatctgtctggc

SEQ ID NO: 1518992 - DNA, 25 bp, Homo sapien
gctggtgtcacatgagcccgtgctc

SEQ ID NO: 1518993 - DNA, 25 bp, Homo sapien
catctgtctggctgcggccgttgat

SEQ ID NO: 1518994 - DNA, 25 bp, Homo sapien
cccgtgctctgttctgaggtggcaa

SEQ ID NO: 1518995 - DNA, 25 bp, Homo sapien
tcctcgtcatctgtctggctgcggc

SEQ ID NO: 1518996 - DNA, 25 bp, Homo sapien
tgctctgttctgaggtggcaatggt

SEQ ID NO: 1518997 - DNA, 25 bp, Homo sapien
gggtctcagggcagcagcatacaag

SEQ ID NO: 1518998 - DNA, 25 bp, Homo sapien
tgcccggtgccttgagggggtctca

SEQ ID NO: 1518999 - DNA, 25 bp, Homo sapien
cctgctgcccggtgccttgaggggg

SEQ ID NO: 1519000 - DNA, 25 bp, Homo sapien
ctgcccggtgccttgagggggtctc

SEQ ID NO: 1519001 - DNA, 25 bp, Homo sapien
gctgcccggtgccttgagggggtct

SEQ ID NO: 1519002 - DNA, 25 bp, Homo sapien
cccggtgccttgagggggtctcagg

SEQ ID NO: 1519003 - DNA, 25 bp, Homo sapien
cccctcaaggcaccgggcagcaggg

SEQ ID NO: 1519004 - DNA, 25 bp, Homo sapien
cttgtatgctgctgccctgagaccc

SEQ ID NO: 1519005 - DNA, 25 bp, Homo sapien
ctgagaccccctcaaggcaccgggc

SEQ ID NO: 1519006 - DNA, 25 bp, Homo sapien
cctgagaccccctcaaggcaccggg

SEQ ID NO: 1519007 - DNA, 25 bp, Homo sapien
tgagaccccctcaaggcaccgggca

SEQ ID NO: 1519008 - DNA, 25 bp, Homo sapien
gagaccccctcaaggcaccgggcag

SEQ ID NO: 1519009 - DNA, 25 bp, Homo sapien
tcctttgctgccccgttctgtcacc

SEQ ID NO: 1519010 - DNA, 25 bp, Homo sapien
ctcctttgctgccccgttctgtcac

SEQ ID NO: 1519011 - DNA, 25 bp, Homo sapien
gtgacagaacggggcagcaaaggag

SEQ ID NO: 1519012 - DNA, 25 bp, Homo sapien
ggtgacagaacggggcagcaaagga

SEQ ID NO: 1519013 - DNA, 25 bp, Homo sapien
gtaaccctgccttgttctgtcatcc

SEQ ID NO: 1519014 - DNA, 25 bp, Homo sapien
gggctcctttgctgccccgttctgt

SEQ ID NO: 1519015 - DNA, 25 bp, Homo sapien
tgttctgtcatccagggctcctttg

SEQ ID NO: 1519016 - DNA, 25 bp, Homo sapien
taattctggctccttccttcctcag

SEQ ID NO: 1519017 - DNA, 25 bp, Homo sapien
gttctgtcacccagggctcctaggg

SEQ ID NO: 1519018 - DNA, 25 bp, Homo sapien
gctcctagggggacaaggctctctc

SEQ ID NO: 1519019 - DNA, 25 bp, Homo sapien
cccctaggagccctgggtgacagaa

SEQ ID NO: 1519020 - DNA, 25 bp, Homo sapien
ggcagcaaaggagccctggatgaca

SEQ ID NO: 1519021 - DNA, 25 bp, Homo sapien
ggatgacagaacaaggcagggttac

SEQ ID NO: 1519022 - DNA, 25 bp, Homo sapien
gaaggaaggagccagaattaaagac

SEQ ID NO: 1519023 - DNA, 25 bp, Homo sapien
acacccctcgggagagagccttgtc

SEQ ID NO: 1519024 - DNA, 25 bp, Homo sapien
aggaattccacacccctcgggagag

SEQ ID NO: 1519025 - DNA, 25 bp, Homo sapien
tctgaaggcctccatggagcaaacg

SEQ ID NO: 1519026 - DNA, 25 bp, Homo sapien
tccttgaggtgcacaagcacggtct

SEQ ID NO: 1519027 - DNA, 25 bp, Homo sapien
gcctgacgtctgctctgaagaatgc

SEQ ID NO: 1519028 - DNA, 25 bp, Homo sapien
gccccttgctccgtaaaagtatcaa

SEQ ID NO: 1519029 - DNA, 25 bp, Homo sapien
tctctgaatagaggtgtggaacctg

SEQ ID NO: 1519030 - DNA, 25 bp, Homo sapien
agtcttgagacggaggctggccatc

SEQ ID NO: 1519031 - DNA, 25 bp, Homo sapien
cgtttgctccatggaggccttcaga

SEQ ID NO: 1519032 - DNA, 25 bp, Homo sapien
tcagaaacctccttgagataccaag

SEQ ID NO: 1519033 - DNA, 25 bp, Homo sapien
gagaccgtgcttgtgcacctcaagg

SEQ ID NO: 1519034 - DNA, 25 bp, Homo sapien
cattcttcagagcagacgtcaggct

SEQ ID NO: 1519035 - DNA, 25 bp, Homo sapien
cagcatctgtaaacatcgggtacaa

SEQ ID NO: 1519036 - DNA, 25 bp, Homo sapien
cacgctcagggctgaatggatggcc

SEQ ID NO: 1519037 - DNA, 25 bp, Homo sapien
tcggccgcctcgctgaagaaaaaga

SEQ ID NO: 1519038 - DNA, 25 bp, Homo sapien
gctcggccgcctcgctgaagaaaaa

SEQ ID NO: 1519039 - DNA, 25 bp, Homo sapien
tgaagaaaaagaagatagcggaacc

SEQ ID NO: 1519040 - DNA, 25 bp, Homo sapien
cagctcggccgcctcgctgaagaaa

SEQ ID NO: 1519041 - DNA, 25 bp, Homo sapien
gtggcctcgcgagccctgcccagcc

SEQ ID NO: 1519042 - DNA, 25 bp, Homo sapien
cgctcgcctcctgggccccggtctg

SEQ ID NO: 1519043 - DNA, 25 bp, Homo sapien
tctgggctccgagccgtggcctcgc

SEQ ID NO: 1519044 - DNA, 25 bp, Homo sapien
aggctcctctccaaaacggcgctcg

SEQ ID NO: 1519045 - DNA, 25 bp, Homo sapien
tctcattaactcggatctgccccga

SEQ ID NO: 1519046 - DNA, 25 bp, Homo sapien
tctctcattaactcggatctgcccc

SEQ ID NO: 1519047 - DNA, 25 bp, Homo sapien
ctcattaactcggatctgccccgag

SEQ ID NO: 1519048 - DNA, 25 bp, Homo sapien
ccctctctcattaactcggatctgc

SEQ ID NO: 1519049 - DNA, 25 bp, Homo sapien
taatggagccaggtatgaagactca

SEQ ID NO: 1519050 - DNA, 25 bp, Homo sapien
gaagactcagctcgagaaatttagt

SEQ ID NO: 1519051 - DNA, 25 bp, Homo sapien
ttccaaagcgactgacgcagtgact

SEQ ID NO: 1519052 - DNA, 25 bp, Homo sapien
gcagagttaacgctacacgctcaat

SEQ ID NO: 1519053 - DNA, 25 bp, Homo sapien
actacaaaaatcaactgggcgtggt

SEQ ID NO: 1519054 - DNA, 25 bp, Homo sapien
ccgcaccactgaactccagcttagg

SEQ ID NO: 1519055 - DNA, 25 bp, Homo sapien
aaactacaaaaatcaactgggcgtg

SEQ ID NO: 1519056 - DNA, 25 bp, Homo sapien
gaagaatcgctcgagcccgggaggt

SEQ ID NO: 1519057 - DNA, 25 bp, Homo sapien
tggatgggaagccatcccctacaac

SEQ ID NO: 1519058 - DNA, 25 bp, Homo sapien
gatgggaagccatcccctacaacac

SEQ ID NO: 1519059 - DNA, 25 bp, Homo sapien
tcttccacggcagccaggtcctgat

SEQ ID NO: 1519060 - DNA, 25 bp, Homo sapien
gcagccaggtcctgatctgcacagg

SEQ ID NO: 1519061 - DNA, 25 bp, Homo sapien
ttggcatcatcttgctagatccatc

SEQ ID NO: 1519062 - DNA, 25 bp, Homo sapien
atcatcttgctagatccatcttccc

SEQ ID NO: 1519063 - DNA, 25 bp, Homo sapien
tttggcatcatcttgctagatccat

SEQ ID NO: 1519064 - DNA, 25 bp, Homo sapien
caggatagactggtgagcaatgcat

SEQ ID NO: 1519065 - DNA, 25 bp, Homo sapien
ggcaggatagactggtgagcaatgc

SEQ ID NO: 1519066 - DNA, 25 bp, Homo sapien
ggaagggaggcaggatagactggtg

SEQ ID NO: 1519067 - DNA, 25 bp, Homo sapien
aagggaggcaggatagactggtgag

SEQ ID NO: 1519068 - DNA, 25 bp, Homo sapien
tttgacattctcaatggtgtcactg

SEQ ID NO: 1519069 - DNA, 25 bp, Homo sapien
gacctcaagggtgatggttttgcca

SEQ ID NO: 1519070 - DNA, 25 bp, Homo sapien
gaattttggctttgacattctcaat

SEQ ID NO: 1519071 - DNA, 25 bp, Homo sapien
ttttgccagtgagggtcttcacaaa

SEQ ID NO: 1519072 - DNA, 25 bp, Homo sapien
tcagttagaggctctgcggaccata

SEQ ID NO: 1519073 - DNA, 25 bp, Homo sapien
tctgcggaccatattactggcagtg

SEQ ID NO: 1519074 - DNA, 25 bp, Homo sapien
agcactacccccagtttctcaaaag

SEQ ID NO: 1519075 - DNA, 25 bp, Homo sapien
actgaggtagaagataacaaacgtt

SEQ ID NO: 1519076 - DNA, 25 bp, Homo sapien
gtttgccggcaaatatcagacgctg

SEQ ID NO: 1519077 - DNA, 25 bp, Homo sapien
tgccggcaaatatcagacgctgctg

SEQ ID NO: 1519078 - DNA, 25 bp, Homo sapien
gccggcaaatatcagacgctgctgg

SEQ ID NO: 1519079 - DNA, 25 bp, Homo sapien
tcctccagctgtttgccggcaaata

SEQ ID NO: 1519080 - DNA, 25 bp, Homo sapien
tctaacatggaagccgacctctaag

SEQ ID NO: 1519081 - DNA, 25 bp, Homo sapien
ctaagtggttcaggcaaggtcagac

SEQ ID NO: 1519082 - DNA, 25 bp, Homo sapien
tgtggaagatacactgtcccagcca

SEQ ID NO: 1519083 - DNA, 25 bp, Homo sapien
ccccgagtgttctacgtgtggaaga

SEQ ID NO: 1519084 - DNA, 25 bp, Homo sapien
ctcgcaggcgcaacaccaggtgcag

SEQ ID NO: 1519085 - DNA, 25 bp, Homo sapien
aagctggcggagagaaggctcaata

SEQ ID NO: 1519086 - DNA, 25 bp, Homo sapien
tctgggcaagctggcggagagaagg

SEQ ID NO: 1519087 - DNA, 25 bp, Homo sapien
caataatgccacctcgcaggcgcaa

SEQ ID NO: 1519088 - DNA, 25 bp, Homo sapien
gggcataccccgactccggcagccc

SEQ ID NO: 1519089 - DNA, 25 bp, Homo sapien
agggcataccccgactccggcagcc

SEQ ID NO: 1519090 - DNA, 25 bp, Homo sapien
ggtgggtgagggcataccccgactc

SEQ ID NO: 1519091 - DNA, 25 bp, Homo sapien
ggtgagggcataccccgactccggc

SEQ ID NO: 1519092 - DNA, 25 bp, Homo sapien
cggcagttgacagcacgagggtgaa

SEQ ID NO: 1519093 - DNA, 25 bp, Homo sapien
agttgacagcacgagggtgaaggcg

SEQ ID NO: 1519094 - DNA, 25 bp, Homo sapien
ggcagttgacagcacgagggtgaag

SEQ ID NO: 1519095 - DNA, 25 bp, Homo sapien
ggacgcaggttgttggtgtgaccac

SEQ ID NO: 1519096 - DNA, 25 bp, Homo sapien
acgcaggttgttggtgtgaccacac

SEQ ID NO: 1519097 - DNA, 25 bp, Homo sapien
gcaggttgttggtgtgaccacactt

SEQ ID NO: 1519098 - DNA, 25 bp, Homo sapien
cttcttcttgggacgcaggttgttg

SEQ ID NO: 1519099 - DNA, 25 bp, Homo sapien
atgaaagggacactttattgaggct

SEQ ID NO: 1519100 - DNA, 25 bp, Homo sapien
ggaggctgcccttcaaggaaagaac

SEQ ID NO: 1519101 - DNA, 25 bp, Homo sapien
ggctgcccttcaaggaaagaaccac

SEQ ID NO: 1519102 - DNA, 25 bp, Homo sapien
gggacactttattgaggctccaggg

SEQ ID NO: 1519103 - DNA, 25 bp, Homo sapien
tacacgactgaggtttttactccag

SEQ ID NO: 1519104 - DNA, 25 bp, Homo sapien
tcaaagtgcctgacaggatcccagc

SEQ ID NO: 1519105 - DNA, 25 bp, Homo sapien
gcagggaccaatgccgatgtgacag

SEQ ID NO: 1519106 - DNA, 25 bp, Homo sapien
cacctagacacttcagggccaaggc

SEQ ID NO: 1519107 - DNA, 25 bp, Homo sapien
gcctactgatcattacaagctttaa

SEQ ID NO: 1519108 - DNA, 25 bp, Homo sapien
gcctgagttccagggtacagggagc

SEQ ID NO: 1519109 - DNA, 25 bp, Homo sapien
ccagcctgcacgatgggagcaaggc

SEQ ID NO: 1519110 - DNA, 25 bp, Homo sapien
ccaagggttgcccttcttaagagtg

SEQ ID NO: 1519111 - DNA, 25 bp, Homo sapien
aaaaaaatgtagcaaggccaggcgc

SEQ ID NO: 1519112 - DNA, 25 bp, Homo sapien
aaaaaaaatgtagcaaggccaggcg

SEQ ID NO: 1519113 - DNA, 25 bp, Homo sapien
gcttgggcggctagagctcatatcc

SEQ ID NO: 1519114 - DNA, 25 bp, Homo sapien
tcattaggatgcatcactggcctcg

SEQ ID NO: 1519115 - DNA, 25 bp, Homo sapien
cagaagggttgccattgctagcttg

SEQ ID NO: 1519116 - DNA, 25 bp, Homo sapien
ttggacccagtgcaaaaccattctg

SEQ ID NO: 1519117 - DNA, 25 bp, Homo sapien
tattgccttcggtgtcgaatatggg

SEQ ID NO: 1519118 - DNA, 25 bp, Homo sapien
ggaacaggtcctgtatatttgcatt

SEQ ID NO: 1519119 - DNA, 25 bp, Homo sapien
cacactatattgtcctgggtattgc

SEQ ID NO: 1519120 - DNA, 25 bp, Homo sapien
taagccttccagtaaccattggcac

SEQ ID NO: 1519121 - DNA, 25 bp, Homo sapien
tccggagcaggcccttccgctgcgc

SEQ ID NO: 1519122 - DNA, 25 bp, Homo sapien
aggcactgcagggaccgtaggctcc

SEQ ID NO: 1519123 - DNA, 25 bp, Homo sapien
gtccccgagcttcggtggcctcctc

SEQ ID NO: 1519124 - DNA, 25 bp, Homo sapien
cagggccacgccggctcctcgcgtc

SEQ ID NO: 1519125 - DNA, 25 bp, Homo sapien
ctcgcgtccccgagcttcggtggcc

SEQ ID NO: 1519126 - DNA, 25 bp, Homo sapien
tcctccagtcggcggaagccctgcg

SEQ ID NO: 1519127 - DNA, 25 bp, Homo sapien
ctccagtcggcggaagccctgcgcg

SEQ ID NO: 1519128 - DNA, 25 bp, Homo sapien
cctccagtcggcggaagccctgcgc

SEQ ID NO: 1519129 - DNA, 25 bp, Homo sapien
aaatccccgccccatctgactctgc

SEQ ID NO: 1519130 - DNA, 25 bp, Homo sapien
agaagccacgaagagtgagtcgtcg

SEQ ID NO: 1519131 - DNA, 25 bp, Homo sapien
tttcgtgaaggtgaggacccggtgc

SEQ ID NO: 1519132 - DNA, 25 bp, Homo sapien
aggacgcttcctgactcccgcaggg

SEQ ID NO: 1519133 - DNA, 25 bp, Homo sapien
gcccccaggaagtgtccccagacac

SEQ ID NO: 1519134 - DNA, 25 bp, Homo sapien
ggcccccaggaagtgtccccagaca

SEQ ID NO: 1519135 - DNA, 25 bp, Homo sapien
tcaggccctgcaccggcgccaacca

SEQ ID NO: 1519136 - DNA, 25 bp, Homo sapien
ctcaggccctgcaccggcgccaacc

SEQ ID NO: 1519137 - DNA, 25 bp, Homo sapien
caggccctgcaccggcgccaaccac

SEQ ID NO: 1519138 - DNA, 25 bp, Homo sapien
cactgtgctccggtagcgcgcgaag

SEQ ID NO: 1519139 - DNA, 25 bp, Homo sapien
tagtcagggccgctgcgcaggtact

SEQ ID NO: 1519140 - DNA, 25 bp, Homo sapien
ggcctgggtcaccccgtgcactgtg

SEQ ID NO: 1519141 - DNA, 25 bp, Homo sapien
ccggtagcgcgcgaagtcgtagtca

SEQ ID NO: 1519142 - DNA, 25 bp, Homo sapien
gaacaacagtgacgtcttagccagg

SEQ ID NO: 1519143 - DNA, 25 bp, Homo sapien
tgagcaacacgaaggatgtctccac

SEQ ID NO: 1519144 - DNA, 25 bp, Homo sapien
tccgaaattcagtttagaggctctc

SEQ ID NO: 1519145 - DNA, 25 bp, Homo sapien
ttaggttgcgcctcatggtcccagg

SEQ ID NO: 1519146 - DNA, 25 bp, Homo sapien
atccgtacagcgtcctcctgccccg

SEQ ID NO: 1519147 - DNA, 25 bp, Homo sapien
tcagctgctgcatccgtacagcgtc

SEQ ID NO: 1519148 - DNA, 25 bp, Homo sapien
ctcctgccccgccagctctggcgtc

SEQ ID NO: 1519149 - DNA, 25 bp, Homo sapien
cccgccagctctggcgtctccatca

SEQ ID NO: 1519150 - DNA, 25 bp, Homo sapien
tgtgtcgaggtatacagcagtgtcc

SEQ ID NO: 1519151 - DNA, 25 bp, Homo sapien
tgcaaatcgagcatagccaggcggc

SEQ ID NO: 1519152 - DNA, 25 bp, Homo sapien
gacagccacgtgtgcaggattggca

SEQ ID NO: 1519153 - DNA, 25 bp, Homo sapien
ggtgagaacaccattgtgcactggc

SEQ ID NO: 1519154 - DNA, 25 bp, Homo sapien
gattccgcatcaaacctaaggtcct

SEQ ID NO: 1519155 - DNA, 25 bp, Homo sapien
gaacctcgctgatcgcctccatggt

SEQ ID NO: 1519156 - DNA, 25 bp, Homo sapien
ctaaggtcctggagaacctcgctga

SEQ ID NO: 1519157 - DNA, 25 bp, Homo sapien
tcactcggcagattccgcatcaaac

SEQ ID NO: 1519158 - DNA, 25 bp, Homo sapien
agctctttattgtgggaggtgtctg

SEQ ID NO: 1519159 - DNA, 25 bp, Homo sapien
tgggcgccatccgccccgtttccca

SEQ ID NO: 1519160 - DNA, 25 bp, Homo sapien
gagctctttattgtgggaggtgtct

SEQ ID NO: 1519161 - DNA, 25 bp, Homo sapien
ttcccatctccctcggcgcatccct

SEQ ID NO: 1519162 - DNA, 25 bp, Homo sapien
aagaagcacgcgtactgctccaacc

SEQ ID NO: 1519163 - DNA, 25 bp, Homo sapien
tctacgaccagtggcgagcctggat

SEQ ID NO: 1519164 - DNA, 25 bp, Homo sapien
ctgggctggctcaagaagcacgcgt

SEQ ID NO: 1519165 - DNA, 25 bp, Homo sapien
gtgcggcgcgagctcaagcagttcc

SEQ ID NO: 1519166 - DNA, 25 bp, Homo sapien
ctgaaacccggcaccgtgtacttcg

SEQ ID NO: 1519167 - DNA, 25 bp, Homo sapien
tggcatctatggctccaagaaagcc

SEQ ID NO: 1519168 - DNA, 25 bp, Homo sapien
gacgatgtgagcaaccagacctcct

SEQ ID NO: 1519169 - DNA, 25 bp, Homo sapien
tgtacttcgtgcaagtgcgctgcaa

SEQ ID NO: 1519170 - DNA, 25 bp, Homo sapien
ctaccgagtggaggacagtgtggac

SEQ ID NO: 1519171 - DNA, 25 bp, Homo sapien
taccgagtggaggacagtgtggact

SEQ ID NO: 1519172 - DNA, 25 bp, Homo sapien
ccgctaccgagtggaggacagtgtg

SEQ ID NO: 1519173 - DNA, 25 bp, Homo sapien
gctaccgagtggaggacagtgtgga

SEQ ID NO: 1519174 - DNA, 25 bp, Homo sapien
gtcgggggacaacctcgtgtgccac

SEQ ID NO: 1519175 - DNA, 25 bp, Homo sapien
tgagctctcccgtgtactcaacgcc

SEQ ID NO: 1519176 - DNA, 25 bp, Homo sapien
aggatcccacgcttctcatcggctc

SEQ ID NO: 1519177 - DNA, 25 bp, Homo sapien
ggccaacctcaatgggtccaggcag

SEQ ID NO: 1519178 - DNA, 25 bp, Homo sapien
tcaaacccatcccgcgcgcgaaggg

SEQ ID NO: 1519179 - DNA, 25 bp, Homo sapien
ctcaaacccatcccgcgcgcgaagg

SEQ ID NO: 1519180 - DNA, 25 bp, Homo sapien
acccatcccgcgcgcgaaggggaca

SEQ ID NO: 1519181 - DNA, 25 bp, Homo sapien
atcccgcgcgcgaaggggacagcgc

SEQ ID NO: 1519182 - DNA, 25 bp, Homo sapien
ggcggggaccggggcgctgacgtca

SEQ ID NO: 1519183 - DNA, 25 bp, Homo sapien
gcgctgacgtcacccgagcgaggca

SEQ ID NO: 1519184 - DNA, 25 bp, Homo sapien
cggggcgctgacgtcacccgagcga

SEQ ID NO: 1519185 - DNA, 25 bp, Homo sapien
ggaccggggcgctgacgtcacccga

SEQ ID NO: 1519186 - DNA, 25 bp, Homo sapien
cagttctgcgtgtccccgagctggg

SEQ ID NO: 1519187 - DNA, 25 bp, Homo sapien
ggcgggcggcgacgccaacagcagc

SEQ ID NO: 1519188 - DNA, 25 bp, Homo sapien
gggctgcgggccgaggtcgcggtcg

SEQ ID NO: 1519189 - DNA, 25 bp, Homo sapien
gtcgcggcaccgcagctggcagttc

SEQ ID NO: 1519190 - DNA, 25 bp, Homo sapien
ctgctgtcatccaagagaagcccat

SEQ ID NO: 1519191 - DNA, 25 bp, Homo sapien
accaaagtctcctgctgtcatccaa

SEQ ID NO: 1519192 - DNA, 25 bp, Homo sapien
acccccaccaaagtctcctgctgtc

SEQ ID NO: 1519193 - DNA, 25 bp, Homo sapien
tcctgctgtcatccaagagaagccc

SEQ ID NO: 1519194 - DNA, 25 bp, Homo sapien
gagcttctggccacaaatcggcaga

SEQ ID NO: 1519195 - DNA, 25 bp, Homo sapien
ctcgcaagcgctgatcagaacggct

SEQ ID NO: 1519196 - DNA, 25 bp, Homo sapien
ggcagccacgctcgcaagcgctgat

SEQ ID NO: 1519197 - DNA, 25 bp, Homo sapien
cagaacggctctgtcatagggagac

SEQ ID NO: 1519198 - DNA, 25 bp, Homo sapien
tccttcacataggcttccacgcagg

SEQ ID NO: 1519199 - DNA, 25 bp, Homo sapien
tccagcagccgtggctacaggcctg

SEQ ID NO: 1519200 - DNA, 25 bp, Homo sapien
ctcaggctccgcgggctggctccag

SEQ ID NO: 1519201 - DNA, 25 bp, Homo sapien
gccgtggctacaggcctgctgctct

SEQ ID NO: 1519202 - DNA, 25 bp, Homo sapien
cctgggctgagttgacaaggtcatt

SEQ ID NO: 1519203 - DNA, 25 bp, Homo sapien
tgggctgagttgacaaggtcattgc

SEQ ID NO: 1519204 - DNA, 25 bp, Homo sapien
ctgcaagtagtatgtccaggtggag

SEQ ID NO: 1519205 - DNA, 25 bp, Homo sapien
gctgagttgacaaggtcattgcaga

SEQ ID NO: 1519206 - DNA, 25 bp, Homo sapien
aacaccaccactttcccattgtcag

SEQ ID NO: 1519207 - DNA, 25 bp, Homo sapien
ctgaaacaccaccactttcccattg

SEQ ID NO: 1519208 - DNA, 25 bp, Homo sapien
acaccaccactttcccattgtcagt

SEQ ID NO: 1519209 - DNA, 25 bp, Homo sapien
gaaacaccaccactttcccattgtc

SEQ ID NO: 1519210 - DNA, 25 bp, Homo sapien
gagcctcgccaggtcacctccacgc

SEQ ID NO: 1519211 - DNA, 25 bp, Homo sapien
agggcttcagggtgggagcctcgcc

SEQ ID NO: 1519212 - DNA, 25 bp, Homo sapien
aagccgaggctctccactatgggct

SEQ ID NO: 1519213 - DNA, 25 bp, Homo sapien
acctccacgcgctgcagacggcccc

SEQ ID NO: 1519214 - DNA, 25 bp, Homo sapien
tggtcttgactcggatcttggcctt

SEQ ID NO: 1519215 - DNA, 25 bp, Homo sapien
ggtcttgactcggatcttggccttc

SEQ ID NO: 1519216 - DNA, 25 bp, Homo sapien
gtcttgactcggatcttggccttcc

SEQ ID NO: 1519217 - DNA, 25 bp, Homo sapien
tgctggtcttgactcggatcttggc

SEQ ID NO: 1519218 - DNA, 25 bp, Homo sapien
tcattgtcctgtggctcttcagact

SEQ ID NO: 1519219 - DNA, 25 bp, Homo sapien
attgtcctgtggctcttcagactcc

SEQ ID NO: 1519220 - DNA, 25 bp, Homo sapien
agtcattgtcctgtggctcttcaga

SEQ ID NO: 1519221 - DNA, 25 bp, Homo sapien
tgtcctgtggctcttcagactccac

SEQ ID NO: 1519222 - DNA, 25 bp, Homo sapien
ccggcaggcaccactcagctgccca

SEQ ID NO: 1519223 - DNA, 25 bp, Homo sapien
ccaggatccagcgaggcagacccga

SEQ ID NO: 1519224 - DNA, 25 bp, Homo sapien
cagcaggccaggatccagcgaggca

SEQ ID NO: 1519225 - DNA, 25 bp, Homo sapien
gatccagcgaggcagacccgagcgc

SEQ ID NO: 1519226 - DNA, 25 bp, Homo sapien
aggccaggatccagcgaggcagacc

SEQ ID NO: 1519227 - DNA, 25 bp, Homo sapien
ggtacaggggccaatcgggctccat

SEQ ID NO: 1519228 - DNA, 25 bp, Homo sapien
tcacaggcgtgggacggcggcgggt

SEQ ID NO: 1519229 - DNA, 25 bp, Homo sapien
agcttcagcttgtagggtggtaggc

SEQ ID NO: 1519230 - DNA, 25 bp, Homo sapien
gctccatcatgaagcccttgtgctg

SEQ ID NO: 1519231 - DNA, 25 bp, Homo sapien
gggaagccctagcaagacgcagctc

SEQ ID NO: 1519232 - DNA, 25 bp, Homo sapien
caagccccaggcacgctttataggg

SEQ ID NO: 1519233 - DNA, 25 bp, Homo sapien
tataggggcatggagatgcccacac

SEQ ID NO: 1519234 - DNA, 25 bp, Homo sapien
aaggaggaaccagtgcccgatcccg

SEQ ID NO: 1519235 - DNA, 25 bp, Homo sapien
cgctgctaccgccggactccgccat

SEQ ID NO: 1519236 - DNA, 25 bp, Homo sapien
caggacggacttcaccaaggagaac

SEQ ID NO: 1519237 - DNA, 25 bp, Homo sapien
tataaacatttgtgcgctcctgacc

SEQ ID NO: 1519238 - DNA, 25 bp, Homo sapien
ggagaacgcgtgcttccaactcgaa

SEQ ID NO: 1519239 - DNA, 25 bp, Homo sapien
taacatcccgtggagagcagaactc

SEQ ID NO: 1519240 - DNA, 25 bp, Homo sapien
tcatttcaaacaggaacccgccact

SEQ ID NO: 1519241 - DNA, 25 bp, Homo sapien
gaatcatttcaaacaggaacccgcc

SEQ ID NO: 1519242 - DNA, 25 bp, Homo sapien
cttcacgaatcatttcaaacaggaa

SEQ ID NO: 1519243 - DNA, 25 bp, Homo sapien
cacgaatcatttcaaacaggaaccc

SEQ ID NO: 1519244 - DNA, 25 bp, Homo sapien
ataggcggttctgacgcgcgcagtc

SEQ ID NO: 1519245 - DNA, 25 bp, Homo sapien
ccggcattgcccctcataggcggtt

SEQ ID NO: 1519246 - DNA, 25 bp, Homo sapien
ccaggctggcaactggaccaagacc

SEQ ID NO: 1519247 - DNA, 25 bp, Homo sapien
tattgtccatgtggctcgaaggagc

SEQ ID NO: 1519248 - DNA, 25 bp, Homo sapien
ctcctccggccccgggctggcctca

SEQ ID NO: 1519249 - DNA, 25 bp, Homo sapien
tgtcagggcaggcgcccctcctccg

SEQ ID NO: 1519250 - DNA, 25 bp, Homo sapien
ggccccgggctggcctcatctccat

SEQ ID NO: 1519251 - DNA, 25 bp, Homo sapien
ctgtcagggcaggcgcccctcctcc

SEQ ID NO: 1519252 - DNA, 25 bp, Homo sapien
tgcagggatgctgcgtaaatgagac

SEQ ID NO: 1519253 - DNA, 25 bp, Homo sapien
taaatgagacgaagtaggccccgtc

SEQ ID NO: 1519254 - DNA, 25 bp, Homo sapien
gtcctcatgggcacgcggtccaggc

SEQ ID NO: 1519255 - DNA, 25 bp, Homo sapien
tcttccctgcccgtgcatgcaggga

SEQ ID NO: 1519256 - DNA, 25 bp, Homo sapien
gaaagggtgagtgatcaagacaaac

SEQ ID NO: 1519257 - DNA, 25 bp, Homo sapien
atcaagacaaactgccggggagagg

SEQ ID NO: 1519258 - DNA, 25 bp, Homo sapien
tgatcaagacaaactgccggggaga

SEQ ID NO: 1519259 - DNA, 25 bp, Homo sapien
ggaaagggtgagtgatcaagacaaa

SEQ ID NO: 1519260 - DNA, 25 bp, Homo sapien
gagacacggtttcctccgctacggt

SEQ ID NO: 1519261 - DNA, 25 bp, Homo sapien
accgtagcggaggaaaccgtgtctc

SEQ ID NO: 1519262 - DNA, 25 bp, Homo sapien
aaaggcctctctgttaatagtcagc

SEQ ID NO: 1519263 - DNA, 25 bp, Homo sapien
ctgggtgccgagaaggtgcacttga

SEQ ID NO: 1519264 - DNA, 25 bp, Homo sapien
caggcagccaggacgaccttgtgtg

SEQ ID NO: 1519265 - DNA, 25 bp, Homo sapien
agcacaacatcgaggagctggccct

SEQ ID NO: 1519266 - DNA, 25 bp, Homo sapien
ccaacagctacgtccccagcctcca

SEQ ID NO: 1519267 - DNA, 25 bp, Homo sapien
agcctccattgagaccccagctccg

SEQ ID NO: 1519268 - DNA, 25 bp, Homo sapien
cccagcctccattgagaccccagct

SEQ ID NO: 1519269 - DNA, 25 bp, Homo sapien
agctccgcccttgtactgctgtgct

SEQ ID NO: 1519270 - DNA, 25 bp, Homo sapien
ctcaggtggtcggggaagcacctcc

SEQ ID NO: 1519271 - DNA, 25 bp, Homo sapien
tcaggtggtcggggaagcacctccc

SEQ ID NO: 1519272 - DNA, 25 bp, Homo sapien
ccaggaatgatctggcctggggaac

SEQ ID NO: 1519273 - DNA, 25 bp, Homo sapien
agaaacacaacgtgtggctggcagt

SEQ ID NO: 1519274 - DNA, 25 bp, Homo sapien
gctgaggggtgttttggccagccag

SEQ ID NO: 1519275 - DNA, 25 bp, Homo sapien
gaaacacaacgtgtggctggcagtg

SEQ ID NO: 1519276 - DNA, 25 bp, Homo sapien
ttgcctcccgcatgccgccggtgaa

SEQ ID NO: 1519277 - DNA, 25 bp, Homo sapien
tcagctcgatgacgtcctggcttgc

SEQ ID NO: 1519278 - DNA, 25 bp, Homo sapien
gctcgatgacgtcctggcttgcctc

SEQ ID NO: 1519279 - DNA, 25 bp, Homo sapien
ccttcagctcgatgacgtcctggct

SEQ ID NO: 1519280 - DNA, 25 bp, Homo sapien
ggtcgatctcggcacagctctgcag

SEQ ID NO: 1519281 - DNA, 25 bp, Homo sapien
aggtgaaggcatccaccgactctcg

SEQ ID NO: 1519282 - DNA, 25 bp, Homo sapien
tgaggcaggtctccacgctcatggc

SEQ ID NO: 1519283 - DNA, 25 bp, Homo sapien
catctggccgatgttgaggcaggtc

SEQ ID NO: 1519284 - DNA, 25 bp, Homo sapien
agagcacgtggctggcgcgcggccg

SEQ ID NO: 1519285 - DNA, 25 bp, Homo sapien
agcacgtggctggcgcgcggccgcc

SEQ ID NO: 1519286 - DNA, 25 bp, Homo sapien
gagcacgtggctggcgcgcggccgc

SEQ ID NO: 1519287 - DNA, 25 bp, Homo sapien
gagactgcatctcgtgctgccggaa

SEQ ID NO: 1519288 - DNA, 25 bp, Homo sapien
tgcccgtgacgttgttgagacgcca

SEQ ID NO: 1519289 - DNA, 25 bp, Homo sapien
tagccacccgagatgtagaggcggc

SEQ ID NO: 1519290 - DNA, 25 bp, Homo sapien
tacacaaaattgtccagcacggcca

SEQ ID NO: 1519291 - DNA, 25 bp, Homo sapien
gggttctcaggcagacgtgcattcg

SEQ ID NO: 1519292 - DNA, 25 bp, Homo sapien
tgcattcgccaagccccacttggag

SEQ ID NO: 1519293 - DNA, 25 bp, Homo sapien
ttatcaacgcagcaggcccctcaag

SEQ ID NO: 1519294 - DNA, 25 bp, Homo sapien
cttggagacaacatgcggtcaggcc

SEQ ID NO: 1519295 - DNA, 25 bp, Homo sapien
atgtcagacgctttgccggcaggct

SEQ ID NO: 1519296 - DNA, 25 bp, Homo sapien
cctcggatggactcgcagccaggat

SEQ ID NO: 1519297 - DNA, 25 bp, Homo sapien
caccacatgtcagacgctttgccgg

SEQ ID NO: 1519298 - DNA, 25 bp, Homo sapien
caccccggggacgaatttgctgcca

SEQ ID NO: 1519299 - DNA, 25 bp, Homo sapien
gaagtgagatggagctgcacaggga

SEQ ID NO: 1519300 - DNA, 25 bp, Homo sapien
aagtgagatggagctgcacagggac

SEQ ID NO: 1519301 - DNA, 25 bp, Homo sapien
agaagtgagatggagctgcacaggg

SEQ ID NO: 1519302 - DNA, 25 bp, Homo sapien
agtgagatggagctgcacagggacc

SEQ ID NO: 1519303 - DNA, 25 bp, Homo sapien
tataccaccgactttgggttcaatg

SEQ ID NO: 1519304 - DNA, 25 bp, Homo sapien
tcatataccaccgactttgggttca

SEQ ID NO: 1519305 - DNA, 25 bp, Homo sapien
accaccgactttgggttcaatgttg

SEQ ID NO: 1519306 - DNA, 25 bp, Homo sapien
ccgactttgggttcaatgttgatga

SEQ ID NO: 1519307 - DNA, 25 bp, Homo sapien
aaaaacacgcgcgcaggagacttgg

SEQ ID NO: 1519308 - DNA, 25 bp, Homo sapien
attttaaaaacacgcgcgcaggaga

SEQ ID NO: 1519309 - DNA, 25 bp, Homo sapien
ttaaaaacacgcgcgcaggagactt

SEQ ID NO: 1519310 - DNA, 25 bp, Homo sapien
aacacgcgcgcaggagacttggaag

SEQ ID NO: 1519311 - DNA, 25 bp, Homo sapien
tttcctccggaaagcagatgaaggc

SEQ ID NO: 1519312 - DNA, 25 bp, Homo sapien
gattctgaagttagcgtcgccctcc

SEQ ID NO: 1519313 - DNA, 25 bp, Homo sapien
tctgttagcagcgagagagacactt

SEQ ID NO: 1519314 - DNA, 25 bp, Homo sapien
tagaacaaatgtggccagagatacc

SEQ ID NO: 1519315 - DNA, 25 bp, Homo sapien
agggtgaaagtcctggccacgcttc

SEQ ID NO: 1519316 - DNA, 25 bp, Homo sapien
tctgtgaccaatcagacccaagccg

SEQ ID NO: 1519317 - DNA, 25 bp, Homo sapien
ccaagccgcacaagctcagtgctgg

SEQ ID NO: 1519318 - DNA, 25 bp, Homo sapien
gaggacacacgaggaatctgtgacc

SEQ ID NO: 1519319 - DNA, 25 bp, Homo sapien
gatccggttagatacagcagcgccc

SEQ ID NO: 1519320 - DNA, 25 bp, Homo sapien
acgaacattccacgaaccggcctag

SEQ ID NO: 1519321 - DNA, 25 bp, Homo sapien
ggttatgcacaatcgatccggttag

SEQ ID NO: 1519322 - DNA, 25 bp, Homo sapien
tcactggggacaagatgttctgagg

SEQ ID NO: 1519323 - DNA, 25 bp, Homo sapien
gtccaggcctcagcgagtaggcagg

SEQ ID NO: 1519324 - DNA, 25 bp, Homo sapien
caggcctcagcgagtaggcagggca

SEQ ID NO: 1519325 - DNA, 25 bp, Homo sapien
aggcctcagcgagtaggcagggcat

SEQ ID NO: 1519326 - DNA, 25 bp, Homo sapien
tccaggcctcagcgagtaggcaggg

SEQ ID NO: 1519327 - DNA, 25 bp, Homo sapien
gagaggccccagaagtcgcacttgg

SEQ ID NO: 1519328 - DNA, 25 bp, Homo sapien
ggcctgcatctgaccgtcccgagag

SEQ ID NO: 1519329 - DNA, 25 bp, Homo sapien
tggcctccctcttgcgggcctgcat

SEQ ID NO: 1519330 - DNA, 25 bp, Homo sapien
gagagacagcgttttcccacagcct

SEQ ID NO: 1519331 - DNA, 25 bp, Homo sapien
tccccagaggcccccttggccctca

SEQ ID NO: 1519332 - DNA, 25 bp, Homo sapien
cgatttggggtacccacgtcgtgtg

SEQ ID NO: 1519333 - DNA, 25 bp, Homo sapien
cccacgtcgtgtggaggtgaattag

SEQ ID NO: 1519334 - DNA, 25 bp, Homo sapien
gtacccacgtcgtgtggaggtgaat

SEQ ID NO: 1519335 - DNA, 25 bp, Homo sapien
cgtgtggaggtgaattagggccatt

SEQ ID NO: 1519336 - DNA, 25 bp, Homo sapien
tttggtaagctcctatactttttgc

SEQ ID NO: 1519337 - DNA, 25 bp, Homo sapien
gcgcactttggtaagctcctatact

SEQ ID NO: 1519338 - DNA, 25 bp, Homo sapien
gattttgcgcactttggtaagctcc

SEQ ID NO: 1519339 - DNA, 25 bp, Homo sapien
tgatatgattttgcgcactttggta

SEQ ID NO: 1519340 - DNA, 25 bp, Homo sapien
ctcgcccgtgccaccgcgcaagcgc

SEQ ID NO: 1519341 - DNA, 25 bp, Homo sapien
ccccactcgcccgtgccaccgcgca

SEQ ID NO: 1519342 - DNA, 25 bp, Homo sapien
ccactcgcccgtgccaccgcgcaag

SEQ ID NO: 1519343 - DNA, 25 bp, Homo sapien
ccccccactcgcccgtgccaccgcg

SEQ ID NO: 1519344 - DNA, 25 bp, Homo sapien
ctcgctgaatttccgcggattgttc

SEQ ID NO: 1519345 - DNA, 25 bp, Homo sapien
cctccgcctgcttctgattgtgcag

SEQ ID NO: 1519346 - DNA, 25 bp, Homo sapien
atcttctcgctgaatttccgcggat

SEQ ID NO: 1519347 - DNA, 25 bp, Homo sapien
tgcttctgattgtgcagcgcgatct

SEQ ID NO: 1519348 - DNA, 25 bp, Homo sapien
tgtcccctgtcaggtaacgacgagg

SEQ ID NO: 1519349 - DNA, 25 bp, Homo sapien
ctagtagtaatgatatagaggcccc

SEQ ID NO: 1519350 - DNA, 25 bp, Homo sapien
gacgaggtactagcacctgttccct

SEQ ID NO: 1519351 - DNA, 25 bp, Homo sapien
tcgggtaacaatgatgtagggacac

SEQ ID NO: 1519352 - DNA, 25 bp, Homo sapien
aaccagggatacgagcatctgcaaa

SEQ ID NO: 1519353 - DNA, 25 bp, Homo sapien
gaaaccagggatacgagcatctgca

SEQ ID NO: 1519354 - DNA, 25 bp, Homo sapien
cagggatacgagcatctgcaaagcc

SEQ ID NO: 1519355 - DNA, 25 bp, Homo sapien
tggaaaccagggatacgagcatctg

SEQ ID NO: 1519356 - DNA, 25 bp, Homo sapien
cagactgaaagtgctacctaaggaa

SEQ ID NO: 1519357 - DNA, 25 bp, Homo sapien
cctaaagcagtacctgggtgacagt

SEQ ID NO: 1519358 - DNA, 25 bp, Homo sapien
cactcaccgagcatgcctaaagcag

SEQ ID NO: 1519359 - DNA, 25 bp, Homo sapien
gaggacagatgtggcacactcaccg

SEQ ID NO: 1519360 - DNA, 25 bp, Homo sapien
cctgctgtctacagtatgggaggca

SEQ ID NO: 1519361 - DNA, 25 bp, Homo sapien
aacccctgctgtctacagtatggga

SEQ ID NO: 1519362 - DNA, 25 bp, Homo sapien
ctgtctacagtatgggaggcagcgc

SEQ ID NO: 1519363 - DNA, 25 bp, Homo sapien
caaacccctgctgtctacagtatgg

SEQ ID NO: 1519364 - DNA, 25 bp, Homo sapien
gaaacaaatagcgccaaagccagga

SEQ ID NO: 1519365 - DNA, 25 bp, Homo sapien
acagaaacaaatagcgccaaagcca

SEQ ID NO: 1519366 - DNA, 25 bp, Homo sapien
agaaacaaatagcgccaaagccagg

SEQ ID NO: 1519367 - DNA, 25 bp, Homo sapien
gcacagaaacaaatagcgccaaagc

SEQ ID NO: 1519368 - DNA, 25 bp, Homo sapien
tgtatatggaggctgcggatggcag

SEQ ID NO: 1519369 - DNA, 25 bp, Homo sapien
gtatatggaggctgcggatggcagc

SEQ ID NO: 1519370 - DNA, 25 bp, Homo sapien
gccccaccttttgttcagggagcag

SEQ ID NO: 1519371 - DNA, 25 bp, Homo sapien
ttcagggagcagctcagggagtcct

SEQ ID NO: 1519372 - DNA, 25 bp, Homo sapien
aggatgagggcagcttgccccacct

SEQ ID NO: 1519373 - DNA, 25 bp, Homo sapien
ttagctttttggaggggcctggaga

SEQ ID NO: 1519374 - DNA, 25 bp, Homo sapien
ggaggtattgagaagaccccgcaca

SEQ ID NO: 1519375 - DNA, 25 bp, Homo sapien
tgagcgcccggtgagtatacactgt

SEQ ID NO: 1519376 - DNA, 25 bp, Homo sapien
cagccggtacatgttcccagatgga

SEQ ID NO: 1519377 - DNA, 25 bp, Homo sapien
gcttcttgttcaggcactcagaggg

SEQ ID NO: 1519378 - DNA, 25 bp, Homo sapien
gaatcaggctcaggatccatgggtg

SEQ ID NO: 1519379 - DNA, 25 bp, Homo sapien
cagccgctatagtggtgacgttccc

SEQ ID NO: 1519380 - DNA, 25 bp, Homo sapien
caactgactcgaggaatggactttc

SEQ ID NO: 1519381 - DNA, 25 bp, Homo sapien
cctgagatggaagacgcagccactt

SEQ ID NO: 1519382 - DNA, 25 bp, Homo sapien
taattacagccaccaatctcgcctg

SEQ ID NO: 1519383 - DNA, 25 bp, Homo sapien
aattacagccaccaatctcgcctgc

SEQ ID NO: 1519384 - DNA, 25 bp, Homo sapien
ctaattacagccaccaatctcgcct

SEQ ID NO: 1519385 - DNA, 25 bp, Homo sapien
cgaggagcctgtccgccccgccggt

SEQ ID NO: 1519386 - DNA, 25 bp, Homo sapien
gacgagggagccgtgtcgatgctgc

SEQ ID NO: 1519387 - DNA, 25 bp, Homo sapien
agccgtgtcgatgctgccgaggagc

SEQ ID NO: 1519388 - DNA, 25 bp, Homo sapien
atctgcagaggggacgagggagccg

SEQ ID NO: 1519389 - DNA, 25 bp, Homo sapien
attctccagaacacgggagggccga

SEQ ID NO: 1519390 - DNA, 25 bp, Homo sapien
gcagccccggaagcgcgacacacgg

SEQ ID NO: 1519391 - DNA, 25 bp, Homo sapien
ggccgaggcggaccctgtaagccag

SEQ ID NO: 1519392 - DNA, 25 bp, Homo sapien
cacacggggagagaggaattctcca

SEQ ID NO: 1519393 - DNA, 25 bp, Homo sapien
gcgaggccggcacacgtcagcggtg

SEQ ID NO: 1519394 - DNA, 25 bp, Homo sapien
agctggccgcctgagggctcctctg

SEQ ID NO: 1519395 - DNA, 25 bp, Homo sapien
tcatccctatagctggccgcctgag

SEQ ID NO: 1519396 - DNA, 25 bp, Homo sapien
accgaggggtgaagcgaggccggca

SEQ ID NO: 1519397 - DNA, 25 bp, Homo sapien
tgaccccagagtcccccttggtcca

SEQ ID NO: 1519398 - DNA, 25 bp, Homo sapien
ggaggggtcacttgtcctgacccca

SEQ ID NO: 1519399 - DNA, 25 bp, Homo sapien
ggggtcacttgtcctgaccccagag

SEQ ID NO: 1519400 - DNA, 25 bp, Homo sapien
ggtcacttgtcctgaccccagagtc

SEQ ID NO: 1519401 - DNA, 25 bp, Homo sapien
tcaaatgaggctaatgtacaattct

SEQ ID NO: 1519402 - DNA, 25 bp, Homo sapien
gcagcgattgaagctgaagaggcct

SEQ ID NO: 1519403 - DNA, 25 bp, Homo sapien
aatgaggctaatgtacaattcttca

SEQ ID NO: 1519404 - DNA, 25 bp, Homo sapien
atcctgggcagcgattgaagctgaa

SEQ ID NO: 1519405 - DNA, 25 bp, Homo sapien
cttggacaggacataagcacaggat

SEQ ID NO: 1519406 - DNA, 25 bp, Homo sapien
tcgtaagggctgctgaggccctcag

SEQ ID NO: 1519407 - DNA, 25 bp, Homo sapien
aggccaccttcccagggtaagccat

SEQ ID NO: 1519408 - DNA, 25 bp, Homo sapien
ctcgtaagggctgctgaggccctca

SEQ ID NO: 1519409 - DNA, 25 bp, Homo sapien
cagggtaagccatcagaagccacgg

SEQ ID NO: 1519410 - DNA, 25 bp, Homo sapien
gagctggtgatgtgcttcgtgggat

SEQ ID NO: 1519411 - DNA, 25 bp, Homo sapien
aggagctggtgatgtgcttcgtggg

SEQ ID NO: 1519412 - DNA, 25 bp, Homo sapien
agcaggggggctcggtgttcaccag

SEQ ID NO: 1519413 - DNA, 25 bp, Homo sapien
cctgtgaatgtgaccccgactccac

SEQ ID NO: 1519414 - DNA, 25 bp, Homo sapien
ctgcaccaggtagcgtgtgaagcag

SEQ ID NO: 1519415 - DNA, 25 bp, Homo sapien
gggctcggtgttcaccaggcgcccc

SEQ ID NO: 1519416 - DNA, 25 bp, Homo sapien
ggaaccgtccgggatgaaggatgag

SEQ ID NO: 1519417 - DNA, 25 bp, Homo sapien
ggatgaggtaggcagcgggtcgggc

SEQ ID NO: 1519418 - DNA, 25 bp, Homo sapien
aggaaccgtccgggatgaaggatga

SEQ ID NO: 1519419 - DNA, 25 bp, Homo sapien
tgaggtaggcagcgggtcgggcagc

SEQ ID NO: 1519420 - DNA, 25 bp, Homo sapien
ctgaagagtagggtcaataagggcc

SEQ ID NO: 1519421 - DNA, 25 bp, Homo sapien
cacgactcggggcacaccaggagga

SEQ ID NO: 1519422 - DNA, 25 bp, Homo sapien
ccctctggacatgggactcaactaa

SEQ ID NO: 1519423 - DNA, 25 bp, Homo sapien
tgggactcaactaaggccacgactc

SEQ ID NO: 1519424 - DNA, 25 bp, Homo sapien
cagtgtgcgctagccctaaagggcc

SEQ ID NO: 1519425 - DNA, 25 bp, Homo sapien
tgtccaccaaaacctcggaacgtga

SEQ ID NO: 1519426 - DNA, 25 bp, Homo sapien
gagtctcccgaagataagcaacgtg

SEQ ID NO: 1519427 - DNA, 25 bp, Homo sapien
gaatcgggtcctgtgttagatggac

SEQ ID NO: 1519428 - DNA, 25 bp, Homo sapien
accacaggcagccaaacccaggtga

SEQ ID NO: 1519429 - DNA, 25 bp, Homo sapien
caggcagccaaacccaggtgaagcc

SEQ ID NO: 1519430 - DNA, 25 bp, Homo sapien
caaacccaggtgaagcccacggagc

SEQ ID NO: 1519431 - DNA, 25 bp, Homo sapien
ccaggtgaagcccacggagcccagg

SEQ ID NO: 1519432 - DNA, 25 bp, Homo sapien
tgtgtctttctgcaggccaacatgc

SEQ ID NO: 1519433 - DNA, 25 bp, Homo sapien
gaattcagtctgtggcacctgctca

SEQ ID NO: 1519434 - DNA, 25 bp, Homo sapien
gcatcacccccaggaattacaggaa

SEQ ID NO: 1519435 - DNA, 25 bp, Homo sapien
caaataagccgcctgcctgtgtctt

SEQ ID NO: 1519436 - DNA, 25 bp, Homo sapien
catcaacagccagagcaggactctt

SEQ ID NO: 1519437 - DNA, 25 bp, Homo sapien
tcaacagccagagcaggactcttcc

SEQ ID NO: 1519438 - DNA, 25 bp, Homo sapien
atcaacagccagagcaggactcttc

SEQ ID NO: 1519439 - DNA, 25 bp, Homo sapien
gcttcccaagatggagttctgggaa

SEQ ID NO: 1519440 - DNA, 25 bp, Homo sapien
ggattcgcaccccttgaccctgcag

SEQ ID NO: 1519441 - DNA, 25 bp, Homo sapien
gggattcgcaccccttgaccctgca

SEQ ID NO: 1519442 - DNA, 25 bp, Homo sapien
cggggattcgcaccccttgaccctg

SEQ ID NO: 1519443 - DNA, 25 bp, Homo sapien
gattcgcaccccttgaccctgcagc

SEQ ID NO: 1519444 - DNA, 25 bp, Homo sapien
agcccagcgaatgcacaggatgtac

SEQ ID NO: 1519445 - DNA, 25 bp, Homo sapien
tccagcccagcgaatgcacaggatg

SEQ ID NO: 1519446 - DNA, 25 bp, Homo sapien
gtggggagcgaacactttctccagc

SEQ ID NO: 1519447 - DNA, 25 bp, Homo sapien
gaaggtggggagcgaacactttctc

SEQ ID NO: 1519448 - DNA, 25 bp, Homo sapien
ggacatgattcacccctctacaggg

SEQ ID NO: 1519449 - DNA, 25 bp, Homo sapien
gacatgcgtggctcaaaaccattga

SEQ ID NO: 1519450 - DNA, 25 bp, Homo sapien
gacaagtgttactgaagccacccga

SEQ ID NO: 1519451 - DNA, 25 bp, Homo sapien
ccgtccttcacgtagagctggctga

SEQ ID NO: 1519452 - DNA, 25 bp, Homo sapien
ctgaggacgagctccgtgaacccag

SEQ ID NO: 1519453 - DNA, 25 bp, Homo sapien
cccaggacccgctgctcagcagcgc

SEQ ID NO: 1519454 - DNA, 25 bp, Homo sapien
gcccaggacccgctgctcagcagcg

SEQ ID NO: 1519455 - DNA, 25 bp, Homo sapien
ggacgagctccgtgaacccagcagc

SEQ ID NO: 1519456 - DNA, 25 bp, Homo sapien
gcatgaacaaaacggcttctgggga

SEQ ID NO: 1519457 - DNA, 25 bp, Homo sapien
tttaatgtgtcctttcgctgcaata

SEQ ID NO: 1519458 - DNA, 25 bp, Homo sapien
cagtgaattttctagccagagggtg

SEQ ID NO: 1519459 - DNA, 25 bp, Homo sapien
cgctgcaataaaccataagcatgaa

SEQ ID NO: 1519460 - DNA, 25 bp, Homo sapien
gcccaggtaaacagctgtttcctgt

SEQ ID NO: 1519461 - DNA, 25 bp, Homo sapien
caggtaaacagctgtttcctgtgag

SEQ ID NO: 1519462 - DNA, 25 bp, Homo sapien
ctcgcccaggtaaacagctgtttcc

SEQ ID NO: 1519463 - DNA, 25 bp, Homo sapien
tcgcccaggtaaacagctgtttcct

SEQ ID NO: 1519464 - DNA, 25 bp, Homo sapien
ttcttatcacggccagaggctgtga

SEQ ID NO: 1519465 - DNA, 25 bp, Homo sapien
gccatttcttatcacggccagaggc

SEQ ID NO: 1519466 - DNA, 25 bp, Homo sapien
agcccaggggagccatttcttatca

SEQ ID NO: 1519467 - DNA, 25 bp, Homo sapien
ggacccgccatagtactggcctcgg

SEQ ID NO: 1519468 - DNA, 25 bp, Homo sapien
cgccatagtactggcctcggctggg

SEQ ID NO: 1519469 - DNA, 25 bp, Homo sapien
tgcaggtactgggatttctggagct

SEQ ID NO: 1519470 - DNA, 25 bp, Homo sapien
ggcccagttgcaggtactgggattt

SEQ ID NO: 1519471 - DNA, 25 bp, Homo sapien
gataaggctgtgcacggcggctgtg

SEQ ID NO: 1519472 - DNA, 25 bp, Homo sapien
gccaacaggtgtagcggctgccgaa

SEQ ID NO: 1519473 - DNA, 25 bp, Homo sapien
aattgctgggcttgcggattagtga

SEQ ID NO: 1519474 - DNA, 25 bp, Homo sapien
gccgccgggcctccttctgagaatt

SEQ ID NO: 1519475 - DNA, 25 bp, Homo sapien
agacaggagccgctgccagggcctc

SEQ ID NO: 1519476 - DNA, 25 bp, Homo sapien
agagacaggagccgctgccagggcc

SEQ ID NO: 1519477 - DNA, 25 bp, Homo sapien
agggcctcccccagaaatccgctgg

SEQ ID NO: 1519478 - DNA, 25 bp, Homo sapien
cagagagacaggagccgctgccagg

SEQ ID NO: 1519479 - DNA, 25 bp, Homo sapien
gagtctgatcgcagggccccccact

SEQ ID NO: 1519480 - DNA, 25 bp, Homo sapien
cccagagtctgatcgcagggccccc

SEQ ID NO: 1519481 - DNA, 25 bp, Homo sapien
tctggagcaccctcggccatcgctc

SEQ ID NO: 1519482 - DNA, 25 bp, Homo sapien
cccactctggagcaccctcggccat

SEQ ID NO: 1519483 - DNA, 25 bp, Homo sapien
gggccggcggtgtggggagccgagc

SEQ ID NO: 1519484 - DNA, 25 bp, Homo sapien
agcccatggtgccgggtggtccggc

SEQ ID NO: 1519485 - DNA, 25 bp, Homo sapien
gtgccgggtggtccggctggtgtcc

SEQ ID NO: 1519486 - DNA, 25 bp, Homo sapien
agccgagccggccacgctcccggta

SEQ ID NO: 1519487 - DNA, 25 bp, Homo sapien
ctgccgtccgtgtttgtccactgac

SEQ ID NO: 1519488 - DNA, 25 bp, Homo sapien
cctcatcctctggtgaaaaggatat

SEQ ID NO: 1519489 - DNA, 25 bp, Homo sapien
tgctgggtaaacttggggtcctgcc

SEQ ID NO: 1519490 - DNA, 25 bp, Homo sapien
ctgctgggtaaacttggggtcctgc

SEQ ID NO: 1519491 - DNA, 25 bp, Homo sapien
tggaagcaggcagccctgtcagaac

SEQ ID NO: 1519492 - DNA, 25 bp, Homo sapien
gatggtgctgccctgattctgtccc

SEQ ID NO: 1519493 - DNA, 25 bp, Homo sapien
tgctgccctgattctgtccccagag

SEQ ID NO: 1519494 - DNA, 25 bp, Homo sapien
ctcccagatggtgctgccctgattc

SEQ ID NO: 1519495 - DNA, 25 bp, Homo sapien
cggaaatgagaaccggagaacaagc

SEQ ID NO: 1519496 - DNA, 25 bp, Homo sapien
ccacggaaatgagaaccggagaaca

SEQ ID NO: 1519497 - DNA, 25 bp, Homo sapien
cccagcccacggaaatgagaaccgg

SEQ ID NO: 1519498 - DNA, 25 bp, Homo sapien
aatgagaaccggagaacaagcttct

SEQ ID NO: 1519499 - DNA, 25 bp, Homo sapien
tgagttaagggggcagtgccactgg

SEQ ID NO: 1519500 - DNA, 25 bp, Homo sapien
gaggtgagttaagggggcagtgcca

SEQ ID NO: 1519501 - DNA, 25 bp, Homo sapien
tgaggtgagttaagggggcagtgcc

SEQ ID NO: 1519502 - DNA, 25 bp, Homo sapien
gttaagggggcagtgccactggctg

SEQ ID NO: 1519503 - DNA, 25 bp, Homo sapien
ggtgagaggtacatggtgccatagg

SEQ ID NO: 1519504 - DNA, 25 bp, Homo sapien
gagaggtacatggtgccataggggc

SEQ ID NO: 1519505 - DNA, 25 bp, Homo sapien
gaggtacatggtgccataggggcag

SEQ ID NO: 1519506 - DNA, 25 bp, Homo sapien
tggtgtccgcgggtggtgagaggta

SEQ ID NO: 1519507 - DNA, 25 bp, Homo sapien
ccacatgtaaccatgatgagagttt

SEQ ID NO: 1519508 - DNA, 25 bp, Homo sapien
ttctggatgcatcttagtttggtca

SEQ ID NO: 1519509 - DNA, 25 bp, Homo sapien
cagggtgaaggctaatttctagaaa

SEQ ID NO: 1519510 - DNA, 25 bp, Homo sapien
cattgtttaagcgactgtgtcctgc

SEQ ID NO: 1519511 - DNA, 25 bp, Homo sapien
tggtgcagggcggagtcagaattgg

SEQ ID NO: 1519512 - DNA, 25 bp, Homo sapien
ggtgcagggcggagtcagaattggt

SEQ ID NO: 1519513 - DNA, 25 bp, Homo sapien
gtgcagggcggagtcagaattggtc

SEQ ID NO: 1519514 - DNA, 25 bp, Homo sapien
cccactgctaaaggattctggctgc

SEQ ID NO: 1519515 - DNA, 25 bp, Homo sapien
cttttctggtgcacgtcctgggacc

SEQ ID NO: 1519516 - DNA, 25 bp, Homo sapien
tgggacccactgctaaaggattctg

SEQ ID NO: 1519517 - DNA, 25 bp, Homo sapien
ctcttttctggtgcacgtcctggga

SEQ ID NO: 1519518 - DNA, 25 bp, Homo sapien
tctttatgcctgttgcacatttcat

SEQ ID NO: 1519519 - DNA, 25 bp, Homo sapien
ttggtgtcccatgcttgcttggaaa

SEQ ID NO: 1519520 - DNA, 25 bp, Homo sapien
ggtgtcccatgcttgcttggaaagg

SEQ ID NO: 1519521 - DNA, 25 bp, Homo sapien
tggcctcaaaatgcacacaccgtga

SEQ ID NO: 1519522 - DNA, 25 bp, Homo sapien
tgcgaccggcgggtgttaagcctct

SEQ ID NO: 1519523 - DNA, 25 bp, Homo sapien
ctccttcattctgagagtaaacatt

SEQ ID NO: 1519524 - DNA, 25 bp, Homo sapien
cctctgtggagaacgccggctgaat

SEQ ID NO: 1519525 - DNA, 25 bp, Homo sapien
ctcacaggacttgggcctggacccc

SEQ ID NO: 1519526 - DNA, 25 bp, Homo sapien
ttgattccggggacctcacaggact

SEQ ID NO: 1519527 - DNA, 25 bp, Homo sapien
tgattccggggacctcacaggactt

SEQ ID NO: 1519528 - DNA, 25 bp, Homo sapien
cacaggacttgggcctggaccccgt

SEQ ID NO: 1519529 - DNA, 25 bp, Homo sapien
caggaggtgagctcatggggcgggg

SEQ ID NO: 1519530 - DNA, 25 bp, Homo sapien
aggcaggaggtgagctcatggggcg

SEQ ID NO: 1519531 - DNA, 25 bp, Homo sapien
ctgggaaaaggccagaggcaggcag

SEQ ID NO: 1519532 - DNA, 25 bp, Homo sapien
ggcaggcaggaggtgagctcatggg

SEQ ID NO: 1519533 - DNA, 25 bp, Homo sapien
caggttggccgcgaggttgccggtg

SEQ ID NO: 1519534 - DNA, 25 bp, Homo sapien
cagggacccccctgtgttgtgggtg

SEQ ID NO: 1519535 - DNA, 25 bp, Homo sapien
cggcgccaccgatgcccaggtgcgt

SEQ ID NO: 1519536 - DNA, 25 bp, Homo sapien
caccgatgcccaggtgcgtcaggtt

SEQ ID NO: 1519537 - DNA, 25 bp, Homo sapien
gaagagggctcctccgaatcggctg

SEQ ID NO: 1519538 - DNA, 25 bp, Homo sapien
gggctcctccgaatcggctgtgttt

SEQ ID NO: 1519539 - DNA, 25 bp, Homo sapien
gagggctcctccgaatcggctgtgt

SEQ ID NO: 1519540 - DNA, 25 bp, Homo sapien
gctcctccgaatcggctgtgttttc

SEQ ID NO: 1519541 - DNA, 25 bp, Homo sapien
gggaagtctggagcgggcagggaga

SEQ ID NO: 1519542 - DNA, 25 bp, Homo sapien
aggggaagtctggagcgggcaggga

SEQ ID NO: 1519543 - DNA, 25 bp, Homo sapien
tggaggggaagtctggagcgggcag

SEQ ID NO: 1519544 - DNA, 25 bp, Homo sapien
ctggaggggaagtctggagcgggca

SEQ ID NO: 1519545 - DNA, 25 bp, Homo sapien
cttcccctcggatgccctggcagct

SEQ ID NO: 1519546 - DNA, 25 bp, Homo sapien
ggcgagctcggtcacgcctgcactt

SEQ ID NO: 1519547 - DNA, 25 bp, Homo sapien
tgcttggctgcgcactgtgggagga

SEQ ID NO: 1519548 - DNA, 25 bp, Homo sapien
aggcagcaagcgccctttgcaggcc

SEQ ID NO: 1519549 - DNA, 25 bp, Homo sapien
tgagcaacccaatccttggattctg

SEQ ID NO: 1519550 - DNA, 25 bp, Homo sapien
aggcccttgcactgagcaacccaat

SEQ ID NO: 1519551 - DNA, 25 bp, Homo sapien
gccccgaaggcccttgcactgagca

SEQ ID NO: 1519552 - DNA, 25 bp, Homo sapien
gaaggcccttgcactgagcaaccca

SEQ ID NO: 1519553 - DNA, 25 bp, Homo sapien
gatgcctgctgacgccttgcctctg

SEQ ID NO: 1519554 - DNA, 25 bp, Homo sapien
tgggcgatgcctgctgacgccttgc

SEQ ID NO: 1519555 - DNA, 25 bp, Homo sapien
ggcgatgcctgctgacgccttgcct

SEQ ID NO: 1519556 - DNA, 25 bp, Homo sapien
gtgggcgatgcctgctgacgccttg

SEQ ID NO: 1519557 - DNA, 25 bp, Homo sapien
agggctggctcaggccttcgcagag

SEQ ID NO: 1519558 - DNA, 25 bp, Homo sapien
aagggctggctcaggccttcgcaga

SEQ ID NO: 1519559 - DNA, 25 bp, Homo sapien
caagggctggctcaggccttcgcag

SEQ ID NO: 1519560 - DNA, 25 bp, Homo sapien
ctgggagcccgcctgggtgaagaag

SEQ ID NO: 1519561 - DNA, 25 bp, Homo sapien
agagacagggcgtccatggctacag

SEQ ID NO: 1519562 - DNA, 25 bp, Homo sapien
gtgaagaaggcgtagggcagctgct

SEQ ID NO: 1519563 - DNA, 25 bp, Homo sapien
agagaggacggtaccgtgactgcaa

SEQ ID NO: 1519564 - DNA, 25 bp, Homo sapien
tccccatcgatggctggccagggtt

SEQ ID NO: 1519565 - DNA, 25 bp, Homo sapien
tcgatccccatcgatggctggccag

SEQ ID NO: 1519566 - DNA, 25 bp, Homo sapien
gatccccatcgatggctggccaggg

SEQ ID NO: 1519567 - DNA, 25 bp, Homo sapien
gtcgatccccatcgatggctggcca

SEQ ID NO: 1519568 - DNA, 25 bp, Homo sapien
tactcttcttgcctcctaggaagcc

SEQ ID NO: 1519569 - DNA, 25 bp, Homo sapien
ctggccctgagaacgccgtactctt

SEQ ID NO: 1519570 - DNA, 25 bp, Homo sapien
catctctacagggagtgacagtctc

SEQ ID NO: 1519571 - DNA, 25 bp, Homo sapien
tctgataagctcacgtcatccccgg

SEQ ID NO: 1519572 - DNA, 25 bp, Homo sapien
ccggtccagggcctataattgctgt

SEQ ID NO: 1519573 - DNA, 25 bp, Homo sapien
gacaacttgcctgacctgtctgagc

SEQ ID NO: 1519574 - DNA, 25 bp, Homo sapien
tgttacttagggatggctgacttgg

SEQ ID NO: 1519575 - DNA, 25 bp, Homo sapien
agaccactctcttgtcctagcacgg

SEQ ID NO: 1519576 - DNA, 25 bp, Homo sapien
caggaaaggtgggtacctgagcctc

SEQ ID NO: 1519577 - DNA, 25 bp, Homo sapien
accccactggtaggcagaggagcct

SEQ ID NO: 1519578 - DNA, 25 bp, Homo sapien
tgaataactgccctccttcttggag

SEQ ID NO: 1519579 - DNA, 25 bp, Homo sapien
gatcagagggttggccctgactcag

SEQ ID NO: 1519580 - DNA, 25 bp, Homo sapien
gagccggcgctagtgcggtactgct

SEQ ID NO: 1519581 - DNA, 25 bp, Homo sapien
ccggcgctagtgcggtactgctgca

SEQ ID NO: 1519582 - DNA, 25 bp, Homo sapien
gggagccggcgctagtgcggtactg

SEQ ID NO: 1519583 - DNA, 25 bp, Homo sapien
agccggcgctagtgcggtactgctg

SEQ ID NO: 1519584 - DNA, 25 bp, Homo sapien
catagtacgcgtccccaaacacgct

SEQ ID NO: 1519585 - DNA, 25 bp, Homo sapien
atagtacgcgtccccaaacacgctg

SEQ ID NO: 1519586 - DNA, 25 bp, Homo sapien
gctgctcatagtacgcgtccccaaa

SEQ ID NO: 1519587 - DNA, 25 bp, Homo sapien
tctgctgctcatagtacgcgtcccc

SEQ ID NO: 1519588 - DNA, 25 bp, Homo sapien
actgtggctggcgtatcccagttgc

SEQ ID NO: 1519589 - DNA, 25 bp, Homo sapien
gagtagttgagtgtggagcccgggc

SEQ ID NO: 1519590 - DNA, 25 bp, Homo sapien
agttgctgcgagtccggcaggctcc

SEQ ID NO: 1519591 - DNA, 25 bp, Homo sapien
agttgagtgtggagcccgggctgta

SEQ ID NO: 1519592 - DNA, 25 bp, Homo sapien
gcatccatgtgtcggaccaggcatg

SEQ ID NO: 1519593 - DNA, 25 bp, Homo sapien
tggctccatcgctcgcatccatgtg

SEQ ID NO: 1519594 - DNA, 25 bp, Homo sapien
aaggcactgcttagccctggctcca

SEQ ID NO: 1519595 - DNA, 25 bp, Homo sapien
tgtcccctgggtatgctggcaatgt

SEQ ID NO: 1519596 - DNA, 25 bp, Homo sapien
ctggtcagttctttagagaggctgg

SEQ ID NO: 1519597 - DNA, 25 bp, Homo sapien
agaggctggggggggactctcctgt

SEQ ID NO: 1519598 - DNA, 25 bp, Homo sapien
aggctggggggggactctcctgtca

SEQ ID NO: 1519599 - DNA, 25 bp, Homo sapien
agagaggctggggggggactctcct

SEQ ID NO: 1519600 - DNA, 25 bp, Homo sapien
ctgacgtcgccgaccccggccagag

SEQ ID NO: 1519601 - DNA, 25 bp, Homo sapien
tgacgtcgccgaccccggccagaga

SEQ ID NO: 1519602 - DNA, 25 bp, Homo sapien
gacgtcgccgaccccggccagagag

SEQ ID NO: 1519603 - DNA, 25 bp, Homo sapien
gcatgtgcagtccgtcgagggtcag

SEQ ID NO: 1519604 - DNA, 25 bp, Homo sapien
cggccagaaccatgtcggggtcgtt

SEQ ID NO: 1519605 - DNA, 25 bp, Homo sapien
atgtgcagtccgtcgagggtcaggg

SEQ ID NO: 1519606 - DNA, 25 bp, Homo sapien
gtcggccagaaccatgtcggggtcg

SEQ ID NO: 1519607 - DNA, 25 bp, Homo sapien
cggtccatccggaaggtgtcctcgg

SEQ ID NO: 1519608 - DNA, 25 bp, Homo sapien
ggcggtccatccggaaggtgtcctc

SEQ ID NO: 1519609 - DNA, 25 bp, Homo sapien
tccatccggaaggtgtcctcggtgg

SEQ ID NO: 1519610 - DNA, 25 bp, Homo sapien
gtccatccggaaggtgtcctcggtg

SEQ ID NO: 1519611 - DNA, 25 bp, Homo sapien
tggcgagggacggagcacggccgtc

SEQ ID NO: 1519612 - DNA, 25 bp, Homo sapien
gcgccgtcgggacggctgagcggca

SEQ ID NO: 1519613 - DNA, 25 bp, Homo sapien
acaagctcggccgttggcgagggac

SEQ ID NO: 1519614 - DNA, 25 bp, Homo sapien
tcggccgttggcgagggacggagca

SEQ ID NO: 1519615 - DNA, 25 bp, Homo sapien
tcgcggcctcgcgattgggcttcgc

SEQ ID NO: 1519616 - DNA, 25 bp, Homo sapien
caaacagtcggaaaatgcgccacgg

SEQ ID NO: 1519617 - DNA, 25 bp, Homo sapien
gagctgacacttcccgcatcttaca

SEQ ID NO: 1519618 - DNA, 25 bp, Homo sapien
ttatttcactttgcgtctgccccgc

SEQ ID NO: 1519619 - DNA, 25 bp, Homo sapien
gggtccgccgccctgcatgctctgt

SEQ ID NO: 1519620 - DNA, 25 bp, Homo sapien
tctgtccactttgcgcctgccccgg

SEQ ID NO: 1519621 - DNA, 25 bp, Homo sapien
gggcttcgaggggatggagacaggg

SEQ ID NO: 1519622 - DNA, 25 bp, Homo sapien
cccggtggacgccagggctctgtgt

SEQ ID NO: 1519623 - DNA, 25 bp, Homo sapien
ggtcacttcccggcaaaggtggcca

SEQ ID NO: 1519624 - DNA, 25 bp, Homo sapien
gtcacttcccggcaaaggtggccac

SEQ ID NO: 1519625 - DNA, 25 bp, Homo sapien
caaaggtggccaccgatgggcctgc

SEQ ID NO: 1519626 - DNA, 25 bp, Homo sapien
cggcaaaggtggccaccgatgggcc

SEQ ID NO: 1519627 - DNA, 25 bp, Homo sapien
gagagcagcctctaacccagtgtag

SEQ ID NO: 1519628 - DNA, 25 bp, Homo sapien
gcatctatgacaggaccggtgacca

SEQ ID NO: 1519629 - DNA, 25 bp, Homo sapien
gaaagggaccttgacctggacagac

SEQ ID NO: 1519630 - DNA, 25 bp, Homo sapien
ttcttttgaaaaccgcatccaggcg

SEQ ID NO: 1519631 - DNA, 25 bp, Homo sapien
tcctgctaccgttaccttgcgtaaa

SEQ ID NO: 1519632 - DNA, 25 bp, Homo sapien
ttcctgctaccgttaccttgcgtaa

SEQ ID NO: 1519633 - DNA, 25 bp, Homo sapien
ctgcagccgccggtgggtaaacaca

SEQ ID NO: 1519634 - DNA, 25 bp, Homo sapien
gtctgcagccgccggtgggtaaaca

SEQ ID NO: 1519635 - DNA, 25 bp, Homo sapien
gcagccgccggtgggtaaacacacc

SEQ ID NO: 1519636 - DNA, 25 bp, Homo sapien
cctgtctgcagccgccggtgggtaa

SEQ ID NO: 1519637 - DNA, 25 bp, Homo sapien
taagggcctggcgtgcagaaagatg

SEQ ID NO: 1519638 - DNA, 25 bp, Homo sapien
agaaagatgtgggaatggacacgcc

SEQ ID NO: 1519639 - DNA, 25 bp, Homo sapien
gagcctctaagccagccggggtgag

SEQ ID NO: 1519640 - DNA, 25 bp, Homo sapien
cagcatggtcacagctctgatggag

SEQ ID NO: 1519641 - DNA, 25 bp, Homo sapien
tgtttcctggtacttggacagcctc

SEQ ID NO: 1519642 - DNA, 25 bp, Homo sapien
acttggccctggtgccgggactcac

SEQ ID NO: 1519643 - DNA, 25 bp, Homo sapien
gcagtgtttcctggtacttggacag

SEQ ID NO: 1519644 - DNA, 25 bp, Homo sapien
tcacttggccctggtgccgggactc

SEQ ID NO: 1519645 - DNA, 25 bp, Homo sapien
gactcgaaatcaaagccgttctgcc

SEQ ID NO: 1519646 - DNA, 25 bp, Homo sapien
tgacctgttggatgacgggccactg

SEQ ID NO: 1519647 - DNA, 25 bp, Homo sapien
cacggtccaagggttgcgtccaact

SEQ ID NO: 1519648 - DNA, 25 bp, Homo sapien
tccgcctggtgttgggattgacgtc

SEQ ID NO: 1519649 - DNA, 25 bp, Homo sapien
cgagaggtaacagtgccgagccgcc

SEQ ID NO: 1519650 - DNA, 25 bp, Homo sapien
ccagccggaccgagaggtaacagtg

SEQ ID NO: 1519651 - DNA, 25 bp, Homo sapien
aggcctaggccgcaggcctcgggtc

SEQ ID NO: 1519652 - DNA, 25 bp, Homo sapien
ctcgggccggttccgcgctgcactc

SEQ ID NO: 1519653 - DNA, 25 bp, Homo sapien
gtgtcggcgccaagcagctcggcct

SEQ ID NO: 1519654 - DNA, 25 bp, Homo sapien
agtctgcgagctgggcccgtacgcc

SEQ ID NO: 1519655 - DNA, 25 bp, Homo sapien
ctcctccgtgtccaggaaagtgaga

SEQ ID NO: 1519656 - DNA, 25 bp, Homo sapien
gagccctgtgtgtcggcgccaagca

SEQ ID NO: 1519657 - DNA, 25 bp, Homo sapien
tctggctaggaagagtaaagtcggt

SEQ ID NO: 1519658 - DNA, 25 bp, Homo sapien
tgcgcgtcgagctgtcccgccgcag

SEQ ID NO: 1519659 - DNA, 25 bp, Homo sapien
tgcgtctggctaggaagagtaaagt

SEQ ID NO: 1519660 - DNA, 25 bp, Homo sapien
gggcgtctgcgtctggctaggaaga

SEQ ID NO: 1519661 - DNA, 25 bp, Homo sapien
gctagttgtcccttacgatccagaa

SEQ ID NO: 1519662 - DNA, 25 bp, Homo sapien
tgggaccagtaccaagcagcatcta

SEQ ID NO: 1519663 - DNA, 25 bp, Homo sapien
caaaaacatgcgtgttgctgcctaa

SEQ ID NO: 1519664 - DNA, 25 bp, Homo sapien
taaaaggtctgtacctacccacaga

SEQ ID NO: 1519665 - DNA, 25 bp, Homo sapien
tatgttagagaattcatcgtagacg

SEQ ID NO: 1519666 - DNA, 25 bp, Homo sapien
gttagagaattcatcgtagacgttt

SEQ ID NO: 1519667 - DNA, 25 bp, Homo sapien
tcttgtatgttagagaattcatcgt

SEQ ID NO: 1519668 - DNA, 25 bp, Homo sapien
cagctcttgtatgttagagaattca

SEQ ID NO: 1519669 - DNA, 25 bp, Homo sapien
tgtgctagagtccgcgtgaggttca

SEQ ID NO: 1519670 - DNA, 25 bp, Homo sapien
gcacctgtgtggaccggcagaccct

SEQ ID NO: 1519671 - DNA, 25 bp, Homo sapien
cggcagacccttgttccagccaggt

SEQ ID NO: 1519672 - DNA, 25 bp, Homo sapien
ttccagccaggtgtgctagagtccg

SEQ ID NO: 1519673 - DNA, 25 bp, Homo sapien
cactgaaggcgcctcttctatgttc

SEQ ID NO: 1519674 - DNA, 25 bp, Homo sapien
cgcctcttctatgttcagcaaaggc

SEQ ID NO: 1519675 - DNA, 25 bp, Homo sapien
aaggcgcctcttctatgttcagcaa

SEQ ID NO: 1519676 - DNA, 25 bp, Homo sapien
ggcgcctcttctatgttcagcaaag

SEQ ID NO: 1519677 - DNA, 25 bp, Homo sapien
tgcccacaaccaggatgcttaggaa

SEQ ID NO: 1519678 - DNA, 25 bp, Homo sapien
gcttaggaagatgcttctttcccat

SEQ ID NO: 1519679 - DNA, 25 bp, Homo sapien
ccccgcctagccacagagccatgtc

SEQ ID NO: 1519680 - DNA, 25 bp, Homo sapien
gggccactggtggccttctacaccc

SEQ ID NO: 1519681 - DNA, 25 bp, Homo sapien
agaaccagcctcgatgactctggtg

SEQ ID NO: 1519682 - DNA, 25 bp, Homo sapien
agaagaaccagcctcgatgactctg

SEQ ID NO: 1519683 - DNA, 25 bp, Homo sapien
aaccagcctcgatgactctggtgtg

SEQ ID NO: 1519684 - DNA, 25 bp, Homo sapien
ccagcctcgatgactctggtgtgac

SEQ ID NO: 1519685 - DNA, 25 bp, Homo sapien
gaggtccttcgtgtaataggtgtct

SEQ ID NO: 1519686 - DNA, 25 bp, Homo sapien
gctggtcttggctacactgtcgtcc

SEQ ID NO: 1519687 - DNA, 25 bp, Homo sapien
gaagttcaactcagccaacaactgg

SEQ ID NO: 1519688 - DNA, 25 bp, Homo sapien
gttctgcaggatgccttcgggccca

SEQ ID NO: 1519689 - DNA, 25 bp, Homo sapien
tattacagtaaaccacgcaggcagg

SEQ ID NO: 1519690 - DNA, 25 bp, Homo sapien
gccagaagtatttccacgtccgttg

SEQ ID NO: 1519691 - DNA, 25 bp, Homo sapien
ttccacgtccgttgcagaaccactt

SEQ ID NO: 1519692 - DNA, 25 bp, Homo sapien
ggcaggatcgtgtattccacagtaa

SEQ ID NO: 1519693 - DNA, 25 bp, Homo sapien
cagttgtagcactccaggactgtct

SEQ ID NO: 1519694 - DNA, 25 bp, Homo sapien
gacgttgcgacagccgcagttgtag

SEQ ID NO: 1519695 - DNA, 25 bp, Homo sapien
ccactgagtcagctttggccgggat

SEQ ID NO: 1519696 - DNA, 25 bp, Homo sapien
cctcacaaggtgatttacaatgtgg

SEQ ID NO: 1519697 - DNA, 25 bp, Homo sapien
tgctcctgctcggaggggatcttga

SEQ ID NO: 1519698 - DNA, 25 bp, Homo sapien
caggaagcagcggtcctggatcagc

SEQ ID NO: 1519699 - DNA, 25 bp, Homo sapien
tctgctgtgccgtgatctggcgtgc

SEQ ID NO: 1519700 - DNA, 25 bp, Homo sapien
agcggtcctggatcagcggctgcca

SEQ ID NO: 1519701 - DNA, 25 bp, Homo sapien
gggatggagcacacatgccgcttct

SEQ ID NO: 1519702 - DNA, 25 bp, Homo sapien
acactcgtcctgtttttccctacat

SEQ ID NO: 1519703 - DNA, 25 bp, Homo sapien
tacatgcaaatgaacgagggcgcag

SEQ ID NO: 1519704 - DNA, 25 bp, Homo sapien
cgcttctcagaatgggccacggtgg

SEQ ID NO: 1519705 - DNA, 25 bp, Homo sapien
tctggtactggtaggcgtcctcgta

SEQ ID NO: 1519706 - DNA, 25 bp, Homo sapien
tcctcgtaccgcaggaggacatgct

SEQ ID NO: 1519707 - DNA, 25 bp, Homo sapien
ttcttgtcgtagtcggcctccagct

SEQ ID NO: 1519708 - DNA, 25 bp, Homo sapien
cctccagcgtggcagaagggttttc

SEQ ID NO: 1519709 - DNA, 25 bp, Homo sapien
catgaggcgggccctacagcaagcc

SEQ ID NO: 1519710 - DNA, 25 bp, Homo sapien
tggcctccacatgcccgaggcccca

SEQ ID NO: 1519711 - DNA, 25 bp, Homo sapien
aacaagagccccggttagcctccag

SEQ ID NO: 1519712 - DNA, 25 bp, Homo sapien
gagccccggttagcctccagcacag

SEQ ID NO: 1519713 - DNA, 25 bp, Homo sapien
tcttgggcaaagtgaagtaggcgat

SEQ ID NO: 1519714 - DNA, 25 bp, Homo sapien
gaagtaggcgattctcttcttgtta

SEQ ID NO: 1519715 - DNA, 25 bp, Homo sapien
caaagtgaagtaggcgattctcttc

SEQ ID NO: 1519716 - DNA, 25 bp, Homo sapien
cacctgacagtgatgttatcttgag

SEQ ID NO: 1519717 - DNA, 25 bp, Homo sapien
ctcttaaccaaattatgactaaatc

SEQ ID NO: 1519718 - DNA, 25 bp, Homo sapien
accaaattatgactaaatcctcatt

SEQ ID NO: 1519719 - DNA, 25 bp, Homo sapien
caaattatgactaaatcctcattac

SEQ ID NO: 1519720 - DNA, 25 bp, Homo sapien
cttaaccaaattatgactaaatcct

SEQ ID NO: 1519721 - DNA, 25 bp, Homo sapien
ttgtaccgcaggcatatctcatccc

SEQ ID NO: 1519722 - DNA, 25 bp, Homo sapien
gcgcaaggtcccctttgtaccgcag

SEQ ID NO: 1519723 - DNA, 25 bp, Homo sapien
tgacgtggccgatccctttccacag

SEQ ID NO: 1519724 - DNA, 25 bp, Homo sapien
agggaccttgatgacgtggccgatc

SEQ ID NO: 1519725 - DNA, 25 bp, Homo sapien
ttctgggccacccttggtacacgct

SEQ ID NO: 1519726 - DNA, 25 bp, Homo sapien
gtttgcatccttgtcaaaagccggg

SEQ ID NO: 1519727 - DNA, 25 bp, Homo sapien
ctttctgggccacccttggtacacg

SEQ ID NO: 1519728 - DNA, 25 bp, Homo sapien
tcaaaagccgggctgacctttctgg

SEQ ID NO: 1519729 - DNA, 25 bp, Homo sapien
ccgcagctcaatggcgatctcatcg

SEQ ID NO: 1519730 - DNA, 25 bp, Homo sapien
tcaatggcgatctcatcgccataat

SEQ ID NO: 1519731 - DNA, 25 bp, Homo sapien
ctccacaggtgcacccacgctgctc

SEQ ID NO: 1519732 - DNA, 25 bp, Homo sapien
acgctgctccgcagctcaatggcga

SEQ ID NO: 1519733 - DNA, 25 bp, Homo sapien
cctcgtggcccaacagcttgtggta

SEQ ID NO: 1519734 - DNA, 25 bp, Homo sapien
aagcgcttgggcagctggcacttga

SEQ ID NO: 1519735 - DNA, 25 bp, Homo sapien
gatgtagccagacaccgaggtctca

SEQ ID NO: 1519736 - DNA, 25 bp, Homo sapien
cgaggtctcatccacggcaaacgtt

SEQ ID NO: 1519737 - DNA, 25 bp, Homo sapien
ggccctggatcaggctcagtggtct

SEQ ID NO: 1519738 - DNA, 25 bp, Homo sapien
cctggcgggccctggatcaggctca

SEQ ID NO: 1519739 - DNA, 25 bp, Homo sapien
gccgggccaggtggtagacgatggt

SEQ ID NO: 1519740 - DNA, 25 bp, Homo sapien
gatggtggccgacgtcaccgtcttc

SEQ ID NO: 1519741 - DNA, 25 bp, Homo sapien
cacgtgctctcttcggtgtgacaga

SEQ ID NO: 1519742 - DNA, 25 bp, Homo sapien
taatgtcacatagagagcggtaggc

SEQ ID NO: 1519743 - DNA, 25 bp, Homo sapien
taatgacacgatgccgaaggagctc

SEQ ID NO: 1519744 - DNA, 25 bp, Homo sapien
cctaaggttggagctgacacgaata

SEQ ID NO: 1519745 - DNA, 25 bp, Homo sapien
tccacggcgatgttgctcggagcac

SEQ ID NO: 1519746 - DNA, 25 bp, Homo sapien
tagccccgtctggtggatcttctcc

SEQ ID NO: 1519747 - DNA, 25 bp, Homo sapien
gttgtgcagggccagaaaagacacc

SEQ ID NO: 1519748 - DNA, 25 bp, Homo sapien
gatcttctccgttagctggtccacg

SEQ ID NO: 1519749 - DNA, 25 bp, Homo sapien
ggtgcgcttcaaggcccggtaccgc

SEQ ID NO: 1519750 - DNA, 25 bp, Homo sapien
ggtaccgcttctcgtcggcagacga

SEQ ID NO: 1519751 - DNA, 25 bp, Homo sapien
acagctccccagtctcgtctttcag

SEQ ID NO: 1519752 - DNA, 25 bp, Homo sapien
tctctctctgcggtgcgcttcaagg

SEQ ID NO: 1519753 - DNA, 25 bp, Homo sapien
cagacaagatacatggtccaggctg

SEQ ID NO: 1519754 - DNA, 25 bp, Homo sapien
cagggcacctgcactgtaaacgcca

SEQ ID NO: 1519755 - DNA, 25 bp, Homo sapien
tgctggaacctgcactcaggctgat

SEQ ID NO: 1519756 - DNA, 25 bp, Homo sapien
catgtttcacagaaggcaacctctc

SEQ ID NO: 1519757 - DNA, 25 bp, Homo sapien
cctgggtgctttcgtcgattaaaat

SEQ ID NO: 1519758 - DNA, 25 bp, Homo sapien
tgcttggccccgaggaccacgggaa

SEQ ID NO: 1519759 - DNA, 25 bp, Homo sapien
acgggaaccatgcactccggctcgg

SEQ ID NO: 1519760 - DNA, 25 bp, Homo sapien
gattaaaatggagcggaactgcatc

SEQ ID NO: 1519761 - DNA, 25 bp, Homo sapien
ggagccctcgtagaagatgttggat

SEQ ID NO: 1519762 - DNA, 25 bp, Homo sapien
ggcagtggtcgcctacaaggatcag

SEQ ID NO: 1519763 - DNA, 25 bp, Homo sapien
tgcagggtgcatccggtactggacc

SEQ ID NO: 1519764 - DNA, 25 bp, Homo sapien
caggcgctcgaagagcgactgtgac

SEQ ID NO: 1519765 - DNA, 25 bp, Homo sapien
gatcccacgtcgagctgaaaatgag

SEQ ID NO: 1519766 - DNA, 25 bp, Homo sapien
tagttgctacgctacagtgctgcag

SEQ ID NO: 1519767 - DNA, 25 bp, Homo sapien
ttccagaagcttgccttaaaggcgc

SEQ ID NO: 1519768 - DNA, 25 bp, Homo sapien
tccatcagtggagaaaaccggtgtt

SEQ ID NO: 1519769 - DNA, 25 bp, Homo sapien
agaagaacatcggtttatcgggttg

SEQ ID NO: 1519770 - DNA, 25 bp, Homo sapien
taggaggtgcccgagctggcaatct

SEQ ID NO: 1519771 - DNA, 25 bp, Homo sapien
tgcccgagctggcaatctcctcttg

SEQ ID NO: 1519772 - DNA, 25 bp, Homo sapien
ttggggccactggaagtcaaatccc

SEQ ID NO: 1519773 - DNA, 25 bp, Homo sapien
gctgccatgtgggattagcaagtat

SEQ ID NO: 1519774 - DNA, 25 bp, Homo sapien
ctgtgggatcccgagccctgaggct

SEQ ID NO: 1519775 - DNA, 25 bp, Homo sapien
agacacaacaccctgcgggaaggca

SEQ ID NO: 1519776 - DNA, 25 bp, Homo sapien
tcactggcgtttgcacagctgagct

SEQ ID NO: 1519777 - DNA, 25 bp, Homo sapien
cagcaacttcgtggtgatcttctcc

SEQ ID NO: 1519778 - DNA, 25 bp, Homo sapien
tctggtccggcttggcgcctgcctt

SEQ ID NO: 1519779 - DNA, 25 bp, Homo sapien
aactgcatgtactgcaccaggtagg

SEQ ID NO: 1519780 - DNA, 25 bp, Homo sapien
cgtgatgatgccaatctggtccggc

SEQ ID NO: 1519781 - DNA, 25 bp, Homo sapien
gtcagggccacgttcagacgcctgg

SEQ ID NO: 1519782 - DNA, 25 bp, Homo sapien
ccgcacacaggacaggatgatgaag

SEQ ID NO: 1519783 - DNA, 25 bp, Homo sapien
gatgatgaagtccttctcgcgtccc

SEQ ID NO: 1519784 - DNA, 25 bp, Homo sapien
aatgccttggtgctcgttggcccgc

SEQ ID NO: 1519785 - DNA, 25 bp, Homo sapien
ccaaatccaaggcaacagaggcgtg

SEQ ID NO: 1519786 - DNA, 25 bp, Homo sapien
gattttgtggccgactctaagcagc

SEQ ID NO: 1519787 - DNA, 25 bp, Homo sapien
tgctgtcaagagagtcggccttcca

SEQ ID NO: 1519788 - DNA, 25 bp, Homo sapien
agaaccaccgcgcatatgagccgga

SEQ ID NO: 1519789 - DNA, 25 bp, Homo sapien
gatagtgttgaccagcttccgtggc

SEQ ID NO: 1519790 - DNA, 25 bp, Homo sapien
ttatagtagttcagcaggtggttcc

SEQ ID NO: 1519791 - DNA, 25 bp, Homo sapien
tctcacgcaggttgttgagcggccc

SEQ ID NO: 1519792 - DNA, 25 bp, Homo sapien
tgatagtgccttcgggttgcccaca

SEQ ID NO: 1519793 - DNA, 25 bp, Homo sapien
ccgggcatcatacatggctgtggtc

SEQ ID NO: 1519794 - DNA, 25 bp, Homo sapien
cctggctgctccgatcatagacgga

SEQ ID NO: 1519795 - DNA, 25 bp, Homo sapien
cgatcatagacggagcctgggatga

SEQ ID NO: 1519796 - DNA, 25 bp, Homo sapien
tgggatgatggcctcccgggcatca

SEQ ID NO: 1519797 - DNA, 25 bp, Homo sapien
tgcagcaggcccgttggcttgtcca

SEQ ID NO: 1519798 - DNA, 25 bp, Homo sapien
tgccaatctggtcatgggtctggaa

SEQ ID NO: 1519799 - DNA, 25 bp, Homo sapien
catgggtggcatgaccaggttgaag

SEQ ID NO: 1519800 - DNA, 25 bp, Homo sapien
tagggccggcactgatcatgccaat

SEQ ID NO: 1519801 - DNA, 25 bp, Homo sapien
ccagggcctcgcagacaagcacacc

SEQ ID NO: 1519802 - DNA, 25 bp, Homo sapien
gtccagggtgatccgaaggaggcca

SEQ ID NO: 1519803 - DNA, 25 bp, Homo sapien
agggcctcgcagacaagcacaccct

SEQ ID NO: 1519804 - DNA, 25 bp, Homo sapien
cagggcctcgcagacaagcacaccc

SEQ ID NO: 1519805 - DNA, 25 bp, Homo sapien
tggctcatctgggaaggctggctca

SEQ ID NO: 1519806 - DNA, 25 bp, Homo sapien
cgtcagggcgccctgagagaagggc

SEQ ID NO: 1519807 - DNA, 25 bp, Homo sapien
ggctgtgacgccacatcctggctgg

SEQ ID NO: 1519808 - DNA, 25 bp, Homo sapien
gcccaaagcggttcttctggcgtcc

SEQ ID NO: 1519809 - DNA, 25 bp, Homo sapien
tccctggtacgtggagtcctgtgag

SEQ ID NO: 1519810 - DNA, 25 bp, Homo sapien
cgctctccctggtacgtggagtcct

SEQ ID NO: 1519811 - DNA, 25 bp, Homo sapien
tgatttaaactcgtcaccaaggtaa

SEQ ID NO: 1519812 - DNA, 25 bp, Homo sapien
tgtgagagcgccacgtcgatttgtg

SEQ ID NO: 1519813 - DNA, 25 bp, Homo sapien
gtgagaggctgcgacctgagcccca

SEQ ID NO: 1519814 - DNA, 25 bp, Homo sapien
gccaccctgactagcagtgaagggc

SEQ ID NO: 1519815 - DNA, 25 bp, Homo sapien
aggacagtgagggagagcccgagct

SEQ ID NO: 1519816 - DNA, 25 bp, Homo sapien
cctccccgactctgatgaggaaact

SEQ ID NO: 1519817 - DNA, 25 bp, Homo sapien
gactaagccacgttgcttagctctt

SEQ ID NO: 1519818 - DNA, 25 bp, Homo sapien
ttttattacccagaataagatgctg

SEQ ID NO: 1519819 - DNA, 25 bp, Homo sapien
gatgctgatggactaagccacgttg

SEQ ID NO: 1519820 - DNA, 25 bp, Homo sapien
tacccagaataagatgctgatggac

SEQ ID NO: 1519821 - DNA, 25 bp, Homo sapien
caatttgggctttcggtgtgcagcg

SEQ ID NO: 1519822 - DNA, 25 bp, Homo sapien
gcctgctcgggcacagaaatgcgaa

SEQ ID NO: 1519823 - DNA, 25 bp, Homo sapien
gcttctgagtccagcggagaacgag

SEQ ID NO: 1519824 - DNA, 25 bp, Homo sapien
tcccatgtagaagccggaatctgga

SEQ ID NO: 1519825 - DNA, 25 bp, Homo sapien
taatatttggtgacaaaagaactta

SEQ ID NO: 1519826 - DNA, 25 bp, Homo sapien
actgtttattaatatttggtgacaa

SEQ ID NO: 1519827 - DNA, 25 bp, Homo sapien
aactgtttattaatatttggtgaca

SEQ ID NO: 1519828 - DNA, 25 bp, Homo sapien
ttattaatatttggtgacaaaagaa

SEQ ID NO: 1519829 - DNA, 25 bp, Homo sapien
cgcgctctttccggcagggccgagc

SEQ ID NO: 1519830 - DNA, 25 bp, Homo sapien
gcgcgctctttccggcagggccgag

SEQ ID NO: 1519831 - DNA, 25 bp, Homo sapien
cgcgcgctctttccggcagggccga

SEQ ID NO: 1519832 - DNA, 25 bp, Homo sapien
cgctctttccggcagggccgagcca

SEQ ID NO: 1519833 - DNA, 25 bp, Homo sapien
tgcgtgggggaaccgggtagatgcg

SEQ ID NO: 1519834 - DNA, 25 bp, Homo sapien
ctgcgtgggggaaccgggtagatgc

SEQ ID NO: 1519835 - DNA, 25 bp, Homo sapien
cgccggcgcgttcctttcttccagc

SEQ ID NO: 1519836 - DNA, 25 bp, Homo sapien
cccaggataaggtctctcgggccgc

SEQ ID NO: 1519837 - DNA, 25 bp, Homo sapien
cactgcgcgcctctttcgggtcagt

SEQ ID NO: 1519838 - DNA, 25 bp, Homo sapien
ccaggacgttggagccccaggataa

SEQ ID NO: 1519839 - DNA, 25 bp, Homo sapien
tccaagaacggtgaggtcggagcgg

SEQ ID NO: 1519840 - DNA, 25 bp, Homo sapien
ggtccttgagaaggagcgagggctc

SEQ ID NO: 1519841 - DNA, 25 bp, Homo sapien
tcctgaatgcgggagggccacggga

SEQ ID NO: 1519842 - DNA, 25 bp, Homo sapien
caagactgtgccaaggcgtgccagg

SEQ ID NO: 1519843 - DNA, 25 bp, Homo sapien
ttgtcccagtagcccgctgtgcaga

SEQ ID NO: 1519844 - DNA, 25 bp, Homo sapien
tttgtcccagtagcccgctgtgcag

SEQ ID NO: 1519845 - DNA, 25 bp, Homo sapien
tgtcccagtagcccgctgtgcagac

SEQ ID NO: 1519846 - DNA, 25 bp, Homo sapien
ggatggagggggggtgcagcagtgc

SEQ ID NO: 1519847 - DNA, 25 bp, Homo sapien
ctaggatggagggggggtgcagcag

SEQ ID NO: 1519848 - DNA, 25 bp, Homo sapien
aggatggagggggggtgcagcagtg

SEQ ID NO: 1519849 - DNA, 25 bp, Homo sapien
taggatggagggggggtgcagcagt

SEQ ID NO: 1519850 - DNA, 25 bp, Homo sapien
agttcaggtgcaggtgttcgggagc

SEQ ID NO: 1519851 - DNA, 25 bp, Homo sapien
gttcaggtgcaggtgttcgggagcc

SEQ ID NO: 1519852 - DNA, 25 bp, Homo sapien
ttcaggtgcaggtgttcgggagcca

SEQ ID NO: 1519853 - DNA, 25 bp, Homo sapien
gaacaggccaacagcgtcgcagcca

SEQ ID NO: 1519854 - DNA, 25 bp, Homo sapien
ctgcaagcagacgaggaacaggcca

SEQ ID NO: 1519855 - DNA, 25 bp, Homo sapien
ggtgacaagtgccaagcagacatga

SEQ ID NO: 1519856 - DNA, 25 bp, Homo sapien
cacaggcggagggaaacagggcgct

SEQ ID NO: 1519857 - DNA, 25 bp, Homo sapien
cactgagcagccctggttggcatcg

SEQ ID NO: 1519858 - DNA, 25 bp, Homo sapien
gcagccctggttggcatcgggggaa

SEQ ID NO: 1519859 - DNA, 25 bp, Homo sapien
gagcagccctggttggcatcggggg

SEQ ID NO: 1519860 - DNA, 25 bp, Homo sapien
ttcaccctggcccctagaggccact

SEQ ID NO: 1519861 - DNA, 25 bp, Homo sapien
gctgggggcgtgtgggagctgacgc

SEQ ID NO: 1519862 - DNA, 25 bp, Homo sapien
agctgacgctcagggagagtcctgg

SEQ ID NO: 1519863 - DNA, 25 bp, Homo sapien
gcactggcatccagggctgttcctg

SEQ ID NO: 1519864 - DNA, 25 bp, Homo sapien
agagtcctggggcactggcatccag

SEQ ID NO: 1519865 - DNA, 25 bp, Homo sapien
gatgatagacatgcgccagtgcgcc

SEQ ID NO: 1519866 - DNA, 25 bp, Homo sapien
agtcagggctagtcaggaactccca

SEQ ID NO: 1519867 - DNA, 25 bp, Homo sapien
cacctgagaacacttggatgcatgt

SEQ ID NO: 1519868 - DNA, 25 bp, Homo sapien
caatctcagacaggctgtgtgtccc

SEQ ID NO: 1519869 - DNA, 25 bp, Homo sapien
aaggcctgttggttatgaacctggg

SEQ ID NO: 1519870 - DNA, 25 bp, Homo sapien
agcgcacagcatccctcagattagg

SEQ ID NO: 1519871 - DNA, 25 bp, Homo sapien
gaggccccagagaatgggttggcct

SEQ ID NO: 1519872 - DNA, 25 bp, Homo sapien
agcatccctcagattaggcgcctct

SEQ ID NO: 1519873 - DNA, 25 bp, Homo sapien
tcagagaaggacgtttccctgccca

SEQ ID NO: 1519874 - DNA, 25 bp, Homo sapien
tacggatgagaaccctaaagttcag

SEQ ID NO: 1519875 - DNA, 25 bp, Homo sapien
ccttcagttcccgtgagatggagac

SEQ ID NO: 1519876 - DNA, 25 bp, Homo sapien
tacggtactgctcactcgtacagcg

SEQ ID NO: 1519877 - DNA, 25 bp, Homo sapien
ggcccgtgtgatccgcgcttccggc

SEQ ID NO: 1519878 - DNA, 25 bp, Homo sapien
cccttgtaggggcccgtgtgatccg

SEQ ID NO: 1519879 - DNA, 25 bp, Homo sapien
cttgtggccgcttgtaggggcccct

SEQ ID NO: 1519880 - DNA, 25 bp, Homo sapien
tggccgcttgtaggggccccttgta

SEQ ID NO: 1519881 - DNA, 25 bp, Homo sapien
ctgcacgggcgtgggctgcttcaaa

SEQ ID NO: 1519882 - DNA, 25 bp, Homo sapien
gatgcagccgagctgcacgggcgtg

SEQ ID NO: 1519883 - DNA, 25 bp, Homo sapien
atgacagcccgagctccgcgaagcc

SEQ ID NO: 1519884 - DNA, 25 bp, Homo sapien
attgttccacgagccacgatgacag

SEQ ID NO: 1519885 - DNA, 25 bp, Homo sapien
tgcctgtcttagcacagcccaagca

SEQ ID NO: 1519886 - DNA, 25 bp, Homo sapien
aggacaaacgctgctgtcttcccac

SEQ ID NO: 1519887 - DNA, 25 bp, Homo sapien
actgcctgtcttagcacagcccaag

SEQ ID NO: 1519888 - DNA, 25 bp, Homo sapien
atgggaaggacaaacgctgctgtct

SEQ ID NO: 1519889 - DNA, 25 bp, Homo sapien
aagatgccatagggatcctcagaca

SEQ ID NO: 1519890 - DNA, 25 bp, Homo sapien
gatgccatagggatcctcagacagc

SEQ ID NO: 1519891 - DNA, 25 bp, Homo sapien
agatgccatagggatcctcagacag

SEQ ID NO: 1519892 - DNA, 25 bp, Homo sapien
ccactgcaccggggccatcttgttt

SEQ ID NO: 1519893 - DNA, 25 bp, Homo sapien
actgcaccggggccatcttgtttaa

SEQ ID NO: 1519894 - DNA, 25 bp, Homo sapien
tgcaccggggccatcttgtttaatt

SEQ ID NO: 1519895 - DNA, 25 bp, Homo sapien
gcaccggggccatcttgtttaattc

SEQ ID NO: 1519896 - DNA, 25 bp, Homo sapien
ctgggattacggcatgcgctaccat

SEQ ID NO: 1519897 - DNA, 25 bp, Homo sapien
ctcctggcctcaagtgatccgctca

SEQ ID NO: 1519898 - DNA, 25 bp, Homo sapien
ggattacggcatgcgctaccatgcc

SEQ ID NO: 1519899 - DNA, 25 bp, Homo sapien
tcctggcctcaagtgatccgctcac

SEQ ID NO: 1519900 - DNA, 25 bp, Homo sapien
aactgctctgcgatctggtaggcca

SEQ ID NO: 1519901 - DNA, 25 bp, Homo sapien
ggacccggaactgctctgcgatctg

SEQ ID NO: 1519902 - DNA, 25 bp, Homo sapien
ttcagccctagaggcttccccagga

SEQ ID NO: 1519903 - DNA, 25 bp, Homo sapien
tgatgcagtctttcagccctagagg

SEQ ID NO: 1519904 - DNA, 25 bp, Homo sapien
ctgggcaggtggtccaaagctgcta

SEQ ID NO: 1519905 - DNA, 25 bp, Homo sapien
caaagctgctagggtcccatgctgg

SEQ ID NO: 1519906 - DNA, 25 bp, Homo sapien
tgggcaggtggtccaaagctgctag

SEQ ID NO: 1519907 - DNA, 25 bp, Homo sapien
agctgctagggtcccatgctggggc

SEQ ID NO: 1519908 - DNA, 25 bp, Homo sapien
tttccgagagagctccagcgcctgg

SEQ ID NO: 1519909 - DNA, 25 bp, Homo sapien
ccccggcgtggcgatgaccacgtgt

SEQ ID NO: 1519910 - DNA, 25 bp, Homo sapien
tatactaaaagtgttggagctgcgc

SEQ ID NO: 1519911 - DNA, 25 bp, Homo sapien
ttggagctgcgcaggtgatctgcca

SEQ ID NO: 1519912 - DNA, 25 bp, Homo sapien
acatggaccctaggccctggagtac

SEQ ID NO: 1519913 - DNA, 25 bp, Homo sapien
tcctaaatggatgagatggtgcccc

SEQ ID NO: 1519914 - DNA, 25 bp, Homo sapien
tactggacagtctaacggacatacg

SEQ ID NO: 1519915 - DNA, 25 bp, Homo sapien
aataacattgctaggactgggcccc

SEQ ID NO: 1519916 - DNA, 25 bp, Homo sapien
cacggtgaagtcagtgcagccctgt

SEQ ID NO: 1519917 - DNA, 25 bp, Homo sapien
tcggtcagcgtggcgctgaacagca

SEQ ID NO: 1519918 - DNA, 25 bp, Homo sapien
tgttccagcagccggtctgcctcat

SEQ ID NO: 1519919 - DNA, 25 bp, Homo sapien
cagctcccggagtgtgtcggtcagc

SEQ ID NO: 1519920 - DNA, 25 bp, Homo sapien
tcaggtggaccaggtaggcgtcctt

SEQ ID NO: 1519921 - DNA, 25 bp, Homo sapien
gaagatgataatggaccagtcctcg

SEQ ID NO: 1519922 - DNA, 25 bp, Homo sapien
tcctggaagcgctggatcaggtgga

SEQ ID NO: 1519923 - DNA, 25 bp, Homo sapien
cagcaggtagcgctggtccagctgc

SEQ ID NO: 1519924 - DNA, 25 bp, Homo sapien
agccacggtggggaagctgaatttg

SEQ ID NO: 1519925 - DNA, 25 bp, Homo sapien
tggggaagctgaatttgcgcagcat

SEQ ID NO: 1519926 - DNA, 25 bp, Homo sapien
gaagctgaatttgcgcagcatcatg

SEQ ID NO: 1519927 - DNA, 25 bp, Homo sapien
cacggtggggaagctgaatttgcgc

SEQ ID NO: 1519928 - DNA, 25 bp, Homo sapien
tgcgatcaggatccggtagatgctg

SEQ ID NO: 1519929 - DNA, 25 bp, Homo sapien
ttgaacttggctagggcggcaaagc

SEQ ID NO: 1519930 - DNA, 25 bp, Homo sapien
tggctagggcggcaaagcgttcttt

SEQ ID NO: 1519931 - DNA, 25 bp, Homo sapien
cgggaggccacgtctgttgcgatca

SEQ ID NO: 1519932 - DNA, 25 bp, Homo sapien
gggagtgcccttggcaggagactgg

SEQ ID NO: 1519933 - DNA, 25 bp, Homo sapien
gccttgtagtaaaagagggagtgcc

SEQ ID NO: 1519934 - DNA, 25 bp, Homo sapien
catctgtggggccttgtagtaaaag

SEQ ID NO: 1519935 - DNA, 25 bp, Homo sapien
agtaaaagagggagtgcccttggca

SEQ ID NO: 1519936 - DNA, 25 bp, Homo sapien
ggaggcagaggtggctggtcagctc

SEQ ID NO: 1519937 - DNA, 25 bp, Homo sapien
ctggaggcagaggtggctggtcagc

SEQ ID NO: 1519938 - DNA, 25 bp, Homo sapien
tggaggcagaggtggctggtcagct

SEQ ID NO: 1519939 - DNA, 25 bp, Homo sapien
aggcagaggtggctggtcagctcca

SEQ ID NO: 1519940 - DNA, 25 bp, Homo sapien
ccgtccggccgactcggtggatgta

SEQ ID NO: 1519941 - DNA, 25 bp, Homo sapien
tgttgtggttgatgaccacctgtac

SEQ ID NO: 1519942 - DNA, 25 bp, Homo sapien
cggccgactcggtggatgtagatct

SEQ ID NO: 1519943 - DNA, 25 bp, Homo sapien
ctgtaccgtagggatgtccaggccc

SEQ ID NO: 1519944 - DNA, 25 bp, Homo sapien
aaacatggccctgagtagctctcat

SEQ ID NO: 1519945 - DNA, 25 bp, Homo sapien
ctgggattcacctttgctttagaaa

SEQ ID NO: 1519946 - DNA, 25 bp, Homo sapien
ctacccacgtcctaccacctgaatt

SEQ ID NO: 1519947 - DNA, 25 bp, Homo sapien
tagaaaggacaactccccaacttgc

SEQ ID NO: 1519948 - DNA, 25 bp, Homo sapien
gcgaataaaggtagatcctgacagc

SEQ ID NO: 1519949 - DNA, 25 bp, Homo sapien
gggatgtgccggttatctgctatgt

SEQ ID NO: 1519950 - DNA, 25 bp, Homo sapien
ctgctatgtgctgggcgtcaggaca

SEQ ID NO: 1519951 - DNA, 25 bp, Homo sapien
gggcgaataaaggtagatcctgaca

SEQ ID NO: 1519952 - DNA, 25 bp, Homo sapien
tcaccagcgtgatggcctgaccctg

SEQ ID NO: 1519953 - DNA, 25 bp, Homo sapien
accagcgtgatggcctgaccctgcc

SEQ ID NO: 1519954 - DNA, 25 bp, Homo sapien
agcgtgatggcctgaccctgccgcc

SEQ ID NO: 1519955 - DNA, 25 bp, Homo sapien
cagcgtgatggcctgaccctgccgc

SEQ ID NO: 1519956 - DNA, 25 bp, Homo sapien
cctcgatggcgtgcaccaggtggat

SEQ ID NO: 1519957 - DNA, 25 bp, Homo sapien
tgcaccaggtggatgtcgtactgtg

SEQ ID NO: 1519958 - DNA, 25 bp, Homo sapien
gtctttcagagtctcacggtcaccc

SEQ ID NO: 1519959 - DNA, 25 bp, Homo sapien
gtaaggaaggtatggaccgctgtct

SEQ ID NO: 1519960 - DNA, 25 bp, Homo sapien
ggtaagggtcagctgagcaagatca

SEQ ID NO: 1519961 - DNA, 25 bp, Homo sapien
catctggggccatatcaggtaaggg

SEQ ID NO: 1519962 - DNA, 25 bp, Homo sapien
tctcttcgcaccacgttgacctgtg

SEQ ID NO: 1519963 - DNA, 25 bp, Homo sapien
tcggcctcttccacggagaactcct

SEQ ID NO: 1519964 - DNA, 25 bp, Homo sapien
tctcacactctcttcgcaccacgtt

SEQ ID NO: 1519965 - DNA, 25 bp, Homo sapien
ccacgttgacctgtgtgaggatctg

SEQ ID NO: 1519966 - DNA, 25 bp, Homo sapien
tttcgtcaaagtgggccgcctccag

SEQ ID NO: 1519967 - DNA, 25 bp, Homo sapien
tctccttcttttcgtcaaagtgggc

SEQ ID NO: 1519968 - DNA, 25 bp, Homo sapien
aggatcagctgcttccgtttgttga

SEQ ID NO: 1519969 - DNA, 25 bp, Homo sapien
tcagctgcttccgtttgttgatctc

SEQ ID NO: 1519970 - DNA, 25 bp, Homo sapien
ttgaagcgccggttcttctgcttga

SEQ ID NO: 1519971 - DNA, 25 bp, Homo sapien
ccttgaagcgccggttcttctgctt

SEQ ID NO: 1519972 - DNA, 25 bp, Homo sapien
cttgaagcgccggttcttctgcttg

SEQ ID NO: 1519973 - DNA, 25 bp, Homo sapien
tccttgaagcgccggttcttctgct

SEQ ID NO: 1519974 - DNA, 25 bp, Homo sapien
ggactgggcctgagtgggacccaga

SEQ ID NO: 1519975 - DNA, 25 bp, Homo sapien
ctgagtgggacccagacggtgtcct

SEQ ID NO: 1519976 - DNA, 25 bp, Homo sapien
gggcctgagtgggacccagacggtg

SEQ ID NO: 1519977 - DNA, 25 bp, Homo sapien
ggacccagacggtgtcctgggtgga

SEQ ID NO: 1519978 - DNA, 25 bp, Homo sapien
gggtcacaacctcccggtcatgttc

SEQ ID NO: 1519979 - DNA, 25 bp, Homo sapien
tccatggacgagtcaaggactgggc

SEQ ID NO: 1519980 - DNA, 25 bp, Homo sapien
agcctgaatcttggccagggctcag

SEQ ID NO: 1519981 - DNA, 25 bp, Homo sapien
tattaagcacctcctgtatgcggca

SEQ ID NO: 1519982 - DNA, 25 bp, Homo sapien
tttcctggcaggacctggagacccg

SEQ ID NO: 1519983 - DNA, 25 bp, Homo sapien
attcctggtgtgttgggcgccctag

SEQ ID NO: 1519984 - DNA, 25 bp, Homo sapien
gactctggatgcctcgggcaggact

SEQ ID NO: 1519985 - DNA, 25 bp, Homo sapien
gcaatgcggagttggagcaccagct

SEQ ID NO: 1519986 - DNA, 25 bp, Homo sapien
ggtgtaagccatcactgggcgtggt

SEQ ID NO: 1519987 - DNA, 25 bp, Homo sapien
ccacaccaggctttctttgttttct

SEQ ID NO: 1519988 - DNA, 25 bp, Homo sapien
tgagctaccacaccaggctttcttt

SEQ ID NO: 1519989 - DNA, 25 bp, Homo sapien
gctaccacaccaggctttctttgtt

SEQ ID NO: 1519990 - DNA, 25 bp, Homo sapien
gagataatgccttgctctgtccccc

SEQ ID NO: 1519991 - DNA, 25 bp, Homo sapien
tgcttgaacccagaaagttgaggct

SEQ ID NO: 1519992 - DNA, 25 bp, Homo sapien
gcctgggcaacagagtgaggccctg

SEQ ID NO: 1519993 - DNA, 25 bp, Homo sapien
gagtgaggccctgtctcaaaaaaaa

SEQ ID NO: 1519994 - DNA, 25 bp, Homo sapien
gccatgattgagccactgcactaca

SEQ ID NO: 1519995 - DNA, 25 bp, Homo sapien
ttcacataacaactcattggaggcc

SEQ ID NO: 1519996 - DNA, 25 bp, Homo sapien
cttcacataacaactcattggaggc

SEQ ID NO: 1519997 - DNA, 25 bp, Homo sapien
tctcttcacataacaactcattgga

SEQ ID NO: 1519998 - DNA, 25 bp, Homo sapien
tcttcacataacaactcattggagg

SEQ ID NO: 1519999 - DNA, 25 bp, Homo sapien
tataacagcaagcatttattaagca

SEQ ID NO: 1520000 - DNA, 25 bp, Homo sapien
ataacagcaagcatttattaagcac

SEQ ID NO: 1520001 - DNA, 25 bp, Homo sapien
gtttataacagcaagcatttattaa

SEQ ID NO: 1520002 - DNA, 25 bp, Homo sapien
ttataacagcaagcatttattaagc

SEQ ID NO: 1520003 - DNA, 25 bp, Homo sapien
aaactctagggaaacatgggccctg

SEQ ID NO: 1520004 - DNA, 25 bp, Homo sapien
aaagatttagaggatgtcatgccag

SEQ ID NO: 1520005 - DNA, 25 bp, Homo sapien
ggttggcccaaccagctatggcttg

SEQ ID NO: 1520006 - DNA, 25 bp, Homo sapien
catgcgtccacactatgctggaaga

SEQ ID NO: 1520007 - DNA, 25 bp, Homo sapien
tcactcttcgctccatgggttgggc

SEQ ID NO: 1520008 - DNA, 25 bp, Homo sapien
aggtgcattcactcttcgctccatg

SEQ ID NO: 1520009 - DNA, 25 bp, Homo sapien
gtgcattcactcttcgctccatggg

SEQ ID NO: 1520010 - DNA, 25 bp, Homo sapien
tcaggccttgctctcgagcagcctc

SEQ ID NO: 1520011 - DNA, 25 bp, Homo sapien
ctttgaggatgcaggttgagcgctc

SEQ ID NO: 1520012 - DNA, 25 bp, Homo sapien
ctagcaggctgttggatcgacgatc

SEQ ID NO: 1520013 - DNA, 25 bp, Homo sapien
ggcgctcaataaatggccttgtttc

SEQ ID NO: 1520014 - DNA, 25 bp, Homo sapien
ttgagcgctcagcatatcaccggcg

SEQ ID NO: 1520015 - DNA, 25 bp, Homo sapien
gcttctgtagctttggcaactggca

SEQ ID NO: 1520016 - DNA, 25 bp, Homo sapien
acacctgcagcgtggatcaagcgca

SEQ ID NO: 1520017 - DNA, 25 bp, Homo sapien
gaagtgctctctcgccactctgggt

SEQ ID NO: 1520018 - DNA, 25 bp, Homo sapien
tgtcgttctagttccagggtcaccc

SEQ ID NO: 1520019 - DNA, 25 bp, Homo sapien
tgcactcgggtaccaaagctctgaa

SEQ ID NO: 1520020 - DNA, 25 bp, Homo sapien
cacagcagtggctagggcatcagcc

SEQ ID NO: 1520021 - DNA, 25 bp, Homo sapien
gcacttttcgcacgtatggcatcgt

SEQ ID NO: 1520022 - DNA, 25 bp, Homo sapien
tattggctgtaaagaaatcctggct

SEQ ID NO: 1520023 - DNA, 25 bp, Homo sapien
aattgcccttaaaacatcatccctg

SEQ ID NO: 1520024 - DNA, 25 bp, Homo sapien
ctgaatagatcaaaaccactgatgt

SEQ ID NO: 1520025 - DNA, 25 bp, Homo sapien
taagccttgaagcagcaattgccct

SEQ ID NO: 1520026 - DNA, 25 bp, Homo sapien
ggagccagtgcccaagtacggtttg

SEQ ID NO: 1520027 - DNA, 25 bp, Homo sapien
caaaagccagctcttcgagggtgag

SEQ ID NO: 1520028 - DNA, 25 bp, Homo sapien
taaggcattccgaggtaaccagggc

SEQ ID NO: 1520029 - DNA, 25 bp, Homo sapien
cacattcgatgtgttccgacagagg

SEQ ID NO: 1520030 - DNA, 25 bp, Homo sapien
tgatgtctcagtgtgtgtcccaaac

SEQ ID NO: 1520031 - DNA, 25 bp, Homo sapien
cgcggcgctgcggagaccgttggtt

SEQ ID NO: 1520032 - DNA, 25 bp, Homo sapien
gcgctgcggagaccgttggttcatt

SEQ ID NO: 1520033 - DNA, 25 bp, Homo sapien
tgcggagaccgttggttcatttgca

SEQ ID NO: 1520034 - DNA, 25 bp, Homo sapien
aggactcggcggcggcttgcgcctg

SEQ ID NO: 1520035 - DNA, 25 bp, Homo sapien
cctcgtgcgcgacggaggcgtcttt

SEQ ID NO: 1520036 - DNA, 25 bp, Homo sapien
cgcgaaccaaggtaaagccaacgag

SEQ ID NO: 1520037 - DNA, 25 bp, Homo sapien
gacagcgcgcttgcgcaagagagcc

SEQ ID NO: 1520038 - DNA, 25 bp, Homo sapien
gacgctcacgataaccaaggacgac

SEQ ID NO: 1520039 - DNA, 25 bp, Homo sapien
actccgcgcgggacaggcctcggca

SEQ ID NO: 1520040 - DNA, 25 bp, Homo sapien
cgagggtcgcgccagcccgaccctg

SEQ ID NO: 1520041 - DNA, 25 bp, Homo sapien
ccactccccactccgcgcgggacag

SEQ ID NO: 1520042 - DNA, 25 bp, Homo sapien
agggtcgcgccagcccgaccctgcg

SEQ ID NO: 1520043 - DNA, 25 bp, Homo sapien
catttatttgtaccctgtagcctcc

SEQ ID NO: 1520044 - DNA, 25 bp, Homo sapien
ctaggacggggcccgacacgcagca

SEQ ID NO: 1520045 - DNA, 25 bp, Homo sapien
ctagagcaacatcgttcactcattt

SEQ ID NO: 1520046 - DNA, 25 bp, Homo sapien
gagcaacatcgttcactcatttatt

SEQ ID NO: 1520047 - DNA, 25 bp, Homo sapien
tttctaactgattgacacctgtctc

SEQ ID NO: 1520048 - DNA, 25 bp, Homo sapien
aaatacttcggattctcagtcctct

SEQ ID NO: 1520049 - DNA, 25 bp, Homo sapien
cttccaggtggctgcctttcctggc

SEQ ID NO: 1520050 - DNA, 25 bp, Homo sapien
tcatttatatctcacgtctccctaa

SEQ ID NO: 1520051 - DNA, 25 bp, Homo sapien
tattgcagtaatatcaagtttccgt

SEQ ID NO: 1520052 - DNA, 25 bp, Homo sapien
agtaatatcaagtttccgttctgga

SEQ ID NO: 1520053 - DNA, 25 bp, Homo sapien
cttgcttattgcagtaatatcaagt

SEQ ID NO: 1520054 - DNA, 25 bp, Homo sapien
tccgttctggaattatcaagtttcc

SEQ ID NO: 1520055 - DNA, 25 bp, Homo sapien
ccagcaatcagggagaccgaggtag

SEQ ID NO: 1520056 - DNA, 25 bp, Homo sapien
aaccacttgagcacagaggcggagg

SEQ ID NO: 1520057 - DNA, 25 bp, Homo sapien
ggagaaccacttgagcacagaggcg

SEQ ID NO: 1520058 - DNA, 25 bp, Homo sapien
cccagcaatcagggagaccgaggta

SEQ ID NO: 1520059 - DNA, 25 bp, Homo sapien
tgatgttggcgtgcagccgatagat

SEQ ID NO: 1520060 - DNA, 25 bp, Homo sapien
cttcgcctgtgttgatgttggcgtg

SEQ ID NO: 1520061 - DNA, 25 bp, Homo sapien
tgttggcgtgcagccgatagatgct

SEQ ID NO: 1520062 - DNA, 25 bp, Homo sapien
ttcgcctgtgttgatgttggcgtgc

SEQ ID NO: 1520063 - DNA, 25 bp, Homo sapien
aactcctcgatgttctcgcgcacag

SEQ ID NO: 1520064 - DNA, 25 bp, Homo sapien
tctcgcgcacagctgcatcaaaggt

SEQ ID NO: 1520065 - DNA, 25 bp, Homo sapien
catcgcaaactcctcgatgttctcg

SEQ ID NO: 1520066 - DNA, 25 bp, Homo sapien
ctcctgggcaatgcgcttggagacc

SEQ ID NO: 1520067 - DNA, 25 bp, Homo sapien
ttaggtgccgtctttacaatgttgc

SEQ ID NO: 1520068 - DNA, 25 bp, Homo sapien
tctgcagagactttaggtgccgtct

SEQ ID NO: 1520069 - DNA, 25 bp, Homo sapien
tgggatccgtctgcagagactttag

SEQ ID NO: 1520070 - DNA, 25 bp, Homo sapien
ggctcctgggatccgtctgcagaga

SEQ ID NO: 1520071 - DNA, 25 bp, Homo sapien
gcaacatacggagcattcatctcaa

SEQ ID NO: 1520072 - DNA, 25 bp, Homo sapien
caaaaattaagttaacaccagtgtg

SEQ ID NO: 1520073 - DNA, 25 bp, Homo sapien
cactgagctcagatttgtggaccta

SEQ ID NO: 1520074 - DNA, 25 bp, Homo sapien
ccagtgtgcatgactagaatagaca

SEQ ID NO: 1520075 - DNA, 25 bp, Homo sapien
cagaagcgggtgaggtatgctgaca

SEQ ID NO: 1520076 - DNA, 25 bp, Homo sapien
gggtgaggtatgctgacacctcctg

SEQ ID NO: 1520077 - DNA, 25 bp, Homo sapien
aagcgggtgaggtatgctgacacct

SEQ ID NO: 1520078 - DNA, 25 bp, Homo sapien
gcgggtgaggtatgctgacacctcc

SEQ ID NO: 1520079 - DNA, 25 bp, Homo sapien
ccagcttccaggcagtgaagatgat

SEQ ID NO: 1520080 - DNA, 25 bp, Homo sapien
ggctgtccatcagtcagcaccgaca

SEQ ID NO: 1520081 - DNA, 25 bp, Homo sapien
ctgggtcagcgtggccactaggagc

SEQ ID NO: 1520082 - DNA, 25 bp, Homo sapien
gaagcggcaggccttgtcctgtttg

SEQ ID NO: 1520083 - DNA, 25 bp, Homo sapien
catgtttcaggcaagcgtgacgcac

SEQ ID NO: 1520084 - DNA, 25 bp, Homo sapien
gccaaagggcacacggatgtcgtca

SEQ ID NO: 1520085 - DNA, 25 bp, Homo sapien
catcgaaggtcatgacacgcagggc

SEQ ID NO: 1520086 - DNA, 25 bp, Homo sapien
tccctgaccacgtcagtgtggtggc

SEQ ID NO: 1520087 - DNA, 25 bp, Homo sapien
tggcagaactcgttgcgaatggcca

SEQ ID NO: 1520088 - DNA, 25 bp, Homo sapien
acagggttccacagagctcgctcag

SEQ ID NO: 1520089 - DNA, 25 bp, Homo sapien
ctcaggatgccagggttatccagga

SEQ ID NO: 1520090 - DNA, 25 bp, Homo sapien
cgaggtcgacgacctcctggcagaa

SEQ ID NO: 1520091 - DNA, 25 bp, Homo sapien
cattgcagtcggctagcagggacac

SEQ ID NO: 1520092 - DNA, 25 bp, Homo sapien
ctcatctggtggtcattgcagtcgg

SEQ ID NO: 1520093 - DNA, 25 bp, Homo sapien
gtcattgcagtcggctagcagggac

SEQ ID NO: 1520094 - DNA, 25 bp, Homo sapien
cctcatctggtggtcattgcagtcg

SEQ ID NO: 1520095 - DNA, 25 bp, Homo sapien
cggccacagacccagggtaggcgct

SEQ ID NO: 1520096 - DNA, 25 bp, Homo sapien
cagggtaggcgctaactgccctgca

SEQ ID NO: 1520097 - DNA, 25 bp, Homo sapien
gggcatgtgactcaggccggccttc

SEQ ID NO: 1520098 - DNA, 25 bp, Homo sapien
tcaggccggccttcagagcacaggg

SEQ ID NO: 1520099 - DNA, 25 bp, Homo sapien
ccagcacggacaatagcatctttca

SEQ ID NO: 1520100 - DNA, 25 bp, Homo sapien
tcatagcagccacgatggactccgt

SEQ ID NO: 1520101 - DNA, 25 bp, Homo sapien
tcgtcgttgcctgcgatggctcgca

SEQ ID NO: 1520102 - DNA, 25 bp, Homo sapien
tgctcagcacttgcttcacgagctc

SEQ ID NO: 1520103 - DNA, 25 bp, Homo sapien
acagggccgcgcagctctgctcaca

SEQ ID NO: 1520104 - DNA, 25 bp, Homo sapien
tccacgatgatgcggctgttgtcgg

SEQ ID NO: 1520105 - DNA, 25 bp, Homo sapien
ctgttgtcgggcttacgcagggcca

SEQ ID NO: 1520106 - DNA, 25 bp, Homo sapien
ctgcacgccggccttctgcgggtgt

SEQ ID NO: 1520107 - DNA, 25 bp, Homo sapien
gaagacagtggttgtgcacaggcac

SEQ ID NO: 1520108 - DNA, 25 bp, Homo sapien
gtaagagccagcgagagcaaaggcc

SEQ ID NO: 1520109 - DNA, 25 bp, Homo sapien
tccagcagctgcctatactgtatca

SEQ ID NO: 1520110 - DNA, 25 bp, Homo sapien
tactgtatcaagctagacccatctc

SEQ ID NO: 1520111 - DNA, 25 bp, Homo sapien
gggccaccaggtttcggatcagcat

SEQ ID NO: 1520112 - DNA, 25 bp, Homo sapien
cagatcgggcctgcatgatgagtgc

SEQ ID NO: 1520113 - DNA, 25 bp, Homo sapien
tcacagtcacggtgggcagatcggg

SEQ ID NO: 1520114 - DNA, 25 bp, Homo sapien
ggagctcgacatgacaacccaggtc

SEQ ID NO: 1520115 - DNA, 25 bp, Homo sapien
gaaggagcaggacagtaacatccgt

SEQ ID NO: 1520116 - DNA, 25 bp, Homo sapien
tgtgtagaggcctccctacaaggct

SEQ ID NO: 1520117 - DNA, 25 bp, Homo sapien
tgagtgatgggacgtgccctttgcc

SEQ ID NO: 1520118 - DNA, 25 bp, Homo sapien
ggcggagcatctgagacccatttta

SEQ ID NO: 1520119 - DNA, 25 bp, Homo sapien
gcaggccgtcctcgaaatagctcag

SEQ ID NO: 1520120 - DNA, 25 bp, Homo sapien
gaagaaatgcttgagaactgcccaa

SEQ ID NO: 1520121 - DNA, 25 bp, Homo sapien
tgtttgcatcggctggattccacgg

SEQ ID NO: 1520122 - DNA, 25 bp, Homo sapien
cactggcccagaagttaagtcaggg

SEQ ID NO: 1520123 - DNA, 25 bp, Homo sapien
caagtgatcttcccgccttagccca

SEQ ID NO: 1520124 - DNA, 25 bp, Homo sapien
gtgatcttcccgccttagcccaagt

SEQ ID NO: 1520125 - DNA, 25 bp, Homo sapien
tgatcttcccgccttagcccaagtt

SEQ ID NO: 1520126 - DNA, 25 bp, Homo sapien
tcttcccgccttagcccaagttgct

SEQ ID NO: 1520127 - DNA, 25 bp, Homo sapien
gcagggacctcgagtgcttgtcagt

SEQ ID NO: 1520128 - DNA, 25 bp, Homo sapien
aaacactgacgggaagctgaaggca

SEQ ID NO: 1520129 - DNA, 25 bp, Homo sapien
tgaaacctcatgtgctaggaggagc

SEQ ID NO: 1520130 - DNA, 25 bp, Homo sapien
gaaggcaacgtgagctgaaacctca

SEQ ID NO: 1520131 - DNA, 25 bp, Homo sapien
aggcaaagcaccttggcaatagcaa

SEQ ID NO: 1520132 - DNA, 25 bp, Homo sapien
cgccttccagcaatggcaggcaaag

SEQ ID NO: 1520133 - DNA, 25 bp, Homo sapien
ccttggcaatagcaatggacacccc

SEQ ID NO: 1520134 - DNA, 25 bp, Homo sapien
ttccagcaatggcaggcaaagcacc

SEQ ID NO: 1520135 - DNA, 25 bp, Homo sapien
tctcccatacctcccacctgtggtt

SEQ ID NO: 1520136 - DNA, 25 bp, Homo sapien
cacctgtggtttgcttcctggcaac

SEQ ID NO: 1520137 - DNA, 25 bp, Homo sapien
ggcaacttccaggatctggcctcca

SEQ ID NO: 1520138 - DNA, 25 bp, Homo sapien
tggtttgcttcctggcaacttccag

SEQ ID NO: 1520139 - DNA, 25 bp, Homo sapien
ggttggtggagatcaagttcagaac

SEQ ID NO: 1520140 - DNA, 25 bp, Homo sapien
tcgcgcacccccagagcgcgccacg

SEQ ID NO: 1520141 - DNA, 25 bp, Homo sapien
acgccacgccccgattggctgctcc

SEQ ID NO: 1520142 - DNA, 25 bp, Homo sapien
agcgcgccacgggaggggtccacgc

SEQ ID NO: 1520143 - DNA, 25 bp, Homo sapien
gccacgccccgattggctgctccct

SEQ ID NO: 1520144 - DNA, 25 bp, Homo sapien
cccggacgcgtcgccgccgccgcta

SEQ ID NO: 1520145 - DNA, 25 bp, Homo sapien
ccggacgcgtcgccgccgccgctac

SEQ ID NO: 1520146 - DNA, 25 bp, Homo sapien
cggcccggacgcgtcgccgccgccg

SEQ ID NO: 1520147 - DNA, 25 bp, Homo sapien
gcccggacgcgtcgccgccgccgct

SEQ ID NO: 1520148 - DNA, 25 bp, Homo sapien
acaggcgcgggccgctgacgcttgg

SEQ ID NO: 1520149 - DNA, 25 bp, Homo sapien
ggcgcgggccgctgacgcttgggcc

SEQ ID NO: 1520150 - DNA, 25 bp, Homo sapien
tcagttcagcccgacaggcgcgggc

SEQ ID NO: 1520151 - DNA, 25 bp, Homo sapien
ctcagttcagcccgacaggcgcggg

SEQ ID NO: 1520152 - DNA, 25 bp, Homo sapien
tcaacgaaaagggacgtggtgtcag

SEQ ID NO: 1520153 - DNA, 25 bp, Homo sapien
tgtcaggcgtgcgtggactgcgggt

SEQ ID NO: 1520154 - DNA, 25 bp, Homo sapien
gactgcgggtgacgggctcaaacct

SEQ ID NO: 1520155 - DNA, 25 bp, Homo sapien
gggatccatgacaggacccgtgcct

SEQ ID NO: 1520156 - DNA, 25 bp, Homo sapien
aaaaatatgggctgcagcttaaaca

SEQ ID NO: 1520157 - DNA, 25 bp, Homo sapien
aaatatgggctgcagcttaaacagc

SEQ ID NO: 1520158 - DNA, 25 bp, Homo sapien
tatgggctgcagcttaaacagccat

SEQ ID NO: 1520159 - DNA, 25 bp, Homo sapien
tgggctgcagcttaaacagccatca

SEQ ID NO: 1520160 - DNA, 25 bp, Homo sapien
atctccctacaatgtgaaacaaaac

SEQ ID NO: 1520161 - DNA, 25 bp, Homo sapien
attcatcctgggtcgccccatgcca

SEQ ID NO: 1520162 - DNA, 25 bp, Homo sapien
cccacaggttaatctccctacaatg

SEQ ID NO: 1520163 - DNA, 25 bp, Homo sapien
aacttagatgatttgtcccgctgct

SEQ ID NO: 1520164 - DNA, 25 bp, Homo sapien
tgtaatctctcagtaaacggaagcc

SEQ ID NO: 1520165 - DNA, 25 bp, Homo sapien
tcctatctgccagccgataaaggct

SEQ ID NO: 1520166 - DNA, 25 bp, Homo sapien
gatccgggcacatcttacataatgg

SEQ ID NO: 1520167 - DNA, 25 bp, Homo sapien
tataagcagccgtgaaatggatcct

SEQ ID NO: 1520168 - DNA, 25 bp, Homo sapien
tagaacctccagagcaatgggaaca

SEQ ID NO: 1520169 - DNA, 25 bp, Homo sapien
cagcatagaacctccagagcaatgg

SEQ ID NO: 1520170 - DNA, 25 bp, Homo sapien
actggttccaagcaagttgacagtt

SEQ ID NO: 1520171 - DNA, 25 bp, Homo sapien
agcctcagcatagaacctccagagc

SEQ ID NO: 1520172 - DNA, 25 bp, Homo sapien
gaaacgtgaacctggagcatgggat

SEQ ID NO: 1520173 - DNA, 25 bp, Homo sapien
cctggagcatgggatcttcgataac

SEQ ID NO: 1520174 - DNA, 25 bp, Homo sapien
gagcatgggatcttcgataactcat

SEQ ID NO: 1520175 - DNA, 25 bp, Homo sapien
gcagcattattcaggaaacgtgaac

SEQ ID NO: 1520176 - DNA, 25 bp, Homo sapien
ggattcaggtgtccccacaagggtg

SEQ ID NO: 1520177 - DNA, 25 bp, Homo sapien
tcgcgagtacctaggatgccagtgc

SEQ ID NO: 1520178 - DNA, 25 bp, Homo sapien
cacacggactttgctgtcatggagc

SEQ ID NO: 1520179 - DNA, 25 bp, Homo sapien
gacacagagttagagggcagagcaa

SEQ ID NO: 1520180 - DNA, 25 bp, Homo sapien
aggacaaataccatacgaatccact

SEQ ID NO: 1520181 - DNA, 25 bp, Homo sapien
tgttttatacacatccaaatgtcga

SEQ ID NO: 1520182 - DNA, 25 bp, Homo sapien
gataactgctgccacacggatggac

SEQ ID NO: 1520183 - DNA, 25 bp, Homo sapien
gcccagctgcatactgaatgattct

SEQ ID NO: 1520184 - DNA, 25 bp, Homo sapien
ggaggcacaccttcacgggctctat

SEQ ID NO: 1520185 - DNA, 25 bp, Homo sapien
cgggctctatcggtactgcaaatga

SEQ ID NO: 1520186 - DNA, 25 bp, Homo sapien
tgcttgctgcgtacatgctcgctgc

SEQ ID NO: 1520187 - DNA, 25 bp, Homo sapien
tcgtatgtcactccctctgtgtgct

SEQ ID NO: 1520188 - DNA, 25 bp, Homo sapien
tgcctggttaatttccctctctccc

SEQ ID NO: 1520189 - DNA, 25 bp, Homo sapien
atgcctggttaatttccctctctcc

SEQ ID NO: 1520190 - DNA, 25 bp, Homo sapien
tgggaccacagataggtaccaccaa

SEQ ID NO: 1520191 - DNA, 25 bp, Homo sapien
gaccacagataggtaccaccaagcc

SEQ ID NO: 1520192 - DNA, 25 bp, Homo sapien
tgaaatctcattttgtacaaaaatt

SEQ ID NO: 1520193 - DNA, 25 bp, Homo sapien
ccaggtgagagcagcctgggtaaca

SEQ ID NO: 1520194 - DNA, 25 bp, Homo sapien
ggtaacatagtgaaatctcattttg

SEQ ID NO: 1520195 - DNA, 25 bp, Homo sapien
gaagatcacttgagggccaggtgag

SEQ ID NO: 1520196 - DNA, 25 bp, Homo sapien
cttcgcccttgaggtaagaggagcc

SEQ ID NO: 1520197 - DNA, 25 bp, Homo sapien
gtgagtgctgagggtttgccaattc

SEQ ID NO: 1520198 - DNA, 25 bp, Homo sapien
gggtttgccaattcaggccttcgcc

SEQ ID NO: 1520199 - DNA, 25 bp, Homo sapien
cgacactcgttcactgtgctggcct

SEQ ID NO: 1520200 - DNA, 25 bp, Homo sapien
gccccaaacctgactatgcagatgt

SEQ ID NO: 1520201 - DNA, 25 bp, Homo sapien
agggtccaggcatgttgcggtggtg

SEQ ID NO: 1520202 - DNA, 25 bp, Homo sapien
ccaaaggtgcctgccggggcacact

SEQ ID NO: 1520203 - DNA, 25 bp, Homo sapien
tggtgtgtgcaacaccccaaaggtg

SEQ ID NO: 1520204 - DNA, 25 bp, Homo sapien
ctgaaaccaagaagttgaggttaca

SEQ ID NO: 1520205 - DNA, 25 bp, Homo sapien
tctgaaaccaagaagttgaggttac

SEQ ID NO: 1520206 - DNA, 25 bp, Homo sapien
gttcccacgctttaaaatcatccag

SEQ ID NO: 1520207 - DNA, 25 bp, Homo sapien
ccgcgtccgactgggttggctaatt

SEQ ID NO: 1520208 - DNA, 25 bp, Homo sapien
gccaccgcgtccgactgggttggct

SEQ ID NO: 1520209 - DNA, 25 bp, Homo sapien
tcgtgtgatcctcctaacgtggcct

SEQ ID NO: 1520210 - DNA, 25 bp, Homo sapien
gggccttccttcacaccattaccca

SEQ ID NO: 1520211 - DNA, 25 bp, Homo sapien
ggccttccttcacaccattacccat

SEQ ID NO: 1520212 - DNA, 25 bp, Homo sapien
agacggacgaggacaggacagcctc

SEQ ID NO: 1520213 - DNA, 25 bp, Homo sapien
gacggacgaggacaggacagcctca

SEQ ID NO: 1520214 - DNA, 25 bp, Homo sapien
ttgatgagacggacgaggacaggac

SEQ ID NO: 1520215 - DNA, 25 bp, Homo sapien
ctttgatgagacggacgaggacagg

SEQ ID NO: 1520216 - DNA, 25 bp, Homo sapien
gagcacagcagaggaatccctgagc

SEQ ID NO: 1520217 - DNA, 25 bp, Homo sapien
cctaggtacagggtgatttgtgatg

SEQ ID NO: 1520218 - DNA, 25 bp, Homo sapien
atgggctgcatggagcacagcagag

SEQ ID NO: 1520219 - DNA, 25 bp, Homo sapien
tacagggtgatttgtgatgggctgc

SEQ ID NO: 1520220 - DNA, 25 bp, Homo sapien
gtaggaaggggtaccaacatgcaca

SEQ ID NO: 1520221 - DNA, 25 bp, Homo sapien
taggaaggggtaccaacatgcacat

SEQ ID NO: 1520222 - DNA, 25 bp, Homo sapien
ggtaggaaggggtaccaacatgcac

SEQ ID NO: 1520223 - DNA, 25 bp, Homo sapien
caggtaggaaggggtaccaacatgc

SEQ ID NO: 1520224 - DNA, 25 bp, Homo sapien
tttggtggaatagagggtggctggc

SEQ ID NO: 1520225 - DNA, 25 bp, Homo sapien
ctggttggattcacatcacaagtgg

SEQ ID NO: 1520226 - DNA, 25 bp, Homo sapien
ggcttttggtggaatagagggtggc

SEQ ID NO: 1520227 - DNA, 25 bp, Homo sapien
gggctggttggattcacatcacaag

SEQ ID NO: 1520228 - DNA, 25 bp, Homo sapien
tcagtcacctggtggtgaccccggt

SEQ ID NO: 1520229 - DNA, 25 bp, Homo sapien
taaacttcaaggcacgtgcctgccc

SEQ ID NO: 1520230 - DNA, 25 bp, Homo sapien
aggcctggaagatgacgccacctca

SEQ ID NO: 1520231 - DNA, 25 bp, Homo sapien
tgaaaactgcctgtgcggtcggcct

SEQ ID NO: 1520232 - DNA, 25 bp, Homo sapien
ctacggcactgtggcattgtaggta

SEQ ID NO: 1520233 - DNA, 25 bp, Homo sapien
gactacggcactgtggcattgtagg

SEQ ID NO: 1520234 - DNA, 25 bp, Homo sapien
tgactacggcactgtggcattgtag

SEQ ID NO: 1520235 - DNA, 25 bp, Homo sapien
ctgactacggcactgtggcattgta

SEQ ID NO: 1520236 - DNA, 25 bp, Homo sapien
tggttcggtccaggggagctaccgc

SEQ ID NO: 1520237 - DNA, 25 bp, Homo sapien
ccaggggagctaccgctgttttggc

SEQ ID NO: 1520238 - DNA, 25 bp, Homo sapien
ggagctaccgctgttttggcaaggg

SEQ ID NO: 1520239 - DNA, 25 bp, Homo sapien
ttcggtccaggggagctaccgctgt

SEQ ID NO: 1520240 - DNA, 25 bp, Homo sapien
agggcctctgagtggattttaaaga

SEQ ID NO: 1520241 - DNA, 25 bp, Homo sapien
aaaaaaacccaattgagtgcagtgg

SEQ ID NO: 1520242 - DNA, 25 bp, Homo sapien
gccactgcgccagggcctctgagtg

SEQ ID NO: 1520243 - DNA, 25 bp, Homo sapien
gtgcagtggagcacacccatagtcc

SEQ ID NO: 1520244 - DNA, 25 bp, Homo sapien
cttggcagaaaatctttttgaagac

SEQ ID NO: 1520245 - DNA, 25 bp, Homo sapien
ggaagacaggtagtcctgtccccac

SEQ ID NO: 1520246 - DNA, 25 bp, Homo sapien
tgttttagagctgttgagtctcccc

SEQ ID NO: 1520247 - DNA, 25 bp, Homo sapien
aaggacactcgggatgtcccgtcag

SEQ ID NO: 1520248 - DNA, 25 bp, Homo sapien
catcagggtagtggtgactgtcccc

SEQ ID NO: 1520249 - DNA, 25 bp, Homo sapien
gctgcccaggatgcgcttgtactcc

SEQ ID NO: 1520250 - DNA, 25 bp, Homo sapien
tactcctcgtgtgcgctgaactgga

SEQ ID NO: 1520251 - DNA, 25 bp, Homo sapien
gttcccgcgccacaagctgagaaat

SEQ ID NO: 1520252 - DNA, 25 bp, Homo sapien
cacgcgcaccatggtggccgagttc

SEQ ID NO: 1520253 - DNA, 25 bp, Homo sapien
gaagcggctgtcgttccagccagtg

SEQ ID NO: 1520254 - DNA, 25 bp, Homo sapien
tgtcgttccagccagtgcgccggcg

SEQ ID NO: 1520255 - DNA, 25 bp, Homo sapien
taggtcagtgaagcggctgtcgttc

SEQ ID NO: 1520256 - DNA, 25 bp, Homo sapien
gggttacggccatccgcgctctgac

SEQ ID NO: 1520257 - DNA, 25 bp, Homo sapien
cccggggctgatgcgcatcaccgat

SEQ ID NO: 1520258 - DNA, 25 bp, Homo sapien
tgatgcgcatcaccgatgtaaggac

SEQ ID NO: 1520259 - DNA, 25 bp, Homo sapien
gcgcatcaccgatgtaaggactcac

SEQ ID NO: 1520260 - DNA, 25 bp, Homo sapien
gggctgatgcgcatcaccgatgtaa

SEQ ID NO: 1520261 - DNA, 25 bp, Homo sapien
gggagtacaggtgcgtgtcaccacg

SEQ ID NO: 1520262 - DNA, 25 bp, Homo sapien
gagtctggctctattgcccacactg

SEQ ID NO: 1520263 - DNA, 25 bp, Homo sapien
gcccaagctggtctcaaactcctga

SEQ ID NO: 1520264 - DNA, 25 bp, Homo sapien
cactggagtgcagtggctcgatctc

SEQ ID NO: 1520265 - DNA, 25 bp, Homo sapien
gaagcaagtgctcagcccttgtctt

SEQ ID NO: 1520266 - DNA, 25 bp, Homo sapien
ggaaatgcatgcgtaagcccagact

SEQ ID NO: 1520267 - DNA, 25 bp, Homo sapien
cccatcactcaagctttgttattag

SEQ ID NO: 1520268 - DNA, 25 bp, Homo sapien
tcttcttcaagacatataaccccat

SEQ ID NO: 1520269 - DNA, 25 bp, Homo sapien
tctgtgcaagctcttgagcgtctca

SEQ ID NO: 1520270 - DNA, 25 bp, Homo sapien
ccccagcacggtgggcataaatcca

SEQ ID NO: 1520271 - DNA, 25 bp, Homo sapien
tctcgagatgcggatgaagacatga

SEQ ID NO: 1520272 - DNA, 25 bp, Homo sapien
taggtgaagaagctcaggccagcgt

SEQ ID NO: 1520273 - DNA, 25 bp, Homo sapien
gggttttacccatatgctttgcgtg

SEQ ID NO: 1520274 - DNA, 25 bp, Homo sapien
tgctcgtgaagaggtgaggtatcaa

SEQ ID NO: 1520275 - DNA, 25 bp, Homo sapien
tatgctttgcgtgtgtgctcgtgaa

SEQ ID NO: 1520276 - DNA, 25 bp, Homo sapien
ggtatcaatgctctaggtgacacac

SEQ ID NO: 1520277 - DNA, 25 bp, Homo sapien
cacgtgtgttcgcactcatgcgcac

SEQ ID NO: 1520278 - DNA, 25 bp, Homo sapien
taggagcaacctgcgtgcacataca

SEQ ID NO: 1520279 - DNA, 25 bp, Homo sapien
cgcgcctttgcacccctaggagcaa

SEQ ID NO: 1520280 - DNA, 25 bp, Homo sapien
ggtcgctcctttcactcaaactcga

SEQ ID NO: 1520281 - DNA, 25 bp, Homo sapien
aagctgatgcccacggcgatgggac

SEQ ID NO: 1520282 - DNA, 25 bp, Homo sapien
gcgatgggacccttgacccagttca

SEQ ID NO: 1520283 - DNA, 25 bp, Homo sapien
cagcaggatctgcatgaggtcgaag

SEQ ID NO: 1520284 - DNA, 25 bp, Homo sapien
tcaagcctttgtagaggccgcgcac

SEQ ID NO: 1520285 - DNA, 25 bp, Homo sapien
gagtcagaacaagaaggtccaggcg

SEQ ID NO: 1520286 - DNA, 25 bp, Homo sapien
catttgtggccaaagctgagcacga

SEQ ID NO: 1520287 - DNA, 25 bp, Homo sapien
tataactccagaccaagaccagtga

SEQ ID NO: 1520288 - DNA, 25 bp, Homo sapien
gcgtttggacgtggactctgagccc

SEQ ID NO: 1520289 - DNA, 25 bp, Homo sapien
gtgtcaaaagcacttcaaccctgtt

SEQ ID NO: 1520290 - DNA, 25 bp, Homo sapien
atgggggggcggtcagagccaaaga

SEQ ID NO: 1520291 - DNA, 25 bp, Homo sapien
gtcaaaagcacttcaaccctgtttg

SEQ ID NO: 1520292 - DNA, 25 bp, Homo sapien
aaatgtgtcaaaagcacttcaaccc

SEQ ID NO: 1520293 - DNA, 25 bp, Homo sapien
ggagctcaggctcaacagatacccc

SEQ ID NO: 1520294 - DNA, 25 bp, Homo sapien
gaaaaatcttgggtcctgaattgag

SEQ ID NO: 1520295 - DNA, 25 bp, Homo sapien
agattccttctataacctagggagc

SEQ ID NO: 1520296 - DNA, 25 bp, Homo sapien
tgggtcctgaattgaggattccttc

SEQ ID NO: 1520297 - DNA, 25 bp, Homo sapien
tcttaaatgatccttttaacatata

SEQ ID NO: 1520298 - DNA, 25 bp, Homo sapien
cctcttaaatgatccttttaacata

SEQ ID NO: 1520299 - DNA, 25 bp, Homo sapien
ggcctcttaaatgatccttttaaca

SEQ ID NO: 1520300 - DNA, 25 bp, Homo sapien
ctggcctcttaaatgatccttttaa

SEQ ID NO: 1520301 - DNA, 25 bp, Homo sapien
gattgaggtgccacgtgatggccct

SEQ ID NO: 1520302 - DNA, 25 bp, Homo sapien
cctgcggcccaggattgagtttctt

SEQ ID NO: 1520303 - DNA, 25 bp, Homo sapien
tgtggttaccctgataccctgcggc

SEQ ID NO: 1520304 - DNA, 25 bp, Homo sapien
gagtttcttggaccctgtgacggtg

SEQ ID NO: 1520305 - DNA, 25 bp, Homo sapien
cctgatcttcgtgcagccgccgcgg

SEQ ID NO: 1520306 - DNA, 25 bp, Homo sapien
cggccgcgggcccctgatcttcgtg

SEQ ID NO: 1520307 - DNA, 25 bp, Homo sapien
ctgcggccgcgggcccctgatcttc

SEQ ID NO: 1520308 - DNA, 25 bp, Homo sapien
gccgccgcgggtccgtgcgcccagc

SEQ ID NO: 1520309 - DNA, 25 bp, Homo sapien
caggcccatgaactcccgggtcggg

SEQ ID NO: 1520310 - DNA, 25 bp, Homo sapien
aaataagcccgtcccgcccaatcag

SEQ ID NO: 1520311 - DNA, 25 bp, Homo sapien
cagggtgacgccctgtatgcaaata

SEQ ID NO: 1520312 - DNA, 25 bp, Homo sapien
catcctttcgcgtctgagtcccagg

SEQ ID NO: 1520313 - DNA, 25 bp, Homo sapien
ggctaaagtcttcacaggggtcatc

SEQ ID NO: 1520314 - DNA, 25 bp, Homo sapien
tcgacccttggaccaataactgcca

SEQ ID NO: 1520315 - DNA, 25 bp, Homo sapien
ttgctgctcctggactctcactggc

SEQ ID NO: 1520316 - DNA, 25 bp, Homo sapien
ttatgcacctatcaagtccctggcc

SEQ ID NO: 1520317 - DNA, 25 bp, Homo sapien
tcagcctgatcctggaagagactcg

SEQ ID NO: 1520318 - DNA, 25 bp, Homo sapien
atcccacttttaagcaggatgcccc

SEQ ID NO: 1520319 - DNA, 25 bp, Homo sapien
agtatcacccaaacatacactccag

SEQ ID NO: 1520320 - DNA, 25 bp, Homo sapien
ccagaggtctttgagaccagagtat

SEQ ID NO: 1520321 - DNA, 25 bp, Homo sapien
gagttacatgcagacagagacgatc

SEQ ID NO: 1520322 - DNA, 25 bp, Homo sapien
gatccctgggagtgttcgagaagca

SEQ ID NO: 1520323 - DNA, 25 bp, Homo sapien
gcactcacagtccttgaacattgga

SEQ ID NO: 1520324 - DNA, 25 bp, Homo sapien
cctaggaggtggcatgagttacatg

SEQ ID NO: 1520325 - DNA, 25 bp, Homo sapien
ctgagagcgtctacgtcctggccaa

SEQ ID NO: 1520326 - DNA, 25 bp, Homo sapien
tcatgggccaggagtgacctagctg

SEQ ID NO: 1520327 - DNA, 25 bp, Homo sapien
tatctagtcacggacaagttcactg

SEQ ID NO: 1520328 - DNA, 25 bp, Homo sapien
taatgtcctcttgagtgagccctgc

SEQ ID NO: 1520329 - DNA, 25 bp, Homo sapien
tctgcggtctcaaaggcttataagc

SEQ ID NO: 1520330 - DNA, 25 bp, Homo sapien
tcttgtccgcaaagactgaggagcg

SEQ ID NO: 1520331 - DNA, 25 bp, Homo sapien
tttttgcggcccgagtgggtaatgc

SEQ ID NO: 1520332 - DNA, 25 bp, Homo sapien
ctctgacaccggaacaggagccgtg

SEQ ID NO: 1520333 - DNA, 25 bp, Homo sapien
gatgggcggggctatctcaagaaga

SEQ ID NO: 1520334 - DNA, 25 bp, Homo sapien
ccagagggagccaattggctccggc

SEQ ID NO: 1520335 - DNA, 25 bp, Homo sapien
aattggctccggcttcgggtagatg

SEQ ID NO: 1520336 - DNA, 25 bp, Homo sapien
tctggaacttaaaggggcagcgtac

SEQ ID NO: 1520337 - DNA, 25 bp, Homo sapien
gaagggcccgggcagtaagtgctgc

SEQ ID NO: 1520338 - DNA, 25 bp, Homo sapien
gggcccgggcagtaagtgctgcctc

SEQ ID NO: 1520339 - DNA, 25 bp, Homo sapien
aagcaacttgatactcgaccgctac

SEQ ID NO: 1520340 - DNA, 25 bp, Homo sapien
agcaacttgatactcgaccgctacc

SEQ ID NO: 1520341 - DNA, 25 bp, Homo sapien
gatatagcaggaggcaaactggaga

SEQ ID NO: 1520342 - DNA, 25 bp, Homo sapien
gaccggaccctcagcgatctggctt

SEQ ID NO: 1520343 - DNA, 25 bp, Homo sapien
tccaatggatatagcaggaggcaaa

SEQ ID NO: 1520344 - DNA, 25 bp, Homo sapien
gcaaactggagaccggaccctcagc

SEQ ID NO: 1520345 - DNA, 25 bp, Homo sapien
gaaagagactgaggaccacagtgtc

SEQ ID NO: 1520346 - DNA, 25 bp, Homo sapien
tggcatccggttcaggattcacagg

SEQ ID NO: 1520347 - DNA, 25 bp, Homo sapien
aggaaacactggcatccggttcagg

SEQ ID NO: 1520348 - DNA, 25 bp, Homo sapien
ggaaagagactgaggaccacagtgt

SEQ ID NO: 1520349 - DNA, 25 bp, Homo sapien
acctcgttccctcgctgccggttgg

SEQ ID NO: 1520350 - DNA, 25 bp, Homo sapien
tggtgagagtggtggagtgcttcag

SEQ ID NO: 1520351 - DNA, 25 bp, Homo sapien
ctgccggttggtgagagtggtggag

SEQ ID NO: 1520352 - DNA, 25 bp, Homo sapien
ggcagagctgacacctcgttccctc

SEQ ID NO: 1520353 - DNA, 25 bp, Homo sapien
tctgtccacgattgctcctcacagg

SEQ ID NO: 1520354 - DNA, 25 bp, Homo sapien
ggcagagtcctcactcatccccttg

SEQ ID NO: 1520355 - DNA, 25 bp, Homo sapien
ttgttggggaccgtgggcccactca

SEQ ID NO: 1520356 - DNA, 25 bp, Homo sapien
cagtttaccctctgtccacgattgc

SEQ ID NO: 1520357 - DNA, 25 bp, Homo sapien
cccctgtgctgcgagctggtggatg

SEQ ID NO: 1520358 - DNA, 25 bp, Homo sapien
gctccccctgtgctgcgagctggtg

SEQ ID NO: 1520359 - DNA, 25 bp, Homo sapien
tccccctgtgctgcgagctggtgga

SEQ ID NO: 1520360 - DNA, 25 bp, Homo sapien
ttccgcaaatgctccttcagctggt

SEQ ID NO: 1520361 - DNA, 25 bp, Homo sapien
cacgtcatgagtgggtatggacacc

SEQ ID NO: 1520362 - DNA, 25 bp, Homo sapien
tggacactcacaggtcacgtcatga

SEQ ID NO: 1520363 - DNA, 25 bp, Homo sapien
gatacaatcatacacgtggacactc

SEQ ID NO: 1520364 - DNA, 25 bp, Homo sapien
tgcagacatgccagcacatgtgtgt

SEQ ID NO: 1520365 - DNA, 25 bp, Homo sapien
tcgtctggcttgttgacgaggttgt

SEQ ID NO: 1520366 - DNA, 25 bp, Homo sapien
gtgaagccgcgctcgtctggcttgt

SEQ ID NO: 1520367 - DNA, 25 bp, Homo sapien
gaagccgcgctcgtctggcttgttg

SEQ ID NO: 1520368 - DNA, 25 bp, Homo sapien
ccgcgctcgtctggcttgttgacga

SEQ ID NO: 1520369 - DNA, 25 bp, Homo sapien
tccagcaggaagcgaacggtctcaa

SEQ ID NO: 1520370 - DNA, 25 bp, Homo sapien
agcaggaagcgaacggtctcaatct

SEQ ID NO: 1520371 - DNA, 25 bp, Homo sapien
ccagcaggaagcgaacggtctcaat

SEQ ID NO: 1520372 - DNA, 25 bp, Homo sapien
cagcaggaagcgaacggtctcaatc

SEQ ID NO: 1520373 - DNA, 25 bp, Homo sapien
gctgcccagctgggctgggacgcac

SEQ ID NO: 1520374 - DNA, 25 bp, Homo sapien
ccccagctgcccagctgggctggga

SEQ ID NO: 1520375 - DNA, 25 bp, Homo sapien
agctgcccagctgggctgggacgca

SEQ ID NO: 1520376 - DNA, 25 bp, Homo sapien
ccagctgcccagctgggctgggacg

SEQ ID NO: 1520377 - DNA, 25 bp, Homo sapien
gacagggcgctctctcgctcttttg

SEQ ID NO: 1520378 - DNA, 25 bp, Homo sapien
tgctggccagcgacagggcgctctc

SEQ ID NO: 1520379 - DNA, 25 bp, Homo sapien
atgttgatgtccacgtcacgctcca

SEQ ID NO: 1520380 - DNA, 25 bp, Homo sapien
gcagcagccccacaatgtctgtgta

SEQ ID NO: 1520381 - DNA, 25 bp, Homo sapien
tttcacgtggttcccgcgcacagcg

SEQ ID NO: 1520382 - DNA, 25 bp, Homo sapien
gcgtacagcagtggcgtccctccat

SEQ ID NO: 1520383 - DNA, 25 bp, Homo sapien
agcaaggcctcaacgcatttcacgt

SEQ ID NO: 1520384 - DNA, 25 bp, Homo sapien
gcgcacagcgtacagcagtggcgtc

SEQ ID NO: 1520385 - DNA, 25 bp, Homo sapien
tctccactgaagaacgtggctgaag

SEQ ID NO: 1520386 - DNA, 25 bp, Homo sapien
tatcttggtctccactgaagaacgt

SEQ ID NO: 1520387 - DNA, 25 bp, Homo sapien
ctctgctatcttggtctccactgaa

SEQ ID NO: 1520388 - DNA, 25 bp, Homo sapien
cactgaagaacgtggctgaagggtc

SEQ ID NO: 1520389 - DNA, 25 bp, Homo sapien
agtcggcttcggtggtgaggtcagc

SEQ ID NO: 1520390 - DNA, 25 bp, Homo sapien
gggtgtagccagagtcggcttcggt

SEQ ID NO: 1520391 - DNA, 25 bp, Homo sapien
gccagagtcggcttcggtggtgagg

SEQ ID NO: 1520392 - DNA, 25 bp, Homo sapien
tgtagccagagtcggcttcggtggt

SEQ ID NO: 1520393 - DNA, 25 bp, Homo sapien
tttccggtatcccagggccacggca

SEQ ID NO: 1520394 - DNA, 25 bp, Homo sapien
ccacccctgctctgtgtgtctcagg

SEQ ID NO: 1520395 - DNA, 25 bp, Homo sapien
ctatggaagggaccccacccctgct

SEQ ID NO: 1520396 - DNA, 25 bp, Homo sapien
gaccccacccctgctctgtgtgtct

SEQ ID NO: 1520397 - DNA, 25 bp, Homo sapien
ccccacccctgctctgtgtgtctca

SEQ ID NO: 1520398 - DNA, 25 bp, Homo sapien
cattacagagcaaagctgggagaac

SEQ ID NO: 1520399 - DNA, 25 bp, Homo sapien
aaatgcacttttgtagcttttcaga

SEQ ID NO: 1520400 - DNA, 25 bp, Homo sapien
tgggagaaccgaggactcaccccag

SEQ ID NO: 1520401 - DNA, 25 bp, Homo sapien
caaacagggacccttgcagagacct

SEQ ID NO: 1520402 - DNA, 25 bp, Homo sapien
accaggttgctctggaagagcttga

SEQ ID NO: 1520403 - DNA, 25 bp, Homo sapien
ggcaccaggttgctctggaagagct

SEQ ID NO: 1520404 - DNA, 25 bp, Homo sapien
ctgagtgtctgagtccccggcaggc

SEQ ID NO: 1520405 - DNA, 25 bp, Homo sapien
ggctgaccattttgttccctgagtg

SEQ ID NO: 1520406 - DNA, 25 bp, Homo sapien
tgaagtcagttctgggtttccccag

SEQ ID NO: 1520407 - DNA, 25 bp, Homo sapien
gcacagaaggtttattggttcctct

SEQ ID NO: 1520408 - DNA, 25 bp, Homo sapien
ccaggttgcccacatcggtggagtg

SEQ ID NO: 1520409 - DNA, 25 bp, Homo sapien
aggcttagagggacctgcagcttcc

SEQ ID NO: 1520410 - DNA, 25 bp, Homo sapien
tgaaggtgacgtttgaggatgccac

SEQ ID NO: 1520411 - DNA, 25 bp, Homo sapien
cctgcgggtgggaaaccagaaatca

SEQ ID NO: 1520412 - DNA, 25 bp, Homo sapien
atctgcagcatcaaaaggcccaagg

SEQ ID NO: 1520413 - DNA, 25 bp, Homo sapien
tctgcagcatcaaaaggcccaaggc

SEQ ID NO: 1520414 - DNA, 25 bp, Homo sapien
ggctgcagggtaaagagacagggca

SEQ ID NO: 1520415 - DNA, 25 bp, Homo sapien
tcagtggccccagaagtagcgtggc

SEQ ID NO: 1520416 - DNA, 25 bp, Homo sapien
ccccctttcgctggcatcggtgata

SEQ ID NO: 1520417 - DNA, 25 bp, Homo sapien
ctggcagcggtacagcccagagtca

SEQ ID NO: 1520418 - DNA, 25 bp, Homo sapien
gctgagctgagacggcaggcctcct

SEQ ID NO: 1520419 - DNA, 25 bp, Homo sapien
gcatcacagttgtcaaagccatcct

SEQ ID NO: 1520420 - DNA, 25 bp, Homo sapien
agtgcatagcggtcccgggctgatc

SEQ ID NO: 1520421 - DNA, 25 bp, Homo sapien
gggcctcagcgaaggtcagtgcata

SEQ ID NO: 1520422 - DNA, 25 bp, Homo sapien
acccctggaaggctgctacggtcgc

SEQ ID NO: 1520423 - DNA, 25 bp, Homo sapien
gtgggttgcgcctcccatagctccg

SEQ ID NO: 1520424 - DNA, 25 bp, Homo sapien
catcgtagagttcctgtgggttgcg

SEQ ID NO: 1520425 - DNA, 25 bp, Homo sapien
cgccatagcaaccaggacgggactg

SEQ ID NO: 1520426 - DNA, 25 bp, Homo sapien
tggtccaggccctcatgccaggcca

SEQ ID NO: 1520427 - DNA, 25 bp, Homo sapien
gcgcgccggccagtgtcaggcggcg

SEQ ID NO: 1520428 - DNA, 25 bp, Homo sapien
gccagcccgggtcgcactggtccag

SEQ ID NO: 1520429 - DNA, 25 bp, Homo sapien
aggtgcagctgtcccaccgaggcca

SEQ ID NO: 1520430 - DNA, 25 bp, Homo sapien
gcggtagacggtgcgcacgcccggg

SEQ ID NO: 1520431 - DNA, 25 bp, Homo sapien
ccggttagcgaagcggtagacggtg

SEQ ID NO: 1520432 - DNA, 25 bp, Homo sapien
cgccggcgcggcgtctggatcgggt

SEQ ID NO: 1520433 - DNA, 25 bp, Homo sapien
gcggcgtctggatcgggtagcgcac

SEQ ID NO: 1520434 - DNA, 25 bp, Homo sapien
ctcggaagcagtaggcgtcgaagcg

SEQ ID NO: 1520435 - DNA, 25 bp, Homo sapien
gggggcgcggccaccaggggacgca

SEQ ID NO: 1520436 - DNA, 25 bp, Homo sapien
cgcggccaccaggggacgcacgcac

SEQ ID NO: 1520437 - DNA, 25 bp, Homo sapien
gggcgcggccaccaggggacgcacg

SEQ ID NO: 1520438 - DNA, 25 bp, Homo sapien
tgggggcgcggccaccaggggacgc

SEQ ID NO: 1520439 - DNA, 25 bp, Homo sapien
tgtgtctctcccttggcttggcgag

SEQ ID NO: 1520440 - DNA, 25 bp, Homo sapien
ttggcgaggctttcagggacgtggc

SEQ ID NO: 1520441 - DNA, 25 bp, Homo sapien
caaagcgagcttccatgtgtctctc

SEQ ID NO: 1520442 - DNA, 25 bp, Homo sapien
ccagggatgtggcttatcacaaagc

SEQ ID NO: 1520443 - DNA, 25 bp, Homo sapien
cccaacaagggcgagtgtcatccct

SEQ ID NO: 1520444 - DNA, 25 bp, Homo sapien
ccacatccggtgtggtgcccagagg

SEQ ID NO: 1520445 - DNA, 25 bp, Homo sapien
cccagaggtggccaattgaggcatt

SEQ ID NO: 1520446 - DNA, 25 bp, Homo sapien
attgaggcattatctcttccacggg

SEQ ID NO: 1520447 - DNA, 25 bp, Homo sapien
tctccatgttgtgacgtggggtgat

SEQ ID NO: 1520448 - DNA, 25 bp, Homo sapien
acagaatctccccctcatccccaga

SEQ ID NO: 1520449 - DNA, 25 bp, Homo sapien
aggtctccatgttgtgacgtggggt

SEQ ID NO: 1520450 - DNA, 25 bp, Homo sapien
cagttctctaactgggggcccctct

SEQ ID NO: 1520451 - DNA, 25 bp, Homo sapien
ctgcccccatgtcgctagggctggg

SEQ ID NO: 1520452 - DNA, 25 bp, Homo sapien
cgtgtgtgaacttgctgcagtgcct

SEQ ID NO: 1520453 - DNA, 25 bp, Homo sapien
gagggtctgttgagactcctgcttc

SEQ ID NO: 1520454 - DNA, 25 bp, Homo sapien
gggccaccgtgcttagccacacttc

SEQ ID NO: 1520455 - DNA, 25 bp, Homo sapien
tgtgactgccatggccaacggaggc

SEQ ID NO: 1520456 - DNA, 25 bp, Homo sapien
tgctgctggaagtagcgcccattca

SEQ ID NO: 1520457 - DNA, 25 bp, Homo sapien
cctcattggtcagatcagcccaggg

SEQ ID NO: 1520458 - DNA, 25 bp, Homo sapien
ccaacggaggctccatttggttcac

SEQ ID NO: 1520459 - DNA, 25 bp, Homo sapien
ggcactggggccctcggctttctct

SEQ ID NO: 1520460 - DNA, 25 bp, Homo sapien
tgggaccatggtagggggccacagc

SEQ ID NO: 1520461 - DNA, 25 bp, Homo sapien
gagctgagacagtggcctccaaggg

SEQ ID NO: 1520462 - DNA, 25 bp, Homo sapien
gcctgagatgctgggtgggaccatg

SEQ ID NO: 1520463 - DNA, 25 bp, Homo sapien
gcatccactctttgggaccacgcag

SEQ ID NO: 1520464 - DNA, 25 bp, Homo sapien
accacgcagcatggccatcataggg

SEQ ID NO: 1520465 - DNA, 25 bp, Homo sapien
gggtgtggtagcatccactctttgg

SEQ ID NO: 1520466 - DNA, 25 bp, Homo sapien
aactctattggcctcggtggagatg

SEQ ID NO: 1520467 - DNA, 25 bp, Homo sapien
gggagggtggagccgtggcggtggc

SEQ ID NO: 1520468 - DNA, 25 bp, Homo sapien
ggtggagccgtggcggtggcctcac

SEQ ID NO: 1520469 - DNA, 25 bp, Homo sapien
gagggtggagccgtggcggtggcct

SEQ ID NO: 1520470 - DNA, 25 bp, Homo sapien
agggtggagccgtggcggtggcctc

SEQ ID NO: 1520471 - DNA, 25 bp, Homo sapien
gagaggcagggaatacaccttggtc

SEQ ID NO: 1520472 - DNA, 25 bp, Homo sapien
agaggcagggaatacaccttggtct

SEQ ID NO: 1520473 - DNA, 25 bp, Homo sapien
agagaggcagggaatacaccttggt

SEQ ID NO: 1520474 - DNA, 25 bp, Homo sapien
gagagaggcagggaatacaccttgg

SEQ ID NO: 1520475 - DNA, 25 bp, Homo sapien
gactgctctgatgcggaggcactga

SEQ ID NO: 1520476 - DNA, 25 bp, Homo sapien
ggaacttgcatccagccctttgctg

SEQ ID NO: 1520477 - DNA, 25 bp, Homo sapien
tcagctttgttgacctgagcagggc

SEQ ID NO: 1520478 - DNA, 25 bp, Homo sapien
aatgcttgtatccagggccacctga

SEQ ID NO: 1520479 - DNA, 25 bp, Homo sapien
tcccagaagctctctacacccgggc

SEQ ID NO: 1520480 - DNA, 25 bp, Homo sapien
agttcgaagtcctctatgcccaggg

SEQ ID NO: 1520481 - DNA, 25 bp, Homo sapien
cctgcattcataggggtccctggca

SEQ ID NO: 1520482 - DNA, 25 bp, Homo sapien
gccaggacctccagttcgaagtcct

SEQ ID NO: 1520483 - DNA, 25 bp, Homo sapien
aaatcagactctactcaatgcctcg

SEQ ID NO: 1520484 - DNA, 25 bp, Homo sapien
agccaagcggcgttttacctccctg

SEQ ID NO: 1520485 - DNA, 25 bp, Homo sapien
cacgagtcaaatcaccgaattccag

SEQ ID NO: 1520486 - DNA, 25 bp, Homo sapien
tgtagacatggcttgtacctgaact

SEQ ID NO: 1520487 - DNA, 25 bp, Homo sapien
ctctatattgttctaattatagcat

SEQ ID NO: 1520488 - DNA, 25 bp, Homo sapien
aatcttctctatattgttctaatta

SEQ ID NO: 1520489 - DNA, 25 bp, Homo sapien
catatgtgctgctgaagcgagcact

SEQ ID NO: 1520490 - DNA, 25 bp, Homo sapien
cttctctatattgttctaattatag

SEQ ID NO: 1520491 - DNA, 25 bp, Homo sapien
gttctccccggcgaagccctgatca

SEQ ID NO: 1520492 - DNA, 25 bp, Homo sapien
catgaagacaagggttgttctcaca

SEQ ID NO: 1520493 - DNA, 25 bp, Homo sapien
tggtgccattggcattacatgtccc

SEQ ID NO: 1520494 - DNA, 25 bp, Homo sapien
tgatcacagctacagccatacatgg

SEQ ID NO: 1520495 - DNA, 25 bp, Homo sapien
attgacctcatcaatacaggtgcct

SEQ ID NO: 1520496 - DNA, 25 bp, Homo sapien
ttctcacaaaagctgcccccatagc

SEQ ID NO: 1520497 - DNA, 25 bp, Homo sapien
ggcagacaaagccattgacctcatc

SEQ ID NO: 1520498 - DNA, 25 bp, Homo sapien
tcacaaaagctgcccccatagctgg

SEQ ID NO: 1520499 - DNA, 25 bp, Homo sapien
ggcggcagtccttctcggcatcttc

SEQ ID NO: 1520500 - DNA, 25 bp, Homo sapien
tccggtgggcaaaatagcggtaaca

SEQ ID NO: 1520501 - DNA, 25 bp, Homo sapien
tggaacttatgccagccgcggtcac

SEQ ID NO: 1520502 - DNA, 25 bp, Homo sapien
tcctccggtgagtggacgctggtca

SEQ ID NO: 1520503 - DNA, 25 bp, Homo sapien
caggcaggtggccccctccccagag

SEQ ID NO: 1520504 - DNA, 25 bp, Homo sapien
ctccaggcaggtggccccctcccca

SEQ ID NO: 1520505 - DNA, 25 bp, Homo sapien
tccaggcaggtggccccctccccag

SEQ ID NO: 1520506 - DNA, 25 bp, Homo sapien
aggcaggtggccccctccccagagc

SEQ ID NO: 1520507 - DNA, 25 bp, Homo sapien
cagtgtaggctggaggtgcatcctc

SEQ ID NO: 1520508 - DNA, 25 bp, Homo sapien
ggcccagtgggatacatcaaggaaa

SEQ ID NO: 1520509 - DNA, 25 bp, Homo sapien
tatcccagggtttgtggccaggaga

SEQ ID NO: 1520510 - DNA, 25 bp, Homo sapien
agaaccggaagtaggcccaggctat

SEQ ID NO: 1520511 - DNA, 25 bp, Homo sapien
gggtctgggtgttcacccatgcctc

SEQ ID NO: 1520512 - DNA, 25 bp, Homo sapien
tggggggaaagatctagaaggtgga

SEQ ID NO: 1520513 - DNA, 25 bp, Homo sapien
ggtctgggtgttcacccatgcctct

SEQ ID NO: 1520514 - DNA, 25 bp, Homo sapien
cctctgtaagagctggagaagggaa

SEQ ID NO: 1520515 - DNA, 25 bp, Homo sapien
tggaaatctctctccacgatcctgt

SEQ ID NO: 1520516 - DNA, 25 bp, Homo sapien
agcccggtgttgtccgtccactgga

SEQ ID NO: 1520517 - DNA, 25 bp, Homo sapien
tctctccacgatcctgtcgttcagg

SEQ ID NO: 1520518 - DNA, 25 bp, Homo sapien
ttcaggccgatccacgtgttttcat

SEQ ID NO: 1520519 - DNA, 25 bp, Homo sapien
tccggctggttctctcgccagttct

SEQ ID NO: 1520520 - DNA, 25 bp, Homo sapien
ctgtgcccttcttgcagacataggg

SEQ ID NO: 1520521 - DNA, 25 bp, Homo sapien
gggacatcgttccagcgcccgcttt

SEQ ID NO: 1520522 - DNA, 25 bp, Homo sapien
tcgccacccgcgaagaaattgtccg

SEQ ID NO: 1520523 - DNA, 25 bp, Homo sapien
ctggtaccttacagtggcatggaca

SEQ ID NO: 1520524 - DNA, 25 bp, Homo sapien
cattgctccggcatcgaatggtggc

SEQ ID NO: 1520525 - DNA, 25 bp, Homo sapien
gacattgtacttggccttgcgggca

SEQ ID NO: 1520526 - DNA, 25 bp, Homo sapien
gcaccgatgagtgaggcattctcca

SEQ ID NO: 1520527 - DNA, 25 bp, Homo sapien
tggagaaataggatgtcttacttgg

SEQ ID NO: 1520528 - DNA, 25 bp, Homo sapien
ttaagccagatcaatgtgtggagaa

SEQ ID NO: 1520529 - DNA, 25 bp, Homo sapien
aaaaacctatgttgagatctctggg

SEQ ID NO: 1520530 - DNA, 25 bp, Homo sapien
aggctgtattatcaggcagacatta

SEQ ID NO: 1520531 - DNA, 25 bp, Homo sapien
agaggccagacgcgagggctcatcc

SEQ ID NO: 1520532 - DNA, 25 bp, Homo sapien
ggaaagaggccagacgcgagggctc

SEQ ID NO: 1520533 - DNA, 25 bp, Homo sapien
ccagacgcgagggctcatccctgtc

SEQ ID NO: 1520534 - DNA, 25 bp, Homo sapien
cagacgcgagggctcatccctgtca

SEQ ID NO: 1520535 - DNA, 25 bp, Homo sapien
cagtcctccgttgggtgtttcttgt

SEQ ID NO: 1520536 - DNA, 25 bp, Homo sapien
gcagaaattcccttcgtccttctcc

SEQ ID NO: 1520537 - DNA, 25 bp, Homo sapien
tctgcgctccttgcgggatttgtgg

SEQ ID NO: 1520538 - DNA, 25 bp, Homo sapien
gtggtgtcgccgcatccgatgtgaa

SEQ ID NO: 1520539 - DNA, 25 bp, Homo sapien
cctggaagggttagcaatacactct

SEQ ID NO: 1520540 - DNA, 25 bp, Homo sapien
taaaatgcagtacgtgggatctcca

SEQ ID NO: 1520541 - DNA, 25 bp, Homo sapien
tgtttatccaccaagaccaaagacg

SEQ ID NO: 1520542 - DNA, 25 bp, Homo sapien
tcagcgctggactagacctggaagg

SEQ ID NO: 1520543 - DNA, 25 bp, Homo sapien
taagtgtttctagaccaccaggcaa

SEQ ID NO: 1520544 - DNA, 25 bp, Homo sapien
taccaatgtctgcttaaggactggg

SEQ ID NO: 1520545 - DNA, 25 bp, Homo sapien
gcccctggtgtggagagacctttta

SEQ ID NO: 1520546 - DNA, 25 bp, Homo sapien
caatatgaccgcaggtaggtgtcac

SEQ ID NO: 1520547 - DNA, 25 bp, Homo sapien
accctgatccacagattttacccgg

SEQ ID NO: 1520548 - DNA, 25 bp, Homo sapien
cctgatccacagattttacccggac

SEQ ID NO: 1520549 - DNA, 25 bp, Homo sapien
ttaaccctgatccacagattttacc

SEQ ID NO: 1520550 - DNA, 25 bp, Homo sapien
tgatccacagattttacccggactg

SEQ ID NO: 1520551 - DNA, 25 bp, Homo sapien
cgtggttgtgacttcaagccagtac

SEQ ID NO: 1520552 - DNA, 25 bp, Homo sapien
tgaagagggccattctccacggtgc

SEQ ID NO: 1520553 - DNA, 25 bp, Homo sapien
gaaagtgtaagcagagccagagtaa

SEQ ID NO: 1520554 - DNA, 25 bp, Homo sapien
aagggattcaggctcagttaacaca

SEQ ID NO: 1520555 - DNA, 25 bp, Homo sapien
tgtccacagtgtcagataccacaga

SEQ ID NO: 1520556 - DNA, 25 bp, Homo sapien
acacacgcacatccaaaagggaaag

SEQ ID NO: 1520557 - DNA, 25 bp, Homo sapien
tgtccaagaagtacattaatgtcca

SEQ ID NO: 1520558 - DNA, 25 bp, Homo sapien
gcccactttagaaaagaccagagcc

SEQ ID NO: 1520559 - DNA, 25 bp, Homo sapien
cactagtcccttgcggtcacgtggg

SEQ ID NO: 1520560 - DNA, 25 bp, Homo sapien
ctctagtttcatgggcgagcacccc

SEQ ID NO: 1520561 - DNA, 25 bp, Homo sapien
ggtcactccccgtggtcacatggag

SEQ ID NO: 1520562 - DNA, 25 bp, Homo sapien
cctcacctggagagactacaggaac

SEQ ID NO: 1520563 - DNA, 25 bp, Homo sapien
ttggcctccacaacaacaagccgcc

SEQ ID NO: 1520564 - DNA, 25 bp, Homo sapien
tttggcctccacaacaacaagccgc

SEQ ID NO: 1520565 - DNA, 25 bp, Homo sapien
cggaagtgctcagcgaagcccagaa

SEQ ID NO: 1520566 - DNA, 25 bp, Homo sapien
agcgccaggtaccacgagtcggccg

SEQ ID NO: 1520567 - DNA, 25 bp, Homo sapien
aagcgccaggtaccacgagtcggcc

SEQ ID NO: 1520568 - DNA, 25 bp, Homo sapien
ctggaagtgcggaagtgctcagcga

SEQ ID NO: 1520569 - DNA, 25 bp, Homo sapien
gatagagaacggagcccagctgcag

SEQ ID NO: 1520570 - DNA, 25 bp, Homo sapien
cagtgcacgcacaggcggattttgg

SEQ ID NO: 1520571 - DNA, 25 bp, Homo sapien
agctgcaggtgtgtacgggcctcga

SEQ ID NO: 1520572 - DNA, 25 bp, Homo sapien
tcttggtgtggtgatagagaacgga

SEQ ID NO: 1520573 - DNA, 25 bp, Homo sapien
cataaagttggcgtgagctacagag

SEQ ID NO: 1520574 - DNA, 25 bp, Homo sapien
tgggatgcgactgacaaaaagaacg

SEQ ID NO: 1520575 - DNA, 25 bp, Homo sapien
gagcaaaggcacttcgcaaggagaa

SEQ ID NO: 1520576 - DNA, 25 bp, Homo sapien
gactgcttctcctagacagggctga

SEQ ID NO: 1520577 - DNA, 25 bp, Homo sapien
tactgttacactgggttggctctcc

SEQ ID NO: 1520578 - DNA, 25 bp, Homo sapien
tgttacactgggttggctctccaag

SEQ ID NO: 1520579 - DNA, 25 bp, Homo sapien
gagaatgagcaaggagaaatgtcac

SEQ ID NO: 1520580 - DNA, 25 bp, Homo sapien
acactgggttggctctccaagaaga

SEQ ID NO: 1520581 - DNA, 25 bp, Homo sapien
gcccactttggcctcacaaagtctt

SEQ ID NO: 1520582 - DNA, 25 bp, Homo sapien
ctgcccactttggcctcacaaagtc

SEQ ID NO: 1520583 - DNA, 25 bp, Homo sapien
atctgcccactttggcctcacaaag

SEQ ID NO: 1520584 - DNA, 25 bp, Homo sapien
aatctgcccactttggcctcacaaa

SEQ ID NO: 1520585 - DNA, 25 bp, Homo sapien
cctggctcaagaattgtcttgcctt

SEQ ID NO: 1520586 - DNA, 25 bp, Homo sapien
ctggctcaagaattgtcttgcctta

SEQ ID NO: 1520587 - DNA, 25 bp, Homo sapien
tggctcaagaattgtcttgccttag

SEQ ID NO: 1520588 - DNA, 25 bp, Homo sapien
caggttggtcactgcgaattctcta

SEQ ID NO: 1520589 - DNA, 25 bp, Homo sapien
agtgacaatgcttatagtcatcaac

SEQ ID NO: 1520590 - DNA, 25 bp, Homo sapien
tggtcactgcgaattctctagccaa

SEQ ID NO: 1520591 - DNA, 25 bp, Homo sapien
gacaatgcttatagtcatcaactat

SEQ ID NO: 1520592 - DNA, 25 bp, Homo sapien
taagtatctgaccagcacagtctgg

SEQ ID NO: 1520593 - DNA, 25 bp, Homo sapien
taagtcagatgagcaaaaccaccat

SEQ ID NO: 1520594 - DNA, 25 bp, Homo sapien
aaagaactgcttacgctgggcctga

SEQ ID NO: 1520595 - DNA, 25 bp, Homo sapien
gaaagtgaaccatagatgctcaggc

SEQ ID NO: 1520596 - DNA, 25 bp, Homo sapien
tgagtctgaggtgggccttaccctg

SEQ ID NO: 1520597 - DNA, 25 bp, Homo sapien
catgtagtaggtgccaatgatgcta

SEQ ID NO: 1520598 - DNA, 25 bp, Homo sapien
tattgcttgcaacacctctgggatg

SEQ ID NO: 1520599 - DNA, 25 bp, Homo sapien
accgtgaggtgatggttcctaaaca

SEQ ID NO: 1520600 - DNA, 25 bp, Homo sapien
cagggcaaggaggtgactgtctcca

SEQ ID NO: 1520601 - DNA, 25 bp, Homo sapien
cagggctgagtgtttcaaggcttct

SEQ ID NO: 1520602 - DNA, 25 bp, Homo sapien
aagagagggttgcaacagggccaac

SEQ ID NO: 1520603 - DNA, 25 bp, Homo sapien
ggtgcatctcaccaggtcctactaa

SEQ ID NO: 1520604 - DNA, 25 bp, Homo sapien
gggccatgatgtggctaacatcaat

SEQ ID NO: 1520605 - DNA, 25 bp, Homo sapien
tacaggcgttggacatcgtgcttgg

SEQ ID NO: 1520606 - DNA, 25 bp, Homo sapien
ggccagcaacagctttgtgtccctt

SEQ ID NO: 1520607 - DNA, 25 bp, Homo sapien
catcaatctattcagcacacagttg

SEQ ID NO: 1520608 - DNA, 25 bp, Homo sapien
gctaagcctggcacctgtgacaaag

SEQ ID NO: 1520609 - DNA, 25 bp, Homo sapien
gcctggcacctgtgacaaagctggc

SEQ ID NO: 1520610 - DNA, 25 bp, Homo sapien
agctaagcctggcacctgtgacaaa

SEQ ID NO: 1520611 - DNA, 25 bp, Homo sapien
ctaagcctggcacctgtgacaaagc

SEQ ID NO: 1520612 - DNA, 25 bp, Homo sapien
gaaaacaacgattaattctcaggca

SEQ ID NO: 1520613 - DNA, 25 bp, Homo sapien
tatccaggtaacaagaaggcggccc

SEQ ID NO: 1520614 - DNA, 25 bp, Homo sapien
gcacctggttactggctcgctctgg

SEQ ID NO: 1520615 - DNA, 25 bp, Homo sapien
tggcctgagagggtaggcttactcc

SEQ ID NO: 1520616 - DNA, 25 bp, Homo sapien
gatacattctttttatttaagtgga

SEQ ID NO: 1520617 - DNA, 25 bp, Homo sapien
tcaagctttgatacattctttttat

SEQ ID NO: 1520618 - DNA, 25 bp, Homo sapien
caagctttgatacattctttttatt

SEQ ID NO: 1520619 - DNA, 25 bp, Homo sapien
cattctttttatttaagtggagaat

SEQ ID NO: 1520620 - DNA, 25 bp, Homo sapien
ggatgcaaggtacgaagagaagcac

SEQ ID NO: 1520621 - DNA, 25 bp, Homo sapien
tgcaaggtacgaagagaagcacaaa

SEQ ID NO: 1520622 - DNA, 25 bp, Homo sapien
gatgcaaggtacgaagagaagcaca

SEQ ID NO: 1520623 - DNA, 25 bp, Homo sapien
ctggatgcaaggtacgaagagaagc

SEQ ID NO: 1520624 - DNA, 25 bp, Homo sapien
gacagtacaattcagacaacagact

SEQ ID NO: 1520625 - DNA, 25 bp, Homo sapien
gtacaattcagacaacagacttgct

SEQ ID NO: 1520626 - DNA, 25 bp, Homo sapien
ctcttgacagtacaattcagacaac

SEQ ID NO: 1520627 - DNA, 25 bp, Homo sapien
caattcagacaacagacttgctgct

SEQ ID NO: 1520628 - DNA, 25 bp, Homo sapien
cttccgcagcagcggctttgctgca

SEQ ID NO: 1520629 - DNA, 25 bp, Homo sapien
agctggaagagcaggcggcagtgcc

SEQ ID NO: 1520630 - DNA, 25 bp, Homo sapien
tccgcagcagcggctttgctgcatc

SEQ ID NO: 1520631 - DNA, 25 bp, Homo sapien
cggcagtgccaatatggggtctgct

SEQ ID NO: 1520632 - DNA, 25 bp, Homo sapien
caggtgtgccccagggtcatggtcc

SEQ ID NO: 1520633 - DNA, 25 bp, Homo sapien
tctgcgcatcgtggactctgctgtt

SEQ ID NO: 1520634 - DNA, 25 bp, Homo sapien
gggtctgcgcatcgtggactctgct

SEQ ID NO: 1520635 - DNA, 25 bp, Homo sapien
gcaggtgtgccccagggtcatggtc

SEQ ID NO: 1520636 - DNA, 25 bp, Homo sapien
ctcggcccctacacccaggaggtca

SEQ ID NO: 1520637 - DNA, 25 bp, Homo sapien
caccaggtccttctcaagcgtgtgc

SEQ ID NO: 1520638 - DNA, 25 bp, Homo sapien
ttcagatcccaccacccgggcgtac

SEQ ID NO: 1520639 - DNA, 25 bp, Homo sapien
ggtccttctcaagcgtgtgcagttg

SEQ ID NO: 1520640 - DNA, 25 bp, Homo sapien
tccccttgctgaggaggaacagcgc

SEQ ID NO: 1520641 - DNA, 25 bp, Homo sapien
catccccttgctgaggaggaacagc

SEQ ID NO: 1520642 - DNA, 25 bp, Homo sapien
ccccttgctgaggaggaacagcgcc

SEQ ID NO: 1520643 - DNA, 25 bp, Homo sapien
atccccttgctgaggaggaacagcg

SEQ ID NO: 1520644 - DNA, 25 bp, Homo sapien
ttctccacgatctgcccgcagaggg

SEQ ID NO: 1520645 - DNA, 25 bp, Homo sapien
gtcagcagcgggtgcacctcctgca

SEQ ID NO: 1520646 - DNA, 25 bp, Homo sapien
ccggcatccagatagtgggtgacct

SEQ ID NO: 1520647 - DNA, 25 bp, Homo sapien
aagacacgcagcgactccttctgga

SEQ ID NO: 1520648 - DNA, 25 bp, Homo sapien
cctgtggagactcgcctgtggccca

SEQ ID NO: 1520649 - DNA, 25 bp, Homo sapien
caagccctgtggagactcgcctgtg

SEQ ID NO: 1520650 - DNA, 25 bp, Homo sapien
ttcagacacggcttcacgctcttca

SEQ ID NO: 1520651 - DNA, 25 bp, Homo sapien
gctgcttcagacacggcttcacgct

SEQ ID NO: 1520652 - DNA, 25 bp, Homo sapien
gatggtctggatgcactgctgcagc

SEQ ID NO: 1520653 - DNA, 25 bp, Homo sapien
caggatctcatcatcgtgcagtgtg

SEQ ID NO: 1520654 - DNA, 25 bp, Homo sapien
atgagggccttgtccgtgtacttct

SEQ ID NO: 1520655 - DNA, 25 bp, Homo sapien
gcctgcatggagtgcatcacagtca

SEQ ID NO: 1520656 - DNA, 25 bp, Homo sapien
tgtccgtgtacttctgcgccttctc

SEQ ID NO: 1520657 - DNA, 25 bp, Homo sapien
tccaggtagccggcctgcatggagt

SEQ ID NO: 1520658 - DNA, 25 bp, Homo sapien
gtggccttgtgacccgtgacaaggc

SEQ ID NO: 1520659 - DNA, 25 bp, Homo sapien
ttgtgacccgtgacaaggcggcaca

SEQ ID NO: 1520660 - DNA, 25 bp, Homo sapien
gacccgtgacaaggcggcacatgat

SEQ ID NO: 1520661 - DNA, 25 bp, Homo sapien
aaggcggcacatgatgatgtgctcc

SEQ ID NO: 1520662 - DNA, 25 bp, Homo sapien
taaaggacctccagcctactgaggg

SEQ ID NO: 1520663 - DNA, 25 bp, Homo sapien
catgtgcgctatccccttggtgtgc

SEQ ID NO: 1520664 - DNA, 25 bp, Homo sapien
gacctggcgtctgagcagcaatgga

SEQ ID NO: 1520665 - DNA, 25 bp, Homo sapien
catgcagggctgtaaaacgctggcc

SEQ ID NO: 1520666 - DNA, 25 bp, Homo sapien
tggagaagagccggggggactgctg

SEQ ID NO: 1520667 - DNA, 25 bp, Homo sapien
aagagccggggggactgctggcaca

SEQ ID NO: 1520668 - DNA, 25 bp, Homo sapien
gcatggttggagaagagccgggggg

SEQ ID NO: 1520669 - DNA, 25 bp, Homo sapien
cagcaatgtgtgcagctgtgctgca

SEQ ID NO: 1520670 - DNA, 25 bp, Homo sapien
gaacattctggattctcccggggtg

SEQ ID NO: 1520671 - DNA, 25 bp, Homo sapien
aacattctggattctcccggggtgt

SEQ ID NO: 1520672 - DNA, 25 bp, Homo sapien
ggggtgttgtcacagggttactcac

SEQ ID NO: 1520673 - DNA, 25 bp, Homo sapien
gattctcccggggtgttgtcacagg

SEQ ID NO: 1520674 - DNA, 25 bp, Homo sapien
tggatctggttaggtacttacttac

SEQ ID NO: 1520675 - DNA, 25 bp, Homo sapien
ctggatctggttaggtacttactta

SEQ ID NO: 1520676 - DNA, 25 bp, Homo sapien
tatgattacctatgggaacattccg

SEQ ID NO: 1520677 - DNA, 25 bp, Homo sapien
ccggattctgattagggtgctgtca

SEQ ID NO: 1520678 - DNA, 25 bp, Homo sapien
gatcgtgcctgggaaggttatatga

SEQ ID NO: 1520679 - DNA, 25 bp, Homo sapien
gctcactgggagcattccggatcgt

SEQ ID NO: 1520680 - DNA, 25 bp, Homo sapien
tggctctaccgagccagctgcaagg

SEQ ID NO: 1520681 - DNA, 25 bp, Homo sapien
tatgacaatggctctaccgagccag

SEQ ID NO: 1520682 - DNA, 25 bp, Homo sapien
tgcaaggcaggtaatatgctcactg

SEQ ID NO: 1520683 - DNA, 25 bp, Homo sapien
ggctcagatcagagacacgtggtgt

SEQ ID NO: 1520684 - DNA, 25 bp, Homo sapien
ggtggtgttgtcatcagggccggcc

SEQ ID NO: 1520685 - DNA, 25 bp, Homo sapien
gaaggtggtgttgtcatcagggccg

SEQ ID NO: 1520686 - DNA, 25 bp, Homo sapien
aaggtggtgttgtcatcagggccgg

SEQ ID NO: 1520687 - DNA, 25 bp, Homo sapien
gtggtgttgtcatcagggccggccc

SEQ ID NO: 1520688 - DNA, 25 bp, Homo sapien
cagttgacagagacacagtacaggc

SEQ ID NO: 1520689 - DNA, 25 bp, Homo sapien
gcagttgacagagacacagtacagg

SEQ ID NO: 1520690 - DNA, 25 bp, Homo sapien
agttgacagagacacagtacaggcc

SEQ ID NO: 1520691 - DNA, 25 bp, Homo sapien
tgaactgggcttccgcgttgtccat

SEQ ID NO: 1520692 - DNA, 25 bp, Homo sapien
cgcagggccgtggtgaactgggctt

SEQ ID NO: 1520693 - DNA, 25 bp, Homo sapien
ggtgaactgggcttccgcgttgtcc

SEQ ID NO: 1520694 - DNA, 25 bp, Homo sapien
ccgcagggccgtggtgaactgggct

SEQ ID NO: 1520695 - DNA, 25 bp, Homo sapien
ggctgggtcgggtgctgtgacccat

SEQ ID NO: 1520696 - DNA, 25 bp, Homo sapien
agagcacccacaatctccacggaga

SEQ ID NO: 1520697 - DNA, 25 bp, Homo sapien
tctccacggagactactttggaaaa

SEQ ID NO: 1520698 - DNA, 25 bp, Homo sapien
cccatgtggcagtgtcagagcaccc

SEQ ID NO: 1520699 - DNA, 25 bp, Homo sapien
tcccgtatatacacactcgccaggt

SEQ ID NO: 1520700 - DNA, 25 bp, Homo sapien
tttccttcccgtatatacacactcg

SEQ ID NO: 1520701 - DNA, 25 bp, Homo sapien
gtctatttccttcccgtatatacac

SEQ ID NO: 1520702 - DNA, 25 bp, Homo sapien
ttcccgtatatacacactcgccagg

SEQ ID NO: 1520703 - DNA, 25 bp, Homo sapien
ttcagaagcgccacgtgagggcaac

SEQ ID NO: 1520704 - DNA, 25 bp, Homo sapien
cactgcagtgcatgggaatttctct

SEQ ID NO: 1520705 - DNA, 25 bp, Homo sapien
gaactgagggacatcctagggctga

SEQ ID NO: 1520706 - DNA, 25 bp, Homo sapien
tatggcatcggatgactaagccggg

SEQ ID NO: 1520707 - DNA, 25 bp, Homo sapien
gaagctgtggtccgggttgatcctc

SEQ ID NO: 1520708 - DNA, 25 bp, Homo sapien
ggaagctgtggtccgggttgatcct

SEQ ID NO: 1520709 - DNA, 25 bp, Homo sapien
gctgtggtccgggttgatcctctcc

SEQ ID NO: 1520710 - DNA, 25 bp, Homo sapien
aagctgtggtccgggttgatcctct

SEQ ID NO: 1520711 - DNA, 25 bp, Homo sapien
aaccaaagagcacggggagcctagg

SEQ ID NO: 1520712 - DNA, 25 bp, Homo sapien
aggtttacaaaacggcagtgggcag

SEQ ID NO: 1520713 - DNA, 25 bp, Homo sapien
agtcaggggccccaaccaaagagca

SEQ ID NO: 1520714 - DNA, 25 bp, Homo sapien
cctaggccgtgcgtggagtggtgcc

SEQ ID NO: 1520715 - DNA, 25 bp, Homo sapien
cctcgttgtagcgtccctggaagaa

SEQ ID NO: 1520716 - DNA, 25 bp, Homo sapien
aggagaagagcccacgcacatagaa

SEQ ID NO: 1520717 - DNA, 25 bp, Homo sapien
gagcccacgcacatagaaggcggct

SEQ ID NO: 1520718 - DNA, 25 bp, Homo sapien
ttggcctcgttgtagcgtccctgga

SEQ ID NO: 1520719 - DNA, 25 bp, Homo sapien
ggctgtgagccggttcaggtcctca

SEQ ID NO: 1520720 - DNA, 25 bp, Homo sapien
tcccagcacatagaagatgtggccc

SEQ ID NO: 1520721 - DNA, 25 bp, Homo sapien
ccagaagcacgagggagcaggctgt

SEQ ID NO: 1520722 - DNA, 25 bp, Homo sapien
tcagcattggacatcttcagagttt

SEQ ID NO: 1520723 - DNA, 25 bp, Homo sapien
tgggcgggcaccacgtttgttaaca

SEQ ID NO: 1520724 - DNA, 25 bp, Homo sapien
tgttaacagcatccatgctgaggga

SEQ ID NO: 1520725 - DNA, 25 bp, Homo sapien
actttacaggccaagacacacatct

SEQ ID NO: 1520726 - DNA, 25 bp, Homo sapien
agggagccctcagatcacgtgaaac

SEQ ID NO: 1520727 - DNA, 25 bp, Homo sapien
gtgtgactttaacctccccatctga

SEQ ID NO: 1520728 - DNA, 25 bp, Homo sapien
tctgagagttcttgggcgccgcttg

SEQ ID NO: 1520729 - DNA, 25 bp, Homo sapien
ggtgatagcacattctagaaggagc

SEQ ID NO: 1520730 - DNA, 25 bp, Homo sapien
tccccgagatctggagtcacttaag

SEQ ID NO: 1520731 - DNA, 25 bp, Homo sapien
gctccggcacttgtgctctgactgc

SEQ ID NO: 1520732 - DNA, 25 bp, Homo sapien
cattgtggccattcagccgtctgct

SEQ ID NO: 1520733 - DNA, 25 bp, Homo sapien
ctccggcacttgtgctctgactgct

SEQ ID NO: 1520734 - DNA, 25 bp, Homo sapien
tgtggccattcagccgtctgctccg

SEQ ID NO: 1520735 - DNA, 25 bp, Homo sapien
tgtggacactctagcctaacaggct

SEQ ID NO: 1520736 - DNA, 25 bp, Homo sapien
tggaccgaggactcaaagccctgta

SEQ ID NO: 1520737 - DNA, 25 bp, Homo sapien
cttgaaagtgagctccaggtgggtc

SEQ ID NO: 1520738 - DNA, 25 bp, Homo sapien
aaaaagcactgatggccgttagccc

SEQ ID NO: 1520739 - DNA, 25 bp, Homo sapien
tgtcaaccaagagcagcaaggggga

SEQ ID NO: 1520740 - DNA, 25 bp, Homo sapien
acttgccgaacccagcccaggttgg

SEQ ID NO: 1520741 - DNA, 25 bp, Homo sapien
gttgtgacctccttctgcgtctggt

SEQ ID NO: 1520742 - DNA, 25 bp, Homo sapien
gcccaggttgtgacctccttctgcg

SEQ ID NO: 1520743 - DNA, 25 bp, Homo sapien
agcagtgctgacgaccacagctgta

SEQ ID NO: 1520744 - DNA, 25 bp, Homo sapien
accacagctgtaccgacatgtccgg

SEQ ID NO: 1520745 - DNA, 25 bp, Homo sapien
gatcttgctggcgagctgcatggca

SEQ ID NO: 1520746 - DNA, 25 bp, Homo sapien
tctcagcagtgctgacgaccacagc

SEQ ID NO: 1520747 - DNA, 25 bp, Homo sapien
gatggagccctaaggtcaagtccca

SEQ ID NO: 1520748 - DNA, 25 bp, Homo sapien
tggccagccctacccaataggtatg

SEQ ID NO: 1520749 - DNA, 25 bp, Homo sapien
tcttgggatcacaaagcccatgcgc

SEQ ID NO: 1520750 - DNA, 25 bp, Homo sapien
taacagcaatgatacccgctgagtg

SEQ ID NO: 1520751 - DNA, 25 bp, Homo sapien
tgcaggcctcaatgtggtcctggag

SEQ ID NO: 1520752 - DNA, 25 bp, Homo sapien
catgggcatccatggcgttcccaca

SEQ ID NO: 1520753 - DNA, 25 bp, Homo sapien
tctggtgcatctgggcggcttcatg

SEQ ID NO: 1520754 - DNA, 25 bp, Homo sapien
catggcgttcccacaggctttattc

SEQ ID NO: 1520755 - DNA, 25 bp, Homo sapien
ccccatcaagggatcacctgaggct

SEQ ID NO: 1520756 - DNA, 25 bp, Homo sapien
aagaagaggttggaatgctgccttc

SEQ ID NO: 1520757 - DNA, 25 bp, Homo sapien
gctgctcacacagccgggactctgt

SEQ ID NO: 1520758 - DNA, 25 bp, Homo sapien
aaagagaaatacagccaaggtgccc

SEQ ID NO: 1520759 - DNA, 25 bp, Homo sapien
agaggacatgcgagtgaggcactgt

SEQ ID NO: 1520760 - DNA, 25 bp, Homo sapien
gaggacatgcgagtgaggcactgtg

SEQ ID NO: 1520761 - DNA, 25 bp, Homo sapien
cattctgagcttggaactgcacggg

SEQ ID NO: 1520762 - DNA, 25 bp, Homo sapien
gccaggctggtgttgggtccattct

SEQ ID NO: 1520763 - DNA, 25 bp, Homo sapien
actgcacggggggtggaccgtctgt

SEQ ID NO: 1520764 - DNA, 25 bp, Homo sapien
gcacggggggtggaccgtctgtcca

SEQ ID NO: 1520765 - DNA, 25 bp, Homo sapien
cttaaatttaggagacgagcccact

SEQ ID NO: 1520766 - DNA, 25 bp, Homo sapien
tagagacaatcaggaaggaagcacg

SEQ ID NO: 1520767 - DNA, 25 bp, Homo sapien
tagggtgcgggtttcacactgtgcc

SEQ ID NO: 1520768 - DNA, 25 bp, Homo sapien
tggataaaaccaaacgctgctgtct

SEQ ID NO: 1520769 - DNA, 25 bp, Homo sapien
cagggtggtcatgaaaagcacttta

SEQ ID NO: 1520770 - DNA, 25 bp, Homo sapien
cacgctctcctattggcttcatggg

SEQ ID NO: 1520771 - DNA, 25 bp, Homo sapien
gatgaacatgatgcacgccgtggtg

SEQ ID NO: 1520772 - DNA, 25 bp, Homo sapien
agatggcggtggtcctcttaggaca

SEQ ID NO: 1520773 - DNA, 25 bp, Homo sapien
gctgagcgacccacaggaaagtact

SEQ ID NO: 1520774 - DNA, 25 bp, Homo sapien
tagacacttagctacaggacactgt

SEQ ID NO: 1520775 - DNA, 25 bp, Homo sapien
gaggttcaaagcttgcacacacgca

SEQ ID NO: 1520776 - DNA, 25 bp, Homo sapien
tgaatgagatgctatgaggcgctga

SEQ ID NO: 1520777 - DNA, 25 bp, Homo sapien
ggtagccgcgataccctcccagtgt

SEQ ID NO: 1520778 - DNA, 25 bp, Homo sapien
cgacaggcagcctggtagccgcgat

SEQ ID NO: 1520779 - DNA, 25 bp, Homo sapien
aaatgcgacaggcagcctggtagcc

SEQ ID NO: 1520780 - DNA, 25 bp, Homo sapien
ggcagcctggtagccgcgataccct

SEQ ID NO: 1520781 - DNA, 25 bp, Homo sapien
cagatgtcagctgagtacaaggtgg

SEQ ID NO: 1520782 - DNA, 25 bp, Homo sapien
ccagatgtcagctgagtacaaggtg

SEQ ID NO: 1520783 - DNA, 25 bp, Homo sapien
tcctcctggatgtgcttccagatgt

SEQ ID NO: 1520784 - DNA, 25 bp, Homo sapien
gatgtcagctgagtacaaggtggtg

SEQ ID NO: 1520785 - DNA, 25 bp, Homo sapien
tctggggcctcagagatttgatttc

SEQ ID NO: 1520786 - DNA, 25 bp, Homo sapien
cagtgggggcagaaggatgatggct

SEQ ID NO: 1520787 - DNA, 25 bp, Homo sapien
gggcctcagagatttgatttcacac

SEQ ID NO: 1520788 - DNA, 25 bp, Homo sapien
aaggatgatggctctggtctggggc

SEQ ID NO: 1520789 - DNA, 25 bp, Homo sapien
aagatgcctgaattatatgctggaa

SEQ ID NO: 1520790 - DNA, 25 bp, Homo sapien
cacagaagtgtccaaggtgcaaaga

SEQ ID NO: 1520791 - DNA, 25 bp, Homo sapien
caggcagaatattatactgaagagg

SEQ ID NO: 1520792 - DNA, 25 bp, Homo sapien
aataggcttgttataccaggcagaa

SEQ ID NO: 1520793 - DNA, 25 bp, Homo sapien
ccttcacttgattctgaacttcttg

SEQ ID NO: 1520794 - DNA, 25 bp, Homo sapien
agggatcagggccttcacttgtgtc

SEQ ID NO: 1520795 - DNA, 25 bp, Homo sapien
tcacttgattctgaacttcttgcct

SEQ ID NO: 1520796 - DNA, 25 bp, Homo sapien
cacttgtgtcttcccccttcacttg

SEQ ID NO: 1520797 - DNA, 25 bp, Homo sapien
ttgaggcgcgtctctccgagtgaag

SEQ ID NO: 1520798 - DNA, 25 bp, Homo sapien
gccagcttcatgacagacagcgcat

SEQ ID NO: 1520799 - DNA, 25 bp, Homo sapien
ggcgccacaagccaatgaggtccag

SEQ ID NO: 1520800 - DNA, 25 bp, Homo sapien
gacagcgcatgacgaccagtgagtg

SEQ ID NO: 1520801 - DNA, 25 bp, Homo sapien
ggagccgcagctcagtctcgcggct

SEQ ID NO: 1520802 - DNA, 25 bp, Homo sapien
ctcggagccgcagctcagtctcgcg

SEQ ID NO: 1520803 - DNA, 25 bp, Homo sapien
cgcagctcagtctcgcggctcagtc

SEQ ID NO: 1520804 - DNA, 25 bp, Homo sapien
gccgcagctcagtctcgcggctcag

SEQ ID NO: 1520805 - DNA, 25 bp, Homo sapien
gggcgctgaccctgggcgggaggag

SEQ ID NO: 1520806 - DNA, 25 bp, Homo sapien
gaccgaccgactgcgcgggcggcgc

SEQ ID NO: 1520807 - DNA, 25 bp, Homo sapien
ggggcgctgaccctgggcgggagga

SEQ ID NO: 1520808 - DNA, 25 bp, Homo sapien
gaccgaccgaccgactgcgcgggcg

SEQ ID NO: 1520809 - DNA, 25 bp, Homo sapien
cggcggcagcggcgacaggacagac

SEQ ID NO: 1520810 - DNA, 25 bp, Homo sapien
ctcaggtggcgcccgcggcggccgc

SEQ ID NO: 1520811 - DNA, 25 bp, Homo sapien
gcgcccgcggcggccgctgtggcgg

SEQ ID NO: 1520812 - DNA, 25 bp, Homo sapien
ggcggcggcagcggcgacaggacag

SEQ ID NO: 1520813 - DNA, 25 bp, Homo sapien
ctcgggcggcgcagtccggtcaggt

SEQ ID NO: 1520814 - DNA, 25 bp, Homo sapien
cggcgcagtccggtcaggtcttgtg

SEQ ID NO: 1520815 - DNA, 25 bp, Homo sapien
gtcttgtggcgtcccgcggaggcga

SEQ ID NO: 1520816 - DNA, 25 bp, Homo sapien
tccggtcaggtcttgtggcgtcccg

SEQ ID NO: 1520817 - DNA, 25 bp, Homo sapien
tcggcgccctcgctgacggcggccg

SEQ ID NO: 1520818 - DNA, 25 bp, Homo sapien
cgccctcgctgacggcggccgacgg

SEQ ID NO: 1520819 - DNA, 25 bp, Homo sapien
gccctcgctgacggcggccgacggc

SEQ ID NO: 1520820 - DNA, 25 bp, Homo sapien
ggcgccctcgctgacggcggccgac

SEQ ID NO: 1520821 - DNA, 25 bp, Homo sapien
cccacagcttgacagtgtgataatg

SEQ ID NO: 1520822 - DNA, 25 bp, Homo sapien
cacagcttgacagtgtgataatggg

SEQ ID NO: 1520823 - DNA, 25 bp, Homo sapien
tgtcccttttgtcttcacaaaggcc

SEQ ID NO: 1520824 - DNA, 25 bp, Homo sapien
tgacaacactgtgatggcctcacgg

SEQ ID NO: 1520825 - DNA, 25 bp, Homo sapien
tcaacttggagcccaagaactcagc

SEQ ID NO: 1520826 - DNA, 25 bp, Homo sapien
gcctcgagtctggaaatcagcctat

SEQ ID NO: 1520827 - DNA, 25 bp, Homo sapien
gagcacaaatgctcccctaaagggt

SEQ ID NO: 1520828 - DNA, 25 bp, Homo sapien
cctaaagggttaagcacaaactgct

SEQ ID NO: 1520829 - DNA, 25 bp, Homo sapien
cagaagtgctgttgtgaaccggaag

SEQ ID NO: 1520830 - DNA, 25 bp, Homo sapien
ctgtactttgcattcttagtactct

SEQ ID NO: 1520831 - DNA, 25 bp, Homo sapien
acaacaatctctaagggaggatcat

SEQ ID NO: 1520832 - DNA, 25 bp, Homo sapien
caatataacaacaatctctaaggga

SEQ ID NO: 1520833 - DNA, 25 bp, Homo sapien
actttgcattcttagtactctaaag

SEQ ID NO: 1520834 - DNA, 25 bp, Homo sapien
ttggtggacaacatacaagatgact

SEQ ID NO: 1520835 - DNA, 25 bp, Homo sapien
ttttggagcccaagaagcctacagg

SEQ ID NO: 1520836 - DNA, 25 bp, Homo sapien
cactgatcgacaactgagagaccac

SEQ ID NO: 1520837 - DNA, 25 bp, Homo sapien
catactcccgaagctgacaggctgg

SEQ ID NO: 1520838 - DNA, 25 bp, Homo sapien
ctgggtcttgattaatgtcaattta

SEQ ID NO: 1520839 - DNA, 25 bp, Homo sapien
tcttgattaatgtcaatttaattaa

SEQ ID NO: 1520840 - DNA, 25 bp, Homo sapien
tgggtcttgattaatgtcaatttaa

SEQ ID NO: 1520841 - DNA, 25 bp, Homo sapien
ggtcttgattaatgtcaatttaatt

SEQ ID NO: 1520842 - DNA, 25 bp, Homo sapien
gcgcaccaggtcagcgcgcccggcc

SEQ ID NO: 1520843 - DNA, 25 bp, Homo sapien
gtcaccgcccgggacatgcgcacca

SEQ ID NO: 1520844 - DNA, 25 bp, Homo sapien
gcccctcggccgcacacatggagcc

SEQ ID NO: 1520845 - DNA, 25 bp, Homo sapien
agcccggcgccggcgtcaccgcccg

SEQ ID NO: 1520846 - DNA, 25 bp, Homo sapien
tagggcagcgcgcaggttacggggg

SEQ ID NO: 1520847 - DNA, 25 bp, Homo sapien
cagcgcgcaggttacgggggctgct

SEQ ID NO: 1520848 - DNA, 25 bp, Homo sapien
ggccgcgcgcgctcgttccgcctgt

SEQ ID NO: 1520849 - DNA, 25 bp, Homo sapien
gctcgttccgcctgtggggccgccc

SEQ ID NO: 1520850 - DNA, 25 bp, Homo sapien
ggctgaggcaggtggatcatgaggt

SEQ ID NO: 1520851 - DNA, 25 bp, Homo sapien
tgtggtgacgcacgcctgtagtcgc

SEQ ID NO: 1520852 - DNA, 25 bp, Homo sapien
cttcgaggctgggtacggtggctca

SEQ ID NO: 1520853 - DNA, 25 bp, Homo sapien
cacctgtagtcccagcactttgaga

SEQ ID NO: 1520854 - DNA, 25 bp, Homo sapien
cacccacgtgggcacggaggaggag

SEQ ID NO: 1520855 - DNA, 25 bp, Homo sapien
acccacgtgggcacggaggaggaga

SEQ ID NO: 1520856 - DNA, 25 bp, Homo sapien
acacccacgtgggcacggaggagga

SEQ ID NO: 1520857 - DNA, 25 bp, Homo sapien
tacttgaaatcgagcatcccacttc

SEQ ID NO: 1520858 - DNA, 25 bp, Homo sapien
ccatggacacaaggcgcttgcgcat

SEQ ID NO: 1520859 - DNA, 25 bp, Homo sapien
acttgctacttgaaatcgagcatcc

SEQ ID NO: 1520860 - DNA, 25 bp, Homo sapien
catggaccacgatgctggaactttt

SEQ ID NO: 1520861 - DNA, 25 bp, Homo sapien
ctttcaattcctcagacccagcacg

SEQ ID NO: 1520862 - DNA, 25 bp, Homo sapien
gcatgtgaaggagcatacacgttcc

SEQ ID NO: 1520863 - DNA, 25 bp, Homo sapien
cctttgggttcaagcacctgttact

SEQ ID NO: 1520864 - DNA, 25 bp, Homo sapien
gtgccagacctttgcacgcaccgtt

SEQ ID NO: 1520865 - DNA, 25 bp, Homo sapien
ccggcccacttcagccgcaagtgcg

SEQ ID NO: 1520866 - DNA, 25 bp, Homo sapien
aaggcccggcccacttcagccgcaa

SEQ ID NO: 1520867 - DNA, 25 bp, Homo sapien
ttcaaggcccggcccacttcagccg

SEQ ID NO: 1520868 - DNA, 25 bp, Homo sapien
gcccggcccacttcagccgcaagtg

SEQ ID NO: 1520869 - DNA, 25 bp, Homo sapien
acttccaccatcttctactccccat

SEQ ID NO: 1520870 - DNA, 25 bp, Homo sapien
ttctactccccataataaaccagac

SEQ ID NO: 1520871 - DNA, 25 bp, Homo sapien
tactccccataataaaccagacggc

SEQ ID NO: 1520872 - DNA, 25 bp, Homo sapien
gtccacccagcgtcagagcacctca

SEQ ID NO: 1520873 - DNA, 25 bp, Homo sapien
gtacatgttgtaggcccctggtctg

SEQ ID NO: 1520874 - DNA, 25 bp, Homo sapien
agtacatgttgtaggcccctggtct

SEQ ID NO: 1520875 - DNA, 25 bp, Homo sapien
agcttcccattagggtgacagccag

SEQ ID NO: 1520876 - DNA, 25 bp, Homo sapien
cattagggtgacagccagtacatgt

SEQ ID NO: 1520877 - DNA, 25 bp, Homo sapien
aaaggctacttgagacaatgtgctg

SEQ ID NO: 1520878 - DNA, 25 bp, Homo sapien
acagtgacatcaaaaggctacttga

SEQ ID NO: 1520879 - DNA, 25 bp, Homo sapien
gggtgctggtcctaccagttggcca

SEQ ID NO: 1520880 - DNA, 25 bp, Homo sapien
catcaaaaggctacttgagacaatg

SEQ ID NO: 1520881 - DNA, 25 bp, Homo sapien
cacctttccttagataagtgacagc

SEQ ID NO: 1520882 - DNA, 25 bp, Homo sapien
accaccacaagttgcccagtctgaa

SEQ ID NO: 1520883 - DNA, 25 bp, Homo sapien
gtctgaacactgacacatctaagtc

SEQ ID NO: 1520884 - DNA, 25 bp, Homo sapien
ggctcaggcaccaccctgtaggcag

SEQ ID NO: 1520885 - DNA, 25 bp, Homo sapien
aacaaaaaccaggccaggcacggtg

SEQ ID NO: 1520886 - DNA, 25 bp, Homo sapien
gctcacgcctgtaatcccagcactt

SEQ ID NO: 1520887 - DNA, 25 bp, Homo sapien
gaggtcaggagatagagaccatcct

SEQ ID NO: 1520888 - DNA, 25 bp, Homo sapien
tgggaggccaaggcgggtggatcac

SEQ ID NO: 1520889 - DNA, 25 bp, Homo sapien
tttttaacacatctaactcaggggc

SEQ ID NO: 1520890 - DNA, 25 bp, Homo sapien
acacatctaactcaggggctccttg

SEQ ID NO: 1520891 - DNA, 25 bp, Homo sapien
ccctgtgggtccttctgatacaacc

SEQ ID NO: 1520892 - DNA, 25 bp, Homo sapien
tcttgttcactctcgcttgccccat

SEQ ID NO: 1520893 - DNA, 25 bp, Homo sapien
cctccggaacagctaggatggcagg

SEQ ID NO: 1520894 - DNA, 25 bp, Homo sapien
gatggcaggtgcgtataaccacagc

SEQ ID NO: 1520895 - DNA, 25 bp, Homo sapien
tgcgtataaccacagccagcttaaa

SEQ ID NO: 1520896 - DNA, 25 bp, Homo sapien
caatcctatggccttggcctccgga

SEQ ID NO: 1520897 - DNA, 25 bp, Homo sapien
acccacagagtagataatggtgtga

SEQ ID NO: 1520898 - DNA, 25 bp, Homo sapien
tactcccaagtggtctcctaaacta

SEQ ID NO: 1520899 - DNA, 25 bp, Homo sapien
tgattaactgcaggtgcttaccacc

SEQ ID NO: 1520900 - DNA, 25 bp, Homo sapien
tagatgatccagtcacgaagctccc

SEQ ID NO: 1520901 - DNA, 25 bp, Homo sapien
cacactgttcgctgggtccctagat

SEQ ID NO: 1520902 - DNA, 25 bp, Homo sapien
gaaacaagtcatgtgcaagtccagc

SEQ ID NO: 1520903 - DNA, 25 bp, Homo sapien
tatccactcgtgatgggctacgact

SEQ ID NO: 1520904 - DNA, 25 bp, Homo sapien
tttctacttagggatcagggacacc

SEQ ID NO: 1520905 - DNA, 25 bp, Homo sapien
cactaggcctgcacagtggagagca

SEQ ID NO: 1520906 - DNA, 25 bp, Homo sapien
cagaaacatacccaggtatattaat

SEQ ID NO: 1520907 - DNA, 25 bp, Homo sapien
ggtctgcaaattcctaatgtaactc

SEQ ID NO: 1520908 - DNA, 25 bp, Homo sapien
tatatacccaagtaaccatcaacgt

SEQ ID NO: 1520909 - DNA, 25 bp, Homo sapien
cagtgggcggaatctgaccaacgac

SEQ ID NO: 1520910 - DNA, 25 bp, Homo sapien
ttctagagctactcagaaatgcagg

SEQ ID NO: 1520911 - DNA, 25 bp, Homo sapien
cgaatataagctggttcccatcacc

SEQ ID NO: 1520912 - DNA, 25 bp, Homo sapien
tcatctgaaatgctaatgacccacg

SEQ ID NO: 1520913 - DNA, 25 bp, Homo sapien
agtgaagtagtacctcccctcaggc

SEQ ID NO: 1520914 - DNA, 25 bp, Homo sapien
caggaagacgctatttacaagtgcc

SEQ ID NO: 1520915 - DNA, 25 bp, Homo sapien
ggtgaaagaaagcatcccagtacag

SEQ ID NO: 1520916 - DNA, 25 bp, Homo sapien
tacataaatatgagcaccagcgttc

SEQ ID NO: 1520917 - DNA, 25 bp, Homo sapien
gggaggtttcagtcacagtgcaagc

SEQ ID NO: 1520918 - DNA, 25 bp, Homo sapien
ggccatcacctttgaggactgaggg

SEQ ID NO: 1520919 - DNA, 25 bp, Homo sapien
tgaaccaaacacaccactgaggctg

SEQ ID NO: 1520920 - DNA, 25 bp, Homo sapien
tccctaagcacaggtgcccgagaat

SEQ ID NO: 1520921 - DNA, 25 bp, Homo sapien
tgaagtggccccacttctgcaagag

SEQ ID NO: 1520922 - DNA, 25 bp, Homo sapien
ggccccacttctgcaagagtgtcag

SEQ ID NO: 1520923 - DNA, 25 bp, Homo sapien
ctgcaagagtgtcagtcacagagca

SEQ ID NO: 1520924 - DNA, 25 bp, Homo sapien
cagcaggtacaacaccttgtccatg

SEQ ID NO: 1520925 - DNA, 25 bp, Homo sapien
ctgacgctgggttcttaacccttgg

SEQ ID NO: 1520926 - DNA, 25 bp, Homo sapien
gctgacgctgggttcttaacccttg

SEQ ID NO: 1520927 - DNA, 25 bp, Homo sapien
tggctgacgctgggttcttaaccct

SEQ ID NO: 1520928 - DNA, 25 bp, Homo sapien
gactcatgaagcatgtgattcccag

SEQ ID NO: 1520929 - DNA, 25 bp, Homo sapien
agactcatgaagcatgtgattccca

SEQ ID NO: 1520930 - DNA, 25 bp, Homo sapien
tcaccagagccctggcaacaatctc

SEQ ID NO: 1520931 - DNA, 25 bp, Homo sapien
ctcaccagagccctggcaacaatct

SEQ ID NO: 1520932 - DNA, 25 bp, Homo sapien
caccagagccctggcaacaatctcc

SEQ ID NO: 1520933 - DNA, 25 bp, Homo sapien
gccaagtacgagagatacaacttaa

SEQ ID NO: 1520934 - DNA, 25 bp, Homo sapien
tcaaacttcattaaggccaagtacg

SEQ ID NO: 1520935 - DNA, 25 bp, Homo sapien
tctggacttctcaatgtcaaacttc

SEQ ID NO: 1520936 - DNA, 25 bp, Homo sapien
caacttaacttgagagacagaaagg

SEQ ID NO: 1520937 - DNA, 25 bp, Homo sapien
gtgggcatcggtctcctctgatacg

SEQ ID NO: 1520938 - DNA, 25 bp, Homo sapien
aggctgagtgggcatcggtctcctc

SEQ ID NO: 1520939 - DNA, 25 bp, Homo sapien
gactgcaagccagcacagatgagca

SEQ ID NO: 1520940 - DNA, 25 bp, Homo sapien
tctgatacgtcccgcacacactggg

SEQ ID NO: 1520941 - DNA, 25 bp, Homo sapien
agaccaatgacgcagggcctgctac

SEQ ID NO: 1520942 - DNA, 25 bp, Homo sapien
tgacgcagggcctgctactggccaa

SEQ ID NO: 1520943 - DNA, 25 bp, Homo sapien
gctactggccaatcctcggccacca

SEQ ID NO: 1520944 - DNA, 25 bp, Homo sapien
ccaagaccaatgacgcagggcctgc

SEQ ID NO: 1520945 - DNA, 25 bp, Homo sapien
cgtgttcggcatgcttcttcggtca

SEQ ID NO: 1520946 - DNA, 25 bp, Homo sapien
cctcatgtctccgtcagtgtttaaa

SEQ ID NO: 1520947 - DNA, 25 bp, Homo sapien
aatccttgggttggacctgctcccg

SEQ ID NO: 1520948 - DNA, 25 bp, Homo sapien
caagcgctcgtttctgactccgtgt

SEQ ID NO: 1520949 - DNA, 25 bp, Homo sapien
tatttcctcagactaggaggctttg

SEQ ID NO: 1520950 - DNA, 25 bp, Homo sapien
gaatttgacataagactgcaggctg

SEQ ID NO: 1520951 - DNA, 25 bp, Homo sapien
gctttgtcaacaggagcaggcttgg

SEQ ID NO: 1520952 - DNA, 25 bp, Homo sapien
cattttaaacgctgtgaacaccaga

SEQ ID NO: 1520953 - DNA, 25 bp, Homo sapien
actgcagacagcagagtcagacaga

SEQ ID NO: 1520954 - DNA, 25 bp, Homo sapien
ctggaactttagaagaggaccttgg

SEQ ID NO: 1520955 - DNA, 25 bp, Homo sapien
tggttttagaatggggactgcagac

SEQ ID NO: 1520956 - DNA, 25 bp, Homo sapien
gaaaagccctctttggacagcagga

SEQ ID NO: 1520957 - DNA, 25 bp, Homo sapien
tgagctgtcatggactggtctctgg

SEQ ID NO: 1520958 - DNA, 25 bp, Homo sapien
tgctgagctgtcatggactggtctc

SEQ ID NO: 1520959 - DNA, 25 bp, Homo sapien
gctgagctgtcatggactggtctct

SEQ ID NO: 1520960 - DNA, 25 bp, Homo sapien
ctgctgagctgtcatggactggtct

SEQ ID NO: 1520961 - DNA, 25 bp, Homo sapien
aagaactggcaggtctaccagcaat

SEQ ID NO: 1520962 - DNA, 25 bp, Homo sapien
tccattgtctcgagtcagaagtcag

SEQ ID NO: 1520963 - DNA, 25 bp, Homo sapien
gcagaactagttaagtctttccagt

SEQ ID NO: 1520964 - DNA, 25 bp, Homo sapien
tcatagactcaagctgccaacgtgt

SEQ ID NO: 1520965 - DNA, 25 bp, Homo sapien
gagaacgttcacctacaattgggag

SEQ ID NO: 1520966 - DNA, 25 bp, Homo sapien
ccaggtattctacagatgtcaggct

SEQ ID NO: 1520967 - DNA, 25 bp, Homo sapien
ggatgtattctgcattcaccaggta

SEQ ID NO: 1520968 - DNA, 25 bp, Homo sapien
catatgaaatgtcgcagctgggcac

SEQ ID NO: 1520969 - DNA, 25 bp, Homo sapien
acgccaccacaccaggcaaatttct

SEQ ID NO: 1520970 - DNA, 25 bp, Homo sapien
gcacgccaccacaccaggcaaattt

SEQ ID NO: 1520971 - DNA, 25 bp, Homo sapien
cacgccaccacaccaggcaaatttc

SEQ ID NO: 1520972 - DNA, 25 bp, Homo sapien
caaatttctgtatttttagtggaga

SEQ ID NO: 1520973 - DNA, 25 bp, Homo sapien
gagcaacgtgctcttccatccaaaa

SEQ ID NO: 1520974 - DNA, 25 bp, Homo sapien
agcaacgtgctcttccatccaaaaa

SEQ ID NO: 1520975 - DNA, 25 bp, Homo sapien
ttttactgagcaacgtgctcttcca

SEQ ID NO: 1520976 - DNA, 25 bp, Homo sapien
tgagcaacgtgctcttccatccaaa

SEQ ID NO: 1520977 - DNA, 25 bp, Homo sapien
tcagttgcaggacccctggagaaga

SEQ ID NO: 1520978 - DNA, 25 bp, Homo sapien
ctttcagttgcaggacccctggaga

SEQ ID NO: 1520979 - DNA, 25 bp, Homo sapien
gcaggacccctggagaagagccgca

SEQ ID NO: 1520980 - DNA, 25 bp, Homo sapien
caggacccctggagaagagccgcat

SEQ ID NO: 1520981 - DNA, 25 bp, Homo sapien
ttaatgatgggcacgcatgctcacc

SEQ ID NO: 1520982 - DNA, 25 bp, Homo sapien
ccacaagtgcttgaccagggagctg

SEQ ID NO: 1520983 - DNA, 25 bp, Homo sapien
gcacagatgctactttgagccccaa

SEQ ID NO: 1520984 - DNA, 25 bp, Homo sapien
caattgcgactggttttgcaggccc

SEQ ID NO: 1520985 - DNA, 25 bp, Homo sapien
gccccatgctcacgtggttgtcggg

SEQ ID NO: 1520986 - DNA, 25 bp, Homo sapien
gggcaattccagtgtcgacctcacc

SEQ ID NO: 1520987 - DNA, 25 bp, Homo sapien
tgtctcgggcacaccaggagagccc

SEQ ID NO: 1520988 - DNA, 25 bp, Homo sapien
gagccccatgctcacgtggttgtcg

SEQ ID NO: 1520989 - DNA, 25 bp, Homo sapien
cagctgtgccacattagtccatcgt

SEQ ID NO: 1520990 - DNA, 25 bp, Homo sapien
tgcattcctgtagacagccggccgg

SEQ ID NO: 1520991 - DNA, 25 bp, Homo sapien
tgtgccacattagtccatcgtccat

SEQ ID NO: 1520992 - DNA, 25 bp, Homo sapien
tctcattcaaggacgtgcattcctg

SEQ ID NO: 1520993 - DNA, 25 bp, Homo sapien
gataaagggaaattggatgaggagc

SEQ ID NO: 1520994 - DNA, 25 bp, Homo sapien
gattagagtcccagataaagggaaa

SEQ ID NO: 1520995 - DNA, 25 bp, Homo sapien
gcgatttctgggattagagtcccag

SEQ ID NO: 1520996 - DNA, 25 bp, Homo sapien
atttcagcgatttctgggattagag

SEQ ID NO: 1520997 - DNA, 25 bp, Homo sapien
ctcgatgtccatataaagtgtggcc

SEQ ID NO: 1520998 - DNA, 25 bp, Homo sapien
cgatgtccatataaagtgtggcctc

SEQ ID NO: 1520999 - DNA, 25 bp, Homo sapien
gatgtccatataaagtgtggcctct

SEQ ID NO: 1521000 - DNA, 25 bp, Homo sapien
tcgatgtccatataaagtgtggcct

SEQ ID NO: 1521001 - DNA, 25 bp, Homo sapien
agaagccgccccgtagcctccaggt

SEQ ID NO: 1521002 - DNA, 25 bp, Homo sapien
cactgcaactgcttgcagcatggca

SEQ ID NO: 1521003 - DNA, 25 bp, Homo sapien
tcactgcaactgcttgcagcatggc

SEQ ID NO: 1521004 - DNA, 25 bp, Homo sapien
cgtagcctccaggttggtttcactg

SEQ ID NO: 1521005 - DNA, 25 bp, Homo sapien
ctgccaggaacttccatagaatttc

SEQ ID NO: 1521006 - DNA, 25 bp, Homo sapien
gccaaggacagacacgtcctctagg

SEQ ID NO: 1521007 - DNA, 25 bp, Homo sapien
cagagaacaaactcggacaaagtta

SEQ ID NO: 1521008 - DNA, 25 bp, Homo sapien
tggttgccgcagctcaaagttgtcc

SEQ ID NO: 1521009 - DNA, 25 bp, Homo sapien
gacagacacgtcctctaggtggcac

SEQ ID NO: 1521010 - DNA, 25 bp, Homo sapien
aggtgggcaccctgatggtagggac

SEQ ID NO: 1521011 - DNA, 25 bp, Homo sapien
caccctgatggtagggacttcatgc

SEQ ID NO: 1521012 - DNA, 25 bp, Homo sapien
gcacccaatcccagtgcccaggtgg

SEQ ID NO: 1521013 - DNA, 25 bp, Homo sapien
acgtcatagggcacccaatcccagt

SEQ ID NO: 1521014 - DNA, 25 bp, Homo sapien
ctgtggggtggagacagtagtgacc

SEQ ID NO: 1521015 - DNA, 25 bp, Homo sapien
gtagtgaccagagcgcccttgacag

SEQ ID NO: 1521016 - DNA, 25 bp, Homo sapien
cagtagtgaccagagcgcccttgac

SEQ ID NO: 1521017 - DNA, 25 bp, Homo sapien
tggggtggagacagtagtgaccaga

SEQ ID NO: 1521018 - DNA, 25 bp, Homo sapien
gggcctcggtgctagtctccttcaa

SEQ ID NO: 1521019 - DNA, 25 bp, Homo sapien
aaggccaccgtggtcagcccattca

SEQ ID NO: 1521020 - DNA, 25 bp, Homo sapien
ggctgctcgttgtcggagagcacaa

SEQ ID NO: 1521021 - DNA, 25 bp, Homo sapien
ttcactctcgggctcgagggctgct

SEQ ID NO: 1521022 - DNA, 25 bp, Homo sapien
cctttctcgttcttcaggactgctt

SEQ ID NO: 1521023 - DNA, 25 bp, Homo sapien
tttctcgttcttcaggactgctttt

SEQ ID NO: 1521024 - DNA, 25 bp, Homo sapien
ctttctcgttcttcaggactgcttt

SEQ ID NO: 1521025 - DNA, 25 bp, Homo sapien
tcaacaacacgagttttgcttcttc

SEQ ID NO: 1521026 - DNA, 25 bp, Homo sapien
ttttcaacaacacgagttttgcttc

SEQ ID NO: 1521027 - DNA, 25 bp, Homo sapien
gactctgccgcaactttttcaacaa

SEQ ID NO: 1521028 - DNA, 25 bp, Homo sapien
gtatttgactctgccgcaacttttt

SEQ ID NO: 1521029 - DNA, 25 bp, Homo sapien
gtggtcacggtgctcccaacagaac

SEQ ID NO: 1521030 - DNA, 25 bp, Homo sapien
ggaggggtggtcacggtgctcccaa

SEQ ID NO: 1521031 - DNA, 25 bp, Homo sapien
atgttctgagtgccccgaacaagcg

SEQ ID NO: 1521032 - DNA, 25 bp, Homo sapien
gttctgagtgccccgaacaagcggg

SEQ ID NO: 1521033 - DNA, 25 bp, Homo sapien
atgcctgtaatcccagcactttgtg

SEQ ID NO: 1521034 - DNA, 25 bp, Homo sapien
aaattatggatgggcacagtggcac

SEQ ID NO: 1521035 - DNA, 25 bp, Homo sapien
catgaggtcagaagtttgagaccag

SEQ ID NO: 1521036 - DNA, 25 bp, Homo sapien
tgtgaggccgaggtaggcagatcat

SEQ ID NO: 1521037 - DNA, 25 bp, Homo sapien
gggtatgacactgccgggcatccga

SEQ ID NO: 1521038 - DNA, 25 bp, Homo sapien
gggcatgacgacctgtgagctcgcc

SEQ ID NO: 1521039 - DNA, 25 bp, Homo sapien
cactgccgggcatccgagctgaaga

SEQ ID NO: 1521040 - DNA, 25 bp, Homo sapien
tgtggccccagcttcgaggacgcct

SEQ ID NO: 1521041 - DNA, 25 bp, Homo sapien
ggctggtgttgggaacattggcgac

SEQ ID NO: 1521042 - DNA, 25 bp, Homo sapien
tgggatgttgacgagcaggctggtg

SEQ ID NO: 1521043 - DNA, 25 bp, Homo sapien
tgcacactgggcaccgacgcccggg

SEQ ID NO: 1521044 - DNA, 25 bp, Homo sapien
acattggcgacgcggatgaggccct

SEQ ID NO: 1521045 - DNA, 25 bp, Homo sapien
tgtgtctccagtaggttctgcacca

SEQ ID NO: 1521046 - DNA, 25 bp, Homo sapien
tccaggccgaccaggtagatgaact

SEQ ID NO: 1521047 - DNA, 25 bp, Homo sapien
ggatctcgagtagcgtcttctccag

SEQ ID NO: 1521048 - DNA, 25 bp, Homo sapien
tagatgaactcgttgttggcggcgc

SEQ ID NO: 1521049 - DNA, 25 bp, Homo sapien
agcggcacgtgaagtccgtcttgca

SEQ ID NO: 1521050 - DNA, 25 bp, Homo sapien
tgcacacatgtagggctcccgggac

SEQ ID NO: 1521051 - DNA, 25 bp, Homo sapien
cagttctcacacatgatggcgccgc

SEQ ID NO: 1521052 - DNA, 25 bp, Homo sapien
tggttggttgtcatgcagttctcac

SEQ ID NO: 1521053 - DNA, 25 bp, Homo sapien
caaacgcccctttggtatctcaacg

SEQ ID NO: 1521054 - DNA, 25 bp, Homo sapien
gacaagcagtacttgtcagccggca

SEQ ID NO: 1521055 - DNA, 25 bp, Homo sapien
tgcaagtgagagctacaaagtctaa

SEQ ID NO: 1521056 - DNA, 25 bp, Homo sapien
cgtgcagttaacaatcaggcggtgc

SEQ ID NO: 1521057 - DNA, 25 bp, Homo sapien
cgctggccggcccagggtgaccgag

SEQ ID NO: 1521058 - DNA, 25 bp, Homo sapien
gccggcccagggtgaccgagggtga

SEQ ID NO: 1521059 - DNA, 25 bp, Homo sapien
tgcggtccgctggccggcccagggt

SEQ ID NO: 1521060 - DNA, 25 bp, Homo sapien
ggcccagggtgaccgagggtgagcc

SEQ ID NO: 1521061 - DNA, 25 bp, Homo sapien
ctctcctgagcggaacgccaactta

SEQ ID NO: 1521062 - DNA, 25 bp, Homo sapien
tgagcggaacgccaacttacgccgg

SEQ ID NO: 1521063 - DNA, 25 bp, Homo sapien
cccgttactccagtcgcgggcctct

SEQ ID NO: 1521064 - DNA, 25 bp, Homo sapien
tgtagcacagccccgttactccagt

SEQ ID NO: 1521065 - DNA, 25 bp, Homo sapien
acagtcggcgactgacgtggtcacg

SEQ ID NO: 1521066 - DNA, 25 bp, Homo sapien
gaagaggcagcgtgacagtcggcga

SEQ ID NO: 1521067 - DNA, 25 bp, Homo sapien
ctgacgtggtcacgggctgcggtgg

SEQ ID NO: 1521068 - DNA, 25 bp, Homo sapien
tcccggcgcccagtgcggttctgac

SEQ ID NO: 1521069 - DNA, 25 bp, Homo sapien
ttgccggcgctcacggttctctcag

SEQ ID NO: 1521070 - DNA, 25 bp, Homo sapien
tcttccagttggaggtggcgctgcc

SEQ ID NO: 1521071 - DNA, 25 bp, Homo sapien
gacggactgaacgtgtgcaggacac

SEQ ID NO: 1521072 - DNA, 25 bp, Homo sapien
tctcagaatgtctgccggtcctgct

SEQ ID NO: 1521073 - DNA, 25 bp, Homo sapien
gagtatttttagtggtggctaatac

SEQ ID NO: 1521074 - DNA, 25 bp, Homo sapien
gcatgtctggccctaagagtatttt

SEQ ID NO: 1521075 - DNA, 25 bp, Homo sapien
gctaatacattttgtggaaaaagcg

SEQ ID NO: 1521076 - DNA, 25 bp, Homo sapien
cagaaacctggcaactgggtcctgc

SEQ ID NO: 1521077 - DNA, 25 bp, Homo sapien
tccaggaggtactctcgctggcggt

SEQ ID NO: 1521078 - DNA, 25 bp, Homo sapien
cggtccacggccgaggagctcttgt

SEQ ID NO: 1521079 - DNA, 25 bp, Homo sapien
ttgggctgacaaacgcaagggtccc

SEQ ID NO: 1521080 - DNA, 25 bp, Homo sapien
gaggagctcttgtgcaccgccaggc

SEQ ID NO: 1521081 - DNA, 25 bp, Homo sapien
catcacagtgtccagggtgagccgc

SEQ ID NO: 1521082 - DNA, 25 bp, Homo sapien
ctggtgtcgggcaaactaaaggcaa

SEQ ID NO: 1521083 - DNA, 25 bp, Homo sapien
gatgatgcagcgtacaacagggacc

SEQ ID NO: 1521084 - DNA, 25 bp, Homo sapien
tcaacttatagatcgccatgggaag

SEQ ID NO: 1521085 - DNA, 25 bp, Homo sapien
tccttctcccttaatgggcagcttc

SEQ ID NO: 1521086 - DNA, 25 bp, Homo sapien
gaggcgttcagctggagcgagggct

SEQ ID NO: 1521087 - DNA, 25 bp, Homo sapien
caagcagcaatggaggcgttcagct

SEQ ID NO: 1521088 - DNA, 25 bp, Homo sapien
tccagaacaagcagcaatggaggcg

SEQ ID NO: 1521089 - DNA, 25 bp, Homo sapien
ccgcgacagtcccccctccagcttt

SEQ ID NO: 1521090 - DNA, 25 bp, Homo sapien
ccctccagctttctgctcagggctg

SEQ ID NO: 1521091 - DNA, 25 bp, Homo sapien
cacaacagaaaaaccccgcgacagt

SEQ ID NO: 1521092 - DNA, 25 bp, Homo sapien
ccacaacagaaaaaccccgcgacag

SEQ ID NO: 1521093 - DNA, 25 bp, Homo sapien
taaagtccctaactgcatgggtagg

SEQ ID NO: 1521094 - DNA, 25 bp, Homo sapien
ccagggtggcttaagattgcgtcca

SEQ ID NO: 1521095 - DNA, 25 bp, Homo sapien
ctgcaagagacacggaacggcttct

SEQ ID NO: 1521096 - DNA, 25 bp, Homo sapien
cagggctggagctcaattggaacca

SEQ ID NO: 1521097 - DNA, 25 bp, Homo sapien
actaggtcttctatgctgtgtcaaa

SEQ ID NO: 1521098 - DNA, 25 bp, Homo sapien
tacagactgaggatattcacacgac

SEQ ID NO: 1521099 - DNA, 25 bp, Homo sapien
tcagcccatccaagttatgcacaaa

SEQ ID NO: 1521100 - DNA, 25 bp, Homo sapien
cacacagaaaaatgcgaggaataga

SEQ ID NO: 1521101 - DNA, 25 bp, Homo sapien
ccagccactgcatagaactgaggtt

SEQ ID NO: 1521102 - DNA, 25 bp, Homo sapien
cggcaggtgcggctcggatctggcc

SEQ ID NO: 1521103 - DNA, 25 bp, Homo sapien
tgacttcggtctggatgcctgatcc

SEQ ID NO: 1521104 - DNA, 25 bp, Homo sapien
cagctgacccaagctggagcaggca

SEQ ID NO: 1521105 - DNA, 25 bp, Homo sapien
aaggatgggttgacagccatcagcc

SEQ ID NO: 1521106 - DNA, 25 bp, Homo sapien
agtatgtacgttgtccctgatggaa

SEQ ID NO: 1521107 - DNA, 25 bp, Homo sapien
cctgatggaatgctccctggggaca

SEQ ID NO: 1521108 - DNA, 25 bp, Homo sapien
cctttcgaggggcagcagtccatat

SEQ ID NO: 1521109 - DNA, 25 bp, Homo sapien
aaaagtttacatcacagtatgtacg

SEQ ID NO: 1521110 - DNA, 25 bp, Homo sapien
cctgatcctggtagggctctcggga

SEQ ID NO: 1521111 - DNA, 25 bp, Homo sapien
tacaacaggcgaggtgtgaactctg

SEQ ID NO: 1521112 - DNA, 25 bp, Homo sapien
gtcataatacaacaacccgcttggg

SEQ ID NO: 1521113 - DNA, 25 bp, Homo sapien
gcagctgacagagggaaccgtttcc

SEQ ID NO: 1521114 - DNA, 25 bp, Homo sapien
gtccgtggagtacaggtaagaccag

SEQ ID NO: 1521115 - DNA, 25 bp, Homo sapien
ggtaagaccaggcacaactagcact

SEQ ID NO: 1521116 - DNA, 25 bp, Homo sapien
tgagaagggccgctacagacctcgt

SEQ ID NO: 1521117 - DNA, 25 bp, Homo sapien
ctgtgggctgttccactctgagaag

SEQ ID NO: 1521118 - DNA, 25 bp, Homo sapien
cctacggcagagcagcaaggatcat

SEQ ID NO: 1521119 - DNA, 25 bp, Homo sapien
tctttaggttaacgtcatgtgcagc

SEQ ID NO: 1521120 - DNA, 25 bp, Homo sapien
tagctcagcatcaaaaaccctacgg

SEQ ID NO: 1521121 - DNA, 25 bp, Homo sapien
gatacaacgtatagccacccattcc

SEQ ID NO: 1521122 - DNA, 25 bp, Homo sapien
agtgcgaaaacgtgctgctgagccc

SEQ ID NO: 1521123 - DNA, 25 bp, Homo sapien
cgtcacccgaggtgctcctgggcat

SEQ ID NO: 1521124 - DNA, 25 bp, Homo sapien
tgcaccgcgacctcaagtgcgaaaa

SEQ ID NO: 1521125 - DNA, 25 bp, Homo sapien
gctacctgcacgatcatcacctggt

SEQ ID NO: 1521126 - DNA, 25 bp, Homo sapien
gtctagggactctacgcgaagccca

SEQ ID NO: 1521127 - DNA, 25 bp, Homo sapien
tccacgtagtcacgggctgggtaca

SEQ ID NO: 1521128 - DNA, 25 bp, Homo sapien
tgctcgaagtcggactcaccccaat

SEQ ID NO: 1521129 - DNA, 25 bp, Homo sapien
aactccgagctctcaaaggagccag

SEQ ID NO: 1521130 - DNA, 25 bp, Homo sapien
agtagtgtaactatccgaccgcgcg

SEQ ID NO: 1521131 - DNA, 25 bp, Homo sapien
aagtgacttactgccaccgccatga

SEQ ID NO: 1521132 - DNA, 25 bp, Homo sapien
tttgcccagacagggcgtgactcgc

SEQ ID NO: 1521133 - DNA, 25 bp, Homo sapien
cacggctaggaagtcccggacagta

SEQ ID NO: 1521134 - DNA, 25 bp, Homo sapien
cggcaagttccgtttgtagtcgatg

SEQ ID NO: 1521135 - DNA, 25 bp, Homo sapien
ccccggcggaggcatgtcctgcttc

SEQ ID NO: 1521136 - DNA, 25 bp, Homo sapien
ccgacagtcctcgacgcggcaagtt

SEQ ID NO: 1521137 - DNA, 25 bp, Homo sapien
cgtttgtagtcgatgggcccatagc

SEQ ID NO: 1521138 - DNA, 25 bp, Homo sapien
gcaacagaaccataccgtcttaaaa

SEQ ID NO: 1521139 - DNA, 25 bp, Homo sapien
gggactgagtatgggcgccttttaa

SEQ ID NO: 1521140 - DNA, 25 bp, Homo sapien
gtattcactcttagattacgtttaa

SEQ ID NO: 1521141 - DNA, 25 bp, Homo sapien
caattttctgtgctgagcccgataa

SEQ ID NO: 1521142 - DNA, 25 bp, Homo sapien
cactcaacaatgaaagcagggccat

SEQ ID NO: 1521143 - DNA, 25 bp, Homo sapien
taaacaaagagcacaccagcatagg

SEQ ID NO: 1521144 - DNA, 25 bp, Homo sapien
gcacatcctggcttaagtgggccca

SEQ ID NO: 1521145 - DNA, 25 bp, Homo sapien
cactgtggaccatggctcaggagag

SEQ ID NO: 1521146 - DNA, 25 bp, Homo sapien
caatcaggggacactggcggcttct

SEQ ID NO: 1521147 - DNA, 25 bp, Homo sapien
acactggcggcttctcaggagtgag

SEQ ID NO: 1521148 - DNA, 25 bp, Homo sapien
tgcttggactgtgacacctctgccc

SEQ ID NO: 1521149 - DNA, 25 bp, Homo sapien
ctgcaatcaggggacactggcggct

SEQ ID NO: 1521150 - DNA, 25 bp, Homo sapien
agatcagggttccaatccctatggc

SEQ ID NO: 1521151 - DNA, 25 bp, Homo sapien
gatcagggttccaatccctatggcc

SEQ ID NO: 1521152 - DNA, 25 bp, Homo sapien
ctgcgctcacggttccacttcatta

SEQ ID NO: 1521153 - DNA, 25 bp, Homo sapien
gacatctcgaggacagagcctagaa

SEQ ID NO: 1521154 - DNA, 25 bp, Homo sapien
gattgcagacatggagacatctcga

SEQ ID NO: 1521155 - DNA, 25 bp, Homo sapien
tctgacaaaatcctgcttagagggc

SEQ ID NO: 1521156 - DNA, 25 bp, Homo sapien
ggtttgagcctggtcacctctgaca

SEQ ID NO: 1521157 - DNA, 25 bp, Homo sapien
gatgcgagcctcgaagtcctcgatt

SEQ ID NO: 1521158 - DNA, 25 bp, Homo sapien
acagcgcgatgcgagcctcgaagtc

SEQ ID NO: 1521159 - DNA, 25 bp, Homo sapien
ctgtaacagtggcaacagcgcgatg

SEQ ID NO: 1521160 - DNA, 25 bp, Homo sapien
ctcgaagtcctcgatttgtaggcgc

SEQ ID NO: 1521161 - DNA, 25 bp, Homo sapien
cccctagtagcaccccttcaagcct

SEQ ID NO: 1521162 - DNA, 25 bp, Homo sapien
tgcctagggcccctagtagcacccc

SEQ ID NO: 1521163 - DNA, 25 bp, Homo sapien
agcctccctccgaccctgtctcctt

SEQ ID NO: 1521164 - DNA, 25 bp, Homo sapien
tggccaccttcggggatgcaggtca

SEQ ID NO: 1521165 - DNA, 25 bp, Homo sapien
tcgggcacgtccttcatgatgatgg

SEQ ID NO: 1521166 - DNA, 25 bp, Homo sapien
ggttctcccgaagcatctgcaaggt

SEQ ID NO: 1521167 - DNA, 25 bp, Homo sapien
ccaggttctcccgaagcatctgcaa

SEQ ID NO: 1521168 - DNA, 25 bp, Homo sapien
acgtccttcatgatgatggcctcct

SEQ ID NO: 1521169 - DNA, 25 bp, Homo sapien
cgtggctggcatggagagcctcctc

SEQ ID NO: 1521170 - DNA, 25 bp, Homo sapien
tctgtggtgcgcagcccgtacagct

SEQ ID NO: 1521171 - DNA, 25 bp, Homo sapien
gcacccagcgggttgtgtggaacac

SEQ ID NO: 1521172 - DNA, 25 bp, Homo sapien
tacagctccccgatcaaggggggca

SEQ ID NO: 1521173 - DNA, 25 bp, Homo sapien
agggatccaggtggccggagggcac

SEQ ID NO: 1521174 - DNA, 25 bp, Homo sapien
ggcagggatccaggtggccggaggg

SEQ ID NO: 1521175 - DNA, 25 bp, Homo sapien
ggatccaggtggccggagggcacag

SEQ ID NO: 1521176 - DNA, 25 bp, Homo sapien
tattccgtcccagtggggaggggca

SEQ ID NO: 1521177 - DNA, 25 bp, Homo sapien
ggcgccgggcgctgccgccaccgcc

SEQ ID NO: 1521178 - DNA, 25 bp, Homo sapien
ctgccgccaccgccaccgcctttta

SEQ ID NO: 1521179 - DNA, 25 bp, Homo sapien
gccgaggtgagcccgggcgccgggc

SEQ ID NO: 1521180 - DNA, 25 bp, Homo sapien
gcgctgccgccaccgccaccgcctt

SEQ ID NO: 1521181 - DNA, 25 bp, Homo sapien
ggaaatgccgctcttcgggcgcctc

SEQ ID NO: 1521182 - DNA, 25 bp, Homo sapien
gcgcctccgacgggtctgggccggc

SEQ ID NO: 1521183 - DNA, 25 bp, Homo sapien
tgccgctcttcgggcgcctccgacg

SEQ ID NO: 1521184 - DNA, 25 bp, Homo sapien
gaggaaatgccgctcttcgggcgcc

SEQ ID NO: 1521185 - DNA, 25 bp, Homo sapien
cggaggcagtttccccagcaacgca

SEQ ID NO: 1521186 - DNA, 25 bp, Homo sapien
cagcaacgcagcttagtgtctccag

SEQ ID NO: 1521187 - DNA, 25 bp, Homo sapien
atgaatcattcatgaggggcgggct

SEQ ID NO: 1521188 - DNA, 25 bp, Homo sapien
caagatgccaggagggtctcggatt

SEQ ID NO: 1521189 - DNA, 25 bp, Homo sapien
acaagggaggtggtagcatttgagc

SEQ ID NO: 1521190 - DNA, 25 bp, Homo sapien
aacaggccctgcgttccaaatctgc

SEQ ID NO: 1521191 - DNA, 25 bp, Homo sapien
tgagctaagctccgctcttcccatg

SEQ ID NO: 1521192 - DNA, 25 bp, Homo sapien
cgctcttcccatgtcggcaagtggg

SEQ ID NO: 1521193 - DNA, 25 bp, Homo sapien
tgtcccaaagctttggcctctagca

SEQ ID NO: 1521194 - DNA, 25 bp, Homo sapien
gggcgatgcattcctcttcttctgt

SEQ ID NO: 1521195 - DNA, 25 bp, Homo sapien
tctagcagccacttggaacattctc

SEQ ID NO: 1521196 - DNA, 25 bp, Homo sapien
gcgggagggcgatgcattcctcttc

SEQ ID NO: 1521197 - DNA, 25 bp, Homo sapien
gagccacggaacaagcttcaggacg

SEQ ID NO: 1521198 - DNA, 25 bp, Homo sapien
agtgtttgatggcacactcagcggg

SEQ ID NO: 1521199 - DNA, 25 bp, Homo sapien
agaccctttggtgaccgattttcag

SEQ ID NO: 1521200 - DNA, 25 bp, Homo sapien
ggtccatgggtttttaaggctgcag

SEQ ID NO: 1521201 - DNA, 25 bp, Homo sapien
tggtcacagccacggcactagcatg

SEQ ID NO: 1521202 - DNA, 25 bp, Homo sapien
gcacagctccacgagctgctgccgc

SEQ ID NO: 1521203 - DNA, 25 bp, Homo sapien
acggcactagcatgaccgcacagct

SEQ ID NO: 1521204 - DNA, 25 bp, Homo sapien
tgctgccgcccaaagcgataatcct

SEQ ID NO: 1521205 - DNA, 25 bp, Homo sapien
tatcctccccaaaggcttagcgcag

SEQ ID NO: 1521206 - DNA, 25 bp, Homo sapien
tatcaaatgcgatgacagtgccacc

SEQ ID NO: 1521207 - DNA, 25 bp, Homo sapien
gagcgccaggcgagtagtgactact

SEQ ID NO: 1521208 - DNA, 25 bp, Homo sapien
gctagagcctcgactgtatgggaca

SEQ ID NO: 1521209 - DNA, 25 bp, Homo sapien
ggaaaaacgtgcatccagccactgc

SEQ ID NO: 1521210 - DNA, 25 bp, Homo sapien
gtttgtttattctccgcctgagttg

SEQ ID NO: 1521211 - DNA, 25 bp, Homo sapien
cagtttccccgctggagatgcagag

SEQ ID NO: 1521212 - DNA, 25 bp, Homo sapien
gcaacaggataggacaggaggtgag

SEQ ID NO: 1521213 - DNA, 25 bp, Homo sapien
ggccacacacgaccagcaccgtcct

SEQ ID NO: 1521214 - DNA, 25 bp, Homo sapien
gggagagagcgggcaacgggaacgc

SEQ ID NO: 1521215 - DNA, 25 bp, Homo sapien
tctgctccgggccacacacgaccag

SEQ ID NO: 1521216 - DNA, 25 bp, Homo sapien
ccccactgccccgttctgctccggg

SEQ ID NO: 1521217 - DNA, 25 bp, Homo sapien
tggtcaggtcccgatgcagcaggtc

SEQ ID NO: 1521218 - DNA, 25 bp, Homo sapien
ctgggtggtcaggtcccgatgcagc

SEQ ID NO: 1521219 - DNA, 25 bp, Homo sapien
ccgatgcagcaggtccagcgagcgt

SEQ ID NO: 1521220 - DNA, 25 bp, Homo sapien
gtcccgatgcagcaggtccagcgag

SEQ ID NO: 1521221 - DNA, 25 bp, Homo sapien
aggaaggggatgtccatcttctcgc

SEQ ID NO: 1521222 - DNA, 25 bp, Homo sapien
ggaaggggatgtccatcttctcgca

SEQ ID NO: 1521223 - DNA, 25 bp, Homo sapien
caggaaggggatgtccatcttctcg

SEQ ID NO: 1521224 - DNA, 25 bp, Homo sapien
gcgtggccagcgcgcgggtgcaggg

SEQ ID NO: 1521225 - DNA, 25 bp, Homo sapien
cagcccataggcttcgttaatgagc

SEQ ID NO: 1521226 - DNA, 25 bp, Homo sapien
cataggcttcgttaatgagctgcac

SEQ ID NO: 1521227 - DNA, 25 bp, Homo sapien
ggcccagtacggcatccaccaccag

SEQ ID NO: 1521228 - DNA, 25 bp, Homo sapien
ttcagacaggcaggggcgaccagga

SEQ ID NO: 1521229 - DNA, 25 bp, Homo sapien
caggccccaatgtgcccccctctgc

SEQ ID NO: 1521230 - DNA, 25 bp, Homo sapien
tggggagattgaggttcagacaggc

SEQ ID NO: 1521231 - DNA, 25 bp, Homo sapien
aggttcagacaggcaggggcgacca

SEQ ID NO: 1521232 - DNA, 25 bp, Homo sapien
ggatgggtgtgacccttagcctcag

SEQ ID NO: 1521233 - DNA, 25 bp, Homo sapien
tcagccaagtgtgggtccatccaag

SEQ ID NO: 1521234 - DNA, 25 bp, Homo sapien
gatgggtgtgacccttagcctcagc

SEQ ID NO: 1521235 - DNA, 25 bp, Homo sapien
gggcagagggcatgtgggctgggca

SEQ ID NO: 1521236 - DNA, 25 bp, Homo sapien
gtctgcccaggcaactgggccaggg

SEQ ID NO: 1521237 - DNA, 25 bp, Homo sapien
gggtgggcagagggcatgtgggctg

SEQ ID NO: 1521238 - DNA, 25 bp, Homo sapien
gccaggggtgggcagagggcatgtg

SEQ ID NO: 1521239 - DNA, 25 bp, Homo sapien
ggtgagacttgtcgccccctagaac

SEQ ID NO: 1521240 - DNA, 25 bp, Homo sapien
gccctcagcctagagtccatcctgt

SEQ ID NO: 1521241 - DNA, 25 bp, Homo sapien
ctggtgagacttgtcgccccctaga

SEQ ID NO: 1521242 - DNA, 25 bp, Homo sapien
tctgcctccgccctcagacaagtct

SEQ ID NO: 1521243 - DNA, 25 bp, Homo sapien
acgtcatcgggcacgaacctgccgg

SEQ ID NO: 1521244 - DNA, 25 bp, Homo sapien
aacctgccggccacgaagtggtggc

SEQ ID NO: 1521245 - DNA, 25 bp, Homo sapien
cgcagagcgaacttgcggcgcacgt

SEQ ID NO: 1521246 - DNA, 25 bp, Homo sapien
agtcggtgcccgtgtatcccggcag

SEQ ID NO: 1521247 - DNA, 25 bp, Homo sapien
cggtgtggccgcgggtggcggtcac

SEQ ID NO: 1521248 - DNA, 25 bp, Homo sapien
ccctgcggtgtggccgcgggtggcg

SEQ ID NO: 1521249 - DNA, 25 bp, Homo sapien
ctgtttattggcgagggtccctgcg

SEQ ID NO: 1521250 - DNA, 25 bp, Homo sapien
ggagggctgtttattggcgagggtc

SEQ ID NO: 1521251 - DNA, 25 bp, Homo sapien
ggcagagcgtccgagggagggtccg

SEQ ID NO: 1521252 - DNA, 25 bp, Homo sapien
ctcgggtccaactccggcgggtctg

SEQ ID NO: 1521253 - DNA, 25 bp, Homo sapien
tccggcgggtctggcggccgctggg

SEQ ID NO: 1521254 - DNA, 25 bp, Homo sapien
ggctccgcggcgtgctcgggtccaa

SEQ ID NO: 1521255 - DNA, 25 bp, Homo sapien
ggtgcgcagcgacgacacagagaca

SEQ ID NO: 1521256 - DNA, 25 bp, Homo sapien
gtgcgcagcgacgacacagagacag

SEQ ID NO: 1521257 - DNA, 25 bp, Homo sapien
accgtctttccaggcccagtgcagt

SEQ ID NO: 1521258 - DNA, 25 bp, Homo sapien
cggtgtacacggaccgtctttccag

SEQ ID NO: 1521259 - DNA, 25 bp, Homo sapien
gcagtcgccattggctcctcggtgg

SEQ ID NO: 1521260 - DNA, 25 bp, Homo sapien
tttccaggcccagtgcagtcgccat

SEQ ID NO: 1521261 - DNA, 25 bp, Homo sapien
tgcatgcgtgcaaaggccttacttg

SEQ ID NO: 1521262 - DNA, 25 bp, Homo sapien
ggtgggcaccggctagccgagcgcg

SEQ ID NO: 1521263 - DNA, 25 bp, Homo sapien
cgtgcaaaggccttacttgctgtct

SEQ ID NO: 1521264 - DNA, 25 bp, Homo sapien
cccatgcatgcgtgcaaaggcctta

SEQ ID NO: 1521265 - DNA, 25 bp, Homo sapien
cccgtagtagaagcggatggcagcc

SEQ ID NO: 1521266 - DNA, 25 bp, Homo sapien
gttgctcgcggttgaggcaccagaa

SEQ ID NO: 1521267 - DNA, 25 bp, Homo sapien
atggcagccaggctctcgaagtcgc

SEQ ID NO: 1521268 - DNA, 25 bp, Homo sapien
ttgaaccaggacgtccactcgctgg

SEQ ID NO: 1521269 - DNA, 25 bp, Homo sapien
ccagcggggcttgggcagtggcggc

SEQ ID NO: 1521270 - DNA, 25 bp, Homo sapien
accgaggccgcacgcacttctgcgc

SEQ ID NO: 1521271 - DNA, 25 bp, Homo sapien
tggcggcggcgcaagcgacggcctg

SEQ ID NO: 1521272 - DNA, 25 bp, Homo sapien
tccagaggacgcccgggacacgcat

SEQ ID NO: 1521273 - DNA, 25 bp, Homo sapien
tgtggtccgggcattcacaggtgtc

SEQ ID NO: 1521274 - DNA, 25 bp, Homo sapien
atgttggcgcggctgtcagcacaga

SEQ ID NO: 1521275 - DNA, 25 bp, Homo sapien
gttccgtgagcatcgctggtggcca

SEQ ID NO: 1521276 - DNA, 25 bp, Homo sapien
cacagagatggatccgttggcctgg

SEQ ID NO: 1521277 - DNA, 25 bp, Homo sapien
cacattctggccagcctctcgcact

SEQ ID NO: 1521278 - DNA, 25 bp, Homo sapien
gctttgcagcagaaagtcacattct

SEQ ID NO: 1521279 - DNA, 25 bp, Homo sapien
cactcgggactcagggtgtttcacc

SEQ ID NO: 1521280 - DNA, 25 bp, Homo sapien
ggtcccggaggctttgcagcagaaa

SEQ ID NO: 1521281 - DNA, 25 bp, Homo sapien
catgccttgcagtggtagatgccag

SEQ ID NO: 1521282 - DNA, 25 bp, Homo sapien
tacccatgagctcgcctgtccagca

SEQ ID NO: 1521283 - DNA, 25 bp, Homo sapien
caggtgggccccgtacccatgagct

SEQ ID NO: 1521284 - DNA, 25 bp, Homo sapien
ggcacccgcctcattccatgccttg

SEQ ID NO: 1521285 - DNA, 25 bp, Homo sapien
ctctcggggccgggggtcgcaggct

SEQ ID NO: 1521286 - DNA, 25 bp, Homo sapien
gccgggggtcgcaggctggctggcc

SEQ ID NO: 1521287 - DNA, 25 bp, Homo sapien
tctcggggccgggggtcgcaggctg

SEQ ID NO: 1521288 - DNA, 25 bp, Homo sapien
ggggccgggggtcgcaggctggctg

SEQ ID NO: 1521289 - DNA, 25 bp, Homo sapien
tggagggcggcacctcaatggtaaa

SEQ ID NO: 1521290 - DNA, 25 bp, Homo sapien
caatggtaaagtcgccctggtaggc

SEQ ID NO: 1521291 - DNA, 25 bp, Homo sapien
ccttcactgggaggacgtagccagg

SEQ ID NO: 1521292 - DNA, 25 bp, Homo sapien
agaatcctggcgaagcgtagcggct

SEQ ID NO: 1521293 - DNA, 25 bp, Homo sapien
tccacaggccccgagtagggtttgc

SEQ ID NO: 1521294 - DNA, 25 bp, Homo sapien
cgcatggccttgacctcgtggtaca

SEQ ID NO: 1521295 - DNA, 25 bp, Homo sapien
gcgggctccagattgaccagcgtga

SEQ ID NO: 1521296 - DNA, 25 bp, Homo sapien
tcaggcacgtccagattgaacaggc

SEQ ID NO: 1521297 - DNA, 25 bp, Homo sapien
tgcggaagccgttacgcttgaaggc

SEQ ID NO: 1521298 - DNA, 25 bp, Homo sapien
cgttacgcttgaaggcgggatcgtc

SEQ ID NO: 1521299 - DNA, 25 bp, Homo sapien
cttggcgaggttgatgcggaagccg

SEQ ID NO: 1521300 - DNA, 25 bp, Homo sapien
gcgggatcgtcgtggtccgtccgac

SEQ ID NO: 1521301 - DNA, 25 bp, Homo sapien
caggtaatcccgaaggagtccgttg

SEQ ID NO: 1521302 - DNA, 25 bp, Homo sapien
cctgcgttgtgggagcggaccatat

SEQ ID NO: 1521303 - DNA, 25 bp, Homo sapien
ggcatcccgaagtccgtagagctgg

SEQ ID NO: 1521304 - DNA, 25 bp, Homo sapien
gagaagccgtcagaggaaccatcaa

SEQ ID NO: 1521305 - DNA, 25 bp, Homo sapien
gctcatctccctgcggatgtcacca

SEQ ID NO: 1521306 - DNA, 25 bp, Homo sapien
ctccctgcggatgtcaccaagtgct

SEQ ID NO: 1521307 - DNA, 25 bp, Homo sapien
accaagtgctgtcgccggggactcc

SEQ ID NO: 1521308 - DNA, 25 bp, Homo sapien
aagaggctgggtcgtccggccggtg

SEQ ID NO: 1521309 - DNA, 25 bp, Homo sapien
ggtgggaaagcgaggcccctgccca

SEQ ID NO: 1521310 - DNA, 25 bp, Homo sapien
aacttcctggggtcaaaggagtctg

SEQ ID NO: 1521311 - DNA, 25 bp, Homo sapien
ggtcaaaggagtctggagggaggtg

SEQ ID NO: 1521312 - DNA, 25 bp, Homo sapien
ggaggtgggaaagcgaggcccctgc

SEQ ID NO: 1521313 - DNA, 25 bp, Homo sapien
tgtttctaccatcggatgctctggg

SEQ ID NO: 1521314 - DNA, 25 bp, Homo sapien
ttcctggtgtttctaccatcggatg

SEQ ID NO: 1521315 - DNA, 25 bp, Homo sapien
ctaccatcggatgctctgggttctt

SEQ ID NO: 1521316 - DNA, 25 bp, Homo sapien
ggtgtttctaccatcggatgctctg

SEQ ID NO: 1521317 - DNA, 25 bp, Homo sapien
tcaggctagggttgaacgtcgtccc

SEQ ID NO: 1521318 - DNA, 25 bp, Homo sapien
tgaaatcagggtcaaaatacgcacg

SEQ ID NO: 1521319 - DNA, 25 bp, Homo sapien
ggactttgtgccaaacgccagaact

SEQ ID NO: 1521320 - DNA, 25 bp, Homo sapien
tacgcacgagaagtcagagacggct

SEQ ID NO: 1521321 - DNA, 25 bp, Homo sapien
gacctggtctagcactgagctccaa

SEQ ID NO: 1521322 - DNA, 25 bp, Homo sapien
gtggtctggcagccccaatttggtt

SEQ ID NO: 1521323 - DNA, 25 bp, Homo sapien
tggggggtagacaatggatttacca

SEQ ID NO: 1521324 - DNA, 25 bp, Homo sapien
gtctggcagccccaatttggttggg

SEQ ID NO: 1521325 - DNA, 25 bp, Homo sapien
aggcggacggtagcccaggttccag

SEQ ID NO: 1521326 - DNA, 25 bp, Homo sapien
cagtgtccagcgtgtcccatgggtc

SEQ ID NO: 1521327 - DNA, 25 bp, Homo sapien
ggcctttctctgtgttgagggtgca

SEQ ID NO: 1521328 - DNA, 25 bp, Homo sapien
tctgtctacccgtgctgctgtgatg

SEQ ID NO: 1521329 - DNA, 25 bp, Homo sapien
ggacagtgtccagcgtgtcccatgg

SEQ ID NO: 1521330 - DNA, 25 bp, Homo sapien
ccagccggtgtcctgagaccttagc

SEQ ID NO: 1521331 - DNA, 25 bp, Homo sapien
agaccttagctaaggggctaggagc

SEQ ID NO: 1521332 - DNA, 25 bp, Homo sapien
taggagcgtccgcaggggcgggcgc

SEQ ID NO: 1521333 - DNA, 25 bp, Homo sapien
cgccagccggtgtcctgagacctta

SEQ ID NO: 1521334 - DNA, 25 bp, Homo sapien
gcacatggattgaagcaagaatccc

SEQ ID NO: 1521335 - DNA, 25 bp, Homo sapien
gattgaagcaagaatccccagcaga

SEQ ID NO: 1521336 - DNA, 25 bp, Homo sapien
catggattgaagcaagaatccccag

SEQ ID NO: 1521337 - DNA, 25 bp, Homo sapien
cccagcagatcccaaaacgagtggg

SEQ ID NO: 1521338 - DNA, 25 bp, Homo sapien
gctccaggctttttacttgggagaa

SEQ ID NO: 1521339 - DNA, 25 bp, Homo sapien
agctccaggctttttacttgggaga

SEQ ID NO: 1521340 - DNA, 25 bp, Homo sapien
ggcccagattgtaggcacagcaccc

SEQ ID NO: 1521341 - DNA, 25 bp, Homo sapien
attccaagtgggctgtcctcgctca

SEQ ID NO: 1521342 - DNA, 25 bp, Homo sapien
ccatgagcatcattccaagtgggct

SEQ ID NO: 1521343 - DNA, 25 bp, Homo sapien
tctgtaaggcccagattgtaggcac

SEQ ID NO: 1521344 - DNA, 25 bp, Homo sapien
gcaggagagggttagcacagtaggg

SEQ ID NO: 1521345 - DNA, 25 bp, Homo sapien
aggagagggttagcacagtagggac

SEQ ID NO: 1521346 - DNA, 25 bp, Homo sapien
caggagagggttagcacagtaggga

SEQ ID NO: 1521347 - DNA, 25 bp, Homo sapien
ggcaggagagggttagcacagtagg

SEQ ID NO: 1521348 - DNA, 25 bp, Homo sapien
cactgtcagttccagacacggtggg

SEQ ID NO: 1521349 - DNA, 25 bp, Homo sapien
ctgtcagttccagacacggtgggtg

SEQ ID NO: 1521350 - DNA, 25 bp, Homo sapien
ctgtgcagagtcaccggcactgtca

SEQ ID NO: 1521351 - DNA, 25 bp, Homo sapien
agagtcaccggcactgtcagttcca

SEQ ID NO: 1521352 - DNA, 25 bp, Homo sapien
tctcccaaagtgagtaggtcgctcc

SEQ ID NO: 1521353 - DNA, 25 bp, Homo sapien
ggaatgccggctccttccaagtggc

SEQ ID NO: 1521354 - DNA, 25 bp, Homo sapien
gatgcgtgcgaggaaataggtttac

SEQ ID NO: 1521355 - DNA, 25 bp, Homo sapien
cacccgcaagacagtaatgacgcag

SEQ ID NO: 1521356 - DNA, 25 bp, Homo sapien
tgttgcccagtgagcccatgggctg

SEQ ID NO: 1521357 - DNA, 25 bp, Homo sapien
tgatcaaggccagcaacatagtatc

SEQ ID NO: 1521358 - DNA, 25 bp, Homo sapien
gagccaccgattttacatttcggta

SEQ ID NO: 1521359 - DNA, 25 bp, Homo sapien
tcggtaggtcagaaagcccacatgg

SEQ ID NO: 1521360 - DNA, 25 bp, Homo sapien
aaagactttgtgattgctgcttccg

SEQ ID NO: 1521361 - DNA, 25 bp, Homo sapien
cgctgagtcacctatgaccttcatg

SEQ ID NO: 1521362 - DNA, 25 bp, Homo sapien
gaccttcatgttgctaaatccgaat

SEQ ID NO: 1521363 - DNA, 25 bp, Homo sapien
tttgtgattgctgcttccgcttcct

SEQ ID NO: 1521364 - DNA, 25 bp, Homo sapien
ggcacccagccataacgtgtcatat

SEQ ID NO: 1521365 - DNA, 25 bp, Homo sapien
tccagtctatctcattatcaactct

SEQ ID NO: 1521366 - DNA, 25 bp, Homo sapien
tataagaaatcaccgcaagcctagc

SEQ ID NO: 1521367 - DNA, 25 bp, Homo sapien
tgttagacataccagcaccaacccc

SEQ ID NO: 1521368 - DNA, 25 bp, Homo sapien
cttgccaggtaaggagtgagcacgc

SEQ ID NO: 1521369 - DNA, 25 bp, Homo sapien
tgcccaggtgggagttcagttttct

SEQ ID NO: 1521370 - DNA, 25 bp, Homo sapien
tgctgtccgaccaagcatggccttg

SEQ ID NO: 1521371 - DNA, 25 bp, Homo sapien
tgagcacgcggtttgttccagactt

SEQ ID NO: 1521372 - DNA, 25 bp, Homo sapien
atgtgagaacactgattcagacagg

SEQ ID NO: 1521373 - DNA, 25 bp, Homo sapien
ttctgatttttatgtgagaacactg

SEQ ID NO: 1521374 - DNA, 25 bp, Homo sapien
tgagaacactgattcagacaggttg

SEQ ID NO: 1521375 - DNA, 25 bp, Homo sapien
ctaggaaagggacttcagattccca

SEQ ID NO: 1521376 - DNA, 25 bp, Homo sapien
tacttcctactgttggccgaggcca

SEQ ID NO: 1521377 - DNA, 25 bp, Homo sapien
tcttgccgagatgctgagatgcgcc

SEQ ID NO: 1521378 - DNA, 25 bp, Homo sapien
gagtcctgcaatgtcctggctgtag

SEQ ID NO: 1521379 - DNA, 25 bp, Homo sapien
tcaatgctgctgtgtactcttgccg

SEQ ID NO: 1521380 - DNA, 25 bp, Homo sapien
tgcagcacctacgtaaaggcagttg

SEQ ID NO: 1521381 - DNA, 25 bp, Homo sapien
tagcgtgcgcccgatgatcagctgg

SEQ ID NO: 1521382 - DNA, 25 bp, Homo sapien
gggattgcaaaaccctagcgtgcgc

SEQ ID NO: 1521383 - DNA, 25 bp, Homo sapien
tgatactgcgagctggcaaagccga

SEQ ID NO: 1521384 - DNA, 25 bp, Homo sapien
cactcagggtcaatactcagggtca

SEQ ID NO: 1521385 - DNA, 25 bp, Homo sapien
tgctactttggttgtggtcactccc

SEQ ID NO: 1521386 - DNA, 25 bp, Homo sapien
cccagattgtgaagacggacccata

SEQ ID NO: 1521387 - DNA, 25 bp, Homo sapien
cagggtcagtgcaggttatgagatc

SEQ ID NO: 1521388 - DNA, 25 bp, Homo sapien
tgtcactcgaccagatgacgggctc

SEQ ID NO: 1521389 - DNA, 25 bp, Homo sapien
gatgacgggctctcgtctgacacca

SEQ ID NO: 1521390 - DNA, 25 bp, Homo sapien
ttcaggaatcatagaaaatctcagc

SEQ ID NO: 1521391 - DNA, 25 bp, Homo sapien
cttctctacttgctgtgtcactcga

SEQ ID NO: 1521392 - DNA, 25 bp, Homo sapien
ttcaccatgttgggtcttgaactcc

SEQ ID NO: 1521393 - DNA, 25 bp, Homo sapien
tttcaccatgttgggtcttgaactc

SEQ ID NO: 1521394 - DNA, 25 bp, Homo sapien
gactgacttcaggtctcttcgtcct

SEQ ID NO: 1521395 - DNA, 25 bp, Homo sapien
tgactgacttcaggtctcttcgtcc

SEQ ID NO: 1521396 - DNA, 25 bp, Homo sapien
ttgactgacttcaggtctcttcgtc

SEQ ID NO: 1521397 - DNA, 25 bp, Homo sapien
ggccggcgggaaatgagaccgcttc

SEQ ID NO: 1521398 - DNA, 25 bp, Homo sapien
ccggcgggaaatgagaccgcttcgg

SEQ ID NO: 1521399 - DNA, 25 bp, Homo sapien
gccggcgggaaatgagaccgcttcg

SEQ ID NO: 1521400 - DNA, 25 bp, Homo sapien
ggcgggaaatgagaccgcttcgggc

SEQ ID NO: 1521401 - DNA, 25 bp, Homo sapien
gccagaacaggtcccacacgacaaa

SEQ ID NO: 1521402 - DNA, 25 bp, Homo sapien
cagccagaacaggtcccacacgaca

SEQ ID NO: 1521403 - DNA, 25 bp, Homo sapien
agcagccagaacaggtcccacacga

SEQ ID NO: 1521404 - DNA, 25 bp, Homo sapien
ggagcagccagaacaggtcccacac

SEQ ID NO: 1521405 - DNA, 25 bp, Homo sapien
tacatgagtgatcccatgacgccgg

SEQ ID NO: 1521406 - DNA, 25 bp, Homo sapien
gagaatatcctgaagcttgcaagca

SEQ ID NO: 1521407 - DNA, 25 bp, Homo sapien
caacttagactacgagagggatccc

SEQ ID NO: 1521408 - DNA, 25 bp, Homo sapien
caaagtggcttactgtggctaaacg

SEQ ID NO: 1521409 - DNA, 25 bp, Homo sapien
aggttcctgaaggtttccagcgtca

SEQ ID NO: 1521410 - DNA, 25 bp, Homo sapien
ttcctgaaggtttccagcgtcacat

SEQ ID NO: 1521411 - DNA, 25 bp, Homo sapien
tgaaggtttccagcgtcacatctct

SEQ ID NO: 1521412 - DNA, 25 bp, Homo sapien
cctgaaggtttccagcgtcacatct

SEQ ID NO: 1521413 - DNA, 25 bp, Homo sapien
ttgtcttctaattgactaaggaagg

SEQ ID NO: 1521414 - DNA, 25 bp, Homo sapien
tgtcttctaattgactaaggaagga

SEQ ID NO: 1521415 - DNA, 25 bp, Homo sapien
gtcttctaattgactaaggaaggaa

SEQ ID NO: 1521416 - DNA, 25 bp, Homo sapien
cccacgatgccccatttattcacca

SEQ ID NO: 1521417 - DNA, 25 bp, Homo sapien
gatgccccatttattcaccaacgta

SEQ ID NO: 1521418 - DNA, 25 bp, Homo sapien
catttattcaccaacgtattctctt

SEQ ID NO: 1521419 - DNA, 25 bp, Homo sapien
tattcaccaacgtattctctttcca

SEQ ID NO: 1521420 - DNA, 25 bp, Homo sapien
caacattatctcaacattatcccaa

SEQ ID NO: 1521421 - DNA, 25 bp, Homo sapien
ggtacagattctcaatgtcctggtc

SEQ ID NO: 1521422 - DNA, 25 bp, Homo sapien
cattcccttctttacgtccacagag

SEQ ID NO: 1521423 - DNA, 25 bp, Homo sapien
tggtttcactccagtttgacttttc

SEQ ID NO: 1521424 - DNA, 25 bp, Homo sapien
ttcccttctttacgtccacagagtc

SEQ ID NO: 1521425 - DNA, 25 bp, Homo sapien
tcattcccttctttacgtccacaga

SEQ ID NO: 1521426 - DNA, 25 bp, Homo sapien
aaactggaaactgtgaaggctctca

SEQ ID NO: 1521427 - DNA, 25 bp, Homo sapien
tgatttcatgtgtccgaaggtaacc

SEQ ID NO: 1521428 - DNA, 25 bp, Homo sapien
catgtcttcggagggaactgcacca

SEQ ID NO: 1521429 - DNA, 25 bp, Homo sapien
actcagatcgtttgtgtccagcatg

SEQ ID NO: 1521430 - DNA, 25 bp, Homo sapien
tgccaaagcactggctacgcccggc

SEQ ID NO: 1521431 - DNA, 25 bp, Homo sapien
cactggctacgcccggccaaatgag

SEQ ID NO: 1521432 - DNA, 25 bp, Homo sapien
aaagcactggctacgcccggccaaa

SEQ ID NO: 1521433 - DNA, 25 bp, Homo sapien
ctgccaaagcactggctacgcccgg

SEQ ID NO: 1521434 - DNA, 25 bp, Homo sapien
cgatatggggccttcttatgttgcc

SEQ ID NO: 1521435 - DNA, 25 bp, Homo sapien
cagccgatatggggccttcttatgt

SEQ ID NO: 1521436 - DNA, 25 bp, Homo sapien
cccagccgatatggggccttcttat

SEQ ID NO: 1521437 - DNA, 25 bp, Homo sapien
gccgatatggggccttcttatgttg

SEQ ID NO: 1521438 - DNA, 25 bp, Homo sapien
atgagccaccacgtgatatggggct

SEQ ID NO: 1521439 - DNA, 25 bp, Homo sapien
cgtgatatggggcttttttgtgtgt

SEQ ID NO: 1521440 - DNA, 25 bp, Homo sapien
gagccaccacgtgatatggggcttt

SEQ ID NO: 1521441 - DNA, 25 bp, Homo sapien
caccacgtgatatggggcttttttg

SEQ ID NO: 1521442 - DNA, 25 bp, Homo sapien
ttatggctctgaatagaactggaat

SEQ ID NO: 1521443 - DNA, 25 bp, Homo sapien
gatgagagcaatgagagtttcccca

SEQ ID NO: 1521444 - DNA, 25 bp, Homo sapien
gagcaatgagagtttccccatattc

SEQ ID NO: 1521445 - DNA, 25 bp, Homo sapien
ccttttatggctctgaatagaactg

SEQ ID NO: 1521446 - DNA, 25 bp, Homo sapien
taacgtttccatccagtgtgtattc

SEQ ID NO: 1521447 - DNA, 25 bp, Homo sapien
ctaacgtttccatccagtgtgtatt

SEQ ID NO: 1521448 - DNA, 25 bp, Homo sapien
ttcttcgattcataccatccatctc

SEQ ID NO: 1521449 - DNA, 25 bp, Homo sapien
ccagtgtgtattcttcgattcatac

SEQ ID NO: 1521450 - DNA, 25 bp, Homo sapien
tcggcacgcgcctgtaggaggctaa

SEQ ID NO: 1521451 - DNA, 25 bp, Homo sapien
aatcccagatgcttcggagactgaa

SEQ ID NO: 1521452 - DNA, 25 bp, Homo sapien
taataaagactcatgggccggtcgc

SEQ ID NO: 1521453 - DNA, 25 bp, Homo sapien
tgggtgaggaatatgcagaatctgc

SEQ ID NO: 1521454 - DNA, 25 bp, Homo sapien
cggagcgccaggacagcaaagatgt

SEQ ID NO: 1521455 - DNA, 25 bp, Homo sapien
gagcgccaggacagcaaagatgtcg

SEQ ID NO: 1521456 - DNA, 25 bp, Homo sapien
caggacagcaaagatgtcggcttcc

SEQ ID NO: 1521457 - DNA, 25 bp, Homo sapien
cgccaggacagcaaagatgtcggct

SEQ ID NO: 1521458 - DNA, 25 bp, Homo sapien
atcaagtagtcattcctgaaaaagt

SEQ ID NO: 1521459 - DNA, 25 bp, Homo sapien
ctggataccagaagtgatatttctg

SEQ ID NO: 1521460 - DNA, 25 bp, Homo sapien
caattcaagatgtttagtctgagtt

SEQ ID NO: 1521461 - DNA, 25 bp, Homo sapien
ctgtcaattcaagatgtttagtctg

SEQ ID NO: 1521462 - DNA, 25 bp, Homo sapien
aagccagctcaccatccaacctcac

SEQ ID NO: 1521463 - DNA, 25 bp, Homo sapien
cagaatgcaaggtgtactgaactcc

SEQ ID NO: 1521464 - DNA, 25 bp, Homo sapien
gacagcaccgaagagttcctccttt

SEQ ID NO: 1521465 - DNA, 25 bp, Homo sapien
gaactcccaagaaactgtcctgaca

SEQ ID NO: 1521466 - DNA, 25 bp, Homo sapien
ggagccgactcgcttcatgtcactc

SEQ ID NO: 1521467 - DNA, 25 bp, Homo sapien
ttaaatatccgtggaatctaaactc

SEQ ID NO: 1521468 - DNA, 25 bp, Homo sapien
tcagccagatacagacattttgaag

SEQ ID NO: 1521469 - DNA, 25 bp, Homo sapien
tttgaagatgcaccttccagttctg

SEQ ID NO: 1521470 - DNA, 25 bp, Homo sapien
tccagttctgctataagattatcag

SEQ ID NO: 1521471 - DNA, 25 bp, Homo sapien
gacatattgatttagatgtgactca

SEQ ID NO: 1521472 - DNA, 25 bp, Homo sapien
ggacatattgatttagatgtgactc

SEQ ID NO: 1521473 - DNA, 25 bp, Homo sapien
aaggacatattgatttagatgtgac

SEQ ID NO: 1521474 - DNA, 25 bp, Homo sapien
caaaggacatattgatttagatgtg

SEQ ID NO: 1521475 - DNA, 25 bp, Homo sapien
gggtgaaagtctataaatgtaagac

SEQ ID NO: 1521476 - DNA, 25 bp, Homo sapien
gccttttgagcacacatgagaatgt

SEQ ID NO: 1521477 - DNA, 25 bp, Homo sapien
gagtgtgaatatatgaaaggagtca

SEQ ID NO: 1521478 - DNA, 25 bp, Homo sapien
gaaagtatcatgtaaacagcccagt

SEQ ID NO: 1521479 - DNA, 25 bp, Homo sapien
tcctcacttgtgagaaccgaagcct

SEQ ID NO: 1521480 - DNA, 25 bp, Homo sapien
aggttcctgtggctgttcaaacgcc

SEQ ID NO: 1521481 - DNA, 25 bp, Homo sapien
gaatccacgggtgcgtttcctcact

SEQ ID NO: 1521482 - DNA, 25 bp, Homo sapien
aagcctggctaggtccttgctgccg

SEQ ID NO: 1521483 - DNA, 25 bp, Homo sapien
gaacagagggatgtttgtcaggaca

SEQ ID NO: 1521484 - DNA, 25 bp, Homo sapien
tgtcatctggccctattcctgagcc

SEQ ID NO: 1521485 - DNA, 25 bp, Homo sapien
ggaacagagggatgtttgtcaggac

SEQ ID NO: 1521486 - DNA, 25 bp, Homo sapien
ggacatgtcatctggccctattcct

SEQ ID NO: 1521487 - DNA, 25 bp, Homo sapien
ctcctcccagtagacctctgggggt

SEQ ID NO: 1521488 - DNA, 25 bp, Homo sapien
tcctcctcccagtagacctctgggg

SEQ ID NO: 1521489 - DNA, 25 bp, Homo sapien
acctcctcctcccagtagacctctg

SEQ ID NO: 1521490 - DNA, 25 bp, Homo sapien
ctcctcctcccagtagacctctggg

SEQ ID NO: 1521491 - DNA, 25 bp, Homo sapien
tgccgaatcccgaggtgatcggtga

SEQ ID NO: 1521492 - DNA, 25 bp, Homo sapien
ggtgatcggtgactttgtagctgtc

SEQ ID NO: 1521493 - DNA, 25 bp, Homo sapien
cgaggtgatcggtgactttgtagct

SEQ ID NO: 1521494 - DNA, 25 bp, Homo sapien
gaatcccgaggtgatcggtgacttt

SEQ ID NO: 1521495 - DNA, 25 bp, Homo sapien
taaaggcccagcatattagcccctg

SEQ ID NO: 1521496 - DNA, 25 bp, Homo sapien
tgggctgaagtggtaaaggcccagc

SEQ ID NO: 1521497 - DNA, 25 bp, Homo sapien
atattagcccctgtaccacagggtg

SEQ ID NO: 1521498 - DNA, 25 bp, Homo sapien
tggtaaaggcccagcatattagccc

SEQ ID NO: 1521499 - DNA, 25 bp, Homo sapien
ggcactgatcgatggcagctttgtc

SEQ ID NO: 1521500 - DNA, 25 bp, Homo sapien
cagggcactgatcgatggcagcttt

SEQ ID NO: 1521501 - DNA, 25 bp, Homo sapien
agggcactgatcgatggcagctttg

SEQ ID NO: 1521502 - DNA, 25 bp, Homo sapien
ccagggcactgatcgatggcagctt

SEQ ID NO: 1521503 - DNA, 25 bp, Homo sapien
ctggagcctggcacaatttgaactg

SEQ ID NO: 1521504 - DNA, 25 bp, Homo sapien
cgtgtcccgggtgggcttagagtct

SEQ ID NO: 1521505 - DNA, 25 bp, Homo sapien
acacgtgtcccgggtgggcttagag

SEQ ID NO: 1521506 - DNA, 25 bp, Homo sapien
ggagcctggcacaatttgaactgca

SEQ ID NO: 1521507 - DNA, 25 bp, Homo sapien
cctcataagcttcggggatgatgtc

SEQ ID NO: 1521508 - DNA, 25 bp, Homo sapien
caagtcctcataagcttcggggatg

SEQ ID NO: 1521509 - DNA, 25 bp, Homo sapien
tcctcataagcttcggggatgatgt

SEQ ID NO: 1521510 - DNA, 25 bp, Homo sapien
agtcctcataagcttcggggatgat

SEQ ID NO: 1521511 - DNA, 25 bp, Homo sapien
gccattgccattattgcatgcttca

SEQ ID NO: 1521512 - DNA, 25 bp, Homo sapien
ctcgaaggccgtgggcgccattgcc

SEQ ID NO: 1521513 - DNA, 25 bp, Homo sapien
ttgccattattgcatgcttcatctt

SEQ ID NO: 1521514 - DNA, 25 bp, Homo sapien
gccgtgggcgccattgccattattg

SEQ ID NO: 1521515 - DNA, 25 bp, Homo sapien
agacacagggggacttgcttctgtg

SEQ ID NO: 1521516 - DNA, 25 bp, Homo sapien
tcagacacagggggacttgcttctg

SEQ ID NO: 1521517 - DNA, 25 bp, Homo sapien
cacagggggacttgcttctgtgaac

SEQ ID NO: 1521518 - DNA, 25 bp, Homo sapien
acacagggggacttgcttctgtgaa

SEQ ID NO: 1521519 - DNA, 25 bp, Homo sapien
caagacactatctccacagtgggtg

SEQ ID NO: 1521520 - DNA, 25 bp, Homo sapien
acaagacactatctccacagtgggt

SEQ ID NO: 1521521 - DNA, 25 bp, Homo sapien
tgggtgagatggtcccaggcacggg

SEQ ID NO: 1521522 - DNA, 25 bp, Homo sapien
ccacagtgggtgagatggtcccagg

SEQ ID NO: 1521523 - DNA, 25 bp, Homo sapien
gcttcttgagtctgactctgaggac

SEQ ID NO: 1521524 - DNA, 25 bp, Homo sapien
tgtggcttcttgagtctgactctga

SEQ ID NO: 1521525 - DNA, 25 bp, Homo sapien
ccctgtgtggcttcttgagtctgac

SEQ ID NO: 1521526 - DNA, 25 bp, Homo sapien
tgagtctgactctgaggacacccct

SEQ ID NO: 1521527 - DNA, 25 bp, Homo sapien
aaaaatagcagatgcgagcggtcag

SEQ ID NO: 1521528 - DNA, 25 bp, Homo sapien
ggaccctcgattgggtttggctgaa

SEQ ID NO: 1521529 - DNA, 25 bp, Homo sapien
caagtccattaagtcctcacaaggc

SEQ ID NO: 1521530 - DNA, 25 bp, Homo sapien
agatgcgagcggtcagcttctcctc

SEQ ID NO: 1521531 - DNA, 25 bp, Homo sapien
tacaacaaccgggtgaggtgtgcca

SEQ ID NO: 1521532 - DNA, 25 bp, Homo sapien
atggtacaacaaccgggtgaggtgt

SEQ ID NO: 1521533 - DNA, 25 bp, Homo sapien
ctgaaatggtacaacaaccgggtga

SEQ ID NO: 1521534 - DNA, 25 bp, Homo sapien
acaacaaccgggtgaggtgtgccat

SEQ ID NO: 1521535 - DNA, 25 bp, Homo sapien
ctcgtgttcctgcagcaagttcttg

SEQ ID NO: 1521536 - DNA, 25 bp, Homo sapien
gttcctgcagcaagttcttgccggg

SEQ ID NO: 1521537 - DNA, 25 bp, Homo sapien
gcagcaagttcttgccggggttctc

SEQ ID NO: 1521538 - DNA, 25 bp, Homo sapien
cagcaagttcttgccggggttctct

SEQ ID NO: 1521539 - DNA, 25 bp, Homo sapien
gggaagaggccacagtcactgtagc

SEQ ID NO: 1521540 - DNA, 25 bp, Homo sapien
tgtagccatggacgctcttgagcag

SEQ ID NO: 1521541 - DNA, 25 bp, Homo sapien
tcactgtagccatggacgctcttga

SEQ ID NO: 1521542 - DNA, 25 bp, Homo sapien
gaagaggccacagtcactgtagcca

SEQ ID NO: 1521543 - DNA, 25 bp, Homo sapien
tcctggttgccacgaaagagctgct

SEQ ID NO: 1521544 - DNA, 25 bp, Homo sapien
ccggctgctgaaaggtattcagtgg

SEQ ID NO: 1521545 - DNA, 25 bp, Homo sapien
agcataccgggcatggcctcgaagc

SEQ ID NO: 1521546 - DNA, 25 bp, Homo sapien
ctgcggctgtagcaccggctggaaa

SEQ ID NO: 1521547 - DNA, 25 bp, Homo sapien
ggaagcggttgagactgcgcctcat

SEQ ID NO: 1521548 - DNA, 25 bp, Homo sapien
aagctgttgccaccacgggggctca

SEQ ID NO: 1521549 - DNA, 25 bp, Homo sapien
ggtgtgaaccgccactaggctcatc

SEQ ID NO: 1521550 - DNA, 25 bp, Homo sapien
gagactgcgcctcatggtggccaag

SEQ ID NO: 1521551 - DNA, 25 bp, Homo sapien
cctgccacttgaggccatagagcca

SEQ ID NO: 1521552 - DNA, 25 bp, Homo sapien
ctcctgccacttgaggccatagagc

SEQ ID NO: 1521553 - DNA, 25 bp, Homo sapien
cggtgtcgctggtagtgcactggaa

SEQ ID NO: 1521554 - DNA, 25 bp, Homo sapien
tactgagcggtgtcgctggtagtgc

SEQ ID NO: 1521555 - DNA, 25 bp, Homo sapien
cttgttgcgccgtgcactgggacct

SEQ ID NO: 1521556 - DNA, 25 bp, Homo sapien
ggaatgtcaccagacacgcatccag

SEQ ID NO: 1521557 - DNA, 25 bp, Homo sapien
tccagccagtccaagtgcttgttgc

SEQ ID NO: 1521558 - DNA, 25 bp, Homo sapien
tcgtggcccacttctcaggtaggtg

SEQ ID NO: 1521559 - DNA, 25 bp, Homo sapien
tggaggacgtggcactgcgccagca

SEQ ID NO: 1521560 - DNA, 25 bp, Homo sapien
ctggaggacgtggcactgcgccagc

SEQ ID NO: 1521561 - DNA, 25 bp, Homo sapien
gaccaggccacgtatccagtgttcg

SEQ ID NO: 1521562 - DNA, 25 bp, Homo sapien
gaggtgctgtgccatacagaaggcc

SEQ ID NO: 1521563 - DNA, 25 bp, Homo sapien
ccagtgttcgtcttcgatacccaca

SEQ ID NO: 1521564 - DNA, 25 bp, Homo sapien
aagtgatgcccaccttctcgctgac

SEQ ID NO: 1521565 - DNA, 25 bp, Homo sapien
aagctgtcaatcatgctctccacct

SEQ ID NO: 1521566 - DNA, 25 bp, Homo sapien
gctgagcagcagcgccgtcatccac

SEQ ID NO: 1521567 - DNA, 25 bp, Homo sapien
tgcttgccgtgaactccatgccctg

SEQ ID NO: 1521568 - DNA, 25 bp, Homo sapien
cagcagcgccgtcatccaccttctt

SEQ ID NO: 1521569 - DNA, 25 bp, Homo sapien
ttgatgcgttgctgcttggacagca

SEQ ID NO: 1521570 - DNA, 25 bp, Homo sapien
taacaggtccgagacagaatccagg

SEQ ID NO: 1521571 - DNA, 25 bp, Homo sapien
taagagctcctctgtgaacgtggag

SEQ ID NO: 1521572 - DNA, 25 bp, Homo sapien
tgacgatggtattgtaggcacctcc

SEQ ID NO: 1521573 - DNA, 25 bp, Homo sapien
aagtggccaaagaactcgtgtccca

SEQ ID NO: 1521574 - DNA, 25 bp, Homo sapien
ggccaaagaactcgtgtcccacgct

SEQ ID NO: 1521575 - DNA, 25 bp, Homo sapien
caaagaactcgtgtcccacgctcct

SEQ ID NO: 1521576 - DNA, 25 bp, Homo sapien
gtggccaaagaactcgtgtcccacg

SEQ ID NO: 1521577 - DNA, 25 bp, Homo sapien
aagacgtgcctgctacgctttcacc

SEQ ID NO: 1521578 - DNA, 25 bp, Homo sapien
ggcctctccagaagccgaatagata

SEQ ID NO: 1521579 - DNA, 25 bp, Homo sapien
gaagccgaatagataccagcatcat

SEQ ID NO: 1521580 - DNA, 25 bp, Homo sapien
aaaaaagcaaagacgtgcctgctac

SEQ ID NO: 1521581 - DNA, 25 bp, Homo sapien
catcacctcagcaattctggtggca

SEQ ID NO: 1521582 - DNA, 25 bp, Homo sapien
tgatgaccgtaatgaaaagtgggat

SEQ ID NO: 1521583 - DNA, 25 bp, Homo sapien
agccagggcagcgatgatgaccgta

SEQ ID NO: 1521584 - DNA, 25 bp, Homo sapien
tgctgcagccacaacaagtgccacc

SEQ ID NO: 1521585 - DNA, 25 bp, Homo sapien
aaggcccttctcaccatggtaccca

SEQ ID NO: 1521586 - DNA, 25 bp, Homo sapien
tagggcaatgtgtcacccagaggct

SEQ ID NO: 1521587 - DNA, 25 bp, Homo sapien
tgctagggcaatgtgtcacccagag

SEQ ID NO: 1521588 - DNA, 25 bp, Homo sapien
tcaaggcccttctcaccatggtacc

SEQ ID NO: 1521589 - DNA, 25 bp, Homo sapien
gccaggcctggtgagtgacagcagc

SEQ ID NO: 1521590 - DNA, 25 bp, Homo sapien
gtgacagcagccctggtgccccagc

SEQ ID NO: 1521591 - DNA, 25 bp, Homo sapien
ctggtgagtgacagcagccctggtg

SEQ ID NO: 1521592 - DNA, 25 bp, Homo sapien
gtgagtgacagcagccctggtgccc

SEQ ID NO: 1521593 - DNA, 25 bp, Homo sapien
gatactaaagatccagactcagtgc

SEQ ID NO: 1521594 - DNA, 25 bp, Homo sapien
gacacatcaaagactaacaaaccaa

SEQ ID NO: 1521595 - DNA, 25 bp, Homo sapien
catgcagatgcttcttagagacaag

SEQ ID NO: 1521596 - DNA, 25 bp, Homo sapien
tctgatgattattgaacttgggctt

SEQ ID NO: 1521597 - DNA, 25 bp, Homo sapien
ctgctttgactgtttaaggtctctt

SEQ ID NO: 1521598 - DNA, 25 bp, Homo sapien
tactatcttgttttgatggcattgc

SEQ ID NO: 1521599 - DNA, 25 bp, Homo sapien
aatcagagagtataatatcgtcagc

SEQ ID NO: 1521600 - DNA, 25 bp, Homo sapien
ctatatcactttgggaagcatggac

SEQ ID NO: 1521601 - DNA, 25 bp, Homo sapien
atcgtctgtgtgtaacatcgtctgt

SEQ ID NO: 1521602 - DNA, 25 bp, Homo sapien
catttgggtgttgattgtgaacttc

SEQ ID NO: 1521603 - DNA, 25 bp, Homo sapien
tcttcatttgggtgttgattgtgaa

SEQ ID NO: 1521604 - DNA, 25 bp, Homo sapien
ctgtgtgtaacatcgtctgtcatct

SEQ ID NO: 1521605 - DNA, 25 bp, Homo sapien
tctgccggttttccgtgagcagtga

SEQ ID NO: 1521606 - DNA, 25 bp, Homo sapien
ggttttccgtgagcagtgacatcag

SEQ ID NO: 1521607 - DNA, 25 bp, Homo sapien
gacattctgccggttttccgtgagc

SEQ ID NO: 1521608 - DNA, 25 bp, Homo sapien
ccggttttccgtgagcagtgacatc

SEQ ID NO: 1521609 - DNA, 25 bp, Homo sapien
gacaatgtactttgtgccgcaggcc

SEQ ID NO: 1521610 - DNA, 25 bp, Homo sapien
tcagccgcttttgagagaaatctgc

SEQ ID NO: 1521611 - DNA, 25 bp, Homo sapien
tcagggaaatgtcacgcgcactggc

SEQ ID NO: 1521612 - DNA, 25 bp, Homo sapien
aatacagctagggacgtgaaaggca

SEQ ID NO: 1521613 - DNA, 25 bp, Homo sapien
catggcggaacagctctgaaggcat

SEQ ID NO: 1521614 - DNA, 25 bp, Homo sapien
gactacaatcccagcctgtaccagg

SEQ ID NO: 1521615 - DNA, 25 bp, Homo sapien
ggatcagggactgtgcgcatcactg

SEQ ID NO: 1521616 - DNA, 25 bp, Homo sapien
catgtaatctcatggccagtcccag

SEQ ID NO: 1521617 - DNA, 25 bp, Homo sapien
acgttgggggatgcggtatcacaat

SEQ ID NO: 1521618 - DNA, 25 bp, Homo sapien
ggatgcggtatcacaatttcttggt

SEQ ID NO: 1521619 - DNA, 25 bp, Homo sapien
caagctgtcctggtagcttgtcctc

SEQ ID NO: 1521620 - DNA, 25 bp, Homo sapien
aatttcttggtgagacaagctgtcc

SEQ ID NO: 1521621 - DNA, 25 bp, Homo sapien
tccataaccctataagactccaata

SEQ ID NO: 1521622 - DNA, 25 bp, Homo sapien
cgcagatggcccagatgcattcaat

SEQ ID NO: 1521623 - DNA, 25 bp, Homo sapien
tgaggccactgataacccgtagcct

SEQ ID NO: 1521624 - DNA, 25 bp, Homo sapien
taattgaaggtattctccataaccc

SEQ ID NO: 1521625 - DNA, 25 bp, Homo sapien
tcctcctttttttgcgtgtgtgatg

SEQ ID NO: 1521626 - DNA, 25 bp, Homo sapien
ctttttttgcgtgtgtgatggggtt

SEQ ID NO: 1521627 - DNA, 25 bp, Homo sapien
ctaccatagtgtcctcctttttttg

SEQ ID NO: 1521628 - DNA, 25 bp, Homo sapien
aggcatgcgccactaagggaggaga

SEQ ID NO: 1521629 - DNA, 25 bp, Homo sapien
tgtctgcataggtttccacttcttg

SEQ ID NO: 1521630 - DNA, 25 bp, Homo sapien
tatctagtgtctgcataggtttcca

SEQ ID NO: 1521631 - DNA, 25 bp, Homo sapien
cataggtttccacttcttgtcccca

SEQ ID NO: 1521632 - DNA, 25 bp, Homo sapien
aacaaaacctatctagtgtctgcat

SEQ ID NO: 1521633 - DNA, 25 bp, Homo sapien
tcagtttgctgatacttcagttaaa

SEQ ID NO: 1521634 - DNA, 25 bp, Homo sapien
aaacgtctgcattaggttcttcctc

SEQ ID NO: 1521635 - DNA, 25 bp, Homo sapien
gctgatacttcagttaaagtctcct

SEQ ID NO: 1521636 - DNA, 25 bp, Homo sapien
ctgggaaacgtctgcattaggttct

SEQ ID NO: 1521637 - DNA, 25 bp, Homo sapien
ggtcaggagttcacgcaaatcaggg

SEQ ID NO: 1521638 - DNA, 25 bp, Homo sapien
accctcagaggcacaagattctctc

SEQ ID NO: 1521639 - DNA, 25 bp, Homo sapien
atcagggggcccgtgaaaggcaact

SEQ ID NO: 1521640 - DNA, 25 bp, Homo sapien
cagaggcacaagattctctcgttac

SEQ ID NO: 1521641 - DNA, 25 bp, Homo sapien
ggcacactctgctggtcctttaaac

SEQ ID NO: 1521642 - DNA, 25 bp, Homo sapien
ctaatgctgaccctacttgccctag

SEQ ID NO: 1521643 - DNA, 25 bp, Homo sapien
cacgctacggagctgggaagatgac

SEQ ID NO: 1521644 - DNA, 25 bp, Homo sapien
tagcagcactcaactagacaaagtg

SEQ ID NO: 1521645 - DNA, 25 bp, Homo sapien
cactggtatgtctgaagcgtcctag

SEQ ID NO: 1521646 - DNA, 25 bp, Homo sapien
cttgtgaaaaaggttaggcccactg

SEQ ID NO: 1521647 - DNA, 25 bp, Homo sapien
gtgacactgcactgaagcaccaaag

SEQ ID NO: 1521648 - DNA, 25 bp, Homo sapien
gcatttcaaacaggtgatggtgaca

SEQ ID NO: 1521649 - DNA, 25 bp, Homo sapien
aggttgctgttagccaagaccgcgc

SEQ ID NO: 1521650 - DNA, 25 bp, Homo sapien
cttgggtgacagaatgagactccat

SEQ ID NO: 1521651 - DNA, 25 bp, Homo sapien
cactgcactccagcttgggtgacag

SEQ ID NO: 1521652 - DNA, 25 bp, Homo sapien
gcggaggttgctgttagccaagacc

SEQ ID NO: 1521653 - DNA, 25 bp, Homo sapien
atagaatccatgtatttctgaatcc

SEQ ID NO: 1521654 - DNA, 25 bp, Homo sapien
aatagaatccatgtatttctgaatc

SEQ ID NO: 1521655 - DNA, 25 bp, Homo sapien
tagaatccatgtatttctgaatcct

SEQ ID NO: 1521656 - DNA, 25 bp, Homo sapien
tctgaggaagcgctcctttcgcggg

SEQ ID NO: 1521657 - DNA, 25 bp, Homo sapien
tcaagctatgcaaactctcaggcct

SEQ ID NO: 1521658 - DNA, 25 bp, Homo sapien
cgagtaggcggcagtaaagtaccct

SEQ ID NO: 1521659 - DNA, 25 bp, Homo sapien
ctctgatcagatagtgaggcttgca

SEQ ID NO: 1521660 - DNA, 25 bp, Homo sapien
cagatcttgttgcacacattgtgta

SEQ ID NO: 1521661 - DNA, 25 bp, Homo sapien
cattgtgtactagaggaaaacctga

SEQ ID NO: 1521662 - DNA, 25 bp, Homo sapien
tacactagaataaggcactgacact

SEQ ID NO: 1521663 - DNA, 25 bp, Homo sapien
gaagagtcctgcaaatataatgaat

SEQ ID NO: 1521664 - DNA, 25 bp, Homo sapien
cccactcacatctcaacagaaggtt

SEQ ID NO: 1521665 - DNA, 25 bp, Homo sapien
gagtgcttacaccttatttcacagg

SEQ ID NO: 1521666 - DNA, 25 bp, Homo sapien
gatgcaacagtgcttttaccaccac

SEQ ID NO: 1521667 - DNA, 25 bp, Homo sapien
tatggaaacgccattaacgcccact

SEQ ID NO: 1521668 - DNA, 25 bp, Homo sapien
gagagaaaccctacagatgtagaga

SEQ ID NO: 1521669 - DNA, 25 bp, Homo sapien
agagaaaccctacagatgtagagaa

SEQ ID NO: 1521670 - DNA, 25 bp, Homo sapien
gagaaaccctacagatgtagagaat

SEQ ID NO: 1521671 - DNA, 25 bp, Homo sapien
tctttgcattgtgctcacctggagc

SEQ ID NO: 1521672 - DNA, 25 bp, Homo sapien
tatctgagtctagcaattgaagtca

SEQ ID NO: 1521673 - DNA, 25 bp, Homo sapien
aaagtgtagatgagtgtccagtgca

SEQ ID NO: 1521674 - DNA, 25 bp, Homo sapien
cccaagacctttggtcagagcagag

SEQ ID NO: 1521675 - DNA, 25 bp, Homo sapien
tcccggagtgctggggtcacgggtg

SEQ ID NO: 1521676 - DNA, 25 bp, Homo sapien
gctaccacaccgggcccgcaattta

SEQ ID NO: 1521677 - DNA, 25 bp, Homo sapien
agctaccacaccgggcccgcaattt

SEQ ID NO: 1521678 - DNA, 25 bp, Homo sapien
gattatctaaaacctctaaaagatc

SEQ ID NO: 1521679 - DNA, 25 bp, Homo sapien
cctcattattacatctaccttcaca

SEQ ID NO: 1521680 - DNA, 25 bp, Homo sapien
tatgttgtctattcattaacagatg

SEQ ID NO: 1521681 - DNA, 25 bp, Homo sapien
tcagttgcatacagaaattcctcat

SEQ ID NO: 1521682 - DNA, 25 bp, Homo sapien
cctgtctacgtgagtagtcataaaa

SEQ ID NO: 1521683 - DNA, 25 bp, Homo sapien
ctgtctacgtgagtagtcataaaaa

SEQ ID NO: 1521684 - DNA, 25 bp, Homo sapien
tgtctacgtgagtagtcataaaaat

SEQ ID NO: 1521685 - DNA, 25 bp, Homo sapien
ttaaacaggctcaagcctccatgcc

SEQ ID NO: 1521686 - DNA, 25 bp, Homo sapien
tggctggcctaacaatgtttgttta

SEQ ID NO: 1521687 - DNA, 25 bp, Homo sapien
cgcctggctggcctaacaatgtttg

SEQ ID NO: 1521688 - DNA, 25 bp, Homo sapien
tgtgctttttcagagtaggtttctc

SEQ ID NO: 1521689 - DNA, 25 bp, Homo sapien
ccaagttgggtgaaccctatcctgg

SEQ ID NO: 1521690 - DNA, 25 bp, Homo sapien
ttgtagtttcccacctgaatgaggg

SEQ ID NO: 1521691 - DNA, 25 bp, Homo sapien
taagttcagaattctcagtgggacc

SEQ ID NO: 1521692 - DNA, 25 bp, Homo sapien
ggatctcaaatcttacaggcactta

SEQ ID NO: 1521693 - DNA, 25 bp, Homo sapien
tgacaatatagttggaagtaaacca

SEQ ID NO: 1521694 - DNA, 25 bp, Homo sapien
gacaatatagttggaagtaaaccac

SEQ ID NO: 1521695 - DNA, 25 bp, Homo sapien
gaagcactgacaatgggcgcaatat

SEQ ID NO: 1521696 - DNA, 25 bp, Homo sapien
caatgggcgcaatatagttttgtat

SEQ ID NO: 1521697 - DNA, 25 bp, Homo sapien
cactttggataatatggcacttcag

SEQ ID NO: 1521698 - DNA, 25 bp, Homo sapien
tttcggtgagcttccttcaagttca

SEQ ID NO: 1521699 - DNA, 25 bp, Homo sapien
caaagtcctcttcatgacagataag

SEQ ID NO: 1521700 - DNA, 25 bp, Homo sapien
gggacacacaagtatctgcatgatt

SEQ ID NO: 1521701 - DNA, 25 bp, Homo sapien
ccaagatcgagccattgcactccag

SEQ ID NO: 1521702 - DNA, 25 bp, Homo sapien
aatcctggagttggagcttgtggtg

SEQ ID NO: 1521703 - DNA, 25 bp, Homo sapien
tgaatcctggagttggagcttgtgg

SEQ ID NO: 1521704 - DNA, 25 bp, Homo sapien
tcctggagttggagcttgtggtgag

SEQ ID NO: 1521705 - DNA, 25 bp, Homo sapien
tttcagggaccattgcaatttagag

SEQ ID NO: 1521706 - DNA, 25 bp, Homo sapien
agaaacctgatcttccttggtgagg

SEQ ID NO: 1521707 - DNA, 25 bp, Homo sapien
cccatggccacttggtaaaaataag

SEQ ID NO: 1521708 - DNA, 25 bp, Homo sapien
ctgcacagcggaatctatataggga

SEQ ID NO: 1521709 - DNA, 25 bp, Homo sapien
tctattagctctatgcagaacgaga

SEQ ID NO: 1521710 - DNA, 25 bp, Homo sapien
tatatgctatgcaggattctcagca

SEQ ID NO: 1521711 - DNA, 25 bp, Homo sapien
aactctggtccttagtaaagatgga

SEQ ID NO: 1521712 - DNA, 25 bp, Homo sapien
gaggctccatctgtgtgttctatta

SEQ ID NO: 1521713 - DNA, 25 bp, Homo sapien
aaatcagaatgggtgatccaggttg

SEQ ID NO: 1521714 - DNA, 25 bp, Homo sapien
tctgcattgggagtgtggctctttg

SEQ ID NO: 1521715 - DNA, 25 bp, Homo sapien
tacccaagagctagtaaatcagaat

SEQ ID NO: 1521716 - DNA, 25 bp, Homo sapien
tggcttatcattgggccagcggccc

SEQ ID NO: 1521717 - DNA, 25 bp, Homo sapien
agctgttcataatctcacctgcctg

SEQ ID NO: 1521718 - DNA, 25 bp, Homo sapien
cctagcattttggaccagctgttca

SEQ ID NO: 1521719 - DNA, 25 bp, Homo sapien
cactgggaccactatctgtaccaaa

SEQ ID NO: 1521720 - DNA, 25 bp, Homo sapien
gcctgcatgcacacggaaataaata

SEQ ID NO: 1521721 - DNA, 25 bp, Homo sapien
tcagagaggttatgggactccccag

SEQ ID NO: 1521722 - DNA, 25 bp, Homo sapien
gactctacagatatggtgccagaaa

SEQ ID NO: 1521723 - DNA, 25 bp, Homo sapien
gaatcagggtctacgatgactctgg

SEQ ID NO: 1521724 - DNA, 25 bp, Homo sapien
acaatgttgcgggactgagccctga

SEQ ID NO: 1521725 - DNA, 25 bp, Homo sapien
tctcctgggagggtagttattgagc

SEQ ID NO: 1521726 - DNA, 25 bp, Homo sapien
tattgagcatgtacctgaacaggat

SEQ ID NO: 1521727 - DNA, 25 bp, Homo sapien
aactgaccccagtgagagggcgtaa

SEQ ID NO: 1521728 - DNA, 25 bp, Homo sapien
taacctcaggtgtttgtgctgttgt

SEQ ID NO: 1521729 - DNA, 25 bp, Homo sapien
cagacatttgcccggactaaggcag

SEQ ID NO: 1521730 - DNA, 25 bp, Homo sapien
agacatttgcccggactaaggcagc

SEQ ID NO: 1521731 - DNA, 25 bp, Homo sapien
caccagaatctccttttgtctttgt

SEQ ID NO: 1521732 - DNA, 25 bp, Homo sapien
ctccatcttgaataacttcaccaga

SEQ ID NO: 1521733 - DNA, 25 bp, Homo sapien
acttcaccagaatctccttttgtct

SEQ ID NO: 1521734 - DNA, 25 bp, Homo sapien
actccatcttgaataacttcaccag

SEQ ID NO: 1521735 - DNA, 25 bp, Homo sapien
ttttcttcaacatagtccatctctg

SEQ ID NO: 1521736 - DNA, 25 bp, Homo sapien
tctgttcctaaaagtgttagctttg

SEQ ID NO: 1521737 - DNA, 25 bp, Homo sapien
ccatctctgttcctaaaagtgttag

SEQ ID NO: 1521738 - DNA, 25 bp, Homo sapien
tctctgttcctaaaagtgttagctt

SEQ ID NO: 1521739 - DNA, 25 bp, Homo sapien
tcaaatattaaagctttctccacag

SEQ ID NO: 1521740 - DNA, 25 bp, Homo sapien
cacagccacaagttcctttgatgtt

SEQ ID NO: 1521741 - DNA, 25 bp, Homo sapien
tttgggttattgaacacaaactcac

SEQ ID NO: 1521742 - DNA, 25 bp, Homo sapien
tcctttgatgtttgggttattgaac

SEQ ID NO: 1521743 - DNA, 25 bp, Homo sapien
cttgagatcccatctctgagcagac

SEQ ID NO: 1521744 - DNA, 25 bp, Homo sapien
ttgagatcccatctctgagcagaca

SEQ ID NO: 1521745 - DNA, 25 bp, Homo sapien
tgagatcccatctctgagcagacat

SEQ ID NO: 1521746 - DNA, 25 bp, Homo sapien
tgtcatttcatagaatacttaacat

SEQ ID NO: 1521747 - DNA, 25 bp, Homo sapien
tggccacgtctctaaattgcaatgg

SEQ ID NO: 1521748 - DNA, 25 bp, Homo sapien
ccacgtctctaaattgcaatggtcc

SEQ ID NO: 1521749 - DNA, 25 bp, Homo sapien
tctatggccacgtctctaaattgca

SEQ ID NO: 1521750 - DNA, 25 bp, Homo sapien
tatggccacgtctctaaattgcaat

SEQ ID NO: 1521751 - DNA, 25 bp, Homo sapien
tcttttgagcagctcatgctcatcc

SEQ ID NO: 1521752 - DNA, 25 bp, Homo sapien
taaggtgtgaggaccttttgaaggc

SEQ ID NO: 1521753 - DNA, 25 bp, Homo sapien
tgaggacgagttaaaagctttgccg

SEQ ID NO: 1521754 - DNA, 25 bp, Homo sapien
tgtagtaaggtttgaggacgagtta

SEQ ID NO: 1521755 - DNA, 25 bp, Homo sapien
atgtacagtaaggtgtgaggacctt

SEQ ID NO: 1521756 - DNA, 25 bp, Homo sapien
ttttcttatgtgcagtaacatgtga

SEQ ID NO: 1521757 - DNA, 25 bp, Homo sapien
tcttatgtgcagtaacatgtgaggg

SEQ ID NO: 1521758 - DNA, 25 bp, Homo sapien
gaattttcttatgtgcagtaacatg

SEQ ID NO: 1521759 - DNA, 25 bp, Homo sapien
catgtgaggggtgcttaaaggcttt

SEQ ID NO: 1521760 - DNA, 25 bp, Homo sapien
ttatgtgcaataagggtagaagtgt

SEQ ID NO: 1521761 - DNA, 25 bp, Homo sapien
atgtgcaataagggtagaagtgtac

SEQ ID NO: 1521762 - DNA, 25 bp, Homo sapien
cttatgtgcaataagggtagaagtg

SEQ ID NO: 1521763 - DNA, 25 bp, Homo sapien
tatgtgcaataagggtagaagtgta

SEQ ID NO: 1521764 - DNA, 25 bp, Homo sapien
tgtagtaaggttagaagtgcactta

SEQ ID NO: 1521765 - DNA, 25 bp, Homo sapien
aggttagaagtgcacttaaaagtct

SEQ ID NO: 1521766 - DNA, 25 bp, Homo sapien
aagtgcacttaaaagtctttgccac

SEQ ID NO: 1521767 - DNA, 25 bp, Homo sapien
ttttgtgtgaaaaaaggattgtgga

SEQ ID NO: 1521768 - DNA, 25 bp, Homo sapien
tgtgtttagagagtagtgagggcca

SEQ ID NO: 1521769 - DNA, 25 bp, Homo sapien
cctgtgtttagagagtagtgagggc

SEQ ID NO: 1521770 - DNA, 25 bp, Homo sapien
tcctgtgtttagagagtagtgaggg

SEQ ID NO: 1521771 - DNA, 25 bp, Homo sapien
ctgtgtttagagagtagtgagggcc

SEQ ID NO: 1521772 - DNA, 25 bp, Homo sapien
tgcttttattaactacgagctttct

SEQ ID NO: 1521773 - DNA, 25 bp, Homo sapien
tcttacctacaatcagtgtcacaac

SEQ ID NO: 1521774 - DNA, 25 bp, Homo sapien
taactacgagctttcttctgttgag

SEQ ID NO: 1521775 - DNA, 25 bp, Homo sapien
cctacaatcagtgtcacaaccatat

SEQ ID NO: 1521776 - DNA, 25 bp, Homo sapien
gtgtggtgcatatttccgttactgt

SEQ ID NO: 1521777 - DNA, 25 bp, Homo sapien
tggtgcatatttccgttactgtagc

SEQ ID NO: 1521778 - DNA, 25 bp, Homo sapien
tcagtgtggtgcatatttccgttac

SEQ ID NO: 1521779 - DNA, 25 bp, Homo sapien
ggtcagtgtggtgcatatttccgtt

SEQ ID NO: 1521780 - DNA, 25 bp, Homo sapien
aaccataatagctctgcagttaacg

SEQ ID NO: 1521781 - DNA, 25 bp, Homo sapien
ttcaatatagaaccccaatttaatg

SEQ ID NO: 1521782 - DNA, 25 bp, Homo sapien
gaaccccaatttaatggctaggaga

SEQ ID NO: 1521783 - DNA, 25 bp, Homo sapien
gatgttgccagttctaatatgttcc

SEQ ID NO: 1521784 - DNA, 25 bp, Homo sapien
catggagtgtagactttcaagggag

SEQ ID NO: 1521785 - DNA, 25 bp, Homo sapien
aactttgtaggatgatgtgtcctca

SEQ ID NO: 1521786 - DNA, 25 bp, Homo sapien
actttgtaggatgatgtgtcctcag

SEQ ID NO: 1521787 - DNA, 25 bp, Homo sapien
aagcatggagtgtagactttcaagg

SEQ ID NO: 1521788 - DNA, 25 bp, Homo sapien
gacgggcctctataagcacaggaca

SEQ ID NO: 1521789 - DNA, 25 bp, Homo sapien
gtcccggggtttagctgtggctctc

SEQ ID NO: 1521790 - DNA, 25 bp, Homo sapien
ctctcccaatacttgcaggtcacac

SEQ ID NO: 1521791 - DNA, 25 bp, Homo sapien
gccacagaggacgggcctctataag

SEQ ID NO: 1521792 - DNA, 25 bp, Homo sapien
ttcatgaacccgcagggaaccgagt

SEQ ID NO: 1521793 - DNA, 25 bp, Homo sapien
tccttgcatgatctgggagagacgc

SEQ ID NO: 1521794 - DNA, 25 bp, Homo sapien
tgttttgcggcaccaagcgcttgtt

SEQ ID NO: 1521795 - DNA, 25 bp, Homo sapien
tgtgctcttgcgatcaggtcggacg

SEQ ID NO: 1521796 - DNA, 25 bp, Homo sapien
ctgcactcggcaatgtatgtagtat

SEQ ID NO: 1521797 - DNA, 25 bp, Homo sapien
gccactgcactcggcaatgtatgta

SEQ ID NO: 1521798 - DNA, 25 bp, Homo sapien
actgcactcggcaatgtatgtagta

SEQ ID NO: 1521799 - DNA, 25 bp, Homo sapien
gaatgtctctgttagcactggattc

SEQ ID NO: 1521800 - DNA, 25 bp, Homo sapien
ttagcactggattcatagaaaactt

SEQ ID NO: 1521801 - DNA, 25 bp, Homo sapien
gtctctgttagcactggattcatag

SEQ ID NO: 1521802 - DNA, 25 bp, Homo sapien
ctaacaccctctaatacatactttg

SEQ ID NO: 1521803 - DNA, 25 bp, Homo sapien
cacacacacacataattactaaatg

SEQ ID NO: 1521804 - DNA, 25 bp, Homo sapien
acacacacataattactaaatggca

SEQ ID NO: 1521805 - DNA, 25 bp, Homo sapien
cacacacataattactaaatggcat

SEQ ID NO: 1521806 - DNA, 25 bp, Homo sapien
cacacacacataattactaaatggc

SEQ ID NO: 1521807 - DNA, 25 bp, Homo sapien
ccacatctctaaattgcaatggtcc

SEQ ID NO: 1521808 - DNA, 25 bp, Homo sapien
tggccacatctctaaattgcaatgg

SEQ ID NO: 1521809 - DNA, 25 bp, Homo sapien
tatggccacatctctaaattgcaat

SEQ ID NO: 1521810 - DNA, 25 bp, Homo sapien
tctatggccacatctctaaattgca

SEQ ID NO: 1521811 - DNA, 25 bp, Homo sapien
gattacagggttatctttgtggtca

SEQ ID NO: 1521812 - DNA, 25 bp, Homo sapien
ctaacaaacattctacaaaaaagag

SEQ ID NO: 1521813 - DNA, 25 bp, Homo sapien
aattctaccactttgcaaagaataa

SEQ ID NO: 1521814 - DNA, 25 bp, Homo sapien
aaaatcttcagggtatattatgaat

SEQ ID NO: 1521815 - DNA, 25 bp, Homo sapien
aatcatctcatgtctttccatagtt

SEQ ID NO: 1521816 - DNA, 25 bp, Homo sapien
catgtctttccatagttaaaggttt

SEQ ID NO: 1521817 - DNA, 25 bp, Homo sapien
ctcatgtctttccatagttaaaggt

SEQ ID NO: 1521818 - DNA, 25 bp, Homo sapien
catctcatgtctttccatagttaaa

SEQ ID NO: 1521819 - DNA, 25 bp, Homo sapien
ataaactaatactctcacgcatttc

SEQ ID NO: 1521820 - DNA, 25 bp, Homo sapien
atactctcacgcatttcagacctga

SEQ ID NO: 1521821 - DNA, 25 bp, Homo sapien
taaactaatactctcacgcatttca

SEQ ID NO: 1521822 - DNA, 25 bp, Homo sapien
ctaatactctcacgcatttcagacc

SEQ ID NO: 1521823 - DNA, 25 bp, Homo sapien
ttaaactgcgcccagctacagtttc

SEQ ID NO: 1521824 - DNA, 25 bp, Homo sapien
caaactatctgataaaatagagaaa

SEQ ID NO: 1521825 - DNA, 25 bp, Homo sapien
actttgggagaccacccccagctat

SEQ ID NO: 1521826 - DNA, 25 bp, Homo sapien
catacacttaaactgcgcccagcta

SEQ ID NO: 1521827 - DNA, 25 bp, Homo sapien
ggtcttgggcaaaatgagaactcat

SEQ ID NO: 1521828 - DNA, 25 bp, Homo sapien
ggccaaaggtcttgggcaaaatgag

SEQ ID NO: 1521829 - DNA, 25 bp, Homo sapien
ctggccaaaggtcttgggcaaaatg

SEQ ID NO: 1521830 - DNA, 25 bp, Homo sapien
aaggtcttgggcaaaatgagaactc

SEQ ID NO: 1521831 - DNA, 25 bp, Homo sapien
tatttggaaagaattttgtatgttc

SEQ ID NO: 1521832 - DNA, 25 bp, Homo sapien
ctatttggaaagaattttgtatgtt

SEQ ID NO: 1521833 - DNA, 25 bp, Homo sapien
atttggaaagaattttgtatgttct

SEQ ID NO: 1521834 - DNA, 25 bp, Homo sapien
gtaaattgtcatgtctgcattcttc

SEQ ID NO: 1521835 - DNA, 25 bp, Homo sapien
taaattgtcatgtctgcattcttca

SEQ ID NO: 1521836 - DNA, 25 bp, Homo sapien
tgtcatgtctgcattcttcatatct

SEQ ID NO: 1521837 - DNA, 25 bp, Homo sapien
aattgtcatgtctgcattcttcata

SEQ ID NO: 1521838 - DNA, 25 bp, Homo sapien
aacctcctttgtgcaccttatgctc

SEQ ID NO: 1521839 - DNA, 25 bp, Homo sapien
aatatttctttctgggtagttgtca

SEQ ID NO: 1521840 - DNA, 25 bp, Homo sapien
aaaagatttattccagtatgtcttg

SEQ ID NO: 1521841 - DNA, 25 bp, Homo sapien
gccacatattatacatttgaaaaga

SEQ ID NO: 1521842 - DNA, 25 bp, Homo sapien
tatgaattttcttatgtgtagtaag

SEQ ID NO: 1521843 - DNA, 25 bp, Homo sapien
ttcttcacatctgtaaggtttctct

SEQ ID NO: 1521844 - DNA, 25 bp, Homo sapien
gtttgcagattggttaaaagctttg

SEQ ID NO: 1521845 - DNA, 25 bp, Homo sapien
ccacattcttcacatctgtaaggtt

SEQ ID NO: 1521846 - DNA, 25 bp, Homo sapien
cggtatgaattctcttatgtgtagt

SEQ ID NO: 1521847 - DNA, 25 bp, Homo sapien
gtatgaattctcttatgtgtagtaa

SEQ ID NO: 1521848 - DNA, 25 bp, Homo sapien
tatgaattctcttatgtgtagtaag

SEQ ID NO: 1521849 - DNA, 25 bp, Homo sapien
ggtatgaattctcttatgtgtagta

SEQ ID NO: 1521850 - DNA, 25 bp, Homo sapien
taaggtctgtggatcggttgaaggc

SEQ ID NO: 1521851 - DNA, 25 bp, Homo sapien
tgtatagtaaggttagagcagtgct

SEQ ID NO: 1521852 - DNA, 25 bp, Homo sapien
ttatgtgtagttagagttgaggatg

SEQ ID NO: 1521853 - DNA, 25 bp, Homo sapien
tcttttatgtttggagaggattgag

SEQ ID NO: 1521854 - DNA, 25 bp, Homo sapien
tgtagggttttcgttcaatatgaat

SEQ ID NO: 1521855 - DNA, 25 bp, Homo sapien
atgtagggttttcgttcaatatgaa

SEQ ID NO: 1521856 - DNA, 25 bp, Homo sapien
ggaggaacatttaaaagatctgtca

SEQ ID NO: 1521857 - DNA, 25 bp, Homo sapien
ggaacatttaaaagatctgtcacat

SEQ ID NO: 1521858 - DNA, 25 bp, Homo sapien
acatttaaaagatctgtcacattct

SEQ ID NO: 1521859 - DNA, 25 bp, Homo sapien
gaggaacatttaaaagatctgtcac

SEQ ID NO: 1521860 - DNA, 25 bp, Homo sapien
tactaagagtcgagggctggttaaa

SEQ ID NO: 1521861 - DNA, 25 bp, Homo sapien
actaagagtcgagggctggttaaag

SEQ ID NO: 1521862 - DNA, 25 bp, Homo sapien
aatttactaagagtcgagggctggt

SEQ ID NO: 1521863 - DNA, 25 bp, Homo sapien
tttactaagagtcgagggctggtta

SEQ ID NO: 1521864 - DNA, 25 bp, Homo sapien
ctgtttggtatgaattatgtgtaat

SEQ ID NO: 1521865 - DNA, 25 bp, Homo sapien
aaaggaattgagaacttgttatagg

SEQ ID NO: 1521866 - DNA, 25 bp, Homo sapien
ttataggtttataggttttgccaca

SEQ ID NO: 1521867 - DNA, 25 bp, Homo sapien
cttgtagggcttctgtttggtatga

SEQ ID NO: 1521868 - DNA, 25 bp, Homo sapien
tcttaagaattaagaacttgtagcc

SEQ ID NO: 1521869 - DNA, 25 bp, Homo sapien
cttaagaattaagaacttgtagcca

SEQ ID NO: 1521870 - DNA, 25 bp, Homo sapien
tatacatttctagggtattacacta

SEQ ID NO: 1521871 - DNA, 25 bp, Homo sapien
gagttttggcagtatgacttctatc

SEQ ID NO: 1521872 - DNA, 25 bp, Homo sapien
gacttctatcacctacaatcatgta

SEQ ID NO: 1521873 - DNA, 25 bp, Homo sapien
tcatgtatgacaatcatataaaggc

SEQ ID NO: 1521874 - DNA, 25 bp, Homo sapien
tgtgaaataaggtataagcactaat

SEQ ID NO: 1521875 - DNA, 25 bp, Homo sapien
cctgtgaaataaggtataagcacta

SEQ ID NO: 1521876 - DNA, 25 bp, Homo sapien
ctgtgaaataaggtataagcactaa

SEQ ID NO: 1521877 - DNA, 25 bp, Homo sapien
tgaaataaggtataagcactaataa

SEQ ID NO: 1521878 - DNA, 25 bp, Homo sapien
taaattcccttgattccctgaaaca

SEQ ID NO: 1521879 - DNA, 25 bp, Homo sapien
acatgtgtgcactaagatctgtgac

SEQ ID NO: 1521880 - DNA, 25 bp, Homo sapien
ttatagaaatgagaacatgaacccc

SEQ ID NO: 1521881 - DNA, 25 bp, Homo sapien
ggttagaccatccaaaagacattca

SEQ ID NO: 1521882 - DNA, 25 bp, Homo sapien
tcattaaattatgcactaaaagtgt

SEQ ID NO: 1521883 - DNA, 25 bp, Homo sapien
tgataaacgctagaggtgacggata

SEQ ID NO: 1521884 - DNA, 25 bp, Homo sapien
acaaatgataaacgctagaggtgac

SEQ ID NO: 1521885 - DNA, 25 bp, Homo sapien
cgctagaggtgacggatatcttatt

SEQ ID NO: 1521886 - DNA, 25 bp, Homo sapien
gacaactaagtcatcctacgcggtg

SEQ ID NO: 1521887 - DNA, 25 bp, Homo sapien
caggaattcatcaggtactgtaggt

SEQ ID NO: 1521888 - DNA, 25 bp, Homo sapien
cctttctgaaggtgggatggatctt

SEQ ID NO: 1521889 - DNA, 25 bp, Homo sapien
gcatgcaccggtagttagattagaa

SEQ ID NO: 1521890 - DNA, 25 bp, Homo sapien
gaaggctgcagagtgagtaatcaag

SEQ ID NO: 1521891 - DNA, 25 bp, Homo sapien
atcacgatcgcaagagcaccctgaa

SEQ ID NO: 1521892 - DNA, 25 bp, Homo sapien
ggtcggaccccacaatctaaactga

SEQ ID NO: 1521893 - DNA, 25 bp, Homo sapien
catgtataagtcacagtggtgggac

SEQ ID NO: 1521894 - DNA, 25 bp, Homo sapien
cctgtaggagcacaggacacagagt

SEQ ID NO: 1521895 - DNA, 25 bp, Homo sapien
ctgtaggagcacaggacacagagta

SEQ ID NO: 1521896 - DNA, 25 bp, Homo sapien
tgcaccgagagacaaaggacccgcc

SEQ ID NO: 1521897 - DNA, 25 bp, Homo sapien
acctggagctccggctgcaccgaga

SEQ ID NO: 1521898 - DNA, 25 bp, Homo sapien
ttgctcctccctagggagaaaagcc

SEQ ID NO: 1521899 - DNA, 25 bp, Homo sapien
tgctcctccctagggagaaaagccc

SEQ ID NO: 1521900 - DNA, 25 bp, Homo sapien
aagctggcgaacgtggtaagactcc

SEQ ID NO: 1521901 - DNA, 25 bp, Homo sapien
gatcaagctggcgaacgtggtaaga

SEQ ID NO: 1521902 - DNA, 25 bp, Homo sapien
tggcgaacgtggtaagactccatct

SEQ ID NO: 1521903 - DNA, 25 bp, Homo sapien
tcaagatcaagctggcgaacgtggt

SEQ ID NO: 1521904 - DNA, 25 bp, Homo sapien
caggcgtcatggatagaatttcacc

SEQ ID NO: 1521905 - DNA, 25 bp, Homo sapien
aatcagaatgtgagcagtgtttcag

SEQ ID NO: 1521906 - DNA, 25 bp, Homo sapien
gacatatcttcaaaagttctcactg

SEQ ID NO: 1521907 - DNA, 25 bp, Homo sapien
agcactcctgtttactttctcctag

SEQ ID NO: 1521908 - DNA, 25 bp, Homo sapien
aagggacttgcatttcttaggtaag

SEQ ID NO: 1521909 - DNA, 25 bp, Homo sapien
gagcttcaagtttagggcctgaacg

SEQ ID NO: 1521910 - DNA, 25 bp, Homo sapien
taacatcgattattgattacatata

SEQ ID NO: 1521911 - DNA, 25 bp, Homo sapien
aaccaaagggacttgcatttcttag

SEQ ID NO: 1521912 - DNA, 25 bp, Homo sapien
tctggattgtaggaactatgactgc

SEQ ID NO: 1521913 - DNA, 25 bp, Homo sapien
gagactcaggctaactctgaataga

SEQ ID NO: 1521914 - DNA, 25 bp, Homo sapien
tgagaagggaaagtcacctgaaccc

SEQ ID NO: 1521915 - DNA, 25 bp, Homo sapien
tacttatccagtagctagtctagac

SEQ ID NO: 1521916 - DNA, 25 bp, Homo sapien
atgacatcttctggcagaaaaagac

SEQ ID NO: 1521917 - DNA, 25 bp, Homo sapien
agcatgacatcttctggcagaaaaa

SEQ ID NO: 1521918 - DNA, 25 bp, Homo sapien
catgacatcttctggcagaaaaaga

SEQ ID NO: 1521919 - DNA, 25 bp, Homo sapien
gcatgacatcttctggcagaaaaag

SEQ ID NO: 1521920 - DNA, 25 bp, Homo sapien
ccacatctctaaattgcaatggtcc

SEQ ID NO: 1521921 - DNA, 25 bp, Homo sapien
tggccacatctctaaattgcaatgg

SEQ ID NO: 1521922 - DNA, 25 bp, Homo sapien
tatggccacatctctaaattgcaat

SEQ ID NO: 1521923 - DNA, 25 bp, Homo sapien
ctatggccacatctctaaattgcaa

SEQ ID NO: 1521924 - DNA, 25 bp, Homo sapien
gcagtgtccaggcaatgccactcct

SEQ ID NO: 1521925 - DNA, 25 bp, Homo sapien
ctatatagattccgctgtgcagtgt

SEQ ID NO: 1521926 - DNA, 25 bp, Homo sapien
atatagattccgctgtgcagtgtcc

SEQ ID NO: 1521927 - DNA, 25 bp, Homo sapien
caggcaatgccactcctccagagag

SEQ ID NO: 1521928 - DNA, 25 bp, Homo sapien
ggttactgtagttctctaacatcac

SEQ ID NO: 1521929 - DNA, 25 bp, Homo sapien
gttactgtagttctctaacatcaca

SEQ ID NO: 1521930 - DNA, 25 bp, Homo sapien
actgtagttctctaacatcacattc

SEQ ID NO: 1521931 - DNA, 25 bp, Homo sapien
caaggaagaccaggttactgtagtt

SEQ ID NO: 1521932 - DNA, 25 bp, Homo sapien
ttgctccagatgggcgatcaggtct

SEQ ID NO: 1521933 - DNA, 25 bp, Homo sapien
tccagatgggcgatcaggtctggct

SEQ ID NO: 1521934 - DNA, 25 bp, Homo sapien
tttccttgctccagatgggcgatca

SEQ ID NO: 1521935 - DNA, 25 bp, Homo sapien
tccttgctccagatgggcgatcagg

SEQ ID NO: 1521936 - DNA, 25 bp, Homo sapien
gattacacatgagcaccacaaccac

SEQ ID NO: 1521937 - DNA, 25 bp, Homo sapien
cagggatcctcttggcttgacctcc

SEQ ID NO: 1521938 - DNA, 25 bp, Homo sapien
aatcctgggattacacatgagcacc

SEQ ID NO: 1521939 - DNA, 25 bp, Homo sapien
cctgggattacacatgagcaccaca

SEQ ID NO: 1521940 - DNA, 25 bp, Homo sapien
taccgagaggatgtaccaagccatt

SEQ ID NO: 1521941 - DNA, 25 bp, Homo sapien
cactaaaattatgcactgggttgtt

SEQ ID NO: 1521942 - DNA, 25 bp, Homo sapien
tgagatttggacaacatagacatcc

SEQ ID NO: 1521943 - DNA, 25 bp, Homo sapien
ggtcccatagccaacattgaggatt

SEQ ID NO: 1521944 - DNA, 25 bp, Homo sapien
gcccggccctacaatctcttatctc

SEQ ID NO: 1521945 - DNA, 25 bp, Homo sapien
cctgtggggctggtgcctacgttat

SEQ ID NO: 1521946 - DNA, 25 bp, Homo sapien
ggccctacaatctcttatctctgca

SEQ ID NO: 1521947 - DNA, 25 bp, Homo sapien
gctggtgcctacgttatatgatggt

SEQ ID NO: 1521948 - DNA, 25 bp, Homo sapien
gcaagccactaggtaaaagtaatcg

SEQ ID NO: 1521949 - DNA, 25 bp, Homo sapien
tgtagcattgttactgcaagccact

SEQ ID NO: 1521950 - DNA, 25 bp, Homo sapien
taaagtgacccagccgcaaaaagac

SEQ ID NO: 1521951 - DNA, 25 bp, Homo sapien
caggaacaatgttacaggcaatacc

SEQ ID NO: 1521952 - DNA, 25 bp, Homo sapien
aaatttccatgtccacgtttttcat

SEQ ID NO: 1521953 - DNA, 25 bp, Homo sapien
tttccatgtccacgtttttcatatc

SEQ ID NO: 1521954 - DNA, 25 bp, Homo sapien
aatttccatgtccacgtttttcata

SEQ ID NO: 1521955 - DNA, 25 bp, Homo sapien
atttccatgtccacgtttttcatat

SEQ ID NO: 1521956 - DNA, 25 bp, Homo sapien
gctctgggtagttgtactacactgg

SEQ ID NO: 1521957 - DNA, 25 bp, Homo sapien
tgggtagttgtactacactggttaa

SEQ ID NO: 1521958 - DNA, 25 bp, Homo sapien
tagttgtactacactggttaagtcc

SEQ ID NO: 1521959 - DNA, 25 bp, Homo sapien
ttttcagtatgtcttatattatgtc

SEQ ID NO: 1521960 - DNA, 25 bp, Homo sapien
tatgcatttgaaaggttttttttca

SEQ ID NO: 1521961 - DNA, 25 bp, Homo sapien
tcagtatgtcttatattatgtctat

SEQ ID NO: 1521962 - DNA, 25 bp, Homo sapien
atgcatttgaaaggttttttttcag

SEQ ID NO: 1521963 - DNA, 25 bp, Homo sapien
gtctagttaggactgaggaccaaat

SEQ ID NO: 1521964 - DNA, 25 bp, Homo sapien
tagttaggactgaggaccaaatgaa

SEQ ID NO: 1521965 - DNA, 25 bp, Homo sapien
tctagttaggactgaggaccaaatg

SEQ ID NO: 1521966 - DNA, 25 bp, Homo sapien
ctagttaggactgaggaccaaatga

SEQ ID NO: 1521967 - DNA, 25 bp, Homo sapien
cttctcttatgtgaactaagggtag

SEQ ID NO: 1521968 - DNA, 25 bp, Homo sapien
ttatgtgaactaagggtagaggagt

SEQ ID NO: 1521969 - DNA, 25 bp, Homo sapien
gtagaggagtacttaaaggctttgc

SEQ ID NO: 1521970 - DNA, 25 bp, Homo sapien
tctcttatgtgaactaagggtagag

SEQ ID NO: 1521971 - DNA, 25 bp, Homo sapien
gttgaggatgcaacaaaggctttgc

SEQ ID NO: 1521972 - DNA, 25 bp, Homo sapien
ggttgaggatgcaacaaaggctttg

SEQ ID NO: 1521973 - DNA, 25 bp, Homo sapien
ttactaagggttgaggatgcaacaa

SEQ ID NO: 1521974 - DNA, 25 bp, Homo sapien
taagggttgaggatgcaacaaaggc

SEQ ID NO: 1521975 - DNA, 25 bp, Homo sapien
ttctctccagtatgaattttcttat

SEQ ID NO: 1521976 - DNA, 25 bp, Homo sapien
tcttcacatttgtagggtttctctc

SEQ ID NO: 1521977 - DNA, 25 bp, Homo sapien
ggtttctctccagtatgaattttct

SEQ ID NO: 1521978 - DNA, 25 bp, Homo sapien
ggactggttaaaagctttgccacat

SEQ ID NO: 1521979 - DNA, 25 bp, Homo sapien
gaagaaagggttgcagaatggttaa

SEQ ID NO: 1521980 - DNA, 25 bp, Homo sapien
gtgtgtggataggtgaaaagctttg

SEQ ID NO: 1521981 - DNA, 25 bp, Homo sapien
gtgaagaaagggttgcagaatggtt

SEQ ID NO: 1521982 - DNA, 25 bp, Homo sapien
gtgtagtaaggtgtgtggataggtg

SEQ ID NO: 1521983 - DNA, 25 bp, Homo sapien
tctcatgtctactaaggcttgaggg

SEQ ID NO: 1521984 - DNA, 25 bp, Homo sapien
catgtctactaaggcttgagggtga

SEQ ID NO: 1521985 - DNA, 25 bp, Homo sapien
tgaattatctcatgtctactaaggc

SEQ ID NO: 1521986 - DNA, 25 bp, Homo sapien
tatctcatgtctactaaggcttgag

SEQ ID NO: 1521987 - DNA, 25 bp, Homo sapien
taccgtagtaaaggccaaggtctgc

SEQ ID NO: 1521988 - DNA, 25 bp, Homo sapien
gcaggcctgcctacatggctgtaaa

SEQ ID NO: 1521989 - DNA, 25 bp, Homo sapien
tcagtgagtaccagagagcatttcc

SEQ ID NO: 1521990 - DNA, 25 bp, Homo sapien
tgtacggcagacactagggcatgtt

SEQ ID NO: 1521991 - DNA, 25 bp, Homo sapien
actgcaggtgctagccaccattccc

SEQ ID NO: 1521992 - DNA, 25 bp, Homo sapien
tttaagtgtataaaaccatacatat

SEQ ID NO: 1521993 - DNA, 25 bp, Homo sapien
tgttcctctgtttaattagatagtt

SEQ ID NO: 1521994 - DNA, 25 bp, Homo sapien
taagtgtataaaaccatacatatac

SEQ ID NO: 1521995 - DNA, 25 bp, Homo sapien
taagggagttaactttgccgctaga

SEQ ID NO: 1521996 - DNA, 25 bp, Homo sapien
actttgccgctagatagtttatcag

SEQ ID NO: 1521997 - DNA, 25 bp, Homo sapien
cgggctggtccacagcaatcagaag

SEQ ID NO: 1521998 - DNA, 25 bp, Homo sapien
ggcagtttatcagtttaccatgaac

SEQ ID NO: 1521999 - DNA, 25 bp, Homo sapien
cttctccttttctcgcaaaatcacg

SEQ ID NO: 1522000 - DNA, 25 bp, Homo sapien
cctggtcataagttgtaaaagctgt

SEQ ID NO: 1522001 - DNA, 25 bp, Homo sapien
gtctctcccagattgtgcagggacc

SEQ ID NO: 1522002 - DNA, 25 bp, Homo sapien
tccctgtgcagcgactgtgccctgg

SEQ ID NO: 1522003 - DNA, 25 bp, Homo sapien
tgcagcttaggttgtcagtctttct

SEQ ID NO: 1522004 - DNA, 25 bp, Homo sapien
catgaagctgaagcgaacaggacga

SEQ ID NO: 1522005 - DNA, 25 bp, Homo sapien
gctccaggtctggtcttcactactc

SEQ ID NO: 1522006 - DNA, 25 bp, Homo sapien
gcaggaaatcctcaaatcaggcatg

SEQ ID NO: 1522007 - DNA, 25 bp, Homo sapien
tactggtaacaatatagccattcag

SEQ ID NO: 1522008 - DNA, 25 bp, Homo sapien
gcagcctccggcaactcaacatata

SEQ ID NO: 1522009 - DNA, 25 bp, Homo sapien
gattcttcaagatagcccatcccag

SEQ ID NO: 1522010 - DNA, 25 bp, Homo sapien
cttagtgtggtgaaaggaagcccag

SEQ ID NO: 1522011 - DNA, 25 bp, Homo sapien
tggagcttgcgagcaatgaagctca

SEQ ID NO: 1522012 - DNA, 25 bp, Homo sapien
ggagcttgcgagcaatgaagctcat

SEQ ID NO: 1522013 - DNA, 25 bp, Homo sapien
tggacacctcttgtgggagatctcc

SEQ ID NO: 1522014 - DNA, 25 bp, Homo sapien
ccttggtatatttggacacctcttg

SEQ ID NO: 1522015 - DNA, 25 bp, Homo sapien
gacacctcttgtgggagatctcctg

SEQ ID NO: 1522016 - DNA, 25 bp, Homo sapien
tccccttggtatatttggacacctc

SEQ ID NO: 1522017 - DNA, 25 bp, Homo sapien
caaattccaatgctacgagatgctc

SEQ ID NO: 1522018 - DNA, 25 bp, Homo sapien
gaagaggcaccccactaaactgtgt

SEQ ID NO: 1522019 - DNA, 25 bp, Homo sapien
gagtttaaagctgatccttccccag

SEQ ID NO: 1522020 - DNA, 25 bp, Homo sapien
caatagatggaagaaacgtgggctc

SEQ ID NO: 1522021 - DNA, 25 bp, Homo sapien
catttgacaacctggttctgtccag

SEQ ID NO: 1522022 - DNA, 25 bp, Homo sapien
caacatttgacaacctggttctgtc

SEQ ID NO: 1522023 - DNA, 25 bp, Homo sapien
tttgacaacctggttctgtccagga

SEQ ID NO: 1522024 - DNA, 25 bp, Homo sapien
gacaacctggttctgtccaggaaga

SEQ ID NO: 1522025 - DNA, 25 bp, Homo sapien
tcaggcacataggaacatctgcata

SEQ ID NO: 1522026 - DNA, 25 bp, Homo sapien
cagaggacagcttaaagtcttggga

SEQ ID NO: 1522027 - DNA, 25 bp, Homo sapien
tctgcatagatcttcagccaggaag

SEQ ID NO: 1522028 - DNA, 25 bp, Homo sapien
catagatgactcctctattgaagtt

SEQ ID NO: 1522029 - DNA, 25 bp, Homo sapien
ccaaggttagtggtgtagggcacct

SEQ ID NO: 1522030 - DNA, 25 bp, Homo sapien
agtgctggccaaggttagtggtgta

SEQ ID NO: 1522031 - DNA, 25 bp, Homo sapien
gaggagttagactcatcaaacagct

SEQ ID NO: 1522032 - DNA, 25 bp, Homo sapien
ccaaagagatggaggagttagactc

SEQ ID NO: 1522033 - DNA, 25 bp, Homo sapien
tgctgcttttaactggaacgttctg

SEQ ID NO: 1522034 - DNA, 25 bp, Homo sapien
gaaattatctgatccttgagcaaga

SEQ ID NO: 1522035 - DNA, 25 bp, Homo sapien
ttatgtgtcctaacagaatgctctg

SEQ ID NO: 1522036 - DNA, 25 bp, Homo sapien
cattgaatttgtacgtggctgtgca

SEQ ID NO: 1522037 - DNA, 25 bp, Homo sapien
tgtacacacgtgcttaattctgagc

SEQ ID NO: 1522038 - DNA, 25 bp, Homo sapien
cattgtgtggccatagcaatcttat

SEQ ID NO: 1522039 - DNA, 25 bp, Homo sapien
tatggtgcatgtaacggaagggctc

SEQ ID NO: 1522040 - DNA, 25 bp, Homo sapien
gaaattagtgccaagtccaatgtca

SEQ ID NO: 1522041 - DNA, 25 bp, Homo sapien
tgaggccaatgagttcaagcataaa

SEQ ID NO: 1522042 - DNA, 25 bp, Homo sapien
caacctgatgggtttcaaatgaccc

SEQ ID NO: 1522043 - DNA, 25 bp, Homo sapien
gggtgctccacatctcaaaagttgc

SEQ ID NO: 1522044 - DNA, 25 bp, Homo sapien
catgaatctggaatgctatctgttc

SEQ ID NO: 1522045 - DNA, 25 bp, Homo sapien
agacacgaagcagctaagaccagat

SEQ ID NO: 1522046 - DNA, 25 bp, Homo sapien
aagacacgaagcagctaagaccaga

SEQ ID NO: 1522047 - DNA, 25 bp, Homo sapien
cacgaagcagctaagaccagatttg

SEQ ID NO: 1522048 - DNA, 25 bp, Homo sapien
gacacgaagcagctaagaccagatt

SEQ ID NO: 1522049 - DNA, 25 bp, Homo sapien
ttgcttacatcgcttcagggccggg

SEQ ID NO: 1522050 - DNA, 25 bp, Homo sapien
cgtcaggacggtggtactagtccca

SEQ ID NO: 1522051 - DNA, 25 bp, Homo sapien
taataacgagctagtccgtaccaag

SEQ ID NO: 1522052 - DNA, 25 bp, Homo sapien
gctcatcaacagcacaccgtcagga

SEQ ID NO: 1522053 - DNA, 25 bp, Homo sapien
ggccacatctctaaattccaatggt

SEQ ID NO: 1522054 - DNA, 25 bp, Homo sapien
tggccacatctctaaattccaatgg

SEQ ID NO: 1522055 - DNA, 25 bp, Homo sapien
tatggccacatctctaaattccaat

SEQ ID NO: 1522056 - DNA, 25 bp, Homo sapien
ccacatctctaaattccaatggtcc

SEQ ID NO: 1522057 - DNA, 25 bp, Homo sapien
tgtctcttcacagtgaagggttttt

SEQ ID NO: 1522058 - DNA, 25 bp, Homo sapien
ggatttggcaatcatctcatgtctc

SEQ ID NO: 1522059 - DNA, 25 bp, Homo sapien
ctggggatttggcaatcatctcatg

SEQ ID NO: 1522060 - DNA, 25 bp, Homo sapien
tcatgtctcttcacagtgaagggtt

SEQ ID NO: 1522061 - DNA, 25 bp, Homo sapien
agagggcatctcatcacactaaggg

SEQ ID NO: 1522062 - DNA, 25 bp, Homo sapien
actaaagggccgctgttcttggcta

SEQ ID NO: 1522063 - DNA, 25 bp, Homo sapien
caattatagctatacaggcaggcat

SEQ ID NO: 1522064 - DNA, 25 bp, Homo sapien
gaaatgctgtctggtactcagtcag

SEQ ID NO: 1522065 - DNA, 25 bp, Homo sapien
aaatacagagttagtattgttttga

SEQ ID NO: 1522066 - DNA, 25 bp, Homo sapien
aaaaataagatagattcacaaggaa

SEQ ID NO: 1522067 - DNA, 25 bp, Homo sapien
aatacagagttagtattgttttgaa

SEQ ID NO: 1522068 - DNA, 25 bp, Homo sapien
aaataagatagattcacaaggaaat

SEQ ID NO: 1522069 - DNA, 25 bp, Homo sapien
catgttcttcactatgtaggctttc

SEQ ID NO: 1522070 - DNA, 25 bp, Homo sapien
tatgactagtaagctgtgaggagcg

SEQ ID NO: 1522071 - DNA, 25 bp, Homo sapien
tacgaaggactaaggagcgcctgaa

SEQ ID NO: 1522072 - DNA, 25 bp, Homo sapien
gctgaggagcgtttgaagactttgt

SEQ ID NO: 1522073 - DNA, 25 bp, Homo sapien
tatttttgtaggagttatgtttcat

SEQ ID NO: 1522074 - DNA, 25 bp, Homo sapien
tttgtaggagttatgtttcatataa

SEQ ID NO: 1522075 - DNA, 25 bp, Homo sapien
tagaggggtggtcaaaggctttcca

SEQ ID NO: 1522076 - DNA, 25 bp, Homo sapien
tctcatatttagtaagagtagaggg

SEQ ID NO: 1522077 - DNA, 25 bp, Homo sapien
atcaagtcttgcaaccatataaagg

SEQ ID NO: 1522078 - DNA, 25 bp, Homo sapien
ttgagcataattgcactttaaatgc

SEQ ID NO: 1522079 - DNA, 25 bp, Homo sapien
tacctacaatcaagtcttgcaacca

SEQ ID NO: 1522080 - DNA, 25 bp, Homo sapien
agtcttgcaaccatataaaggattt

SEQ ID NO: 1522081 - DNA, 25 bp, Homo sapien
cgaacagcctgtccacttatatttt

SEQ ID NO: 1522082 - DNA, 25 bp, Homo sapien
gcataaatttgaaagctctattacc

SEQ ID NO: 1522083 - DNA, 25 bp, Homo sapien
taatataggtcaaatacgaacagcc

SEQ ID NO: 1522084 - DNA, 25 bp, Homo sapien
taaggaatgcccaataaagaatctg

SEQ ID NO: 1522085 - DNA, 25 bp, Homo sapien
tgatcacacagagattgcgctgctg

SEQ ID NO: 1522086 - DNA, 25 bp, Homo sapien
caatgatcacacagagattgcgctg

SEQ ID NO: 1522087 - DNA, 25 bp, Homo sapien
ggttgcaatgatcacacagagattg

SEQ ID NO: 1522088 - DNA, 25 bp, Homo sapien
tgaaggttgcaatgatcacacagag

SEQ ID NO: 1522089 - DNA, 25 bp, Homo sapien
gagcgtggactagagaacctcaccg

SEQ ID NO: 1522090 - DNA, 25 bp, Homo sapien
ttgcaccgattgcagcgggcccttg

SEQ ID NO: 1522091 - DNA, 25 bp, Homo sapien
cttgcgtccgaagacttgcaccgat

SEQ ID NO: 1522092 - DNA, 25 bp, Homo sapien
gctgcgagcgtggactagagaacct

SEQ ID NO: 1522093 - DNA, 25 bp, Homo sapien
ttgccgcgtctgcagtgcgccacag

SEQ ID NO: 1522094 - DNA, 25 bp, Homo sapien
gaccattgccgcgtctgcagtgcgc

SEQ ID NO: 1522095 - DNA, 25 bp, Homo sapien
cttgatgagaccattgccgcgtctg

SEQ ID NO: 1522096 - DNA, 25 bp, Homo sapien
gatgagaccattgccgcgtctgcag

SEQ ID NO: 1522097 - DNA, 25 bp, Homo sapien
gcatgcgcggctcagtcatctccag

SEQ ID NO: 1522098 - DNA, 25 bp, Homo sapien
catgcgcggctcagtcatctccagg

SEQ ID NO: 1522099 - DNA, 25 bp, Homo sapien
gtattgtagcatgcgcggctcagtc

SEQ ID NO: 1522100 - DNA, 25 bp, Homo sapien
ctcgtattgtagcatgcgcggctca

SEQ ID NO: 1522101 - DNA, 25 bp, Homo sapien
caaactttttggacttgcagcgacg

SEQ ID NO: 1522102 - DNA, 25 bp, Homo sapien
ctggtagcaagcacgggcaccagga

SEQ ID NO: 1522103 - DNA, 25 bp, Homo sapien
atgagcaccacccttcacacggaca

SEQ ID NO: 1522104 - DNA, 25 bp, Homo sapien
tgcagcgacggggatcagctaccag

SEQ ID NO: 1522105 - DNA, 25 bp, Homo sapien
gtttattatacaggtgaattttgat

SEQ ID NO: 1522106 - DNA, 25 bp, Homo sapien
gtgaattttgatagtcatgatgggc

SEQ ID NO: 1522107 - DNA, 25 bp, Homo sapien
aaactgtttattatacaggtgaatt

SEQ ID NO: 1522108 - DNA, 25 bp, Homo sapien
tacaggtgaattttgatagtcatga

SEQ ID NO: 1522109 - DNA, 25 bp, Homo sapien
ttccatcttccgcatcctcctgttc

SEQ ID NO: 1522110 - DNA, 25 bp, Homo sapien
gagggagcagttagtcgggatcatg

SEQ ID NO: 1522111 - DNA, 25 bp, Homo sapien
tgaggaaaccgcaccacaactaaaa

SEQ ID NO: 1522112 - DNA, 25 bp, Homo sapien
aaggtgaacaaatcacgaggccagg

SEQ ID NO: 1522113 - DNA, 25 bp, Homo sapien
tttaaaattaacatgcttctagaaa

SEQ ID NO: 1522114 - DNA, 25 bp, Homo sapien
agtgggtcaagatcacggcactgcc

SEQ ID NO: 1522115 - DNA, 25 bp, Homo sapien
aatatacaaactaatcagcctggtc

SEQ ID NO: 1522116 - DNA, 25 bp, Homo sapien
cccttcagcttgagcgacagaatga

SEQ ID NO: 1522117 - DNA, 25 bp, Homo sapien
tgcttgacaacagttggctgagact

SEQ ID NO: 1522118 - DNA, 25 bp, Homo sapien
tgtatctaggaaccaccagaaatgc

SEQ ID NO: 1522119 - DNA, 25 bp, Homo sapien
gctctcagtaaaccagtctagtgag

SEQ ID NO: 1522120 - DNA, 25 bp, Homo sapien
tctcgcaaagaagatttgacctggc

SEQ ID NO: 1522121 - DNA, 25 bp, Homo sapien
agatagcagacgtgagacaccatgc

SEQ ID NO: 1522122 - DNA, 25 bp, Homo sapien
tcactgtcttgcagttccatgtgtg

SEQ ID NO: 1522123 - DNA, 25 bp, Homo sapien
ttggcttattgctgcctccatttcc

SEQ ID NO: 1522124 - DNA, 25 bp, Homo sapien
gatacatcgatgttgcgtaccagag

SEQ ID NO: 1522125 - DNA, 25 bp, Homo sapien
tgaattcttactgggaccaagttgg

SEQ ID NO: 1522126 - DNA, 25 bp, Homo sapien
tgcaaccctggatctcaaataactc

SEQ ID NO: 1522127 - DNA, 25 bp, Homo sapien
taataaaggcatgccagggaaggct

SEQ ID NO: 1522128 - DNA, 25 bp, Homo sapien
aagagcggtcctgtagtttcccaca

SEQ ID NO: 1522129 - DNA, 25 bp, Homo sapien
tcccagtattgctttccccaagccc

SEQ ID NO: 1522130 - DNA, 25 bp, Homo sapien
ttcactgacattggggcagtgagcc

SEQ ID NO: 1522131 - DNA, 25 bp, Homo sapien
gtattgctttccccaagcccctcta

SEQ ID NO: 1522132 - DNA, 25 bp, Homo sapien
cagtattgctttccccaagcccctc

SEQ ID NO: 1522133 - DNA, 25 bp, Homo sapien
aacatagccggtcattgtggcgcat

SEQ ID NO: 1522134 - DNA, 25 bp, Homo sapien
catagccggtcattgtggcgcatgc

SEQ ID NO: 1522135 - DNA, 25 bp, Homo sapien
aacaaaaacatagccggtcattgtg

SEQ ID NO: 1522136 - DNA, 25 bp, Homo sapien
aaaacatagccggtcattgtggcgc

SEQ ID NO: 1522137 - DNA, 25 bp, Homo sapien
gggaagagacctcctcactttccag

SEQ ID NO: 1522138 - DNA, 25 bp, Homo sapien
actgggcagccaggcagaggggctc

SEQ ID NO: 1522139 - DNA, 25 bp, Homo sapien
tgggcagccaggcagaggggctcct

SEQ ID NO: 1522140 - DNA, 25 bp, Homo sapien
cggccgggaagagacctcctcactt

SEQ ID NO: 1522141 - DNA, 25 bp, Homo sapien
gtctaatggatattagctcttgggt

SEQ ID NO: 1522142 - DNA, 25 bp, Homo sapien
ttaggaccacctgaagtatagagtg

SEQ ID NO: 1522143 - DNA, 25 bp, Homo sapien
cttaggaccacctgaagtatagagt

SEQ ID NO: 1522144 - DNA, 25 bp, Homo sapien
tgtctaatggatattagctcttggg

SEQ ID NO: 1522145 - DNA, 25 bp, Homo sapien
aataattccagcatgtgtatgaata

SEQ ID NO: 1522146 - DNA, 25 bp, Homo sapien
aattccagcatgtgtatgaataaat

SEQ ID NO: 1522147 - DNA, 25 bp, Homo sapien
ccaataattccagcatgtgtatgaa

SEQ ID NO: 1522148 - DNA, 25 bp, Homo sapien
taattccagcatgtgtatgaataaa

SEQ ID NO: 1522149 - DNA, 25 bp, Homo sapien
tctgcccggccagccgccccgtccg

SEQ ID NO: 1522150 - DNA, 25 bp, Homo sapien
ccctctgcccggccagccgccccgt

SEQ ID NO: 1522151 - DNA, 25 bp, Homo sapien
gagcccctctgcccggccagccgcc

SEQ ID NO: 1522152 - DNA, 25 bp, Homo sapien
gcccctctgcccggccagccgcccc

SEQ ID NO: 1522153 - DNA, 25 bp, Homo sapien
gaaccactcaatcaccaaagaggag

SEQ ID NO: 1522154 - DNA, 25 bp, Homo sapien
tacacagtcaaaggtttaaattgca

SEQ ID NO: 1522155 - DNA, 25 bp, Homo sapien
gaggctttcatgcacatccgtgtga

SEQ ID NO: 1522156 - DNA, 25 bp, Homo sapien
atttagattctcagttcttacaaag

SEQ ID NO: 1522157 - DNA, 25 bp, Homo sapien
agaggacacagagtagcgaagaggc

SEQ ID NO: 1522158 - DNA, 25 bp, Homo sapien
tagcgaagaggcgacctagagctcc

SEQ ID NO: 1522159 - DNA, 25 bp, Homo sapien
cacagagtagcgaagaggcgaccta

SEQ ID NO: 1522160 - DNA, 25 bp, Homo sapien
agaggcgacctagagctccagatgc

SEQ ID NO: 1522161 - DNA, 25 bp, Homo sapien
aaacccacatgtgtacatcgaacca

SEQ ID NO: 1522162 - DNA, 25 bp, Homo sapien
gctatgggtagtacctcagtgacaa

SEQ ID NO: 1522163 - DNA, 25 bp, Homo sapien
catgtggcccagatcctaggatggt

SEQ ID NO: 1522164 - DNA, 25 bp, Homo sapien
tgaggttggaactttatgatcagcc

SEQ ID NO: 1522165 - DNA, 25 bp, Homo sapien
aacaattttcttcgctggacatggt

SEQ ID NO: 1522166 - DNA, 25 bp, Homo sapien
agaacaattttcttcgctggacatg

SEQ ID NO: 1522167 - DNA, 25 bp, Homo sapien
gaacaattttcttcgctggacatgg

SEQ ID NO: 1522168 - DNA, 25 bp, Homo sapien
tacagccacatctctaaattgcaat

SEQ ID NO: 1522169 - DNA, 25 bp, Homo sapien
tctacagccacatctctaaattgca

SEQ ID NO: 1522170 - DNA, 25 bp, Homo sapien
ttctacagccacatctctaaattgc

SEQ ID NO: 1522171 - DNA, 25 bp, Homo sapien
cagccacatctctaaattgcaatga

SEQ ID NO: 1522172 - DNA, 25 bp, Homo sapien
agtcagaggttttattccttgctcc

SEQ ID NO: 1522173 - DNA, 25 bp, Homo sapien
tcaggtctggcttagagacaataat

SEQ ID NO: 1522174 - DNA, 25 bp, Homo sapien
aggtctggcttagagacaataatac

SEQ ID NO: 1522175 - DNA, 25 bp, Homo sapien
gtgatcaggtctggcttagagacaa

SEQ ID NO: 1522176 - DNA, 25 bp, Homo sapien
gggtttggcaatcatctcatgtctc

SEQ ID NO: 1522177 - DNA, 25 bp, Homo sapien
ctgggggtttggcaatcatctcatg

SEQ ID NO: 1522178 - DNA, 25 bp, Homo sapien
gtttggcaatcatctcatgtctctt

SEQ ID NO: 1522179 - DNA, 25 bp, Homo sapien
gggggtttggcaatcatctcatgtc

SEQ ID NO: 1522180 - DNA, 25 bp, Homo sapien
gctttgtcaccttctatatatttca

SEQ ID NO: 1522181 - DNA, 25 bp, Homo sapien
agctttgtcaccttctatatatttc

SEQ ID NO: 1522182 - DNA, 25 bp, Homo sapien
ctttgtcaccttctatatatttcaa

SEQ ID NO: 1522183 - DNA, 25 bp, Homo sapien
tatgttcagttagatttgaggatgt

SEQ ID NO: 1522184 - DNA, 25 bp, Homo sapien
tgtgtagtaaagctagagaagtact

SEQ ID NO: 1522185 - DNA, 25 bp, Homo sapien
aggatgtagtatacgctttgccaca

SEQ ID NO: 1522186 - DNA, 25 bp, Homo sapien
tatgtttatggaggcctgcagacca

SEQ ID NO: 1522187 - DNA, 25 bp, Homo sapien
cacagtaattgctcttttatgaacc

SEQ ID NO: 1522188 - DNA, 25 bp, Homo sapien
cacaaagtttggcaaccgctttagg

SEQ ID NO: 1522189 - DNA, 25 bp, Homo sapien
cgcgggcaataagatctgtaataca

SEQ ID NO: 1522190 - DNA, 25 bp, Homo sapien
ccttctaatacaaaacgcgggcaat

SEQ ID NO: 1522191 - DNA, 25 bp, Homo sapien
cttttaatgtaattacaatgcttcc

SEQ ID NO: 1522192 - DNA, 25 bp, Homo sapien
ctccgttttggtcagtctgatctca

SEQ ID NO: 1522193 - DNA, 25 bp, Homo sapien
aattacaatgcttccaaaaatctgc

SEQ ID NO: 1522194 - DNA, 25 bp, Homo sapien
aaatctgcttttaaagttatacaca

SEQ ID NO: 1522195 - DNA, 25 bp, Homo sapien
ggtgggataggttagtggcataata

SEQ ID NO: 1522196 - DNA, 25 bp, Homo sapien
ttactagagacattattccattatg

SEQ ID NO: 1522197 - DNA, 25 bp, Homo sapien
aaaggtcataaatgcccaattaata

SEQ ID NO: 1522198 - DNA, 25 bp, Homo sapien
tgaaagctgtattatgtcattaccc

SEQ ID NO: 1522199 - DNA, 25 bp, Homo sapien
tttcttgagattgagtctgttgccc

SEQ ID NO: 1522200 - DNA, 25 bp, Homo sapien
taataagttttcagtatatgtatga

SEQ ID NO: 1522201 - DNA, 25 bp, Homo sapien
caccacaatgcccaactatattttg

SEQ ID NO: 1522202 - DNA, 25 bp, Homo sapien
gctcccagttacaagtgaatctcct

SEQ ID NO: 1522203 - DNA, 25 bp, Homo sapien
attctcaaggagcttagttttttat

SEQ ID NO: 1522204 - DNA, 25 bp, Homo sapien
gcattctcaaggagcttagtttttt

SEQ ID NO: 1522205 - DNA, 25 bp, Homo sapien
cattctcaaggagcttagtttttta

SEQ ID NO: 1522206 - DNA, 25 bp, Homo sapien
ctcaaggagcttagttttttattag

SEQ ID NO: 1522207 - DNA, 25 bp, Homo sapien
gaggcaggaaaatcgggtgagcgag

SEQ ID NO: 1522208 - DNA, 25 bp, Homo sapien
tgtttggcataaagcccagtcacag

SEQ ID NO: 1522209 - DNA, 25 bp, Homo sapien
tggcataaagcccagtcacagggct

SEQ ID NO: 1522210 - DNA, 25 bp, Homo sapien
caggaaaatcgggtgagcgagaccc

SEQ ID NO: 1522211 - DNA, 25 bp, Homo sapien
tgcaatgtccgatgctagagcccag

SEQ ID NO: 1522212 - DNA, 25 bp, Homo sapien
ctttttagcaacaagggcagggcgg

SEQ ID NO: 1522213 - DNA, 25 bp, Homo sapien
tcatctgtgcaggaatgagcggccg

SEQ ID NO: 1522214 - DNA, 25 bp, Homo sapien
gaggacttcccatatccccggatgg

SEQ ID NO: 1522215 - DNA, 25 bp, Homo sapien
gtgatcaggtctggcttaggacaac

SEQ ID NO: 1522216 - DNA, 25 bp, Homo sapien
gatcaggtctggcttaggacaacaa

SEQ ID NO: 1522217 - DNA, 25 bp, Homo sapien
tcaggtctggcttaggacaacaata

SEQ ID NO: 1522218 - DNA, 25 bp, Homo sapien
ggtgatcaggtctggcttaggacaa

SEQ ID NO: 1522219 - DNA, 25 bp, Homo sapien
cgtccacccagggaagagccgctgc

SEQ ID NO: 1522220 - DNA, 25 bp, Homo sapien
ccgctgccgccgcacaacctacagc

SEQ ID NO: 1522221 - DNA, 25 bp, Homo sapien
tgccgccgcacaacctacagccgct

SEQ ID NO: 1522222 - DNA, 25 bp, Homo sapien
cgccgcacaacctacagccgctgcc

SEQ ID NO: 1522223 - DNA, 25 bp, Homo sapien
aacccagtgtcattgtcgcacacca

SEQ ID NO: 1522224 - DNA, 25 bp, Homo sapien
caaacccagtgtcattgtcgcacac

SEQ ID NO: 1522225 - DNA, 25 bp, Homo sapien
acaaacccagtgtcattgtcgcaca

SEQ ID NO: 1522226 - DNA, 25 bp, Homo sapien
cccagtgtcattgtcgcacaccacc

SEQ ID NO: 1522227 - DNA, 25 bp, Homo sapien
caaagctgggaagatgtgttctgga

SEQ ID NO: 1522228 - DNA, 25 bp, Homo sapien
aagctgggaagatgtgttctggaaa

SEQ ID NO: 1522229 - DNA, 25 bp, Homo sapien
tgttctggaaagttggagcctgcat

SEQ ID NO: 1522230 - DNA, 25 bp, Homo sapien
aaagttggagcctgcatatccacac

SEQ ID NO: 1522231 - DNA, 25 bp, Homo sapien
tgtcatcccaatttcgtactatgcc

SEQ ID NO: 1522232 - DNA, 25 bp, Homo sapien
gaagtttttccgcatcatccttcaa

SEQ ID NO: 1522233 - DNA, 25 bp, Homo sapien
tttaggaagtttttccgcatcatcc

SEQ ID NO: 1522234 - DNA, 25 bp, Homo sapien
ccttctaatactgggtaaatgtgag

SEQ ID NO: 1522235 - DNA, 25 bp, Homo sapien
actacagcagtcaataaacctcgag

SEQ ID NO: 1522236 - DNA, 25 bp, Homo sapien
acagaatccttagccctctagtcta

SEQ ID NO: 1522237 - DNA, 25 bp, Homo sapien
gcagacagaatccttagccctctag

SEQ ID NO: 1522238 - DNA, 25 bp, Homo sapien
gaatccttagccctctagtctatgt

SEQ ID NO: 1522239 - DNA, 25 bp, Homo sapien
tccttagccctctagtctatgtagg

SEQ ID NO: 1522240 - DNA, 25 bp, Homo sapien
tgcaagaatgatacttggcaatggg

SEQ ID NO: 1522241 - DNA, 25 bp, Homo sapien
aatttgcaagaatgatacttggcaa

SEQ ID NO: 1522242 - DNA, 25 bp, Homo sapien
gcaagaatgatacttggcaatgggt

SEQ ID NO: 1522243 - DNA, 25 bp, Homo sapien
tttgcaagaatgatacttggcaatg

SEQ ID NO: 1522244 - DNA, 25 bp, Homo sapien
ttcaaagatggctgaaaattaagtt

SEQ ID NO: 1522245 - DNA, 25 bp, Homo sapien
taaccttttgctgcttatttaagct

SEQ ID NO: 1522246 - DNA, 25 bp, Homo sapien
tgaatttagtcaccccaaattaagc

SEQ ID NO: 1522247 - DNA, 25 bp, Homo sapien
ccagcatgcaggcaaacttatcttt

SEQ ID NO: 1522248 - DNA, 25 bp, Homo sapien
ttcttaccaaacagagaccctcaag

SEQ ID NO: 1522249 - DNA, 25 bp, Homo sapien
ctcaaaggtcaaagtattggcaatt

SEQ ID NO: 1522250 - DNA, 25 bp, Homo sapien
cagccttggaggtgaaaggcatctc

SEQ ID NO: 1522251 - DNA, 25 bp, Homo sapien
gcagccttggaggtgaaaggcatct

SEQ ID NO: 1522252 - DNA, 25 bp, Homo sapien
cccactatggctatggctatgtgtc

SEQ ID NO: 1522253 - DNA, 25 bp, Homo sapien
gctatggctatgtgtctagtgacta

SEQ ID NO: 1522254 - DNA, 25 bp, Homo sapien
gtggcaagggttcacaagtggaatc

SEQ ID NO: 1522255 - DNA, 25 bp, Homo sapien
tgggtagcccgctcagtcacagcct

SEQ ID NO: 1522256 - DNA, 25 bp, Homo sapien
ctccagtggcaagggttcacaagtg

SEQ ID NO: 1522257 - DNA, 25 bp, Homo sapien
tcaggctccagtggcaagggttcac

SEQ ID NO: 1522258 - DNA, 25 bp, Homo sapien
gctgaccatagatgtactcgggaat

SEQ ID NO: 1522259 - DNA, 25 bp, Homo sapien
tgaccacgctctggcataccttcaa

SEQ ID NO: 1522260 - DNA, 25 bp, Homo sapien
tcaatgaccacgctctggcatacct

SEQ ID NO: 1522261 - DNA, 25 bp, Homo sapien
ctcgggaatctctcatcaacttgtc

SEQ ID NO: 1522262 - DNA, 25 bp, Homo sapien
ttaccagctagcgtaacatcaacca

SEQ ID NO: 1522263 - DNA, 25 bp, Homo sapien
cagctagcgtaacatcaaccagcag

SEQ ID NO: 1522264 - DNA, 25 bp, Homo sapien
taccagctagcgtaacatcaaccag

SEQ ID NO: 1522265 - DNA, 25 bp, Homo sapien
tgtttaccagctagcgtaacatcaa

SEQ ID NO: 1522266 - DNA, 25 bp, Homo sapien
ctatggccacatctctgaattgtaa

SEQ ID NO: 1522267 - DNA, 25 bp, Homo sapien
tggccacatctctgaattgtaatgt

SEQ ID NO: 1522268 - DNA, 25 bp, Homo sapien
tatggccacatctctgaattgtaat

SEQ ID NO: 1522269 - DNA, 25 bp, Homo sapien
ccacatctctgaattgtaatgtcct

SEQ ID NO: 1522270 - DNA, 25 bp, Homo sapien
acaggcatgaggcacggaagtaatt

SEQ ID NO: 1522271 - DNA, 25 bp, Homo sapien
ttgtactttcgttagttggccaggc

SEQ ID NO: 1522272 - DNA, 25 bp, Homo sapien
catgaggcacggaagtaattctttt

SEQ ID NO: 1522273 - DNA, 25 bp, Homo sapien
agtaattcttttctaaatgcacaaa

SEQ ID NO: 1522274 - DNA, 25 bp, Homo sapien
cggcggggcagaggcactccccaca

SEQ ID NO: 1522275 - DNA, 25 bp, Homo sapien
ggcggggcagaggcactccccacat

SEQ ID NO: 1522276 - DNA, 25 bp, Homo sapien
tccttgctccagatgggtgatgagg

SEQ ID NO: 1522277 - DNA, 25 bp, Homo sapien
gatgggtgatgaggtctggctttaa

SEQ ID NO: 1522278 - DNA, 25 bp, Homo sapien
gatgaggtctggctttaagacaaca

SEQ ID NO: 1522279 - DNA, 25 bp, Homo sapien
gaggtctggctttaagacaacaata

SEQ ID NO: 1522280 - DNA, 25 bp, Homo sapien
tgctctggccaaagattttgggtaa

SEQ ID NO: 1522281 - DNA, 25 bp, Homo sapien
tcatctacactttcacagccttctt

SEQ ID NO: 1522282 - DNA, 25 bp, Homo sapien
agattttgggtaaaatgagaacaca

SEQ ID NO: 1522283 - DNA, 25 bp, Homo sapien
cagccttcttttaactgtaaattct

SEQ ID NO: 1522284 - DNA, 25 bp, Homo sapien
gtccattataacctcttttgtgcgc

SEQ ID NO: 1522285 - DNA, 25 bp, Homo sapien
aaaattgatgaaagactttcccata

SEQ ID NO: 1522286 - DNA, 25 bp, Homo sapien
cattataacctcttttgtgcgcctt

SEQ ID NO: 1522287 - DNA, 25 bp, Homo sapien
ttataacctcttttgtgcgccttac

SEQ ID NO: 1522288 - DNA, 25 bp, Homo sapien
tgtgtagtaaggtttgaggactggt

SEQ ID NO: 1522289 - DNA, 25 bp, Homo sapien
tagtaaggtttgaggactggttgaa

SEQ ID NO: 1522290 - DNA, 25 bp, Homo sapien
ttatgtgtagtaaggtttgaggact

SEQ ID NO: 1522291 - DNA, 25 bp, Homo sapien
aggtttgaggactggttgaaagctt

SEQ ID NO: 1522292 - DNA, 25 bp, Homo sapien
taagaatagaggaccaactgaaggt

SEQ ID NO: 1522293 - DNA, 25 bp, Homo sapien
cattttatgtgtaataagaatagag

SEQ ID NO: 1522294 - DNA, 25 bp, Homo sapien
tagaggaccaactgaaggttttgcc

SEQ ID NO: 1522295 - DNA, 25 bp, Homo sapien
tgaatcattttatgtgtaataagaa

SEQ ID NO: 1522296 - DNA, 25 bp, Homo sapien
tttcttatgcgaaaaaaagttgcag

SEQ ID NO: 1522297 - DNA, 25 bp, Homo sapien
aggtttgaggatgaaataaaggcct

SEQ ID NO: 1522298 - DNA, 25 bp, Homo sapien
tatctcatgtctactaaggtttgag

SEQ ID NO: 1522299 - DNA, 25 bp, Homo sapien
ttatctcatgtctactaaggtttga

SEQ ID NO: 1522300 - DNA, 25 bp, Homo sapien
aaaggccttgccacatttatcgcac

SEQ ID NO: 1522301 - DNA, 25 bp, Homo sapien
tagtaaaagttgatagctggttaaa

SEQ ID NO: 1522302 - DNA, 25 bp, Homo sapien
tatttagtaaaagttgatagctggt

SEQ ID NO: 1522303 - DNA, 25 bp, Homo sapien
agtaaaagttgatagctggttaaag

SEQ ID NO: 1522304 - DNA, 25 bp, Homo sapien
tttagtaaaagttgatagctggtta

SEQ ID NO: 1522305 - DNA, 25 bp, Homo sapien
cctctagtgcaaagtgtgtgcaata

SEQ ID NO: 1522306 - DNA, 25 bp, Homo sapien
gtgtgtgcaataggatcagtgatac

SEQ ID NO: 1522307 - DNA, 25 bp, Homo sapien
gtgtgcaataggatcagtgatacaa

SEQ ID NO: 1522308 - DNA, 25 bp, Homo sapien
aagtgtgtgcaataggatcagtgat

SEQ ID NO: 1522309 - DNA, 25 bp, Homo sapien
tgtctcttcatagtcaaaggttttt

SEQ ID NO: 1522310 - DNA, 25 bp, Homo sapien
tcatgtctcttcatagtcaaaggtt

SEQ ID NO: 1522311 - DNA, 25 bp, Homo sapien
gggggtttggcagtcatctcatgtc

SEQ ID NO: 1522312 - DNA, 25 bp, Homo sapien
ctgggggtttggcagtcatctcatg

SEQ ID NO: 1522313 - DNA, 25 bp, Homo sapien
cttttcggaagacagatggtgatga

SEQ ID NO: 1522314 - DNA, 25 bp, Homo sapien
tctagtcttttcgtctttatggcag

SEQ ID NO: 1522315 - DNA, 25 bp, Homo sapien
atgaaaatgaagtttaggcctcttt

SEQ ID NO: 1522316 - DNA, 25 bp, Homo sapien
gagtgtgtgatgtaaagtcaccctc

SEQ ID NO: 1522317 - DNA, 25 bp, Homo sapien
gaattaaattcacctgtctcggcct

SEQ ID NO: 1522318 - DNA, 25 bp, Homo sapien
taaattgagcggtacagaaatcttc

SEQ ID NO: 1522319 - DNA, 25 bp, Homo sapien
ttagatggaattaaattcacctgtc

SEQ ID NO: 1522320 - DNA, 25 bp, Homo sapien
aatctgtagattaaattgagcggta

SEQ ID NO: 1522321 - DNA, 25 bp, Homo sapien
ccataggatgcagagccaggttgat

SEQ ID NO: 1522322 - DNA, 25 bp, Homo sapien
gagccaggttgatcctacctagaat

SEQ ID NO: 1522323 - DNA, 25 bp, Homo sapien
ggactttggacggagatgtacagaa

SEQ ID NO: 1522324 - DNA, 25 bp, Homo sapien
cctagaatctgcagataaggtctgc

SEQ ID NO: 1522325 - DNA, 25 bp, Homo sapien
gggagctccatgagaccaagatttt

SEQ ID NO: 1522326 - DNA, 25 bp, Homo sapien
tatgttgctcttcatgggtacgagc

SEQ ID NO: 1522327 - DNA, 25 bp, Homo sapien
ctaatggcttcacccggcttaggcg

SEQ ID NO: 1522328 - DNA, 25 bp, Homo sapien
tgtatgacaagatagagggccacgt

SEQ ID NO: 1522329 - DNA, 25 bp, Homo sapien
tggccaaagagaccgctaacgctca

SEQ ID NO: 1522330 - DNA, 25 bp, Homo sapien
gaatctgtttacacaagttaactcc

SEQ ID NO: 1522331 - DNA, 25 bp, Homo sapien
aaaattctctcggccatgaggaggg

SEQ ID NO: 1522332 - DNA, 25 bp, Homo sapien
gatgttagatatgggtgctatgccg

SEQ ID NO: 1522333 - DNA, 25 bp, Homo sapien
ttaacttataggtacttgtgccaat

SEQ ID NO: 1522334 - DNA, 25 bp, Homo sapien
tacagatatggcattgattattgat

SEQ ID NO: 1522335 - DNA, 25 bp, Homo sapien
tatatacagatatggcattgattat

SEQ ID NO: 1522336 - DNA, 25 bp, Homo sapien
tagtttaacttataggtacttgtgc

SEQ ID NO: 1522337 - DNA, 25 bp, Homo sapien
cagcaaatggagtacaaaggaggga

SEQ ID NO: 1522338 - DNA, 25 bp, Homo sapien
tacagcaaatggagtacaaaggagg

SEQ ID NO: 1522339 - DNA, 25 bp, Homo sapien
tgttacagcaaatggagtacaaagg

SEQ ID NO: 1522340 - DNA, 25 bp, Homo sapien
gcaaatggagtacaaaggagggatc

SEQ ID NO: 1522341 - DNA, 25 bp, Homo sapien
ttctggcatcagatgctatttcctc

SEQ ID NO: 1522342 - DNA, 25 bp, Homo sapien
tggagcctctcacataaccgcagca

SEQ ID NO: 1522343 - DNA, 25 bp, Homo sapien
acataaccgcagcaggtcaatgaac

SEQ ID NO: 1522344 - DNA, 25 bp, Homo sapien
gattctggcatcagatgctatttcc

SEQ ID NO: 1522345 - DNA, 25 bp, Homo sapien
aacacagaatgactcatttctctta

SEQ ID NO: 1522346 - DNA, 25 bp, Homo sapien
cacagaatgactcatttctcttaca

SEQ ID NO: 1522347 - DNA, 25 bp, Homo sapien
caaacacagaatgactcatttctct

SEQ ID NO: 1522348 - DNA, 25 bp, Homo sapien
ctatgaggggatgaacaaacacaga

SEQ ID NO: 1522349 - DNA, 25 bp, Homo sapien
tctcctccttgtttatcatccaagt

SEQ ID NO: 1522350 - DNA, 25 bp, Homo sapien
tgggtaccaaccaatggcacttctt

SEQ ID NO: 1522351 - DNA, 25 bp, Homo sapien
ttaggtctccagatctcctccttgt

SEQ ID NO: 1522352 - DNA, 25 bp, Homo sapien
gaaactggataaactctcatctggg

SEQ ID NO: 1522353 - DNA, 25 bp, Homo sapien
tatggccacatctctaaattgcaat

SEQ ID NO: 1522354 - DNA, 25 bp, Homo sapien
atggccacatctctaaattgcaatg

SEQ ID NO: 1522355 - DNA, 25 bp, Homo sapien
ctatggccacatctctaaattgcaa

SEQ ID NO: 1522356 - DNA, 25 bp, Homo sapien
aaagcctttaactggccctcacagc

SEQ ID NO: 1522357 - DNA, 25 bp, Homo sapien
aatggctttaagtattcctctacgc

SEQ ID NO: 1522358 - DNA, 25 bp, Homo sapien
ccctcacagcttgctattcataaga

SEQ ID NO: 1522359 - DNA, 25 bp, Homo sapien
aagcttttaaacatcctgcaaccct

SEQ ID NO: 1522360 - DNA, 25 bp, Homo sapien
tctcataaaactttggccccctctg

SEQ ID NO: 1522361 - DNA, 25 bp, Homo sapien
gtccgccacccatctgtgcacagat

SEQ ID NO: 1522362 - DNA, 25 bp, Homo sapien
ctcataaaactttggccccctctgg

SEQ ID NO: 1522363 - DNA, 25 bp, Homo sapien
ctggactccagagtccgccacccat

SEQ ID NO: 1522364 - DNA, 25 bp, Homo sapien
atctatttgggcctccagatttact

SEQ ID NO: 1522365 - DNA, 25 bp, Homo sapien
tatttgggcctccagatttactcct

SEQ ID NO: 1522366 - DNA, 25 bp, Homo sapien
tttgggcctccagatttactccttg

SEQ ID NO: 1522367 - DNA, 25 bp, Homo sapien
ggcctccagatttactccttgttta

SEQ ID NO: 1522368 - DNA, 25 bp, Homo sapien
cacatccctatataaattgtgctgt

SEQ ID NO: 1522369 - DNA, 25 bp, Homo sapien
catcacatccctatataaattgtgc

SEQ ID NO: 1522370 - DNA, 25 bp, Homo sapien
gtgctgtgcagtgtccaggcaatgc

SEQ ID NO: 1522371 - DNA, 25 bp, Homo sapien
atccctatataaattgtgctgtgca

SEQ ID NO: 1522372 - DNA, 25 bp, Homo sapien
tgtgtttggcaatcatcacctgtct

SEQ ID NO: 1522373 - DNA, 25 bp, Homo sapien
ctgtgtgtttggcaatcatcacctg

SEQ ID NO: 1522374 - DNA, 25 bp, Homo sapien
tgtctcttcatggtcaaagtttctt

SEQ ID NO: 1522375 - DNA, 25 bp, Homo sapien
cacctgtctcttcatggtcaaagtt

SEQ ID NO: 1522376 - DNA, 25 bp, Homo sapien
aatgtaattagtaaagtcagtaaca

SEQ ID NO: 1522377 - DNA, 25 bp, Homo sapien
taggtaattccctaagataccacta

SEQ ID NO: 1522378 - DNA, 25 bp, Homo sapien
agtaacaaagtttaaggcagatgta

SEQ ID NO: 1522379 - DNA, 25 bp, Homo sapien
tgtaattagtaaagtcagtaacaaa

SEQ ID NO: 1522380 - DNA, 25 bp, Homo sapien
aatatccaggaagttatatagaaac

SEQ ID NO: 1522381 - DNA, 25 bp, Homo sapien
caactactgaagatcggaaaaatga

SEQ ID NO: 1522382 - DNA, 25 bp, Homo sapien
ctgaagatcggaaaaatgagattaa

SEQ ID NO: 1522383 - DNA, 25 bp, Homo sapien
aaacacagacaactactgaagatcg

SEQ ID NO: 1522384 - DNA, 25 bp, Homo sapien
actcaaaggatttttccttgctcca

SEQ ID NO: 1522385 - DNA, 25 bp, Homo sapien
acccacctgggtgtttggcaatcat

SEQ ID NO: 1522386 - DNA, 25 bp, Homo sapien
catactcaaaggatttttccttgct

SEQ ID NO: 1522387 - DNA, 25 bp, Homo sapien
ttgcacccacctgggtgtttggcaa

SEQ ID NO: 1522388 - DNA, 25 bp, Homo sapien
caggcagcagtgaaccgagcaaatc

SEQ ID NO: 1522389 - DNA, 25 bp, Homo sapien
ccgagcaaatcagcctggttgacag

SEQ ID NO: 1522390 - DNA, 25 bp, Homo sapien
attcaggcagcagtgaaccgagcaa

SEQ ID NO: 1522391 - DNA, 25 bp, Homo sapien
cagtgaaccgagcaaatcagcctgg

SEQ ID NO: 1522392 - DNA, 25 bp, Homo sapien
tatatctggaaataacaacttcatt

SEQ ID NO: 1522393 - DNA, 25 bp, Homo sapien
atatactactagaaacacatgaaac

SEQ ID NO: 1522394 - DNA, 25 bp, Homo sapien
catggcaataatctgtctcgacaaa

SEQ ID NO: 1522395 - DNA, 25 bp, Homo sapien
ggaaaatatagaggcacagtttttg

SEQ ID NO: 1522396 - DNA, 25 bp, Homo sapien
gccgagacaggtggaatgcttgagg

SEQ ID NO: 1522397 - DNA, 25 bp, Homo sapien
atgtaaataaaatacggccaggcac

SEQ ID NO: 1522398 - DNA, 25 bp, Homo sapien
agacaggtggaatgcttgaggttag

SEQ ID NO: 1522399 - DNA, 25 bp, Homo sapien
atggtggcacatgccaggaggctga

SEQ ID NO: 1522400 - DNA, 25 bp, Homo sapien
gacattgcttttacgaacacctcca

SEQ ID NO: 1522401 - DNA, 25 bp, Homo sapien
tatctcacagaaaagctagtatcct

SEQ ID NO: 1522402 - DNA, 25 bp, Homo sapien
tgttgaagaggaaatccgcaaagct

SEQ ID NO: 1522403 - DNA, 25 bp, Homo sapien
gagatgcgacttcgccatgtttgcc

SEQ ID NO: 1522404 - DNA, 25 bp, Homo sapien
ggacacctcttgtgggagatctgct

SEQ ID NO: 1522405 - DNA, 25 bp, Homo sapien
tggacacctcttgtgggagatctgc

SEQ ID NO: 1522406 - DNA, 25 bp, Homo sapien
ctccatgatatgtttggacacctct

SEQ ID NO: 1522407 - DNA, 25 bp, Homo sapien
ccatgatatgtttggacacctcttg

SEQ ID NO: 1522408 - DNA, 25 bp, Homo sapien
tcaagcacctggctatagccaacat

SEQ ID NO: 1522409 - DNA, 25 bp, Homo sapien
ggatattaaagtccacagatttgat

SEQ ID NO: 1522410 - DNA, 25 bp, Homo sapien
cctggctatagccaacatcttggtc

SEQ ID NO: 1522411 - DNA, 25 bp, Homo sapien
ggtggatattaaagtccacagattt

SEQ ID NO: 1522412 - DNA, 25 bp, Homo sapien
ttacttcttctgtggccccatcatc

SEQ ID NO: 1522413 - DNA, 25 bp, Homo sapien
atcatcctttgttcactgtctgttc

SEQ ID NO: 1522414 - DNA, 25 bp, Homo sapien
cttctgtggccccatcatcctttgt

SEQ ID NO: 1522415 - DNA, 25 bp, Homo sapien
tggccccatcatcctttgttcactg

SEQ ID NO: 1522416 - DNA, 25 bp, Homo sapien
gcttcctgaagcacgctgtttctga

SEQ ID NO: 1522417 - DNA, 25 bp, Homo sapien
aattgtcctgtagctcctctttagg

SEQ ID NO: 1522418 - DNA, 25 bp, Homo sapien
tgaaaagacagctgatctcccctcc

SEQ ID NO: 1522419 - DNA, 25 bp, Homo sapien
tgaagaaaccaatacggagtaccga

SEQ ID NO: 1522420 - DNA, 25 bp, Homo sapien
gaagcctagtgagaaggtgcccgat

SEQ ID NO: 1522421 - DNA, 25 bp, Homo sapien
tctcgttccaaatagagccgggctg

SEQ ID NO: 1522422 - DNA, 25 bp, Homo sapien
ggagttaacccttggaatgcctagc

SEQ ID NO: 1522423 - DNA, 25 bp, Homo sapien
tctgggcaagagtacggaccctact

SEQ ID NO: 1522424 - DNA, 25 bp, Homo sapien
ggtggatccaagacacagcacctga

SEQ ID NO: 1522425 - DNA, 25 bp, Homo sapien
gtctcgcctcaggatcagccaggtt

SEQ ID NO: 1522426 - DNA, 25 bp, Homo sapien
gcttggtctcgcctcaggatcagcc

SEQ ID NO: 1522427 - DNA, 25 bp, Homo sapien
tggatccaagacacagcacctgaaa

SEQ ID NO: 1522428 - DNA, 25 bp, Homo sapien
tatatgcatatagctccaggaagag

SEQ ID NO: 1522429 - DNA, 25 bp, Homo sapien
agtggagacacccttctataggtgt

SEQ ID NO: 1522430 - DNA, 25 bp, Homo sapien
gactcagtatgaatctccaaccgag

SEQ ID NO: 1522431 - DNA, 25 bp, Homo sapien
cactcataagtatagtacaataggg

SEQ ID NO: 1522432 - DNA, 25 bp, Homo sapien
gctggcccatagtgttgaattattc

SEQ ID NO: 1522433 - DNA, 25 bp, Homo sapien
agtatccccgtgacccatcttgtgc

SEQ ID NO: 1522434 - DNA, 25 bp, Homo sapien
aataggagtgcagtatccccgtgac

SEQ ID NO: 1522435 - DNA, 25 bp, Homo sapien
tttcaggggacttccctatgtcttc

SEQ ID NO: 1522436 - DNA, 25 bp, Homo sapien
catgtaatctatagtataacattac

SEQ ID NO: 1522437 - DNA, 25 bp, Homo sapien
tataacattacttgtgacctagcca

SEQ ID NO: 1522438 - DNA, 25 bp, Homo sapien
atagtataacattacttgtgaccta

SEQ ID NO: 1522439 - DNA, 25 bp, Homo sapien
agtataacattacttgtgacctagc

SEQ ID NO: 1522440 - DNA, 25 bp, Homo sapien
tactggcaaaattcctacaagcatg

SEQ ID NO: 1522441 - DNA, 25 bp, Homo sapien
gaatatggaaaacccattaatgcct

SEQ ID NO: 1522442 - DNA, 25 bp, Homo sapien
aacagcctttatatggttgccacat

SEQ ID NO: 1522443 - DNA, 25 bp, Homo sapien
cttactattaagagacatggtgata

SEQ ID NO: 1522444 - DNA, 25 bp, Homo sapien
tattatatcttgtaggactgtgcca

SEQ ID NO: 1522445 - DNA, 25 bp, Homo sapien
taattttgaatcgagtattactggt

SEQ ID NO: 1522446 - DNA, 25 bp, Homo sapien
cattacagtcgccacctccttgatt

SEQ ID NO: 1522447 - DNA, 25 bp, Homo sapien
gtgagccagggagcacaaccctgta

SEQ ID NO: 1522448 - DNA, 25 bp, Homo sapien
aaatttatagtggccattctaatgt

SEQ ID NO: 1522449 - DNA, 25 bp, Homo sapien
aataatgactgcacctttgttatcc

SEQ ID NO: 1522450 - DNA, 25 bp, Homo sapien
ctctataaactagtaattttctgtg

SEQ ID NO: 1522451 - DNA, 25 bp, Homo sapien
gttatccaccaacattcaacttagg

SEQ ID NO: 1522452 - DNA, 25 bp, Homo sapien
aagtaattagcatacacagatgtcc

SEQ ID NO: 1522453 - DNA, 25 bp, Homo sapien
agcgattatcctgctaaactaccac

SEQ ID NO: 1522454 - DNA, 25 bp, Homo sapien
gaatataagtaattagcatacacag

SEQ ID NO: 1522455 - DNA, 25 bp, Homo sapien
cacctgttataaagaggtgaaaagt

SEQ ID NO: 1522456 - DNA, 25 bp, Homo sapien
taactatccaatatttgcaggctga

SEQ ID NO: 1522457 - DNA, 25 bp, Homo sapien
cacaaagataggagtaaaggtagca

SEQ ID NO: 1522458 - DNA, 25 bp, Homo sapien
tatactgcgaaagcaagaacagttc

SEQ ID NO: 1522459 - DNA, 25 bp, Homo sapien
ttgacagaaacctgataatccaagg

SEQ ID NO: 1522460 - DNA, 25 bp, Homo sapien
gtatttgaaaatgggaggctctgct

SEQ ID NO: 1522461 - DNA, 25 bp, Homo sapien
gaaagagttctgatgacagaccctg

SEQ ID NO: 1522462 - DNA, 25 bp, Homo sapien
agaccctgttttcttgtagctgcca

SEQ ID NO: 1522463 - DNA, 25 bp, Homo sapien
gggccagacctggaacaaagctctg

SEQ ID NO: 1522464 - DNA, 25 bp, Homo sapien
cagccacggaaggagccttcattct

SEQ ID NO: 1522465 - DNA, 25 bp, Homo sapien
gggagtctcccttgcggatatctca

SEQ ID NO: 1522466 - DNA, 25 bp, Homo sapien
ggcagatgcagtcaagattaagatg

SEQ ID NO: 1522467 - DNA, 25 bp, Homo sapien
gatatctcaagactgctcaccccag

SEQ ID NO: 1522468 - DNA, 25 bp, Homo sapien
attttcaggtgggggtatcagtatt

SEQ ID NO: 1522469 - DNA, 25 bp, Homo sapien
ggggtatcagtattttatgccacta

SEQ ID NO: 1522470 - DNA, 25 bp, Homo sapien
agattttcaggtgggggtatcagta

SEQ ID NO: 1522471 - DNA, 25 bp, Homo sapien
tgggggtatcagtattttatgccac

SEQ ID NO: 1522472 - DNA, 25 bp, Homo sapien
tatttgtgaagcattggttaagtcc

SEQ ID NO: 1522473 - DNA, 25 bp, Homo sapien
cacttgtagagatgctctccagtat

SEQ ID NO: 1522474 - DNA, 25 bp, Homo sapien
agtgaggttcgaggagtacttaaag

SEQ ID NO: 1522475 - DNA, 25 bp, Homo sapien
tcaaaatgacaaagaagcatgcagc

SEQ ID NO: 1522476 - DNA, 25 bp, Homo sapien
tgtgaggaccagttgaacgctttgc

SEQ ID NO: 1522477 - DNA, 25 bp, Homo sapien
ggactgcttaaaggttttggcacat

SEQ ID NO: 1522478 - DNA, 25 bp, Homo sapien
gaggactgcttaaaggttttggcac

SEQ ID NO: 1522479 - DNA, 25 bp, Homo sapien
tagaggactgcttaaaggttttggc

SEQ ID NO: 1522480 - DNA, 25 bp, Homo sapien
aattgtaggctttgcaacattcttc

SEQ ID NO: 1522481 - DNA, 25 bp, Homo sapien
caattgtaggctttgcaacattctt

SEQ ID NO: 1522482 - DNA, 25 bp, Homo sapien
ttgtaggctttgcaacattcttcac

SEQ ID NO: 1522483 - DNA, 25 bp, Homo sapien
attgtaggctttgcaacattcttca

SEQ ID NO: 1522484 - DNA, 25 bp, Homo sapien
taagttgagaggagttcttaaagac

SEQ ID NO: 1522485 - DNA, 25 bp, Homo sapien
tatgtgtggtaagttgagaggagtt

SEQ ID NO: 1522486 - DNA, 25 bp, Homo sapien
tagggttgctccttagtataaatta

SEQ ID NO: 1522487 - DNA, 25 bp, Homo sapien
tttgtagggttgctccttagtataa

SEQ ID NO: 1522488 - DNA, 25 bp, Homo sapien
ttatctgtagtaagggtagaggagt

SEQ ID NO: 1522489 - DNA, 25 bp, Homo sapien
ggtagaggagtacataaaggctttg

SEQ ID NO: 1522490 - DNA, 25 bp, Homo sapien
tttcctatgtgaaaaaagtgttgtg

SEQ ID NO: 1522491 - DNA, 25 bp, Homo sapien
tatgtgaaaaaagtgttgtgggatg

SEQ ID NO: 1522492 - DNA, 25 bp, Homo sapien
tgtacggtttctctgcagtagaaat

SEQ ID NO: 1522493 - DNA, 25 bp, Homo sapien
acggtttctctgcagtagaaattct

SEQ ID NO: 1522494 - DNA, 25 bp, Homo sapien
tgtgaggaccagctgaaagctttgc

SEQ ID NO: 1522495 - DNA, 25 bp, Homo sapien
ttgtacggtttctctgcagtagaaa

SEQ ID NO: 1522496 - DNA, 25 bp, Homo sapien
tgttgtgcacagtaagctggtaatt

SEQ ID NO: 1522497 - DNA, 25 bp, Homo sapien
ggtttgtagtttcaactgtgcccac

SEQ ID NO: 1522498 - DNA, 25 bp, Homo sapien
gcacagtaagctggtaattctgtta

SEQ ID NO: 1522499 - DNA, 25 bp, Homo sapien
gggtttgtagtttcaactgtgccca

SEQ ID NO: 1522500 - DNA, 25 bp, Homo sapien
ctgtggctattatgagcttcattgg

SEQ ID NO: 1522501 - DNA, 25 bp, Homo sapien
agcagatctcccacaagaggtgtcc

SEQ ID NO: 1522502 - DNA, 25 bp, Homo sapien
tcaggtactcaagagtggcagcaag

SEQ ID NO: 1522503 - DNA, 25 bp, Homo sapien
ttatgagcttcattggtcaccagct

SEQ ID NO: 1522504 - DNA, 25 bp, Homo sapien
cagagagcagtgaacagacgacctg

SEQ ID NO: 1522505 - DNA, 25 bp, Homo sapien
agagcagtgaacagacgacctggag

SEQ ID NO: 1522506 - DNA, 25 bp, Homo sapien
gacagagagcagtgaacagacgacc

SEQ ID NO: 1522507 - DNA, 25 bp, Homo sapien
gagagcagtgaacagacgacctgga

SEQ ID NO: 1522508 - DNA, 25 bp, Homo sapien
tacagacattcgccaacatatccac

SEQ ID NO: 1522509 - DNA, 25 bp, Homo sapien
actacagacattcgccaacatatcc

SEQ ID NO: 1522510 - DNA, 25 bp, Homo sapien
gacattcgccaacatatccacctaa

SEQ ID NO: 1522511 - DNA, 25 bp, Homo sapien
gcagagctgggtaaggagaattcgg

SEQ ID NO: 1522512 - DNA, 25 bp, Homo sapien
tgtatagctactctcaccatgagaa

SEQ ID NO: 1522513 - DNA, 25 bp, Homo sapien
tctctcgaaacactcaaagtgtata

SEQ ID NO: 1522514 - DNA, 25 bp, Homo sapien
actcaaagtgtatagctactctcac

SEQ ID NO: 1522515 - DNA, 25 bp, Homo sapien
aacatgagcattaggagggtgcaga

SEQ ID NO: 1522516 - DNA, 25 bp, Homo sapien
taaatgcttatatccaatgacaaat

SEQ ID NO: 1522517 - DNA, 25 bp, Homo sapien
gcatctgggtatgctaaatgcttat

SEQ ID NO: 1522518 - DNA, 25 bp, Homo sapien
catcatggtcaatatgtttaacaga

SEQ ID NO: 1522519 - DNA, 25 bp, Homo sapien
cttgaaagtgacatacatcatggtc

SEQ ID NO: 1522520 - DNA, 25 bp, Homo sapien
catcaattggcagaaaaagacagaa

SEQ ID NO: 1522521 - DNA, 25 bp, Homo sapien
cagaaaaagacagaaaaatccatcc

SEQ ID NO: 1522522 - DNA, 25 bp, Homo sapien
gaaaaagacagaaaaatccatccat

SEQ ID NO: 1522523 - DNA, 25 bp, Homo sapien
ggcatcaattggcagaaaaagacag

SEQ ID NO: 1522524 - DNA, 25 bp, Homo sapien
tcagtgccacatgtttaccagctag

SEQ ID NO: 1522525 - DNA, 25 bp, Homo sapien
gtcagtgccacatgtttaccagcta

SEQ ID NO: 1522526 - DNA, 25 bp, Homo sapien
gtgtcagtgccacatgtttaccagc

SEQ ID NO: 1522527 - DNA, 25 bp, Homo sapien
agtgccacatgtttaccagctagca

SEQ ID NO: 1522528 - DNA, 25 bp, Homo sapien
actcttgtcccccaggctggagtgc

SEQ ID NO: 1522529 - DNA, 25 bp, Homo sapien
gccatcacgccaggctaattgttat

SEQ ID NO: 1522530 - DNA, 25 bp, Homo sapien
aatggcacgatctcagctcactgca

SEQ ID NO: 1522531 - DNA, 25 bp, Homo sapien
ttgagattaagtctcactcttgtcc

SEQ ID NO: 1522532 - DNA, 25 bp, Homo sapien
ccgctgtgccatgtccaggcaatgc

SEQ ID NO: 1522533 - DNA, 25 bp, Homo sapien
tataaattccgctgtgccatgtcca

SEQ ID NO: 1522534 - DNA, 25 bp, Homo sapien
ccacatctctaaattgcaatggccc

SEQ ID NO: 1522535 - DNA, 25 bp, Homo sapien
gccacatctctaaattgcaatggcc

SEQ ID NO: 1522536 - DNA, 25 bp, Homo sapien
ccatctcatgtctctgcatagtcga

SEQ ID NO: 1522537 - DNA, 25 bp, Homo sapien
tccttgctccagatgggtgatgagg

SEQ ID NO: 1522538 - DNA, 25 bp, Homo sapien
gatgaggtctggctttgagacaaca

SEQ ID NO: 1522539 - DNA, 25 bp, Homo sapien
ctgcatagtcgaaggtttttttcct

SEQ ID NO: 1522540 - DNA, 25 bp, Homo sapien
tgcccagaagttcctttggaacaca

SEQ ID NO: 1522541 - DNA, 25 bp, Homo sapien
aaaagcagctggattgtgctgtctc

SEQ ID NO: 1522542 - DNA, 25 bp, Homo sapien
tgcccctttgtgacagcaaaattta

SEQ ID NO: 1522543 - DNA, 25 bp, Homo sapien
gaagcataagacaatatgccccttt

SEQ ID NO: 1522544 - DNA, 25 bp, Homo sapien
ccttggcgatgtgacgtgcacctgt

SEQ ID NO: 1522545 - DNA, 25 bp, Homo sapien
caagggctggaaagagtgtaaaatg

SEQ ID NO: 1522546 - DNA, 25 bp, Homo sapien
tttatagaggagagtctccatatgc

SEQ ID NO: 1522547 - DNA, 25 bp, Homo sapien
aaaaattaccttggcgatgtgacgt

SEQ ID NO: 1522548 - DNA, 25 bp, Homo sapien
tacagcattctcctatatagaccac

SEQ ID NO: 1522549 - DNA, 25 bp, Homo sapien
agaagggctttaaacaatatatgta

SEQ ID NO: 1522550 - DNA, 25 bp, Homo sapien
gcatgtgtgtgtctcagattagagt

SEQ ID NO: 1522551 - DNA, 25 bp, Homo sapien
tctttcactgggaatctatgacaaa

SEQ ID NO: 1522552 - DNA, 25 bp, Homo sapien
ttttgtgcactttacacttatccac

SEQ ID NO: 1522553 - DNA, 25 bp, Homo sapien
tatgccttctcagtatcagtttttg

SEQ ID NO: 1522554 - DNA, 25 bp, Homo sapien
tgccacattctgtaaatttgcaagg

SEQ ID NO: 1522555 - DNA, 25 bp, Homo sapien
tttttaactgcaaattatcatgtcc

SEQ ID NO: 1522556 - DNA, 25 bp, Homo sapien
gggagaggagtgcttaaacactttg

SEQ ID NO: 1522557 - DNA, 25 bp, Homo sapien
tgtgcagtaagggaacaggagtact

SEQ ID NO: 1522558 - DNA, 25 bp, Homo sapien
tgtagtaaggatagaggagcgctta

SEQ ID NO: 1522559 - DNA, 25 bp, Homo sapien
gaaaggggagaggagtgcttaaaca

SEQ ID NO: 1522560 - DNA, 25 bp, Homo sapien
tagggattccctcccatatgaatta

SEQ ID NO: 1522561 - DNA, 25 bp, Homo sapien
tgtgtagtaagaatagaggagcact

SEQ ID NO: 1522562 - DNA, 25 bp, Homo sapien
tgtgtagtaagaatagaggaccgac

SEQ ID NO: 1522563 - DNA, 25 bp, Homo sapien
tgcacttgtgtggtttccctccagt

SEQ ID NO: 1522564 - DNA, 25 bp, Homo sapien
tggaagttttatatgaggagtaccc

SEQ ID NO: 1522565 - DNA, 25 bp, Homo sapien
agttttatatgaggagtacccagcc

SEQ ID NO: 1522566 - DNA, 25 bp, Homo sapien
aagttttatatgaggagtacccagc

SEQ ID NO: 1522567 - DNA, 25 bp, Homo sapien
ccatgctattttggttatgtagcct

SEQ ID NO: 1522568 - DNA, 25 bp, Homo sapien
gttatgtagccttgtagcatagttt

SEQ ID NO: 1522569 - DNA, 25 bp, Homo sapien
tgctattttggttatgtagccttgt

SEQ ID NO: 1522570 - DNA, 25 bp, Homo sapien
tggttatgtagccttgtagcatagt

SEQ ID NO: 1522571 - DNA, 25 bp, Homo sapien
tccatgtgttctcaatgtgcaattt

SEQ ID NO: 1522572 - DNA, 25 bp, Homo sapien
catgtgttctcaatgtgcaatttcc

SEQ ID NO: 1522573 - DNA, 25 bp, Homo sapien
ttgctgagaatgatgatatccagtt

SEQ ID NO: 1522574 - DNA, 25 bp, Homo sapien
tgtgttctcaatgtgcaatttccac

SEQ ID NO: 1522575 - DNA, 25 bp, Homo sapien
tttccttgtgacactataatgtaga

SEQ ID NO: 1522576 - DNA, 25 bp, Homo sapien
gctctgaacatttaccttatactta

SEQ ID NO: 1522577 - DNA, 25 bp, Homo sapien
cttgtagcttcacccttgagtaagg

SEQ ID NO: 1522578 - DNA, 25 bp, Homo sapien
agaaatgttattccactatatgcca

SEQ ID NO: 1522579 - DNA, 25 bp, Homo sapien
catttaactgtctgaattatgtgga

SEQ ID NO: 1522580 - DNA, 25 bp, Homo sapien
tttccatgaactcaaattgattacc

SEQ ID NO: 1522581 - DNA, 25 bp, Homo sapien
gattaccatagataatcttttagta

SEQ ID NO: 1522582 - DNA, 25 bp, Homo sapien
cactaagaagactttatcttattca

SEQ ID NO: 1522583 - DNA, 25 bp, Homo sapien
tagaaggaaggaagtggattactca

SEQ ID NO: 1522584 - DNA, 25 bp, Homo sapien
ccataatagtatgcaaaaacagaga

SEQ ID NO: 1522585 - DNA, 25 bp, Homo sapien
aacaacattcatgaacctgaaagac

SEQ ID NO: 1522586 - DNA, 25 bp, Homo sapien
ttcatgaacctgaaagacattatac

SEQ ID NO: 1522587 - DNA, 25 bp, Homo sapien
tcatccagaagtgcacaacaaagtt

SEQ ID NO: 1522588 - DNA, 25 bp, Homo sapien
gaaaagtcaaccctgatatggcagt

SEQ ID NO: 1522589 - DNA, 25 bp, Homo sapien
ggtctcattaaaccagcccggtgag

SEQ ID NO: 1522590 - DNA, 25 bp, Homo sapien
gagccacctgtgacacttcagcgaa

SEQ ID NO: 1522591 - DNA, 25 bp, Homo sapien
gaatggaacatatcaacaaagctct

SEQ ID NO: 1522592 - DNA, 25 bp, Homo sapien
gcatgctctaaagacgctaatgtag

SEQ ID NO: 1522593 - DNA, 25 bp, Homo sapien
tacatgttccgttcacatgcaccat

SEQ ID NO: 1522594 - DNA, 25 bp, Homo sapien
tgtccaggacagtatttcagcgccc

SEQ ID NO: 1522595 - DNA, 25 bp, Homo sapien
gtagtggtcctcctaatgggtgtga

SEQ ID NO: 1522596 - DNA, 25 bp, Homo sapien
aatgaggagcatttgtaactttcta

SEQ ID NO: 1522597 - DNA, 25 bp, Homo sapien
aatatttgtagtggtcctcctaatg

SEQ ID NO: 1522598 - DNA, 25 bp, Homo sapien
gtagagaagggatcaggttggtctc

SEQ ID NO: 1522599 - DNA, 25 bp, Homo sapien
gattgccgtcgggtgatcttggctc

SEQ ID NO: 1522600 - DNA, 25 bp, Homo sapien
tgtctgagtagtcatggagatagcc

SEQ ID NO: 1522601 - DNA, 25 bp, Homo sapien
gcatgaatcactacaccctgcctga

SEQ ID NO: 1522602 - DNA, 25 bp, Homo sapien
aattgcgcatgtctatcacaaccgg

SEQ ID NO: 1522603 - DNA, 25 bp, Homo sapien
aagccttcctctcccatttagtcaa

SEQ ID NO: 1522604 - DNA, 25 bp, Homo sapien
ctcccatttagtcaaagtcattctc

SEQ ID NO: 1522605 - DNA, 25 bp, Homo sapien
ggttaatgaggcttgtgccttcgtc

SEQ ID NO: 1522606 - DNA, 25 bp, Homo sapien
gattgcattggttaatgaggcttgt

SEQ ID NO: 1522607 - DNA, 25 bp, Homo sapien
ccttgtgatggattcaaacgtcctt

SEQ ID NO: 1522608 - DNA, 25 bp, Homo sapien
tgtgatggattcaaacgtccttctt

SEQ ID NO: 1522609 - DNA, 25 bp, Homo sapien
ttccgtcagcttgttaaagtcattt

SEQ ID NO: 1522610 - DNA, 25 bp, Homo sapien
tgatggattcaaacgtccttcttta

SEQ ID NO: 1522611 - DNA, 25 bp, Homo sapien
ctcttgcaatgaaggggtggtcgac

SEQ ID NO: 1522612 - DNA, 25 bp, Homo sapien
taaatgagtgggttagggtgaacaa

SEQ ID NO: 1522613 - DNA, 25 bp, Homo sapien
aggggtggtcgacaatgaacagctt

SEQ ID NO: 1522614 - DNA, 25 bp, Homo sapien
tgggtgacagttaaatgttcctctt

SEQ ID NO: 1522615 - DNA, 25 bp, Homo sapien
tgaatgagtgggtgacagtgaatag

SEQ ID NO: 1522616 - DNA, 25 bp, Homo sapien
tgagtgggtgacagtgaataggttc

SEQ ID NO: 1522617 - DNA, 25 bp, Homo sapien
gtgggtgacagtgaataggttccta

SEQ ID NO: 1522618 - DNA, 25 bp, Homo sapien
gaatgagtgggtgacagtgaatagg

SEQ ID NO: 1522619 - DNA, 25 bp, Homo sapien
tgccgtgaacgactgaatgaaagtg

SEQ ID NO: 1522620 - DNA, 25 bp, Homo sapien
tgtggctgacagttaacaagttcac

SEQ ID NO: 1522621 - DNA, 25 bp, Homo sapien
gaaagtgaactggttcccactatgg

SEQ ID NO: 1522622 - DNA, 25 bp, Homo sapien
tgaacaggtttctactgccgtgaac

SEQ ID NO: 1522623 - DNA, 25 bp, Homo sapien
tgagtaaatgagtaacagtgaacag

SEQ ID NO: 1522624 - DNA, 25 bp, Homo sapien
gtaaatgagtaacagtgaacaggtt

SEQ ID NO: 1522625 - DNA, 25 bp, Homo sapien
gagtaaatgagtaacagtgaacagg

SEQ ID NO: 1522626 - DNA, 25 bp, Homo sapien
aatgagtaacagtgaacaggtttct

SEQ ID NO: 1522627 - DNA, 25 bp, Homo sapien
gagtcaataggtttctactctggtg

SEQ ID NO: 1522628 - DNA, 25 bp, Homo sapien
cctctgcgatgaataagggtatgac

SEQ ID NO: 1522629 - DNA, 25 bp, Homo sapien
tctactctggtgaatgagtgcctga

SEQ ID NO: 1522630 - DNA, 25 bp, Homo sapien
gaacagctgtccactgtcatgtatg

SEQ ID NO: 1522631 - DNA, 25 bp, Homo sapien
gccagtgaaccggtttctactgtgg

SEQ ID NO: 1522632 - DNA, 25 bp, Homo sapien
tgaatgggtgccagtgaaccggttt

SEQ ID NO: 1522633 - DNA, 25 bp, Homo sapien
gtgaatgaatgggtgccagtgaacc

SEQ ID NO: 1522634 - DNA, 25 bp, Homo sapien
atgggtgccagtgaaccggtttcta

SEQ ID NO: 1522635 - DNA, 25 bp, Homo sapien
gacagtgaacaggtacccactgtga

SEQ ID NO: 1522636 - DNA, 25 bp, Homo sapien
gtgacagtgaacaggtacccactgt

SEQ ID NO: 1522637 - DNA, 25 bp, Homo sapien
tgacagtgaacaggtacccactgtg

SEQ ID NO: 1522638 - DNA, 25 bp, Homo sapien
acagtgaacaggtacccactgtgat

SEQ ID NO: 1522639 - DNA, 25 bp, Homo sapien
cactgtgttaaatgagtggatgaca

SEQ ID NO: 1522640 - DNA, 25 bp, Homo sapien
gtgggtgagagttatcagatttatc

SEQ ID NO: 1522641 - DNA, 25 bp, Homo sapien
aatgagtgggtgagagttatcagat

SEQ ID NO: 1522642 - DNA, 25 bp, Homo sapien
caggatcccactgcgatgaatgaat

SEQ ID NO: 1522643 - DNA, 25 bp, Homo sapien
tgagtgcctgacagggaacagtttc

SEQ ID NO: 1522644 - DNA, 25 bp, Homo sapien
ccaactgtcaggaatgagtggatga

SEQ ID NO: 1522645 - DNA, 25 bp, Homo sapien
tgtaacagtcaacaggttccaactg

SEQ ID NO: 1522646 - DNA, 25 bp, Homo sapien
tgggtgacactgaacaggatagcac

SEQ ID NO: 1522647 - DNA, 25 bp, Homo sapien
gtggatgacagtgaactggttctca

SEQ ID NO: 1522648 - DNA, 25 bp, Homo sapien
aataggtggatgacagtgaactggt

SEQ ID NO: 1522649 - DNA, 25 bp, Homo sapien
ctatgatgaataggtggatgacagt

SEQ ID NO: 1522650 - DNA, 25 bp, Homo sapien
atgaataggtggatgacagtgaact

SEQ ID NO: 1522651 - DNA, 25 bp, Homo sapien
gatagtgaataggttccttctgtaa

SEQ ID NO: 1522652 - DNA, 25 bp, Homo sapien
gtgtgtgatagtgaataggttcctt

SEQ ID NO: 1522653 - DNA, 25 bp, Homo sapien
tccttctgtaataaacgagtgggtg

SEQ ID NO: 1522654 - DNA, 25 bp, Homo sapien
cttctgtaataaacgagtgggtgac

SEQ ID NO: 1522655 - DNA, 25 bp, Homo sapien
tctcactgtgatgaatgagggagtt

SEQ ID NO: 1522656 - DNA, 25 bp, Homo sapien
ctgtgatgaatgagggagttacagt

SEQ ID NO: 1522657 - DNA, 25 bp, Homo sapien
tcactgtgatgaatgagggagttac

SEQ ID NO: 1522658 - DNA, 25 bp, Homo sapien
cactgtgatgaatgagggagttaca

SEQ ID NO: 1522659 - DNA, 25 bp, Homo sapien
cccactgtgatgcatgaggtggtga

SEQ ID NO: 1522660 - DNA, 25 bp, Homo sapien
tgggtgtcagtgaataggttgccac

SEQ ID NO: 1522661 - DNA, 25 bp, Homo sapien
taaaagagtgcctgacagtgaacag

SEQ ID NO: 1522662 - DNA, 25 bp, Homo sapien
gagaatgagcatgttccaaccgtag

SEQ ID NO: 1522663 - DNA, 25 bp, Homo sapien
agttggtgacagtgaacaggttccc

SEQ ID NO: 1522664 - DNA, 25 bp, Homo sapien
tgtaatgaataagttggtgacagtg

SEQ ID NO: 1522665 - DNA, 25 bp, Homo sapien
gttggtgacagtgaacaggttccca

SEQ ID NO: 1522666 - DNA, 25 bp, Homo sapien
tgaataagttggtgacagtgaacag

SEQ ID NO: 1522667 - DNA, 25 bp, Homo sapien
tatgtcgttgacagtgataaggttc

SEQ ID NO: 1522668 - DNA, 25 bp, Homo sapien
cactctggggaatggttggctgaca

SEQ ID NO: 1522669 - DNA, 25 bp, Homo sapien
tcctacagtggtgaatatgtcgttg

SEQ ID NO: 1522670 - DNA, 25 bp, Homo sapien
ttggctgacagggaaaacgttcaca

SEQ ID NO: 1522671 - DNA, 25 bp, Homo sapien
gaatgagaggacgacagtgagcagg

SEQ ID NO: 1522672 - DNA, 25 bp, Homo sapien
tgagcaggttcccactgtaatgaga

SEQ ID NO: 1522673 - DNA, 25 bp, Homo sapien
ggttcccacagtagtgaatgagtgc

SEQ ID NO: 1522674 - DNA, 25 bp, Homo sapien
ggttccaacagttttgagtgagtcg

SEQ ID NO: 1522675 - DNA, 25 bp, Homo sapien
agtgaatagctgacagtgaagagga

SEQ ID NO: 1522676 - DNA, 25 bp, Homo sapien
atgtgttgagtgaatagctgacagt

SEQ ID NO: 1522677 - DNA, 25 bp, Homo sapien
ggatcccactgtgattaatgagtgc

SEQ ID NO: 1522678 - DNA, 25 bp, Homo sapien
ttaatgagtgcctgacactgaacag

SEQ ID NO: 1522679 - DNA, 25 bp, Homo sapien
ttgggtgacaacgaacaggtttgca

SEQ ID NO: 1522680 - DNA, 25 bp, Homo sapien
cacaatgaatgattgggtgacaacg

SEQ ID NO: 1522681 - DNA, 25 bp, Homo sapien
cgaacaggtttgcacggtaatgaaa

SEQ ID NO: 1522682 - DNA, 25 bp, Homo sapien
tttgcacggtaatgaaagagtgggt

SEQ ID NO: 1522683 - DNA, 25 bp, Homo sapien
gagcaggtttcctctgtggtgaatg

SEQ ID NO: 1522684 - DNA, 25 bp, Homo sapien
ggtgacagtgagcaggtttcctctg

SEQ ID NO: 1522685 - DNA, 25 bp, Homo sapien
tggtgaatgagtggctgacatagaa

SEQ ID NO: 1522686 - DNA, 25 bp, Homo sapien
gtggctgacatagaactggttctca

SEQ ID NO: 1522687 - DNA, 25 bp, Homo sapien
tagtgagtgcttgacagccaagagg

SEQ ID NO: 1522688 - DNA, 25 bp, Homo sapien
gagtggtcaacagggaacaggttcc

SEQ ID NO: 1522689 - DNA, 25 bp, Homo sapien
aatgagtggtcaacagggaacaggt

SEQ ID NO: 1522690 - DNA, 25 bp, Homo sapien
tgagtggcttatagtgaacgggttc

SEQ ID NO: 1522691 - DNA, 25 bp, Homo sapien
tgttggtgaccataaacaggttccc

SEQ ID NO: 1522692 - DNA, 25 bp, Homo sapien
aataagtgggtgacaaagaacaggc

SEQ ID NO: 1522693 - DNA, 25 bp, Homo sapien
tgtgatgtatgtgttggtgaccata

SEQ ID NO: 1522694 - DNA, 25 bp, Homo sapien
ctggtgaataagtgggtgacaaaga

SEQ ID NO: 1522695 - DNA, 25 bp, Homo sapien
cagggaaaagggtctcgttgtaatg

SEQ ID NO: 1522696 - DNA, 25 bp, Homo sapien
tctggttcccattgtactgagtgtg

SEQ ID NO: 1522697 - DNA, 25 bp, Homo sapien
tatagttaacgggtttccactgtga

SEQ ID NO: 1522698 - DNA, 25 bp, Homo sapien
ggtgaatgtgtggttgacactgaaa

SEQ ID NO: 1522699 - DNA, 25 bp, Homo sapien
tgggtgacagtgaacaggttctcac

SEQ ID NO: 1522700 - DNA, 25 bp, Homo sapien
tgagtgggtgacagtgaacaggttc

SEQ ID NO: 1522701 - DNA, 25 bp, Homo sapien
gtttccactgtgatgaatgagtggg

SEQ ID NO: 1522702 - DNA, 25 bp, Homo sapien
tttccactgtgatgaatgagtgggt

SEQ ID NO: 1522703 - DNA, 25 bp, Homo sapien
tactatggtgaacgagtggatgaca

SEQ ID NO: 1522704 - DNA, 25 bp, Homo sapien
gttggtgacagtaaagacgttcctc

SEQ ID NO: 1522705 - DNA, 25 bp, Homo sapien
gaatgtgtggtcgacagtgaacagt

SEQ ID NO: 1522706 - DNA, 25 bp, Homo sapien
tgggaaatgagtgcctgacagtcaa

SEQ ID NO: 1522707 - DNA, 25 bp, Homo sapien
cactgtgataacagagtggctgaaa

SEQ ID NO: 1522708 - DNA, 25 bp, Homo sapien
cccactgtgataacagagtggctga

SEQ ID NO: 1522709 - DNA, 25 bp, Homo sapien
cagagtggctgaaagttaacaggtt

SEQ ID NO: 1522710 - DNA, 25 bp, Homo sapien
agagtggctgaaagttaacaggtta

SEQ ID NO: 1522711 - DNA, 25 bp, Homo sapien
tgatgagtgagtgggtgacagtgta

SEQ ID NO: 1522712 - DNA, 25 bp, Homo sapien
gtgagtgggtgacagtgtagagatt

SEQ ID NO: 1522713 - DNA, 25 bp, Homo sapien
ctgtgatgagtgagtgggtgacagt

SEQ ID NO: 1522714 - DNA, 25 bp, Homo sapien
gagtgagtgggtgacagtgtagaga

SEQ ID NO: 1522715 - DNA, 25 bp, Homo sapien
aagttcccattgtgatgagtgaggg

SEQ ID NO: 1522716 - DNA, 25 bp, Homo sapien
agttcccattgtgatgagtgagggg

SEQ ID NO: 1522717 - DNA, 25 bp, Homo sapien
atgagtaggtgacagtgcacaggct

SEQ ID NO: 1522718 - DNA, 25 bp, Homo sapien
gtgatgaatgagtaggtgacagtgc

SEQ ID NO: 1522719 - DNA, 25 bp, Homo sapien
gtaggtgacagtgcacaggctctta

SEQ ID NO: 1522720 - DNA, 25 bp, Homo sapien
ctgtgatgaatgagtaggtgacagt

SEQ ID NO: 1522721 - DNA, 25 bp, Homo sapien
taaatgagcacatgacagtgaccag

SEQ ID NO: 1522722 - DNA, 25 bp, Homo sapien
tgaaagtcagcaggttcccattgtg

SEQ ID NO: 1522723 - DNA, 25 bp, Homo sapien
tatgtgacagtgaacagcatgccac

SEQ ID NO: 1522724 - DNA, 25 bp, Homo sapien
tgacagtgaaaacgttcccacagtg

SEQ ID NO: 1522725 - DNA, 25 bp, Homo sapien
gagtgggtgatggtgaattccttcc

SEQ ID NO: 1522726 - DNA, 25 bp, Homo sapien
gagtgtgtgaacagtgaactggttc

SEQ ID NO: 1522727 - DNA, 25 bp, Homo sapien
tgtgatgaatgagtggggtgacatt

SEQ ID NO: 1522728 - DNA, 25 bp, Homo sapien
gtgatgaatgagtgtgtgaacagtg

SEQ ID NO: 1522729 - DNA, 25 bp, Homo sapien
taaatgaatgggtgacagtaaactg

SEQ ID NO: 1522730 - DNA, 25 bp, Homo sapien
cacagtagtgattgagtggctcaca

SEQ ID NO: 1522731 - DNA, 25 bp, Homo sapien
tagcttctcactgtgttgaacgagt

SEQ ID NO: 1522732 - DNA, 25 bp, Homo sapien
gaacgagtgactcagagtgaacagg

SEQ ID NO: 1522733 - DNA, 25 bp, Homo sapien
tgtaatgaatgggtttgtgacagta

SEQ ID NO: 1522734 - DNA, 25 bp, Homo sapien
taatgaatgggtttgtgacagtaaa

SEQ ID NO: 1522735 - DNA, 25 bp, Homo sapien
tgggtttgtgacagtaaacaggtac

SEQ ID NO: 1522736 - DNA, 25 bp, Homo sapien
gaatgggtttgtgacagtaaacagg

SEQ ID NO: 1522737 - DNA, 25 bp, Homo sapien
agtgagtggttgacagtgaacaata

SEQ ID NO: 1522738 - DNA, 25 bp, Homo sapien
gagtggttgacagtgaacaatatct

SEQ ID NO: 1522739 - DNA, 25 bp, Homo sapien
tgagtggttgacagtgaacaatatc

SEQ ID NO: 1522740 - DNA, 25 bp, Homo sapien
agtggttgacagtgaacaatatctg

SEQ ID NO: 1522741 - DNA, 25 bp, Homo sapien
aatggctgacagtgaaccggttcac

SEQ ID NO: 1522742 - DNA, 25 bp, Homo sapien
agaggtacccacagtagtgaacgaa

SEQ ID NO: 1522743 - DNA, 25 bp, Homo sapien
gaacgaatggctgacagtgaaccgg

SEQ ID NO: 1522744 - DNA, 25 bp, Homo sapien
cacagtagtgaacgaatggctgaca

SEQ ID NO: 1522745 - DNA, 25 bp, Homo sapien
gtgatgagtgggtgagagtgaaccg

SEQ ID NO: 1522746 - DNA, 25 bp, Homo sapien
tgatgagtgggtgagagtgaaccgg

SEQ ID NO: 1522747 - DNA, 25 bp, Homo sapien
tgagtgaaaggcaccgaacaggttc

SEQ ID NO: 1522748 - DNA, 25 bp, Homo sapien
gagagagaacatgttcccactgtgc

SEQ ID NO: 1522749 - DNA, 25 bp, Homo sapien
caagttcccaccattgttaatgcgg

SEQ ID NO: 1522750 - DNA, 25 bp, Homo sapien
taatgcgtgtgtgacagtaaacggg

SEQ ID NO: 1522751 - DNA, 25 bp, Homo sapien
gaatgagagtgtgacagtgaactgg

SEQ ID NO: 1522752 - DNA, 25 bp, Homo sapien
tattgagtgggtgacactgaacata

SEQ ID NO: 1522753 - DNA, 25 bp, Homo sapien
tgcttcccactgtcgttattgagtg

SEQ ID NO: 1522754 - DNA, 25 bp, Homo sapien
tgaactgcttcccactgtcgttatt

SEQ ID NO: 1522755 - DNA, 25 bp, Homo sapien
cactgtcgttattgagtgggtgaca

SEQ ID NO: 1522756 - DNA, 25 bp, Homo sapien
tgtctgacggtaaacaggttctgat

SEQ ID NO: 1522757 - DNA, 25 bp, Homo sapien
cccactgttgagaatgagtgtctga

SEQ ID NO: 1522758 - DNA, 25 bp, Homo sapien
ggtgacagtcaacttgtacccactg

SEQ ID NO: 1522759 - DNA, 25 bp, Homo sapien
tgaacagattactactgcggtgaac

SEQ ID NO: 1522760 - DNA, 25 bp, Homo sapien
gagttaatgacagtgaaccggttcc

SEQ ID NO: 1522761 - DNA, 25 bp, Homo sapien
gtggctcacagtgaacaggttccca

SEQ ID NO: 1522762 - DNA, 25 bp, Homo sapien
gagtggctcacagtgaacaggttcc

SEQ ID NO: 1522763 - DNA, 25 bp, Homo sapien
agtgagtggctcacagtgaacaggt

SEQ ID NO: 1522764 - DNA, 25 bp, Homo sapien
tgagtggctcacagtgaacaggttc

SEQ ID NO: 1522765 - DNA, 25 bp, Homo sapien
caggttcgcaccatagtgaacaggt

SEQ ID NO: 1522766 - DNA, 25 bp, Homo sapien
ccactgttgtgaatgaattgttgac

SEQ ID NO: 1522767 - DNA, 25 bp, Homo sapien
ggctcacagtagcaggttcccaatg

SEQ ID NO: 1522768 - DNA, 25 bp, Homo sapien
ttcactgtgatgaatgggctggtga

SEQ ID NO: 1522769 - DNA, 25 bp, Homo sapien
cggctgtgtgacattgaacagcttc

SEQ ID NO: 1522770 - DNA, 25 bp, Homo sapien
tgaatgagtgagtagacagtgaaca

SEQ ID NO: 1522771 - DNA, 25 bp, Homo sapien
tgtgatgagtgagtgtctgacagta

SEQ ID NO: 1522772 - DNA, 25 bp, Homo sapien
tttctactgctgtgaacggctgtgt

SEQ ID NO: 1522773 - DNA, 25 bp, Homo sapien
tgagtaagtgggtgacaatgaaccg

SEQ ID NO: 1522774 - DNA, 25 bp, Homo sapien
accggtttccgttgtgatgagtgag

SEQ ID NO: 1522775 - DNA, 25 bp, Homo sapien
gtgatgaacgagtggaaaacagtga

SEQ ID NO: 1522776 - DNA, 25 bp, Homo sapien
acaggtttccattgtgatgaacgag

SEQ ID NO: 1522777 - DNA, 25 bp, Homo sapien
ttcccaccgtgatgaaggagtggct

SEQ ID NO: 1522778 - DNA, 25 bp, Homo sapien
tgagtggatgacagtgataagtttc

SEQ ID NO: 1522779 - DNA, 25 bp, Homo sapien
caatgtataggttcccagtgtgatg

SEQ ID NO: 1522780 - DNA, 25 bp, Homo sapien
cactgtagtgagagtttgggagaca

SEQ ID NO: 1522781 - DNA, 25 bp, Homo sapien
atgagcgagttagtgagagtgaaca

SEQ ID NO: 1522782 - DNA, 25 bp, Homo sapien
gagtgaacaggttcccactgtgatg

SEQ ID NO: 1522783 - DNA, 25 bp, Homo sapien
tgtgatgagcgagttagtgagagtg

SEQ ID NO: 1522784 - DNA, 25 bp, Homo sapien
cactgtgatgaatatgtgggtgaca

SEQ ID NO: 1522785 - DNA, 25 bp, Homo sapien
gaacaggtttccactgcgattcgtg

SEQ ID NO: 1522786 - DNA, 25 bp, Homo sapien
ttcacactgcaatgaacgagtgggt

SEQ ID NO: 1522787 - DNA, 25 bp, Homo sapien
caccgtgatgagtgcatgttgacca

SEQ ID NO: 1522788 - DNA, 25 bp, Homo sapien
ggtgacaataatcaggttccccttg

SEQ ID NO: 1522789 - DNA, 25 bp, Homo sapien
tgagataaatgagaggatgacagtg

SEQ ID NO: 1522790 - DNA, 25 bp, Homo sapien
ctgagataaatgagaggatgacagt

SEQ ID NO: 1522791 - DNA, 25 bp, Homo sapien
cacagaggctgggcgtccacgagca

SEQ ID NO: 1522792 - DNA, 25 bp, Homo sapien
ccacagaggctgggcgtccacgagc

SEQ ID NO: 1522793 - DNA, 25 bp, Homo sapien
ggcgtccacgagcagaaaacacaaa

SEQ ID NO: 1522794 - DNA, 25 bp, Homo sapien
ctgggcgtccacgagcagaaaacac

SEQ ID NO: 1522795 - DNA, 25 bp, Homo sapien
ctgctcccttgataggatacacttc

SEQ ID NO: 1522796 - DNA, 25 bp, Homo sapien
ggttggagtcactgggttcaagctt

SEQ ID NO: 1522797 - DNA, 25 bp, Homo sapien
taggttggagtcactgggttcaagc

SEQ ID NO: 1522798 - DNA, 25 bp, Homo sapien
aatttccatgtcagatttattccct

SEQ ID NO: 1522799 - DNA, 25 bp, Homo sapien
tgtaggctcaatattagccttaggt

SEQ ID NO: 1522800 - DNA, 25 bp, Homo sapien
agtgtccaggcattgccactccttc

SEQ ID NO: 1522801 - DNA, 25 bp, Homo sapien
ggcattgccactccttcagagagaa

SEQ ID NO: 1522802 - DNA, 25 bp, Homo sapien
gccacatccctaaatgtcaatggtc

SEQ ID NO: 1522803 - DNA, 25 bp, Homo sapien
atttctatataaattccgctgtgca

SEQ ID NO: 1522804 - DNA, 25 bp, Homo sapien
accaggtttctgtagttctctaaca

SEQ ID NO: 1522805 - DNA, 25 bp, Homo sapien
ggaagaccaggtttctgtagttctc

SEQ ID NO: 1522806 - DNA, 25 bp, Homo sapien
ccaggtttctgtagttctctaacat

SEQ ID NO: 1522807 - DNA, 25 bp, Homo sapien
ccaggaagaccaggtttctgtagtt

SEQ ID NO: 1522808 - DNA, 25 bp, Homo sapien
cagaaaaacattccacaaataaaag

SEQ ID NO: 1522809 - DNA, 25 bp, Homo sapien
cctttagggcatattagaaattgtg

SEQ ID NO: 1522810 - DNA, 25 bp, Homo sapien
agaaattgtgtattgaagttatcct

SEQ ID NO: 1522811 - DNA, 25 bp, Homo sapien
ttaccagaaaaacattccacaaata

SEQ ID NO: 1522812 - DNA, 25 bp, Homo sapien
gatctcatgtctcttcatactccag

SEQ ID NO: 1522813 - DNA, 25 bp, Homo sapien
tctcttcatactccaggcctctttc

SEQ ID NO: 1522814 - DNA, 25 bp, Homo sapien
tcatgtctcttcatactccaggcct

SEQ ID NO: 1522815 - DNA, 25 bp, Homo sapien
atgtctcttcatactccaggcctct

SEQ ID NO: 1522816 - DNA, 25 bp, Homo sapien
gaagtatgtggcagaagaattagta

SEQ ID NO: 1522817 - DNA, 25 bp, Homo sapien
ggatttttgtgacaccaagcaccca

SEQ ID NO: 1522818 - DNA, 25 bp, Homo sapien
catgaatagtacattaaaacctgtc

SEQ ID NO: 1522819 - DNA, 25 bp, Homo sapien
agtaaaagttgctggttgtagatca

SEQ ID NO: 1522820 - DNA, 25 bp, Homo sapien
ctcagcatccacaagttgctccctc

SEQ ID NO: 1522821 - DNA, 25 bp, Homo sapien
tttctcagcatccacaagttgctcc

SEQ ID NO: 1522822 - DNA, 25 bp, Homo sapien
ttctcagcatccacaagttgctccc

SEQ ID NO: 1522823 - DNA, 25 bp, Homo sapien
tctcagcatccacaagttgctccct

SEQ ID NO: 1522824 - DNA, 25 bp, Homo sapien
tcgtaaaatgtgaaatagaggttcc

SEQ ID NO: 1522825 - DNA, 25 bp, Homo sapien
cagacgttgtggtgcacggctttag

SEQ ID NO: 1522826 - DNA, 25 bp, Homo sapien
gactttcctcctcgtgtaattagga

SEQ ID NO: 1522827 - DNA, 25 bp, Homo sapien
gcaaaactatattgtgctcatcgta

SEQ ID NO: 1522828 - DNA, 25 bp, Homo sapien
cttgtttggttcatcgttgggcaga

SEQ ID NO: 1522829 - DNA, 25 bp, Homo sapien
caagaagtgtgtgccggcatctgcc

SEQ ID NO: 1522830 - DNA, 25 bp, Homo sapien
tttcagtaagcttccacaatggtgg

SEQ ID NO: 1522831 - DNA, 25 bp, Homo sapien
caggttccacatccaacagtgagga

SEQ ID NO: 1522832 - DNA, 25 bp, Homo sapien
caatagctcatacgacattcttttt

SEQ ID NO: 1522833 - DNA, 25 bp, Homo sapien
gatatacacctttctcaatagctca

SEQ ID NO: 1522834 - DNA, 25 bp, Homo sapien
atagctcatacgacattctttttga

SEQ ID NO: 1522835 - DNA, 25 bp, Homo sapien
cagtaacatcaggatatacaccttt

SEQ ID NO: 1522836 - DNA, 25 bp, Homo sapien
taggcatgaaatcatgccaaatgat

SEQ ID NO: 1522837 - DNA, 25 bp, Homo sapien
tgctatgttcagttaggcatgaaat

SEQ ID NO: 1522838 - DNA, 25 bp, Homo sapien
tcagttaggcatgaaatcatgccaa

SEQ ID NO: 1522839 - DNA, 25 bp, Homo sapien
ctgctatgttcagttaggcatgaaa

SEQ ID NO: 1522840 - DNA, 25 bp, Homo sapien
ttacctcatgtgtggtaaggtgtgc

SEQ ID NO: 1522841 - DNA, 25 bp, Homo sapien
tgtttagtaagacttgtaaattgat

SEQ ID NO: 1522842 - DNA, 25 bp, Homo sapien
cttttataagtctgaggtgttgtca

SEQ ID NO: 1522843 - DNA, 25 bp, Homo sapien
tttataagtctgaggtgttgtcaaa

SEQ ID NO: 1522844 - DNA, 25 bp, Homo sapien
agtaagacttgtaaattgattaaag

SEQ ID NO: 1522845 - DNA, 25 bp, Homo sapien
caaataattaatccaccaaatttag

SEQ ID NO: 1522846 - DNA, 25 bp, Homo sapien
attttagtatgaatcctctgctgct

SEQ ID NO: 1522847 - DNA, 25 bp, Homo sapien
ctgcgactgaaggcgtgcgctgcca

SEQ ID NO: 1522848 - DNA, 25 bp, Homo sapien
cttcagcaggaatatttatagcttg

SEQ ID NO: 1522849 - DNA, 25 bp, Homo sapien
tagctggaatacacataataaaaca

SEQ ID NO: 1522850 - DNA, 25 bp, Homo sapien
actaactgacttattcctctcacct

SEQ ID NO: 1522851 - DNA, 25 bp, Homo sapien
cagctgcagatttgtcacagatggc

SEQ ID NO: 1522852 - DNA, 25 bp, Homo sapien
tacgagtgttaagagtggatattct

SEQ ID NO: 1522853 - DNA, 25 bp, Homo sapien
taatcatgttagcttttaatcatct

SEQ ID NO: 1522854 - DNA, 25 bp, Homo sapien
ttttattcatatggagagttcatcc

SEQ ID NO: 1522855 - DNA, 25 bp, Homo sapien
ctgaaccccatgggccttgaagctg

SEQ ID NO: 1522856 - DNA, 25 bp, Homo sapien
ggccaggcagtagttcagggtctgc

SEQ ID NO: 1522857 - DNA, 25 bp, Homo sapien
ggaggccaggcagtagttcagggtc

SEQ ID NO: 1522858 - DNA, 25 bp, Homo sapien
ccaggcagtagttcagggtctgcat

SEQ ID NO: 1522859 - DNA, 25 bp, Homo sapien
gagccctcaggtccttgatggtctt

SEQ ID NO: 1522860 - DNA, 25 bp, Homo sapien
acagtatttgtgaagatctgagccc

SEQ ID NO: 1522861 - DNA, 25 bp, Homo sapien
gcagaacgatgtgggcattgtccac

SEQ ID NO: 1522862 - DNA, 25 bp, Homo sapien
ggacactgtcgatctgcagaacgat

SEQ ID NO: 1522863 - DNA, 25 bp, Homo sapien
ctctgtctcacacttgggtctaaag

SEQ ID NO: 1522864 - DNA, 25 bp, Homo sapien
tctcacacttgggtctaaagtcatc

SEQ ID NO: 1522865 - DNA, 25 bp, Homo sapien
ctcacacttgggtctaaagtcatca

SEQ ID NO: 1522866 - DNA, 25 bp, Homo sapien
cagctctgtctcacacttgggtcta

SEQ ID NO: 1522867 - DNA, 25 bp, Homo sapien
agccatggatgttgctctccacaga

SEQ ID NO: 1522868 - DNA, 25 bp, Homo sapien
gcaaagccatggatgttgctctcca

SEQ ID NO: 1522869 - DNA, 25 bp, Homo sapien
ctttgcaaagccatggatgttgctc

SEQ ID NO: 1522870 - DNA, 25 bp, Homo sapien
aagccatggatgttgctctccacag

SEQ ID NO: 1522871 - DNA, 25 bp, Homo sapien
agccgagtgacattggtgtcatcaa

SEQ ID NO: 1522872 - DNA, 25 bp, Homo sapien
ccaaccgcagccgagtgacattggt

SEQ ID NO: 1522873 - DNA, 25 bp, Homo sapien
cgagtgacattggtgtcatcaatga

SEQ ID NO: 1522874 - DNA, 25 bp, Homo sapien
ctccaaccgcagccgagtgacattg

SEQ ID NO: 1522875 - DNA, 25 bp, Homo sapien
caacccagagctgtcgaccttggct

SEQ ID NO: 1522876 - DNA, 25 bp, Homo sapien
tgagctttgggggcaactacctccc

SEQ ID NO: 1522877 - DNA, 25 bp, Homo sapien
agctttgggggcaactacctccctg

SEQ ID NO: 1522878 - DNA, 25 bp, Homo sapien
gagctgtcgaccttggcttgtagtc

SEQ ID NO: 1522879 - DNA, 25 bp, Homo sapien
gctcctctcggttcttctgagctac

SEQ ID NO: 1522880 - DNA, 25 bp, Homo sapien
cctcaatctgctgagactggtactt

SEQ ID NO: 1522881 - DNA, 25 bp, Homo sapien
cagctcctctcggttcttctgagct

SEQ ID NO: 1522882 - DNA, 25 bp, Homo sapien
tctgctgagactggtacttgtccag

SEQ ID NO: 1522883 - DNA, 25 bp, Homo sapien
atcatctcagcagctacaaccttgg

SEQ ID NO: 1522884 - DNA, 25 bp, Homo sapien
tctcagcagctacaaccttggtgga

SEQ ID NO: 1522885 - DNA, 25 bp, Homo sapien
tgtacatctaagctctgtgagcatc

SEQ ID NO: 1522886 - DNA, 25 bp, Homo sapien
ctggactgtacatctaagctctgtg

SEQ ID NO: 1522887 - DNA, 25 bp, Homo sapien
ggtactgcccctctgccagggtctg

SEQ ID NO: 1522888 - DNA, 25 bp, Homo sapien
ctgcttgactttgatgttcagcggg

SEQ ID NO: 1522889 - DNA, 25 bp, Homo sapien
catctggcgggttgtggtcttttgg

SEQ ID NO: 1522890 - DNA, 25 bp, Homo sapien
tcctgcttgactttgatgttcagcg

SEQ ID NO: 1522891 - DNA, 25 bp, Homo sapien
gggcctggacctgtgccaactctga

SEQ ID NO: 1522892 - DNA, 25 bp, Homo sapien
gctgggtccagctaaatcttacaat

SEQ ID NO: 1522893 - DNA, 25 bp, Homo sapien
tcttatggtcgaggcccagcagaag

SEQ ID NO: 1522894 - DNA, 25 bp, Homo sapien
ccttaaggctagctatgagagtcag

SEQ ID NO: 1522895 - DNA, 25 bp, Homo sapien
ggctgggcccatgtatatatcgcaa

SEQ ID NO: 1522896 - DNA, 25 bp, Homo sapien
ttagagcacttcactgggtacctcc

SEQ ID NO: 1522897 - DNA, 25 bp, Homo sapien
cctaagacctggtggttcttgcact

SEQ ID NO: 1522898 - DNA, 25 bp, Homo sapien
gtctgggtacggtttcaaccctgca

SEQ ID NO: 1522899 - DNA, 25 bp, Homo sapien
gacacagagtaaagaaggagacact

SEQ ID NO: 1522900 - DNA, 25 bp, Homo sapien
gatgctcagcattcttggtgacctg

SEQ ID NO: 1522901 - DNA, 25 bp, Homo sapien
gaactgaggtaaggtctcccatggg

SEQ ID NO: 1522902 - DNA, 25 bp, Homo sapien
gatcagcaggtgcaaacttctcagg

SEQ ID NO: 1522903 - DNA, 25 bp, Homo sapien
tgacctgtggacaaagggttgcctc

SEQ ID NO: 1522904 - DNA, 25 bp, Homo sapien
gcaaagatgttttctaagcccacaa

SEQ ID NO: 1522905 - DNA, 25 bp, Homo sapien
cagctgtgtatactttgaagggcaa

SEQ ID NO: 1522906 - DNA, 25 bp, Homo sapien
aggtaagtgacatagatagagctgc

SEQ ID NO: 1522907 - DNA, 25 bp, Homo sapien
tctaagcccacaaatttaggagcag

SEQ ID NO: 1522908 - DNA, 25 bp, Homo sapien
taaagtagggactggtgaccccaca

SEQ ID NO: 1522909 - DNA, 25 bp, Homo sapien
caataccagtaggtcacagggcgac

SEQ ID NO: 1522910 - DNA, 25 bp, Homo sapien
tttccggccgactccgatgaggcct

SEQ ID NO: 1522911 - DNA, 25 bp, Homo sapien
ctgaaacggtacaggacgcctgggt

SEQ ID NO: 1522912 - DNA, 25 bp, Homo sapien
aaacgacaaaccatgtctggggctg

SEQ ID NO: 1522913 - DNA, 25 bp, Homo sapien
caaacgacaaaccatgtctggggct

SEQ ID NO: 1522914 - DNA, 25 bp, Homo sapien
tagcccccaaacgacaaaccatgtc

SEQ ID NO: 1522915 - DNA, 25 bp, Homo sapien
agcccccaaacgacaaaccatgtct

SEQ ID NO: 1522916 - DNA, 25 bp, Homo sapien
tatgagataattcagaagacaggca

SEQ ID NO: 1522917 - DNA, 25 bp, Homo sapien
ggctgatattcaccaaaccttccaa

SEQ ID NO: 1522918 - DNA, 25 bp, Homo sapien
cttgggttatcccaagagagctcta

SEQ ID NO: 1522919 - DNA, 25 bp, Homo sapien
gagaagctccatttccatacatcag

SEQ ID NO: 1522920 - DNA, 25 bp, Homo sapien
ctttcaagggcttacaactataacg

SEQ ID NO: 1522921 - DNA, 25 bp, Homo sapien
tatcctcactactcatgtcttcctg

SEQ ID NO: 1522922 - DNA, 25 bp, Homo sapien
gggctgcatgtaccactagtcagaa

SEQ ID NO: 1522923 - DNA, 25 bp, Homo sapien
tgagaacctctctcattagtggaag

SEQ ID NO: 1522924 - DNA, 25 bp, Homo sapien
tgtgtgggactgtgtgggtataagc

SEQ ID NO: 1522925 - DNA, 25 bp, Homo sapien
tgtgggactgtgtgggtataagcac

SEQ ID NO: 1522926 - DNA, 25 bp, Homo sapien
gtggtgtgtgggactgtgtgggtat

SEQ ID NO: 1522927 - DNA, 25 bp, Homo sapien
tgggactgtgtgggtataagcacca

SEQ ID NO: 1522928 - DNA, 25 bp, Homo sapien
tcaggccacagcgagggacaaaggc

SEQ ID NO: 1522929 - DNA, 25 bp, Homo sapien
ctcaggccacagcgagggacaaagg

SEQ ID NO: 1522930 - DNA, 25 bp, Homo sapien
caggccacagcgagggacaaaggcc

SEQ ID NO: 1522931 - DNA, 25 bp, Homo sapien
gctcaggccacagcgagggacaaag

SEQ ID NO: 1522932 - DNA, 25 bp, Homo sapien
cttttcataaaaagagtacaccaga

SEQ ID NO: 1522933 - DNA, 25 bp, Homo sapien
ttttcataaaaagagtacaccagaa

SEQ ID NO: 1522934 - DNA, 25 bp, Homo sapien
cccttagacaatccagaggcaaaaa

SEQ ID NO: 1522935 - DNA, 25 bp, Homo sapien
gcccccttagacaatccagaggcaa

SEQ ID NO: 1522936 - DNA, 25 bp, Homo sapien
tactttcactatagttatttcacta

SEQ ID NO: 1522937 - DNA, 25 bp, Homo sapien
ttactttcactatagttatttcact

SEQ ID NO: 1522938 - DNA, 25 bp, Homo sapien
aatgtcagcaccacctttttgtctg

SEQ ID NO: 1522939 - DNA, 25 bp, Homo sapien
tccatgaagcagagtgcacacagct

SEQ ID NO: 1522940 - DNA, 25 bp, Homo sapien
tataatctgaatgcaaccataaaga

SEQ ID NO: 1522941 - DNA, 25 bp, Homo sapien
tccatctttactagggaccccagct

SEQ ID NO: 1522942 - DNA, 25 bp, Homo sapien
gaatcttgagtatctacatctcccc

SEQ ID NO: 1522943 - DNA, 25 bp, Homo sapien
ttctatacaaatcctgctgagcagt

SEQ ID NO: 1522944 - DNA, 25 bp, Homo sapien
ttttctatacaaatcctgctgagca

SEQ ID NO: 1522945 - DNA, 25 bp, Homo sapien
catcacttttctatacaaatcctgc

SEQ ID NO: 1522946 - DNA, 25 bp, Homo sapien
ctaacatcacttttctatacaaatc

SEQ ID NO: 1522947 - DNA, 25 bp, Homo sapien
gggtatactagtaattgtgtactaa

SEQ ID NO: 1522948 - DNA, 25 bp, Homo sapien
tactagtaattgtgtactaaagtta

SEQ ID NO: 1522949 - DNA, 25 bp, Homo sapien
ttagggtatactagtaattgtgtac

SEQ ID NO: 1522950 - DNA, 25 bp, Homo sapien
gtatactagtaattgtgtactaaag

SEQ ID NO: 1522951 - DNA, 25 bp, Homo sapien
tcactgcctggcattcattaatcaa

SEQ ID NO: 1522952 - DNA, 25 bp, Homo sapien
tgtgcttagtaaagaggatgtggta

SEQ ID NO: 1522953 - DNA, 25 bp, Homo sapien
gttaccaacctagtactgtgcttag

SEQ ID NO: 1522954 - DNA, 25 bp, Homo sapien
tttgtaggttcttaatttcactgcc

SEQ ID NO: 1522955 - DNA, 25 bp, Homo sapien
gatcaggtctggcttagaaacagca

SEQ ID NO: 1522956 - DNA, 25 bp, Homo sapien
aggtgatcaggtctggcttagaaac

SEQ ID NO: 1522957 - DNA, 25 bp, Homo sapien
ctagacaggtgatcaggtctggctt

SEQ ID NO: 1522958 - DNA, 25 bp, Homo sapien
caggtctggcttagaaacagcaata

SEQ ID NO: 1522959 - DNA, 25 bp, Homo sapien
gggggttgatctaccatcgcatgtc

SEQ ID NO: 1522960 - DNA, 25 bp, Homo sapien
gaggactttggttctgatagcaaac

SEQ ID NO: 1522961 - DNA, 25 bp, Homo sapien
tgagtctcgcatgccatgaagagga

SEQ ID NO: 1522962 - DNA, 25 bp, Homo sapien
aagacagaagatgaccctatgcgag

SEQ ID NO: 1522963 - DNA, 25 bp, Homo sapien
aaagcagtcagattgtgagtctcgc

SEQ ID NO: 1522964 - DNA, 25 bp, Homo sapien
cattatatatgaacctgactgcaga

SEQ ID NO: 1522965 - DNA, 25 bp, Homo sapien
gaaacctgccctattgtctgctcta

SEQ ID NO: 1522966 - DNA, 25 bp, Homo sapien
tctatgaccctggagacatgacaga

SEQ ID NO: 1522967 - DNA, 25 bp, Homo sapien
gagataaaccgaattgcaaactgtc

SEQ ID NO: 1522968 - DNA, 25 bp, Homo sapien
ccatgtctggccctaaaaggtacac

SEQ ID NO: 1522969 - DNA, 25 bp, Homo sapien
gtagcctgaaccacagatgcacaac

SEQ ID NO: 1522970 - DNA, 25 bp, Homo sapien
tgtctggccctaaaaggtacaccta

SEQ ID NO: 1522971 - DNA, 25 bp, Homo sapien
tttgtagagagggactctccatatg

SEQ ID NO: 1522972 - DNA, 25 bp, Homo sapien
gaacaaattcaatataacctctata

SEQ ID NO: 1522973 - DNA, 25 bp, Homo sapien
cacactcttcagctaaaggttcaaa

SEQ ID NO: 1522974 - DNA, 25 bp, Homo sapien
gactctgtctcgaatcaatcagtca

SEQ ID NO: 1522975 - DNA, 25 bp, Homo sapien
gaataaacaggcattatacttcctg

SEQ ID NO: 1522976 - DNA, 25 bp, Homo sapien
tggaacccttccttacacctgtaca

SEQ ID NO: 1522977 - DNA, 25 bp, Homo sapien
gacccattggtgtgccatattcaag

SEQ ID NO: 1522978 - DNA, 25 bp, Homo sapien
cacagaatgtcaagctgattaaaga

SEQ ID NO: 1522979 - DNA, 25 bp, Homo sapien
gcaattgtagtttctgacaaaatag

SEQ ID NO: 1522980 - DNA, 25 bp, Homo sapien
tacagatgagcactaccatgacagg

SEQ ID NO: 1522981 - DNA, 25 bp, Homo sapien
tgcctcagtctcagatgtcctccac

SEQ ID NO: 1522982 - DNA, 25 bp, Homo sapien
gatgtcctccaccacatacctaatt

SEQ ID NO: 1522983 - DNA, 25 bp, Homo sapien
tttatgccccatctgggagggaggt

SEQ ID NO: 1522984 - DNA, 25 bp, Homo sapien
gttggggccagcacccgcccggcca

SEQ ID NO: 1522985 - DNA, 25 bp, Homo sapien
caataggtgacatctgggaagactg

SEQ ID NO: 1522986 - DNA, 25 bp, Homo sapien
gctgcgtgtgcctgtatgccagaca

SEQ ID NO: 1522987 - DNA, 25 bp, Homo sapien
tgaagagtcctgaacagtcgcgatg

SEQ ID NO: 1522988 - DNA, 25 bp, Homo sapien
tagtagtcagcctatgaggaaccag

SEQ ID NO: 1522989 - DNA, 25 bp, Homo sapien
tggaaggcggaagtttcagcgagcc

SEQ ID NO: 1522990 - DNA, 25 bp, Homo sapien
cctggaaggcggaagtttcagcgag

SEQ ID NO: 1522991 - DNA, 25 bp, Homo sapien
aacctggaaggcggaagtttcagcg

SEQ ID NO: 1522992 - DNA, 25 bp, Homo sapien
gaaggcggaagtttcagcgagccaa

SEQ ID NO: 1522993 - DNA, 25 bp, Homo sapien
gaaatatatcgttgtatcttttaga

SEQ ID NO: 1522994 - DNA, 25 bp, Homo sapien
ccagactgaaatatatcgttgtatc

SEQ ID NO: 1522995 - DNA, 25 bp, Homo sapien
tgtaatccccaagatagcacaaata

SEQ ID NO: 1522996 - DNA, 25 bp, Homo sapien
agatacaagaatcaaatacaacaat

SEQ ID NO: 1522997 - DNA, 25 bp, Homo sapien
caaattactccatttactagactca

SEQ ID NO: 1522998 - DNA, 25 bp, Homo sapien
acaaattactccatttactagactc

SEQ ID NO: 1522999 - DNA, 25 bp, Homo sapien
aataacaaattactccatttactag

SEQ ID NO: 1523000 - DNA, 25 bp, Homo sapien
taacaaattactccatttactagac

SEQ ID NO: 1523001 - DNA, 25 bp, Homo sapien
tctaggtatttgtaagatgtatctc

SEQ ID NO: 1523002 - DNA, 25 bp, Homo sapien
taggtatttgtaagatgtatctcca

SEQ ID NO: 1523003 - DNA, 25 bp, Homo sapien
cattctaggtatttgtaagatgtat

SEQ ID NO: 1523004 - DNA, 25 bp, Homo sapien
tatcacattctaggtatttgtaaga

SEQ ID NO: 1523005 - DNA, 25 bp, Homo sapien
ggacgggttagaggctttgccacaa

SEQ ID NO: 1523006 - DNA, 25 bp, Homo sapien
aacctcatgtaattcacccgtctca

SEQ ID NO: 1523007 - DNA, 25 bp, Homo sapien
taagaattcaggacgggttagaggc

SEQ ID NO: 1523008 - DNA, 25 bp, Homo sapien
aattcaggacgggttagaggctttg

SEQ ID NO: 1523009 - DNA, 25 bp, Homo sapien
ggtgtgagcattcattaaaagtttt

SEQ ID NO: 1523010 - DNA, 25 bp, Homo sapien
taaggtgtgagcattcattaaaagt

SEQ ID NO: 1523011 - DNA, 25 bp, Homo sapien
tcacacttgtagaagttttcttcag

SEQ ID NO: 1523012 - DNA, 25 bp, Homo sapien
ataaatgctctcctgtgcaataagg

SEQ ID NO: 1523013 - DNA, 25 bp, Homo sapien
tctgaacacctacctaatgcattat

SEQ ID NO: 1523014 - DNA, 25 bp, Homo sapien
tatacttcaaacgtaataactctgc

SEQ ID NO: 1523015 - DNA, 25 bp, Homo sapien
taaattaaccataaagagcctcttc

SEQ ID NO: 1523016 - DNA, 25 bp, Homo sapien
gttctcacaacgcaaaatattactc

SEQ ID NO: 1523017 - DNA, 25 bp, Homo sapien
aacaggttaaagttcgtggcataat

SEQ ID NO: 1523018 - DNA, 25 bp, Homo sapien
tggaacaggttaaagttcgtggcat

SEQ ID NO: 1523019 - DNA, 25 bp, Homo sapien
gtggaacaggttaaagttcgtggca

SEQ ID NO: 1523020 - DNA, 25 bp, Homo sapien
ctttcatctatacctttaagtaaag

SEQ ID NO: 1523021 - DNA, 25 bp, Homo sapien
tctgaaagtagggacaaactcatat

SEQ ID NO: 1523022 - DNA, 25 bp, Homo sapien
ggagattccgaagtataaggcatag

SEQ ID NO: 1523023 - DNA, 25 bp, Homo sapien
attccatagttttcttacaactaag

SEQ ID NO: 1523024 - DNA, 25 bp, Homo sapien
taaggcatagattatacagtaataa

SEQ ID NO: 1523025 - DNA, 25 bp, Homo sapien
caagaactgctatatatgctttcca

SEQ ID NO: 1523026 - DNA, 25 bp, Homo sapien
tttctggagcatgttacacaccaag

SEQ ID NO: 1523027 - DNA, 25 bp, Homo sapien
taagcttcccttgtatttacctgaa

SEQ ID NO: 1523028 - DNA, 25 bp, Homo sapien
taaagaatagtaagcttatataggg

SEQ ID NO: 1523029 - DNA, 25 bp, Homo sapien
ataagttgggtgtaaaagtgtagct

SEQ ID NO: 1523030 - DNA, 25 bp, Homo sapien
agaggtaggcgtccagttttcttct

SEQ ID NO: 1523031 - DNA, 25 bp, Homo sapien
tagcttgaagactcacagataagtc

SEQ ID NO: 1523032 - DNA, 25 bp, Homo sapien
agagtactttctaggtgttcttgaa

SEQ ID NO: 1523033 - DNA, 25 bp, Homo sapien
caataaacatctgattgcaggtgtc

SEQ ID NO: 1523034 - DNA, 25 bp, Homo sapien
tattgcaaggtgtataaggacctca

SEQ ID NO: 1523035 - DNA, 25 bp, Homo sapien
caatctaagtttcatgagtacctgg

SEQ ID NO: 1523036 - DNA, 25 bp, Homo sapien
tagatacgtagtttttcagggcttg

SEQ ID NO: 1523037 - DNA, 25 bp, Homo sapien
ggcagtgaaggcgagacctgcagct

SEQ ID NO: 1523038 - DNA, 25 bp, Homo sapien
aaaaacattctgacaagatctttgt

SEQ ID NO: 1523039 - DNA, 25 bp, Homo sapien
cccaaaaacattctgacaagatctt

SEQ ID NO: 1523040 - DNA, 25 bp, Homo sapien
caaaaacattctgacaagatctttg

SEQ ID NO: 1523041 - DNA, 25 bp, Homo sapien
aaacattctgacaagatctttgtac

SEQ ID NO: 1523042 - DNA, 25 bp, Homo sapien
aaagtaagagtacactagaagcttc

SEQ ID NO: 1523043 - DNA, 25 bp, Homo sapien
agagtacactagaagcttcctctct

SEQ ID NO: 1523044 - DNA, 25 bp, Homo sapien
gtaagagtacactagaagcttcctc

SEQ ID NO: 1523045 - DNA, 25 bp, Homo sapien
gtacactagaagcttcctctctgcc

SEQ ID NO: 1523046 - DNA, 25 bp, Homo sapien
tgcagtatttctcggtggctgctcc

SEQ ID NO: 1523047 - DNA, 25 bp, Homo sapien
gtatttctcggtggctgctccagag

SEQ ID NO: 1523048 - DNA, 25 bp, Homo sapien
ctgcagtatttctcggtggctgctc

SEQ ID NO: 1523049 - DNA, 25 bp, Homo sapien
tagtttccatgttagagttactcac

SEQ ID NO: 1523050 - DNA, 25 bp, Homo sapien
tattagccttagctctgagacactg

SEQ ID NO: 1523051 - DNA, 25 bp, Homo sapien
ggagcatcccccataaataaactag

SEQ ID NO: 1523052 - DNA, 25 bp, Homo sapien
tttcctgttgcaatactcctttgga

SEQ ID NO: 1523053 - DNA, 25 bp, Homo sapien
gctgagactgccctaagactttccc

SEQ ID NO: 1523054 - DNA, 25 bp, Homo sapien
caagaagactctgactagttaggca

SEQ ID NO: 1523055 - DNA, 25 bp, Homo sapien
tacaactcttaggattaagtgtgcc

SEQ ID NO: 1523056 - DNA, 25 bp, Homo sapien
tagttaggcaaaaatatcatcaccc

SEQ ID NO: 1523057 - DNA, 25 bp, Homo sapien
gattctgtcagaggcgtattgaacc

SEQ ID NO: 1523058 - DNA, 25 bp, Homo sapien
tcacaaggtgagatagaaggtcagc

SEQ ID NO: 1523059 - DNA, 25 bp, Homo sapien
tccatttggaatagagcctgagtaa

SEQ ID NO: 1523060 - DNA, 25 bp, Homo sapien
caaacataatctgggtaaatagctg

SEQ ID NO: 1523061 - DNA, 25 bp, Homo sapien
acaatgagttgctccacggaaataa

SEQ ID NO: 1523062 - DNA, 25 bp, Homo sapien
aatatgaaaatatgggccactgccc

SEQ ID NO: 1523063 - DNA, 25 bp, Homo sapien
tatgttcctcttttaccgtccacag

SEQ ID NO: 1523064 - DNA, 25 bp, Homo sapien
gttgctccacggaaataaaaatata

SEQ ID NO: 1523065 - DNA, 25 bp, Homo sapien
ctactagcctcacactcacagacag

SEQ ID NO: 1523066 - DNA, 25 bp, Homo sapien
gaccaagaccaaaaagtccactcat

SEQ ID NO: 1523067 - DNA, 25 bp, Homo sapien
agacagaaggaccaagaccaaaaag

SEQ ID NO: 1523068 - DNA, 25 bp, Homo sapien
tcacagacagaaggaccaagaccaa

SEQ ID NO: 1523069 - DNA, 25 bp, Homo sapien
aagtcccttaaaggcatcagcacca

SEQ ID NO: 1523070 - DNA, 25 bp, Homo sapien
gacaagtcccttaaaggcatcagca

SEQ ID NO: 1523071 - DNA, 25 bp, Homo sapien
gagacaagtcccttaaaggcatcag

SEQ ID NO: 1523072 - DNA, 25 bp, Homo sapien
tgagacaagtcccttaaaggcatca

SEQ ID NO: 1523073 - DNA, 25 bp, Homo sapien
tggccacatccctaaatgtcaacgt

SEQ ID NO: 1523074 - DNA, 25 bp, Homo sapien
tataaattctgctgagcagggttca

SEQ ID NO: 1523075 - DNA, 25 bp, Homo sapien
tctgctgagcagggttcaggcattc

SEQ ID NO: 1523076 - DNA, 25 bp, Homo sapien
gccacatccctaaatgtcaacgtct

SEQ ID NO: 1523077 - DNA, 25 bp, Homo sapien
tagactggtgatcgggtcttgctta

SEQ ID NO: 1523078 - DNA, 25 bp, Homo sapien
tctagactggtgatcgggtcttgct

SEQ ID NO: 1523079 - DNA, 25 bp, Homo sapien
ctagactggtgatcgggtcttgctt

SEQ ID NO: 1523080 - DNA, 25 bp, Homo sapien
tacaaaactcgataaacataattca

SEQ ID NO: 1523081 - DNA, 25 bp, Homo sapien
tgatatcaagacctggcagagatat

SEQ ID NO: 1523082 - DNA, 25 bp, Homo sapien
gaggggcctctccttaactcattct

SEQ ID NO: 1523083 - DNA, 25 bp, Homo sapien
caacatacaaaactcgataaacata

SEQ ID NO: 1523084 - DNA, 25 bp, Homo sapien
cctgccttgctagatagagctatta

SEQ ID NO: 1523085 - DNA, 25 bp, Homo sapien
caagagacccacttcgcatgaaaag

SEQ ID NO: 1523086 - DNA, 25 bp, Homo sapien
taagcagctagcaccacttggatag

SEQ ID NO: 1523087 - DNA, 25 bp, Homo sapien
ccttaaatgtaataggctgaatgcc

SEQ ID NO: 1523088 - DNA, 25 bp, Homo sapien
ttgagaaccgcttaaacactttgtc

SEQ ID NO: 1523089 - DNA, 25 bp, Homo sapien
tgtagtaagggctgaagggtggtta

SEQ ID NO: 1523090 - DNA, 25 bp, Homo sapien
gacctcgcgatctgctcacctagtc

SEQ ID NO: 1523091 - DNA, 25 bp, Homo sapien
acctcgcgatctgctcacctagtcc

SEQ ID NO: 1523092 - DNA, 25 bp, Homo sapien
ttcacaattgtagggtttcgttcca

SEQ ID NO: 1523093 - DNA, 25 bp, Homo sapien
agacagagtcttgccttgtggccca

SEQ ID NO: 1523094 - DNA, 25 bp, Homo sapien
cacaattgtagggtttcgttccagt

SEQ ID NO: 1523095 - DNA, 25 bp, Homo sapien
tcgttccagtatgaattttcttttc

SEQ ID NO: 1523096 - DNA, 25 bp, Homo sapien
agcattgccagatctttctggtttg

SEQ ID NO: 1523097 - DNA, 25 bp, Homo sapien
aaaagcattgccagatctttctggt

SEQ ID NO: 1523098 - DNA, 25 bp, Homo sapien
gcattgccagatctttctggtttgc

SEQ ID NO: 1523099 - DNA, 25 bp, Homo sapien
aaagcattgccagatctttctggtt

SEQ ID NO: 1523100 - DNA, 25 bp, Homo sapien
ggagatcgagaccagatcacgaggt

SEQ ID NO: 1523101 - DNA, 25 bp, Homo sapien
taccaggcgaaatgaaatggcgtga

SEQ ID NO: 1523102 - DNA, 25 bp, Homo sapien
taaaaaagaatctcttgccaggagc

SEQ ID NO: 1523103 - DNA, 25 bp, Homo sapien
tattgataagcgaactcaccagtta

SEQ ID NO: 1523104 - DNA, 25 bp, Homo sapien
tgtaaattgtgctgtaattatatca

SEQ ID NO: 1523105 - DNA, 25 bp, Homo sapien
aaattaaattcgtggccgggcactg

SEQ ID NO: 1523106 - DNA, 25 bp, Homo sapien
tttgcaatctttaccaccacactta

SEQ ID NO: 1523107 - DNA, 25 bp, Homo sapien
gattctgcacggaaatgtaaattgt

SEQ ID NO: 1523108 - DNA, 25 bp, Homo sapien
gtttggacccagcacattgcatggg

SEQ ID NO: 1523109 - DNA, 25 bp, Homo sapien
atggtttggacccagcacattgcat

SEQ ID NO: 1523110 - DNA, 25 bp, Homo sapien
ggtttggacccagcacattgcatgg

SEQ ID NO: 1523111 - DNA, 25 bp, Homo sapien
tgtcatgatctccaaatgtttttca

SEQ ID NO: 1523112 - DNA, 25 bp, Homo sapien
taaattacatagattaagctggagg

SEQ ID NO: 1523113 - DNA, 25 bp, Homo sapien
tcagatgccaaggtatttagaagaa

SEQ ID NO: 1523114 - DNA, 25 bp, Homo sapien
cttaatcccattgatgtatagagta

SEQ ID NO: 1523115 - DNA, 25 bp, Homo sapien
cattatattagttgggataggccag

SEQ ID NO: 1523116 - DNA, 25 bp, Homo sapien
acggggattttccatgttgaccagg

SEQ ID NO: 1523117 - DNA, 25 bp, Homo sapien
atgcccatgcccagctgagattttt

SEQ ID NO: 1523118 - DNA, 25 bp, Homo sapien
gacggggattttccatgttgaccag

SEQ ID NO: 1523119 - DNA, 25 bp, Homo sapien
accatgcccatgcccagctgagatt

SEQ ID NO: 1523120 - DNA, 25 bp, Homo sapien
ggagatatcaactcgttcctgttag

SEQ ID NO: 1523121 - DNA, 25 bp, Homo sapien
gaagaacaagtcagtcagatcactt

SEQ ID NO: 1523122 - DNA, 25 bp, Homo sapien
catgtcataacagcaattgcactac

SEQ ID NO: 1523123 - DNA, 25 bp, Homo sapien
aaagaaggtatcaccctgactttga

SEQ ID NO: 1523124 - DNA, 25 bp, Homo sapien
aaacatcatcaaaaagtcatagcat

SEQ ID NO: 1523125 - DNA, 25 bp, Homo sapien
caaaaacatcatcaaaaagtcatag

SEQ ID NO: 1523126 - DNA, 25 bp, Homo sapien
tcatcaaaaagtcatagcatttcta

SEQ ID NO: 1523127 - DNA, 25 bp, Homo sapien
atcatcaaaaagtcatagcatttct

SEQ ID NO: 1523128 - DNA, 25 bp, Homo sapien
cggtgtcttagctgtgggtctccca

SEQ ID NO: 1523129 - DNA, 25 bp, Homo sapien
gggagacctggagctcaggctgcgg

SEQ ID NO: 1523130 - DNA, 25 bp, Homo sapien
agctcaggctgcggcgagagacaaa

SEQ ID NO: 1523131 - DNA, 25 bp, Homo sapien
ggacacagagcagcgaaggggagac

SEQ ID NO: 1523132 - DNA, 25 bp, Homo sapien
gcactgaaacccacgaccagaaaaa

SEQ ID NO: 1523133 - DNA, 25 bp, Homo sapien
cacggtggatatcttagttcatccc

SEQ ID NO: 1523134 - DNA, 25 bp, Homo sapien
gcactttagctgacataaccacggt

SEQ ID NO: 1523135 - DNA, 25 bp, Homo sapien
gacagcactgaaacccacgaccaga

SEQ ID NO: 1523136 - DNA, 25 bp, Homo sapien
gagaggatacactccatatttcaag

SEQ ID NO: 1523137 - DNA, 25 bp, Homo sapien
tgagaggatacactccatatttcaa

SEQ ID NO: 1523138 - DNA, 25 bp, Homo sapien
aggatacactccatatttcaagtcg

SEQ ID NO: 1523139 - DNA, 25 bp, Homo sapien
gatacactccatatttcaagtcgtc

SEQ ID NO: 1523140 - DNA, 25 bp, Homo sapien
ttgggcgtagacaattttaatgtct

SEQ ID NO: 1523141 - DNA, 25 bp, Homo sapien
tagacaattttaatgtctcaagagg

SEQ ID NO: 1523142 - DNA, 25 bp, Homo sapien
gacaattttaatgtctcaagaggtt

SEQ ID NO: 1523143 - DNA, 25 bp, Homo sapien
caattttaatgtctcaagaggttac

SEQ ID NO: 1523144 - DNA, 25 bp, Homo sapien
ttacaccatctcactagagtcaggt

SEQ ID NO: 1523145 - DNA, 25 bp, Homo sapien
catcagtgccagcatcggactggct

SEQ ID NO: 1523146 - DNA, 25 bp, Homo sapien
tcatgaaccacccatacaggagaca

SEQ ID NO: 1523147 - DNA, 25 bp, Homo sapien
tatttctcggtgactgctccaggtg

SEQ ID NO: 1523148 - DNA, 25 bp, Homo sapien
tgggttgagcagactgggacatctg

SEQ ID NO: 1523149 - DNA, 25 bp, Homo sapien
tctgcaggggaggatccccagaaaa

SEQ ID NO: 1523150 - DNA, 25 bp, Homo sapien
actagctgggcttttatttgtttct

SEQ ID NO: 1523151 - DNA, 25 bp, Homo sapien
ggttgagcagactgggacatctgca

SEQ ID NO: 1523152 - DNA, 25 bp, Homo sapien
caggctccagaactttgaactatcc

SEQ ID NO: 1523153 - DNA, 25 bp, Homo sapien
tcttcctgttgcaatactctttcgg

SEQ ID NO: 1523154 - DNA, 25 bp, Homo sapien
tctcgtctaagaacatgctgacttc

SEQ ID NO: 1523155 - DNA, 25 bp, Homo sapien
gatttttcacggttcatttgccatt

SEQ ID NO: 1523156 - DNA, 25 bp, Homo sapien
agtgagccaagatagcgagcgccac

SEQ ID NO: 1523157 - DNA, 25 bp, Homo sapien
gcattccagcctgggcgacagagcg

SEQ ID NO: 1523158 - DNA, 25 bp, Homo sapien
ttccagcctgggcgacagagcgaga

SEQ ID NO: 1523159 - DNA, 25 bp, Homo sapien
tgagccaagatagcgagcgccactg

SEQ ID NO: 1523160 - DNA, 25 bp, Homo sapien
ggacaatcgcttgactcccatagat

SEQ ID NO: 1523161 - DNA, 25 bp, Homo sapien
caatcgcttgactcccatagatgga

SEQ ID NO: 1523162 - DNA, 25 bp, Homo sapien
gacaatcgcttgactcccatagatg

SEQ ID NO: 1523163 - DNA, 25 bp, Homo sapien
aggacaatcgcttgactcccataga

SEQ ID NO: 1523164 - DNA, 25 bp, Homo sapien
ggtttctgaaattttgagcaccagc

SEQ ID NO: 1523165 - DNA, 25 bp, Homo sapien
tttctgaaattttgagcaccagctc

SEQ ID NO: 1523166 - DNA, 25 bp, Homo sapien
ctgcttttgggtttctgaaattttg

SEQ ID NO: 1523167 - DNA, 25 bp, Homo sapien
tctgaaattttgagcaccagctcta

SEQ ID NO: 1523168 - DNA, 25 bp, Homo sapien
tctgctgagcagggttcaggcattc

SEQ ID NO: 1523169 - DNA, 25 bp, Homo sapien
aattctgctgagcagggttcaggca

SEQ ID NO: 1523170 - DNA, 25 bp, Homo sapien
ttgtagttttctaacatcacattca

SEQ ID NO: 1523171 - DNA, 25 bp, Homo sapien
tataaattctgctgagcagggttca

SEQ ID NO: 1523172 - DNA, 25 bp, Homo sapien
gaaacatttagggcatattaagaat

SEQ ID NO: 1523173 - DNA, 25 bp, Homo sapien
gacatgaaacatttagggcatatta

SEQ ID NO: 1523174 - DNA, 25 bp, Homo sapien
gagacatgaaacatttagggcatat

SEQ ID NO: 1523175 - DNA, 25 bp, Homo sapien
catgaaacatttagggcatattaag

SEQ ID NO: 1523176 - DNA, 25 bp, Homo sapien
tccagacaggtgactgggtcttgct

SEQ ID NO: 1523177 - DNA, 25 bp, Homo sapien
gactgggtcttgcttagagacagca

SEQ ID NO: 1523178 - DNA, 25 bp, Homo sapien
caggtgactgggtcttgcttagaga

SEQ ID NO: 1523179 - DNA, 25 bp, Homo sapien
ctgggtcttgcttagagacagcaac

SEQ ID NO: 1523180 - DNA, 25 bp, Homo sapien
cataattgtggcgatcaagacatca

SEQ ID NO: 1523181 - DNA, 25 bp, Homo sapien
tataaagcaaacgttgacaaaggtg

SEQ ID NO: 1523182 - DNA, 25 bp, Homo sapien
tacatacatatgacataagggctcc

SEQ ID NO: 1523183 - DNA, 25 bp, Homo sapien
caaagagtaattttggcgcctgtaa

SEQ ID NO: 1523184 - DNA, 25 bp, Homo sapien
tatactcatctacacttgcggagcc

SEQ ID NO: 1523185 - DNA, 25 bp, Homo sapien
tactcatctacacttgcggagcctt

SEQ ID NO: 1523186 - DNA, 25 bp, Homo sapien
caccttatactcatctacacttgcg

SEQ ID NO: 1523187 - DNA, 25 bp, Homo sapien
caatatttaatgcttagtaagagtt

SEQ ID NO: 1523188 - DNA, 25 bp, Homo sapien
tatttaatgcttagtaagagttgag

SEQ ID NO: 1523189 - DNA, 25 bp, Homo sapien
cggccaatatttaatgcttagtaag

SEQ ID NO: 1523190 - DNA, 25 bp, Homo sapien
cccggccaatatttaatgcttagta

SEQ ID NO: 1523191 - DNA, 25 bp, Homo sapien
tgaggcgttgtcaaaagtagtcaca

SEQ ID NO: 1523192 - DNA, 25 bp, Homo sapien
aagtttgaggcgttgtcaaaagtag

SEQ ID NO: 1523193 - DNA, 25 bp, Homo sapien
gtttgaggcgttgtcaaaagtagtc

SEQ ID NO: 1523194 - DNA, 25 bp, Homo sapien
aggcgttgtcaaaagtagtcacatc

SEQ ID NO: 1523195 - DNA, 25 bp, Homo sapien
tgatgtagcaacaattaaccccatg

SEQ ID NO: 1523196 - DNA, 25 bp, Homo sapien
taatttcagagttgaatgatgacat

SEQ ID NO: 1523197 - DNA, 25 bp, Homo sapien
ttgttcacacatgtaggcgttttct

SEQ ID NO: 1523198 - DNA, 25 bp, Homo sapien
tctgatcctcttaaagttctataca

SEQ ID NO: 1523199 - DNA, 25 bp, Homo sapien
gaacaaaatggagtgctctaactaa

SEQ ID NO: 1523200 - DNA, 25 bp, Homo sapien
gatggatgccttacttaaccctgct

SEQ ID NO: 1523201 - DNA, 25 bp, Homo sapien
gaactctaagtcatagactgtacag

SEQ ID NO: 1523202 - DNA, 25 bp, Homo sapien
gaagcctccctagtacttagctgaa

SEQ ID NO: 1523203 - DNA, 25 bp, Homo sapien
gaataacaatgtgtcaaatactgtg

SEQ ID NO: 1523204 - DNA, 25 bp, Homo sapien
catcatgtctgaccaatgtgagata

SEQ ID NO: 1523205 - DNA, 25 bp, Homo sapien
cagtaaactagtttgcatgcaaagt

SEQ ID NO: 1523206 - DNA, 25 bp, Homo sapien
cgttctacagaaaaagtacagattc

SEQ ID NO: 1523207 - DNA, 25 bp, Homo sapien
ggcacagaaagattagtgtctcata

SEQ ID NO: 1523208 - DNA, 25 bp, Homo sapien
taatttcacttacacatggattcca

SEQ ID NO: 1523209 - DNA, 25 bp, Homo sapien
taagaaatggaaggctggaaacatg

SEQ ID NO: 1523210 - DNA, 25 bp, Homo sapien
gtattagttgggataagcaaggcac

SEQ ID NO: 1523211 - DNA, 25 bp, Homo sapien
aaagtcatacatatgtccaacggat

SEQ ID NO: 1523212 - DNA, 25 bp, Homo sapien
gaggatagccattacgaaaaacaaa

SEQ ID NO: 1523213 - DNA, 25 bp, Homo sapien
ctgtttgcagcacttgtttcacaat

SEQ ID NO: 1523214 - DNA, 25 bp, Homo sapien
gtaatacagcaatcgcactactggg

SEQ ID NO: 1523215 - DNA, 25 bp, Homo sapien
taaggcctgacactctgaaactact

SEQ ID NO: 1523216 - DNA, 25 bp, Homo sapien
aatgcaacctctatcgaaatacgtg

SEQ ID NO: 1523217 - DNA, 25 bp, Homo sapien
ctataacattgttctgggcagcaaa

SEQ ID NO: 1523218 - DNA, 25 bp, Homo sapien
tccacatgcagagataaaaattgag

SEQ ID NO: 1523219 - DNA, 25 bp, Homo sapien
gacttcggtatcaagatgacacagg

SEQ ID NO: 1523220 - DNA, 25 bp, Homo sapien
tgatttgcctgtgaactcagcttgc

SEQ ID NO: 1523221 - DNA, 25 bp, Homo sapien
gttagatttatccagcacttccaga

SEQ ID NO: 1523222 - DNA, 25 bp, Homo sapien
tgatgaaacatccttgcacatgtga

SEQ ID NO: 1523223 - DNA, 25 bp, Homo sapien
tgtattcaataggaaaaagccccac

SEQ ID NO: 1523224 - DNA, 25 bp, Homo sapien
tgtgttggccatttgacatctgcga

SEQ ID NO: 1523225 - DNA, 25 bp, Homo sapien
gcataagaccgcctttgtgaggccc

SEQ ID NO: 1523226 - DNA, 25 bp, Homo sapien
cgttcataaagcaatagtcccacct

SEQ ID NO: 1523227 - DNA, 25 bp, Homo sapien
tgaaactgttgaccacttcggagct

SEQ ID NO: 1523228 - DNA, 25 bp, Homo sapien
tgcaagaagacactagaacatatgg

SEQ ID NO: 1523229 - DNA, 25 bp, Homo sapien
tcacagagagaagttaccaggtatc

SEQ ID NO: 1523230 - DNA, 25 bp, Homo sapien
gaggaattagccaaagcccaactat

SEQ ID NO: 1523231 - DNA, 25 bp, Homo sapien
tgatgttcatgcagcttcaccctca

SEQ ID NO: 1523232 - DNA, 25 bp, Homo sapien
ctcaccctggtacgcctccactcta

SEQ ID NO: 1523233 - DNA, 25 bp, Homo sapien
cttggtgatgttcatgcagcttcac

SEQ ID NO: 1523234 - DNA, 25 bp, Homo sapien
tacgcctccactctaacccttggtc

SEQ ID NO: 1523235 - DNA, 25 bp, Homo sapien
cagtgggttttagggacattcgcca

SEQ ID NO: 1523236 - DNA, 25 bp, Homo sapien
agtgggttttagggacattcgccat

SEQ ID NO: 1523237 - DNA, 25 bp, Homo sapien
taagatctgcatttgggctcaatgc

SEQ ID NO: 1523238 - DNA, 25 bp, Homo sapien
ctaagatctgcatttgggctcaatg

SEQ ID NO: 1523239 - DNA, 25 bp, Homo sapien
aagatctgcatttgggctcaatgca

SEQ ID NO: 1523240 - DNA, 25 bp, Homo sapien
agatctgcatttgggctcaatgcac

SEQ ID NO: 1523241 - DNA, 25 bp, Homo sapien
cacccatatttccattactgtagca

SEQ ID NO: 1523242 - DNA, 25 bp, Homo sapien
tggtgtttgtggcaagggcgagcac

SEQ ID NO: 1523243 - DNA, 25 bp, Homo sapien
tttgatagggagaggtcagtgtcac

SEQ ID NO: 1523244 - DNA, 25 bp, Homo sapien
gctggtgtttgtggcaagggcgagc

SEQ ID NO: 1523245 - DNA, 25 bp, Homo sapien
ttaactggatatggtggcaggtgca

SEQ ID NO: 1523246 - DNA, 25 bp, Homo sapien
aggcagagggaggtgaatcgcttga

SEQ ID NO: 1523247 - DNA, 25 bp, Homo sapien
actggatatggtggcaggtgcatgt

SEQ ID NO: 1523248 - DNA, 25 bp, Homo sapien
aaattaactggatatggtggcaggt

SEQ ID NO: 1523249 - DNA, 25 bp, Homo sapien
gtaagattttatgatctacaaacaa

SEQ ID NO: 1523250 - DNA, 25 bp, Homo sapien
ttgacaagtgggcacaatatagttt

SEQ ID NO: 1523251 - DNA, 25 bp, Homo sapien
agattttatgatctacaaacaaaca

SEQ ID NO: 1523252 - DNA, 25 bp, Homo sapien
tgggcacaatatagtttggcattgg

SEQ ID NO: 1523253 - DNA, 25 bp, Homo sapien
ggtgtcaaccaagctttactctaga

SEQ ID NO: 1523254 - DNA, 25 bp, Homo sapien
gataggtggcatccccaatgaccag

SEQ ID NO: 1523255 - DNA, 25 bp, Homo sapien
tttctacaaaccttacagggcagca

SEQ ID NO: 1523256 - DNA, 25 bp, Homo sapien
ggattccagtcaactcacaattgtg

SEQ ID NO: 1523257 - DNA, 25 bp, Homo sapien
ggctgggattagagctgtgtatcac

SEQ ID NO: 1523258 - DNA, 25 bp, Homo sapien
gagtggctgggattagagctgtgta

SEQ ID NO: 1523259 - DNA, 25 bp, Homo sapien
gtggctgggattagagctgtgtatc

SEQ ID NO: 1523260 - DNA, 25 bp, Homo sapien
ggattagagctgtgtatcaccatgc

SEQ ID NO: 1523261 - DNA, 25 bp, Homo sapien
ttctgaatgagcacacttggtaggt

SEQ ID NO: 1523262 - DNA, 25 bp, Homo sapien
caggaggccattgttcttctgaatg

SEQ ID NO: 1523263 - DNA, 25 bp, Homo sapien
gattaaagataaagggccaatgtgg

SEQ ID NO: 1523264 - DNA, 25 bp, Homo sapien
agaataggataaagagcattgccag

SEQ ID NO: 1523265 - DNA, 25 bp, Homo sapien
acccggagttccagcggcagccaaa

SEQ ID NO: 1523266 - DNA, 25 bp, Homo sapien
gacaaagaagcggacaaatcccgcc

SEQ ID NO: 1523267 - DNA, 25 bp, Homo sapien
agttccagcggcagccaaagacaaa

SEQ ID NO: 1523268 - DNA, 25 bp, Homo sapien
agacgagacccggagttccagcggc

SEQ ID NO: 1523269 - DNA, 25 bp, Homo sapien
gctgaagtgggagaattgtttaaaa

SEQ ID NO: 1523270 - DNA, 25 bp, Homo sapien
ccagcctgggagacagagcgagact

SEQ ID NO: 1523271 - DNA, 25 bp, Homo sapien
tgagccgagatcgcgccattgcact

SEQ ID NO: 1523272 - DNA, 25 bp, Homo sapien
ccgggaggcggaggttgaggtgagc

SEQ ID NO: 1523273 - DNA, 25 bp, Homo sapien
gggtatccacttgcccccttgacag

SEQ ID NO: 1523274 - DNA, 25 bp, Homo sapien
tcaaaataagagtactccagaagat

SEQ ID NO: 1523275 - DNA, 25 bp, Homo sapien
gtactccagaagattcctctcagcc

SEQ ID NO: 1523276 - DNA, 25 bp, Homo sapien
ccttgacaggatacactccatacct

SEQ ID NO: 1523277 - DNA, 25 bp, Homo sapien
caactacacggtcagtaagaccctc

SEQ ID NO: 1523278 - DNA, 25 bp, Homo sapien
tttgtcttaaccttaactcatctgc

SEQ ID NO: 1523279 - DNA, 25 bp, Homo sapien
tgccttaaaacaactacacggtcag

SEQ ID NO: 1523280 - DNA, 25 bp, Homo sapien
gcagtgggaccgttatcggctcact

SEQ ID NO: 1523281 - DNA, 25 bp, Homo sapien
acagggtttcgtcatttggtcaggc

SEQ ID NO: 1523282 - DNA, 25 bp, Homo sapien
tccacccgcctaggcttctcagagt

SEQ ID NO: 1523283 - DNA, 25 bp, Homo sapien
ggattataggcgcgccctaccatgc

SEQ ID NO: 1523284 - DNA, 25 bp, Homo sapien
cccgcctaggcttctcagagtgctt

SEQ ID NO: 1523285 - DNA, 25 bp, Homo sapien
ttgggaggtcgaggtaggtaggtca

SEQ ID NO: 1523286 - DNA, 25 bp, Homo sapien
gtcgggagttcaagaccagcctgac

SEQ ID NO: 1523287 - DNA, 25 bp, Homo sapien
gaggtcgaggtaggtaggtcacctg

SEQ ID NO: 1523288 - DNA, 25 bp, Homo sapien
ggtcgaggtaggtaggtcacctgag

SEQ ID NO: 1523289 - DNA, 25 bp, Homo sapien
tgtaagcactggttttactacaaaa

SEQ ID NO: 1523290 - DNA, 25 bp, Homo sapien
ttttgtaagggaacactccagagtg

SEQ ID NO: 1523291 - DNA, 25 bp, Homo sapien
cagaaaatctgctaaatggaacgtt

SEQ ID NO: 1523292 - DNA, 25 bp, Homo sapien
gttattatgtcctactaacaccttg

SEQ ID NO: 1523293 - DNA, 25 bp, Homo sapien
cacttttaatagtgcagatcaaaaa

SEQ ID NO: 1523294 - DNA, 25 bp, Homo sapien
cagcaacaagggaaacacttttaat

SEQ ID NO: 1523295 - DNA, 25 bp, Homo sapien
caagggaaacacttttaatagtgca

SEQ ID NO: 1523296 - DNA, 25 bp, Homo sapien
gaaacacttttaatagtgcagatca

SEQ ID NO: 1523297 - DNA, 25 bp, Homo sapien
gtaatgccaatgtatttcgcccaaa

SEQ ID NO: 1523298 - DNA, 25 bp, Homo sapien
tgtgctgacgcacaccgaagaacac

SEQ ID NO: 1523299 - DNA, 25 bp, Homo sapien
gttttatgcagagttcaagatgcag

SEQ ID NO: 1523300 - DNA, 25 bp, Homo sapien
tgaaatgaatatttccaagagctct

SEQ ID NO: 1523301 - DNA, 25 bp, Homo sapien
catcactttcctatacaaatcttgc

SEQ ID NO: 1523302 - DNA, 25 bp, Homo sapien
tcctatacaaatcttgctgagcagt

SEQ ID NO: 1523303 - DNA, 25 bp, Homo sapien
atacaaatcttgctgagcagtgtcc

SEQ ID NO: 1523304 - DNA, 25 bp, Homo sapien
ccaagaacaccaggtttctgaagtt

SEQ ID NO: 1523305 - DNA, 25 bp, Homo sapien
cctttagtgtatataaggaattgtg

SEQ ID NO: 1523306 - DNA, 25 bp, Homo sapien
ggagaaatgaaacctttagtgtata

SEQ ID NO: 1523307 - DNA, 25 bp, Homo sapien
aaatggagaaatgaaacctttagtg

SEQ ID NO: 1523308 - DNA, 25 bp, Homo sapien
atgaaacctttagtgtatataagga

SEQ ID NO: 1523309 - DNA, 25 bp, Homo sapien
ggggtgtggctaccatactgtgtct

SEQ ID NO: 1523310 - DNA, 25 bp, Homo sapien
ggtgtggctaccatactgtgtctct

SEQ ID NO: 1523311 - DNA, 25 bp, Homo sapien
ctgggggtgtggctaccatactgtg

SEQ ID NO: 1523312 - DNA, 25 bp, Homo sapien
gtgtggctaccatactgtgtctctt

SEQ ID NO: 1523313 - DNA, 25 bp, Homo sapien
caaatcacattatagggactgcttt

SEQ ID NO: 1523314 - DNA, 25 bp, Homo sapien
gaagatggccctatgtgacagtaac

SEQ ID NO: 1523315 - DNA, 25 bp, Homo sapien
tccaacctttcatctatgtcaactg

SEQ ID NO: 1523316 - DNA, 25 bp, Homo sapien
atcttccaacctttcatctatgtca

SEQ ID NO: 1523317 - DNA, 25 bp, Homo sapien
actcccaaactcagatgatccgctc

SEQ ID NO: 1523318 - DNA, 25 bp, Homo sapien
ctacaggcacgtgctgccatacctg

SEQ ID NO: 1523319 - DNA, 25 bp, Homo sapien
ccaaactcagatgatccgctcgcct

SEQ ID NO: 1523320 - DNA, 25 bp, Homo sapien
tcccaaactcagatgatccgctcgc

SEQ ID NO: 1523321 - DNA, 25 bp, Homo sapien
acacctagacagcaatataattata

SEQ ID NO: 1523322 - DNA, 25 bp, Homo sapien
attgacagactggaagaaacaccta

SEQ ID NO: 1523323 - DNA, 25 bp, Homo sapien
gacagactggaagaaacacctagac

SEQ ID NO: 1523324 - DNA, 25 bp, Homo sapien
tggaagaaacacctagacagcaata

SEQ ID NO: 1523325 - DNA, 25 bp, Homo sapien
atagatttattaactgggaacctat

SEQ ID NO: 1523326 - DNA, 25 bp, Homo sapien
tagatttattaactgggaacctatg

SEQ ID NO: 1523327 - DNA, 25 bp, Homo sapien
gatccaatttgcctttctacaaggg

SEQ ID NO: 1523328 - DNA, 25 bp, Homo sapien
ccaatttgcctttctacaagggtca

SEQ ID NO: 1523329 - DNA, 25 bp, Homo sapien
catactgaaggtggcaagatagatt

SEQ ID NO: 1523330 - DNA, 25 bp, Homo sapien
ttaaaaacatactgaaggtggcaag

SEQ ID NO: 1523331 - DNA, 25 bp, Homo sapien
tatcataatggcacagaagaaattt

SEQ ID NO: 1523332 - DNA, 25 bp, Homo sapien
caagaatactcttatgagatagcca

SEQ ID NO: 1523333 - DNA, 25 bp, Homo sapien
tctgggaaagatacgcacatacaca

SEQ ID NO: 1523334 - DNA, 25 bp, Homo sapien
gccagtggattctcaacaaaaattt

SEQ ID NO: 1523335 - DNA, 25 bp, Homo sapien
aatactcaatgagtaaaatatgaac

SEQ ID NO: 1523336 - DNA, 25 bp, Homo sapien
aacagggcaatgtagtaccaacaaa

SEQ ID NO: 1523337 - DNA, 25 bp, Homo sapien
ataaaagtgatgtgttggctgggcg

SEQ ID NO: 1523338 - DNA, 25 bp, Homo sapien
cagcgaggtgaaatcgcgccatttc

SEQ ID NO: 1523339 - DNA, 25 bp, Homo sapien
tgccatgtccatggagacaggctga

SEQ ID NO: 1523340 - DNA, 25 bp, Homo sapien
cattgggatggtgaagatgtcagct

SEQ ID NO: 1523341 - DNA, 25 bp, Homo sapien
gacaggctgaggcagccgagctctg

SEQ ID NO: 1523342 - DNA, 25 bp, Homo sapien
ttccttagtccaggcaactgtccag

SEQ ID NO: 1523343 - DNA, 25 bp, Homo sapien
cagctgttcctgctccccgatataa

SEQ ID NO: 1523344 - DNA, 25 bp, Homo sapien
ctgttcctgctccccgatataacat

SEQ ID NO: 1523345 - DNA, 25 bp, Homo sapien
acagctgttcctgctccccgatata

SEQ ID NO: 1523346 - DNA, 25 bp, Homo sapien
agctgttcctgctccccgatataac

SEQ ID NO: 1523347 - DNA, 25 bp, Homo sapien
taactgtaaatctttatgtccataa

SEQ ID NO: 1523348 - DNA, 25 bp, Homo sapien
tattttatgttgacctaggtgtaaa

SEQ ID NO: 1523349 - DNA, 25 bp, Homo sapien
cttcatgtttgtaggatttgtctcc

SEQ ID NO: 1523350 - DNA, 25 bp, Homo sapien
tgggtagttgtcaaatactctttta

SEQ ID NO: 1523351 - DNA, 25 bp, Homo sapien
tagtaaggtatgagaattggcagaa

SEQ ID NO: 1523352 - DNA, 25 bp, Homo sapien
tttagtaaggtatgagaattggcag

SEQ ID NO: 1523353 - DNA, 25 bp, Homo sapien
gtaaggtatgagaattggcagaaag

SEQ ID NO: 1523354 - DNA, 25 bp, Homo sapien
taaggtatgagaattggcagaaagc

SEQ ID NO: 1523355 - DNA, 25 bp, Homo sapien
tctggtaaggtgtgagtaccaatta

SEQ ID NO: 1523356 - DNA, 25 bp, Homo sapien
atgtctggtaaggtgtgagtaccaa

SEQ ID NO: 1523357 - DNA, 25 bp, Homo sapien
tgtctggtaaggtgtgagtaccaat

SEQ ID NO: 1523358 - DNA, 25 bp, Homo sapien
tggtaaggtgtgagtaccaattaaa

SEQ ID NO: 1523359 - DNA, 25 bp, Homo sapien
ctagtaagggttgcgaatacattaa

SEQ ID NO: 1523360 - DNA, 25 bp, Homo sapien
tatgtctagtaagggttgcgaatac

SEQ ID NO: 1523361 - DNA, 25 bp, Homo sapien
ttatgtctagtaagggttgcgaata

SEQ ID NO: 1523362 - DNA, 25 bp, Homo sapien
tgtctagtaagggttgcgaatacat

SEQ ID NO: 1523363 - DNA, 25 bp, Homo sapien
tttgaggactgtttaaaagctttgc

SEQ ID NO: 1523364 - DNA, 25 bp, Homo sapien
cacattcctcacatttgtagggttt

SEQ ID NO: 1523365 - DNA, 25 bp, Homo sapien
gccacattcctcacatttgtagggt

SEQ ID NO: 1523366 - DNA, 25 bp, Homo sapien
cattcctcacatttgtagggtttct

SEQ ID NO: 1523367 - DNA, 25 bp, Homo sapien
ggtttctctccagaatgaattttca

SEQ ID NO: 1523368 - DNA, 25 bp, Homo sapien
gtttctctccagaatgaattttcat

SEQ ID NO: 1523369 - DNA, 25 bp, Homo sapien
gaagaaagctttgccacattctcca

SEQ ID NO: 1523370 - DNA, 25 bp, Homo sapien
tgaagaaagctttgccacattctcc

SEQ ID NO: 1523371 - DNA, 25 bp, Homo sapien
ctgaagaaagctttgccacattctc

SEQ ID NO: 1523372 - DNA, 25 bp, Homo sapien
aagaaagctttgccacattctccac

SEQ ID NO: 1523373 - DNA, 25 bp, Homo sapien
atgtgcagtaaggtaggagtaacag

SEQ ID NO: 1523374 - DNA, 25 bp, Homo sapien
taagataagataatcggtagaaagc

SEQ ID NO: 1523375 - DNA, 25 bp, Homo sapien
taaggtaaatgaatcggtagaaagc

SEQ ID NO: 1523376 - DNA, 25 bp, Homo sapien
tatgtgtagtaagataagataatcg

SEQ ID NO: 1523377 - DNA, 25 bp, Homo sapien
tagtaagagttgaggactggttaaa

SEQ ID NO: 1523378 - DNA, 25 bp, Homo sapien
ctagtaagagttgaggactggttaa

SEQ ID NO: 1523379 - DNA, 25 bp, Homo sapien
tgccacattcttcacatttgtaggg

SEQ ID NO: 1523380 - DNA, 25 bp, Homo sapien
ctctccagtatgaactctcttatgt

SEQ ID NO: 1523381 - DNA, 25 bp, Homo sapien
tagtaaggtttgaggaccagttata

SEQ ID NO: 1523382 - DNA, 25 bp, Homo sapien
aggtttgaggaccagttataagctt

SEQ ID NO: 1523383 - DNA, 25 bp, Homo sapien
ttatcttatgtatagtaagggttga

SEQ ID NO: 1523384 - DNA, 25 bp, Homo sapien
ttatgtatagtaagggttgaagatt

SEQ ID NO: 1523385 - DNA, 25 bp, Homo sapien
ttattctccaatatgaattatctta

SEQ ID NO: 1523386 - DNA, 25 bp, Homo sapien
tgtatagtaagggttgaagattggt

SEQ ID NO: 1523387 - DNA, 25 bp, Homo sapien
gtgaggactggttaagagctttctc

SEQ ID NO: 1523388 - DNA, 25 bp, Homo sapien
ggactggttaagagctttctcacat

SEQ ID NO: 1523389 - DNA, 25 bp, Homo sapien
gactggttaagagctttctcacatt

SEQ ID NO: 1523390 - DNA, 25 bp, Homo sapien
aggactggttaagagctttctcaca

SEQ ID NO: 1523391 - DNA, 25 bp, Homo sapien
tagggtatctctccagcatgaatta

SEQ ID NO: 1523392 - DNA, 25 bp, Homo sapien
agggtatctctccagcatgaattac

SEQ ID NO: 1523393 - DNA, 25 bp, Homo sapien
agaatgaatcaccttatttttagta

SEQ ID NO: 1523394 - DNA, 25 bp, Homo sapien
ccagaatgaatcaccttatttttag

SEQ ID NO: 1523395 - DNA, 25 bp, Homo sapien
cagaatgaatcaccttatttttagt

SEQ ID NO: 1523396 - DNA, 25 bp, Homo sapien
tatgagaatctataaaaagttttga

SEQ ID NO: 1523397 - DNA, 25 bp, Homo sapien
atgagaatctataaaaagttttgag

SEQ ID NO: 1523398 - DNA, 25 bp, Homo sapien
tgagaatctataaaaagttttgaga

SEQ ID NO: 1523399 - DNA, 25 bp, Homo sapien
tgcagaaagttgaggggaccattaa

SEQ ID NO: 1523400 - DNA, 25 bp, Homo sapien
gcagaaagttgaggggaccattaaa

SEQ ID NO: 1523401 - DNA, 25 bp, Homo sapien
cagaaagttgaggggaccattaaag

SEQ ID NO: 1523402 - DNA, 25 bp, Homo sapien
gtgcagaaagttgaggggaccatta

SEQ ID NO: 1523403 - DNA, 25 bp, Homo sapien
tagtgggagttgaggactggataac

SEQ ID NO: 1523404 - DNA, 25 bp, Homo sapien
tgaattatgttatgtttagtgggag

SEQ ID NO: 1523405 - DNA, 25 bp, Homo sapien
actggataacggctttaccacatcc

SEQ ID NO: 1523406 - DNA, 25 bp, Homo sapien
tggataacggctttaccacatcctt

SEQ ID NO: 1523407 - DNA, 25 bp, Homo sapien
tttggtaagaattgaggactggtta

SEQ ID NO: 1523408 - DNA, 25 bp, Homo sapien
cataaggttaatctccaatatgaat

SEQ ID NO: 1523409 - DNA, 25 bp, Homo sapien
atgtttggtaagaattgaggactgg

SEQ ID NO: 1523410 - DNA, 25 bp, Homo sapien
cctgtatgaattattttgttcaaaa

SEQ ID NO: 1523411 - DNA, 25 bp, Homo sapien
aaaagtcaagtatgacaaccattta

SEQ ID NO: 1523412 - DNA, 25 bp, Homo sapien
aagtcaagtatgacaaccatttaaa

SEQ ID NO: 1523413 - DNA, 25 bp, Homo sapien
gaaaaaagtcaagtatgacaaccat

SEQ ID NO: 1523414 - DNA, 25 bp, Homo sapien
aaaaaagtcaagtatgacaaccatt

SEQ ID NO: 1523415 - DNA, 25 bp, Homo sapien
tacctttgatgcaacaattatcaca

SEQ ID NO: 1523416 - DNA, 25 bp, Homo sapien
cctacctcatatatcactcaagagt

SEQ ID NO: 1523417 - DNA, 25 bp, Homo sapien
acaatactcttaacacctacctcat

SEQ ID NO: 1523418 - DNA, 25 bp, Homo sapien
tctatactcagaactcttgacttag

SEQ ID NO: 1523419 - DNA, 25 bp, Homo sapien
agtatcttcaggtcacgaagccaca

SEQ ID NO: 1523420 - DNA, 25 bp, Homo sapien
gccacacacgctgaggacacagagc

SEQ ID NO: 1523421 - DNA, 25 bp, Homo sapien
ctggagctccggcagcagagagaaa

SEQ ID NO: 1523422 - DNA, 25 bp, Homo sapien
ttagctatggatttcccagtatctt

SEQ ID NO: 1523423 - DNA, 25 bp, Homo sapien
gagaaaatagcaactgggaacccca

SEQ ID NO: 1523424 - DNA, 25 bp, Homo sapien
gagtacaccggaagattcccctcag

SEQ ID NO: 1523425 - DNA, 25 bp, Homo sapien
gacactctagctaacataaccatgg

SEQ ID NO: 1523426 - DNA, 25 bp, Homo sapien
cagaagctgagatccaatggacact

SEQ ID NO: 1523427 - DNA, 25 bp, Homo sapien
aattacctaccgcattttctcatgg

SEQ ID NO: 1523428 - DNA, 25 bp, Homo sapien
tgtttgaaatcacccagctataaaa

SEQ ID NO: 1523429 - DNA, 25 bp, Homo sapien
ccaggcagtatcaagtttcatctca

SEQ ID NO: 1523430 - DNA, 25 bp, Homo sapien
gcgcccggccaagttgcttatattg

SEQ ID NO: 1523431 - DNA, 25 bp, Homo sapien
cactgggctcaacctttaattttca

SEQ ID NO: 1523432 - DNA, 25 bp, Homo sapien
ctgggctcaacctttaattttcacg

SEQ ID NO: 1523433 - DNA, 25 bp, Homo sapien
taaataaatagcctgcccaccaaaa

SEQ ID NO: 1523434 - DNA, 25 bp, Homo sapien
aaccacacaaatttacagctgaatt

SEQ ID NO: 1523435 - DNA, 25 bp, Homo sapien
gatgtaaagtaagagctggtaccac

SEQ ID NO: 1523436 - DNA, 25 bp, Homo sapien
ccactcctactaagattatttcaaa

SEQ ID NO: 1523437 - DNA, 25 bp, Homo sapien
ctgaggaaacatgaatataattaga

SEQ ID NO: 1523438 - DNA, 25 bp, Homo sapien
tataattagagagttcgtcagggcc

SEQ ID NO: 1523439 - DNA, 25 bp, Homo sapien
ttagagagttcgtcagggccaagct

SEQ ID NO: 1523440 - DNA, 25 bp, Homo sapien
tgaggattataaccttggaacaatg

SEQ ID NO: 1523441 - DNA, 25 bp, Homo sapien
taattctgtcctcaccttaagagtc

SEQ ID NO: 1523442 - DNA, 25 bp, Homo sapien
aacggaacagttcctgtgaccacct

SEQ ID NO: 1523443 - DNA, 25 bp, Homo sapien
gaaaatatgggtgacactgacctct

SEQ ID NO: 1523444 - DNA, 25 bp, Homo sapien
gcaaattggccatgtaatcccgaca

SEQ ID NO: 1523445 - DNA, 25 bp, Homo sapien
tatgttgagttagaaggcacctctc

SEQ ID NO: 1523446 - DNA, 25 bp, Homo sapien
cagtaaactggagatcttgtgcaga

SEQ ID NO: 1523447 - DNA, 25 bp, Homo sapien
ggtataagatctacaacaccactgt

SEQ ID NO: 1523448 - DNA, 25 bp, Homo sapien
aatgccaatgtgtttggcccagaaa

SEQ ID NO: 1523449 - DNA, 25 bp, Homo sapien
tcctatacaaatcctgctgagcagt

SEQ ID NO: 1523450 - DNA, 25 bp, Homo sapien
cactttcctatacaaatcctgctga

SEQ ID NO: 1523451 - DNA, 25 bp, Homo sapien
tttcctatacaaatcctgctgagca

SEQ ID NO: 1523452 - DNA, 25 bp, Homo sapien
catcactttcctatacaaatcctgc

SEQ ID NO: 1523453 - DNA, 25 bp, Homo sapien
taattacctacctagtaccatgctt

SEQ ID NO: 1523454 - DNA, 25 bp, Homo sapien
agtgaaggatacagaccggctcaga

SEQ ID NO: 1523455 - DNA, 25 bp, Homo sapien
cttaattttgccacccagtattcat

SEQ ID NO: 1523456 - DNA, 25 bp, Homo sapien
ttaaaacaggcaccagaaactcact

SEQ ID NO: 1523457 - DNA, 25 bp, Homo sapien
gactaccgtactgtgtcccttcata

SEQ ID NO: 1523458 - DNA, 25 bp, Homo sapien
ctgggggtttgactaccgtactgtg

SEQ ID NO: 1523459 - DNA, 25 bp, Homo sapien
ccttcatattccagggatcttttcc

SEQ ID NO: 1523460 - DNA, 25 bp, Homo sapien
tttgactaccgtactgtgtcccttc

SEQ ID NO: 1523461 - DNA, 25 bp, Homo sapien
caactgtttcattcactctcaccta

SEQ ID NO: 1523462 - DNA, 25 bp, Homo sapien
atctatgtcaactgtttcattcact

SEQ ID NO: 1523463 - DNA, 25 bp, Homo sapien
catctatgtcaactgtttcattcac

SEQ ID NO: 1523464 - DNA, 25 bp, Homo sapien
tgtcaactgtttcattcactctcac

SEQ ID NO: 1523465 - DNA, 25 bp, Homo sapien
tcttatagtaatgaaaactacgatt

SEQ ID NO: 1523466 - DNA, 25 bp, Homo sapien
aatctatagattcagcaaacgacct

SEQ ID NO: 1523467 - DNA, 25 bp, Homo sapien
caataaacttcgaatagccaaatta

SEQ ID NO: 1523468 - DNA, 25 bp, Homo sapien
tcagcaaacgacctatcaaaattcc

SEQ ID NO: 1523469 - DNA, 25 bp, Homo sapien
actgcacaggaagagacgtttaact

SEQ ID NO: 1523470 - DNA, 25 bp, Homo sapien
taaccaaaaaccacgataagctgat

SEQ ID NO: 1523471 - DNA, 25 bp, Homo sapien
tggaccctaatgtagaaccagcagc

SEQ ID NO: 1523472 - DNA, 25 bp, Homo sapien
cagcagccttgcaaccaagttacaa

SEQ ID NO: 1523473 - DNA, 25 bp, Homo sapien
tatatacaagataagccataaccaa

SEQ ID NO: 1523474 - DNA, 25 bp, Homo sapien
acaagataagccataaccaatattg

SEQ ID NO: 1523475 - DNA, 25 bp, Homo sapien
attggggtcatatttatagataaac

SEQ ID NO: 1523476 - DNA, 25 bp, Homo sapien
taagccataaccaatattggggtca

SEQ ID NO: 1523477 - DNA, 25 bp, Homo sapien
acagaaattggaagggtgtttgcca

SEQ ID NO: 1523478 - DNA, 25 bp, Homo sapien
tccatgtttattgtacccgtattca

SEQ ID NO: 1523479 - DNA, 25 bp, Homo sapien
gccaaagggctgaaacaactcagat

SEQ ID NO: 1523480 - DNA, 25 bp, Homo sapien
aatattatgtcacctatatgccaga

SEQ ID NO: 1523481 - DNA, 25 bp, Homo sapien
gctgtcacagatggcggaagaaaac

SEQ ID NO: 1523482 - DNA, 25 bp, Homo sapien
aagctgtcacagatggcggaagaaa

SEQ ID NO: 1523483 - DNA, 25 bp, Homo sapien
cttgggacagatcaagaagctgtca

SEQ ID NO: 1523484 - DNA, 25 bp, Homo sapien
agaagctgtcacagatggcggaaga

SEQ ID NO: 1523485 - DNA, 25 bp, Homo sapien
ggccgattgcctagttgctaacgca

SEQ ID NO: 1523486 - DNA, 25 bp, Homo sapien
aagcgtcacaagcaacacacgtcga

SEQ ID NO: 1523487 - DNA, 25 bp, Homo sapien
caagattgatgctgaggacaacccc

SEQ ID NO: 1523488 - DNA, 25 bp, Homo sapien
tgcagatacagcattacctggaaag

SEQ ID NO: 1523489 - DNA, 25 bp, Homo sapien
gtttattgaaaatgctcagttacga

SEQ ID NO: 1523490 - DNA, 25 bp, Homo sapien
ttgaaaatgctcagttacgatttca

SEQ ID NO: 1523491 - DNA, 25 bp, Homo sapien
tattgaaaatgctcagttacgattt

SEQ ID NO: 1523492 - DNA, 25 bp, Homo sapien
acagtttattgaaaatgctcagtta

SEQ ID NO: 1523493 - DNA, 25 bp, Homo sapien
aagaatctttaatgcctggccctgg

SEQ ID NO: 1523494 - DNA, 25 bp, Homo sapien
agaatctttaatgcctggccctggg

SEQ ID NO: 1523495 - DNA, 25 bp, Homo sapien
ttggtagaaagatgtgccacattct

SEQ ID NO: 1523496 - DNA, 25 bp, Homo sapien
tatgcgtattaaggtttgagaatcg

SEQ ID NO: 1523497 - DNA, 25 bp, Homo sapien
tacactatgaatttgcttgtgccca

SEQ ID NO: 1523498 - DNA, 25 bp, Homo sapien
ttgtgcccagcgaggtgtgaggacc

SEQ ID NO: 1523499 - DNA, 25 bp, Homo sapien
tttttgtacactatgaatttgcttg

SEQ ID NO: 1523500 - DNA, 25 bp, Homo sapien
tctactaagatgtgaagaccgccta

SEQ ID NO: 1523501 - DNA, 25 bp, Homo sapien
atgtctactaagatgtgaagaccgc

SEQ ID NO: 1523502 - DNA, 25 bp, Homo sapien
taagatgtgaagaccgcctaaaagc

SEQ ID NO: 1523503 - DNA, 25 bp, Homo sapien
tactaagatgtgaagaccgcctaaa

SEQ ID NO: 1523504 - DNA, 25 bp, Homo sapien
ggaataggagcagtaaaggcctttg

SEQ ID NO: 1523505 - DNA, 25 bp, Homo sapien
aagggaataggagcagtaaaggcct

SEQ ID NO: 1523506 - DNA, 25 bp, Homo sapien
gatgagaactaattaaagcctttgc

SEQ ID NO: 1523507 - DNA, 25 bp, Homo sapien
agggaataggagcagtaaaggcctt

SEQ ID NO: 1523508 - DNA, 25 bp, Homo sapien
gtgtaggcagggttgagaagtggtt

SEQ ID NO: 1523509 - DNA, 25 bp, Homo sapien
taggcagggttgagaagtggttaaa

SEQ ID NO: 1523510 - DNA, 25 bp, Homo sapien
ttaaaagctttgtcacattcttcat

SEQ ID NO: 1523511 - DNA, 25 bp, Homo sapien
agtggttaaaagctttgtcacattc

SEQ ID NO: 1523512 - DNA, 25 bp, Homo sapien
tataagaatcagtaaaaagctttga

SEQ ID NO: 1523513 - DNA, 25 bp, Homo sapien
tttgtataatttatctcctttatga

SEQ ID NO: 1523514 - DNA, 25 bp, Homo sapien
gagacattcctcatatttgtagggt

SEQ ID NO: 1523515 - DNA, 25 bp, Homo sapien
cagtaaaaagctttgagacattcct

SEQ ID NO: 1523516 - DNA, 25 bp, Homo sapien
attggagggacaggctaaaggcttt

SEQ ID NO: 1523517 - DNA, 25 bp, Homo sapien
cagtaaattggagggacaggctaaa

SEQ ID NO: 1523518 - DNA, 25 bp, Homo sapien
taaattggagggacaggctaaaggc

SEQ ID NO: 1523519 - DNA, 25 bp, Homo sapien
tgtgcagtaaattggagggacaggc

SEQ ID NO: 1523520 - DNA, 25 bp, Homo sapien
tgaaaattggttaaaagctttgcca

SEQ ID NO: 1523521 - DNA, 25 bp, Homo sapien
tgagttatcttatgtttagtaaggt

SEQ ID NO: 1523522 - DNA, 25 bp, Homo sapien
agtatgagttatcttatgtttagta

SEQ ID NO: 1523523 - DNA, 25 bp, Homo sapien
tatcttatgtttagtaaggtttgaa

SEQ ID NO: 1523524 - DNA, 25 bp, Homo sapien
ggataaaggctttgccacattcttc

SEQ ID NO: 1523525 - DNA, 25 bp, Homo sapien
ctggataaaggctttgccacattct

SEQ ID NO: 1523526 - DNA, 25 bp, Homo sapien
taggagttgaggactggataaaggc

SEQ ID NO: 1523527 - DNA, 25 bp, Homo sapien
gactggataaaggctttgccacatt

SEQ ID NO: 1523528 - DNA, 25 bp, Homo sapien
tattttgttcaataaagtttgagga

SEQ ID NO: 1523529 - DNA, 25 bp, Homo sapien
ttctctccatcattaattatgttta

SEQ ID NO: 1523530 - DNA, 25 bp, Homo sapien
tggtttctctccatcattaattatg

SEQ ID NO: 1523531 - DNA, 25 bp, Homo sapien
tgttcaataaagtttgaggactggt

SEQ ID NO: 1523532 - DNA, 25 bp, Homo sapien
tgtgttaagaactgaggactagtta

SEQ ID NO: 1523533 - DNA, 25 bp, Homo sapien
aagaactgaggactagttaaagcct

SEQ ID NO: 1523534 - DNA, 25 bp, Homo sapien
tgtgtgttaagaactgaggactagt

SEQ ID NO: 1523535 - DNA, 25 bp, Homo sapien
ttaagaactgaggactagttaaagc

SEQ ID NO: 1523536 - DNA, 25 bp, Homo sapien
catttaaatactttgttacattctc

SEQ ID NO: 1523537 - DNA, 25 bp, Homo sapien
tttaaatactttgttacattctcca

SEQ ID NO: 1523538 - DNA, 25 bp, Homo sapien
aatattacctataatcaagtgtgac

SEQ ID NO: 1523539 - DNA, 25 bp, Homo sapien
gcagatattgacgtctttttcacag

SEQ ID NO: 1523540 - DNA, 25 bp, Homo sapien
gaatattcgaagtgtcgcttcctca

SEQ ID NO: 1523541 - DNA, 25 bp, Homo sapien
aaatgtggacaataagatctgatac

SEQ ID NO: 1523542 - DNA, 25 bp, Homo sapien
ttactcttaacacctaccttgtgca

SEQ ID NO: 1523543 - DNA, 25 bp, Homo sapien
tgttgaaacagttaccttcacacag

SEQ ID NO: 1523544 - DNA, 25 bp, Homo sapien
aaatgttgaaacagttaccttcaca

SEQ ID NO: 1523545 - DNA, 25 bp, Homo sapien
tattgaatgcacaataatatttacc

SEQ ID NO: 1523546 - DNA, 25 bp, Homo sapien
gaaacagttaccttcacacagaatt

SEQ ID NO: 1523547 - DNA, 25 bp, Homo sapien
cgtatgccatttggtaaggtggaaa

SEQ ID NO: 1523548 - DNA, 25 bp, Homo sapien
tggcaaaagagatgactacagatgt

SEQ ID NO: 1523549 - DNA, 25 bp, Homo sapien
gtatataaactcatgtacccacaaa

SEQ ID NO: 1523550 - DNA, 25 bp, Homo sapien
cagatgttagtccatgatgttacca

SEQ ID NO: 1523551 - DNA, 25 bp, Homo sapien
tttaagatatctactcaggactcag

SEQ ID NO: 1523552 - DNA, 25 bp, Homo sapien
caacatcaaagtcagtagcattcct

SEQ ID NO: 1523553 - DNA, 25 bp, Homo sapien
taagtacaaacttctactcacacaa

SEQ ID NO: 1523554 - DNA, 25 bp, Homo sapien
tatgtgtttccatgcagacaggaca

SEQ ID NO: 1523555 - DNA, 25 bp, Homo sapien
aaatgaaagaccctggtttgcccag

SEQ ID NO: 1523556 - DNA, 25 bp, Homo sapien
cattatcgccaggtttggactgcct

SEQ ID NO: 1523557 - DNA, 25 bp, Homo sapien
tagaagccatgccttgtaaaagcgt

SEQ ID NO: 1523558 - DNA, 25 bp, Homo sapien
ccaggaattcgggaagtagaagcca

SEQ ID NO: 1523559 - DNA, 25 bp, Homo sapien
tctggtttttataagtaacaggaca

SEQ ID NO: 1523560 - DNA, 25 bp, Homo sapien
ctttctgacaaactcaggaacccca

SEQ ID NO: 1523561 - DNA, 25 bp, Homo sapien
caccgagaccagctgatctttttga

SEQ ID NO: 1523562 - DNA, 25 bp, Homo sapien
cacaggtcagaaatcctgaaggtca

SEQ ID NO: 1523563 - DNA, 25 bp, Homo sapien
attttacaatgacctgtgacatcag

SEQ ID NO: 1523564 - DNA, 25 bp, Homo sapien
gacttagtgtacattattagcagta

SEQ ID NO: 1523565 - DNA, 25 bp, Homo sapien
tataattgctatattgccacagagg

SEQ ID NO: 1523566 - DNA, 25 bp, Homo sapien
tacagagaacgttgttgaatatgaa

SEQ ID NO: 1523567 - DNA, 25 bp, Homo sapien
tgtctcacccattggtctctccagt

SEQ ID NO: 1523568 - DNA, 25 bp, Homo sapien
ctgtctcacccattggtctctccag

SEQ ID NO: 1523569 - DNA, 25 bp, Homo sapien
agccagtggccaccttaatgaaatt

SEQ ID NO: 1523570 - DNA, 25 bp, Homo sapien
gtctcacccattggtctctccagtc

SEQ ID NO: 1523571 - DNA, 25 bp, Homo sapien
caagggtctcggtgattcggccaca

SEQ ID NO: 1523572 - DNA, 25 bp, Homo sapien
tgaaatgactggagccaagagcctg

SEQ ID NO: 1523573 - DNA, 25 bp, Homo sapien
tcacgctcgcggtattcagtgcaag

SEQ ID NO: 1523574 - DNA, 25 bp, Homo sapien
gagctctatccattaagggcgctgg

SEQ ID NO: 1523575 - DNA, 25 bp, Homo sapien
tcaggagccccacctgtgctggcat

SEQ ID NO: 1523576 - DNA, 25 bp, Homo sapien
ctcaggagccccacctgtgctggca

SEQ ID NO: 1523577 - DNA, 25 bp, Homo sapien
cctcaggagccccacctgtgctggc

SEQ ID NO: 1523578 - DNA, 25 bp, Homo sapien
cttgcagagatgtctacctgcttct

SEQ ID NO: 1523579 - DNA, 25 bp, Homo sapien
atgagccatccctggcaaggaccgg

SEQ ID NO: 1523580 - DNA, 25 bp, Homo sapien
cactgcttctgtggcgagatatcag

SEQ ID NO: 1523581 - DNA, 25 bp, Homo sapien
agacacagcctgatgggatgtagcc

SEQ ID NO: 1523582 - DNA, 25 bp, Homo sapien
ctgctcattagcactgccttgtgtt

SEQ ID NO: 1523583 - DNA, 25 bp, Homo sapien
ctgccttgtgttggttactcaggac

SEQ ID NO: 1523584 - DNA, 25 bp, Homo sapien
tgctcattagcactgccttgtgttg

SEQ ID NO: 1523585 - DNA, 25 bp, Homo sapien
ttagcactgccttgtgttggttact

SEQ ID NO: 1523586 - DNA, 25 bp, Homo sapien
catgaacagcgtgaggtagcaggca

SEQ ID NO: 1523587 - DNA, 25 bp, Homo sapien
acatgaacagcgtgaggtagcaggc

SEQ ID NO: 1523588 - DNA, 25 bp, Homo sapien
caaacatgaacagcgtgaggtagca

SEQ ID NO: 1523589 - DNA, 25 bp, Homo sapien
catcaaacatgaacagcgtgaggta

SEQ ID NO: 1523590 - DNA, 25 bp, Homo sapien
gacaatggtgctgccccctttccag

SEQ ID NO: 1523591 - DNA, 25 bp, Homo sapien
aggacaatggtgctgccccctttcc

SEQ ID NO: 1523592 - DNA, 25 bp, Homo sapien
ctaggacaatggtgctgcccccttt

SEQ ID NO: 1523593 - DNA, 25 bp, Homo sapien
gtgctgccccctttccagcactcac

SEQ ID NO: 1523594 - DNA, 25 bp, Homo sapien
gtaggcaagagaagtagcaccggca

SEQ ID NO: 1523595 - DNA, 25 bp, Homo sapien
cccagagctagtctccgtttaaggg

SEQ ID NO: 1523596 - DNA, 25 bp, Homo sapien
catgttagggctctgacagtaggca

SEQ ID NO: 1523597 - DNA, 25 bp, Homo sapien
cagcctgggcctatagggtccctaa

SEQ ID NO: 1523598 - DNA, 25 bp, Homo sapien
agtaacccatgattcagccactgca

SEQ ID NO: 1523599 - DNA, 25 bp, Homo sapien
aaatactcgggattgcgggtgcaga

SEQ ID NO: 1523600 - DNA, 25 bp, Homo sapien
gggattctgccgatgacccgcctgt

SEQ ID NO: 1523601 - DNA, 25 bp, Homo sapien
gagacaggcaactaaaactctggca

SEQ ID NO: 1523602 - DNA, 25 bp, Homo sapien
tgtggtcctggctgcgagtccagcc

SEQ ID NO: 1523603 - DNA, 25 bp, Homo sapien
tgtgggccacaagccgtgccgtcag

SEQ ID NO: 1523604 - DNA, 25 bp, Homo sapien
ggacaagagaactctagaaaggtgg

SEQ ID NO: 1523605 - DNA, 25 bp, Homo sapien
ctgtgggccacaagccgtgccgtca

SEQ ID NO: 1523606 - DNA, 25 bp, Homo sapien
agagaactctagaaaggtggccgcc

SEQ ID NO: 1523607 - DNA, 25 bp, Homo sapien
caagggacgcgccagagctctggca

SEQ ID NO: 1523608 - DNA, 25 bp, Homo sapien
atgccgggagcacggtaacagcctc

SEQ ID NO: 1523609 - DNA, 25 bp, Homo sapien
agccctacacgccagagctatgact

SEQ ID NO: 1523610 - DNA, 25 bp, Homo sapien
agctcatgccgggagcacggtaaca

SEQ ID NO: 1523611 - DNA, 25 bp, Homo sapien
atgcctggtgggttccgagggtcgg

SEQ ID NO: 1523612 - DNA, 25 bp, Homo sapien
gttccgagggtcgggcctccgcagc

SEQ ID NO: 1523613 - DNA, 25 bp, Homo sapien
agaaatcggccagagcctcaaacgg

SEQ ID NO: 1523614 - DNA, 25 bp, Homo sapien
cagagcctcaaacggccaggacaca

SEQ ID NO: 1523615 - DNA, 25 bp, Homo sapien
gggaaaagaaatcggccagagcctc

SEQ ID NO: 1523616 - DNA, 25 bp, Homo sapien
cttgggaaaagaaatcggccagagc

SEQ ID NO: 1523617 - DNA, 25 bp, Homo sapien
gcacaggacggtccctgattctcca

SEQ ID NO: 1523618 - DNA, 25 bp, Homo sapien
agcatgtggccccttcggcgctcgg

SEQ ID NO: 1523619 - DNA, 25 bp, Homo sapien
gaagatggcacaggacggtccctga

SEQ ID NO: 1523620 - DNA, 25 bp, Homo sapien
ttcggcgctcggaaagcccacgggc

SEQ ID NO: 1523621 - DNA, 25 bp, Homo sapien
agccagggcgacgagccacccgcag

SEQ ID NO: 1523622 - DNA, 25 bp, Homo sapien
tcccagccagggcgacgagccaccc

SEQ ID NO: 1523623 - DNA, 25 bp, Homo sapien
cacgctcccacagcggcgtcccagc

SEQ ID NO: 1523624 - DNA, 25 bp, Homo sapien
cagccagggcgacgagccacccgca

SEQ ID NO: 1523625 - DNA, 25 bp, Homo sapien
cccgctgctgagtgggagaggccca

SEQ ID NO: 1523626 - DNA, 25 bp, Homo sapien
tcctccccgctgctgagtgggagag

SEQ ID NO: 1523627 - DNA, 25 bp, Homo sapien
ctaagacggggaagagctcaagggg

SEQ ID NO: 1523628 - DNA, 25 bp, Homo sapien
gctgctgagtgggagaggcccagga

SEQ ID NO: 1523629 - DNA, 25 bp, Homo sapien
cgggtccacactacgcgccaagtgt

SEQ ID NO: 1523630 - DNA, 25 bp, Homo sapien
ctgagcccgtccgtctggagtataa

SEQ ID NO: 1523631 - DNA, 25 bp, Homo sapien
agtgtggccgagtgtggcgcgcggg

SEQ ID NO: 1523632 - DNA, 25 bp, Homo sapien
tggagtataactccgccaaccttcc

SEQ ID NO: 1523633 - DNA, 25 bp, Homo sapien
ttggggctgacatctggtcgaccca

SEQ ID NO: 1523634 - DNA, 25 bp, Homo sapien
acccagcggctggacagagaagcca

SEQ ID NO: 1523635 - DNA, 25 bp, Homo sapien
acatctggtcgacccagcggctgga

SEQ ID NO: 1523636 - DNA, 25 bp, Homo sapien
cagagaagccagccggtggcgaggg

SEQ ID NO: 1523637 - DNA, 25 bp, Homo sapien
gtccaagactatccggggccaacat

SEQ ID NO: 1523638 - DNA, 25 bp, Homo sapien
ggagtccaagactatccggggccaa

SEQ ID NO: 1523639 - DNA, 25 bp, Homo sapien
cacggaggatacctggaacccagga

SEQ ID NO: 1523640 - DNA, 25 bp, Homo sapien
ttttggaggccacggaggatacctg

SEQ ID NO: 1523641 - DNA, 25 bp, Homo sapien
atgtcacaagatcttctgtaggcag

SEQ ID NO: 1523642 - DNA, 25 bp, Homo sapien
tatgtcacaagatcttctgtaggca

SEQ ID NO: 1523643 - DNA, 25 bp, Homo sapien
gtcacaatccctttttgggtagaga

SEQ ID NO: 1523644 - DNA, 25 bp, Homo sapien
ttgggtagagaccaaacagtagaga

SEQ ID NO: 1523645 - DNA, 25 bp, Homo sapien
gttcttgacagagtgatatgtcaca

SEQ ID NO: 1523646 - DNA, 25 bp, Homo sapien
cttctaggttcttgacagagtgata

SEQ ID NO: 1523647 - DNA, 25 bp, Homo sapien
ggtgctccattaggaatatgctaca

SEQ ID NO: 1523648 - DNA, 25 bp, Homo sapien
cattaggaatatgctacaatcccct

SEQ ID NO: 1523649 - DNA, 25 bp, Homo sapien
gctccattaggaatatgctacaatc

SEQ ID NO: 1523650 - DNA, 25 bp, Homo sapien
cttggtgctccattaggaatatgct

SEQ ID NO: 1523651 - DNA, 25 bp, Homo sapien
cagcaatgcggcacaatcccatctg

SEQ ID NO: 1523652 - DNA, 25 bp, Homo sapien
aatcccatctgtacgctgggcccaa

SEQ ID NO: 1523653 - DNA, 25 bp, Homo sapien
tgctgggcagaggtgtatgtaacaa

SEQ ID NO: 1523654 - DNA, 25 bp, Homo sapien
gctgggcccaagcagaagagtcaaa

SEQ ID NO: 1523655 - DNA, 25 bp, Homo sapien
ttcagtgatttgccataatctccca

SEQ ID NO: 1523656 - DNA, 25 bp, Homo sapien
cagtgatttgccataatctcccact

SEQ ID NO: 1523657 - DNA, 25 bp, Homo sapien
tgatttgccataatctcccactttt

SEQ ID NO: 1523658 - DNA, 25 bp, Homo sapien
gtgatttgccataatctcccacttt

SEQ ID NO: 1523659 - DNA, 25 bp, Homo sapien
aatgtcacatcttctaggtcatggg

SEQ ID NO: 1523660 - DNA, 25 bp, Homo sapien
taaatgtcacatcttctaggtcatg

SEQ ID NO: 1523661 - DNA, 25 bp, Homo sapien
atgtcacatcttctaggtcatgggt

SEQ ID NO: 1523662 - DNA, 25 bp, Homo sapien
aataaatgtcacatcttctaggtca

SEQ ID NO: 1523663 - DNA, 25 bp, Homo sapien
ctcataatctgctgagggaagaagc

SEQ ID NO: 1523664 - DNA, 25 bp, Homo sapien
gagtgctcagccagggatatgttac

SEQ ID NO: 1523665 - DNA, 25 bp, Homo sapien
ggatttcagccatggatatctcata

SEQ ID NO: 1523666 - DNA, 25 bp, Homo sapien
cacctgagtgctcagccagggatat

SEQ ID NO: 1523667 - DNA, 25 bp, Homo sapien
taagtgcaaggttcagtgagatgtc

SEQ ID NO: 1523668 - DNA, 25 bp, Homo sapien
cctctacgagcagcaccaagacaga

SEQ ID NO: 1523669 - DNA, 25 bp, Homo sapien
aatgtcctctacgagcagcaccaag

SEQ ID NO: 1523670 - DNA, 25 bp, Homo sapien
atcaactaagtgcaaggttcagtga

SEQ ID NO: 1523671 - DNA, 25 bp, Homo sapien
tgagccgagcaatacgtcacagtgc

SEQ ID NO: 1523672 - DNA, 25 bp, Homo sapien
cacatcgcctgatttctgggccaga

SEQ ID NO: 1523673 - DNA, 25 bp, Homo sapien
tcacggtctcccctatgagcaaagc

SEQ ID NO: 1523674 - DNA, 25 bp, Homo sapien
tcacacttgcttggtactgggccaa

SEQ ID NO: 1523675 - DNA, 25 bp, Homo sapien
gcagtatgccacaatctcctttgtg

SEQ ID NO: 1523676 - DNA, 25 bp, Homo sapien
ccttctaaggacatagccaaagcag

SEQ ID NO: 1523677 - DNA, 25 bp, Homo sapien
atgccttctaaggacatagccaaag

SEQ ID NO: 1523678 - DNA, 25 bp, Homo sapien
gctttgtccataggagagattgcag

SEQ ID NO: 1523679 - DNA, 25 bp, Homo sapien
tctaagtttagctacaagtgccagt

SEQ ID NO: 1523680 - DNA, 25 bp, Homo sapien
cattatcacaactgtgagctgggct

SEQ ID NO: 1523681 - DNA, 25 bp, Homo sapien
ctgatttgtcagtatgagtgtcatt

SEQ ID NO: 1523682 - DNA, 25 bp, Homo sapien
caagtgccagtatctctcctactga

SEQ ID NO: 1523683 - DNA, 25 bp, Homo sapien
cagatagatcataaagcttcctgta

SEQ ID NO: 1523684 - DNA, 25 bp, Homo sapien
agatagatcataaagcttcctgtag

SEQ ID NO: 1523685 - DNA, 25 bp, Homo sapien
gatagatcataaagcttcctgtagg

SEQ ID NO: 1523686 - DNA, 25 bp, Homo sapien
gaccagccgtatttcaacagacaca

SEQ ID NO: 1523687 - DNA, 25 bp, Homo sapien
ccagtgaaaagacgagagtcataac

SEQ ID NO: 1523688 - DNA, 25 bp, Homo sapien
ctttttggcaggttccagtgaaaag

SEQ ID NO: 1523689 - DNA, 25 bp, Homo sapien
gttggaccagccgtatttcaacaga

SEQ ID NO: 1523690 - DNA, 25 bp, Homo sapien
tcatgtgtcataggcggtcatagca

SEQ ID NO: 1523691 - DNA, 25 bp, Homo sapien
tagcaaggcctatgcaggagagtca

SEQ ID NO: 1523692 - DNA, 25 bp, Homo sapien
catattacttatgtgctgggtccag

SEQ ID NO: 1523693 - DNA, 25 bp, Homo sapien
gagctccccaactgctaggtgttga

SEQ ID NO: 1523694 - DNA, 25 bp, Homo sapien
agcctattaggtaacagaaatgtac

SEQ ID NO: 1523695 - DNA, 25 bp, Homo sapien
taagtatcttgatcattagagacct

SEQ ID NO: 1523696 - DNA, 25 bp, Homo sapien
caggaacaataccttatttaacagt

SEQ ID NO: 1523697 - DNA, 25 bp, Homo sapien
gagaaagcttttatactatcagaaa

SEQ ID NO: 1523698 - DNA, 25 bp, Homo sapien
catgggcaactattagcaactgcac

SEQ ID NO: 1523699 - DNA, 25 bp, Homo sapien
tatctacatggagacggccatctgc

SEQ ID NO: 1523700 - DNA, 25 bp, Homo sapien
taggtggcaggcagattcaatctct

SEQ ID NO: 1523701 - DNA, 25 bp, Homo sapien
taataccggctgtagttctccatgg

SEQ ID NO: 1523702 - DNA, 25 bp, Homo sapien
tatttagactcgaatctcactgtga

SEQ ID NO: 1523703 - DNA, 25 bp, Homo sapien
gctttaggctacaactaatttaaca

SEQ ID NO: 1523704 - DNA, 25 bp, Homo sapien
cagaactgtgggtttgtaaagtgga

SEQ ID NO: 1523705 - DNA, 25 bp, Homo sapien
tattacagcttaagatatgtcccat

SEQ ID NO: 1523706 - DNA, 25 bp, Homo sapien
cacagccacatgttggtaaaatttt

SEQ ID NO: 1523707 - DNA, 25 bp, Homo sapien
acctatggatccagagtaggctcag

SEQ ID NO: 1523708 - DNA, 25 bp, Homo sapien
agaaaatcaaagctcaataacatta

SEQ ID NO: 1523709 - DNA, 25 bp, Homo sapien
tcatgatttgcaaatcgggtaacct

SEQ ID NO: 1523710 - DNA, 25 bp, Homo sapien
gcattactcaacattgtcttaggag

SEQ ID NO: 1523711 - DNA, 25 bp, Homo sapien
tatttctgcattactcaacattgtc

SEQ ID NO: 1523712 - DNA, 25 bp, Homo sapien
tctgcattactcaacattgtcttag

SEQ ID NO: 1523713 - DNA, 25 bp, Homo sapien
tgtatttctgcattactcaacattg

SEQ ID NO: 1523714 - DNA, 25 bp, Homo sapien
gctctggctgcagcaagagccaaac

SEQ ID NO: 1523715 - DNA, 25 bp, Homo sapien
gcaagagccaaacgccccgccatat

SEQ ID NO: 1523716 - DNA, 25 bp, Homo sapien
aatgaagacgagacctggagctctg

SEQ ID NO: 1523717 - DNA, 25 bp, Homo sapien
gggcctctaagaacaaaggacacag

SEQ ID NO: 1523718 - DNA, 25 bp, Homo sapien
ggggatgtcagactcggcactctca

SEQ ID NO: 1523719 - DNA, 25 bp, Homo sapien
gggagacctaagtccgccacggcca

SEQ ID NO: 1523720 - DNA, 25 bp, Homo sapien
ggccacttctcacggttccgaccag

SEQ ID NO: 1523721 - DNA, 25 bp, Homo sapien
gctgactgccgggagacctaagtcc

SEQ ID NO: 1523722 - DNA, 25 bp, Homo sapien
cagggctacacgtcaggcacagtca

SEQ ID NO: 1523723 - DNA, 25 bp, Homo sapien
gagagactgcggaattgcgcgtgca

SEQ ID NO: 1523724 - DNA, 25 bp, Homo sapien
gagctccccagacagggctacacgt

SEQ ID NO: 1523725 - DNA, 25 bp, Homo sapien
gcggaattgcgcgtgcagagctccc

SEQ ID NO: 1523726 - DNA, 25 bp, Homo sapien
tctcgaatgccggacctcagtgatc

SEQ ID NO: 1523727 - DNA, 25 bp, Homo sapien
cgcccggccactcccatagattttt

SEQ ID NO: 1523728 - DNA, 25 bp, Homo sapien
gagagaatgggaactgggaacccca

SEQ ID NO: 1523729 - DNA, 25 bp, Homo sapien
atgaacccgcatcccgagtcactat

SEQ ID NO: 1523730 - DNA, 25 bp, Homo sapien
cagtgtcagaagattattccttgct

SEQ ID NO: 1523731 - DNA, 25 bp, Homo sapien
ttttttacaatacagtgtcagaaga

SEQ ID NO: 1523732 - DNA, 25 bp, Homo sapien
tacaatacagtgtcagaagattatt

SEQ ID NO: 1523733 - DNA, 25 bp, Homo sapien
tacagtgtcagaagattattccttg

SEQ ID NO: 1523734 - DNA, 25 bp, Homo sapien
gttgtcctatgggagaaaatgaccc

SEQ ID NO: 1523735 - DNA, 25 bp, Homo sapien
ttagacagtcttgcagacatagcca

SEQ ID NO: 1523736 - DNA, 25 bp, Homo sapien
tattcacagacagtactggaaccca

SEQ ID NO: 1523737 - DNA, 25 bp, Homo sapien
gacatagccatgactgatatcttgg

SEQ ID NO: 1523738 - DNA, 25 bp, Homo sapien
acaaattgtagagaatcaaggggtc

SEQ ID NO: 1523739 - DNA, 25 bp, Homo sapien
aattgtagagaatcaaggggtcaga

SEQ ID NO: 1523740 - DNA, 25 bp, Homo sapien
ttcacaaattgtagagaatcaaggg

SEQ ID NO: 1523741 - DNA, 25 bp, Homo sapien
gaccagcaatgtggcccaaagaaag

SEQ ID NO: 1523742 - DNA, 25 bp, Homo sapien
taaaaaatcatgtagtaggccgggc

SEQ ID NO: 1523743 - DNA, 25 bp, Homo sapien
caaaaataggctggcgcgacagtgt

SEQ ID NO: 1523744 - DNA, 25 bp, Homo sapien
aatcatgtagtaggccgggcaaggt

SEQ ID NO: 1523745 - DNA, 25 bp, Homo sapien
acaaaaataggctggcgcgacagtg

SEQ ID NO: 1523746 - DNA, 25 bp, Homo sapien
caagttttaatttccgtgtcagagt

SEQ ID NO: 1523747 - DNA, 25 bp, Homo sapien
agcaaaattactcaatgttcatata

SEQ ID NO: 1523748 - DNA, 25 bp, Homo sapien
acaatgcttacatttcatacctcaa

SEQ ID NO: 1523749 - DNA, 25 bp, Homo sapien
ctcaagttttaatttccgtgtcaga

SEQ ID NO: 1523750 - DNA, 25 bp, Homo sapien
tgttacctaggcttgctctagtgcc

SEQ ID NO: 1523751 - DNA, 25 bp, Homo sapien
aaatgctcacttagaccacaacttg

SEQ ID NO: 1523752 - DNA, 25 bp, Homo sapien
catacacttctaaagagggtgggct

SEQ ID NO: 1523753 - DNA, 25 bp, Homo sapien
ttactgcctctaggataagtcagcc

SEQ ID NO: 1523754 - DNA, 25 bp, Homo sapien
cacaggcagaagaatcaagacttgc

SEQ ID NO: 1523755 - DNA, 25 bp, Homo sapien
atcaagacttgcaaaaaaagtccac

SEQ ID NO: 1523756 - DNA, 25 bp, Homo sapien
caggcagaagaatcaagacttgcaa

SEQ ID NO: 1523757 - DNA, 25 bp, Homo sapien
cccacaggcagaagaatcaagactt

SEQ ID NO: 1523758 - DNA, 25 bp, Homo sapien
tttctatataagttctgttgtgctg

SEQ ID NO: 1523759 - DNA, 25 bp, Homo sapien
cacatttctatataagttctgttgt

SEQ ID NO: 1523760 - DNA, 25 bp, Homo sapien
catttctatataagttctgttgtgc

SEQ ID NO: 1523761 - DNA, 25 bp, Homo sapien
tctatataagttctgttgtgctgtg

SEQ ID NO: 1523762 - DNA, 25 bp, Homo sapien
accatttcatgtcgcttcatcttgc

SEQ ID NO: 1523763 - DNA, 25 bp, Homo sapien
caccatttcatgtcgcttcatcttg

SEQ ID NO: 1523764 - DNA, 25 bp, Homo sapien
catttcatgtcgcttcatcttgcag

SEQ ID NO: 1523765 - DNA, 25 bp, Homo sapien
atttcatgtcgcttcatcttgcagg

SEQ ID NO: 1523766 - DNA, 25 bp, Homo sapien
atgaatattcttcaggactttgctc

SEQ ID NO: 1523767 - DNA, 25 bp, Homo sapien
aatattcttcaggactttgctctgt

SEQ ID NO: 1523768 - DNA, 25 bp, Homo sapien
ttgtagcttggtcacaaggctgcgg

SEQ ID NO: 1523769 - DNA, 25 bp, Homo sapien
gttgtagcttggtcacaaggctgcg

SEQ ID NO: 1523770 - DNA, 25 bp, Homo sapien
ccaaaagtcttcagcaaaatgagaa

SEQ ID NO: 1523771 - DNA, 25 bp, Homo sapien
ctggccaaaagtcttcagcaaaatg

SEQ ID NO: 1523772 - DNA, 25 bp, Homo sapien
tcttcagcaaaatgagaacacacaa

SEQ ID NO: 1523773 - DNA, 25 bp, Homo sapien
ggccaaaagtcttcagcaaaatgag

SEQ ID NO: 1523774 - DNA, 25 bp, Homo sapien
taagttctcatgtccacgtttatca

SEQ ID NO: 1523775 - DNA, 25 bp, Homo sapien
ttgtaagttctcatgtccacgttta

SEQ ID NO: 1523776 - DNA, 25 bp, Homo sapien
gttctcatgtccacgtttatcatat

SEQ ID NO: 1523777 - DNA, 25 bp, Homo sapien
cgtttatcatatctcctcagtgtca

SEQ ID NO: 1523778 - DNA, 25 bp, Homo sapien
gctctgggtaagtgtcaaacattgg

SEQ ID NO: 1523779 - DNA, 25 bp, Homo sapien
taaaagacttttacatatatatcac

SEQ ID NO: 1523780 - DNA, 25 bp, Homo sapien
aaagacttttacatatatatcacag

SEQ ID NO: 1523781 - DNA, 25 bp, Homo sapien
tatatcacagtgatacattttgctc

SEQ ID NO: 1523782 - DNA, 25 bp, Homo sapien
ctttacatctgtaggtattctctct

SEQ ID NO: 1523783 - DNA, 25 bp, Homo sapien
ctgattaaaggcattgccaaattct

SEQ ID NO: 1523784 - DNA, 25 bp, Homo sapien
taagggttgagtagtggttaaatgc

SEQ ID NO: 1523785 - DNA, 25 bp, Homo sapien
tcacatctgtagtgtttctcaccaa

SEQ ID NO: 1523786 - DNA, 25 bp, Homo sapien
gggcttctctccagaatgaattctc

SEQ ID NO: 1523787 - DNA, 25 bp, Homo sapien
ctaaaggttttgccacattcatcac

SEQ ID NO: 1523788 - DNA, 25 bp, Homo sapien
atttgtagggcttctctccagaatg

SEQ ID NO: 1523789 - DNA, 25 bp, Homo sapien
tgtagggcttctctccagaatgaat

SEQ ID NO: 1523790 - DNA, 25 bp, Homo sapien
gtattctcttatggctagtaagggt

SEQ ID NO: 1523791 - DNA, 25 bp, Homo sapien
atgtattctcttatggctagtaagg

SEQ ID NO: 1523792 - DNA, 25 bp, Homo sapien
ttatgtttagtaaaggttgaggata

SEQ ID NO: 1523793 - DNA, 25 bp, Homo sapien
atgtttagtaaaggttgaggatatg

SEQ ID NO: 1523794 - DNA, 25 bp, Homo sapien
tgagtaagtcttgaggaccgattaa

SEQ ID NO: 1523795 - DNA, 25 bp, Homo sapien
ttatgactgttaaggtttgaggact

SEQ ID NO: 1523796 - DNA, 25 bp, Homo sapien
ttttcttgtcttgagtaagtgttga

SEQ ID NO: 1523797 - DNA, 25 bp, Homo sapien
tagtaagtgtagaggaataggtaaa

SEQ ID NO: 1523798 - DNA, 25 bp, Homo sapien
caccacacccatcctatgaattttc

SEQ ID NO: 1523799 - DNA, 25 bp, Homo sapien
tttcttatgttgagtaagtcttgaa

SEQ ID NO: 1523800 - DNA, 25 bp, Homo sapien
cacacccatcctatgaattttctta

SEQ ID NO: 1523801 - DNA, 25 bp, Homo sapien
cttatgttgagtaagtcttgaagac

SEQ ID NO: 1523802 - DNA, 25 bp, Homo sapien
gagcattagttaaaacgagttttgc

SEQ ID NO: 1523803 - DNA, 25 bp, Homo sapien
gtctcattcactttaaaggatgata

SEQ ID NO: 1523804 - DNA, 25 bp, Homo sapien
aactctctgttgttaagatgtgaac

SEQ ID NO: 1523805 - DNA, 25 bp, Homo sapien
tttctacaagattgtttgacagtaa

SEQ ID NO: 1523806 - DNA, 25 bp, Homo sapien
taaatgcactataaccctctttaca

SEQ ID NO: 1523807 - DNA, 25 bp, Homo sapien
agtaaatgcactataaccctcttta

SEQ ID NO: 1523808 - DNA, 25 bp, Homo sapien
caagtaaatgcactataaccctctt

SEQ ID NO: 1523809 - DNA, 25 bp, Homo sapien
aagtaaatgcactataaccctcttt

SEQ ID NO: 1523810 - DNA, 25 bp, Homo sapien
gataaccatgcagtcaatagcaatt

SEQ ID NO: 1523811 - DNA, 25 bp, Homo sapien
tacagaagaggccataatttccacc

SEQ ID NO: 1523812 - DNA, 25 bp, Homo sapien
taatgagtctatatgtgatgcagca

SEQ ID NO: 1523813 - DNA, 25 bp, Homo sapien
gatgctattccactatgttactaaa

SEQ ID NO: 1523814 - DNA, 25 bp, Homo sapien
aattaagggcctagcatgagtacca

SEQ ID NO: 1523815 - DNA, 25 bp, Homo sapien
aaaaaattaagggcctagcatgagt

SEQ ID NO: 1523816 - DNA, 25 bp, Homo sapien
aaattaagggcctagcatgagtacc

SEQ ID NO: 1523817 - DNA, 25 bp, Homo sapien
aaaattaagggcctagcatgagtac

SEQ ID NO: 1523818 - DNA, 25 bp, Homo sapien
tgttgtgttccgctgtcgttttgct

SEQ ID NO: 1523819 - DNA, 25 bp, Homo sapien
ctcctcacaccctgtatgcatgttc

SEQ ID NO: 1523820 - DNA, 25 bp, Homo sapien
ctcacaccctgtatgcatgttctgt

SEQ ID NO: 1523821 - DNA, 25 bp, Homo sapien
gtcgttttgcttgctgactccacag

SEQ ID NO: 1523822 - DNA, 25 bp, Homo sapien
ttttccctgcagatgtctctcctgc

SEQ ID NO: 1523823 - DNA, 25 bp, Homo sapien
tccctgcagatgtctctcctgctga

SEQ ID NO: 1523824 - DNA, 25 bp, Homo sapien
tctgggttacatttttttccctgca

SEQ ID NO: 1523825 - DNA, 25 bp, Homo sapien
ttttttccctgcagatgtctctcct

SEQ ID NO: 1523826 - DNA, 25 bp, Homo sapien
aacgaacctaatagacatctccaga

SEQ ID NO: 1523827 - DNA, 25 bp, Homo sapien
ttaaggcagaaatacgagtgcctgc

SEQ ID NO: 1523828 - DNA, 25 bp, Homo sapien
cagctctggaccaaacgaacctaat

SEQ ID NO: 1523829 - DNA, 25 bp, Homo sapien
taacaagaccgaaaattagcaagga

SEQ ID NO: 1523830 - DNA, 25 bp, Homo sapien
gtgatagtaatagttaccaaaacaa

SEQ ID NO: 1523831 - DNA, 25 bp, Homo sapien
gcaaaatgtgaatggtgactattca

SEQ ID NO: 1523832 - DNA, 25 bp, Homo sapien
tggtgactattcagaccatctgctc

SEQ ID NO: 1523833 - DNA, 25 bp, Homo sapien
tatattcaccctatgtaattaagtg

SEQ ID NO: 1523834 - DNA, 25 bp, Homo sapien
aagctgttaatttcaacctgcaaga

SEQ ID NO: 1523835 - DNA, 25 bp, Homo sapien
tcgctaccctttaaccttctgttga

SEQ ID NO: 1523836 - DNA, 25 bp, Homo sapien
tgttgaagggccactgagaagctgt

SEQ ID NO: 1523837 - DNA, 25 bp, Homo sapien
gttgaagggccactgagaagctgtt

SEQ ID NO: 1523838 - DNA, 25 bp, Homo sapien
agcccacaaatcaacatatcccaag

SEQ ID NO: 1523839 - DNA, 25 bp, Homo sapien
ggtagttgtaacaacattgctgtgt

SEQ ID NO: 1523840 - DNA, 25 bp, Homo sapien
tctcttcagattattagatgcgaat

SEQ ID NO: 1523841 - DNA, 25 bp, Homo sapien
ccaaggattaacaattaacaggtag

SEQ ID NO: 1523842 - DNA, 25 bp, Homo sapien
aggtgttgattatgccagtgtggct

SEQ ID NO: 1523843 - DNA, 25 bp, Homo sapien
gttctcagtgccctggtgtccccca

SEQ ID NO: 1523844 - DNA, 25 bp, Homo sapien
caacaggaggggacaatggatgttc

SEQ ID NO: 1523845 - DNA, 25 bp, Homo sapien
aagaaggtgttgattatgccagtgt

SEQ ID NO: 1523846 - DNA, 25 bp, Homo sapien
attcatgggtgtttctccaagaggg

SEQ ID NO: 1523847 - DNA, 25 bp, Homo sapien
atagacaaggtaaagaatcaagtgc

SEQ ID NO: 1523848 - DNA, 25 bp, Homo sapien
tagacaaggtaaagaatcaagtgct

SEQ ID NO: 1523849 - DNA, 25 bp, Homo sapien
atcattcatgggtgtttctccaaga

SEQ ID NO: 1523850 - DNA, 25 bp, Homo sapien
gtccatacatcatatccctcgacat

SEQ ID NO: 1523851 - DNA, 25 bp, Homo sapien
ggtccatacatcatatccctcgaca

SEQ ID NO: 1523852 - DNA, 25 bp, Homo sapien
cagccctccttaaagctacagtgag

SEQ ID NO: 1523853 - DNA, 25 bp, Homo sapien
acagctgcggacctgagcgcctaga

SEQ ID NO: 1523854 - DNA, 25 bp, Homo sapien
agaactgtctggaacccgtcccagg

SEQ ID NO: 1523855 - DNA, 25 bp, Homo sapien
cttaaagctacagtgagagggccct

SEQ ID NO: 1523856 - DNA, 25 bp, Homo sapien
gcaggcgctcgttgcagaaggcccc

SEQ ID NO: 1523857 - DNA, 25 bp, Homo sapien
tggagtcccacgcaggcgctcgttg

SEQ ID NO: 1523858 - DNA, 25 bp, Homo sapien
ccacgcaggcgctcgttgcagaagg

SEQ ID NO: 1523859 - DNA, 25 bp, Homo sapien
agaaggccccgcgttgtccccagcg

SEQ ID NO: 1523860 - DNA, 25 bp, Homo sapien
ggtgaggtttcagcgcgggtagcca

SEQ ID NO: 1523861 - DNA, 25 bp, Homo sapien
ctggagcgcagtccgtttgcagccg

SEQ ID NO: 1523862 - DNA, 25 bp, Homo sapien
cgcagtccgtttgcagccggcggca

SEQ ID NO: 1523863 - DNA, 25 bp, Homo sapien
gagcgcagtccgtttgcagccggcg

SEQ ID NO: 1523864 - DNA, 25 bp, Homo sapien
tagaaaggccccgctcctgtccgga

SEQ ID NO: 1523865 - DNA, 25 bp, Homo sapien
agcaaaagtctgcggatagaaaggc

SEQ ID NO: 1523866 - DNA, 25 bp, Homo sapien
gcaggaatgggagagccgcctccaa

SEQ ID NO: 1523867 - DNA, 25 bp, Homo sapien
tcttctctgccgctggcgtaggggc

SEQ ID NO: 1523868 - DNA, 25 bp, Homo sapien
tgaactctgggaccttgcagaggct

SEQ ID NO: 1523869 - DNA, 25 bp, Homo sapien
tatgaagatgagagcgtgagacagc

SEQ ID NO: 1523870 - DNA, 25 bp, Homo sapien
aacacctctgagctcgaatctctgc

SEQ ID NO: 1523871 - DNA, 25 bp, Homo sapien
ctccaggggatgcaggttatgaaga

SEQ ID NO: 1523872 - DNA, 25 bp, Homo sapien
gccgtgactatttttgcagtaactg

SEQ ID NO: 1523873 - DNA, 25 bp, Homo sapien
ggttactggtcccttacactgtgta

SEQ ID NO: 1523874 - DNA, 25 bp, Homo sapien
gtcagtgtctactggatgaaggaca

SEQ ID NO: 1523875 - DNA, 25 bp, Homo sapien
tgtcccaccccaagaatttccttga

SEQ ID NO: 1523876 - DNA, 25 bp, Homo sapien
tgccagaccacagcagactgaggag

SEQ ID NO: 1523877 - DNA, 25 bp, Homo sapien
ctgccagaccacagcagactgagga

SEQ ID NO: 1523878 - DNA, 25 bp, Homo sapien
agactgaggagcagcagcaggccac

SEQ ID NO: 1523879 - DNA, 25 bp, Homo sapien
agcagactgaggagcagcagcaggc

SEQ ID NO: 1523880 - DNA, 25 bp, Homo sapien
attccactgtgaggtggtgcaggcc

SEQ ID NO: 1523881 - DNA, 25 bp, Homo sapien
tggaaaggtggcgtgggtcccatca

SEQ ID NO: 1523882 - DNA, 25 bp, Homo sapien
aggcctctggaaaggtggcgtgggt

SEQ ID NO: 1523883 - DNA, 25 bp, Homo sapien
tctgaggattccactgtgaggtggt

SEQ ID NO: 1523884 - DNA, 25 bp, Homo sapien
ctgtggtccccaaccactggcccac

SEQ ID NO: 1523885 - DNA, 25 bp, Homo sapien
tactcaccgaagtgctcaaagatca

SEQ ID NO: 1523886 - DNA, 25 bp, Homo sapien
ggtaggtctatttcgtctttcagca

SEQ ID NO: 1523887 - DNA, 25 bp, Homo sapien
gactcaagtgtcaaatcaggcaacc

SEQ ID NO: 1523888 - DNA, 25 bp, Homo sapien
aaatatgacactattctgaggacag

SEQ ID NO: 1523889 - DNA, 25 bp, Homo sapien
caggacttcgggatgacagctttct

SEQ ID NO: 1523890 - DNA, 25 bp, Homo sapien
gtcttaagtcccttggccacgctaa

SEQ ID NO: 1523891 - DNA, 25 bp, Homo sapien
tgtttttaaccagctgacaggtgcc

SEQ ID NO: 1523892 - DNA, 25 bp, Homo sapien
tagcctagatacctaaggatgcagc

SEQ ID NO: 1523893 - DNA, 25 bp, Homo sapien
agggagtgaagttgatcttgcacta

SEQ ID NO: 1523894 - DNA, 25 bp, Homo sapien
tattgtaggggctattgcatggttg

SEQ ID NO: 1523895 - DNA, 25 bp, Homo sapien
gagtgaagttgatcttgcactaacc

SEQ ID NO: 1523896 - DNA, 25 bp, Homo sapien
gctctacattatatttgatctcaaa

SEQ ID NO: 1523897 - DNA, 25 bp, Homo sapien
aaggagtggcacctaatgttgtcta

SEQ ID NO: 1523898 - DNA, 25 bp, Homo sapien
gagtggcacctaatgttgtctatac

SEQ ID NO: 1523899 - DNA, 25 bp, Homo sapien
agtggcacctaatgttgtctataca

SEQ ID NO: 1523900 - DNA, 25 bp, Homo sapien
gtaaaggagtggcacctaatgttgt

SEQ ID NO: 1523901 - DNA, 25 bp, Homo sapien
tttcctatacaaaccctgctgagca

SEQ ID NO: 1523902 - DNA, 25 bp, Homo sapien
tcactttcctatacaaaccctgctg

SEQ ID NO: 1523903 - DNA, 25 bp, Homo sapien
cctatacaaaccctgctgagcactg

SEQ ID NO: 1523904 - DNA, 25 bp, Homo sapien
ccacatccctaaatgacaatggctc

SEQ ID NO: 1523905 - DNA, 25 bp, Homo sapien
cctttagggtatattagaaattgtg

SEQ ID NO: 1523906 - DNA, 25 bp, Homo sapien
caaaaatcattccacaaaaaaagag

SEQ ID NO: 1523907 - DNA, 25 bp, Homo sapien
aattgtgtattaaagttattctcac

SEQ ID NO: 1523908 - DNA, 25 bp, Homo sapien
tcattccacaaaaaaagagaaagga

SEQ ID NO: 1523909 - DNA, 25 bp, Homo sapien
tggggatttggctaccatctgtctc

SEQ ID NO: 1523910 - DNA, 25 bp, Homo sapien
ctgtctctttatattctcgggctct

SEQ ID NO: 1523911 - DNA, 25 bp, Homo sapien
ctggggatttggctaccatctgtct

SEQ ID NO: 1523912 - DNA, 25 bp, Homo sapien
ccatctgtctctttatattctcggg

SEQ ID NO: 1523913 - DNA, 25 bp, Homo sapien
gaaggagcaggcagttctctctgct

SEQ ID NO: 1523914 - DNA, 25 bp, Homo sapien
gatgaaggagcaggcagttctctct

SEQ ID NO: 1523915 - DNA, 25 bp, Homo sapien
tgaaggagcaggcagttctctctgc

SEQ ID NO: 1523916 - DNA, 25 bp, Homo sapien
aggagcaggcagttctctctgctgt

SEQ ID NO: 1523917 - DNA, 25 bp, Homo sapien
tttcagaatcgcttcttgaaaagaa

SEQ ID NO: 1523918 - DNA, 25 bp, Homo sapien
tattttttcagaatcgcttcttgaa

SEQ ID NO: 1523919 - DNA, 25 bp, Homo sapien
atattttttcagaatcgcttcttga

SEQ ID NO: 1523920 - DNA, 25 bp, Homo sapien
cagaatcgcttcttgaaaagaatct

SEQ ID NO: 1523921 - DNA, 25 bp, Homo sapien
acacaggtttagtttgttatcttct

SEQ ID NO: 1523922 - DNA, 25 bp, Homo sapien
tcttaaggtatgagaatcttgcaaa

SEQ ID NO: 1523923 - DNA, 25 bp, Homo sapien
cagtaagaattgagaagcagttgaa

SEQ ID NO: 1523924 - DNA, 25 bp, Homo sapien
tgagttatcttatgggcagttaggg

SEQ ID NO: 1523925 - DNA, 25 bp, Homo sapien
tgtagtaggagttgaggagtggtta

SEQ ID NO: 1523926 - DNA, 25 bp, Homo sapien
aaggataaatgctaagccgggcacg

SEQ ID NO: 1523927 - DNA, 25 bp, Homo sapien
attttatgtacaaccttgagtaagg

SEQ ID NO: 1523928 - DNA, 25 bp, Homo sapien
tactttagaggcttccattttctta

SEQ ID NO: 1523929 - DNA, 25 bp, Homo sapien
cactggcaaaagtactagagaagtt

SEQ ID NO: 1523930 - DNA, 25 bp, Homo sapien
ggctaccacctcgttccacctgcag

SEQ ID NO: 1523931 - DNA, 25 bp, Homo sapien
accacctcgttccacctgcagggtg

SEQ ID NO: 1523932 - DNA, 25 bp, Homo sapien
ctaccacctcgttccacctgcaggg

SEQ ID NO: 1523933 - DNA, 25 bp, Homo sapien
taccacctcgttccacctgcagggt

SEQ ID NO: 1523934 - DNA, 25 bp, Homo sapien
tcagcagggtgtggttttcaggaac

SEQ ID NO: 1523935 - DNA, 25 bp, Homo sapien
agatttgtcagcagggtgtggtttt

SEQ ID NO: 1523936 - DNA, 25 bp, Homo sapien
catttggctcaagctcttgggcagt

SEQ ID NO: 1523937 - DNA, 25 bp, Homo sapien
ctgctccagcagtccgttcatttgg

SEQ ID NO: 1523938 - DNA, 25 bp, Homo sapien
ttagcttgtgtggtttttggggtca

SEQ ID NO: 1523939 - DNA, 25 bp, Homo sapien
tagcttgtgtggtttttggggtcat

SEQ ID NO: 1523940 - DNA, 25 bp, Homo sapien
gggtgacaccagatgtggatgctct

SEQ ID NO: 1523941 - DNA, 25 bp, Homo sapien
tgacaccagatgtggatgctctggc

SEQ ID NO: 1523942 - DNA, 25 bp, Homo sapien
gtgacaccagatgtggatgctctgg

SEQ ID NO: 1523943 - DNA, 25 bp, Homo sapien
ggtgacaccagatgtggatgctctg

SEQ ID NO: 1523944 - DNA, 25 bp, Homo sapien
cacttcccagactgggcagctgggc

SEQ ID NO: 1523945 - DNA, 25 bp, Homo sapien
cttcccagactgggcagctgggcag

SEQ ID NO: 1523946 - DNA, 25 bp, Homo sapien
acttcccagactgggcagctgggca

SEQ ID NO: 1523947 - DNA, 25 bp, Homo sapien
ttcccagactgggcagctgggcaga

SEQ ID NO: 1523948 - DNA, 25 bp, Homo sapien
cttggtgcgcagaaacccgatgtca

SEQ ID NO: 1523949 - DNA, 25 bp, Homo sapien
tttccttggcatgcggggcagttcc

SEQ ID NO: 1523950 - DNA, 25 bp, Homo sapien
tcatggcgcagcttggtgcgcagaa

SEQ ID NO: 1523951 - DNA, 25 bp, Homo sapien
cccgatgtcaaccagagcattttgt

SEQ ID NO: 1523952 - DNA, 25 bp, Homo sapien
ctctttctgccggcagggcggctcc

SEQ ID NO: 1523953 - DNA, 25 bp, Homo sapien
cctctttctgccggcagggcggctc

SEQ ID NO: 1523954 - DNA, 25 bp, Homo sapien
tctttctgccggcagggcggctcct

SEQ ID NO: 1523955 - DNA, 25 bp, Homo sapien
gccctctttctgccggcagggcggc

SEQ ID NO: 1523956 - DNA, 25 bp, Homo sapien
cactttgaggagttcgcacaacttc

SEQ ID NO: 1523957 - DNA, 25 bp, Homo sapien
actttgaggagttcgcacaacttca

SEQ ID NO: 1523958 - DNA, 25 bp, Homo sapien
acagggttgcggcccagcagaggcg

SEQ ID NO: 1523959 - DNA, 25 bp, Homo sapien
cccagacagggttgcggcccagcag

SEQ ID NO: 1523960 - DNA, 25 bp, Homo sapien
cctcccagacagggttgcggcccag

SEQ ID NO: 1523961 - DNA, 25 bp, Homo sapien
ccagacagggttgcggcccagcaga

SEQ ID NO: 1523962 - DNA, 25 bp, Homo sapien
taactaatgctcacaccttcacagg

SEQ ID NO: 1523963 - DNA, 25 bp, Homo sapien
caaagccttttaccagtcctcaact

SEQ ID NO: 1523964 - DNA, 25 bp, Homo sapien
tggagggaactcctgtgactgtgaa

SEQ ID NO: 1523965 - DNA, 25 bp, Homo sapien
tataaagactgtgaaaaagccatta

SEQ ID NO: 1523966 - DNA, 25 bp, Homo sapien
tcttggttagagattctgggagtct

SEQ ID NO: 1523967 - DNA, 25 bp, Homo sapien
ggcatagtctgaacaatcgtcttgg

SEQ ID NO: 1523968 - DNA, 25 bp, Homo sapien
taataataatcacgtgctacacctg

SEQ ID NO: 1523969 - DNA, 25 bp, Homo sapien
taaaaaaggctacctgtcacaatct

SEQ ID NO: 1523970 - DNA, 25 bp, Homo sapien
tactggggggacacgcaataggtca

SEQ ID NO: 1523971 - DNA, 25 bp, Homo sapien
ccggggctggcgccttctctagccc

SEQ ID NO: 1523972 - DNA, 25 bp, Homo sapien
tctagccccctactcgccgccctca

SEQ ID NO: 1523973 - DNA, 25 bp, Homo sapien
ggctggtactggggggacacgcaat

SEQ ID NO: 1523974 - DNA, 25 bp, Homo sapien
tgtcggttgcgcagtacagctctgg

SEQ ID NO: 1523975 - DNA, 25 bp, Homo sapien
cccgctgcgaaatccaactggtagg

SEQ ID NO: 1523976 - DNA, 25 bp, Homo sapien
agctaaatcttagggcatctcgtgg

SEQ ID NO: 1523977 - DNA, 25 bp, Homo sapien
aactggtaggctccacagaagcggg

SEQ ID NO: 1523978 - DNA, 25 bp, Homo sapien
agaagagtggctcccagaacaatcc

SEQ ID NO: 1523979 - DNA, 25 bp, Homo sapien
gaggcaagaagagtggctcccagaa

SEQ ID NO: 1523980 - DNA, 25 bp, Homo sapien
caagaagagtggctcccagaacaat

SEQ ID NO: 1523981 - DNA, 25 bp, Homo sapien
ggcaagaagagtggctcccagaaca

SEQ ID NO: 1523982 - DNA, 25 bp, Homo sapien
ctaaggagcgatggtcaaggtagtg

SEQ ID NO: 1523983 - DNA, 25 bp, Homo sapien
tggtcaaggtagtgtttggcataaa

SEQ ID NO: 1523984 - DNA, 25 bp, Homo sapien
agcgatggtcaaggtagtgtttggc

SEQ ID NO: 1523985 - DNA, 25 bp, Homo sapien
ggtagtgtttggcataaacactagc

SEQ ID NO: 1523986 - DNA, 25 bp, Homo sapien
tgaagttgatcagcgctgaaagacc

SEQ ID NO: 1523987 - DNA, 25 bp, Homo sapien
agttgatcagcgctgaaagaccttc

SEQ ID NO: 1523988 - DNA, 25 bp, Homo sapien
aatgaagttgatcagcgctgaaaga

SEQ ID NO: 1523989 - DNA, 25 bp, Homo sapien
gatcagcgctgaaagaccttcttac

SEQ ID NO: 1523990 - DNA, 25 bp, Homo sapien
ttgctggtttttgagcaggaaaggt

SEQ ID NO: 1523991 - DNA, 25 bp, Homo sapien
tttgctggtttttgagcaggaaagg

SEQ ID NO: 1523992 - DNA, 25 bp, Homo sapien
taacatagttcagttactggcccac

SEQ ID NO: 1523993 - DNA, 25 bp, Homo sapien
cctttgtttatgaccgcagacatgc

SEQ ID NO: 1523994 - DNA, 25 bp, Homo sapien
ccttcaatacctaacaatgctgcag

SEQ ID NO: 1523995 - DNA, 25 bp, Homo sapien
taacattcaggagacaaatgcaggg

SEQ ID NO: 1523996 - DNA, 25 bp, Homo sapien
ggtcctgtttccaagctagcatctg

SEQ ID NO: 1523997 - DNA, 25 bp, Homo sapien
ccaagctagcatctgggattgtggg

SEQ ID NO: 1523998 - DNA, 25 bp, Homo sapien
cagcagctccccatgtttctacagg

SEQ ID NO: 1523999 - DNA, 25 bp, Homo sapien
gggggttcttatgtgctccctggaa

SEQ ID NO: 1524000 - DNA, 25 bp, Homo sapien
gggctgtacgcacatcttttgcctg

SEQ ID NO: 1524001 - DNA, 25 bp, Homo sapien
tcgtgagggctgtacgcacatcttt

SEQ ID NO: 1524002 - DNA, 25 bp, Homo sapien
tcatcgtgagggctgtacgcacatc

SEQ ID NO: 1524003 - DNA, 25 bp, Homo sapien
gagggctgtacgcacatcttttgcc

SEQ ID NO: 1524004 - DNA, 25 bp, Homo sapien
ctgctggtccctgatatggggggag

SEQ ID NO: 1524005 - DNA, 25 bp, Homo sapien
ttgagtttgctgaagtttcccatgg

SEQ ID NO: 1524006 - DNA, 25 bp, Homo sapien
tccctgatatggggggagccacaag

SEQ ID NO: 1524007 - DNA, 25 bp, Homo sapien
gacacagacccttgagtttgctgaa

SEQ ID NO: 1524008 - DNA, 25 bp, Homo sapien
tggcttcttagagatgcagaagcag

SEQ ID NO: 1524009 - DNA, 25 bp, Homo sapien
tcatggtcgggcacctggcttctta

SEQ ID NO: 1524010 - DNA, 25 bp, Homo sapien
gcagaagcagcatggcaccttgggt

SEQ ID NO: 1524011 - DNA, 25 bp, Homo sapien
tgcagaagcagcatggcaccttggg

SEQ ID NO: 1524012 - DNA, 25 bp, Homo sapien
gataaagtatctattaccttcagca

SEQ ID NO: 1524013 - DNA, 25 bp, Homo sapien
tattacaagccaattctacacttca

SEQ ID NO: 1524014 - DNA, 25 bp, Homo sapien
tgactacagggtcattttaattata

SEQ ID NO: 1524015 - DNA, 25 bp, Homo sapien
tataatatgtattagtcacatcagg

SEQ ID NO: 1524016 - DNA, 25 bp, Homo sapien
aatcctcaaaccttactgaacataa

SEQ ID NO: 1524017 - DNA, 25 bp, Homo sapien
ttaaccaatcctcaaaccttactga

SEQ ID NO: 1524018 - DNA, 25 bp, Homo sapien
gaacataagaaaattcatcctggag

SEQ ID NO: 1524019 - DNA, 25 bp, Homo sapien
tcaaaccttactgaacataagaaaa

SEQ ID NO: 1524020 - DNA, 25 bp, Homo sapien
cactgtacctacctggatggtttta

SEQ ID NO: 1524021 - DNA, 25 bp, Homo sapien
gatttgttctcatgtcccaggttca

SEQ ID NO: 1524022 - DNA, 25 bp, Homo sapien
tatgcatttctctacaaattgtaat

SEQ ID NO: 1524023 - DNA, 25 bp, Homo sapien
gccattctaaatgggtgataggtga

SEQ ID NO: 1524024 - DNA, 25 bp, Homo sapien
catgaggacatgaggatctccactt

SEQ ID NO: 1524025 - DNA, 25 bp, Homo sapien
tgtgtaggtgaaacctgctgccaca

SEQ ID NO: 1524026 - DNA, 25 bp, Homo sapien
gaaacccgatcaaagtaacgtgtgc

SEQ ID NO: 1524027 - DNA, 25 bp, Homo sapien
gactcttgtatcctcagacctgaaa

SEQ ID NO: 1524028 - DNA, 25 bp, Homo sapien
actctctttgcagggtaaatttgta

SEQ ID NO: 1524029 - DNA, 25 bp, Homo sapien
ggtacctcctagaagtgttttcata

SEQ ID NO: 1524030 - DNA, 25 bp, Homo sapien
tataagtggtgagttacacagattc

SEQ ID NO: 1524031 - DNA, 25 bp, Homo sapien
taggaatcttctcaggtgtctttta

SEQ ID NO: 1524032 - DNA, 25 bp, Homo sapien
tagatacagagatacgttttagata

SEQ ID NO: 1524033 - DNA, 25 bp, Homo sapien
cattggatggacttaaataaatttt

SEQ ID NO: 1524034 - DNA, 25 bp, Homo sapien
aaaatcattggatggacttaaataa

SEQ ID NO: 1524035 - DNA, 25 bp, Homo sapien
cagagatacgttttagataaagata

SEQ ID NO: 1524036 - DNA, 25 bp, Homo sapien
gagcgatttgactctcctgcctggg

SEQ ID NO: 1524037 - DNA, 25 bp, Homo sapien
ttttactaagagacacagtccgcag

SEQ ID NO: 1524038 - DNA, 25 bp, Homo sapien
tgcctgggcccagtacacagatggg

SEQ ID NO: 1524039 - DNA, 25 bp, Homo sapien
cctagaatgaagacacgtgaagaac

SEQ ID NO: 1524040 - DNA, 25 bp, Homo sapien
ttatactcatatgcgcaaccagcca

SEQ ID NO: 1524041 - DNA, 25 bp, Homo sapien
tagggccgcaggtacgatcatggtt

SEQ ID NO: 1524042 - DNA, 25 bp, Homo sapien
tgagcagctgggatatgcccggctt

SEQ ID NO: 1524043 - DNA, 25 bp, Homo sapien
taaagccctcgggtaatacactgag

SEQ ID NO: 1524044 - DNA, 25 bp, Homo sapien
gtagggtaataagtccgtatctgca

SEQ ID NO: 1524045 - DNA, 25 bp, Homo sapien
aatcctgggtttgtattgtggcata

SEQ ID NO: 1524046 - DNA, 25 bp, Homo sapien
tacggcaatgtacaatcctgggttt

SEQ ID NO: 1524047 - DNA, 25 bp, Homo sapien
ttatgtagacaacattgtacggcaa

SEQ ID NO: 1524048 - DNA, 25 bp, Homo sapien
tttgggataggtgtacaaagtacat

SEQ ID NO: 1524049 - DNA, 25 bp, Homo sapien
acaaagtaccttcttcagggcagag

SEQ ID NO: 1524050 - DNA, 25 bp, Homo sapien
tcagggcagagggagaatatatcgt

SEQ ID NO: 1524051 - DNA, 25 bp, Homo sapien
gagggagaatatatcgtatcagtta

SEQ ID NO: 1524052 - DNA, 25 bp, Homo sapien
ttttctggcactgatatttgttgca

SEQ ID NO: 1524053 - DNA, 25 bp, Homo sapien
tttttctggcactgatatttgttgc

SEQ ID NO: 1524054 - DNA, 25 bp, Homo sapien
tttctggcactgatatttgttgcat

SEQ ID NO: 1524055 - DNA, 25 bp, Homo sapien
ggcccgtagacaccgtgaggagtcc

SEQ ID NO: 1524056 - DNA, 25 bp, Homo sapien
atcagagggacgctcaggattgtgc

SEQ ID NO: 1524057 - DNA, 25 bp, Homo sapien
tcagagggacgctcaggattgtgca

SEQ ID NO: 1524058 - DNA, 25 bp, Homo sapien
gattgtgcaggggcccgtagacacc

SEQ ID NO: 1524059 - DNA, 25 bp, Homo sapien
ccttcacttccggagggcgccagtt

SEQ ID NO: 1524060 - DNA, 25 bp, Homo sapien
ggcgccagttccagtcgtgacccag

SEQ ID NO: 1524061 - DNA, 25 bp, Homo sapien
tccggagggcgccagttccagtcgt

SEQ ID NO: 1524062 - DNA, 25 bp, Homo sapien
agggaccacggctaccgcctcctct

SEQ ID NO: 1524063 - DNA, 25 bp, Homo sapien
cctcagccgctccagcagttcctcc

SEQ ID NO: 1524064 - DNA, 25 bp, Homo sapien
tagcgtctgcctttggtttctgcta

SEQ ID NO: 1524065 - DNA, 25 bp, Homo sapien
ttggcgtctgacatttgtcagcaag

SEQ ID NO: 1524066 - DNA, 25 bp, Homo sapien
ttggctgaagctctccgttcttctg

SEQ ID NO: 1524067 - DNA, 25 bp, Homo sapien
actggagagaaatcctacaaatgtg

SEQ ID NO: 1524068 - DNA, 25 bp, Homo sapien
tggagagaaatcctacaaatgtgaa

SEQ ID NO: 1524069 - DNA, 25 bp, Homo sapien
gagagaaatcctacaaatgtgaaga

SEQ ID NO: 1524070 - DNA, 25 bp, Homo sapien
acaaatgtgaagaatgtggcaaggc

SEQ ID NO: 1524071 - DNA, 25 bp, Homo sapien
tctatcagcttctactgggaggtgt

SEQ ID NO: 1524072 - DNA, 25 bp, Homo sapien
tcttaatcaggagacacgggtgtca

SEQ ID NO: 1524073 - DNA, 25 bp, Homo sapien
ctcttgtacgaggtgtctatcagct

SEQ ID NO: 1524074 - DNA, 25 bp, Homo sapien
ctcttcagagttgtccagcagggat

SEQ ID NO: 1524075 - DNA, 25 bp, Homo sapien
tattgctactttacccatgcaggac

SEQ ID NO: 1524076 - DNA, 25 bp, Homo sapien
ggcacagaaacccaatcagagtaaa

SEQ ID NO: 1524077 - DNA, 25 bp, Homo sapien
cacttttagagaggctagaacagat

SEQ ID NO: 1524078 - DNA, 25 bp, Homo sapien
tagacctgtagacgtgagaatccac

SEQ ID NO: 1524079 - DNA, 25 bp, Homo sapien
gctagagcgagagacaaagtacccg

SEQ ID NO: 1524080 - DNA, 25 bp, Homo sapien
ggctagagcgagagacaaagtaccc

SEQ ID NO: 1524081 - DNA, 25 bp, Homo sapien
tagagcgagagacaaagtacccgcc

SEQ ID NO: 1524082 - DNA, 25 bp, Homo sapien
cctgcagctcgggctagagcgagag

SEQ ID NO: 1524083 - DNA, 25 bp, Homo sapien
ttctttcttaataggctacactcca

SEQ ID NO: 1524084 - DNA, 25 bp, Homo sapien
cttctttcttaataggctacactcc

SEQ ID NO: 1524085 - DNA, 25 bp, Homo sapien
tctttcttaataggctacactccat

SEQ ID NO: 1524086 - DNA, 25 bp, Homo sapien
actccagtctgacgacagagcaaga

SEQ ID NO: 1524087 - DNA, 25 bp, Homo sapien
ctgcactccagtctgacgacagagc

SEQ ID NO: 1524088 - DNA, 25 bp, Homo sapien
actgcactccagtctgacgacagag

SEQ ID NO: 1524089 - DNA, 25 bp, Homo sapien
gcactccagtctgacgacagagcaa

SEQ ID NO: 1524090 - DNA, 25 bp, Homo sapien
ggcaaccttgggcacactttgtgca

SEQ ID NO: 1524091 - DNA, 25 bp, Homo sapien
caggttttctggacgtgttcttgaa

SEQ ID NO: 1524092 - DNA, 25 bp, Homo sapien
taaatgctttaagatgctaagtgct

SEQ ID NO: 1524093 - DNA, 25 bp, Homo sapien
gacattggattcaggcatctaaggg

SEQ ID NO: 1524094 - DNA, 25 bp, Homo sapien
gaatttctaagcatccagagtgcac

SEQ ID NO: 1524095 - DNA, 25 bp, Homo sapien
gatgaagaattggaatccctctctg

SEQ ID NO: 1524096 - DNA, 25 bp, Homo sapien
gctattacggtttttggatggccat

SEQ ID NO: 1524097 - DNA, 25 bp, Homo sapien
cataagatttatcgaaatagccaga

SEQ ID NO: 1524098 - DNA, 25 bp, Homo sapien
cactggcaggaccaagacctgcaga

SEQ ID NO: 1524099 - DNA, 25 bp, Homo sapien
cacccactggcaggaccaagacctg

SEQ ID NO: 1524100 - DNA, 25 bp, Homo sapien
cccactggcaggaccaagacctgca

SEQ ID NO: 1524101 - DNA, 25 bp, Homo sapien
actggcaggaccaagacctgcagaa

SEQ ID NO: 1524102 - DNA, 25 bp, Homo sapien
tttaaaggtgtcagcaccacccatt

SEQ ID NO: 1524103 - DNA, 25 bp, Homo sapien
taaaggtgtcagcaccacccattta

SEQ ID NO: 1524104 - DNA, 25 bp, Homo sapien
aaaggtgtcagcaccacccatttac

SEQ ID NO: 1524105 - DNA, 25 bp, Homo sapien
ctttaaaggtgtcagcaccacccat

SEQ ID NO: 1524106 - DNA, 25 bp, Homo sapien
atccctatataaattctgctgtgca

SEQ ID NO: 1524107 - DNA, 25 bp, Homo sapien
cagagagaattctacagtcacatcc

SEQ ID NO: 1524108 - DNA, 25 bp, Homo sapien
ctcctccagagagaattctacagtc

SEQ ID NO: 1524109 - DNA, 25 bp, Homo sapien
ctccagagagaattctacagtcaca

SEQ ID NO: 1524110 - DNA, 25 bp, Homo sapien
accaggtttctgtagttctctaaca

SEQ ID NO: 1524111 - DNA, 25 bp, Homo sapien
ggaagaccaggtttctgtagttctc

SEQ ID NO: 1524112 - DNA, 25 bp, Homo sapien
ccaggtttctgtagttctctaacat

SEQ ID NO: 1524113 - DNA, 25 bp, Homo sapien
ccaggaagaccaggtttctgtagtt

SEQ ID NO: 1524114 - DNA, 25 bp, Homo sapien
tcatgtctcttcatattacagggct

SEQ ID NO: 1524115 - DNA, 25 bp, Homo sapien
cttcatattacagggctcttttcct

SEQ ID NO: 1524116 - DNA, 25 bp, Homo sapien
taccatctcatgtctcttcatatta

SEQ ID NO: 1524117 - DNA, 25 bp, Homo sapien
atgtctcttcatattacagggctct

SEQ ID NO: 1524118 - DNA, 25 bp, Homo sapien
caacgctacttggtcccactgagaa

SEQ ID NO: 1524119 - DNA, 25 bp, Homo sapien
tcagccgcagtctgggagaggttct

SEQ ID NO: 1524120 - DNA, 25 bp, Homo sapien
tatttcaaaatcctttcagccgcag

SEQ ID NO: 1524121 - DNA, 25 bp, Homo sapien
ggaagacacccgtttacagccatgc

SEQ ID NO: 1524122 - DNA, 25 bp, Homo sapien
gcctaggcctgaaatgtacacttaa

SEQ ID NO: 1524123 - DNA, 25 bp, Homo sapien
atggtaaattttaggacaggtgcgg

SEQ ID NO: 1524124 - DNA, 25 bp, Homo sapien
ccatgcctaggcctgaaatgtacac

SEQ ID NO: 1524125 - DNA, 25 bp, Homo sapien
gagggggactttatatgctgcccag

SEQ ID NO: 1524126 - DNA, 25 bp, Homo sapien
cttttaggggtctttcaagacactg

SEQ ID NO: 1524127 - DNA, 25 bp, Homo sapien
ttcaagacactggtttcattctccc

SEQ ID NO: 1524128 - DNA, 25 bp, Homo sapien
caagacactggtttcattctcccat

SEQ ID NO: 1524129 - DNA, 25 bp, Homo sapien
ttctatgtctggcttttaggggtct

SEQ ID NO: 1524130 - DNA, 25 bp, Homo sapien
attttatgtctcgctctgggcaaag

SEQ ID NO: 1524131 - DNA, 25 bp, Homo sapien
aatattttatgtctcgctctgggca

SEQ ID NO: 1524132 - DNA, 25 bp, Homo sapien
tgaaaacttatagaagacttttaca

SEQ ID NO: 1524133 - DNA, 25 bp, Homo sapien
aaacttatagaagacttttacatat

SEQ ID NO: 1524134 - DNA, 25 bp, Homo sapien
tttacatttgcaagttttcttttca

SEQ ID NO: 1524135 - DNA, 25 bp, Homo sapien
tgcaagttttcttttcagtatgtct

SEQ ID NO: 1524136 - DNA, 25 bp, Homo sapien
tttgcaagttttcttttcagtatgt

SEQ ID NO: 1524137 - DNA, 25 bp, Homo sapien
acatttgcaagttttcttttcagta

SEQ ID NO: 1524138 - DNA, 25 bp, Homo sapien
tttgtgggaattctctctaatatga

SEQ ID NO: 1524139 - DNA, 25 bp, Homo sapien
ctcttatgtcgagttagttgtgaaa

SEQ ID NO: 1524140 - DNA, 25 bp, Homo sapien
cacatttgtgggaattctctctaat

SEQ ID NO: 1524141 - DNA, 25 bp, Homo sapien
aattctcttatgtcgagttagttgt

SEQ ID NO: 1524142 - DNA, 25 bp, Homo sapien
ttatgtacggtaaggtatgagaaac

SEQ ID NO: 1524143 - DNA, 25 bp, Homo sapien
gagaaacgattaaaaggcttgccac

SEQ ID NO: 1524144 - DNA, 25 bp, Homo sapien
tatgagaaacgattaaaaggcttgc

SEQ ID NO: 1524145 - DNA, 25 bp, Homo sapien
tacggtaaggtatgagaaacgatta

SEQ ID NO: 1524146 - DNA, 25 bp, Homo sapien
tgaacgtacaatagtcttaacgtgg

SEQ ID NO: 1524147 - DNA, 25 bp, Homo sapien
gaagaggtcgtatataattcccacc

SEQ ID NO: 1524148 - DNA, 25 bp, Homo sapien
tgtacaataagttgtgaacactggt

SEQ ID NO: 1524149 - DNA, 25 bp, Homo sapien
cattcaggattgtagtttcgctcca

SEQ ID NO: 1524150 - DNA, 25 bp, Homo sapien
tgtgggtaatgtcctttttcagttg

SEQ ID NO: 1524151 - DNA, 25 bp, Homo sapien
ttttcagttgaggaacaatttgttc

SEQ ID NO: 1524152 - DNA, 25 bp, Homo sapien
tgggtaatgtcctttttcagttgag

SEQ ID NO: 1524153 - DNA, 25 bp, Homo sapien
aggccataagtttgtgtttcttcag

SEQ ID NO: 1524154 - DNA, 25 bp, Homo sapien
tcctcgaagcggcctctgaagcggc

SEQ ID NO: 1524155 - DNA, 25 bp, Homo sapien
acagaggcgccggtccctcctcacc

SEQ ID NO: 1524156 - DNA, 25 bp, Homo sapien
tcgaagcggcctctgaagcggccca

SEQ ID NO: 1524157 - DNA, 25 bp, Homo sapien
agcggcctctgaagcggcccaggct

SEQ ID NO: 1524158 - DNA, 25 bp, Homo sapien
tcttcctcctctagctcctcttctt

SEQ ID NO: 1524159 - DNA, 25 bp, Homo sapien
cttcttcctcctctagctcctcttc

SEQ ID NO: 1524160 - DNA, 25 bp, Homo sapien
tcctctagctcctcttcttcttcca

SEQ ID NO: 1524161 - DNA, 25 bp, Homo sapien
cctcctctagctcctcttcttcttc

SEQ ID NO: 1524162 - DNA, 25 bp, Homo sapien
tccctccagcctcaacgagaagtga

SEQ ID NO: 1524163 - DNA, 25 bp, Homo sapien
ctccctccagcctcaacgagaagtg

SEQ ID NO: 1524164 - DNA, 25 bp, Homo sapien
tatggggtcagctcagagagattaa

SEQ ID NO: 1524165 - DNA, 25 bp, Homo sapien
gagagattaatcaggcgctcctcct

SEQ ID NO: 1524166 - DNA, 25 bp, Homo sapien
ctttgcaaatggaacacaagatata

SEQ ID NO: 1524167 - DNA, 25 bp, Homo sapien
gcaaatggaacacaagatatatggg

SEQ ID NO: 1524168 - DNA, 25 bp, Homo sapien
atggtagttgcatctattaagtaac

SEQ ID NO: 1524169 - DNA, 25 bp, Homo sapien
gatggtagttgcatctattaagtaa

SEQ ID NO: 1524170 - DNA, 25 bp, Homo sapien
tgtgatggtagttgcatctattaag

SEQ ID NO: 1524171 - DNA, 25 bp, Homo sapien
tgatggtagttgcatctattaagta

SEQ ID NO: 1524172 - DNA, 25 bp, Homo sapien
catctgttgctgtagtaaaaatgtc

SEQ ID NO: 1524173 - DNA, 25 bp, Homo sapien
ctatattgcattttggacatctgtt

SEQ ID NO: 1524174 - DNA, 25 bp, Homo sapien
tgcattttggacatctgttgctgta

SEQ ID NO: 1524175 - DNA, 25 bp, Homo sapien
tggacatctgttgctgtagtaaaaa

SEQ ID NO: 1524176 - DNA, 25 bp, Homo sapien
ataaagaggttgtgtctgatgtact

SEQ ID NO: 1524177 - DNA, 25 bp, Homo sapien
tataaagaggttgtgtctgatgtac

SEQ ID NO: 1524178 - DNA, 25 bp, Homo sapien
cttataaagaggttgtgtctgatgt

SEQ ID NO: 1524179 - DNA, 25 bp, Homo sapien
taaagaggttgtgtctgatgtactg

SEQ ID NO: 1524180 - DNA, 25 bp, Homo sapien
tctagattgatcactaatttgtaca

SEQ ID NO: 1524181 - DNA, 25 bp, Homo sapien
tcctctagattgatcactaatttgt

SEQ ID NO: 1524182 - DNA, 25 bp, Homo sapien
ctaatttgtacactatgtcttgtaa

SEQ ID NO: 1524183 - DNA, 25 bp, Homo sapien
ctagattgatcactaatttgtacac

SEQ ID NO: 1524184 - DNA, 25 bp, Homo sapien
aaaatgtcccgtgccttcattagca

SEQ ID NO: 1524185 - DNA, 25 bp, Homo sapien
tctcctgaaactcgaacaaacttct

SEQ ID NO: 1524186 - DNA, 25 bp, Homo sapien
catgtccaatagttgcttctcctga

SEQ ID NO: 1524187 - DNA, 25 bp, Homo sapien
ctgacaagctggatcaagacccatt

SEQ ID NO: 1524188 - DNA, 25 bp, Homo sapien
tattgcacgtcggatttcccttaga

SEQ ID NO: 1524189 - DNA, 25 bp, Homo sapien
gctccaacaggtgatcaccacagat

SEQ ID NO: 1524190 - DNA, 25 bp, Homo sapien
gcattgctgcatcacctattgcacg

SEQ ID NO: 1524191 - DNA, 25 bp, Homo sapien
tagagtttgatactgctccaacagg

SEQ ID NO: 1524192 - DNA, 25 bp, Homo sapien
ggagaaactacaagaccataatgaa

SEQ ID NO: 1524193 - DNA, 25 bp, Homo sapien
aagaccataatgaaggacaagcaga

SEQ ID NO: 1524194 - DNA, 25 bp, Homo sapien
tcaagttatcttcagaggagaaact

SEQ ID NO: 1524195 - DNA, 25 bp, Homo sapien
agaggagaaactacaagaccataat

SEQ ID NO: 1524196 - DNA, 25 bp, Homo sapien
gagatgcagtcctgcagaagcctcc

SEQ ID NO: 1524197 - DNA, 25 bp, Homo sapien
gtttccctcctcataatgtgcctag

SEQ ID NO: 1524198 - DNA, 25 bp, Homo sapien
tgtcttgaacagcaaagtggtagca

SEQ ID NO: 1524199 - DNA, 25 bp, Homo sapien
tatatacagtctctagtaacagatg

SEQ ID NO: 1524200 - DNA, 25 bp, Homo sapien
tgcaaggtatcaacaaccacactat

SEQ ID NO: 1524201 - DNA, 25 bp, Homo sapien
gaagcaccccttattggaagatgta

SEQ ID NO: 1524202 - DNA, 25 bp, Homo sapien
gcatcacaatgctaattttaggcaa

SEQ ID NO: 1524203 - DNA, 25 bp, Homo sapien
catggaggtgagctcaaacaccctt

SEQ ID NO: 1524204 - DNA, 25 bp, Homo sapien
gccaccgcggggaggacagaggggc

SEQ ID NO: 1524205 - DNA, 25 bp, Homo sapien
agcagagatcagccactgccaccgc

SEQ ID NO: 1524206 - DNA, 25 bp, Homo sapien
aggggcccaggatcccccagccagc

SEQ ID NO: 1524207 - DNA, 25 bp, Homo sapien
agagatcagccactgccaccgcggg

SEQ ID NO: 1524208 - DNA, 25 bp, Homo sapien
cagagggatgctcaagattgtgtaa

SEQ ID NO: 1524209 - DNA, 25 bp, Homo sapien
tcagagggatgctcaagattgtgta

SEQ ID NO: 1524210 - DNA, 25 bp, Homo sapien
agagggatgctcaagattgtgtaag

SEQ ID NO: 1524211 - DNA, 25 bp, Homo sapien
ctcctcccacctgcggggcacctcc

SEQ ID NO: 1524212 - DNA, 25 bp, Homo sapien
gctactgcctcctcccacctgcggg

SEQ ID NO: 1524213 - DNA, 25 bp, Homo sapien
ggctactgcctcctcccacctgcgg

SEQ ID NO: 1524214 - DNA, 25 bp, Homo sapien
cacctgcggggcacctccttcactt

SEQ ID NO: 1524215 - DNA, 25 bp, Homo sapien
ttgttcatttggcagaagctctccg

SEQ ID NO: 1524216 - DNA, 25 bp, Homo sapien
tttgttcatttggcagaagctctcc

SEQ ID NO: 1524217 - DNA, 25 bp, Homo sapien
actcagtcgctccaacagtttgttc

SEQ ID NO: 1524218 - DNA, 25 bp, Homo sapien
ccttgtgatgagtttgtacatgctc

SEQ ID NO: 1524219 - DNA, 25 bp, Homo sapien
tagccattcgtctaccctttcttta

SEQ ID NO: 1524220 - DNA, 25 bp, Homo sapien
cttccttgtgatgagtttgtacatg

SEQ ID NO: 1524221 - DNA, 25 bp, Homo sapien
tgatgagtttgtacatgctccttta

SEQ ID NO: 1524222 - DNA, 25 bp, Homo sapien
ctaagtgtagcgatctccttgatca

SEQ ID NO: 1524223 - DNA, 25 bp, Homo sapien
gaaaaactgtacgataggatactgc

SEQ ID NO: 1524224 - DNA, 25 bp, Homo sapien
tcatgggagcataagcaacctgccc

SEQ ID NO: 1524225 - DNA, 25 bp, Homo sapien
aacgttcctatggttatgactggca

SEQ ID NO: 1524226 - DNA, 25 bp, Homo sapien
tgggagaaccatatataggcttact

SEQ ID NO: 1524227 - DNA, 25 bp, Homo sapien
tataggcttactttagttattgttc

SEQ ID NO: 1524228 - DNA, 25 bp, Homo sapien
gagctgatttgtagttaaaagaata

SEQ ID NO: 1524229 - DNA, 25 bp, Homo sapien
aaacattccattagcttctatggga

SEQ ID NO: 1524230 - DNA, 25 bp, Homo sapien
tacagtctggtcttgctagctgcgg

SEQ ID NO: 1524231 - DNA, 25 bp, Homo sapien
tatagggtaaagctgcctactcaag

SEQ ID NO: 1524232 - DNA, 25 bp, Homo sapien
tcttctgggtggctttatagggtaa

SEQ ID NO: 1524233 - DNA, 25 bp, Homo sapien
ttcccaggtcaagcttagactgctg

SEQ ID NO: 1524234 - DNA, 25 bp, Homo sapien
tcaaacgaagatttggtcctttcat

SEQ ID NO: 1524235 - DNA, 25 bp, Homo sapien
cccaatcaaacgaagatttggtcct

SEQ ID NO: 1524236 - DNA, 25 bp, Homo sapien
gagagtacactagccaccaagagag

SEQ ID NO: 1524237 - DNA, 25 bp, Homo sapien
cctctagtcatgaagatgtgaaagc

SEQ ID NO: 1524238 - DNA, 25 bp, Homo sapien
tgaggctgaaacagtgctccctttt

SEQ ID NO: 1524239 - DNA, 25 bp, Homo sapien
agagtcaaagcctaccttcagcagg

SEQ ID NO: 1524240 - DNA, 25 bp, Homo sapien
tgacatattgttgggcccaccacca

SEQ ID NO: 1524241 - DNA, 25 bp, Homo sapien
gtgacatattgttgggcccaccacc

SEQ ID NO: 1524242 - DNA, 25 bp, Homo sapien
gacatattgttgggcccaccaccaa

SEQ ID NO: 1524243 - DNA, 25 bp, Homo sapien
acatattgttgggcccaccaccaac

SEQ ID NO: 1524244 - DNA, 25 bp, Homo sapien
gtgacaccgcctcacgaggtcgtga

SEQ ID NO: 1524245 - DNA, 25 bp, Homo sapien
gaaggtgtacattgtccaggaaagt

SEQ ID NO: 1524246 - DNA, 25 bp, Homo sapien
ggtagataaaggactaatggttgca

SEQ ID NO: 1524247 - DNA, 25 bp, Homo sapien
gagtcaggagacattaatcgatata

SEQ ID NO: 1524248 - DNA, 25 bp, Homo sapien
tcaaaacttatttgcccataattga

SEQ ID NO: 1524249 - DNA, 25 bp, Homo sapien
aatgaatcctggcatcctgtctgca

SEQ ID NO: 1524250 - DNA, 25 bp, Homo sapien
tgcccactgttagaagagaactagt

SEQ ID NO: 1524251 - DNA, 25 bp, Homo sapien
gagaactagtaatcaacttgtcaat

SEQ ID NO: 1524252 - DNA, 25 bp, Homo sapien
aaagaactccaggcgcagattgtgg

SEQ ID NO: 1524253 - DNA, 25 bp, Homo sapien
gcagtcagcgcattcgccatcttat

SEQ ID NO: 1524254 - DNA, 25 bp, Homo sapien
tgaggccgagatgggaaagaactcc

SEQ ID NO: 1524255 - DNA, 25 bp, Homo sapien
acaatctcggagagacgcggccatg

SEQ ID NO: 1524256 - DNA, 25 bp, Homo sapien
aaacattctgataaaatctgtgggc

SEQ ID NO: 1524257 - DNA, 25 bp, Homo sapien
ccgaaacattctgataaaatctgtg

SEQ ID NO: 1524258 - DNA, 25 bp, Homo sapien
gaaacattctgataaaatctgtggg

SEQ ID NO: 1524259 - DNA, 25 bp, Homo sapien
ccccgaaacattctgataaaatctg

SEQ ID NO: 1524260 - DNA, 25 bp, Homo sapien
tgtttgagtctcaggacctccttct

SEQ ID NO: 1524261 - DNA, 25 bp, Homo sapien
tctgggtaccaactaaaggtatctc

SEQ ID NO: 1524262 - DNA, 25 bp, Homo sapien
ttcacccaagtaccaagaaactgga

SEQ ID NO: 1524263 - DNA, 25 bp, Homo sapien
actcttgtctgggtaccaactaaag

SEQ ID NO: 1524264 - DNA, 25 bp, Homo sapien
ggtcacatctctaaatgtcaatggt

SEQ ID NO: 1524265 - DNA, 25 bp, Homo sapien
tggtcacatctctaaatgtcaatgg

SEQ ID NO: 1524266 - DNA, 25 bp, Homo sapien
tcacatctctaaatgtcaatggtcc

SEQ ID NO: 1524267 - DNA, 25 bp, Homo sapien
ctatggtcacatctctaaatgtcaa

SEQ ID NO: 1524268 - DNA, 25 bp, Homo sapien
tctgctgaaccgtgtccaggcattg

SEQ ID NO: 1524269 - DNA, 25 bp, Homo sapien
tccctatataaattctgctgaaccg

SEQ ID NO: 1524270 - DNA, 25 bp, Homo sapien
atataaattctgctgaaccgtgtcc

SEQ ID NO: 1524271 - DNA, 25 bp, Homo sapien
aaattctgctgaaccgtgtccaggc

SEQ ID NO: 1524272 - DNA, 25 bp, Homo sapien
tatcaagtctggcttaaagacagcc

SEQ ID NO: 1524273 - DNA, 25 bp, Homo sapien
tcagacaagttatcaagtctggctt

SEQ ID NO: 1524274 - DNA, 25 bp, Homo sapien
gcttcagacaagttatcaagtctgg

SEQ ID NO: 1524275 - DNA, 25 bp, Homo sapien
tcccttgcttcagacaagttatcaa

SEQ ID NO: 1524276 - DNA, 25 bp, Homo sapien
ctagtctcaaactccataccccagg

SEQ ID NO: 1524277 - DNA, 25 bp, Homo sapien
tagtctcaaactccataccccaggt

SEQ ID NO: 1524278 - DNA, 25 bp, Homo sapien
taagccaccgcgtccggctgaaaaa

SEQ ID NO: 1524279 - DNA, 25 bp, Homo sapien
gcataagccaccgcgtccggctgaa

SEQ ID NO: 1524280 - DNA, 25 bp, Homo sapien
ataacaaattattccacttgctaga

SEQ ID NO: 1524281 - DNA, 25 bp, Homo sapien
aataacaaattattccacttgctag

SEQ ID NO: 1524282 - DNA, 25 bp, Homo sapien
taacaaattattccacttgctagac

SEQ ID NO: 1524283 - DNA, 25 bp, Homo sapien
agctgtcctgcattggttaagttta

SEQ ID NO: 1524284 - DNA, 25 bp, Homo sapien
taccctcattggcacttttacaatc

SEQ ID NO: 1524285 - DNA, 25 bp, Homo sapien
atatttttctctgggtagctgtcct

SEQ ID NO: 1524286 - DNA, 25 bp, Homo sapien
tctttgtgcatcttaccctcattgg

SEQ ID NO: 1524287 - DNA, 25 bp, Homo sapien
ttctcttatgtcgaattaagcatga

SEQ ID NO: 1524288 - DNA, 25 bp, Homo sapien
tgtcgaattaagcatgaaagcatga

SEQ ID NO: 1524289 - DNA, 25 bp, Homo sapien
tatgtcgaattaagcatgaaagcat

SEQ ID NO: 1524290 - DNA, 25 bp, Homo sapien
ctcttatgtcgaattaagcatgaaa

SEQ ID NO: 1524291 - DNA, 25 bp, Homo sapien
gttgagaacgatttaaaggctttgc

SEQ ID NO: 1524292 - DNA, 25 bp, Homo sapien
tatgtttagtaagggttgagaacga

SEQ ID NO: 1524293 - DNA, 25 bp, Homo sapien
ttgagaacgatttaaaggctttgcc

SEQ ID NO: 1524294 - DNA, 25 bp, Homo sapien
tatcttatgtttagtaagggttgag

SEQ ID NO: 1524295 - DNA, 25 bp, Homo sapien
atgtttagtgaacgttgaagaaaat

SEQ ID NO: 1524296 - DNA, 25 bp, Homo sapien
tatgtttagtgaacgttgaagaaaa

SEQ ID NO: 1524297 - DNA, 25 bp, Homo sapien
ttatgtttagtgaacgttgaagaaa

SEQ ID NO: 1524298 - DNA, 25 bp, Homo sapien
attctcttatggtcagtaagatttg

SEQ ID NO: 1524299 - DNA, 25 bp, Homo sapien
ctcttatggtcagtaagatttgagg

SEQ ID NO: 1524300 - DNA, 25 bp, Homo sapien
tggtcagtaagatttgaggactggt

SEQ ID NO: 1524301 - DNA, 25 bp, Homo sapien
gtcagtaagatttgaggactggtta

SEQ ID NO: 1524302 - DNA, 25 bp, Homo sapien
tgcattaaaatttgaggacccctta

SEQ ID NO: 1524303 - DNA, 25 bp, Homo sapien
tatctcatgttttctaagggttgag

SEQ ID NO: 1524304 - DNA, 25 bp, Homo sapien
tctcatgttttctaagggttgagga

SEQ ID NO: 1524305 - DNA, 25 bp, Homo sapien
tcatgttttctaagggttgaggact

SEQ ID NO: 1524306 - DNA, 25 bp, Homo sapien
aattatctcatgttttctaagggtt

SEQ ID NO: 1524307 - DNA, 25 bp, Homo sapien
cagtatgaactaccttatgtacagt

SEQ ID NO: 1524308 - DNA, 25 bp, Homo sapien
ggtgtgaggattgcctaaaagcttt

SEQ ID NO: 1524309 - DNA, 25 bp, Homo sapien
tatgtcttctaaggtctgagaaatg

SEQ ID NO: 1524310 - DNA, 25 bp, Homo sapien
ctgatggtttctaagggttgaggac

SEQ ID NO: 1524311 - DNA, 25 bp, Homo sapien
tgaattaccttatgtacagtaagtt

SEQ ID NO: 1524312 - DNA, 25 bp, Homo sapien
cagtaagttttgatgaccacttaaa

SEQ ID NO: 1524313 - DNA, 25 bp, Homo sapien
cttatgttttctgagggctgagaaa

SEQ ID NO: 1524314 - DNA, 25 bp, Homo sapien
ttatgtacagtaagttttgatgacc

SEQ ID NO: 1524315 - DNA, 25 bp, Homo sapien
cttcacatttgtacaatttctccct

SEQ ID NO: 1524316 - DNA, 25 bp, Homo sapien
acatttgtacaatttctccctagta

SEQ ID NO: 1524317 - DNA, 25 bp, Homo sapien
tcacatttgtacaatttctccctag

SEQ ID NO: 1524318 - DNA, 25 bp, Homo sapien
atttgtacaatttctccctagtatg

SEQ ID NO: 1524319 - DNA, 25 bp, Homo sapien
cttatgtcttctaagggctgagaaa

SEQ ID NO: 1524320 - DNA, 25 bp, Homo sapien
cttctaagggctgagaaatggctaa

SEQ ID NO: 1524321 - DNA, 25 bp, Homo sapien
tgtttagcaaggattgaggaattgt

SEQ ID NO: 1524322 - DNA, 25 bp, Homo sapien
tatgtcttctaagggctgagaaatg

SEQ ID NO: 1524323 - DNA, 25 bp, Homo sapien
atgttttctaagggctgagaaatgc

SEQ ID NO: 1524324 - DNA, 25 bp, Homo sapien
cttatgttttctaagggctgagaaa

SEQ ID NO: 1524325 - DNA, 25 bp, Homo sapien
ttctaagggctgagaaatgcttaaa

SEQ ID NO: 1524326 - DNA, 25 bp, Homo sapien
gttttctaagggctgagaaatgctt

SEQ ID NO: 1524327 - DNA, 25 bp, Homo sapien
tcataagggctgagaaactgttaaa

SEQ ID NO: 1524328 - DNA, 25 bp, Homo sapien
tgtacagtaagctttgaggaccact

SEQ ID NO: 1524329 - DNA, 25 bp, Homo sapien
gagaaactgttaaaagctttgacac

SEQ ID NO: 1524330 - DNA, 25 bp, Homo sapien
tatgtttcataagggctgagaaact

SEQ ID NO: 1524331 - DNA, 25 bp, Homo sapien
atgttttctaagggctgagaaatgc

SEQ ID NO: 1524332 - DNA, 25 bp, Homo sapien
cttatgttttctaagggctgagaaa

SEQ ID NO: 1524333 - DNA, 25 bp, Homo sapien
gttttctaagggctgagaaatgctt

SEQ ID NO: 1524334 - DNA, 25 bp, Homo sapien
ttctaagggctgagaaatgcttaaa

SEQ ID NO: 1524335 - DNA, 25 bp, Homo sapien
tcatgttttctaagggatgaggatt

SEQ ID NO: 1524336 - DNA, 25 bp, Homo sapien
gttttctaagggatgaggattggct

SEQ ID NO: 1524337 - DNA, 25 bp, Homo sapien
ttctaagggatgaggattggctaaa

SEQ ID NO: 1524338 - DNA, 25 bp, Homo sapien
tatctcatgttttctaagggatgag

SEQ ID NO: 1524339 - DNA, 25 bp, Homo sapien
cttatgtacagtaagttttgacaac

SEQ ID NO: 1524340 - DNA, 25 bp, Homo sapien
tgtacagtaagttttgacaaccact

SEQ ID NO: 1524341 - DNA, 25 bp, Homo sapien
caaccacttaaaagctttaccacat

SEQ ID NO: 1524342 - DNA, 25 bp, Homo sapien
tatgtacagtaagttttgacaacca

SEQ ID NO: 1524343 - DNA, 25 bp, Homo sapien
gctttatgtctagtaagatgtgagg

SEQ ID NO: 1524344 - DNA, 25 bp, Homo sapien
cataagggttgaggaatcattaaaa

SEQ ID NO: 1524345 - DNA, 25 bp, Homo sapien
tatgcttcataagggttgaggaatc

SEQ ID NO: 1524346 - DNA, 25 bp, Homo sapien
ttcataagggctgagaaattgttaa

SEQ ID NO: 1524347 - DNA, 25 bp, Homo sapien
ataaggtatgagcactgaataaaag

SEQ ID NO: 1524348 - DNA, 25 bp, Homo sapien
tgtctaataaggtatgagcactgaa

SEQ ID NO: 1524349 - DNA, 25 bp, Homo sapien
gtatgagcactgaataaaagctttg

SEQ ID NO: 1524350 - DNA, 25 bp, Homo sapien
tttatgtctaataaggtatgagcac

SEQ ID NO: 1524351 - DNA, 25 bp, Homo sapien
atttgtggagtttatcttctttagg

SEQ ID NO: 1524352 - DNA, 25 bp, Homo sapien
gagtttatcttctttaggaattctc

SEQ ID NO: 1524353 - DNA, 25 bp, Homo sapien
gtttatcttctttaggaattctctc

SEQ ID NO: 1524354 - DNA, 25 bp, Homo sapien
ttatcttctttaggaattctctcat

SEQ ID NO: 1524355 - DNA, 25 bp, Homo sapien
ttatgttcagtaagatttgaggacc

SEQ ID NO: 1524356 - DNA, 25 bp, Homo sapien
ttcagtaagatttgaggaccggtca

SEQ ID NO: 1524357 - DNA, 25 bp, Homo sapien
tgttcagtaagatttgaggaccggt

SEQ ID NO: 1524358 - DNA, 25 bp, Homo sapien
tatgttcagtaagatttgaggaccg

SEQ ID NO: 1524359 - DNA, 25 bp, Homo sapien
atcctttgaatttgtagcgttcctc

SEQ ID NO: 1524360 - DNA, 25 bp, Homo sapien
ttgaatttgtagcgttcctctccac

SEQ ID NO: 1524361 - DNA, 25 bp, Homo sapien
tcctttgaatttgtagcgttcctct

SEQ ID NO: 1524362 - DNA, 25 bp, Homo sapien
cctttgaatttgtagcgttcctctc

SEQ ID NO: 1524363 - DNA, 25 bp, Homo sapien
ttgagtaaggtctcaaaaccagtta

SEQ ID NO: 1524364 - DNA, 25 bp, Homo sapien
attttgagtaaggtctcaaaaccag

SEQ ID NO: 1524365 - DNA, 25 bp, Homo sapien
tgagtaaggtctcaaaaccagttaa

SEQ ID NO: 1524366 - DNA, 25 bp, Homo sapien
tattttgagtaaggtctcaaaacca

SEQ ID NO: 1524367 - DNA, 25 bp, Homo sapien
gtcacattcttcacatttatagagt

SEQ ID NO: 1524368 - DNA, 25 bp, Homo sapien
cacattcttcacatttatagagttt

SEQ ID NO: 1524369 - DNA, 25 bp, Homo sapien
ctgagaattgattaaaagcattgtc

SEQ ID NO: 1524370 - DNA, 25 bp, Homo sapien
cattcttcacatttatagagtttgt

SEQ ID NO: 1524371 - DNA, 25 bp, Homo sapien
aggactggctaaaagtgttcccact

SEQ ID NO: 1524372 - DNA, 25 bp, Homo sapien
ttttgaataatgctaggacaatgtc

SEQ ID NO: 1524373 - DNA, 25 bp, Homo sapien
tgccaaggtatctaaaagagggctt

SEQ ID NO: 1524374 - DNA, 25 bp, Homo sapien
gacttgttgtacagcatggtgtcta

SEQ ID NO: 1524375 - DNA, 25 bp, Homo sapien
aaaattgtaaccaccagatgccaag

SEQ ID NO: 1524376 - DNA, 25 bp, Homo sapien
gcttgcacactgctagtctgagtgt

SEQ ID NO: 1524377 - DNA, 25 bp, Homo sapien
catacatatggccaagagatatttt

SEQ ID NO: 1524378 - DNA, 25 bp, Homo sapien
aagttgctgtacagaatctgatata

SEQ ID NO: 1524379 - DNA, 25 bp, Homo sapien
cacttattatcagagaaaggcaagc

SEQ ID NO: 1524380 - DNA, 25 bp, Homo sapien
tagcccagggacaccttagctacaa

SEQ ID NO: 1524381 - DNA, 25 bp, Homo sapien
acaacccagggttgatgtccagctc

SEQ ID NO: 1524382 - DNA, 25 bp, Homo sapien
gatctctcggtctgcagggccagtt

SEQ ID NO: 1524383 - DNA, 25 bp, Homo sapien
tcctggacaagatctctcggtctgc

SEQ ID NO: 1524384 - DNA, 25 bp, Homo sapien
tggcaatggttccagctgcggccca

SEQ ID NO: 1524385 - DNA, 25 bp, Homo sapien
cctcaagctctaggcagtttctcct

SEQ ID NO: 1524386 - DNA, 25 bp, Homo sapien
tcaagctctaggcagtttctcctgg

SEQ ID NO: 1524387 - DNA, 25 bp, Homo sapien
tttgcctcaagctctaggcagtttc

SEQ ID NO: 1524388 - DNA, 25 bp, Homo sapien
caagctctaggcagtttctcctggt

SEQ ID NO: 1524389 - DNA, 25 bp, Homo sapien
aggaaatgatgcagttgtagcttgc

SEQ ID NO: 1524390 - DNA, 25 bp, Homo sapien
aaatgatgcagttgtagcttgctgg

SEQ ID NO: 1524391 - DNA, 25 bp, Homo sapien
aatgatgcagttgtagcttgctggg

SEQ ID NO: 1524392 - DNA, 25 bp, Homo sapien
gaaatgatgcagttgtagcttgctg

SEQ ID NO: 1524393 - DNA, 25 bp, Homo sapien
caggaagacttcgaggggttcgtgc

SEQ ID NO: 1524394 - DNA, 25 bp, Homo sapien
agttcttatgaaattgtcaaaaaga

SEQ ID NO: 1524395 - DNA, 25 bp, Homo sapien
cgaggggttcgtgctgtaagaccta

SEQ ID NO: 1524396 - DNA, 25 bp, Homo sapien
ctaaagttcttatgaaattgtcaaa

SEQ ID NO: 1524397 - DNA, 25 bp, Homo sapien
attcgttaggcaatttgttcaggta

SEQ ID NO: 1524398 - DNA, 25 bp, Homo sapien
atttattcgttaggcaatttgttca

SEQ ID NO: 1524399 - DNA, 25 bp, Homo sapien
tacttctgtgaaagttgcaaactgc

SEQ ID NO: 1524400 - DNA, 25 bp, Homo sapien
ttattcgttaggcaatttgttcagg

SEQ ID NO: 1524401 - DNA, 25 bp, Homo sapien
caaacctgaaagttgtaacaatgct

SEQ ID NO: 1524402 - DNA, 25 bp, Homo sapien
caatgctcaaaccttattgcacagg

SEQ ID NO: 1524403 - DNA, 25 bp, Homo sapien
taacaatgcttgtgacaacattgca

SEQ ID NO: 1524404 - DNA, 25 bp, Homo sapien
taacaactcctctattcttaacaga

SEQ ID NO: 1524405 - DNA, 25 bp, Homo sapien
aatgtggcaaagcttttagccagtc

SEQ ID NO: 1524406 - DNA, 25 bp, Homo sapien
gcttttagccagtcctcaaccctta

SEQ ID NO: 1524407 - DNA, 25 bp, Homo sapien
gcaaagcttttagccagtcctcaac

SEQ ID NO: 1524408 - DNA, 25 bp, Homo sapien
gtggcaaagcttttagccagtcctc

SEQ ID NO: 1524409 - DNA, 25 bp, Homo sapien
ggttgctctatgttgtgtctcagat

SEQ ID NO: 1524410 - DNA, 25 bp, Homo sapien
gagataagcagataccaggagagga

SEQ ID NO: 1524411 - DNA, 25 bp, Homo sapien
tatgttgtgtctcagattccaggag

SEQ ID NO: 1524412 - DNA, 25 bp, Homo sapien
caggagataagcagataccaggaga

SEQ ID NO: 1524413 - DNA, 25 bp, Homo sapien
cagggtgggtgaactggtcaggata

SEQ ID NO: 1524414 - DNA, 25 bp, Homo sapien
ggtcaggataggttcttggcctagt

SEQ ID NO: 1524415 - DNA, 25 bp, Homo sapien
ggtgaactggtcaggataggttctt

SEQ ID NO: 1524416 - DNA, 25 bp, Homo sapien
ggataggttcttggcctagtacagg

SEQ ID NO: 1524417 - DNA, 25 bp, Homo sapien
ctctgtctgaagttggggtccctgg

SEQ ID NO: 1524418 - DNA, 25 bp, Homo sapien
ctgtctgaagttggggtccctggcc

SEQ ID NO: 1524419 - DNA, 25 bp, Homo sapien
tgaagttggggtccctggcctctgc

SEQ ID NO: 1524420 - DNA, 25 bp, Homo sapien
tctgaagttggggtccctggcctct

SEQ ID NO: 1524421 - DNA, 25 bp, Homo sapien
ctgtaattgggagcaaggttcccca

SEQ ID NO: 1524422 - DNA, 25 bp, Homo sapien
tgtaattgggagcaaggttccccag

SEQ ID NO: 1524423 - DNA, 25 bp, Homo sapien
gcaggttatattgccttcctcagca

SEQ ID NO: 1524424 - DNA, 25 bp, Homo sapien
ccaggcaggttatattgccttcctc

SEQ ID NO: 1524425 - DNA, 25 bp, Homo sapien
tggttgacccaagccccttatgatg

SEQ ID NO: 1524426 - DNA, 25 bp, Homo sapien
gccctaatgcattggaggtccttaa

SEQ ID NO: 1524427 - DNA, 25 bp, Homo sapien
tgcagagtccagaaccagaatatct

SEQ ID NO: 1524428 - DNA, 25 bp, Homo sapien
gagtggtcagcttcagacaggagtc

SEQ ID NO: 1524429 - DNA, 25 bp, Homo sapien
tctgactttgttaagaaactttgct

SEQ ID NO: 1524430 - DNA, 25 bp, Homo sapien
tcccagaggacgaatatggcagggc

SEQ ID NO: 1524431 - DNA, 25 bp, Homo sapien
tgattaggccggataatcctggtaa

SEQ ID NO: 1524432 - DNA, 25 bp, Homo sapien
aactttattagcctgcctggtctgg

SEQ ID NO: 1524433 - DNA, 25 bp, Homo sapien
gcccggccaggctcccggtgtcctc

SEQ ID NO: 1524434 - DNA, 25 bp, Homo sapien
tccaggctgccagtggcccggccag

SEQ ID NO: 1524435 - DNA, 25 bp, Homo sapien
gggctccaggctgccagtggcccgg

SEQ ID NO: 1524436 - DNA, 25 bp, Homo sapien
ccaggctcccggtgtcctcctccaa

SEQ ID NO: 1524437 - DNA, 25 bp, Homo sapien
ttgcaaaggcgctctggttccccag

SEQ ID NO: 1524438 - DNA, 25 bp, Homo sapien
cttgcaaaggcgctctggttcccca

SEQ ID NO: 1524439 - DNA, 25 bp, Homo sapien
ccctggccaccgagccgcgcgggac

SEQ ID NO: 1524440 - DNA, 25 bp, Homo sapien
cgggggctcggattcagagccatct

SEQ ID NO: 1524441 - DNA, 25 bp, Homo sapien
cgctctgggaaatttgcccccgcta

SEQ ID NO: 1524442 - DNA, 25 bp, Homo sapien
ccagtggctgtcgtgggcggccccg

SEQ ID NO: 1524443 - DNA, 25 bp, Homo sapien
caaaaacaaaatctcaaaataggct

SEQ ID NO: 1524444 - DNA, 25 bp, Homo sapien
acaaaatctcaaaataggctgggcc

SEQ ID NO: 1524445 - DNA, 25 bp, Homo sapien
aacaaaatctcaaaataggctgggc

SEQ ID NO: 1524446 - DNA, 25 bp, Homo sapien
aaaacaaaatctcaaaataggctgg

SEQ ID NO: 1524447 - DNA, 25 bp, Homo sapien
gggaatcgattgaattagggagtcg

SEQ ID NO: 1524448 - DNA, 25 bp, Homo sapien
aatcgattgaattagggagtcggag

SEQ ID NO: 1524449 - DNA, 25 bp, Homo sapien
caggggaatcgattgaattagggag

SEQ ID NO: 1524450 - DNA, 25 bp, Homo sapien
gcaggggaatcgattgaattaggga

SEQ ID NO: 1524451 - DNA, 25 bp, Homo sapien
acctccagctactgagttcaagcga

SEQ ID NO: 1524452 - DNA, 25 bp, Homo sapien
tgagcctcccaaagtgctaggatta

SEQ ID NO: 1524453 - DNA, 25 bp, Homo sapien
ttacaggagcgggccaccatgccca

SEQ ID NO: 1524454 - DNA, 25 bp, Homo sapien
aacctccagctactgagttcaagcg

SEQ ID NO: 1524455 - DNA, 25 bp, Homo sapien
gcaccacctgtttacctgctaccac

SEQ ID NO: 1524456 - DNA, 25 bp, Homo sapien
caccacctgtttacctgctaccacc

SEQ ID NO: 1524457 - DNA, 25 bp, Homo sapien
tcagcaccacctgtttacctgctac

SEQ ID NO: 1524458 - DNA, 25 bp, Homo sapien
agcaccacctgtttacctgctacca

SEQ ID NO: 1524459 - DNA, 25 bp, Homo sapien
gacatctgtggaatagccttgggca

SEQ ID NO: 1524460 - DNA, 25 bp, Homo sapien
gacagactctgacacaataatagga

SEQ ID NO: 1524461 - DNA, 25 bp, Homo sapien
catgttgaactgtcaagacgtcgga

SEQ ID NO: 1524462 - DNA, 25 bp, Homo sapien
gacgtcggaatttcagtagacaatg

SEQ ID NO: 1524463 - DNA, 25 bp, Homo sapien
tgttcacctactaccaccacgccca

SEQ ID NO: 1524464 - DNA, 25 bp, Homo sapien
catgttcacctactaccaccacgcc

SEQ ID NO: 1524465 - DNA, 25 bp, Homo sapien
atgttcacctactaccaccacgccc

SEQ ID NO: 1524466 - DNA, 25 bp, Homo sapien
catccaccatctcatgtctcttcat

SEQ ID NO: 1524467 - DNA, 25 bp, Homo sapien
tgggtgttcatccaccatctcatgt

SEQ ID NO: 1524468 - DNA, 25 bp, Homo sapien
gttcatccaccatctcatgtctctt

SEQ ID NO: 1524469 - DNA, 25 bp, Homo sapien
ctgggtgttcatccaccatctcatg

SEQ ID NO: 1524470 - DNA, 25 bp, Homo sapien
tgctaaatgtaagcagaatatggtt

SEQ ID NO: 1524471 - DNA, 25 bp, Homo sapien
taaatgtaagcagaatatggttaga

SEQ ID NO: 1524472 - DNA, 25 bp, Homo sapien
aatgtaagcagaatatggttagagc

SEQ ID NO: 1524473 - DNA, 25 bp, Homo sapien
attgctaaatgtaagcagaatatgg

SEQ ID NO: 1524474 - DNA, 25 bp, Homo sapien
aaacttcactgtagcatgaattctt

SEQ ID NO: 1524475 - DNA, 25 bp, Homo sapien
ctgttatagacttttccacattctt

SEQ ID NO: 1524476 - DNA, 25 bp, Homo sapien
ttatagacttttccacattctttac

SEQ ID NO: 1524477 - DNA, 25 bp, Homo sapien
tgttatagacttttccacattcttt

SEQ ID NO: 1524478 - DNA, 25 bp, Homo sapien
gttatagacttttccacattcttta

SEQ ID NO: 1524479 - DNA, 25 bp, Homo sapien
tcttatgtgtagtaaaggttgagga

SEQ ID NO: 1524480 - DNA, 25 bp, Homo sapien
cttatgtgtagtaaaggttgaggat

SEQ ID NO: 1524481 - DNA, 25 bp, Homo sapien
tgtctagtaaggtttgtagactggt

SEQ ID NO: 1524482 - DNA, 25 bp, Homo sapien
ttatgtctagtaaggtttgtagact

SEQ ID NO: 1524483 - DNA, 25 bp, Homo sapien
ttagggatggttaaaagctttgcca

SEQ ID NO: 1524484 - DNA, 25 bp, Homo sapien
atgttcagtaaggttttagggatgg

SEQ ID NO: 1524485 - DNA, 25 bp, Homo sapien
tatgttcagtaaggttttagggatg

SEQ ID NO: 1524486 - DNA, 25 bp, Homo sapien
tgtttagaaagtattgaggactggt

SEQ ID NO: 1524487 - DNA, 25 bp, Homo sapien
atgtttagaaagtattgaggactgg

SEQ ID NO: 1524488 - DNA, 25 bp, Homo sapien
tttagaaagtattgaggactggtta

SEQ ID NO: 1524489 - DNA, 25 bp, Homo sapien
gtctagtaagggttgtagaatatgt

SEQ ID NO: 1524490 - DNA, 25 bp, Homo sapien
ctagtaagggttgtagaatatgtaa

SEQ ID NO: 1524491 - DNA, 25 bp, Homo sapien
gtgtagtaagcattgaggattcgtt

SEQ ID NO: 1524492 - DNA, 25 bp, Homo sapien
taagcattgaggattcgttgaaagc

SEQ ID NO: 1524493 - DNA, 25 bp, Homo sapien
aagggttgcagagtctgtgaaagct

SEQ ID NO: 1524494 - DNA, 25 bp, Homo sapien
ggttgcagagtctgtgaaagctttg

SEQ ID NO: 1524495 - DNA, 25 bp, Homo sapien
tgcagagtctgtgaaagctttgcca

SEQ ID NO: 1524496 - DNA, 25 bp, Homo sapien
tatgtttaggaagggttgcagagtc

SEQ ID NO: 1524497 - DNA, 25 bp, Homo sapien
cttattcttaataaggcttgcagat

SEQ ID NO: 1524498 - DNA, 25 bp, Homo sapien
ttcttaataaggcttgcagataggt

SEQ ID NO: 1524499 - DNA, 25 bp, Homo sapien
tattcttaataaggcttgcagatag

SEQ ID NO: 1524500 - DNA, 25 bp, Homo sapien
cttaataaggcttgcagataggtta

SEQ ID NO: 1524501 - DNA, 25 bp, Homo sapien
gacctcatactaatagtctcatcta

SEQ ID NO: 1524502 - DNA, 25 bp, Homo sapien
gataacatttgactaaaagcttgca

SEQ ID NO: 1524503 - DNA, 25 bp, Homo sapien
ggacaaccacttcttagcgataaac

SEQ ID NO: 1524504 - DNA, 25 bp, Homo sapien
catttgcttcttatccacacatcac

SEQ ID NO: 1524505 - DNA, 25 bp, Homo sapien
cccagttctgccagagagggggcgg

SEQ ID NO: 1524506 - DNA, 25 bp, Homo sapien
agagagggggcggatcggcgtgcgt

SEQ ID NO: 1524507 - DNA, 25 bp, Homo sapien
gcgtgcgtggcggacggtgtcggag

SEQ ID NO: 1524508 - DNA, 25 bp, Homo sapien
ccgcgcgctcaggccatgggtagag

SEQ ID NO: 1524509 - DNA, 25 bp, Homo sapien
tataggctggagcaacgtcttacag

SEQ ID NO: 1524510 - DNA, 25 bp, Homo sapien
cccacttataggctggagcaacgtc

SEQ ID NO: 1524511 - DNA, 25 bp, Homo sapien
ggagtcctttgtgccgtgtatctga

SEQ ID NO: 1524512 - DNA, 25 bp, Homo sapien
gcaacgtcttacagggcgtagaact

SEQ ID NO: 1524513 - DNA, 25 bp, Homo sapien
gagccctaggttccgaggctcccag

SEQ ID NO: 1524514 - DNA, 25 bp, Homo sapien
gttcagtggcgcaggagggtccagg

SEQ ID NO: 1524515 - DNA, 25 bp, Homo sapien
gcaggagtcggtgagttgcctctca

SEQ ID NO: 1524516 - DNA, 25 bp, Homo sapien
taaaggaactctgacccagagcgtg

SEQ ID NO: 1524517 - DNA, 25 bp, Homo sapien
ggatccgaggggaaagcctgatggg

SEQ ID NO: 1524518 - DNA, 25 bp, Homo sapien
aggatccgaggggaaagcctgatgg

SEQ ID NO: 1524519 - DNA, 25 bp, Homo sapien
gatccgaggggaaagcctgatggga

SEQ ID NO: 1524520 - DNA, 25 bp, Homo sapien
agttcacttggtaccttcggataag

SEQ ID NO: 1524521 - DNA, 25 bp, Homo sapien
gtaccttcggataagtcctggttca

SEQ ID NO: 1524522 - DNA, 25 bp, Homo sapien
attcagctgtcacattaattttctc

SEQ ID NO: 1524523 - DNA, 25 bp, Homo sapien
acttggtaccttcggataagtcctg

SEQ ID NO: 1524524 - DNA, 25 bp, Homo sapien
cttttatttagttccagggcttatg

SEQ ID NO: 1524525 - DNA, 25 bp, Homo sapien
cactagacttttatttagttccagg

SEQ ID NO: 1524526 - DNA, 25 bp, Homo sapien
ttttatttagttccagggcttatga

SEQ ID NO: 1524527 - DNA, 25 bp, Homo sapien
tgtattcactagacttttatttagt

SEQ ID NO: 1524528 - DNA, 25 bp, Homo sapien
gctctcacatttagccttagcatga

SEQ ID NO: 1524529 - DNA, 25 bp, Homo sapien
tgtaactttacgatagagacaagga

SEQ ID NO: 1524530 - DNA, 25 bp, Homo sapien
tacagttgtaagcattatacctata

SEQ ID NO: 1524531 - DNA, 25 bp, Homo sapien
catagtcgtagagttagattttcca

SEQ ID NO: 1524532 - DNA, 25 bp, Homo sapien
gccagagccaggtactaaaatcttt

SEQ ID NO: 1524533 - DNA, 25 bp, Homo sapien
tagcaaatgatcaatggggtgtggc

SEQ ID NO: 1524534 - DNA, 25 bp, Homo sapien
ttgccggcggagaagagatccaggt

SEQ ID NO: 1524535 - DNA, 25 bp, Homo sapien
caggtgccttgatgtgagtgttgac

SEQ ID NO: 1524536 - DNA, 25 bp, Homo sapien
aaacatatggaacagttcacaaatt

SEQ ID NO: 1524537 - DNA, 25 bp, Homo sapien
aacatatggaacagttcacaaattt

SEQ ID NO: 1524538 - DNA, 25 bp, Homo sapien
gcttgtcatccttgtgcagaggcca

SEQ ID NO: 1524539 - DNA, 25 bp, Homo sapien
tgcagaggccatgctgatcttcact

SEQ ID NO: 1524540 - DNA, 25 bp, Homo sapien
tctgagaggctgttagcaacttggg

SEQ ID NO: 1524541 - DNA, 25 bp, Homo sapien
ttactgttatgagatcctgttgatc

SEQ ID NO: 1524542 - DNA, 25 bp, Homo sapien
tccggctgccagagtctgtgtgaca

SEQ ID NO: 1524543 - DNA, 25 bp, Homo sapien
ggaaagcaccaggtttactgttatg

SEQ ID NO: 1524544 - DNA, 25 bp, Homo sapien
gcaaggccctttggaatctgacttc

SEQ ID NO: 1524545 - DNA, 25 bp, Homo sapien
acttgcaaggccctttggaatctga

SEQ ID NO: 1524546 - DNA, 25 bp, Homo sapien
catttaagtcatattcaagctgctc

SEQ ID NO: 1524547 - DNA, 25 bp, Homo sapien
ctgctcctttatgagacttgcaagg

SEQ ID NO: 1524548 - DNA, 25 bp, Homo sapien
ctttccagctagatccagtcccggg

SEQ ID NO: 1524549 - DNA, 25 bp, Homo sapien
gtcccatcaggctttcccctcggat

SEQ ID NO: 1524550 - DNA, 25 bp, Homo sapien
ttctcagggcggccgtgggtcccat

SEQ ID NO: 1524551 - DNA, 25 bp, Homo sapien
cctgattccgggagagcatctgccc

SEQ ID NO: 1524552 - DNA, 25 bp, Homo sapien
tttcttccgacatggcagggcggga

SEQ ID NO: 1524553 - DNA, 25 bp, Homo sapien
ccacatcagctctatcccagttacc

SEQ ID NO: 1524554 - DNA, 25 bp, Homo sapien
atcagctctatcccagttaccactg

SEQ ID NO: 1524555 - DNA, 25 bp, Homo sapien
acatcagctctatcccagttaccac

SEQ ID NO: 1524556 - DNA, 25 bp, Homo sapien
ctggggctgggtcgttgggctgcca

SEQ ID NO: 1524557 - DNA, 25 bp, Homo sapien
tggggctgggtcgttgggctgccac

SEQ ID NO: 1524558 - DNA, 25 bp, Homo sapien
aacccagtgagcctcgggagtggca

SEQ ID NO: 1524559 - DNA, 25 bp, Homo sapien
gcatgagctctggccgtggtcctgc

SEQ ID NO: 1524560 - DNA, 25 bp, Homo sapien
ctcgggagtggcatgagctctggcc

SEQ ID NO: 1524561 - DNA, 25 bp, Homo sapien
ggcccaacccagtgagcctcgggag

SEQ ID NO: 1524562 - DNA, 25 bp, Homo sapien
tgttcctccactgatagtctctcaa

SEQ ID NO: 1524563 - DNA, 25 bp, Homo sapien
ttttcactcctgtaggaacaccagg

SEQ ID NO: 1524564 - DNA, 25 bp, Homo sapien
agggctgttcctccactgatagtct

SEQ ID NO: 1524565 - DNA, 25 bp, Homo sapien
tgtctcggggttactgcaattttta

SEQ ID NO: 1524566 - DNA, 25 bp, Homo sapien
cgacatctgattcatcctctgctgc

SEQ ID NO: 1524567 - DNA, 25 bp, Homo sapien
gccatgtggctctctctcctttaag

SEQ ID NO: 1524568 - DNA, 25 bp, Homo sapien
tctctctccagttgtatttgtctac

SEQ ID NO: 1524569 - DNA, 25 bp, Homo sapien
taagaatctcagcaaatgtatctct

SEQ ID NO: 1524570 - DNA, 25 bp, Homo sapien
gctggacaggctaccatctccctct

SEQ ID NO: 1524571 - DNA, 25 bp, Homo sapien
acaaagcccagactcatgaccaccc

SEQ ID NO: 1524572 - DNA, 25 bp, Homo sapien
atgaccacccctcccattttacaga

SEQ ID NO: 1524573 - DNA, 25 bp, Homo sapien
tggacaggctaccatctccctctct

SEQ ID NO: 1524574 - DNA, 25 bp, Homo sapien
tcctgtaaccgattcataatacact

SEQ ID NO: 1524575 - DNA, 25 bp, Homo sapien
taaccgattcataatacactccttc

SEQ ID NO: 1524576 - DNA, 25 bp, Homo sapien
gattcataatacactccttctcctc

SEQ ID NO: 1524577 - DNA, 25 bp, Homo sapien
ttctcaattccaccaagcttgtctc

SEQ ID NO: 1524578 - DNA, 25 bp, Homo sapien
gggggtgccagggctgggagttcag

SEQ ID NO: 1524579 - DNA, 25 bp, Homo sapien
tgggggtgccagggctgggagttca

SEQ ID NO: 1524580 - DNA, 25 bp, Homo sapien
ctgggggtgccagggctgggagttc

SEQ ID NO: 1524581 - DNA, 25 bp, Homo sapien
gggcttggagctgtcctgccagact

SEQ ID NO: 1524582 - DNA, 25 bp, Homo sapien
cctccctcaggtgctcagcctcctc

SEQ ID NO: 1524583 - DNA, 25 bp, Homo sapien
tcaggtgctcagcctcctcttgtag

SEQ ID NO: 1524584 - DNA, 25 bp, Homo sapien
tgctgctccacctcggagggccttg

SEQ ID NO: 1524585 - DNA, 25 bp, Homo sapien
gcaactcaagccctcattgtcctgt

SEQ ID NO: 1524586 - DNA, 25 bp, Homo sapien
tgctcccggttcaggcaactcaagc

SEQ ID NO: 1524587 - DNA, 25 bp, Homo sapien
ctcctgctcccggttcaggcaactc

SEQ ID NO: 1524588 - DNA, 25 bp, Homo sapien
aactcaagccctcattgtcctgtac

SEQ ID NO: 1524589 - DNA, 25 bp, Homo sapien
acaggatttgtctctgtgcctccac

SEQ ID NO: 1524590 - DNA, 25 bp, Homo sapien
ctacaggatttgtctctgtgcctcc

SEQ ID NO: 1524591 - DNA, 25 bp, Homo sapien
tacaggatttgtctctgtgcctcca

SEQ ID NO: 1524592 - DNA, 25 bp, Homo sapien
ccagctgttccttgacctcacaggt

SEQ ID NO: 1524593 - DNA, 25 bp, Homo sapien
ttatgaagccactctgcagctcggc

SEQ ID NO: 1524594 - DNA, 25 bp, Homo sapien
gctttatgaagccactctgcagctc

SEQ ID NO: 1524595 - DNA, 25 bp, Homo sapien
agctcggccagctgttccttgacct

SEQ ID NO: 1524596 - DNA, 25 bp, Homo sapien
atgaatagggtacctagggcactgc

SEQ ID NO: 1524597 - DNA, 25 bp, Homo sapien
gaatagggtacctagggcactgcag

SEQ ID NO: 1524598 - DNA, 25 bp, Homo sapien
tgaatagggtacctagggcactgca

SEQ ID NO: 1524599 - DNA, 25 bp, Homo sapien
aatagggtacctagggcactgcagg

SEQ ID NO: 1524600 - DNA, 25 bp, Homo sapien
tggtggcctgctttcaaattctggg

SEQ ID NO: 1524601 - DNA, 25 bp, Homo sapien
aggtggtggcctgctttcaaattct

SEQ ID NO: 1524602 - DNA, 25 bp, Homo sapien
ggtggtggcctgctttcaaattctg

SEQ ID NO: 1524603 - DNA, 25 bp, Homo sapien
ggtggcctgctttcaaattctgggc

SEQ ID NO: 1524604 - DNA, 25 bp, Homo sapien
tgcaggggacccagggactggtctt

SEQ ID NO: 1524605 - DNA, 25 bp, Homo sapien
gcaggggacccagggactggtcttg

SEQ ID NO: 1524606 - DNA, 25 bp, Homo sapien
cccagggactggtcttgctgcggct

SEQ ID NO: 1524607 - DNA, 25 bp, Homo sapien
ggacccagggactggtcttgctgcg

SEQ ID NO: 1524608 - DNA, 25 bp, Homo sapien
ctgtgcagcgcctccatctcagagc

SEQ ID NO: 1524609 - DNA, 25 bp, Homo sapien
gcctccatctcagagctcagctgct

SEQ ID NO: 1524610 - DNA, 25 bp, Homo sapien
tgtgcagcgcctccatctcagagct

SEQ ID NO: 1524611 - DNA, 25 bp, Homo sapien
tccatctcagagctcagctgctgac

SEQ ID NO: 1524612 - DNA, 25 bp, Homo sapien
ctgcagctggtccatgagctgggtc

SEQ ID NO: 1524613 - DNA, 25 bp, Homo sapien
ctgctgcagctggtccatgagctgg

SEQ ID NO: 1524614 - DNA, 25 bp, Homo sapien
ctggtccatgagctgggtctgcagc

SEQ ID NO: 1524615 - DNA, 25 bp, Homo sapien
cagctggtccatgagctgggtctgc

SEQ ID NO: 1524616 - DNA, 25 bp, Homo sapien
ctgggtcccccgcaactcttggtgg

SEQ ID NO: 1524617 - DNA, 25 bp, Homo sapien
cccttgggacccgccctcagcaact

SEQ ID NO: 1524618 - DNA, 25 bp, Homo sapien
cttgggacccgccctcagcaactcc

SEQ ID NO: 1524619 - DNA, 25 bp, Homo sapien
ggctgccaggtcgtcccccttggga

SEQ ID NO: 1524620 - DNA, 25 bp, Homo sapien
agaggctgccaggtcgtcccccttg

SEQ ID NO: 1524621 - DNA, 25 bp, Homo sapien
gcctgtagctgctggttctctggct

SEQ ID NO: 1524622 - DNA, 25 bp, Homo sapien
tgggcctgtagctgctggttctctg

SEQ ID NO: 1524623 - DNA, 25 bp, Homo sapien
ggcctgtagctgctggttctctggc

SEQ ID NO: 1524624 - DNA, 25 bp, Homo sapien
gctgggcctgtagctgctggttctc

SEQ ID NO: 1524625 - DNA, 25 bp, Homo sapien
actcctatctgctaacagtcccccc

SEQ ID NO: 1524626 - DNA, 25 bp, Homo sapien
tcttcctctgagtgatctcccgtac

SEQ ID NO: 1524627 - DNA, 25 bp, Homo sapien
tcctatctgctaacagtcccccctt

SEQ ID NO: 1524628 - DNA, 25 bp, Homo sapien
cctcttcctctgagtgatctcccgt

SEQ ID NO: 1524629 - DNA, 25 bp, Homo sapien
aaacccggtcggcatagtgaccagc

SEQ ID NO: 1524630 - DNA, 25 bp, Homo sapien
actactgcccggcaggggagttctg

SEQ ID NO: 1524631 - DNA, 25 bp, Homo sapien
cttaacgcagaaacccggtcggcat

SEQ ID NO: 1524632 - DNA, 25 bp, Homo sapien
gatgccgaacttaacgcagaaaccc

SEQ ID NO: 1524633 - DNA, 25 bp, Homo sapien
caggaaaccaaaagcataagcgggt

SEQ ID NO: 1524634 - DNA, 25 bp, Homo sapien
gtcaaatggtatctgtctgaccact

SEQ ID NO: 1524635 - DNA, 25 bp, Homo sapien
aaatggtatctgtctgaccactggc

SEQ ID NO: 1524636 - DNA, 25 bp, Homo sapien
gcaggaaaccaaaagcataagcggg

SEQ ID NO: 1524637 - DNA, 25 bp, Homo sapien
gcaagaggtgtgcattcttcttggg

SEQ ID NO: 1524638 - DNA, 25 bp, Homo sapien
cttgggggatatacaggaccaacgg

SEQ ID NO: 1524639 - DNA, 25 bp, Homo sapien
agctgcccacggagccgagcctgct

SEQ ID NO: 1524640 - DNA, 25 bp, Homo sapien
tgcaggcaagaggtgtgcattcttc

SEQ ID NO: 1524641 - DNA, 25 bp, Homo sapien
acatctcggcagtgaactgcctcgc

SEQ ID NO: 1524642 - DNA, 25 bp, Homo sapien
catctcggcagtgaactgcctcgct

SEQ ID NO: 1524643 - DNA, 25 bp, Homo sapien
actgcctcgctcacacccttcttgg

SEQ ID NO: 1524644 - DNA, 25 bp, Homo sapien
aactgcctcgctcacacccttcttg

SEQ ID NO: 1524645 - DNA, 25 bp, Homo sapien
cctgcatcagctgcataaagcagct

SEQ ID NO: 1524646 - DNA, 25 bp, Homo sapien
tcctgcatcagctgcataaagcagc

SEQ ID NO: 1524647 - DNA, 25 bp, Homo sapien
ccagagagctggatgcagcgatgtt

SEQ ID NO: 1524648 - DNA, 25 bp, Homo sapien
ggatgcagcgatgttccagctcctc

SEQ ID NO: 1524649 - DNA, 25 bp, Homo sapien
agagctggatgcagcgatgttccag

SEQ ID NO: 1524650 - DNA, 25 bp, Homo sapien
ctggatgcagcgatgttccagctcc

SEQ ID NO: 1524651 - DNA, 25 bp, Homo sapien
ggctagcctgtggatgtgctcctcc

SEQ ID NO: 1524652 - DNA, 25 bp, Homo sapien
cagagaagctccacgccctgccttc

SEQ ID NO: 1524653 - DNA, 25 bp, Homo sapien
agagaagctccacgccctgccttca

SEQ ID NO: 1524654 - DNA, 25 bp, Homo sapien
tgggctagcctgtggatgtgctcct

SEQ ID NO: 1524655 - DNA, 25 bp, Homo sapien
ggagagggtgttcagctgccatgcc

SEQ ID NO: 1524656 - DNA, 25 bp, Homo sapien
gccgcaacaccagctcctgcaactc

SEQ ID NO: 1524657 - DNA, 25 bp, Homo sapien
gctcctgcaactccagcagcttcac

SEQ ID NO: 1524658 - DNA, 25 bp, Homo sapien
aagccgcaacaccagctcctgcaac

SEQ ID NO: 1524659 - DNA, 25 bp, Homo sapien
cagctcctgcaactccagcagcttc

SEQ ID NO: 1524660 - DNA, 25 bp, Homo sapien
caggaatctgccatggccctcagtc

SEQ ID NO: 1524661 - DNA, 25 bp, Homo sapien
ccaggaatctgccatggccctcagt

SEQ ID NO: 1524662 - DNA, 25 bp, Homo sapien
ctgcttgtcggcagccctgagctct

SEQ ID NO: 1524663 - DNA, 25 bp, Homo sapien
ggcccctggagctggctcatgagca

SEQ ID NO: 1524664 - DNA, 25 bp, Homo sapien
caaaccgcctgagggcactactcat

SEQ ID NO: 1524665 - DNA, 25 bp, Homo sapien
cttgcctgcccaaaccgcctgaggg

SEQ ID NO: 1524666 - DNA, 25 bp, Homo sapien
ctcttgcctgcccaaaccgcctgag

SEQ ID NO: 1524667 - DNA, 25 bp, Homo sapien
tgcccaaaccgcctgagggcactac

SEQ ID NO: 1524668 - DNA, 25 bp, Homo sapien
tccacgctgctggtgagggtcacct

SEQ ID NO: 1524669 - DNA, 25 bp, Homo sapien
tgtgcaggctccacgctgctggtga

SEQ ID NO: 1524670 - DNA, 25 bp, Homo sapien
ctggtgagggtcacctggcaaagat

SEQ ID NO: 1524671 - DNA, 25 bp, Homo sapien
cttgtgcaggctccacgctgctggt

SEQ ID NO: 1524672 - DNA, 25 bp, Homo sapien
gcactggggttgtcgaggggagaac

SEQ ID NO: 1524673 - DNA, 25 bp, Homo sapien
ctgtgcactggggttgtcgagggga

SEQ ID NO: 1524674 - DNA, 25 bp, Homo sapien
ctgctgtgcactggggttgtcgagg

SEQ ID NO: 1524675 - DNA, 25 bp, Homo sapien
acagctgcatgatctgctgtgcact

SEQ ID NO: 1524676 - DNA, 25 bp, Homo sapien
cgctcctgagggttctgcatctcac

SEQ ID NO: 1524677 - DNA, 25 bp, Homo sapien
tggtggtttttgtcagcctggtggg

SEQ ID NO: 1524678 - DNA, 25 bp, Homo sapien
tttgtcagcctggtgggaaaacaga

SEQ ID NO: 1524679 - DNA, 25 bp, Homo sapien
cagcctggtgggaaaacagaatgca

SEQ ID NO: 1524680 - DNA, 25 bp, Homo sapien
ctaggagcagggccatgagctcagc

SEQ ID NO: 1524681 - DNA, 25 bp, Homo sapien
tcttgcctgagcagaccccaatggt

SEQ ID NO: 1524682 - DNA, 25 bp, Homo sapien
ctcagagctttcatggttgtcggaa

SEQ ID NO: 1524683 - DNA, 25 bp, Homo sapien
caatggtcaccctcagctgtctgca

SEQ ID NO: 1524684 - DNA, 25 bp, Homo sapien
cggaagcggtgaaaagttcacatgc

SEQ ID NO: 1524685 - DNA, 25 bp, Homo sapien
tcacagtttgccttggacgtggtca

SEQ ID NO: 1524686 - DNA, 25 bp, Homo sapien
cacagtttgccttggacgtggtcac

SEQ ID NO: 1524687 - DNA, 25 bp, Homo sapien
cagctggccgttttcctactggaac

SEQ ID NO: 1524688 - DNA, 25 bp, Homo sapien
aaggaaagcatgtgcatgagagctg

SEQ ID NO: 1524689 - DNA, 25 bp, Homo sapien
ccacccgtggcatcctactgcagga

SEQ ID NO: 1524690 - DNA, 25 bp, Homo sapien
aggccctgagaccaggacacagctg

SEQ ID NO: 1524691 - DNA, 25 bp, Homo sapien
tcaaatttctggtagatgtggatga

SEQ ID NO: 1524692 - DNA, 25 bp, Homo sapien
gtcaaatttctggtagatgtggatg

SEQ ID NO: 1524693 - DNA, 25 bp, Homo sapien
aggcagaatggatatggcaggcagc

SEQ ID NO: 1524694 - DNA, 25 bp, Homo sapien
tccaaggcagaatggatatggcagg

SEQ ID NO: 1524695 - DNA, 25 bp, Homo sapien
cagaatggatatggcaggcagccac

SEQ ID NO: 1524696 - DNA, 25 bp, Homo sapien
caaggcagaatggatatggcaggca

SEQ ID NO: 1524697 - DNA, 25 bp, Homo sapien
aacacacaaactccaggcctgtgca

SEQ ID NO: 1524698 - DNA, 25 bp, Homo sapien
caacacacaaactccaggcctgtgc

SEQ ID NO: 1524699 - DNA, 25 bp, Homo sapien
ggcctgcccagccacggggagcctc

SEQ ID NO: 1524700 - DNA, 25 bp, Homo sapien
cacggggagcctcaggtccttgctt

SEQ ID NO: 1524701 - DNA, 25 bp, Homo sapien
cagccacggggagcctcaggtcctt

SEQ ID NO: 1524702 - DNA, 25 bp, Homo sapien
ggagcctcaggtccttgctttgcag

SEQ ID NO: 1524703 - DNA, 25 bp, Homo sapien
accatggccagtgaccaggttagga

SEQ ID NO: 1524704 - DNA, 25 bp, Homo sapien
atggccagtgaccaggttaggaagt

SEQ ID NO: 1524705 - DNA, 25 bp, Homo sapien
caccatggccagtgaccaggttagg

SEQ ID NO: 1524706 - DNA, 25 bp, Homo sapien
ccatggccagtgaccaggttaggaa

SEQ ID NO: 1524707 - DNA, 25 bp, Homo sapien
gagagaagtggagcccgctgtgact

SEQ ID NO: 1524708 - DNA, 25 bp, Homo sapien
cccaggttagccaggtccactccgc

SEQ ID NO: 1524709 - DNA, 25 bp, Homo sapien
ggagcccaggttagccaggtccact

SEQ ID NO: 1524710 - DNA, 25 bp, Homo sapien
gagcccaggttagccaggtccactc

SEQ ID NO: 1524711 - DNA, 25 bp, Homo sapien
aggttagccaggtccactccgcctt

SEQ ID NO: 1524712 - DNA, 25 bp, Homo sapien
ccaggtgacacggtagcaaatgaag

SEQ ID NO: 1524713 - DNA, 25 bp, Homo sapien
ctaccagggctcacctccaagcttc

SEQ ID NO: 1524714 - DNA, 25 bp, Homo sapien
ctcgtgtcactcatcatgtcagttc

SEQ ID NO: 1524715 - DNA, 25 bp, Homo sapien
tagcaaatgaagtctcccggctacc

SEQ ID NO: 1524716 - DNA, 25 bp, Homo sapien
ggtccagctcctcaaaagaggagcc

SEQ ID NO: 1524717 - DNA, 25 bp, Homo sapien
caggtccagctcctcaaaagaggag

SEQ ID NO: 1524718 - DNA, 25 bp, Homo sapien
tcctcaaaagaggagccgctggcac

SEQ ID NO: 1524719 - DNA, 25 bp, Homo sapien
cagctcctcaaaagaggagccgctg

SEQ ID NO: 1524720 - DNA, 25 bp, Homo sapien
tcagggccacttggtagcccccagg

SEQ ID NO: 1524721 - DNA, 25 bp, Homo sapien
agggtccagccgtggttcctccaag

SEQ ID NO: 1524722 - DNA, 25 bp, Homo sapien
gaaggcttcacaagaggcctagagc

SEQ ID NO: 1524723 - DNA, 25 bp, Homo sapien
atacaacaggagtgtcggcccacag

SEQ ID NO: 1524724 - DNA, 25 bp, Homo sapien
gatacagtctttggctgctttggcc

SEQ ID NO: 1524725 - DNA, 25 bp, Homo sapien
ggagagtctgctcggttccgcagcc

SEQ ID NO: 1524726 - DNA, 25 bp, Homo sapien
gagactggacacctgtattcatgca

SEQ ID NO: 1524727 - DNA, 25 bp, Homo sapien
tatggtcaacttccacttgtggccc

SEQ ID NO: 1524728 - DNA, 25 bp, Homo sapien
aggtggcttggcaaaccctccagag

SEQ ID NO: 1524729 - DNA, 25 bp, Homo sapien
gagtgttgtccccagcttaggaggt

SEQ ID NO: 1524730 - DNA, 25 bp, Homo sapien
gaagtggagagctgggtggtttccc

SEQ ID NO: 1524731 - DNA, 25 bp, Homo sapien
gggctgctggcagtgatggaagtag

SEQ ID NO: 1524732 - DNA, 25 bp, Homo sapien
agagctgggtggtttccctggcaca

SEQ ID NO: 1524733 - DNA, 25 bp, Homo sapien
ggcacagaagggctgagcatgaagg

SEQ ID NO: 1524734 - DNA, 25 bp, Homo sapien
acatgccccatgaaaggttgcttgg

SEQ ID NO: 1524735 - DNA, 25 bp, Homo sapien
catgccccatgaaaggttgcttggc

SEQ ID NO: 1524736 - DNA, 25 bp, Homo sapien
gacatgccccatgaaaggttgcttg

SEQ ID NO: 1524737 - DNA, 25 bp, Homo sapien
agacatgccccatgaaaggttgctt

SEQ ID NO: 1524738 - DNA, 25 bp, Homo sapien
tatcacatcatcgtccctattctca

SEQ ID NO: 1524739 - DNA, 25 bp, Homo sapien
tcacatcatcgtccctattctcatc

SEQ ID NO: 1524740 - DNA, 25 bp, Homo sapien
acatcatcgtccctattctcatcat

SEQ ID NO: 1524741 - DNA, 25 bp, Homo sapien
atcatcgtccctattctcatcatca

SEQ ID NO: 1524742 - DNA, 25 bp, Homo sapien
cagtactgatgggagaggatcccgc

SEQ ID NO: 1524743 - DNA, 25 bp, Homo sapien
caatcatggggtggttgaccttgtg

SEQ ID NO: 1524744 - DNA, 25 bp, Homo sapien
gaaacagtcagcaatcatggggtgg

SEQ ID NO: 1524745 - DNA, 25 bp, Homo sapien
gaggatcccgcagatgggaacacca

SEQ ID NO: 1524746 - DNA, 25 bp, Homo sapien
ttaagcttcccagacttgaatcacc

SEQ ID NO: 1524747 - DNA, 25 bp, Homo sapien
aagcttcccagacttgaatcaccca

SEQ ID NO: 1524748 - DNA, 25 bp, Homo sapien
caaagttcagcattaagcttcccag

SEQ ID NO: 1524749 - DNA, 25 bp, Homo sapien
gcagctagaacaaagttcagcatta

SEQ ID NO: 1524750 - DNA, 25 bp, Homo sapien
gggaccttgctctccagcaagctca

SEQ ID NO: 1524751 - DNA, 25 bp, Homo sapien
cagggaccttgctctccagcaagct

SEQ ID NO: 1524752 - DNA, 25 bp, Homo sapien
tgcagggaccttgctctccagcaag

SEQ ID NO: 1524753 - DNA, 25 bp, Homo sapien
ctgcagggaccttgctctccagcaa

SEQ ID NO: 1524754 - DNA, 25 bp, Homo sapien
agctggaagccctggtcacaccggg

SEQ ID NO: 1524755 - DNA, 25 bp, Homo sapien
ctgtcagctggaagccctggtcaca

SEQ ID NO: 1524756 - DNA, 25 bp, Homo sapien
gtcagctggaagccctggtcacacc

SEQ ID NO: 1524757 - DNA, 25 bp, Homo sapien
tggaagccctggtcacaccggggga

SEQ ID NO: 1524758 - DNA, 25 bp, Homo sapien
taacaggtccgaaatggctctggac

SEQ ID NO: 1524759 - DNA, 25 bp, Homo sapien
cagtgtcaggagcagtaacagagtc

SEQ ID NO: 1524760 - DNA, 25 bp, Homo sapien
tgtgaggcccagtagtaacaggtcc

SEQ ID NO: 1524761 - DNA, 25 bp, Homo sapien
tccacatggaacttgtagggatggg

SEQ ID NO: 1524762 - DNA, 25 bp, Homo sapien
tgtcctagtggacagcgatggagca

SEQ ID NO: 1524763 - DNA, 25 bp, Homo sapien
tctccaaagtgtaggtgtagagcag

SEQ ID NO: 1524764 - DNA, 25 bp, Homo sapien
atctccaaagtgtaggtgtagagca

SEQ ID NO: 1524765 - DNA, 25 bp, Homo sapien
ctccaaagtgtaggtgtagagcaga

SEQ ID NO: 1524766 - DNA, 25 bp, Homo sapien
tctgcctggcgttgggtgcgcacct

SEQ ID NO: 1524767 - DNA, 25 bp, Homo sapien
tagaagatcctcctcatctcgggtg

SEQ ID NO: 1524768 - DNA, 25 bp, Homo sapien
tcgggtgacattgaccgccagcagc

SEQ ID NO: 1524769 - DNA, 25 bp, Homo sapien
cagagcgtctttgcaaggtgggctc

SEQ ID NO: 1524770 - DNA, 25 bp, Homo sapien
gctggaggccgaaggtgccgcccct

SEQ ID NO: 1524771 - DNA, 25 bp, Homo sapien
tggaggccgaaggtgccgcccctcg

SEQ ID NO: 1524772 - DNA, 25 bp, Homo sapien
tggctggaggccgaaggtgccgccc

SEQ ID NO: 1524773 - DNA, 25 bp, Homo sapien
ttggctggaggccgaaggtgccgcc

SEQ ID NO: 1524774 - DNA, 25 bp, Homo sapien
tcgcccaagctgagagtggcctgtt

SEQ ID NO: 1524775 - DNA, 25 bp, Homo sapien
cttccctcgcccaagctgagagtgg

SEQ ID NO: 1524776 - DNA, 25 bp, Homo sapien
gtgtctgtgcttccctcgcccaagc

SEQ ID NO: 1524777 - DNA, 25 bp, Homo sapien
caagctgagagtggcctgttcccag

SEQ ID NO: 1524778 - DNA, 25 bp, Homo sapien
gcagggacttggtaagaaaaccaga

SEQ ID NO: 1524779 - DNA, 25 bp, Homo sapien
accagaatgtgtgttcaagggcagg

SEQ ID NO: 1524780 - DNA, 25 bp, Homo sapien
cagctgagttggaaaattcagattc

SEQ ID NO: 1524781 - DNA, 25 bp, Homo sapien
gctgagttggaaaattcagattctc

SEQ ID NO: 1524782 - DNA, 25 bp, Homo sapien
gccttcctccccatgaggattcatg

SEQ ID NO: 1524783 - DNA, 25 bp, Homo sapien
aaggctgcgatgggagctgccttcc

SEQ ID NO: 1524784 - DNA, 25 bp, Homo sapien
tgtctctcagaagggcccaagacct

SEQ ID NO: 1524785 - DNA, 25 bp, Homo sapien
cagtgtctctcagaagggcccaaga

SEQ ID NO: 1524786 - DNA, 25 bp, Homo sapien
ccccacatcctggttattgtcagag

SEQ ID NO: 1524787 - DNA, 25 bp, Homo sapien
tcctggttattgtcagagctgggct

SEQ ID NO: 1524788 - DNA, 25 bp, Homo sapien
ggctaaaaaaggctcccaggagcat

SEQ ID NO: 1524789 - DNA, 25 bp, Homo sapien
agaagtccagggtgcttcgacctgg

SEQ ID NO: 1524790 - DNA, 25 bp, Homo sapien
acttgctcacaagtccaagggtcac

SEQ ID NO: 1524791 - DNA, 25 bp, Homo sapien
tagtttttcatccaggaaatggagg

SEQ ID NO: 1524792 - DNA, 25 bp, Homo sapien
ttatgaaacctcttgtagtttttca

SEQ ID NO: 1524793 - DNA, 25 bp, Homo sapien
aatgagttgggtggttggattggcc

SEQ ID NO: 1524794 - DNA, 25 bp, Homo sapien
ctccaccacgctctccataaccagg

SEQ ID NO: 1524795 - DNA, 25 bp, Homo sapien
tccaccacgctctccataaccaggc

SEQ ID NO: 1524796 - DNA, 25 bp, Homo sapien
ccaccacgctctccataaccaggct

SEQ ID NO: 1524797 - DNA, 25 bp, Homo sapien
gagagcactctgcaggggcacatga

SEQ ID NO: 1524798 - DNA, 25 bp, Homo sapien
ccggcttcttcactgcctgagcctg

SEQ ID NO: 1524799 - DNA, 25 bp, Homo sapien
gccatgtatgcagaatggccagtga

SEQ ID NO: 1524800 - DNA, 25 bp, Homo sapien
ttgaccagcagccatgtatgcagaa

SEQ ID NO: 1524801 - DNA, 25 bp, Homo sapien
ctgcacacctcacagcggagcttca

SEQ ID NO: 1524802 - DNA, 25 bp, Homo sapien
gcacacctcacagcggagcttcacc

SEQ ID NO: 1524803 - DNA, 25 bp, Homo sapien
tgcacacctcacagcggagcttcac

SEQ ID NO: 1524804 - DNA, 25 bp, Homo sapien
tgctgttcgcctccaaatgctaagt

SEQ ID NO: 1524805 - DNA, 25 bp, Homo sapien
gctgttcgcctccaaatgctaagtc

SEQ ID NO: 1524806 - DNA, 25 bp, Homo sapien
ctgttcgcctccaaatgctaagtcc

SEQ ID NO: 1524807 - DNA, 25 bp, Homo sapien
acttgcacccagctggcagcagcac

SEQ ID NO: 1524808 - DNA, 25 bp, Homo sapien
ttgcacccagctggcagcagcaccc

SEQ ID NO: 1524809 - DNA, 25 bp, Homo sapien
gcacccagctggcagcagcacccac

SEQ ID NO: 1524810 - DNA, 25 bp, Homo sapien
cacttgcacccagctggcagcagca

SEQ ID NO: 1524811 - DNA, 25 bp, Homo sapien
aaaacattctcataagatctttatg

SEQ ID NO: 1524812 - DNA, 25 bp, Homo sapien
aaacattctcataagatctttatgc

SEQ ID NO: 1524813 - DNA, 25 bp, Homo sapien
ctaaaacattctcataagatcttta

SEQ ID NO: 1524814 - DNA, 25 bp, Homo sapien
taaaacattctcataagatctttat

SEQ ID NO: 1524815 - DNA, 25 bp, Homo sapien
acaggcagaagacccaaaacagaaa

SEQ ID NO: 1524816 - DNA, 25 bp, Homo sapien
caggcagaagacccaaaacagaaaa

SEQ ID NO: 1524817 - DNA, 25 bp, Homo sapien
cacaggcagaagacccaaaacagaa

SEQ ID NO: 1524818 - DNA, 25 bp, Homo sapien
catagccacgaaggaaacattctta

SEQ ID NO: 1524819 - DNA, 25 bp, Homo sapien
ttcccatgttccatagccacgaagg

SEQ ID NO: 1524820 - DNA, 25 bp, Homo sapien
tgttccatagccacgaaggaaacat

SEQ ID NO: 1524821 - DNA, 25 bp, Homo sapien
ggtgagaattcttgatgacatgtaa

SEQ ID NO: 1524822 - DNA, 25 bp, Homo sapien
ctcaaggtaaaacaagagtaaagag

SEQ ID NO: 1524823 - DNA, 25 bp, Homo sapien
tcaaggtaaaacaagagtaaagaga

SEQ ID NO: 1524824 - DNA, 25 bp, Homo sapien
catacatatttaccaagtggccatg

SEQ ID NO: 1524825 - DNA, 25 bp, Homo sapien
catatttaccaagtggccatgaaca

SEQ ID NO: 1524826 - DNA, 25 bp, Homo sapien
ttaccaagtggccatgaacagaatt

SEQ ID NO: 1524827 - DNA, 25 bp, Homo sapien
tatttaccaagtggccatgaacaga

SEQ ID NO: 1524828 - DNA, 25 bp, Homo sapien
tataaattctgctgtgcggtgtcca

SEQ ID NO: 1524829 - DNA, 25 bp, Homo sapien
tggccacatccctaaatgtcaacac

SEQ ID NO: 1524830 - DNA, 25 bp, Homo sapien
ttctgctgtgcggtgtccaggcatt

SEQ ID NO: 1524831 - DNA, 25 bp, Homo sapien
tgctgtgcggtgtccaggcattgcc

SEQ ID NO: 1524832 - DNA, 25 bp, Homo sapien
ctgttttattacaaataacatgaat

SEQ ID NO: 1524833 - DNA, 25 bp, Homo sapien
tattacaaataacatgaatcttgct

SEQ ID NO: 1524834 - DNA, 25 bp, Homo sapien
ttacaaataacatgaatcttgctca

SEQ ID NO: 1524835 - DNA, 25 bp, Homo sapien
gttttattacaaataacatgaatct

SEQ ID NO: 1524836 - DNA, 25 bp, Homo sapien
acattccaaggttcttttccttgct

SEQ ID NO: 1524837 - DNA, 25 bp, Homo sapien
ggttcagctaccatctcatgtctct

SEQ ID NO: 1524838 - DNA, 25 bp, Homo sapien
tcttcacattccaaggttcttttcc

SEQ ID NO: 1524839 - DNA, 25 bp, Homo sapien
ctgggggttcagctaccatctcatg

SEQ ID NO: 1524840 - DNA, 25 bp, Homo sapien
gtctcgggcaaaataagaacataca

SEQ ID NO: 1524841 - DNA, 25 bp, Homo sapien
aaggtctcgggcaaaataagaacat

SEQ ID NO: 1524842 - DNA, 25 bp, Homo sapien
tcttaactgtaaattttcacatcca

SEQ ID NO: 1524843 - DNA, 25 bp, Homo sapien
ttgccctgctttggccaaaggtctc

SEQ ID NO: 1524844 - DNA, 25 bp, Homo sapien
gttctgggtagtcgtcaaacactgg

SEQ ID NO: 1524845 - DNA, 25 bp, Homo sapien
tttgttctgggtagtcgtcaaacac

SEQ ID NO: 1524846 - DNA, 25 bp, Homo sapien
aatattttgttctgggtagtcgtca

SEQ ID NO: 1524847 - DNA, 25 bp, Homo sapien
tccattgtaacattctttgtgcacc

SEQ ID NO: 1524848 - DNA, 25 bp, Homo sapien
tgaggtctcattataggctttccca

SEQ ID NO: 1524849 - DNA, 25 bp, Homo sapien
ggataactggctaaaggccttacca

SEQ ID NO: 1524850 - DNA, 25 bp, Homo sapien
tatgtgtagaaaggtttgaggtctc

SEQ ID NO: 1524851 - DNA, 25 bp, Homo sapien
tgtgagagccggttaaaggcttttc

SEQ ID NO: 1524852 - DNA, 25 bp, Homo sapien
tttggaaatctttgcaatgttgtca

SEQ ID NO: 1524853 - DNA, 25 bp, Homo sapien
tgcaatgttgtcacaagcattgtta

SEQ ID NO: 1524854 - DNA, 25 bp, Homo sapien
tttatatttggaaatctttgcaatg

SEQ ID NO: 1524855 - DNA, 25 bp, Homo sapien
caatgttgtcacaagcattgttaca

SEQ ID NO: 1524856 - DNA, 25 bp, Homo sapien
gtttgagcaattgcctcagggtttg

SEQ ID NO: 1524857 - DNA, 25 bp, Homo sapien
agatgtgcacagatattaatcactt

SEQ ID NO: 1524858 - DNA, 25 bp, Homo sapien
cacaacttcgtttatatttgtaatg

SEQ ID NO: 1524859 - DNA, 25 bp, Homo sapien
tcagggtttgctctaatacagaatg

SEQ ID NO: 1524860 - DNA, 25 bp, Homo sapien
aaagaaacaacatcaggcaggcgca

SEQ ID NO: 1524861 - DNA, 25 bp, Homo sapien
tcatgcatcactcagtactgtaagt

SEQ ID NO: 1524862 - DNA, 25 bp, Homo sapien
tgtatgcctcttatcagaatatgcc

SEQ ID NO: 1524863 - DNA, 25 bp, Homo sapien
tgtaagtgaatcacaaagaacctct

SEQ ID NO: 1524864 - DNA, 25 bp, Homo sapien
tttattcaggactcagaaatgtgta

SEQ ID NO: 1524865 - DNA, 25 bp, Homo sapien
attcaggactcagaaatgtgtaaat

SEQ ID NO: 1524866 - DNA, 25 bp, Homo sapien
ttatttattcaggactcagaaatgt

SEQ ID NO: 1524867 - DNA, 25 bp, Homo sapien
tattcaggactcagaaatgtgtaaa

SEQ ID NO: 1524868 - DNA, 25 bp, Homo sapien
taatatggttcacttaccataaact

SEQ ID NO: 1524869 - DNA, 25 bp, Homo sapien
atatggttcacttaccataaactct

SEQ ID NO: 1524870 - DNA, 25 bp, Homo sapien
tggttcacttaccataaactctcta

SEQ ID NO: 1524871 - DNA, 25 bp, Homo sapien
ttaatatggttcacttaccataaac

SEQ ID NO: 1524872 - DNA, 25 bp, Homo sapien
tttgatctttgatcactgatactct

SEQ ID NO: 1524873 - DNA, 25 bp, Homo sapien
tgatctttgatcactgatactcttt

SEQ ID NO: 1524874 - DNA, 25 bp, Homo sapien
catgtgtcacgtagttctcttgcca

SEQ ID NO: 1524875 - DNA, 25 bp, Homo sapien
catttgatctttgatcactgatact

SEQ ID NO: 1524876 - DNA, 25 bp, Homo sapien
acaattttttatgccctgctttggc

SEQ ID NO: 1524877 - DNA, 25 bp, Homo sapien
gctttggccaaaagtcttgggcaaa

SEQ ID NO: 1524878 - DNA, 25 bp, Homo sapien
aaagtcttgggcaaaataagaacat

SEQ ID NO: 1524879 - DNA, 25 bp, Homo sapien
ttggaaacaattttttatgccctgc

SEQ ID NO: 1524880 - DNA, 25 bp, Homo sapien
ttttcatgtccacattttttatatc

SEQ ID NO: 1524881 - DNA, 25 bp, Homo sapien
aattttcatgtccacattttttata

SEQ ID NO: 1524882 - DNA, 25 bp, Homo sapien
attttcctaactgtaaattttcatg

SEQ ID NO: 1524883 - DNA, 25 bp, Homo sapien
tcatgtccacattttttatatcttt

SEQ ID NO: 1524884 - DNA, 25 bp, Homo sapien
tgggataaccggctaaaggccttgc

SEQ ID NO: 1524885 - DNA, 25 bp, Homo sapien
taagtccattgtaacattcttcgtg

SEQ ID NO: 1524886 - DNA, 25 bp, Homo sapien
gtccattgtaacattcttcgtgcac

SEQ ID NO: 1524887 - DNA, 25 bp, Homo sapien
ccggctaaaggccttgccccattct

SEQ ID NO: 1524888 - DNA, 25 bp, Homo sapien
gttgtcacaagcattgtcacaactt

SEQ ID NO: 1524889 - DNA, 25 bp, Homo sapien
cttttatgtttggaaatgtttgaga

SEQ ID NO: 1524890 - DNA, 25 bp, Homo sapien
agatgttgtcacaagcattgtcaca

SEQ ID NO: 1524891 - DNA, 25 bp, Homo sapien
aatgtttgagatgttgtcacaagca

SEQ ID NO: 1524892 - DNA, 25 bp, Homo sapien
gttcacactcgtgatgttttctcca

SEQ ID NO: 1524893 - DNA, 25 bp, Homo sapien
atgaattaccctacttacaaacaag

SEQ ID NO: 1524894 - DNA, 25 bp, Homo sapien
cagtatgaattaccctacttacaaa

SEQ ID NO: 1524895 - DNA, 25 bp, Homo sapien
actgttcacactcgtgatgttttct

SEQ ID NO: 1524896 - DNA, 25 bp, Homo sapien
ttaattgggctgtcgtttgcgtggc

SEQ ID NO: 1524897 - DNA, 25 bp, Homo sapien
gctgtcgtttgcgtggctagatact

SEQ ID NO: 1524898 - DNA, 25 bp, Homo sapien
tgttaggatcttgacttaattgggc

SEQ ID NO: 1524899 - DNA, 25 bp, Homo sapien
gctagatacttagtgaatctggtca

SEQ ID NO: 1524900 - DNA, 25 bp, Homo sapien
tacattggtatgtcaaacgctggac

SEQ ID NO: 1524901 - DNA, 25 bp, Homo sapien
ctacattggtatgtcaaacgctgga

SEQ ID NO: 1524902 - DNA, 25 bp, Homo sapien
cattggtatgtcaaacgctggacca

SEQ ID NO: 1524903 - DNA, 25 bp, Homo sapien
attggtatgtcaaacgctggaccat

SEQ ID NO: 1524904 - DNA, 25 bp, Homo sapien
tctattaccaggggttcggaacagc

SEQ ID NO: 1524905 - DNA, 25 bp, Homo sapien
ttggtataaaggtattctattacca

SEQ ID NO: 1524906 - DNA, 25 bp, Homo sapien
tggtataaaggtattctattaccag

SEQ ID NO: 1524907 - DNA, 25 bp, Homo sapien
agcagattttgatgcttttccaacc

SEQ ID NO: 1524908 - DNA, 25 bp, Homo sapien
gccacaagcagattttgatgctttt

SEQ ID NO: 1524909 - DNA, 25 bp, Homo sapien
caagcagattttgatgcttttccaa

SEQ ID NO: 1524910 - DNA, 25 bp, Homo sapien
cacaagcagattttgatgcttttcc

SEQ ID NO: 1524911 - DNA, 25 bp, Homo sapien
tgtttgttttggacaatttcataag

SEQ ID NO: 1524912 - DNA, 25 bp, Homo sapien
caatttcataagaactttaagtctt

SEQ ID NO: 1524913 - DNA, 25 bp, Homo sapien
acgcttgatcctgccacgaacacat

SEQ ID NO: 1524914 - DNA, 25 bp, Homo sapien
agtcttacagcacgaacccctcgaa

SEQ ID NO: 1524915 - DNA, 25 bp, Homo sapien
cactttttatttagctgcaaagcta

SEQ ID NO: 1524916 - DNA, 25 bp, Homo sapien
ataaaatgagtgagaagactctgct

SEQ ID NO: 1524917 - DNA, 25 bp, Homo sapien
gtgagaagactctgcttgtgccttc

SEQ ID NO: 1524918 - DNA, 25 bp, Homo sapien
gagaagactctgcttgtgccttcaa

SEQ ID NO: 1524919 - DNA, 25 bp, Homo sapien
tacattgattcctcatgttgagagg

SEQ ID NO: 1524920 - DNA, 25 bp, Homo sapien
gataagccataagtattcctcctgg

SEQ ID NO: 1524921 - DNA, 25 bp, Homo sapien
tgtagcagatgcttcatgataagcc

SEQ ID NO: 1524922 - DNA, 25 bp, Homo sapien
taggaaggcttcgataagtcaagag

SEQ ID NO: 1524923 - DNA, 25 bp, Homo sapien
ccagcctgggtgacagaacaagact

SEQ ID NO: 1524924 - DNA, 25 bp, Homo sapien
aatcccagctacttgggaggctgag

SEQ ID NO: 1524925 - DNA, 25 bp, Homo sapien
gcaggagaattgcttgaacccggga

SEQ ID NO: 1524926 - DNA, 25 bp, Homo sapien
gccaggtgcagtggcaggcacctgt

SEQ ID NO: 1524927 - DNA, 25 bp, Homo sapien
gccacagcagccttacagaagagga

SEQ ID NO: 1524928 - DNA, 25 bp, Homo sapien
gaagtgaacccccaacaagccacag

SEQ ID NO: 1524929 - DNA, 25 bp, Homo sapien
acaaaaggccaaagtgcctcttctc

SEQ ID NO: 1524930 - DNA, 25 bp, Homo sapien
acacaaaaggccaaagtgcctcttc

SEQ ID NO: 1524931 - DNA, 25 bp, Homo sapien
taagagttccttccgagtgccccat

SEQ ID NO: 1524932 - DNA, 25 bp, Homo sapien
ttaagagttccttccgagtgcccca

SEQ ID NO: 1524933 - DNA, 25 bp, Homo sapien
ttgggcaagggaagcacagacaccc

SEQ ID NO: 1524934 - DNA, 25 bp, Homo sapien
aacaggccactctcggcttgggcaa

SEQ ID NO: 1524935 - DNA, 25 bp, Homo sapien
tggctgccaaccaaggaggaagcct

SEQ ID NO: 1524936 - DNA, 25 bp, Homo sapien
tccttaggcctccagctaagtcgcc

SEQ ID NO: 1524937 - DNA, 25 bp, Homo sapien
gggctgctggcggtcaaggtccccc

SEQ ID NO: 1524938 - DNA, 25 bp, Homo sapien
ccaacgccaggcagaggtagcaggt

SEQ ID NO: 1524939 - DNA, 25 bp, Homo sapien
ctggcggtcaaggtcccccgagatg

SEQ ID NO: 1524940 - DNA, 25 bp, Homo sapien
caaggtcccccgagatgaggagggt

SEQ ID NO: 1524941 - DNA, 25 bp, Homo sapien
tccggtccagattcgccgaagtcag

SEQ ID NO: 1524942 - DNA, 25 bp, Homo sapien
ggcccatgggcgtccacagtccagg

SEQ ID NO: 1524943 - DNA, 25 bp, Homo sapien
agaccacgcgtccggtccagattcg

SEQ ID NO: 1524944 - DNA, 25 bp, Homo sapien
gattcgccgaagtcagacactggaa

SEQ ID NO: 1524945 - DNA, 25 bp, Homo sapien
ctgtccctgccggtggccgtcgtgg

SEQ ID NO: 1524946 - DNA, 25 bp, Homo sapien
cgctctgggaaatttgcccccgctg

SEQ ID NO: 1524947 - DNA, 25 bp, Homo sapien
gtccctgccggtggccgtcgtgggc

SEQ ID NO: 1524948 - DNA, 25 bp, Homo sapien
tctgggaaatttgcccccgctgtcc

SEQ ID NO: 1524949 - DNA, 25 bp, Homo sapien
cagcccgagtgaccgagcgggtgcg

SEQ ID NO: 1524950 - DNA, 25 bp, Homo sapien
gattcgaagccatccctgccgtggg

SEQ ID NO: 1524951 - DNA, 25 bp, Homo sapien
gcgagccacgcagggtgcgggctgg

SEQ ID NO: 1524952 - DNA, 25 bp, Homo sapien
gggctcggattcgaagccatccctg

SEQ ID NO: 1524953 - DNA, 25 bp, Homo sapien
taagttcttctgagggtgagatcca

SEQ ID NO: 1524954 - DNA, 25 bp, Homo sapien
gctgggtccagcaacatgtcataag

SEQ ID NO: 1524955 - DNA, 25 bp, Homo sapien
tccaggcataagcaaagactcattt

SEQ ID NO: 1524956 - DNA, 25 bp, Homo sapien
taacttatgtaattggcccagaaat

SEQ ID NO: 1524957 - DNA, 25 bp, Homo sapien
gtttgtgggtgtcatcattgtacca

SEQ ID NO: 1524958 - DNA, 25 bp, Homo sapien
attgtaccagtgaccacgtcccagg

SEQ ID NO: 1524959 - DNA, 25 bp, Homo sapien
ctgttgcccaaagcctagcagacag

SEQ ID NO: 1524960 - DNA, 25 bp, Homo sapien
gcctagcagacagaatcaatatttc

SEQ ID NO: 1524961 - DNA, 25 bp, Homo sapien
tggatgaaactatgacccattatcc

SEQ ID NO: 1524962 - DNA, 25 bp, Homo sapien
ccttagaaaactaatgctgaaagac

SEQ ID NO: 1524963 - DNA, 25 bp, Homo sapien
tatcatggaatactgtgtggccata

SEQ ID NO: 1524964 - DNA, 25 bp, Homo sapien
taaatatcatggaatactgtgtggc

SEQ ID NO: 1524965 - DNA, 25 bp, Homo sapien
aggattgtaacctgggagcaaacct

SEQ ID NO: 1524966 - DNA, 25 bp, Homo sapien
aaagcttgaggattgtaacctggga

SEQ ID NO: 1524967 - DNA, 25 bp, Homo sapien
tgaggattgtaacctgggagcaaac

SEQ ID NO: 1524968 - DNA, 25 bp, Homo sapien
gaggattgtaacctgggagcaaacc

SEQ ID NO: 1524969 - DNA, 25 bp, Homo sapien
cagaaaattgtaagtaccagcttta

SEQ ID NO: 1524970 - DNA, 25 bp, Homo sapien
agaaaattgtaagtaccagctttag

SEQ ID NO: 1524971 - DNA, 25 bp, Homo sapien
gaaaattgtaagtaccagctttaga

SEQ ID NO: 1524972 - DNA, 25 bp, Homo sapien
ccaagacccgctgaaaaagtccatc

SEQ ID NO: 1524973 - DNA, 25 bp, Homo sapien
cagaagtaccaagacccgctgaaaa

SEQ ID NO: 1524974 - DNA, 25 bp, Homo sapien
caggcagaagtaccaagacccgctg

SEQ ID NO: 1524975 - DNA, 25 bp, Homo sapien
taccaagacccgctgaaaaagtcca

SEQ ID NO: 1524976 - DNA, 25 bp, Homo sapien
gaaaattttattgccacatctgtga

SEQ ID NO: 1524977 - DNA, 25 bp, Homo sapien
agaaaattttattgccacatctgtg

SEQ ID NO: 1524978 - DNA, 25 bp, Homo sapien
gagaaaattttattgccacatctgt

SEQ ID NO: 1524979 - DNA, 25 bp, Homo sapien
gaaacatttacagtatctgaggatt

SEQ ID NO: 1524980 - DNA, 25 bp, Homo sapien
aaacatttacagtatctgaggattg

SEQ ID NO: 1524981 - DNA, 25 bp, Homo sapien
acatttacagtatctgaggattgtg

SEQ ID NO: 1524982 - DNA, 25 bp, Homo sapien
agaaacatttacagtatctgaggat

SEQ ID NO: 1524983 - DNA, 25 bp, Homo sapien
ggcttggctaccatcttgtgtctct

SEQ ID NO: 1524984 - DNA, 25 bp, Homo sapien
ctgggggcttggctaccatcttgtg

SEQ ID NO: 1524985 - DNA, 25 bp, Homo sapien
taaatctggcttagagacaccaaca

SEQ ID NO: 1524986 - DNA, 25 bp, Homo sapien
ggggcttggctaccatcttgtgtct

SEQ ID NO: 1524987 - DNA, 25 bp, Homo sapien
cttatcttctggctatttgaacttg

SEQ ID NO: 1524988 - DNA, 25 bp, Homo sapien
agctttgagggcacactaaaggctt

SEQ ID NO: 1524989 - DNA, 25 bp, Homo sapien
ttaagctttgagggcacactaaagg

SEQ ID NO: 1524990 - DNA, 25 bp, Homo sapien
tatcttctggctatttgaacttgaa

SEQ ID NO: 1524991 - DNA, 25 bp, Homo sapien
tgtagtaaggtgtacagatacttta

SEQ ID NO: 1524992 - DNA, 25 bp, Homo sapien
tagtaaggtgtacagatactttaaa

SEQ ID NO: 1524993 - DNA, 25 bp, Homo sapien
tgtgtagtaaggtgtacagatactt

SEQ ID NO: 1524994 - DNA, 25 bp, Homo sapien
gtgtagtaaggtgtacagatacttt

SEQ ID NO: 1524995 - DNA, 25 bp, Homo sapien
taaagctcatatgactgtggcaaag

SEQ ID NO: 1524996 - DNA, 25 bp, Homo sapien
tttttagagagaatgcgtccagctt

SEQ ID NO: 1524997 - DNA, 25 bp, Homo sapien
tgttcaccaggaatataggcctgta

SEQ ID NO: 1524998 - DNA, 25 bp, Homo sapien
taggaccagctcatctttgcatacg

SEQ ID NO: 1524999 - DNA, 25 bp, Homo sapien
tacatcaggatgttgaggcttgcac

SEQ ID NO: 1525000 - DNA, 25 bp, Homo sapien
gatttgtaacctgtatacatcagga

SEQ ID NO: 1525001 - DNA, 25 bp, Homo sapien
ctctctgattagagatcttgtgcaa

SEQ ID NO: 1525002 - DNA, 25 bp, Homo sapien
catcataccctatagtttttcaagg

SEQ ID NO: 1525003 - DNA, 25 bp, Homo sapien
taagagccagaattcgccaaggacc

SEQ ID NO: 1525004 - DNA, 25 bp, Homo sapien
tttcaaacacgaggcggctttcagc

SEQ ID NO: 1525005 - DNA, 25 bp, Homo sapien
taagtcggcaggataaggaagtccc

SEQ ID NO: 1525006 - DNA, 25 bp, Homo sapien
tctggaaaggtgcaagcgaaggtca

SEQ ID NO: 1525007 - DNA, 25 bp, Homo sapien
caaccagacaatagtgaacatgtgc

SEQ ID NO: 1525008 - DNA, 25 bp, Homo sapien
gccaaatttcaaccagacaatagtg

SEQ ID NO: 1525009 - DNA, 25 bp, Homo sapien
ccagacaatagtgaacatgtgcaaa

SEQ ID NO: 1525010 - DNA, 25 bp, Homo sapien
ttcaaccagacaatagtgaacatgt

SEQ ID NO: 1525011 - DNA, 25 bp, Homo sapien
cagtaacaataatatgtgaaactca

SEQ ID NO: 1525012 - DNA, 25 bp, Homo sapien
tcaagcaagagaggatagtcacatc

SEQ ID NO: 1525013 - DNA, 25 bp, Homo sapien
gtttgtcacagaggtatgtcacagt

SEQ ID NO: 1525014 - DNA, 25 bp, Homo sapien
ccatagctgtttgtcacagaggtat

SEQ ID NO: 1525015 - DNA, 25 bp, Homo sapien
caagccccagtcagaagagacacgt

SEQ ID NO: 1525016 - DNA, 25 bp, Homo sapien
ggctcagtgctatgtcacagttgtc

SEQ ID NO: 1525017 - DNA, 25 bp, Homo sapien
tgtctctgtgggcaagccccagtca

SEQ ID NO: 1525018 - DNA, 25 bp, Homo sapien
cacgtcactaggttgcttagttcag

SEQ ID NO: 1525019 - DNA, 25 bp, Homo sapien
tctgagtacagttcgaaaatgaaag

SEQ ID NO: 1525020 - DNA, 25 bp, Homo sapien
ccatcccttgtttagtatgtactca

SEQ ID NO: 1525021 - DNA, 25 bp, Homo sapien
catgaaaagagccaatgagcagccc

SEQ ID NO: 1525022 - DNA, 25 bp, Homo sapien
ccttgctgataaaagaggatacagg

SEQ ID NO: 1525023 - DNA, 25 bp, Homo sapien
aaaaagccttacaaagtgatgacat

SEQ ID NO: 1525024 - DNA, 25 bp, Homo sapien
gtgcccggctgccagataccaagat

SEQ ID NO: 1525025 - DNA, 25 bp, Homo sapien
ggctgccagataccaagatttgttt

SEQ ID NO: 1525026 - DNA, 25 bp, Homo sapien
cccggctgccagataccaagatttg

SEQ ID NO: 1525027 - DNA, 25 bp, Homo sapien
gatcgttcaagtgagtttgctgagc

SEQ ID NO: 1525028 - DNA, 25 bp, Homo sapien
tgtcagtctattcacgttcacaaaa

SEQ ID NO: 1525029 - DNA, 25 bp, Homo sapien
ctgaaaagcaaagggatcgttcaag

SEQ ID NO: 1525030 - DNA, 25 bp, Homo sapien
cagtctattcacgttcacaaaagta

SEQ ID NO: 1525031 - DNA, 25 bp, Homo sapien
tcactcctcgaaggcatttttactg

SEQ ID NO: 1525032 - DNA, 25 bp, Homo sapien
cactcctcgaaggcatttttactgc

SEQ ID NO: 1525033 - DNA, 25 bp, Homo sapien
gctaaaagcaaatgtatatactctg

SEQ ID NO: 1525034 - DNA, 25 bp, Homo sapien
catgatactcatgctagacccataa

SEQ ID NO: 1525035 - DNA, 25 bp, Homo sapien
aaatcatatatttctgagtcctgaa

SEQ ID NO: 1525036 - DNA, 25 bp, Homo sapien
cctgagagcacacaatagagtttta

SEQ ID NO: 1525037 - DNA, 25 bp, Homo sapien
ggggtggtggcagctcgatccaccg

SEQ ID NO: 1525038 - DNA, 25 bp, Homo sapien
tcgatccaccggctgggatagggct

SEQ ID NO: 1525039 - DNA, 25 bp, Homo sapien
ggtggtggcagctcgatccaccggc

SEQ ID NO: 1525040 - DNA, 25 bp, Homo sapien
ctcgatccaccggctgggatagggc

SEQ ID NO: 1525041 - DNA, 25 bp, Homo sapien
ctgagccatcttctgaggtcccggg

SEQ ID NO: 1525042 - DNA, 25 bp, Homo sapien
tccgagcgccgaaagggacggcgtg

SEQ ID NO: 1525043 - DNA, 25 bp, Homo sapien
tggtcccgactgtctgaggcgcctg

SEQ ID NO: 1525044 - DNA, 25 bp, Homo sapien
gaggcgcctgccgagtttattccca

SEQ ID NO: 1525045 - DNA, 25 bp, Homo sapien
gatctgtcttgttgacgttcgcgct

SEQ ID NO: 1525046 - DNA, 25 bp, Homo sapien
ggtggatccatttcgcccacgagct

SEQ ID NO: 1525047 - DNA, 25 bp, Homo sapien
tctaagttctcttgtcctccggagc

SEQ ID NO: 1525048 - DNA, 25 bp, Homo sapien
tctgtcgtggtctatgcagagccac

SEQ ID NO: 1525049 - DNA, 25 bp, Homo sapien
tccaagcatctgcaaacacccacac

SEQ ID NO: 1525050 - DNA, 25 bp, Homo sapien
tgcatctccaagcatctgcaaacac

SEQ ID NO: 1525051 - DNA, 25 bp, Homo sapien
gatgcatctccaagcatctgcaaac

SEQ ID NO: 1525052 - DNA, 25 bp, Homo sapien
gagatgcatctccaagcatctgcaa

SEQ ID NO: 1525053 - DNA, 25 bp, Homo sapien
cggaacagtgaagaccgatcccaag

SEQ ID NO: 1525054 - DNA, 25 bp, Homo sapien
tagaggacgcggaacagtgaagacc

SEQ ID NO: 1525055 - DNA, 25 bp, Homo sapien
aacagagtctgtgacaaagtcgccg

SEQ ID NO: 1525056 - DNA, 25 bp, Homo sapien
agagtctgtgacaaagtcgccgggc

SEQ ID NO: 1525057 - DNA, 25 bp, Homo sapien
taatacttctaaactgtacacctaa

SEQ ID NO: 1525058 - DNA, 25 bp, Homo sapien
taaatctttacgatactatgtcaag

SEQ ID NO: 1525059 - DNA, 25 bp, Homo sapien
aaaagagacactgtataatcacact

SEQ ID NO: 1525060 - DNA, 25 bp, Homo sapien
catagaatacttagtcaaagtcatg

SEQ ID NO: 1525061 - DNA, 25 bp, Homo sapien
ccccagacaccagtgcctcagccat

SEQ ID NO: 1525062 - DNA, 25 bp, Homo sapien
agcctgctgggccacatccccagac

SEQ ID NO: 1525063 - DNA, 25 bp, Homo sapien
cacatccccagacaccagtgcctca

SEQ ID NO: 1525064 - DNA, 25 bp, Homo sapien
gggccacatccccagacaccagtgc

SEQ ID NO: 1525065 - DNA, 25 bp, Homo sapien
tggtggccaagtcctacactcttgg

SEQ ID NO: 1525066 - DNA, 25 bp, Homo sapien
cataacgtacgtgtgaggcccaacg

SEQ ID NO: 1525067 - DNA, 25 bp, Homo sapien
tacatcaaccagttgttggacccag

SEQ ID NO: 1525068 - DNA, 25 bp, Homo sapien
gtcacaatggcccacatggacaggg

SEQ ID NO: 1525069 - DNA, 25 bp, Homo sapien
tcagggatacatcacaaagtcctcc

SEQ ID NO: 1525070 - DNA, 25 bp, Homo sapien
tctgagggcagtgccaaaactaaag

SEQ ID NO: 1525071 - DNA, 25 bp, Homo sapien
gtcatcttagtattaggcccagtga

SEQ ID NO: 1525072 - DNA, 25 bp, Homo sapien
tgggcccagcaatacaccaccacgg

SEQ ID NO: 1525073 - DNA, 25 bp, Homo sapien
gcccagtgacatgtcacaatgtcct

SEQ ID NO: 1525074 - DNA, 25 bp, Homo sapien
gcctcccatcgtttaggtgtttggc

SEQ ID NO: 1525075 - DNA, 25 bp, Homo sapien
ccatcgtttaggtgtttggcacagt

SEQ ID NO: 1525076 - DNA, 25 bp, Homo sapien
ggcagggcctcccatcgtttaggtg

SEQ ID NO: 1525077 - DNA, 25 bp, Homo sapien
cgtttaggtgtttggcacagtgaaa

SEQ ID NO: 1525078 - DNA, 25 bp, Homo sapien
catcaaggtgcagagtcaagcgata

SEQ ID NO: 1525079 - DNA, 25 bp, Homo sapien
gacattcagaacctcaatatgggag

SEQ ID NO: 1525080 - DNA, 25 bp, Homo sapien
cactaaggtgggtagcagatgcata

SEQ ID NO: 1525081 - DNA, 25 bp, Homo sapien
tagaaatgaatcactgccgggcatg

SEQ ID NO: 1525082 - DNA, 25 bp, Homo sapien
tcacacctgtgagctagaccaaggc

SEQ ID NO: 1525083 - DNA, 25 bp, Homo sapien
tctgaacgctggaatggcaatctct

SEQ ID NO: 1525084 - DNA, 25 bp, Homo sapien
gacacatcaactagtacctgggcct

SEQ ID NO: 1525085 - DNA, 25 bp, Homo sapien
ggtcaaggcccagttaccagagaca

SEQ ID NO: 1525086 - DNA, 25 bp, Homo sapien
tgcagtttagcaaagtatttgagta

SEQ ID NO: 1525087 - DNA, 25 bp, Homo sapien
ccgagctgctaagaagacattttat

SEQ ID NO: 1525088 - DNA, 25 bp, Homo sapien
aaagtgactatagaccgagctgcta

SEQ ID NO: 1525089 - DNA, 25 bp, Homo sapien
gacattttattctgttgcagtttag

SEQ ID NO: 1525090 - DNA, 25 bp, Homo sapien
cagtgtacatggcaggcagactcaa

SEQ ID NO: 1525091 - DNA, 25 bp, Homo sapien
tacagtgcaatctgctataaagccc

SEQ ID NO: 1525092 - DNA, 25 bp, Homo sapien
gaaaccccttgtgttaagatctgct

SEQ ID NO: 1525093 - DNA, 25 bp, Homo sapien
gaaaagtaatggcaccctggcaatg

SEQ ID NO: 1525094 - DNA, 25 bp, Homo sapien
gaggacacaaagcagacagacgaaa

SEQ ID NO: 1525095 - DNA, 25 bp, Homo sapien
gctgggcttctacgtgcagaggaca

SEQ ID NO: 1525096 - DNA, 25 bp, Homo sapien
gacacaaagcagacagacgaaaatt

SEQ ID NO: 1525097 - DNA, 25 bp, Homo sapien
agaggacacaaagcagacagacgaa

SEQ ID NO: 1525098 - DNA, 25 bp, Homo sapien
tgacaggcaattcgaggtacgtggc

SEQ ID NO: 1525099 - DNA, 25 bp, Homo sapien
tcaagcccgtcccatggataacaag

SEQ ID NO: 1525100 - DNA, 25 bp, Homo sapien
tgtacgctcaaggtgcaaatttaga

SEQ ID NO: 1525101 - DNA, 25 bp, Homo sapien
ggtagacttgagaccccgtttgaga

SEQ ID NO: 1525102 - DNA, 25 bp, Homo sapien
aagaagtagcattaaccactcttgt

SEQ ID NO: 1525103 - DNA, 25 bp, Homo sapien
tctgttttagtttctagacctcttc

SEQ ID NO: 1525104 - DNA, 25 bp, Homo sapien
atctgttttagtttctagacctctt

SEQ ID NO: 1525105 - DNA, 25 bp, Homo sapien
tgcagtgtaattggttaggccaacc

SEQ ID NO: 1525106 - DNA, 25 bp, Homo sapien
tgctgtgtgtaatatcacatcctct

SEQ ID NO: 1525107 - DNA, 25 bp, Homo sapien
cacatcctcttctatacgggtataa

SEQ ID NO: 1525108 - DNA, 25 bp, Homo sapien
tattttggcagtttacgagcatatg

SEQ ID NO: 1525109 - DNA, 25 bp, Homo sapien
atcttgtccatgccataggtcacag

SEQ ID NO: 1525110 - DNA, 25 bp, Homo sapien
tcacagatcttgacctactgaggag

SEQ ID NO: 1525111 - DNA, 25 bp, Homo sapien
cagatcttgacctactgaggagcct

SEQ ID NO: 1525112 - DNA, 25 bp, Homo sapien
cacagatcttgacctactgaggagc

SEQ ID NO: 1525113 - DNA, 25 bp, Homo sapien
ttccacattgtattcattgccagtc

SEQ ID NO: 1525114 - DNA, 25 bp, Homo sapien
tccacattgtattcattgccagtca

SEQ ID NO: 1525115 - DNA, 25 bp, Homo sapien
ccacattgtattcattgccagtcac

SEQ ID NO: 1525116 - DNA, 25 bp, Homo sapien
ctttccacattgtattcattgccag

SEQ ID NO: 1525117 - DNA, 25 bp, Homo sapien
catcatccttcattaagtagtgcat

SEQ ID NO: 1525118 - DNA, 25 bp, Homo sapien
ctgctctcttcagggaaccaaaaac

SEQ ID NO: 1525119 - DNA, 25 bp, Homo sapien
tcttcatcatccttcattaagtagt

SEQ ID NO: 1525120 - DNA, 25 bp, Homo sapien
cctatgatgtacttctggtgtactg

SEQ ID NO: 1525121 - DNA, 25 bp, Homo sapien
gcttttgtttatgtattgagagaac

SEQ ID NO: 1525122 - DNA, 25 bp, Homo sapien
agctttcttatgcatctccttcaag

SEQ ID NO: 1525123 - DNA, 25 bp, Homo sapien
gctttcttatgcatctccttcaagt

SEQ ID NO: 1525124 - DNA, 25 bp, Homo sapien
cacaagtagagaattaaagtttggc

SEQ ID NO: 1525125 - DNA, 25 bp, Homo sapien
aaggcatggcattctagcaggcaga

SEQ ID NO: 1525126 - DNA, 25 bp, Homo sapien
gttacaacaaactcatttaagagga

SEQ ID NO: 1525127 - DNA, 25 bp, Homo sapien
gtttggcaagtactaaaggcatggc

SEQ ID NO: 1525128 - DNA, 25 bp, Homo sapien
ttataaattcatggtgagaatcatg

SEQ ID NO: 1525129 - DNA, 25 bp, Homo sapien
attcatggtgagaatcatggcatat

SEQ ID NO: 1525130 - DNA, 25 bp, Homo sapien
tggtgagaatcatggcatataagaa

SEQ ID NO: 1525131 - DNA, 25 bp, Homo sapien
tattgcagattataaattcatggtg

SEQ ID NO: 1525132 - DNA, 25 bp, Homo sapien
taaattctgttgttcggtgtccaga

SEQ ID NO: 1525133 - DNA, 25 bp, Homo sapien
aattctgttgttcggtgtccagaca

SEQ ID NO: 1525134 - DNA, 25 bp, Homo sapien
ttctgttgttcggtgtccagacatt

SEQ ID NO: 1525135 - DNA, 25 bp, Homo sapien
ctgttgttcggtgtccagacattgc

SEQ ID NO: 1525136 - DNA, 25 bp, Homo sapien
aataaatgaaatctatagggtatat

SEQ ID NO: 1525137 - DNA, 25 bp, Homo sapien
aatgaaatctatagggtatattagg

SEQ ID NO: 1525138 - DNA, 25 bp, Homo sapien
gaaatctatagggtatattaggaat

SEQ ID NO: 1525139 - DNA, 25 bp, Homo sapien
atctatagggtatattaggaattgt

SEQ ID NO: 1525140 - DNA, 25 bp, Homo sapien
actcttcccgcctttctattccaca

SEQ ID NO: 1525141 - DNA, 25 bp, Homo sapien
ttgtcatcatggcccatccccaatg

SEQ ID NO: 1525142 - DNA, 25 bp, Homo sapien
tatccacacagacccggcaaccatc

SEQ ID NO: 1525143 - DNA, 25 bp, Homo sapien
tcatggcccatccccaatgagccgc

SEQ ID NO: 1525144 - DNA, 25 bp, Homo sapien
gaaaaataacatgaatcttgctcat

SEQ ID NO: 1525145 - DNA, 25 bp, Homo sapien
tttatgaaaaataacatgaatcttg

SEQ ID NO: 1525146 - DNA, 25 bp, Homo sapien
tatgaaaaataacatgaatcttgct

SEQ ID NO: 1525147 - DNA, 25 bp, Homo sapien
tgaaaaataacatgaatcttgctca

SEQ ID NO: 1525148 - DNA, 25 bp, Homo sapien
ggctaccatatcatgtgtcttcaaa

SEQ ID NO: 1525149 - DNA, 25 bp, Homo sapien
gggtttggctaccatatcatgtgtc

SEQ ID NO: 1525150 - DNA, 25 bp, Homo sapien
tgtcttcaaattccaaggctctttt

SEQ ID NO: 1525151 - DNA, 25 bp, Homo sapien
caaattccaaggctctttttcttgc

SEQ ID NO: 1525152 - DNA, 25 bp, Homo sapien
gtgtattgtatttactgtcacctac

SEQ ID NO: 1525153 - DNA, 25 bp, Homo sapien
ggagcatcctttttagaaggcaggc

SEQ ID NO: 1525154 - DNA, 25 bp, Homo sapien
gcctttatgagagaaacaggcatca

SEQ ID NO: 1525155 - DNA, 25 bp, Homo sapien
tacattaaggctgaagaattgcttc

SEQ ID NO: 1525156 - DNA, 25 bp, Homo sapien
caagactagtctgggttatgtaaca

SEQ ID NO: 1525157 - DNA, 25 bp, Homo sapien
gagggcacccatcaataaccttagg

SEQ ID NO: 1525158 - DNA, 25 bp, Homo sapien
tacagctcattgcaacgtcaaactt

SEQ ID NO: 1525159 - DNA, 25 bp, Homo sapien
tattgtaaatgtgtctatcctgctc

SEQ ID NO: 1525160 - DNA, 25 bp, Homo sapien
tcatagacaacgtcctaggccaaaa

SEQ ID NO: 1525161 - DNA, 25 bp, Homo sapien
tatattgtctcagtatgacttcttg

SEQ ID NO: 1525162 - DNA, 25 bp, Homo sapien
tttttatattgtctcagtatgactt

SEQ ID NO: 1525163 - DNA, 25 bp, Homo sapien
tttatattgtctcagtatgacttct

SEQ ID NO: 1525164 - DNA, 25 bp, Homo sapien
tattgtctcagtatgacttcttgga

SEQ ID NO: 1525165 - DNA, 25 bp, Homo sapien
tttgctatgggaagttgtcaaacac

SEQ ID NO: 1525166 - DNA, 25 bp, Homo sapien
caaacactggttatgtctattataa

SEQ ID NO: 1525167 - DNA, 25 bp, Homo sapien
gtcaaacactggttatgtctattat

SEQ ID NO: 1525168 - DNA, 25 bp, Homo sapien
tgctatgggaagttgtcaaacactg

SEQ ID NO: 1525169 - DNA, 25 bp, Homo sapien
ttatgtgtagtaaaatgtgaaaacc

SEQ ID NO: 1525170 - DNA, 25 bp, Homo sapien
tacagtttgaggactcattaaaggc

SEQ ID NO: 1525171 - DNA, 25 bp, Homo sapien
aaggtgtgagatacggctaaaggct

SEQ ID NO: 1525172 - DNA, 25 bp, Homo sapien
gttgagctaagtgtgaaagaatgca

SEQ ID NO: 1525173 - DNA, 25 bp, Homo sapien
acaattttatgtatgaattgtctta

SEQ ID NO: 1525174 - DNA, 25 bp, Homo sapien
tacaattttatgtatgaattgtctt

SEQ ID NO: 1525175 - DNA, 25 bp, Homo sapien
tgtttagtaagatttgaggactggt

SEQ ID NO: 1525176 - DNA, 25 bp, Homo sapien
tttagtaagatttgaggactggtta

SEQ ID NO: 1525177 - DNA, 25 bp, Homo sapien
tatgtgtagtaaggtataaagattg

SEQ ID NO: 1525178 - DNA, 25 bp, Homo sapien
tgtagtaaggtataaagattgttta

SEQ ID NO: 1525179 - DNA, 25 bp, Homo sapien
tgtgaagattggttgaagactttgc

SEQ ID NO: 1525180 - DNA, 25 bp, Homo sapien
ggtgtgaagattggttgaagacttt

SEQ ID NO: 1525181 - DNA, 25 bp, Homo sapien
gtgaagattggttgaagactttgcc

SEQ ID NO: 1525182 - DNA, 25 bp, Homo sapien
aaggtgtgaagattggttgaagact

SEQ ID NO: 1525183 - DNA, 25 bp, Homo sapien
taaggatttgttaaaggctttgtca

SEQ ID NO: 1525184 - DNA, 25 bp, Homo sapien
ctctggtatgaatcatgtctgttaa

SEQ ID NO: 1525185 - DNA, 25 bp, Homo sapien
tgtctgttaagaattaaggatttgt

SEQ ID NO: 1525186 - DNA, 25 bp, Homo sapien
ctctctggtatgaatcatgtctgtt

SEQ ID NO: 1525187 - DNA, 25 bp, Homo sapien
caccttacctacaattaaatgtgac

SEQ ID NO: 1525188 - DNA, 25 bp, Homo sapien
gaactctgatgttgagttgatgtga

SEQ ID NO: 1525189 - DNA, 25 bp, Homo sapien
taaatgtgacaacaatttaatggct

SEQ ID NO: 1525190 - DNA, 25 bp, Homo sapien
atgaatcaccttacctacaattaaa

SEQ ID NO: 1525191 - DNA, 25 bp, Homo sapien
tcaataactataactatactttgaa

SEQ ID NO: 1525192 - DNA, 25 bp, Homo sapien
ttaatacatgaatagccgggcgcgg

SEQ ID NO: 1525193 - DNA, 25 bp, Homo sapien
gacaactatctcagaatgaattaaa

SEQ ID NO: 1525194 - DNA, 25 bp, Homo sapien
gcataatcataagaaaagcctaaga

SEQ ID NO: 1525195 - DNA, 25 bp, Homo sapien
cataatagtctttgaaaacttttca

SEQ ID NO: 1525196 - DNA, 25 bp, Homo sapien
taacattaaatagatgcagaataaa

SEQ ID NO: 1525197 - DNA, 25 bp, Homo sapien
aacaaaaaatgcagagctaattaca

SEQ ID NO: 1525198 - DNA, 25 bp, Homo sapien
tctggttaagacttctggttcttac

SEQ ID NO: 1525199 - DNA, 25 bp, Homo sapien
gacaaatgtgtcgtaggctcaggct

SEQ ID NO: 1525200 - DNA, 25 bp, Homo sapien
taacagatcaagcagctctccggtg

SEQ ID NO: 1525201 - DNA, 25 bp, Homo sapien
tacgcccaggtaaatgccaagcaag

SEQ ID NO: 1525202 - DNA, 25 bp, Homo sapien
catggagccatctaccaggagtgca

SEQ ID NO: 1525203 - DNA, 25 bp, Homo sapien
aaagtggctgcttcattgttttcat

SEQ ID NO: 1525204 - DNA, 25 bp, Homo sapien
taaaagtggctgcttcattgttttc

SEQ ID NO: 1525205 - DNA, 25 bp, Homo sapien
aaaagtggctgcttcattgttttca

SEQ ID NO: 1525206 - DNA, 25 bp, Homo sapien
gcaccatggattgcaagtatctgct

SEQ ID NO: 1525207 - DNA, 25 bp, Homo sapien
tcaaagatgcatgagatcacttagg

SEQ ID NO: 1525208 - DNA, 25 bp, Homo sapien
caggtgtactacttggttccatgaa

SEQ ID NO: 1525209 - DNA, 25 bp, Homo sapien
aatatgttaaaaaagctgatgcacc

SEQ ID NO: 1525210 - DNA, 25 bp, Homo sapien
tttctgtgcctattatatatagaca

SEQ ID NO: 1525211 - DNA, 25 bp, Homo sapien
tggaagaggctaaataatatcaaca

SEQ ID NO: 1525212 - DNA, 25 bp, Homo sapien
tatactgtaccaaacttacttatgg

SEQ ID NO: 1525213 - DNA, 25 bp, Homo sapien
caggaattaagttatgcagggtttt

SEQ ID NO: 1525214 - DNA, 25 bp, Homo sapien
cagcgccaacagtccgtccatttgg

SEQ ID NO: 1525215 - DNA, 25 bp, Homo sapien
agctctagggctgtttctgccggtt

SEQ ID NO: 1525216 - DNA, 25 bp, Homo sapien
gtttgggcaccttcgccctcagcag

SEQ ID NO: 1525217 - DNA, 25 bp, Homo sapien
ctgtttctgccggttcttctgttcc

SEQ ID NO: 1525218 - DNA, 25 bp, Homo sapien
tataattgtgagtcacagttgcccc

SEQ ID NO: 1525219 - DNA, 25 bp, Homo sapien
gaagtaaagtggagtcaaccatgac

SEQ ID NO: 1525220 - DNA, 25 bp, Homo sapien
tcattccgtcacaaccatgctagtg

SEQ ID NO: 1525221 - DNA, 25 bp, Homo sapien
catgcagatacctaaaagtgtcatc

SEQ ID NO: 1525222 - DNA, 25 bp, Homo sapien
cactggtattttcatagaggttgca

SEQ ID NO: 1525223 - DNA, 25 bp, Homo sapien
ctggtattttcatagaggttgcatt

SEQ ID NO: 1525224 - DNA, 25 bp, Homo sapien
tattgtttagattataatgcacagg

SEQ ID NO: 1525225 - DNA, 25 bp, Homo sapien
gaggttgcattatgtctgtagatta

SEQ ID NO: 1525226 - DNA, 25 bp, Homo sapien
gaagccattaatatctgttcacatc

SEQ ID NO: 1525227 - DNA, 25 bp, Homo sapien
tattggacaggaaatgatgtatact

SEQ ID NO: 1525228 - DNA, 25 bp, Homo sapien
gagagttcatacttaatagaagcat

SEQ ID NO: 1525229 - DNA, 25 bp, Homo sapien
tatcaagagtgtaagctgggcatgg

SEQ ID NO: 1525230 - DNA, 25 bp, Homo sapien
gcaggttgtcaaactggtggtccct

SEQ ID NO: 1525231 - DNA, 25 bp, Homo sapien
ttgaagttatgggagatggatgcct

SEQ ID NO: 1525232 - DNA, 25 bp, Homo sapien
gagtccgtggtcctgagtatctcac

SEQ ID NO: 1525233 - DNA, 25 bp, Homo sapien
ggcagcagcagaatccgtgcctttt

SEQ ID NO: 1525234 - DNA, 25 bp, Homo sapien
gggcttagggccaaacagttcatgg

SEQ ID NO: 1525235 - DNA, 25 bp, Homo sapien
gacatgttgactctcctacctgggc

SEQ ID NO: 1525236 - DNA, 25 bp, Homo sapien
gagaattctacctgtctaagcctag

SEQ ID NO: 1525237 - DNA, 25 bp, Homo sapien
gatacctagaactgggacatgtgca

SEQ ID NO: 1525238 - DNA, 25 bp, Homo sapien
aatatatcttgacctagatcacaga

SEQ ID NO: 1525239 - DNA, 25 bp, Homo sapien
gcaatgattactctcatacctcaca

SEQ ID NO: 1525240 - DNA, 25 bp, Homo sapien
ttgacctagatcacagatgcaatga

SEQ ID NO: 1525241 - DNA, 25 bp, Homo sapien
cagatgcaatgattactctcatacc

SEQ ID NO: 1525242 - DNA, 25 bp, Homo sapien
gattgtgacctatctctgggcccag

SEQ ID NO: 1525243 - DNA, 25 bp, Homo sapien
tggtccatgcccacagaaaagagtg

SEQ ID NO: 1525244 - DNA, 25 bp, Homo sapien
cggcgactcttttcttacgtgggct

SEQ ID NO: 1525245 - DNA, 25 bp, Homo sapien
tgggcccagcacctagatattatga

SEQ ID NO: 1525246 - DNA, 25 bp, Homo sapien
tcacataagctaggcacttggcccg

SEQ ID NO: 1525247 - DNA, 25 bp, Homo sapien
tacaattcccctgtgagcagcgcta

SEQ ID NO: 1525248 - DNA, 25 bp, Homo sapien
tcaaatatcggctgactggagtcac

SEQ ID NO: 1525249 - DNA, 25 bp, Homo sapien
taattggaatacactgggctgagct

SEQ ID NO: 1525250 - DNA, 25 bp, Homo sapien
gaaaacgggttcacacattggagct

SEQ ID NO: 1525251 - DNA, 25 bp, Homo sapien
aaaacattagagagcttgcgcccag

SEQ ID NO: 1525252 - DNA, 25 bp, Homo sapien
tacaagtacttgcagggtgagcgac

SEQ ID NO: 1525253 - DNA, 25 bp, Homo sapien
gaacaaggctcagatcagtggcact

SEQ ID NO: 1525254 - DNA, 25 bp, Homo sapien
ggagctacctggaaaggacacatgt

SEQ ID NO: 1525255 - DNA, 25 bp, Homo sapien
tgcagctctgctaataggaaaagga

SEQ ID NO: 1525256 - DNA, 25 bp, Homo sapien
tgagggcaaaaacagtccttggtaa

SEQ ID NO: 1525257 - DNA, 25 bp, Homo sapien
agtgagtgagggcaaaaacagtcct

SEQ ID NO: 1525258 - DNA, 25 bp, Homo sapien
gttggtcattgagggccagcacacc

SEQ ID NO: 1525259 - DNA, 25 bp, Homo sapien
tctaagtctaagtctaagtctcaga

SEQ ID NO: 1525260 - DNA, 25 bp, Homo sapien
tttgtgcagtgggaaagactctgta

SEQ ID NO: 1525261 - DNA, 25 bp, Homo sapien
tgtttattgcatagggccatgtggc

SEQ ID NO: 1525262 - DNA, 25 bp, Homo sapien
ttattttcgaatttacattcattgg

SEQ ID NO: 1525263 - DNA, 25 bp, Homo sapien
attttcgaatttacattcattggag

SEQ ID NO: 1525264 - DNA, 25 bp, Homo sapien
tttcgaatttacattcattggagga

SEQ ID NO: 1525265 - DNA, 25 bp, Homo sapien
ttttcgaatttacattcattggagg

SEQ ID NO: 1525266 - DNA, 25 bp, Homo sapien
gacctcgtgataccctcacctcacc

SEQ ID NO: 1525267 - DNA, 25 bp, Homo sapien
atctatacatttcaatgaaggattt

SEQ ID NO: 1525268 - DNA, 25 bp, Homo sapien
catttcaatgaaggatttaatttat

SEQ ID NO: 1525269 - DNA, 25 bp, Homo sapien
gcgcgatctcgtcccactgctcact

SEQ ID NO: 1525270 - DNA, 25 bp, Homo sapien
tatctcaatggtctctctaatgctg

SEQ ID NO: 1525271 - DNA, 25 bp, Homo sapien
cacccctggtcaaccatcataatta

SEQ ID NO: 1525272 - DNA, 25 bp, Homo sapien
tactttgttgatttgccagatttcc

SEQ ID NO: 1525273 - DNA, 25 bp, Homo sapien
tggtctaagtaggtagttcgtataa

SEQ ID NO: 1525274 - DNA, 25 bp, Homo sapien
caggctcaaacgatcgttttatatt

SEQ ID NO: 1525275 - DNA, 25 bp, Homo sapien
tcaaacgatcgttttatattagcct

SEQ ID NO: 1525276 - DNA, 25 bp, Homo sapien
ctcaaacgatcgttttatattagcc

SEQ ID NO: 1525277 - DNA, 25 bp, Homo sapien
ggctcaaacgatcgttttatattag

SEQ ID NO: 1525278 - DNA, 25 bp, Homo sapien
gaatgtgaactctaacaacatgttc

SEQ ID NO: 1525279 - DNA, 25 bp, Homo sapien
tgagctggggtctagatacggtcct

SEQ ID NO: 1525280 - DNA, 25 bp, Homo sapien
ctagatacggtcctcgtcttctggg

SEQ ID NO: 1525281 - DNA, 25 bp, Homo sapien
acactgggtgaggtactgaaactct

SEQ ID NO: 1525282 - DNA, 25 bp, Homo sapien
tccttactaaccataagaaaattca

SEQ ID NO: 1525283 - DNA, 25 bp, Homo sapien
ttaaccagtcttcaatccttactaa

SEQ ID NO: 1525284 - DNA, 25 bp, Homo sapien
gaaaattcatactatcacacctgta

SEQ ID NO: 1525285 - DNA, 25 bp, Homo sapien
agaaaattcatactatcacacctgt

SEQ ID NO: 1525286 - DNA, 25 bp, Homo sapien
ttaaccagtgtctcacaactgccca

SEQ ID NO: 1525287 - DNA, 25 bp, Homo sapien
aagtcattttgcatccgtttacaca

SEQ ID NO: 1525288 - DNA, 25 bp, Homo sapien
tagacataagaggatacacactgga

SEQ ID NO: 1525289 - DNA, 25 bp, Homo sapien
caaacagacatacgataagacatac

SEQ ID NO: 1525290 - DNA, 25 bp, Homo sapien
cttcaatttcaatgactttaaattt

SEQ ID NO: 1525291 - DNA, 25 bp, Homo sapien
tttcttttgactgttttgtcttcca

SEQ ID NO: 1525292 - DNA, 25 bp, Homo sapien
tggtcttcaatttcaatgactttaa

SEQ ID NO: 1525293 - DNA, 25 bp, Homo sapien
cttttgactgttttgtcttccacat

SEQ ID NO: 1525294 - DNA, 25 bp, Homo sapien
aatgaaaaattctgcccatagccac

SEQ ID NO: 1525295 - DNA, 25 bp, Homo sapien
gtttttcagggactgttgacattta

SEQ ID NO: 1525296 - DNA, 25 bp, Homo sapien
ctctccggaggagtggcaatgtctg

SEQ ID NO: 1525297 - DNA, 25 bp, Homo sapien
gcccatagccactttgtaaatatgt

SEQ ID NO: 1525298 - DNA, 25 bp, Homo sapien
tggtccaggaacctgttctatttgg

SEQ ID NO: 1525299 - DNA, 25 bp, Homo sapien
cagtgtggccaatatttgtattact

SEQ ID NO: 1525300 - DNA, 25 bp, Homo sapien
gaaattgctgatgtccgtagcaggg

SEQ ID NO: 1525301 - DNA, 25 bp, Homo sapien
ctttgcactaaagggtggtccagga

SEQ ID NO: 1525302 - DNA, 25 bp, Homo sapien
ctaaggtgccagaatcaagtatgag

SEQ ID NO: 1525303 - DNA, 25 bp, Homo sapien
taaggtgccagaatcaagtatgaga

SEQ ID NO: 1525304 - DNA, 25 bp, Homo sapien
gtatgagaagtttaagatacattca

SEQ ID NO: 1525305 - DNA, 25 bp, Homo sapien
tcaagtatgagaagtttaagataca

SEQ ID NO: 1525306 - DNA, 25 bp, Homo sapien
ccgtgtgctgtgggctgtaccacag

SEQ ID NO: 1525307 - DNA, 25 bp, Homo sapien
gatagcaccctattcaaccactttt

SEQ ID NO: 1525308 - DNA, 25 bp, Homo sapien
caagtcctcagggagtagagagcca

SEQ ID NO: 1525309 - DNA, 25 bp, Homo sapien
aagcaggagtgcactagtcaagtcc

SEQ ID NO: 1525310 - DNA, 25 bp, Homo sapien
tggcaaaagcctccaagagggggac

SEQ ID NO: 1525311 - DNA, 25 bp, Homo sapien
gatgatatcgggagacagaatgtct

SEQ ID NO: 1525312 - DNA, 25 bp, Homo sapien
gccgatttggatggtatggcaaaag

SEQ ID NO: 1525313 - DNA, 25 bp, Homo sapien
atgcttggccctctttgccgatttg

SEQ ID NO: 1525314 - DNA, 25 bp, Homo sapien
ggagatggtatttttgaccactgag

SEQ ID NO: 1525315 - DNA, 25 bp, Homo sapien
ttcaccggtgacaataagagcaaca

SEQ ID NO: 1525316 - DNA, 25 bp, Homo sapien
ctgaggagggtgtttctgtgaacac

SEQ ID NO: 1525317 - DNA, 25 bp, Homo sapien
gaccctccagtgatcgtgagggaga

SEQ ID NO: 1525318 - DNA, 25 bp, Homo sapien
agccttggcaactttgctggccgaa

SEQ ID NO: 1525319 - DNA, 25 bp, Homo sapien
ccttggcaactttgctggccgaaag

SEQ ID NO: 1525320 - DNA, 25 bp, Homo sapien
ttggcaactttgctggccgaaagga

SEQ ID NO: 1525321 - DNA, 25 bp, Homo sapien
ggcaactttgctggccgaaaggact

SEQ ID NO: 1525322 - DNA, 25 bp, Homo sapien
cttgatgagcttgcatgacgcggga

SEQ ID NO: 1525323 - DNA, 25 bp, Homo sapien
cctgtctggactgagatgcggaacc

SEQ ID NO: 1525324 - DNA, 25 bp, Homo sapien
gaaacatgtcttcggctggccattc

SEQ ID NO: 1525325 - DNA, 25 bp, Homo sapien
ttttttccgtgacattcagcccctc

SEQ ID NO: 1525326 - DNA, 25 bp, Homo sapien
cacatgtggcctgtacggtagacac

SEQ ID NO: 1525327 - DNA, 25 bp, Homo sapien
cacgagcgtaggacttggttgccag

SEQ ID NO: 1525328 - DNA, 25 bp, Homo sapien
ttcaggccgcgagtgccacatgtgg

SEQ ID NO: 1525329 - DNA, 25 bp, Homo sapien
gaaataaggttccaacagggacagc

SEQ ID NO: 1525330 - DNA, 25 bp, Homo sapien
ctgcagggtggacacgttggcttct

SEQ ID NO: 1525331 - DNA, 25 bp, Homo sapien
tctggccaccgggtgaccagatgtg

SEQ ID NO: 1525332 - DNA, 25 bp, Homo sapien
ccagatgtgggtggcgagctgtggc

SEQ ID NO: 1525333 - DNA, 25 bp, Homo sapien
tgctggcctctcgtttgggtggacc

SEQ ID NO: 1525334 - DNA, 25 bp, Homo sapien
tatcttccctggtgcatacaccttg

SEQ ID NO: 1525335 - DNA, 25 bp, Homo sapien
ggataacccaagatgcccacagtgg

SEQ ID NO: 1525336 - DNA, 25 bp, Homo sapien
catgattttcagaaccgtcagggat

SEQ ID NO: 1525337 - DNA, 25 bp, Homo sapien
atacaccttgttagtaggtctttcg

SEQ ID NO: 1525338 - DNA, 25 bp, Homo sapien
tcaccggctctttagcaccgccttg

SEQ ID NO: 1525339 - DNA, 25 bp, Homo sapien
ggctctttagcaccgccttgtgttg

SEQ ID NO: 1525340 - DNA, 25 bp, Homo sapien
accggctctttagcaccgccttgtg

SEQ ID NO: 1525341 - DNA, 25 bp, Homo sapien
cggctctttagcaccgccttgtgtt

SEQ ID NO: 1525342 - DNA, 25 bp, Homo sapien
gccctagcccagatagcattcaaat

SEQ ID NO: 1525343 - DNA, 25 bp, Homo sapien
cctagcccagatagcattcaaatct

SEQ ID NO: 1525344 - DNA, 25 bp, Homo sapien
cagccctagcccagatagcattcaa

SEQ ID NO: 1525345 - DNA, 25 bp, Homo sapien
ctgacagccctagcccagatagcat

SEQ ID NO: 1525346 - DNA, 25 bp, Homo sapien
ttatgattccactctggttctcccc

SEQ ID NO: 1525347 - DNA, 25 bp, Homo sapien
ggatttatgattccactctggttct

SEQ ID NO: 1525348 - DNA, 25 bp, Homo sapien
tatgtgggtctggttaaaatgagga

SEQ ID NO: 1525349 - DNA, 25 bp, Homo sapien
taatacttccagattgtagccttca

SEQ ID NO: 1525350 - DNA, 25 bp, Homo sapien
cttggactactcaggccatcttcct

SEQ ID NO: 1525351 - DNA, 25 bp, Homo sapien
ttggactactcaggccatcttcctt

SEQ ID NO: 1525352 - DNA, 25 bp, Homo sapien
tgtaacagatgttggctgcgagcgt

SEQ ID NO: 1525353 - DNA, 25 bp, Homo sapien
gatcttcccgatgtcacccggagga

SEQ ID NO: 1525354 - DNA, 25 bp, Homo sapien
gcagtagtattgttcaggcccagca

SEQ ID NO: 1525355 - DNA, 25 bp, Homo sapien
gattagttgccagcttgccatgtct

SEQ ID NO: 1525356 - DNA, 25 bp, Homo sapien
tatggctcttgtcagcagcagtccc

SEQ ID NO: 1525357 - DNA, 25 bp, Homo sapien
gatctttccagtcttatccaggtag

SEQ ID NO: 1525358 - DNA, 25 bp, Homo sapien
ccaggtagtcacacaacaaaacgtc

SEQ ID NO: 1525359 - DNA, 25 bp, Homo sapien
gcagagggatgcaatcctgattcac

SEQ ID NO: 1525360 - DNA, 25 bp, Homo sapien
gattgctatgtctatggtcgaccag

SEQ ID NO: 1525361 - DNA, 25 bp, Homo sapien
ctgtaagcattggacttagccacca

SEQ ID NO: 1525362 - DNA, 25 bp, Homo sapien
tttgagacagctgttggctgtaagc

SEQ ID NO: 1525363 - DNA, 25 bp, Homo sapien
tgtctaaggtcctccagatggctca

SEQ ID NO: 1525364 - DNA, 25 bp, Homo sapien
ttccatagtacttagagtgatttgt

SEQ ID NO: 1525365 - DNA, 25 bp, Homo sapien
tccatagtacttagagtgatttgtt

SEQ ID NO: 1525366 - DNA, 25 bp, Homo sapien
tggatgtcaccactttctagatgca

SEQ ID NO: 1525367 - DNA, 25 bp, Homo sapien
ccaagtgaggaagatctgggcacac

SEQ ID NO: 1525368 - DNA, 25 bp, Homo sapien
ccttgaaggatcctgtgtgcatgac

SEQ ID NO: 1525369 - DNA, 25 bp, Homo sapien
gacatattgggtatgctccagtggg

SEQ ID NO: 1525370 - DNA, 25 bp, Homo sapien
ccactttttgcctgtgccacttttc

SEQ ID NO: 1525371 - DNA, 25 bp, Homo sapien
ttagcaggctaggtctggcatgctg

SEQ ID NO: 1525372 - DNA, 25 bp, Homo sapien
ctccttagcaggctaggtctggcat

SEQ ID NO: 1525373 - DNA, 25 bp, Homo sapien
gcctgtgccacttttcgcttgtgct

SEQ ID NO: 1525374 - DNA, 25 bp, Homo sapien
tatttacaggatactggcacatggt

SEQ ID NO: 1525375 - DNA, 25 bp, Homo sapien
tatgcaatctagctgcctctgagag

SEQ ID NO: 1525376 - DNA, 25 bp, Homo sapien
actgactgcatcgtttgtggcctga

SEQ ID NO: 1525377 - DNA, 25 bp, Homo sapien
tatcagtaggaatccccaaagtggg

SEQ ID NO: 1525378 - DNA, 25 bp, Homo sapien
ttcaggaagatttgaagaccactta

SEQ ID NO: 1525379 - DNA, 25 bp, Homo sapien
aattatctcattttcaggaagattt

SEQ ID NO: 1525380 - DNA, 25 bp, Homo sapien
ttatgtccagtaatgtttgaagacc

SEQ ID NO: 1525381 - DNA, 25 bp, Homo sapien
aacagtgtctttttagtgtgaattc

SEQ ID NO: 1525382 - DNA, 25 bp, Homo sapien
ctaaaagatttgccacattctttac

SEQ ID NO: 1525383 - DNA, 25 bp, Homo sapien
attcccttatgggtagtaaggtgtg

SEQ ID NO: 1525384 - DNA, 25 bp, Homo sapien
ttccagtatgaattcccttatgggt

SEQ ID NO: 1525385 - DNA, 25 bp, Homo sapien
tcccttatgggtagtaaggtgtgag

SEQ ID NO: 1525386 - DNA, 25 bp, Homo sapien
ccttatgggtagtaaggtgtgagta

SEQ ID NO: 1525387 - DNA, 25 bp, Homo sapien
cttataagctctgccacattcttta

SEQ ID NO: 1525388 - DNA, 25 bp, Homo sapien
acttataagctctgccacattcttt

SEQ ID NO: 1525389 - DNA, 25 bp, Homo sapien
ttataagctctgccacattctttac

SEQ ID NO: 1525390 - DNA, 25 bp, Homo sapien
cacttataagctctgccacattctt

SEQ ID NO: 1525391 - DNA, 25 bp, Homo sapien
cttatgttcagtaaggtttgaggac

SEQ ID NO: 1525392 - DNA, 25 bp, Homo sapien
tatgtacagcaaggtgtaaggacca

SEQ ID NO: 1525393 - DNA, 25 bp, Homo sapien
tgtacagcaaggtgtaaggaccagt

SEQ ID NO: 1525394 - DNA, 25 bp, Homo sapien
tacagcaaggtgtaaggaccagtta

SEQ ID NO: 1525395 - DNA, 25 bp, Homo sapien
ttatcttatgtacagcaaggtgtaa

SEQ ID NO: 1525396 - DNA, 25 bp, Homo sapien
atcttatgcttagtaaggtttgagg

SEQ ID NO: 1525397 - DNA, 25 bp, Homo sapien
ccagtataaattatcttatgcttag

SEQ ID NO: 1525398 - DNA, 25 bp, Homo sapien
cttatgcttagtaaggtttgaggac

SEQ ID NO: 1525399 - DNA, 25 bp, Homo sapien
gtataaattatcttatgcttagtaa

SEQ ID NO: 1525400 - DNA, 25 bp, Homo sapien
ctgttcagtaagttttgaggaccac

SEQ ID NO: 1525401 - DNA, 25 bp, Homo sapien
tcagtaagttttgaggaccacttaa

SEQ ID NO: 1525402 - DNA, 25 bp, Homo sapien
aaagcattgccacattcttcaaatt

SEQ ID NO: 1525403 - DNA, 25 bp, Homo sapien
gaccacttaaaagcattgccacatt

SEQ ID NO: 1525404 - DNA, 25 bp, Homo sapien
tgggaaggttgtcatcacccgaaag

SEQ ID NO: 1525405 - DNA, 25 bp, Homo sapien
tgagaggcatgtcctcttgtgggaa

SEQ ID NO: 1525406 - DNA, 25 bp, Homo sapien
ttgtgagaggcatgtcctcttgtgg

SEQ ID NO: 1525407 - DNA, 25 bp, Homo sapien
gtgggaaggttgtcatcacccgaaa

SEQ ID NO: 1525408 - DNA, 25 bp, Homo sapien
tgcatgactaaagaccgtggtgact

SEQ ID NO: 1525409 - DNA, 25 bp, Homo sapien
catttgtgcatgactaaagaccgtg

SEQ ID NO: 1525410 - DNA, 25 bp, Homo sapien
actaaagaccgtggtgactttatag

SEQ ID NO: 1525411 - DNA, 25 bp, Homo sapien
catgactaaagaccgtggtgacttt

SEQ ID NO: 1525412 - DNA, 25 bp, Homo sapien
aggacagtggagcagccaacacaca

SEQ ID NO: 1525413 - DNA, 25 bp, Homo sapien
gacagtggagcagccaacacacaaa

SEQ ID NO: 1525414 - DNA, 25 bp, Homo sapien
tggagcagccaacacacaaaactac

SEQ ID NO: 1525415 - DNA, 25 bp, Homo sapien
cagtggagcagccaacacacaaaac

SEQ ID NO: 1525416 - DNA, 25 bp, Homo sapien
tgattcagagtgcttttagtgctgc

SEQ ID NO: 1525417 - DNA, 25 bp, Homo sapien
ttttaatccaaaatgtgtttattga

SEQ ID NO: 1525418 - DNA, 25 bp, Homo sapien
aatgtgtttattgagatggtttccc

SEQ ID NO: 1525419 - DNA, 25 bp, Homo sapien
ggtttcccactcatcttgattcaga

SEQ ID NO: 1525420 - DNA, 25 bp, Homo sapien
atggattgagagatgagtaaaagct

SEQ ID NO: 1525421 - DNA, 25 bp, Homo sapien
catggattgagagatgagtaaaagc

SEQ ID NO: 1525422 - DNA, 25 bp, Homo sapien
tgtgagcattggttaaaggttttgc

SEQ ID NO: 1525423 - DNA, 25 bp, Homo sapien
tcaaatataaatggtttcctgtgca

SEQ ID NO: 1525424 - DNA, 25 bp, Homo sapien
ttcacacttgtagaagttttctcca

SEQ ID NO: 1525425 - DNA, 25 bp, Homo sapien
atataaatggtttcctgtgcaataa

SEQ ID NO: 1525426 - DNA, 25 bp, Homo sapien
caggaaagtgtggtccgtattttca

SEQ ID NO: 1525427 - DNA, 25 bp, Homo sapien
gaaagtgtggtccgtattttcattg

SEQ ID NO: 1525428 - DNA, 25 bp, Homo sapien
agtgtggtccgtattttcattgctg

SEQ ID NO: 1525429 - DNA, 25 bp, Homo sapien
aagtgtggtccgtattttcattgct

SEQ ID NO: 1525430 - DNA, 25 bp, Homo sapien
gacccaaccccatggtggcacaggg

SEQ ID NO: 1525431 - DNA, 25 bp, Homo sapien
aggggtaatgactggtacctttgca

SEQ ID NO: 1525432 - DNA, 25 bp, Homo sapien
caggggcttagtatatccctttgcc

SEQ ID NO: 1525433 - DNA, 25 bp, Homo sapien
cactgctagagttttctgacccaac

SEQ ID NO: 1525434 - DNA, 25 bp, Homo sapien
tgagaccataagaaacagctgccct

SEQ ID NO: 1525435 - DNA, 25 bp, Homo sapien
gcatgacattttgaagtatatacac

SEQ ID NO: 1525436 - DNA, 25 bp, Homo sapien
catttagtcacctaactctagccaa

SEQ ID NO: 1525437 - DNA, 25 bp, Homo sapien
gaaaacattcgaagatcatggcagc

SEQ ID NO: 1525438 - DNA, 25 bp, Homo sapien
agagacaaactctacaaacgtgaag

SEQ ID NO: 1525439 - DNA, 25 bp, Homo sapien
gcaaagcctttaacctgtcgtcaca

SEQ ID NO: 1525440 - DNA, 25 bp, Homo sapien
taaatggacataaggtaagacacac

SEQ ID NO: 1525441 - DNA, 25 bp, Homo sapien
tggcaaagcctgtaaccagttcaca

SEQ ID NO: 1525442 - DNA, 25 bp, Homo sapien
gatcataggtcaacagaggctgtga

SEQ ID NO: 1525443 - DNA, 25 bp, Homo sapien
tgcagatcataggtcaacagaggct

SEQ ID NO: 1525444 - DNA, 25 bp, Homo sapien
tccctgcagatcataggtcaacaga

SEQ ID NO: 1525445 - DNA, 25 bp, Homo sapien
cataggtcaacagaggctgtgacag

SEQ ID NO: 1525446 - DNA, 25 bp, Homo sapien
gacaaatagttgatagtgttgtaaa

SEQ ID NO: 1525447 - DNA, 25 bp, Homo sapien
acactgtgtctgaaatgcacaataa

SEQ ID NO: 1525448 - DNA, 25 bp, Homo sapien
tatgtcacgattcatctgtgggtta

SEQ ID NO: 1525449 - DNA, 25 bp, Homo sapien
cgattcatctgtgggttaaatccag

SEQ ID NO: 1525450 - DNA, 25 bp, Homo sapien
ccagcgatatgtcacgattcatctg

SEQ ID NO: 1525451 - DNA, 25 bp, Homo sapien
tcatctgtgggttaaatccagacag

SEQ ID NO: 1525452 - DNA, 25 bp, Homo sapien
cattttctaattgctgggtccagtg

SEQ ID NO: 1525453 - DNA, 25 bp, Homo sapien
caatgttcttgtgggcaaggctcag

SEQ ID NO: 1525454 - DNA, 25 bp, Homo sapien
ggtgctgagcccaaggatatgtcac

SEQ ID NO: 1525455 - DNA, 25 bp, Homo sapien
gagcccaaggatatgtcacaatgtt

SEQ ID NO: 1525456 - DNA, 25 bp, Homo sapien
tgggttctcaaccagtgacgtgtta

SEQ ID NO: 1525457 - DNA, 25 bp, Homo sapien
gagaattatggcctcatcggtgggc

SEQ ID NO: 1525458 - DNA, 25 bp, Homo sapien
gacagtatctcttctattgaccggt

SEQ ID NO: 1525459 - DNA, 25 bp, Homo sapien
tcttggcagaaatcacgcaggagag

SEQ ID NO: 1525460 - DNA, 25 bp, Homo sapien
tgctctggacccatgatcttataga

SEQ ID NO: 1525461 - DNA, 25 bp, Homo sapien
cctgctctgagaacgttgtgctgct

SEQ ID NO: 1525462 - DNA, 25 bp, Homo sapien
tagagttaccatctcaaatgtggcc

SEQ ID NO: 1525463 - DNA, 25 bp, Homo sapien
tcttgaggactgtatatggtgtgca

SEQ ID NO: 1525464 - DNA, 25 bp, Homo sapien
aacccgaggccacgcatggcggtca

SEQ ID NO: 1525465 - DNA, 25 bp, Homo sapien
ggttacagtcacaaaggtgtgttga

SEQ ID NO: 1525466 - DNA, 25 bp, Homo sapien
tttggttacagagtcactaacccga

SEQ ID NO: 1525467 - DNA, 25 bp, Homo sapien
tattctccttagtgaggttacagtc

SEQ ID NO: 1525468 - DNA, 25 bp, Homo sapien
caccttagtgttagggacagtcata

SEQ ID NO: 1525469 - DNA, 25 bp, Homo sapien
gctaggtgctggacccaatagtatg

SEQ ID NO: 1525470 - DNA, 25 bp, Homo sapien
gaaaaatgtcacgtcagctaggtgc

SEQ ID NO: 1525471 - DNA, 25 bp, Homo sapien
tataaagggcatttacctgagcttg

SEQ ID NO: 1525472 - DNA, 25 bp, Homo sapien
taaactgtgtttactctggccctaa

SEQ ID NO: 1525473 - DNA, 25 bp, Homo sapien
tgtgataatcactcccgcaggaagg

SEQ ID NO: 1525474 - DNA, 25 bp, Homo sapien
cattgcacctgtgagctagaccaaa

SEQ ID NO: 1525475 - DNA, 25 bp, Homo sapien
cctgtgtgctgaaccctggaatgac

SEQ ID NO: 1525476 - DNA, 25 bp, Homo sapien
acaatgtcccctataggaagggcac

SEQ ID NO: 1525477 - DNA, 25 bp, Homo sapien
gcaatatgccacagctttccatgta

SEQ ID NO: 1525478 - DNA, 25 bp, Homo sapien
tgtctttattaagacccaggcagga

SEQ ID NO: 1525479 - DNA, 25 bp, Homo sapien
tccatgtaggcagggtgcaagcaga

SEQ ID NO: 1525480 - DNA, 25 bp, Homo sapien
taaaaattacatcccctgagtgtca

SEQ ID NO: 1525481 - DNA, 25 bp, Homo sapien
gacatttcaaaatgccgcctatagg

SEQ ID NO: 1525482 - DNA, 25 bp, Homo sapien
agggtttcacaatattaagcaggct

SEQ ID NO: 1525483 - DNA, 25 bp, Homo sapien
aaattgtcaatgcagggcccagcga

SEQ ID NO: 1525484 - DNA, 25 bp, Homo sapien
cacgaggtcagaagtgccaagccag

SEQ ID NO: 1525485 - DNA, 25 bp, Homo sapien
cgaggtcagaagtgccaagccagcc

SEQ ID NO: 1525486 - DNA, 25 bp, Homo sapien
gtcagaagtgccaagccagcctgac

SEQ ID NO: 1525487 - DNA, 25 bp, Homo sapien
gcactttccaagcctgaggccagca

SEQ ID NO: 1525488 - DNA, 25 bp, Homo sapien
tgggaatatcagacgaaactggaaa

SEQ ID NO: 1525489 - DNA, 25 bp, Homo sapien
tacattgccggaaacaagcttcagg

SEQ ID NO: 1525490 - DNA, 25 bp, Homo sapien
tgaggtggctctagtccccggattt

SEQ ID NO: 1525491 - DNA, 25 bp, Homo sapien
cagtcaccattggagtgtgaaaata

SEQ ID NO: 1525492 - DNA, 25 bp, Homo sapien
ggacatctacattttgcacattgtg

SEQ ID NO: 1525493 - DNA, 25 bp, Homo sapien
gctaggtctctaaacatgttcttga

SEQ ID NO: 1525494 - DNA, 25 bp, Homo sapien
gaatgtttacggaagaaaaagcaga

SEQ ID NO: 1525495 - DNA, 25 bp, Homo sapien
caggcactaatagacagataactga

SEQ ID NO: 1525496 - DNA, 25 bp, Homo sapien
ccacatacctaaacgtcaagagtcc

SEQ ID NO: 1525497 - DNA, 25 bp, Homo sapien
gccaggttttcataacattcctcta

SEQ ID NO: 1525498 - DNA, 25 bp, Homo sapien
gccacatacctaaacgtcaagagtc

SEQ ID NO: 1525499 - DNA, 25 bp, Homo sapien
aggccaggttttcataacattcctc

SEQ ID NO: 1525500 - DNA, 25 bp, Homo sapien
caattaccaacttagtaatgtgttc

SEQ ID NO: 1525501 - DNA, 25 bp, Homo sapien
atacttttattggtcaggcgcagtg

SEQ ID NO: 1525502 - DNA, 25 bp, Homo sapien
attaccaacttagtaatgtgttcag

SEQ ID NO: 1525503 - DNA, 25 bp, Homo sapien
accaacttagtaatgtgttcagtaa

SEQ ID NO: 1525504 - DNA, 25 bp, Homo sapien
gggctctttttctcgctccagatag

SEQ ID NO: 1525505 - DNA, 25 bp, Homo sapien
ctttttctcgctccagataggtgat

SEQ ID NO: 1525506 - DNA, 25 bp, Homo sapien
ttttctcgctccagataggtgatca

SEQ ID NO: 1525507 - DNA, 25 bp, Homo sapien
ttctcgctccagataggtgatcagg

SEQ ID NO: 1525508 - DNA, 25 bp, Homo sapien
gtgaaacagaaaccgtcactctcgt

SEQ ID NO: 1525509 - DNA, 25 bp, Homo sapien
tcatgaatagtactttagctgtcac

SEQ ID NO: 1525510 - DNA, 25 bp, Homo sapien
aacacaaccctaaaacatagatgaa

SEQ ID NO: 1525511 - DNA, 25 bp, Homo sapien
ttatggagatatctctctgtccaca

SEQ ID NO: 1525512 - DNA, 25 bp, Homo sapien
aaaatcttgaagaggtgtttgctcc

SEQ ID NO: 1525513 - DNA, 25 bp, Homo sapien
aaacattgctgttggtagaccatgt

SEQ ID NO: 1525514 - DNA, 25 bp, Homo sapien
aaacaaacggtctgataaaagagag

SEQ ID NO: 1525515 - DNA, 25 bp, Homo sapien
tgctcctttaaatttacagacccca

SEQ ID NO: 1525516 - DNA, 25 bp, Homo sapien
ggactactgttgttggctacagaca

SEQ ID NO: 1525517 - DNA, 25 bp, Homo sapien
aagtgcctttaagagagttctgaga

SEQ ID NO: 1525518 - DNA, 25 bp, Homo sapien
ccctcattcaggtggcaaactacag

SEQ ID NO: 1525519 - DNA, 25 bp, Homo sapien
aacttggttccagtgagaattctga

SEQ ID NO: 1525520 - DNA, 25 bp, Homo sapien
gcctggctgtgacatgtatatttaa

SEQ ID NO: 1525521 - DNA, 25 bp, Homo sapien
tatgcctggctgtgacatgtatatt

SEQ ID NO: 1525522 - DNA, 25 bp, Homo sapien
ggctcaagtaaccctgcccctcatt

SEQ ID NO: 1525523 - DNA, 25 bp, Homo sapien
actatgcctggctgtgacatgtata

SEQ ID NO: 1525524 - DNA, 25 bp, Homo sapien
tcttcccaagaagctgggattacag

SEQ ID NO: 1525525 - DNA, 25 bp, Homo sapien
gcaacctccgccttccaggttcaac

SEQ ID NO: 1525526 - DNA, 25 bp, Homo sapien
caattctcctgcctcatcttcccaa

SEQ ID NO: 1525527 - DNA, 25 bp, Homo sapien
cagtggcatggtctcagcttgctgc

SEQ ID NO: 1525528 - DNA, 25 bp, Homo sapien
gcagtgaggcaaaatcatggcagta

SEQ ID NO: 1525529 - DNA, 25 bp, Homo sapien
tcaacatatgtttgctcaggaatca

SEQ ID NO: 1525530 - DNA, 25 bp, Homo sapien
ggccaaataatctcccacaaaattg

SEQ ID NO: 1525531 - DNA, 25 bp, Homo sapien
caactacatgagacactgaggagga

SEQ ID NO: 1525532 - DNA, 25 bp, Homo sapien
aaatttctaaccaataatacttgat

SEQ ID NO: 1525533 - DNA, 25 bp, Homo sapien
acttattagataaccatcaactaga

SEQ ID NO: 1525534 - DNA, 25 bp, Homo sapien
gatttaggaaatcttagaagaagaa

SEQ ID NO: 1525535 - DNA, 25 bp, Homo sapien
tagcacagttctacaaaaaaaggta

SEQ ID NO: 1525536 - DNA, 25 bp, Homo sapien
caggaaatattctaccaactataaa

SEQ ID NO: 1525537 - DNA, 25 bp, Homo sapien
tacatgaagtagttatactgttaaa

SEQ ID NO: 1525538 - DNA, 25 bp, Homo sapien
gagtggtgtttgcaaaacgctataa

SEQ ID NO: 1525539 - DNA, 25 bp, Homo sapien
tactcagtattcaaaagcaggaaat

SEQ ID NO: 1525540 - DNA, 25 bp, Homo sapien
gagatcaaccagaccaacaatggtg

SEQ ID NO: 1525541 - DNA, 25 bp, Homo sapien
tcgagatcaaccagaccaacaatgg

SEQ ID NO: 1525542 - DNA, 25 bp, Homo sapien
ttcgagatcaaccagaccaacaatg

SEQ ID NO: 1525543 - DNA, 25 bp, Homo sapien
agatcaaccagaccaacaatggtga

SEQ ID NO: 1525544 - DNA, 25 bp, Homo sapien
ctgcaggtagcgcggaaaagctgca

SEQ ID NO: 1525545 - DNA, 25 bp, Homo sapien
aggtagcgcggaaaagctgcagcat

SEQ ID NO: 1525546 - DNA, 25 bp, Homo sapien
gcgcggaaaagctgcagcattgtta

SEQ ID NO: 1525547 - DNA, 25 bp, Homo sapien
agcgcggaaaagctgcagcattgtt

SEQ ID NO: 1525548 - DNA, 25 bp, Homo sapien
ctcctccttcatttgcaggacatca

SEQ ID NO: 1525549 - DNA, 25 bp, Homo sapien
tgctgcaaggaacttaaggacatcc

SEQ ID NO: 1525550 - DNA, 25 bp, Homo sapien
ttgcaggacatcaagggctccggac

SEQ ID NO: 1525551 - DNA, 25 bp, Homo sapien
gaacttaaggacatcctcctccttc

SEQ ID NO: 1525552 - DNA, 25 bp, Homo sapien
ttccttttatagatgtagtgttcca

SEQ ID NO: 1525553 - DNA, 25 bp, Homo sapien
tccttttatagatgtagtgttccat

SEQ ID NO: 1525554 - DNA, 25 bp, Homo sapien
gtcctcttgagatttatgatataga

SEQ ID NO: 1525555 - DNA, 25 bp, Homo sapien
ggtcctcttgagatttatgatatag

SEQ ID NO: 1525556 - DNA, 25 bp, Homo sapien
ctcttgagatttatgatatagatgc

SEQ ID NO: 1525557 - DNA, 25 bp, Homo sapien
caggtcctcttgagatttatgatat

SEQ ID NO: 1525558 - DNA, 25 bp, Homo sapien
gaaggttccaggagtgaagcggcca

SEQ ID NO: 1525559 - DNA, 25 bp, Homo sapien
gcggccagcaattggagtggctcca

SEQ ID NO: 1525560 - DNA, 25 bp, Homo sapien
agtgaagcggccagcaattggagtg

SEQ ID NO: 1525561 - DNA, 25 bp, Homo sapien
caggagtgaagcggccagcaattgg

SEQ ID NO: 1525562 - DNA, 25 bp, Homo sapien
aaccacaagaagccgtggctcccag

SEQ ID NO: 1525563 - DNA, 25 bp, Homo sapien
cacaagaagccgtggctcccagaag

SEQ ID NO: 1525564 - DNA, 25 bp, Homo sapien
ccacaagaagccgtggctcccagaa

SEQ ID NO: 1525565 - DNA, 25 bp, Homo sapien
gtaaccacaagaagccgtggctccc

SEQ ID NO: 1525566 - DNA, 25 bp, Homo sapien
gcaatggtaggtaggttaacataag

SEQ ID NO: 1525567 - DNA, 25 bp, Homo sapien
tggtaggtaggttaacataagatgc

SEQ ID NO: 1525568 - DNA, 25 bp, Homo sapien
aatggtaggtaggttaacataagat

SEQ ID NO: 1525569 - DNA, 25 bp, Homo sapien
acagcgcaatggtaggtaggttaac

SEQ ID NO: 1525570 - DNA, 25 bp, Homo sapien
acgggaaatggtgccacgcatgcgc

SEQ ID NO: 1525571 - DNA, 25 bp, Homo sapien
gcatgcgcagaacttcccgagccag

SEQ ID NO: 1525572 - DNA, 25 bp, Homo sapien
cctcccatgggtgttcacgggaaat

SEQ ID NO: 1525573 - DNA, 25 bp, Homo sapien
gacctcccatgggtgttcacgggaa

SEQ ID NO: 1525574 - DNA, 25 bp, Homo sapien
ttcctccttggtcactgccttctca

SEQ ID NO: 1525575 - DNA, 25 bp, Homo sapien
gagggcacctgtacaccttcagacc

SEQ ID NO: 1525576 - DNA, 25 bp, Homo sapien
gcgctccagtcttcagtagggaatt

SEQ ID NO: 1525577 - DNA, 25 bp, Homo sapien
tccttggtcactgccttctcagcag

SEQ ID NO: 1525578 - DNA, 25 bp, Homo sapien
gcttaagagcctatgcaagaacagc

SEQ ID NO: 1525579 - DNA, 25 bp, Homo sapien
ctgcttaagagcctatgcaagaaca

SEQ ID NO: 1525580 - DNA, 25 bp, Homo sapien
tgcttaagagcctatgcaagaacag

SEQ ID NO: 1525581 - DNA, 25 bp, Homo sapien
tgctgcttaagagcctatgcaagaa

SEQ ID NO: 1525582 - DNA, 25 bp, Homo sapien
aaactgatgtttattttccatcaac

SEQ ID NO: 1525583 - DNA, 25 bp, Homo sapien
tgatgtttattttccatcaaccatt

SEQ ID NO: 1525584 - DNA, 25 bp, Homo sapien
agaaactgatgtttattttccatca

SEQ ID NO: 1525585 - DNA, 25 bp, Homo sapien
actgatgtttattttccatcaacca

SEQ ID NO: 1525586 - DNA, 25 bp, Homo sapien
gagtgtgctcttacacaaaggttga

SEQ ID NO: 1525587 - DNA, 25 bp, Homo sapien
cttgagtgtgctcttacacaaaggt

SEQ ID NO: 1525588 - DNA, 25 bp, Homo sapien
tatatagaaactaaacaacacactc

SEQ ID NO: 1525589 - DNA, 25 bp, Homo sapien
tgctcttacacaaaggttgaaatac

SEQ ID NO: 1525590 - DNA, 25 bp, Homo sapien
taaaagaacagactacttaaaggca

SEQ ID NO: 1525591 - DNA, 25 bp, Homo sapien
aatagctcatacaacatttcccttg

SEQ ID NO: 1525592 - DNA, 25 bp, Homo sapien
ccttgaaagaccacatcttaggaca

SEQ ID NO: 1525593 - DNA, 25 bp, Homo sapien
tctatgaactacattctatgaccaa

SEQ ID NO: 1525594 - DNA, 25 bp, Homo sapien
tgctctgagtagttgtgaaacactt

SEQ ID NO: 1525595 - DNA, 25 bp, Homo sapien
aaggactttcaaacatttaccacat

SEQ ID NO: 1525596 - DNA, 25 bp, Homo sapien
tgaaacacttgttaagtccattata

SEQ ID NO: 1525597 - DNA, 25 bp, Homo sapien
tcttccagtatatcttattttttgt

SEQ ID NO: 1525598 - DNA, 25 bp, Homo sapien
gtaggacttctctctagtataaatg

SEQ ID NO: 1525599 - DNA, 25 bp, Homo sapien
aaatgcttttatgttgggttttgtg

SEQ ID NO: 1525600 - DNA, 25 bp, Homo sapien
tattattagtaaggattgaggacca

SEQ ID NO: 1525601 - DNA, 25 bp, Homo sapien
tatgttgggttttgtgtgaaagcat

SEQ ID NO: 1525602 - DNA, 25 bp, Homo sapien
cacacttgtaatgtttccctctagt

SEQ ID NO: 1525603 - DNA, 25 bp, Homo sapien
tatatctagttagggttgagggctg

SEQ ID NO: 1525604 - DNA, 25 bp, Homo sapien
tttctgtctagtatggactctccta

SEQ ID NO: 1525605 - DNA, 25 bp, Homo sapien
ctcctatgttcagtaaggcctgagg

SEQ ID NO: 1525606 - DNA, 25 bp, Homo sapien
gttagggttgagaattgaattaatg

SEQ ID NO: 1525607 - DNA, 25 bp, Homo sapien
gggttgagaattgaattaatgcttt

SEQ ID NO: 1525608 - DNA, 25 bp, Homo sapien
ctagttagggttgagaattgaatta

SEQ ID NO: 1525609 - DNA, 25 bp, Homo sapien
tagggttgagaattgaattaatgct

SEQ ID NO: 1525610 - DNA, 25 bp, Homo sapien
ggtttgccacatagatttgttgggt

SEQ ID NO: 1525611 - DNA, 25 bp, Homo sapien
aggtttgccacatagatttgttggg

SEQ ID NO: 1525612 - DNA, 25 bp, Homo sapien
aaggtttgccacatagatttgttgg

SEQ ID NO: 1525613 - DNA, 25 bp, Homo sapien
aaaggtttgccacatagatttgttg

SEQ ID NO: 1525614 - DNA, 25 bp, Homo sapien
tatatatagtaaggtttgagttttg

SEQ ID NO: 1525615 - DNA, 25 bp, Homo sapien
atatatagtaaggtttgagttttgg

SEQ ID NO: 1525616 - DNA, 25 bp, Homo sapien
cttatatatagtaaggtttgagttt

SEQ ID NO: 1525617 - DNA, 25 bp, Homo sapien
atcttatatatagtaaggtttgagt

SEQ ID NO: 1525618 - DNA, 25 bp, Homo sapien
gaccagttagggtaatgaaccatag

SEQ ID NO: 1525619 - DNA, 25 bp, Homo sapien
cctcttatgaccagttagggtaatg

SEQ ID NO: 1525620 - DNA, 25 bp, Homo sapien
tctcttatggttagcaaaaattgaa

SEQ ID NO: 1525621 - DNA, 25 bp, Homo sapien
tgtacacactgatagttatctccag

SEQ ID NO: 1525622 - DNA, 25 bp, Homo sapien
taaacattgagtggccctagatatt

SEQ ID NO: 1525623 - DNA, 25 bp, Homo sapien
ctctgatttacagtagtgtctaaac

SEQ ID NO: 1525624 - DNA, 25 bp, Homo sapien
ttacagtagtgtctaaacattgagt

SEQ ID NO: 1525625 - DNA, 25 bp, Homo sapien
tttatacgcagcactctgatttaca

SEQ ID NO: 1525626 - DNA, 25 bp, Homo sapien
gaaaaggtcataagtaatgcttacc

SEQ ID NO: 1525627 - DNA, 25 bp, Homo sapien
tattggccatttaaagttactggca

SEQ ID NO: 1525628 - DNA, 25 bp, Homo sapien
tgtattgttacctacacccttgtgt

SEQ ID NO: 1525629 - DNA, 25 bp, Homo sapien
taaagattactagtgatgtcagtcc

SEQ ID NO: 1525630 - DNA, 25 bp, Homo sapien
ttctatggccacagccttgaaagtt

SEQ ID NO: 1525631 - DNA, 25 bp, Homo sapien
tatggccacagccttgaaagttaac

SEQ ID NO: 1525632 - DNA, 25 bp, Homo sapien
tggccacagccttgaaagttaacat

SEQ ID NO: 1525633 - DNA, 25 bp, Homo sapien
gccacagccttgaaagttaacattt

SEQ ID NO: 1525634 - DNA, 25 bp, Homo sapien
ctataagaatgaccaatagaataaa

SEQ ID NO: 1525635 - DNA, 25 bp, Homo sapien
actataagaatgaccaatagaataa

SEQ ID NO: 1525636 - DNA, 25 bp, Homo sapien
cacaataatagtggagaaattcagc

SEQ ID NO: 1525637 - DNA, 25 bp, Homo sapien
ttaaacctatagaaagagatggaca

SEQ ID NO: 1525638 - DNA, 25 bp, Homo sapien
cattagagagaccattgagatagga

SEQ ID NO: 1525639 - DNA, 25 bp, Homo sapien
gaaattcagcattctactcacagca

SEQ ID NO: 1525640 - DNA, 25 bp, Homo sapien
atgacagtaacaaagccttaatatt

SEQ ID NO: 1525641 - DNA, 25 bp, Homo sapien
tatgacagtaacaaagccttaatat

SEQ ID NO: 1525642 - DNA, 25 bp, Homo sapien
ttatgacagtaacaaagccttaata

SEQ ID NO: 1525643 - DNA, 25 bp, Homo sapien
ttcacttcctcgaagtccctattca

SEQ ID NO: 1525644 - DNA, 25 bp, Homo sapien
tcacttcctcgaagtccctattcat

SEQ ID NO: 1525645 - DNA, 25 bp, Homo sapien
acttcctcgaagtccctattcatga

SEQ ID NO: 1525646 - DNA, 25 bp, Homo sapien
taataaatcctgatgtcccaatcct

SEQ ID NO: 1525647 - DNA, 25 bp, Homo sapien
tatccaatgctataagtaagtctcg

SEQ ID NO: 1525648 - DNA, 25 bp, Homo sapien
tctcatatccaatgctataagtaag

SEQ ID NO: 1525649 - DNA, 25 bp, Homo sapien
tgtctgtctttccagttattgatat

SEQ ID NO: 1525650 - DNA, 25 bp, Homo sapien
gacagtgtcaccatacatgaccgga

SEQ ID NO: 1525651 - DNA, 25 bp, Homo sapien
ggatggcaagccctgctgtaatgca

SEQ ID NO: 1525652 - DNA, 25 bp, Homo sapien
tccatatgagcaaacggcgacagac

SEQ ID NO: 1525653 - DNA, 25 bp, Homo sapien
tgaccggatgtctcacccatttggc

SEQ ID NO: 1525654 - DNA, 25 bp, Homo sapien
gctccctgatcacgatagatctcag

SEQ ID NO: 1525655 - DNA, 25 bp, Homo sapien
cactccaaagtacaggttgtactgc

SEQ ID NO: 1525656 - DNA, 25 bp, Homo sapien
ttgtactgctggaggattgggaacc

SEQ ID NO: 1525657 - DNA, 25 bp, Homo sapien
gggcattatagctaacatggccaag

SEQ ID NO: 1525658 - DNA, 25 bp, Homo sapien
cagcagaagtgattagtgtgaccaa

SEQ ID NO: 1525659 - DNA, 25 bp, Homo sapien
ctacagaggacattacagcagaagt

SEQ ID NO: 1525660 - DNA, 25 bp, Homo sapien
tgtgttggtcacaatcctcaggctt

SEQ ID NO: 1525661 - DNA, 25 bp, Homo sapien
cttagtgtaggcctgcatgacagca

SEQ ID NO: 1525662 - DNA, 25 bp, Homo sapien
cagcagtttttctgagcctggtctt

SEQ ID NO: 1525663 - DNA, 25 bp, Homo sapien
aacagcagtttttctgagcctggtc

SEQ ID NO: 1525664 - DNA, 25 bp, Homo sapien
cagtttttctgagcctggtcttctg

SEQ ID NO: 1525665 - DNA, 25 bp, Homo sapien
cctggtcttctgtcctacatgtcct

SEQ ID NO: 1525666 - DNA, 25 bp, Homo sapien
cttcaagagtccacagaacttttgc

SEQ ID NO: 1525667 - DNA, 25 bp, Homo sapien
cacagaacttttgcaggaatggata

SEQ ID NO: 1525668 - DNA, 25 bp, Homo sapien
gcaggaatggatatgaattccttca

SEQ ID NO: 1525669 - DNA, 25 bp, Homo sapien
attccttcaaaagggtcttgtgctc

SEQ ID NO: 1525670 - DNA, 25 bp, Homo sapien
aagaagggggccacggcctggccat

SEQ ID NO: 1525671 - DNA, 25 bp, Homo sapien
caggaaagaagggggccacggcctg

SEQ ID NO: 1525672 - DNA, 25 bp, Homo sapien
cctgctctgccgatttgacctttct

SEQ ID NO: 1525673 - DNA, 25 bp, Homo sapien
ctacgcccttaccctttcctggctg

SEQ ID NO: 1525674 - DNA, 25 bp, Homo sapien
cagcaggcagccctacgcccttacc

SEQ ID NO: 1525675 - DNA, 25 bp, Homo sapien
accagggtgctttccgcaccctgct

SEQ ID NO: 1525676 - DNA, 25 bp, Homo sapien
taacactgccgggaatcggatggtg

SEQ ID NO: 1525677 - DNA, 25 bp, Homo sapien
caacttctgcgctgtctccctgtat

SEQ ID NO: 1525678 - DNA, 25 bp, Homo sapien
taggccagaaacatttcgatgctgc

SEQ ID NO: 1525679 - DNA, 25 bp, Homo sapien
gatggtgcaagccacataggccaga

SEQ ID NO: 1525680 - DNA, 25 bp, Homo sapien
ggctcttaatccaatctgtaatccc

SEQ ID NO: 1525681 - DNA, 25 bp, Homo sapien
ccaagatgtggttgaaatggctggt

SEQ ID NO: 1525682 - DNA, 25 bp, Homo sapien
catacatatcatccttaagaaagcg

SEQ ID NO: 1525683 - DNA, 25 bp, Homo sapien
tgtaatccctattcctgaggttttg

SEQ ID NO: 1525684 - DNA, 25 bp, Homo sapien
gctgcgcccctaaaagcagaagaca

SEQ ID NO: 1525685 - DNA, 25 bp, Homo sapien
agaggctgcgcccctaaaagcagaa

SEQ ID NO: 1525686 - DNA, 25 bp, Homo sapien
agacacagagtagtgaggacgagac

SEQ ID NO: 1525687 - DNA, 25 bp, Homo sapien
aagacacagagtagtgaggacgaga

SEQ ID NO: 1525688 - DNA, 25 bp, Homo sapien
acattcctatataaattcttctgtg

SEQ ID NO: 1525689 - DNA, 25 bp, Homo sapien
atcacattcctatataaattcttct

SEQ ID NO: 1525690 - DNA, 25 bp, Homo sapien
attcctatataaattcttctgtgca

SEQ ID NO: 1525691 - DNA, 25 bp, Homo sapien
tcacattcctatataaattcttctg

SEQ ID NO: 1525692 - DNA, 25 bp, Homo sapien
ttaaaaataattaacatgaatcttg

SEQ ID NO: 1525693 - DNA, 25 bp, Homo sapien
tattaaaaataattaacatgaatct

SEQ ID NO: 1525694 - DNA, 25 bp, Homo sapien
ttttctttctccagacagatgatga

SEQ ID NO: 1525695 - DNA, 25 bp, Homo sapien
tctttctccagacagatgatgaggt

SEQ ID NO: 1525696 - DNA, 25 bp, Homo sapien
tgggggttcatccaccatctcatct

SEQ ID NO: 1525697 - DNA, 25 bp, Homo sapien
atccaccatctcatctcgcttcata

SEQ ID NO: 1525698 - DNA, 25 bp, Homo sapien
agggagagtagaattcttagagatt

SEQ ID NO: 1525699 - DNA, 25 bp, Homo sapien
aaactatgcagatatctatctgtcc

SEQ ID NO: 1525700 - DNA, 25 bp, Homo sapien
aagtcagattgtacactcttttata

SEQ ID NO: 1525701 - DNA, 25 bp, Homo sapien
tcactgtaaacgttaaggaagatca

SEQ ID NO: 1525702 - DNA, 25 bp, Homo sapien
gcaggaagtaaaaacggccatatta

SEQ ID NO: 1525703 - DNA, 25 bp, Homo sapien
atgaaaacaggatgcccgttccagc

SEQ ID NO: 1525704 - DNA, 25 bp, Homo sapien
gaaaccactactcttgtgcaaaaag

SEQ ID NO: 1525705 - DNA, 25 bp, Homo sapien
tgcaggaagtaaaaacggccatatt

SEQ ID NO: 1525706 - DNA, 25 bp, Homo sapien
ttacaatcctaaaatgtacacgaaa

SEQ ID NO: 1525707 - DNA, 25 bp, Homo sapien
aatgtacacgaaaccacaataaatt

SEQ ID NO: 1525708 - DNA, 25 bp, Homo sapien
ctaaggtgatctctagactcaataa

SEQ ID NO: 1525709 - DNA, 25 bp, Homo sapien
tatatacatcgagagagagtcttgc

SEQ ID NO: 1525710 - DNA, 25 bp, Homo sapien
tgtttactcattacaactagttggc

SEQ ID NO: 1525711 - DNA, 25 bp, Homo sapien
tctagataactgcaatgtttgactg

SEQ ID NO: 1525712 - DNA, 25 bp, Homo sapien
taaaactgcaacacaataacagaaa

SEQ ID NO: 1525713 - DNA, 25 bp, Homo sapien
caagcgcggtgtcggcacctatagt

SEQ ID NO: 1525714 - DNA, 25 bp, Homo sapien
tgtcggtggaaaataaagatgtacc

SEQ ID NO: 1525715 - DNA, 25 bp, Homo sapien
tcgtcacatttgaagatacactttg

SEQ ID NO: 1525716 - DNA, 25 bp, Homo sapien
caaaagttagttgggttgattgtcg

SEQ ID NO: 1525717 - DNA, 25 bp, Homo sapien
aaatacataacataggaacctgaag

SEQ ID NO: 1525718 - DNA, 25 bp, Homo sapien
ggccaaataatctcccacaaaatta

SEQ ID NO: 1525719 - DNA, 25 bp, Homo sapien
taaaatgaagttcgattatttctct

SEQ ID NO: 1525720 - DNA, 25 bp, Homo sapien
aaagctgaacatccataacgataaa

SEQ ID NO: 1525721 - DNA, 25 bp, Homo sapien
tgaacatccataacgataaaatgaa

SEQ ID NO: 1525722 - DNA, 25 bp, Homo sapien
gagagtgtcaccaagcttacagtca

SEQ ID NO: 1525723 - DNA, 25 bp, Homo sapien
gatggtgccaagctatctatgagga

SEQ ID NO: 1525724 - DNA, 25 bp, Homo sapien
ttggcaacgcggcaaaactgtctca

SEQ ID NO: 1525725 - DNA, 25 bp, Homo sapien
gtatgtacaatatcagggctccaaa

SEQ ID NO: 1525726 - DNA, 25 bp, Homo sapien
tctatcagaaaaagacatatggcta

SEQ ID NO: 1525727 - DNA, 25 bp, Homo sapien
taatggatgtgtggtagcataccct

SEQ ID NO: 1525728 - DNA, 25 bp, Homo sapien
gacttcacatctacacaggattaga

SEQ ID NO: 1525729 - DNA, 25 bp, Homo sapien
gtgattggataccatcaactagatc

SEQ ID NO: 1525730 - DNA, 25 bp, Homo sapien
gtccacatttttcaaatcttcttag

SEQ ID NO: 1525731 - DNA, 25 bp, Homo sapien
ttgaaaagaatcttccacgccctgc

SEQ ID NO: 1525732 - DNA, 25 bp, Homo sapien
caaatcttcttagtattactttttg

SEQ ID NO: 1525733 - DNA, 25 bp, Homo sapien
tttgaaaagaatcttccacgccctg

SEQ ID NO: 1525734 - DNA, 25 bp, Homo sapien
tccattataaccttctttgtgtacc

SEQ ID NO: 1525735 - DNA, 25 bp, Homo sapien
agtccattataaccttctttgtgta

SEQ ID NO: 1525736 - DNA, 25 bp, Homo sapien
taagtccattataaccttctttgtg

SEQ ID NO: 1525737 - DNA, 25 bp, Homo sapien
tataaccttctttgtgtaccttaca

SEQ ID NO: 1525738 - DNA, 25 bp, Homo sapien
atgcaaaatgatttgacacaatttt

SEQ ID NO: 1525739 - DNA, 25 bp, Homo sapien
caaaatgatttgacacaatttttac

SEQ ID NO: 1525740 - DNA, 25 bp, Homo sapien
tgatttgacacaatttttacatttg

SEQ ID NO: 1525741 - DNA, 25 bp, Homo sapien
gggttttgtgtgaaaacatgcaaaa

SEQ ID NO: 1525742 - DNA, 25 bp, Homo sapien
agggcttttcttcagtatgagtttt

SEQ ID NO: 1525743 - DNA, 25 bp, Homo sapien
tataatttgaggattgattaaaagc

SEQ ID NO: 1525744 - DNA, 25 bp, Homo sapien
tatgtgtagtataatttgaggattg

SEQ ID NO: 1525745 - DNA, 25 bp, Homo sapien
gggcttttcttcagtatgagttttc

SEQ ID NO: 1525746 - DNA, 25 bp, Homo sapien
tgtatggttagtgttgaggattggc

SEQ ID NO: 1525747 - DNA, 25 bp, Homo sapien
tatgtatggttagtgttgaggattg

SEQ ID NO: 1525748 - DNA, 25 bp, Homo sapien
tatggttagtgttgaggattggcta

SEQ ID NO: 1525749 - DNA, 25 bp, Homo sapien
cttatgtatggttagtgttgaggat

SEQ ID NO: 1525750 - DNA, 25 bp, Homo sapien
tcctcttatgtatggttagtgctga

SEQ ID NO: 1525751 - DNA, 25 bp, Homo sapien
tagggtcgaggacaatataaatgct

SEQ ID NO: 1525752 - DNA, 25 bp, Homo sapien
taaggtgtccgaattggctaaaagc

SEQ ID NO: 1525753 - DNA, 25 bp, Homo sapien
tgtttagatagggtcgaggacaata

SEQ ID NO: 1525754 - DNA, 25 bp, Homo sapien
gataaatgatttgccacattcgtca

SEQ ID NO: 1525755 - DNA, 25 bp, Homo sapien
cagataaatgatttgccacattcgt

SEQ ID NO: 1525756 - DNA, 25 bp, Homo sapien
aaatgatttgccacattcgtcacac

SEQ ID NO: 1525757 - DNA, 25 bp, Homo sapien
taaatgatttgccacattcgtcaca

SEQ ID NO: 1525758 - DNA, 25 bp, Homo sapien
agtgtgcatcctcttatgtttagcg

SEQ ID NO: 1525759 - DNA, 25 bp, Homo sapien
catcctcttatgtttagcgttgagg

SEQ ID NO: 1525760 - DNA, 25 bp, Homo sapien
tgtgcatcctcttatgtttagcgtt

SEQ ID NO: 1525761 - DNA, 25 bp, Homo sapien
tgcatcctcttatgtttagcgttga

SEQ ID NO: 1525762 - DNA, 25 bp, Homo sapien
ctaatgtttagtaagatttgaggat

SEQ ID NO: 1525763 - DNA, 25 bp, Homo sapien
aatgtttagtaagatttgaggatta

SEQ ID NO: 1525764 - DNA, 25 bp, Homo sapien
tgtttagtaagatttgaggattaaa

SEQ ID NO: 1525765 - DNA, 25 bp, Homo sapien
gatttgaggattaaaagctttttca

SEQ ID NO: 1525766 - DNA, 25 bp, Homo sapien
gtagtaagatttgagaatgattaaa

SEQ ID NO: 1525767 - DNA, 25 bp, Homo sapien
taagatttgagaatgattaaaagct

SEQ ID NO: 1525768 - DNA, 25 bp, Homo sapien
gatttgagaatgattaaaagctttc

SEQ ID NO: 1525769 - DNA, 25 bp, Homo sapien
tatgtgtagtaagatttgagaatga

SEQ ID NO: 1525770 - DNA, 25 bp, Homo sapien
tactttatgttcagtaacagttgag

SEQ ID NO: 1525771 - DNA, 25 bp, Homo sapien
actttatgttcagtaacagttgagg

SEQ ID NO: 1525772 - DNA, 25 bp, Homo sapien
ttactttatgttcagtaacagttga

SEQ ID NO: 1525773 - DNA, 25 bp, Homo sapien
ttctgaacagtgaacagaataaaca

SEQ ID NO: 1525774 - DNA, 25 bp, Homo sapien
gaataaacaataaaggtgcaatgga

SEQ ID NO: 1525775 - DNA, 25 bp, Homo sapien
cactgtacacccttcttgattctag

SEQ ID NO: 1525776 - DNA, 25 bp, Homo sapien
cttgattctagaaagactgtatgaa

SEQ ID NO: 1525777 - DNA, 25 bp, Homo sapien
agagttttactccagtatgaattac

SEQ ID NO: 1525778 - DNA, 25 bp, Homo sapien
cttcacatttgtagagttttactcc

SEQ ID NO: 1525779 - DNA, 25 bp, Homo sapien
ctgaggaccagaaaaacactttgcc

SEQ ID NO: 1525780 - DNA, 25 bp, Homo sapien
tgaggaccagaaaaacactttgcca

SEQ ID NO: 1525781 - DNA, 25 bp, Homo sapien
tagggttgctgtccagcatgaattt

SEQ ID NO: 1525782 - DNA, 25 bp, Homo sapien
agggttgctgtccagcatgaatttt

SEQ ID NO: 1525783 - DNA, 25 bp, Homo sapien
tctgtagtaagatgtgaggactggt

SEQ ID NO: 1525784 - DNA, 25 bp, Homo sapien
gagttatcttatctgtagtaagatg

SEQ ID NO: 1525785 - DNA, 25 bp, Homo sapien
accctgtccgggatgtgaggagcgt

SEQ ID NO: 1525786 - DNA, 25 bp, Homo sapien
ctaaagaatgtttttcaagtgctca

SEQ ID NO: 1525787 - DNA, 25 bp, Homo sapien
cctgccaccctgtccgggatgtgag

SEQ ID NO: 1525788 - DNA, 25 bp, Homo sapien
aaagaatgtttttcaagtgctcaat

SEQ ID NO: 1525789 - DNA, 25 bp, Homo sapien
tttgctcaaggcaggagatcagatc

SEQ ID NO: 1525790 - DNA, 25 bp, Homo sapien
agatcagggttagagacagcaaggc

SEQ ID NO: 1525791 - DNA, 25 bp, Homo sapien
gagtatttgactactgtctcatgtc

SEQ ID NO: 1525792 - DNA, 25 bp, Homo sapien
caaggcaggagatcagatcagggtt

SEQ ID NO: 1525793 - DNA, 25 bp, Homo sapien
gacactcacaaacctgaaaacttag

SEQ ID NO: 1525794 - DNA, 25 bp, Homo sapien
aagcttaggactagaaaaatgcaca

SEQ ID NO: 1525795 - DNA, 25 bp, Homo sapien
tgaataacaatcctcttgaaactct

SEQ ID NO: 1525796 - DNA, 25 bp, Homo sapien
catcacaaacagaagagagatctaa

SEQ ID NO: 1525797 - DNA, 25 bp, Homo sapien
ggaggtgggccaatgaccgctctaa

SEQ ID NO: 1525798 - DNA, 25 bp, Homo sapien
gggaggtgggccaatgaccgctcta

SEQ ID NO: 1525799 - DNA, 25 bp, Homo sapien
aggtgggccaatgaccgctctaact

SEQ ID NO: 1525800 - DNA, 25 bp, Homo sapien
gtgggccaatgaccgctctaactgc

SEQ ID NO: 1525801 - DNA, 25 bp, Homo sapien
taactattaagtaatctgtcatcat

SEQ ID NO: 1525802 - DNA, 25 bp, Homo sapien
attaagtaatctgtcatcatacacc

SEQ ID NO: 1525803 - DNA, 25 bp, Homo sapien
acccttttacgtcaggagtgctggc

SEQ ID NO: 1525804 - DNA, 25 bp, Homo sapien
ttctcacccttttacgtcaggagtg

SEQ ID NO: 1525805 - DNA, 25 bp, Homo sapien
agtcgtttgcagctacatgaaaaag

SEQ ID NO: 1525806 - DNA, 25 bp, Homo sapien
tcagagctccaatgtgtgaattcat

SEQ ID NO: 1525807 - DNA, 25 bp, Homo sapien
tgtaaaaccagaaacctgcagggta

SEQ ID NO: 1525808 - DNA, 25 bp, Homo sapien
gcctggttgcactaaaatctgtcac

SEQ ID NO: 1525809 - DNA, 25 bp, Homo sapien
tcccgggcagcagttcacactccat

SEQ ID NO: 1525810 - DNA, 25 bp, Homo sapien
atcccgggcagcagttcacactcca

SEQ ID NO: 1525811 - DNA, 25 bp, Homo sapien
cagatcccgggcagcagttcacact

SEQ ID NO: 1525812 - DNA, 25 bp, Homo sapien
agatcccgggcagcagttcacactc

SEQ ID NO: 1525813 - DNA, 25 bp, Homo sapien
gcggccgatcccactacctggcggg

SEQ ID NO: 1525814 - DNA, 25 bp, Homo sapien
ccggcgcagaaacgcgctggccagt

SEQ ID NO: 1525815 - DNA, 25 bp, Homo sapien
ccaagggtgaggacgggacgcggcg

SEQ ID NO: 1525816 - DNA, 25 bp, Homo sapien
cagtgggccgcttggcaggcgccct

SEQ ID NO: 1525817 - DNA, 25 bp, Homo sapien
cgcgttttctgggccgagggcacat

SEQ ID NO: 1525818 - DNA, 25 bp, Homo sapien
gccgagggcacatcgaggatgtcac

SEQ ID NO: 1525819 - DNA, 25 bp, Homo sapien
gggaggtccttcctgtcgccgacgc

SEQ ID NO: 1525820 - DNA, 25 bp, Homo sapien
cctccatgggaagcggcgcgttttc

SEQ ID NO: 1525821 - DNA, 25 bp, Homo sapien
ctggcggttttggtgtggccgacta

SEQ ID NO: 1525822 - DNA, 25 bp, Homo sapien
gcggttttggtgtggccgactacca

SEQ ID NO: 1525823 - DNA, 25 bp, Homo sapien
ggctggcggttttggtgtggccgac

SEQ ID NO: 1525824 - DNA, 25 bp, Homo sapien
tggcggttttggtgtggccgactac

SEQ ID NO: 1525825 - DNA, 25 bp, Homo sapien
gaagagaaatgcgatcgtgattcat

SEQ ID NO: 1525826 - DNA, 25 bp, Homo sapien
ggctcagaagagaaatgcgatcgtg

SEQ ID NO: 1525827 - DNA, 25 bp, Homo sapien
cagaagagaaatgcgatcgtgattc

SEQ ID NO: 1525828 - DNA, 25 bp, Homo sapien
agcagtacagttcaggctcagaaga

SEQ ID NO: 1525829 - DNA, 25 bp, Homo sapien
gttcaaccagatggctctcgccttt

SEQ ID NO: 1525830 - DNA, 25 bp, Homo sapien
ctaaggtcgaccagatggctctcac

SEQ ID NO: 1525831 - DNA, 25 bp, Homo sapien
ctcgcctttccatgtctaaggtcga

SEQ ID NO: 1525832 - DNA, 25 bp, Homo sapien
atggctctcgcctttccatgtctaa

SEQ ID NO: 1525833 - DNA, 25 bp, Homo sapien
ctgaggtggagacatgacaaatggc

SEQ ID NO: 1525834 - DNA, 25 bp, Homo sapien
tctgaagtcgactagatggctctcc

SEQ ID NO: 1525835 - DNA, 25 bp, Homo sapien
tgaggtcgaccagagggctttcgcc

SEQ ID NO: 1525836 - DNA, 25 bp, Homo sapien
gacaaatggctcttgctttttcatg

SEQ ID NO: 1525837 - DNA, 25 bp, Homo sapien
cttgccttttcatgtctgaggttga

SEQ ID NO: 1525838 - DNA, 25 bp, Homo sapien
tcaggtcgaccagatggctcttgcc

SEQ ID NO: 1525839 - DNA, 25 bp, Homo sapien
ggtcgaccagatggctcttgccttt

SEQ ID NO: 1525840 - DNA, 25 bp, Homo sapien
ctcttgccttttcatgtctgaggtt

SEQ ID NO: 1525841 - DNA, 25 bp, Homo sapien
catgtctaaggtcagccaaatggct

SEQ ID NO: 1525842 - DNA, 25 bp, Homo sapien
ggcttttgtgttcccatgtttgagg

SEQ ID NO: 1525843 - DNA, 25 bp, Homo sapien
catttctgaggtgggccagatggcc

SEQ ID NO: 1525844 - DNA, 25 bp, Homo sapien
tgtgttcccatgtttgaggttgaca

SEQ ID NO: 1525845 - DNA, 25 bp, Homo sapien
cacgtgtgaggtcaacaagatggct

SEQ ID NO: 1525846 - DNA, 25 bp, Homo sapien
taaggacgatgagatggctttcacc

SEQ ID NO: 1525847 - DNA, 25 bp, Homo sapien
catgtgtgagtggacaagatagctc

SEQ ID NO: 1525848 - DNA, 25 bp, Homo sapien
caccttgccatgtttgagggcttcc

SEQ ID NO: 1525849 - DNA, 25 bp, Homo sapien
ggtgcggtacacctgtcaaacagta

SEQ ID NO: 1525850 - DNA, 25 bp, Homo sapien
tgagtgcagggagtaccaaaacctc

SEQ ID NO: 1525851 - DNA, 25 bp, Homo sapien
ggtcctggaatagtgccaagtgcag

SEQ ID NO: 1525852 - DNA, 25 bp, Homo sapien
catgctggctggatgttaactggtc

SEQ ID NO: 1525853 - DNA, 25 bp, Homo sapien
aaggggctcacttttggcgccaagc

SEQ ID NO: 1525854 - DNA, 25 bp, Homo sapien
aaaggggctcacttttggcgccaag

SEQ ID NO: 1525855 - DNA, 25 bp, Homo sapien
aggggctcacttttggcgccaagca

SEQ ID NO: 1525856 - DNA, 25 bp, Homo sapien
ggggctcacttttggcgccaagcac

SEQ ID NO: 1525857 - DNA, 25 bp, Homo sapien
gagactgactctagtctggtatggt

SEQ ID NO: 1525858 - DNA, 25 bp, Homo sapien
gtagaataagtgaaaggccccagca

SEQ ID NO: 1525859 - DNA, 25 bp, Homo sapien
gtgaaattccactaccctgatcatt

SEQ ID NO: 1525860 - DNA, 25 bp, Homo sapien
tgtgggctgccggtgaaattccact

SEQ ID NO: 1525861 - DNA, 25 bp, Homo sapien
tcaggggctcgcacgaaagccactg

SEQ ID NO: 1525862 - DNA, 25 bp, Homo sapien
ccaccgtccactctcgcccactgtg

SEQ ID NO: 1525863 - DNA, 25 bp, Homo sapien
ccactgtggcgcaatgaaggtgaag

SEQ ID NO: 1525864 - DNA, 25 bp, Homo sapien
taacacgtgtgcgagtcaggggctc

SEQ ID NO: 1525865 - DNA, 25 bp, Homo sapien
aggccggtggcgctgttggctaccc

SEQ ID NO: 1525866 - DNA, 25 bp, Homo sapien
ggcgctgttggctacccacatgacc

SEQ ID NO: 1525867 - DNA, 25 bp, Homo sapien
ggtggcgctgttggctacccacatg

SEQ ID NO: 1525868 - DNA, 25 bp, Homo sapien
ggccggtggcgctgttggctaccca

SEQ ID NO: 1525869 - DNA, 25 bp, Homo sapien
agaagttgttggtaggtagagacct

SEQ ID NO: 1525870 - DNA, 25 bp, Homo sapien
tgaagaagttgttggtaggtagaga

SEQ ID NO: 1525871 - DNA, 25 bp, Homo sapien
gaagaagttgttggtaggtagagac

SEQ ID NO: 1525872 - DNA, 25 bp, Homo sapien
gaagttgttggtaggtagagacctc

SEQ ID NO: 1525873 - DNA, 25 bp, Homo sapien
ttagctgtgcgtctctccggacctg

SEQ ID NO: 1525874 - DNA, 25 bp, Homo sapien
gccaaatgccggaaaccatgcactc

SEQ ID NO: 1525875 - DNA, 25 bp, Homo sapien
attccaagctctggtgggagcgaga

SEQ ID NO: 1525876 - DNA, 25 bp, Homo sapien
gaagagcagagacggattccaagct

SEQ ID NO: 1525877 - DNA, 25 bp, Homo sapien
tagcaaaacattatagttgcagcca

SEQ ID NO: 1525878 - DNA, 25 bp, Homo sapien
cttagcaaaacattatagttgcagc

SEQ ID NO: 1525879 - DNA, 25 bp, Homo sapien
acattatagttgcagccaggcgcgg

SEQ ID NO: 1525880 - DNA, 25 bp, Homo sapien
caaaacattatagttgcagccaggc

SEQ ID NO: 1525881 - DNA, 25 bp, Homo sapien
gcatagaccctacaagttcagggct

SEQ ID NO: 1525882 - DNA, 25 bp, Homo sapien
gcagatcccagtcacaattcctagg

SEQ ID NO: 1525883 - DNA, 25 bp, Homo sapien
aatgtgcattgtgacagcctgtgtg

SEQ ID NO: 1525884 - DNA, 25 bp, Homo sapien
gagaaaccaagagtctccctccagc

SEQ ID NO: 1525885 - DNA, 25 bp, Homo sapien
ggataatccaggagtcctctaggca

SEQ ID NO: 1525886 - DNA, 25 bp, Homo sapien
tatgattggtagtccacaagcccag

SEQ ID NO: 1525887 - DNA, 25 bp, Homo sapien
gaaaggtgctatcaaggacccgtga

SEQ ID NO: 1525888 - DNA, 25 bp, Homo sapien
cacactgtgcacatcagaaagggtt

SEQ ID NO: 1525889 - DNA, 25 bp, Homo sapien
tacatatcagtttgagcctccagac

SEQ ID NO: 1525890 - DNA, 25 bp, Homo sapien
tgcatgacacactaacaaccgactt

SEQ ID NO: 1525891 - DNA, 25 bp, Homo sapien
tatgatgtcccttcaggtggtgaca

SEQ ID NO: 1525892 - DNA, 25 bp, Homo sapien
gcagtgtcccaaataaagcccaagt

SEQ ID NO: 1525893 - DNA, 25 bp, Homo sapien
attggatccagaggccaatgcacag

SEQ ID NO: 1525894 - DNA, 25 bp, Homo sapien
gcagaaaacaccttagccagatgaa

SEQ ID NO: 1525895 - DNA, 25 bp, Homo sapien
cagatgggcccataattactgccgt

SEQ ID NO: 1525896 - DNA, 25 bp, Homo sapien
taaacctcacttgggaaatccatcc

SEQ ID NO: 1525897 - DNA, 25 bp, Homo sapien
acacacccacagaaatggtaagtat

SEQ ID NO: 1525898 - DNA, 25 bp, Homo sapien
ctattgttactgaatcgggtgtttc

SEQ ID NO: 1525899 - DNA, 25 bp, Homo sapien
cacatgaaaagttggagagtagaac

SEQ ID NO: 1525900 - DNA, 25 bp, Homo sapien
aattataagcctctttgtgcatgct

SEQ ID NO: 1525901 - DNA, 25 bp, Homo sapien
caggggctttgagcgcattcccagg

SEQ ID NO: 1525902 - DNA, 25 bp, Homo sapien
gctttgagcgcattcccaggagctg

SEQ ID NO: 1525903 - DNA, 25 bp, Homo sapien
tatacctcagtctacaaggggaggg

SEQ ID NO: 1525904 - DNA, 25 bp, Homo sapien
aacgcaggggctttgagcgcattcc

SEQ ID NO: 1525905 - DNA, 25 bp, Homo sapien
agcttctttagaatatgtaggaagt

SEQ ID NO: 1525906 - DNA, 25 bp, Homo sapien
gcttctttagaatatgtaggaagta

SEQ ID NO: 1525907 - DNA, 25 bp, Homo sapien
tacgtttagaaattctgtgcttcat

SEQ ID NO: 1525908 - DNA, 25 bp, Homo sapien
tattttacgtttagaaattctgtgc

SEQ ID NO: 1525909 - DNA, 25 bp, Homo sapien
tgtgcagctatggtctcctcactct

SEQ ID NO: 1525910 - DNA, 25 bp, Homo sapien
gctgtgcagctatggtctcctcact

SEQ ID NO: 1525911 - DNA, 25 bp, Homo sapien
gtgcagctatggtctcctcactctt

SEQ ID NO: 1525912 - DNA, 25 bp, Homo sapien
ctgtgcagctatggtctcctcactc

SEQ ID NO: 1525913 - DNA, 25 bp, Homo sapien
cacctgatggtgtgaccaggaagcc

SEQ ID NO: 1525914 - DNA, 25 bp, Homo sapien
ggcgactaagtctgagagcttccca

SEQ ID NO: 1525915 - DNA, 25 bp, Homo sapien
atctctgatcaacccaaacgtgtgg

SEQ ID NO: 1525916 - DNA, 25 bp, Homo sapien
caaagctgtccctctggcgactaag

SEQ ID NO: 1525917 - DNA, 25 bp, Homo sapien
ccaagtcctacgcttgtggccgaca

SEQ ID NO: 1525918 - DNA, 25 bp, Homo sapien
ctggcgaccaagtcctacgcttgtg

SEQ ID NO: 1525919 - DNA, 25 bp, Homo sapien
gtcctacgcttgtggccgacatcct

SEQ ID NO: 1525920 - DNA, 25 bp, Homo sapien
gaccaagtcctacgcttgtggccga

SEQ ID NO: 1525921 - DNA, 25 bp, Homo sapien
gcagatcgcttgaccgtgggagttt

SEQ ID NO: 1525922 - DNA, 25 bp, Homo sapien
agcagatcgcttgaccgtgggagtt

SEQ ID NO: 1525923 - DNA, 25 bp, Homo sapien
cagcagatcgcttgaccgtgggagt

SEQ ID NO: 1525924 - DNA, 25 bp, Homo sapien
aattctgggtccaacgatatgtcac

SEQ ID NO: 1525925 - DNA, 25 bp, Homo sapien
agataaagtcacatgtcataatcac

SEQ ID NO: 1525926 - DNA, 25 bp, Homo sapien
ctcaattctgggtccaacgatatgt

SEQ ID NO: 1525927 - DNA, 25 bp, Homo sapien
gttgccagataaagtcacatgtcat

SEQ ID NO: 1525928 - DNA, 25 bp, Homo sapien
gggcccagcgatatgacacaatgcc

SEQ ID NO: 1525929 - DNA, 25 bp, Homo sapien
gtggggcccagcgatatgacacaat

SEQ ID NO: 1525930 - DNA, 25 bp, Homo sapien
gcccagcgatatgacacaatgcccc

SEQ ID NO: 1525931 - DNA, 25 bp, Homo sapien
tggggcccagcgatatgacacaatg

SEQ ID NO: 1525932 - DNA, 25 bp, Homo sapien
tattacctaattaacggtctcagag

SEQ ID NO: 1525933 - DNA, 25 bp, Homo sapien
tgcccctcacagatagggctcagga

SEQ ID NO: 1525934 - DNA, 25 bp, Homo sapien
tctcagagataagacacagtgcccc

SEQ ID NO: 1525935 - DNA, 25 bp, Homo sapien
gaagtgtggagtcacataacatttg

SEQ ID NO: 1525936 - DNA, 25 bp, Homo sapien
taccccttatgtggagggcccatgc

SEQ ID NO: 1525937 - DNA, 25 bp, Homo sapien
tacaatacttctgtgggtggttccc

SEQ ID NO: 1525938 - DNA, 25 bp, Homo sapien
cctaggtgttgaatccaggcatgtc

SEQ ID NO: 1525939 - DNA, 25 bp, Homo sapien
gggcaaagcccaaaccatagagaag

SEQ ID NO: 1525940 - DNA, 25 bp, Homo sapien
ggacattccctgtacctcttgacga

SEQ ID NO: 1525941 - DNA, 25 bp, Homo sapien
tatgcatatgagtgtcgcaacctcc

SEQ ID NO: 1525942 - DNA, 25 bp, Homo sapien
tgaagtcactgactcacaggtgtgc

SEQ ID NO: 1525943 - DNA, 25 bp, Homo sapien
gacactaacctctctatggatcgaa

SEQ ID NO: 1525944 - DNA, 25 bp, Homo sapien
ctgggatttcagccaaggtatctca

SEQ ID NO: 1525945 - DNA, 25 bp, Homo sapien
tctcacaatcttccccgagggaagg

SEQ ID NO: 1525946 - DNA, 25 bp, Homo sapien
aaacaagcaggagtgtcatatcacc

SEQ ID NO: 1525947 - DNA, 25 bp, Homo sapien
aacaagcaggagtgtcatatcacct

SEQ ID NO: 1525948 - DNA, 25 bp, Homo sapien
tatccagtataaatgagaggcacaa

SEQ ID NO: 1525949 - DNA, 25 bp, Homo sapien
actgcgcctggttagtacactatac

SEQ ID NO: 1525950 - DNA, 25 bp, Homo sapien
tgccctgggataacacgtttgtaac

SEQ ID NO: 1525951 - DNA, 25 bp, Homo sapien
ccctgtgtgagggtgataatcctaa

SEQ ID NO: 1525952 - DNA, 25 bp, Homo sapien
tcttaggcaagagagtcagatcact

SEQ ID NO: 1525953 - DNA, 25 bp, Homo sapien
tgtcatggtccatacaggagactca

SEQ ID NO: 1525954 - DNA, 25 bp, Homo sapien
gtcacataacctgggcatagggctc

SEQ ID NO: 1525955 - DNA, 25 bp, Homo sapien
tcatttaagtgtaaggtccagcgat

SEQ ID NO: 1525956 - DNA, 25 bp, Homo sapien
tatttgtaggctgggccagttctga

SEQ ID NO: 1525957 - DNA, 25 bp, Homo sapien
gaagatcacaatactcagctgctag

SEQ ID NO: 1525958 - DNA, 25 bp, Homo sapien
tcagctgctagacagaagtgtgtca

SEQ ID NO: 1525959 - DNA, 25 bp, Homo sapien
agacagaagtgtgtcaaaactgcac

SEQ ID NO: 1525960 - DNA, 25 bp, Homo sapien
catcagcttggtgctgaaaccagca

SEQ ID NO: 1525961 - DNA, 25 bp, Homo sapien
caatagcctaagtagacagggcaca

SEQ ID NO: 1525962 - DNA, 25 bp, Homo sapien
catctttctaggtaatgaggccaga

SEQ ID NO: 1525963 - DNA, 25 bp, Homo sapien
ggtgattggcacaaaggtacgtaac

SEQ ID NO: 1525964 - DNA, 25 bp, Homo sapien
tgggcccagagataggtcacaagct

SEQ ID NO: 1525965 - DNA, 25 bp, Homo sapien
gaccaggcgggagagtcataacatc

SEQ ID NO: 1525966 - DNA, 25 bp, Homo sapien
tagatgatgaacctagagatgtcac

SEQ ID NO: 1525967 - DNA, 25 bp, Homo sapien
gttgatcctagtataagtcactctc

SEQ ID NO: 1525968 - DNA, 25 bp, Homo sapien
gctggtaggaggtattagagtcacc

SEQ ID NO: 1525969 - DNA, 25 bp, Homo sapien
tattagagtcaccatcaaacctgtg

SEQ ID NO: 1525970 - DNA, 25 bp, Homo sapien
caaacctgtgagctgggccgagata

SEQ ID NO: 1525971 - DNA, 25 bp, Homo sapien
actcctctttctaagcctacctgtg

SEQ ID NO: 1525972 - DNA, 25 bp, Homo sapien
taaccttcatacagagagaccacca

SEQ ID NO: 1525973 - DNA, 25 bp, Homo sapien
tataaccttcatacagagagaccac

SEQ ID NO: 1525974 - DNA, 25 bp, Homo sapien
tctataaccttcatacagagagacc

SEQ ID NO: 1525975 - DNA, 25 bp, Homo sapien
ataaccttcatacagagagaccacc

SEQ ID NO: 1525976 - DNA, 25 bp, Homo sapien
gaccactgtgcgctttatcaaagca

SEQ ID NO: 1525977 - DNA, 25 bp, Homo sapien
gatatggcactgtggactggtccca

SEQ ID NO: 1525978 - DNA, 25 bp, Homo sapien
gatgctgggctaagatgtatgtcac

SEQ ID NO: 1525979 - DNA, 25 bp, Homo sapien
cattaccaagggtatgggcccggtg

SEQ ID NO: 1525980 - DNA, 25 bp, Homo sapien
tcagctttgcccgtagaagagattg

SEQ ID NO: 1525981 - DNA, 25 bp, Homo sapien
gctttgcccgtagaagagattgtaa

SEQ ID NO: 1525982 - DNA, 25 bp, Homo sapien
ccgtagaagagattgtaatgggtca

SEQ ID NO: 1525983 - DNA, 25 bp, Homo sapien
ttgcccgtagaagagattgtaatgg

SEQ ID NO: 1525984 - DNA, 25 bp, Homo sapien
catgttggtccagcagtatttcaca

SEQ ID NO: 1525985 - DNA, 25 bp, Homo sapien
caatgtcctttgtgggtagggctta

SEQ ID NO: 1525986 - DNA, 25 bp, Homo sapien
gagaagcctagagatacgtcacaat

SEQ ID NO: 1525987 - DNA, 25 bp, Homo sapien
gctttatgttccagtaaccccagtg

SEQ ID NO: 1525988 - DNA, 25 bp, Homo sapien
gagattgcaccattgcaatccagcc

SEQ ID NO: 1525989 - DNA, 25 bp, Homo sapien
gaacctgggagatgaaggttgtggt

SEQ ID NO: 1525990 - DNA, 25 bp, Homo sapien
tgggagatgaaggttgtggtgagct

SEQ ID NO: 1525991 - DNA, 25 bp, Homo sapien
atccagcctgggcaaaaggagcaaa

SEQ ID NO: 1525992 - DNA, 25 bp, Homo sapien
gaaaagatgtgttagaatagttctg

SEQ ID NO: 1525993 - DNA, 25 bp, Homo sapien
agttctgtgtgagagcccacacagg

SEQ ID NO: 1525994 - DNA, 25 bp, Homo sapien
gatgtgttagaatagttctgtgtga

SEQ ID NO: 1525995 - DNA, 25 bp, Homo sapien
ttagaatagttctgtgtgagagccc

SEQ ID NO: 1525996 - DNA, 25 bp, Homo sapien
gaacaagcacaagagtcacatcaac

SEQ ID NO: 1525997 - DNA, 25 bp, Homo sapien
atgcaccagcaaggagagtcacatc

SEQ ID NO: 1525998 - DNA, 25 bp, Homo sapien
gatcacctgggtgtcacaaggctca

SEQ ID NO: 1525999 - DNA, 25 bp, Homo sapien
gatagacaaaacacctggttcctgg

SEQ ID NO: 1526000 - DNA, 25 bp, Homo sapien
tgtaacaatcacacccacaggaatg

SEQ ID NO: 1526001 - DNA, 25 bp, Homo sapien
tacatttggactgagaccaggcagc

SEQ ID NO: 1526002 - DNA, 25 bp, Homo sapien
gctgggcccagtaatatgtcaatca

SEQ ID NO: 1526003 - DNA, 25 bp, Homo sapien
tcaaaatgcctcctgtaagcaaggc

SEQ ID NO: 1526004 - DNA, 25 bp, Homo sapien
cacaatctttcctgcaggagaaaaa

SEQ ID NO: 1526005 - DNA, 25 bp, Homo sapien
atagttgacgggcagaaaactcaca

SEQ ID NO: 1526006 - DNA, 25 bp, Homo sapien
gtcacataaaatagttgacgggcag

SEQ ID NO: 1526007 - DNA, 25 bp, Homo sapien
aaaaatatatccctttggtgcttag

SEQ ID NO: 1526008 - DNA, 25 bp, Homo sapien
cttctattagcatgacccaggccca

SEQ ID NO: 1526009 - DNA, 25 bp, Homo sapien
tcagataacgtaggagctgggccca

SEQ ID NO: 1526010 - DNA, 25 bp, Homo sapien
tatatggcacaatcactacagtagg

SEQ ID NO: 1526011 - DNA, 25 bp, Homo sapien
acaatgaccatttcggcaggaacca

SEQ ID NO: 1526012 - DNA, 25 bp, Homo sapien
cacgtttcttaggtgatggatgcca

SEQ ID NO: 1526013 - DNA, 25 bp, Homo sapien
tgggcccagtgatatgttacaacgc

SEQ ID NO: 1526014 - DNA, 25 bp, Homo sapien
tacatcatctaggtgctggacccac

SEQ ID NO: 1526015 - DNA, 25 bp, Homo sapien
aaatatgtcacgaggccatctgtgg

SEQ ID NO: 1526016 - DNA, 25 bp, Homo sapien
tatggacccttgatagtacatgctg

SEQ ID NO: 1526017 - DNA, 25 bp, Homo sapien
caatatgcatgtgagtcgcaatcca

SEQ ID NO: 1526018 - DNA, 25 bp, Homo sapien
cacacatgggagtcaactttgcaac

SEQ ID NO: 1526019 - DNA, 25 bp, Homo sapien
aagacatttgtgatggtatggaccc

SEQ ID NO: 1526020 - DNA, 25 bp, Homo sapien
gagaaaagtcgcataacctaggccc

SEQ ID NO: 1526021 - DNA, 25 bp, Homo sapien
aatgccctatgtgggtgaggctcac

SEQ ID NO: 1526022 - DNA, 25 bp, Homo sapien
tatacgccacaatcaccccagtggg

SEQ ID NO: 1526023 - DNA, 25 bp, Homo sapien
gggtccatgcagcagtctacctaaa

SEQ ID NO: 1526024 - DNA, 25 bp, Homo sapien
caatctatgctgtggactgtgtccc

SEQ ID NO: 1526025 - DNA, 25 bp, Homo sapien
catcagttacaatctcaaaggtgga

SEQ ID NO: 1526026 - DNA, 25 bp, Homo sapien
tgagagtcacataaccaaggtgtgg

SEQ ID NO: 1526027 - DNA, 25 bp, Homo sapien
tcatgatctaatctgtgggctgggc

SEQ ID NO: 1526028 - DNA, 25 bp, Homo sapien
tacaatggatctctatgtcagaggc

SEQ ID NO: 1526029 - DNA, 25 bp, Homo sapien
taatcttcctgtaagctgggtgcag

SEQ ID NO: 1526030 - DNA, 25 bp, Homo sapien
tgcagccagaatagaggagtcacat

SEQ ID NO: 1526031 - DNA, 25 bp, Homo sapien
tattctgccaaggttaagtaggagc

SEQ ID NO: 1526032 - DNA, 25 bp, Homo sapien
tcagtgctgcattctcaggtacaca

SEQ ID NO: 1526033 - DNA, 25 bp, Homo sapien
ttataagatagactggctgaaagct

SEQ ID NO: 1526034 - DNA, 25 bp, Homo sapien
ccctgcaatggtggtggataagtct

SEQ ID NO: 1526035 - DNA, 25 bp, Homo sapien
caattgctatcaagaaaccagagtc

SEQ ID NO: 1526036 - DNA, 25 bp, Homo sapien
tacttctgttttgttgtagacagcc

SEQ ID NO: 1526037 - DNA, 25 bp, Homo sapien
gatacttctgttttgttgtagacag

SEQ ID NO: 1526038 - DNA, 25 bp, Homo sapien
atacttctgttttgttgtagacagc

SEQ ID NO: 1526039 - DNA, 25 bp, Homo sapien
ctgatacttctgttttgttgtagac

SEQ ID NO: 1526040 - DNA, 25 bp, Homo sapien
tccccttggaggttgataggcagct

SEQ ID NO: 1526041 - DNA, 25 bp, Homo sapien
cagatcctgccatgttaaactgtag

SEQ ID NO: 1526042 - DNA, 25 bp, Homo sapien
ttattatagagccaaaccagacaga

SEQ ID NO: 1526043 - DNA, 25 bp, Homo sapien
caaaaatgcccgctgaaccaagtgg

SEQ ID NO: 1526044 - DNA, 25 bp, Homo sapien
accgcacctggtgaaacttcatatt

SEQ ID NO: 1526045 - DNA, 25 bp, Homo sapien
caccgcacctggtgaaacttcatat

SEQ ID NO: 1526046 - DNA, 25 bp, Homo sapien
cgcacctggtgaaacttcatattct

SEQ ID NO: 1526047 - DNA, 25 bp, Homo sapien
gccaccgcacctggtgaaacttcat

SEQ ID NO: 1526048 - DNA, 25 bp, Homo sapien
gcatccgggcatgataaggaagtta

SEQ ID NO: 1526049 - DNA, 25 bp, Homo sapien
catacttggtgtgggcttaaacctc

SEQ ID NO: 1526050 - DNA, 25 bp, Homo sapien
tgggcttgtcaatctatccccgtga

SEQ ID NO: 1526051 - DNA, 25 bp, Homo sapien
gaaattgctacgacttccctgaggc

SEQ ID NO: 1526052 - DNA, 25 bp, Homo sapien
tgtttttacctatgaggagatgtgc

SEQ ID NO: 1526053 - DNA, 25 bp, Homo sapien
ttactatattttgcgagactcgata

SEQ ID NO: 1526054 - DNA, 25 bp, Homo sapien
catttaccatagttacaatgttttt

SEQ ID NO: 1526055 - DNA, 25 bp, Homo sapien
aattaatttactattgaggaacaca

SEQ ID NO: 1526056 - DNA, 25 bp, Homo sapien
ggactccggcgacagcgagagacaa

SEQ ID NO: 1526057 - DNA, 25 bp, Homo sapien
cctgctggtaacagcgccacagagg

SEQ ID NO: 1526058 - DNA, 25 bp, Homo sapien
acagacctgggactccggcgacagc

SEQ ID NO: 1526059 - DNA, 25 bp, Homo sapien
tgtggatctccaatacctgctggta

SEQ ID NO: 1526060 - DNA, 25 bp, Homo sapien
actgaggtcgagctgggcgcagatt

SEQ ID NO: 1526061 - DNA, 25 bp, Homo sapien
ctgaggtcgagctgggcgcagattg

SEQ ID NO: 1526062 - DNA, 25 bp, Homo sapien
ggggactgaggtcgagctgggcgca

SEQ ID NO: 1526063 - DNA, 25 bp, Homo sapien
ggactgaggtcgagctgggcgcaga

SEQ ID NO: 1526064 - DNA, 25 bp, Homo sapien
tctaaactcaagagcattttttggt

SEQ ID NO: 1526065 - DNA, 25 bp, Homo sapien
atctaaactcaagagcattttttgg

SEQ ID NO: 1526066 - DNA, 25 bp, Homo sapien
taaactcaagagcattttttggtaa

SEQ ID NO: 1526067 - DNA, 25 bp, Homo sapien
aaatctaaactcaagagcatttttt

SEQ ID NO: 1526068 - DNA, 25 bp, Homo sapien
gagactctgaactatgccccagtga

SEQ ID NO: 1526069 - DNA, 25 bp, Homo sapien
taatcatgtgtcaagtcaggccatc

SEQ ID NO: 1526070 - DNA, 25 bp, Homo sapien
gtctcaagacaacgaaaacaagcct

SEQ ID NO: 1526071 - DNA, 25 bp, Homo sapien
tcaggccatccaattacttgagaga

SEQ ID NO: 1526072 - DNA, 25 bp, Homo sapien
aaaactacagaaactagctgagtgt

SEQ ID NO: 1526073 - DNA, 25 bp, Homo sapien
ggtggtgcacacctgtagtcccagc

SEQ ID NO: 1526074 - DNA, 25 bp, Homo sapien
tactaaaactacagaaactagctga

SEQ ID NO: 1526075 - DNA, 25 bp, Homo sapien
ctaaaactacagaaactagctgagt

SEQ ID NO: 1526076 - DNA, 25 bp, Homo sapien
atcactcagccataggccaagcacg

SEQ ID NO: 1526077 - DNA, 25 bp, Homo sapien
tctgtttgaaatcactcagccatag

SEQ ID NO: 1526078 - DNA, 25 bp, Homo sapien
aattctgtttgaaatcactcagcca

SEQ ID NO: 1526079 - DNA, 25 bp, Homo sapien
cactcagccataggccaagcacggt

SEQ ID NO: 1526080 - DNA, 25 bp, Homo sapien
gctcgagaggctgagaacggcgtga

SEQ ID NO: 1526081 - DNA, 25 bp, Homo sapien
tcgagaggctgagaacggcgtgaac

SEQ ID NO: 1526082 - DNA, 25 bp, Homo sapien
agctgctcgagaggctgagaacggc

SEQ ID NO: 1526083 - DNA, 25 bp, Homo sapien
ccagctgctcgagaggctgagaacg

SEQ ID NO: 1526084 - DNA, 25 bp, Homo sapien
taattcagcctgcaaacgatcacca

SEQ ID NO: 1526085 - DNA, 25 bp, Homo sapien
ctgtactgctaaattttgtctattt

SEQ ID NO: 1526086 - DNA, 25 bp, Homo sapien
atctttataattctgtactgctaaa

SEQ ID NO: 1526087 - DNA, 25 bp, Homo sapien
aatctttataattcagcctgcaaac

SEQ ID NO: 1526088 - DNA, 25 bp, Homo sapien
ggtgaatgccaattcccacagcagc

SEQ ID NO: 1526089 - DNA, 25 bp, Homo sapien
gccaggtaactgcttaaggtagact

SEQ ID NO: 1526090 - DNA, 25 bp, Homo sapien
tactccctgaagactgtgctagcgc

SEQ ID NO: 1526091 - DNA, 25 bp, Homo sapien
catacagcccatagcgcagggctca

SEQ ID NO: 1526092 - DNA, 25 bp, Homo sapien
ctgcagatttaggtcccggatgggt

SEQ ID NO: 1526093 - DNA, 25 bp, Homo sapien
cagttgttacctgcaattgtgagca

SEQ ID NO: 1526094 - DNA, 25 bp, Homo sapien
ggtctagcccctctagaagtgacta

SEQ ID NO: 1526095 - DNA, 25 bp, Homo sapien
tgattaatatctgccctataaagtt

SEQ ID NO: 1526096 - DNA, 25 bp, Homo sapien
ggaggaacaatcacaggatgactca

SEQ ID NO: 1526097 - DNA, 25 bp, Homo sapien
gaggaacaatcacaggatgactcat

SEQ ID NO: 1526098 - DNA, 25 bp, Homo sapien
ggggaggaacaatcacaggatgact

SEQ ID NO: 1526099 - DNA, 25 bp, Homo sapien
gaggggaggaacaatcacaggatga

SEQ ID NO: 1526100 - DNA, 25 bp, Homo sapien
ggtaccaaccgaagacagctcttgc

SEQ ID NO: 1526101 - DNA, 25 bp, Homo sapien
taccaaccgaagacagctcttgcat

SEQ ID NO: 1526102 - DNA, 25 bp, Homo sapien
tgggtaccaaccgaagacagctctt

SEQ ID NO: 1526103 - DNA, 25 bp, Homo sapien
atctgggtaccaaccgaagacagct

SEQ ID NO: 1526104 - DNA, 25 bp, Homo sapien
ccacactcaaagtcagaaggctcaa

SEQ ID NO: 1526105 - DNA, 25 bp, Homo sapien
accacactcaaagtcagaaggctca

SEQ ID NO: 1526106 - DNA, 25 bp, Homo sapien
gttcacctgttaccaccacactcaa

SEQ ID NO: 1526107 - DNA, 25 bp, Homo sapien
tgttcacctgttaccaccacactca

SEQ ID NO: 1526108 - DNA, 25 bp, Homo sapien
tgtgctgatgcacccagaaggacac

SEQ ID NO: 1526109 - DNA, 25 bp, Homo sapien
caaaaggcagccagattaaacgtga

SEQ ID NO: 1526110 - DNA, 25 bp, Homo sapien
gaaggacacgacattactactgaga

SEQ ID NO: 1526111 - DNA, 25 bp, Homo sapien
tacaaagtggctatcggcagaattt

SEQ ID NO: 1526112 - DNA, 25 bp, Homo sapien
tgcaatgtccaggtgttgccactcc

SEQ ID NO: 1526113 - DNA, 25 bp, Homo sapien
tgtgcaatgtccaggtgttgccact

SEQ ID NO: 1526114 - DNA, 25 bp, Homo sapien
tctgctgtgcaatgtccaggtgttg

SEQ ID NO: 1526115 - DNA, 25 bp, Homo sapien
tgctgtgcaatgtccaggtgttgcc

SEQ ID NO: 1526116 - DNA, 25 bp, Homo sapien
tataatagaatatgctaacaaagtt

SEQ ID NO: 1526117 - DNA, 25 bp, Homo sapien
gccttaatctaaagtgcaggacaca

SEQ ID NO: 1526118 - DNA, 25 bp, Homo sapien
cagattagctcaggaatgtggaaag

SEQ ID NO: 1526119 - DNA, 25 bp, Homo sapien
caaaaattggtgatgccaaatggat

SEQ ID NO: 1526120 - DNA, 25 bp, Homo sapien
ctgggggttcatccaccatctcatg

SEQ ID NO: 1526121 - DNA, 25 bp, Homo sapien
gggggttcatccaccatctcatgtc

SEQ ID NO: 1526122 - DNA, 25 bp, Homo sapien
gttcatccaccatctcatgtcgctt

SEQ ID NO: 1526123 - DNA, 25 bp, Homo sapien
gggttcatccaccatctcatgtcgc

SEQ ID NO: 1526124 - DNA, 25 bp, Homo sapien
ttcctttggatcacagcttcttaaa

SEQ ID NO: 1526125 - DNA, 25 bp, Homo sapien
aagtcagattgtacactcttttgta

SEQ ID NO: 1526126 - DNA, 25 bp, Homo sapien
ggatcacagcttcttaaatcacttt

SEQ ID NO: 1526127 - DNA, 25 bp, Homo sapien
agcagaaggacatcctactttgtac

SEQ ID NO: 1526128 - DNA, 25 bp, Homo sapien
aaagaataagtattatgaaactgcc

SEQ ID NO: 1526129 - DNA, 25 bp, Homo sapien
gaataagtattatgaaactgccata

SEQ ID NO: 1526130 - DNA, 25 bp, Homo sapien
ccaaagtgacctgtagatttaaaga

SEQ ID NO: 1526131 - DNA, 25 bp, Homo sapien
catattatccaaagtgacctgtaga

SEQ ID NO: 1526132 - DNA, 25 bp, Homo sapien
tataggtgtgaggtgccattccagg

SEQ ID NO: 1526133 - DNA, 25 bp, Homo sapien
ccttaaaccatatgtggaaaaatct

SEQ ID NO: 1526134 - DNA, 25 bp, Homo sapien
gaatgtggtggcatgctctccaatc

SEQ ID NO: 1526135 - DNA, 25 bp, Homo sapien
cccgagtagcctgggtttacacgca

SEQ ID NO: 1526136 - DNA, 25 bp, Homo sapien
taagggttgagagttgcttaggaga

SEQ ID NO: 1526137 - DNA, 25 bp, Homo sapien
gagagttgcttaggagatttgttat

SEQ ID NO: 1526138 - DNA, 25 bp, Homo sapien
gagttgcttaggagatttgttatat

SEQ ID NO: 1526139 - DNA, 25 bp, Homo sapien
gttgagagttgcttaggagatttgt

SEQ ID NO: 1526140 - DNA, 25 bp, Homo sapien
tctagttagggttgaggaccatata

SEQ ID NO: 1526141 - DNA, 25 bp, Homo sapien
tctagttagtgttgaggaccatata

SEQ ID NO: 1526142 - DNA, 25 bp, Homo sapien
tgccacattctaagcatttgtagcg

SEQ ID NO: 1526143 - DNA, 25 bp, Homo sapien
ggatcgattaaaagcttcaccacat

SEQ ID NO: 1526144 - DNA, 25 bp, Homo sapien
tgaggtgcgaggaccgattaaaggc

SEQ ID NO: 1526145 - DNA, 25 bp, Homo sapien
agttatcttatctgtggtgaggtgc

SEQ ID NO: 1526146 - DNA, 25 bp, Homo sapien
gaggtgcgaggaccgattaaaggct

SEQ ID NO: 1526147 - DNA, 25 bp, Homo sapien
tatcttatctgtggtgaggtgcgag

SEQ ID NO: 1526148 - DNA, 25 bp, Homo sapien
tccagtaggaataatcttatatcta

SEQ ID NO: 1526149 - DNA, 25 bp, Homo sapien
cattgtcgaagcttggccacgttgt

SEQ ID NO: 1526150 - DNA, 25 bp, Homo sapien
tttactatgaactctacaattttga

SEQ ID NO: 1526151 - DNA, 25 bp, Homo sapien
tgtcaaaagcattagcgcctctctc

SEQ ID NO: 1526152 - DNA, 25 bp, Homo sapien
taaagacatactttctgacagatct

SEQ ID NO: 1526153 - DNA, 25 bp, Homo sapien
cacatatgaatacaccagcaatgat

SEQ ID NO: 1526154 - DNA, 25 bp, Homo sapien
tgtaatgtctaaagcttgaatgccc

SEQ ID NO: 1526155 - DNA, 25 bp, Homo sapien
tattatatagagtatgcctgcatca

SEQ ID NO: 1526156 - DNA, 25 bp, Homo sapien
catatgtgcttgcaggcaaaggtca

SEQ ID NO: 1526157 - DNA, 25 bp, Homo sapien
ggcaaaggtcacatattcaaagaaa

SEQ ID NO: 1526158 - DNA, 25 bp, Homo sapien
ttatgtaaatcaattctaagagtcc

SEQ ID NO: 1526159 - DNA, 25 bp, Homo sapien
aagagtccatatgtgcttgcaggca

SEQ ID NO: 1526160 - DNA, 25 bp, Homo sapien
tgtgctgtggtcaagaataggccga

SEQ ID NO: 1526161 - DNA, 25 bp, Homo sapien
gagacctgagttactgcattgctaa

SEQ ID NO: 1526162 - DNA, 25 bp, Homo sapien
actgtgtatagttcccatatggaga

SEQ ID NO: 1526163 - DNA, 25 bp, Homo sapien
aactcaacagatctgggatgagacc

SEQ ID NO: 1526164 - DNA, 25 bp, Homo sapien
atcagaacagaaccaaatgaattta

SEQ ID NO: 1526165 - DNA, 25 bp, Homo sapien
aattcaggataatgaaattcttcct

SEQ ID NO: 1526166 - DNA, 25 bp, Homo sapien
cgggagtagataaatggacagccaa

SEQ ID NO: 1526167 - DNA, 25 bp, Homo sapien
aaggacttgacatcacacttcaagg

SEQ ID NO: 1526168 - DNA, 25 bp, Homo sapien
caaagcacccagattttaaatagaa

SEQ ID NO: 1526169 - DNA, 25 bp, Homo sapien
tctatggtgcctacaagaatctcac

SEQ ID NO: 1526170 - DNA, 25 bp, Homo sapien
gaggaaagatatcaacagaaacaga

SEQ ID NO: 1526171 - DNA, 25 bp, Homo sapien
ccttacttgtaagacacatatagat

SEQ ID NO: 1526172 - DNA, 25 bp, Homo sapien
cttcaggtttgctgggcctcaatga

SEQ ID NO: 1526173 - DNA, 25 bp, Homo sapien
cttttacttcaggtttgctgggcct

SEQ ID NO: 1526174 - DNA, 25 bp, Homo sapien
tacaaaagtgttgtgtacaaatgta

SEQ ID NO: 1526175 - DNA, 25 bp, Homo sapien
tacttcaggtttgctgggcctcaat

SEQ ID NO: 1526176 - DNA, 25 bp, Homo sapien
aataattcatggttgaggttcagag

SEQ ID NO: 1526177 - DNA, 25 bp, Homo sapien
gcaagagctagatttgtcagaaaag

SEQ ID NO: 1526178 - DNA, 25 bp, Homo sapien
ggttcagagctacccataccatagt

SEQ ID NO: 1526179 - DNA, 25 bp, Homo sapien
tactaagcatagatttgcaagagct

SEQ ID NO: 1526180 - DNA, 25 bp, Homo sapien
tcggaaggacacacactataaggta

SEQ ID NO: 1526181 - DNA, 25 bp, Homo sapien
aatggaacccacgtcacctatcgga

SEQ ID NO: 1526182 - DNA, 25 bp, Homo sapien
gaggcgcacgttctttattcacatg

SEQ ID NO: 1526183 - DNA, 25 bp, Homo sapien
cacagtgggtggttcaatgacatga

SEQ ID NO: 1526184 - DNA, 25 bp, Homo sapien
catttaaagccgtccacaaacagag

SEQ ID NO: 1526185 - DNA, 25 bp, Homo sapien
tgttcctctgttccgcactggagag

SEQ ID NO: 1526186 - DNA, 25 bp, Homo sapien
catgctgggaggttgtgcatttacc

SEQ ID NO: 1526187 - DNA, 25 bp, Homo sapien
ttattatttgttgggaacaggcctc

SEQ ID NO: 1526188 - DNA, 25 bp, Homo sapien
cagggagacagtgtgaaatctgacc

SEQ ID NO: 1526189 - DNA, 25 bp, Homo sapien
ccacagagtgtttgtctagccagca

SEQ ID NO: 1526190 - DNA, 25 bp, Homo sapien
cagggcattcctcaactactcagtg

SEQ ID NO: 1526191 - DNA, 25 bp, Homo sapien
gtgctttatgcaactcagggagaca

SEQ ID NO: 1526192 - DNA, 25 bp, Homo sapien
aattctttgggtggtacagataggt

SEQ ID NO: 1526193 - DNA, 25 bp, Homo sapien
atgatataattaccttcctcccctg

SEQ ID NO: 1526194 - DNA, 25 bp, Homo sapien
gctcaaaggtgagattgtaacacta

SEQ ID NO: 1526195 - DNA, 25 bp, Homo sapien
gacatagagccaaactatgtatctc

SEQ ID NO: 1526196 - DNA, 25 bp, Homo sapien
ttttctacgattgacttcaaatcgg

SEQ ID NO: 1526197 - DNA, 25 bp, Homo sapien
tctccttttctacgattgacttcaa

SEQ ID NO: 1526198 - DNA, 25 bp, Homo sapien
tccttttctacgattgacttcaaat

SEQ ID NO: 1526199 - DNA, 25 bp, Homo sapien
gatatctccttttctacgattgact

SEQ ID NO: 1526200 - DNA, 25 bp, Homo sapien
gagaattcttctttctagcataata

SEQ ID NO: 1526201 - DNA, 25 bp, Homo sapien
aattcttctttctagcataatatga

SEQ ID NO: 1526202 - DNA, 25 bp, Homo sapien
gaattcttctttctagcataatatg

SEQ ID NO: 1526203 - DNA, 25 bp, Homo sapien
ttcttctttctagcataatatgaag

SEQ ID NO: 1526204 - DNA, 25 bp, Homo sapien
aagttactgagaattcttctgtcta

SEQ ID NO: 1526205 - DNA, 25 bp, Homo sapien
agttactgagaattcttctgtctag

SEQ ID NO: 1526206 - DNA, 25 bp, Homo sapien
ttgaacgcacacatcacagcgcagt

SEQ ID NO: 1526207 - DNA, 25 bp, Homo sapien
tacgaagatatttccttttctgcca

SEQ ID NO: 1526208 - DNA, 25 bp, Homo sapien
agttgaacgcacacatcacagcgca

SEQ ID NO: 1526209 - DNA, 25 bp, Homo sapien
atcacagcgcagtttctgagaatca

SEQ ID NO: 1526210 - DNA, 25 bp, Homo sapien
tgtctaaagaaacgttcaactctgt

SEQ ID NO: 1526211 - DNA, 25 bp, Homo sapien
caaatctgctctgtctaaagaaacg

SEQ ID NO: 1526212 - DNA, 25 bp, Homo sapien
tctgtctaaagaaacgttcaactct

SEQ ID NO: 1526213 - DNA, 25 bp, Homo sapien
tgctctgtctaaagaaacgttcaac

SEQ ID NO: 1526214 - DNA, 25 bp, Homo sapien
atcaaatctgctctgtctaaaggag

SEQ ID NO: 1526215 - DNA, 25 bp, Homo sapien
gaattcttctgtctagccttatatg

SEQ ID NO: 1526216 - DNA, 25 bp, Homo sapien
agagtgtatcaaatctgctctgtct

SEQ ID NO: 1526217 - DNA, 25 bp, Homo sapien
tgctctgtctaaaggagggttcaac

SEQ ID NO: 1526218 - DNA, 25 bp, Homo sapien
agaaacgagctatctttgaatatgc

SEQ ID NO: 1526219 - DNA, 25 bp, Homo sapien
accttatttttgactcaccaagatg

SEQ ID NO: 1526220 - DNA, 25 bp, Homo sapien
tgactcaccaagatggaaatacttt

SEQ ID NO: 1526221 - DNA, 25 bp, Homo sapien
aaaactagaaacgagctatctttga

SEQ ID NO: 1526222 - DNA, 25 bp, Homo sapien
ggcattgagacaattaaatttcact

SEQ ID NO: 1526223 - DNA, 25 bp, Homo sapien
cattgagacaattaaatttcactgg

SEQ ID NO: 1526224 - DNA, 25 bp, Homo sapien
aatatgcaaataatcgagtcatgct

SEQ ID NO: 1526225 - DNA, 25 bp, Homo sapien
aatcgagtcatgcttcttgggagaa

SEQ ID NO: 1526226 - DNA, 25 bp, Homo sapien
gatttttggttctctggaattgaat

SEQ ID NO: 1526227 - DNA, 25 bp, Homo sapien
atttttggttctctggaattgaatg

SEQ ID NO: 1526228 - DNA, 25 bp, Homo sapien
ggatttttggttctctggaattgaa

SEQ ID NO: 1526229 - DNA, 25 bp, Homo sapien
cacagtgaatcacgatccgatccct

SEQ ID NO: 1526230 - DNA, 25 bp, Homo sapien
cagggcacagtgaatcacgatccga

SEQ ID NO: 1526231 - DNA, 25 bp, Homo sapien
aatcacgatccgatccctctgctgg

SEQ ID NO: 1526232 - DNA, 25 bp, Homo sapien
gacgcccagggcacagtgaatcacg

SEQ ID NO: 1526233 - DNA, 25 bp, Homo sapien
tggcagctaagtccaatcctctcag

SEQ ID NO: 1526234 - DNA, 25 bp, Homo sapien
ggcaagctggcagctaagtccaatc

SEQ ID NO: 1526235 - DNA, 25 bp, Homo sapien
taagtccaatcctctcagctgacat

SEQ ID NO: 1526236 - DNA, 25 bp, Homo sapien
caagctggcagctaagtccaatcct

SEQ ID NO: 1526237 - DNA, 25 bp, Homo sapien
tcatggcaaggcgagagccatctgg

SEQ ID NO: 1526238 - DNA, 25 bp, Homo sapien
atggcaaggcgagagccatctggtt

SEQ ID NO: 1526239 - DNA, 25 bp, Homo sapien
catggcaaggcgagagccatctggt

SEQ ID NO: 1526240 - DNA, 25 bp, Homo sapien
ctcagttctgtgaaaggcggacgca

SEQ ID NO: 1526241 - DNA, 25 bp, Homo sapien
ctgggttagacctcgcacagggacg

SEQ ID NO: 1526242 - DNA, 25 bp, Homo sapien
aggacagaatctccgtggacatctg

SEQ ID NO: 1526243 - DNA, 25 bp, Homo sapien
cacgcttctgaaactggtgtaggaa

SEQ ID NO: 1526244 - DNA, 25 bp, Homo sapien
tccataggaggacccattggacccc

SEQ ID NO: 1526245 - DNA, 25 bp, Homo sapien
ctccataggaggacccattggaccc

SEQ ID NO: 1526246 - DNA, 25 bp, Homo sapien
cataggaggacccattggacccccg

SEQ ID NO: 1526247 - DNA, 25 bp, Homo sapien
tttctcgcagaccaggtaaaagcca

SEQ ID NO: 1526248 - DNA, 25 bp, Homo sapien
aaagccaagaggctctcataggcgc

SEQ ID NO: 1526249 - DNA, 25 bp, Homo sapien
agaggctctcataggcgccttggca

SEQ ID NO: 1526250 - DNA, 25 bp, Homo sapien
tctcccgggcttgtcggcttcatga

SEQ ID NO: 1526251 - DNA, 25 bp, Homo sapien
agaagatagcttggccgggcggctg

SEQ ID NO: 1526252 - DNA, 25 bp, Homo sapien
aagatagcttggccgggcggctgat

SEQ ID NO: 1526253 - DNA, 25 bp, Homo sapien
gaagatagcttggccgggcggctga

SEQ ID NO: 1526254 - DNA, 25 bp, Homo sapien
agattgtagtcccgcagccctgcga

SEQ ID NO: 1526255 - DNA, 25 bp, Homo sapien
caagctatccgcaccaccctctctt

SEQ ID NO: 1526256 - DNA, 25 bp, Homo sapien
ttccatttcatgcgaagattgtagt

SEQ ID NO: 1526257 - DNA, 25 bp, Homo sapien
tgtagtcccgcagccctgcgaccag

SEQ ID NO: 1526258 - DNA, 25 bp, Homo sapien
caggtttactggacacgtctcagag

SEQ ID NO: 1526259 - DNA, 25 bp, Homo sapien
gagtagtatatattgtactcaacag

SEQ ID NO: 1526260 - DNA, 25 bp, Homo sapien
tttgcatacgcatggcttagctcca

SEQ ID NO: 1526261 - DNA, 25 bp, Homo sapien
tatgtcaccccgcatgcctttgcat

SEQ ID NO: 1526262 - DNA, 25 bp, Homo sapien
atgagaacacgtcaccagttccata

SEQ ID NO: 1526263 - DNA, 25 bp, Homo sapien
gctgacccaatctaacatagatctt

SEQ ID NO: 1526264 - DNA, 25 bp, Homo sapien
gagaacacgtcaccagttccatatg

SEQ ID NO: 1526265 - DNA, 25 bp, Homo sapien
aacccatgactgttgtattttgaga

SEQ ID NO: 1526266 - DNA, 25 bp, Homo sapien
tctcgggattctaccctttcttctc

SEQ ID NO: 1526267 - DNA, 25 bp, Homo sapien
tagcagtagatgggatagtggtctc

SEQ ID NO: 1526268 - DNA, 25 bp, Homo sapien
acattctcgggattctaccctttct

SEQ ID NO: 1526269 - DNA, 25 bp, Homo sapien
gtggtctctccttatcagcactgtg

SEQ ID NO: 1526270 - DNA, 25 bp, Homo sapien
ccttgtgttctatatgacaggtggg

SEQ ID NO: 1526271 - DNA, 25 bp, Homo sapien
tccagctgaagtgggtctgcaacag

SEQ ID NO: 1526272 - DNA, 25 bp, Homo sapien
tgtccatgttcctagcttccagctg

SEQ ID NO: 1526273 - DNA, 25 bp, Homo sapien
tgcccctcctgtggatgcaatgcca

SEQ ID NO: 1526274 - DNA, 25 bp, Homo sapien
gggagtgaggatatctctgatgttc

SEQ ID NO: 1526275 - DNA, 25 bp, Homo sapien
gagggagcctcacacttaagcactg

SEQ ID NO: 1526276 - DNA, 25 bp, Homo sapien
taagcactgttaattggggtatggg

SEQ ID NO: 1526277 - DNA, 25 bp, Homo sapien
tctctgatgttctgagggagcctca

SEQ ID NO: 1526278 - DNA, 25 bp, Homo sapien
tccctgacttgccacaacagttttc

SEQ ID NO: 1526279 - DNA, 25 bp, Homo sapien
taaagtagtcatgagatctgaaaac

SEQ ID NO: 1526280 - DNA, 25 bp, Homo sapien
tatttgctgagtctggcaactccaa

SEQ ID NO: 1526281 - DNA, 25 bp, Homo sapien
cttaactgtgtgtcgtgtattttta

SEQ ID NO: 1526282 - DNA, 25 bp, Homo sapien
taagcgcccttctaattacgtgagg

SEQ ID NO: 1526283 - DNA, 25 bp, Homo sapien
catgtaatcacatgtacggtccaca

SEQ ID NO: 1526284 - DNA, 25 bp, Homo sapien
cacttcttgtggagcctaacattag

SEQ ID NO: 1526285 - DNA, 25 bp, Homo sapien
gaacattgttgtatgtgggcagcaa

SEQ ID NO: 1526286 - DNA, 25 bp, Homo sapien
agtcaggagaaaggtgatggagctg

SEQ ID NO: 1526287 - DNA, 25 bp, Homo sapien
cagtcaggagaaaggtgatggagct

SEQ ID NO: 1526288 - DNA, 25 bp, Homo sapien
cattgtgggagcggccagtgtcttc

SEQ ID NO: 1526289 - DNA, 25 bp, Homo sapien
ctctgcacgagatcgagccccagat

SEQ ID NO: 1526290 - DNA, 25 bp, Homo sapien
gcacgagatcgagccccagatgcga

SEQ ID NO: 1526291 - DNA, 25 bp, Homo sapien
agtgtcttcggaaatgctcctctgc

SEQ ID NO: 1526292 - DNA, 25 bp, Homo sapien
acaggccccgtgctgaagcagggct

SEQ ID NO: 1526293 - DNA, 25 bp, Homo sapien
tttctttgtcctgacatccctgcgc

SEQ ID NO: 1526294 - DNA, 25 bp, Homo sapien
gggctggaaccaggcaacttgtttc

SEQ ID NO: 1526295 - DNA, 25 bp, Homo sapien
tctttgtcctgacatccctgcgcag

SEQ ID NO: 1526296 - DNA, 25 bp, Homo sapien
gattgtgcgggaacaccgggactta

SEQ ID NO: 1526297 - DNA, 25 bp, Homo sapien
aatccaagtacaggggattcttcca

SEQ ID NO: 1526298 - DNA, 25 bp, Homo sapien
taatccatggccagacctctccaaa

SEQ ID NO: 1526299 - DNA, 25 bp, Homo sapien
tggtggtcctatgtcccatggagac

SEQ ID NO: 1526300 - DNA, 25 bp, Homo sapien
agcaaggcgggcagcggtgcggcca

SEQ ID NO: 1526301 - DNA, 25 bp, Homo sapien
tgaacagcaaggcgggcagcggtgc

SEQ ID NO: 1526302 - DNA, 25 bp, Homo sapien
ctggtgaacagcaaggcgggcagcg

SEQ ID NO: 1526303 - DNA, 25 bp, Homo sapien
cagcaaggcgggcagcggtgcggcc

SEQ ID NO: 1526304 - DNA, 25 bp, Homo sapien
gcggcgtcaggcgttcctcagcaac

SEQ ID NO: 1526305 - DNA, 25 bp, Homo sapien
tcagcaaccagatgcgggatgccca

SEQ ID NO: 1526306 - DNA, 25 bp, Homo sapien
ttcctcagcaaccagatgcgggatg

SEQ ID NO: 1526307 - DNA, 25 bp, Homo sapien
ccacaaggcggcgtcaggcgttcct

SEQ ID NO: 1526308 - DNA, 25 bp, Homo sapien
gaattcaggaggctccgatcccaag

SEQ ID NO: 1526309 - DNA, 25 bp, Homo sapien
gtcatgccatgcctgcgtcctggaa

SEQ ID NO: 1526310 - DNA, 25 bp, Homo sapien
cgtcctggaacgcacggctgatgct

SEQ ID NO: 1526311 - DNA, 25 bp, Homo sapien
accgagttcgtgaagatgcagctgc

SEQ ID NO: 1526312 - DNA, 25 bp, Homo sapien
agttgcttatagtagccacaaacca

SEQ ID NO: 1526313 - DNA, 25 bp, Homo sapien
gaaaactgctcactaataaccaaaa

SEQ ID NO: 1526314 - DNA, 25 bp, Homo sapien
aaaaacctgttgatcccaatacact

SEQ ID NO: 1526315 - DNA, 25 bp, Homo sapien
tctgctctaatcctataatcctatg

SEQ ID NO: 1526316 - DNA, 25 bp, Homo sapien
gcatttctctgaggttcaactttta

SEQ ID NO: 1526317 - DNA, 25 bp, Homo sapien
tgcatggtagctatggtagctcact

SEQ ID NO: 1526318 - DNA, 25 bp, Homo sapien
tcctcgtcagcatttgttaatgtct

SEQ ID NO: 1526319 - DNA, 25 bp, Homo sapien
tgcctcttcaaatcttttgccaata

SEQ ID NO: 1526320 - DNA, 25 bp, Homo sapien
attaagtaataatgcaggatagaaa

SEQ ID NO: 1526321 - DNA, 25 bp, Homo sapien
aattaagtaataatgcaggatagaa

SEQ ID NO: 1526322 - DNA, 25 bp, Homo sapien
gtagcatttctatatcccaatagaa

SEQ ID NO: 1526323 - DNA, 25 bp, Homo sapien
aaattaagtaataatgcaggataga

SEQ ID NO: 1526324 - DNA, 25 bp, Homo sapien
catggttgctggtgtaggctgacgg

SEQ ID NO: 1526325 - DNA, 25 bp, Homo sapien
tgtaggctgacggtcctacagccat

SEQ ID NO: 1526326 - DNA, 25 bp, Homo sapien
ctggtgtaggctgacggtcctacag

SEQ ID NO: 1526327 - DNA, 25 bp, Homo sapien
cctccttcttgatctttgaaatgca

SEQ ID NO: 1526328 - DNA, 25 bp, Homo sapien
ctatgaaaacgaactggggacaaag

SEQ ID NO: 1526329 - DNA, 25 bp, Homo sapien
tatgaaaacgaactggggacaaaga

SEQ ID NO: 1526330 - DNA, 25 bp, Homo sapien
atgaaaacgaactggggacaaagag

SEQ ID NO: 1526331 - DNA, 25 bp, Homo sapien
gaggtaacgtagctcttcagcttgt

SEQ ID NO: 1526332 - DNA, 25 bp, Homo sapien
gcagggttaatggagccagcatccc

SEQ ID NO: 1526333 - DNA, 25 bp, Homo sapien
tgcagggttaatggagccagcatcc

SEQ ID NO: 1526334 - DNA, 25 bp, Homo sapien
cagggttaatggagccagcatcccc

SEQ ID NO: 1526335 - DNA, 25 bp, Homo sapien
gctgtcgtctggtgctttccaaggc

SEQ ID NO: 1526336 - DNA, 25 bp, Homo sapien
gcaaagtagggaggcaagtgctggt

SEQ ID NO: 1526337 - DNA, 25 bp, Homo sapien
aaggctgaagttctgtgtagacgta

SEQ ID NO: 1526338 - DNA, 25 bp, Homo sapien
gttctgagccctggagctgtcgtct

SEQ ID NO: 1526339 - DNA, 25 bp, Homo sapien
ctggtggctcatcatgtttacacac

SEQ ID NO: 1526340 - DNA, 25 bp, Homo sapien
aagccaggagcagcggggtccctgg

SEQ ID NO: 1526341 - DNA, 25 bp, Homo sapien
aaagccaggagcagcggggtccctg

SEQ ID NO: 1526342 - DNA, 25 bp, Homo sapien
agccaggagcagcggggtccctggg

SEQ ID NO: 1526343 - DNA, 25 bp, Homo sapien
atggcagaattaagagggtccagaa

SEQ ID NO: 1526344 - DNA, 25 bp, Homo sapien
tgatggcagaattaagagggtccag

SEQ ID NO: 1526345 - DNA, 25 bp, Homo sapien
gatggcagaattaagagggtccaga

SEQ ID NO: 1526346 - DNA, 25 bp, Homo sapien
gagctcacaggagtcatgtggaggc

SEQ ID NO: 1526347 - DNA, 25 bp, Homo sapien
cataagagaccatcagttggtatgc

SEQ ID NO: 1526348 - DNA, 25 bp, Homo sapien
gaacctcgcttaaattccatgatga

SEQ ID NO: 1526349 - DNA, 25 bp, Homo sapien
aatgatcattctacagagctcacag

SEQ ID NO: 1526350 - DNA, 25 bp, Homo sapien
agcagtctgcgtggcgcccagagct

SEQ ID NO: 1526351 - DNA, 25 bp, Homo sapien
gagcgcccgcgtttctgctgatcct

SEQ ID NO: 1526352 - DNA, 25 bp, Homo sapien
tttctgctgatcctacttcctggtg

SEQ ID NO: 1526353 - DNA, 25 bp, Homo sapien
ctggcaccagttgtgagcgcccgcg

SEQ ID NO: 1526354 - DNA, 25 bp, Homo sapien
gccctgcgggtagaggcctaaggaa

SEQ ID NO: 1526355 - DNA, 25 bp, Homo sapien
gaagcacccaccaggcacggtaggg

SEQ ID NO: 1526356 - DNA, 25 bp, Homo sapien
aggtgaggaagcacccaccaggcac

SEQ ID NO: 1526357 - DNA, 25 bp, Homo sapien
ctgggcaaaagagcagccccgttgt

SEQ ID NO: 1526358 - DNA, 25 bp, Homo sapien
ccacaagccggcgtggggaccacag

SEQ ID NO: 1526359 - DNA, 25 bp, Homo sapien
gacctgcgacctcgcgctctgggtg

SEQ ID NO: 1526360 - DNA, 25 bp, Homo sapien
acgtcagggcctccggcatgagtac

SEQ ID NO: 1526361 - DNA, 25 bp, Homo sapien
gcagagggcgccgactcaagagggc

SEQ ID NO: 1526362 - DNA, 25 bp, Homo sapien
gtagggcctcactgtgcgggcacag

SEQ ID NO: 1526363 - DNA, 25 bp, Homo sapien
gaggcggcccgcgggtagggcctca

SEQ ID NO: 1526364 - DNA, 25 bp, Homo sapien
tgtggcggctgcctcggcgacgcga

SEQ ID NO: 1526365 - DNA, 25 bp, Homo sapien
acgcgaccgggggtaggacagcgct

SEQ ID NO: 1526366 - DNA, 25 bp, Homo sapien
gcagtcagaggtaggcggccattgg

SEQ ID NO: 1526367 - DNA, 25 bp, Homo sapien
cggccattgggtagggcaggacagt

SEQ ID NO: 1526368 - DNA, 25 bp, Homo sapien
agttccctccttcggtgcccagaag

SEQ ID NO: 1526369 - DNA, 25 bp, Homo sapien
aggcagccggcgggcggtagtggag

SEQ ID NO: 1526370 - DNA, 25 bp, Homo sapien
ctgggcggtggcagcggctgccacg

SEQ ID NO: 1526371 - DNA, 25 bp, Homo sapien
cggtggcagcggctgccacggtgga

SEQ ID NO: 1526372 - DNA, 25 bp, Homo sapien
ggtggcagcggctgccacggtggag

SEQ ID NO: 1526373 - DNA, 25 bp, Homo sapien
ggcggtggcagcggctgccacggtg

SEQ ID NO: 1526374 - DNA, 25 bp, Homo sapien
cagtgtagactgcataggccatttt

SEQ ID NO: 1526375 - DNA, 25 bp, Homo sapien
cccgaaacttatatggaaatgctgt

SEQ ID NO: 1526376 - DNA, 25 bp, Homo sapien
cttgctgatgtagggactttctggg

SEQ ID NO: 1526377 - DNA, 25 bp, Homo sapien
tccacagatcacactcagcagtgta

SEQ ID NO: 1526378 - DNA, 25 bp, Homo sapien
tgattccactggcaaggcatgtcca

SEQ ID NO: 1526379 - DNA, 25 bp, Homo sapien
tatgaaagtctacgtgcacaacaag

SEQ ID NO: 1526380 - DNA, 25 bp, Homo sapien
aataggaaaacctcacattgctggt

SEQ ID NO: 1526381 - DNA, 25 bp, Homo sapien
tagtgcagccagttaaaacacaatg

SEQ ID NO: 1526382 - DNA, 25 bp, Homo sapien
gcaaatgtgaggcctggttagtcat

SEQ ID NO: 1526383 - DNA, 25 bp, Homo sapien
tgcaaatgtgaggcctggttagtca

SEQ ID NO: 1526384 - DNA, 25 bp, Homo sapien
taacaatcacatggcataggaccag

SEQ ID NO: 1526385 - DNA, 25 bp, Homo sapien
ggcataggaccagaagaatgatgat

SEQ ID NO: 1526386 - DNA, 25 bp, Homo sapien
tcagtaacaatcacatggcatagga

SEQ ID NO: 1526387 - DNA, 25 bp, Homo sapien
tcacatggcataggaccagaagaat

SEQ ID NO: 1526388 - DNA, 25 bp, Homo sapien
tttagcaccttccaccaaagcagct

SEQ ID NO: 1526389 - DNA, 25 bp, Homo sapien
ctttttagcaccttccaccaaagca

SEQ ID NO: 1526390 - DNA, 25 bp, Homo sapien
tgtacaaagcccagctttttagcac

SEQ ID NO: 1526391 - DNA, 25 bp, Homo sapien
acaaagcccagctttttagcacctt

SEQ ID NO: 1526392 - DNA, 25 bp, Homo sapien
cttctatgatgaccgaatatggtgt

SEQ ID NO: 1526393 - DNA, 25 bp, Homo sapien
tgcttctatgatgaccgaatatggt

SEQ ID NO: 1526394 - DNA, 25 bp, Homo sapien
tctatgatgaccgaatatggtgttc

SEQ ID NO: 1526395 - DNA, 25 bp, Homo sapien
gcttctatgatgaccgaatatggtg

SEQ ID NO: 1526396 - DNA, 25 bp, Homo sapien
tttaaaagtgtctcacaaaatacac

SEQ ID NO: 1526397 - DNA, 25 bp, Homo sapien
tccagatggcataatgtttcctcca

SEQ ID NO: 1526398 - DNA, 25 bp, Homo sapien
cagcgtaagccacagagtgcacaag

SEQ ID NO: 1526399 - DNA, 25 bp, Homo sapien
tcctcataatcatcctcagagagaa

SEQ ID NO: 1526400 - DNA, 25 bp, Homo sapien
tcctcagagagaacagcgtaagcca

SEQ ID NO: 1526401 - DNA, 25 bp, Homo sapien
aatgtgttgctggcttcttgatagc

SEQ ID NO: 1526402 - DNA, 25 bp, Homo sapien
tgttcggtagctgcttaagtccttc

SEQ ID NO: 1526403 - DNA, 25 bp, Homo sapien
gtggttaacttctcaatgatctgac

SEQ ID NO: 1526404 - DNA, 25 bp, Homo sapien
tcaaagattttgttcggtagctgct

SEQ ID NO: 1526405 - DNA, 25 bp, Homo sapien
gaaggatgcctgttcaaagattttg

SEQ ID NO: 1526406 - DNA, 25 bp, Homo sapien
ttctggaatctcttggtcatggatg

SEQ ID NO: 1526407 - DNA, 25 bp, Homo sapien
tctcttggtcatggatgtggtgtac

SEQ ID NO: 1526408 - DNA, 25 bp, Homo sapien
tcttggtcatggatgtggtgtacat

SEQ ID NO: 1526409 - DNA, 25 bp, Homo sapien
gaatctcttggtcatggatgtggtg

SEQ ID NO: 1526410 - DNA, 25 bp, Homo sapien
ggcacacgtggagctcctttgtgcc

SEQ ID NO: 1526411 - DNA, 25 bp, Homo sapien
cgcagttcatctgggacttcccaag

SEQ ID NO: 1526412 - DNA, 25 bp, Homo sapien
cagtcaatcgcagttcatctgggac

SEQ ID NO: 1526413 - DNA, 25 bp, Homo sapien
ggttggccagtcaatcgcagttcat

SEQ ID NO: 1526414 - DNA, 25 bp, Homo sapien
cgagaggttggccagtcaatcgcag

SEQ ID NO: 1526415 - DNA, 25 bp, Homo sapien
cttggatcatcagaagggtttggct

SEQ ID NO: 1526416 - DNA, 25 bp, Homo sapien
ttggatcatcagaagggtttggctc

SEQ ID NO: 1526417 - DNA, 25 bp, Homo sapien
tcttcttggtggaaaaaacagtgtc

SEQ ID NO: 1526418 - DNA, 25 bp, Homo sapien
tcaagctgaagcctaaattctatca

SEQ ID NO: 1526419 - DNA, 25 bp, Homo sapien
ggtgttgccaaaaggtagcaaaatg

SEQ ID NO: 1526420 - DNA, 25 bp, Homo sapien
cactcattatgacagagagttttca

SEQ ID NO: 1526421 - DNA, 25 bp, Homo sapien
gtcgttgctctttctcttttcttga

SEQ ID NO: 1526422 - DNA, 25 bp, Homo sapien
tcgttgctctttctcttttcttgaa

SEQ ID NO: 1526423 - DNA, 25 bp, Homo sapien
tagaagaaaacatcacagtaagtta

SEQ ID NO: 1526424 - DNA, 25 bp, Homo sapien
gaagaaaacatcacagtaagttaaa

SEQ ID NO: 1526425 - DNA, 25 bp, Homo sapien
aatagaagaaaacatcacagtaagt

SEQ ID NO: 1526426 - DNA, 25 bp, Homo sapien
aaatagaagaaaacatcacagtaag

SEQ ID NO: 1526427 - DNA, 25 bp, Homo sapien
gaacacgagctgtactttttagtaa

SEQ ID NO: 1526428 - DNA, 25 bp, Homo sapien
tgctgtcatctaggtatatggttga

SEQ ID NO: 1526429 - DNA, 25 bp, Homo sapien
tctaggtatatggttgaacacgagc

SEQ ID NO: 1526430 - DNA, 25 bp, Homo sapien
tatggttgaacacgagctgtacttt

SEQ ID NO: 1526431 - DNA, 25 bp, Homo sapien
cttcatgtgataatatattgctaag

SEQ ID NO: 1526432 - DNA, 25 bp, Homo sapien
gtgataatatattgctaaggccaca

SEQ ID NO: 1526433 - DNA, 25 bp, Homo sapien
ttttcttcatgtgataatatattgc

SEQ ID NO: 1526434 - DNA, 25 bp, Homo sapien
tcatgtgataatatattgctaaggc

SEQ ID NO: 1526435 - DNA, 25 bp, Homo sapien
gtcaaacatatcgagggatttatct

SEQ ID NO: 1526436 - DNA, 25 bp, Homo sapien
atgtaattgctcgtcaaacatatcg

SEQ ID NO: 1526437 - DNA, 25 bp, Homo sapien
gtgagtggatgtaattgctcgtcaa

SEQ ID NO: 1526438 - DNA, 25 bp, Homo sapien
catatcgagggatttatctgcatct

SEQ ID NO: 1526439 - DNA, 25 bp, Homo sapien
aattcagctgttaggtttgtggctt

SEQ ID NO: 1526440 - DNA, 25 bp, Homo sapien
cagctgttaggtttgtggctttaaa

SEQ ID NO: 1526441 - DNA, 25 bp, Homo sapien
tcagctgttaggtttgtggctttaa

SEQ ID NO: 1526442 - DNA, 25 bp, Homo sapien
attcagctgttaggtttgtggcttt

SEQ ID NO: 1526443 - DNA, 25 bp, Homo sapien
ctatgtaaatatgcaaaatagagca

SEQ ID NO: 1526444 - DNA, 25 bp, Homo sapien
tggtcgggcaaaggtctatctccac

SEQ ID NO: 1526445 - DNA, 25 bp, Homo sapien
tcacaaagagcctgcagtattccct

SEQ ID NO: 1526446 - DNA, 25 bp, Homo sapien
acaatctcttccagttggtcgggca

SEQ ID NO: 1526447 - DNA, 25 bp, Homo sapien
gagcctgcagtattccctattccat

SEQ ID NO: 1526448 - DNA, 25 bp, Homo sapien
ccagaaacttcgacgttatagtcaa

SEQ ID NO: 1526449 - DNA, 25 bp, Homo sapien
tagtacttggcataaacacttccag

SEQ ID NO: 1526450 - DNA, 25 bp, Homo sapien
tagtcaattagctgcaaaaactgtc

SEQ ID NO: 1526451 - DNA, 25 bp, Homo sapien
gcaagctattgtcctttgccaagga

SEQ ID NO: 1526452 - DNA, 25 bp, Homo sapien
gcatgagaggtaatattttccgaac

SEQ ID NO: 1526453 - DNA, 25 bp, Homo sapien
aattatcagcgctgaaggaccttca

SEQ ID NO: 1526454 - DNA, 25 bp, Homo sapien
gagtgcaatcctagttgcccacaag

SEQ ID NO: 1526455 - DNA, 25 bp, Homo sapien
gggttcacatgatatagcccctcat

SEQ ID NO: 1526456 - DNA, 25 bp, Homo sapien
catatatacataagctgccgtgcac

SEQ ID NO: 1526457 - DNA, 25 bp, Homo sapien
tggagggtctaagcacactacatta

SEQ ID NO: 1526458 - DNA, 25 bp, Homo sapien
atactatgaaacttttgaacggtat

SEQ ID NO: 1526459 - DNA, 25 bp, Homo sapien
agctgccgtgcactggagggtctaa

SEQ ID NO: 1526460 - DNA, 25 bp, Homo sapien
tcagcgtttcttggagacagcagat

SEQ ID NO: 1526461 - DNA, 25 bp, Homo sapien
gattctcccacttaagactcatgag

SEQ ID NO: 1526462 - DNA, 25 bp, Homo sapien
ttctcccacttaagactcatgagta

SEQ ID NO: 1526463 - DNA, 25 bp, Homo sapien
tctcccacttaagactcatgagtag

SEQ ID NO: 1526464 - DNA, 25 bp, Homo sapien
gtgattctcccacttaagactcatg

SEQ ID NO: 1526465 - DNA, 25 bp, Homo sapien
taggtgatcaacgtagataacagcc

SEQ ID NO: 1526466 - DNA, 25 bp, Homo sapien
gataacagccctgctaagaactact

SEQ ID NO: 1526467 - DNA, 25 bp, Homo sapien
tgaaatataatacctgtagccaggc

SEQ ID NO: 1526468 - DNA, 25 bp, Homo sapien
taatcacctgctactattagggtcc

SEQ ID NO: 1526469 - DNA, 25 bp, Homo sapien
tgaataaatttatccgaggaggtga

SEQ ID NO: 1526470 - DNA, 25 bp, Homo sapien
agtatgtcaattcctgaccagagca

SEQ ID NO: 1526471 - DNA, 25 bp, Homo sapien
ggtgaaagaatttccgtgaagagct

SEQ ID NO: 1526472 - DNA, 25 bp, Homo sapien
agctggaactggtcaagaatgcaca

SEQ ID NO: 1526473 - DNA, 25 bp, Homo sapien
gagacagctttctatgcctaagaga

SEQ ID NO: 1526474 - DNA, 25 bp, Homo sapien
caagagaccatgacctcccttggtg

SEQ ID NO: 1526475 - DNA, 25 bp, Homo sapien
cctggtgagagcatcgtctgtgtct

SEQ ID NO: 1526476 - DNA, 25 bp, Homo sapien
tgggtcctccgtaatgcaggtggca

SEQ ID NO: 1526477 - DNA, 25 bp, Homo sapien
tcctgatggattaagactctgctgc

SEQ ID NO: 1526478 - DNA, 25 bp, Homo sapien
tttgtctattccacacccatggcag

SEQ ID NO: 1526479 - DNA, 25 bp, Homo sapien
caatcagtaagatccagtgtgtgag

SEQ ID NO: 1526480 - DNA, 25 bp, Homo sapien
ttagacctcctgcaagcaaggatgc

SEQ ID NO: 1526481 - DNA, 25 bp, Homo sapien
tgaaatacaccgtcttacagttttc

SEQ ID NO: 1526482 - DNA, 25 bp, Homo sapien
tgaaccctgggctcgtcctgatgag

SEQ ID NO: 1526483 - DNA, 25 bp, Homo sapien
cccaatgaggtcagttgtgaacatc

SEQ ID NO: 1526484 - DNA, 25 bp, Homo sapien
cggtgagggcagctatgaaccctgg

SEQ ID NO: 1526485 - DNA, 25 bp, Homo sapien
tgcatgggcccaatgaggtcagttg

SEQ ID NO: 1526486 - DNA, 25 bp, Homo sapien
agttcagcataggtgtttatagcca

SEQ ID NO: 1526487 - DNA, 25 bp, Homo sapien
gggccagccaaggtattatagccag

SEQ ID NO: 1526488 - DNA, 25 bp, Homo sapien
tcacagctgatctcatggagttcag

SEQ ID NO: 1526489 - DNA, 25 bp, Homo sapien
ggtattatagccaggtgttcacagc

SEQ ID NO: 1526490 - DNA, 25 bp, Homo sapien
attcacatggtgccagttcaggtgt

SEQ ID NO: 1526491 - DNA, 25 bp, Homo sapien
ttcacatggtgccagttcaggtgtt

SEQ ID NO: 1526492 - DNA, 25 bp, Homo sapien
tgatggctttggaaagtgagttgtg

SEQ ID NO: 1526493 - DNA, 25 bp, Homo sapien
gatggctttggaaagtgagttgtgg

SEQ ID NO: 1526494 - DNA, 25 bp, Homo sapien
ggctttggaaagtgagttgtggact

SEQ ID NO: 1526495 - DNA, 25 bp, Homo sapien
tggctttggaaagtgagttgtggac

SEQ ID NO: 1526496 - DNA, 25 bp, Homo sapien
tttagccaggcattctctagtgctg

SEQ ID NO: 1526497 - DNA, 25 bp, Homo sapien
aaaggagatggtgacaagatgcctc

SEQ ID NO: 1526498 - DNA, 25 bp, Homo sapien
gacaagatgcctctgcacaacctcg

SEQ ID NO: 1526499 - DNA, 25 bp, Homo sapien
aacctcgccatggttttggccccat

SEQ ID NO: 1526500 - DNA, 25 bp, Homo sapien
gagaagggcggcagaaaaggagatg

SEQ ID NO: 1526501 - DNA, 25 bp, Homo sapien
tggaggccaacctggtgaccttcct

SEQ ID NO: 1526502 - DNA, 25 bp, Homo sapien
cttaaccgagggcattgctctttca

SEQ ID NO: 1526503 - DNA, 25 bp, Homo sapien
agctgcatactcaacctgccgctgt

SEQ ID NO: 1526504 - DNA, 25 bp, Homo sapien
gcatactcaacctgccgctgtttct

SEQ ID NO: 1526505 - DNA, 25 bp, Homo sapien
tatcagcagttggaggctgcagaac

SEQ ID NO: 1526506 - DNA, 25 bp, Homo sapien
cagcagatattggtgaactgcaaat

SEQ ID NO: 1526507 - DNA, 25 bp, Homo sapien
aacagcagatattggtgaactgcaa

SEQ ID NO: 1526508 - DNA, 25 bp, Homo sapien
cctgggtatcagcagttggaggctg

SEQ ID NO: 1526509 - DNA, 25 bp, Homo sapien
ttgcttctacatgaagccctaaggg

SEQ ID NO: 1526510 - DNA, 25 bp, Homo sapien
gcccacagactaacaaggaacttga

SEQ ID NO: 1526511 - DNA, 25 bp, Homo sapien
tggacttcagtccatttctacttag

SEQ ID NO: 1526512 - DNA, 25 bp, Homo sapien
tgcacaaagtggcactggttcacat

SEQ ID NO: 1526513 - DNA, 25 bp, Homo sapien
taggtggtccatgtgactccagggc

SEQ ID NO: 1526514 - DNA, 25 bp, Homo sapien
tgctgctgggtgtgtactctagtct

SEQ ID NO: 1526515 - DNA, 25 bp, Homo sapien
tctttgattcctgcacagttgagat

SEQ ID NO: 1526516 - DNA, 25 bp, Homo sapien
gcctatcacttgtggccccattctg

SEQ ID NO: 1526517 - DNA, 25 bp, Homo sapien
tgaagtttaacccatctgtccaaat

SEQ ID NO: 1526518 - DNA, 25 bp, Homo sapien
ttgtctgaagtttaacccatctgtc

SEQ ID NO: 1526519 - DNA, 25 bp, Homo sapien
ctgtccaaattttcgggttgatggg

SEQ ID NO: 1526520 - DNA, 25 bp, Homo sapien
tgatggggatacctggccacccagt

SEQ ID NO: 1526521 - DNA, 25 bp, Homo sapien
ctgacgcgcatcctgtgagcacctg

SEQ ID NO: 1526522 - DNA, 25 bp, Homo sapien
cctgtgagcacctgctggtggcatt

SEQ ID NO: 1526523 - DNA, 25 bp, Homo sapien
tggcattgattccatgctcccagga

SEQ ID NO: 1526524 - DNA, 25 bp, Homo sapien
gctcccaggaccatcagaagctgct

SEQ ID NO: 1526525 - DNA, 25 bp, Homo sapien
gggtgtgcccatcatttcctggaag

SEQ ID NO: 1526526 - DNA, 25 bp, Homo sapien
ttgccatggctgcttgggtccacag

SEQ ID NO: 1526527 - DNA, 25 bp, Homo sapien
tgagttctgaatcttggaattctac

SEQ ID NO: 1526528 - DNA, 25 bp, Homo sapien
tcttggaattctacaggcattgagg

SEQ ID NO: 1526529 - DNA, 25 bp, Homo sapien
tattgacataatctgcattcagatc

SEQ ID NO: 1526530 - DNA, 25 bp, Homo sapien
tcccctttagcaataaagacagaag

SEQ ID NO: 1526531 - DNA, 25 bp, Homo sapien
taacatgaatcaaatacagcttggc

SEQ ID NO: 1526532 - DNA, 25 bp, Homo sapien
ttggctcgattcaacgcaacccagc

SEQ ID NO: 1526533 - DNA, 25 bp, Homo sapien
gagtagattttcctggccccacttg

SEQ ID NO: 1526534 - DNA, 25 bp, Homo sapien
cagggcctgcgaagatgctgtcaca

SEQ ID NO: 1526535 - DNA, 25 bp, Homo sapien
gtggacctttatgacccctcttgag

SEQ ID NO: 1526536 - DNA, 25 bp, Homo sapien
agtctctcttggtggcttgaaggtt

SEQ ID NO: 1526537 - DNA, 25 bp, Homo sapien
agtgtatttacatcatacttccttc

SEQ ID NO: 1526538 - DNA, 25 bp, Homo sapien
cagcactctggtttgcctgcgccat

SEQ ID NO: 1526539 - DNA, 25 bp, Homo sapien
tcctcttgcaggtgtaaacagccag

SEQ ID NO: 1526540 - DNA, 25 bp, Homo sapien
tttattccgtctgttgctacagcaa

SEQ ID NO: 1526541 - DNA, 25 bp, Homo sapien
tctgatactgtgaagtgtctgtgag

SEQ ID NO: 1526542 - DNA, 25 bp, Homo sapien
ggacactatgccaggcttctctacc

SEQ ID NO: 1526543 - DNA, 25 bp, Homo sapien
gcttctctaccttatgccttttcca

SEQ ID NO: 1526544 - DNA, 25 bp, Homo sapien
ggaagagacaagttaacaggcacac

SEQ ID NO: 1526545 - DNA, 25 bp, Homo sapien
gttaacaggcacactggacactatg

SEQ ID NO: 1526546 - DNA, 25 bp, Homo sapien
tcagggcattctctcccatgaggca

SEQ ID NO: 1526547 - DNA, 25 bp, Homo sapien
gcacacagcttagtatcagggcatt

SEQ ID NO: 1526548 - DNA, 25 bp, Homo sapien
tgcttccaggacagtgcatccgagg

SEQ ID NO: 1526549 - DNA, 25 bp, Homo sapien
tgacgaaaattggtcccatggagca

SEQ ID NO: 1526550 - DNA, 25 bp, Homo sapien
tgagagaccagggaattttctggcc

SEQ ID NO: 1526551 - DNA, 25 bp, Homo sapien
gaattttctggccaacatccatggg

SEQ ID NO: 1526552 - DNA, 25 bp, Homo sapien
ggaattttctggccaacatccatgg

SEQ ID NO: 1526553 - DNA, 25 bp, Homo sapien
tctgggttgtttctagggagcccca

SEQ ID NO: 1526554 - DNA, 25 bp, Homo sapien
ttgtttctagggagccccacaggct

SEQ ID NO: 1526555 - DNA, 25 bp, Homo sapien
tcactcaggcaagagccagctttgt

SEQ ID NO: 1526556 - DNA, 25 bp, Homo sapien
gtctctgagtatgtctacacctttt

SEQ ID NO: 1526557 - DNA, 25 bp, Homo sapien
gttgtgcatgtcagccgcacacaga

SEQ ID NO: 1526558 - DNA, 25 bp, Homo sapien
ggattataggaacccttgccctcag

SEQ ID NO: 1526559 - DNA, 25 bp, Homo sapien
ggttatcccactggatacctacaag

SEQ ID NO: 1526560 - DNA, 25 bp, Homo sapien
tcccactggatacctacaaggtttg

SEQ ID NO: 1526561 - DNA, 25 bp, Homo sapien
agacatgtggggcaccccggcagaa

SEQ ID NO: 1526562 - DNA, 25 bp, Homo sapien
gaggacgtggagccaacaacatcta

SEQ ID NO: 1526563 - DNA, 25 bp, Homo sapien
ggacgtggagccaacaacatctatt

SEQ ID NO: 1526564 - DNA, 25 bp, Homo sapien
agctgacgtgggtagaatgaggacg

SEQ ID NO: 1526565 - DNA, 25 bp, Homo sapien
cttgaaagcttttcataagggccat

SEQ ID NO: 1526566 - DNA, 25 bp, Homo sapien
gtacatttagagatgactcttgaaa

SEQ ID NO: 1526567 - DNA, 25 bp, Homo sapien
aaagtacatttagagatgactcttg

SEQ ID NO: 1526568 - DNA, 25 bp, Homo sapien
agcttttcataagggccatttaaag

SEQ ID NO: 1526569 - DNA, 25 bp, Homo sapien
gcttccttgtatgacaccatgcttg

SEQ ID NO: 1526570 - DNA, 25 bp, Homo sapien
ctcgcagcttccttgtatgacacca

SEQ ID NO: 1526571 - DNA, 25 bp, Homo sapien
tacatgtgctgtcttcaggttggcc

SEQ ID NO: 1526572 - DNA, 25 bp, Homo sapien
ctgggctagatcaccaagagagacg

SEQ ID NO: 1526573 - DNA, 25 bp, Homo sapien
gacgtagccagagcctacatgtgct

SEQ ID NO: 1526574 - DNA, 25 bp, Homo sapien
tgctaaagacctccctcattatggg

SEQ ID NO: 1526575 - DNA, 25 bp, Homo sapien
tctcttcttcaaattcctgtagcac

SEQ ID NO: 1526576 - DNA, 25 bp, Homo sapien
ctctcttcttcaaattcctgtagca

SEQ ID NO: 1526577 - DNA, 25 bp, Homo sapien
gcctgaaagtctctggtccgaactg

SEQ ID NO: 1526578 - DNA, 25 bp, Homo sapien
ggaagcctgaaagtctctggtccga

SEQ ID NO: 1526579 - DNA, 25 bp, Homo sapien
ctgaaagtctctggtccgaactgac

SEQ ID NO: 1526580 - DNA, 25 bp, Homo sapien
aagcctgaaagtctctggtccgaac

SEQ ID NO: 1526581 - DNA, 25 bp, Homo sapien
aaggagtaatttgttaagtagagag

SEQ ID NO: 1526582 - DNA, 25 bp, Homo sapien
aggagtaatttgttaagtagagaga

SEQ ID NO: 1526583 - DNA, 25 bp, Homo sapien
tggccttatcaggcgaaagtgagct

SEQ ID NO: 1526584 - DNA, 25 bp, Homo sapien
ctggccttatcaggcgaaagtgagc

SEQ ID NO: 1526585 - DNA, 25 bp, Homo sapien
tcatctttggcactcagcagataat

SEQ ID NO: 1526586 - DNA, 25 bp, Homo sapien
cgggcttctcatcaatcactccctg

SEQ ID NO: 1526587 - DNA, 25 bp, Homo sapien
ggcactcagcagataataatttctg

SEQ ID NO: 1526588 - DNA, 25 bp, Homo sapien
tgatttcttttctgtgcacgggctt

SEQ ID NO: 1526589 - DNA, 25 bp, Homo sapien
ccccacaagccccagatgctgcacc

SEQ ID NO: 1526590 - DNA, 25 bp, Homo sapien
ccacaagccccagatgctgcaccat

SEQ ID NO: 1526591 - DNA, 25 bp, Homo sapien
gcttcctccccacaagccccagatg

SEQ ID NO: 1526592 - DNA, 25 bp, Homo sapien
tcctccccacaagccccagatgctg

SEQ ID NO: 1526593 - DNA, 25 bp, Homo sapien
taggagagaatcagtgctgggccca

SEQ ID NO: 1526594 - DNA, 25 bp, Homo sapien
cccaggtaggagagaatcagtgctg

SEQ ID NO: 1526595 - DNA, 25 bp, Homo sapien
ggtaggagagaatcagtgctgggcc

SEQ ID NO: 1526596 - DNA, 25 bp, Homo sapien
gggcccaggtaggagagaatcagtg

SEQ ID NO: 1526597 - DNA, 25 bp, Homo sapien
ctgggaagatgggaaactgggtcgg

SEQ ID NO: 1526598 - DNA, 25 bp, Homo sapien
aagatgggaaactgggtcggtaatg

SEQ ID NO: 1526599 - DNA, 25 bp, Homo sapien
ttccttgcgagacctggtgaggctg

SEQ ID NO: 1526600 - DNA, 25 bp, Homo sapien
agagctatagcctgcttcccaacag

SEQ ID NO: 1526601 - DNA, 25 bp, Homo sapien
catttgcggctcagcagtgtcagag

SEQ ID NO: 1526602 - DNA, 25 bp, Homo sapien
cccagacaggacttcacatttgcgg

SEQ ID NO: 1526603 - DNA, 25 bp, Homo sapien
gaaagcccttgaagtctctgtttcc

SEQ ID NO: 1526604 - DNA, 25 bp, Homo sapien
tttgggaaagcccttgaagtctctg

SEQ ID NO: 1526605 - DNA, 25 bp, Homo sapien
tcctgtgaagatgacaatttctgct

SEQ ID NO: 1526606 - DNA, 25 bp, Homo sapien
ctgtttcctgtgaagatgacaattt

SEQ ID NO: 1526607 - DNA, 25 bp, Homo sapien
ccatagcgcagcttctagatgtgct

SEQ ID NO: 1526608 - DNA, 25 bp, Homo sapien
ttccagagggttccaaggaagcgtg

SEQ ID NO: 1526609 - DNA, 25 bp, Homo sapien
ttggaaaatgccatagcgcagcttc

SEQ ID NO: 1526610 - DNA, 25 bp, Homo sapien
aatgccatagcgcagcttctagatg

SEQ ID NO: 1526611 - DNA, 25 bp, Homo sapien
gctggacatgtatcctaagccccta

SEQ ID NO: 1526612 - DNA, 25 bp, Homo sapien
tggggcagctggacatgtatcctaa

SEQ ID NO: 1526613 - DNA, 25 bp, Homo sapien
cagctggacatgtatcctaagcccc

SEQ ID NO: 1526614 - DNA, 25 bp, Homo sapien
gggcagctggacatgtatcctaagc

SEQ ID NO: 1526615 - DNA, 25 bp, Homo sapien
cattgctttcgttgttgagagttcc

SEQ ID NO: 1526616 - DNA, 25 bp, Homo sapien
ccttaagcaaggcagcttcattgct

SEQ ID NO: 1526617 - DNA, 25 bp, Homo sapien
ctttcctccttaagcaaggcagctt

SEQ ID NO: 1526618 - DNA, 25 bp, Homo sapien
tggaaacttggtcaccaccatcctt

SEQ ID NO: 1526619 - DNA, 25 bp, Homo sapien
ccagagctacctggcagaatcctgg

SEQ ID NO: 1526620 - DNA, 25 bp, Homo sapien
gcccagagctacctggcagaatcct

SEQ ID NO: 1526621 - DNA, 25 bp, Homo sapien
tgatgtgcgggagtgtgtggcagca

SEQ ID NO: 1526622 - DNA, 25 bp, Homo sapien
cagcaggtggcagttgtcttgatga

SEQ ID NO: 1526623 - DNA, 25 bp, Homo sapien
cttgcctgtgggccccatatttcac

SEQ ID NO: 1526624 - DNA, 25 bp, Homo sapien
gttgactaacagcttcgatttccag

SEQ ID NO: 1526625 - DNA, 25 bp, Homo sapien
gaactgcgaaatcctcattatgtga

SEQ ID NO: 1526626 - DNA, 25 bp, Homo sapien
tatgtgaaatgccaattcgaagccc

SEQ ID NO: 1526627 - DNA, 25 bp, Homo sapien
gatgtcaccgaatgcttgcttaatg

SEQ ID NO: 1526628 - DNA, 25 bp, Homo sapien
ttctgggaatttccatgtgcttgag

SEQ ID NO: 1526629 - DNA, 25 bp, Homo sapien
tccatgtgcttgagggatccagtgg

SEQ ID NO: 1526630 - DNA, 25 bp, Homo sapien
cagtggctgttatcatctgtggtgc

SEQ ID NO: 1526631 - DNA, 25 bp, Homo sapien
gatcatgggatgcatctgtgagcat

SEQ ID NO: 1526632 - DNA, 25 bp, Homo sapien
gtaacttagcgtgtttgtgcatcca

SEQ ID NO: 1526633 - DNA, 25 bp, Homo sapien
gactcttgtgattaaagttagaagc

SEQ ID NO: 1526634 - DNA, 25 bp, Homo sapien
gtttgtgcatccatgactcttgtga

SEQ ID NO: 1526635 - DNA, 25 bp, Homo sapien
ttacacttgtaacttagcgtgtttg

SEQ ID NO: 1526636 - DNA, 25 bp, Homo sapien
tttgtggtccgactttaattctcat

SEQ ID NO: 1526637 - DNA, 25 bp, Homo sapien
tctttgtggtccgactttaattctc

SEQ ID NO: 1526638 - DNA, 25 bp, Homo sapien
tccctgcaggttgcttctttgtggt

SEQ ID NO: 1526639 - DNA, 25 bp, Homo sapien
ccctgcaggttgcttctttgtggtc

SEQ ID NO: 1526640 - DNA, 25 bp, Homo sapien
gaacccatggaagatgttccaggcc

SEQ ID NO: 1526641 - DNA, 25 bp, Homo sapien
gagggagagctcttgaggaacccat

SEQ ID NO: 1526642 - DNA, 25 bp, Homo sapien
tcttgaggaacccatggaagatgtt

SEQ ID NO: 1526643 - DNA, 25 bp, Homo sapien
catggaagatgttccaggccacatg

SEQ ID NO: 1526644 - DNA, 25 bp, Homo sapien
cagtgagtaagttggccttctcaaa

SEQ ID NO: 1526645 - DNA, 25 bp, Homo sapien
ccaccagtgagtaagttggccttct

SEQ ID NO: 1526646 - DNA, 25 bp, Homo sapien
ttgtagcagaccaccagtgagtaag

SEQ ID NO: 1526647 - DNA, 25 bp, Homo sapien
cagaccaccagtgagtaagttggcc

SEQ ID NO: 1526648 - DNA, 25 bp, Homo sapien
accttgtccaatgccaggaagccag

SEQ ID NO: 1526649 - DNA, 25 bp, Homo sapien
gatgttgtgactgacacagtaatta

SEQ ID NO: 1526650 - DNA, 25 bp, Homo sapien
gacacagtaattatgggtttttgca

SEQ ID NO: 1526651 - DNA, 25 bp, Homo sapien
ttctgcagggatgttgtgactgaca

SEQ ID NO: 1526652 - DNA, 25 bp, Homo sapien
taagtcagtgtctgcaagatctgcc

SEQ ID NO: 1526653 - DNA, 25 bp, Homo sapien
tgcaagccccaagattagatctgct

SEQ ID NO: 1526654 - DNA, 25 bp, Homo sapien
gaggaatcatttggtcgcccttgag

SEQ ID NO: 1526655 - DNA, 25 bp, Homo sapien
gaagattgacagtcagcgctgacat

SEQ ID NO: 1526656 - DNA, 25 bp, Homo sapien
gggctgctttcacccaaaacctaga

SEQ ID NO: 1526657 - DNA, 25 bp, Homo sapien
cagtgactcacctcacccttgtaaa

SEQ ID NO: 1526658 - DNA, 25 bp, Homo sapien
agaagagggtggctatttctgtaga

SEQ ID NO: 1526659 - DNA, 25 bp, Homo sapien
ctagaagagggtggctatttctgta

SEQ ID NO: 1526660 - DNA, 25 bp, Homo sapien
tgccatgcaattcgctgccggaaaa

SEQ ID NO: 1526661 - DNA, 25 bp, Homo sapien
catgcaattcgctgccggaaaactc

SEQ ID NO: 1526662 - DNA, 25 bp, Homo sapien
gatttgccatgcaattcgctgccgg

SEQ ID NO: 1526663 - DNA, 25 bp, Homo sapien
ttgcccagatttgccatgcaattcg

SEQ ID NO: 1526664 - DNA, 25 bp, Homo sapien
tctacttggagtctcgggctgccca

SEQ ID NO: 1526665 - DNA, 25 bp, Homo sapien
aggccctcttgattgtctacttgga

SEQ ID NO: 1526666 - DNA, 25 bp, Homo sapien
tcagggtcatggtcacttgtgagca

SEQ ID NO: 1526667 - DNA, 25 bp, Homo sapien
gagttgcggcagcacctcagttctc

SEQ ID NO: 1526668 - DNA, 25 bp, Homo sapien
ttctgcagggtgtccttacatttta

SEQ ID NO: 1526669 - DNA, 25 bp, Homo sapien
cattttatccgttccccatcctctc

SEQ ID NO: 1526670 - DNA, 25 bp, Homo sapien
gttccccatcctctctgttcagcca

SEQ ID NO: 1526671 - DNA, 25 bp, Homo sapien
gtttctgcagggtgtccttacattt

SEQ ID NO: 1526672 - DNA, 25 bp, Homo sapien
ctgaagtctccctagttctgctgtg

SEQ ID NO: 1526673 - DNA, 25 bp, Homo sapien
aagtctccctagttctgctgtgtct

SEQ ID NO: 1526674 - DNA, 25 bp, Homo sapien
gaagtctccctagttctgctgtgtc

SEQ ID NO: 1526675 - DNA, 25 bp, Homo sapien
tgaagtctccctagttctgctgtgt

SEQ ID NO: 1526676 - DNA, 25 bp, Homo sapien
tcagagggctttctttggttgagag

SEQ ID NO: 1526677 - DNA, 25 bp, Homo sapien
cagagggctttctttggttgagaga

SEQ ID NO: 1526678 - DNA, 25 bp, Homo sapien
agagggctttctttggttgagagac

SEQ ID NO: 1526679 - DNA, 25 bp, Homo sapien
gagggctttctttggttgagagacc

SEQ ID NO: 1526680 - DNA, 25 bp, Homo sapien
cagacttagagatgccttcttctgg

SEQ ID NO: 1526681 - DNA, 25 bp, Homo sapien
ccttcttctggaactattttcctca

SEQ ID NO: 1526682 - DNA, 25 bp, Homo sapien
ggagcaagccttcagacttagagat

SEQ ID NO: 1526683 - DNA, 25 bp, Homo sapien
cagcagtccttctggagcaagcctt

SEQ ID NO: 1526684 - DNA, 25 bp, Homo sapien
agatctgagatttcccagacacccg

SEQ ID NO: 1526685 - DNA, 25 bp, Homo sapien
ccgtgggccaccagaagctcaagat

SEQ ID NO: 1526686 - DNA, 25 bp, Homo sapien
gatctgagatctgggagatctgaga

SEQ ID NO: 1526687 - DNA, 25 bp, Homo sapien
tgtacataaaaactggtggagatct

SEQ ID NO: 1526688 - DNA, 25 bp, Homo sapien
ttgtcttctgttgctggccccataa

SEQ ID NO: 1526689 - DNA, 25 bp, Homo sapien
taagggcagatacagcatctgttct

SEQ ID NO: 1526690 - DNA, 25 bp, Homo sapien
tgctcatgggtctgtgccttgctga

SEQ ID NO: 1526691 - DNA, 25 bp, Homo sapien
tgcaatcccaggtatattgatttgc

SEQ ID NO: 1526692 - DNA, 25 bp, Homo sapien
cgcagaggcttctcctctctgcagg

SEQ ID NO: 1526693 - DNA, 25 bp, Homo sapien
tcctctccacgcagaggcttctcct

SEQ ID NO: 1526694 - DNA, 25 bp, Homo sapien
ggccccagcgcggcgaacaccttct

SEQ ID NO: 1526695 - DNA, 25 bp, Homo sapien
agcgcggcgaacaccttctctgcag

SEQ ID NO: 1526696 - DNA, 25 bp, Homo sapien
gacacttgtacatgtgggtgtccag

SEQ ID NO: 1526697 - DNA, 25 bp, Homo sapien
ggacacttgtacatgtgggtgtcca

SEQ ID NO: 1526698 - DNA, 25 bp, Homo sapien
ttgaggctctgctctgtgcattgca

SEQ ID NO: 1526699 - DNA, 25 bp, Homo sapien
ctgctcgttgaggctctgctctgtg

SEQ ID NO: 1526700 - DNA, 25 bp, Homo sapien
cgttgaggctctgctctgtgcattg

SEQ ID NO: 1526701 - DNA, 25 bp, Homo sapien
gctcgttgaggctctgctctgtgca

SEQ ID NO: 1526702 - DNA, 25 bp, Homo sapien
ctgcgtatctggcatgaacaatcac

SEQ ID NO: 1526703 - DNA, 25 bp, Homo sapien
tgaacaatcaccacatatccagtat

SEQ ID NO: 1526704 - DNA, 25 bp, Homo sapien
tcaccacatatccagtattcatgtc

SEQ ID NO: 1526705 - DNA, 25 bp, Homo sapien
gtatctggcatgaacaatcaccaca

SEQ ID NO: 1526706 - DNA, 25 bp, Homo sapien
acctgctctatgtgcgtgccgggca

SEQ ID NO: 1526707 - DNA, 25 bp, Homo sapien
gtctagaggcaattatagccaacac

SEQ ID NO: 1526708 - DNA, 25 bp, Homo sapien
tggtggctgattccttgcctccaat

SEQ ID NO: 1526709 - DNA, 25 bp, Homo sapien
gaagtctagaggcaattatagccaa

SEQ ID NO: 1526710 - DNA, 25 bp, Homo sapien
ctctaaggttcagctcacactggga

SEQ ID NO: 1526711 - DNA, 25 bp, Homo sapien
ccacaccaatacctgaggctcgttg

SEQ ID NO: 1526712 - DNA, 25 bp, Homo sapien
cgttgctttgattcaagtccggaca

SEQ ID NO: 1526713 - DNA, 25 bp, Homo sapien
agtccggacaagctctaaggttcag

SEQ ID NO: 1526714 - DNA, 25 bp, Homo sapien
agaaagctggaagtgatgctccagg

SEQ ID NO: 1526715 - DNA, 25 bp, Homo sapien
ctttgggctttgttcacaggtgcag

SEQ ID NO: 1526716 - DNA, 25 bp, Homo sapien
tgggctttgttcacaggtgcagaaa

SEQ ID NO: 1526717 - DNA, 25 bp, Homo sapien
gctccagggagtttatgtctcccca

SEQ ID NO: 1526718 - DNA, 25 bp, Homo sapien
caggtgtaaatttttatactcagtt

SEQ ID NO: 1526719 - DNA, 25 bp, Homo sapien
tatatggatacaagcaaagccacag

SEQ ID NO: 1526720 - DNA, 25 bp, Homo sapien
ccaggtgtaaatttttatactcagt

SEQ ID NO: 1526721 - DNA, 25 bp, Homo sapien
atatatggatacaagcaaagccaca

SEQ ID NO: 1526722 - DNA, 25 bp, Homo sapien
ctgaagctcaatggtctctatgcta

SEQ ID NO: 1526723 - DNA, 25 bp, Homo sapien
cacagtcatctgaagctcaatggtc

SEQ ID NO: 1526724 - DNA, 25 bp, Homo sapien
tgttgcacagtcatctgaagctcaa

SEQ ID NO: 1526725 - DNA, 25 bp, Homo sapien
catctgaagctcaatggtctctatg

SEQ ID NO: 1526726 - DNA, 25 bp, Homo sapien
actccgctgtgtgggagcagaccca

SEQ ID NO: 1526727 - DNA, 25 bp, Homo sapien
gatgcggacagcatgaaccacaggc

SEQ ID NO: 1526728 - DNA, 25 bp, Homo sapien
tgttgttagaacagccagtttccca

SEQ ID NO: 1526729 - DNA, 25 bp, Homo sapien
ctcatgtctcagattggatgcggac

SEQ ID NO: 1526730 - DNA, 25 bp, Homo sapien
caaatgaataggatatttaaaggca

SEQ ID NO: 1526731 - DNA, 25 bp, Homo sapien
atggttggcgtccactctatgcttg

SEQ ID NO: 1526732 - DNA, 25 bp, Homo sapien
gcgtccactctatgcttgccaaatg

SEQ ID NO: 1526733 - DNA, 25 bp, Homo sapien
gccaaatgaataggatatttaaagg

SEQ ID NO: 1526734 - DNA, 25 bp, Homo sapien
gtagaaacttgcactgtagacgggc

SEQ ID NO: 1526735 - DNA, 25 bp, Homo sapien
ttgcactgtagacgggcaggtctct

SEQ ID NO: 1526736 - DNA, 25 bp, Homo sapien
gaaacttgcactgtagacgggcagg

SEQ ID NO: 1526737 - DNA, 25 bp, Homo sapien
tggtagaaacttgcactgtagacgg

SEQ ID NO: 1526738 - DNA, 25 bp, Homo sapien
agcgccacctctccgtgggtctgga

SEQ ID NO: 1526739 - DNA, 25 bp, Homo sapien
tgggatgtaaggttgggtcttccga

SEQ ID NO: 1526740 - DNA, 25 bp, Homo sapien
agccaggactggactgggatgtaag

SEQ ID NO: 1526741 - DNA, 25 bp, Homo sapien
tgggtctggagtcttgaggagccag

SEQ ID NO: 1526742 - DNA, 25 bp, Homo sapien
tttcctcatgtgcttatcactttca

SEQ ID NO: 1526743 - DNA, 25 bp, Homo sapien
tcctcatgtgcttatcactttcatt

SEQ ID NO: 1526744 - DNA, 25 bp, Homo sapien
attttcctcatgtgcttatcacttt

SEQ ID NO: 1526745 - DNA, 25 bp, Homo sapien
ttattttcctcatgtgcttatcact

SEQ ID NO: 1526746 - DNA, 25 bp, Homo sapien
gcttgctgctctgtcgtggcccaca

SEQ ID NO: 1526747 - DNA, 25 bp, Homo sapien
gctgctctgtcgtggcccacaactg

SEQ ID NO: 1526748 - DNA, 25 bp, Homo sapien
gtcgtggcccacaactgtgcctctt

SEQ ID NO: 1526749 - DNA, 25 bp, Homo sapien
tctgtcgtggcccacaactgtgcct

SEQ ID NO: 1526750 - DNA, 25 bp, Homo sapien
acatgcttgggaccagccagaagtg

SEQ ID NO: 1526751 - DNA, 25 bp, Homo sapien
ctgcaggctcacatgcttgggacca

SEQ ID NO: 1526752 - DNA, 25 bp, Homo sapien
tctgctgcaggctcacatgcttggg

SEQ ID NO: 1526753 - DNA, 25 bp, Homo sapien
aggctcacatgcttgggaccagcca

SEQ ID NO: 1526754 - DNA, 25 bp, Homo sapien
cacacttggaaatggggcactgagt

SEQ ID NO: 1526755 - DNA, 25 bp, Homo sapien
gcactgagtgttctgctctttaaag

SEQ ID NO: 1526756 - DNA, 25 bp, Homo sapien
acacttggaaatggggcactgagtg

SEQ ID NO: 1526757 - DNA, 25 bp, Homo sapien
cacttggaaatggggcactgagtgt

SEQ ID NO: 1526758 - DNA, 25 bp, Homo sapien
gctttctcgtaggccccattgccga

SEQ ID NO: 1526759 - DNA, 25 bp, Homo sapien
gtaggccccattgccgactgccctc

SEQ ID NO: 1526760 - DNA, 25 bp, Homo sapien
tctcgtaggccccattgccgactgc

SEQ ID NO: 1526761 - DNA, 25 bp, Homo sapien
tttctcgtaggccccattgccgact

SEQ ID NO: 1526762 - DNA, 25 bp, Homo sapien
agttgtatctgtgagtgtcctgggt

SEQ ID NO: 1526763 - DNA, 25 bp, Homo sapien
cagcttggagagtggaccgccagta

SEQ ID NO: 1526764 - DNA, 25 bp, Homo sapien
ggcagcttggagagtggaccgccag

SEQ ID NO: 1526765 - DNA, 25 bp, Homo sapien
gtcctgggtaaaggaatggcagctt

SEQ ID NO: 1526766 - DNA, 25 bp, Homo sapien
ttctctctaagcctacagaagatga

SEQ ID NO: 1526767 - DNA, 25 bp, Homo sapien
gaagatgacaagagggacaacagcc

SEQ ID NO: 1526768 - DNA, 25 bp, Homo sapien
gggacaacagccagcggaaagctgc

SEQ ID NO: 1526769 - DNA, 25 bp, Homo sapien
tcacagctctatgcttgcaagatcc

SEQ ID NO: 1526770 - DNA, 25 bp, Homo sapien
cacaggaacttgacaatttcatcac

SEQ ID NO: 1526771 - DNA, 25 bp, Homo sapien
caggaacttgacaatttcatcacac

SEQ ID NO: 1526772 - DNA, 25 bp, Homo sapien
aggaacttgacaatttcatcacacc

SEQ ID NO: 1526773 - DNA, 25 bp, Homo sapien
tcacaggaacttgacaatttcatca

SEQ ID NO: 1526774 - DNA, 25 bp, Homo sapien
gaggaggggagcggtcagctgccag

SEQ ID NO: 1526775 - DNA, 25 bp, Homo sapien
ggcaggaggaggggagcggtcagct

SEQ ID NO: 1526776 - DNA, 25 bp, Homo sapien
gaggggagcggtcagctgccagctc

SEQ ID NO: 1526777 - DNA, 25 bp, Homo sapien
gcaggaggaggggagcggtcagctg

SEQ ID NO: 1526778 - DNA, 25 bp, Homo sapien
cagctctgcgcctgagatggacgaa

SEQ ID NO: 1526779 - DNA, 25 bp, Homo sapien
cttcagtgtgcaggcagtcaaccag

SEQ ID NO: 1526780 - DNA, 25 bp, Homo sapien
tgttattaccacaacggctgtcgtc

SEQ ID NO: 1526781 - DNA, 25 bp, Homo sapien
tggacgaagtcacctctcttggcag

SEQ ID NO: 1526782 - DNA, 25 bp, Homo sapien
cactctctctcatccagttaatctg

SEQ ID NO: 1526783 - DNA, 25 bp, Homo sapien
aggactgctgcaggtaagaccacca

SEQ ID NO: 1526784 - DNA, 25 bp, Homo sapien
gatgggcactcatggcttcaaatga

SEQ ID NO: 1526785 - DNA, 25 bp, Homo sapien
ttaatctgttatgtagatgggcact

SEQ ID NO: 1526786 - DNA, 25 bp, Homo sapien
gcctgcctagtgagagtgtgactta

SEQ ID NO: 1526787 - DNA, 25 bp, Homo sapien
gagcctgcctagtgagagtgtgact

SEQ ID NO: 1526788 - DNA, 25 bp, Homo sapien
cagagcctgcctagtgagagtgtga

SEQ ID NO: 1526789 - DNA, 25 bp, Homo sapien
cctgcctagtgagagtgtgacttac

SEQ ID NO: 1526790 - DNA, 25 bp, Homo sapien
ataggaatgaccctagctgagtgcc

SEQ ID NO: 1526791 - DNA, 25 bp, Homo sapien
ggcagaactgggaccgagtgctctt

SEQ ID NO: 1526792 - DNA, 25 bp, Homo sapien
tatcagatacattggaactcagctc

SEQ ID NO: 1526793 - DNA, 25 bp, Homo sapien
tcaagcaatgtacccagagtttcag

SEQ ID NO: 1526794 - DNA, 25 bp, Homo sapien
taaaacaatgtgagcctggagtttt

SEQ ID NO: 1526795 - DNA, 25 bp, Homo sapien
caaagtgtttgggtaagattagcac

SEQ ID NO: 1526796 - DNA, 25 bp, Homo sapien
ggtaagttgtgttaatgatatcccc

SEQ ID NO: 1526797 - DNA, 25 bp, Homo sapien
ctttgaaaagatccagctcttagtt

SEQ ID NO: 1526798 - DNA, 25 bp, Homo sapien
taggcatagtcgttaggagtgatcc

SEQ ID NO: 1526799 - DNA, 25 bp, Homo sapien
caaattgaggggcataggcatagtc

SEQ ID NO: 1526800 - DNA, 25 bp, Homo sapien
gcataggcatagtcgttaggagtga

SEQ ID NO: 1526801 - DNA, 25 bp, Homo sapien
catagtcgttaggagtgatccttgg

SEQ ID NO: 1526802 - DNA, 25 bp, Homo sapien
gaaactgaggctaacatgaagccgc

SEQ ID NO: 1526803 - DNA, 25 bp, Homo sapien
agacaaaccatatctgtgtgaatga

SEQ ID NO: 1526804 - DNA, 25 bp, Homo sapien
gtgaatgaaactgaggctaacatga

SEQ ID NO: 1526805 - DNA, 25 bp, Homo sapien
tcttccagacaaaccatatctgtgt

SEQ ID NO: 1526806 - DNA, 25 bp, Homo sapien
cgttgacagtgccttttatctgtga

SEQ ID NO: 1526807 - DNA, 25 bp, Homo sapien
tctaatagtgcgttgacagtgcctt

SEQ ID NO: 1526808 - DNA, 25 bp, Homo sapien
tcccctggtgtctaatagtgcgttg

SEQ ID NO: 1526809 - DNA, 25 bp, Homo sapien
tcctgaccttcttgcactgacttct

SEQ ID NO: 1526810 - DNA, 25 bp, Homo sapien
gttcttgattctcaagcagccgttt

SEQ ID NO: 1526811 - DNA, 25 bp, Homo sapien
gattctcaagcagccgtttctctga

SEQ ID NO: 1526812 - DNA, 25 bp, Homo sapien
tggaaagcatatgctcctcagacct

SEQ ID NO: 1526813 - DNA, 25 bp, Homo sapien
ctcagacctgtgctcgttctgctgc

SEQ ID NO: 1526814 - DNA, 25 bp, Homo sapien
ggcgctctggtgtcttttcatggca

SEQ ID NO: 1526815 - DNA, 25 bp, Homo sapien
gcatctattaggcatcataacaaag

SEQ ID NO: 1526816 - DNA, 25 bp, Homo sapien
gcgatagagcagtccatgatgacct

SEQ ID NO: 1526817 - DNA, 25 bp, Homo sapien
gcttgcttttacactggcgctctgg

SEQ ID NO: 1526818 - DNA, 25 bp, Homo sapien
gccctcgtctagactctttctgatg

SEQ ID NO: 1526819 - DNA, 25 bp, Homo sapien
tctttctgatgcattgccaatctcc

SEQ ID NO: 1526820 - DNA, 25 bp, Homo sapien
agtgcccttgtctagagcatcctgg

SEQ ID NO: 1526821 - DNA, 25 bp, Homo sapien
gcgatttctgtcagaagcagtgccc

SEQ ID NO: 1526822 - DNA, 25 bp, Homo sapien
gtttcaggtccatcaaccctaatct

SEQ ID NO: 1526823 - DNA, 25 bp, Homo sapien
gtctgtcagtgtctccttcagtgtt

SEQ ID NO: 1526824 - DNA, 25 bp, Homo sapien
tgtctctctcacgtcgggacccaaa

SEQ ID NO: 1526825 - DNA, 25 bp, Homo sapien
cacgtcgggacccaaacttctgtgt

SEQ ID NO: 1526826 - DNA, 25 bp, Homo sapien
cacaatgcaagctcacattctacaa

SEQ ID NO: 1526827 - DNA, 25 bp, Homo sapien
taattttcacaaccagagaagaacc

SEQ ID NO: 1526828 - DNA, 25 bp, Homo sapien
gaagaaccatgaacctggatggtgc

SEQ ID NO: 1526829 - DNA, 25 bp, Homo sapien
cacattctacaatgctctgctggct

SEQ ID NO: 1526830 - DNA, 25 bp, Homo sapien
ccattgtctgcatgactaggtaggg

SEQ ID NO: 1526831 - DNA, 25 bp, Homo sapien
cagtggcgccaatcagtctgttatt

SEQ ID NO: 1526832 - DNA, 25 bp, Homo sapien
ggagcattggcagatttgtatctca

SEQ ID NO: 1526833 - DNA, 25 bp, Homo sapien
gaaaaagttgtgatagattgagcaa

SEQ ID NO: 1526834 - DNA, 25 bp, Homo sapien
cacacagtgctgttgtgataagacc

SEQ ID NO: 1526835 - DNA, 25 bp, Homo sapien
gccgcaacgtgaagaagtgactctg

SEQ ID NO: 1526836 - DNA, 25 bp, Homo sapien
agtgactctgcaagttgggctttgg

SEQ ID NO: 1526837 - DNA, 25 bp, Homo sapien
agcactcaggagaatgaccacacag

SEQ ID NO: 1526838 - DNA, 25 bp, Homo sapien
gtatccggtctttcctcaacctcag

SEQ ID NO: 1526839 - DNA, 25 bp, Homo sapien
tcttgaggtgttcttgtatccggtc

SEQ ID NO: 1526840 - DNA, 25 bp, Homo sapien
actttctttgctatggttgatgcag

SEQ ID NO: 1526841 - DNA, 25 bp, Homo sapien
ttctttgctatggttgatgcaggga

SEQ ID NO: 1526842 - DNA, 25 bp, Homo sapien
tctctgagcaatttcctgcaggcat

SEQ ID NO: 1526843 - DNA, 25 bp, Homo sapien
ttctctgagcaatttcctgcaggca

SEQ ID NO: 1526844 - DNA, 25 bp, Homo sapien
cttctctgagcaatttcctgcaggc

SEQ ID NO: 1526845 - DNA, 25 bp, Homo sapien
tcttctctgagcaatttcctgcagg

SEQ ID NO: 1526846 - DNA, 25 bp, Homo sapien
ctgcagctttctgggttgctgaatc

SEQ ID NO: 1526847 - DNA, 25 bp, Homo sapien
ttctgggttgctgaatcccatgcat

SEQ ID NO: 1526848 - DNA, 25 bp, Homo sapien
gcagctttctgggttgctgaatccc

SEQ ID NO: 1526849 - DNA, 25 bp, Homo sapien
ctttctgggttgctgaatcccatgc

SEQ ID NO: 1526850 - DNA, 25 bp, Homo sapien
tttcagaccagtggccaaggcacag

SEQ ID NO: 1526851 - DNA, 25 bp, Homo sapien
agcagctgactttctgcaggtggtt

SEQ ID NO: 1526852 - DNA, 25 bp, Homo sapien
caaggcacaggtcttcactaagttg

SEQ ID NO: 1526853 - DNA, 25 bp, Homo sapien
tgatgatctgtgcactgctataccc

SEQ ID NO: 1526854 - DNA, 25 bp, Homo sapien
ctagcttgcatactgaactttgtca

SEQ ID NO: 1526855 - DNA, 25 bp, Homo sapien
tggaaaaaactactcattgagattc

SEQ ID NO: 1526856 - DNA, 25 bp, Homo sapien
ttagttgggctagcttgcatactga

SEQ ID NO: 1526857 - DNA, 25 bp, Homo sapien
tcattgagattcttatggcaaggaa

SEQ ID NO: 1526858 - DNA, 25 bp, Homo sapien
gaagcagagtgcctcagatgccgct

SEQ ID NO: 1526859 - DNA, 25 bp, Homo sapien
catgcaagaacatttaaccctgggt

SEQ ID NO: 1526860 - DNA, 25 bp, Homo sapien
tggaagactggctaatgcaacgatc

SEQ ID NO: 1526861 - DNA, 25 bp, Homo sapien
gccgcttccgacatcttatggacaa

SEQ ID NO: 1526862 - DNA, 25 bp, Homo sapien
taaaagttatggatgctaaggctta

SEQ ID NO: 1526863 - DNA, 25 bp, Homo sapien
acagtacaaagcattcctgtttgtc

SEQ ID NO: 1526864 - DNA, 25 bp, Homo sapien
ggattcttaatttggtttgtgtata

SEQ ID NO: 1526865 - DNA, 25 bp, Homo sapien
acaaaaatagtacagtacaaagcat

SEQ ID NO: 1526866 - DNA, 25 bp, Homo sapien
gaaagagctcctcgagctgaaggaa

SEQ ID NO: 1526867 - DNA, 25 bp, Homo sapien
tctgtgaatcttgagcgagtacttt

SEQ ID NO: 1526868 - DNA, 25 bp, Homo sapien
ctctgtgaatcttgagcgagtactt

SEQ ID NO: 1526869 - DNA, 25 bp, Homo sapien
gtgaatcttgagcgagtactttcac

SEQ ID NO: 1526870 - DNA, 25 bp, Homo sapien
ctgtgaatcttgagcgagtactttc

SEQ ID NO: 1526871 - DNA, 25 bp, Homo sapien
gcttcaaggaactgccgcgagccgt

SEQ ID NO: 1526872 - DNA, 25 bp, Homo sapien
cgctctcccgaagataaaggcagct

SEQ ID NO: 1526873 - DNA, 25 bp, Homo sapien
tctccgcggagatctgagccattcg

SEQ ID NO: 1526874 - DNA, 25 bp, Homo sapien
ggagcgagggctccgcttttccagc

SEQ ID NO: 1526875 - DNA, 25 bp, Homo sapien
tttggtctagactttcgatatttaa

SEQ ID NO: 1526876 - DNA, 25 bp, Homo sapien
tagactttcgatatttaagtttgag

SEQ ID NO: 1526877 - DNA, 25 bp, Homo sapien
tgtctttggtctagactttcgatat

SEQ ID NO: 1526878 - DNA, 25 bp, Homo sapien
tggtctagactttcgatatttaagt

SEQ ID NO: 1526879 - DNA, 25 bp, Homo sapien
ctgactcgggtaatgatgtcaatgt

SEQ ID NO: 1526880 - DNA, 25 bp, Homo sapien
cctgactcgggtaatgatgtcaatg

SEQ ID NO: 1526881 - DNA, 25 bp, Homo sapien
atgatgtcaatgttgaatctgcttc

SEQ ID NO: 1526882 - DNA, 25 bp, Homo sapien
gaatcaaagcccttagccacgctgt

SEQ ID NO: 1526883 - DNA, 25 bp, Homo sapien
ctgttagttaccacccgaaaggctg

SEQ ID NO: 1526884 - DNA, 25 bp, Homo sapien
gctgttgagatatttgcaggcggaa

SEQ ID NO: 1526885 - DNA, 25 bp, Homo sapien
agtagtacttgtctcctagggaatc

SEQ ID NO: 1526886 - DNA, 25 bp, Homo sapien
atgattaactccttttttccagtgg

SEQ ID NO: 1526887 - DNA, 25 bp, Homo sapien
tacatgattaactccttttttccag

SEQ ID NO: 1526888 - DNA, 25 bp, Homo sapien
gtacatgattaactccttttttcca

SEQ ID NO: 1526889 - DNA, 25 bp, Homo sapien
catgattaactccttttttccagtg

SEQ ID NO: 1526890 - DNA, 25 bp, Homo sapien
gtaattctgctgttggataaaagca

SEQ ID NO: 1526891 - DNA, 25 bp, Homo sapien
aggtaattctgctgttggataaaag

SEQ ID NO: 1526892 - DNA, 25 bp, Homo sapien
ggtaattctgctgttggataaaagc

SEQ ID NO: 1526893 - DNA, 25 bp, Homo sapien
caggtaattctgctgttggataaaa

SEQ ID NO: 1526894 - DNA, 25 bp, Homo sapien
tggaattggaggagcgtcaaagagg

SEQ ID NO: 1526895 - DNA, 25 bp, Homo sapien
gaatggaattggaggagcgtcaaag

SEQ ID NO: 1526896 - DNA, 25 bp, Homo sapien
ggaattggaggagcgtcaaagaggt

SEQ ID NO: 1526897 - DNA, 25 bp, Homo sapien
aatggaattggaggagcgtcaaaga

SEQ ID NO: 1526898 - DNA, 25 bp, Homo sapien
ctggccgggctcaggtacgttggac

SEQ ID NO: 1526899 - DNA, 25 bp, Homo sapien
tccggacaggcgagtgcggcggcga

SEQ ID NO: 1526900 - DNA, 25 bp, Homo sapien
caggtacgttggacgtgactgcccg

SEQ ID NO: 1526901 - DNA, 25 bp, Homo sapien
gaggaggaaggtgcgtccggacagg

SEQ ID NO: 1526902 - DNA, 25 bp, Homo sapien
ctgttcggcgcccaccagtactggg

SEQ ID NO: 1526903 - DNA, 25 bp, Homo sapien
cccagcgcgtgtcgccccgcagctg

SEQ ID NO: 1526904 - DNA, 25 bp, Homo sapien
gcgcgtgggcgccatctctcagcag

SEQ ID NO: 1526905 - DNA, 25 bp, Homo sapien
cccgcagctgttcggcgcccaccag

SEQ ID NO: 1526906 - DNA, 25 bp, Homo sapien
taattcggggcggcctgactgtccc

SEQ ID NO: 1526907 - DNA, 25 bp, Homo sapien
tggcagcatggaggatgctatatta

SEQ ID NO: 1526908 - DNA, 25 bp, Homo sapien
gaggatgctatattaaagctctctc

SEQ ID NO: 1526909 - DNA, 25 bp, Homo sapien
catggaggatgctatattaaagctc

SEQ ID NO: 1526910 - DNA, 25 bp, Homo sapien
agagagccttgagatacccagaggg

SEQ ID NO: 1526911 - DNA, 25 bp, Homo sapien
gcagagagccttgagatacccagag

SEQ ID NO: 1526912 - DNA, 25 bp, Homo sapien
gggcagagagccttgagatacccag

SEQ ID NO: 1526913 - DNA, 25 bp, Homo sapien
gagggcagagagccttgagataccc

SEQ ID NO: 1526914 - DNA, 25 bp, Homo sapien
aaagcacacacacaggttcagttgg

SEQ ID NO: 1526915 - DNA, 25 bp, Homo sapien
gcaaagcacacacacaggttcagtt

SEQ ID NO: 1526916 - DNA, 25 bp, Homo sapien
ctgcaaagcacacacacaggttcag

SEQ ID NO: 1526917 - DNA, 25 bp, Homo sapien
aagcacacacacaggttcagttggg

SEQ ID NO: 1526918 - DNA, 25 bp, Homo sapien
caggtaggtgctcatggcaatggcc

SEQ ID NO: 1526919 - DNA, 25 bp, Homo sapien
acaggtaggtgctcatggcaatggc

SEQ ID NO: 1526920 - DNA, 25 bp, Homo sapien
aggtaggtgctcatggcaatggccc

SEQ ID NO: 1526921 - DNA, 25 bp, Homo sapien
aggctgaccagggctaatgagctca

SEQ ID NO: 1526922 - DNA, 25 bp, Homo sapien
ggctgaccagggctaatgagctcag

SEQ ID NO: 1526923 - DNA, 25 bp, Homo sapien
accagggctaatgagctcagcagca

SEQ ID NO: 1526924 - DNA, 25 bp, Homo sapien
tgaccagggctaatgagctcagcag

SEQ ID NO: 1526925 - DNA, 25 bp, Homo sapien
gaggaatgagcaccacttcctgtcc

SEQ ID NO: 1526926 - DNA, 25 bp, Homo sapien
aggccacgaggaatgagcaccactt

SEQ ID NO: 1526927 - DNA, 25 bp, Homo sapien
ggctcaggccacgaggaatgagcac

SEQ ID NO: 1526928 - DNA, 25 bp, Homo sapien
tgccgtgggctcaggccacgaggaa

SEQ ID NO: 1526929 - DNA, 25 bp, Homo sapien
ggatctccctttgggcaaagccact

SEQ ID NO: 1526930 - DNA, 25 bp, Homo sapien
tttggatctccctttgggcaaagcc

SEQ ID NO: 1526931 - DNA, 25 bp, Homo sapien
cctttgggcaaagccactctgcaca

SEQ ID NO: 1526932 - DNA, 25 bp, Homo sapien
ctttggatctccctttgggcaaagc

SEQ ID NO: 1526933 - DNA, 25 bp, Homo sapien
gagccagcaagatgcagtcgctact

SEQ ID NO: 1526934 - DNA, 25 bp, Homo sapien
agccagcaagatgcagtcgctactt

SEQ ID NO: 1526935 - DNA, 25 bp, Homo sapien
gctgaatactagcattgcttttgga

SEQ ID NO: 1526936 - DNA, 25 bp, Homo sapien
gacgtagcatgttgccgctgaatac

SEQ ID NO: 1526937 - DNA, 25 bp, Homo sapien
cactgtactgtgtggtagacgtagc

SEQ ID NO: 1526938 - DNA, 25 bp, Homo sapien
tctgctattcactgtactgtgtggt

SEQ ID NO: 1526939 - DNA, 25 bp, Homo sapien
tgatttcctgccacacgggtgccat

SEQ ID NO: 1526940 - DNA, 25 bp, Homo sapien
gccctgagaagacctgagtgtccaa

SEQ ID NO: 1526941 - DNA, 25 bp, Homo sapien
caggctcatgcagctctggtttttt

SEQ ID NO: 1526942 - DNA, 25 bp, Homo sapien
ttttggctgatttcctgccacacgg

SEQ ID NO: 1526943 - DNA, 25 bp, Homo sapien
tcacagtgcctgatgacggtctggc

SEQ ID NO: 1526944 - DNA, 25 bp, Homo sapien
ctgccatcaactccaggcactcaca

SEQ ID NO: 1526945 - DNA, 25 bp, Homo sapien
ggcactcacagtgcctgatgacggt

SEQ ID NO: 1526946 - DNA, 25 bp, Homo sapien
tccaggcactcacagtgcctgatga

SEQ ID NO: 1526947 - DNA, 25 bp, Homo sapien
tcccctcactgaaaatggtggatcc

SEQ ID NO: 1526948 - DNA, 25 bp, Homo sapien
tcttcacagaagaggtcgagtcttt

SEQ ID NO: 1526949 - DNA, 25 bp, Homo sapien
ttcacagaagaggtcgagtctttgg

SEQ ID NO: 1526950 - DNA, 25 bp, Homo sapien
ccctcactgaaaatggtggatcctt

SEQ ID NO: 1526951 - DNA, 25 bp, Homo sapien
aatgtagcgtgtgcataggcctgga

SEQ ID NO: 1526952 - DNA, 25 bp, Homo sapien
gggaatgtagcgtgtgcataggcct

SEQ ID NO: 1526953 - DNA, 25 bp, Homo sapien
tagcgtgtgcataggcctggactgt

SEQ ID NO: 1526954 - DNA, 25 bp, Homo sapien
tgtagcgtgtgcataggcctggact

SEQ ID NO: 1526955 - DNA, 25 bp, Homo sapien
agccctgtgatgaggctactgtgtg

SEQ ID NO: 1526956 - DNA, 25 bp, Homo sapien
gccctgtgatgaggctactgtgtga

SEQ ID NO: 1526957 - DNA, 25 bp, Homo sapien
ccctgtgatgaggctactgtgtgag

SEQ ID NO: 1526958 - DNA, 25 bp, Homo sapien
taataaaatggttctccccacaggc

SEQ ID NO: 1526959 - DNA, 25 bp, Homo sapien
gatactaaagacagcgccagtgtga

SEQ ID NO: 1526960 - DNA, 25 bp, Homo sapien
caacaagggtgggtcttggactcca

SEQ ID NO: 1526961 - DNA, 25 bp, Homo sapien
gagaccaaattacccacttgtggga

SEQ ID NO: 1526962 - DNA, 25 bp, Homo sapien
agcgtgtggactaagcttggagttg

SEQ ID NO: 1526963 - DNA, 25 bp, Homo sapien
gagcgtgtggactaagcttggagtt

SEQ ID NO: 1526964 - DNA, 25 bp, Homo sapien
gcgtgtggactaagcttggagttgg

SEQ ID NO: 1526965 - DNA, 25 bp, Homo sapien
atacggggatcaagcagcgcctctg

SEQ ID NO: 1526966 - DNA, 25 bp, Homo sapien
tgatacggggatcaagcagcgcctc

SEQ ID NO: 1526967 - DNA, 25 bp, Homo sapien
cagtgatacggggatcaagcagcgc

SEQ ID NO: 1526968 - DNA, 25 bp, Homo sapien
tccaccagcttggcagtgatacggg

SEQ ID NO: 1526969 - DNA, 25 bp, Homo sapien
ctttgggtgcagacatttctgctca

SEQ ID NO: 1526970 - DNA, 25 bp, Homo sapien
atgggcagtgccgcatgaatgcatg

SEQ ID NO: 1526971 - DNA, 25 bp, Homo sapien
ggcctttgggtgcagacatttctgc

SEQ ID NO: 1526972 - DNA, 25 bp, Homo sapien
ttggcctttgggtgcagacatttct

SEQ ID NO: 1526973 - DNA, 25 bp, Homo sapien
ggcatatttcttaatcccccctaga

SEQ ID NO: 1526974 - DNA, 25 bp, Homo sapien
gctgtttgctccagtgagtttgaga

SEQ ID NO: 1526975 - DNA, 25 bp, Homo sapien
agggaagaggcgctcccgcgctgag

SEQ ID NO: 1526976 - DNA, 25 bp, Homo sapien
tgtctgtggagctgtagagggaaga

SEQ ID NO: 1526977 - DNA, 25 bp, Homo sapien
cagttggccacatttgtctctgatc

SEQ ID NO: 1526978 - DNA, 25 bp, Homo sapien
ctgattttcagttggccacatttgt

SEQ ID NO: 1526979 - DNA, 25 bp, Homo sapien
ttttcagttggccacatttgtctct

SEQ ID NO: 1526980 - DNA, 25 bp, Homo sapien
atttgtctctgatctctgagcccca

SEQ ID NO: 1526981 - DNA, 25 bp, Homo sapien
atcagattcccatttcaccagccgt

SEQ ID NO: 1526982 - DNA, 25 bp, Homo sapien
actcaggtgagcaccgtgcagcctc

SEQ ID NO: 1526983 - DNA, 25 bp, Homo sapien
atttcaccagccgttcgcggctggg

SEQ ID NO: 1526984 - DNA, 25 bp, Homo sapien
cactcaggtgagcaccgtgcagcct

SEQ ID NO: 1526985 - DNA, 25 bp, Homo sapien
aaaccaggagcacctccgacctgct

SEQ ID NO: 1526986 - DNA, 25 bp, Homo sapien
ccaggagcacctccgacctgctcac

SEQ ID NO: 1526987 - DNA, 25 bp, Homo sapien
gaaaaccaggagcacctccgacctg

SEQ ID NO: 1526988 - DNA, 25 bp, Homo sapien
ctgatgggaaaaccaggagcacctc

SEQ ID NO: 1526989 - DNA, 25 bp, Homo sapien
tgaaagcctgcgaaggcacccatag

SEQ ID NO: 1526990 - DNA, 25 bp, Homo sapien
gatcccagggcaaaggctcggccct

SEQ ID NO: 1526991 - DNA, 25 bp, Homo sapien
cagagcgcccttgccatggaggagt

SEQ ID NO: 1526992 - DNA, 25 bp, Homo sapien
tagactccatgggtagcagggaccc

SEQ ID NO: 1526993 - DNA, 25 bp, Homo sapien
cccttggaagacaagacagacgtgg

SEQ ID NO: 1526994 - DNA, 25 bp, Homo sapien
tccccttggaagacaagacagacgt

SEQ ID NO: 1526995 - DNA, 25 bp, Homo sapien
ccagggagtccccttggaagacaag

SEQ ID NO: 1526996 - DNA, 25 bp, Homo sapien
gagtccccttggaagacaagacaga

SEQ ID NO: 1526997 - DNA, 25 bp, Homo sapien
taactggaggccaaacttcttcttg

SEQ ID NO: 1526998 - DNA, 25 bp, Homo sapien
tagcatccaacaccaagataaatgg

SEQ ID NO: 1526999 - DNA, 25 bp, Homo sapien
tactcagacttgagatacccgctga

SEQ ID NO: 1527000 - DNA, 25 bp, Homo sapien
gctgacctcaaggtgtaataactgg

SEQ ID NO: 1527001 - DNA, 25 bp, Homo sapien
taaaccggcagatccaatttctaag

SEQ ID NO: 1527002 - DNA, 25 bp, Homo sapien
ttacgtcaagttgccataaaccggc

SEQ ID NO: 1527003 - DNA, 25 bp, Homo sapien
tcacaatgtcagatagagaatgcct

SEQ ID NO: 1527004 - DNA, 25 bp, Homo sapien
tggttactgtcaactccaaagtgca

SEQ ID NO: 1527005 - DNA, 25 bp, Homo sapien
tcagaggctgagaagcggatgctcc

SEQ ID NO: 1527006 - DNA, 25 bp, Homo sapien
ctgagaagcggatgctccagttcat

SEQ ID NO: 1527007 - DNA, 25 bp, Homo sapien
gaagcggatgctccagttcattcca

SEQ ID NO: 1527008 - DNA, 25 bp, Homo sapien
tgctccagttcattccagagacaaa

SEQ ID NO: 1527009 - DNA, 25 bp, Homo sapien
gcccactatgggatttaggtccaga

SEQ ID NO: 1527010 - DNA, 25 bp, Homo sapien
tgcacattttccaagggaacgcggg

SEQ ID NO: 1527011 - DNA, 25 bp, Homo sapien
gaacgcgggaatgaccttcggcaat

SEQ ID NO: 1527012 - DNA, 25 bp, Homo sapien
cattgggaggtgtggcttttgcatc

SEQ ID NO: 1527013 - DNA, 25 bp, Homo sapien
tgaagagaaccacggtttgttcctg

SEQ ID NO: 1527014 - DNA, 25 bp, Homo sapien
tgtgaagagaaccacggtttgttcc

SEQ ID NO: 1527015 - DNA, 25 bp, Homo sapien
aacttttgacggctgagagtctcgc

SEQ ID NO: 1527016 - DNA, 25 bp, Homo sapien
taaagtcactgtacgtgaatctcgc

SEQ ID NO: 1527017 - DNA, 25 bp, Homo sapien
caaggagacacaaggacttaaagtc

SEQ ID NO: 1527018 - DNA, 25 bp, Homo sapien
gaatctcgcagaaagtccgtaaact

SEQ ID NO: 1527019 - DNA, 25 bp, Homo sapien
tgccctgtgtgcaagattgagtgtg

SEQ ID NO: 1527020 - DNA, 25 bp, Homo sapien
ccgccatatcccagtggtggctggt

SEQ ID NO: 1527021 - DNA, 25 bp, Homo sapien
gtaagaagcctttggtttgcacaca

SEQ ID NO: 1527022 - DNA, 25 bp, Homo sapien
tccaaggtacatttactccctggct

SEQ ID NO: 1527023 - DNA, 25 bp, Homo sapien
aaagtgggcagcccagagatgacat

SEQ ID NO: 1527024 - DNA, 25 bp, Homo sapien
gtcagccaaagtgggcagcccagag

SEQ ID NO: 1527025 - DNA, 25 bp, Homo sapien
agccaaagtgggcagcccagagatg

SEQ ID NO: 1527026 - DNA, 25 bp, Homo sapien
ccaaagtgggcagcccagagatgac

SEQ ID NO: 1527027 - DNA, 25 bp, Homo sapien
agctccgtggccaaggagcagcacc

SEQ ID NO: 1527028 - DNA, 25 bp, Homo sapien
gagacagctccgtggccaaggagca

SEQ ID NO: 1527029 - DNA, 25 bp, Homo sapien
aggaagtggagacagctccgtggcc

SEQ ID NO: 1527030 - DNA, 25 bp, Homo sapien
aagtggagacagctccgtggccaag

SEQ ID NO: 1527031 - DNA, 25 bp, Homo sapien
atcttggagcttgcctgggaagtgt

SEQ ID NO: 1527032 - DNA, 25 bp, Homo sapien
cttgaagatcttggagcttgcctgg

SEQ ID NO: 1527033 - DNA, 25 bp, Homo sapien
cagtttgtccctttcctccttgaag

SEQ ID NO: 1527034 - DNA, 25 bp, Homo sapien
tcctcccaacaagggccagtttgtc

SEQ ID NO: 1527035 - DNA, 25 bp, Homo sapien
ggcttctgagcacacggggttttgc

SEQ ID NO: 1527036 - DNA, 25 bp, Homo sapien
tgagcacacggggttttgcactggt

SEQ ID NO: 1527037 - DNA, 25 bp, Homo sapien
cttctgagcacacggggttttgcac

SEQ ID NO: 1527038 - DNA, 25 bp, Homo sapien
agcacacggggttttgcactggttg

SEQ ID NO: 1527039 - DNA, 25 bp, Homo sapien
agaatggaaaggtctcatgtgattc

SEQ ID NO: 1527040 - DNA, 25 bp, Homo sapien
gagaatggaaaggtctcatgtgatt

SEQ ID NO: 1527041 - DNA, 25 bp, Homo sapien
gaatggaaaggtctcatgtgattca

SEQ ID NO: 1527042 - DNA, 25 bp, Homo sapien
ggagaatggaaaggtctcatgtgat

SEQ ID NO: 1527043 - DNA, 25 bp, Homo sapien
gaactctgacactggatatgcggac

SEQ ID NO: 1527044 - DNA, 25 bp, Homo sapien
ggagaggtgagcctgaactctgaca

SEQ ID NO: 1527045 - DNA, 25 bp, Homo sapien
tgcggacattgacatttgaggtagc

SEQ ID NO: 1527046 - DNA, 25 bp, Homo sapien
gacatttgaggtagctttctccata

SEQ ID NO: 1527047 - DNA, 25 bp, Homo sapien
tataattcagcgctattgcttgctc

SEQ ID NO: 1527048 - DNA, 25 bp, Homo sapien
ccctccaggatccatccttcatcag

SEQ ID NO: 1527049 - DNA, 25 bp, Homo sapien
ttaaatataattcagcgctattgct

SEQ ID NO: 1527050 - DNA, 25 bp, Homo sapien
attcagcgctattgcttgctccagg

SEQ ID NO: 1527051 - DNA, 25 bp, Homo sapien
ctggtggcatgagagggtttgaggg

SEQ ID NO: 1527052 - DNA, 25 bp, Homo sapien
gctggtggcatgagagggtttgagg

SEQ ID NO: 1527053 - DNA, 25 bp, Homo sapien
atgggatgggttatgtgctggtggc

SEQ ID NO: 1527054 - DNA, 25 bp, Homo sapien
gatgggttatgtgctggtggcatga

SEQ ID NO: 1527055 - DNA, 25 bp, Homo sapien
catctagattgctgccaatgctatt

SEQ ID NO: 1527056 - DNA, 25 bp, Homo sapien
taggttcttagagagcaagtggtgt

SEQ ID NO: 1527057 - DNA, 25 bp, Homo sapien
ttatttcaataggttcttagagagc

SEQ ID NO: 1527058 - DNA, 25 bp, Homo sapien
tagagagcaagtggtgtgtggttac

SEQ ID NO: 1527059 - DNA, 25 bp, Homo sapien
gtgctgtagatgtggtctcactgca

SEQ ID NO: 1527060 - DNA, 25 bp, Homo sapien
tgtagatgtggtctcactgcacacc

SEQ ID NO: 1527061 - DNA, 25 bp, Homo sapien
gatgtggtctcactgcacacccatg

SEQ ID NO: 1527062 - DNA, 25 bp, Homo sapien
actgcacacccatgtctgcttgtcc

SEQ ID NO: 1527063 - DNA, 25 bp, Homo sapien
caacagttaacttgctggtacaaag

SEQ ID NO: 1527064 - DNA, 25 bp, Homo sapien
tagttggctcaaaataatgcttatg

SEQ ID NO: 1527065 - DNA, 25 bp, Homo sapien
tccagagtgtggagctaataatgct

SEQ ID NO: 1527066 - DNA, 25 bp, Homo sapien
gagaggcttaaagatgtcatccaga

SEQ ID NO: 1527067 - DNA, 25 bp, Homo sapien
tataggtatatggtttttccaatac

SEQ ID NO: 1527068 - DNA, 25 bp, Homo sapien
tttggtattgaatgtaatgaataga

SEQ ID NO: 1527069 - DNA, 25 bp, Homo sapien
tatcttgttccatataggtatatgg

SEQ ID NO: 1527070 - DNA, 25 bp, Homo sapien
aaatttccacttatatttggctata

SEQ ID NO: 1527071 - DNA, 25 bp, Homo sapien
tcccttagactgctaatgcattata

SEQ ID NO: 1527072 - DNA, 25 bp, Homo sapien
ggtgggagtgtcccttagactgcta

SEQ ID NO: 1527073 - DNA, 25 bp, Homo sapien
gggtagcttcctgatactgccatgg

SEQ ID NO: 1527074 - DNA, 25 bp, Homo sapien
gagtgtcccttagactgctaatgca

SEQ ID NO: 1527075 - DNA, 25 bp, Homo sapien
cctggagagtgtccaacaatctgaa

SEQ ID NO: 1527076 - DNA, 25 bp, Homo sapien
cagtccagatgcttgatcaggtcca

SEQ ID NO: 1527077 - DNA, 25 bp, Homo sapien
gaatctagaccttttgtcctggaga

SEQ ID NO: 1527078 - DNA, 25 bp, Homo sapien
ttcgtgaattttgccccacggagac

SEQ ID NO: 1527079 - DNA, 25 bp, Homo sapien
tttttgctaaagtgcagggaccacc

SEQ ID NO: 1527080 - DNA, 25 bp, Homo sapien
taataattcctacagcaagtgcggg

SEQ ID NO: 1527081 - DNA, 25 bp, Homo sapien
tgttgtttgagtagccctgacccca

SEQ ID NO: 1527082 - DNA, 25 bp, Homo sapien
acacttctccgggtttgggacagca

SEQ ID NO: 1527083 - DNA, 25 bp, Homo sapien
ctttattgggaggtgcaatcccaac

SEQ ID NO: 1527084 - DNA, 25 bp, Homo sapien
gaaagcaaatacaaggtcatatgtt

SEQ ID NO: 1527085 - DNA, 25 bp, Homo sapien
gtaagggacatagggaaataaagca

SEQ ID NO: 1527086 - DNA, 25 bp, Homo sapien
gggaggtgcaatcccaacaaccaaa

SEQ ID NO: 1527087 - DNA, 25 bp, Homo sapien
gagaactccaccaagcagtacagtg

SEQ ID NO: 1527088 - DNA, 25 bp, Homo sapien
gttagaagcatgaaattcgaaacca

SEQ ID NO: 1527089 - DNA, 25 bp, Homo sapien
tctgtgacctttgatgagttaccca

SEQ ID NO: 1527090 - DNA, 25 bp, Homo sapien
ctctgcctgaaaggtaggactagca

SEQ ID NO: 1527091 - DNA, 25 bp, Homo sapien
cagtccgagatcaaggggctgcatc

SEQ ID NO: 1527092 - DNA, 25 bp, Homo sapien
tctagaggctgggcagtccgagatc

SEQ ID NO: 1527093 - DNA, 25 bp, Homo sapien
gggctgcatctggtggcagctttct

SEQ ID NO: 1527094 - DNA, 25 bp, Homo sapien
ggtggcagctttcttgctgcatcac

SEQ ID NO: 1527095 - DNA, 25 bp, Homo sapien
ggaaactggagggaattgctcttca

SEQ ID NO: 1527096 - DNA, 25 bp, Homo sapien
tatctcacaatatttgatatggaag

SEQ ID NO: 1527097 - DNA, 25 bp, Homo sapien
gatatggaagaagaagcatttctaa

SEQ ID NO: 1527098 - DNA, 25 bp, Homo sapien
gaaaggtgtttcaggctatctcaca

SEQ ID NO: 1527099 - DNA, 25 bp, Homo sapien
tgagtaaagtccgtggaaatcatat

SEQ ID NO: 1527100 - DNA, 25 bp, Homo sapien
tgtgagtaaagtccgtggaaatcat

SEQ ID NO: 1527101 - DNA, 25 bp, Homo sapien
ctgtgagtaaagtccgtggaaatca

SEQ ID NO: 1527102 - DNA, 25 bp, Homo sapien
gtgagtaaagtccgtggaaatcata

SEQ ID NO: 1527103 - DNA, 25 bp, Homo sapien
ggggatatgtctctaaaagggctgt

SEQ ID NO: 1527104 - DNA, 25 bp, Homo sapien
gatgctttatttgtaggggatatgt

SEQ ID NO: 1527105 - DNA, 25 bp, Homo sapien
gctttatttgtaggggatatgtctc

SEQ ID NO: 1527106 - DNA, 25 bp, Homo sapien
ttgtaggggatatgtctctaaaagg

SEQ ID NO: 1527107 - DNA, 25 bp, Homo sapien
taatcagaatcccatgttagtaagt

SEQ ID NO: 1527108 - DNA, 25 bp, Homo sapien
tgtctgttttcaacccggcaagttg

SEQ ID NO: 1527109 - DNA, 25 bp, Homo sapien
catggtctctgcattacgatggtgc

SEQ ID NO: 1527110 - DNA, 25 bp, Homo sapien
aatcccatgttagtaagtgacagtg

SEQ ID NO: 1527111 - DNA, 25 bp, Homo sapien
ggctgcctgagtccctcctcttgag

SEQ ID NO: 1527112 - DNA, 25 bp, Homo sapien
tcctccttctgagcgcctggaatca

SEQ ID NO: 1527113 - DNA, 25 bp, Homo sapien
agcttcctccttctgagcgcctgga

SEQ ID NO: 1527114 - DNA, 25 bp, Homo sapien
tgagtccctcctcttgaggcagctt

SEQ ID NO: 1527115 - DNA, 25 bp, Homo sapien
tgctgttccccttcagcgtggctgc

SEQ ID NO: 1527116 - DNA, 25 bp, Homo sapien
tatcttcactttccgtgttgagtcc

SEQ ID NO: 1527117 - DNA, 25 bp, Homo sapien
tctatgggtgcgcagtccctggaac

SEQ ID NO: 1527118 - DNA, 25 bp, Homo sapien
tcttggcttccgcagggtggaccag

SEQ ID NO: 1527119 - DNA, 25 bp, Homo sapien
gagtcccaggagttggtcgcattct

SEQ ID NO: 1527120 - DNA, 25 bp, Homo sapien
tccatgctggcgttagattccaaga

SEQ ID NO: 1527121 - DNA, 25 bp, Homo sapien
gcaagccgcttgtgttgaaatagca

SEQ ID NO: 1527122 - DNA, 25 bp, Homo sapien
tggaccagccgtcctcttaacaggc

SEQ ID NO: 1527123 - DNA, 25 bp, Homo sapien
attgatcaatccagagcctgtttag

SEQ ID NO: 1527124 - DNA, 25 bp, Homo sapien
tccatccaagtattgatcaatccag

SEQ ID NO: 1527125 - DNA, 25 bp, Homo sapien
agatcagatgacaccaggcacgtcc

SEQ ID NO: 1527126 - DNA, 25 bp, Homo sapien
gcacgtccatggtaatatggccata

SEQ ID NO: 1527127 - DNA, 25 bp, Homo sapien
tggaccccagttcggttctgtaaca

SEQ ID NO: 1527128 - DNA, 25 bp, Homo sapien
ccagttcggttctgtaacagtgcct

SEQ ID NO: 1527129 - DNA, 25 bp, Homo sapien
gcgagtggaccccagttcggttctg

SEQ ID NO: 1527130 - DNA, 25 bp, Homo sapien
cagttcggttctgtaacagtgcctc

SEQ ID NO: 1527131 - DNA, 25 bp, Homo sapien
ggcctaatgagccttcccaagcatg

SEQ ID NO: 1527132 - DNA, 25 bp, Homo sapien
tcctgagatggggaagggaccctct

SEQ ID NO: 1527133 - DNA, 25 bp, Homo sapien
tgcgttcctcgaagggaaattccag

SEQ ID NO: 1527134 - DNA, 25 bp, Homo sapien
ggaccctctcttaggggcctaatga

SEQ ID NO: 1527135 - DNA, 25 bp, Homo sapien
actctgcggggcatcctccacagac

SEQ ID NO: 1527136 - DNA, 25 bp, Homo sapien
tgcggggcatcctccacagacccat

SEQ ID NO: 1527137 - DNA, 25 bp, Homo sapien
tggctgcatcatctcgacttcactc

SEQ ID NO: 1527138 - DNA, 25 bp, Homo sapien
catcatctcgacttcactctgcggg

SEQ ID NO: 1527139 - DNA, 25 bp, Homo sapien
tgtcaagatcattgtgctgtacgct

SEQ ID NO: 1527140 - DNA, 25 bp, Homo sapien
tgtacgcttctaggtgattatatgg

SEQ ID NO: 1527141 - DNA, 25 bp, Homo sapien
tttgatggaatggtttgagacgttg

SEQ ID NO: 1527142 - DNA, 25 bp, Homo sapien
ccactgaagggagacgcttcagggc

SEQ ID NO: 1527143 - DNA, 25 bp, Homo sapien
aggtgtggtggttcaaagttaaatg

SEQ ID NO: 1527144 - DNA, 25 bp, Homo sapien
ggtgtggtggttcaaagttaaatgc

SEQ ID NO: 1527145 - DNA, 25 bp, Homo sapien
ggaagaggctggcaaaaacacatac

SEQ ID NO: 1527146 - DNA, 25 bp, Homo sapien
taaaggctgcaatgccctgatggag

SEQ ID NO: 1527147 - DNA, 25 bp, Homo sapien
tggagagttctggttgccccaaggc

SEQ ID NO: 1527148 - DNA, 25 bp, Homo sapien
caagacaaatgtccgccttcaggaa

SEQ ID NO: 1527149 - DNA, 25 bp, Homo sapien
gagattaagctaaaacaaggtcagg

SEQ ID NO: 1527150 - DNA, 25 bp, Homo sapien
catgactgacgtccttatgagaaag

SEQ ID NO: 1527151 - DNA, 25 bp, Homo sapien
gacttccgccatcgagaactgtgag

SEQ ID NO: 1527152 - DNA, 25 bp, Homo sapien
aaggcctcagagagacctagccctg

SEQ ID NO: 1527153 - DNA, 25 bp, Homo sapien
cggctgggcctgagaattaaatgga

SEQ ID NO: 1527154 - DNA, 25 bp, Homo sapien
tactcagagattggacgggacaaag

SEQ ID NO: 1527155 - DNA, 25 bp, Homo sapien
aatgaggtactcacagtatgctctc

SEQ ID NO: 1527156 - DNA, 25 bp, Homo sapien
ggatgttgctttcccttctagggtg

SEQ ID NO: 1527157 - DNA, 25 bp, Homo sapien
gcttgacttcgtagctccctccagc

SEQ ID NO: 1527158 - DNA, 25 bp, Homo sapien
caatcccatgtggacctcactggta

SEQ ID NO: 1527159 - DNA, 25 bp, Homo sapien
ctgacgccgcttgacttcgtagctc

SEQ ID NO: 1527160 - DNA, 25 bp, Homo sapien
atcccatgtggacctcactggtaga

SEQ ID NO: 1527161 - DNA, 25 bp, Homo sapien
cccggctgtgcgtggtttgctctac

SEQ ID NO: 1527162 - DNA, 25 bp, Homo sapien
ccgcaggcccttctacaataagagt

SEQ ID NO: 1527163 - DNA, 25 bp, Homo sapien
tatttaagccgagcttcctccttgc

SEQ ID NO: 1527164 - DNA, 25 bp, Homo sapien
ggatcctgagctgcgaatgcctagc

SEQ ID NO: 1527165 - DNA, 25 bp, Homo sapien
gcttgcaaaggagtcaggatgggac

SEQ ID NO: 1527166 - DNA, 25 bp, Homo sapien
agaggctgccctgagcaaggaggga

SEQ ID NO: 1527167 - DNA, 25 bp, Homo sapien
ttccggaagtttgactgaggtgccc

SEQ ID NO: 1527168 - DNA, 25 bp, Homo sapien
cccgtggagttgagggaataagctt

SEQ ID NO: 1527169 - DNA, 25 bp, Homo sapien
ttgaggtcagctctcacacagccct

SEQ ID NO: 1527170 - DNA, 25 bp, Homo sapien
tggccttgaggtcagctctcacaca

SEQ ID NO: 1527171 - DNA, 25 bp, Homo sapien
catctttgagggtctattattccct

SEQ ID NO: 1527172 - DNA, 25 bp, Homo sapien
gcctcagggacggagccatctttga

SEQ ID NO: 1527173 - DNA, 25 bp, Homo sapien
agaaagcgcctgaagacccttgcag

SEQ ID NO: 1527174 - DNA, 25 bp, Homo sapien
tccaggcgttcctggctgtctgctt

SEQ ID NO: 1527175 - DNA, 25 bp, Homo sapien
tggggagcatagcttccaggcgttc

SEQ ID NO: 1527176 - DNA, 25 bp, Homo sapien
tgtaaccaagcccacgaaatagaag

SEQ ID NO: 1527177 - DNA, 25 bp, Homo sapien
tacttcccgacccaggtagcattcc

SEQ ID NO: 1527178 - DNA, 25 bp, Homo sapien
gccaacggaacatgggcagaggcct

SEQ ID NO: 1527179 - DNA, 25 bp, Homo sapien
cttcttgtctgaggtggagtggcca

SEQ ID NO: 1527180 - DNA, 25 bp, Homo sapien
tcccttctaggtccttctgtgtcct

SEQ ID NO: 1527181 - DNA, 25 bp, Homo sapien
aggtcccgtggccagggttggtgtg

SEQ ID NO: 1527182 - DNA, 25 bp, Homo sapien
gggacagctcggtgacgttccttgg

SEQ ID NO: 1527183 - DNA, 25 bp, Homo sapien
tctcagacatttcagcaccctgagt

SEQ ID NO: 1527184 - DNA, 25 bp, Homo sapien
ccgtggccagggttggtgtggaaag

SEQ ID NO: 1527185 - DNA, 25 bp, Homo sapien
tcatagaacacttcacacctaaaat

SEQ ID NO: 1527186 - DNA, 25 bp, Homo sapien
ccagtactcacttccccattgagga

SEQ ID NO: 1527187 - DNA, 25 bp, Homo sapien
gccagtactcacttccccattgagg

SEQ ID NO: 1527188 - DNA, 25 bp, Homo sapien
tgaagatgtattcatagaacacttc

SEQ ID NO: 1527189 - DNA, 25 bp, Homo sapien
cttggtgaaattatcgaggtttcca

SEQ ID NO: 1527190 - DNA, 25 bp, Homo sapien
tcttagagtagtggggcatttataa

SEQ ID NO: 1527191 - DNA, 25 bp, Homo sapien
tgtttgcatttaattgcttctgcct

SEQ ID NO: 1527192 - DNA, 25 bp, Homo sapien
tctgccttggtgaaattatcgaggt

SEQ ID NO: 1527193 - DNA, 25 bp, Homo sapien
cagcccccacggtgctggaacgagt

SEQ ID NO: 1527194 - DNA, 25 bp, Homo sapien
tcagcccccacggtgctggaacgag

SEQ ID NO: 1527195 - DNA, 25 bp, Homo sapien
ccctaagggtcagtttgtgtgagca

SEQ ID NO: 1527196 - DNA, 25 bp, Homo sapien
gtgagcaagcaaatccaacgtagga

SEQ ID NO: 1527197 - DNA, 25 bp, Homo sapien
tgtgcaccaggagattgacccctgc

SEQ ID NO: 1527198 - DNA, 25 bp, Homo sapien
cagcctgtgagggtgaactttctga

SEQ ID NO: 1527199 - DNA, 25 bp, Homo sapien
cctgatgtttttgtcaagaggtttt

SEQ ID NO: 1527200 - DNA, 25 bp, Homo sapien
tccctgatgtttttgtcaagaggtt

SEQ ID NO: 1527201 - DNA, 25 bp, Homo sapien
ttctgaaacctcctcgaattcatcc

SEQ ID NO: 1527202 - DNA, 25 bp, Homo sapien
tgtttttgtcaagaggtttttgcat

SEQ ID NO: 1527203 - DNA, 25 bp, Homo sapien
aaggccagcatatgtgacagcctgc

SEQ ID NO: 1527204 - DNA, 25 bp, Homo sapien
catttctagggcctgaacaaggcca

SEQ ID NO: 1527205 - DNA, 25 bp, Homo sapien
agcatatgtgacagcctgctgtgag

SEQ ID NO: 1527206 - DNA, 25 bp, Homo sapien
cctgaacaaggccagcatatgtgac

SEQ ID NO: 1527207 - DNA, 25 bp, Homo sapien
cctttggaaaactgtgcatcagaga

SEQ ID NO: 1527208 - DNA, 25 bp, Homo sapien
ccagggagaaagcacgagagagtct

SEQ ID NO: 1527209 - DNA, 25 bp, Homo sapien
tgtcgttggtatgaaaggcagcatc

SEQ ID NO: 1527210 - DNA, 25 bp, Homo sapien
ctgaaaactgcaagccctttggaaa

SEQ ID NO: 1527211 - DNA, 25 bp, Homo sapien
tagaacccagcaagtggctagcccg

SEQ ID NO: 1527212 - DNA, 25 bp, Homo sapien
tagaattggccaagctcagcgccag

SEQ ID NO: 1527213 - DNA, 25 bp, Homo sapien
gttgagaattgtcatccctgcggtg

SEQ ID NO: 1527214 - DNA, 25 bp, Homo sapien
ggctagcccgctgaaggcactgtta

SEQ ID NO: 1527215 - DNA, 25 bp, Homo sapien
tgacatgcaccgcagcacgtgctgg

SEQ ID NO: 1527216 - DNA, 25 bp, Homo sapien
gacggaacagccatctgtgcttctg

SEQ ID NO: 1527217 - DNA, 25 bp, Homo sapien
cctgtgacatgcaccgcagcacgtg

SEQ ID NO: 1527218 - DNA, 25 bp, Homo sapien
cacgtgctggatgacggaacagcca

SEQ ID NO: 1527219 - DNA, 25 bp, Homo sapien
agaagtggagactgagccgcataca

SEQ ID NO: 1527220 - DNA, 25 bp, Homo sapien
agtggagactgagccgcatacagtg

SEQ ID NO: 1527221 - DNA, 25 bp, Homo sapien
tggacagctacgcagaactgagaaa

SEQ ID NO: 1527222 - DNA, 25 bp, Homo sapien
catacagtggtcggagtgttggaca

SEQ ID NO: 1527223 - DNA, 25 bp, Homo sapien
taactgcccagtaacaggagggcgg

SEQ ID NO: 1527224 - DNA, 25 bp, Homo sapien
tcagttcagggctgaaacggccgcg

SEQ ID NO: 1527225 - DNA, 25 bp, Homo sapien
tcagttcagggctgaaacgggccgc

SEQ ID NO: 1527226 - DNA, 25 bp, Homo sapien
ccctgggctgagcaatataaggtca

SEQ ID NO: 1527227 - DNA, 25 bp, Homo sapien
taatttctccacgagatggccgtgg

SEQ ID NO: 1527228 - DNA, 25 bp, Homo sapien
taactaattgcattggtagccaaca

SEQ ID NO: 1527229 - DNA, 25 bp, Homo sapien
catgcttgttaggagaagaactgtc

SEQ ID NO: 1527230 - DNA, 25 bp, Homo sapien
cagattagctaatgggcagatgaga

SEQ ID NO: 1527231 - DNA, 25 bp, Homo sapien
gacaggagagtccagaagctgcttc

SEQ ID NO: 1527232 - DNA, 25 bp, Homo sapien
tgcttccctacaagggggccagagc

SEQ ID NO: 1527233 - DNA, 25 bp, Homo sapien
tctggagacagaagatcctgattct

SEQ ID NO: 1527234 - DNA, 25 bp, Homo sapien
cagggctgttccagctttggatgaa

SEQ ID NO: 1527235 - DNA, 25 bp, Homo sapien
tcaatgtcgggaaccactgagggtg

SEQ ID NO: 1527236 - DNA, 25 bp, Homo sapien
cagcatcaatgtcgggaaccactga

SEQ ID NO: 1527237 - DNA, 25 bp, Homo sapien
gcatcaatgtcgggaaccactgagg

SEQ ID NO: 1527238 - DNA, 25 bp, Homo sapien
catcaatgtcgggaaccactgaggg

SEQ ID NO: 1527239 - DNA, 25 bp, Homo sapien
ggaaccctgaagtcgagtggagaca

SEQ ID NO: 1527240 - DNA, 25 bp, Homo sapien
aacgtcctttccctaagaggctcag

SEQ ID NO: 1527241 - DNA, 25 bp, Homo sapien
cgtcctttccctaagaggctcaggg

SEQ ID NO: 1527242 - DNA, 25 bp, Homo sapien
aagtcgagtggagacagtcaatgtg

SEQ ID NO: 1527243 - DNA, 25 bp, Homo sapien
tcacttcccatcctccaaggccctt

SEQ ID NO: 1527244 - DNA, 25 bp, Homo sapien
cttctttcagtgatagggaactcac

SEQ ID NO: 1527245 - DNA, 25 bp, Homo sapien
ttcagtgatagggaactcactgtcc

SEQ ID NO: 1527246 - DNA, 25 bp, Homo sapien
ttctttcagtgatagggaactcact

SEQ ID NO: 1527247 - DNA, 25 bp, Homo sapien
ctttcagtgatagggaactcactgt

SEQ ID NO: 1527248 - DNA, 25 bp, Homo sapien
caggtctggtacaacttcaacggca

SEQ ID NO: 1527249 - DNA, 25 bp, Homo sapien
agatgcactggcgtaattggaggct

SEQ ID NO: 1527250 - DNA, 25 bp, Homo sapien
cctattgacagaaatccagcgggcc

SEQ ID NO: 1527251 - DNA, 25 bp, Homo sapien
caacggcacgttccctattgacaga

SEQ ID NO: 1527252 - DNA, 25 bp, Homo sapien
ctcccactgcatgtcatcacattgt

SEQ ID NO: 1527253 - DNA, 25 bp, Homo sapien
cctcacgtggtcttctcatggacat

SEQ ID NO: 1527254 - DNA, 25 bp, Homo sapien
atcacattgtcttcccatggacgtg

SEQ ID NO: 1527255 - DNA, 25 bp, Homo sapien
tgtcttcccatggacgtgttccccg

SEQ ID NO: 1527256 - DNA, 25 bp, Homo sapien
gtccctgtgtgtgttctaacatcat

SEQ ID NO: 1527257 - DNA, 25 bp, Homo sapien
cgtccctgtgtgtgttctaacatca

SEQ ID NO: 1527258 - DNA, 25 bp, Homo sapien
cttcccgctgtgggtcttcatgtcc

SEQ ID NO: 1527259 - DNA, 25 bp, Homo sapien
tcttcccgctgtgggtcttcatgtc

SEQ ID NO: 1527260 - DNA, 25 bp, Homo sapien
gccgtcttcccgctgtgggtcttca

SEQ ID NO: 1527261 - DNA, 25 bp, Homo sapien
cgtcttcccgctgtgggtcttcatg

SEQ ID NO: 1527262 - DNA, 25 bp, Homo sapien
tcaaatcgtcttcacgtggctgtcc

SEQ ID NO: 1527263 - DNA, 25 bp, Homo sapien
ctgtcctccccctgcacgtcctcac

SEQ ID NO: 1527264 - DNA, 25 bp, Homo sapien
gctgtcctccccctgcacgtcctca

SEQ ID NO: 1527265 - DNA, 25 bp, Homo sapien
aatcgtcttcacgtggctgtcctcc

SEQ ID NO: 1527266 - DNA, 25 bp, Homo sapien
gagatgactatctcctctctggctt

SEQ ID NO: 1527267 - DNA, 25 bp, Homo sapien
acacatgggcctttgccatccacgg

SEQ ID NO: 1527268 - DNA, 25 bp, Homo sapien
tttgccatccacggagatgactatc

SEQ ID NO: 1527269 - DNA, 25 bp, Homo sapien
gtggctgccactcacaacacatggg

SEQ ID NO: 1527270 - DNA, 25 bp, Homo sapien
gcaatgaaatgtccagaccattgcc

SEQ ID NO: 1527271 - DNA, 25 bp, Homo sapien
tgcttccacaaattcttctctgttt

SEQ ID NO: 1527272 - DNA, 25 bp, Homo sapien
tccacaaattcttctctgtttcctt

SEQ ID NO: 1527273 - DNA, 25 bp, Homo sapien
cgcaaggagctgttttgcttccaca

SEQ ID NO: 1527274 - DNA, 25 bp, Homo sapien
ccgcaaggagctgttttgcttccac

SEQ ID NO: 1527275 - DNA, 25 bp, Homo sapien
gggagacgactgataagaacaaagc

SEQ ID NO: 1527276 - DNA, 25 bp, Homo sapien
catgggagacgactgataagaacaa

SEQ ID NO: 1527277 - DNA, 25 bp, Homo sapien
gcttcatgggagacgactgataaga

SEQ ID NO: 1527278 - DNA, 25 bp, Homo sapien
aaaaagcttcatgggagacgactga

SEQ ID NO: 1527279 - DNA, 25 bp, Homo sapien
ttttaattgttgtgatgttcaagac

SEQ ID NO: 1527280 - DNA, 25 bp, Homo sapien
tttaattgttgtgatgttcaagacc

SEQ ID NO: 1527281 - DNA, 25 bp, Homo sapien
ttaattgttgtgatgttcaagacca

SEQ ID NO: 1527282 - DNA, 25 bp, Homo sapien
gccatggagtcaccgccagtgtggt

SEQ ID NO: 1527283 - DNA, 25 bp, Homo sapien
ttagccatggagtcaccgccagtgt

SEQ ID NO: 1527284 - DNA, 25 bp, Homo sapien
ccttagccatggagtcaccgccagt

SEQ ID NO: 1527285 - DNA, 25 bp, Homo sapien
agccatggagtcaccgccagtgtgg

SEQ ID NO: 1527286 - DNA, 25 bp, Homo sapien
gaatttgtgagaagctctctgcatg

SEQ ID NO: 1527287 - DNA, 25 bp, Homo sapien
tcaacaggctcacttttcaaggtag

SEQ ID NO: 1527288 - DNA, 25 bp, Homo sapien
gaaattcaattcctgggtgtcaaca

SEQ ID NO: 1527289 - DNA, 25 bp, Homo sapien
gtgtcaacaggctcacttttcaagg

SEQ ID NO: 1527290 - DNA, 25 bp, Homo sapien
catttgtgtttgcaggtagcatctg

SEQ ID NO: 1527291 - DNA, 25 bp, Homo sapien
cacatttgtgtttgcaggtagcatc

SEQ ID NO: 1527292 - DNA, 25 bp, Homo sapien
gggtaggtgatctgccctggctcat

SEQ ID NO: 1527293 - DNA, 25 bp, Homo sapien
cctgggtaggtgatctgccctggct

SEQ ID NO: 1527294 - DNA, 25 bp, Homo sapien
gatggagaggccatggctgaccgcc

SEQ ID NO: 1527295 - DNA, 25 bp, Homo sapien
ttggtctggtcctgttattttcagc

SEQ ID NO: 1527296 - DNA, 25 bp, Homo sapien
aagctcattagggagctgatggaga

SEQ ID NO: 1527297 - DNA, 25 bp, Homo sapien
atggctgaccgccgtgtggctctgc

SEQ ID NO: 1527298 - DNA, 25 bp, Homo sapien
tgtgctgaagacctgacgggaccca

SEQ ID NO: 1527299 - DNA, 25 bp, Homo sapien
tgggcacgttggctgcatgtgctga

SEQ ID NO: 1527300 - DNA, 25 bp, Homo sapien
aactggtggcgcctgctgttcggct

SEQ ID NO: 1527301 - DNA, 25 bp, Homo sapien
acagaaaggaactggtggcgcctgc

SEQ ID NO: 1527302 - DNA, 25 bp, Homo sapien
catctttagttcacctgcaggactg

SEQ ID NO: 1527303 - DNA, 25 bp, Homo sapien
ggctgtaacgaatatgagtgtcttc

SEQ ID NO: 1527304 - DNA, 25 bp, Homo sapien
tgcaggactggaccggagaacctct

SEQ ID NO: 1527305 - DNA, 25 bp, Homo sapien
tccattttcagcacagcccctggag

SEQ ID NO: 1527306 - DNA, 25 bp, Homo sapien
gaaatggtgtggctctcatagcagt

SEQ ID NO: 1527307 - DNA, 25 bp, Homo sapien
tgggtagaaagcagtatcgatgaga

SEQ ID NO: 1527308 - DNA, 25 bp, Homo sapien
gatgagatggtttttcctggaagag

SEQ ID NO: 1527309 - DNA, 25 bp, Homo sapien
tgctgagttgagtgggtgggtagaa

SEQ ID NO: 1527310 - DNA, 25 bp, Homo sapien
ttggcatgagcagagtgtgaacgtg

SEQ ID NO: 1527311 - DNA, 25 bp, Homo sapien
tgagcagagtgtgaacgtgcgtggc

SEQ ID NO: 1527312 - DNA, 25 bp, Homo sapien
cagagtgtgaacgtgcgtggctgtg

SEQ ID NO: 1527313 - DNA, 25 bp, Homo sapien
ctacgttggcatgagcagagtgtga

SEQ ID NO: 1527314 - DNA, 25 bp, Homo sapien
ccatgtagctgccaagtagtgtgga

SEQ ID NO: 1527315 - DNA, 25 bp, Homo sapien
cagggttgttttaggaagtagcaca

SEQ ID NO: 1527316 - DNA, 25 bp, Homo sapien
gggagtctcgagtccagagcctata

SEQ ID NO: 1527317 - DNA, 25 bp, Homo sapien
gtaaaccccttgctctagtaacaga

SEQ ID NO: 1527318 - DNA, 25 bp, Homo sapien
tgtgcgtcatagaacccagaaggaa

SEQ ID NO: 1527319 - DNA, 25 bp, Homo sapien
ttatcacagttgagggacccacagc

SEQ ID NO: 1527320 - DNA, 25 bp, Homo sapien
aagtccccacgtatgagttcaccag

SEQ ID NO: 1527321 - DNA, 25 bp, Homo sapien
gtcacactatgatgcatctggcagg

SEQ ID NO: 1527322 - DNA, 25 bp, Homo sapien
gagtttctaaacgtacttcctgtga

SEQ ID NO: 1527323 - DNA, 25 bp, Homo sapien
gagttcacgagctctgtagtcccgc

SEQ ID NO: 1527324 - DNA, 25 bp, Homo sapien
ggaattctacgtaaagccgttagca

SEQ ID NO: 1527325 - DNA, 25 bp, Homo sapien
cgttagcacagtttgggcacttaca

SEQ ID NO: 1527326 - DNA, 25 bp, Homo sapien
caccgggacctacaggtgggccgca

SEQ ID NO: 1527327 - DNA, 25 bp, Homo sapien
cccagcgacggcttgtagccccgtc

SEQ ID NO: 1527328 - DNA, 25 bp, Homo sapien
tcttctggggatctctcgggacact

SEQ ID NO: 1527329 - DNA, 25 bp, Homo sapien
gtcccctgttcagccctctcgttct

SEQ ID NO: 1527330 - DNA, 25 bp, Homo sapien
gaagtccaagttccagtatgcctgc

SEQ ID NO: 1527331 - DNA, 25 bp, Homo sapien
gaagacagctgttcggccatacagt

SEQ ID NO: 1527332 - DNA, 25 bp, Homo sapien
tgacactcagtaacgttgcccgatg

SEQ ID NO: 1527333 - DNA, 25 bp, Homo sapien
tggactcgaacaccactaccagatg

SEQ ID NO: 1527334 - DNA, 25 bp, Homo sapien
ggtgctaccttcattagtaccttga

SEQ ID NO: 1527335 - DNA, 25 bp, Homo sapien
gctgttcatgctggacacctggtgg

SEQ ID NO: 1527336 - DNA, 25 bp, Homo sapien
aagatgctggaggtttgccattacc

SEQ ID NO: 1527337 - DNA, 25 bp, Homo sapien
cattacctgcttgtatacgtcacac

SEQ ID NO: 1527338 - DNA, 25 bp, Homo sapien
taggatgtgaccgatgacagcggac

SEQ ID NO: 1527339 - DNA, 25 bp, Homo sapien
gagttcaagccggtaccatgcactg

SEQ ID NO: 1527340 - DNA, 25 bp, Homo sapien
tattccagcctaagagagggcatcc

SEQ ID NO: 1527341 - DNA, 25 bp, Homo sapien
acacagtgttgctcatgggacgccc

SEQ ID NO: 1527342 - DNA, 25 bp, Homo sapien
tatttgatgcacgtcttgctagacg

SEQ ID NO: 1527343 - DNA, 25 bp, Homo sapien
ttggacacattcctacaaacagggt

SEQ ID NO: 1527344 - DNA, 25 bp, Homo sapien
gcaaactgcagaatcccacacatag

SEQ ID NO: 1527345 - DNA, 25 bp, Homo sapien
aaggctctgggttgtgagtgcaaac

SEQ ID NO: 1527346 - DNA, 25 bp, Homo sapien
cggagcctgccttcttccatgcccc

SEQ ID NO: 1527347 - DNA, 25 bp, Homo sapien
caaccccggagcctgccttcttcca

SEQ ID NO: 1527348 - DNA, 25 bp, Homo sapien
gcaccaaccccggagcctgccttct

SEQ ID NO: 1527349 - DNA, 25 bp, Homo sapien
tgggggcaccaaccccggagcctgc

SEQ ID NO: 1527350 - DNA, 25 bp, Homo sapien
cactgtctgcaggtggttgaataga

SEQ ID NO: 1527351 - DNA, 25 bp, Homo sapien
gttgaatagagtgctggaggcctgc

SEQ ID NO: 1527352 - DNA, 25 bp, Homo sapien
ggatttgcaaactggtcccctggag

SEQ ID NO: 1527353 - DNA, 25 bp, Homo sapien
ggctttgcagggcttggatttgcaa

SEQ ID NO: 1527354 - DNA, 25 bp, Homo sapien
ctggcagttgtgaccttgctgctgg

SEQ ID NO: 1527355 - DNA, 25 bp, Homo sapien
actgggcagactctcttggcagctg

SEQ ID NO: 1527356 - DNA, 25 bp, Homo sapien
atcacactgggcagactctcttggc

SEQ ID NO: 1527357 - DNA, 25 bp, Homo sapien
aggagtggccttggctgttctggca

SEQ ID NO: 1527358 - DNA, 25 bp, Homo sapien
agagatcgggatgcgcagtgcctgg

SEQ ID NO: 1527359 - DNA, 25 bp, Homo sapien
cagagatcgggatgcgcagtgcctg

SEQ ID NO: 1527360 - DNA, 25 bp, Homo sapien
agatcgggatgcgcagtgcctggca

SEQ ID NO: 1527361 - DNA, 25 bp, Homo sapien
ccagagatcgggatgcgcagtgcct

SEQ ID NO: 1527362 - DNA, 25 bp, Homo sapien
tcatgtgatacaccagccccttcac

SEQ ID NO: 1527363 - DNA, 25 bp, Homo sapien
gaacttggacttgagaagccctgcc

SEQ ID NO: 1527364 - DNA, 25 bp, Homo sapien
aggaaaaggatatctcacctgtttc

SEQ ID NO: 1527365 - DNA, 25 bp, Homo sapien
caggacactgtaaacccaggaaaag

SEQ ID NO: 1527366 - DNA, 25 bp, Homo sapien
agcaagtgcagagcagcttagggca

SEQ ID NO: 1527367 - DNA, 25 bp, Homo sapien
caggagatggcactgttgaagccat

SEQ ID NO: 1527368 - DNA, 25 bp, Homo sapien
gcttagggcaggagatggcactgtt

SEQ ID NO: 1527369 - DNA, 25 bp, Homo sapien
ctcccagagcaagtgcagagcagct

SEQ ID NO: 1527370 - DNA, 25 bp, Homo sapien
ggatccctgtcttgccccaatgtgt

SEQ ID NO: 1527371 - DNA, 25 bp, Homo sapien
caggctgcccgggttcaattctagt

SEQ ID NO: 1527372 - DNA, 25 bp, Homo sapien
tctctgagtcgggaaagactgctca

SEQ ID NO: 1527373 - DNA, 25 bp, Homo sapien
cacatggctgattttgacttcgagg

SEQ ID NO: 1527374 - DNA, 25 bp, Homo sapien
gggattttgcgtgttctttgttgga

SEQ ID NO: 1527375 - DNA, 25 bp, Homo sapien
ctgctctgatagatcacgctcgtgg

SEQ ID NO: 1527376 - DNA, 25 bp, Homo sapien
tagatcacgctcgtgggattttgcg

SEQ ID NO: 1527377 - DNA, 25 bp, Homo sapien
gggaggagttgtggcgtcagctctg

SEQ ID NO: 1527378 - DNA, 25 bp, Homo sapien
ctgtggaagcagcagccatggctgg

SEQ ID NO: 1527379 - DNA, 25 bp, Homo sapien
caaggtcctcataacaaaggggcag

SEQ ID NO: 1527380 - DNA, 25 bp, Homo sapien
aaaggggcagtgtcaggaccgacct

SEQ ID NO: 1527381 - DNA, 25 bp, Homo sapien
tgccgctgtgcttgggccactttcc

SEQ ID NO: 1527382 - DNA, 25 bp, Homo sapien
atccttctggcaacccgtaggcagt

SEQ ID NO: 1527383 - DNA, 25 bp, Homo sapien
aaaaatttggtggtcttgctatttg

SEQ ID NO: 1527384 - DNA, 25 bp, Homo sapien
aaaatttggtggtcttgctatttgc

SEQ ID NO: 1527385 - DNA, 25 bp, Homo sapien
gctttgggtagtcaggaaagactgc

SEQ ID NO: 1527386 - DNA, 25 bp, Homo sapien
ctatggacaggaaagttttctttgc

SEQ ID NO: 1527387 - DNA, 25 bp, Homo sapien
aggacagagggctttgggtagtcag

SEQ ID NO: 1527388 - DNA, 25 bp, Homo sapien
tgctgggcaccatcttgagagagga

SEQ ID NO: 1527389 - DNA, 25 bp, Homo sapien
tctgaagatattattgcgccgctta

SEQ ID NO: 1527390 - DNA, 25 bp, Homo sapien
ccagtcaatgggcaccccttggtgg

SEQ ID NO: 1527391 - DNA, 25 bp, Homo sapien
tgtttctccctgtccgtggcgccct

SEQ ID NO: 1527392 - DNA, 25 bp, Homo sapien
gttgggaagtctgttctccacccag

SEQ ID NO: 1527393 - DNA, 25 bp, Homo sapien
gacaaggctccgaattcaccagatg

SEQ ID NO: 1527394 - DNA, 25 bp, Homo sapien
tgagcttagtgatgcattccgacaa

SEQ ID NO: 1527395 - DNA, 25 bp, Homo sapien
gatgcattccgacaaggctccgaat

SEQ ID NO: 1527396 - DNA, 25 bp, Homo sapien
gccgaggtgccaccgtgagcttagt

SEQ ID NO: 1527397 - DNA, 25 bp, Homo sapien
gacttcttgagccgtgtgggctggg

SEQ ID NO: 1527398 - DNA, 25 bp, Homo sapien
cagacttcttgagccgtgtgggctg

SEQ ID NO: 1527399 - DNA, 25 bp, Homo sapien
agacttcttgagccgtgtgggctgg

SEQ ID NO: 1527400 - DNA, 25 bp, Homo sapien
tataaactatattccagggctcctt

SEQ ID NO: 1527401 - DNA, 25 bp, Homo sapien
gaggcccaagtggtccagcagagtt

SEQ ID NO: 1527402 - DNA, 25 bp, Homo sapien
acatataaactatattccagggctc

SEQ ID NO: 1527403 - DNA, 25 bp, Homo sapien
gggaggcccaagtggtccagcagag

SEQ ID NO: 1527404 - DNA, 25 bp, Homo sapien
tatattgcttgttgtagcattcact

SEQ ID NO: 1527405 - DNA, 25 bp, Homo sapien
ggctgcaattaccaatatatattgc

SEQ ID NO: 1527406 - DNA, 25 bp, Homo sapien
ttagatggctgcaattaccaatata

SEQ ID NO: 1527407 - DNA, 25 bp, Homo sapien
tagcattcactaggagtggaaagta

SEQ ID NO: 1527408 - DNA, 25 bp, Homo sapien
agaagagttcatggaaactaccagt

SEQ ID NO: 1527409 - DNA, 25 bp, Homo sapien
tctccttgtcccagttgtctcccct

SEQ ID NO: 1527410 - DNA, 25 bp, Homo sapien
gtgtgtcagcttcaagcacaggaaa

SEQ ID NO: 1527411 - DNA, 25 bp, Homo sapien
aaccatgtgtgtcagcttcaagcac

SEQ ID NO: 1527412 - DNA, 25 bp, Homo sapien
aataaaccatgtgtgtcagcttcaa

SEQ ID NO: 1527413 - DNA, 25 bp, Homo sapien
cggcagaatggcgtaaaacatggct

SEQ ID NO: 1527414 - DNA, 25 bp, Homo sapien
gctgacagtggttagtgggactccc

SEQ ID NO: 1527415 - DNA, 25 bp, Homo sapien
cacttccgagtggatctcgtcggca

SEQ ID NO: 1527416 - DNA, 25 bp, Homo sapien
gcagggagcttgattagagacacac

SEQ ID NO: 1527417 - DNA, 25 bp, Homo sapien
ggcccaggcagatccaaggcttgca

SEQ ID NO: 1527418 - DNA, 25 bp, Homo sapien
gcccaggcagatccaaggcttgcag

SEQ ID NO: 1527419 - DNA, 25 bp, Homo sapien
cccaggcagatccaaggcttgcagc

SEQ ID NO: 1527420 - DNA, 25 bp, Homo sapien
tcaaaggtgtctccgccactgtagc

SEQ ID NO: 1527421 - DNA, 25 bp, Homo sapien
atgctttcaaaggtgtctccgccac

SEQ ID NO: 1527422 - DNA, 25 bp, Homo sapien
aggtgtctccgccactgtagccttc

SEQ ID NO: 1527423 - DNA, 25 bp, Homo sapien
gattataaatggttgttgacttggc

SEQ ID NO: 1527424 - DNA, 25 bp, Homo sapien
gggcctcgcacaccaggctaagaaa

SEQ ID NO: 1527425 - DNA, 25 bp, Homo sapien
cacaccaggctaagaaagttggatt

SEQ ID NO: 1527426 - DNA, 25 bp, Homo sapien
acagggagggcctcgcacaccaggc

SEQ ID NO: 1527427 - DNA, 25 bp, Homo sapien
tcgcacaccaggctaagaaagttgg

SEQ ID NO: 1527428 - DNA, 25 bp, Homo sapien
aagctgccttgcgttctgtttgtag

SEQ ID NO: 1527429 - DNA, 25 bp, Homo sapien
catcagtgacatgtgtgagagccat

SEQ ID NO: 1527430 - DNA, 25 bp, Homo sapien
tgacatgtgtgagagccattgccgg

SEQ ID NO: 1527431 - DNA, 25 bp, Homo sapien
ggaagctgccttgcgttctgtttgt

SEQ ID NO: 1527432 - DNA, 25 bp, Homo sapien
gaacattttcttgagcgtctcacat

SEQ ID NO: 1527433 - DNA, 25 bp, Homo sapien
agcacccacggcgtgaacattttct

SEQ ID NO: 1527434 - DNA, 25 bp, Homo sapien
cacccacggcgtgaacattttcttg

SEQ ID NO: 1527435 - DNA, 25 bp, Homo sapien
gcagcacccacggcgtgaacatttt

SEQ ID NO: 1527436 - DNA, 25 bp, Homo sapien
cttgcagcaggggtctccccaggcc

SEQ ID NO: 1527437 - DNA, 25 bp, Homo sapien
ccaggcccactccatggagggccat

SEQ ID NO: 1527438 - DNA, 25 bp, Homo sapien
ctccccaggcccactccatggaggg

SEQ ID NO: 1527439 - DNA, 25 bp, Homo sapien
ttgcagcaggggtctccccaggccc

SEQ ID NO: 1527440 - DNA, 25 bp, Homo sapien
tcagagggcctttgcaggtttcact

SEQ ID NO: 1527441 - DNA, 25 bp, Homo sapien
gagggcctttgcaggtttcactggt

SEQ ID NO: 1527442 - DNA, 25 bp, Homo sapien
ctttgcaggtttcactggtgggggg

SEQ ID NO: 1527443 - DNA, 25 bp, Homo sapien
cctttgcaggtttcactggtggggg

SEQ ID NO: 1527444 - DNA, 25 bp, Homo sapien
cagatgccgtctggatccttaggag

SEQ ID NO: 1527445 - DNA, 25 bp, Homo sapien
ttcttggcagatgccgtctggatcc

SEQ ID NO: 1527446 - DNA, 25 bp, Homo sapien
ggttctgattccaggcaggcttgct

SEQ ID NO: 1527447 - DNA, 25 bp, Homo sapien
ggagtgggctctttctggcagtcac

SEQ ID NO: 1527448 - DNA, 25 bp, Homo sapien
ttcaagtttccatctgttcacgcag

SEQ ID NO: 1527449 - DNA, 25 bp, Homo sapien
caccgaatttatgcatgttcaggca

SEQ ID NO: 1527450 - DNA, 25 bp, Homo sapien
tggctgacattttagcgggcttcca

SEQ ID NO: 1527451 - DNA, 25 bp, Homo sapien
gacgtgggctatttcttctggctga

SEQ ID NO: 1527452 - DNA, 25 bp, Homo sapien
ggccaccccgatgggcacatgcccc

SEQ ID NO: 1527453 - DNA, 25 bp, Homo sapien
cacggccaccccgatgggcacatgc

SEQ ID NO: 1527454 - DNA, 25 bp, Homo sapien
cctgccacggccaccccgatgggca

SEQ ID NO: 1527455 - DNA, 25 bp, Homo sapien
ctgccacggccaccccgatgggcac

SEQ ID NO: 1527456 - DNA, 25 bp, Homo sapien
gaatcaagtggctggatgcggcccc

SEQ ID NO: 1527457 - DNA, 25 bp, Homo sapien
ggatgcggccccagatgtgatccat

SEQ ID NO: 1527458 - DNA, 25 bp, Homo sapien
gaacagggagtgtgcttgaaggact

SEQ ID NO: 1527459 - DNA, 25 bp, Homo sapien
gggttgcttcccaaggaatcaagtg

SEQ ID NO: 1527460 - DNA, 25 bp, Homo sapien
agatttccctggctttgaactggta

SEQ ID NO: 1527461 - DNA, 25 bp, Homo sapien
atttccctggctttgaactggtatt

SEQ ID NO: 1527462 - DNA, 25 bp, Homo sapien
ctagatttccctggctttgaactgg

SEQ ID NO: 1527463 - DNA, 25 bp, Homo sapien
gatttccctggctttgaactggtat

SEQ ID NO: 1527464 - DNA, 25 bp, Homo sapien
gcttgcagtaccgacgtctgctctt

SEQ ID NO: 1527465 - DNA, 25 bp, Homo sapien
ttgcagtaccgacgtctgctcttgg

SEQ ID NO: 1527466 - DNA, 25 bp, Homo sapien
ggcgggcttgcagtaccgacgtctg

SEQ ID NO: 1527467 - DNA, 25 bp, Homo sapien
cgggcttgcagtaccgacgtctgct

SEQ ID NO: 1527468 - DNA, 25 bp, Homo sapien
tgggttttctcctctataccacaga

SEQ ID NO: 1527469 - DNA, 25 bp, Homo sapien
ggttttctcctctataccacagacc

SEQ ID NO: 1527470 - DNA, 25 bp, Homo sapien
cgtccctgaatgtgggttttctcct

SEQ ID NO: 1527471 - DNA, 25 bp, Homo sapien
tgtgggttttctcctctataccaca

SEQ ID NO: 1527472 - DNA, 25 bp, Homo sapien
tgcacggtgcaacccattgttcttg

SEQ ID NO: 1527473 - DNA, 25 bp, Homo sapien
gaggctgcacggtgcaacccattgt

SEQ ID NO: 1527474 - DNA, 25 bp, Homo sapien
tgttcttgctcagcaaaggcgccca

SEQ ID NO: 1527475 - DNA, 25 bp, Homo sapien
ggtgggtgaggctgcacggtgcaac

SEQ ID NO: 1527476 - DNA, 25 bp, Homo sapien
agggatgggggcatgacaagcctcc

SEQ ID NO: 1527477 - DNA, 25 bp, Homo sapien
gggatgggggcatgacaagcctcct

SEQ ID NO: 1527478 - DNA, 25 bp, Homo sapien
ttgtagaggtatctggctgccccca

SEQ ID NO: 1527479 - DNA, 25 bp, Homo sapien
ccttgtagaggtatctggctgcccc

SEQ ID NO: 1527480 - DNA, 25 bp, Homo sapien
agcacaatcacaggtgtgaaggtga

SEQ ID NO: 1527481 - DNA, 25 bp, Homo sapien
cagcacaatcacaggtgtgaaggtg

SEQ ID NO: 1527482 - DNA, 25 bp, Homo sapien
tcagcacaatcacaggtgtgaaggt

SEQ ID NO: 1527483 - DNA, 25 bp, Homo sapien
tcactgaggccggtgagtgccctgt

SEQ ID NO: 1527484 - DNA, 25 bp, Homo sapien
acgtttgccgtatcccatctccatg

SEQ ID NO: 1527485 - DNA, 25 bp, Homo sapien
tttcctggcggtcacataggttggg

SEQ ID NO: 1527486 - DNA, 25 bp, Homo sapien
tgtgtcgtgactgcctctcgttgtg

SEQ ID NO: 1527487 - DNA, 25 bp, Homo sapien
cgtctacatgtttggtgctgtctgc

SEQ ID NO: 1527488 - DNA, 25 bp, Homo sapien
cattttacatttctcgtctacatgt

SEQ ID NO: 1527489 - DNA, 25 bp, Homo sapien
catttctcgtctacatgtttggtgc

SEQ ID NO: 1527490 - DNA, 25 bp, Homo sapien
tctcgtctacatgtttggtgctgtc

SEQ ID NO: 1527491 - DNA, 25 bp, Homo sapien
actggtgcagtagactgtcctggtt

SEQ ID NO: 1527492 - DNA, 25 bp, Homo sapien
cctggactggtgcagtagactgtcc

SEQ ID NO: 1527493 - DNA, 25 bp, Homo sapien
gcagtagactgtcctggttgcagtg

SEQ ID NO: 1527494 - DNA, 25 bp, Homo sapien
gtagactgtcctggttgcagtggtc

SEQ ID NO: 1527495 - DNA, 25 bp, Homo sapien
attcagtctggcaatgtggcattct

SEQ ID NO: 1527496 - DNA, 25 bp, Homo sapien
tggcaatgtggcattctggcaatgt

SEQ ID NO: 1527497 - DNA, 25 bp, Homo sapien
ggcattctggcaatgtggcccacgg

SEQ ID NO: 1527498 - DNA, 25 bp, Homo sapien
aatgtggcattctggcaatgtggcc

SEQ ID NO: 1527499 - DNA, 25 bp, Homo sapien
taaaccaattgggtacaaccatgca

SEQ ID NO: 1527500 - DNA, 25 bp, Homo sapien
aaccatctagtgcatattagcaggc

SEQ ID NO: 1527501 - DNA, 25 bp, Homo sapien
taaatgcagttcaaaattaggtaaa

SEQ ID NO: 1527502 - DNA, 25 bp, Homo sapien
acctactgataagtgcatctgcaca

SEQ ID NO: 1527503 - DNA, 25 bp, Homo sapien
tacagaaggcttgatcccacggctg

SEQ ID NO: 1527504 - DNA, 25 bp, Homo sapien
ttcccagtgacatcacaattagtac

SEQ ID NO: 1527505 - DNA, 25 bp, Homo sapien
gaaccatttgaatcccaggacagga

SEQ ID NO: 1527506 - DNA, 25 bp, Homo sapien
agtattccaggaggtggtcaacacc

SEQ ID NO: 1527507 - DNA, 25 bp, Homo sapien
tttcctatactaaggctccttcaag

SEQ ID NO: 1527508 - DNA, 25 bp, Homo sapien
gtttcctatactaaggctccttcaa

SEQ ID NO: 1527509 - DNA, 25 bp, Homo sapien
ggtttcctatactaaggctccttca

SEQ ID NO: 1527510 - DNA, 25 bp, Homo sapien
ctcacgggccagcttacctgggtct

SEQ ID NO: 1527511 - DNA, 25 bp, Homo sapien
ctggcgatgggaaccacgcctcacg

SEQ ID NO: 1527512 - DNA, 25 bp, Homo sapien
gggccagcttacctgggtcttgact

SEQ ID NO: 1527513 - DNA, 25 bp, Homo sapien
gcgatgggaaccacgcctcacgggc

SEQ ID NO: 1527514 - DNA, 25 bp, Homo sapien
agggtgaccgaagaaattgccagca

SEQ ID NO: 1527515 - DNA, 25 bp, Homo sapien
ggcagggtgaccgaagaaattgcca

SEQ ID NO: 1527516 - DNA, 25 bp, Homo sapien
cagctggtcagcgcggctgttgtct

SEQ ID NO: 1527517 - DNA, 25 bp, Homo sapien
cagcagctggtcagcgcggctgttg

SEQ ID NO: 1527518 - DNA, 25 bp, Homo sapien
ttgggacaagcaaatttacataagg

SEQ ID NO: 1527519 - DNA, 25 bp, Homo sapien
cttgggacaagcaaatttacataag

SEQ ID NO: 1527520 - DNA, 25 bp, Homo sapien
tgggacaagcaaatttacataaggg

SEQ ID NO: 1527521 - DNA, 25 bp, Homo sapien
acagtgatagaggacgggggagagt

SEQ ID NO: 1527522 - DNA, 25 bp, Homo sapien
tagaggacgggggagagttgggcac

SEQ ID NO: 1527523 - DNA, 25 bp, Homo sapien
ctgtggggacagtgatagaggacgg

SEQ ID NO: 1527524 - DNA, 25 bp, Homo sapien
ggacagtgatagaggacgggggaga

SEQ ID NO: 1527525 - DNA, 25 bp, Homo sapien
taatgggtgcaagattctttgtcaa

SEQ ID NO: 1527526 - DNA, 25 bp, Homo sapien
ccggtgaggggggataatgggtgca

SEQ ID NO: 1527527 - DNA, 25 bp, Homo sapien
agcaagtgccactcgctgtccggct

SEQ ID NO: 1527528 - DNA, 25 bp, Homo sapien
gggataatgggtgcaagattctttg

SEQ ID NO: 1527529 - DNA, 25 bp, Homo sapien
gcacagggctggctctatgcgcatg

SEQ ID NO: 1527530 - DNA, 25 bp, Homo sapien
agtactggagggagctaacggcttc

SEQ ID NO: 1527531 - DNA, 25 bp, Homo sapien
ttgcactgtccctcgaaggccagca

SEQ ID NO: 1527532 - DNA, 25 bp, Homo sapien
caagtctgtgccagagttgatgggc

SEQ ID NO: 1527533 - DNA, 25 bp, Homo sapien
gatctggccccagcaaacagcagtg

SEQ ID NO: 1527534 - DNA, 25 bp, Homo sapien
ctggccccagcaaacagcagtgcat

SEQ ID NO: 1527535 - DNA, 25 bp, Homo sapien
tcctctgctggccaccccctttgcc

SEQ ID NO: 1527536 - DNA, 25 bp, Homo sapien
accccctttgcctgcagatctggcc

SEQ ID NO: 1527537 - DNA, 25 bp, Homo sapien
tggcctgacattgctgcatcggtgc

SEQ ID NO: 1527538 - DNA, 25 bp, Homo sapien
tgacattgctgcatcggtgccatca

SEQ ID NO: 1527539 - DNA, 25 bp, Homo sapien
acattgctgcatcggtgccatcaca

SEQ ID NO: 1527540 - DNA, 25 bp, Homo sapien
gcctgacattgctgcatcggtgcca

SEQ ID NO: 1527541 - DNA, 25 bp, Homo sapien
tcagccaggggttggccagcagcag

SEQ ID NO: 1527542 - DNA, 25 bp, Homo sapien
tggccagcagcagcaagaggactca

SEQ ID NO: 1527543 - DNA, 25 bp, Homo sapien
ggccagcagcagcaagaggactcac

SEQ ID NO: 1527544 - DNA, 25 bp, Homo sapien
gccaggggttggccagcagcagcaa

SEQ ID NO: 1527545 - DNA, 25 bp, Homo sapien
ccttgcttgccccacgtcctcagca

SEQ ID NO: 1527546 - DNA, 25 bp, Homo sapien
cacgtcctcagcaacttggagtgct

SEQ ID NO: 1527547 - DNA, 25 bp, Homo sapien
cgtcctcagcaacttggagtgctga

SEQ ID NO: 1527548 - DNA, 25 bp, Homo sapien
ctgagttccaggaggagggtagcag

SEQ ID NO: 1527549 - DNA, 25 bp, Homo sapien
ggccgcgtgggctcggatcggctcc

SEQ ID NO: 1527550 - DNA, 25 bp, Homo sapien
tgttccatctcccgcggggggcgcg

SEQ ID NO: 1527551 - DNA, 25 bp, Homo sapien
gccgcgtgggctcggatcggctccg

SEQ ID NO: 1527552 - DNA, 25 bp, Homo sapien
gcggccgcgtgggctcggatcggct

SEQ ID NO: 1527553 - DNA, 25 bp, Homo sapien
aggcggcaggtatccgagggcaccg

SEQ ID NO: 1527554 - DNA, 25 bp, Homo sapien
tatccgagggcaccgagccggttcc

SEQ ID NO: 1527555 - DNA, 25 bp, Homo sapien
cggcaggtatccgagggcaccgagc

SEQ ID NO: 1527556 - DNA, 25 bp, Homo sapien
agcagaggcggcaggtatccgaggg

SEQ ID NO: 1527557 - DNA, 25 bp, Homo sapien
acgctgagcgccagctcgtgcagca

SEQ ID NO: 1527558 - DNA, 25 bp, Homo sapien
gaacgcgcagggcatttcgatgtcg

SEQ ID NO: 1527559 - DNA, 25 bp, Homo sapien
ccagcgaatacgaggtggctccgct

SEQ ID NO: 1527560 - DNA, 25 bp, Homo sapien
tggctccttgaggtaccaccactga

SEQ ID NO: 1527561 - DNA, 25 bp, Homo sapien
gctgattttagttgcatccttattt

SEQ ID NO: 1527562 - DNA, 25 bp, Homo sapien
gattttagttgcatccttatttgtt

SEQ ID NO: 1527563 - DNA, 25 bp, Homo sapien
ttttagttgcatccttatttgttac

SEQ ID NO: 1527564 - DNA, 25 bp, Homo sapien
ctgattttagttgcatccttatttg

SEQ ID NO: 1527565 - DNA, 25 bp, Homo sapien
ctgcaagagagcagggttagaggcc

SEQ ID NO: 1527566 - DNA, 25 bp, Homo sapien
aagagagcagggttagaggccgggc

SEQ ID NO: 1527567 - DNA, 25 bp, Homo sapien
agagcagggttagaggccgggctgg

SEQ ID NO: 1527568 - DNA, 25 bp, Homo sapien
agcagggttagaggccgggctgggc

SEQ ID NO: 1527569 - DNA, 25 bp, Homo sapien
gccgaagccggtgtgagatgtcatt

SEQ ID NO: 1527570 - DNA, 25 bp, Homo sapien
cagacagccgaagccggtgtgagat

SEQ ID NO: 1527571 - DNA, 25 bp, Homo sapien
gcagccgcacggcagacagccgaag

SEQ ID NO: 1527572 - DNA, 25 bp, Homo sapien
cggtgtgagatgtcattgccctgga

SEQ ID NO: 1527573 - DNA, 25 bp, Homo sapien
gcgcagcatcgcctgggccttgtgc

SEQ ID NO: 1527574 - DNA, 25 bp, Homo sapien
tcctgcgtgtcgtcgtcgctgtagt

SEQ ID NO: 1527575 - DNA, 25 bp, Homo sapien
cgaagcgcgagagcacgcgcagcat

SEQ ID NO: 1527576 - DNA, 25 bp, Homo sapien
tgctctggatgtgggacacggcctc

SEQ ID NO: 1527577 - DNA, 25 bp, Homo sapien
cgcgttgttggcgttggcggcgctg

SEQ ID NO: 1527578 - DNA, 25 bp, Homo sapien
cgttgttggcgttggcggcgctggc

SEQ ID NO: 1527579 - DNA, 25 bp, Homo sapien
gcccgcgttgttggcgttggcggcg

SEQ ID NO: 1527580 - DNA, 25 bp, Homo sapien
gcgcccgcgttgttggcgttggcgg

SEQ ID NO: 1527581 - DNA, 25 bp, Homo sapien
ctgccgcgactgtggtggtgggcgt

SEQ ID NO: 1527582 - DNA, 25 bp, Homo sapien
ctgcgggatcgatggcggcgggagg

SEQ ID NO: 1527583 - DNA, 25 bp, Homo sapien
gggctcttgtcgccgcggccgggct

SEQ ID NO: 1527584 - DNA, 25 bp, Homo sapien
ctgccgcggcctcggggactgcggg

SEQ ID NO: 1527585 - DNA, 25 bp, Homo sapien
ggcggcgacgctgacgaggcagcag

SEQ ID NO: 1527586 - DNA, 25 bp, Homo sapien
cggcgacgctgacgaggcagcagca

SEQ ID NO: 1527587 - DNA, 25 bp, Homo sapien
ggcgacgctgacgaggcagcagcag

SEQ ID NO: 1527588 - DNA, 25 bp, Homo sapien
tggcggcgacgctgacgaggcagca

SEQ ID NO: 1527589 - DNA, 25 bp, Homo sapien
ccgagccgtgcctctggcgcagcag

SEQ ID NO: 1527590 - DNA, 25 bp, Homo sapien
agccgtgcctctggcgcagcaggac

SEQ ID NO: 1527591 - DNA, 25 bp, Homo sapien
cgtgcctctggcgcagcaggaccgc

SEQ ID NO: 1527592 - DNA, 25 bp, Homo sapien
gagccgtgcctctggcgcagcagga

SEQ ID NO: 1527593 - DNA, 25 bp, Homo sapien
gcatccaagacggatgaggccttcg

SEQ ID NO: 1527594 - DNA, 25 bp, Homo sapien
gaggccttcggatcaagccaatagc

SEQ ID NO: 1527595 - DNA, 25 bp, Homo sapien
caagacggatgaggccttcggatca

SEQ ID NO: 1527596 - DNA, 25 bp, Homo sapien
ttccccagtagcctgagggacagtc

SEQ ID NO: 1527597 - DNA, 25 bp, Homo sapien
caccttctgggcaccccaaaggaga

SEQ ID NO: 1527598 - DNA, 25 bp, Homo sapien
gagactggaggttctttctgagatg

SEQ ID NO: 1527599 - DNA, 25 bp, Homo sapien
ccaaaggagacttggagagagactg

SEQ ID NO: 1527600 - DNA, 25 bp, Homo sapien
tctgagatgtgtctacacagttcct

SEQ ID NO: 1527601 - DNA, 25 bp, Homo sapien
gtggttccgagcaaagcagctggct

SEQ ID NO: 1527602 - DNA, 25 bp, Homo sapien
ggctgctgtggttccgagcaaagca

SEQ ID NO: 1527603 - DNA, 25 bp, Homo sapien
tgctgtggttccgagcaaagcagct

SEQ ID NO: 1527604 - DNA, 25 bp, Homo sapien
tcagggcgctcagcagtacctggtg

SEQ ID NO: 1527605 - DNA, 25 bp, Homo sapien
tcccaactactagtccatcctggta

SEQ ID NO: 1527606 - DNA, 25 bp, Homo sapien
tagtccatcctggtagcccaccatt

SEQ ID NO: 1527607 - DNA, 25 bp, Homo sapien
tcctggtagcccaccatttctgagc

SEQ ID NO: 1527608 - DNA, 25 bp, Homo sapien
gagttcttcccaactactagtccat

SEQ ID NO: 1527609 - DNA, 25 bp, Homo sapien
caagagtgggtctgtggtgtagcta

SEQ ID NO: 1527610 - DNA, 25 bp, Homo sapien
gcaggcgcaggaacttatgcagagc

SEQ ID NO: 1527611 - DNA, 25 bp, Homo sapien
tctgtggtgtagctacggccggtgc

SEQ ID NO: 1527612 - DNA, 25 bp, Homo sapien
caggaacttatgcagagctaacagg

SEQ ID NO: 1527613 - DNA, 25 bp, Homo sapien
cctctgagatgctcgggttggtctt

SEQ ID NO: 1527614 - DNA, 25 bp, Homo sapien
gactgcatgggccaaactccaaatt

SEQ ID NO: 1527615 - DNA, 25 bp, Homo sapien
tcattgattcccatgcagactgcat

SEQ ID NO: 1527616 - DNA, 25 bp, Homo sapien
gctcaacagttcgtgcaaaatgaag

SEQ ID NO: 1527617 - DNA, 25 bp, Homo sapien
ttcttggctgatgaaggcagggagc

SEQ ID NO: 1527618 - DNA, 25 bp, Homo sapien
gggcaggtccctcataaaggtcgtg

SEQ ID NO: 1527619 - DNA, 25 bp, Homo sapien
tatttatgctgtggtagggtgtgca

SEQ ID NO: 1527620 - DNA, 25 bp, Homo sapien
ccatgtgtttctagggcccctggca

SEQ ID NO: 1527621 - DNA, 25 bp, Homo sapien
caggcaacatggcttagaggaagcc

SEQ ID NO: 1527622 - DNA, 25 bp, Homo sapien
cttccgcagagcctgatcttgagcc

SEQ ID NO: 1527623 - DNA, 25 bp, Homo sapien
gcctgatcttgagccaaacaggcaa

SEQ ID NO: 1527624 - DNA, 25 bp, Homo sapien
ccaggagccatccaactgcagtgtg

SEQ ID NO: 1527625 - DNA, 25 bp, Homo sapien
catctgcacagtctgtgttctcatc

SEQ ID NO: 1527626 - DNA, 25 bp, Homo sapien
ggtggtccccggaacacagtgccat

SEQ ID NO: 1527627 - DNA, 25 bp, Homo sapien
acagtgccatgtggccccccagggc

SEQ ID NO: 1527628 - DNA, 25 bp, Homo sapien
gaaggtggtccccggaacacagtgc

SEQ ID NO: 1527629 - DNA, 25 bp, Homo sapien
gggcccccatatgcctgtttctgag

SEQ ID NO: 1527630 - DNA, 25 bp, Homo sapien
tgagtttagagattcgtttggcttc

SEQ ID NO: 1527631 - DNA, 25 bp, Homo sapien
tagagattcgtttggcttctacctc

SEQ ID NO: 1527632 - DNA, 25 bp, Homo sapien
aacgtggtgagtttagagattcgtt

SEQ ID NO: 1527633 - DNA, 25 bp, Homo sapien
tggtgagtttagagattcgtttggc

SEQ ID NO: 1527634 - DNA, 25 bp, Homo sapien
ctctcaccctggtgattggttcagg

SEQ ID NO: 1527635 - DNA, 25 bp, Homo sapien
ctctctcaccctggtgattggttca

SEQ ID NO: 1527636 - DNA, 25 bp, Homo sapien
tctctcaccctggtgattggttcag

SEQ ID NO: 1527637 - DNA, 25 bp, Homo sapien
agggagcactctgagactgccctga

SEQ ID NO: 1527638 - DNA, 25 bp, Homo sapien
gaagacattgctggtgcggcttgca

SEQ ID NO: 1527639 - DNA, 25 bp, Homo sapien
ctggtgcggcttgcaaaagcaggat

SEQ ID NO: 1527640 - DNA, 25 bp, Homo sapien
tgcggcttgcaaaagcaggatgctc

SEQ ID NO: 1527641 - DNA, 25 bp, Homo sapien
cactggtggctttgagggttgcccc

SEQ ID NO: 1527642 - DNA, 25 bp, Homo sapien
ctggtggctttgagggttgcccctg

SEQ ID NO: 1527643 - DNA, 25 bp, Homo sapien
gcactggtggctttgagggttgccc

SEQ ID NO: 1527644 - DNA, 25 bp, Homo sapien
gagcactggtggctttgagggttgc

SEQ ID NO: 1527645 - DNA, 25 bp, Homo sapien
ctccctgcagcccaggtaccactgg

SEQ ID NO: 1527646 - DNA, 25 bp, Homo sapien
acctccctgcagcccaggtaccact

SEQ ID NO: 1527647 - DNA, 25 bp, Homo sapien
caacctccctgcagcccaggtacca

SEQ ID NO: 1527648 - DNA, 25 bp, Homo sapien
tccctgcagcccaggtaccactggt

SEQ ID NO: 1527649 - DNA, 25 bp, Homo sapien
ctggaaagggattcggctactgaga

SEQ ID NO: 1527650 - DNA, 25 bp, Homo sapien
gggtaaaggcatgtggaatgcttgc

SEQ ID NO: 1527651 - DNA, 25 bp, Homo sapien
tactgagaacgtcgtaggcggtgtt

SEQ ID NO: 1527652 - DNA, 25 bp, Homo sapien
ggtcttttccgcctgcatcttttgg

SEQ ID NO: 1527653 - DNA, 25 bp, Homo sapien
cagctgctgtcgcagactctcggag

SEQ ID NO: 1527654 - DNA, 25 bp, Homo sapien
tatgcgtgacatcaccggcgctcgc

SEQ ID NO: 1527655 - DNA, 25 bp, Homo sapien
gctgtcgcagactctcggagctcgg

SEQ ID NO: 1527656 - DNA, 25 bp, Homo sapien
ggagatggcgctatgcgtgacatca

SEQ ID NO: 1527657 - DNA, 25 bp, Homo sapien
catcggagtcattcgcctctttctg

SEQ ID NO: 1527658 - DNA, 25 bp, Homo sapien
gacatcggagtcattcgcctctttc

SEQ ID NO: 1527659 - DNA, 25 bp, Homo sapien
ggagtcattcgcctctttctgagac

SEQ ID NO: 1527660 - DNA, 25 bp, Homo sapien
ctggacatcggagtcattcgcctct

SEQ ID NO: 1527661 - DNA, 25 bp, Homo sapien
gagaactacagactttgatccagcc

SEQ ID NO: 1527662 - DNA, 25 bp, Homo sapien
gacaaggttgaatgatgctgcccac

SEQ ID NO: 1527663 - DNA, 25 bp, Homo sapien
tatagccttcgagggagctcacagt

SEQ ID NO: 1527664 - DNA, 25 bp, Homo sapien
gaaaggacatctcaatcagtgctgg

SEQ ID NO: 1527665 - DNA, 25 bp, Homo sapien
ggacaagggggtgcggcgctcactg

SEQ ID NO: 1527666 - DNA, 25 bp, Homo sapien
atcccaggcatcccgcccgccattc

SEQ ID NO: 1527667 - DNA, 25 bp, Homo sapien
caggcggacaagggggtgcggcgct

SEQ ID NO: 1527668 - DNA, 25 bp, Homo sapien
ggcggacaagggggtgcggcgctca

SEQ ID NO: 1527669 - DNA, 25 bp, Homo sapien
tgcgcttcaggaaggccctcacgaa

SEQ ID NO: 1527670 - DNA, 25 bp, Homo sapien
ctcatgcggggcgtgctgcgcttca

SEQ ID NO: 1527671 - DNA, 25 bp, Homo sapien
cttgcgctgcagctggtcctcgcgg

SEQ ID NO: 1527672 - DNA, 25 bp, Homo sapien
aggaaggccctcacgaaggcctcgg

SEQ ID NO: 1527673 - DNA, 25 bp, Homo sapien
gtttaatgtcaaagagccgcagctc

SEQ ID NO: 1527674 - DNA, 25 bp, Homo sapien
tctggtttaatgtcaaagagccgca

SEQ ID NO: 1527675 - DNA, 25 bp, Homo sapien
tcttcttctccttgcgcttgtggcg

SEQ ID NO: 1527676 - DNA, 25 bp, Homo sapien
cttcttctccttgcgcttgtggcgg

SEQ ID NO: 1527677 - DNA, 25 bp, Homo sapien
tcttgtggcagacgacagagaggcc

SEQ ID NO: 1527678 - DNA, 25 bp, Homo sapien
gaaacttctgaaacgtgtgggcaac

SEQ ID NO: 1527679 - DNA, 25 bp, Homo sapien
ccagattggtaaaggaaggctgccc

SEQ ID NO: 1527680 - DNA, 25 bp, Homo sapien
ctttggcaatgaaacccgagtgggt

SEQ ID NO: 1527681 - DNA, 25 bp, Homo sapien
tgatgccaacaactgcaacctggga

SEQ ID NO: 1527682 - DNA, 25 bp, Homo sapien
catgagcttgggatgacaatgtcca

SEQ ID NO: 1527683 - DNA, 25 bp, Homo sapien
gaactatgtgcaaatccgacgatga

SEQ ID NO: 1527684 - DNA, 25 bp, Homo sapien
tcctcattggtaggaccacaccagc

SEQ ID NO: 1527685 - DNA, 25 bp, Homo sapien
tgcacaggtccctgatgtactgttt

SEQ ID NO: 1527686 - DNA, 25 bp, Homo sapien
cagagttcatggagagggaggaaaa

SEQ ID NO: 1527687 - DNA, 25 bp, Homo sapien
tccagagttcatggagagggaggaa

SEQ ID NO: 1527688 - DNA, 25 bp, Homo sapien
cactgcacaggtccctgatgtactg

SEQ ID NO: 1527689 - DNA, 25 bp, Homo sapien
cttggcctgaatcatctgtggctgc

SEQ ID NO: 1527690 - DNA, 25 bp, Homo sapien
cccgtgaagatctgcctttaagagc

SEQ ID NO: 1527691 - DNA, 25 bp, Homo sapien
tgaaataatagccccgtgaagatct

SEQ ID NO: 1527692 - DNA, 25 bp, Homo sapien
gatctgcctttaagagcttggcctg

SEQ ID NO: 1527693 - DNA, 25 bp, Homo sapien
ggattcctgtaatacccacataaga

SEQ ID NO: 1527694 - DNA, 25 bp, Homo sapien
ctttcaggcggtcttctttggtgat

SEQ ID NO: 1527695 - DNA, 25 bp, Homo sapien
ctttgtttcctgtagaaggattcct

SEQ ID NO: 1527696 - DNA, 25 bp, Homo sapien
caggcggtcttctttggtgataatt

SEQ ID NO: 1527697 - DNA, 25 bp, Homo sapien
gaccgttcacttgaccgaagctgga

SEQ ID NO: 1527698 - DNA, 25 bp, Homo sapien
gaatttgctcccgtaaatgtaggaa

SEQ ID NO: 1527699 - DNA, 25 bp, Homo sapien
gctttgaacttcttcgcagaccgtt

SEQ ID NO: 1527700 - DNA, 25 bp, Homo sapien
cagtgaacacgcagtttagcttggg

SEQ ID NO: 1527701 - DNA, 25 bp, Homo sapien
tcaactcggagcgtcactggctgga

SEQ ID NO: 1527702 - DNA, 25 bp, Homo sapien
gacttcttcacttagtacgctgcga

SEQ ID NO: 1527703 - DNA, 25 bp, Homo sapien
tacgctgcgaccttcccatgttgtt

SEQ ID NO: 1527704 - DNA, 25 bp, Homo sapien
tcaaccagtgttaaccccggtgtgc

SEQ ID NO: 1527705 - DNA, 25 bp, Homo sapien
ctgaaatagcaaagtaaaccttagg

SEQ ID NO: 1527706 - DNA, 25 bp, Homo sapien
gtcagagttccacccaaaggcgagc

SEQ ID NO: 1527707 - DNA, 25 bp, Homo sapien
ccaaaggcgagcctctgtagacacc

SEQ ID NO: 1527708 - DNA, 25 bp, Homo sapien
acctgccatccaatggacctttggg

SEQ ID NO: 1527709 - DNA, 25 bp, Homo sapien
tgcagcaggtctcacctcgggaggt

SEQ ID NO: 1527710 - DNA, 25 bp, Homo sapien
ttgctgatcggcagagacttgctcc

SEQ ID NO: 1527711 - DNA, 25 bp, Homo sapien
ggtccaccccagctatgattcctga

SEQ ID NO: 1527712 - DNA, 25 bp, Homo sapien
cgaggcaccgtgttggtccctgtga

SEQ ID NO: 1527713 - DNA, 25 bp, Homo sapien
tgtggcagatgaggacggccacacc

SEQ ID NO: 1527714 - DNA, 25 bp, Homo sapien
ggctccatgtgcctagcccgtgcgt

SEQ ID NO: 1527715 - DNA, 25 bp, Homo sapien
taggcaagaggtccctcgaagtctg

SEQ ID NO: 1527716 - DNA, 25 bp, Homo sapien
ggagagcacttgagctgcctcagaa

SEQ ID NO: 1527717 - DNA, 25 bp, Homo sapien
aatctacccttgagtcagcgaggcc

SEQ ID NO: 1527718 - DNA, 25 bp, Homo sapien
gatggctaggaagctacagcaccta

SEQ ID NO: 1527719 - DNA, 25 bp, Homo sapien
aacagtggacgccttttacattgca

SEQ ID NO: 1527720 - DNA, 25 bp, Homo sapien
gaatagatgccacttcccactcaag

SEQ ID NO: 1527721 - DNA, 25 bp, Homo sapien
tgggagatatgacccctgggtgggc

SEQ ID NO: 1527722 - DNA, 25 bp, Homo sapien
gtgagtagacacccagaccgaggct

SEQ ID NO: 1527723 - DNA, 25 bp, Homo sapien
agtagacacccagaccgaggctgga

SEQ ID NO: 1527724 - DNA, 25 bp, Homo sapien
gcacctctcaaacctgtttccgtgc

SEQ ID NO: 1527725 - DNA, 25 bp, Homo sapien
acctctcaaacctgtttccgtgcat

SEQ ID NO: 1527726 - DNA, 25 bp, Homo sapien
ctccactcgcctagtggggctgcca

SEQ ID NO: 1527727 - DNA, 25 bp, Homo sapien
tccactcgcctagtggggctgccac

SEQ ID NO: 1527728 - DNA, 25 bp, Homo sapien
ccactcgcctagtggggctgccacc

SEQ ID NO: 1527729 - DNA, 25 bp, Homo sapien
cactcgcctagtggggctgccaccc

SEQ ID NO: 1527730 - DNA, 25 bp, Homo sapien
tcagcagcttggacggctggagcca

SEQ ID NO: 1527731 - DNA, 25 bp, Homo sapien
ttttactcaatggagccagaatggg

SEQ ID NO: 1527732 - DNA, 25 bp, Homo sapien
cttttactcaatggagccagaatgg

SEQ ID NO: 1527733 - DNA, 25 bp, Homo sapien
gaatggggctgctaccataaaaacc

SEQ ID NO: 1527734 - DNA, 25 bp, Homo sapien
gccagaatggggctgctaccataaa

SEQ ID NO: 1527735 - DNA, 25 bp, Homo sapien
ttgcaccgggggtccgtggagcact

SEQ ID NO: 1527736 - DNA, 25 bp, Homo sapien
caccgggggtccgtggagcactcgg

SEQ ID NO: 1527737 - DNA, 25 bp, Homo sapien
tgttgcaccgggggtccgtggagca

SEQ ID NO: 1527738 - DNA, 25 bp, Homo sapien
gactgttgcaccgggggtccgtgga

SEQ ID NO: 1527739 - DNA, 25 bp, Homo sapien
ttctccgagcccctgcatcgagctg

SEQ ID NO: 1527740 - DNA, 25 bp, Homo sapien
cctttgcgctgagcctgggactcag

SEQ ID NO: 1527741 - DNA, 25 bp, Homo sapien
ctgcatcgagctggcctttgcgctg

SEQ ID NO: 1527742 - DNA, 25 bp, Homo sapien
ggactcaggggcgaattcatcagag

SEQ ID NO: 1527743 - DNA, 25 bp, Homo sapien
gagcactcagtagtgacttaatcag

SEQ ID NO: 1527744 - DNA, 25 bp, Homo sapien
tgacttaatcagtgctctgtaggag

SEQ ID NO: 1527745 - DNA, 25 bp, Homo sapien
gggttacctgtagagcactcagtag

SEQ ID NO: 1527746 - DNA, 25 bp, Homo sapien
tgctaagatttgaaggggttacctg

SEQ ID NO: 1527747 - DNA, 25 bp, Homo sapien
catttccttaccttctcatcttgtt

SEQ ID NO: 1527748 - DNA, 25 bp, Homo sapien
ttccttaccttctcatcttgttcca

SEQ ID NO: 1527749 - DNA, 25 bp, Homo sapien
tttccttaccttctcatcttgttcc

SEQ ID NO: 1527750 - DNA, 25 bp, Homo sapien
tccttaccttctcatcttgttccat

SEQ ID NO: 1527751 - DNA, 25 bp, Homo sapien
gcgggactgtcgcccgtgtttgacc

SEQ ID NO: 1527752 - DNA, 25 bp, Homo sapien
gcgactgccgtcacccggtgggact

SEQ ID NO: 1527753 - DNA, 25 bp, Homo sapien
agggcgcccgagcttgtgcgcgctg

SEQ ID NO: 1527754 - DNA, 25 bp, Homo sapien
cgcgactgcgagacctgcgggactt

SEQ ID NO: 1527755 - DNA, 25 bp, Homo sapien
cgcctgccccgcgacccgcagcccg

SEQ ID NO: 1527756 - DNA, 25 bp, Homo sapien
gcgcctgccccgcgacccgcagccc

SEQ ID NO: 1527757 - DNA, 25 bp, Homo sapien
gcctgccccgcgacccgcagcccgg

SEQ ID NO: 1527758 - DNA, 25 bp, Homo sapien
acgctctgacccctgaccgctctcc

SEQ ID NO: 1527759 - DNA, 25 bp, Homo sapien
ttcttgggctggagtcagcggcact

SEQ ID NO: 1527760 - DNA, 25 bp, Homo sapien
tccaccagcttacatctgcgcgttt

SEQ ID NO: 1527761 - DNA, 25 bp, Homo sapien
gggattccgcctcggacgctctgac

SEQ ID NO: 1527762 - DNA, 25 bp, Homo sapien
gatctaggggcagagctccggtcct

SEQ ID NO: 1527763 - DNA, 25 bp, Homo sapien
ccagcgtgaggatgtgaggttttct

SEQ ID NO: 1527764 - DNA, 25 bp, Homo sapien
agtgccggcaggagacatcctgcag

SEQ ID NO: 1527765 - DNA, 25 bp, Homo sapien
tcagctgtgcaaagatctaggggca

SEQ ID NO: 1527766 - DNA, 25 bp, Homo sapien
aaagctgagccctgtccttactcat

SEQ ID NO: 1527767 - DNA, 25 bp, Homo sapien
caggctcagtaagcctgggagacca

SEQ ID NO: 1527768 - DNA, 25 bp, Homo sapien
gcctgcctcgggaagatgttggtga

SEQ ID NO: 1527769 - DNA, 25 bp, Homo sapien
caggcaacgaacagacctgcatctt

SEQ ID NO: 1527770 - DNA, 25 bp, Homo sapien
aagaactgctatttttagcttgctg

SEQ ID NO: 1527771 - DNA, 25 bp, Homo sapien
tgctatttttagcttgctgatcttg

SEQ ID NO: 1527772 - DNA, 25 bp, Homo sapien
gaactgctatttttagcttgctgat

SEQ ID NO: 1527773 - DNA, 25 bp, Homo sapien
tatttttagcttgctgatcttggct

SEQ ID NO: 1527774 - DNA, 25 bp, Homo sapien
gatgctgccatacaccaggatgtcg

SEQ ID NO: 1527775 - DNA, 25 bp, Homo sapien
gatgcgctggctgttgatctccgtg

SEQ ID NO: 1527776 - DNA, 25 bp, Homo sapien
tacttgcgcttgttgagcacgatgc

SEQ ID NO: 1527777 - DNA, 25 bp, Homo sapien
gatgtggctaatccattcctggcgc

SEQ ID NO: 1527778 - DNA, 25 bp, Homo sapien
gcaaaaaggcactgggagtccagaa

SEQ ID NO: 1527779 - DNA, 25 bp, Homo sapien
cagtgaagccataaggacacagtgt

SEQ ID NO: 1527780 - DNA, 25 bp, Homo sapien
tgcagtgaagccataaggacacagt

SEQ ID NO: 1527781 - DNA, 25 bp, Homo sapien
tgggagtccagaaagagccactccc

SEQ ID NO: 1527782 - DNA, 25 bp, Homo sapien
gtggctacactcccatcctgtcttc

SEQ ID NO: 1527783 - DNA, 25 bp, Homo sapien
tgtaaggtggcgtttgttaccaaga

SEQ ID NO: 1527784 - DNA, 25 bp, Homo sapien
caggcggtgggcaccagcgtggtgg

SEQ ID NO: 1527785 - DNA, 25 bp, Homo sapien
ggtgtgcctgtcagggtgcaggtgg

SEQ ID NO: 1527786 - DNA, 25 bp, Homo sapien
cacatgtctgatcggcagggcttgg

SEQ ID NO: 1527787 - DNA, 25 bp, Homo sapien
tcggggagcccacatgtctgatcgg

SEQ ID NO: 1527788 - DNA, 25 bp, Homo sapien
gggagcccacatgtctgatcggcag

SEQ ID NO: 1527789 - DNA, 25 bp, Homo sapien
gagcccacatgtctgatcggcaggg

SEQ ID NO: 1527790 - DNA, 25 bp, Homo sapien
aaaaggcatgagacagctggacacc

SEQ ID NO: 1527791 - DNA, 25 bp, Homo sapien
aaaaaggcatgagacagctggacac

SEQ ID NO: 1527792 - DNA, 25 bp, Homo sapien
caatggtttcgctgaccacacggag

SEQ ID NO: 1527793 - DNA, 25 bp, Homo sapien
gaaaacaatggtttcgctgaccaca

SEQ ID NO: 1527794 - DNA, 25 bp, Homo sapien
ggggcagcagcagttctgttccagc

SEQ ID NO: 1527795 - DNA, 25 bp, Homo sapien
cctaacaccttgggacttggggcag

SEQ ID NO: 1527796 - DNA, 25 bp, Homo sapien
gggcagcagcagttctgttccagcc

SEQ ID NO: 1527797 - DNA, 25 bp, Homo sapien
aacaccttgggacttggggcagcag

SEQ ID NO: 1527798 - DNA, 25 bp, Homo sapien
gaaggctctgcgaaggtcctgggcc

SEQ ID NO: 1527799 - DNA, 25 bp, Homo sapien
catgctgtgcgggccttgtttgtct

SEQ ID NO: 1527800 - DNA, 25 bp, Homo sapien
tttgtctcactcccagcggtgtccc

SEQ ID NO: 1527801 - DNA, 25 bp, Homo sapien
caagaccgcaggtgtgaaggctctg

SEQ ID NO: 1527802 - DNA, 25 bp, Homo sapien
aggagcggttctggcctgcccctgt

SEQ ID NO: 1527803 - DNA, 25 bp, Homo sapien
caggagcggttctggcctgcccctg

SEQ ID NO: 1527804 - DNA, 25 bp, Homo sapien
gcccctcaaatgcatgggcctgttc

SEQ ID NO: 1527805 - DNA, 25 bp, Homo sapien
ggcctgttctcggaccctctcctca

SEQ ID NO: 1527806 - DNA, 25 bp, Homo sapien
gtgcctgaatgcaccacagatgcct

SEQ ID NO: 1527807 - DNA, 25 bp, Homo sapien
agaggaagcatgatgggcgtagctg

SEQ ID NO: 1527808 - DNA, 25 bp, Homo sapien
aggaagcatgatgggcgtagctgtg

SEQ ID NO: 1527809 - DNA, 25 bp, Homo sapien
aagcatgatgggcgtagctgtgctg

SEQ ID NO: 1527810 - DNA, 25 bp, Homo sapien
gaagcatgatgggcgtagctgtgct

SEQ ID NO: 1527811 - DNA, 25 bp, Homo sapien
tgtacgaagtgtcccagtgtgctgc

SEQ ID NO: 1527812 - DNA, 25 bp, Homo sapien
tcagggattgggttgtgccagcaag

SEQ ID NO: 1527813 - DNA, 25 bp, Homo sapien
agtgtgctgctccagaatcccggag

SEQ ID NO: 1527814 - DNA, 25 bp, Homo sapien
tattagtaatttgcaaactgtacga

SEQ ID NO: 1527815 - DNA, 25 bp, Homo sapien
gacactggaactagctgggtcctgg

SEQ ID NO: 1527816 - DNA, 25 bp, Homo sapien
gaaatcaagcgctgcttctcagctc

SEQ ID NO: 1527817 - DNA, 25 bp, Homo sapien
gctttgggcctaaaagggcagcctg

SEQ ID NO: 1527818 - DNA, 25 bp, Homo sapien
aagggaaggcctgctcctatgccga

SEQ ID NO: 1527819 - DNA, 25 bp, Homo sapien
taagacaccgcattgcattgaatcg

SEQ ID NO: 1527820 - DNA, 25 bp, Homo sapien
tctcagacttgccttgttcacagcc

SEQ ID NO: 1527821 - DNA, 25 bp, Homo sapien
cttgaacacttggttaagggcatgt

SEQ ID NO: 1527822 - DNA, 25 bp, Homo sapien
tactgggcaggtatttcgtagaaca

SEQ ID NO: 1527823 - DNA, 25 bp, Homo sapien
cctcctacgcggaaatctggtgctt

SEQ ID NO: 1527824 - DNA, 25 bp, Homo sapien
ccgagtccctcctacgcggaaatct

SEQ ID NO: 1527825 - DNA, 25 bp, Homo sapien
gagtccctcctacgcggaaatctgg

SEQ ID NO: 1527826 - DNA, 25 bp, Homo sapien
ttccaattgcatcgttgcccccgag

SEQ ID NO: 1527827 - DNA, 25 bp, Homo sapien
acaggacagtgagtgactttgttcc

SEQ ID NO: 1527828 - DNA, 25 bp, Homo sapien
ggtcctcgcagagactcggagacta

SEQ ID NO: 1527829 - DNA, 25 bp, Homo sapien
tcggagactacccacaggacagtga

SEQ ID NO: 1527830 - DNA, 25 bp, Homo sapien
ccgtgcagtgggtcctcgcagagac

SEQ ID NO: 1527831 - DNA, 25 bp, Homo sapien
accacctgggacattagaagtagca

SEQ ID NO: 1527832 - DNA, 25 bp, Homo sapien
tacaggctgtctcgggatagtttgc

SEQ ID NO: 1527833 - DNA, 25 bp, Homo sapien
gtctagggcaagaaacggctggcca

SEQ ID NO: 1527834 - DNA, 25 bp, Homo sapien
tattagacagcttgggagactgcca

SEQ ID NO: 1527835 - DNA, 25 bp, Homo sapien
cttgttccacggcatcaaaggctcc

SEQ ID NO: 1527836 - DNA, 25 bp, Homo sapien
tgttccacggcatcaaaggctcctt

SEQ ID NO: 1527837 - DNA, 25 bp, Homo sapien
ttcgcatggacaattcctccacctt

SEQ ID NO: 1527838 - DNA, 25 bp, Homo sapien
ttcaggggccacttcgcatggacaa

SEQ ID NO: 1527839 - DNA, 25 bp, Homo sapien
tggatgtggatggttagagaggcca

SEQ ID NO: 1527840 - DNA, 25 bp, Homo sapien
catggatgtggatggttagagaggc

SEQ ID NO: 1527841 - DNA, 25 bp, Homo sapien
atgtggatggttagagaggccatgc

SEQ ID NO: 1527842 - DNA, 25 bp, Homo sapien
ccatgcaggcgcggggaaagccggt

SEQ ID NO: 1527843 - DNA, 25 bp, Homo sapien
gacccctgtacgtgaggagctcacc

SEQ ID NO: 1527844 - DNA, 25 bp, Homo sapien
aggaggcagcgcgacccctgtacgt

SEQ ID NO: 1527845 - DNA, 25 bp, Homo sapien
ctcatggctacagatgccagagcct

SEQ ID NO: 1527846 - DNA, 25 bp, Homo sapien
gggtcactcggcaaacattcctctc

SEQ ID NO: 1527847 - DNA, 25 bp, Homo sapien
ccacctggcaggtacccggtaggca

SEQ ID NO: 1527848 - DNA, 25 bp, Homo sapien
cacctggcaggtacccggtaggcat

SEQ ID NO: 1527849 - DNA, 25 bp, Homo sapien
ctcaggacagtctgtctttcctgtg

SEQ ID NO: 1527850 - DNA, 25 bp, Homo sapien
ggaactcaggtgagccagtccctct

SEQ ID NO: 1527851 - DNA, 25 bp, Homo sapien
tgatgaaaatgagcgagtgtctgtt

SEQ ID NO: 1527852 - DNA, 25 bp, Homo sapien
tccagcagagggccagagagcttgc

SEQ ID NO: 1527853 - DNA, 25 bp, Homo sapien
aggcagtcgtgggtcctccttgatt

SEQ ID NO: 1527854 - DNA, 25 bp, Homo sapien
tagtctggccgctgagggcaactca

SEQ ID NO: 1527855 - DNA, 25 bp, Homo sapien
cccagcgcctgcaaactccctgcag

SEQ ID NO: 1527856 - DNA, 25 bp, Homo sapien
aactggaggcagtcgtgggtcctcc

SEQ ID NO: 1527857 - DNA, 25 bp, Homo sapien
cgaagtcccgggagcagcccggtgg

SEQ ID NO: 1527858 - DNA, 25 bp, Homo sapien
gaggctgttttgctaacacgttaaa

SEQ ID NO: 1527859 - DNA, 25 bp, Homo sapien
tgctaacacgttaaagattaacgtg

SEQ ID NO: 1527860 - DNA, 25 bp, Homo sapien
attggaggctgttttgctaacacgt

SEQ ID NO: 1527861 - DNA, 25 bp, Homo sapien
ggctgttttgctaacacgttaaaga

SEQ ID NO: 1527862 - DNA, 25 bp, Homo sapien
ccggaaagtcatcccctctgggcag

SEQ ID NO: 1527863 - DNA, 25 bp, Homo sapien
ttcagcacccgtgtggatcccggaa

SEQ ID NO: 1527864 - DNA, 25 bp, Homo sapien
tgtggatcccggaaagtcatcccct

SEQ ID NO: 1527865 - DNA, 25 bp, Homo sapien
tctgggcagctgaattatggccaag

SEQ ID NO: 1527866 - DNA, 25 bp, Homo sapien
ttctcctggaatgttagacccaggg

SEQ ID NO: 1527867 - DNA, 25 bp, Homo sapien
gaataagacacctgtcatcagccat

SEQ ID NO: 1527868 - DNA, 25 bp, Homo sapien
tctcctggaatgttagacccagggg

SEQ ID NO: 1527869 - DNA, 25 bp, Homo sapien
ttcatcactttttcatccactgatg

SEQ ID NO: 1527870 - DNA, 25 bp, Homo sapien
cagcctaaaagtcactttttcatca

SEQ ID NO: 1527871 - DNA, 25 bp, Homo sapien
gcctaaaagtcactttttcatcact

SEQ ID NO: 1527872 - DNA, 25 bp, Homo sapien
gcccagcctaaaagtcactttttca

SEQ ID NO: 1527873 - DNA, 25 bp, Homo sapien
agaaaggcccccgatcatgggtgct

SEQ ID NO: 1527874 - DNA, 25 bp, Homo sapien
ccccgatcatgggtgctggacattt

SEQ ID NO: 1527875 - DNA, 25 bp, Homo sapien
cctgggatgatttctggcgtgagca

SEQ ID NO: 1527876 - DNA, 25 bp, Homo sapien
agcccggcatcacttggggcagcca

SEQ ID NO: 1527877 - DNA, 25 bp, Homo sapien
ccccactagagccatgccaatgagg

SEQ ID NO: 1527878 - DNA, 25 bp, Homo sapien
ggctgcgtgtgtgctgcccgcgtgt

SEQ ID NO: 1527879 - DNA, 25 bp, Homo sapien
cgcgcatggagccacgagggaaatt

SEQ ID NO: 1527880 - DNA, 25 bp, Homo sapien
gagggaaatttccagcacaaagacc

SEQ ID NO: 1527881 - DNA, 25 bp, Homo sapien
ggcaagctcggcacaggtgccaact

SEQ ID NO: 1527882 - DNA, 25 bp, Homo sapien
catcctggtgctcgggtgccacaag

SEQ ID NO: 1527883 - DNA, 25 bp, Homo sapien
tggaaagcatctccgattccgccag

SEQ ID NO: 1527884 - DNA, 25 bp, Homo sapien
ctcctcaggcaagctcggcacaggt

SEQ ID NO: 1527885 - DNA, 25 bp, Homo sapien
gtgtctgtgaggccacgagaacatg

SEQ ID NO: 1527886 - DNA, 25 bp, Homo sapien
agtgtctgtgaggccacgagaacat

SEQ ID NO: 1527887 - DNA, 25 bp, Homo sapien
gtctgtgaggccacgagaacatgcc

SEQ ID NO: 1527888 - DNA, 25 bp, Homo sapien
tgtctgtgaggccacgagaacatgc

SEQ ID NO: 1527889 - DNA, 25 bp, Homo sapien
tgactaccactttcctgatggcgtg

SEQ ID NO: 1527890 - DNA, 25 bp, Homo sapien
tcgttgctgggttatagactgccct

SEQ ID NO: 1527891 - DNA, 25 bp, Homo sapien
ctgatggcgtggaccacaacaggtc

SEQ ID NO: 1527892 - DNA, 25 bp, Homo sapien
cagcttctcgtatccccgtgtcgtt

SEQ ID NO: 1527893 - DNA, 25 bp, Homo sapien
gggtgaaggacagccactgcccaat

SEQ ID NO: 1527894 - DNA, 25 bp, Homo sapien
gccactgcccaatgttcctctcttc

SEQ ID NO: 1527895 - DNA, 25 bp, Homo sapien
cttcagcccaagggtgaaggacagc

SEQ ID NO: 1527896 - DNA, 25 bp, Homo sapien
tgaaggacagccactgcccaatgtt

SEQ ID NO: 1527897 - DNA, 25 bp, Homo sapien
gatgtcaggccatctcgcttcagct

SEQ ID NO: 1527898 - DNA, 25 bp, Homo sapien
acagaggtctttagaacctgatgga

SEQ ID NO: 1527899 - DNA, 25 bp, Homo sapien
cagcgagaccccagcagtcctcaag

SEQ ID NO: 1527900 - DNA, 25 bp, Homo sapien
cagctccagacacagccgcagcgag

SEQ ID NO: 1527901 - DNA, 25 bp, Homo sapien
ttcacaggtttgagtgaaagatgtg

SEQ ID NO: 1527902 - DNA, 25 bp, Homo sapien
gaaggaagccgcacagaggcccgtg

SEQ ID NO: 1527903 - DNA, 25 bp, Homo sapien
gaggcccgtgggaggcgctccatat

SEQ ID NO: 1527904 - DNA, 25 bp, Homo sapien
ctgagacattttgtaattggacatt

SEQ ID NO: 1527905 - DNA, 25 bp, Homo sapien
tccaggacccgtggtgtctggctgt

SEQ ID NO: 1527906 - DNA, 25 bp, Homo sapien
tcctcagctccaggacccgtggtgt

SEQ ID NO: 1527907 - DNA, 25 bp, Homo sapien
ggacccgtggtgtctggctgtccca

SEQ ID NO: 1527908 - DNA, 25 bp, Homo sapien
gctccaggacccgtggtgtctggct

SEQ ID NO: 1527909 - DNA, 25 bp, Homo sapien
cttcttttgcttctgttgttttcat

SEQ ID NO: 1527910 - DNA, 25 bp, Homo sapien
tcctctcagcatcttcttttgcttc

SEQ ID NO: 1527911 - DNA, 25 bp, Homo sapien
tcttcttttgcttctgttgttttca

SEQ ID NO: 1527912 - DNA, 25 bp, Homo sapien
caatttcctctcagcatcttctttt

SEQ ID NO: 1527913 - DNA, 25 bp, Homo sapien
cacaaccggtgctcttttagcctgc

SEQ ID NO: 1527914 - DNA, 25 bp, Homo sapien
acgaggtgccgtgcacacaaccggt

SEQ ID NO: 1527915 - DNA, 25 bp, Homo sapien
tgccgtgcacacaaccggtgctctt

SEQ ID NO: 1527916 - DNA, 25 bp, Homo sapien
cgggtccacgaggtgccgtgcacac

SEQ ID NO: 1527917 - DNA, 25 bp, Homo sapien
ccggctcagagcgggacatttaaaa

SEQ ID NO: 1527918 - DNA, 25 bp, Homo sapien
cagggtcttgtccgcggcggacggc

SEQ ID NO: 1527919 - DNA, 25 bp, Homo sapien
acggcgcgctccagtcccggcaggc

SEQ ID NO: 1527920 - DNA, 25 bp, Homo sapien
ggcggtggcgggatccgcgcctgcc

SEQ ID NO: 1527921 - DNA, 25 bp, Homo sapien
gcggcggtggcgggatccgcgcctg

SEQ ID NO: 1527922 - DNA, 25 bp, Homo sapien
cctcttcctggagcgagccgagaac

SEQ ID NO: 1527923 - DNA, 25 bp, Homo sapien
gagccgagaactccgcgccgccgtc

SEQ ID NO: 1527924 - DNA, 25 bp, Homo sapien
ttcctggagcgagccgagaactccg

SEQ ID NO: 1527925 - DNA, 25 bp, Homo sapien
tcttcctggagcgagccgagaactc

SEQ ID NO: 1527926 - DNA, 25 bp, Homo sapien
ccgtcctgtcgattttggccatttc

SEQ ID NO: 1527927 - DNA, 25 bp, Homo sapien
ggctcccacactggtccctcgccgt

SEQ ID NO: 1527928 - DNA, 25 bp, Homo sapien
tggtccctcgccgtcctgtcgattt

SEQ ID NO: 1527929 - DNA, 25 bp, Homo sapien
ctcgccgtcctgtcgattttggcca

SEQ ID NO: 1527930 - DNA, 25 bp, Homo sapien
tatctgtaatctcagacggtgccag

SEQ ID NO: 1527931 - DNA, 25 bp, Homo sapien
ccatatgggctgtggctgcattaga

SEQ ID NO: 1527932 - DNA, 25 bp, Homo sapien
tcttccaggctaggcacatatctgt

SEQ ID NO: 1527933 - DNA, 25 bp, Homo sapien
gtgccagtcaggaacaccaagcttc

SEQ ID NO: 1527934 - DNA, 25 bp, Homo sapien
tgggtaaacccggtcatcatcttct

SEQ ID NO: 1527935 - DNA, 25 bp, Homo sapien
agcctctggatggtgcaataatccg

SEQ ID NO: 1527936 - DNA, 25 bp, Homo sapien
gcttgcacgttgagtttgggtaaac

SEQ ID NO: 1527937 - DNA, 25 bp, Homo sapien
aataatccgaggcttgcacgttgag

SEQ ID NO: 1527938 - DNA, 25 bp, Homo sapien
accaatccagaagaattgctcgcat

SEQ ID NO: 1527939 - DNA, 25 bp, Homo sapien
aagaaagtgctgatcccttaagtat

SEQ ID NO: 1527940 - DNA, 25 bp, Homo sapien
gtgctgatcccttaagtatgtcttt

SEQ ID NO: 1527941 - DNA, 25 bp, Homo sapien
tccagaagaattgctcgcatttttg

SEQ ID NO: 1527942 - DNA, 25 bp, Homo sapien
ataaagatgaaatcccaataagctg

SEQ ID NO: 1527943 - DNA, 25 bp, Homo sapien
cattttcttgtgtcgccatataccg

SEQ ID NO: 1527944 - DNA, 25 bp, Homo sapien
tcttgtgccaagtaaaaggtctccc

SEQ ID NO: 1527945 - DNA, 25 bp, Homo sapien
tataccggtcaaagaaatcttgtgc

SEQ ID NO: 1527946 - DNA, 25 bp, Homo sapien
aattccatggtgagaatttcatctc

SEQ ID NO: 1527947 - DNA, 25 bp, Homo sapien
ggtgcaactttggaggatagatttc

SEQ ID NO: 1527948 - DNA, 25 bp, Homo sapien
catctcctgaacaagctccatctgt

SEQ ID NO: 1527949 - DNA, 25 bp, Homo sapien
catctgtcacatacgcaaactggtg

SEQ ID NO: 1527950 - DNA, 25 bp, Homo sapien
gggatactgcggcagtagcacttca

SEQ ID NO: 1527951 - DNA, 25 bp, Homo sapien
cggcagtagcacttcatgtaagtca

SEQ ID NO: 1527952 - DNA, 25 bp, Homo sapien
caatagtcaggggacttaaacgcca

SEQ ID NO: 1527953 - DNA, 25 bp, Homo sapien
tgtaagtcatttagatatgcaacct

SEQ ID NO: 1527954 - DNA, 25 bp, Homo sapien
gagaaatgatacaaggccgaagcag

SEQ ID NO: 1527955 - DNA, 25 bp, Homo sapien
gccgaagcagcaagtataccataag

SEQ ID NO: 1527956 - DNA, 25 bp, Homo sapien
ccttttgcatcaattcagatgacga

SEQ ID NO: 1527957 - DNA, 25 bp, Homo sapien
gaaattcaaggcagtcaacatccag

SEQ ID NO: 1527958 - DNA, 25 bp, Homo sapien
tatgttgtgtgcatcttcatcagcg

SEQ ID NO: 1527959 - DNA, 25 bp, Homo sapien
aaatggaaccatccacttgacacag

SEQ ID NO: 1527960 - DNA, 25 bp, Homo sapien
tcagcgacgcccctgaagtgcttca

SEQ ID NO: 1527961 - DNA, 25 bp, Homo sapien
tataaccatggcaaatggaaccatc

SEQ ID NO: 1527962 - DNA, 25 bp, Homo sapien
gaagccctattttgttcagacaaca

SEQ ID NO: 1527963 - DNA, 25 bp, Homo sapien
gaggagaagccctattttgttcaga

SEQ ID NO: 1527964 - DNA, 25 bp, Homo sapien
tggctttctttgctcgggctttgtc

SEQ ID NO: 1527965 - DNA, 25 bp, Homo sapien
aacatggctttctttgctcgggctt

SEQ ID NO: 1527966 - DNA, 25 bp, Homo sapien
atttccggcccgctgctctgcttct

SEQ ID NO: 1527967 - DNA, 25 bp, Homo sapien
tcacgccatttccggcccgctgctc

SEQ ID NO: 1527968 - DNA, 25 bp, Homo sapien
gccatttccggcccgctgctctgct

SEQ ID NO: 1527969 - DNA, 25 bp, Homo sapien
tccggcccgctgctctgcttcttac

SEQ ID NO: 1527970 - DNA, 25 bp, Homo sapien
tgggagtcccttaggtcaagtagca

SEQ ID NO: 1527971 - DNA, 25 bp, Homo sapien
gcaccttccatagcagcatcgggag

SEQ ID NO: 1527972 - DNA, 25 bp, Homo sapien
gcatcgggagcacgcactggtgtct

SEQ ID NO: 1527973 - DNA, 25 bp, Homo sapien
gatatctgtaaaagcaaacgcacgc

SEQ ID NO: 1527974 - DNA, 25 bp, Homo sapien
aacagttcatcaaaggcattgtaca

SEQ ID NO: 1527975 - DNA, 25 bp, Homo sapien
ctgctccacttggtacaacggagcc

SEQ ID NO: 1527976 - DNA, 25 bp, Homo sapien
gctccacttggtacaacggagccca

SEQ ID NO: 1527977 - DNA, 25 bp, Homo sapien
cagttcatcaaaggcattgtacact

SEQ ID NO: 1527978 - DNA, 25 bp, Homo sapien
ctttattaaaaaatggatagatata

SEQ ID NO: 1527979 - DNA, 25 bp, Homo sapien
ttaaaaaatggatagatatagcagc

SEQ ID NO: 1527980 - DNA, 25 bp, Homo sapien
aaaaaatggatagatatagcagcac

SEQ ID NO: 1527981 - DNA, 25 bp, Homo sapien
aatggatagatatagcagcacttac

SEQ ID NO: 1527982 - DNA, 25 bp, Homo sapien
ctcattttcttcttaaaagcagttt

SEQ ID NO: 1527983 - DNA, 25 bp, Homo sapien
gcctcattttcttcttaaaagcagt

SEQ ID NO: 1527984 - DNA, 25 bp, Homo sapien
ccagcctcattttcttcttaaaagc

SEQ ID NO: 1527985 - DNA, 25 bp, Homo sapien
cagcctcattttcttcttaaaagca

SEQ ID NO: 1527986 - DNA, 25 bp, Homo sapien
gggccaaaggtcacctcagggatca

SEQ ID NO: 1527987 - DNA, 25 bp, Homo sapien
actgagggccaaaggtcacctcagg

SEQ ID NO: 1527988 - DNA, 25 bp, Homo sapien
gagggccaaaggtcacctcagggat

SEQ ID NO: 1527989 - DNA, 25 bp, Homo sapien
gggactgagggccaaaggtcacctc

SEQ ID NO: 1527990 - DNA, 25 bp, Homo sapien
aactttactcagtgttggatccacc

SEQ ID NO: 1527991 - DNA, 25 bp, Homo sapien
ggtggcagtgctgataatttctaca

SEQ ID NO: 1527992 - DNA, 25 bp, Homo sapien
tcacaccgagactttctccaggagc

SEQ ID NO: 1527993 - DNA, 25 bp, Homo sapien
tcaaatgcaggattactttgcaggc

SEQ ID NO: 1527994 - DNA, 25 bp, Homo sapien
tcttgagaaagatccctgcgactgc

SEQ ID NO: 1527995 - DNA, 25 bp, Homo sapien
tcggtcgcctacgagtccaggtgaa

SEQ ID NO: 1527996 - DNA, 25 bp, Homo sapien
tcatgtgtttcagaccagggccgtg

SEQ ID NO: 1527997 - DNA, 25 bp, Homo sapien
caagaggcagaaagatcggtcgcct

SEQ ID NO: 1527998 - DNA, 25 bp, Homo sapien
cctccttctgagtttcaaggactaa

SEQ ID NO: 1527999 - DNA, 25 bp, Homo sapien
tcaaggactaacagagtcatggcac

SEQ ID NO: 1528000 - DNA, 25 bp, Homo sapien
gacagcgtcgttgctcagaggtcct

SEQ ID NO: 1528001 - DNA, 25 bp, Homo sapien
gtcatggcactgttgacagcgtcgt

SEQ ID NO: 1528002 - DNA, 25 bp, Homo sapien
gcctctccccgatcccacatccacc

SEQ ID NO: 1528003 - DNA, 25 bp, Homo sapien
ctctccccgatcccacatccaccat

SEQ ID NO: 1528004 - DNA, 25 bp, Homo sapien
ttctttgatggttggctcaggtttt

SEQ ID NO: 1528005 - DNA, 25 bp, Homo sapien
ttgatggttggctcaggtttttcat

SEQ ID NO: 1528006 - DNA, 25 bp, Homo sapien
tttcatcattctttacccgtattaa

SEQ ID NO: 1528007 - DNA, 25 bp, Homo sapien
cattctttacccgtattaattcaga

SEQ ID NO: 1528008 - DNA, 25 bp, Homo sapien
gatcagccacgatgcacccagtgga

SEQ ID NO: 1528009 - DNA, 25 bp, Homo sapien
ttctcatgagcagtaaccactgggc

SEQ ID NO: 1528010 - DNA, 25 bp, Homo sapien
gatgccagcgatatttattttctgc

SEQ ID NO: 1528011 - DNA, 25 bp, Homo sapien
ttttttgcattagctggctgtatat

SEQ ID NO: 1528012 - DNA, 25 bp, Homo sapien
tctctgggagactgagcccggagca

SEQ ID NO: 1528013 - DNA, 25 bp, Homo sapien
gcctcagccagagcggtggtgggca

SEQ ID NO: 1528014 - DNA, 25 bp, Homo sapien
ctgggagactgagcccggagcagga

SEQ ID NO: 1528015 - DNA, 25 bp, Homo sapien
ctctgggagactgagcccggagcag

SEQ ID NO: 1528016 - DNA, 25 bp, Homo sapien
ccacacaagcctgcccgtcttggct

SEQ ID NO: 1528017 - DNA, 25 bp, Homo sapien
gccacacaagcctgcccgtcttggc

SEQ ID NO: 1528018 - DNA, 25 bp, Homo sapien
cttccaggagccgcagtgcgcaggc

SEQ ID NO: 1528019 - DNA, 25 bp, Homo sapien
caggagccgcagtgcgcaggccagg

SEQ ID NO: 1528020 - DNA, 25 bp, Homo sapien
gcttcaggctggaccccagaaacac

SEQ ID NO: 1528021 - DNA, 25 bp, Homo sapien
tgcttcaggctggaccccagaaaca

SEQ ID NO: 1528022 - DNA, 25 bp, Homo sapien
cagccaggtgcttcaggctggaccc

SEQ ID NO: 1528023 - DNA, 25 bp, Homo sapien
ccaggtgcttcaggctggaccccag

SEQ ID NO: 1528024 - DNA, 25 bp, Homo sapien
tccgtacaggaactctcgcatgtgt

SEQ ID NO: 1528025 - DNA, 25 bp, Homo sapien
tttatggtccacagctccgtacagg

SEQ ID NO: 1528026 - DNA, 25 bp, Homo sapien
tgcaccaaaggatgtctgagaatta

SEQ ID NO: 1528027 - DNA, 25 bp, Homo sapien
ttgccaccgggacagcatgcgtggt

SEQ ID NO: 1528028 - DNA, 25 bp, Homo sapien
atttcctgtggtgctccacttgaga

SEQ ID NO: 1528029 - DNA, 25 bp, Homo sapien
ccacttgagatgtctggccagagca

SEQ ID NO: 1528030 - DNA, 25 bp, Homo sapien
tgagattcccagcacacgtggtagg

SEQ ID NO: 1528031 - DNA, 25 bp, Homo sapien
ggtaggaatgcagcatcctggaaag

SEQ ID NO: 1528032 - DNA, 25 bp, Homo sapien
ggatgcagttcagcgggcagcggag

SEQ ID NO: 1528033 - DNA, 25 bp, Homo sapien
cgcccgaccgccgggaggatgcagt

SEQ ID NO: 1528034 - DNA, 25 bp, Homo sapien
gccgcccgaccgccgggaggatgca

SEQ ID NO: 1528035 - DNA, 25 bp, Homo sapien
ccgaccgccgggaggatgcagttca

SEQ ID NO: 1528036 - DNA, 25 bp, Homo sapien
gccccagaagggtcgaaggcgccgc

SEQ ID NO: 1528037 - DNA, 25 bp, Homo sapien
gatgcggccccagggctcattgaag

SEQ ID NO: 1528038 - DNA, 25 bp, Homo sapien
tgcggccccagggctcattgaagaa

SEQ ID NO: 1528039 - DNA, 25 bp, Homo sapien
cggccccagggctcattgaagaact

SEQ ID NO: 1528040 - DNA, 25 bp, Homo sapien
agatgcggccccagggctcattgaa

SEQ ID NO: 1528041 - DNA, 25 bp, Homo sapien
agaacacatgctcaccatccaacca

SEQ ID NO: 1528042 - DNA, 25 bp, Homo sapien
caaagaacacatgctcaccatccaa

SEQ ID NO: 1528043 - DNA, 25 bp, Homo sapien
gccaaagaacacatgctcaccatcc

SEQ ID NO: 1528044 - DNA, 25 bp, Homo sapien
aaagaacacatgctcaccatccaac

SEQ ID NO: 1528045 - DNA, 25 bp, Homo sapien
tccttgaagggaagaccatgttgtc

SEQ ID NO: 1528046 - DNA, 25 bp, Homo sapien
ccttgaagggaagaccatgttgtca

SEQ ID NO: 1528047 - DNA, 25 bp, Homo sapien
gagccctcttagaaacgtggcttcc

SEQ ID NO: 1528048 - DNA, 25 bp, Homo sapien
tcttagaaacgtggcttccttgaag

SEQ ID NO: 1528049 - DNA, 25 bp, Homo sapien
gcattttaatcagagccggtcacat

SEQ ID NO: 1528050 - DNA, 25 bp, Homo sapien
tgaaagtgtggaccatcccctccaa

SEQ ID NO: 1528051 - DNA, 25 bp, Homo sapien
gcagagcctaagtcagtcacgggat

SEQ ID NO: 1528052 - DNA, 25 bp, Homo sapien
gtgtaagtcacacacgcccacgaag

SEQ ID NO: 1528053 - DNA, 25 bp, Homo sapien
gaatagctttcctggaatggctggc

SEQ ID NO: 1528054 - DNA, 25 bp, Homo sapien
tgagggattagcacagactcctgta

SEQ ID NO: 1528055 - DNA, 25 bp, Homo sapien
tgtattggtttcagccctcttgtgc

SEQ ID NO: 1528056 - DNA, 25 bp, Homo sapien
aaggtgggcaagatgacccttgtcc

SEQ ID NO: 1528057 - DNA, 25 bp, Homo sapien
ggctgcgtttgtatccctctggaag

SEQ ID NO: 1528058 - DNA, 25 bp, Homo sapien
aagagccgcgtgtcgccttgagtgc

SEQ ID NO: 1528059 - DNA, 25 bp, Homo sapien
cgtttggcgctgcatctgtatctag

SEQ ID NO: 1528060 - DNA, 25 bp, Homo sapien
tgcgcttgatgcgaaccgcgtggct

SEQ ID NO: 1528061 - DNA, 25 bp, Homo sapien
taccgagacgcctctccggtgcggg

SEQ ID NO: 1528062 - DNA, 25 bp, Homo sapien
aggccgcctgccaggtaccgagacg

SEQ ID NO: 1528063 - DNA, 25 bp, Homo sapien
gggctccgagtagcaggccgcctgc

SEQ ID NO: 1528064 - DNA, 25 bp, Homo sapien
cccgcagcgggctccgagtagcagg

SEQ ID NO: 1528065 - DNA, 25 bp, Homo sapien
ccgctgctgttcgcgtccgcgccgc

SEQ ID NO: 1528066 - DNA, 25 bp, Homo sapien
cgctgctgttcgcgtccgcgccgcc

SEQ ID NO: 1528067 - DNA, 25 bp, Homo sapien
ggggcgcgcaacggaaccagggcag

SEQ ID NO: 1528068 - DNA, 25 bp, Homo sapien
cggggcgcgcaacggaaccagggca

SEQ ID NO: 1528069 - DNA, 25 bp, Homo sapien
gggcgcgcaacggaaccagggcagg

SEQ ID NO: 1528070 - DNA, 25 bp, Homo sapien
ggcgcgcaacggaaccagggcaggg

SEQ ID NO: 1528071 - DNA, 25 bp, Homo sapien
cttttcctgctcctcgcgcagccgc

SEQ ID NO: 1528072 - DNA, 25 bp, Homo sapien
tgctcctcgcgcagccgcgccacat

SEQ ID NO: 1528073 - DNA, 25 bp, Homo sapien
cctgctcctcgcgcagccgcgccac

SEQ ID NO: 1528074 - DNA, 25 bp, Homo sapien
tttcctgctcctcgcgcagccgcgc

SEQ ID NO: 1528075 - DNA, 25 bp, Homo sapien
caaaaggcttttgaggaataggata

SEQ ID NO: 1528076 - DNA, 25 bp, Homo sapien
cactgtcttcaagtactataccatt

SEQ ID NO: 1528077 - DNA, 25 bp, Homo sapien
gagacttgacatcttaaacaagtgg

SEQ ID NO: 1528078 - DNA, 25 bp, Homo sapien
aactgatttaggcaaggatcatcca

SEQ ID NO: 1528079 - DNA, 25 bp, Homo sapien
gccagatgactcctaagacatactt

SEQ ID NO: 1528080 - DNA, 25 bp, Homo sapien
gatgactcctaagacatacttgtga

SEQ ID NO: 1528081 - DNA, 25 bp, Homo sapien
gactcctaagacatacttgtgatat

SEQ ID NO: 1528082 - DNA, 25 bp, Homo sapien
agatgactcctaagacatacttgtg

SEQ ID NO: 1528083 - DNA, 25 bp, Homo sapien
ctgctaactggaccaacctcattta

SEQ ID NO: 1528084 - DNA, 25 bp, Homo sapien
tgctgctaactggaccaacctcatt

SEQ ID NO: 1528085 - DNA, 25 bp, Homo sapien
ctgctgctaactggaccaacctcat

SEQ ID NO: 1528086 - DNA, 25 bp, Homo sapien
gctgctaactggaccaacctcattt

SEQ ID NO: 1528087 - DNA, 25 bp, Homo sapien
ggattctctcttggcagttagtgac

SEQ ID NO: 1528088 - DNA, 25 bp, Homo sapien
attctctcttggcagttagtgacca

SEQ ID NO: 1528089 - DNA, 25 bp, Homo sapien
gattctctcttggcagttagtgacc

SEQ ID NO: 1528090 - DNA, 25 bp, Homo sapien
ttctctcttggcagttagtgaccac

SEQ ID NO: 1528091 - DNA, 25 bp, Homo sapien
gattcaaatataggtctgtgactcc

SEQ ID NO: 1528092 - DNA, 25 bp, Homo sapien
cgggcagggtgttctacagacatga

SEQ ID NO: 1528093 - DNA, 25 bp, Homo sapien
cactagtggaccaaacagtgggaag

SEQ ID NO: 1528094 - DNA, 25 bp, Homo sapien
atacttattgagtgccgggcagggt

SEQ ID NO: 1528095 - DNA, 25 bp, Homo sapien
tgagcccacacaagactagcagaag

SEQ ID NO: 1528096 - DNA, 25 bp, Homo sapien
tcaacataaaggacggagacttcct

SEQ ID NO: 1528097 - DNA, 25 bp, Homo sapien
cagcactaaccaccagacttgaggg

SEQ ID NO: 1528098 - DNA, 25 bp, Homo sapien
tgagatgcccatagaaagtaagctg

SEQ ID NO: 1528099 - DNA, 25 bp, Homo sapien
aaaatactgtgagatgcctaacggg

SEQ ID NO: 1528100 - DNA, 25 bp, Homo sapien
taacatctgagttaacctgggacag

SEQ ID NO: 1528101 - DNA, 25 bp, Homo sapien
cctatggcatatgctgcagggatca

SEQ ID NO: 1528102 - DNA, 25 bp, Homo sapien
tccactagcttgaaggatgcctggc

SEQ ID NO: 1528103 - DNA, 25 bp, Homo sapien
taggcagcagcgatgaagaccatta

SEQ ID NO: 1528104 - DNA, 25 bp, Homo sapien
ttaagatcaagacagaacctatggg

SEQ ID NO: 1528105 - DNA, 25 bp, Homo sapien
tacttagaatagctagacctgcttc

SEQ ID NO: 1528106 - DNA, 25 bp, Homo sapien
gatccttatagatcaggttccgcct

SEQ ID NO: 1528107 - DNA, 25 bp, Homo sapien
tgctgagtctttctcgaagggcatt

SEQ ID NO: 1528108 - DNA, 25 bp, Homo sapien
gaagggcattatagtcattatctac

SEQ ID NO: 1528109 - DNA, 25 bp, Homo sapien
aatttatcaggcaaggtgctgagtc

SEQ ID NO: 1528110 - DNA, 25 bp, Homo sapien
ttataagacaatttatcaggcaagg

SEQ ID NO: 1528111 - DNA, 25 bp, Homo sapien
tgcaaaccagttgtcccccagtaaa

SEQ ID NO: 1528112 - DNA, 25 bp, Homo sapien
tctttccggtgctcaactaaaccta

SEQ ID NO: 1528113 - DNA, 25 bp, Homo sapien
atgaaggcaaaagggccaaatggta

SEQ ID NO: 1528114 - DNA, 25 bp, Homo sapien
gacttcattagtatggacaagtttt

SEQ ID NO: 1528115 - DNA, 25 bp, Homo sapien
aaaatacaacatagggccgggcgtg

SEQ ID NO: 1528116 - DNA, 25 bp, Homo sapien
gtggctcacacctgtaatcccagca

SEQ ID NO: 1528117 - DNA, 25 bp, Homo sapien
gtcaggagttcaagatcagcctggc

SEQ ID NO: 1528118 - DNA, 25 bp, Homo sapien
gactgaggcagatgcatcacctgag

SEQ ID NO: 1528119 - DNA, 25 bp, Homo sapien
aagtcatctattgtttttcttacat

SEQ ID NO: 1528120 - DNA, 25 bp, Homo sapien
cactttttttaagtcatctattgtt

SEQ ID NO: 1528121 - DNA, 25 bp, Homo sapien
taagtcatctattgtttttcttaca

SEQ ID NO: 1528122 - DNA, 25 bp, Homo sapien
ttaagtcatctattgtttttcttac

SEQ ID NO: 1528123 - DNA, 25 bp, Homo sapien
caactctggattcaaaatttttcat

SEQ ID NO: 1528124 - DNA, 25 bp, Homo sapien
cttctgtgaattcaactctggattc

SEQ ID NO: 1528125 - DNA, 25 bp, Homo sapien
cattttctgcaaatcttctgtgaat

SEQ ID NO: 1528126 - DNA, 25 bp, Homo sapien
aatcttctgtgaattcaactctgga

SEQ ID NO: 1528127 - DNA, 25 bp, Homo sapien
ttcttctcgtatgtcaacaatatca

SEQ ID NO: 1528128 - DNA, 25 bp, Homo sapien
ttaatttcttctcgtatgtcaacaa

SEQ ID NO: 1528129 - DNA, 25 bp, Homo sapien
tttcttctcgtatgtcaacaatatc

SEQ ID NO: 1528130 - DNA, 25 bp, Homo sapien
aatttcttctcgtatgtcaacaata

SEQ ID NO: 1528131 - DNA, 25 bp, Homo sapien
agtcgagcccacagttctttatcag

SEQ ID NO: 1528132 - DNA, 25 bp, Homo sapien
aagttcacccagcaattcttcctgt

SEQ ID NO: 1528133 - DNA, 25 bp, Homo sapien
tttatcagctagcaaatccttggat

SEQ ID NO: 1528134 - DNA, 25 bp, Homo sapien
gtctctctagttcttcaagtcgagc

SEQ ID NO: 1528135 - DNA, 25 bp, Homo sapien
catttgcaatcacagtatcaggctt

SEQ ID NO: 1528136 - DNA, 25 bp, Homo sapien
tgatgcatcgcattcacatttgtgt

SEQ ID NO: 1528137 - DNA, 25 bp, Homo sapien
ctccatttgcaatcacagtatcagg

SEQ ID NO: 1528138 - DNA, 25 bp, Homo sapien
catttgtgttacgatcttccttttc

SEQ ID NO: 1528139 - DNA, 25 bp, Homo sapien
ttgaccactgaatggttctgaactt

SEQ ID NO: 1528140 - DNA, 25 bp, Homo sapien
aacatccttatgacaaggagtatga

SEQ ID NO: 1528141 - DNA, 25 bp, Homo sapien
ggttctgaacttgcaacatccttat

SEQ ID NO: 1528142 - DNA, 25 bp, Homo sapien
cactgaatggttctgaacttgcaac

SEQ ID NO: 1528143 - DNA, 25 bp, Homo sapien
cttaggctcaacagtatgtgaaaaa

SEQ ID NO: 1528144 - DNA, 25 bp, Homo sapien
tagaattatctccaacccctaaagc

SEQ ID NO: 1528145 - DNA, 25 bp, Homo sapien
atcactgtggtaagaactggaacca

SEQ ID NO: 1528146 - DNA, 25 bp, Homo sapien
atcatcgtcgtcaatgttgtcgtcg

SEQ ID NO: 1528147 - DNA, 25 bp, Homo sapien
atataattaactccaggattcttaa

SEQ ID NO: 1528148 - DNA, 25 bp, Homo sapien
caatataattaactccaggattctt

SEQ ID NO: 1528149 - DNA, 25 bp, Homo sapien
aatataattaactccaggattctta

SEQ ID NO: 1528150 - DNA, 25 bp, Homo sapien
tataattaactccaggattcttaag

SEQ ID NO: 1528151 - DNA, 25 bp, Homo sapien
gacaaattaaatcaaagtgaaacca

SEQ ID NO: 1528152 - DNA, 25 bp, Homo sapien
aaaaaataatagtaagagaggcagc

SEQ ID NO: 1528153 - DNA, 25 bp, Homo sapien
tcagagcaagaaattaagaatcttt

SEQ ID NO: 1528154 - DNA, 25 bp, Homo sapien
aataatagtaagagaggcagctgaa

SEQ ID NO: 1528155 - DNA, 25 bp, Homo sapien
tgctgttctttcgtttacgtttggc

SEQ ID NO: 1528156 - DNA, 25 bp, Homo sapien
tgccagtgctgttctttcgtttacg

SEQ ID NO: 1528157 - DNA, 25 bp, Homo sapien
caggcgtcctgatggtcggcagctc

SEQ ID NO: 1528158 - DNA, 25 bp, Homo sapien
cctgatggtcggcagctcctgggca

SEQ ID NO: 1528159 - DNA, 25 bp, Homo sapien
tttctccagtaaaggttcagtggca

SEQ ID NO: 1528160 - DNA, 25 bp, Homo sapien
tgtttcaaaagcactggtgaagagg

SEQ ID NO: 1528161 - DNA, 25 bp, Homo sapien
cagccggtcagcctatcagatccta

SEQ ID NO: 1528162 - DNA, 25 bp, Homo sapien
tctggactgggaagctacagccggt

SEQ ID NO: 1528163 - DNA, 25 bp, Homo sapien
ggatttgcgagggacatattctcca

SEQ ID NO: 1528164 - DNA, 25 bp, Homo sapien
gcaagtggcttcttcgcagctgata

SEQ ID NO: 1528165 - DNA, 25 bp, Homo sapien
gctctcactggtgtcactgcaagtg

SEQ ID NO: 1528166 - DNA, 25 bp, Homo sapien
cttcgagacttcaggatggatttgc

SEQ ID NO: 1528167 - DNA, 25 bp, Homo sapien
tatgtactgtccctaaatgctacca

SEQ ID NO: 1528168 - DNA, 25 bp, Homo sapien
taaggtaagatactttccaggtcac

SEQ ID NO: 1528169 - DNA, 25 bp, Homo sapien
gacagggtctacagctttcatcaga

SEQ ID NO: 1528170 - DNA, 25 bp, Homo sapien
ttatcacgatgagcatagagccttc

SEQ ID NO: 1528171 - DNA, 25 bp, Homo sapien
gcatttaatctggtcaactatatgt

SEQ ID NO: 1528172 - DNA, 25 bp, Homo sapien
ctgcatttaatctggtcaactatat

SEQ ID NO: 1528173 - DNA, 25 bp, Homo sapien
atttaatctggtcaactatatgttc

SEQ ID NO: 1528174 - DNA, 25 bp, Homo sapien
ttaatctggtcaactatatgttcaa

SEQ ID NO: 1528175 - DNA, 25 bp, Homo sapien
aatgctattagggtgtcaaactctg

SEQ ID NO: 1528176 - DNA, 25 bp, Homo sapien
tgctgcctgctagccaatagcttag

SEQ ID NO: 1528177 - DNA, 25 bp, Homo sapien
cacgagatttttggctagacaacac

SEQ ID NO: 1528178 - DNA, 25 bp, Homo sapien
gagctatcctatgatggccttgctg

SEQ ID NO: 1528179 - DNA, 25 bp, Homo sapien
tgttaaggaaggtgatacaaattct

SEQ ID NO: 1528180 - DNA, 25 bp, Homo sapien
ctagtctttctgttgcaatctggca

SEQ ID NO: 1528181 - DNA, 25 bp, Homo sapien
cttcctttcgttctggaatagtggg

SEQ ID NO: 1528182 - DNA, 25 bp, Homo sapien
gaatagtgggtagtgcgggatgagc

SEQ ID NO: 1528183 - DNA, 25 bp, Homo sapien
tgccaaagtaactcaggatacctta

SEQ ID NO: 1528184 - DNA, 25 bp, Homo sapien
tggtatgcacaatatcacagctggc

SEQ ID NO: 1528185 - DNA, 25 bp, Homo sapien
aatgctgccactgcatcataaaggc

SEQ ID NO: 1528186 - DNA, 25 bp, Homo sapien
taaagtattcagacagttaccttga

SEQ ID NO: 1528187 - DNA, 25 bp, Homo sapien
acagaaagcctcatgtgaatagcaa

SEQ ID NO: 1528188 - DNA, 25 bp, Homo sapien
gtttcttgaatagccaactagccgc

SEQ ID NO: 1528189 - DNA, 25 bp, Homo sapien
tgaatagcaattcctaacgggagca

SEQ ID NO: 1528190 - DNA, 25 bp, Homo sapien
taagaacaccacaatagtcctacag

SEQ ID NO: 1528191 - DNA, 25 bp, Homo sapien
tcatgtctcatgtatctctcccaag

SEQ ID NO: 1528192 - DNA, 25 bp, Homo sapien
tgacacactagaatgcacctcttga

SEQ ID NO: 1528193 - DNA, 25 bp, Homo sapien
gcggtaactgttacagacaagatcc

SEQ ID NO: 1528194 - DNA, 25 bp, Homo sapien
acagtaattttgcagtggagatacc

SEQ ID NO: 1528195 - DNA, 25 bp, Homo sapien
ccctattggcaattagtatacttaa

SEQ ID NO: 1528196 - DNA, 25 bp, Homo sapien
caagaggcaatgacaccctattggc

SEQ ID NO: 1528197 - DNA, 25 bp, Homo sapien
ttgtggtgccagtaagaaagtgttc

SEQ ID NO: 1528198 - DNA, 25 bp, Homo sapien
tggtcctgtagtattttgtggtgcc

SEQ ID NO: 1528199 - DNA, 25 bp, Homo sapien
ctttaagataccatactgccccaga

SEQ ID NO: 1528200 - DNA, 25 bp, Homo sapien
tcatcaatgatatgcagacatacgt

SEQ ID NO: 1528201 - DNA, 25 bp, Homo sapien
taatgattctgaaacccctttaaga

SEQ ID NO: 1528202 - DNA, 25 bp, Homo sapien
atacgtatatgttaaaactatgtcc

SEQ ID NO: 1528203 - DNA, 25 bp, Homo sapien
tagtgagggccatacaagttttgac

SEQ ID NO: 1528204 - DNA, 25 bp, Homo sapien
gaaaaatggacttatcatgcacagg

SEQ ID NO: 1528205 - DNA, 25 bp, Homo sapien
ggaaccccagtaaaattagcagctg

SEQ ID NO: 1528206 - DNA, 25 bp, Homo sapien
aagggacaataacccctggcaggag

SEQ ID NO: 1528207 - DNA, 25 bp, Homo sapien
gcacaggctcactcaaagactaaga

SEQ ID NO: 1528208 - DNA, 25 bp, Homo sapien
tcttactcaggaacgtgcccagctg

SEQ ID NO: 1528209 - DNA, 25 bp, Homo sapien
gaagcacaagtaactggagccgaga

SEQ ID NO: 1528210 - DNA, 25 bp, Homo sapien
cccctgaaattggagtgaccggcag

SEQ ID NO: 1528211 - DNA, 25 bp, Homo sapien
ctggtgtactggtgagcaggatgct

SEQ ID NO: 1528212 - DNA, 25 bp, Homo sapien
tgtactggtgagcaggatgcttgga

SEQ ID NO: 1528213 - DNA, 25 bp, Homo sapien
ctggtgagcaggatgcttggaagca

SEQ ID NO: 1528214 - DNA, 25 bp, Homo sapien
tactggtgagcaggatgcttggaag

SEQ ID NO: 1528215 - DNA, 25 bp, Homo sapien
cattaatgtatttcagtcctgattt

SEQ ID NO: 1528216 - DNA, 25 bp, Homo sapien
gtggaactggattgccaactgcaca

SEQ ID NO: 1528217 - DNA, 25 bp, Homo sapien
ggaactggattgccaactgcacatc

SEQ ID NO: 1528218 - DNA, 25 bp, Homo sapien
tggaactggattgccaactgcacat

SEQ ID NO: 1528219 - DNA, 25 bp, Homo sapien
gccttgcgatatctaataaaaaaat

SEQ ID NO: 1528220 - DNA, 25 bp, Homo sapien
gatttctttgccttgcgatatctaa

SEQ ID NO: 1528221 - DNA, 25 bp, Homo sapien
ctgaatatggcttgattaatggaaa

SEQ ID NO: 1528222 - DNA, 25 bp, Homo sapien
aatatggcttgattaatggaaaagg

SEQ ID NO: 1528223 - DNA, 25 bp, Homo sapien
tgttaagcaatatctatcaggtggc

SEQ ID NO: 1528224 - DNA, 25 bp, Homo sapien
taagcaatatctatcaggtggcaat

SEQ ID NO: 1528225 - DNA, 25 bp, Homo sapien
ttggagctgttaagcaatatctatc

SEQ ID NO: 1528226 - DNA, 25 bp, Homo sapien
ctataatttggagctgttaagcaat

SEQ ID NO: 1528227 - DNA, 25 bp, Homo sapien
ttactcttcccgtggaagttgatgc

SEQ ID NO: 1528228 - DNA, 25 bp, Homo sapien
gttactcttcccgtggaagttgatg

SEQ ID NO: 1528229 - DNA, 25 bp, Homo sapien
actgttactcttcccgtggaagttg

SEQ ID NO: 1528230 - DNA, 25 bp, Homo sapien
ctgttactcttcccgtggaagttga

SEQ ID NO: 1528231 - DNA, 25 bp, Homo sapien
gaagtaggcatctgtactgtaaacc

SEQ ID NO: 1528232 - DNA, 25 bp, Homo sapien
catgcagcaaggctaaattacaaat

SEQ ID NO: 1528233 - DNA, 25 bp, Homo sapien
atcttcttcacgctttttcaatgca

SEQ ID NO: 1528234 - DNA, 25 bp, Homo sapien
aagaagcttttggacccaattaatg

SEQ ID NO: 1528235 - DNA, 25 bp, Homo sapien
tgtgataacaccgtattagtggtaa

SEQ ID NO: 1528236 - DNA, 25 bp, Homo sapien
acctcctgggtcctggttcaagcaa

SEQ ID NO: 1528237 - DNA, 25 bp, Homo sapien
gattgcaggaatgcaccaccctgcc

SEQ ID NO: 1528238 - DNA, 25 bp, Homo sapien
gggattgcaggaatgcaccaccctg

SEQ ID NO: 1528239 - DNA, 25 bp, Homo sapien
ccacctcctgggtcctggttcaagc

SEQ ID NO: 1528240 - DNA, 25 bp, Homo sapien
tattactgtaactgactgcacaccc

SEQ ID NO: 1528241 - DNA, 25 bp, Homo sapien
tcatgctttacaggaactctctcag

SEQ ID NO: 1528242 - DNA, 25 bp, Homo sapien
gatttgcatttttggaaccctgtcc

SEQ ID NO: 1528243 - DNA, 25 bp, Homo sapien
tgctgtaactaacctcaaacctgga

SEQ ID NO: 1528244 - DNA, 25 bp, Homo sapien
cctttgtctagggtgcagagtaatc

SEQ ID NO: 1528245 - DNA, 25 bp, Homo sapien
gctctgaaaacactgcgatctctca

SEQ ID NO: 1528246 - DNA, 25 bp, Homo sapien
gaaaagggcccagatagatgagttc

SEQ ID NO: 1528247 - DNA, 25 bp, Homo sapien
tgaaagcatgccctaaccttaagat

SEQ ID NO: 1528248 - DNA, 25 bp, Homo sapien
gccacactgccttctgcgtggttct

SEQ ID NO: 1528249 - DNA, 25 bp, Homo sapien
ttccaaatgcagcattgcaccgcag

SEQ ID NO: 1528250 - DNA, 25 bp, Homo sapien
cttctgcgtggttctgtgctgattt

SEQ ID NO: 1528251 - DNA, 25 bp, Homo sapien
ccaaatgcagcattgcaccgcagcc

SEQ ID NO: 1528252 - DNA, 25 bp, Homo sapien
gatagctagcttgtattttcgccca

SEQ ID NO: 1528253 - DNA, 25 bp, Homo sapien
tcttatgcgttgttggagaggctca

SEQ ID NO: 1528254 - DNA, 25 bp, Homo sapien
gccagcaccgttcatgatatcaaga

SEQ ID NO: 1528255 - DNA, 25 bp, Homo sapien
aaagtattgtttagggccaggcacg

SEQ ID NO: 1528256 - DNA, 25 bp, Homo sapien
agtggtaccgaaagcctccacgcaa

SEQ ID NO: 1528257 - DNA, 25 bp, Homo sapien
catccacgcgtggacgtgggcacgt

SEQ ID NO: 1528258 - DNA, 25 bp, Homo sapien
catagagtgtttcaggtacaataag

SEQ ID NO: 1528259 - DNA, 25 bp, Homo sapien
aagatatgctcgtttttctccgttc

SEQ ID NO: 1528260 - DNA, 25 bp, Homo sapien
cagagagtggcctccaaggcgggca

SEQ ID NO: 1528261 - DNA, 25 bp, Homo sapien
accgccggcccaggctcatgctggg

SEQ ID NO: 1528262 - DNA, 25 bp, Homo sapien
ctggtgtgggcacctcgccaatggc

SEQ ID NO: 1528263 - DNA, 25 bp, Homo sapien
aatggctgccgtccatatgccctgc

SEQ ID NO: 1528264 - DNA, 25 bp, Homo sapien
agatcgggggcacgagatcccctcc

SEQ ID NO: 1528265 - DNA, 25 bp, Homo sapien
ccatgcaggagtggaagttggccca

SEQ ID NO: 1528266 - DNA, 25 bp, Homo sapien
cctgaaggtatttcgagcaatggca

SEQ ID NO: 1528267 - DNA, 25 bp, Homo sapien
gatacacgctctacacgctgatgga

SEQ ID NO: 1528268 - DNA, 25 bp, Homo sapien
taggtgctattccaaatgctcgcca

SEQ ID NO: 1528269 - DNA, 25 bp, Homo sapien
tgtgcttggacacgaacattcctgg

SEQ ID NO: 1528270 - DNA, 25 bp, Homo sapien
gaagcagaagcttggatcatcttgt

SEQ ID NO: 1528271 - DNA, 25 bp, Homo sapien
gcgtttgaatcagcagaccgagtga

SEQ ID NO: 1528272 - DNA, 25 bp, Homo sapien
cacgtagctggtggaaccttctttc

SEQ ID NO: 1528273 - DNA, 25 bp, Homo sapien
ggtggcgcccttcacgagggtggaa

SEQ ID NO: 1528274 - DNA, 25 bp, Homo sapien
ctggtggcgcccttcacgagggtgg

SEQ ID NO: 1528275 - DNA, 25 bp, Homo sapien
gcgcccttcacgagggtggaaggca

SEQ ID NO: 1528276 - DNA, 25 bp, Homo sapien
tggcgcccttcacgagggtggaagg

SEQ ID NO: 1528277 - DNA, 25 bp, Homo sapien
ggagggaaggctcctcaggagaggt

SEQ ID NO: 1528278 - DNA, 25 bp, Homo sapien
aggtgaagaacttggtcaggaagga

SEQ ID NO: 1528279 - DNA, 25 bp, Homo sapien
aaggctcctcaggagaggtgaagaa

SEQ ID NO: 1528280 - DNA, 25 bp, Homo sapien
cttggtcaggaaggatgaggtggac

SEQ ID NO: 1528281 - DNA, 25 bp, Homo sapien
gacgcaggagtgtcacgaggaccca

SEQ ID NO: 1528282 - DNA, 25 bp, Homo sapien
tggatacaggggtgtccgcagggcc

SEQ ID NO: 1528283 - DNA, 25 bp, Homo sapien
agagtgaccagaacccatggccatg

SEQ ID NO: 1528284 - DNA, 25 bp, Homo sapien
tgaccagaacccatggccatggcca

SEQ ID NO: 1528285 - DNA, 25 bp, Homo sapien
tccagagtcagagtttcgaggagga

SEQ ID NO: 1528286 - DNA, 25 bp, Homo sapien
ccagagtcagagtttcgaggaggac

SEQ ID NO: 1528287 - DNA, 25 bp, Homo sapien
tgaggaggcaacagagctctgtcca

SEQ ID NO: 1528288 - DNA, 25 bp, Homo sapien
cctgaggaggcaacagagctctgtc

SEQ ID NO: 1528289 - DNA, 25 bp, Homo sapien
gaggcaacagagctctgtccaccaa

SEQ ID NO: 1528290 - DNA, 25 bp, Homo sapien
cagagctctgtccaccaaaccttac

SEQ ID NO: 1528291 - DNA, 25 bp, Homo sapien
ttgacatttggcgagggtccaggcc

SEQ ID NO: 1528292 - DNA, 25 bp, Homo sapien
ccccaggcaggtgctttcggcagct

SEQ ID NO: 1528293 - DNA, 25 bp, Homo sapien
cagctgactgcttagcagggatttt

SEQ ID NO: 1528294 - DNA, 25 bp, Homo sapien
ccagtgttcctgttggtccccaaca

SEQ ID NO: 1528295 - DNA, 25 bp, Homo sapien
tcttgcagagcacatgtgggcaacc

SEQ ID NO: 1528296 - DNA, 25 bp, Homo sapien
agcccatgcccagatctcttgcaga

SEQ ID NO: 1528297 - DNA, 25 bp, Homo sapien
ggaatccatgccctcgggggtcacc

SEQ ID NO: 1528298 - DNA, 25 bp, Homo sapien
gtgggcaacctgagtatggagagga

SEQ ID NO: 1528299 - DNA, 25 bp, Homo sapien
gctcccaggtgtccgcgtccacctg

SEQ ID NO: 1528300 - DNA, 25 bp, Homo sapien
tcagagcaatcgccagctccaagag

SEQ ID NO: 1528301 - DNA, 25 bp, Homo sapien
agcaatcgccagctccaagagggct

SEQ ID NO: 1528302 - DNA, 25 bp, Homo sapien
agagcaatcgccagctccaagaggg

SEQ ID NO: 1528303 - DNA, 25 bp, Homo sapien
gagcaatcgccagctccaagagggc

SEQ ID NO: 1528304 - DNA, 25 bp, Homo sapien
gataaagggaagctccactccacct

SEQ ID NO: 1528305 - DNA, 25 bp, Homo sapien
ctgtggtgagtcttgccgcaggcca

SEQ ID NO: 1528306 - DNA, 25 bp, Homo sapien
gactctcacgctcagggtcagatgc

SEQ ID NO: 1528307 - DNA, 25 bp, Homo sapien
ctcagggtcagatgcgcggtgataa

SEQ ID NO: 1528308 - DNA, 25 bp, Homo sapien
ggggttccacatgaccccaagatca

SEQ ID NO: 1528309 - DNA, 25 bp, Homo sapien
ttggggttccacatgaccccaagat

SEQ ID NO: 1528310 - DNA, 25 bp, Homo sapien
ttccacatgaccccaagatcatttt

SEQ ID NO: 1528311 - DNA, 25 bp, Homo sapien
ggttccacatgaccccaagatcatt

SEQ ID NO: 1528312 - DNA, 25 bp, Homo sapien
ctgaccactgtaggacaccctctct

SEQ ID NO: 1528313 - DNA, 25 bp, Homo sapien
gggacatgtgttcagagaagctgct

SEQ ID NO: 1528314 - DNA, 25 bp, Homo sapien
ccacgcgggcatgctgaccactgta

SEQ ID NO: 1528315 - DNA, 25 bp, Homo sapien
gggatgggccagagctgtgagtcct

SEQ ID NO: 1528316 - DNA, 25 bp, Homo sapien
ccagccctggacatagagatggagg

SEQ ID NO: 1528317 - DNA, 25 bp, Homo sapien
ccaggcctgcagctagtggtcccgg

SEQ ID NO: 1528318 - DNA, 25 bp, Homo sapien
caggcctgcagctagtggtcccggg

SEQ ID NO: 1528319 - DNA, 25 bp, Homo sapien
tccaggcctgcagctagtggtcccg

SEQ ID NO: 1528320 - DNA, 25 bp, Homo sapien
ctccaggcctgcagctagtggtccc

SEQ ID NO: 1528321 - DNA, 25 bp, Homo sapien
gaagatgccattaacatgaagtcca

SEQ ID NO: 1528322 - DNA, 25 bp, Homo sapien
cagatttgctctgggttaaaaataa

SEQ ID NO: 1528323 - DNA, 25 bp, Homo sapien
catttttagaataggactgggagta

SEQ ID NO: 1528324 - DNA, 25 bp, Homo sapien
tggacaacatgtcccaggtctggct

SEQ ID NO: 1528325 - DNA, 25 bp, Homo sapien
agcaagtgggtgggaactgtgctga

SEQ ID NO: 1528326 - DNA, 25 bp, Homo sapien
cagcaagtgggtgggaactgtgctg

SEQ ID NO: 1528327 - DNA, 25 bp, Homo sapien
gcaagtgggtgggaactgtgctgag

SEQ ID NO: 1528328 - DNA, 25 bp, Homo sapien
tgacttgcttagcaatgccggtgag

SEQ ID NO: 1528329 - DNA, 25 bp, Homo sapien
acttgcttagcaatgccggtgaggg

SEQ ID NO: 1528330 - DNA, 25 bp, Homo sapien
agcaatgccggtgaggggaacagct

SEQ ID NO: 1528331 - DNA, 25 bp, Homo sapien
caatgccggtgaggggaacagctgc

SEQ ID NO: 1528332 - DNA, 25 bp, Homo sapien
tctgccgccgaatatgcacagagag

SEQ ID NO: 1528333 - DNA, 25 bp, Homo sapien
ctctgccgccgaatatgcacagaga

SEQ ID NO: 1528334 - DNA, 25 bp, Homo sapien
ctgccgccgaatatgcacagagagg

SEQ ID NO: 1528335 - DNA, 25 bp, Homo sapien
gggaacatggtgatgtggaaccagt

SEQ ID NO: 1528336 - DNA, 25 bp, Homo sapien
cccagggcaaagagttgctggtcgt

SEQ ID NO: 1528337 - DNA, 25 bp, Homo sapien
ccactgggtgtcacagtaggggact

SEQ ID NO: 1528338 - DNA, 25 bp, Homo sapien
acatggtgatgtggaaccagtggca

SEQ ID NO: 1528339 - DNA, 25 bp, Homo sapien
caggacaagggaacacacagcagga

SEQ ID NO: 1528340 - DNA, 25 bp, Homo sapien
gacacaggacaagggaacacacagc

SEQ ID NO: 1528341 - DNA, 25 bp, Homo sapien
acacagcaggaagtttgcacggcac

SEQ ID NO: 1528342 - DNA, 25 bp, Homo sapien
cagacatcaaggatgtaggtgacac

SEQ ID NO: 1528343 - DNA, 25 bp, Homo sapien
catgttaggaaatccattaacactg

SEQ ID NO: 1528344 - DNA, 25 bp, Homo sapien
tgttaggaaatccattaacactgtc

SEQ ID NO: 1528345 - DNA, 25 bp, Homo sapien
tcatgttaggaaatccattaacact

SEQ ID NO: 1528346 - DNA, 25 bp, Homo sapien
atgttaggaaatccattaacactgt

SEQ ID NO: 1528347 - DNA, 25 bp, Homo sapien
cgctggtcctgagcgaggaactctg

SEQ ID NO: 1528348 - DNA, 25 bp, Homo sapien
aggcacagggaactctgaggcacac

SEQ ID NO: 1528349 - DNA, 25 bp, Homo sapien
tctgaggcacacgaggaactctgag

SEQ ID NO: 1528350 - DNA, 25 bp, Homo sapien
tgaatccaccacatatttgtcaatt

SEQ ID NO: 1528351 - DNA, 25 bp, Homo sapien
caacagagatgaatcgcctgtaggg

SEQ ID NO: 1528352 - DNA, 25 bp, Homo sapien
ggacccggtgtccataaaccaatga

SEQ ID NO: 1528353 - DNA, 25 bp, Homo sapien
tctctcactcaggaacatcaagtgg

SEQ ID NO: 1528354 - DNA, 25 bp, Homo sapien
caagtggatttgtgacagtccctgg

SEQ ID NO: 1528355 - DNA, 25 bp, Homo sapien
ggagatgtctccacaggttcctcct

SEQ ID NO: 1528356 - DNA, 25 bp, Homo sapien
cagagcccagcatgatggggtcctt

SEQ ID NO: 1528357 - DNA, 25 bp, Homo sapien
tccttgtgccagtttccttgcttgg

SEQ ID NO: 1528358 - DNA, 25 bp, Homo sapien
gggtccttgtgccagtttccttgct

SEQ ID NO: 1528359 - DNA, 25 bp, Homo sapien
tagaaggcaagcattgactgtgaga

SEQ ID NO: 1528360 - DNA, 25 bp, Homo sapien
tggctagaaggcaagcattgactgt

SEQ ID NO: 1528361 - DNA, 25 bp, Homo sapien
gctagaaggcaagcattgactgtga

SEQ ID NO: 1528362 - DNA, 25 bp, Homo sapien
ctggctagaaggcaagcattgactg

SEQ ID NO: 1528363 - DNA, 25 bp, Homo sapien
agcagattatgcacacggtaggtgt

SEQ ID NO: 1528364 - DNA, 25 bp, Homo sapien
tgttccctacacatggctgggttga

SEQ ID NO: 1528365 - DNA, 25 bp, Homo sapien
tgtgcccgaagtcactccctcggat

SEQ ID NO: 1528366 - DNA, 25 bp, Homo sapien
ctccctcggattgaaagcagattat

SEQ ID NO: 1528367 - DNA, 25 bp, Homo sapien
acagaaaggttaatggtgttccaca

SEQ ID NO: 1528368 - DNA, 25 bp, Homo sapien
cagaaaggttaatggtgttccacat

SEQ ID NO: 1528369 - DNA, 25 bp, Homo sapien
tacagaaaggttaatggtgttccac

SEQ ID NO: 1528370 - DNA, 25 bp, Homo sapien
tcccgctcagcagcggaggttcaca

SEQ ID NO: 1528371 - DNA, 25 bp, Homo sapien
cgctcagcagcggaggttcacagcg

SEQ ID NO: 1528372 - DNA, 25 bp, Homo sapien
agcagcggaggttcacagcggcaac

SEQ ID NO: 1528373 - DNA, 25 bp, Homo sapien
cggaggttcacagcggcaaccctgg

SEQ ID NO: 1528374 - DNA, 25 bp, Homo sapien
tgcaggttcaccaacagccgagcca

SEQ ID NO: 1528375 - DNA, 25 bp, Homo sapien
tgccgtggagataaggcacgtgtct

SEQ ID NO: 1528376 - DNA, 25 bp, Homo sapien
gcaggttcaccaacagccgagccat

SEQ ID NO: 1528377 - DNA, 25 bp, Homo sapien
gataaggcacgtgtctcagaggccc

SEQ ID NO: 1528378 - DNA, 25 bp, Homo sapien
gaccggaaataagtcacaatccagg

SEQ ID NO: 1528379 - DNA, 25 bp, Homo sapien
tttaaagacgaaatgaacaactcga

SEQ ID NO: 1528380 - DNA, 25 bp, Homo sapien
cgagtccttgaccttgtgaatgtag

SEQ ID NO: 1528381 - DNA, 25 bp, Homo sapien
tgaatgtagtcaccagccaagagag

SEQ ID NO: 1528382 - DNA, 25 bp, Homo sapien
tcgagttacttttgccaatggtggt

SEQ ID NO: 1528383 - DNA, 25 bp, Homo sapien
cctcgagttacttttgccaatggtg

SEQ ID NO: 1528384 - DNA, 25 bp, Homo sapien
tcctcgagttacttttgccaatggt

SEQ ID NO: 1528385 - DNA, 25 bp, Homo sapien
ctcgagttacttttgccaatggtgg

SEQ ID NO: 1528386 - DNA, 25 bp, Homo sapien
tacggagctttatcgccttgtagga

SEQ ID NO: 1528387 - DNA, 25 bp, Homo sapien
acggagctttatcgccttgtaggaa

SEQ ID NO: 1528388 - DNA, 25 bp, Homo sapien
aatacggagctttatcgccttgtag

SEQ ID NO: 1528389 - DNA, 25 bp, Homo sapien
gtaaatacggagctttatcgccttg

SEQ ID NO: 1528390 - DNA, 25 bp, Homo sapien
acagcgcgctcatcggaggccaagc

SEQ ID NO: 1528391 - DNA, 25 bp, Homo sapien
cgggcagagacagcgcgctcatcgg

SEQ ID NO: 1528392 - DNA, 25 bp, Homo sapien
cctgagccccgcagacggccgggca

SEQ ID NO: 1528393 - DNA, 25 bp, Homo sapien
agagacagcgcgctcatcggaggcc

SEQ ID NO: 1528394 - DNA, 25 bp, Homo sapien
tcggcgggcaccgggccttgccgct

SEQ ID NO: 1528395 - DNA, 25 bp, Homo sapien
cgccgtcggcgggcaccgggccttg

SEQ ID NO: 1528396 - DNA, 25 bp, Homo sapien
cgggcaccgggccttgccgctgcca

SEQ ID NO: 1528397 - DNA, 25 bp, Homo sapien
gcaccgggccttgccgctgccagca

SEQ ID NO: 1528398 - DNA, 25 bp, Homo sapien
ccctggcataattcacagcaactag

SEQ ID NO: 1528399 - DNA, 25 bp, Homo sapien
ggtcttgcggcatttagctttgatg

SEQ ID NO: 1528400 - DNA, 25 bp, Homo sapien
ttagctttgatgagccagagactga

SEQ ID NO: 1528401 - DNA, 25 bp, Homo sapien
cagcaactagataggtcttgcggca

SEQ ID NO: 1528402 - DNA, 25 bp, Homo sapien
agcctcttttcagaatcgccccgtt

SEQ ID NO: 1528403 - DNA, 25 bp, Homo sapien
ggtgaaatgcattgtaccattaaaa

SEQ ID NO: 1528404 - DNA, 25 bp, Homo sapien
gttcattgatactcatcacccagcc

SEQ ID NO: 1528405 - DNA, 25 bp, Homo sapien
gcagagccctgcgaactgttcccag

SEQ ID NO: 1528406 - DNA, 25 bp, Homo sapien
cctaactcgggaacggtggacatgt

SEQ ID NO: 1528407 - DNA, 25 bp, Homo sapien
gaacggtggacatgttctccaacag

SEQ ID NO: 1528408 - DNA, 25 bp, Homo sapien
cacctaactcgggaacggtggacat

SEQ ID NO: 1528409 - DNA, 25 bp, Homo sapien
actcgggaacggtggacatgttctc

SEQ ID NO: 1528410 - DNA, 25 bp, Homo sapien
cttttgagtgtgcagatcgtcgcgg

SEQ ID NO: 1528411 - DNA, 25 bp, Homo sapien
gccgccggagcatctcgaagttaat

SEQ ID NO: 1528412 - DNA, 25 bp, Homo sapien
tatgcaaatggactccggactggga

SEQ ID NO: 1528413 - DNA, 25 bp, Homo sapien
ggatggatctgacgccgctactgta

SEQ ID NO: 1528414 - DNA, 25 bp, Homo sapien
ccagccatgttctatccgtgagacg

SEQ ID NO: 1528415 - DNA, 25 bp, Homo sapien
gcattgaccctctttcgggtggaaa

SEQ ID NO: 1528416 - DNA, 25 bp, Homo sapien
gtgagacgctctctgctcggtgcag

SEQ ID NO: 1528417 - DNA, 25 bp, Homo sapien
taattgcagtaagacttcccagccc

SEQ ID NO: 1528418 - DNA, 25 bp, Homo sapien
gattaaatcctttcatgccggcatg

SEQ ID NO: 1528419 - DNA, 25 bp, Homo sapien
tcagaggaggtttcggctgcgcaga

SEQ ID NO: 1528420 - DNA, 25 bp, Homo sapien
catgccggcatgtggccgcttttct

SEQ ID NO: 1528421 - DNA, 25 bp, Homo sapien
tttcggctgcgcagattaaatcctt

SEQ ID NO: 1528422 - DNA, 25 bp, Homo sapien
tgttcccagctacatgcaagtcctc

SEQ ID NO: 1528423 - DNA, 25 bp, Homo sapien
agaattgcagatggagtgtctggct

SEQ ID NO: 1528424 - DNA, 25 bp, Homo sapien
aatcacacggaaaataaatatgaag

SEQ ID NO: 1528425 - DNA, 25 bp, Homo sapien
gagagagtggctttgccaagaccag

SEQ ID NO: 1528426 - DNA, 25 bp, Homo sapien
caagctgtgcgttgttgggcagcac

SEQ ID NO: 1528427 - DNA, 25 bp, Homo sapien
agccctgatgacagaacgcgtgtct

SEQ ID NO: 1528428 - DNA, 25 bp, Homo sapien
tggccccgaaatactgctccacact

SEQ ID NO: 1528429 - DNA, 25 bp, Homo sapien
taaaattcaagctgtgcgttgttgg

SEQ ID NO: 1528430 - DNA, 25 bp, Homo sapien
cacagcctctgggacacgaagatga

SEQ ID NO: 1528431 - DNA, 25 bp, Homo sapien
tgactgggtctacaggcttgtagca

SEQ ID NO: 1528432 - DNA, 25 bp, Homo sapien
cactaggagatgatggaaagttctg

SEQ ID NO: 1528433 - DNA, 25 bp, Homo sapien
cacgaagatgacactaggagatgat

SEQ ID NO: 1528434 - DNA, 25 bp, Homo sapien
tgaagcctttgcaggttcgctagac

SEQ ID NO: 1528435 - DNA, 25 bp, Homo sapien
tatgaaggccatgcccacacatttg

SEQ ID NO: 1528436 - DNA, 25 bp, Homo sapien
cttatttctaggagcaggactgggc

SEQ ID NO: 1528437 - DNA, 25 bp, Homo sapien
tctaccaagtatggtggccatggct

SEQ ID NO: 1528438 - DNA, 25 bp, Homo sapien
ttccacgaacaccagcaagacaagt

SEQ ID NO: 1528439 - DNA, 25 bp, Homo sapien
cccaaggatgccatagcattccacg

SEQ ID NO: 1528440 - DNA, 25 bp, Homo sapien
aagcctccaaccacggatgagccct

SEQ ID NO: 1528441 - DNA, 25 bp, Homo sapien
gacaagtccacattgcatctccaag

SEQ ID NO: 1528442 - DNA, 25 bp, Homo sapien
tcaaccagcaaagttgaagagggct

SEQ ID NO: 1528443 - DNA, 25 bp, Homo sapien
taagctgatcaagacatcaaccagc

SEQ ID NO: 1528444 - DNA, 25 bp, Homo sapien
ggattgcacccgagcatttgggaaa

SEQ ID NO: 1528445 - DNA, 25 bp, Homo sapien
tagactgaggtactgaagacacgac

SEQ ID NO: 1528446 - DNA, 25 bp, Homo sapien
taaaacctgacaactactaggatgc

SEQ ID NO: 1528447 - DNA, 25 bp, Homo sapien
tcgtaacaaacatgacaccttcctg

SEQ ID NO: 1528448 - DNA, 25 bp, Homo sapien
aacggattccgttgtcagacaaaag

SEQ ID NO: 1528449 - DNA, 25 bp, Homo sapien
tatttgcacctctataacggattcc

SEQ ID NO: 1528450 - DNA, 25 bp, Homo sapien
aaaaataatctctgggacaacttca

SEQ ID NO: 1528451 - DNA, 25 bp, Homo sapien
caacttcatgaactggtgatactcc

SEQ ID NO: 1528452 - DNA, 25 bp, Homo sapien
catgaactggtgatactccctgtgt

SEQ ID NO: 1528453 - DNA, 25 bp, Homo sapien
actccctgtgtctgaaggcagacag

SEQ ID NO: 1528454 - DNA, 25 bp, Homo sapien
ctccctcccggttgaaggatattct

SEQ ID NO: 1528455 - DNA, 25 bp, Homo sapien
ttcttaaagccgtggtggtcaggaa

SEQ ID NO: 1528456 - DNA, 25 bp, Homo sapien
caggcaagtcttaaagcaatggatc

SEQ ID NO: 1528457 - DNA, 25 bp, Homo sapien
ttaaagcaatggatctccctcccgg

SEQ ID NO: 1528458 - DNA, 25 bp, Homo sapien
ggaaggtagcatcaaatactcatct

SEQ ID NO: 1528459 - DNA, 25 bp, Homo sapien
actgtcagtctggaaggtagcatca

SEQ ID NO: 1528460 - DNA, 25 bp, Homo sapien
tcagtctggaaggtagcatcaaata

SEQ ID NO: 1528461 - DNA, 25 bp, Homo sapien
cagggaatcctactgcccttccacc

SEQ ID NO: 1528462 - DNA, 25 bp, Homo sapien
catgcaagattcataaaggccccag

SEQ ID NO: 1528463 - DNA, 25 bp, Homo sapien
ggtagatgtgaatataaaagaatat

SEQ ID NO: 1528464 - DNA, 25 bp, Homo sapien
ccagatgttgcttatttaaatgagc

SEQ ID NO: 1528465 - DNA, 25 bp, Homo sapien
gacaatatttttggctatccctttg

SEQ ID NO: 1528466 - DNA, 25 bp, Homo sapien
tcttttccataacgaggctggctgc

SEQ ID NO: 1528467 - DNA, 25 bp, Homo sapien
ttgggaaaaatgacctccagtcggc

SEQ ID NO: 1528468 - DNA, 25 bp, Homo sapien
tccagtcggcaatattcctttcagc

SEQ ID NO: 1528469 - DNA, 25 bp, Homo sapien
catgattctagtgtgctgttgccca

SEQ ID NO: 1528470 - DNA, 25 bp, Homo sapien
atcattaagaaattgaaggcactga

SEQ ID NO: 1528471 - DNA, 25 bp, Homo sapien
tgtctgcatgaaaccgatgatcgca

SEQ ID NO: 1528472 - DNA, 25 bp, Homo sapien
tcccctgtcaatcaattctgcatgt

SEQ ID NO: 1528473 - DNA, 25 bp, Homo sapien
taaatgaaattcctgccgctgctaa

SEQ ID NO: 1528474 - DNA, 25 bp, Homo sapien
tgtctcaataaaggctctgttctgt

SEQ ID NO: 1528475 - DNA, 25 bp, Homo sapien
ctgtctcaataaaggctctgttctg

SEQ ID NO: 1528476 - DNA, 25 bp, Homo sapien
gtgaaaatgccctaaaatgccagtg

SEQ ID NO: 1528477 - DNA, 25 bp, Homo sapien
gtaagttaacttatgccccagagca

SEQ ID NO: 1528478 - DNA, 25 bp, Homo sapien
tgggagagcccaaacgtcagagtaa

SEQ ID NO: 1528479 - DNA, 25 bp, Homo sapien
aacttttgtctgtatcacgcctggg

SEQ ID NO: 1528480 - DNA, 25 bp, Homo sapien
acttcaatgcctcgaagttccctgg

SEQ ID NO: 1528481 - DNA, 25 bp, Homo sapien
tcaatgcctcgaagttccctggcca

SEQ ID NO: 1528482 - DNA, 25 bp, Homo sapien
gagtacatgtctacaatggccatgt

SEQ ID NO: 1528483 - DNA, 25 bp, Homo sapien
ttctgatcccgaatgagtacatgtc

SEQ ID NO: 1528484 - DNA, 25 bp, Homo sapien
gacccacaggtcaagctttctcagg

SEQ ID NO: 1528485 - DNA, 25 bp, Homo sapien
ccagtccattgctggaagtgcagta

SEQ ID NO: 1528486 - DNA, 25 bp, Homo sapien
gctggctcaagcaagggcttcactg

SEQ ID NO: 1528487 - DNA, 25 bp, Homo sapien
tgcagtagggactgaaacctctagt

SEQ ID NO: 1528488 - DNA, 25 bp, Homo sapien
cctgcaggaagccccagacaaagac

SEQ ID NO: 1528489 - DNA, 25 bp, Homo sapien
gacaaagacagccgcaggcaggaag

SEQ ID NO: 1528490 - DNA, 25 bp, Homo sapien
tgatgggcaatggcagaaggtagac

SEQ ID NO: 1528491 - DNA, 25 bp, Homo sapien
gatgggcaatggcagaaggtagaca

SEQ ID NO: 1528492 - DNA, 25 bp, Homo sapien
aatggtcccactcttgctcacttgc

SEQ ID NO: 1528493 - DNA, 25 bp, Homo sapien
agctctgcccgagggtaggcaagcc

SEQ ID NO: 1528494 - DNA, 25 bp, Homo sapien
tgccacaccctgagaccaagggcat

SEQ ID NO: 1528495 - DNA, 25 bp, Homo sapien
gaccatcctagatccctggaaggct

SEQ ID NO: 1528496 - DNA, 25 bp, Homo sapien
tgctcagaacgtggctgctggcctc

SEQ ID NO: 1528497 - DNA, 25 bp, Homo sapien
cacactccagggctgtagcagcccc

SEQ ID NO: 1528498 - DNA, 25 bp, Homo sapien
ctcttgtctccctatggtgcagaga

SEQ ID NO: 1528499 - DNA, 25 bp, Homo sapien
agggctgtagcagcccctcttgtct

SEQ ID NO: 1528500 - DNA, 25 bp, Homo sapien
ggagattccagaggagcccaccctg

SEQ ID NO: 1528501 - DNA, 25 bp, Homo sapien
tcctccttgaggagggtccacccag

SEQ ID NO: 1528502 - DNA, 25 bp, Homo sapien
cagaaggagaacatttagggctgga

SEQ ID NO: 1528503 - DNA, 25 bp, Homo sapien
tccctaggatgaagagtgcccactg

SEQ ID NO: 1528504 - DNA, 25 bp, Homo sapien
gacagccagtgtgaccattggattt

SEQ ID NO: 1528505 - DNA, 25 bp, Homo sapien
gctagggagactctgcaagtcagcc

SEQ ID NO: 1528506 - DNA, 25 bp, Homo sapien
tcttgtgcaggctacctggccggtg

SEQ ID NO: 1528507 - DNA, 25 bp, Homo sapien
ttcccccagagacatggccattggg

SEQ ID NO: 1528508 - DNA, 25 bp, Homo sapien
agcagatgaaaagacccctccaagg

SEQ ID NO: 1528509 - DNA, 25 bp, Homo sapien
cacacgatgcctgttgcaagaggaa

SEQ ID NO: 1528510 - DNA, 25 bp, Homo sapien
tatcaatcacgagaggagaagcagc

SEQ ID NO: 1528511 - DNA, 25 bp, Homo sapien
gattatgcatcgagtccaagccctg

SEQ ID NO: 1528512 - DNA, 25 bp, Homo sapien
catcaccagtagatcaattgcaggt

SEQ ID NO: 1528513 - DNA, 25 bp, Homo sapien
tcccaggctgggtagttacaactta

SEQ ID NO: 1528514 - DNA, 25 bp, Homo sapien
tatctttcagactatcttgccaggg

SEQ ID NO: 1528515 - DNA, 25 bp, Homo sapien
caaacactgtgtgtcgaaagcaaac

SEQ ID NO: 1528516 - DNA, 25 bp, Homo sapien
ggactccgaggcataggtgaaacag

SEQ ID NO: 1528517 - DNA, 25 bp, Homo sapien
catttggagccctatgcagtaagta

SEQ ID NO: 1528518 - DNA, 25 bp, Homo sapien
ttaactccagtataaggaaggcagg

SEQ ID NO: 1528519 - DNA, 25 bp, Homo sapien
taaacatctggaaccaacaggtgcc

SEQ ID NO: 1528520 - DNA, 25 bp, Homo sapien
aaaagctgttttgagtgatgcaggc

SEQ ID NO: 1528521 - DNA, 25 bp, Homo sapien
taaacgccgaaatttgaaatgatat

SEQ ID NO: 1528522 - DNA, 25 bp, Homo sapien
tgatgcaggcttaaacgccgaaatt

SEQ ID NO: 1528523 - DNA, 25 bp, Homo sapien
ccacaaaagctgttttgagtgatgc

SEQ ID NO: 1528524 - DNA, 25 bp, Homo sapien
ctttcaggtctagcaagctgacatt

SEQ ID NO: 1528525 - DNA, 25 bp, Homo sapien
ttcaggtctagcaagctgacatttc

SEQ ID NO: 1528526 - DNA, 25 bp, Homo sapien
gctttcaggtctagcaagctgacat

SEQ ID NO: 1528527 - DNA, 25 bp, Homo sapien
caggtctagcaagctgacatttctc

SEQ ID NO: 1528528 - DNA, 25 bp, Homo sapien
ctcttaaactgagggtttgtgcatg

SEQ ID NO: 1528529 - DNA, 25 bp, Homo sapien
gatgccattttattccccgtcttta

SEQ ID NO: 1528530 - DNA, 25 bp, Homo sapien
tgcatgagtgcacagtgaaacacac

SEQ ID NO: 1528531 - DNA, 25 bp, Homo sapien
aactgagggtttgtgcatgagtgca

SEQ ID NO: 1528532 - DNA, 25 bp, Homo sapien
gaaaccatatactggaagcaaagct

SEQ ID NO: 1528533 - DNA, 25 bp, Homo sapien
ttctttgaaaccatatactggaagc

SEQ ID NO: 1528534 - DNA, 25 bp, Homo sapien
catcatgtggccgtgtaaatcgatc

SEQ ID NO: 1528535 - DNA, 25 bp, Homo sapien
gatgacatcatcatgtggccgtgta

SEQ ID NO: 1528536 - DNA, 25 bp, Homo sapien
tgtgctctatcagggcaaagaggag

SEQ ID NO: 1528537 - DNA, 25 bp, Homo sapien
gaagacacaattccattaagaggtc

SEQ ID NO: 1528538 - DNA, 25 bp, Homo sapien
gcttttaatgctatttacacctgaa

SEQ ID NO: 1528539 - DNA, 25 bp, Homo sapien
tatattggcaggagcgggaagtccc

SEQ ID NO: 1528540 - DNA, 25 bp, Homo sapien
aggataaagttggtgcaggcactga

SEQ ID NO: 1528541 - DNA, 25 bp, Homo sapien
gcagcttaactgcatacttgtctta

SEQ ID NO: 1528542 - DNA, 25 bp, Homo sapien
cttagcagcttaactgcatacttgt

SEQ ID NO: 1528543 - DNA, 25 bp, Homo sapien
ccagaaaggataaagttggtgcagg

SEQ ID NO: 1528544 - DNA, 25 bp, Homo sapien
aaaactgtgagcatccgcgtggcag

SEQ ID NO: 1528545 - DNA, 25 bp, Homo sapien
gttttcccaaccaaacagctatgga

SEQ ID NO: 1528546 - DNA, 25 bp, Homo sapien
gacattcccttatctggcaggcaga

SEQ ID NO: 1528547 - DNA, 25 bp, Homo sapien
gattctaaaccttactggcaactgc

SEQ ID NO: 1528548 - DNA, 25 bp, Homo sapien
gaaccaagaaccaatggtaagccca

SEQ ID NO: 1528549 - DNA, 25 bp, Homo sapien
acactcataaacaagaaccaagaac

SEQ ID NO: 1528550 - DNA, 25 bp, Homo sapien
cactcataaacaagaaccaagaacc

SEQ ID NO: 1528551 - DNA, 25 bp, Homo sapien
ctcataaacaagaaccaagaaccaa

SEQ ID NO: 1528552 - DNA, 25 bp, Homo sapien
acttttcaagacaaacttcatcagg

SEQ ID NO: 1528553 - DNA, 25 bp, Homo sapien
tcctatgatgacaacgtggaaactc

SEQ ID NO: 1528554 - DNA, 25 bp, Homo sapien
tccaagcaaggttttggtcacttga

SEQ ID NO: 1528555 - DNA, 25 bp, Homo sapien
cacttgagtccagatcctatgatga

SEQ ID NO: 1528556 - DNA, 25 bp, Homo sapien
ttctctgcgttgtgatagcacagca

SEQ ID NO: 1528557 - DNA, 25 bp, Homo sapien
agctgctcccagagacttggtcttt

SEQ ID NO: 1528558 - DNA, 25 bp, Homo sapien
aacaatgtgctgctatttgcatgca

SEQ ID NO: 1528559 - DNA, 25 bp, Homo sapien
gaggacgccttcgttccaagcaatt

SEQ ID NO: 1528560 - DNA, 25 bp, Homo sapien
tctgttctcttagcactactggata

SEQ ID NO: 1528561 - DNA, 25 bp, Homo sapien
gtgccaaggcgcctttcttcagggc

SEQ ID NO: 1528562 - DNA, 25 bp, Homo sapien
tttgcgcaaaagaggcaatccgggc

SEQ ID NO: 1528563 - DNA, 25 bp, Homo sapien
caatccgggcaccttctggtgggca

SEQ ID NO: 1528564 - DNA, 25 bp, Homo sapien
ggacttgggctatattttgccttga

SEQ ID NO: 1528565 - DNA, 25 bp, Homo sapien
tcttctgttggggtcttcagctcag

SEQ ID NO: 1528566 - DNA, 25 bp, Homo sapien
ctctgtgcaggaaacacgaagagtg

SEQ ID NO: 1528567 - DNA, 25 bp, Homo sapien
tgcaggaaacacgaagagtggccat

SEQ ID NO: 1528568 - DNA, 25 bp, Homo sapien
ggactggcttcagaaaatttcagca

SEQ ID NO: 1528569 - DNA, 25 bp, Homo sapien
gttggactggcttcagaaaatttca

SEQ ID NO: 1528570 - DNA, 25 bp, Homo sapien
tggactggcttcagaaaatttcagc

SEQ ID NO: 1528571 - DNA, 25 bp, Homo sapien
ctgttggactggcttcagaaaattt

SEQ ID NO: 1528572 - DNA, 25 bp, Homo sapien
ttcaggtaaagcctaaaatccttca

SEQ ID NO: 1528573 - DNA, 25 bp, Homo sapien
tcaggtaaagcctaaaatccttcat

SEQ ID NO: 1528574 - DNA, 25 bp, Homo sapien
aaattgtgccttcaagggctgagaa

SEQ ID NO: 1528575 - DNA, 25 bp, Homo sapien
aaattaaattgtgccttcaagggct

SEQ ID NO: 1528576 - DNA, 25 bp, Homo sapien
attaaattgtgccttcaagggctga

SEQ ID NO: 1528577 - DNA, 25 bp, Homo sapien
taaattgtgccttcaagggctgaga

SEQ ID NO: 1528578 - DNA, 25 bp, Homo sapien
tgaacctgacatcagtataacccaa

SEQ ID NO: 1528579 - DNA, 25 bp, Homo sapien
tttcccctccactatattgctataa

SEQ ID NO: 1528580 - DNA, 25 bp, Homo sapien
tattgctataatgattttgcataac

SEQ ID NO: 1528581 - DNA, 25 bp, Homo sapien
aaaaggttagcttcaatgaacctga

SEQ ID NO: 1528582 - DNA, 25 bp, Homo sapien
gatgccgtggagcagaggacgtgtt

SEQ ID NO: 1528583 - DNA, 25 bp, Homo sapien
tctccgtgcctggaaaggatgccgt

SEQ ID NO: 1528584 - DNA, 25 bp, Homo sapien
tgagcttcccgggttgctgatggct

SEQ ID NO: 1528585 - DNA, 25 bp, Homo sapien
cagcacccggatgggaactctgtcc

SEQ ID NO: 1528586 - DNA, 25 bp, Homo sapien
agccttgctcctgccgaagcccccg

SEQ ID NO: 1528587 - DNA, 25 bp, Homo sapien
tgacgtccttcgcagcgaccgctcc

SEQ ID NO: 1528588 - DNA, 25 bp, Homo sapien
tccctgacgtccttcgcagcgaccg

SEQ ID NO: 1528589 - DNA, 25 bp, Homo sapien
gtccttcgcagcgaccgctcccagg

SEQ ID NO: 1528590 - DNA, 25 bp, Homo sapien
tgtagctcctcaggggttgcagaga

SEQ ID NO: 1528591 - DNA, 25 bp, Homo sapien
ctgtttgtagctcctcaggggttgc

SEQ ID NO: 1528592 - DNA, 25 bp, Homo sapien
gctcctcaggggttgcagagatcct

SEQ ID NO: 1528593 - DNA, 25 bp, Homo sapien
tcaggggttgcagagatcctgccaa

SEQ ID NO: 1528594 - DNA, 25 bp, Homo sapien
gagttgtccacaccttctgtccttg

SEQ ID NO: 1528595 - DNA, 25 bp, Homo sapien
ggcaagcatctctgcatcccatgaa

SEQ ID NO: 1528596 - DNA, 25 bp, Homo sapien
tcaactacttggcaagcatctctgc

SEQ ID NO: 1528597 - DNA, 25 bp, Homo sapien
catgaatgagagttgtccacacctt

SEQ ID NO: 1528598 - DNA, 25 bp, Homo sapien
gctgaacacagagaaatattctaaa

SEQ ID NO: 1528599 - DNA, 25 bp, Homo sapien
tgatcttgaaccatcacccatctgc

SEQ ID NO: 1528600 - DNA, 25 bp, Homo sapien
ctgacagggagggaccgcatagcca

SEQ ID NO: 1528601 - DNA, 25 bp, Homo sapien
tagccaaaccctgatcttgaaccat

SEQ ID NO: 1528602 - DNA, 25 bp, Homo sapien
taatgcttcttagatgctgaccgca

SEQ ID NO: 1528603 - DNA, 25 bp, Homo sapien
catagtttttagatccagaagcccc

SEQ ID NO: 1528604 - DNA, 25 bp, Homo sapien
gctgaccgcagcagttagcatagtt

SEQ ID NO: 1528605 - DNA, 25 bp, Homo sapien
gaagcccccttaatttggtagcaga

SEQ ID NO: 1528606 - DNA, 25 bp, Homo sapien
cgaggctggacagttaaaggccact

SEQ ID NO: 1528607 - DNA, 25 bp, Homo sapien
aactgatgcctgctgctcgacttag

SEQ ID NO: 1528608 - DNA, 25 bp, Homo sapien
tgggagaaaggaccacgacagtcag

SEQ ID NO: 1528609 - DNA, 25 bp, Homo sapien
cagtcagcttagaatcctctgtgat

SEQ ID NO: 1528610 - DNA, 25 bp, Homo sapien
tgtgattcctcgagcaggtgcagcc

SEQ ID NO: 1528611 - DNA, 25 bp, Homo sapien
tctcctcttgcatcccattgtttag

SEQ ID NO: 1528612 - DNA, 25 bp, Homo sapien
tgttgggcagccaggtggtccagga

SEQ ID NO: 1528613 - DNA, 25 bp, Homo sapien
ggagctgcgcttaaccccagccggg

SEQ ID NO: 1528614 - DNA, 25 bp, Homo sapien
ccaggagctgcgcttaaccccagcc

SEQ ID NO: 1528615 - DNA, 25 bp, Homo sapien
ggagtccaaatttgtttcctgccat

SEQ ID NO: 1528616 - DNA, 25 bp, Homo sapien
gaaggagtccaaatttgtttcctgc

SEQ ID NO: 1528617 - DNA, 25 bp, Homo sapien
ctgaaggagtccaaatttgtttcct

SEQ ID NO: 1528618 - DNA, 25 bp, Homo sapien
aggagtccaaatttgtttcctgcca

SEQ ID NO: 1528619 - DNA, 25 bp, Homo sapien
cttctgtttccgtttactatattca

SEQ ID NO: 1528620 - DNA, 25 bp, Homo sapien
ctgagagcagaatgactttccctgt

SEQ ID NO: 1528621 - DNA, 25 bp, Homo sapien
gtttccgtttactatattcagtaca

SEQ ID NO: 1528622 - DNA, 25 bp, Homo sapien
ttggttccgtccaaagtttgcctga

SEQ ID NO: 1528623 - DNA, 25 bp, Homo sapien
caaagtgtcttcgtggttgcgctgc

SEQ ID NO: 1528624 - DNA, 25 bp, Homo sapien
tcagcccgtgtgacaaaaaatcccg

SEQ ID NO: 1528625 - DNA, 25 bp, Homo sapien
ttctgcccgttgaggaactgctgca

SEQ ID NO: 1528626 - DNA, 25 bp, Homo sapien
taaagggtcgagcttacttggcagg

SEQ ID NO: 1528627 - DNA, 25 bp, Homo sapien
tgagcagggctgctgtacaagctgc

SEQ ID NO: 1528628 - DNA, 25 bp, Homo sapien
tctccccgcttctcagctaacctac

SEQ ID NO: 1528629 - DNA, 25 bp, Homo sapien
gcagggctgctgtacaagctgcttc

SEQ ID NO: 1528630 - DNA, 25 bp, Homo sapien
agggctgctgtacaagctgcttctc

SEQ ID NO: 1528631 - DNA, 25 bp, Homo sapien
agacccactggccttggaactgact

SEQ ID NO: 1528632 - DNA, 25 bp, Homo sapien
ccctgtcctcaatcaagacccactg

SEQ ID NO: 1528633 - DNA, 25 bp, Homo sapien
tgtcctcaatcaagacccactggcc

SEQ ID NO: 1528634 - DNA, 25 bp, Homo sapien
cccactggccttggaactgactgga

SEQ ID NO: 1528635 - DNA, 25 bp, Homo sapien
acacggatctggcaggtgagccacg

SEQ ID NO: 1528636 - DNA, 25 bp, Homo sapien
tctggcaggtgagccacgttgtaat

SEQ ID NO: 1528637 - DNA, 25 bp, Homo sapien
tgagccacgttgtaattttggaagg

SEQ ID NO: 1528638 - DNA, 25 bp, Homo sapien
gtgagccacgttgtaattttggaag

SEQ ID NO: 1528639 - DNA, 25 bp, Homo sapien
tgattacagtattagcgaggtgctt

SEQ ID NO: 1528640 - DNA, 25 bp, Homo sapien
tgattttaatttagccgtctgaggc

SEQ ID NO: 1528641 - DNA, 25 bp, Homo sapien
aaggcaacgccttacctgctgttag

SEQ ID NO: 1528642 - DNA, 25 bp, Homo sapien
caatgttgccattagtaacagggta

SEQ ID NO: 1528643 - DNA, 25 bp, Homo sapien
ggtttgtaataagccggcagagtcc

SEQ ID NO: 1528644 - DNA, 25 bp, Homo sapien
gcagtgaattgcctccaagatcgaa

SEQ ID NO: 1528645 - DNA, 25 bp, Homo sapien
gacagtcgctccaggtagtgtgacc

SEQ ID NO: 1528646 - DNA, 25 bp, Homo sapien
tacgtctttaacagtgggcaaggca

SEQ ID NO: 1528647 - DNA, 25 bp, Homo sapien
tttgctcacataacaaacagctgca

SEQ ID NO: 1528648 - DNA, 25 bp, Homo sapien
gcccatctcggcaataactgtttga

SEQ ID NO: 1528649 - DNA, 25 bp, Homo sapien
attagcctagccagtgacagtcgcc

SEQ ID NO: 1528650 - DNA, 25 bp, Homo sapien
gtttgattgcaaacttgaccccttc

SEQ ID NO: 1528651 - DNA, 25 bp, Homo sapien
ccgagctccggtataaagtttggct

SEQ ID NO: 1528652 - DNA, 25 bp, Homo sapien
tctgctgataatgactgtcttcggc

SEQ ID NO: 1528653 - DNA, 25 bp, Homo sapien
ggtataaagtttggcttttgcagca

SEQ ID NO: 1528654 - DNA, 25 bp, Homo sapien
ataatgactgtcttcggctctgcag

SEQ ID NO: 1528655 - DNA, 25 bp, Homo sapien
taattacacagatccgacctgccgc

SEQ ID NO: 1528656 - DNA, 25 bp, Homo sapien
taatagcaaggagaagccggttggc

SEQ ID NO: 1528657 - DNA, 25 bp, Homo sapien
tcgcagtgagataccgggcatcgtt

SEQ ID NO: 1528658 - DNA, 25 bp, Homo sapien
tgcaagatgctgaccaataatgtac

SEQ ID NO: 1528659 - DNA, 25 bp, Homo sapien
tcaatcatcagaagctgcaaggtgc

SEQ ID NO: 1528660 - DNA, 25 bp, Homo sapien
caatcatcagaagctgcaaggtgct

SEQ ID NO: 1528661 - DNA, 25 bp, Homo sapien
aatcatcagaagctgcaaggtgctt

SEQ ID NO: 1528662 - DNA, 25 bp, Homo sapien
tcatcagaagctgcaaggtgctttt

SEQ ID NO: 1528663 - DNA, 25 bp, Homo sapien
tggaattacagccgcatccaccatg

SEQ ID NO: 1528664 - DNA, 25 bp, Homo sapien
ggaattacagccgcatccaccatgc

SEQ ID NO: 1528665 - DNA, 25 bp, Homo sapien
tattgtgagtacaggaacagctgca

SEQ ID NO: 1528666 - DNA, 25 bp, Homo sapien
ggtctcgtggatacgttgtcaaaag

SEQ ID NO: 1528667 - DNA, 25 bp, Homo sapien
tgcagacccactcattgagtaagag

SEQ ID NO: 1528668 - DNA, 25 bp, Homo sapien
taagagccaacagcatatgattgtg

SEQ ID NO: 1528669 - DNA, 25 bp, Homo sapien
gtgtctatgaaatgagccttttaat

SEQ ID NO: 1528670 - DNA, 25 bp, Homo sapien
ctggatgccctaaacggttccaaat

SEQ ID NO: 1528671 - DNA, 25 bp, Homo sapien
atgccctaaacggttccaaattatg

SEQ ID NO: 1528672 - DNA, 25 bp, Homo sapien
cggagtgaagtcgaagcaagacgcc

SEQ ID NO: 1528673 - DNA, 25 bp, Homo sapien
gcaactttgcaaggagcccagtgct

SEQ ID NO: 1528674 - DNA, 25 bp, Homo sapien
tgttcccgtagtgcaaagtgtccac

SEQ ID NO: 1528675 - DNA, 25 bp, Homo sapien
gggacactgaccttagctgtaacga

SEQ ID NO: 1528676 - DNA, 25 bp, Homo sapien
tggagaccttgagcatccagtgcat

SEQ ID NO: 1528677 - DNA, 25 bp, Homo sapien
tgagcatccagtgcattgagaaggc

SEQ ID NO: 1528678 - DNA, 25 bp, Homo sapien
gaccttgagcatccagtgcattgag

SEQ ID NO: 1528679 - DNA, 25 bp, Homo sapien
ctgtatccctggagaccttgagcat

SEQ ID NO: 1528680 - DNA, 25 bp, Homo sapien
tccaaggcgatgaggataactacag

SEQ ID NO: 1528681 - DNA, 25 bp, Homo sapien
gatctcaagtggtgatggtcatcct

SEQ ID NO: 1528682 - DNA, 25 bp, Homo sapien
gagccccaagctgcgagagatgaac

SEQ ID NO: 1528683 - DNA, 25 bp, Homo sapien
cactcttctgatgtgacggcattca

SEQ ID NO: 1528684 - DNA, 25 bp, Homo sapien
cagacacaatgaaggctgagacaac

SEQ ID NO: 1528685 - DNA, 25 bp, Homo sapien
cgcagacacaatgaaggctgagaca

SEQ ID NO: 1528686 - DNA, 25 bp, Homo sapien
agacacaatgaaggctgagacaact

SEQ ID NO: 1528687 - DNA, 25 bp, Homo sapien
ggccgcagacacaatgaaggctgag

SEQ ID NO: 1528688 - DNA, 25 bp, Homo sapien
agctcatacccgaaaatgctttcaa

SEQ ID NO: 1528689 - DNA, 25 bp, Homo sapien
tcagctcatacccgaaaatgctttc

SEQ ID NO: 1528690 - DNA, 25 bp, Homo sapien
tttcagctcatacccgaaaatgctt

SEQ ID NO: 1528691 - DNA, 25 bp, Homo sapien
atttcagctcatacccgaaaatgct

SEQ ID NO: 1528692 - DNA, 25 bp, Homo sapien
ttaccccacccatgtaagctctgag

SEQ ID NO: 1528693 - DNA, 25 bp, Homo sapien
tgtgacaactgcaaggtcctatctg

SEQ ID NO: 1528694 - DNA, 25 bp, Homo sapien
tacggtctccttgcattttacccca

SEQ ID NO: 1528695 - DNA, 25 bp, Homo sapien
tgtcattaacgtgcatacggtctcc

SEQ ID NO: 1528696 - DNA, 25 bp, Homo sapien
aatttctccagtcaccagtaagagg

SEQ ID NO: 1528697 - DNA, 25 bp, Homo sapien
caggtgttccgcagtcccctaataa

SEQ ID NO: 1528698 - DNA, 25 bp, Homo sapien
cattcgggagatgttctgaacgaca

SEQ ID NO: 1528699 - DNA, 25 bp, Homo sapien
tttgcaggcattggaaaaacaacca

SEQ ID NO: 1528700 - DNA, 25 bp, Homo sapien
gagcaacataacaccatccggctga

SEQ ID NO: 1528701 - DNA, 25 bp, Homo sapien
gctgatgcgctgttctcttttttat

SEQ ID NO: 1528702 - DNA, 25 bp, Homo sapien
gcaacataacaccatccggctgatg

SEQ ID NO: 1528703 - DNA, 25 bp, Homo sapien
acataacaccatccggctgatgcgc

SEQ ID NO: 1528704 - DNA, 25 bp, Homo sapien
acagatgctgataaactgctcagcc

SEQ ID NO: 1528705 - DNA, 25 bp, Homo sapien
ggtctcagaatccttcaaaatcccc

SEQ ID NO: 1528706 - DNA, 25 bp, Homo sapien
gctgataaactgctcagccctgagt

SEQ ID NO: 1528707 - DNA, 25 bp, Homo sapien
agccctgagtttgagggtctcagaa

SEQ ID NO: 1528708 - DNA, 25 bp, Homo sapien
ctttccgtggtgaaaggcgccatta

SEQ ID NO: 1528709 - DNA, 25 bp, Homo sapien
tccgtggtgaaaggcgccattatca

SEQ ID NO: 1528710 - DNA, 25 bp, Homo sapien
ggtgaaaggcgccattatcatctcc

SEQ ID NO: 1528711 - DNA, 25 bp, Homo sapien
tggtgaaaggcgccattatcatctc

SEQ ID NO: 1528712 - DNA, 25 bp, Homo sapien
aatctggtgtctggtatcccagggc

SEQ ID NO: 1528713 - DNA, 25 bp, Homo sapien
ctctccttgagagagtgcagggctc

SEQ ID NO: 1528714 - DNA, 25 bp, Homo sapien
tgtctggtatcccagggctccattc

SEQ ID NO: 1528715 - DNA, 25 bp, Homo sapien
gaaggaaagctggacgtggggaatc

SEQ ID NO: 1528716 - DNA, 25 bp, Homo sapien
cctttgaggggagtaggtgaaggag

SEQ ID NO: 1528717 - DNA, 25 bp, Homo sapien
tgaggggagtaggtgaaggagttgg

SEQ ID NO: 1528718 - DNA, 25 bp, Homo sapien
tattatcctccaaacacccctttga

SEQ ID NO: 1528719 - DNA, 25 bp, Homo sapien
attatcctccaaacacccctttgag

SEQ ID NO: 1528720 - DNA, 25 bp, Homo sapien
gcttgtgagcctgccgccgtcggat

SEQ ID NO: 1528721 - DNA, 25 bp, Homo sapien
gcatggaggcattcgtgatggataa

SEQ ID NO: 1528722 - DNA, 25 bp, Homo sapien
aataatctattagggcggcatggag

SEQ ID NO: 1528723 - DNA, 25 bp, Homo sapien
gacttgaggttgcatgagagacaca

SEQ ID NO: 1528724 - DNA, 25 bp, Homo sapien
cacagaggtggggacaatagacact

SEQ ID NO: 1528725 - DNA, 25 bp, Homo sapien
acaatagacactggaggccaggtgt

SEQ ID NO: 1528726 - DNA, 25 bp, Homo sapien
attgggtaccatggacacagaggtg

SEQ ID NO: 1528727 - DNA, 25 bp, Homo sapien
tggggacaatagacactggaggcca

SEQ ID NO: 1528728 - DNA, 25 bp, Homo sapien
taaatcccactaggagaacaaggga

SEQ ID NO: 1528729 - DNA, 25 bp, Homo sapien
cactaggagaacaagggaaccttct

SEQ ID NO: 1528730 - DNA, 25 bp, Homo sapien
actaggagaacaagggaaccttctg

SEQ ID NO: 1528731 - DNA, 25 bp, Homo sapien
tagcttccagcccaccctctaggcc

SEQ ID NO: 1528732 - DNA, 25 bp, Homo sapien
ttccagcccaccctctaggcctcat

SEQ ID NO: 1528733 - DNA, 25 bp, Homo sapien
gcttccagcccaccctctaggcctc

SEQ ID NO: 1528734 - DNA, 25 bp, Homo sapien
cgtagcttccagcccaccctctagg

SEQ ID NO: 1528735 - DNA, 25 bp, Homo sapien
ctggttgctggacgccggcagatct

SEQ ID NO: 1528736 - DNA, 25 bp, Homo sapien
tctgtcgcgaagcagcgctggttgc

SEQ ID NO: 1528737 - DNA, 25 bp, Homo sapien
ccacagtacgggcagtccttcatgg

SEQ ID NO: 1528738 - DNA, 25 bp, Homo sapien
tatcctcaggtgcaccttaaggtga

SEQ ID NO: 1528739 - DNA, 25 bp, Homo sapien
tgtgcccctggatgcactcagactt

SEQ ID NO: 1528740 - DNA, 25 bp, Homo sapien
tgcccctggatgcactcagacttct

SEQ ID NO: 1528741 - DNA, 25 bp, Homo sapien
gctgtgcccctggatgcactcagac

SEQ ID NO: 1528742 - DNA, 25 bp, Homo sapien
gggctgtgcccctggatgcactcag

SEQ ID NO: 1528743 - DNA, 25 bp, Homo sapien
tgcaccttgtccaatccgttgaagg

SEQ ID NO: 1528744 - DNA, 25 bp, Homo sapien
gagtctccagctcaccaattacaga

SEQ ID NO: 1528745 - DNA, 25 bp, Homo sapien
tctttcagctgggacattgatctgc

SEQ ID NO: 1528746 - DNA, 25 bp, Homo sapien
gaaggtggccctctccaatgtgggt

SEQ ID NO: 1528747 - DNA, 25 bp, Homo sapien
tgtcatctccagatcacgtgccaga

SEQ ID NO: 1528748 - DNA, 25 bp, Homo sapien
gactttgtgagcaagagggccacca

SEQ ID NO: 1528749 - DNA, 25 bp, Homo sapien
tcagcggaaggcatgagtcccagtt

SEQ ID NO: 1528750 - DNA, 25 bp, Homo sapien
acaagggtgccagttgctatgagca

SEQ ID NO: 1528751 - DNA, 25 bp, Homo sapien
tggagggcaccattccagacgggct

SEQ ID NO: 1528752 - DNA, 25 bp, Homo sapien
atcattatttggagggcaccattcc

SEQ ID NO: 1528753 - DNA, 25 bp, Homo sapien
gggctcagatatctgcagacctact

SEQ ID NO: 1528754 - DNA, 25 bp, Homo sapien
caccattccagacgggctcagatat

SEQ ID NO: 1528755 - DNA, 25 bp, Homo sapien
tatggcactgttacgcaagactgaa

SEQ ID NO: 1528756 - DNA, 25 bp, Homo sapien
tcaggaatgacatactatctacaca

SEQ ID NO: 1528757 - DNA, 25 bp, Homo sapien
gctctgcagtaaatcatggatataa

SEQ ID NO: 1528758 - DNA, 25 bp, Homo sapien
tgaaaacggctgtagatttaaaagc

SEQ ID NO: 1528759 - DNA, 25 bp, Homo sapien
tattttaaggatgctgactgcgtgc

SEQ ID NO: 1528760 - DNA, 25 bp, Homo sapien
tgcagttgactgtgaccccgatggt

SEQ ID NO: 1528761 - DNA, 25 bp, Homo sapien
gaagttacaaaatgcagggtccacg

SEQ ID NO: 1528762 - DNA, 25 bp, Homo sapien
tccatggaggacgttgtgaaagcac

SEQ ID NO: 1528763 - DNA, 25 bp, Homo sapien
taaatgcacaattcagcactgatgt

SEQ ID NO: 1528764 - DNA, 25 bp, Homo sapien
aaaagttgctcatggataagtctac

SEQ ID NO: 1528765 - DNA, 25 bp, Homo sapien
tgggaaatgaactataggaagagga

SEQ ID NO: 1528766 - DNA, 25 bp, Homo sapien
ttcaaaagttgctcatggataagtc

SEQ ID NO: 1528767 - DNA, 25 bp, Homo sapien
tgttcggaaatctggaattcctttg

SEQ ID NO: 1528768 - DNA, 25 bp, Homo sapien
aatgatgttcggaaatctggaattc

SEQ ID NO: 1528769 - DNA, 25 bp, Homo sapien
tgatgttcggaaatctggaattcct

SEQ ID NO: 1528770 - DNA, 25 bp, Homo sapien
gatgttcggaaatctggaattcctt

SEQ ID NO: 1528771 - DNA, 25 bp, Homo sapien
tatcaatctaaattatgaacccaga

SEQ ID NO: 1528772 - DNA, 25 bp, Homo sapien
ccagagtctagcttcctgaattctt

SEQ ID NO: 1528773 - DNA, 25 bp, Homo sapien
cgaacaacaggatgttgaggttcaa

SEQ ID NO: 1528774 - DNA, 25 bp, Homo sapien
tgtgcttaaacgaacaacaggatgt

SEQ ID NO: 1528775 - DNA, 25 bp, Homo sapien
aaaatatttctgaccgcttgattca

SEQ ID NO: 1528776 - DNA, 25 bp, Homo sapien
ttttttgagctgtcagaaatccatt

SEQ ID NO: 1528777 - DNA, 25 bp, Homo sapien
ccatttagtgattttcgacaattca

SEQ ID NO: 1528778 - DNA, 25 bp, Homo sapien
gtatgtggctaaaaatagatctggg

SEQ ID NO: 1528779 - DNA, 25 bp, Homo sapien
gtattctccgactgcctatgccaag

SEQ ID NO: 1528780 - DNA, 25 bp, Homo sapien
tcagaggccctgttgattcagccag

SEQ ID NO: 1528781 - DNA, 25 bp, Homo sapien
tcagggtgtctgcacatatgcggcc

SEQ ID NO: 1528782 - DNA, 25 bp, Homo sapien
gctgtggtgctacttccaaagcgga

SEQ ID NO: 1528783 - DNA, 25 bp, Homo sapien
aacaagctgcagataaccaccgagg

SEQ ID NO: 1528784 - DNA, 25 bp, Homo sapien
cctggttaataggacgacctgacac

SEQ ID NO: 1528785 - DNA, 25 bp, Homo sapien
tccagatagaccgactaggacaggg

SEQ ID NO: 1528786 - DNA, 25 bp, Homo sapien
tatatactgtagattggtgcaccgt

SEQ ID NO: 1528787 - DNA, 25 bp, Homo sapien
ttctcacttgaagcagatactgttg

SEQ ID NO: 1528788 - DNA, 25 bp, Homo sapien
gcgactttctactgggtacccaaga

SEQ ID NO: 1528789 - DNA, 25 bp, Homo sapien
gatactgttggttcctcattccttc

SEQ ID NO: 1528790 - DNA, 25 bp, Homo sapien
ccttcccttctgattatctgattat

SEQ ID NO: 1528791 - DNA, 25 bp, Homo sapien
aacatctgtctcagtgcaaacaatg

SEQ ID NO: 1528792 - DNA, 25 bp, Homo sapien
tgtaaataattctgattaagctgca

SEQ ID NO: 1528793 - DNA, 25 bp, Homo sapien
aaataattctgattaagctgcagca

SEQ ID NO: 1528794 - DNA, 25 bp, Homo sapien
gtctcagtgcaaacaatggaccatt

SEQ ID NO: 1528795 - DNA, 25 bp, Homo sapien
catgcgagtgatcttaggtgtgaca

SEQ ID NO: 1528796 - DNA, 25 bp, Homo sapien
gattttagcatccaagcgtgacctg

SEQ ID NO: 1528797 - DNA, 25 bp, Homo sapien
gacaagatgctgctcggtgcctcag

SEQ ID NO: 1528798 - DNA, 25 bp, Homo sapien
tgggtgacccctcatagacactcag

SEQ ID NO: 1528799 - DNA, 25 bp, Homo sapien
atctctttaaacttctccagcttga

SEQ ID NO: 1528800 - DNA, 25 bp, Homo sapien
ctttaaacttctccagcttgacgtt

SEQ ID NO: 1528801 - DNA, 25 bp, Homo sapien
tgtctgcacaattgccatttttatc

SEQ ID NO: 1528802 - DNA, 25 bp, Homo sapien
tttatctctttaaacttctccagct

SEQ ID NO: 1528803 - DNA, 25 bp, Homo sapien
acaaagtttttcatcaacgcctgag

SEQ ID NO: 1528804 - DNA, 25 bp, Homo sapien
cggcttcttacaaagtttttcatca

SEQ ID NO: 1528805 - DNA, 25 bp, Homo sapien
aaagtttttcatcaacgcctgaggt

SEQ ID NO: 1528806 - DNA, 25 bp, Homo sapien
tcttacaaagtttttcatcaacgcc

SEQ ID NO: 1528807 - DNA, 25 bp, Homo sapien
ggccatcaaaagtcctgacgagctc

SEQ ID NO: 1528808 - DNA, 25 bp, Homo sapien
caaggattggcccacgttttccagg

SEQ ID NO: 1528809 - DNA, 25 bp, Homo sapien
gtcctgacgagctcctgctctctat

SEQ ID NO: 1528810 - DNA, 25 bp, Homo sapien
ttccaggtgaatttgttgtgtatgg

SEQ ID NO: 1528811 - DNA, 25 bp, Homo sapien
tggtcacggtcagcatggagtgaaa

SEQ ID NO: 1528812 - DNA, 25 bp, Homo sapien
caggtctgagcaaccatctgcctct

SEQ ID NO: 1528813 - DNA, 25 bp, Homo sapien
catggccatcatgttggaaggtgtc

SEQ ID NO: 1528814 - DNA, 25 bp, Homo sapien
gggctgaacccctgctggtcacggt

SEQ ID NO: 1528815 - DNA, 25 bp, Homo sapien
tagttaaaacactgcgcttcgcggg

SEQ ID NO: 1528816 - DNA, 25 bp, Homo sapien
taggaaaccctctctagtgaccagg

SEQ ID NO: 1528817 - DNA, 25 bp, Homo sapien
tcatgtcgtataacccaaggaccag

SEQ ID NO: 1528818 - DNA, 25 bp, Homo sapien
cagagattccgtgctcagatgcagc

SEQ ID NO: 1528819 - DNA, 25 bp, Homo sapien
ggagttgctctgaccactgtggaga

SEQ ID NO: 1528820 - DNA, 25 bp, Homo sapien
catctgatccatggaggatgtcagt

SEQ ID NO: 1528821 - DNA, 25 bp, Homo sapien
ctggagttgctctgaccactgtgga

SEQ ID NO: 1528822 - DNA, 25 bp, Homo sapien
ctgcccccatctgatccatggagga

SEQ ID NO: 1528823 - DNA, 25 bp, Homo sapien
tcacttccagatcgaatgaggaccg

SEQ ID NO: 1528824 - DNA, 25 bp, Homo sapien
taggaaaatcacttccagatcgaat

SEQ ID NO: 1528825 - DNA, 25 bp, Homo sapien
cctacaggtcttggaaaatgctggg

SEQ ID NO: 1528826 - DNA, 25 bp, Homo sapien
gaatgaggaccgatgggctcctaca

SEQ ID NO: 1528827 - DNA, 25 bp, Homo sapien
ttcagatggaatatcagattttgga

SEQ ID NO: 1528828 - DNA, 25 bp, Homo sapien
ttccagaagctaatacccaattctt

SEQ ID NO: 1528829 - DNA, 25 bp, Homo sapien
gcttttctaaattcagatggaatat

SEQ ID NO: 1528830 - DNA, 25 bp, Homo sapien
ataattccagaagctaatacccaat

SEQ ID NO: 1528831 - DNA, 25 bp, Homo sapien
ccatcataaatttagaggcaggaga

SEQ ID NO: 1528832 - DNA, 25 bp, Homo sapien
tttccatcataaatttagaggcagg

SEQ ID NO: 1528833 - DNA, 25 bp, Homo sapien
cataaatttagaggcaggagaagta

SEQ ID NO: 1528834 - DNA, 25 bp, Homo sapien
catcataaatttagaggcaggagaa

SEQ ID NO: 1528835 - DNA, 25 bp, Homo sapien
ggaatcctgcgacattcagtgtctt

SEQ ID NO: 1528836 - DNA, 25 bp, Homo sapien
ccactgggaatcctgcgacattcag

SEQ ID NO: 1528837 - DNA, 25 bp, Homo sapien
cttcctgactcttggacataactcc

SEQ ID NO: 1528838 - DNA, 25 bp, Homo sapien
cctgactcttggacataactccttc

SEQ ID NO: 1528839 - DNA, 25 bp, Homo sapien
tggtgcacgtctgcccattgtgtgt

SEQ ID NO: 1528840 - DNA, 25 bp, Homo sapien
attgtgtgtcactgcctcggtctcc

SEQ ID NO: 1528841 - DNA, 25 bp, Homo sapien
aagccaggacatcagctgtgtagag

SEQ ID NO: 1528842 - DNA, 25 bp, Homo sapien
ttggcagtaggcaccctatagagct

SEQ ID NO: 1528843 - DNA, 25 bp, Homo sapien
ctagtgtcaacaggaaaggcttgtt

SEQ ID NO: 1528844 - DNA, 25 bp, Homo sapien
gcttgttgggggacgtgaggcttga

SEQ ID NO: 1528845 - DNA, 25 bp, Homo sapien
agtgtcaacaggaaaggcttgttgg

SEQ ID NO: 1528846 - DNA, 25 bp, Homo sapien
tgggggacgtgaggcttgacacagc

SEQ ID NO: 1528847 - DNA, 25 bp, Homo sapien
tatgcaatactcatggtactctcca

SEQ ID NO: 1528848 - DNA, 25 bp, Homo sapien
tgacaagtgtttcttggactacaag

SEQ ID NO: 1528849 - DNA, 25 bp, Homo sapien
atgcaactgattcttgaagttgaca

SEQ ID NO: 1528850 - DNA, 25 bp, Homo sapien
gattattacataatgttgacaagtg

SEQ ID NO: 1528851 - DNA, 25 bp, Homo sapien
catgggttgacatggccaacatcaa

SEQ ID NO: 1528852 - DNA, 25 bp, Homo sapien
gaacctccatgggttgacatggcca

SEQ ID NO: 1528853 - DNA, 25 bp, Homo sapien
agagcccatgaagaacctccatggg

SEQ ID NO: 1528854 - DNA, 25 bp, Homo sapien
ccaacatcaacaccgcccaggcctg

SEQ ID NO: 1528855 - DNA, 25 bp, Homo sapien
taaacagtagcacagcggatatgtc

SEQ ID NO: 1528856 - DNA, 25 bp, Homo sapien
tgaaaccctttgtgctgcctcgata

SEQ ID NO: 1528857 - DNA, 25 bp, Homo sapien
cccgggtgtgctgcttatctgataa

SEQ ID NO: 1528858 - DNA, 25 bp, Homo sapien
tgtaacacctaagtgagaaatgcgc

SEQ ID NO: 1528859 - DNA, 25 bp, Homo sapien
cacaggcatggctcccctgggttgg

SEQ ID NO: 1528860 - DNA, 25 bp, Homo sapien
caggcatggctcccctgggttggcc

SEQ ID NO: 1528861 - DNA, 25 bp, Homo sapien
acaggcatggctcccctgggttggc

SEQ ID NO: 1528862 - DNA, 25 bp, Homo sapien
ggcatggctcccctgggttggcctt

SEQ ID NO: 1528863 - DNA, 25 bp, Homo sapien
tctgtaaaatggctgactccgctgc

SEQ ID NO: 1528864 - DNA, 25 bp, Homo sapien
gctccttctgacttattgttgtgac

SEQ ID NO: 1528865 - DNA, 25 bp, Homo sapien
cagggctgaacaagtataatttact

SEQ ID NO: 1528866 - DNA, 25 bp, Homo sapien
gtgccgcgattgtcactgtgctcaa

SEQ ID NO: 1528867 - DNA, 25 bp, Homo sapien
ggatgtgaatccaggcagccaatga

SEQ ID NO: 1528868 - DNA, 25 bp, Homo sapien
tgaatccaggcagccaatgagcaga

SEQ ID NO: 1528869 - DNA, 25 bp, Homo sapien
caggcagccaatgagcagatgttcc

SEQ ID NO: 1528870 - DNA, 25 bp, Homo sapien
ctggatgtgaatccaggcagccaat

SEQ ID NO: 1528871 - DNA, 25 bp, Homo sapien
ttctctcactctggcgtctaatctc

SEQ ID NO: 1528872 - DNA, 25 bp, Homo sapien
ggatgggtaccgaagtctagcttgt

SEQ ID NO: 1528873 - DNA, 25 bp, Homo sapien
accgaagtctagcttgttccatcca

SEQ ID NO: 1528874 - DNA, 25 bp, Homo sapien
tctggcgtctaatctctccttgttt

SEQ ID NO: 1528875 - DNA, 25 bp, Homo sapien
caattcatgatggaactgtggtcac

SEQ ID NO: 1528876 - DNA, 25 bp, Homo sapien
gtcatgatgtagccctctttacgta

SEQ ID NO: 1528877 - DNA, 25 bp, Homo sapien
ggaggtcatgatgtagccctcttta

SEQ ID NO: 1528878 - DNA, 25 bp, Homo sapien
ggtcatgatgtagccctctttacgt

SEQ ID NO: 1528879 - DNA, 25 bp, Homo sapien
aggtcatgatgtagccctctttacg

SEQ ID NO: 1528880 - DNA, 25 bp, Homo sapien
agaaagctattgatgaacaaagaag

SEQ ID NO: 1528881 - DNA, 25 bp, Homo sapien
aagaaagctattgatgaacaaagaa

SEQ ID NO: 1528882 - DNA, 25 bp, Homo sapien
ttgcatttcgtgtgtcattcaaaag

SEQ ID NO: 1528883 - DNA, 25 bp, Homo sapien
aaaggtttgcaactgggaaatgatg

SEQ ID NO: 1528884 - DNA, 25 bp, Homo sapien
catggacacagatctgccggaggga

SEQ ID NO: 1528885 - DNA, 25 bp, Homo sapien
tctgccggagggaggaccttttatg

SEQ ID NO: 1528886 - DNA, 25 bp, Homo sapien
agtagcaagtcctgacagtgaccca

SEQ ID NO: 1528887 - DNA, 25 bp, Homo sapien
cttggcccagtagcaagtcctgaca

SEQ ID NO: 1528888 - DNA, 25 bp, Homo sapien
actgagcctgggtagcagtcgcagc

SEQ ID NO: 1528889 - DNA, 25 bp, Homo sapien
gacccagactgagcctgggtagcag

SEQ ID NO: 1528890 - DNA, 25 bp, Homo sapien
tgtcttcatgctccaccaagaggcg

SEQ ID NO: 1528891 - DNA, 25 bp, Homo sapien
gacatttgggtctttaatgccagta

SEQ ID NO: 1528892 - DNA, 25 bp, Homo sapien
gcacagggatgcaatggaaacgacc

SEQ ID NO: 1528893 - DNA, 25 bp, Homo sapien
aatgccagtagggatggtctgccca

SEQ ID NO: 1528894 - DNA, 25 bp, Homo sapien
cacatccacacgtacacaccgatgg

SEQ ID NO: 1528895 - DNA, 25 bp, Homo sapien
cacacgtacacaccgatggcttcat

SEQ ID NO: 1528896 - DNA, 25 bp, Homo sapien
cacgtacacaccgatggcttcatgc

SEQ ID NO: 1528897 - DNA, 25 bp, Homo sapien
gtacacaccgatggcttcatgcaga

SEQ ID NO: 1528898 - DNA, 25 bp, Homo sapien
tggtgtgatgtaggtcgagcgcctg

SEQ ID NO: 1528899 - DNA, 25 bp, Homo sapien
taggtcgagcgcctgtgggtttgca

SEQ ID NO: 1528900 - DNA, 25 bp, Homo sapien
tacaacctgagagtgatgtctcagc

SEQ ID NO: 1528901 - DNA, 25 bp, Homo sapien
tggccttttgatttggtgtagaatt

SEQ ID NO: 1528902 - DNA, 25 bp, Homo sapien
gatccggggaagttgctgtcctgca

SEQ ID NO: 1528903 - DNA, 25 bp, Homo sapien
tcatactctgtggaaacgttggctg

SEQ ID NO: 1528904 - DNA, 25 bp, Homo sapien
ctgtggaaacgttggctgatgctgt

SEQ ID NO: 1528905 - DNA, 25 bp, Homo sapien
tactctgtggaaacgttggctgatg

SEQ ID NO: 1528906 - DNA, 25 bp, Homo sapien
tgtgtaattggagaggtggaaaacc

SEQ ID NO: 1528907 - DNA, 25 bp, Homo sapien
actaacaattaaaacgtcagacagg

SEQ ID NO: 1528908 - DNA, 25 bp, Homo sapien
gagaggtggaaaaccagtcagcccc

SEQ ID NO: 1528909 - DNA, 25 bp, Homo sapien
cgtcagacaggataggcaaatcaaa

SEQ ID NO: 1528910 - DNA, 25 bp, Homo sapien
ttccccgccttggtgttacagcttc

SEQ ID NO: 1528911 - DNA, 25 bp, Homo sapien
gcatcgagagtggatgcagcactgt

SEQ ID NO: 1528912 - DNA, 25 bp, Homo sapien
aatagccgccattcggtcctgggag

SEQ ID NO: 1528913 - DNA, 25 bp, Homo sapien
tcctggattctgacggggcatcgag

SEQ ID NO: 1528914 - DNA, 25 bp, Homo sapien
tcactgctccggttgtacacacaac

SEQ ID NO: 1528915 - DNA, 25 bp, Homo sapien
actgctccggttgtacacacaacaa

SEQ ID NO: 1528916 - DNA, 25 bp, Homo sapien
ctcactgctccggttgtacacacaa

SEQ ID NO: 1528917 - DNA, 25 bp, Homo sapien
tgctccggttgtacacacaacaaca

SEQ ID NO: 1528918 - DNA, 25 bp, Homo sapien
actgggaaaacgcagggacatagtt

SEQ ID NO: 1528919 - DNA, 25 bp, Homo sapien
tgtggtttcggatgaaatatttacc

SEQ ID NO: 1528920 - DNA, 25 bp, Homo sapien
tctctgtggtttcggatgaaatatt

SEQ ID NO: 1528921 - DNA, 25 bp, Homo sapien
catagtttgagtgtattctttctac

SEQ ID NO: 1528922 - DNA, 25 bp, Homo sapien
ctggctacatgtggtcaagacatac

SEQ ID NO: 1528923 - DNA, 25 bp, Homo sapien
ttaaacccacatagcaccctctcca

SEQ ID NO: 1528924 - DNA, 25 bp, Homo sapien
ccccagtctgttagatgcatctgac

SEQ ID NO: 1528925 - DNA, 25 bp, Homo sapien
tctaaggtgctcctggattggaggg

SEQ ID NO: 1528926 - DNA, 25 bp, Homo sapien
ctgacaaactgcccagatacaagaa

SEQ ID NO: 1528927 - DNA, 25 bp, Homo sapien
gagagctgacaaactgcccagatac

SEQ ID NO: 1528928 - DNA, 25 bp, Homo sapien
gagctgacaaactgcccagatacaa

SEQ ID NO: 1528929 - DNA, 25 bp, Homo sapien
agctgacaaactgcccagatacaag

SEQ ID NO: 1528930 - DNA, 25 bp, Homo sapien
ccactcacaggcagcttcggcatgg

SEQ ID NO: 1528931 - DNA, 25 bp, Homo sapien
cctcccggatggacacagaaagcag

SEQ ID NO: 1528932 - DNA, 25 bp, Homo sapien
ggaggcctcccggatggacacagaa

SEQ ID NO: 1528933 - DNA, 25 bp, Homo sapien
cacaggcagcttcggcatgggggag

SEQ ID NO: 1528934 - DNA, 25 bp, Homo sapien
catcaggtagaagctctgggctcat

SEQ ID NO: 1528935 - DNA, 25 bp, Homo sapien
tctgggctcattgcactttgaacgc

SEQ ID NO: 1528936 - DNA, 25 bp, Homo sapien
catagagcaacggacacctttgagg

SEQ ID NO: 1528937 - DNA, 25 bp, Homo sapien
aacgcttgcatcagcaaactcaagg

SEQ ID NO: 1528938 - DNA, 25 bp, Homo sapien
ggcttctccggtccctgaagacagc

SEQ ID NO: 1528939 - DNA, 25 bp, Homo sapien
ccccttgcttctcttgcaagttgtt

SEQ ID NO: 1528940 - DNA, 25 bp, Homo sapien
ccatggaggcttctccggtccctga

SEQ ID NO: 1528941 - DNA, 25 bp, Homo sapien
agccagcggccataacccggcccag

SEQ ID NO: 1528942 - DNA, 25 bp, Homo sapien
tgccaccaccccgttcttcatccct

SEQ ID NO: 1528943 - DNA, 25 bp, Homo sapien
ggtgccaccaccccgttcttcatcc

SEQ ID NO: 1528944 - DNA, 25 bp, Homo sapien
caccaccccgttcttcatccctcat

SEQ ID NO: 1528945 - DNA, 25 bp, Homo sapien
accaccccgttcttcatccctcatt

SEQ ID NO: 1528946 - DNA, 25 bp, Homo sapien
gagacgggtgattctttccactccc

SEQ ID NO: 1528947 - DNA, 25 bp, Homo sapien
ctggtgccaaaaagagacgggtgat

SEQ ID NO: 1528948 - DNA, 25 bp, Homo sapien
agcttctcatggcattcaggagggt

SEQ ID NO: 1528949 - DNA, 25 bp, Homo sapien
tctcatggcattcaggagggtgctg

SEQ ID NO: 1528950 - DNA, 25 bp, Homo sapien
catcttgtcgtcatggagaccagag

SEQ ID NO: 1528951 - DNA, 25 bp, Homo sapien
ttgtcgtcatggagaccagagtgaa

SEQ ID NO: 1528952 - DNA, 25 bp, Homo sapien
cttgtcgtcatggagaccagagtga

SEQ ID NO: 1528953 - DNA, 25 bp, Homo sapien
tcttgtcgtcatggagaccagagtg

SEQ ID NO: 1528954 - DNA, 25 bp, Homo sapien
ccttccccgccattatatcctcaat

SEQ ID NO: 1528955 - DNA, 25 bp, Homo sapien
ccccgccattatatcctcaattatc

SEQ ID NO: 1528956 - DNA, 25 bp, Homo sapien
ttccccgccattatatcctcaatta

SEQ ID NO: 1528957 - DNA, 25 bp, Homo sapien
tccccgccattatatcctcaattat

SEQ ID NO: 1528958 - DNA, 25 bp, Homo sapien
gatgacatgaagacgcgcgcagata

SEQ ID NO: 1528959 - DNA, 25 bp, Homo sapien
tgctgacggatgacatgaagacgcg

SEQ ID NO: 1528960 - DNA, 25 bp, Homo sapien
tcaatgctgacggatgacatgaaga

SEQ ID NO: 1528961 - DNA, 25 bp, Homo sapien
tgacggatgacatgaagacgcgcgc

SEQ ID NO: 1528962 - DNA, 25 bp, Homo sapien
tccggattcaaatccctttcaaatc

SEQ ID NO: 1528963 - DNA, 25 bp, Homo sapien
caaactcatcgccagcataattatc

SEQ ID NO: 1528964 - DNA, 25 bp, Homo sapien
ctttcaaatcgcttcctctctggca

SEQ ID NO: 1528965 - DNA, 25 bp, Homo sapien
ccagcataattatccggattcaaat

SEQ ID NO: 1528966 - DNA, 25 bp, Homo sapien
tcgcccatggcagaacggcgttccg

SEQ ID NO: 1528967 - DNA, 25 bp, Homo sapien
cagcagttgcaacagctgcgaagca

SEQ ID NO: 1528968 - DNA, 25 bp, Homo sapien
aagacgtgacggatttcgcccatgg

SEQ ID NO: 1528969 - DNA, 25 bp, Homo sapien
cacaagtcgcgagaaaagacgtgac

SEQ ID NO: 1528970 - DNA, 25 bp, Homo sapien
ctttgaggccatcaacatttcccat

SEQ ID NO: 1528971 - DNA, 25 bp, Homo sapien
ctctcactttgaggccatcaacatt

SEQ ID NO: 1528972 - DNA, 25 bp, Homo sapien
tcactttgaggccatcaacatttcc

SEQ ID NO: 1528973 - DNA, 25 bp, Homo sapien
actttgaggccatcaacatttccca

SEQ ID NO: 1528974 - DNA, 25 bp, Homo sapien
ggatcataattgcaatcaccagtat

SEQ ID NO: 1528975 - DNA, 25 bp, Homo sapien
ggcagaaagagtggccggtcagcac

SEQ ID NO: 1528976 - DNA, 25 bp, Homo sapien
aaggatcataattgcaatcaccagt

SEQ ID NO: 1528977 - DNA, 25 bp, Homo sapien
cagcactgttgctcacaccttcctg

SEQ ID NO: 1528978 - DNA, 25 bp, Homo sapien
tgtcaaaaggcatgcgatggacgca

SEQ ID NO: 1528979 - DNA, 25 bp, Homo sapien
gccctcttccgtgaggtctgcagag

SEQ ID NO: 1528980 - DNA, 25 bp, Homo sapien
gctgtaggctcctcgaaattcccag

SEQ ID NO: 1528981 - DNA, 25 bp, Homo sapien
tgaacctgcggtcgggatactggct

SEQ ID NO: 1528982 - DNA, 25 bp, Homo sapien
gaaactgacgctgcatcactgtggc

SEQ ID NO: 1528983 - DNA, 25 bp, Homo sapien
tgaaacctcggttagatgacaccct

SEQ ID NO: 1528984 - DNA, 25 bp, Homo sapien
gatctcaatcctctgcagtgccggt

SEQ ID NO: 1528985 - DNA, 25 bp, Homo sapien
tctaggcgaattacagcagctggtg

SEQ ID NO: 1528986 - DNA, 25 bp, Homo sapien
actatgttggcccttggcgatgagg

SEQ ID NO: 1528987 - DNA, 25 bp, Homo sapien
ggcccttggcgatgaggatgagaaa

SEQ ID NO: 1528988 - DNA, 25 bp, Homo sapien
catggtctgcagcaggcatcgccat

SEQ ID NO: 1528989 - DNA, 25 bp, Homo sapien
tatgttggcccttggcgatgaggat

SEQ ID NO: 1528990 - DNA, 25 bp, Homo sapien
cctgaattggccccaggacactttc

SEQ ID NO: 1528991 - DNA, 25 bp, Homo sapien
agaccctgaattggccccaggacac

SEQ ID NO: 1528992 - DNA, 25 bp, Homo sapien
ctatgctgcttcagggtggccacgc

SEQ ID NO: 1528993 - DNA, 25 bp, Homo sapien
tgctgcttcagggtggccacgccca

SEQ ID NO: 1528994 - DNA, 25 bp, Homo sapien
taggatcgtgcatggataccggcca

SEQ ID NO: 1528995 - DNA, 25 bp, Homo sapien
taccggccacaaggaggatgttctg

SEQ ID NO: 1528996 - DNA, 25 bp, Homo sapien
ccttaggctccaggtaggatcgtgc

SEQ ID NO: 1528997 - DNA, 25 bp, Homo sapien
ccatcccagagggtactgctgccct

SEQ ID NO: 1528998 - DNA, 25 bp, Homo sapien
tgggcaggttttgagttggtataaa

SEQ ID NO: 1528999 - DNA, 25 bp, Homo sapien
ttttgagttggtataaacacagtga

SEQ ID NO: 1529000 - DNA, 25 bp, Homo sapien
tcctttgtgggcaggttttgagttg

SEQ ID NO: 1529001 - DNA, 25 bp, Homo sapien
acctcctttgtgggcaggttttgag

SEQ ID NO: 1529002 - DNA, 25 bp, Homo sapien
cagtgcccacttatcatcagaaaga

SEQ ID NO: 1529003 - DNA, 25 bp, Homo sapien
gatgttggtccataggtgggtgccc

SEQ ID NO: 1529004 - DNA, 25 bp, Homo sapien
caatgtacatcttcccgcatatttg

SEQ ID NO: 1529005 - DNA, 25 bp, Homo sapien
tatttgttgaattgtcccacggaga

SEQ ID NO: 1529006 - DNA, 25 bp, Homo sapien
gcagggccttgttcctaaatggacc

SEQ ID NO: 1529007 - DNA, 25 bp, Homo sapien
caccattttgaagcgaccgtgctga

SEQ ID NO: 1529008 - DNA, 25 bp, Homo sapien
cattcctgttgagtagaagatttca

SEQ ID NO: 1529009 - DNA, 25 bp, Homo sapien
tcttaggcccctcggagactggcca

SEQ ID NO: 1529010 - DNA, 25 bp, Homo sapien
ggctcttccaggtttctattcctac

SEQ ID NO: 1529011 - DNA, 25 bp, Homo sapien
tggctcttccaggtttctattccta

SEQ ID NO: 1529012 - DNA, 25 bp, Homo sapien
ggttatcgtccttttccaaaatgca

SEQ ID NO: 1529013 - DNA, 25 bp, Homo sapien
ccaaaatgcataagtgctcttttct

SEQ ID NO: 1529014 - DNA, 25 bp, Homo sapien
tgcagtggaggcctgacagccaagc

SEQ ID NO: 1529015 - DNA, 25 bp, Homo sapien
aagctgtgagcatcagaccccaaac

SEQ ID NO: 1529016 - DNA, 25 bp, Homo sapien
gccaagctgtgagcatcagacccca

SEQ ID NO: 1529017 - DNA, 25 bp, Homo sapien
atgcagtggaggcctgacagccaag

SEQ ID NO: 1529018 - DNA, 25 bp, Homo sapien
aatggacaaatgcaccaaccttgac

SEQ ID NO: 1529019 - DNA, 25 bp, Homo sapien
attgtggtatcaaatggacaaatgc

SEQ ID NO: 1529020 - DNA, 25 bp, Homo sapien
tgtggtatcaaatggacaaatgcac

SEQ ID NO: 1529021 - DNA, 25 bp, Homo sapien
tatcaaatggacaaatgcaccaacc

SEQ ID NO: 1529022 - DNA, 25 bp, Homo sapien
cagtagagcacttttggaccaagaa

SEQ ID NO: 1529023 - DNA, 25 bp, Homo sapien
tacaagactacattcacagtagagc

SEQ ID NO: 1529024 - DNA, 25 bp, Homo sapien
tagcctttgctggtaaggtgatgct

SEQ ID NO: 1529025 - DNA, 25 bp, Homo sapien
ttgcaaccaatgcagcttctgaaag

SEQ ID NO: 1529026 - DNA, 25 bp, Homo sapien
ggaggcaccccagtgtgagcagatg

SEQ ID NO: 1529027 - DNA, 25 bp, Homo sapien
tggaggcaccccagtgtgagcagat

SEQ ID NO: 1529028 - DNA, 25 bp, Homo sapien
gaggcaccccagtgtgagcagatgg

SEQ ID NO: 1529029 - DNA, 25 bp, Homo sapien
tttatacagcaccaggtagaagatg

SEQ ID NO: 1529030 - DNA, 25 bp, Homo sapien
caggtagaagatgccgacactccaa

SEQ ID NO: 1529031 - DNA, 25 bp, Homo sapien
gaagatgccgacactccaatctttc

SEQ ID NO: 1529032 - DNA, 25 bp, Homo sapien
cagcaccaggtagaagatgccgaca

SEQ ID NO: 1529033 - DNA, 25 bp, Homo sapien
tgtttttaatcgtgattccttttca

SEQ ID NO: 1529034 - DNA, 25 bp, Homo sapien
taacccacaggtatcttgttagctg

SEQ ID NO: 1529035 - DNA, 25 bp, Homo sapien
gttataacccacaggtatcttgtta

SEQ ID NO: 1529036 - DNA, 25 bp, Homo sapien
cacaggtatcttgttagctgaatga

SEQ ID NO: 1529037 - DNA, 25 bp, Homo sapien
tgggttcaggtggggaccgctcctc

SEQ ID NO: 1529038 - DNA, 25 bp, Homo sapien
ctgtgggttcaggtggggaccgctc

SEQ ID NO: 1529039 - DNA, 25 bp, Homo sapien
tgtgggttcaggtggggaccgctcc

SEQ ID NO: 1529040 - DNA, 25 bp, Homo sapien
tgccaaagtgccagagggtacgaac

SEQ ID NO: 1529041 - DNA, 25 bp, Homo sapien
tctaatagtccctgaaagctccagc

SEQ ID NO: 1529042 - DNA, 25 bp, Homo sapien
taactgatgaggaactgccaagccc

SEQ ID NO: 1529043 - DNA, 25 bp, Homo sapien
cacatagctcacgtgctgccaaagt

SEQ ID NO: 1529044 - DNA, 25 bp, Homo sapien
tttgggctttaattacgcttgattc

SEQ ID NO: 1529045 - DNA, 25 bp, Homo sapien
ccagcttctgttgagtgatcactcg

SEQ ID NO: 1529046 - DNA, 25 bp, Homo sapien
ttaattacgcttgattccagcttct

SEQ ID NO: 1529047 - DNA, 25 bp, Homo sapien
tgatcactcgtctttctctaagccc

SEQ ID NO: 1529048 - DNA, 25 bp, Homo sapien
ctggagactctgcagcagacataga

SEQ ID NO: 1529049 - DNA, 25 bp, Homo sapien
tgcagcagacatagatgcccagctt

SEQ ID NO: 1529050 - DNA, 25 bp, Homo sapien
agactctgcagcagacatagatgcc

SEQ ID NO: 1529051 - DNA, 25 bp, Homo sapien
cagcagacatagatgcccagcttca

SEQ ID NO: 1529052 - DNA, 25 bp, Homo sapien
tagcagcctatggacactgatctgg

SEQ ID NO: 1529053 - DNA, 25 bp, Homo sapien
ttctgtgtattgcaaccgaaggcac

SEQ ID NO: 1529054 - DNA, 25 bp, Homo sapien
taaggatccctgaagcaaacctgga

SEQ ID NO: 1529055 - DNA, 25 bp, Homo sapien
gaagtgtagcatttaagcgcagcct

SEQ ID NO: 1529056 - DNA, 25 bp, Homo sapien
cagaaagcaggtttccagcacagca

SEQ ID NO: 1529057 - DNA, 25 bp, Homo sapien
ctctctggaccacagccttgtctct

SEQ ID NO: 1529058 - DNA, 25 bp, Homo sapien
tgcagggttccagcaaaccctgtgc

SEQ ID NO: 1529059 - DNA, 25 bp, Homo sapien
agcagtgccctcctgcagggttcca

SEQ ID NO: 1529060 - DNA, 25 bp, Homo sapien
aaatgtgtgcattttcttgacctgc

SEQ ID NO: 1529061 - DNA, 25 bp, Homo sapien
tgtgtgcattttcttgacctgctcc

SEQ ID NO: 1529062 - DNA, 25 bp, Homo sapien
tctttttcttcaaatgtgtgcattt

SEQ ID NO: 1529063 - DNA, 25 bp, Homo sapien
cttctgtcctctgttctttttcttc

SEQ ID NO: 1529064 - DNA, 25 bp, Homo sapien
atccccaagaaatctcgtttgtctg

SEQ ID NO: 1529065 - DNA, 25 bp, Homo sapien
atatgaaatccccaagaaatctcgt

SEQ ID NO: 1529066 - DNA, 25 bp, Homo sapien
tgaaatccccaagaaatctcgtttg

SEQ ID NO: 1529067 - DNA, 25 bp, Homo sapien
ccaagaaatctcgtttgtctgtgga

SEQ ID NO: 1529068 - DNA, 25 bp, Homo sapien
accgtcctccatggcaggatggaaa

SEQ ID NO: 1529069 - DNA, 25 bp, Homo sapien
tgaaacactgagaacaccgtcctcc

SEQ ID NO: 1529070 - DNA, 25 bp, Homo sapien
ttccacggcattctaaatcctggag

SEQ ID NO: 1529071 - DNA, 25 bp, Homo sapien
aagagcccaagaaccttccacggca

SEQ ID NO: 1529072 - DNA, 25 bp, Homo sapien
gtgccatccaatcaactagggtcac

SEQ ID NO: 1529073 - DNA, 25 bp, Homo sapien
catccaatcaactagggtcacaggt

SEQ ID NO: 1529074 - DNA, 25 bp, Homo sapien
cactgatgtctctttgtcctgcaca

SEQ ID NO: 1529075 - DNA, 25 bp, Homo sapien
tgtctctttgtcctgcacattttct

SEQ ID NO: 1529076 - DNA, 25 bp, Homo sapien
gcggatctgcaaggaccccagttct

SEQ ID NO: 1529077 - DNA, 25 bp, Homo sapien
gatctgcaaggaccccagttctcag

SEQ ID NO: 1529078 - DNA, 25 bp, Homo sapien
tggacttggcggatctgcaaggacc

SEQ ID NO: 1529079 - DNA, 25 bp, Homo sapien
gcacctctggacttggcggatctgc

SEQ ID NO: 1529080 - DNA, 25 bp, Homo sapien
taagctcgccaagagccatctgtac

SEQ ID NO: 1529081 - DNA, 25 bp, Homo sapien
gctctgaaattactccccataaata

SEQ ID NO: 1529082 - DNA, 25 bp, Homo sapien
tactcctttaagctcgccaagagcc

SEQ ID NO: 1529083 - DNA, 25 bp, Homo sapien
cccataaatactcctttaagctcgc

SEQ ID NO: 1529084 - DNA, 25 bp, Homo sapien
aagagcttgaatggcacagtgggtc

SEQ ID NO: 1529085 - DNA, 25 bp, Homo sapien
gcttgaatggcacagtgggtcccct

SEQ ID NO: 1529086 - DNA, 25 bp, Homo sapien
tctcattttgtgcccctttggtcct

SEQ ID NO: 1529087 - DNA, 25 bp, Homo sapien
attttgtgcccctttggtcctcctg

SEQ ID NO: 1529088 - DNA, 25 bp, Homo sapien
gatttccttggggactcaatttcat

SEQ ID NO: 1529089 - DNA, 25 bp, Homo sapien
tgtcattgctctgcccggatttcct

SEQ ID NO: 1529090 - DNA, 25 bp, Homo sapien
ttggggactcaatttcatcatttcc

SEQ ID NO: 1529091 - DNA, 25 bp, Homo sapien
gatgtcattgctctgcccggatttc

SEQ ID NO: 1529092 - DNA, 25 bp, Homo sapien
aagcagagctcgaggttcgttcagg

SEQ ID NO: 1529093 - DNA, 25 bp, Homo sapien
tccagcaccgaatctcagaaggttt

SEQ ID NO: 1529094 - DNA, 25 bp, Homo sapien
gatcaatccagcaccgaatctcaga

SEQ ID NO: 1529095 - DNA, 25 bp, Homo sapien
gtaaattggtatttgggatcaatcc

SEQ ID NO: 1529096 - DNA, 25 bp, Homo sapien
acgtacacagacagcttgttctgta

SEQ ID NO: 1529097 - DNA, 25 bp, Homo sapien
cgtacacagacagcttgttctgtac

SEQ ID NO: 1529098 - DNA, 25 bp, Homo sapien
taagttctttgacgtacacagacag

SEQ ID NO: 1529099 - DNA, 25 bp, Homo sapien
cctttaagttctttgacgtacacag

SEQ ID NO: 1529100 - DNA, 25 bp, Homo sapien
tcactcccaactggactcagaggta

SEQ ID NO: 1529101 - DNA, 25 bp, Homo sapien
cactcccaactggactcagaggtac

SEQ ID NO: 1529102 - DNA, 25 bp, Homo sapien
gcatcattcggaagcttctgagacc

SEQ ID NO: 1529103 - DNA, 25 bp, Homo sapien
ccctcttgcaagtggtggggcatca

SEQ ID NO: 1529104 - DNA, 25 bp, Homo sapien
tcactgacatggacagcatggtgtc

SEQ ID NO: 1529105 - DNA, 25 bp, Homo sapien
tgttccaacacagcgtggactggcc

SEQ ID NO: 1529106 - DNA, 25 bp, Homo sapien
ggcttggcctgtcgcctgtttctga

SEQ ID NO: 1529107 - DNA, 25 bp, Homo sapien
tccacaatgcgcagtgggtctgctt

SEQ ID NO: 1529108 - DNA, 25 bp, Homo sapien
gcagccagctgtctcttgctccaag

SEQ ID NO: 1529109 - DNA, 25 bp, Homo sapien
gggtctgctttgtgttccacaccag

SEQ ID NO: 1529110 - DNA, 25 bp, Homo sapien
tagctgcaggtgacataacctttcg

SEQ ID NO: 1529111 - DNA, 25 bp, Homo sapien
tgatactgctgctagcctttctcgt

SEQ ID NO: 1529112 - DNA, 25 bp, Homo sapien
taacctttcgtgtcataccactgtg

SEQ ID NO: 1529113 - DNA, 25 bp, Homo sapien
tgtctgggcccatacaactgtaagt

SEQ ID NO: 1529114 - DNA, 25 bp, Homo sapien
tgaactctagtgtaagtctccaggg

SEQ ID NO: 1529115 - DNA, 25 bp, Homo sapien
ctctagtgtaagtctccagggatgc

SEQ ID NO: 1529116 - DNA, 25 bp, Homo sapien
gctgaactctagtgtaagtctccag

SEQ ID NO: 1529117 - DNA, 25 bp, Homo sapien
aactctagtgtaagtctccagggat

SEQ ID NO: 1529118 - DNA, 25 bp, Homo sapien
ttttaggattaaggacatgtagtag

SEQ ID NO: 1529119 - DNA, 25 bp, Homo sapien
tgcattatttggtggattattacag

SEQ ID NO: 1529120 - DNA, 25 bp, Homo sapien
actggcagccaactggttttaggat

SEQ ID NO: 1529121 - DNA, 25 bp, Homo sapien
ttacagtgactacatcatcaagttc

SEQ ID NO: 1529122 - DNA, 25 bp, Homo sapien
gaaattctgcacagagggaagagtt

SEQ ID NO: 1529123 - DNA, 25 bp, Homo sapien
tgaaattctgcacagagggaagagt

SEQ ID NO: 1529124 - DNA, 25 bp, Homo sapien
atgaaattctgcacagagggaagag

SEQ ID NO: 1529125 - DNA, 25 bp, Homo sapien
catgaaattctgcacagagggaaga

SEQ ID NO: 1529126 - DNA, 25 bp, Homo sapien
gaccatgaccactatgagacactcc

SEQ ID NO: 1529127 - DNA, 25 bp, Homo sapien
cctttagcagacagtgcatagcggg

SEQ ID NO: 1529128 - DNA, 25 bp, Homo sapien
gacactcctgaaggcctttagcaga

SEQ ID NO: 1529129 - DNA, 25 bp, Homo sapien
gaacactggagatttgagcacaaaa

SEQ ID NO: 1529130 - DNA, 25 bp, Homo sapien
cagcagtgacactgactctcacgga

SEQ ID NO: 1529131 - DNA, 25 bp, Homo sapien
tgactctcacggacgccacagaggg

SEQ ID NO: 1529132 - DNA, 25 bp, Homo sapien
gtgacactgactctcacggacgcca

SEQ ID NO: 1529133 - DNA, 25 bp, Homo sapien
acggacgccacagagggaaatcact

SEQ ID NO: 1529134 - DNA, 25 bp, Homo sapien
gaaattgtgcaggaaggacatagct

SEQ ID NO: 1529135 - DNA, 25 bp, Homo sapien
tcctattggccagacatctaaggct

SEQ ID NO: 1529136 - DNA, 25 bp, Homo sapien
tatggagcccattacaaggaaatct

SEQ ID NO: 1529137 - DNA, 25 bp, Homo sapien
gagagtcacagattcttagggctga

SEQ ID NO: 1529138 - DNA, 25 bp, Homo sapien
tctgagaagccgagcagggctgcat

SEQ ID NO: 1529139 - DNA, 25 bp, Homo sapien
tgagggctgttttcccttggagtag

SEQ ID NO: 1529140 - DNA, 25 bp, Homo sapien
agaagccgagcagggctgcatttga

SEQ ID NO: 1529141 - DNA, 25 bp, Homo sapien
tcccttggagtagcagcctgtttgc

SEQ ID NO: 1529142 - DNA, 25 bp, Homo sapien
tctgttgtcctgtccgtggtctcgg

SEQ ID NO: 1529143 - DNA, 25 bp, Homo sapien
ggaatgagccccagcagtgagtttc

SEQ ID NO: 1529144 - DNA, 25 bp, Homo sapien
tggcagcagatacaccgagcactgt

SEQ ID NO: 1529145 - DNA, 25 bp, Homo sapien
cagcgtcgcagtcatcctggttgta

SEQ ID NO: 1529146 - DNA, 25 bp, Homo sapien
caaggccgtggagagttcaacgggt

SEQ ID NO: 1529147 - DNA, 25 bp, Homo sapien
tcaaggccgtggagagttcaacggg

SEQ ID NO: 1529148 - DNA, 25 bp, Homo sapien
tggagagttcaacgggtcggcaggg

SEQ ID NO: 1529149 - DNA, 25 bp, Homo sapien
gccgtggagagttcaacgggtcggc

SEQ ID NO: 1529150 - DNA, 25 bp, Homo sapien
gatgcatattggctttcttgagcac

SEQ ID NO: 1529151 - DNA, 25 bp, Homo sapien
cattagggagaatgatcaggatgct

SEQ ID NO: 1529152 - DNA, 25 bp, Homo sapien
tgaaatgcaccgtatcattagggag

SEQ ID NO: 1529153 - DNA, 25 bp, Homo sapien
tcaggatgctagtgtgaaaccagcc

SEQ ID NO: 1529154 - DNA, 25 bp, Homo sapien
ctgctgctcttcagggcattggtgg

SEQ ID NO: 1529155 - DNA, 25 bp, Homo sapien
gcattggtggctttgaaggaataaa

SEQ ID NO: 1529156 - DNA, 25 bp, Homo sapien
gctttgaaggaataaaggtggtgaa

SEQ ID NO: 1529157 - DNA, 25 bp, Homo sapien
tcttcagggcattggtggctttgaa

SEQ ID NO: 1529158 - DNA, 25 bp, Homo sapien
taaacactcgccttaagctgtaaaa

SEQ ID NO: 1529159 - DNA, 25 bp, Homo sapien
gaataattatctcaggcctcctaac

SEQ ID NO: 1529160 - DNA, 25 bp, Homo sapien
tcaacttccttatcggtagagattg

SEQ ID NO: 1529161 - DNA, 25 bp, Homo sapien
aatgctgtgggcagttttagaataa

SEQ ID NO: 1529162 - DNA, 25 bp, Homo sapien
ctgttttctgggtgagccggagtaa

SEQ ID NO: 1529163 - DNA, 25 bp, Homo sapien
tctgtaatatctgggtgagtcttgc

SEQ ID NO: 1529164 - DNA, 25 bp, Homo sapien
tgcgcgaagaccatggcctcgtaga

SEQ ID NO: 1529165 - DNA, 25 bp, Homo sapien
gagcctttcggtatctgagacagca

SEQ ID NO: 1529166 - DNA, 25 bp, Homo sapien
cagctttggttcagaggagccatcc

SEQ ID NO: 1529167 - DNA, 25 bp, Homo sapien
gctttggttcagaggagccatccca

SEQ ID NO: 1529168 - DNA, 25 bp, Homo sapien
ggaacagctttggttcagaggagcc

SEQ ID NO: 1529169 - DNA, 25 bp, Homo sapien
gaacagctttggttcagaggagcca

SEQ ID NO: 1529170 - DNA, 25 bp, Homo sapien
gtccttcactgcctctattaggctg

SEQ ID NO: 1529171 - DNA, 25 bp, Homo sapien
ccttcactgcctctattaggctggg

SEQ ID NO: 1529172 - DNA, 25 bp, Homo sapien
tgcctgtccttcactgcctctatta

SEQ ID NO: 1529173 - DNA, 25 bp, Homo sapien
cctgtccttcactgcctctattagg

SEQ ID NO: 1529174 - DNA, 25 bp, Homo sapien
cattcccagtaatgcatggcagtcc

SEQ ID NO: 1529175 - DNA, 25 bp, Homo sapien
ttcccagtaatgcatggcagtccat

SEQ ID NO: 1529176 - DNA, 25 bp, Homo sapien
ttaatccacatccttgcacctttga

SEQ ID NO: 1529177 - DNA, 25 bp, Homo sapien
tccacatccttgcacctttgatgtg

SEQ ID NO: 1529178 - DNA, 25 bp, Homo sapien
ccacatccttgcacctttgatgtgg

SEQ ID NO: 1529179 - DNA, 25 bp, Homo sapien
aatccacatccttgcacctttgatg

SEQ ID NO: 1529180 - DNA, 25 bp, Homo sapien
gagagggcttgaccaggaaggatgc

SEQ ID NO: 1529181 - DNA, 25 bp, Homo sapien
aaagagagggcttgaccaggaagga

SEQ ID NO: 1529182 - DNA, 25 bp, Homo sapien
aagagagggcttgaccaggaaggat

SEQ ID NO: 1529183 - DNA, 25 bp, Homo sapien
tccgtttggtttgggtgcgctccag

SEQ ID NO: 1529184 - DNA, 25 bp, Homo sapien
ttccatcccttgtgcaaagtgaaga

SEQ ID NO: 1529185 - DNA, 25 bp, Homo sapien
aagatagaatctcctccgtttggtt

SEQ ID NO: 1529186 - DNA, 25 bp, Homo sapien
cagggttttggcaatcaccccttct

SEQ ID NO: 1529187 - DNA, 25 bp, Homo sapien
tgtcccaagggtgatgtgaatatcc

SEQ ID NO: 1529188 - DNA, 25 bp, Homo sapien
cagggcccaggagaatgtcgctgat

SEQ ID NO: 1529189 - DNA, 25 bp, Homo sapien
cagtatttgtgcaagaaagccagag

SEQ ID NO: 1529190 - DNA, 25 bp, Homo sapien
taaagtcaggtttgctgtccgggct

SEQ ID NO: 1529191 - DNA, 25 bp, Homo sapien
taatctgtcgctaaggtcgctggac

SEQ ID NO: 1529192 - DNA, 25 bp, Homo sapien
cacacaaggcagacatgcgggtttc

SEQ ID NO: 1529193 - DNA, 25 bp, Homo sapien
cgtggaaagtggcaaataatctgtc

SEQ ID NO: 1529194 - DNA, 25 bp, Homo sapien
tctgttggaaccaggtcacgtggaa

SEQ ID NO: 1529195 - DNA, 25 bp, Homo sapien
cacaaatgagaaggatattgaggag

SEQ ID NO: 1529196 - DNA, 25 bp, Homo sapien
agcacaaatgagaaggatattgagg

SEQ ID NO: 1529197 - DNA, 25 bp, Homo sapien
caaatgagaaggatattgaggagct

SEQ ID NO: 1529198 - DNA, 25 bp, Homo sapien
gaagcacaaatgagaaggatattga

SEQ ID NO: 1529199 - DNA, 25 bp, Homo sapien
tagttggcccatattcttctggctc

SEQ ID NO: 1529200 - DNA, 25 bp, Homo sapien
aactagttggcccatattcttctgg

SEQ ID NO: 1529201 - DNA, 25 bp, Homo sapien
gttggcccatattcttctggctcca

SEQ ID NO: 1529202 - DNA, 25 bp, Homo sapien
actagttggcccatattcttctggc

SEQ ID NO: 1529203 - DNA, 25 bp, Homo sapien
tcagcttcttgtcaggactccgtgg

SEQ ID NO: 1529204 - DNA, 25 bp, Homo sapien
ctctgcttgttaccgtgaggtgttg

SEQ ID NO: 1529205 - DNA, 25 bp, Homo sapien
gaagaagattgtcagagcagtcagc

SEQ ID NO: 1529206 - DNA, 25 bp, Homo sapien
tcatggtgccagcagtctgcatgct

SEQ ID NO: 1529207 - DNA, 25 bp, Homo sapien
attagaagacccactcttccagcct

SEQ ID NO: 1529208 - DNA, 25 bp, Homo sapien
gaccctcgaggcattcattagaaga

SEQ ID NO: 1529209 - DNA, 25 bp, Homo sapien
gccaccacgagcgtccagttcatca

SEQ ID NO: 1529210 - DNA, 25 bp, Homo sapien
gtggcagcgcacagaggaccctcga

SEQ ID NO: 1529211 - DNA, 25 bp, Homo sapien
gatgtgaggactgcaatattcccat

SEQ ID NO: 1529212 - DNA, 25 bp, Homo sapien
tttctagcccgaatcagcatggaga

SEQ ID NO: 1529213 - DNA, 25 bp, Homo sapien
cattcacgcatgaaccacagctgct

SEQ ID NO: 1529214 - DNA, 25 bp, Homo sapien
gatcttcccatgtcttggtgaccaa

SEQ ID NO: 1529215 - DNA, 25 bp, Homo sapien
ggtggcattaatggtctgcctgtct

SEQ ID NO: 1529216 - DNA, 25 bp, Homo sapien
ctctggctacgggagaaggccacag

SEQ ID NO: 1529217 - DNA, 25 bp, Homo sapien
ggtgttcctccttgttcctggtggc

SEQ ID NO: 1529218 - DNA, 25 bp, Homo sapien
ctgcctgtctctggctacgggagaa

SEQ ID NO: 1529219 - DNA, 25 bp, Homo sapien
gctttcattgggctttaatggttcc

SEQ ID NO: 1529220 - DNA, 25 bp, Homo sapien
tttatgctttcattgggctttaatg

SEQ ID NO: 1529221 - DNA, 25 bp, Homo sapien
tcttttatgctttcattgggcttta

SEQ ID NO: 1529222 - DNA, 25 bp, Homo sapien
tttcattgggctttaatggttccag

SEQ ID NO: 1529223 - DNA, 25 bp, Homo sapien
aaatcgtcttgcaagcagttcagcg

SEQ ID NO: 1529224 - DNA, 25 bp, Homo sapien
atatggtgcccactaacaggcccca

SEQ ID NO: 1529225 - DNA, 25 bp, Homo sapien
ggaaggaagctcaaagaaatcgtct

SEQ ID NO: 1529226 - DNA, 25 bp, Homo sapien
caagaggaacacagcggactgagtc

SEQ ID NO: 1529227 - DNA, 25 bp, Homo sapien
cagtgggattctgaacctgtccacg

SEQ ID NO: 1529228 - DNA, 25 bp, Homo sapien
ggctagaccgggtcttcagtgggat

SEQ ID NO: 1529229 - DNA, 25 bp, Homo sapien
tagctccacttggagtaactggtct

SEQ ID NO: 1529230 - DNA, 25 bp, Homo sapien
ccacggagatctcctgagtgtgtag

SEQ ID NO: 1529231 - DNA, 25 bp, Homo sapien
tactgggcattagactctggccctg

SEQ ID NO: 1529232 - DNA, 25 bp, Homo sapien
tgccctctggcaagtgacactaaaa

SEQ ID NO: 1529233 - DNA, 25 bp, Homo sapien
cttggcacagcaaaaatgttcacca

SEQ ID NO: 1529234 - DNA, 25 bp, Homo sapien
tgcagtagccacctctaatcgagtg

SEQ ID NO: 1529235 - DNA, 25 bp, Homo sapien
cagatggaccgtgaacagaggagct

SEQ ID NO: 1529236 - DNA, 25 bp, Homo sapien
gaggccttatgcagatggaccgtga

SEQ ID NO: 1529237 - DNA, 25 bp, Homo sapien
tatgcagatggaccgtgaacagagg

SEQ ID NO: 1529238 - DNA, 25 bp, Homo sapien
tgcaccatgggaggccttatgcaga

SEQ ID NO: 1529239 - DNA, 25 bp, Homo sapien
ctgcaaaaaagaaatcacagagcat

SEQ ID NO: 1529240 - DNA, 25 bp, Homo sapien
ggcaaggatggggtcgtggccaggg

SEQ ID NO: 1529241 - DNA, 25 bp, Homo sapien
atggagtccttatgtgactggagct

SEQ ID NO: 1529242 - DNA, 25 bp, Homo sapien
gagcccacacaagctatggagtcct

SEQ ID NO: 1529243 - DNA, 25 bp, Homo sapien
actggagctgtccagaagaggccag

SEQ ID NO: 1529244 - DNA, 25 bp, Homo sapien
ccctggagctccccttggttggttg

SEQ ID NO: 1529245 - DNA, 25 bp, Homo sapien
ggagctccccttggttggttgctgg

SEQ ID NO: 1529246 - DNA, 25 bp, Homo sapien
agcccctggagctccccttggttgg

SEQ ID NO: 1529247 - DNA, 25 bp, Homo sapien
cctggagctccccttggttggttgc

SEQ ID NO: 1529248 - DNA, 25 bp, Homo sapien
gattgactcatctgacgggctgggc

SEQ ID NO: 1529249 - DNA, 25 bp, Homo sapien
taaacgagatccattcacagaagtc

SEQ ID NO: 1529250 - DNA, 25 bp, Homo sapien
actgtctccctgtgtggtctcccgg

SEQ ID NO: 1529251 - DNA, 25 bp, Homo sapien
ccgtgctcggcgaatgattcaaagc

SEQ ID NO: 1529252 - DNA, 25 bp, Homo sapien
ccccttgcaggccatcagcatcgct

SEQ ID NO: 1529253 - DNA, 25 bp, Homo sapien
agaggtgcccatcccccttgcaggc

SEQ ID NO: 1529254 - DNA, 25 bp, Homo sapien
tcagcatcgctttgcccactgcaag

SEQ ID NO: 1529255 - DNA, 25 bp, Homo sapien
ctagaagatgagcaggcacccagag

SEQ ID NO: 1529256 - DNA, 25 bp, Homo sapien
tgtcttcttgatgcactggttgtcc

SEQ ID NO: 1529257 - DNA, 25 bp, Homo sapien
ggatatggtaccctggctgtcttct

SEQ ID NO: 1529258 - DNA, 25 bp, Homo sapien
atgcgatgtggccagaagacacgtg

SEQ ID NO: 1529259 - DNA, 25 bp, Homo sapien
gaagacacgtggatgcaccaggata

SEQ ID NO: 1529260 - DNA, 25 bp, Homo sapien
tgttaaagaagcttgccaggcctgt

SEQ ID NO: 1529261 - DNA, 25 bp, Homo sapien
aatctgattgtgtctgccccgtgcg

SEQ ID NO: 1529262 - DNA, 25 bp, Homo sapien
taatagttattgcaagctccaggcc

SEQ ID NO: 1529263 - DNA, 25 bp, Homo sapien
tcatatagtagaagaagctcctccc

SEQ ID NO: 1529264 - DNA, 25 bp, Homo sapien
ctgtgaagttgggacaccacggcca

SEQ ID NO: 1529265 - DNA, 25 bp, Homo sapien
tgtgaagttgggacaccacggccat

SEQ ID NO: 1529266 - DNA, 25 bp, Homo sapien
cagctagacatatgtgaaagtgacc

SEQ ID NO: 1529267 - DNA, 25 bp, Homo sapien
tagacatatgtgaaagtgacctaca

SEQ ID NO: 1529268 - DNA, 25 bp, Homo sapien
aagtgacctacagatatcaggagat

SEQ ID NO: 1529269 - DNA, 25 bp, Homo sapien
cgggtacctcagctagacatatgtg

SEQ ID NO: 1529270 - DNA, 25 bp, Homo sapien
cccggggagagctgctggaacagga

SEQ ID NO: 1529271 - DNA, 25 bp, Homo sapien
cggggagagctgctggaacaggagc

SEQ ID NO: 1529272 - DNA, 25 bp, Homo sapien
gagctgctggaacaggagccttcat

SEQ ID NO: 1529273 - DNA, 25 bp, Homo sapien
ggagagctgctggaacaggagcctt

SEQ ID NO: 1529274 - DNA, 25 bp, Homo sapien
cagagcaggaacaaacgccggccct

SEQ ID NO: 1529275 - DNA, 25 bp, Homo sapien
ggaacaaacgccggccctggcatca

SEQ ID NO: 1529276 - DNA, 25 bp, Homo sapien
gaacaaacgccggccctggcatcat

SEQ ID NO: 1529277 - DNA, 25 bp, Homo sapien
agcaggaacaaacgccggccctggc

SEQ ID NO: 1529278 - DNA, 25 bp, Homo sapien
ggtggacgacaggggccaggtgaca

SEQ ID NO: 1529279 - DNA, 25 bp, Homo sapien
ctgggtggacgacaggggccaggtg

SEQ ID NO: 1529280 - DNA, 25 bp, Homo sapien
gggccaggtgacaaagccgcctctg

SEQ ID NO: 1529281 - DNA, 25 bp, Homo sapien
gccaggtgacaaagccgcctctgtc

SEQ ID NO: 1529282 - DNA, 25 bp, Homo sapien
aaaggctgggcagcggagattccgg

SEQ ID NO: 1529283 - DNA, 25 bp, Homo sapien
ggctgcacttcagttctcagggcaa

SEQ ID NO: 1529284 - DNA, 25 bp, Homo sapien
gcagggctgcacttcagttctcagg

SEQ ID NO: 1529285 - DNA, 25 bp, Homo sapien
acttcagttctcagggcaaaggctg

SEQ ID NO: 1529286 - DNA, 25 bp, Homo sapien
ctgaaaggaaccgctaagcggtgac

SEQ ID NO: 1529287 - DNA, 25 bp, Homo sapien
ggtagctgaatcttgatagattggc

SEQ ID NO: 1529288 - DNA, 25 bp, Homo sapien
cagcggtagctgaatcttgatagat

SEQ ID NO: 1529289 - DNA, 25 bp, Homo sapien
ctgaatcttgatagattggcagacg

SEQ ID NO: 1529290 - DNA, 25 bp, Homo sapien
tcacagcggtagctgaatcttgata

SEQ ID NO: 1529291 - DNA, 25 bp, Homo sapien
tgaagttcaggccaggataaataat

SEQ ID NO: 1529292 - DNA, 25 bp, Homo sapien
ttttcctttccatggagttgatggg

SEQ ID NO: 1529293 - DNA, 25 bp, Homo sapien
aataattgctgtggtgagggttcct

SEQ ID NO: 1529294 - DNA, 25 bp, Homo sapien
tttcctttccatggagttgatgggt

SEQ ID NO: 1529295 - DNA, 25 bp, Homo sapien
ttgcacaaaacctcccagccccgag

SEQ ID NO: 1529296 - DNA, 25 bp, Homo sapien
cgctgtgcaggaataactgaattag

SEQ ID NO: 1529297 - DNA, 25 bp, Homo sapien
tgctgaacgctgtgcaggaataact

SEQ ID NO: 1529298 - DNA, 25 bp, Homo sapien
cagtcagagtgctgaacgctgtgca

SEQ ID NO: 1529299 - DNA, 25 bp, Homo sapien
ttctttggccttccctttagagatg

SEQ ID NO: 1529300 - DNA, 25 bp, Homo sapien
tttggccttccctttagagatgcag

SEQ ID NO: 1529301 - DNA, 25 bp, Homo sapien
ctttggccttccctttagagatgca

SEQ ID NO: 1529302 - DNA, 25 bp, Homo sapien
tggccttccctttagagatgcagtt

SEQ ID NO: 1529303 - DNA, 25 bp, Homo sapien
gccctgattctagtaaaagggtcca

SEQ ID NO: 1529304 - DNA, 25 bp, Homo sapien
gaagtatttctttaacagactgcca

SEQ ID NO: 1529305 - DNA, 25 bp, Homo sapien
taagttgctatttaagccctgattc

SEQ ID NO: 1529306 - DNA, 25 bp, Homo sapien
gccatcagcctcgagaagtgtcata

SEQ ID NO: 1529307 - DNA, 25 bp, Homo sapien
gaatttggacaatcgcagcttggcc

SEQ ID NO: 1529308 - DNA, 25 bp, Homo sapien
tgtgtgcctgccaaaaaagaggata

SEQ ID NO: 1529309 - DNA, 25 bp, Homo sapien
gcctgtattatcaaccacgcaagat

SEQ ID NO: 1529310 - DNA, 25 bp, Homo sapien
gatatttcccatgagatagcacctg

SEQ ID NO: 1529311 - DNA, 25 bp, Homo sapien
taagtggtgtcaaaatctaggctct

SEQ ID NO: 1529312 - DNA, 25 bp, Homo sapien
tgtgccaaaagacgttgagcttgct

SEQ ID NO: 1529313 - DNA, 25 bp, Homo sapien
tcaagacctgggtacagaacctatt

SEQ ID NO: 1529314 - DNA, 25 bp, Homo sapien
tggagacttgcatggagactcaagc

SEQ ID NO: 1529315 - DNA, 25 bp, Homo sapien
gcagccttgccagtcatgatgaact

SEQ ID NO: 1529316 - DNA, 25 bp, Homo sapien
tggggcagccttgccagtcatgatg

SEQ ID NO: 1529317 - DNA, 25 bp, Homo sapien
cctcttggggcagccttgccagtca

SEQ ID NO: 1529318 - DNA, 25 bp, Homo sapien
tcttggggcagccttgccagtcatg

SEQ ID NO: 1529319 - DNA, 25 bp, Homo sapien
gatgacatgtctcaccctggagcac

SEQ ID NO: 1529320 - DNA, 25 bp, Homo sapien
ttctgatgacatgtctcaccctgga

SEQ ID NO: 1529321 - DNA, 25 bp, Homo sapien
agccttctgatgacatgtctcaccc

SEQ ID NO: 1529322 - DNA, 25 bp, Homo sapien
ttccttctgtaccttttgccctgtg

SEQ ID NO: 1529323 - DNA, 25 bp, Homo sapien
tagatccaagtgtctgacctataga

SEQ ID NO: 1529324 - DNA, 25 bp, Homo sapien
gtagatccaagtgtctgacctatag

SEQ ID NO: 1529325 - DNA, 25 bp, Homo sapien
gatccaagtgtctgacctatagaat

SEQ ID NO: 1529326 - DNA, 25 bp, Homo sapien
agatccaagtgtctgacctatagaa

SEQ ID NO: 1529327 - DNA, 25 bp, Homo sapien
gggcaccaggcaatgtgtggaacaa

SEQ ID NO: 1529328 - DNA, 25 bp, Homo sapien
gcaccaggcaatgtgtggaacaagg

SEQ ID NO: 1529329 - DNA, 25 bp, Homo sapien
agtgcaccttgcagcgctggacagg

SEQ ID NO: 1529330 - DNA, 25 bp, Homo sapien
gcagaggagacgcagtgcaccttgc

SEQ ID NO: 1529331 - DNA, 25 bp, Homo sapien
tccctgtgtcgaagggaggaccaag

SEQ ID NO: 1529332 - DNA, 25 bp, Homo sapien
tccagctccctgtgtcgaagggagg

SEQ ID NO: 1529333 - DNA, 25 bp, Homo sapien
gctccctgtgtcgaagggaggacca

SEQ ID NO: 1529334 - DNA, 25 bp, Homo sapien
gctccagctccctgtgtcgaaggga

SEQ ID NO: 1529335 - DNA, 25 bp, Homo sapien
cataaacggccagtatttcagtgcc

SEQ ID NO: 1529336 - DNA, 25 bp, Homo sapien
gtttccattgtaatattagacatgt

SEQ ID NO: 1529337 - DNA, 25 bp, Homo sapien
gaaatagttcagattatctccgagg

SEQ ID NO: 1529338 - DNA, 25 bp, Homo sapien
cagttttcccttatataaactcaga

SEQ ID NO: 1529339 - DNA, 25 bp, Homo sapien
ttagacatgttagttctctccagtc

SEQ ID NO: 1529340 - DNA, 25 bp, Homo sapien
attcttgagatcctcaatcatggcc

SEQ ID NO: 1529341 - DNA, 25 bp, Homo sapien
catagtgtacaccagcaaaatctcc

SEQ ID NO: 1529342 - DNA, 25 bp, Homo sapien
aagtgttaacccctagacactcatg

SEQ ID NO: 1529343 - DNA, 25 bp, Homo sapien
cagagcttcctctcactcgttagat

SEQ ID NO: 1529344 - DNA, 25 bp, Homo sapien
aaatctcccctgtttcttcttgaag

SEQ ID NO: 1529345 - DNA, 25 bp, Homo sapien
tgcaagtaagaacctcctgacagtc

SEQ ID NO: 1529346 - DNA, 25 bp, Homo sapien
tacagaggtcataggtcaagacacg

SEQ ID NO: 1529347 - DNA, 25 bp, Homo sapien
tgacagtcacagtgtggcaaagcct

SEQ ID NO: 1529348 - DNA, 25 bp, Homo sapien
tcactgtcagcttcgaagaacttcc

SEQ ID NO: 1529349 - DNA, 25 bp, Homo sapien
ggccaaagaatgcctttcatttttc

SEQ ID NO: 1529350 - DNA, 25 bp, Homo sapien
catcaccttgcttctacttcctgtg

SEQ ID NO: 1529351 - DNA, 25 bp, Homo sapien
ccaaggccaaagaatgcctttcatt

SEQ ID NO: 1529352 - DNA, 25 bp, Homo sapien
aaggccaaagaatgcctttcatttt

SEQ ID NO: 1529353 - DNA, 25 bp, Homo sapien
gggctgctgaatagcaatgatatga

SEQ ID NO: 1529354 - DNA, 25 bp, Homo sapien
aattggaggtagcattgacccacca

SEQ ID NO: 1529355 - DNA, 25 bp, Homo sapien
gatttaatatctagagtgtcctcaa

SEQ ID NO: 1529356 - DNA, 25 bp, Homo sapien
ccctaaggctagagtattagaattg

SEQ ID NO: 1529357 - DNA, 25 bp, Homo sapien
ccataattcacaggtctggcctcct

SEQ ID NO: 1529358 - DNA, 25 bp, Homo sapien
ccagccagcacattgcagtgttcag

SEQ ID NO: 1529359 - DNA, 25 bp, Homo sapien
tctaggccgtacataaaagctgaag

SEQ ID NO: 1529360 - DNA, 25 bp, Homo sapien
tcatcctggctggtaatttgccatt

SEQ ID NO: 1529361 - DNA, 25 bp, Homo sapien
taaacagtattagaggtgcaagtgg

SEQ ID NO: 1529362 - DNA, 25 bp, Homo sapien
tagtaaatctctaggaagacaaatt

SEQ ID NO: 1529363 - DNA, 25 bp, Homo sapien
tctccaatgtattgaaagaattgcc

SEQ ID NO: 1529364 - DNA, 25 bp, Homo sapien
aacttcagcctgataagtttaacag

SEQ ID NO: 1529365 - DNA, 25 bp, Homo sapien
gtgcactgggtgtaatcattcttca

SEQ ID NO: 1529366 - DNA, 25 bp, Homo sapien
tcaggtactggtatgccagcaataa

SEQ ID NO: 1529367 - DNA, 25 bp, Homo sapien
ggatgtattctctacctgtgtggat

SEQ ID NO: 1529368 - DNA, 25 bp, Homo sapien
gggagatccaccagcgtttgtgaga

SEQ ID NO: 1529369 - DNA, 25 bp, Homo sapien
gcttgagtgactgtgacaccggcca

SEQ ID NO: 1529370 - DNA, 25 bp, Homo sapien
tgtcttagggcaagctgaccctgcc

SEQ ID NO: 1529371 - DNA, 25 bp, Homo sapien
ccagatttctaaggacaagggattc

SEQ ID NO: 1529372 - DNA, 25 bp, Homo sapien
cattccctgcagagaaggatacaga

SEQ ID NO: 1529373 - DNA, 25 bp, Homo sapien
ctcagtgagagctgcagcctcaggc

SEQ ID NO: 1529374 - DNA, 25 bp, Homo sapien
gagagctgcagcctcaggcccacgg

SEQ ID NO: 1529375 - DNA, 25 bp, Homo sapien
agagctgcagcctcaggcccacggt

SEQ ID NO: 1529376 - DNA, 25 bp, Homo sapien
gctgcagcctcaggcccacggtggc

SEQ ID NO: 1529377 - DNA, 25 bp, Homo sapien
tcacctgtagcgtgtccagtcctgt

SEQ ID NO: 1529378 - DNA, 25 bp, Homo sapien
gcgtgtccagtcctgtccttggtgc

SEQ ID NO: 1529379 - DNA, 25 bp, Homo sapien
gctttcagtcacctgtagcgtgtcc

SEQ ID NO: 1529380 - DNA, 25 bp, Homo sapien
tccttggtgctgtgagtaggacaat

SEQ ID NO: 1529381 - DNA, 25 bp, Homo sapien
tctaatggcctctgtgcagccatct

SEQ ID NO: 1529382 - DNA, 25 bp, Homo sapien
gaggaaacacctcttctggagcacc

SEQ ID NO: 1529383 - DNA, 25 bp, Homo sapien
tcaacaggactgaccaataggactg

SEQ ID NO: 1529384 - DNA, 25 bp, Homo sapien
accaaaggccacagctgtcaacagg

SEQ ID NO: 1529385 - DNA, 25 bp, Homo sapien
cactgtactggaaatggctgtgatg

SEQ ID NO: 1529386 - DNA, 25 bp, Homo sapien
ctagaggaatcgacccgatgggcca

SEQ ID NO: 1529387 - DNA, 25 bp, Homo sapien
gatgggccactgaacagcagctttg

SEQ ID NO: 1529388 - DNA, 25 bp, Homo sapien
ctgtgatggtgcctagaggaatcga

SEQ ID NO: 1529389 - DNA, 25 bp, Homo sapien
tcctttaccagtcttgcaaaaatgc

SEQ ID NO: 1529390 - DNA, 25 bp, Homo sapien
tgcaaaaatgcaccctggctccgga

SEQ ID NO: 1529391 - DNA, 25 bp, Homo sapien
cctttaccagtcttgcaaaaatgca

SEQ ID NO: 1529392 - DNA, 25 bp, Homo sapien
tttaccagtcttgcaaaaatgcacc

SEQ ID NO: 1529393 - DNA, 25 bp, Homo sapien
ctttgttggttcttagcctaagcag

SEQ ID NO: 1529394 - DNA, 25 bp, Homo sapien
tacctgaagtgacccttggtctttg

SEQ ID NO: 1529395 - DNA, 25 bp, Homo sapien
cagcattcgagagccgttgaggaag

SEQ ID NO: 1529396 - DNA, 25 bp, Homo sapien
cttagcctaagcagcgccatccaaa

SEQ ID NO: 1529397 - DNA, 25 bp, Homo sapien
ggatccctcttaggcttgtaatgca

SEQ ID NO: 1529398 - DNA, 25 bp, Homo sapien
gatgaagtcgatcacaatgtaccag

SEQ ID NO: 1529399 - DNA, 25 bp, Homo sapien
gcccacatttatcagaggatgaagt

SEQ ID NO: 1529400 - DNA, 25 bp, Homo sapien
gaaggcttgtgggatccctcttagg

SEQ ID NO: 1529401 - DNA, 25 bp, Homo sapien
cttcccgcaggcatgtctcaggcag

SEQ ID NO: 1529402 - DNA, 25 bp, Homo sapien
gggccagtgccttcccgcaggcatg

SEQ ID NO: 1529403 - DNA, 25 bp, Homo sapien
tgccggggtgtctcctgctctatga

SEQ ID NO: 1529404 - DNA, 25 bp, Homo sapien
cctgagggtggaccttgcggaatcc

SEQ ID NO: 1529405 - DNA, 25 bp, Homo sapien
ggtaaaacgtacagcagagtgctca

SEQ ID NO: 1529406 - DNA, 25 bp, Homo sapien
ggcagcataggtaaaacgtacagca

SEQ ID NO: 1529407 - DNA, 25 bp, Homo sapien
aaaggcagcataggtaaaacgtaca

SEQ ID NO: 1529408 - DNA, 25 bp, Homo sapien
gcataggtaaaacgtacagcagagt

SEQ ID NO: 1529409 - DNA, 25 bp, Homo sapien
tgtttccagggcacggatcacaagg

SEQ ID NO: 1529410 - DNA, 25 bp, Homo sapien
gagtctgtggctctatgtttccagg

SEQ ID NO: 1529411 - DNA, 25 bp, Homo sapien
cacggatcacaagggcggagggtca

SEQ ID NO: 1529412 - DNA, 25 bp, Homo sapien
atcacaagggcggagggtcagctcc

SEQ ID NO: 1529413 - DNA, 25 bp, Homo sapien
tgtgttgcagcacgaccaatgtcgc

SEQ ID NO: 1529414 - DNA, 25 bp, Homo sapien
cagacccgggcgtattccttagcgt

SEQ ID NO: 1529415 - DNA, 25 bp, Homo sapien
agaaaggtccctttacaacactcag

SEQ ID NO: 1529416 - DNA, 25 bp, Homo sapien
tccttagcgtagtggagaaaggtcc

SEQ ID NO: 1529417 - DNA, 25 bp, Homo sapien
gaatcgcgctccagttaaagatgca

SEQ ID NO: 1529418 - DNA, 25 bp, Homo sapien
cgcgctccagttaaagatgcataaa

SEQ ID NO: 1529419 - DNA, 25 bp, Homo sapien
cgctgcggggaatcgcgctccagtt

SEQ ID NO: 1529420 - DNA, 25 bp, Homo sapien
gggaatcgcgctccagttaaagatg

SEQ ID NO: 1529421 - DNA, 25 bp, Homo sapien
gggtggcccctttatgagagtcata

SEQ ID NO: 1529422 - DNA, 25 bp, Homo sapien
tatgagagtcatacaagtttctgcc

SEQ ID NO: 1529423 - DNA, 25 bp, Homo sapien
tcatacaagtttctgccaagtggag

SEQ ID NO: 1529424 - DNA, 25 bp, Homo sapien
acaagtttctgccaagtggagtagg

SEQ ID NO: 1529425 - DNA, 25 bp, Homo sapien
gggtcactcgactcttcatcttcac

SEQ ID NO: 1529426 - DNA, 25 bp, Homo sapien
cacttctggtccattgagaggcagc

SEQ ID NO: 1529427 - DNA, 25 bp, Homo sapien
tttgggtcactcgactcttcatctt

SEQ ID NO: 1529428 - DNA, 25 bp, Homo sapien
ttgctttgggtcactcgactcttca

SEQ ID NO: 1529429 - DNA, 25 bp, Homo sapien
tgcctgaaggaggaatgtggcctcc

SEQ ID NO: 1529430 - DNA, 25 bp, Homo sapien
tgggtccctgagttcatccattcat

SEQ ID NO: 1529431 - DNA, 25 bp, Homo sapien
tgtcatagattggtggaactgcatc

SEQ ID NO: 1529432 - DNA, 25 bp, Homo sapien
agatacttgcagaccaccctggaca

SEQ ID NO: 1529433 - DNA, 25 bp, Homo sapien
tgtgactgttccttgcccccaagca

SEQ ID NO: 1529434 - DNA, 25 bp, Homo sapien
ccttgcccccaagcaggtttggcat

SEQ ID NO: 1529435 - DNA, 25 bp, Homo sapien
tgactgttccttgcccccaagcagg

SEQ ID NO: 1529436 - DNA, 25 bp, Homo sapien
ttccttgcccccaagcaggtttggc

SEQ ID NO: 1529437 - DNA, 25 bp, Homo sapien
gggccatcgttcaaaggtggagcat

SEQ ID NO: 1529438 - DNA, 25 bp, Homo sapien
ctccagcggtgcacacttggcttcc

SEQ ID NO: 1529439 - DNA, 25 bp, Homo sapien
cacgtggcaggcatgtagctcagac

SEQ ID NO: 1529440 - DNA, 25 bp, Homo sapien
cctgtctgtgattgataatggctca

SEQ ID NO: 1529441 - DNA, 25 bp, Homo sapien
acaggaaccatttccgcagcccaac

SEQ ID NO: 1529442 - DNA, 25 bp, Homo sapien
catttccgcagcccaacaggcaggt

SEQ ID NO: 1529443 - DNA, 25 bp, Homo sapien
acagaggcactggcatatgtgtggg

SEQ ID NO: 1529444 - DNA, 25 bp, Homo sapien
caggtggtacgcagtgccaggagcg

SEQ ID NO: 1529445 - DNA, 25 bp, Homo sapien
gaaagaaggcctctagtcctggcct

SEQ ID NO: 1529446 - DNA, 25 bp, Homo sapien
gaagccggaaggaggcatcctttct

SEQ ID NO: 1529447 - DNA, 25 bp, Homo sapien
tctcgtgcagactgtagggaaagaa

SEQ ID NO: 1529448 - DNA, 25 bp, Homo sapien
tcagcatctctcgtgcagactgtag

SEQ ID NO: 1529449 - DNA, 25 bp, Homo sapien
gacagagctgagattaatgagctgc

SEQ ID NO: 1529450 - DNA, 25 bp, Homo sapien
tggtctccggctcagaggatccttg

SEQ ID NO: 1529451 - DNA, 25 bp, Homo sapien
tccggctcagaggatccttgatcag

SEQ ID NO: 1529452 - DNA, 25 bp, Homo sapien
gaggatccttgatcagacagagctg

SEQ ID NO: 1529453 - DNA, 25 bp, Homo sapien
cctagtttaggatgatttggcaaga

SEQ ID NO: 1529454 - DNA, 25 bp, Homo sapien
gctgtagcggttacgtcctagttta

SEQ ID NO: 1529455 - DNA, 25 bp, Homo sapien
ggtcatctgcagctctaagctctgg

SEQ ID NO: 1529456 - DNA, 25 bp, Homo sapien
gtttttgagccaggctgtagcggtt

SEQ ID NO: 1529457 - DNA, 25 bp, Homo sapien
atggaaagtactgctgtccacgtcg

SEQ ID NO: 1529458 - DNA, 25 bp, Homo sapien
acacagtctggatggaaagtactgc

SEQ ID NO: 1529459 - DNA, 25 bp, Homo sapien
cacacagtctggatggaaagtactg

SEQ ID NO: 1529460 - DNA, 25 bp, Homo sapien
agtactgctgtccacgtcgggcctg

SEQ ID NO: 1529461 - DNA, 25 bp, Homo sapien
attcgtaaaccagccgcatcactga

SEQ ID NO: 1529462 - DNA, 25 bp, Homo sapien
aaaccagccgcatcactgagagcag

SEQ ID NO: 1529463 - DNA, 25 bp, Homo sapien
tcgtaaaccagccgcatcactgaga

SEQ ID NO: 1529464 - DNA, 25 bp, Homo sapien
gtaaaccagccgcatcactgagagc

SEQ ID NO: 1529465 - DNA, 25 bp, Homo sapien
taaatagctggtatctgcaagaaca

SEQ ID NO: 1529466 - DNA, 25 bp, Homo sapien
aaatgccttagtgatctgacagccg

SEQ ID NO: 1529467 - DNA, 25 bp, Homo sapien
gcaagaacaaagtgtgaactgaatg

SEQ ID NO: 1529468 - DNA, 25 bp, Homo sapien
ctcagtaactaaaggctctagaatg

SEQ ID NO: 1529469 - DNA, 25 bp, Homo sapien
gtacggccaagcagcccggaggcca

SEQ ID NO: 1529470 - DNA, 25 bp, Homo sapien
ctcgggcattgggagccgtcaggcc

SEQ ID NO: 1529471 - DNA, 25 bp, Homo sapien
cgaggcctgtgctagcagctcctgg

SEQ ID NO: 1529472 - DNA, 25 bp, Homo sapien
cagtcctcaaggtacggccaagcag

SEQ ID NO: 1529473 - DNA, 25 bp, Homo sapien
ggcatgtcaatgctgattcctgtgc

SEQ ID NO: 1529474 - DNA, 25 bp, Homo sapien
ctgtgccctggggtacggcccacct

SEQ ID NO: 1529475 - DNA, 25 bp, Homo sapien
accttctctcggtagagctgtgacc

SEQ ID NO: 1529476 - DNA, 25 bp, Homo sapien
ttgggcatgtcaatgctgattcctg

SEQ ID NO: 1529477 - DNA, 25 bp, Homo sapien
gggtatccctttcggtgagtcataa

SEQ ID NO: 1529478 - DNA, 25 bp, Homo sapien
agtcataactctgccgttgggttgg

SEQ ID NO: 1529479 - DNA, 25 bp, Homo sapien
taggaagcccgtctttgctagaatt

SEQ ID NO: 1529480 - DNA, 25 bp, Homo sapien
ggcagctctcatgtagaagggagat

SEQ ID NO: 1529481 - DNA, 25 bp, Homo sapien
tacttgacgtgttctgtggtaatga

SEQ ID NO: 1529482 - DNA, 25 bp, Homo sapien
ttattagcgtgcgtgcgggaacctg

SEQ ID NO: 1529483 - DNA, 25 bp, Homo sapien
ccttgtgaaagaagtggagtattta

SEQ ID NO: 1529484 - DNA, 25 bp, Homo sapien
gaagtggagtatttaacatttctgc

SEQ ID NO: 1529485 - DNA, 25 bp, Homo sapien
cagagagcgataacctggcgtcaca

SEQ ID NO: 1529486 - DNA, 25 bp, Homo sapien
ggtccaccgtcaagatgctcagagt

SEQ ID NO: 1529487 - DNA, 25 bp, Homo sapien
cccgaagaactggagtgagaccctg

SEQ ID NO: 1529488 - DNA, 25 bp, Homo sapien
gaaagacattccatgaggtccaccg

SEQ ID NO: 1529489 - DNA, 25 bp, Homo sapien
gggctcatccatcacacccgggttg

SEQ ID NO: 1529490 - DNA, 25 bp, Homo sapien
tgctaggagattgtggcagcagctg

SEQ ID NO: 1529491 - DNA, 25 bp, Homo sapien
cagttttatggctggagacatgatt

SEQ ID NO: 1529492 - DNA, 25 bp, Homo sapien
tgatttattgcagccatccatcttg

SEQ ID NO: 1529493 - DNA, 25 bp, Homo sapien
aggagtcggtgaagctctggccttt

SEQ ID NO: 1529494 - DNA, 25 bp, Homo sapien
ggagtcggtgaagctctggcctttc

SEQ ID NO: 1529495 - DNA, 25 bp, Homo sapien
gagtcggtgaagctctggcctttcc

SEQ ID NO: 1529496 - DNA, 25 bp, Homo sapien
cgcagcctggttcactgacacagcc

SEQ ID NO: 1529497 - DNA, 25 bp, Homo sapien
tcgcttctgggtttgcacccttgag

SEQ ID NO: 1529498 - DNA, 25 bp, Homo sapien
caagccctgccagttaatcgcttct

SEQ ID NO: 1529499 - DNA, 25 bp, Homo sapien
cagttaatcgcttctgggtttgcac

SEQ ID NO: 1529500 - DNA, 25 bp, Homo sapien
tctgggtttgcacccttgagctgtg

SEQ ID NO: 1529501 - DNA, 25 bp, Homo sapien
tgaaagggggagggcgaggcggctc

SEQ ID NO: 1529502 - DNA, 25 bp, Homo sapien
aaagggggagggcgaggcggctcat

SEQ ID NO: 1529503 - DNA, 25 bp, Homo sapien
ctaatgaaagggggagggcgaggcg

SEQ ID NO: 1529504 - DNA, 25 bp, Homo sapien
atgaaagggggagggcgaggcggct

SEQ ID NO: 1529505 - DNA, 25 bp, Homo sapien
agcttcataaatcctctcgccataa

SEQ ID NO: 1529506 - DNA, 25 bp, Homo sapien
tcctctcgccataatgaggttcagc

SEQ ID NO: 1529507 - DNA, 25 bp, Homo sapien
tttgccattgggttcagcttcataa

SEQ ID NO: 1529508 - DNA, 25 bp, Homo sapien
taatgaggttcagcagtgccaccct

SEQ ID NO: 1529509 - DNA, 25 bp, Homo sapien
gcctgataactgcatacttaatgag

SEQ ID NO: 1529510 - DNA, 25 bp, Homo sapien
catacttaatgagatttcaaagctg

SEQ ID NO: 1529511 - DNA, 25 bp, Homo sapien
taatgttcctccataagattctgtc

SEQ ID NO: 1529512 - DNA, 25 bp, Homo sapien
gattctgtcggagttgagtaatgtt

SEQ ID NO: 1529513 - DNA, 25 bp, Homo sapien
taggccccagtaatcagggcccgca

SEQ ID NO: 1529514 - DNA, 25 bp, Homo sapien
tcccggtagtgactcctagactggt

SEQ ID NO: 1529515 - DNA, 25 bp, Homo sapien
catccttctcaagtttgacagcttc

SEQ ID NO: 1529516 - DNA, 25 bp, Homo sapien
ggtctgagaactccataggccccag

SEQ ID NO: 1529517 - DNA, 25 bp, Homo sapien
tccttgtcatcgcattcctggtcac

SEQ ID NO: 1529518 - DNA, 25 bp, Homo sapien
caactccttgtcatcgcattcctgg

SEQ ID NO: 1529519 - DNA, 25 bp, Homo sapien
tgtcatcgcattcctggtcacctcg

SEQ ID NO: 1529520 - DNA, 25 bp, Homo sapien
cttgtcatcgcattcctggtcacct

SEQ ID NO: 1529521 - DNA, 25 bp, Homo sapien
tcctacgaaatgagagcaacaatgc

SEQ ID NO: 1529522 - DNA, 25 bp, Homo sapien
ctccttggacaggtattctactctg

SEQ ID NO: 1529523 - DNA, 25 bp, Homo sapien
cagagcgactggttttgaccgttct

SEQ ID NO: 1529524 - DNA, 25 bp, Homo sapien
tctgtagcaaggtggcagagcgact

SEQ ID NO: 1529525 - DNA, 25 bp, Homo sapien
ttcctaagtctggtccacacatcgg

SEQ ID NO: 1529526 - DNA, 25 bp, Homo sapien
tgtccagatgacaccttcctaagtc

SEQ ID NO: 1529527 - DNA, 25 bp, Homo sapien
taagtctggtccacacatcgggcag

SEQ ID NO: 1529528 - DNA, 25 bp, Homo sapien
gcatgcctaagaggtggcccacctg

SEQ ID NO: 1529529 - DNA, 25 bp, Homo sapien
cgtgtgggtgagatcactgtctccc

SEQ ID NO: 1529530 - DNA, 25 bp, Homo sapien
tgtgggtgagatcactgtctcccgg

SEQ ID NO: 1529531 - DNA, 25 bp, Homo sapien
gtgggtgagatcactgtctcccggt

SEQ ID NO: 1529532 - DNA, 25 bp, Homo sapien
gtgtgggtgagatcactgtctcccg

SEQ ID NO: 1529533 - DNA, 25 bp, Homo sapien
ggccaggttcgaggagcttacaaaa

SEQ ID NO: 1529534 - DNA, 25 bp, Homo sapien
ttacaaaattgtgtccatgcagggc

SEQ ID NO: 1529535 - DNA, 25 bp, Homo sapien
tgtatagggtacatcaggtgcagct

SEQ ID NO: 1529536 - DNA, 25 bp, Homo sapien
gcagccatgggctcaaagcatcagc

SEQ ID NO: 1529537 - DNA, 25 bp, Homo sapien
cctctcagcaaccacgggagaaagc

SEQ ID NO: 1529538 - DNA, 25 bp, Homo sapien
gcttcggctgtgtcgtgagaactgt

SEQ ID NO: 1529539 - DNA, 25 bp, Homo sapien
ttctcagggtaggtccagcacaatg

SEQ ID NO: 1529540 - DNA, 25 bp, Homo sapien
agctgctttgcatcgctggagatga

SEQ ID NO: 1529541 - DNA, 25 bp, Homo sapien
aattgccttgcccattcatgccgct

SEQ ID NO: 1529542 - DNA, 25 bp, Homo sapien
tactacagcttcatgctgaataagc

SEQ ID NO: 1529543 - DNA, 25 bp, Homo sapien
tgtgctgtataaagactcccatgcc

SEQ ID NO: 1529544 - DNA, 25 bp, Homo sapien
catttgctaaactgtagatactaca

SEQ ID NO: 1529545 - DNA, 25 bp, Homo sapien
ggtggagcctgcaggacgactcgct

SEQ ID NO: 1529546 - DNA, 25 bp, Homo sapien
tggagcctgcaggacgactcgcttc

SEQ ID NO: 1529547 - DNA, 25 bp, Homo sapien
gagcctgcaggacgactcgcttcat

SEQ ID NO: 1529548 - DNA, 25 bp, Homo sapien
gtggagcctgcaggacgactcgctt

SEQ ID NO: 1529549 - DNA, 25 bp, Homo sapien
tcatcagcaaacatcacatcatgca

SEQ ID NO: 1529550 - DNA, 25 bp, Homo sapien
cacatcatgcaagcacagatttgca

SEQ ID NO: 1529551 - DNA, 25 bp, Homo sapien
ggagtcagacctcccgctgtccttg

SEQ ID NO: 1529552 - DNA, 25 bp, Homo sapien
cacattgaccctgggctggctttgg

SEQ ID NO: 1529553 - DNA, 25 bp, Homo sapien
ggcaaaatgacatcagctgcaatca

SEQ ID NO: 1529554 - DNA, 25 bp, Homo sapien
tcagctgcaatcactaatagagaga

SEQ ID NO: 1529555 - DNA, 25 bp, Homo sapien
tgacatcagctgcaatcactaatag

SEQ ID NO: 1529556 - DNA, 25 bp, Homo sapien
aatcactaatagagagacaatgcca

SEQ ID NO: 1529557 - DNA, 25 bp, Homo sapien
cagctagtcagcagtagtcaggaac

SEQ ID NO: 1529558 - DNA, 25 bp, Homo sapien
gggaggaagacactgccttaagcaa

SEQ ID NO: 1529559 - DNA, 25 bp, Homo sapien
tcccaagtgagctcctaagaatgca

SEQ ID NO: 1529560 - DNA, 25 bp, Homo sapien
tctcagaggacctatgtctcagagg

SEQ ID NO: 1529561 - DNA, 25 bp, Homo sapien
gaccattgtgtgatatgtaagctat

SEQ ID NO: 1529562 - DNA, 25 bp, Homo sapien
ccattgtgtgatatgtaagctattt

SEQ ID NO: 1529563 - DNA, 25 bp, Homo sapien
aagagaccattgtgtgatatgtaag

SEQ ID NO: 1529564 - DNA, 25 bp, Homo sapien
gagaccattgtgtgatatgtaagct

SEQ ID NO: 1529565 - DNA, 25 bp, Homo sapien
tctgatgactcacctgtgcaatggg

SEQ ID NO: 1529566 - DNA, 25 bp, Homo sapien
gattacttgagacagtgcatggagc

SEQ ID NO: 1529567 - DNA, 25 bp, Homo sapien
gaaacaagagcacctacttcacgtg

SEQ ID NO: 1529568 - DNA, 25 bp, Homo sapien
tgattgaccctagaatgcacctctg

SEQ ID NO: 1529569 - DNA, 25 bp, Homo sapien
caaaggagcgttcacagcagactgg

SEQ ID NO: 1529570 - DNA, 25 bp, Homo sapien
taatggccccttggcattccagcat

SEQ ID NO: 1529571 - DNA, 25 bp, Homo sapien
gcccgtaacgcctgcaggatctgat

SEQ ID NO: 1529572 - DNA, 25 bp, Homo sapien
tgtggatttgagaaggcccgtaacg

SEQ ID NO: 1529573 - DNA, 25 bp, Homo sapien
cggactcaaaggcagccatccagcc

SEQ ID NO: 1529574 - DNA, 25 bp, Homo sapien
ctcaaaggcagccatccagcccagc

SEQ ID NO: 1529575 - DNA, 25 bp, Homo sapien
gactcaaaggcagccatccagccca

SEQ ID NO: 1529576 - DNA, 25 bp, Homo sapien
cgcaggacggactcaaaggcagcca

SEQ ID NO: 1529577 - DNA, 25 bp, Homo sapien
tcatcgccagaattgcagacaaagg

SEQ ID NO: 1529578 - DNA, 25 bp, Homo sapien
tacacggattctgcttttggcgagc

SEQ ID NO: 1529579 - DNA, 25 bp, Homo sapien
caaagggctaattactgggactcat

SEQ ID NO: 1529580 - DNA, 25 bp, Homo sapien
ttggcgagcgctggaacagaatcac

SEQ ID NO: 1529581 - DNA, 25 bp, Homo sapien
gaaaatgactacactgtcacaggca

SEQ ID NO: 1529582 - DNA, 25 bp, Homo sapien
gcttcttctgattaaatagtgttgc

SEQ ID NO: 1529583 - DNA, 25 bp, Homo sapien
taccgatacatgctgtgcccttaag

SEQ ID NO: 1529584 - DNA, 25 bp, Homo sapien
tgtcaagccggcagttgcagtaaac

SEQ ID NO: 1529585 - DNA, 25 bp, Homo sapien
tataatgtcccgtaattggagaaac

SEQ ID NO: 1529586 - DNA, 25 bp, Homo sapien
tgtcccgtaattggagaaacagtta

SEQ ID NO: 1529587 - DNA, 25 bp, Homo sapien
aacttataatgtcccgtaattggag

SEQ ID NO: 1529588 - DNA, 25 bp, Homo sapien
aacaacttataatgtcccgtaattg

SEQ ID NO: 1529589 - DNA, 25 bp, Homo sapien
ggggagtaacaagtttcttgatcat

SEQ ID NO: 1529590 - DNA, 25 bp, Homo sapien
cttggggagtaacaagtttcttgat

SEQ ID NO: 1529591 - DNA, 25 bp, Homo sapien
tggggagtaacaagtttcttgatca

SEQ ID NO: 1529592 - DNA, 25 bp, Homo sapien
ttggggagtaacaagtttcttgatc

SEQ ID NO: 1529593 - DNA, 25 bp, Homo sapien
ccaccagggacttctcgggaatcag

SEQ ID NO: 1529594 - DNA, 25 bp, Homo sapien
ctccaccagggacttctcgggaatc

SEQ ID NO: 1529595 - DNA, 25 bp, Homo sapien
ccagggacttctcgggaatcagggc

SEQ ID NO: 1529596 - DNA, 25 bp, Homo sapien
tctcgggaatcagggccacctgcct

SEQ ID NO: 1529597 - DNA, 25 bp, Homo sapien
ttggctgagtctcccctaaggagca

SEQ ID NO: 1529598 - DNA, 25 bp, Homo sapien
ggctgagtctcccctaaggagcagc

SEQ ID NO: 1529599 - DNA, 25 bp, Homo sapien
gcttggctgagtctcccctaaggag

SEQ ID NO: 1529600 - DNA, 25 bp, Homo sapien
agcttggctgagtctcccctaagga

SEQ ID NO: 1529601 - DNA, 25 bp, Homo sapien
ggaaacacagtgggggctgcccagc

SEQ ID NO: 1529602 - DNA, 25 bp, Homo sapien
tatggaaacacagtgggggctgccc

SEQ ID NO: 1529603 - DNA, 25 bp, Homo sapien
ctatggaaacacagtgggggctgcc

SEQ ID NO: 1529604 - DNA, 25 bp, Homo sapien
atggaaacacagtgggggctgccca

SEQ ID NO: 1529605 - DNA, 25 bp, Homo sapien
gccacccaatgatgaccaataaggt

SEQ ID NO: 1529606 - DNA, 25 bp, Homo sapien
atgaccaataaggtcatcatcatag

SEQ ID NO: 1529607 - DNA, 25 bp, Homo sapien
gagcatcgaatgtggccacccaatg

SEQ ID NO: 1529608 - DNA, 25 bp, Homo sapien
ctaagatattacgtagaaaacgccg

SEQ ID NO: 1529609 - DNA, 25 bp, Homo sapien
gagcagcaggtggtaggggaattac

SEQ ID NO: 1529610 - DNA, 25 bp, Homo sapien
ggagcagcaggtggtaggggaatta

SEQ ID NO: 1529611 - DNA, 25 bp, Homo sapien
gaagaacgcagacagctcccttttc

SEQ ID NO: 1529612 - DNA, 25 bp, Homo sapien
gggaagaacgcagacagctcccttt

SEQ ID NO: 1529613 - DNA, 25 bp, Homo sapien
cagggaagaacgcagacagctccct

SEQ ID NO: 1529614 - DNA, 25 bp, Homo sapien
agaacgcagacagctcccttttcag

SEQ ID NO: 1529615 - DNA, 25 bp, Homo sapien
tggtgtttgcccctggtgggtagca

SEQ ID NO: 1529616 - DNA, 25 bp, Homo sapien
tggtgggtagcatggcctcttccgt

SEQ ID NO: 1529617 - DNA, 25 bp, Homo sapien
tttgcccctggtgggtagcatggcc

SEQ ID NO: 1529618 - DNA, 25 bp, Homo sapien
tgcccctggtgggtagcatggcctc

SEQ ID NO: 1529619 - DNA, 25 bp, Homo sapien
gatgctatgaggattgtctgcagtt

SEQ ID NO: 1529620 - DNA, 25 bp, Homo sapien
agcacactggacatcttagcttttc

SEQ ID NO: 1529621 - DNA, 25 bp, Homo sapien
actgtgccaagcacactggacatct

SEQ ID NO: 1529622 - DNA, 25 bp, Homo sapien
acagggatgctatgaggattgtctg

SEQ ID NO: 1529623 - DNA, 25 bp, Homo sapien
tgctcatagcataacttggagtacc

SEQ ID NO: 1529624 - DNA, 25 bp, Homo sapien
taggaccttccaggatactttgctg

SEQ ID NO: 1529625 - DNA, 25 bp, Homo sapien
caaggcacagcggagaaagagattt

SEQ ID NO: 1529626 - DNA, 25 bp, Homo sapien
tactttgctgatctttgtcaaggca

SEQ ID NO: 1529627 - DNA, 25 bp, Homo sapien
ataacgaagacttccacggctgccg

SEQ ID NO: 1529628 - DNA, 25 bp, Homo sapien
ggccagccgccaggagtgctgcggc

SEQ ID NO: 1529629 - DNA, 25 bp, Homo sapien
gctgccgcagtgagtggcaagggat

SEQ ID NO: 1529630 - DNA, 25 bp, Homo sapien
gattcttggcatctatgaataacga

SEQ ID NO: 1529631 - DNA, 25 bp, Homo sapien
caacacatggctgagggagagcaga

SEQ ID NO: 1529632 - DNA, 25 bp, Homo sapien
gggagagcagaaagagaaattcata

SEQ ID NO: 1529633 - DNA, 25 bp, Homo sapien
ctgagggagagcagaaagagaaatt

SEQ ID NO: 1529634 - DNA, 25 bp, Homo sapien
gagggagagcagaaagagaaattca

SEQ ID NO: 1529635 - DNA, 25 bp, Homo sapien
tgtgatgtgacaggtgctgtctttc

SEQ ID NO: 1529636 - DNA, 25 bp, Homo sapien
caggtgctgtctttccccttgttcc

SEQ ID NO: 1529637 - DNA, 25 bp, Homo sapien
gtgacaggtgctgtctttccccttg

SEQ ID NO: 1529638 - DNA, 25 bp, Homo sapien
gcctgtgatgtgacaggtgctgtct

SEQ ID NO: 1529639 - DNA, 25 bp, Homo sapien
gaatgccccagatctgtagaaggtg

SEQ ID NO: 1529640 - DNA, 25 bp, Homo sapien
tgatctgcgttgaatgccccggacc

SEQ ID NO: 1529641 - DNA, 25 bp, Homo sapien
cccggacccgcagagggtgatctag

SEQ ID NO: 1529642 - DNA, 25 bp, Homo sapien
tggtctgctgtgaacgccctcgacc

SEQ ID NO: 1529643 - DNA, 25 bp, Homo sapien
cagctgcccgcagtcctcccggccg

SEQ ID NO: 1529644 - DNA, 25 bp, Homo sapien
cccagctgcccgcagtcctcccggc

SEQ ID NO: 1529645 - DNA, 25 bp, Homo sapien
tgcccgcagtcctcccggccggact

SEQ ID NO: 1529646 - DNA, 25 bp, Homo sapien
gctgcccgcagtcctcccggccgga

SEQ ID NO: 1529647 - DNA, 25 bp, Homo sapien
tcttccggggggcatggctgtgctc

SEQ ID NO: 1529648 - DNA, 25 bp, Homo sapien
atggctgtgctcttgctagaggttc

SEQ ID NO: 1529649 - DNA, 25 bp, Homo sapien
gaggaagcagggtcttccacctctt

SEQ ID NO: 1529650 - DNA, 25 bp, Homo sapien
gcatggctgtgctcttgctagaggt

SEQ ID NO: 1529651 - DNA, 25 bp, Homo sapien
gctgtagggagaagactgtgtagat

SEQ ID NO: 1529652 - DNA, 25 bp, Homo sapien
agaggaagcagggtcttccacctct

SEQ ID NO: 1529653 - DNA, 25 bp, Homo sapien
gaggaagcagggtcttccacctctt

SEQ ID NO: 1529654 - DNA, 25 bp, Homo sapien
ccagggagaagactgtgtagatgga

SEQ ID NO: 1529655 - DNA, 25 bp, Homo sapien
ctacacctcagaccagacttcataa

SEQ ID NO: 1529656 - DNA, 25 bp, Homo sapien
gacttcataaacatcagagaggtgc

SEQ ID NO: 1529657 - DNA, 25 bp, Homo sapien
tcagagaggtgctgaatgccaaaca

SEQ ID NO: 1529658 - DNA, 25 bp, Homo sapien
cagaccagacttcataaacatcaga

SEQ ID NO: 1529659 - DNA, 25 bp, Homo sapien
ttgcgtctgaactctccggaaccct

SEQ ID NO: 1529660 - DNA, 25 bp, Homo sapien
tatcgatttgcgtctgaactctccg

SEQ ID NO: 1529661 - DNA, 25 bp, Homo sapien
gtaatgcatgctatcgatttgcgtc

SEQ ID NO: 1529662 - DNA, 25 bp, Homo sapien
gctctcttgtaatgcatgctatcga

SEQ ID NO: 1529663 - DNA, 25 bp, Homo sapien
taacctccctaatgtgcctgcttgc

SEQ ID NO: 1529664 - DNA, 25 bp, Homo sapien
catcacatgatttatgggactgacc

SEQ ID NO: 1529665 - DNA, 25 bp, Homo sapien
gcttgcttgcatcgtgttgcagaca

SEQ ID NO: 1529666 - DNA, 25 bp, Homo sapien
gggactgaccgctgcctgcatctct

SEQ ID NO: 1529667 - DNA, 25 bp, Homo sapien
actaactggtcccatggcactggcc

SEQ ID NO: 1529668 - DNA, 25 bp, Homo sapien
gctggacctccattgcactaactgg

SEQ ID NO: 1529669 - DNA, 25 bp, Homo sapien
accagcttcctactcaaggatcctg

SEQ ID NO: 1529670 - DNA, 25 bp, Homo sapien
tcatcaccgtggtagacaaagggcg

SEQ ID NO: 1529671 - DNA, 25 bp, Homo sapien
ttattctggtttaagctggtctctt

SEQ ID NO: 1529672 - DNA, 25 bp, Homo sapien
gctattagtgtttgtgagaggggaa

SEQ ID NO: 1529673 - DNA, 25 bp, Homo sapien
tggctattagtgtttgtgagagggg

SEQ ID NO: 1529674 - DNA, 25 bp, Homo sapien
catggctattagtgtttgtgagagg

SEQ ID NO: 1529675 - DNA, 25 bp, Homo sapien
tattagtgtttgtgagaggggaagc

SEQ ID NO: 1529676 - DNA, 25 bp, Homo sapien
tccaacgagatcagagcattcaaag

SEQ ID NO: 1529677 - DNA, 25 bp, Homo sapien
tgctctccaacgagatcagagcatt

SEQ ID NO: 1529678 - DNA, 25 bp, Homo sapien
gacgtgaagattgattgcatcccca

SEQ ID NO: 1529679 - DNA, 25 bp, Homo sapien
ctctttgtactccagacgtgaagat

SEQ ID NO: 1529680 - DNA, 25 bp, Homo sapien
ccttggtgacagctacattaccttc

SEQ ID NO: 1529681 - DNA, 25 bp, Homo sapien
gtgaatttccgcttctctctccttg

SEQ ID NO: 1529682 - DNA, 25 bp, Homo sapien
aagagaaccgtgaatttccgcttct

SEQ ID NO: 1529683 - DNA, 25 bp, Homo sapien
cagctacattaccttccatggatag

SEQ ID NO: 1529684 - DNA, 25 bp, Homo sapien
tttggccaactaggaggatctctcc

SEQ ID NO: 1529685 - DNA, 25 bp, Homo sapien
gccaactaggaggatctctccaagt

SEQ ID NO: 1529686 - DNA, 25 bp, Homo sapien
catggctttggccaactaggaggat

SEQ ID NO: 1529687 - DNA, 25 bp, Homo sapien
gctttggccaactaggaggatctct

SEQ ID NO: 1529688 - DNA, 25 bp, Homo sapien
tgccagctgccgctgtacgttgggc

SEQ ID NO: 1529689 - DNA, 25 bp, Homo sapien
tctggtgaagtagggcctgccccag

SEQ ID NO: 1529690 - DNA, 25 bp, Homo sapien
ctctggtgaagtagggcctgcccca

SEQ ID NO: 1529691 - DNA, 25 bp, Homo sapien
agctgccgctgtacgttgggctctg

SEQ ID NO: 1529692 - DNA, 25 bp, Homo sapien
tccaaatgcaaagcccagcgctggg

SEQ ID NO: 1529693 - DNA, 25 bp, Homo sapien
cactccgtggagaactttaggccca

SEQ ID NO: 1529694 - DNA, 25 bp, Homo sapien
cataatgggaatttgtgacactccg

SEQ ID NO: 1529695 - DNA, 25 bp, Homo sapien
ggcccataaaccatagacagtatgt

SEQ ID NO: 1529696 - DNA, 25 bp, Homo sapien
tggcaattacattgtgagtgtttgc

SEQ ID NO: 1529697 - DNA, 25 bp, Homo sapien
ttgtgagtgtttgctaaagatgtgc

SEQ ID NO: 1529698 - DNA, 25 bp, Homo sapien
ccaactgctgtattttactgtcgca

SEQ ID NO: 1529699 - DNA, 25 bp, Homo sapien
cgtgccgccaactgctgtattttac

SEQ ID NO: 1529700 - DNA, 25 bp, Homo sapien
gctgtattttactgtcgcagcccat

SEQ ID NO: 1529701 - DNA, 25 bp, Homo sapien
tgccgccaactgctgtattttactg

SEQ ID NO: 1529702 - DNA, 25 bp, Homo sapien
caagcttctccttgtttgcggtggg

SEQ ID NO: 1529703 - DNA, 25 bp, Homo sapien
agcaagcttctccttgtttgcggtg

SEQ ID NO: 1529704 - DNA, 25 bp, Homo sapien
ggtagcaagcttctccttgtttgcg

SEQ ID NO: 1529705 - DNA, 25 bp, Homo sapien
tcaaagaaagtccaggtagcaagct

SEQ ID NO: 1529706 - DNA, 25 bp, Homo sapien
ctttggttgaattcgaggggagcct

SEQ ID NO: 1529707 - DNA, 25 bp, Homo sapien
gaattcgaggggagcctgtaatgac

SEQ ID NO: 1529708 - DNA, 25 bp, Homo sapien
ctgtaatgactggatattgagaaag

SEQ ID NO: 1529709 - DNA, 25 bp, Homo sapien
gattccgaaagattagagcaaacat

SEQ ID NO: 1529710 - DNA, 25 bp, Homo sapien
aagtgacccagggatctggagccac

SEQ ID NO: 1529711 - DNA, 25 bp, Homo sapien
gacacgaggagcaagtcctgtcaca

SEQ ID NO: 1529712 - DNA, 25 bp, Homo sapien
tcaggagacacgactaatgaagtca

SEQ ID NO: 1529713 - DNA, 25 bp, Homo sapien
caagaaataacagggtcaggagaca

SEQ ID NO: 1529714 - DNA, 25 bp, Homo sapien
tctcgcccagcttacaggacaccat

SEQ ID NO: 1529715 - DNA, 25 bp, Homo sapien
tgcccatacccccagtgtctcgccc

SEQ ID NO: 1529716 - DNA, 25 bp, Homo sapien
aggcccgtgcccatacccccagtgt

SEQ ID NO: 1529717 - DNA, 25 bp, Homo sapien
ccagtgtctcgcccagcttacagga

SEQ ID NO: 1529718 - DNA, 25 bp, Homo sapien
gaagagacgtttcaagtggtagaat

SEQ ID NO: 1529719 - DNA, 25 bp, Homo sapien
aattcctggatcatagagtatggtg

SEQ ID NO: 1529720 - DNA, 25 bp, Homo sapien
tcctggatcatagagtatggtggtt

SEQ ID NO: 1529721 - DNA, 25 bp, Homo sapien
ctgaagagacgtttcaagtggtaga

SEQ ID NO: 1529722 - DNA, 25 bp, Homo sapien
tattgtgaccagcatccatactgtg

SEQ ID NO: 1529723 - DNA, 25 bp, Homo sapien
tcttgcggtcctctgtgagagcttc

SEQ ID NO: 1529724 - DNA, 25 bp, Homo sapien
catccatactgtgcctcttgcggtc

SEQ ID NO: 1529725 - DNA, 25 bp, Homo sapien
ccaacaattaatattgtgaccagca

SEQ ID NO: 1529726 - DNA, 25 bp, Homo sapien
cagcagcttcccgatgacatctcag

SEQ ID NO: 1529727 - DNA, 25 bp, Homo sapien
gatcagcagcttcccgatgacatct

SEQ ID NO: 1529728 - DNA, 25 bp, Homo sapien
ctgtaattgctgatcagcagcttcc

SEQ ID NO: 1529729 - DNA, 25 bp, Homo sapien
agcttcccgatgacatctcaggagt

SEQ ID NO: 1529730 - DNA, 25 bp, Homo sapien
gggctgagctgaacgaacacatcca

SEQ ID NO: 1529731 - DNA, 25 bp, Homo sapien
gattaaccactagcacgttaaccac

SEQ ID NO: 1529732 - DNA, 25 bp, Homo sapien
caagtaattggattggattaaccac

SEQ ID NO: 1529733 - DNA, 25 bp, Homo sapien
ccagcatgggtctaattatttgaac

SEQ ID NO: 1529734 - DNA, 25 bp, Homo sapien
agagacccacgatcaccctgagaca

SEQ ID NO: 1529735 - DNA, 25 bp, Homo sapien
atgtcatctgactcctggctagaga

SEQ ID NO: 1529736 - DNA, 25 bp, Homo sapien
ttcttctttatgtacttccagtgcc

SEQ ID NO: 1529737 - DNA, 25 bp, Homo sapien
tcaccctgagacagcatgtatgtct

SEQ ID NO: 1529738 - DNA, 25 bp, Homo sapien
ggctgtgggcattaacctgaaccaa

SEQ ID NO: 1529739 - DNA, 25 bp, Homo sapien
caaggtggcttggataaactttaca

SEQ ID NO: 1529740 - DNA, 25 bp, Homo sapien
tattcagaatatgcagaaactcctc

SEQ ID NO: 1529741 - DNA, 25 bp, Homo sapien
caagcagctttgcttaagcagagaa

SEQ ID NO: 1529742 - DNA, 25 bp, Homo sapien
gatgcgtttcctctctagggtttcc

SEQ ID NO: 1529743 - DNA, 25 bp, Homo sapien
gcaaaagccaggtgagatcctttca

SEQ ID NO: 1529744 - DNA, 25 bp, Homo sapien
caatgaggatgcgtttcctctctag

SEQ ID NO: 1529745 - DNA, 25 bp, Homo sapien
gtttcctctctagggtttcctgagc

SEQ ID NO: 1529746 - DNA, 25 bp, Homo sapien
cagctgtcggaaatcagatgttgtc

SEQ ID NO: 1529747 - DNA, 25 bp, Homo sapien
cacgaagcctcagaagtgggacagc

SEQ ID NO: 1529748 - DNA, 25 bp, Homo sapien
gatcctaaaattacgcaagtccatg

SEQ ID NO: 1529749 - DNA, 25 bp, Homo sapien
taaactggaggatattgcattggcg

SEQ ID NO: 1529750 - DNA, 25 bp, Homo sapien
cagctttctagttcatagacggtga

SEQ ID NO: 1529751 - DNA, 25 bp, Homo sapien
gctttctagttcatagacggtgact

SEQ ID NO: 1529752 - DNA, 25 bp, Homo sapien
ctagttcatagacggtgactgcttg

SEQ ID NO: 1529753 - DNA, 25 bp, Homo sapien
tttctagttcatagacggtgactgc

SEQ ID NO: 1529754 - DNA, 25 bp, Homo sapien
gtggccatggagttagaatcagcat

SEQ ID NO: 1529755 - DNA, 25 bp, Homo sapien
ccatggagttagaatcagcattgac

SEQ ID NO: 1529756 - DNA, 25 bp, Homo sapien
gccatggagttagaatcagcattga

SEQ ID NO: 1529757 - DNA, 25 bp, Homo sapien
gcattgactccagataaatgcatgg

SEQ ID NO: 1529758 - DNA, 25 bp, Homo sapien
cggcaagcgcaagctgtcaccattc

SEQ ID NO: 1529759 - DNA, 25 bp, Homo sapien
agctgtcaccattcccttgggaagg

SEQ ID NO: 1529760 - DNA, 25 bp, Homo sapien
tgggaaacagcaacaggccagtctg

SEQ ID NO: 1529761 - DNA, 25 bp, Homo sapien
catgtgtttcctcagatgtgttgga

SEQ ID NO: 1529762 - DNA, 25 bp, Homo sapien
ctacaagcagttgtaggcaaaactg

SEQ ID NO: 1529763 - DNA, 25 bp, Homo sapien
tacaagcagttgtaggcaaaactgt

SEQ ID NO: 1529764 - DNA, 25 bp, Homo sapien
catatgcacagtgcatgccttccct

SEQ ID NO: 1529765 - DNA, 25 bp, Homo sapien
aaaactgtatggtacagcatatgca

SEQ ID NO: 1529766 - DNA, 25 bp, Homo sapien
gagaggaacggagcattcacagcta

SEQ ID NO: 1529767 - DNA, 25 bp, Homo sapien
gaacggagcattcacagctacaatg

SEQ ID NO: 1529768 - DNA, 25 bp, Homo sapien
aaaggagaggaacggagcattcaca

SEQ ID NO: 1529769 - DNA, 25 bp, Homo sapien
tgaaaaggagaggaacggagcattc

SEQ ID NO: 1529770 - DNA, 25 bp, Homo sapien
aaaatgtcgacacagccagcgggag

SEQ ID NO: 1529771 - DNA, 25 bp, Homo sapien
gcaagctctgatatcccggaacaca

SEQ ID NO: 1529772 - DNA, 25 bp, Homo sapien
catccgccttcgtctaccatgtggg

SEQ ID NO: 1529773 - DNA, 25 bp, Homo sapien
atcctcccgggtggacggcagtaga

SEQ ID NO: 1529774 - DNA, 25 bp, Homo sapien
tcttgtcctacagggcaaagacgga

SEQ ID NO: 1529775 - DNA, 25 bp, Homo sapien
taataattcatttaggagccgtgca

SEQ ID NO: 1529776 - DNA, 25 bp, Homo sapien
gagccgtgcacagaatattacccag

SEQ ID NO: 1529777 - DNA, 25 bp, Homo sapien
aatggaatatgctcaccagagtggg

SEQ ID NO: 1529778 - DNA, 25 bp, Homo sapien
aaaaggttttctggctcgatctgaa

SEQ ID NO: 1529779 - DNA, 25 bp, Homo sapien
tattaatattcagaagtagcacaag

SEQ ID NO: 1529780 - DNA, 25 bp, Homo sapien
gttgtgactgagatcttgttttgct

SEQ ID NO: 1529781 - DNA, 25 bp, Homo sapien
taaaactagtatatcttgcaatgcc

SEQ ID NO: 1529782 - DNA, 25 bp, Homo sapien
caaagtacagaattttccttcgctc

SEQ ID NO: 1529783 - DNA, 25 bp, Homo sapien
tttccttcgctcgtatggtagccat

SEQ ID NO: 1529784 - DNA, 25 bp, Homo sapien
tctaggtaagataaaaacaatctcc

SEQ ID NO: 1529785 - DNA, 25 bp, Homo sapien
tattctgcagtttctcattaagcat

SEQ ID NO: 1529786 - DNA, 25 bp, Homo sapien
tgaacagctgtcgtgaattcactgg

SEQ ID NO: 1529787 - DNA, 25 bp, Homo sapien
tggcccagtagagcggcccgcaggt

SEQ ID NO: 1529788 - DNA, 25 bp, Homo sapien
gcatggaagaaggatgtagaggttc

SEQ ID NO: 1529789 - DNA, 25 bp, Homo sapien
ggttccgagcatcagaacacccagg

SEQ ID NO: 1529790 - DNA, 25 bp, Homo sapien
ctatggtgacatggttataatccgt

SEQ ID NO: 1529791 - DNA, 25 bp, Homo sapien
ccgtggaagcgtctctttctggagc

SEQ ID NO: 1529792 - DNA, 25 bp, Homo sapien
tccgtctgctgtgttatccagtaga

SEQ ID NO: 1529793 - DNA, 25 bp, Homo sapien
tttctggagcttccgtctgctgtgt

SEQ ID NO: 1529794 - DNA, 25 bp, Homo sapien
taaaaccggtgcgatttatggctct

SEQ ID NO: 1529795 - DNA, 25 bp, Homo sapien
caataaaaccggtgcgatttatggc

SEQ ID NO: 1529796 - DNA, 25 bp, Homo sapien
gtgccaataaaaccggtgcgattta

SEQ ID NO: 1529797 - DNA, 25 bp, Homo sapien
accggtgcgatttatggctctgctt

SEQ ID NO: 1529798 - DNA, 25 bp, Homo sapien
ggtattgagaatatcctagacccca

SEQ ID NO: 1529799 - DNA, 25 bp, Homo sapien
tattgagaatatcctagaccccact

SEQ ID NO: 1529800 - DNA, 25 bp, Homo sapien
ttgagaatatcctagaccccactcc

SEQ ID NO: 1529801 - DNA, 25 bp, Homo sapien
agggtattgagaatatcctagaccc

SEQ ID NO: 1529802 - DNA, 25 bp, Homo sapien
tcctcttgttaattgcagctggcga

SEQ ID NO: 1529803 - DNA, 25 bp, Homo sapien
ttttctcgaagcgtgtgctggagcc

SEQ ID NO: 1529804 - DNA, 25 bp, Homo sapien
caggatgctctctccggctgatggc

SEQ ID NO: 1529805 - DNA, 25 bp, Homo sapien
gagttgtgtcctggaaatcccacgc

SEQ ID NO: 1529806 - DNA, 25 bp, Homo sapien
cattggcaagcagctgtctgtgtgc

SEQ ID NO: 1529807 - DNA, 25 bp, Homo sapien
gcagctgtctgtgtgcataacccac

SEQ ID NO: 1529808 - DNA, 25 bp, Homo sapien
gcaagcagctgtctgtgtgcataac

SEQ ID NO: 1529809 - DNA, 25 bp, Homo sapien
tcattggcaagcagctgtctgtgtg

SEQ ID NO: 1529810 - DNA, 25 bp, Homo sapien
ggtgaccgggatgctgcagtttaaa

SEQ ID NO: 1529811 - DNA, 25 bp, Homo sapien
aaggagctgtttccatgaggagtac

SEQ ID NO: 1529812 - DNA, 25 bp, Homo sapien
ccatctgacatgactgtgactccca

SEQ ID NO: 1529813 - DNA, 25 bp, Homo sapien
cccggtgaccgggatgctgcagttt

SEQ ID NO: 1529814 - DNA, 25 bp, Homo sapien
ctgagtggattattacctctttccc

SEQ ID NO: 1529815 - DNA, 25 bp, Homo sapien
gagtggattattacctctttcccta

SEQ ID NO: 1529816 - DNA, 25 bp, Homo sapien
tctccgcaaactcctggatcaacat

SEQ ID NO: 1529817 - DNA, 25 bp, Homo sapien
tttccctaatttccacatctccgca

SEQ ID NO: 1529818 - DNA, 25 bp, Homo sapien
acagctttgtcgctaagtttgttgc

SEQ ID NO: 1529819 - DNA, 25 bp, Homo sapien
tttctttcgtgtgtccagatctctt

SEQ ID NO: 1529820 - DNA, 25 bp, Homo sapien
gatctcttgccaatgaggctgtgga

SEQ ID NO: 1529821 - DNA, 25 bp, Homo sapien
ggctgtggaacatattttgacagct

SEQ ID NO: 1529822 - DNA, 25 bp, Homo sapien
tgtaaaaggccgtaactgtgaaggc

SEQ ID NO: 1529823 - DNA, 25 bp, Homo sapien
caggaaacatagctcaggatcatct

SEQ ID NO: 1529824 - DNA, 25 bp, Homo sapien
ttctgtgcggaaagtcttgcttttc

SEQ ID NO: 1529825 - DNA, 25 bp, Homo sapien
aaattcactaccattttatatgctg

SEQ ID NO: 1529826 - DNA, 25 bp, Homo sapien
cagagaatgatggattggaagtaat

SEQ ID NO: 1529827 - DNA, 25 bp, Homo sapien
tgcaaattcactaccattttatatg

SEQ ID NO: 1529828 - DNA, 25 bp, Homo sapien
agaatgatggattggaagtaatgca

SEQ ID NO: 1529829 - DNA, 25 bp, Homo sapien
cttaaataagaatctgtcaacacga

SEQ ID NO: 1529830 - DNA, 25 bp, Homo sapien
tgagctttgttgcagcgggtcccct

SEQ ID NO: 1529831 - DNA, 25 bp, Homo sapien
agctttgttgcagcgggtcccctgg

SEQ ID NO: 1529832 - DNA, 25 bp, Homo sapien
taagaatctgtcaacacgaaggctg

SEQ ID NO: 1529833 - DNA, 25 bp, Homo sapien
cagcttgtgatgtagatctccaagc

SEQ ID NO: 1529834 - DNA, 25 bp, Homo sapien
gggccatccacgtcatctgccaaga

SEQ ID NO: 1529835 - DNA, 25 bp, Homo sapien
agggggccatccacgtcatctgcca

SEQ ID NO: 1529836 - DNA, 25 bp, Homo sapien
gtgatgtagatctccaagccttgct

SEQ ID NO: 1529837 - DNA, 25 bp, Homo sapien
gtggctggctgccgcattagcacca

SEQ ID NO: 1529838 - DNA, 25 bp, Homo sapien
gctggctgccgcattagcaccagct

SEQ ID NO: 1529839 - DNA, 25 bp, Homo sapien
ctggctgccgcattagcaccagctg

SEQ ID NO: 1529840 - DNA, 25 bp, Homo sapien
ggctggctgccgcattagcaccagc

SEQ ID NO: 1529841 - DNA, 25 bp, Homo sapien
ctgcatctgcagagggtttacaaat

SEQ ID NO: 1529842 - DNA, 25 bp, Homo sapien
aattttagccagagcgttaatctcc

SEQ ID NO: 1529843 - DNA, 25 bp, Homo sapien
cttcgagatgtatgattgatttgca

SEQ ID NO: 1529844 - DNA, 25 bp, Homo sapien
taatctcccctacagaactagggct

SEQ ID NO: 1529845 - DNA, 25 bp, Homo sapien
aaaaggaccacataggatgtccctg

SEQ ID NO: 1529846 - DNA, 25 bp, Homo sapien
aggaccacataggatgtccctggtg

SEQ ID NO: 1529847 - DNA, 25 bp, Homo sapien
cataggatgtccctggtgtcgacat

SEQ ID NO: 1529848 - DNA, 25 bp, Homo sapien
accacataggatgtccctggtgtcg

SEQ ID NO: 1529849 - DNA, 25 bp, Homo sapien
cttgtcctggtgtttaggaggagac

SEQ ID NO: 1529850 - DNA, 25 bp, Homo sapien
gcaggccggtgccaggaacacgtgt

SEQ ID NO: 1529851 - DNA, 25 bp, Homo sapien
gaggagacaatgagcctgtgctttg

SEQ ID NO: 1529852 - DNA, 25 bp, Homo sapien
tcttatggtggcgaggcttggttct

SEQ ID NO: 1529853 - DNA, 25 bp, Homo sapien
taagtgagccggaaggaaccaaatc

SEQ ID NO: 1529854 - DNA, 25 bp, Homo sapien
catgtcatcagcctgcacgtctctg

SEQ ID NO: 1529855 - DNA, 25 bp, Homo sapien
ttccagtcgggccggtaagtgagcc

SEQ ID NO: 1529856 - DNA, 25 bp, Homo sapien
gcacgtctctgaacatcacaaccat

SEQ ID NO: 1529857 - DNA, 25 bp, Homo sapien
gcaggacaattcctggatgtcggga

SEQ ID NO: 1529858 - DNA, 25 bp, Homo sapien
gctggtccaaagtgggcaggacaat

SEQ ID NO: 1529859 - DNA, 25 bp, Homo sapien
cctggatgtcgggatgagaagccaa

SEQ ID NO: 1529860 - DNA, 25 bp, Homo sapien
gagagcctcaggtgcttgccagaag

SEQ ID NO: 1529861 - DNA, 25 bp, Homo sapien
gacggcagtctcagagagagacctt

SEQ ID NO: 1529862 - DNA, 25 bp, Homo sapien
ctgggaagacggcagtctcagagag

SEQ ID NO: 1529863 - DNA, 25 bp, Homo sapien
cttctccattgggcccctggtggcc

SEQ ID NO: 1529864 - DNA, 25 bp, Homo sapien
gagagaccttgtggacacagcttct

SEQ ID NO: 1529865 - DNA, 25 bp, Homo sapien
catccggagagcaggcatagaaaca

SEQ ID NO: 1529866 - DNA, 25 bp, Homo sapien
tagagtgcgttaaaaggacactgtc

SEQ ID NO: 1529867 - DNA, 25 bp, Homo sapien
cgtgccgtcctggtagagggccctt

SEQ ID NO: 1529868 - DNA, 25 bp, Homo sapien
aatggcagccgagttccatccggag

SEQ ID NO: 1529869 - DNA, 25 bp, Homo sapien
gacgctggaagataagggtgagaag

SEQ ID NO: 1529870 - DNA, 25 bp, Homo sapien
gagggacggccatgggatagagtga

SEQ ID NO: 1529871 - DNA, 25 bp, Homo sapien
aggagggacggccatgggatagagt

SEQ ID NO: 1529872 - DNA, 25 bp, Homo sapien
gaaggcaggacgctggaagataagg

SEQ ID NO: 1529873 - DNA, 25 bp, Homo sapien
tgagtccgggctatcaggccttgag

SEQ ID NO: 1529874 - DNA, 25 bp, Homo sapien
cttgagctccggataccaggctcag

SEQ ID NO: 1529875 - DNA, 25 bp, Homo sapien
tggccttcatgtgagtccgggctat

SEQ ID NO: 1529876 - DNA, 25 bp, Homo sapien
ggctatcaggccttgagctccggat

SEQ ID NO: 1529877 - DNA, 25 bp, Homo sapien
catccacggtaattttggagacgga

SEQ ID NO: 1529878 - DNA, 25 bp, Homo sapien
tctccctccttcagacttatcaatg

SEQ ID NO: 1529879 - DNA, 25 bp, Homo sapien
cggaaatagcaatgcattgtctttc

SEQ ID NO: 1529880 - DNA, 25 bp, Homo sapien
cttatcaatgccatccacggtaatt

SEQ ID NO: 1529881 - DNA, 25 bp, Homo sapien
ctctggggtgaattctcttccccat

SEQ ID NO: 1529882 - DNA, 25 bp, Homo sapien
ttctctggggtgaattctcttcccc

SEQ ID NO: 1529883 - DNA, 25 bp, Homo sapien
tctctggggtgaattctcttcccca

SEQ ID NO: 1529884 - DNA, 25 bp, Homo sapien
cttctctggggtgaattctcttccc

SEQ ID NO: 1529885 - DNA, 25 bp, Homo sapien
ttacaaaaatgctacgatgtagtct

SEQ ID NO: 1529886 - DNA, 25 bp, Homo sapien
aaaatgctacgatgtagtctttgcc

SEQ ID NO: 1529887 - DNA, 25 bp, Homo sapien
acaaaaatgctacgatgtagtcttt

SEQ ID NO: 1529888 - DNA, 25 bp, Homo sapien
tacaaaaatgctacgatgtagtctt

SEQ ID NO: 1529889 - DNA, 25 bp, Homo sapien
tctgtagggcctggatttgcgcttt

SEQ ID NO: 1529890 - DNA, 25 bp, Homo sapien
tagggcctggatttgcgctttgaag

SEQ ID NO: 1529891 - DNA, 25 bp, Homo sapien
atctgtagggcctggatttgcgctt

SEQ ID NO: 1529892 - DNA, 25 bp, Homo sapien
tgtagggcctggatttgcgctttga

SEQ ID NO: 1529893 - DNA, 25 bp, Homo sapien
tggtatttccccagcagatggctaa

SEQ ID NO: 1529894 - DNA, 25 bp, Homo sapien
gagcttttgaaataagcgtgccata

SEQ ID NO: 1529895 - DNA, 25 bp, Homo sapien
tgcttgtcatgcgtcctcggtgcct

SEQ ID NO: 1529896 - DNA, 25 bp, Homo sapien
gccatataaattcaaggtgtttggg

SEQ ID NO: 1529897 - DNA, 25 bp, Homo sapien
agtcagtgggaccagtgttcttcca

SEQ ID NO: 1529898 - DNA, 25 bp, Homo sapien
tcagtgggaccagtgttcttccagg

SEQ ID NO: 1529899 - DNA, 25 bp, Homo sapien
gcagtcagtgggaccagtgttcttc

SEQ ID NO: 1529900 - DNA, 25 bp, Homo sapien
tgggaccagtgttcttccaggagtg

SEQ ID NO: 1529901 - DNA, 25 bp, Homo sapien
tcacgtatgatattgggcacgcaaa

SEQ ID NO: 1529902 - DNA, 25 bp, Homo sapien
gatgtgcattaaaggccctggcggt

SEQ ID NO: 1529903 - DNA, 25 bp, Homo sapien
caaatgtgacgtgatgcccatggac

SEQ ID NO: 1529904 - DNA, 25 bp, Homo sapien
ccatggactcttgagggtaattcga

SEQ ID NO: 1529905 - DNA, 25 bp, Homo sapien
atcttggtagttgggttcagtttct

SEQ ID NO: 1529906 - DNA, 25 bp, Homo sapien
tatcttggtagttgggttcagtttc

SEQ ID NO: 1529907 - DNA, 25 bp, Homo sapien
tcttggtagttgggttcagtttctc

SEQ ID NO: 1529908 - DNA, 25 bp, Homo sapien
gaagccaggaaggatgtttaagaag

SEQ ID NO: 1529909 - DNA, 25 bp, Homo sapien
tgtccttcaagacaccagcttgaag

SEQ ID NO: 1529910 - DNA, 25 bp, Homo sapien
gagctggcagagaagtgacaaagcc

SEQ ID NO: 1529911 - DNA, 25 bp, Homo sapien
tttaagaagtaggatgtgggggagc

SEQ ID NO: 1529912 - DNA, 25 bp, Homo sapien
tgatttgtcacttgtacctgcttct

SEQ ID NO: 1529913 - DNA, 25 bp, Homo sapien
ctctttgatttgtcacttgtacctg

SEQ ID NO: 1529914 - DNA, 25 bp, Homo sapien
gtcacttgtacctgcttcttcgtaa

SEQ ID NO: 1529915 - DNA, 25 bp, Homo sapien
acttgtacctgcttcttcgtaatcc

SEQ ID NO: 1529916 - DNA, 25 bp, Homo sapien
aacttggggctgataagtgcaaggc

SEQ ID NO: 1529917 - DNA, 25 bp, Homo sapien
gggatggattccctctagctgcatc

SEQ ID NO: 1529918 - DNA, 25 bp, Homo sapien
gatggattccctctagctgcatctc

SEQ ID NO: 1529919 - DNA, 25 bp, Homo sapien
taagtgcaaggctgacttctttcct

SEQ ID NO: 1529920 - DNA, 25 bp, Homo sapien
gtctgagcatgcagcaacccacagt

SEQ ID NO: 1529921 - DNA, 25 bp, Homo sapien
cccacagtggaattcagagatcttg

SEQ ID NO: 1529922 - DNA, 25 bp, Homo sapien
ttcaagctcatctaaggcaaaccgg

SEQ ID NO: 1529923 - DNA, 25 bp, Homo sapien
tgagctgccttggaaccaccaatgt

SEQ ID NO: 1529924 - DNA, 25 bp, Homo sapien
ctgctatgtccccggatggtgcaca

SEQ ID NO: 1529925 - DNA, 25 bp, Homo sapien
tatgtccccggatggtgcacaccag

SEQ ID NO: 1529926 - DNA, 25 bp, Homo sapien
tgtccccggatggtgcacaccagtc

SEQ ID NO: 1529927 - DNA, 25 bp, Homo sapien
cggatggtgcacaccagtctctggc

SEQ ID NO: 1529928 - DNA, 25 bp, Homo sapien
atacgctcagatgggcggccacgat

SEQ ID NO: 1529929 - DNA, 25 bp, Homo sapien
tggtgttggtgaactctagagctgt

SEQ ID NO: 1529930 - DNA, 25 bp, Homo sapien
cggccacgattgtggctatggagcc

SEQ ID NO: 1529931 - DNA, 25 bp, Homo sapien
cacgattgtggctatggagccggaa

SEQ ID NO: 1529932 - DNA, 25 bp, Homo sapien
gatgagatgtggggaaattgctaac

SEQ ID NO: 1529933 - DNA, 25 bp, Homo sapien
tcacaggggtgctgaggggggcggg

SEQ ID NO: 1529934 - DNA, 25 bp, Homo sapien
gcgggagggtccaggaatccaggta

SEQ ID NO: 1529935 - DNA, 25 bp, Homo sapien
tccaggaatccaggtagcaacaggc

SEQ ID NO: 1529936 - DNA, 25 bp, Homo sapien
aggaatccaggtagcaacaggcaaa

SEQ ID NO: 1529937 - DNA, 25 bp, Homo sapien
tccatggagattacaattgatgacc

SEQ ID NO: 1529938 - DNA, 25 bp, Homo sapien
gaacttgctccctgatatagcccag

SEQ ID NO: 1529939 - DNA, 25 bp, Homo sapien
gggaagtctggtgttcttactgcca

SEQ ID NO: 1529940 - DNA, 25 bp, Homo sapien
tttgcaaagctctgacagaatcagg

SEQ ID NO: 1529941 - DNA, 25 bp, Homo sapien
ttacagaagtttaccacctctcctc

SEQ ID NO: 1529942 - DNA, 25 bp, Homo sapien
ttcacgagataatttcccagacaca

SEQ ID NO: 1529943 - DNA, 25 bp, Homo sapien
gcttgaattcacgagataatttccc

SEQ ID NO: 1529944 - DNA, 25 bp, Homo sapien
tcctctctaattgcttgaattcacg

SEQ ID NO: 1529945 - DNA, 25 bp, Homo sapien
tgcaggggttgggtaaaagactgtc

SEQ ID NO: 1529946 - DNA, 25 bp, Homo sapien
tatgcaggggttgggtaaaagactg

SEQ ID NO: 1529947 - DNA, 25 bp, Homo sapien
taaaagactgtcctcaccaacctca

SEQ ID NO: 1529948 - DNA, 25 bp, Homo sapien
gttgggtaaaagactgtcctcacca

SEQ ID NO: 1529949 - DNA, 25 bp, Homo sapien
aagaaattgcacaggaagacaacaa

SEQ ID NO: 1529950 - DNA, 25 bp, Homo sapien
aattgcacaggaagacaacaagttc

SEQ ID NO: 1529951 - DNA, 25 bp, Homo sapien
ccaaagaaattgcacaggaagacaa

SEQ ID NO: 1529952 - DNA, 25 bp, Homo sapien
gaaattgcacaggaagacaacaagt

SEQ ID NO: 1529953 - DNA, 25 bp, Homo sapien
gagtcctaggttcaccttcactcct

SEQ ID NO: 1529954 - DNA, 25 bp, Homo sapien
agtcctaggttcaccttcactcctg

SEQ ID NO: 1529955 - DNA, 25 bp, Homo sapien
catcgcatactcccagccagcactg

SEQ ID NO: 1529956 - DNA, 25 bp, Homo sapien
tactcccagccagcactggtgttac

SEQ ID NO: 1529957 - DNA, 25 bp, Homo sapien
tcgcatactcccagccagcactggt

SEQ ID NO: 1529958 - DNA, 25 bp, Homo sapien
gcatactcccagccagcactggtgt

SEQ ID NO: 1529959 - DNA, 25 bp, Homo sapien
cccacgaggacttgctggagttttt

SEQ ID NO: 1529960 - DNA, 25 bp, Homo sapien
cagagcccacgaggacttgctggag

SEQ ID NO: 1529961 - DNA, 25 bp, Homo sapien
gagcccacgaggacttgctggagtt

SEQ ID NO: 1529962 - DNA, 25 bp, Homo sapien
gcccacgaggacttgctggagtttt

SEQ ID NO: 1529963 - DNA, 25 bp, Homo sapien
tcttaaaccttcacaggtggctaca

SEQ ID NO: 1529964 - DNA, 25 bp, Homo sapien
cactggcacacaaagcttcagggat

SEQ ID NO: 1529965 - DNA, 25 bp, Homo sapien
ttagcctggcatagacaacaaggcc

SEQ ID NO: 1529966 - DNA, 25 bp, Homo sapien
aaactggtgctcatagatgctgaca

SEQ ID NO: 1529967 - DNA, 25 bp, Homo sapien
tcaagccatctgaacggaagtcaag

SEQ ID NO: 1529968 - DNA, 25 bp, Homo sapien
catctgaacggaagtcaaggatttc

SEQ ID NO: 1529969 - DNA, 25 bp, Homo sapien
tgaacggaagtcaaggatttctgca

SEQ ID NO: 1529970 - DNA, 25 bp, Homo sapien
cagcatcgtaaacaagatggaaggg

SEQ ID NO: 1529971 - DNA, 25 bp, Homo sapien
tgtgggttctcaatgcagtgaattc

SEQ ID NO: 1529972 - DNA, 25 bp, Homo sapien
gttctcaatgcagtgaattctatag

SEQ ID NO: 1529973 - DNA, 25 bp, Homo sapien
tgggttctcaatgcagtgaattcta

SEQ ID NO: 1529974 - DNA, 25 bp, Homo sapien
gctgtgggttctcaatgcagtgaat

SEQ ID NO: 1529975 - DNA, 25 bp, Homo sapien
ttcctacagctacccatctaaaagc

SEQ ID NO: 1529976 - DNA, 25 bp, Homo sapien
agggactgtttactcaatccaggct

SEQ ID NO: 1529977 - DNA, 25 bp, Homo sapien
gactgtttactcaatccaggcttca

SEQ ID NO: 1529978 - DNA, 25 bp, Homo sapien
cttcaggctgtttcctacagctacc

SEQ ID NO: 1529979 - DNA, 25 bp, Homo sapien
tctctgccaccttcaagggaggctg

SEQ ID NO: 1529980 - DNA, 25 bp, Homo sapien
tgattagtttctgggcacgggaggg

SEQ ID NO: 1529981 - DNA, 25 bp, Homo sapien
tttctcctagatgtgtctgatactg

SEQ ID NO: 1529982 - DNA, 25 bp, Homo sapien
caccttcaagggaggctgcagtccc

SEQ ID NO: 1529983 - DNA, 25 bp, Homo sapien
taaatggtttatgcagattggtctt

SEQ ID NO: 1529984 - DNA, 25 bp, Homo sapien
gcatgctgtctttggattaaatggt

SEQ ID NO: 1529985 - DNA, 25 bp, Homo sapien
gattggtcttggttcttctgtacgt

SEQ ID NO: 1529986 - DNA, 25 bp, Homo sapien
tccaagttcgcaatccaagtgcatg

SEQ ID NO: 1529987 - DNA, 25 bp, Homo sapien
atacttgaaaagtgatcaaatagag

SEQ ID NO: 1529988 - DNA, 25 bp, Homo sapien
cattaatacttgaaaagtgatcaaa

SEQ ID NO: 1529989 - DNA, 25 bp, Homo sapien
ttaatacttgaaaagtgatcaaata

SEQ ID NO: 1529990 - DNA, 25 bp, Homo sapien
taatacttgaaaagtgatcaaatag

SEQ ID NO: 1529991 - DNA, 25 bp, Homo sapien
ctggggtccccgtgctatcccttgg

SEQ ID NO: 1529992 - DNA, 25 bp, Homo sapien
cgtgctatcccttggataaggatat

SEQ ID NO: 1529993 - DNA, 25 bp, Homo sapien
gcttctctgaacctcccagaattcc

SEQ ID NO: 1529994 - DNA, 25 bp, Homo sapien
ggtccccgtgctatcccttggataa

SEQ ID NO: 1529995 - DNA, 25 bp, Homo sapien
tggtttcccgataacggatctggtg

SEQ ID NO: 1529996 - DNA, 25 bp, Homo sapien
ctggtgacttgcacccagcgcagac

SEQ ID NO: 1529997 - DNA, 25 bp, Homo sapien
gatctggtgacttgcacccagcgca

SEQ ID NO: 1529998 - DNA, 25 bp, Homo sapien
tcccgataacggatctggtgacttg

SEQ ID NO: 1529999 - DNA, 25 bp, Homo sapien
cctttgtaatatgagtgccttgtcc

SEQ ID NO: 1530000 - DNA, 25 bp, Homo sapien
tgtccacttgccactgatcgactag

SEQ ID NO: 1530001 - DNA, 25 bp, Homo sapien
tgaggtccatgtgaatctcccagca

SEQ ID NO: 1530002 - DNA, 25 bp, Homo sapien
tattcatggtgtgaatcctttgtaa

SEQ ID NO: 1530003 - DNA, 25 bp, Homo sapien
cagtattcttttgtgagagaacatg

SEQ ID NO: 1530004 - DNA, 25 bp, Homo sapien
ttccaggatcatctgcattaaaagt

SEQ ID NO: 1530005 - DNA, 25 bp, Homo sapien
gcattaaaagtttgctcagtattct

SEQ ID NO: 1530006 - DNA, 25 bp, Homo sapien
ggcttgggcgttcatttggattttc

SEQ ID NO: 1530007 - DNA, 25 bp, Homo sapien
agtggtttggattttgttcaattat

SEQ ID NO: 1530008 - DNA, 25 bp, Homo sapien
gtggtttggattttgttcaattatc

SEQ ID NO: 1530009 - DNA, 25 bp, Homo sapien
tgggatttaacaggttaacttggca

SEQ ID NO: 1530010 - DNA, 25 bp, Homo sapien
gattctatttgttgataactcatca

SEQ ID NO: 1530011 - DNA, 25 bp, Homo sapien
gccttggagggcaaaatatgatagt

SEQ ID NO: 1530012 - DNA, 25 bp, Homo sapien
ttggcactggtcactggccttggag

SEQ ID NO: 1530013 - DNA, 25 bp, Homo sapien
gactgaggtgagagtatttcatcgg

SEQ ID NO: 1530014 - DNA, 25 bp, Homo sapien
gccattctcaaaacaatgcaggatt

SEQ ID NO: 1530015 - DNA, 25 bp, Homo sapien
ttctccctggactgaaagtctctgc

SEQ ID NO: 1530016 - DNA, 25 bp, Homo sapien
atttcatcggatgagtctctctccc

SEQ ID NO: 1530017 - DNA, 25 bp, Homo sapien
ctgacaagtccattgtaaatcaaag

SEQ ID NO: 1530018 - DNA, 25 bp, Homo sapien
gcgagatgaatgttctgacgggtca

SEQ ID NO: 1530019 - DNA, 25 bp, Homo sapien
cttccaagccttgaaacaacttgct

SEQ ID NO: 1530020 - DNA, 25 bp, Homo sapien
tgtctaatcgggctctgacaagtcc

SEQ ID NO: 1530021 - DNA, 25 bp, Homo sapien
tgtgaagcataatcatttgtcagct

SEQ ID NO: 1530022 - DNA, 25 bp, Homo sapien
tcagcttaggtgaagcccctgtgcc

SEQ ID NO: 1530023 - DNA, 25 bp, Homo sapien
tgaagtattgactgagtccgggtgc

SEQ ID NO: 1530024 - DNA, 25 bp, Homo sapien
tgcaagccacggtgctgtgaagtat

SEQ ID NO: 1530025 - DNA, 25 bp, Homo sapien
gaacatgacctttaaattgtatcag

SEQ ID NO: 1530026 - DNA, 25 bp, Homo sapien
ctcgtcaaaactttggagggctctg

SEQ ID NO: 1530027 - DNA, 25 bp, Homo sapien
tcctttccgcctgtagggtgtgagg

SEQ ID NO: 1530028 - DNA, 25 bp, Homo sapien
tggagggcctctcgtcaaaactttg

SEQ ID NO: 1530029 - DNA, 25 bp, Homo sapien
tggtccgaatgccttccttagcacc

SEQ ID NO: 1530030 - DNA, 25 bp, Homo sapien
tctgggtccaaatttgggcttcctg

SEQ ID NO: 1530031 - DNA, 25 bp, Homo sapien
gaatgccttccttagcacccacaag

SEQ ID NO: 1530032 - DNA, 25 bp, Homo sapien
taacaattgtctcacagtgggcatg

SEQ ID NO: 1530033 - DNA, 25 bp, Homo sapien
caggcagttgaacgatatggacagg

SEQ ID NO: 1530034 - DNA, 25 bp, Homo sapien
tagatggtgtttgtcactgggccgc

SEQ ID NO: 1530035 - DNA, 25 bp, Homo sapien
tatggacaggtgaaggctccgtggg

SEQ ID NO: 1530036 - DNA, 25 bp, Homo sapien
gccgcggagctgtggatgttcgtca

SEQ ID NO: 1530037 - DNA, 25 bp, Homo sapien
aaatgggaacactctggggatacaa

SEQ ID NO: 1530038 - DNA, 25 bp, Homo sapien
gaacactctggggatacaaggtcat

SEQ ID NO: 1530039 - DNA, 25 bp, Homo sapien
aatgggaacactctggggatacaag

SEQ ID NO: 1530040 - DNA, 25 bp, Homo sapien
tgggaacactctggggatacaaggt

SEQ ID NO: 1530041 - DNA, 25 bp, Homo sapien
aaccagcagactcccatgcatgcgg

SEQ ID NO: 1530042 - DNA, 25 bp, Homo sapien
ttcaccagagcgcactggaaaagca

SEQ ID NO: 1530043 - DNA, 25 bp, Homo sapien
ggaggctctgtgtatccaaccagca

SEQ ID NO: 1530044 - DNA, 25 bp, Homo sapien
aagtgacgcaatgcatgctgccggg

SEQ ID NO: 1530045 - DNA, 25 bp, Homo sapien
gagtggtcagtacatccctgatgtg

SEQ ID NO: 1530046 - DNA, 25 bp, Homo sapien
catgcctgacaggtatatggatcca

SEQ ID NO: 1530047 - DNA, 25 bp, Homo sapien
tcttaatgtcaaaatacctgcagct

SEQ ID NO: 1530048 - DNA, 25 bp, Homo sapien
tggtgtggtccagcataagcagagt

SEQ ID NO: 1530049 - DNA, 25 bp, Homo sapien
cgagttgagtaatgcctgctggtgc

SEQ ID NO: 1530050 - DNA, 25 bp, Homo sapien
ggcaccacctacgtaaccacaggaa

SEQ ID NO: 1530051 - DNA, 25 bp, Homo sapien
ctgtctctgacgtaatgctgcctgg

SEQ ID NO: 1530052 - DNA, 25 bp, Homo sapien
tcctttgtgccagacaaatgaatgt

SEQ ID NO: 1530053 - DNA, 25 bp, Homo sapien
ccacgagtgatgcccactggatctg

SEQ ID NO: 1530054 - DNA, 25 bp, Homo sapien
tccacgagtgatgcccactggatct

SEQ ID NO: 1530055 - DNA, 25 bp, Homo sapien
acgagtgatgcccactggatctggc

SEQ ID NO: 1530056 - DNA, 25 bp, Homo sapien
cacgagtgatgcccactggatctgg

SEQ ID NO: 1530057 - DNA, 25 bp, Homo sapien
ttattgactcggatgcttgggtggt

SEQ ID NO: 1530058 - DNA, 25 bp, Homo sapien
tgcttgggtggtcagccacggtggc

SEQ ID NO: 1530059 - DNA, 25 bp, Homo sapien
tcagtgaaagacttattgactcgga

SEQ ID NO: 1530060 - DNA, 25 bp, Homo sapien
tgtgcggggcatcaggtctttctca

SEQ ID NO: 1530061 - DNA, 25 bp, Homo sapien
tagtaagtgcaaggagaagacaaag

SEQ ID NO: 1530062 - DNA, 25 bp, Homo sapien
ttagtaagtgcaaggagaagacaaa

SEQ ID NO: 1530063 - DNA, 25 bp, Homo sapien
tccagaaaccaaagccgttggatga

SEQ ID NO: 1530064 - DNA, 25 bp, Homo sapien
catcctatgctttgctgcaggagca

SEQ ID NO: 1530065 - DNA, 25 bp, Homo sapien
tgagccacgcgacttcctgtttttg

SEQ ID NO: 1530066 - DNA, 25 bp, Homo sapien
ggtgcatatagggtcagcacatcct

SEQ ID NO: 1530067 - DNA, 25 bp, Homo sapien
aatacggcgtgttaccatatggcaa

SEQ ID NO: 1530068 - DNA, 25 bp, Homo sapien
cagaagcaagttggagcctggaaga

SEQ ID NO: 1530069 - DNA, 25 bp, Homo sapien
tcccctgcaaatggcggtaatgatg

SEQ ID NO: 1530070 - DNA, 25 bp, Homo sapien
tgacccatgtggtgtcttaggccag

SEQ ID NO: 1530071 - DNA, 25 bp, Homo sapien
ctcatgtccgtcactcctttataga

SEQ ID NO: 1530072 - DNA, 25 bp, Homo sapien
tcactcctttatagacagcagatct

SEQ ID NO: 1530073 - DNA, 25 bp, Homo sapien
tagacagcagatcttagagaatttc

SEQ ID NO: 1530074 - DNA, 25 bp, Homo sapien
cctttatagacagcagatcttagag

SEQ ID NO: 1530075 - DNA, 25 bp, Homo sapien
ctgggtctgggtcggggactgcact

SEQ ID NO: 1530076 - DNA, 25 bp, Homo sapien
gggtctgggtcggggactgcactgg

SEQ ID NO: 1530077 - DNA, 25 bp, Homo sapien
ggtctgggtcggggactgcactgga

SEQ ID NO: 1530078 - DNA, 25 bp, Homo sapien
tgggtctgggtcggggactgcactg

SEQ ID NO: 1530079 - DNA, 25 bp, Homo sapien
tttatagcagctaacgggttcgaga

SEQ ID NO: 1530080 - DNA, 25 bp, Homo sapien
gaggacctcattaccatccggaggg

SEQ ID NO: 1530081 - DNA, 25 bp, Homo sapien
gctaacgggttcgagaggacctcat

SEQ ID NO: 1530082 - DNA, 25 bp, Homo sapien
tcgagaggacctcattaccatccgg

SEQ ID NO: 1530083 - DNA, 25 bp, Homo sapien
gccctgaggacgaaggctgcttaaa

SEQ ID NO: 1530084 - DNA, 25 bp, Homo sapien
tgtagagatcataacttctgggacc

SEQ ID NO: 1530085 - DNA, 25 bp, Homo sapien
tagcaaagctatcgctgattccagc

SEQ ID NO: 1530086 - DNA, 25 bp, Homo sapien
tggaaaacttaaatagagtgagccc

SEQ ID NO: 1530087 - DNA, 25 bp, Homo sapien
gcacgttggagccatgcataggatt

SEQ ID NO: 1530088 - DNA, 25 bp, Homo sapien
acgttggagccatgcataggattgc

SEQ ID NO: 1530089 - DNA, 25 bp, Homo sapien
cacgttggagccatgcataggattg

SEQ ID NO: 1530090 - DNA, 25 bp, Homo sapien
ctgcacgttggagccatgcatagga

SEQ ID NO: 1530091 - DNA, 25 bp, Homo sapien
tttcatatggtgaggatgagtcttc

SEQ ID NO: 1530092 - DNA, 25 bp, Homo sapien
gagtcactgcagtagctttgttttt

SEQ ID NO: 1530093 - DNA, 25 bp, Homo sapien
attgtaatgcatgggagagtcactg

SEQ ID NO: 1530094 - DNA, 25 bp, Homo sapien
gacatagctgcagttaattgccaag

SEQ ID NO: 1530095 - DNA, 25 bp, Homo sapien
cctctgggtcctgtgtagctagtca

SEQ ID NO: 1530096 - DNA, 25 bp, Homo sapien
gtggagcggcacatccctctgggtc

SEQ ID NO: 1530097 - DNA, 25 bp, Homo sapien
aggaagggactagtggctcctcggg

SEQ ID NO: 1530098 - DNA, 25 bp, Homo sapien
aagatgcggcgggaaccaggtggag

SEQ ID NO: 1530099 - DNA, 25 bp, Homo sapien
tatgtcatccatggacctcaaggtt

SEQ ID NO: 1530100 - DNA, 25 bp, Homo sapien
ttctgaaatccatcattccgctatg

SEQ ID NO: 1530101 - DNA, 25 bp, Homo sapien
caggtgtgttgaaggcctctccagg

SEQ ID NO: 1530102 - DNA, 25 bp, Homo sapien
caaggtttataggagatgctcggcc

SEQ ID NO: 1530103 - DNA, 25 bp, Homo sapien
aaatttaaagagtgggaagcacctg

SEQ ID NO: 1530104 - DNA, 25 bp, Homo sapien
aatttaaagagtgggaagcacctgc

SEQ ID NO: 1530105 - DNA, 25 bp, Homo sapien
tttactgcagggctgttgatgggaa

SEQ ID NO: 1530106 - DNA, 25 bp, Homo sapien
agagggaatggcttgcttttcctca

SEQ ID NO: 1530107 - DNA, 25 bp, Homo sapien
aaatatttgtctctgaagccctgaa

SEQ ID NO: 1530108 - DNA, 25 bp, Homo sapien
tcctgatagagagggaatggcttgc

SEQ ID NO: 1530109 - DNA, 25 bp, Homo sapien
ccataactgcctgaaatagaccgtc

SEQ ID NO: 1530110 - DNA, 25 bp, Homo sapien
cacatagcttccttatcggttctgg

SEQ ID NO: 1530111 - DNA, 25 bp, Homo sapien
gttctggagtcgtaacagcagtgtg

SEQ ID NO: 1530112 - DNA, 25 bp, Homo sapien
ggtcagaaggcgacctgagctcata

SEQ ID NO: 1530113 - DNA, 25 bp, Homo sapien
cagtacgtctttaaaagtgcctggg

SEQ ID NO: 1530114 - DNA, 25 bp, Homo sapien
ttctaacaacaaagcgtgaccacag

SEQ ID NO: 1530115 - DNA, 25 bp, Homo sapien
tctcattgcgtgatgcgtgaaggcc

SEQ ID NO: 1530116 - DNA, 25 bp, Homo sapien
taaaaccgttgaccaagcacaatgt

SEQ ID NO: 1530117 - DNA, 25 bp, Homo sapien
tgtttgtgtcacttgttaaagatcc

SEQ ID NO: 1530118 - DNA, 25 bp, Homo sapien
ttgtttgtgtcacttgttaaagatc

SEQ ID NO: 1530119 - DNA, 25 bp, Homo sapien
tgcctggagagtctcaagggagtgg

SEQ ID NO: 1530120 - DNA, 25 bp, Homo sapien
tggggggtgcctggagagtctcaag

SEQ ID NO: 1530121 - DNA, 25 bp, Homo sapien
gggtgcctggagagtctcaagggag

SEQ ID NO: 1530122 - DNA, 25 bp, Homo sapien
ttggggggtgcctggagagtctcaa

SEQ ID NO: 1530123 - DNA, 25 bp, Homo sapien
ttaatgacagcagccgactgcttac

SEQ ID NO: 1530124 - DNA, 25 bp, Homo sapien
attgtcttggcctttttgcttaatg

SEQ ID NO: 1530125 - DNA, 25 bp, Homo sapien
gacagcagccgactgcttacagcag

SEQ ID NO: 1530126 - DNA, 25 bp, Homo sapien
ttgtcttggcctttttgcttaatga

SEQ ID NO: 1530127 - DNA, 25 bp, Homo sapien
tgtagttcgccaaaagtcagtaagt

SEQ ID NO: 1530128 - DNA, 25 bp, Homo sapien
tgagtagaaatgcaggtaggaccag

SEQ ID NO: 1530129 - DNA, 25 bp, Homo sapien
acctttgtagttcgccaaaagtcag

SEQ ID NO: 1530130 - DNA, 25 bp, Homo sapien
atttgtttcagtccaacgatgagta

SEQ ID NO: 1530131 - DNA, 25 bp, Homo sapien
ttggttttactggaaatctgtattc

SEQ ID NO: 1530132 - DNA, 25 bp, Homo sapien
atctgtattcaaaagctctggtttt

SEQ ID NO: 1530133 - DNA, 25 bp, Homo sapien
tggttttactggaaatctgtattca

SEQ ID NO: 1530134 - DNA, 25 bp, Homo sapien
gaaatctgtattcaaaagctctggt

SEQ ID NO: 1530135 - DNA, 25 bp, Homo sapien
ctccatgaagcagccatacttgggc

SEQ ID NO: 1530136 - DNA, 25 bp, Homo sapien
ccatgaagcagccatacttgggctc

SEQ ID NO: 1530137 - DNA, 25 bp, Homo sapien
tgttggtgctaggaccttgctcctc

SEQ ID NO: 1530138 - DNA, 25 bp, Homo sapien
tggtgctaggaccttgctcctctga

SEQ ID NO: 1530139 - DNA, 25 bp, Homo sapien
gatgctgaagaaccctctcctgaga

SEQ ID NO: 1530140 - DNA, 25 bp, Homo sapien
ccaggtgcagaaaaaccggtcctca

SEQ ID NO: 1530141 - DNA, 25 bp, Homo sapien
tagacgtctagaaggaccaccaggt

SEQ ID NO: 1530142 - DNA, 25 bp, Homo sapien
catgggcctgcatcggaactttgac

SEQ ID NO: 1530143 - DNA, 25 bp, Homo sapien
aggatttgcgggtactttggtggca

SEQ ID NO: 1530144 - DNA, 25 bp, Homo sapien
tgaaggatttgcgggtactttggtg

SEQ ID NO: 1530145 - DNA, 25 bp, Homo sapien
ttgcgggtactttggtggcagtccc

SEQ ID NO: 1530146 - DNA, 25 bp, Homo sapien
cagtccctgaatggggtgcctggag

SEQ ID NO: 1530147 - DNA, 25 bp, Homo sapien
taatgacactatatggacctctgca

SEQ ID NO: 1530148 - DNA, 25 bp, Homo sapien
cacggatttgcacgcaaacagatac

SEQ ID NO: 1530149 - DNA, 25 bp, Homo sapien
ttcaaatacacgagatgcaagcact

SEQ ID NO: 1530150 - DNA, 25 bp, Homo sapien
tggacctctgcattcttaaacagga

SEQ ID NO: 1530151 - DNA, 25 bp, Homo sapien
tgtagtaataagtgtcatcaaaagc

SEQ ID NO: 1530152 - DNA, 25 bp, Homo sapien
gtttctcttaaatgattggagactg

SEQ ID NO: 1530153 - DNA, 25 bp, Homo sapien
tgcgtgctgttaccaactcgcatgt

SEQ ID NO: 1530154 - DNA, 25 bp, Homo sapien
aaagcactgaaagtgttggtttctc

SEQ ID NO: 1530155 - DNA, 25 bp, Homo sapien
tttggccatagtcccccttctggct

SEQ ID NO: 1530156 - DNA, 25 bp, Homo sapien
ggctgtggtattttggccatagtcc

SEQ ID NO: 1530157 - DNA, 25 bp, Homo sapien
tattttggccatagtcccccttctg

SEQ ID NO: 1530158 - DNA, 25 bp, Homo sapien
ctgtggtattttggccatagtcccc

SEQ ID NO: 1530159 - DNA, 25 bp, Homo sapien
tctttccattttctctggtgggagt

SEQ ID NO: 1530160 - DNA, 25 bp, Homo sapien
ttacgtctttccattttctctggtg

SEQ ID NO: 1530161 - DNA, 25 bp, Homo sapien
cattttctctggtgggagtgtaggg

SEQ ID NO: 1530162 - DNA, 25 bp, Homo sapien
tccattttctctggtgggagtgtag

SEQ ID NO: 1530163 - DNA, 25 bp, Homo sapien
cacagctgcattcgtctgtccccac

SEQ ID NO: 1530164 - DNA, 25 bp, Homo sapien
ccacagctgcattcgtctgtcccca

SEQ ID NO: 1530165 - DNA, 25 bp, Homo sapien
gctgcattcgtctgtccccacaacc

SEQ ID NO: 1530166 - DNA, 25 bp, Homo sapien
gccacagctgcattcgtctgtcccc

SEQ ID NO: 1530167 - DNA, 25 bp, Homo sapien
tgtaaatagcagtctcagtgcaagg

SEQ ID NO: 1530168 - DNA, 25 bp, Homo sapien
gcttttgcccagcataacaactcag

SEQ ID NO: 1530169 - DNA, 25 bp, Homo sapien
tatcggactccttaatctgtcaggc

SEQ ID NO: 1530170 - DNA, 25 bp, Homo sapien
aaccatgagagaggttgcagacccc

SEQ ID NO: 1530171 - DNA, 25 bp, Homo sapien
agcttgggtcaacagagcatcgaag

SEQ ID NO: 1530172 - DNA, 25 bp, Homo sapien
ctctcaacccagcttgggtcaacag

SEQ ID NO: 1530173 - DNA, 25 bp, Homo sapien
ttgggtcaacagagcatcgaaggcc

SEQ ID NO: 1530174 - DNA, 25 bp, Homo sapien
acagagcatcgaaggccgcccagcg

SEQ ID NO: 1530175 - DNA, 25 bp, Homo sapien
aaaatggcaaacccttgccaaagct

SEQ ID NO: 1530176 - DNA, 25 bp, Homo sapien
gaaaatggcaaacccttgccaaagc

SEQ ID NO: 1530177 - DNA, 25 bp, Homo sapien
gagcctggccctgcaggctgcccat

SEQ ID NO: 1530178 - DNA, 25 bp, Homo sapien
gccccaggagcctggccctgcaggc

SEQ ID NO: 1530179 - DNA, 25 bp, Homo sapien
aggagcctggccctgcaggctgccc

SEQ ID NO: 1530180 - DNA, 25 bp, Homo sapien
cagccttccctggccctccccctgc

SEQ ID NO: 1530181 - DNA, 25 bp, Homo sapien
taagcctatagaactccgaaactgc

SEQ ID NO: 1530182 - DNA, 25 bp, Homo sapien
ggacgtacgtcatccctgccaaaaa

SEQ ID NO: 1530183 - DNA, 25 bp, Homo sapien
tgctgtatagtaacaagtttgtgag

SEQ ID NO: 1530184 - DNA, 25 bp, Homo sapien
agcacgccacctttttaagcctata

SEQ ID NO: 1530185 - DNA, 25 bp, Homo sapien
agcacattttctcttcatgatagat

SEQ ID NO: 1530186 - DNA, 25 bp, Homo sapien
tttctcttcatgatagatggtgtac

SEQ ID NO: 1530187 - DNA, 25 bp, Homo sapien
cattttctcttcatgatagatggtg

SEQ ID NO: 1530188 - DNA, 25 bp, Homo sapien
gagctgggagtggaaagcacatttt

SEQ ID NO: 1530189 - DNA, 25 bp, Homo sapien
ttatcttctgggtattctcctgagc

SEQ ID NO: 1530190 - DNA, 25 bp, Homo sapien
tcacatgtccatattatcttctggg

SEQ ID NO: 1530191 - DNA, 25 bp, Homo sapien
atcttctgggtattctcctgagctc

SEQ ID NO: 1530192 - DNA, 25 bp, Homo sapien
acatgtccatattatcttctgggta

SEQ ID NO: 1530193 - DNA, 25 bp, Homo sapien
tgtgggattccagcttagcaagacc

SEQ ID NO: 1530194 - DNA, 25 bp, Homo sapien
atgtgggattccagcttagcaagac

SEQ ID NO: 1530195 - DNA, 25 bp, Homo sapien
gggattccagcttagcaagacccca

SEQ ID NO: 1530196 - DNA, 25 bp, Homo sapien
agaccccataaggggattcagagca

SEQ ID NO: 1530197 - DNA, 25 bp, Homo sapien
gcagcatagcaagattgggtctctc

SEQ ID NO: 1530198 - DNA, 25 bp, Homo sapien
gcctcatgcgaccttgtttttgcca

SEQ ID NO: 1530199 - DNA, 25 bp, Homo sapien
tgaccatggcttacaaggcctcatg

SEQ ID NO: 1530200 - DNA, 25 bp, Homo sapien
gaacgtgaatcttgggcttttgcac

SEQ ID NO: 1530201 - DNA, 25 bp, Homo sapien
tgtgcttgcaacacatgaacgtgaa

SEQ ID NO: 1530202 - DNA, 25 bp, Homo sapien
ccgtctgtcaagcttcttgttttct

SEQ ID NO: 1530203 - DNA, 25 bp, Homo sapien
gggtagtggttagagtatagatttg

SEQ ID NO: 1530204 - DNA, 25 bp, Homo sapien
cctgccgtctgtcaagcttcttgtt

SEQ ID NO: 1530205 - DNA, 25 bp, Homo sapien
gtagtggttagagtatagatttggg

SEQ ID NO: 1530206 - DNA, 25 bp, Homo sapien
agggtagacacctgaagcactctgc

SEQ ID NO: 1530207 - DNA, 25 bp, Homo sapien
cagggtagacacctgaagcactctg

SEQ ID NO: 1530208 - DNA, 25 bp, Homo sapien
gggtagacacctgaagcactctgct

SEQ ID NO: 1530209 - DNA, 25 bp, Homo sapien
tcgggatgcagggatgaacaatagc

SEQ ID NO: 1530210 - DNA, 25 bp, Homo sapien
caataccagattgctgatagtgcct

SEQ ID NO: 1530211 - DNA, 25 bp, Homo sapien
caaacaaagttgtgcggctgagtga

SEQ ID NO: 1530212 - DNA, 25 bp, Homo sapien
gggcctgtacagatcaataccagat

SEQ ID NO: 1530213 - DNA, 25 bp, Homo sapien
caatgcagacgtgtgatgtggccct

SEQ ID NO: 1530214 - DNA, 25 bp, Homo sapien
gtccagatgatactgtagggagact

SEQ ID NO: 1530215 - DNA, 25 bp, Homo sapien
ttctcctgtcctggcaatgcagacg

SEQ ID NO: 1530216 - DNA, 25 bp, Homo sapien
cccagtgtccagatgatactgtagg

SEQ ID NO: 1530217 - DNA, 25 bp, Homo sapien
tcattgtctcctccaaattggctcg

SEQ ID NO: 1530218 - DNA, 25 bp, Homo sapien
catctcattgtctcctccaaattgg

SEQ ID NO: 1530219 - DNA, 25 bp, Homo sapien
ctccaaattggctcggcttccccat

SEQ ID NO: 1530220 - DNA, 25 bp, Homo sapien
ttgtctcctccaaattggctcggct

SEQ ID NO: 1530221 - DNA, 25 bp, Homo sapien
cataatggaacgatcactgcacggc

SEQ ID NO: 1530222 - DNA, 25 bp, Homo sapien
tttgaggctgctagccgtgtcaggc

SEQ ID NO: 1530223 - DNA, 25 bp, Homo sapien
gctaactgcagtcgaggccaatcaa

SEQ ID NO: 1530224 - DNA, 25 bp, Homo sapien
taagatgcttcaccttctaaaagtg

SEQ ID NO: 1530225 - DNA, 25 bp, Homo sapien
atgtgcagaagaatcttgtggtctt

SEQ ID NO: 1530226 - DNA, 25 bp, Homo sapien
tgtcggagctgacagtagcagcagt

SEQ ID NO: 1530227 - DNA, 25 bp, Homo sapien
catgaccagccgtggcagggttttt

SEQ ID NO: 1530228 - DNA, 25 bp, Homo sapien
gaatgggctataaatctgtcggagc

SEQ ID NO: 1530229 - DNA, 25 bp, Homo sapien
tgctattgcgtgtcccatgaccagc

SEQ ID NO: 1530230 - DNA, 25 bp, Homo sapien
ttgagttgcaaaggttcagcaaccc

SEQ ID NO: 1530231 - DNA, 25 bp, Homo sapien
gcgttgcctaagtgcttgagttgca

SEQ ID NO: 1530232 - DNA, 25 bp, Homo sapien
gaggaagctcggcttttcagcgttg

SEQ ID NO: 1530233 - DNA, 25 bp, Homo sapien
aaaggttcagcaacccagcttgtgt

SEQ ID NO: 1530234 - DNA, 25 bp, Homo sapien
gacaggactcatgcccgagctctgt

SEQ ID NO: 1530235 - DNA, 25 bp, Homo sapien
agctgcctcttcttgtcgggacagg

SEQ ID NO: 1530236 - DNA, 25 bp, Homo sapien
ggtggactagtcagaccagctgcct

SEQ ID NO: 1530237 - DNA, 25 bp, Homo sapien
acatgcttgttgtgtgtgtccaggc

SEQ ID NO: 1530238 - DNA, 25 bp, Homo sapien
tgggaaaggccgacttcaaaatgag

SEQ ID NO: 1530239 - DNA, 25 bp, Homo sapien
aaatataggccacagagcgctggtg

SEQ ID NO: 1530240 - DNA, 25 bp, Homo sapien
gaggcagaacgcttcaccactatat

SEQ ID NO: 1530241 - DNA, 25 bp, Homo sapien
tagaatcggtacagttaacatcccc

SEQ ID NO: 1530242 - DNA, 25 bp, Homo sapien
ccctcctttgggcattgaaattgat

SEQ ID NO: 1530243 - DNA, 25 bp, Homo sapien
tctgctgcagtaattccctcctttg

SEQ ID NO: 1530244 - DNA, 25 bp, Homo sapien
tacaacttgtagtggttggtgacct

SEQ ID NO: 1530245 - DNA, 25 bp, Homo sapien
taaagattcaaagcgtgccccttgc

SEQ ID NO: 1530246 - DNA, 25 bp, Homo sapien
caccatacctggcttctgtctttct

SEQ ID NO: 1530247 - DNA, 25 bp, Homo sapien
gccaccatacctggcttctgtcttt

SEQ ID NO: 1530248 - DNA, 25 bp, Homo sapien
ctctctttctctccttctttctttc

SEQ ID NO: 1530249 - DNA, 25 bp, Homo sapien
tttctgtctttctttctctctctct

SEQ ID NO: 1530250 - DNA, 25 bp, Homo sapien
taaactggacgatgacctgcatctg

SEQ ID NO: 1530251 - DNA, 25 bp, Homo sapien
ggcccagaagatccttacaaatata

SEQ ID NO: 1530252 - DNA, 25 bp, Homo sapien
attatgtagcccagtctggtattga

SEQ ID NO: 1530253 - DNA, 25 bp, Homo sapien
tacatctgtaataggcttaggaccc

SEQ ID NO: 1530254 - DNA, 25 bp, Homo sapien
tgtctttgttgctccagcattttgt

SEQ ID NO: 1530255 - DNA, 25 bp, Homo sapien
tgtttatgtctttgttgctccagca

SEQ ID NO: 1530256 - DNA, 25 bp, Homo sapien
ttatgtctttgttgctccagcattt

SEQ ID NO: 1530257 - DNA, 25 bp, Homo sapien
aggctttggcgttgtttatgtcttt

SEQ ID NO: 1530258 - DNA, 25 bp, Homo sapien
gctacttggtccataggagaaccag

SEQ ID NO: 1530259 - DNA, 25 bp, Homo sapien
gctgcctttgggcactggtgctact

SEQ ID NO: 1530260 - DNA, 25 bp, Homo sapien
gctttgctcttagcttcctcaccta

SEQ ID NO: 1530261 - DNA, 25 bp, Homo sapien
cctacaaccattggcagagggctgc

SEQ ID NO: 1530262 - DNA, 25 bp, Homo sapien
gtgcagctgcagctcaagcctagcc

SEQ ID NO: 1530263 - DNA, 25 bp, Homo sapien
actgcccccgcctgctgcttgcact

SEQ ID NO: 1530264 - DNA, 25 bp, Homo sapien
tgcagctcaagcctagcccagtggg

SEQ ID NO: 1530265 - DNA, 25 bp, Homo sapien
actggtgtgctggtgtagcagacat

SEQ ID NO: 1530266 - DNA, 25 bp, Homo sapien
gagtgaagcccacatttagagagct

SEQ ID NO: 1530267 - DNA, 25 bp, Homo sapien
gtgcatcagagtgaagcccacattt

SEQ ID NO: 1530268 - DNA, 25 bp, Homo sapien
accctcttcatgtgcatcagagtga

SEQ ID NO: 1530269 - DNA, 25 bp, Homo sapien
aagtccaccctcttcatgtgcatca

SEQ ID NO: 1530270 - DNA, 25 bp, Homo sapien
tctttcttggcgaggatgtctgggt

SEQ ID NO: 1530271 - DNA, 25 bp, Homo sapien
tgtcctgctcctgcgtcattccttc

SEQ ID NO: 1530272 - DNA, 25 bp, Homo sapien
tgggtgtaggtgtgactgtcctgct

SEQ ID NO: 1530273 - DNA, 25 bp, Homo sapien
tcctccatatggctctttcttggcg

SEQ ID NO: 1530274 - DNA, 25 bp, Homo sapien
aaaagcccaactgggccgtggtgag

SEQ ID NO: 1530275 - DNA, 25 bp, Homo sapien
ttgaggtctaccttggtgtcctccc

SEQ ID NO: 1530276 - DNA, 25 bp, Homo sapien
gggctctggtttcttgaggtctacc

SEQ ID NO: 1530277 - DNA, 25 bp, Homo sapien
cagtttagggtcttatatacagagc

SEQ ID NO: 1530278 - DNA, 25 bp, Homo sapien
catgctctgtgcactactgggaaca

SEQ ID NO: 1530279 - DNA, 25 bp, Homo sapien
taggtctgagttgctgccattgccc

SEQ ID NO: 1530280 - DNA, 25 bp, Homo sapien
attgccccaacaggcgcatgctctg

SEQ ID NO: 1530281 - DNA, 25 bp, Homo sapien
tccagaggcaagatcaagcggtatg

SEQ ID NO: 1530282 - DNA, 25 bp, Homo sapien
gacagtgaggcgatggaatatttac

SEQ ID NO: 1530283 - DNA, 25 bp, Homo sapien
gcttatggaggctaatgctgtcatc

SEQ ID NO: 1530284 - DNA, 25 bp, Homo sapien
tagattacaggcgtagatactgaac

SEQ ID NO: 1530285 - DNA, 25 bp, Homo sapien
tgtaaaccttgcagccggagggcag

SEQ ID NO: 1530286 - DNA, 25 bp, Homo sapien
tgcgcgcttctgattttacatccat

SEQ ID NO: 1530287 - DNA, 25 bp, Homo sapien
ctctgcgcgcttctgattttacatc

SEQ ID NO: 1530288 - DNA, 25 bp, Homo sapien
ctgcgcgcttctgattttacatcca

SEQ ID NO: 1530289 - DNA, 25 bp, Homo sapien
tctgcgcgcttctgattttacatcc

SEQ ID NO: 1530290 - DNA, 25 bp, Homo sapien
tgtagggcaggaaaaccacctgcat

SEQ ID NO: 1530291 - DNA, 25 bp, Homo sapien
ctccttttctgttgaaattttctga

SEQ ID NO: 1530292 - DNA, 25 bp, Homo sapien
tttctgttgaaattttctgagatgg

SEQ ID NO: 1530293 - DNA, 25 bp, Homo sapien
tctgttgaaattttctgagatggcc

SEQ ID NO: 1530294 - DNA, 25 bp, Homo sapien
tgttgaaattttctgagatggccat

SEQ ID NO: 1530295 - DNA, 25 bp, Homo sapien
gggcagagacttgatgaaatttgca

SEQ ID NO: 1530296 - DNA, 25 bp, Homo sapien
ggagggcagagacttgatgaaattt

SEQ ID NO: 1530297 - DNA, 25 bp, Homo sapien
gcagagacttgatgaaatttgcatt

SEQ ID NO: 1530298 - DNA, 25 bp, Homo sapien
agagacttgatgaaatttgcatttg

SEQ ID NO: 1530299 - DNA, 25 bp, Homo sapien
ggagtttgagcagttctgtgggacc

SEQ ID NO: 1530300 - DNA, 25 bp, Homo sapien
ggaggagtttgagcagttctgtggg

SEQ ID NO: 1530301 - DNA, 25 bp, Homo sapien
gaggaggagtttgagcagttctgtg

SEQ ID NO: 1530302 - DNA, 25 bp, Homo sapien
ggtgaggaggagtttgagcagttct

SEQ ID NO: 1530303 - DNA, 25 bp, Homo sapien
ttttgggcagcaccacgacaaactt

SEQ ID NO: 1530304 - DNA, 25 bp, Homo sapien
gctgagagcagggatagctggcttg

SEQ ID NO: 1530305 - DNA, 25 bp, Homo sapien
gggagtgccagagaatccatatgga

SEQ ID NO: 1530306 - DNA, 25 bp, Homo sapien
gaggactggcattccggtccaggga

SEQ ID NO: 1530307 - DNA, 25 bp, Homo sapien
tgttgaagaagagactggtggtcat

SEQ ID NO: 1530308 - DNA, 25 bp, Homo sapien
gtgttgaagaagagactggtggtca

SEQ ID NO: 1530309 - DNA, 25 bp, Homo sapien
gagctcagctccgggatgtctctgg

SEQ ID NO: 1530310 - DNA, 25 bp, Homo sapien
gctcagctccgggatgtctctggcc

SEQ ID NO: 1530311 - DNA, 25 bp, Homo sapien
ccattacttccaagccaaattttct

SEQ ID NO: 1530312 - DNA, 25 bp, Homo sapien
aaagaccactaccattacttccaag

SEQ ID NO: 1530313 - DNA, 25 bp, Homo sapien
gaatctttaagaagcacaaagacca

SEQ ID NO: 1530314 - DNA, 25 bp, Homo sapien
gaagcacaaagaccactaccattac

SEQ ID NO: 1530315 - DNA, 25 bp, Homo sapien
gatactcctgggaacattggatgct

SEQ ID NO: 1530316 - DNA, 25 bp, Homo sapien
tttcgatgggtagtgaagatactcc

SEQ ID NO: 1530317 - DNA, 25 bp, Homo sapien
caggttctttggcataggagttttt

SEQ ID NO: 1530318 - DNA, 25 bp, Homo sapien
gcttataagtagacacatgggccag

SEQ ID NO: 1530319 - DNA, 25 bp, Homo sapien
ctgctgtccagggccggatgaagct

SEQ ID NO: 1530320 - DNA, 25 bp, Homo sapien
gacttggctccatcaggacacactc

SEQ ID NO: 1530321 - DNA, 25 bp, Homo sapien
aggtcatagccccagcgggagctac

SEQ ID NO: 1530322 - DNA, 25 bp, Homo sapien
gtccagggccggatgaagctcccag

SEQ ID NO: 1530323 - DNA, 25 bp, Homo sapien
gggaagaggcaatgctgctcatagc

SEQ ID NO: 1530324 - DNA, 25 bp, Homo sapien
aagaggcaatgctgctcatagccgc

SEQ ID NO: 1530325 - DNA, 25 bp, Homo sapien
ggaagaggcaatgctgctcatagcc

SEQ ID NO: 1530326 - DNA, 25 bp, Homo sapien
gaagaggcaatgctgctcatagccg

SEQ ID NO: 1530327 - DNA, 25 bp, Homo sapien
tatgagctagcatttctgcccgtga

SEQ ID NO: 1530328 - DNA, 25 bp, Homo sapien
atttctgcccgtgacaatgtactca

SEQ ID NO: 1530329 - DNA, 25 bp, Homo sapien
gtgtatgagctagcatttctgcccg

SEQ ID NO: 1530330 - DNA, 25 bp, Homo sapien
gctagcatttctgcccgtgacaatg

SEQ ID NO: 1530331 - DNA, 25 bp, Homo sapien
gatcgtgttccgtgaaggtgaagaa

SEQ ID NO: 1530332 - DNA, 25 bp, Homo sapien
ttttatgacgagaagttgaagtaac

SEQ ID NO: 1530333 - DNA, 25 bp, Homo sapien
gagagaagagaaacccggcccgatc

SEQ ID NO: 1530334 - DNA, 25 bp, Homo sapien
cattccattttatgacgagaagttg

SEQ ID NO: 1530335 - DNA, 25 bp, Homo sapien
ctggctgttccggagggtgtattcc

SEQ ID NO: 1530336 - DNA, 25 bp, Homo sapien
tccggagggtgtattccaggccaag

SEQ ID NO: 1530337 - DNA, 25 bp, Homo sapien
agcccttggctgatgggcatgagct

SEQ ID NO: 1530338 - DNA, 25 bp, Homo sapien
catgagctgtcaggccactctttct

SEQ ID NO: 1530339 - DNA, 25 bp, Homo sapien
tgagtttgagaagggccccaggttc

SEQ ID NO: 1530340 - DNA, 25 bp, Homo sapien
cttgagtttgagaagggccccaggt

SEQ ID NO: 1530341 - DNA, 25 bp, Homo sapien
tcctcgggcgagcaggaatgcgctt

SEQ ID NO: 1530342 - DNA, 25 bp, Homo sapien
cctcggagcgggttttggtggcagc

SEQ ID NO: 1530343 - DNA, 25 bp, Homo sapien
tggcagctgcctcgcagaagcagaa

SEQ ID NO: 1530344 - DNA, 25 bp, Homo sapien
gctgcgtgatttccgcagttgcccc

SEQ ID NO: 1530345 - DNA, 25 bp, Homo sapien
cgatcatgattcaacagaacgctct

SEQ ID NO: 1530346 - DNA, 25 bp, Homo sapien
aaggtggacatgaaagctcctgaaa

SEQ ID NO: 1530347 - DNA, 25 bp, Homo sapien
cagcgttttggttggactcaaggcc

SEQ ID NO: 1530348 - DNA, 25 bp, Homo sapien
ttgtttagccactgactgtccagcg

SEQ ID NO: 1530349 - DNA, 25 bp, Homo sapien
tccgaatgtgtagcaactctcatgc

SEQ ID NO: 1530350 - DNA, 25 bp, Homo sapien
gcctttgccactctgttccgagatg

SEQ ID NO: 1530351 - DNA, 25 bp, Homo sapien
cagcttttgttggagacgatttcta

SEQ ID NO: 1530352 - DNA, 25 bp, Homo sapien
agatggagggaattgagcagctttt

SEQ ID NO: 1530353 - DNA, 25 bp, Homo sapien
ggttccttgctggagatggctccat

SEQ ID NO: 1530354 - DNA, 25 bp, Homo sapien
gttccttgctggagatggctccatt

SEQ ID NO: 1530355 - DNA, 25 bp, Homo sapien
ttccttgctggagatggctccattt

SEQ ID NO: 1530356 - DNA, 25 bp, Homo sapien
gtggcgaagatcaaacttgcactcg

SEQ ID NO: 1530357 - DNA, 25 bp, Homo sapien
ggacgtttctggaggtcacagctca

SEQ ID NO: 1530358 - DNA, 25 bp, Homo sapien
gaaaatccactgttggacggctctg

SEQ ID NO: 1530359 - DNA, 25 bp, Homo sapien
gacggctctgttggaggacgtttct

SEQ ID NO: 1530360 - DNA, 25 bp, Homo sapien
gacttcaataatcattccaatcctg

SEQ ID NO: 1530361 - DNA, 25 bp, Homo sapien
cattggttggtgtagtctgagaatg

SEQ ID NO: 1530362 - DNA, 25 bp, Homo sapien
actggtggggaaaagctgaactggg

SEQ ID NO: 1530363 - DNA, 25 bp, Homo sapien
tcttgcaaaatataggttttgcttg

SEQ ID NO: 1530364 - DNA, 25 bp, Homo sapien
gatgacagctctaagtccactgtgc

SEQ ID NO: 1530365 - DNA, 25 bp, Homo sapien
cagggttcaggtcccgatgacagct

SEQ ID NO: 1530366 - DNA, 25 bp, Homo sapien
taaggcacgtctttagggccaggta

SEQ ID NO: 1530367 - DNA, 25 bp, Homo sapien
tggaagccgcttcggaggctccatg

SEQ ID NO: 1530368 - DNA, 25 bp, Homo sapien
cattgaacctccacactgcagatgc

SEQ ID NO: 1530369 - DNA, 25 bp, Homo sapien
caccttcttcagaccaactgggcag

SEQ ID NO: 1530370 - DNA, 25 bp, Homo sapien
gggcgagtccgaaggggcagaatgg

SEQ ID NO: 1530371 - DNA, 25 bp, Homo sapien
gtgacgctcagcgtttgcccacctt

SEQ ID NO: 1530372 - DNA, 25 bp, Homo sapien
ccttcttcagaccaactgggcagga

SEQ ID NO: 1530373 - DNA, 25 bp, Homo sapien
cggccaccttttctgaaaatggcct

SEQ ID NO: 1530374 - DNA, 25 bp, Homo sapien
cttttctgaaaatggcctgttgtca

SEQ ID NO: 1530375 - DNA, 25 bp, Homo sapien
gagcggccaggagcaatggcgctgc

SEQ ID NO: 1530376 - DNA, 25 bp, Homo sapien
gcagcttgtcctcagatgtgctcag

SEQ ID NO: 1530377 - DNA, 25 bp, Homo sapien
tattttaacagcgtagatgatccga

SEQ ID NO: 1530378 - DNA, 25 bp, Homo sapien
tggtctgtgacatgaaatttggcaa

SEQ ID NO: 1530379 - DNA, 25 bp, Homo sapien
ccccatctgagagtaaccaggatct

SEQ ID NO: 1530380 - DNA, 25 bp, Homo sapien
accaggatctgtgggtgtattagac

SEQ ID NO: 1530381 - DNA, 25 bp, Homo sapien
ccacatttgtattgataaattgtag

SEQ ID NO: 1530382 - DNA, 25 bp, Homo sapien
taaattgtaggtagtaggagatgta

SEQ ID NO: 1530383 - DNA, 25 bp, Homo sapien
gttcaaaatgtagagtgctgtggct

SEQ ID NO: 1530384 - DNA, 25 bp, Homo sapien
ggagatgtattgatgggatggagac

SEQ ID NO: 1530385 - DNA, 25 bp, Homo sapien
cagcgcttatggtcgggatcacgca

SEQ ID NO: 1530386 - DNA, 25 bp, Homo sapien
ttcacactccccgacagcctgtgaa

SEQ ID NO: 1530387 - DNA, 25 bp, Homo sapien
gcctgtgaaggcagcgcttatggtc

SEQ ID NO: 1530388 - DNA, 25 bp, Homo sapien
gctgtccccggttcacactccccga

SEQ ID NO: 1530389 - DNA, 25 bp, Homo sapien
gtaggcaccacgatagcatcctcca

SEQ ID NO: 1530390 - DNA, 25 bp, Homo sapien
ggtccataatgtgggcgtgaagatc

SEQ ID NO: 1530391 - DNA, 25 bp, Homo sapien
cctcgtgccttgttgtgcatgtggg

SEQ ID NO: 1530392 - DNA, 25 bp, Homo sapien
ctgaggacactccagtgagattcgt

SEQ ID NO: 1530393 - DNA, 25 bp, Homo sapien
taggcgatgttctcaactgcctgtg

SEQ ID NO: 1530394 - DNA, 25 bp, Homo sapien
gcagcttccccatcgtgtgtccaag

SEQ ID NO: 1530395 - DNA, 25 bp, Homo sapien
tcctggacctgaacagcgatgatag

SEQ ID NO: 1530396 - DNA, 25 bp, Homo sapien
tcagaagcgtctttcaatgtctgct

SEQ ID NO: 1530397 - DNA, 25 bp, Homo sapien
ccttgaatcggctcattggcatttc

SEQ ID NO: 1530398 - DNA, 25 bp, Homo sapien
aacatgtatctccttgaatcggctc

SEQ ID NO: 1530399 - DNA, 25 bp, Homo sapien
cttgccaaaccagtgtgatcgaaag

SEQ ID NO: 1530400 - DNA, 25 bp, Homo sapien
tccttttccgtgaactgtttattca

SEQ ID NO: 1530401 - DNA, 25 bp, Homo sapien
ctggcaagcccggttgtacactggc

SEQ ID NO: 1530402 - DNA, 25 bp, Homo sapien
cactggcacgagcacagaagggctg

SEQ ID NO: 1530403 - DNA, 25 bp, Homo sapien
gcccggttgtacactggcacgagca

SEQ ID NO: 1530404 - DNA, 25 bp, Homo sapien
gcaagcccggttgtacactggcacg

SEQ ID NO: 1530405 - DNA, 25 bp, Homo sapien
atgttcaccttctcttggagggtct

SEQ ID NO: 1530406 - DNA, 25 bp, Homo sapien
catgttcaccttctcttggagggtc

SEQ ID NO: 1530407 - DNA, 25 bp, Homo sapien
ccactcttcccatgagtgacagaac

SEQ ID NO: 1530408 - DNA, 25 bp, Homo sapien
gtccactcttcccatgagtgacaga

SEQ ID NO: 1530409 - DNA, 25 bp, Homo sapien
aggtccactcttcccatgagtgaca

SEQ ID NO: 1530410 - DNA, 25 bp, Homo sapien
caggtccactcttcccatgagtgac

SEQ ID NO: 1530411 - DNA, 25 bp, Homo sapien
ttgccaaggtgatgactggttgtaa

SEQ ID NO: 1530412 - DNA, 25 bp, Homo sapien
tgccaaggtgatgactggttgtaaa

SEQ ID NO: 1530413 - DNA, 25 bp, Homo sapien
agacagtgcctcgagtaagttgcca

SEQ ID NO: 1530414 - DNA, 25 bp, Homo sapien
tgaagacagtgcctcgagtaagttg

SEQ ID NO: 1530415 - DNA, 25 bp, Homo sapien
ctcctcatccggagctccaaaatgg

SEQ ID NO: 1530416 - DNA, 25 bp, Homo sapien
tggccagccaggacccggccgtgcc

SEQ ID NO: 1530417 - DNA, 25 bp, Homo sapien
gtgccctcgccctcgtccttgccca

SEQ ID NO: 1530418 - DNA, 25 bp, Homo sapien
tgctgcttccgcgagcctcgtttgg

SEQ ID NO: 1530419 - DNA, 25 bp, Homo sapien
cagaagacagaaccgggacacggaa

SEQ ID NO: 1530420 - DNA, 25 bp, Homo sapien
gggcttgtggctagcaccgggcggg

SEQ ID NO: 1530421 - DNA, 25 bp, Homo sapien
ggtcggccggctgaggaggaagcga

SEQ ID NO: 1530422 - DNA, 25 bp, Homo sapien
acttggggcttgtggctagcaccgg

SEQ ID NO: 1530423 - DNA, 25 bp, Homo sapien
ctgtggccaagaacgaaagtatata

SEQ ID NO: 1530424 - DNA, 25 bp, Homo sapien
taacaagccgacttgaggattttgc

SEQ ID NO: 1530425 - DNA, 25 bp, Homo sapien
gcaaccctattacgtaatgcaaatt

SEQ ID NO: 1530426 - DNA, 25 bp, Homo sapien
tcagaggaatgttcatgcaacccta

SEQ ID NO: 1530427 - DNA, 25 bp, Homo sapien
ctgaaattaatacagtcccttggat

SEQ ID NO: 1530428 - DNA, 25 bp, Homo sapien
ttaatacagtcccttggatcaatct

SEQ ID NO: 1530429 - DNA, 25 bp, Homo sapien
cagtcccttggatcaatcttcaaaa

SEQ ID NO: 1530430 - DNA, 25 bp, Homo sapien
gaaattaatacagtcccttggatca

SEQ ID NO: 1530431 - DNA, 25 bp, Homo sapien
ggtttaagaacaggaatccaggcca

SEQ ID NO: 1530432 - DNA, 25 bp, Homo sapien
caggctaggtgggtgttatacagtc

SEQ ID NO: 1530433 - DNA, 25 bp, Homo sapien
tgagactcacagacacaaagtggta

SEQ ID NO: 1530434 - DNA, 25 bp, Homo sapien
tcataactctttaggacaggctagg

SEQ ID NO: 1530435 - DNA, 25 bp, Homo sapien
tttccaatgaaggactgatgatact

SEQ ID NO: 1530436 - DNA, 25 bp, Homo sapien
ggataacatggattaatggatctgg

SEQ ID NO: 1530437 - DNA, 25 bp, Homo sapien
tcctgttccccaatatctggcacca

SEQ ID NO: 1530438 - DNA, 25 bp, Homo sapien
gactgatgatactttcagcagtcag

SEQ ID NO: 1530439 - DNA, 25 bp, Homo sapien
cacaaagttcttgggtttcaagaga

SEQ ID NO: 1530440 - DNA, 25 bp, Homo sapien
tcagcccttctagtatcagcagcag

SEQ ID NO: 1530441 - DNA, 25 bp, Homo sapien
gactggattactttagccggaatct

SEQ ID NO: 1530442 - DNA, 25 bp, Homo sapien
ccttctagtatcagcagcaggtgac

SEQ ID NO: 1530443 - DNA, 25 bp, Homo sapien
gatgatgatagaaacttacaaaggc

SEQ ID NO: 1530444 - DNA, 25 bp, Homo sapien
tacaaaggctacactgataagacat

SEQ ID NO: 1530445 - DNA, 25 bp, Homo sapien
tgataagacatagccttcccttcat

SEQ ID NO: 1530446 - DNA, 25 bp, Homo sapien
gatcttttaacacggaaaaggatga

SEQ ID NO: 1530447 - DNA, 25 bp, Homo sapien
tctgagcacatcagtatcacttcat

SEQ ID NO: 1530448 - DNA, 25 bp, Homo sapien
taatatggcactctgagcacatcag

SEQ ID NO: 1530449 - DNA, 25 bp, Homo sapien
ctcctggcttctagatgtaatatgg

SEQ ID NO: 1530450 - DNA, 25 bp, Homo sapien
tagatgtaatatggcactctgagca

SEQ ID NO: 1530451 - DNA, 25 bp, Homo sapien
caaagagctggaggggcttacgcac

SEQ ID NO: 1530452 - DNA, 25 bp, Homo sapien
gtagattgtccacacttactgggat

SEQ ID NO: 1530453 - DNA, 25 bp, Homo sapien
tgtggttttccgacacaaagagctg

SEQ ID NO: 1530454 - DNA, 25 bp, Homo sapien
tactgggatatctggaatggtttca

SEQ ID NO: 1530455 - DNA, 25 bp, Homo sapien
tatgtgctcgcagataggacactga

SEQ ID NO: 1530456 - DNA, 25 bp, Homo sapien
tgtaagcaggctatcaggaatcaga

SEQ ID NO: 1530457 - DNA, 25 bp, Homo sapien
tatatctccatagtgccccaggttg

SEQ ID NO: 1530458 - DNA, 25 bp, Homo sapien
gatgtagcccttgttgccacttgtg

SEQ ID NO: 1530459 - DNA, 25 bp, Homo sapien
cttttaataggtccgccatagccca

SEQ ID NO: 1530460 - DNA, 25 bp, Homo sapien
taggtccgccatagcccatttttcc

SEQ ID NO: 1530461 - DNA, 25 bp, Homo sapien
aataggtccgccatagcccattttt

SEQ ID NO: 1530462 - DNA, 25 bp, Homo sapien
ttaataggtccgccatagcccattt

SEQ ID NO: 1530463 - DNA, 25 bp, Homo sapien
tattgacaaggtatctggaagactg

SEQ ID NO: 1530464 - DNA, 25 bp, Homo sapien
cactggaaattcttggctcattaga

SEQ ID NO: 1530465 - DNA, 25 bp, Homo sapien
tagaagttgctattgacaaggtatc

SEQ ID NO: 1530466 - DNA, 25 bp, Homo sapien
catcagctgtatcactggaaattct

SEQ ID NO: 1530467 - DNA, 25 bp, Homo sapien
ttatgtcatgtgcaagtcactgcag

SEQ ID NO: 1530468 - DNA, 25 bp, Homo sapien
tatgtcatgtgcaagtcactgcagc

SEQ ID NO: 1530469 - DNA, 25 bp, Homo sapien
gcagcctgcataacaaaatacatag

SEQ ID NO: 1530470 - DNA, 25 bp, Homo sapien
tcactgcagcctgcataacaaaata

SEQ ID NO: 1530471 - DNA, 25 bp, Homo sapien
taacaccatacgaaagggctttgct

SEQ ID NO: 1530472 - DNA, 25 bp, Homo sapien
aatatgcagctctccgaaacgcagg

SEQ ID NO: 1530473 - DNA, 25 bp, Homo sapien
gacatggatccaacgaaaagtagcc

SEQ ID NO: 1530474 - DNA, 25 bp, Homo sapien
tttaagtgagctgaaccaaagcggc

SEQ ID NO: 1530475 - DNA, 25 bp, Homo sapien
ctgtacggcttatcagagttatgga

SEQ ID NO: 1530476 - DNA, 25 bp, Homo sapien
tcgcctgtggtttctgacaccaaca

SEQ ID NO: 1530477 - DNA, 25 bp, Homo sapien
cagagttatggattcgcctgtggtt

SEQ ID NO: 1530478 - DNA, 25 bp, Homo sapien
ttctgacaccaacatatgttgtact

SEQ ID NO: 1530479 - DNA, 25 bp, Homo sapien
gaggtaccagctaggacaatcagac

SEQ ID NO: 1530480 - DNA, 25 bp, Homo sapien
gctatgcagtgttgtggaggtacca

SEQ ID NO: 1530481 - DNA, 25 bp, Homo sapien
ggaggcacttaaaccaatagcacct

SEQ ID NO: 1530482 - DNA, 25 bp, Homo sapien
tttcctactgccatactcaggaggc

SEQ ID NO: 1530483 - DNA, 25 bp, Homo sapien
gaaaaaactggtcagatagaactga

SEQ ID NO: 1530484 - DNA, 25 bp, Homo sapien
tggaagcagtcgtcttgaaaaagct

SEQ ID NO: 1530485 - DNA, 25 bp, Homo sapien
taattgttccacatacttgagtaca

SEQ ID NO: 1530486 - DNA, 25 bp, Homo sapien
tagaactgagtcctcctataacccc

SEQ ID NO: 1530487 - DNA, 25 bp, Homo sapien
gcatgtttccacatatgagacttca

SEQ ID NO: 1530488 - DNA, 25 bp, Homo sapien
tgttcgtagttgtaattttggtcac

SEQ ID NO: 1530489 - DNA, 25 bp, Homo sapien
aatagccttgtttacttgttcgtag

SEQ ID NO: 1530490 - DNA, 25 bp, Homo sapien
tgaaatcgcgtcgttaatagccttg

SEQ ID NO: 1530491 - DNA, 25 bp, Homo sapien
gggagtctgggacatcagttctgaa

SEQ ID NO: 1530492 - DNA, 25 bp, Homo sapien
tacaacagcagaagagtaaaacgca

SEQ ID NO: 1530493 - DNA, 25 bp, Homo sapien
gaacttccagtgacgggatctgcac

SEQ ID NO: 1530494 - DNA, 25 bp, Homo sapien
taaaacgcagtactccatgctagga

SEQ ID NO: 1530495 - DNA, 25 bp, Homo sapien
ttctactgctttcctgctcgagtca

SEQ ID NO: 1530496 - DNA, 25 bp, Homo sapien
gaagttgtctgacagcgtaaaggtg

SEQ ID NO: 1530497 - DNA, 25 bp, Homo sapien
caagtttggttccaaagtcacatct

SEQ ID NO: 1530498 - DNA, 25 bp, Homo sapien
tggtgaaggaatcctcttctactgc

SEQ ID NO: 1530499 - DNA, 25 bp, Homo sapien
tatatgcttcctcctatcggccagg

SEQ ID NO: 1530500 - DNA, 25 bp, Homo sapien
ttgtcaagccaattacagcacggga

SEQ ID NO: 1530501 - DNA, 25 bp, Homo sapien
aaaggcttcggtcggtgtcacaaca

SEQ ID NO: 1530502 - DNA, 25 bp, Homo sapien
gaaaattatgaagccaccagcagcc

SEQ ID NO: 1530503 - DNA, 25 bp, Homo sapien
cacactggaccatacgttctagagc

SEQ ID NO: 1530504 - DNA, 25 bp, Homo sapien
cctgggaagcatgggacgaaatatt

SEQ ID NO: 1530505 - DNA, 25 bp, Homo sapien
gattctagggcacaaatggataacc

SEQ ID NO: 1530506 - DNA, 25 bp, Homo sapien
cactttcaactgaggtgacccagga

SEQ ID NO: 1530507 - DNA, 25 bp, Homo sapien
tttccttggactgctgtaatgtcat

SEQ ID NO: 1530508 - DNA, 25 bp, Homo sapien
ccttggactgctgtaatgtcatttc

SEQ ID NO: 1530509 - DNA, 25 bp, Homo sapien
tgttagtccgagaatcagtgtcctt

SEQ ID NO: 1530510 - DNA, 25 bp, Homo sapien
ctagatgttagtccgagaatcagtg

SEQ ID NO: 1530511 - DNA, 25 bp, Homo sapien
tgactcatgtcagagaccacagagg

SEQ ID NO: 1530512 - DNA, 25 bp, Homo sapien
tgtgagtcttcatgtggcaggccag

SEQ ID NO: 1530513 - DNA, 25 bp, Homo sapien
tcctctgagattggcttggcatgcg

SEQ ID NO: 1530514 - DNA, 25 bp, Homo sapien
aatgaggaattttccacaggacccg

SEQ ID NO: 1530515 - DNA, 25 bp, Homo sapien
cagcgcccgattgtcactgaccagt

SEQ ID NO: 1530516 - DNA, 25 bp, Homo sapien
agcagtagggccactcgggcctgcc

SEQ ID NO: 1530517 - DNA, 25 bp, Homo sapien
tccctgctctgtggcggatgcgcag

SEQ ID NO: 1530518 - DNA, 25 bp, Homo sapien
gcttcccgcattgcccggtttggcg

SEQ ID NO: 1530519 - DNA, 25 bp, Homo sapien
ctgaggcaggttcgcctcgagccgc

SEQ ID NO: 1530520 - DNA, 25 bp, Homo sapien
cccggcggctctgaggcaggttcgc

SEQ ID NO: 1530521 - DNA, 25 bp, Homo sapien
gctctgaggcaggttcgcctcgagc

SEQ ID NO: 1530522 - DNA, 25 bp, Homo sapien
cggctctgaggcaggttcgcctcga

SEQ ID NO: 1530523 - DNA, 25 bp, Homo sapien
cgcgccgcgggtacaaggagggcag

SEQ ID NO: 1530524 - DNA, 25 bp, Homo sapien
gcctcagccgtcctcacgcgcggct

SEQ ID NO: 1530525 - DNA, 25 bp, Homo sapien
aaccgccgcggagctttgtggaaat

SEQ ID NO: 1530526 - DNA, 25 bp, Homo sapien
gctaggcgggaacggggccgcgcca

SEQ ID NO: 1530527 - DNA, 25 bp, Homo sapien
ggaagttcaggcacgcgccccagct

SEQ ID NO: 1530528 - DNA, 25 bp, Homo sapien
agaagccgctccgcaaacttggtcc

SEQ ID NO: 1530529 - DNA, 25 bp, Homo sapien
gcacggccgacgagcagaagccgct

SEQ ID NO: 1530530 - DNA, 25 bp, Homo sapien
agctctcccaagaccgcgagcggcc

SEQ ID NO: 1530531 - DNA, 25 bp, Homo sapien
ttacatgcattgttctccaaatcac

SEQ ID NO: 1530532 - DNA, 25 bp, Homo sapien
acatgcattgttctccaaatcactc

SEQ ID NO: 1530533 - DNA, 25 bp, Homo sapien
gatgtcagacttacatgcattgttc

SEQ ID NO: 1530534 - DNA, 25 bp, Homo sapien
acttacatgcattgttctccaaatc

SEQ ID NO: 1530535 - DNA, 25 bp, Homo sapien
ggctggaaagtcttcagaaacttct

SEQ ID NO: 1530536 - DNA, 25 bp, Homo sapien
attttcttcttgggctggaaagtct

SEQ ID NO: 1530537 - DNA, 25 bp, Homo sapien
gcaatttattttccaacttcacatt

SEQ ID NO: 1530538 - DNA, 25 bp, Homo sapien
tatttctcttctttgccggatggac

SEQ ID NO: 1530539 - DNA, 25 bp, Homo sapien
ttccataatcttctactggtacaac

SEQ ID NO: 1530540 - DNA, 25 bp, Homo sapien
cttccataatcttctactggtacaa

SEQ ID NO: 1530541 - DNA, 25 bp, Homo sapien
atggttccaccaattgtcaatgaca

SEQ ID NO: 1530542 - DNA, 25 bp, Homo sapien
aatggttccaccaattgtcaatgac

SEQ ID NO: 1530543 - DNA, 25 bp, Homo sapien
ggcaatggttccaccaattgtcaat

SEQ ID NO: 1530544 - DNA, 25 bp, Homo sapien
caatggttccaccaattgtcaatga

SEQ ID NO: 1530545 - DNA, 25 bp, Homo sapien
atcattttcatgtaacgtggcaagg

SEQ ID NO: 1530546 - DNA, 25 bp, Homo sapien
gacagatgtaagaagtccaatgcaa

SEQ ID NO: 1530547 - DNA, 25 bp, Homo sapien
ggtagacagatgtaagaagtccaat

SEQ ID NO: 1530548 - DNA, 25 bp, Homo sapien
gtaacgtggcaaggtagacagatgt

SEQ ID NO: 1530549 - DNA, 25 bp, Homo sapien
gatcccactgagtgaatgatacaat

SEQ ID NO: 1530550 - DNA, 25 bp, Homo sapien
ctggagatcccactgagtgaatgat

SEQ ID NO: 1530551 - DNA, 25 bp, Homo sapien
gagatcccactgagtgaatgataca

SEQ ID NO: 1530552 - DNA, 25 bp, Homo sapien
tactggagatcccactgagtgaatg

SEQ ID NO: 1530553 - DNA, 25 bp, Homo sapien
cccagtgacacaggaagcttaggca

SEQ ID NO: 1530554 - DNA, 25 bp, Homo sapien
tgtggagccacatttagaccccatg

SEQ ID NO: 1530555 - DNA, 25 bp, Homo sapien
gatagtcatgaacatgctgaggacc

SEQ ID NO: 1530556 - DNA, 25 bp, Homo sapien
catattttggaagaccagggcagta

SEQ ID NO: 1530557 - DNA, 25 bp, Homo sapien
acggttgttagcattcaatttgggc

SEQ ID NO: 1530558 - DNA, 25 bp, Homo sapien
aattctagggaatcgctttacaagc

SEQ ID NO: 1530559 - DNA, 25 bp, Homo sapien
tgttaatatatacgcactacatggt

SEQ ID NO: 1530560 - DNA, 25 bp, Homo sapien
caatttgggctatctgctcacacag

SEQ ID NO: 1530561 - DNA, 25 bp, Homo sapien
aatgttacccacagaacaggtgctc

SEQ ID NO: 1530562 - DNA, 25 bp, Homo sapien
gcagtgttgaactcaatgttaccca

SEQ ID NO: 1530563 - DNA, 25 bp, Homo sapien
tctgctggtaaattcagaaatcttt

SEQ ID NO: 1530564 - DNA, 25 bp, Homo sapien
ggaaaatctgctggtaaattcagaa

SEQ ID NO: 1530565 - DNA, 25 bp, Homo sapien
tgaaacgccaatacgatgacatcgc

SEQ ID NO: 1530566 - DNA, 25 bp, Homo sapien
tggattatcttagcagtttcctgac

SEQ ID NO: 1530567 - DNA, 25 bp, Homo sapien
aatattactgaatccactgaattgg

SEQ ID NO: 1530568 - DNA, 25 bp, Homo sapien
cacagcctaaggcaactttctgaaa

SEQ ID NO: 1530569 - DNA, 25 bp, Homo sapien
taaataaatttgagccccactgagc

SEQ ID NO: 1530570 - DNA, 25 bp, Homo sapien
gacaagacctacattacttttgtac

SEQ ID NO: 1530571 - DNA, 25 bp, Homo sapien
tatatgcaatggaatgactgggtta

SEQ ID NO: 1530572 - DNA, 25 bp, Homo sapien
tctcatggatggatgaagtttttcc

SEQ ID NO: 1530573 - DNA, 25 bp, Homo sapien
taggagtaatacaggccacactctg

SEQ ID NO: 1530574 - DNA, 25 bp, Homo sapien
cactctgttctgaatgagatttctc

SEQ ID NO: 1530575 - DNA, 25 bp, Homo sapien
tgaatgagatttctcgctccacttc

SEQ ID NO: 1530576 - DNA, 25 bp, Homo sapien
ttgcacgagggttggagcctgcagc

SEQ ID NO: 1530577 - DNA, 25 bp, Homo sapien
ggttaattgtcttcatagattcagt

SEQ ID NO: 1530578 - DNA, 25 bp, Homo sapien
tcattcgctgaaggaggttaattgt

SEQ ID NO: 1530579 - DNA, 25 bp, Homo sapien
gtatgggtagaactctatataaaat

SEQ ID NO: 1530580 - DNA, 25 bp, Homo sapien
ctgtatgggtagaactctatataaa

SEQ ID NO: 1530581 - DNA, 25 bp, Homo sapien
ctgtgacatagatcgcctggagccc

SEQ ID NO: 1530582 - DNA, 25 bp, Homo sapien
tgtagagagctgtgacatagatcgc

SEQ ID NO: 1530583 - DNA, 25 bp, Homo sapien
cataccagaaagctgccaacagtcc

SEQ ID NO: 1530584 - DNA, 25 bp, Homo sapien
agccatgtaccactgagtagccagc

SEQ ID NO: 1530585 - DNA, 25 bp, Homo sapien
aggacaagtatacttaagattctgg

SEQ ID NO: 1530586 - DNA, 25 bp, Homo sapien
tacaataatttcctcgaagacttcc

SEQ ID NO: 1530587 - DNA, 25 bp, Homo sapien
cgaaagatatattacattaaggaca

SEQ ID NO: 1530588 - DNA, 25 bp, Homo sapien
gaagacttcctcaacgaaagatata

SEQ ID NO: 1530589 - DNA, 25 bp, Homo sapien
gaaatatgtaattgctgctatctga

SEQ ID NO: 1530590 - DNA, 25 bp, Homo sapien
agaggctgtaagtttggtctcagga

SEQ ID NO: 1530591 - DNA, 25 bp, Homo sapien
ccctcagtgggatggtaaactcaac

SEQ ID NO: 1530592 - DNA, 25 bp, Homo sapien
tgcaaagaatggcagcgcccagttc

SEQ ID NO: 1530593 - DNA, 25 bp, Homo sapien
gttgatatgaaaatggcaagaagtg

SEQ ID NO: 1530594 - DNA, 25 bp, Homo sapien
tgatatgaaaatggcaagaagtgtc

SEQ ID NO: 1530595 - DNA, 25 bp, Homo sapien
aagttgatatgaaaatggcaagaag

SEQ ID NO: 1530596 - DNA, 25 bp, Homo sapien
tgaaaatggcaagaagtgtcagcct

SEQ ID NO: 1530597 - DNA, 25 bp, Homo sapien
ataaattgattaaattgccatgtca

SEQ ID NO: 1530598 - DNA, 25 bp, Homo sapien
aaattgattaaattgccatgtcaga

SEQ ID NO: 1530599 - DNA, 25 bp, Homo sapien
taaattgattaaattgccatgtcag

SEQ ID NO: 1530600 - DNA, 25 bp, Homo sapien
cataaattgattaaattgccatgtc

SEQ ID NO: 1530601 - DNA, 25 bp, Homo sapien
acagcactaatgcttgcatcagcat

SEQ ID NO: 1530602 - DNA, 25 bp, Homo sapien
tgaacagcactaatgcttgcatcag

SEQ ID NO: 1530603 - DNA, 25 bp, Homo sapien
agcatgtccagggagtccagtgtga

SEQ ID NO: 1530604 - DNA, 25 bp, Homo sapien
cttcactgctggcagcatgtccagg

SEQ ID NO: 1530605 - DNA, 25 bp, Homo sapien
taccctcacttgtgatctaggtggt

SEQ ID NO: 1530606 - DNA, 25 bp, Homo sapien
tgctgcattccaccttcctattctg

SEQ ID NO: 1530607 - DNA, 25 bp, Homo sapien
tataggagtgtataggttaccagca

SEQ ID NO: 1530608 - DNA, 25 bp, Homo sapien
ggcttttgatacctactgtgaaact

SEQ ID NO: 1530609 - DNA, 25 bp, Homo sapien
tactttcagacggaaatggaagtcc

SEQ ID NO: 1530610 - DNA, 25 bp, Homo sapien
ccactgagtgagagttgaagtccaa

SEQ ID NO: 1530611 - DNA, 25 bp, Homo sapien
tctgacatagctctggcaggaagca

SEQ ID NO: 1530612 - DNA, 25 bp, Homo sapien
aaagttcaggctctctacaggtccc

SEQ ID NO: 1530613 - DNA, 25 bp, Homo sapien
gacctcaggcacgttgctaccatgc

SEQ ID NO: 1530614 - DNA, 25 bp, Homo sapien
tgagacctcaggcacgttgctacca

SEQ ID NO: 1530615 - DNA, 25 bp, Homo sapien
ttttgatgaggaattcactgtcatt

SEQ ID NO: 1530616 - DNA, 25 bp, Homo sapien
cccctataggtacagtatttttctg

SEQ ID NO: 1530617 - DNA, 25 bp, Homo sapien
gatgtaatagtgagcttaattccca

SEQ ID NO: 1530618 - DNA, 25 bp, Homo sapien
taaggtgagagcttggatgaccgat

SEQ ID NO: 1530619 - DNA, 25 bp, Homo sapien
tgagttcaatgctctccgaggttcc

SEQ ID NO: 1530620 - DNA, 25 bp, Homo sapien
gtcccacaaatttaaacatgcttca

SEQ ID NO: 1530621 - DNA, 25 bp, Homo sapien
actgataagcagtgatccaagaatc

SEQ ID NO: 1530622 - DNA, 25 bp, Homo sapien
tctgtattccatacagccatgtcgc

SEQ ID NO: 1530623 - DNA, 25 bp, Homo sapien
tgttatctgtattccatacagccat

SEQ ID NO: 1530624 - DNA, 25 bp, Homo sapien
cagtgatccaagaatcatggaatta

SEQ ID NO: 1530625 - DNA, 25 bp, Homo sapien
aattatgttgttgagaaaaagtgtc

SEQ ID NO: 1530626 - DNA, 25 bp, Homo sapien
ttcccaagcctattaaggaagcttc

SEQ ID NO: 1530627 - DNA, 25 bp, Homo sapien
cccaagcctattaaggaagcttcca

SEQ ID NO: 1530628 - DNA, 25 bp, Homo sapien
tgagaaaaagtgtcaaacataaaac

SEQ ID NO: 1530629 - DNA, 25 bp, Homo sapien
catctgacttcaggttaagaatttt

SEQ ID NO: 1530630 - DNA, 25 bp, Homo sapien
caaatgtattaaaaggcaggaggcc

SEQ ID NO: 1530631 - DNA, 25 bp, Homo sapien
gattatgaaaggcaacaacgaatgc

SEQ ID NO: 1530632 - DNA, 25 bp, Homo sapien
caacgaatgctacaatcactgtgat

SEQ ID NO: 1530633 - DNA, 25 bp, Homo sapien
cacacagatagagatttgcatcaaa

SEQ ID NO: 1530634 - DNA, 25 bp, Homo sapien
tactgtatgatattcgcacaatgat

SEQ ID NO: 1530635 - DNA, 25 bp, Homo sapien
gcagcctagatgcagtaggttatac

SEQ ID NO: 1530636 - DNA, 25 bp, Homo sapien
caatgataaaatcgcctaatatgca

SEQ ID NO: 1530637 - DNA, 25 bp, Homo sapien
ccccttgttaagtgacatgactgga

SEQ ID NO: 1530638 - DNA, 25 bp, Homo sapien
ttccattttacccacggattgttga

SEQ ID NO: 1530639 - DNA, 25 bp, Homo sapien
cccacggattgttgatttgtagaat

SEQ ID NO: 1530640 - DNA, 25 bp, Homo sapien
gtattaagttgtaggcagtttctgg

SEQ ID NO: 1530641 - DNA, 25 bp, Homo sapien
atgtattaagttgtaggcagtttct

SEQ ID NO: 1530642 - DNA, 25 bp, Homo sapien
ggttataaagatggactgacttcag

SEQ ID NO: 1530643 - DNA, 25 bp, Homo sapien
cacatgtgtgacgtccagaggtact

SEQ ID NO: 1530644 - DNA, 25 bp, Homo sapien
cataggccgaatgatgcgaacacac

SEQ ID NO: 1530645 - DNA, 25 bp, Homo sapien
gaagtaactcccatatttcagggct

SEQ ID NO: 1530646 - DNA, 25 bp, Homo sapien
tagcatagatacagcagtattaata

SEQ ID NO: 1530647 - DNA, 25 bp, Homo sapien
tattaatatcggtactgaatatcgc

SEQ ID NO: 1530648 - DNA, 25 bp, Homo sapien
taatatcggtactgaatatcgcatt

SEQ ID NO: 1530649 - DNA, 25 bp, Homo sapien
tacagcagtattaatatcggtactg

SEQ ID NO: 1530650 - DNA, 25 bp, Homo sapien
aagaactgaacctacatgcacacgg

SEQ ID NO: 1530651 - DNA, 25 bp, Homo sapien
gatgctgtttatctgaggaccacgc

SEQ ID NO: 1530652 - DNA, 25 bp, Homo sapien
tatcaagagagactaggccaacagt

SEQ ID NO: 1530653 - DNA, 25 bp, Homo sapien
caagaatcaatgctccctaggacag

SEQ ID NO: 1530654 - DNA, 25 bp, Homo sapien
tcaggaaaattgctagtgatgggaa

SEQ ID NO: 1530655 - DNA, 25 bp, Homo sapien
tgctagtgatgggaaatcaggtgtc

SEQ ID NO: 1530656 - DNA, 25 bp, Homo sapien
tcactgtttttttggtcatctcatc

SEQ ID NO: 1530657 - DNA, 25 bp, Homo sapien
ctgtgtttgagacctatcactgttt

SEQ ID NO: 1530658 - DNA, 25 bp, Homo sapien
catgacatggatgacgcaacaggca

SEQ ID NO: 1530659 - DNA, 25 bp, Homo sapien
tacaagggaactagcgcctgggaag

SEQ ID NO: 1530660 - DNA, 25 bp, Homo sapien
ttgaccaagtcacaagcggcagagc

SEQ ID NO: 1530661 - DNA, 25 bp, Homo sapien
tatgtatgctccactgacgtagaaa

SEQ ID NO: 1530662 - DNA, 25 bp, Homo sapien
actgtatctggatcatagaattctc

SEQ ID NO: 1530663 - DNA, 25 bp, Homo sapien
tccagttcatcagctccactgtatc

SEQ ID NO: 1530664 - DNA, 25 bp, Homo sapien
ctgtatctggatcatagaattctct

SEQ ID NO: 1530665 - DNA, 25 bp, Homo sapien
taaacataaaattggcagagacatc

SEQ ID NO: 1530666 - DNA, 25 bp, Homo sapien
ggtctatagtgactcttaaaaggca

SEQ ID NO: 1530667 - DNA, 25 bp, Homo sapien
ttgagcccggccagaaagaatactt

SEQ ID NO: 1530668 - DNA, 25 bp, Homo sapien
tactttcaagtgtcaccattagtgg

SEQ ID NO: 1530669 - DNA, 25 bp, Homo sapien
taatgtgttagtgccacaatcatct

SEQ ID NO: 1530670 - DNA, 25 bp, Homo sapien
agcagggccatcaccagcagagcga

SEQ ID NO: 1530671 - DNA, 25 bp, Homo sapien
aatcatctggattgttaacatactc

SEQ ID NO: 1530672 - DNA, 25 bp, Homo sapien
gtgactgtcttaatgtctggcctta

SEQ ID NO: 1530673 - DNA, 25 bp, Homo sapien
catgagcttggctgcacttgagagc

SEQ ID NO: 1530674 - DNA, 25 bp, Homo sapien
aagactccagcgtgaatgccatcca

SEQ ID NO: 1530675 - DNA, 25 bp, Homo sapien
caacagaggccttggatgtctacaa

SEQ ID NO: 1530676 - DNA, 25 bp, Homo sapien
taatttctcaggaggccctaagagc

SEQ ID NO: 1530677 - DNA, 25 bp, Homo sapien
aagacaacaaagaagacaatatcaa

SEQ ID NO: 1530678 - DNA, 25 bp, Homo sapien
caacaaagaagacaatatcaaactt

SEQ ID NO: 1530679 - DNA, 25 bp, Homo sapien
caaagaagacaatatcaaacttttt

SEQ ID NO: 1530680 - DNA, 25 bp, Homo sapien
cttaaagacaacaaagaagacaata

SEQ ID NO: 1530681 - DNA, 25 bp, Homo sapien
tagagtctgaattaaccccactgtt

SEQ ID NO: 1530682 - DNA, 25 bp, Homo sapien
agtctgaattaaccccactgttaag

SEQ ID NO: 1530683 - DNA, 25 bp, Homo sapien
tttagagtctgaattaaccccactg

SEQ ID NO: 1530684 - DNA, 25 bp, Homo sapien
gagtctgaattaaccccactgttaa

SEQ ID NO: 1530685 - DNA, 25 bp, Homo sapien
aacacagcctttcttggagtgttag

SEQ ID NO: 1530686 - DNA, 25 bp, Homo sapien
cacagcctttcttggagtgttagag

SEQ ID NO: 1530687 - DNA, 25 bp, Homo sapien
cccgcaaacacagcctttcttggag

SEQ ID NO: 1530688 - DNA, 25 bp, Homo sapien
gcaaacacagcctttcttggagtgt

SEQ ID NO: 1530689 - DNA, 25 bp, Homo sapien
gcttgactccggccagcaactgcat

SEQ ID NO: 1530690 - DNA, 25 bp, Homo sapien
ttggttagggtccttcccgtgcaca

SEQ ID NO: 1530691 - DNA, 25 bp, Homo sapien
tgctgtcttcatagtgcgggtggtt

SEQ ID NO: 1530692 - DNA, 25 bp, Homo sapien
cgtgcacagcttgactccggccagc

SEQ ID NO: 1530693 - DNA, 25 bp, Homo sapien
cacaccctcagtggatggatgcaaa

SEQ ID NO: 1530694 - DNA, 25 bp, Homo sapien
gctaattgagagaccccactgctcc

SEQ ID NO: 1530695 - DNA, 25 bp, Homo sapien
caaactgagcgtcccagattctggg

SEQ ID NO: 1530696 - DNA, 25 bp, Homo sapien
gctactccgcatctcagctaattga

SEQ ID NO: 1530697 - DNA, 25 bp, Homo sapien
taaaaatgcaatgtggcaaatgcta

SEQ ID NO: 1530698 - DNA, 25 bp, Homo sapien
atgcaatgtggcaaatgctacttga

SEQ ID NO: 1530699 - DNA, 25 bp, Homo sapien
acataaaaatgcaatgtggcaaatg

SEQ ID NO: 1530700 - DNA, 25 bp, Homo sapien
aatgcaatgtggcaaatgctacttg

SEQ ID NO: 1530701 - DNA, 25 bp, Homo sapien
ggtgccctcttggcatatatctgat

SEQ ID NO: 1530702 - DNA, 25 bp, Homo sapien
gtgccctcttggcatatatctgata

SEQ ID NO: 1530703 - DNA, 25 bp, Homo sapien
tgccctcttggcatatatctgataa

SEQ ID NO: 1530704 - DNA, 25 bp, Homo sapien
tgctgtcttccaggattacgtagtc

SEQ ID NO: 1530705 - DNA, 25 bp, Homo sapien
gattacgtagtcagtgccgaaggac

SEQ ID NO: 1530706 - DNA, 25 bp, Homo sapien
tggccgttggcaatgtccagcaggt

SEQ ID NO: 1530707 - DNA, 25 bp, Homo sapien
tgcctccgctcgtagcagatgctgt

SEQ ID NO: 1530708 - DNA, 25 bp, Homo sapien
accatccctgccatgcagcagctag

SEQ ID NO: 1530709 - DNA, 25 bp, Homo sapien
aatccaccacctagaccggagggca

SEQ ID NO: 1530710 - DNA, 25 bp, Homo sapien
gaaacacaccagtggacacaggaca

SEQ ID NO: 1530711 - DNA, 25 bp, Homo sapien
cagcagctagccaatacgaagcgtt

SEQ ID NO: 1530712 - DNA, 25 bp, Homo sapien
gagtgcagcgtcacacgatgatccc

SEQ ID NO: 1530713 - DNA, 25 bp, Homo sapien
tgaactatgattctcctcgggcaaa

SEQ ID NO: 1530714 - DNA, 25 bp, Homo sapien
taggctaggtttgtcactttgtcca

SEQ ID NO: 1530715 - DNA, 25 bp, Homo sapien
gagacctggcatagctccaagaaca

SEQ ID NO: 1530716 - DNA, 25 bp, Homo sapien
aaatcaggatcattctctcctgggc

SEQ ID NO: 1530717 - DNA, 25 bp, Homo sapien
ctcttcacagaagcgagggtggtct

SEQ ID NO: 1530718 - DNA, 25 bp, Homo sapien
cacgtagggaggcaggtttcttttg

SEQ ID NO: 1530719 - DNA, 25 bp, Homo sapien
ggtggtctgcaggtttcaaatcagg

SEQ ID NO: 1530720 - DNA, 25 bp, Homo sapien
actcgctgaaggatgtactgaccca

SEQ ID NO: 1530721 - DNA, 25 bp, Homo sapien
tatcctaaacggcagtggtctccaa

SEQ ID NO: 1530722 - DNA, 25 bp, Homo sapien
aaatcactgtttgccatcattgcgg

SEQ ID NO: 1530723 - DNA, 25 bp, Homo sapien
cagggccttcccagtaagattggag

SEQ ID NO: 1530724 - DNA, 25 bp, Homo sapien
cacaggcagagtccgttaagagcac

SEQ ID NO: 1530725 - DNA, 25 bp, Homo sapien
agtttgggacgggtgcacaactcca

SEQ ID NO: 1530726 - DNA, 25 bp, Homo sapien
tgagaacaccagagaacagcctcca

SEQ ID NO: 1530727 - DNA, 25 bp, Homo sapien
tcttgcttcggcctggtagagaggc

SEQ ID NO: 1530728 - DNA, 25 bp, Homo sapien
ttctcttaggccaaaaggttgccat

SEQ ID NO: 1530729 - DNA, 25 bp, Homo sapien
ggtaacatctaactatgctcctggc

SEQ ID NO: 1530730 - DNA, 25 bp, Homo sapien
tttgcctaagggtccaatgactaca

SEQ ID NO: 1530731 - DNA, 25 bp, Homo sapien
tctcacaagggtcgggaaaatcatc

SEQ ID NO: 1530732 - DNA, 25 bp, Homo sapien
aagagctttacttggtatacaatct

SEQ ID NO: 1530733 - DNA, 25 bp, Homo sapien
aaaagagctttacttggtatacaat

SEQ ID NO: 1530734 - DNA, 25 bp, Homo sapien
aaagagctttacttggtatacaatc

SEQ ID NO: 1530735 - DNA, 25 bp, Homo sapien
agagctttacttggtatacaatctc

SEQ ID NO: 1530736 - DNA, 25 bp, Homo sapien
ctctcagactggctctcaataatct

SEQ ID NO: 1530737 - DNA, 25 bp, Homo sapien
caaagcacaggtggaagtatcgcat

SEQ ID NO: 1530738 - DNA, 25 bp, Homo sapien
ggctctcaataatctgagaaaaagg

SEQ ID NO: 1530739 - DNA, 25 bp, Homo sapien
taatctgagaaaaaggatcgaaatg

SEQ ID NO: 1530740 - DNA, 25 bp, Homo sapien
ttgtactgtctttggagagtgtcaa

SEQ ID NO: 1530741 - DNA, 25 bp, Homo sapien
aattgtactgtctttggagagtgtc

SEQ ID NO: 1530742 - DNA, 25 bp, Homo sapien
attgtactgtctttggagagtgtca

SEQ ID NO: 1530743 - DNA, 25 bp, Homo sapien
taattgtactgtctttggagagtgt

SEQ ID NO: 1530744 - DNA, 25 bp, Homo sapien
gatcagtgcggctctgctgatgacc

SEQ ID NO: 1530745 - DNA, 25 bp, Homo sapien
gatgaccccttgaaggtccaagctg

SEQ ID NO: 1530746 - DNA, 25 bp, Homo sapien
tggactccgagcagctgatcagtgc

SEQ ID NO: 1530747 - DNA, 25 bp, Homo sapien
tccaagctgccgctaaaggttgaca

SEQ ID NO: 1530748 - DNA, 25 bp, Homo sapien
gctctctgggtgcatgcagatagcc

SEQ ID NO: 1530749 - DNA, 25 bp, Homo sapien
ctctctgggtgcatgcagatagcca

SEQ ID NO: 1530750 - DNA, 25 bp, Homo sapien
tctctgggtgcatgcagatagccat

SEQ ID NO: 1530751 - DNA, 25 bp, Homo sapien
tcttcacaggttgttttagagccat

SEQ ID NO: 1530752 - DNA, 25 bp, Homo sapien
cacttaatggttatgtcttcacagg

SEQ ID NO: 1530753 - DNA, 25 bp, Homo sapien
tcgtgatatcatggaaacggtgccg

SEQ ID NO: 1530754 - DNA, 25 bp, Homo sapien
tttattagccgtgatcctgcatgga

SEQ ID NO: 1530755 - DNA, 25 bp, Homo sapien
gcagcatgtggaattgcagattggt

SEQ ID NO: 1530756 - DNA, 25 bp, Homo sapien
agcatgtggaattgcagattggtac

SEQ ID NO: 1530757 - DNA, 25 bp, Homo sapien
cagcatgtggaattgcagattggta

SEQ ID NO: 1530758 - DNA, 25 bp, Homo sapien
ttatggttccatatgcccgatcctc

SEQ ID NO: 1530759 - DNA, 25 bp, Homo sapien
atggttccatatgcccgatcctctg

SEQ ID NO: 1530760 - DNA, 25 bp, Homo sapien
tatgcccgatcctctgagaaagcca

SEQ ID NO: 1530761 - DNA, 25 bp, Homo sapien
ttccatatgcccgatcctctgagaa

SEQ ID NO: 1530762 - DNA, 25 bp, Homo sapien
ttaatctccctcgtccatctctgtt

SEQ ID NO: 1530763 - DNA, 25 bp, Homo sapien
cctcgtccatctctgttgctgtaaa

SEQ ID NO: 1530764 - DNA, 25 bp, Homo sapien
tctctgttgctgtaaatttatgctc

SEQ ID NO: 1530765 - DNA, 25 bp, Homo sapien
gtccatctctgttgctgtaaattta

SEQ ID NO: 1530766 - DNA, 25 bp, Homo sapien
agcctgcagaaccagtcggtccgtc

SEQ ID NO: 1530767 - DNA, 25 bp, Homo sapien
caaatgcccggagtcctggtgtctc

SEQ ID NO: 1530768 - DNA, 25 bp, Homo sapien
agtcggtccgtctgcaacgctcagc

SEQ ID NO: 1530769 - DNA, 25 bp, Homo sapien
tgatctccaaggaaccccaaatgcc

SEQ ID NO: 1530770 - DNA, 25 bp, Homo sapien
gctggagcagccgcggtcactctcg

SEQ ID NO: 1530771 - DNA, 25 bp, Homo sapien
ggagcagccgcggtcactctcgcag

SEQ ID NO: 1530772 - DNA, 25 bp, Homo sapien
ggctcggcgtcagcgctggagcagc

SEQ ID NO: 1530773 - DNA, 25 bp, Homo sapien
cgctggagcagccgcggtcactctc

SEQ ID NO: 1530774 - DNA, 25 bp, Homo sapien
ctgtctcctcagcgcctcaagctcc

SEQ ID NO: 1530775 - DNA, 25 bp, Homo sapien
ctctgtctcctcagcgcctcaagct

SEQ ID NO: 1530776 - DNA, 25 bp, Homo sapien
tctgtctcctcagcgcctcaagctc

SEQ ID NO: 1530777 - DNA, 25 bp, Homo sapien
tgtctcctcagcgcctcaagctcct

SEQ ID NO: 1530778 - DNA, 25 bp, Homo sapien
taaacttgggtcataacaactgaac

SEQ ID NO: 1530779 - DNA, 25 bp, Homo sapien
ggtcataacaactgaactccggaaa

SEQ ID NO: 1530780 - DNA, 25 bp, Homo sapien
ggcccctcgcgacgaggaaagcgac

SEQ ID NO: 1530781 - DNA, 25 bp, Homo sapien
ggaaagcgacgaggccacctctgag

SEQ ID NO: 1530782 - DNA, 25 bp, Homo sapien
cgaaaccgtgtttcacatgtaggaa

SEQ ID NO: 1530783 - DNA, 25 bp, Homo sapien
gcctcggtattagggacaacgataa

SEQ ID NO: 1530784 - DNA, 25 bp, Homo sapien
cagaaacgcctctccgggcgtgtga

SEQ ID NO: 1530785 - DNA, 25 bp, Homo sapien
tctaaaaccacaacctcagaaggct

SEQ ID NO: 1530786 - DNA, 25 bp, Homo sapien
ttcctgttgggccgcatcaccagga

SEQ ID NO: 1530787 - DNA, 25 bp, Homo sapien
gcttcctgttgggccgcatcaccag

SEQ ID NO: 1530788 - DNA, 25 bp, Homo sapien
cctgttgggccgcatcaccaggatc

SEQ ID NO: 1530789 - DNA, 25 bp, Homo sapien
ttgcttcctgttgggccgcatcacc

SEQ ID NO: 1530790 - DNA, 25 bp, Homo sapien
caatacaaggtctgatgtggagctg

SEQ ID NO: 1530791 - DNA, 25 bp, Homo sapien
gataccctgcggatgattttggcca

SEQ ID NO: 1530792 - DNA, 25 bp, Homo sapien
cacttactaagtgaggcaccggact

SEQ ID NO: 1530793 - DNA, 25 bp, Homo sapien
tgctgtgcgctgtgttgggataaaa

SEQ ID NO: 1530794 - DNA, 25 bp, Homo sapien
ttcatggaatgtggcttaaagctca

SEQ ID NO: 1530795 - DNA, 25 bp, Homo sapien
gctcatttccataggccacttcttt

SEQ ID NO: 1530796 - DNA, 25 bp, Homo sapien
gccctgccacaaactttaagagatg

SEQ ID NO: 1530797 - DNA, 25 bp, Homo sapien
tatggtttgagtactgcagccctgc

SEQ ID NO: 1530798 - DNA, 25 bp, Homo sapien
taaaaacaaatgagcacagatgctt

SEQ ID NO: 1530799 - DNA, 25 bp, Homo sapien
ctaaaaacaaatgagcacagatgct

SEQ ID NO: 1530800 - DNA, 25 bp, Homo sapien
aaagtagttcacgttcacaggacag

SEQ ID NO: 1530801 - DNA, 25 bp, Homo sapien
aagtagttcacgttcacaggacagt

SEQ ID NO: 1530802 - DNA, 25 bp, Homo sapien
agtagttcacgttcacaggacagtg

SEQ ID NO: 1530803 - DNA, 25 bp, Homo sapien
gattccatgttttaagactctcagt

SEQ ID NO: 1530804 - DNA, 25 bp, Homo sapien
ttcaggcaattagaaggaccatgtg

SEQ ID NO: 1530805 - DNA, 25 bp, Homo sapien
cataggtaactgtggccaagctaca

SEQ ID NO: 1530806 - DNA, 25 bp, Homo sapien
gaggctatgctaaagagacataggt

SEQ ID NO: 1530807 - DNA, 25 bp, Homo sapien
aaagaacccatccagtatgtgtctc

SEQ ID NO: 1530808 - DNA, 25 bp, Homo sapien
taaaacacagctgtcggcattccca

SEQ ID NO: 1530809 - DNA, 25 bp, Homo sapien
taggtcaaacacaattaaaacacag

SEQ ID NO: 1530810 - DNA, 25 bp, Homo sapien
catgtaacatacgagaaagaaccca

SEQ ID NO: 1530811 - DNA, 25 bp, Homo sapien
gcccgggccgactgatccagaactt

SEQ ID NO: 1530812 - DNA, 25 bp, Homo sapien
cccgggccgactgatccagaacttg

SEQ ID NO: 1530813 - DNA, 25 bp, Homo sapien
ggcccgggccgactgatccagaact

SEQ ID NO: 1530814 - DNA, 25 bp, Homo sapien
caacattttgtgattggccctatga

SEQ ID NO: 1530815 - DNA, 25 bp, Homo sapien
tggtaagagaagtgacctggtactt

SEQ ID NO: 1530816 - DNA, 25 bp, Homo sapien
tcttacctaatacacacctggagaa

SEQ ID NO: 1530817 - DNA, 25 bp, Homo sapien
gcaataatggtatctaatcacccca

SEQ ID NO: 1530818 - DNA, 25 bp, Homo sapien
ggttctcagattctaagcaccatgc

SEQ ID NO: 1530819 - DNA, 25 bp, Homo sapien
tcacaagcttgtccctcagtgtagg

SEQ ID NO: 1530820 - DNA, 25 bp, Homo sapien
taaaatatatgactgccctctggaa

SEQ ID NO: 1530821 - DNA, 25 bp, Homo sapien
tcagtgtagggcaagacagtattgt

SEQ ID NO: 1530822 - DNA, 25 bp, Homo sapien
tcttgccatctgtataaggtaattc

SEQ ID NO: 1530823 - DNA, 25 bp, Homo sapien
ttgccatctgtataaggtaattctc

SEQ ID NO: 1530824 - DNA, 25 bp, Homo sapien
tgccatctgtataaggtaattctct

SEQ ID NO: 1530825 - DNA, 25 bp, Homo sapien
cttgccatctgtataaggtaattct

SEQ ID NO: 1530826 - DNA, 25 bp, Homo sapien
tgtggtggtagcagacggcttctca

SEQ ID NO: 1530827 - DNA, 25 bp, Homo sapien
ggcaattgaagctagctgaccctaa

SEQ ID NO: 1530828 - DNA, 25 bp, Homo sapien
tgtgacaaccacatataccacggtg

SEQ ID NO: 1530829 - DNA, 25 bp, Homo sapien
acaaggttccagagcaacgccagga

SEQ ID NO: 1530830 - DNA, 25 bp, Homo sapien
aggatttctattaaaccttgttctg

SEQ ID NO: 1530831 - DNA, 25 bp, Homo sapien
gatttctattaaaccttgttctgat

SEQ ID NO: 1530832 - DNA, 25 bp, Homo sapien
tttcactgttgttgtcttttctgtt

SEQ ID NO: 1530833 - DNA, 25 bp, Homo sapien
tttctattaaaccttgttctgatac

SEQ ID NO: 1530834 - DNA, 25 bp, Homo sapien
tgggaatggagtcaagagcctataa

SEQ ID NO: 1530835 - DNA, 25 bp, Homo sapien
ctcagattttccgagaaaagatttc

SEQ ID NO: 1530836 - DNA, 25 bp, Homo sapien
caaactttcacgtgtttgacaaaag

SEQ ID NO: 1530837 - DNA, 25 bp, Homo sapien
tgtgtctttaaagcaacttagcgtg

SEQ ID NO: 1530838 - DNA, 25 bp, Homo sapien
tcgtcatcttcatcagagtccatta

SEQ ID NO: 1530839 - DNA, 25 bp, Homo sapien
catcttcatcagagtccattacttt

SEQ ID NO: 1530840 - DNA, 25 bp, Homo sapien
tcagagtccattacttttcttctgt

SEQ ID NO: 1530841 - DNA, 25 bp, Homo sapien
gtcatcttcatcagagtccattact

SEQ ID NO: 1530842 - DNA, 25 bp, Homo sapien
aatcagatcttaacttctgtcctag

SEQ ID NO: 1530843 - DNA, 25 bp, Homo sapien
atcagatcttaacttctgtcctaga

SEQ ID NO: 1530844 - DNA, 25 bp, Homo sapien
tttaaaaggcatatagacaataaac

SEQ ID NO: 1530845 - DNA, 25 bp, Homo sapien
taatcagatcttaacttctgtccta

SEQ ID NO: 1530846 - DNA, 25 bp, Homo sapien
caaaccaggtcagagttactttcgg

SEQ ID NO: 1530847 - DNA, 25 bp, Homo sapien
tcaaaacttaacagcacaaaccagg

SEQ ID NO: 1530848 - DNA, 25 bp, Homo sapien
taatgtgccttggatatgtgccaaa

SEQ ID NO: 1530849 - DNA, 25 bp, Homo sapien
ggcctagagctacacgtatatgggt

SEQ ID NO: 1530850 - DNA, 25 bp, Homo sapien
ggttgaatccccagcgtggagtcca

SEQ ID NO: 1530851 - DNA, 25 bp, Homo sapien
taccactgggctttatggcctccaa

SEQ ID NO: 1530852 - DNA, 25 bp, Homo sapien
gggcagagcttttacccagtggtaa

SEQ ID NO: 1530853 - DNA, 25 bp, Homo sapien
ggctgaaactgaccgcaaggagtat

SEQ ID NO: 1530854 - DNA, 25 bp, Homo sapien
gtggatgaaggcgtccttcagcacc

SEQ ID NO: 1530855 - DNA, 25 bp, Homo sapien
ccccttgtaaatcagtgttaacatc

SEQ ID NO: 1530856 - DNA, 25 bp, Homo sapien
ccttcagcaccccttgtaaatcagt

SEQ ID NO: 1530857 - DNA, 25 bp, Homo sapien
ggatgaaggcgtccttcagcacccc

SEQ ID NO: 1530858 - DNA, 25 bp, Homo sapien
tgccaaagtccttaactgctacata

SEQ ID NO: 1530859 - DNA, 25 bp, Homo sapien
gccaaagtccttaactgctacatag

SEQ ID NO: 1530860 - DNA, 25 bp, Homo sapien
atttcttgcatgtgaagcactcctc

SEQ ID NO: 1530861 - DNA, 25 bp, Homo sapien
ctcctcaatcacatccttggcccga

SEQ ID NO: 1530862 - DNA, 25 bp, Homo sapien
gaatgttagcgctcgggagatccaa

SEQ ID NO: 1530863 - DNA, 25 bp, Homo sapien
cctcagcgcggcaggatgtggctaa

SEQ ID NO: 1530864 - DNA, 25 bp, Homo sapien
cgctcacgttggtcggtgcttccaa

SEQ ID NO: 1530865 - DNA, 25 bp, Homo sapien
gaacccagctatactgactcccgga

SEQ ID NO: 1530866 - DNA, 25 bp, Homo sapien
gcagtcgtcttgttgagcccgtcca

SEQ ID NO: 1530867 - DNA, 25 bp, Homo sapien
tcctgcaaggacacgaccgaggagg

SEQ ID NO: 1530868 - DNA, 25 bp, Homo sapien
tccatgttgtcgatcatctcgccca

SEQ ID NO: 1530869 - DNA, 25 bp, Homo sapien
ggcacgttgaccttcatctccatgt

SEQ ID NO: 1530870 - DNA, 25 bp, Homo sapien
gatgtgcactggaaacgcgcgtgta

SEQ ID NO: 1530871 - DNA, 25 bp, Homo sapien
taaagctcctgcagacgttagcggt

SEQ ID NO: 1530872 - DNA, 25 bp, Homo sapien
tgtagcgcgtcttagagaaagccct

SEQ ID NO: 1530873 - DNA, 25 bp, Homo sapien
taactcggagggatctagggtcact

SEQ ID NO: 1530874 - DNA, 25 bp, Homo sapien
tatttagtaatctaagtatctacat

SEQ ID NO: 1530875 - DNA, 25 bp, Homo sapien
atactatgtttgactcattggcagg

SEQ ID NO: 1530876 - DNA, 25 bp, Homo sapien
cttcagaagtagatgaaatatatat

SEQ ID NO: 1530877 - DNA, 25 bp, Homo sapien
gggggggaagactatcaacttcaga

SEQ ID NO: 1530878 - DNA, 25 bp, Homo sapien
cctgggcgacaccacaagatcctat

SEQ ID NO: 1530879 - DNA, 25 bp, Homo sapien
tagactgagcatagtagcttatgcc

SEQ ID NO: 1530880 - DNA, 25 bp, Homo sapien
tgtggtttgctgattgcgcccctgc

SEQ ID NO: 1530881 - DNA, 25 bp, Homo sapien
aaaattagttgagtgccgtgatgca

SEQ ID NO: 1530882 - DNA, 25 bp, Homo sapien
ctgcattcaagcgactctcttgcct

SEQ ID NO: 1530883 - DNA, 25 bp, Homo sapien
ctcctgcattcaagcgactctcttg

SEQ ID NO: 1530884 - DNA, 25 bp, Homo sapien
cctcctgcattcaagcgactctctt

SEQ ID NO: 1530885 - DNA, 25 bp, Homo sapien
cattcaagcgactctcttgccttaa

SEQ ID NO: 1530886 - DNA, 25 bp, Homo sapien
tttcagcgagcagaagaccttcaga

SEQ ID NO: 1530887 - DNA, 25 bp, Homo sapien
ccaagtgggtagaaagagtgacaac

SEQ ID NO: 1530888 - DNA, 25 bp, Homo sapien
cacacatctgatgggttgtttcaac

SEQ ID NO: 1530889 - DNA, 25 bp, Homo sapien
gaccttcagaatcaagtacacatct

SEQ ID NO: 1530890 - DNA, 25 bp, Homo sapien
tctattaggcaatgtcataactcca

SEQ ID NO: 1530891 - DNA, 25 bp, Homo sapien
gagagcagcctattgcacaaggcag

SEQ ID NO: 1530892 - DNA, 25 bp, Homo sapien
gcttgtcgtatagcagaagttctat

SEQ ID NO: 1530893 - DNA, 25 bp, Homo sapien
cagagatactagttagagagcagcc

SEQ ID NO: 1530894 - DNA, 25 bp, Homo sapien
tacttggagagcgaggcagtgtcct

SEQ ID NO: 1530895 - DNA, 25 bp, Homo sapien
ttgcaggaggagacacacccaaaag

SEQ ID NO: 1530896 - DNA, 25 bp, Homo sapien
aaaatgcagcattgtcagagtcctc

SEQ ID NO: 1530897 - DNA, 25 bp, Homo sapien
tctttgagttaatcaggtaggaccc

SEQ ID NO: 1530898 - DNA, 25 bp, Homo sapien
agccagccgccaggacgatgctggc

SEQ ID NO: 1530899 - DNA, 25 bp, Homo sapien
ccagccagccgccaggacgatgctg

SEQ ID NO: 1530900 - DNA, 25 bp, Homo sapien
cagccagccgccaggacgatgctgg

SEQ ID NO: 1530901 - DNA, 25 bp, Homo sapien
cagccggaagccctcggccggcggc

SEQ ID NO: 1530902 - DNA, 25 bp, Homo sapien
gcagccggaagccctcggccggcgg

SEQ ID NO: 1530903 - DNA, 25 bp, Homo sapien
gtccgccgagcggtcggccgcatcc

SEQ ID NO: 1530904 - DNA, 25 bp, Homo sapien
cgcccggcatgaagccttggtgcgg

SEQ ID NO: 1530905 - DNA, 25 bp, Homo sapien
gcatccagcactccgccggagaaga

SEQ ID NO: 1530906 - DNA, 25 bp, Homo sapien
actccgccggagaagacgtgcgcgc

SEQ ID NO: 1530907 - DNA, 25 bp, Homo sapien
tgtcggtcttgtggtcatcggtgtc

SEQ ID NO: 1530908 - DNA, 25 bp, Homo sapien
tacgtcctcaggcagcgtcccagtg

SEQ ID NO: 1530909 - DNA, 25 bp, Homo sapien
aaagcggtgcggctgaatggcgccg

SEQ ID NO: 1530910 - DNA, 25 bp, Homo sapien
tgtcgggcagcgacgggaaagcggt

SEQ ID NO: 1530911 - DNA, 25 bp, Homo sapien
tgtcgggtgtgcagtcgaggtgggc

SEQ ID NO: 1530912 - DNA, 25 bp, Homo sapien
gaagtggcgcgggtcctggcgcacg

SEQ ID NO: 1530913 - DNA, 25 bp, Homo sapien
ctggcgcacgcggtcgcgccaggag

SEQ ID NO: 1530914 - DNA, 25 bp, Homo sapien
aaaggcctcccgcacggcgcagatg

SEQ ID NO: 1530915 - DNA, 25 bp, Homo sapien
tgtcaaagcggcgagtggtgccccg

SEQ ID NO: 1530916 - DNA, 25 bp, Homo sapien
caaagcggcgagtggtgccccgcaa

SEQ ID NO: 1530917 - DNA, 25 bp, Homo sapien
gaaggccgtgtcaaagcggcgagtg

SEQ ID NO: 1530918 - DNA, 25 bp, Homo sapien
aggaagaaggccgtgtcaaagcggc

SEQ ID NO: 1530919 - DNA, 25 bp, Homo sapien
ctggcggtccgcagcaaggccctga

SEQ ID NO: 1530920 - DNA, 25 bp, Homo sapien
gatatgaggtcttagtatgttacag

SEQ ID NO: 1530921 - DNA, 25 bp, Homo sapien
gagattataggtatcagtcactgta

SEQ ID NO: 1530922 - DNA, 25 bp, Homo sapien
ccaggcaggtcttgagttcttgagc

SEQ ID NO: 1530923 - DNA, 25 bp, Homo sapien
gaagctggacggtcgcttgaggcca

SEQ ID NO: 1530924 - DNA, 25 bp, Homo sapien
cacccagccaagttccaatactttt

SEQ ID NO: 1530925 - DNA, 25 bp, Homo sapien
tcaaccgattcttctgccttggccc

SEQ ID NO: 1530926 - DNA, 25 bp, Homo sapien
ggttcaaccgattcttctgccttgg

SEQ ID NO: 1530927 - DNA, 25 bp, Homo sapien
ctgcacccagccaagttccaatact

SEQ ID NO: 1530928 - DNA, 25 bp, Homo sapien
cctttccagtccttctaatgcacga

SEQ ID NO: 1530929 - DNA, 25 bp, Homo sapien
taatgcacgacccaaacaaaatttg

SEQ ID NO: 1530930 - DNA, 25 bp, Homo sapien
gtcttctcacttcgtagaactgtgg

SEQ ID NO: 1530931 - DNA, 25 bp, Homo sapien
tcagcagttaacaagatgatcggca

SEQ ID NO: 1530932 - DNA, 25 bp, Homo sapien
taaacgtgtttatactttggctgaa

SEQ ID NO: 1530933 - DNA, 25 bp, Homo sapien
tgtcactatccggtgaaactgcttg

SEQ ID NO: 1530934 - DNA, 25 bp, Homo sapien
cataaaggtggcgatggtatgtcac

SEQ ID NO: 1530935 - DNA, 25 bp, Homo sapien
tggctgaacagtcacgtggatatca

SEQ ID NO: 1530936 - DNA, 25 bp, Homo sapien
aatgaaagtcaaccctcattattca

SEQ ID NO: 1530937 - DNA, 25 bp, Homo sapien
tattcatgaggacttcaagtaggcc

SEQ ID NO: 1530938 - DNA, 25 bp, Homo sapien
tgaaagtcaaccctcattattcatg

SEQ ID NO: 1530939 - DNA, 25 bp, Homo sapien
agcaaatgaaagtcaaccctcatta

SEQ ID NO: 1530940 - DNA, 25 bp, Homo sapien
caatacagaagtaggaacccttgtg

SEQ ID NO: 1530941 - DNA, 25 bp, Homo sapien
gcatgatacagtcaaagatctggac

SEQ ID NO: 1530942 - DNA, 25 bp, Homo sapien
gggtgtctcagccaacttttcatca

SEQ ID NO: 1530943 - DNA, 25 bp, Homo sapien
gaatggaataagcaagcgagctccc

SEQ ID NO: 1530944 - DNA, 25 bp, Homo sapien
gagtcctggacagtcatgaatccct

SEQ ID NO: 1530945 - DNA, 25 bp, Homo sapien
tcccagctggacttcaactggcagg

SEQ ID NO: 1530946 - DNA, 25 bp, Homo sapien
tgaatccctgggtcttcgtggcctc

SEQ ID NO: 1530947 - DNA, 25 bp, Homo sapien
ggctctccgagtctaaacgagttaa

SEQ ID NO: 1530948 - DNA, 25 bp, Homo sapien
tgccctatggagagggtatttcccc

SEQ ID NO: 1530949 - DNA, 25 bp, Homo sapien
gggaggcatgagacaacaatccttg

SEQ ID NO: 1530950 - DNA, 25 bp, Homo sapien
tgaacacagggactcaaaggcccgg

SEQ ID NO: 1530951 - DNA, 25 bp, Homo sapien
tacgcccgatgtaaatgaagacggt

SEQ ID NO: 1530952 - DNA, 25 bp, Homo sapien
ccctcgctgcgggatccctgcctgc

SEQ ID NO: 1530953 - DNA, 25 bp, Homo sapien
tgcgctccgtcctggcagtaaccag

SEQ ID NO: 1530954 - DNA, 25 bp, Homo sapien
aggcaatgcgctccgtcctggcagt

SEQ ID NO: 1530955 - DNA, 25 bp, Homo sapien
gtcggctcgaggcaatgcgctccgt

SEQ ID NO: 1530956 - DNA, 25 bp, Homo sapien
taatttttgataatcgacatcatga

SEQ ID NO: 1530957 - DNA, 25 bp, Homo sapien
taataacccagaagcaacctggatc

SEQ ID NO: 1530958 - DNA, 25 bp, Homo sapien
tttataataacccagaagcaacctg

SEQ ID NO: 1530959 - DNA, 25 bp, Homo sapien
tataataacccagaagcaacctgga

SEQ ID NO: 1530960 - DNA, 25 bp, Homo sapien
tttctatatcttgacacgtgctgtt

SEQ ID NO: 1530961 - DNA, 25 bp, Homo sapien
tcttgacacgtgctgttgtagaagt

SEQ ID NO: 1530962 - DNA, 25 bp, Homo sapien
gacacgtgctgttgtagaagtcatt

SEQ ID NO: 1530963 - DNA, 25 bp, Homo sapien
tatatcttgacacgtgctgttgtag

SEQ ID NO: 1530964 - DNA, 25 bp, Homo sapien
ccagcactttagctcctcacaatag

SEQ ID NO: 1530965 - DNA, 25 bp, Homo sapien
tgatttgacaatggccctgcaccag

SEQ ID NO: 1530966 - DNA, 25 bp, Homo sapien
tactggtctgcggaagacgtaattg

SEQ ID NO: 1530967 - DNA, 25 bp, Homo sapien
ttagctcctcacaatagaccacaca

SEQ ID NO: 1530968 - DNA, 25 bp, Homo sapien
tctgaaaagagcgtaaggtgagata

SEQ ID NO: 1530969 - DNA, 25 bp, Homo sapien
atttgtctctgaaaagagcgtaagg

SEQ ID NO: 1530970 - DNA, 25 bp, Homo sapien
gaaaagagcgtaaggtgagataaac

SEQ ID NO: 1530971 - DNA, 25 bp, Homo sapien
tgtctctgaaaagagcgtaaggtga

SEQ ID NO: 1530972 - DNA, 25 bp, Homo sapien
ttttttgctctatagggaagctgca

SEQ ID NO: 1530973 - DNA, 25 bp, Homo sapien
gaagctgcataaacgattctactac

SEQ ID NO: 1530974 - DNA, 25 bp, Homo sapien
atgtgtaatgtgacaggctttgtgc

SEQ ID NO: 1530975 - DNA, 25 bp, Homo sapien
caatgtcagtactgtctcggcagaa

SEQ ID NO: 1530976 - DNA, 25 bp, Homo sapien
tgaatagctgcattgtcccacttct

SEQ ID NO: 1530977 - DNA, 25 bp, Homo sapien
tgcattgtcccacttcttggcaggt

SEQ ID NO: 1530978 - DNA, 25 bp, Homo sapien
tagctgcattgtcccacttcttggc

SEQ ID NO: 1530979 - DNA, 25 bp, Homo sapien
aagtactgaatagctgcattgtccc

SEQ ID NO: 1530980 - DNA, 25 bp, Homo sapien
aggtaaacctcaaatgtatcttctt

SEQ ID NO: 1530981 - DNA, 25 bp, Homo sapien
cataaaggtaaacctcaaatgtatc

SEQ ID NO: 1530982 - DNA, 25 bp, Homo sapien
tatagttacataaaggtaaacctca

SEQ ID NO: 1530983 - DNA, 25 bp, Homo sapien
tacataaaggtaaacctcaaatgta

SEQ ID NO: 1530984 - DNA, 25 bp, Homo sapien
ggtgacatataacaagcatagttct

SEQ ID NO: 1530985 - DNA, 25 bp, Homo sapien
gagtgtaagtgctggattgagttta

SEQ ID NO: 1530986 - DNA, 25 bp, Homo sapien
tgcaaaaacattggccagagtgtaa

SEQ ID NO: 1530987 - DNA, 25 bp, Homo sapien
tttgtaggtgacatataacaagcat

SEQ ID NO: 1530988 - DNA, 25 bp, Homo sapien
tgaggtcaccgacaatacccttgca

SEQ ID NO: 1530989 - DNA, 25 bp, Homo sapien
tacccttgcaccatgtatgttgcag

SEQ ID NO: 1530990 - DNA, 25 bp, Homo sapien
tggctgttggcctgaggtcaccgac

SEQ ID NO: 1530991 - DNA, 25 bp, Homo sapien
gagattgtgccggaaaatttacacc

SEQ ID NO: 1530992 - DNA, 25 bp, Homo sapien
cctggcagtctcacatcagagttta

SEQ ID NO: 1530993 - DNA, 25 bp, Homo sapien
ctgagccaagcacgctgcacgatgg

SEQ ID NO: 1530994 - DNA, 25 bp, Homo sapien
tacaagaggcatatcagaatctggg

SEQ ID NO: 1530995 - DNA, 25 bp, Homo sapien
gatggcccattcagtaactcccagg

SEQ ID NO: 1530996 - DNA, 25 bp, Homo sapien
gaatctctcaatgaatccatattac

SEQ ID NO: 1530997 - DNA, 25 bp, Homo sapien
tctctcaatgaatccatattacatt

SEQ ID NO: 1530998 - DNA, 25 bp, Homo sapien
tctcaatgaatccatattacatttt

SEQ ID NO: 1530999 - DNA, 25 bp, Homo sapien
tgtctttaggtgaatctctcaatga

SEQ ID NO: 1531000 - DNA, 25 bp, Homo sapien
ggatcagcatatatggttatgcctc

SEQ ID NO: 1531001 - DNA, 25 bp, Homo sapien
catatatggttatgcctctttttgc

SEQ ID NO: 1531002 - DNA, 25 bp, Homo sapien
atatggttatgcctctttttgctgg

SEQ ID NO: 1531003 - DNA, 25 bp, Homo sapien
tacatctggatcagcatatatggtt

SEQ ID NO: 1531004 - DNA, 25 bp, Homo sapien
ttcgcaaggcagaacatgagggccg

SEQ ID NO: 1531005 - DNA, 25 bp, Homo sapien
ggcagaacatgagggccggacctca

SEQ ID NO: 1531006 - DNA, 25 bp, Homo sapien
ccacagttcgcaaggcagaacatga

SEQ ID NO: 1531007 - DNA, 25 bp, Homo sapien
gccacccacagttcgcaaggcagaa

SEQ ID NO: 1531008 - DNA, 25 bp, Homo sapien
cttctcagtcaatctaagaggtttc

SEQ ID NO: 1531009 - DNA, 25 bp, Homo sapien
tcagtcaatctaagaggtttctcat

SEQ ID NO: 1531010 - DNA, 25 bp, Homo sapien
tctcagtcaatctaagaggtttctc

SEQ ID NO: 1531011 - DNA, 25 bp, Homo sapien
cagtcaatctaagaggtttctcatt

SEQ ID NO: 1531012 - DNA, 25 bp, Homo sapien
gaggctgtaatagcctgccaaccaa

SEQ ID NO: 1531013 - DNA, 25 bp, Homo sapien
gctgtaatagcctgccaaccaaaaa

SEQ ID NO: 1531014 - DNA, 25 bp, Homo sapien
gaaattgaggctgtaatagcctgcc

SEQ ID NO: 1531015 - DNA, 25 bp, Homo sapien
ttgaggctgtaatagcctgccaacc

SEQ ID NO: 1531016 - DNA, 25 bp, Homo sapien
tcagagattccgtcagctctcaaag

SEQ ID NO: 1531017 - DNA, 25 bp, Homo sapien
agatcagagattccgtcagctctca

SEQ ID NO: 1531018 - DNA, 25 bp, Homo sapien
gctggagatcagagattccgtcagc

SEQ ID NO: 1531019 - DNA, 25 bp, Homo sapien
gagattccgtcagctctcaaaggat

SEQ ID NO: 1531020 - DNA, 25 bp, Homo sapien
aacaaggaacaatttctcagaagca

SEQ ID NO: 1531021 - DNA, 25 bp, Homo sapien
ccattcgatcgtttctaaaaggatg

SEQ ID NO: 1531022 - DNA, 25 bp, Homo sapien
taaaaggatgtcttcaggttaagtc

SEQ ID NO: 1531023 - DNA, 25 bp, Homo sapien
caaaaggaagatcgtttattatcca

SEQ ID NO: 1531024 - DNA, 25 bp, Homo sapien
gaacgtgtgcattagacaaccagtg

SEQ ID NO: 1531025 - DNA, 25 bp, Homo sapien
gagaacgtgtgcattagacaaccag

SEQ ID NO: 1531026 - DNA, 25 bp, Homo sapien
tgtgcattagacaaccagtgtctgc

SEQ ID NO: 1531027 - DNA, 25 bp, Homo sapien
ctgagagaacgtgtgcattagacaa

SEQ ID NO: 1531028 - DNA, 25 bp, Homo sapien
aagcagggcttgatcttgttccgga

SEQ ID NO: 1531029 - DNA, 25 bp, Homo sapien
tcttgttccggagcactaccacggg

SEQ ID NO: 1531030 - DNA, 25 bp, Homo sapien
ctgacagcggcgacgagtcaatggt

SEQ ID NO: 1531031 - DNA, 25 bp, Homo sapien
gacgagtcaatggttaagcagggct

SEQ ID NO: 1531032 - DNA, 25 bp, Homo sapien
attatacaatgcaaccttagagcca

SEQ ID NO: 1531033 - DNA, 25 bp, Homo sapien
aaaaagtagataaacacgtatgatc

SEQ ID NO: 1531034 - DNA, 25 bp, Homo sapien
cacttctaagaagctaacttggatt

SEQ ID NO: 1531035 - DNA, 25 bp, Homo sapien
gggctcacagttacacagcggctgc

SEQ ID NO: 1531036 - DNA, 25 bp, Homo sapien
tgtcaacactggtaggaggtagagc

SEQ ID NO: 1531037 - DNA, 25 bp, Homo sapien
acagtgagaaatgacaaccacatca

SEQ ID NO: 1531038 - DNA, 25 bp, Homo sapien
gaggccaagagtaagattcagtgtg

SEQ ID NO: 1531039 - DNA, 25 bp, Homo sapien
cagccacgcgctatgggaggccaag

SEQ ID NO: 1531040 - DNA, 25 bp, Homo sapien
tggtggagccccgtctggagcaccc

SEQ ID NO: 1531041 - DNA, 25 bp, Homo sapien
aggccccgagatgcaggttccacac

SEQ ID NO: 1531042 - DNA, 25 bp, Homo sapien
tttttcactggtggagccccgtctg

SEQ ID NO: 1531043 - DNA, 25 bp, Homo sapien
ttcactggtggagccccgtctggag

SEQ ID NO: 1531044 - DNA, 25 bp, Homo sapien
ttccacccagggcacacgatgactg

SEQ ID NO: 1531045 - DNA, 25 bp, Homo sapien
cctctttatggagcccaattgttaa

SEQ ID NO: 1531046 - DNA, 25 bp, Homo sapien
caattgttaatagcacaggatgaag

SEQ ID NO: 1531047 - DNA, 25 bp, Homo sapien
ccagggcacacgatgactgcgagag

SEQ ID NO: 1531048 - DNA, 25 bp, Homo sapien
tatggggtcgtaacaatcacatcac

SEQ ID NO: 1531049 - DNA, 25 bp, Homo sapien
ggctgtatggggtcgtaacaatcac

SEQ ID NO: 1531050 - DNA, 25 bp, Homo sapien
cagcaggctgtatggggtcgtaaca

SEQ ID NO: 1531051 - DNA, 25 bp, Homo sapien
cctcagcaggctgtatggggtcgta

SEQ ID NO: 1531052 - DNA, 25 bp, Homo sapien
tgatgtggtgcagattccctttctt

SEQ ID NO: 1531053 - DNA, 25 bp, Homo sapien
cacaatgtagggatcattcatgaac

SEQ ID NO: 1531054 - DNA, 25 bp, Homo sapien
tatatgtttgttccaatgaactcca

SEQ ID NO: 1531055 - DNA, 25 bp, Homo sapien
ttggacattgccatagagagcagcc

SEQ ID NO: 1531056 - DNA, 25 bp, Homo sapien
caagagcttggagtaaagaagaagt

SEQ ID NO: 1531057 - DNA, 25 bp, Homo sapien
aagatcaaggtcttttgtgcctgac

SEQ ID NO: 1531058 - DNA, 25 bp, Homo sapien
cagagcaggtgaagatcaaggtctt

SEQ ID NO: 1531059 - DNA, 25 bp, Homo sapien
cacattctaggcaaagatgtactac

SEQ ID NO: 1531060 - DNA, 25 bp, Homo sapien
tataatttgagagccagaacttaac

SEQ ID NO: 1531061 - DNA, 25 bp, Homo sapien
taatttgagagccagaacttaactt

SEQ ID NO: 1531062 - DNA, 25 bp, Homo sapien
aatataatttgagagccagaactta

SEQ ID NO: 1531063 - DNA, 25 bp, Homo sapien
ctaatataatttgagagccagaact

SEQ ID NO: 1531064 - DNA, 25 bp, Homo sapien
gcaatacaggcgtccaccaaaaact

SEQ ID NO: 1531065 - DNA, 25 bp, Homo sapien
cacacgtggcatcggtgatggccaa

SEQ ID NO: 1531066 - DNA, 25 bp, Homo sapien
ctgttcagcgtgaaaatgatcagac

SEQ ID NO: 1531067 - DNA, 25 bp, Homo sapien
ggaaactgaagtgaatcacacacgt

SEQ ID NO: 1531068 - DNA, 25 bp, Homo sapien
tcagatatggacaaagaggccttcc

SEQ ID NO: 1531069 - DNA, 25 bp, Homo sapien
tgcggtgaactcgtacagctctgcg

SEQ ID NO: 1531070 - DNA, 25 bp, Homo sapien
tccgctcgctccaagtagcgcagga

SEQ ID NO: 1531071 - DNA, 25 bp, Homo sapien
tctttctccgtcagcagcaagacag

SEQ ID NO: 1531072 - DNA, 25 bp, Homo sapien
tttctggattaatacggtgtcggtc

SEQ ID NO: 1531073 - DNA, 25 bp, Homo sapien
tacggtgtcggtcaggacagatcct

SEQ ID NO: 1531074 - DNA, 25 bp, Homo sapien
tatccaaatgaaggtagggcttggc

SEQ ID NO: 1531075 - DNA, 25 bp, Homo sapien
gctggacagtttcctgggcaagtcc

SEQ ID NO: 1531076 - DNA, 25 bp, Homo sapien
cggccaaagtaatttgttgcattca

SEQ ID NO: 1531077 - DNA, 25 bp, Homo sapien
caactatacggccaaagtaatttgt

SEQ ID NO: 1531078 - DNA, 25 bp, Homo sapien
tatacggccaaagtaatttgttgca

SEQ ID NO: 1531079 - DNA, 25 bp, Homo sapien
gtgtttatcaactatacggccaaag

SEQ ID NO: 1531080 - DNA, 25 bp, Homo sapien
agcattgagagttgcataaagatcc

SEQ ID NO: 1531081 - DNA, 25 bp, Homo sapien
cagcattgagagttgcataaagatc

SEQ ID NO: 1531082 - DNA, 25 bp, Homo sapien
ttcagcattgagagttgcataaaga

SEQ ID NO: 1531083 - DNA, 25 bp, Homo sapien
gcattgagagttgcataaagatcca

SEQ ID NO: 1531084 - DNA, 25 bp, Homo sapien
ttctgctaatccatacaatccaaac

SEQ ID NO: 1531085 - DNA, 25 bp, Homo sapien
ctgtgaaaaagcgttttttctgcta

SEQ ID NO: 1531086 - DNA, 25 bp, Homo sapien
tattagaatccttaaaatactcatt

SEQ ID NO: 1531087 - DNA, 25 bp, Homo sapien
tttccacagttgttttattagaatc

SEQ ID NO: 1531088 - DNA, 25 bp, Homo sapien
cagggcccaggcgtcttctttttgg

SEQ ID NO: 1531089 - DNA, 25 bp, Homo sapien
tgtcagcaggtttcaccctacagac

SEQ ID NO: 1531090 - DNA, 25 bp, Homo sapien
gaactctacaaggatgtcatccagg

SEQ ID NO: 1531091 - DNA, 25 bp, Homo sapien
tccattctatttcgttgtcagcagg

SEQ ID NO: 1531092 - DNA, 25 bp, Homo sapien
acaattttatgatgaatgtacctag

SEQ ID NO: 1531093 - DNA, 25 bp, Homo sapien
tttgcatcatgcaattttccaacaa

SEQ ID NO: 1531094 - DNA, 25 bp, Homo sapien
ccaggatcacttttgcatcatgcaa

SEQ ID NO: 1531095 - DNA, 25 bp, Homo sapien
ccaaagccaggatcacttttgcatc

SEQ ID NO: 1531096 - DNA, 25 bp, Homo sapien
ttcagctcgaacattataatcaatg

SEQ ID NO: 1531097 - DNA, 25 bp, Homo sapien
acaagctggtatcttagcatcttcg

SEQ ID NO: 1531098 - DNA, 25 bp, Homo sapien
gcccatggacaaaatttcagctcga

SEQ ID NO: 1531099 - DNA, 25 bp, Homo sapien
tagcatcttcgcgtaattttttcag

SEQ ID NO: 1531100 - DNA, 25 bp, Homo sapien
cggatggatgatcctggtcttgagc

SEQ ID NO: 1531101 - DNA, 25 bp, Homo sapien
ctgctcctcggatggatgatcctgg

SEQ ID NO: 1531102 - DNA, 25 bp, Homo sapien
gatggatgatcctggtcttgagcag

SEQ ID NO: 1531103 - DNA, 25 bp, Homo sapien
tcctcggatggatgatcctggtctt

SEQ ID NO: 1531104 - DNA, 25 bp, Homo sapien
gatatggggtctcttctagcaggct

SEQ ID NO: 1531105 - DNA, 25 bp, Homo sapien
ggctctctgtgaaacctcgcagtgc

SEQ ID NO: 1531106 - DNA, 25 bp, Homo sapien
tctgtgttcgtgaccacgggtatgt

SEQ ID NO: 1531107 - DNA, 25 bp, Homo sapien
agtgctgtatgctctgtgttcgtga

SEQ ID NO: 1531108 - DNA, 25 bp, Homo sapien
tcctcgtgggtgacaatgtgactca

SEQ ID NO: 1531109 - DNA, 25 bp, Homo sapien
ctcccttcctcgtgggtgacaatgt

SEQ ID NO: 1531110 - DNA, 25 bp, Homo sapien
ccttcctcgtgggtgacaatgtgac

SEQ ID NO: 1531111 - DNA, 25 bp, Homo sapien
tcgtgggtgacaatgtgactcagtt

SEQ ID NO: 1531112 - DNA, 25 bp, Homo sapien
tagacgggagaggcaggggttaaca

SEQ ID NO: 1531113 - DNA, 25 bp, Homo sapien
cgggagaggcaggggttaacacctg

SEQ ID NO: 1531114 - DNA, 25 bp, Homo sapien
ggagaggcaggggttaacacctggc

SEQ ID NO: 1531115 - DNA, 25 bp, Homo sapien
gagaggcaggggttaacacctggct

SEQ ID NO: 1531116 - DNA, 25 bp, Homo sapien
cttctgcacccgtgtcctcaggctg

SEQ ID NO: 1531117 - DNA, 25 bp, Homo sapien
gcccctccttctgcacccgtgtcct

SEQ ID NO: 1531118 - DNA, 25 bp, Homo sapien
gagctcgtcttggactcagcccctc

SEQ ID NO: 1531119 - DNA, 25 bp, Homo sapien
cctccttctgcacccgtgtcctcag

SEQ ID NO: 1531120 - DNA, 25 bp, Homo sapien
tccagacattaacgatttgaactta

SEQ ID NO: 1531121 - DNA, 25 bp, Homo sapien
catttcatctcaaagtagaaagtct

SEQ ID NO: 1531122 - DNA, 25 bp, Homo sapien
ttgaacttaaccatcttttgaatac

SEQ ID NO: 1531123 - DNA, 25 bp, Homo sapien
gtagaaagtctaaacattagcaatt

SEQ ID NO: 1531124 - DNA, 25 bp, Homo sapien
ggcgctgtgcaataaaagtgagcct

SEQ ID NO: 1531125 - DNA, 25 bp, Homo sapien
taagtccgtgcaattagcctggccg

SEQ ID NO: 1531126 - DNA, 25 bp, Homo sapien
ggtcagccaactctattaacgccag

SEQ ID NO: 1531127 - DNA, 25 bp, Homo sapien
tcagtgccaagttcatacacgtcag

SEQ ID NO: 1531128 - DNA, 25 bp, Homo sapien
gggcaaggctgccttcgtcacagga

SEQ ID NO: 1531129 - DNA, 25 bp, Homo sapien
cactctccatcctcaatgaggaatg

SEQ ID NO: 1531130 - DNA, 25 bp, Homo sapien
aggctgccttcgtcacaggagccac

SEQ ID NO: 1531131 - DNA, 25 bp, Homo sapien
ccagagatgcatgggaatcacacag

SEQ ID NO: 1531132 - DNA, 25 bp, Homo sapien
caccagccacagtcacggccagcaa

SEQ ID NO: 1531133 - DNA, 25 bp, Homo sapien
cagccacagtcacggccagcaagag

SEQ ID NO: 1531134 - DNA, 25 bp, Homo sapien
acggccagcaagagcagcacatggg

SEQ ID NO: 1531135 - DNA, 25 bp, Homo sapien
cagcaagagcagcacatgggactgt

SEQ ID NO: 1531136 - DNA, 25 bp, Homo sapien
actcggctccggaagatcctttctc

SEQ ID NO: 1531137 - DNA, 25 bp, Homo sapien
cactcggctccggaagatcctttct

SEQ ID NO: 1531138 - DNA, 25 bp, Homo sapien
ctcggctccggaagatcctttctcc

SEQ ID NO: 1531139 - DNA, 25 bp, Homo sapien
gacaactgttgtcccaatgaccctg

SEQ ID NO: 1531140 - DNA, 25 bp, Homo sapien
tgcaaagtgcaaatgggccggtagc

SEQ ID NO: 1531141 - DNA, 25 bp, Homo sapien
tggatcccggtctgctaccgtggaa

SEQ ID NO: 1531142 - DNA, 25 bp, Homo sapien
taccgtggaataaacactgctctgg

SEQ ID NO: 1531143 - DNA, 25 bp, Homo sapien
aatggatgcatcatacttttctagc

SEQ ID NO: 1531144 - DNA, 25 bp, Homo sapien
cgtgtggcagcacaatggatgcatc

SEQ ID NO: 1531145 - DNA, 25 bp, Homo sapien
tggcagcacaatggatgcatcatac

SEQ ID NO: 1531146 - DNA, 25 bp, Homo sapien
gcagcacaatggatgcatcatactt

SEQ ID NO: 1531147 - DNA, 25 bp, Homo sapien
tgccctaactgtgatgagcctctga

SEQ ID NO: 1531148 - DNA, 25 bp, Homo sapien
ggaatgctgccctaactgtgatgag

SEQ ID NO: 1531149 - DNA, 25 bp, Homo sapien
tgctgccctaactgtgatgagcctc

SEQ ID NO: 1531150 - DNA, 25 bp, Homo sapien
taactgtgatgagcctctgaagctc

SEQ ID NO: 1531151 - DNA, 25 bp, Homo sapien
ccagctgcagcagggctggcagatc

SEQ ID NO: 1531152 - DNA, 25 bp, Homo sapien
ccgaccagctgcagcagggctggca

SEQ ID NO: 1531153 - DNA, 25 bp, Homo sapien
gaccagctgcagcagggctggcaga

SEQ ID NO: 1531154 - DNA, 25 bp, Homo sapien
ctgagaccgaccagctgcagcaggg

SEQ ID NO: 1531155 - DNA, 25 bp, Homo sapien
gcacagtggcatgcgggtgtcacgt

SEQ ID NO: 1531156 - DNA, 25 bp, Homo sapien
cgggtgtcacgtctgcagaggaggg

SEQ ID NO: 1531157 - DNA, 25 bp, Homo sapien
catgcgggtgtcacgtctgcagagg

SEQ ID NO: 1531158 - DNA, 25 bp, Homo sapien
agtggcatgcgggtgtcacgtctgc

SEQ ID NO: 1531159 - DNA, 25 bp, Homo sapien
gttctgctaatgaaggcaccttcag

SEQ ID NO: 1531160 - DNA, 25 bp, Homo sapien
gcaccttcagtgtttccagataaag

SEQ ID NO: 1531161 - DNA, 25 bp, Homo sapien
ccttcagtgtttccagataaagttt

SEQ ID NO: 1531162 - DNA, 25 bp, Homo sapien
tttcagaggcggctgtgcagttctg

SEQ ID NO: 1531163 - DNA, 25 bp, Homo sapien
cgactcctccatgccgagtggacgt

SEQ ID NO: 1531164 - DNA, 25 bp, Homo sapien
tgatcttattaactgggtaagggac

SEQ ID NO: 1531165 - DNA, 25 bp, Homo sapien
ctgcgcattcattgatcttattaac

SEQ ID NO: 1531166 - DNA, 25 bp, Homo sapien
ggacgccgactcctccatgccgagt

SEQ ID NO: 1531167 - DNA, 25 bp, Homo sapien
gacacttgtagtcctttacattcct

SEQ ID NO: 1531168 - DNA, 25 bp, Homo sapien
ctgaaaacgactctatcccttaaat

SEQ ID NO: 1531169 - DNA, 25 bp, Homo sapien
gactctatcccttaaatactgacac

SEQ ID NO: 1531170 - DNA, 25 bp, Homo sapien
tatctttaagatgacgacatcttct

SEQ ID NO: 1531171 - DNA, 25 bp, Homo sapien
catcgtttctaatcacacattggca

SEQ ID NO: 1531172 - DNA, 25 bp, Homo sapien
tctctctttggccagagtgattaca

SEQ ID NO: 1531173 - DNA, 25 bp, Homo sapien
atgttgccccgcagctccagatcag

SEQ ID NO: 1531174 - DNA, 25 bp, Homo sapien
tctgtctgagtaggtgacaccatgc

SEQ ID NO: 1531175 - DNA, 25 bp, Homo sapien
aagtggctgtcctcttcacagtctt

SEQ ID NO: 1531176 - DNA, 25 bp, Homo sapien
actctcactgtcgtcatcctctgaa

SEQ ID NO: 1531177 - DNA, 25 bp, Homo sapien
cactgtgtacggcaggtttttagaa

SEQ ID NO: 1531178 - DNA, 25 bp, Homo sapien
actgtcgtcatcctctgaagtgctg

SEQ ID NO: 1531179 - DNA, 25 bp, Homo sapien
accacctctgtcactgtgtacggca

SEQ ID NO: 1531180 - DNA, 25 bp, Homo sapien
gggcattggcgctttctgatacaaa

SEQ ID NO: 1531181 - DNA, 25 bp, Homo sapien
gcagggctcacgacatgtaggcatt

SEQ ID NO: 1531182 - DNA, 25 bp, Homo sapien
caaagttcacctctagttcaagcgg

SEQ ID NO: 1531183 - DNA, 25 bp, Homo sapien
gctgggacatacataagcctgggca

SEQ ID NO: 1531184 - DNA, 25 bp, Homo sapien
accagaactttctacttcccaagag

SEQ ID NO: 1531185 - DNA, 25 bp, Homo sapien
acatgcagagaaacagacactgata

SEQ ID NO: 1531186 - DNA, 25 bp, Homo sapien
gggcgccactggacggcggcctggt

SEQ ID NO: 1531187 - DNA, 25 bp, Homo sapien
tatgggtgttagaagagctccacag

SEQ ID NO: 1531188 - DNA, 25 bp, Homo sapien
gatctaagcatgcagttgtcctccc

SEQ ID NO: 1531189 - DNA, 25 bp, Homo sapien
taccacaactaagcatgagcgattt

SEQ ID NO: 1531190 - DNA, 25 bp, Homo sapien
tattgatgatacactgcggaagaca

SEQ ID NO: 1531191 - DNA, 25 bp, Homo sapien
tgtgctgtatgaaagagactcggcg

SEQ ID NO: 1531192 - DNA, 25 bp, Homo sapien
ctgtgtttggcattcagggaaagta

SEQ ID NO: 1531193 - DNA, 25 bp, Homo sapien
cacgagggtcgcctgcattgccagt

SEQ ID NO: 1531194 - DNA, 25 bp, Homo sapien
tcacgggcgttttagtcaaaccaga

SEQ ID NO: 1531195 - DNA, 25 bp, Homo sapien
acagccggtgtgctcatcacgaggg

SEQ ID NO: 1531196 - DNA, 25 bp, Homo sapien
cagaaagtgtggtgagtaaagtttt

SEQ ID NO: 1531197 - DNA, 25 bp, Homo sapien
tacccagttgataaccatggttacc

SEQ ID NO: 1531198 - DNA, 25 bp, Homo sapien
ggtcatgggtgaattttgatttatc

SEQ ID NO: 1531199 - DNA, 25 bp, Homo sapien
ttctataaagattggaatagggcca

SEQ ID NO: 1531200 - DNA, 25 bp, Homo sapien
tgtgttcatgtcatgtgaattttct

SEQ ID NO: 1531201 - DNA, 25 bp, Homo sapien
agcgttgctccgaaggcagctgtgc

SEQ ID NO: 1531202 - DNA, 25 bp, Homo sapien
gttgctccgaaggcagctgtgccac

SEQ ID NO: 1531203 - DNA, 25 bp, Homo sapien
cagccagcgttgctccgaaggcagc

SEQ ID NO: 1531204 - DNA, 25 bp, Homo sapien
cgttgctccgaaggcagctgtgcca

SEQ ID NO: 1531205 - DNA, 25 bp, Homo sapien
aaactgcagctgtggatccgagcct

SEQ ID NO: 1531206 - DNA, 25 bp, Homo sapien
tgcacacttcatggagccggtggaa

SEQ ID NO: 1531207 - DNA, 25 bp, Homo sapien
gaagccccgtccctcatgagttggg

SEQ ID NO: 1531208 - DNA, 25 bp, Homo sapien
aactgacagcttatggccacacggt

SEQ ID NO: 1531209 - DNA, 25 bp, Homo sapien
gatatacccactacatacatctgcc

SEQ ID NO: 1531210 - DNA, 25 bp, Homo sapien
ccgatatacccactacatacatctg

SEQ ID NO: 1531211 - DNA, 25 bp, Homo sapien
cccactacatacatctgccagctgt

SEQ ID NO: 1531212 - DNA, 25 bp, Homo sapien
tatacccactacatacatctgccag

SEQ ID NO: 1531213 - DNA, 25 bp, Homo sapien
gcattcgtccccgtgcccggagtta

SEQ ID NO: 1531214 - DNA, 25 bp, Homo sapien
cccagggtcggccacagttggacag

SEQ ID NO: 1531215 - DNA, 25 bp, Homo sapien
ttaactcctggacgacgtacacctg

SEQ ID NO: 1531216 - DNA, 25 bp, Homo sapien
atgtacaccccatcagcaagtccca

SEQ ID NO: 1531217 - DNA, 25 bp, Homo sapien
tactcccggctaattgttcaatatt

SEQ ID NO: 1531218 - DNA, 25 bp, Homo sapien
ctcgcgctgcaaggatgctcctggg

SEQ ID NO: 1531219 - DNA, 25 bp, Homo sapien
caatggccgacgtggttgctgcaaa

SEQ ID NO: 1531220 - DNA, 25 bp, Homo sapien
ctcctgggatttcggagaggccgca

SEQ ID NO: 1531221 - DNA, 25 bp, Homo sapien
cctggctgtggatagatctgctgat

SEQ ID NO: 1531222 - DNA, 25 bp, Homo sapien
agtccttcatccagcccgccctccg

SEQ ID NO: 1531223 - DNA, 25 bp, Homo sapien
ccagtccttcatccagcccgccctc

SEQ ID NO: 1531224 - DNA, 25 bp, Homo sapien
gccctcggtgctcgcccagtccttc

SEQ ID NO: 1531225 - DNA, 25 bp, Homo sapien
cgggttcacgccctcggtgctcgcc

SEQ ID NO: 1531226 - DNA, 25 bp, Homo sapien
atcatgttactggtggccgcgccac

SEQ ID NO: 1531227 - DNA, 25 bp, Homo sapien
gagatcatgttactggtggccgcgc

SEQ ID NO: 1531228 - DNA, 25 bp, Homo sapien
tctagagatcatgttactggtggcc

SEQ ID NO: 1531229 - DNA, 25 bp, Homo sapien
cagtctagagatcatgttactggtg

SEQ ID NO: 1531230 - DNA, 25 bp, Homo sapien
agtccagtccaaggcccgaatacag

SEQ ID NO: 1531231 - DNA, 25 bp, Homo sapien
cgtagcttctcagtccagtccaagg

SEQ ID NO: 1531232 - DNA, 25 bp, Homo sapien
agtccaaggcccgaatacagccggc

SEQ ID NO: 1531233 - DNA, 25 bp, Homo sapien
caaggcccgaatacagccggcagga

SEQ ID NO: 1531234 - DNA, 25 bp, Homo sapien
ctagcccctgataccccagctggat

SEQ ID NO: 1531235 - DNA, 25 bp, Homo sapien
tagcccctgataccccagctggatc

SEQ ID NO: 1531236 - DNA, 25 bp, Homo sapien
cctgataccccagctggatccgcac

SEQ ID NO: 1531237 - DNA, 25 bp, Homo sapien
gcccctgataccccagctggatccg

SEQ ID NO: 1531238 - DNA, 25 bp, Homo sapien
tttctcattggccacaatatgcccc

SEQ ID NO: 1531239 - DNA, 25 bp, Homo sapien
tgcgccagctgtgacccgcgccatt

SEQ ID NO: 1531240 - DNA, 25 bp, Homo sapien
atatgccccaaaggcacgtgcacgg

SEQ ID NO: 1531241 - DNA, 25 bp, Homo sapien
tgtgacccgcgccatttctcattgg

SEQ ID NO: 1531242 - DNA, 25 bp, Homo sapien
tgtcaagccatcctcgaaaatgagc

SEQ ID NO: 1531243 - DNA, 25 bp, Homo sapien
ctgttcgacagataaaagtctggtg

SEQ ID NO: 1531244 - DNA, 25 bp, Homo sapien
cagataaaagtctggtgtcaagcca

SEQ ID NO: 1531245 - DNA, 25 bp, Homo sapien
agtctggtgtcaagccatcctcgaa

SEQ ID NO: 1531246 - DNA, 25 bp, Homo sapien
acccgaacaagcctctttctgtagc

SEQ ID NO: 1531247 - DNA, 25 bp, Homo sapien
tttctgtagccatttcctgccacca

SEQ ID NO: 1531248 - DNA, 25 bp, Homo sapien
aaatcagcttcggtgacataaagaa

SEQ ID NO: 1531249 - DNA, 25 bp, Homo sapien
ctaacccgaacaagcctctttctgt

SEQ ID NO: 1531250 - DNA, 25 bp, Homo sapien
tgtagggctgggaagtattgttcac

SEQ ID NO: 1531251 - DNA, 25 bp, Homo sapien
tcactcatccgggttttttcaacga

SEQ ID NO: 1531252 - DNA, 25 bp, Homo sapien
caaggtccagcacagtaaacttctg

SEQ ID NO: 1531253 - DNA, 25 bp, Homo sapien
tggatgacgaggcaggatgcttcca

SEQ ID NO: 1531254 - DNA, 25 bp, Homo sapien
actcagttgctggatgcttggaaac

SEQ ID NO: 1531255 - DNA, 25 bp, Homo sapien
cgagaagagggttcttactgggctc

SEQ ID NO: 1531256 - DNA, 25 bp, Homo sapien
gctccagttccccaatggaagcatt

SEQ ID NO: 1531257 - DNA, 25 bp, Homo sapien
cacggttcgaaggagcgaaggctca

SEQ ID NO: 1531258 - DNA, 25 bp, Homo sapien
ctgggctgcgtgaagaaggcatgga

SEQ ID NO: 1531259 - DNA, 25 bp, Homo sapien
tgggctgcgtgaagaaggcatggat

SEQ ID NO: 1531260 - DNA, 25 bp, Homo sapien
gacagatgcaggtcaaggtcgcaca

SEQ ID NO: 1531261 - DNA, 25 bp, Homo sapien
tatttacattggaaacagccctcgc

SEQ ID NO: 1531262 - DNA, 25 bp, Homo sapien
tgaactcagacgctaaggcaggacg

SEQ ID NO: 1531263 - DNA, 25 bp, Homo sapien
tagaaggcactttccatgacagatg

SEQ ID NO: 1531264 - DNA, 25 bp, Homo sapien
tgaatgggcaatttgtaccttttga

SEQ ID NO: 1531265 - DNA, 25 bp, Homo sapien
tgttctgcctcatgcatgttgagtt

SEQ ID NO: 1531266 - DNA, 25 bp, Homo sapien
tcaactttaagtgggaacttcagac

SEQ ID NO: 1531267 - DNA, 25 bp, Homo sapien
ctatgcccggccgttgagttttcaa

SEQ ID NO: 1531268 - DNA, 25 bp, Homo sapien
gagatcttcaaggacagcaggcaaa

SEQ ID NO: 1531269 - DNA, 25 bp, Homo sapien
tagctttcaagcgtctgatccagcc

SEQ ID NO: 1531270 - DNA, 25 bp, Homo sapien
ttttcggctaacaagcggtggacgc

SEQ ID NO: 1531271 - DNA, 25 bp, Homo sapien
ggctttccaggttctcgcatgactg

SEQ ID NO: 1531272 - DNA, 25 bp, Homo sapien
cacagcagctggccgattttgtttt

SEQ ID NO: 1531273 - DNA, 25 bp, Homo sapien
acagcagctggccgattttgtttta

SEQ ID NO: 1531274 - DNA, 25 bp, Homo sapien
ccacagcagctggccgattttgttt

SEQ ID NO: 1531275 - DNA, 25 bp, Homo sapien
gccacagcagctggccgattttgtt

SEQ ID NO: 1531276 - DNA, 25 bp, Homo sapien
tggagttgttcgtctggagttgttc

SEQ ID NO: 1531277 - DNA, 25 bp, Homo sapien
tgtagaaatgatccctggaagtaca

SEQ ID NO: 1531278 - DNA, 25 bp, Homo sapien
ttgctgtacacgtacagagaaactt

SEQ ID NO: 1531279 - DNA, 25 bp, Homo sapien
acgaactgtagaaatgatccctgga

SEQ ID NO: 1531280 - DNA, 25 bp, Homo sapien
gttgctgtacacgtacagagaaact

SEQ ID NO: 1531281 - DNA, 25 bp, Homo sapien
tgcatcttttatgaacgcttgtgtg

SEQ ID NO: 1531282 - DNA, 25 bp, Homo sapien
tgagggctaatttcgtgttagacac

SEQ ID NO: 1531283 - DNA, 25 bp, Homo sapien
gagcagcattcatcttagtgagggc

SEQ ID NO: 1531284 - DNA, 25 bp, Homo sapien
aggagcagggatctactctttgatg

SEQ ID NO: 1531285 - DNA, 25 bp, Homo sapien
ccgcgaaccccggtgatgctggaag

SEQ ID NO: 1531286 - DNA, 25 bp, Homo sapien
cgagcctgcgctccggattctcagg

SEQ ID NO: 1531287 - DNA, 25 bp, Homo sapien
ggagactcctggcataagctggaag

SEQ ID NO: 1531288 - DNA, 25 bp, Homo sapien
gcctcggaggatttggcagccacga

SEQ ID NO: 1531289 - DNA, 25 bp, Homo sapien
cggtcccatagctgaccagatcttc

SEQ ID NO: 1531290 - DNA, 25 bp, Homo sapien
ggctccagcccggtcccatagctga

SEQ ID NO: 1531291 - DNA, 25 bp, Homo sapien
cttcgctgtcactgtcccgcgccgc

SEQ ID NO: 1531292 - DNA, 25 bp, Homo sapien
cagcccggtcccatagctgaccaga

SEQ ID NO: 1531293 - DNA, 25 bp, Homo sapien
ctgaagagggattggtttctttggt

SEQ ID NO: 1531294 - DNA, 25 bp, Homo sapien
tgaagagggattggtttctttggtc

SEQ ID NO: 1531295 - DNA, 25 bp, Homo sapien
tattgaagtatccagcagagaaacc

SEQ ID NO: 1531296 - DNA, 25 bp, Homo sapien
ccaacagtattgaagtatccagcag

SEQ ID NO: 1531297 - DNA, 25 bp, Homo sapien
cttcttttgagccaacagtattgaa

SEQ ID NO: 1531298 - DNA, 25 bp, Homo sapien
ctccactaaaggccccgtggaatcg

SEQ ID NO: 1531299 - DNA, 25 bp, Homo sapien
ccaagaacagatttgtctgctctgt

SEQ ID NO: 1531300 - DNA, 25 bp, Homo sapien
caggaccaagaacagatttgtctgc

SEQ ID NO: 1531301 - DNA, 25 bp, Homo sapien
tctgctctgttctgtcgtgaagaca

SEQ ID NO: 1531302 - DNA, 25 bp, Homo sapien
aagacacaaaggtagagggtgtcca

SEQ ID NO: 1531303 - DNA, 25 bp, Homo sapien
gtagcagcggccaactgcctagcct

SEQ ID NO: 1531304 - DNA, 25 bp, Homo sapien
caaaatcgtctgtggtgacaatcgc

SEQ ID NO: 1531305 - DNA, 25 bp, Homo sapien
tttgctggcgttatgaggtcatcaa

SEQ ID NO: 1531306 - DNA, 25 bp, Homo sapien
tgcctagccttttctcgtattctgt

SEQ ID NO: 1531307 - DNA, 25 bp, Homo sapien
gtttctgtcggcgtggccgtctctt

SEQ ID NO: 1531308 - DNA, 25 bp, Homo sapien
tttcttagcaattcgaaaccaacag

SEQ ID NO: 1531309 - DNA, 25 bp, Homo sapien
tagcaattcgaaaccaacagataat

SEQ ID NO: 1531310 - DNA, 25 bp, Homo sapien
ttactcgaggaccaactccttgtcc

SEQ ID NO: 1531311 - DNA, 25 bp, Homo sapien
gaaaagagatttcaaatgcaatagt

SEQ ID NO: 1531312 - DNA, 25 bp, Homo sapien
tagaaaagagatttcaaatgcaata

SEQ ID NO: 1531313 - DNA, 25 bp, Homo sapien
aagagatttcaaatgcaatagtcat

SEQ ID NO: 1531314 - DNA, 25 bp, Homo sapien
aaagagatttcaaatgcaatagtca

SEQ ID NO: 1531315 - DNA, 25 bp, Homo sapien
ctcagatccttccgagcttccaggg

SEQ ID NO: 1531316 - DNA, 25 bp, Homo sapien
gatccttccgagcttccagggggta

SEQ ID NO: 1531317 - DNA, 25 bp, Homo sapien
ttccgagcttccagggggtaatgca

SEQ ID NO: 1531318 - DNA, 25 bp, Homo sapien
agcttccagggggtaatgcacagcc

SEQ ID NO: 1531319 - DNA, 25 bp, Homo sapien
ctttgggtgcaaaggtcacattatc

SEQ ID NO: 1531320 - DNA, 25 bp, Homo sapien
caggcaagtagtcatcatcttcacc

SEQ ID NO: 1531321 - DNA, 25 bp, Homo sapien
tatcaggcaagtagtcatcatcttc

SEQ ID NO: 1531322 - DNA, 25 bp, Homo sapien
cacattatcaggcaagtagtcatca

SEQ ID NO: 1531323 - DNA, 25 bp, Homo sapien
gggatccaggcccttgtaagctaga

SEQ ID NO: 1531324 - DNA, 25 bp, Homo sapien
gttctcccgaagttccaaacagtgc

SEQ ID NO: 1531325 - DNA, 25 bp, Homo sapien
agctagaccatgcacattatcttta

SEQ ID NO: 1531326 - DNA, 25 bp, Homo sapien
caatttctccaagatcgccagctct

SEQ ID NO: 1531327 - DNA, 25 bp, Homo sapien
cagtgtcatacttggatagagtttc

SEQ ID NO: 1531328 - DNA, 25 bp, Homo sapien
tgctgtccagccatagagtccgtct

SEQ ID NO: 1531329 - DNA, 25 bp, Homo sapien
tggtttttatactgcctgggtgctg

SEQ ID NO: 1531330 - DNA, 25 bp, Homo sapien
aggctcctcgtccttcagaacagtg

SEQ ID NO: 1531331 - DNA, 25 bp, Homo sapien
ttgacgtgatttttagaagaagtac

SEQ ID NO: 1531332 - DNA, 25 bp, Homo sapien
cacaccgccctggacagattgggct

SEQ ID NO: 1531333 - DNA, 25 bp, Homo sapien
ctgtggtcctccaagacaagcatat

SEQ ID NO: 1531334 - DNA, 25 bp, Homo sapien
tgactcagtgactaaggcccggccc

SEQ ID NO: 1531335 - DNA, 25 bp, Homo sapien
gtttagaagccaaggaaaatccatc

SEQ ID NO: 1531336 - DNA, 25 bp, Homo sapien
caacgtaccgaaggtctttctctga

SEQ ID NO: 1531337 - DNA, 25 bp, Homo sapien
gaagccaaggaaaatccatccaaaa

SEQ ID NO: 1531338 - DNA, 25 bp, Homo sapien
tgccaacgtaccgaaggtctttctc

SEQ ID NO: 1531339 - DNA, 25 bp, Homo sapien
ctgcgcctcgccctggtatttctaa

SEQ ID NO: 1531340 - DNA, 25 bp, Homo sapien
cactgcgcctcgccctggtatttct

SEQ ID NO: 1531341 - DNA, 25 bp, Homo sapien
gcgcctcgccctggtatttctaatg

SEQ ID NO: 1531342 - DNA, 25 bp, Homo sapien
gcatgcgacaccacgtgcggctaat

SEQ ID NO: 1531343 - DNA, 25 bp, Homo sapien
taatgcactggtcgatagtctcttg

SEQ ID NO: 1531344 - DNA, 25 bp, Homo sapien
gggtctgaaataatgcactggtcga

SEQ ID NO: 1531345 - DNA, 25 bp, Homo sapien
gaaataatgcactggtcgatagtct

SEQ ID NO: 1531346 - DNA, 25 bp, Homo sapien
cactggtcgatagtctcttggcagc

SEQ ID NO: 1531347 - DNA, 25 bp, Homo sapien
tgaataggcgtctctccaagcaact

SEQ ID NO: 1531348 - DNA, 25 bp, Homo sapien
ccaagcaactcagcccgtttggagg

SEQ ID NO: 1531349 - DNA, 25 bp, Homo sapien
ccctgggtcaggcgttgcctttcca

SEQ ID NO: 1531350 - DNA, 25 bp, Homo sapien
ccagctgactctgataatacctgca

SEQ ID NO: 1531351 - DNA, 25 bp, Homo sapien
tccctgataattatgacaagtctga

SEQ ID NO: 1531352 - DNA, 25 bp, Homo sapien
tgaatgacatcaaccaaactgaagg

SEQ ID NO: 1531353 - DNA, 25 bp, Homo sapien
gagcttacaacaaaagttgtgattt

SEQ ID NO: 1531354 - DNA, 25 bp, Homo sapien
ggcaccttaaccacattccctgata

SEQ ID NO: 1531355 - DNA, 25 bp, Homo sapien
ttttgtagacgggattacgccatgt

SEQ ID NO: 1531356 - DNA, 25 bp, Homo sapien
ttaatacatgcacacttacagggca

SEQ ID NO: 1531357 - DNA, 25 bp, Homo sapien
tgtagacgggattacgccatgtttc

SEQ ID NO: 1531358 - DNA, 25 bp, Homo sapien
ggaagttaatacatgcacacttaca

SEQ ID NO: 1531359 - DNA, 25 bp, Homo sapien
tttgggacagaaattctaacactga

SEQ ID NO: 1531360 - DNA, 25 bp, Homo sapien
ttttgggacagaaattctaacactg

SEQ ID NO: 1531361 - DNA, 25 bp, Homo sapien
ttgggacagaaattctaacactgaa

SEQ ID NO: 1531362 - DNA, 25 bp, Homo sapien
tgtactaagaactcgtcgtatcgct

SEQ ID NO: 1531363 - DNA, 25 bp, Homo sapien
tgctggcttttaaggtggccgtccc

SEQ ID NO: 1531364 - DNA, 25 bp, Homo sapien
aatgccatgttccaagagcagtgcc

SEQ ID NO: 1531365 - DNA, 25 bp, Homo sapien
gctgctctgagcgttctgggccaga

SEQ ID NO: 1531366 - DNA, 25 bp, Homo sapien
tcttggtctcgagggacttcaacct

SEQ ID NO: 1531367 - DNA, 25 bp, Homo sapien
ctcctccttggcgtgagtgaacctg

SEQ ID NO: 1531368 - DNA, 25 bp, Homo sapien
gggtccagacagcgttccagagcat

SEQ ID NO: 1531369 - DNA, 25 bp, Homo sapien
gaagatgcgtacagcagggccgccc

SEQ ID NO: 1531370 - DNA, 25 bp, Homo sapien
tcagggtgccactcaaacgtgtctc

SEQ ID NO: 1531371 - DNA, 25 bp, Homo sapien
tctggataagggtcagggacattaa

SEQ ID NO: 1531372 - DNA, 25 bp, Homo sapien
ggacattaaatctcttacatagaag

SEQ ID NO: 1531373 - DNA, 25 bp, Homo sapien
gtctcgggtgagcttcccaaacatc

SEQ ID NO: 1531374 - DNA, 25 bp, Homo sapien
gcttttgtaacttgacatatctgag

SEQ ID NO: 1531375 - DNA, 25 bp, Homo sapien
aatgtaaaccacatgagcagcaaca

SEQ ID NO: 1531376 - DNA, 25 bp, Homo sapien
aaatgagagaggcataatgcttttg

SEQ ID NO: 1531377 - DNA, 25 bp, Homo sapien
tactgatgtaaaggtttatccaact

SEQ ID NO: 1531378 - DNA, 25 bp, Homo sapien
cattttagtaacaaccagtaggaca

SEQ ID NO: 1531379 - DNA, 25 bp, Homo sapien
aaagcagttcgagaatctgggtgac

SEQ ID NO: 1531380 - DNA, 25 bp, Homo sapien
ccattaaggaaaagctccactgata

SEQ ID NO: 1531381 - DNA, 25 bp, Homo sapien
gacagtctctggtttgaccacatat

SEQ ID NO: 1531382 - DNA, 25 bp, Homo sapien
ttcacttgatgcttgagtggtgggc

SEQ ID NO: 1531383 - DNA, 25 bp, Homo sapien
tggtgggcaaggaagctgtctctgg

SEQ ID NO: 1531384 - DNA, 25 bp, Homo sapien
ctgggagcgtcagaaagttgaagac

SEQ ID NO: 1531385 - DNA, 25 bp, Homo sapien
cgggacctcggtgctgtgatacttt

SEQ ID NO: 1531386 - DNA, 25 bp, Homo sapien
cagaatgtcagcgtgcctactaggg

SEQ ID NO: 1531387 - DNA, 25 bp, Homo sapien
ctgaaaggcaggacatagatataaa

SEQ ID NO: 1531388 - DNA, 25 bp, Homo sapien
ctttcattcactcagaatgtcagcg

SEQ ID NO: 1531389 - DNA, 25 bp, Homo sapien
gatataaactccagcattagcaagg

SEQ ID NO: 1531390 - DNA, 25 bp, Homo sapien
ggctcggcttttgatctagccaaac

SEQ ID NO: 1531391 - DNA, 25 bp, Homo sapien
gactgttgtttaggtggctcggctt

SEQ ID NO: 1531392 - DNA, 25 bp, Homo sapien
taattctggtgcatgctcttcctct

SEQ ID NO: 1531393 - DNA, 25 bp, Homo sapien
cgtgtttagaggtatcccatctgga

SEQ ID NO: 1531394 - DNA, 25 bp, Homo sapien
gcaaagatggccctgaataagtcca

SEQ ID NO: 1531395 - DNA, 25 bp, Homo sapien
gaataagtccatggatgggcggctc

SEQ ID NO: 1531396 - DNA, 25 bp, Homo sapien
aagatggccctgaataagtccatgg

SEQ ID NO: 1531397 - DNA, 25 bp, Homo sapien
tccttcagcctgtgcgtccacatct

SEQ ID NO: 1531398 - DNA, 25 bp, Homo sapien
ggagctttggaagttggcctcccca

SEQ ID NO: 1531399 - DNA, 25 bp, Homo sapien
cgcgggccgaactcttctctttcat

SEQ ID NO: 1531400 - DNA, 25 bp, Homo sapien
ctatctgcatcttttgtatcgggaa

SEQ ID NO: 1531401 - DNA, 25 bp, Homo sapien
catcttttgtatcgggaaggaaggt

SEQ ID NO: 1531402 - DNA, 25 bp, Homo sapien
agccgcgggccgaactcttctcttt

SEQ ID NO: 1531403 - DNA, 25 bp, Homo sapien
ggaacctcaagtgtctgacgagcat

SEQ ID NO: 1531404 - DNA, 25 bp, Homo sapien
tttgaggaacctcaagtgtctgacg

SEQ ID NO: 1531405 - DNA, 25 bp, Homo sapien
tctttcttggccttgtgcttgtctt

SEQ ID NO: 1531406 - DNA, 25 bp, Homo sapien
ttcttccgcctgtgctctttcttgg

SEQ ID NO: 1531407 - DNA, 25 bp, Homo sapien
gaactctcggagctactacttttct

SEQ ID NO: 1531408 - DNA, 25 bp, Homo sapien
gggcgacacgtctgcggtttcctcg

SEQ ID NO: 1531409 - DNA, 25 bp, Homo sapien
ctgtcgctgctgtcggaactctcgg

SEQ ID NO: 1531410 - DNA, 25 bp, Homo sapien
tcgtcactctggctgtcgctgctgt

SEQ ID NO: 1531411 - DNA, 25 bp, Homo sapien
gccttcttagtggaagacttttcag

SEQ ID NO: 1531412 - DNA, 25 bp, Homo sapien
gaaatgattctaggacgagccaggg

SEQ ID NO: 1531413 - DNA, 25 bp, Homo sapien
cactctgtacaatgcgttaactgaa

SEQ ID NO: 1531414 - DNA, 25 bp, Homo sapien
taactgaacaatcactgggcttcca

SEQ ID NO: 1531415 - DNA, 25 bp, Homo sapien
atcaatttctgcgacctttcaaggc

SEQ ID NO: 1531416 - DNA, 25 bp, Homo sapien
tagtgacatctaccctgagaggctg

SEQ ID NO: 1531417 - DNA, 25 bp, Homo sapien
cacgcttgtccttcagtgagtccag

SEQ ID NO: 1531418 - DNA, 25 bp, Homo sapien
gagctgcagccgtgtaacccaggct

SEQ ID NO: 1531419 - DNA, 25 bp, Homo sapien
gagcttcactcccaaaaaacggcag

SEQ ID NO: 1531420 - DNA, 25 bp, Homo sapien
tggattgcagtagcgcaatttcggc

SEQ ID NO: 1531421 - DNA, 25 bp, Homo sapien
acctccagggttcaaaggattctcg

SEQ ID NO: 1531422 - DNA, 25 bp, Homo sapien
gctggattgcagtagcgcaatttcg

SEQ ID NO: 1531423 - DNA, 25 bp, Homo sapien
ccacctccagggttcaaaggattct

SEQ ID NO: 1531424 - DNA, 25 bp, Homo sapien
aagcctggatgggaacggtggcgcc

SEQ ID NO: 1531425 - DNA, 25 bp, Homo sapien
tggccgccgacaagcctggatggga

SEQ ID NO: 1531426 - DNA, 25 bp, Homo sapien
cggtggccgccgacaagcctggatg

SEQ ID NO: 1531427 - DNA, 25 bp, Homo sapien
tggatgggaacggtggcgccgcgcg

SEQ ID NO: 1531428 - DNA, 25 bp, Homo sapien
tgggctgtcggggagcaccgcggcg

SEQ ID NO: 1531429 - DNA, 25 bp, Homo sapien
ggcaacttgcattccctgtcatggg

SEQ ID NO: 1531430 - DNA, 25 bp, Homo sapien
ggtggcggcaacttgcattccctgt

SEQ ID NO: 1531431 - DNA, 25 bp, Homo sapien
gagggtggcggcaacttgcattccc

SEQ ID NO: 1531432 - DNA, 25 bp, Homo sapien
agatcaatttctccggcacctggtg

SEQ ID NO: 1531433 - DNA, 25 bp, Homo sapien
tgcttctcaggcaacagatgcggtg

SEQ ID NO: 1531434 - DNA, 25 bp, Homo sapien
gatgcggtggtggttccctgtccaa

SEQ ID NO: 1531435 - DNA, 25 bp, Homo sapien
cccaggacagcttgccgggacaata

SEQ ID NO: 1531436 - DNA, 25 bp, Homo sapien
ggcaggtgctcacagcgtgctcgtg

SEQ ID NO: 1531437 - DNA, 25 bp, Homo sapien
tgctcgtgcccactcagaattttaa

SEQ ID NO: 1531438 - DNA, 25 bp, Homo sapien
caggtgctcacagcgtgctcgtgcc

SEQ ID NO: 1531439 - DNA, 25 bp, Homo sapien
ggtgctcacagcgtgctcgtgccca

SEQ ID NO: 1531440 - DNA, 25 bp, Homo sapien
tgtgctcaaaatcgcgaaccacaga

SEQ ID NO: 1531441 - DNA, 25 bp, Homo sapien
ctgtcgccggtgatgctgcactcta

SEQ ID NO: 1531442 - DNA, 25 bp, Homo sapien
cactctacaacaggagctttgggcc

SEQ ID NO: 1531443 - DNA, 25 bp, Homo sapien
ttgggcctgtgctcaaaatcgcgaa

SEQ ID NO: 1531444 - DNA, 25 bp, Homo sapien
tttaaaagactgctccatcacccac

SEQ ID NO: 1531445 - DNA, 25 bp, Homo sapien
ctggcctgcctatgacttctatgaa

SEQ ID NO: 1531446 - DNA, 25 bp, Homo sapien
caccctagggaccattcggttctca

SEQ ID NO: 1531447 - DNA, 25 bp, Homo sapien
ttaggaccaagattataattaacac

SEQ ID NO: 1531448 - DNA, 25 bp, Homo sapien
tcactgtcttatcataggatgcggc

SEQ ID NO: 1531449 - DNA, 25 bp, Homo sapien
tgtcttatcataggatgcggcaatg

SEQ ID NO: 1531450 - DNA, 25 bp, Homo sapien
cctcactgtcttatcataggatgcg

SEQ ID NO: 1531451 - DNA, 25 bp, Homo sapien
tcttatcataggatgcggcaatgac

SEQ ID NO: 1531452 - DNA, 25 bp, Homo sapien
caggagaaaacttacaggagacgat

SEQ ID NO: 1531453 - DNA, 25 bp, Homo sapien
tatgcagattccatgatccacgtcg

SEQ ID NO: 1531454 - DNA, 25 bp, Homo sapien
gagaccacgtatttaccatcaggag

SEQ ID NO: 1531455 - DNA, 25 bp, Homo sapien
gatgttctcggcgtccattatgcag

SEQ ID NO: 1531456 - DNA, 25 bp, Homo sapien
tgttaaaagcacaagactgaatgaa

SEQ ID NO: 1531457 - DNA, 25 bp, Homo sapien
taaaagattaggctgtcaatgacca

SEQ ID NO: 1531458 - DNA, 25 bp, Homo sapien
ggttggagccgaacattgtgtcctt

SEQ ID NO: 1531459 - DNA, 25 bp, Homo sapien
cattaactgaagaggatcagttttg

SEQ ID NO: 1531460 - DNA, 25 bp, Homo sapien
tgatgcacctgtccaatgagacaga

SEQ ID NO: 1531461 - DNA, 25 bp, Homo sapien
gtcaaagcagcatgacgtgatggac

SEQ ID NO: 1531462 - DNA, 25 bp, Homo sapien
gctgtcggggtcaaagcagcatgac

SEQ ID NO: 1531463 - DNA, 25 bp, Homo sapien
gggatgtaacatcccagatcttgat

SEQ ID NO: 1531464 - DNA, 25 bp, Homo sapien
agccgggggtattttctcctgtgag

SEQ ID NO: 1531465 - DNA, 25 bp, Homo sapien
gccgggggtattttctcctgtgagc

SEQ ID NO: 1531466 - DNA, 25 bp, Homo sapien
gaaggtaaaacagcagtttgagatt

SEQ ID NO: 1531467 - DNA, 25 bp, Homo sapien
cagcagtttgagattgcattggaat

SEQ ID NO: 1531468 - DNA, 25 bp, Homo sapien
gtttgagattgcattggaatgtgcc

SEQ ID NO: 1531469 - DNA, 25 bp, Homo sapien
ggtaaaacagcagtttgagattgca

SEQ ID NO: 1531470 - DNA, 25 bp, Homo sapien
tcccctgtgtggacgttccatattt

SEQ ID NO: 1531471 - DNA, 25 bp, Homo sapien
gtctctggcaaagtgacaggaactg

SEQ ID NO: 1531472 - DNA, 25 bp, Homo sapien
acagaaccttcatggccctgcatca

SEQ ID NO: 1531473 - DNA, 25 bp, Homo sapien
tccacagtttcgaaactcccctgtg

SEQ ID NO: 1531474 - DNA, 25 bp, Homo sapien
aaatagccacagtcctatcaaaccc

SEQ ID NO: 1531475 - DNA, 25 bp, Homo sapien
caaagagagcttccggtagccttct

SEQ ID NO: 1531476 - DNA, 25 bp, Homo sapien
tcccaaatagccacagtcctatcaa

SEQ ID NO: 1531477 - DNA, 25 bp, Homo sapien
ggtagccttctgctacatcccaaat

SEQ ID NO: 1531478 - DNA, 25 bp, Homo sapien
acatccatcacccagtcattatggc

SEQ ID NO: 1531479 - DNA, 25 bp, Homo sapien
ttgctaatggcaacatccatcaccc

SEQ ID NO: 1531480 - DNA, 25 bp, Homo sapien
ggcaacatccatcacccagtcatta

SEQ ID NO: 1531481 - DNA, 25 bp, Homo sapien
taatggcaacatccatcacccagtc

SEQ ID NO: 1531482 - DNA, 25 bp, Homo sapien
gatcgatattgtaagcttgaccact

SEQ ID NO: 1531483 - DNA, 25 bp, Homo sapien
gatattgtaagcttgaccactttta

SEQ ID NO: 1531484 - DNA, 25 bp, Homo sapien
cgaacgtgatcgatattgtaagctt

SEQ ID NO: 1531485 - DNA, 25 bp, Homo sapien
caatcctggcgaacgtgatcgatat

SEQ ID NO: 1531486 - DNA, 25 bp, Homo sapien
ttggcaataactcttccactatcac

SEQ ID NO: 1531487 - DNA, 25 bp, Homo sapien
ggaattttatacttggcaataactc

SEQ ID NO: 1531488 - DNA, 25 bp, Homo sapien
tacttggcaataactcttccactat

SEQ ID NO: 1531489 - DNA, 25 bp, Homo sapien
tttatacttggcaataactcttcca

SEQ ID NO: 1531490 - DNA, 25 bp, Homo sapien
ccattctctaagttgtctttttgct

SEQ ID NO: 1531491 - DNA, 25 bp, Homo sapien
gcccatccttgaaatgggttgtttg

SEQ ID NO: 1531492 - DNA, 25 bp, Homo sapien
ttatagaccccctaatagatgtgaa

SEQ ID NO: 1531493 - DNA, 25 bp, Homo sapien
caccatcagtcaggcacaagggttc

SEQ ID NO: 1531494 - DNA, 25 bp, Homo sapien
taccaaaggaatttcatcaatttct

SEQ ID NO: 1531495 - DNA, 25 bp, Homo sapien
tgattaccaaaggaatttcatcaat

SEQ ID NO: 1531496 - DNA, 25 bp, Homo sapien
gattaccaaaggaatttcatcaatt

SEQ ID NO: 1531497 - DNA, 25 bp, Homo sapien
cttgattaccaaaggaatttcatca

SEQ ID NO: 1531498 - DNA, 25 bp, Homo sapien
ccttgcttcagcttcaggtaggcct

SEQ ID NO: 1531499 - DNA, 25 bp, Homo sapien
agcttcaggtaggcctctttctttt

SEQ ID NO: 1531500 - DNA, 25 bp, Homo sapien
gcttcaggtaggcctctttcttttc

SEQ ID NO: 1531501 - DNA, 25 bp, Homo sapien
gcttcagcttcaggtaggcctcttt

SEQ ID NO: 1531502 - DNA, 25 bp, Homo sapien
tgattgattcagagcaagtcaaatg

SEQ ID NO: 1531503 - DNA, 25 bp, Homo sapien
gattgattcagagcaagtcaaatgc

SEQ ID NO: 1531504 - DNA, 25 bp, Homo sapien
cggcagaacacgcattgggtgaaca

SEQ ID NO: 1531505 - DNA, 25 bp, Homo sapien
catttcagaagaggtgtcactcttg

SEQ ID NO: 1531506 - DNA, 25 bp, Homo sapien
aacatttcagaagaggtgtcactct

SEQ ID NO: 1531507 - DNA, 25 bp, Homo sapien
cacgcattgggtgaacatttcagaa

SEQ ID NO: 1531508 - DNA, 25 bp, Homo sapien
gtatctgctggcaagccccttgtat

SEQ ID NO: 1531509 - DNA, 25 bp, Homo sapien
tgatgacgatgaagtatctgctggc

SEQ ID NO: 1531510 - DNA, 25 bp, Homo sapien
gatgaagtatctgctggcaagcccc

SEQ ID NO: 1531511 - DNA, 25 bp, Homo sapien
ccttggcggcggtgagttctccctt

SEQ ID NO: 1531512 - DNA, 25 bp, Homo sapien
tacatgctaggtagcctgtgctgga

SEQ ID NO: 1531513 - DNA, 25 bp, Homo sapien
ggtagcctgtgctggagtcactcaa

SEQ ID NO: 1531514 - DNA, 25 bp, Homo sapien
tgcaaagccccgaaacctacatgct

SEQ ID NO: 1531515 - DNA, 25 bp, Homo sapien
gaaagtgttcactccccaagctgag

SEQ ID NO: 1531516 - DNA, 25 bp, Homo sapien
gcgctttaaccaactaagccacggc

SEQ ID NO: 1531517 - DNA, 25 bp, Homo sapien
caggcgctttaaccaactaagccac

SEQ ID NO: 1531518 - DNA, 25 bp, Homo sapien
tttaaccaactaagccacggcgcca

SEQ ID NO: 1531519 - DNA, 25 bp, Homo sapien
gctttaaccaactaagccacggcgc

SEQ ID NO: 1531520 - DNA, 25 bp, Homo sapien
aggaagcagcctcggggcgaacacc

SEQ ID NO: 1531521 - DNA, 25 bp, Homo sapien
aaggcggcgtgggagagcgcgtcca

SEQ ID NO: 1531522 - DNA, 25 bp, Homo sapien
ccgccgctcgcctcccacggccagc

SEQ ID NO: 1531523 - DNA, 25 bp, Homo sapien
gctcctcgctggactcgcacagctg

SEQ ID NO: 1531524 - DNA, 25 bp, Homo sapien
ggctccaggtgtctggtagcaagac

SEQ ID NO: 1531525 - DNA, 25 bp, Homo sapien
caggtgtctggtagcaagaccacca

SEQ ID NO: 1531526 - DNA, 25 bp, Homo sapien
ggtgtctggtagcaagaccaccagc

SEQ ID NO: 1531527 - DNA, 25 bp, Homo sapien
tccaggtgtctggtagcaagaccac

SEQ ID NO: 1531528 - DNA, 25 bp, Homo sapien
tccaagtgcatccagccatagacac

SEQ ID NO: 1531529 - DNA, 25 bp, Homo sapien
gccatagacactctccaagctgcag

SEQ ID NO: 1531530 - DNA, 25 bp, Homo sapien
cagtcggcacggtgtgtccaagtgc

SEQ ID NO: 1531531 - DNA, 25 bp, Homo sapien
tctgcaggcacgtccagggcagtcg

SEQ ID NO: 1531532 - DNA, 25 bp, Homo sapien
gctactgtggaaaccagtatacggg

SEQ ID NO: 1531533 - DNA, 25 bp, Homo sapien
ccacaaggtgggagtaaccaagtgt

SEQ ID NO: 1531534 - DNA, 25 bp, Homo sapien
tcagacagatccttgtacacccatg

SEQ ID NO: 1531535 - DNA, 25 bp, Homo sapien
gagagataccactttgcctccatta

SEQ ID NO: 1531536 - DNA, 25 bp, Homo sapien
agggcccccttggagagaactgcaa

SEQ ID NO: 1531537 - DNA, 25 bp, Homo sapien
ccagagagcgtttggagggaagttc

SEQ ID NO: 1531538 - DNA, 25 bp, Homo sapien
tccatcaggcgaatagtcaagccag

SEQ ID NO: 1531539 - DNA, 25 bp, Homo sapien
tctgcctgttccatcaggcgaatag

SEQ ID NO: 1531540 - DNA, 25 bp, Homo sapien
gcgaatagtcaagccagagagcgtt

SEQ ID NO: 1531541 - DNA, 25 bp, Homo sapien
cgcgcccggagcctggaggccgcgc

SEQ ID NO: 1531542 - DNA, 25 bp, Homo sapien
ccggagcctggaggccgcgctgcgc

SEQ ID NO: 1531543 - DNA, 25 bp, Homo sapien
gagcctggaggccgcgctgcgccag

SEQ ID NO: 1531544 - DNA, 25 bp, Homo sapien
gcgcccggagcctggaggccgcgct

SEQ ID NO: 1531545 - DNA, 25 bp, Homo sapien
gtgggtctgtcagtcctcccgcccg

SEQ ID NO: 1531546 - DNA, 25 bp, Homo sapien
tgggtctgtcagtcctcccgcccgg

SEQ ID NO: 1531547 - DNA, 25 bp, Homo sapien
cgtgggtctgtcagtcctcccgccc

SEQ ID NO: 1531548 - DNA, 25 bp, Homo sapien
gtgcaggcccgtagggcgcgcgcgg

SEQ ID NO: 1531549 - DNA, 25 bp, Homo sapien
cgcggccacatcggccgcggcgtca

SEQ ID NO: 1531550 - DNA, 25 bp, Homo sapien
gcgtcacgggccctgcgggggctca

SEQ ID NO: 1531551 - DNA, 25 bp, Homo sapien
tctttgtgcggtggcggtgcaggcc

SEQ ID NO: 1531552 - DNA, 25 bp, Homo sapien
agacagacgacggccagctgcgccc

SEQ ID NO: 1531553 - DNA, 25 bp, Homo sapien
ccagacagacgacggccagctgcgc

SEQ ID NO: 1531554 - DNA, 25 bp, Homo sapien
gacgacggccagctgcgcccgggcg

SEQ ID NO: 1531555 - DNA, 25 bp, Homo sapien
acagacgacggccagctgcgcccgg

SEQ ID NO: 1531556 - DNA, 25 bp, Homo sapien
ctgctggggaccagcagcagcccat

SEQ ID NO: 1531557 - DNA, 25 bp, Homo sapien
ctaaggcaggaaccgcactgctgag

SEQ ID NO: 1531558 - DNA, 25 bp, Homo sapien
cactgctgagtctcccggtgagaaa

SEQ ID NO: 1531559 - DNA, 25 bp, Homo sapien
gcaggaaccgcactgctgagtctcc

SEQ ID NO: 1531560 - DNA, 25 bp, Homo sapien
gaaccgcactgctgagtctcccggt

SEQ ID NO: 1531561 - DNA, 25 bp, Homo sapien
ctgtgaggtccccaggtagccctgc

SEQ ID NO: 1531562 - DNA, 25 bp, Homo sapien
aggtccccaggtagccctgctagac

SEQ ID NO: 1531563 - DNA, 25 bp, Homo sapien
aggtagccctgctagaccctctgga

SEQ ID NO: 1531564 - DNA, 25 bp, Homo sapien
caggtagccctgctagaccctctgg

SEQ ID NO: 1531565 - DNA, 25 bp, Homo sapien
agtggagaatcccacacccctaggc

SEQ ID NO: 1531566 - DNA, 25 bp, Homo sapien
tggcctcgggtcagtggagaatccc

SEQ ID NO: 1531567 - DNA, 25 bp, Homo sapien
ccaaggtgtagcctcgtggcctcgg

SEQ ID NO: 1531568 - DNA, 25 bp, Homo sapien
acctccaaggtgtagcctcgtggcc

SEQ ID NO: 1531569 - DNA, 25 bp, Homo sapien
cgggctgtagatgaccccacgccgc

SEQ ID NO: 1531570 - DNA, 25 bp, Homo sapien
gccgctccgtgtgctgctccagctt

SEQ ID NO: 1531571 - DNA, 25 bp, Homo sapien
ccacgccgctccgtgtgctgctcca

SEQ ID NO: 1531572 - DNA, 25 bp, Homo sapien
gggctgtagatgaccccacgccgct

SEQ ID NO: 1531573 - DNA, 25 bp, Homo sapien
ccctggatgtaccagctgcagttgg

SEQ ID NO: 1531574 - DNA, 25 bp, Homo sapien
cagttggtgcctggcgggtagttga

SEQ ID NO: 1531575 - DNA, 25 bp, Homo sapien
ctgatggtaatcatgtcaccacggt

SEQ ID NO: 1531576 - DNA, 25 bp, Homo sapien
atgtcaccacggtcgccctggatgt

SEQ ID NO: 1531577 - DNA, 25 bp, Homo sapien
gagactaggatagaccctgcccatg

SEQ ID NO: 1531578 - DNA, 25 bp, Homo sapien
gatggaacctatagtgactccccag

SEQ ID NO: 1531579 - DNA, 25 bp, Homo sapien
cagtaggtgggatctccatggccga

SEQ ID NO: 1531580 - DNA, 25 bp, Homo sapien
ggaggctccatgaagaattgcgaca

SEQ ID NO: 1531581 - DNA, 25 bp, Homo sapien
tcggatgtaagacagacggaagccc

SEQ ID NO: 1531582 - DNA, 25 bp, Homo sapien
gactcctccacgtcaaagttgcgga

SEQ ID NO: 1531583 - DNA, 25 bp, Homo sapien
atggcggagccacagaggcggaagg

SEQ ID NO: 1531584 - DNA, 25 bp, Homo sapien
tccagacatggtcgcgggcagagat

SEQ ID NO: 1531585 - DNA, 25 bp, Homo sapien
ggtccaaggcatccgcatgcccagt

SEQ ID NO: 1531586 - DNA, 25 bp, Homo sapien
acggtgtgctccgtggtgtcctgcc

SEQ ID NO: 1531587 - DNA, 25 bp, Homo sapien
aggagacagaagagcctcccttcgg

SEQ ID NO: 1531588 - DNA, 25 bp, Homo sapien
tgtcctgagattgacagggcggtca

SEQ ID NO: 1531589 - DNA, 25 bp, Homo sapien
tgagtagagcttgaaggcgcagccc

SEQ ID NO: 1531590 - DNA, 25 bp, Homo sapien
caggcacttgccgttgtcacagcgg

SEQ ID NO: 1531591 - DNA, 25 bp, Homo sapien
tcgaagatgcacaggttggtaccgc

SEQ ID NO: 1531592 - DNA, 25 bp, Homo sapien
agcggaactcatctgcctggcagga

SEQ ID NO: 1531593 - DNA, 25 bp, Homo sapien
aacaacaggattccaggacgaccct

SEQ ID NO: 1531594 - DNA, 25 bp, Homo sapien
caagatatagggaccccagtgtgca

SEQ ID NO: 1531595 - DNA, 25 bp, Homo sapien
cctgggtgatgaagaagcccggtcc

SEQ ID NO: 1531596 - DNA, 25 bp, Homo sapien
agcctccatgtagctagtccaggcc

SEQ ID NO: 1531597 - DNA, 25 bp, Homo sapien
cctccacgggtggaatgaggccctg

SEQ ID NO: 1531598 - DNA, 25 bp, Homo sapien
agacaggaaagtcctccacgggtgg

SEQ ID NO: 1531599 - DNA, 25 bp, Homo sapien
caggcgcgtcatctgggtctcgaag

SEQ ID NO: 1531600 - DNA, 25 bp, Homo sapien
ctgggcgatgagctgaccataggat

SEQ ID NO: 1531601 - DNA, 25 bp, Homo sapien
catctgtctccgcatggctgtgcga

SEQ ID NO: 1531602 - DNA, 25 bp, Homo sapien
tccgcatggctgtgcgaagattctg

SEQ ID NO: 1531603 - DNA, 25 bp, Homo sapien
tctgtctccgcatggctgtgcgaag

SEQ ID NO: 1531604 - DNA, 25 bp, Homo sapien
catggctgtgcgaagattctgcagc

SEQ ID NO: 1531605 - DNA, 25 bp, Homo sapien
cgcccgcggccggtgaaagagccgg

SEQ ID NO: 1531606 - DNA, 25 bp, Homo sapien
tgaaagagccggttccagaggcggc

SEQ ID NO: 1531607 - DNA, 25 bp, Homo sapien
gcggccggtgaaagagccggttcca

SEQ ID NO: 1531608 - DNA, 25 bp, Homo sapien
gccggtgaaagagccggttccagag

SEQ ID NO: 1531609 - DNA, 25 bp, Homo sapien
tgaggggcgtgctgcggtcagcagt

SEQ ID NO: 1531610 - DNA, 25 bp, Homo sapien
gggcgtgctgcggtcagcagtggga

SEQ ID NO: 1531611 - DNA, 25 bp, Homo sapien
ctgtgaggggcgtgctgcggtcagc

SEQ ID NO: 1531612 - DNA, 25 bp, Homo sapien
cgtgctgcggtcagcagtgggatct

SEQ ID NO: 1531613 - DNA, 25 bp, Homo sapien
ggaggaagccatcgcccagcacggt

SEQ ID NO: 1531614 - DNA, 25 bp, Homo sapien
tggaggaagccatcgcccagcacgg

SEQ ID NO: 1531615 - DNA, 25 bp, Homo sapien
ctggaggaagccatcgcccagcacg

SEQ ID NO: 1531616 - DNA, 25 bp, Homo sapien
ttgtccacgggcctgcactctgggt

SEQ ID NO: 1531617 - DNA, 25 bp, Homo sapien
tgcctgtgtccatgagcggtgctgg

SEQ ID NO: 1531618 - DNA, 25 bp, Homo sapien
gctcccgaggtgcatctgcaggagc

SEQ ID NO: 1531619 - DNA, 25 bp, Homo sapien
agctgggccgtctaccagtggctcc

SEQ ID NO: 1531620 - DNA, 25 bp, Homo sapien
gcttgtgtacaatgggaccctgcag

SEQ ID NO: 1531621 - DNA, 25 bp, Homo sapien
gataggatggaacagacgtggccac

SEQ ID NO: 1531622 - DNA, 25 bp, Homo sapien
tacctcggtgggtgcacacatgttg

SEQ ID NO: 1531623 - DNA, 25 bp, Homo sapien
cggtgcccaggagattggaccttca

SEQ ID NO: 1531624 - DNA, 25 bp, Homo sapien
acaggactgctggaacccatggcct

SEQ ID NO: 1531625 - DNA, 25 bp, Homo sapien
ccagttggtgccagcacaggactgc

SEQ ID NO: 1531626 - DNA, 25 bp, Homo sapien
ttcagaatgccccatgggggagtgg

SEQ ID NO: 1531627 - DNA, 25 bp, Homo sapien
ggagtggaggtggaggcatctcttc

SEQ ID NO: 1531628 - DNA, 25 bp, Homo sapien
cccagtaggcaatgattggcactgg

SEQ ID NO: 1531629 - DNA, 25 bp, Homo sapien
cactaccactgccaatgccaacctt

SEQ ID NO: 1531630 - DNA, 25 bp, Homo sapien
tctgccagtaaagcccagtaggcaa

SEQ ID NO: 1531631 - DNA, 25 bp, Homo sapien
gcaatgattggcactggcagttgtg

SEQ ID NO: 1531632 - DNA, 25 bp, Homo sapien
ccggcagatgcaccccaaatatggg

SEQ ID NO: 1531633 - DNA, 25 bp, Homo sapien
caccccaaatatggggccttcctgg

SEQ ID NO: 1531634 - DNA, 25 bp, Homo sapien
tcctggggcccacagcagcagccat

SEQ ID NO: 1531635 - DNA, 25 bp, Homo sapien
gccttcctggggcccacagcagcag

SEQ ID NO: 1531636 - DNA, 25 bp, Homo sapien
gtccgtgatgagaagaggaagttcc

SEQ ID NO: 1531637 - DNA, 25 bp, Homo sapien
cattttggtccgtgatgagaagagg

SEQ ID NO: 1531638 - DNA, 25 bp, Homo sapien
caagaagccattttggtccgtgatg

SEQ ID NO: 1531639 - DNA, 25 bp, Homo sapien
cgtgatgagaagaggaagttcctgc

SEQ ID NO: 1531640 - DNA, 25 bp, Homo sapien
gcatccaggaatctgcagctctgct

SEQ ID NO: 1531641 - DNA, 25 bp, Homo sapien
ggccttctattccctcggcatccag

SEQ ID NO: 1531642 - DNA, 25 bp, Homo sapien
gccgggccaggccttctattccctc

SEQ ID NO: 1531643 - DNA, 25 bp, Homo sapien
ttccctcggcatccaggaatctgca

SEQ ID NO: 1531644 - DNA, 25 bp, Homo sapien
ctgtccgtgacaaggatggacatcg

SEQ ID NO: 1531645 - DNA, 25 bp, Homo sapien
gacaaggatggacatcgggcattaa

SEQ ID NO: 1531646 - DNA, 25 bp, Homo sapien
catcgggcattaaaggagctgtccg

SEQ ID NO: 1531647 - DNA, 25 bp, Homo sapien
agctgtccgtgttggtgcctggcat

SEQ ID NO: 1531648 - DNA, 25 bp, Homo sapien
gggtgcctgccgaaggcagatattg

SEQ ID NO: 1531649 - DNA, 25 bp, Homo sapien
ggtgcctgccgaaggcagatattgg

SEQ ID NO: 1531650 - DNA, 25 bp, Homo sapien
gctggcaagggtgcctgccgaaggc

SEQ ID NO: 1531651 - DNA, 25 bp, Homo sapien
gcagaagagggggtgccttcaggac

SEQ ID NO: 1531652 - DNA, 25 bp, Homo sapien
ggcaggttgagggggtgaaaagata

SEQ ID NO: 1531653 - DNA, 25 bp, Homo sapien
tgggcaggttgagggggtgaaaaga

SEQ ID NO: 1531654 - DNA, 25 bp, Homo sapien
gcaggttgagggggtgaaaagatac

SEQ ID NO: 1531655 - DNA, 25 bp, Homo sapien
agctttcaggcgctcaatgggcttc

SEQ ID NO: 1531656 - DNA, 25 bp, Homo sapien
caggcgctcaatgggcttctcttga

SEQ ID NO: 1531657 - DNA, 25 bp, Homo sapien
tagtgagtggtcgtcggcagctttc

SEQ ID NO: 1531658 - DNA, 25 bp, Homo sapien
gctcaatgggcttctcttgaggttc

SEQ ID NO: 1531659 - DNA, 25 bp, Homo sapien
gcccaggaaatctgacacgcccagg

SEQ ID NO: 1531660 - DNA, 25 bp, Homo sapien
acacagcgcccaggaaatctgacac

SEQ ID NO: 1531661 - DNA, 25 bp, Homo sapien
ggaaatctgacacgcccaggaaatc

SEQ ID NO: 1531662 - DNA, 25 bp, Homo sapien
ggaaatccgagcctgggactgagcc

SEQ ID NO: 1531663 - DNA, 25 bp, Homo sapien
atgagactctccgtcggcagctggg

SEQ ID NO: 1531664 - DNA, 25 bp, Homo sapien
tcagcattgcctaggaacacgaagc

SEQ ID NO: 1531665 - DNA, 25 bp, Homo sapien
cagagggaccggagttatgacaagc

SEQ ID NO: 1531666 - DNA, 25 bp, Homo sapien
caatgtgaatgtgcgcgtctctgct

SEQ ID NO: 1531667 - DNA, 25 bp, Homo sapien
gggagcccggcaactctagtattta

SEQ ID NO: 1531668 - DNA, 25 bp, Homo sapien
ggataaccttgtgccttggaaatgc

SEQ ID NO: 1531669 - DNA, 25 bp, Homo sapien
gggagcaaatcgtgccttgtcattt

SEQ ID NO: 1531670 - DNA, 25 bp, Homo sapien
gaaatgcaaactcaccgctccaatg

SEQ ID NO: 1531671 - DNA, 25 bp, Homo sapien
ggagctgaccagtgacaatgaccgc

SEQ ID NO: 1531672 - DNA, 25 bp, Homo sapien
tgcgagccaggactaggagattccg

SEQ ID NO: 1531673 - DNA, 25 bp, Homo sapien
caagaacagcaacgagtaccgggtg

SEQ ID NO: 1531674 - DNA, 25 bp, Homo sapien
attccggtgcctcctgaaagcctgg

SEQ ID NO: 1531675 - DNA, 25 bp, Homo sapien
ggccagaccaccatgcacctgcagc

SEQ ID NO: 1531676 - DNA, 25 bp, Homo sapien
cagcgcgctcaaggggctgggcgcc

SEQ ID NO: 1531677 - DNA, 25 bp, Homo sapien
ctgcagcccggtcaccccacgccgc

SEQ ID NO: 1531678 - DNA, 25 bp, Homo sapien
gcgcactgcggccagaccaccatgc

SEQ ID NO: 1531679 - DNA, 25 bp, Homo sapien
cgcacccgcacccgccgcccgcgca

SEQ ID NO: 1531680 - DNA, 25 bp, Homo sapien
gcacccgcacccgcacccgccgccc

SEQ ID NO: 1531681 - DNA, 25 bp, Homo sapien
cgccctcgcacccgcacccgcaccc

SEQ ID NO: 1531682 - DNA, 25 bp, Homo sapien
cccgcacccgcacccgccgcccgcg

SEQ ID NO: 1531683 - DNA, 25 bp, Homo sapien
aggagccccgcgaggaggatgaagc

SEQ ID NO: 1531684 - DNA, 25 bp, Homo sapien
cccgcgaggaggatgaagccaagca

SEQ ID NO: 1531685 - DNA, 25 bp, Homo sapien
gctggccggcctcttcccttaccag

SEQ ID NO: 1531686 - DNA, 25 bp, Homo sapien
cggcctcttcccttaccagccgccg

SEQ ID NO: 1531687 - DNA, 25 bp, Homo sapien
tggagtcggccgacttctacgaggc

SEQ ID NO: 1531688 - DNA, 25 bp, Homo sapien
tcgccatgccgggagaactctaact

SEQ ID NO: 1531689 - DNA, 25 bp, Homo sapien
acgagacgtccatcgacatcagcgc

SEQ ID NO: 1531690 - DNA, 25 bp, Homo sapien
gcggcatctgcgagcacgagacgtc

SEQ ID NO: 1531691 - DNA, 25 bp, Homo sapien
ctggagatcagagctaggagacgca

SEQ ID NO: 1531692 - DNA, 25 bp, Homo sapien
ctaggagacgcagagccaccgcgct

SEQ ID NO: 1531693 - DNA, 25 bp, Homo sapien
ggctttgaaagagaatccgcgcccc

SEQ ID NO: 1531694 - DNA, 25 bp, Homo sapien
cgagaggtacctctgcgcggaatca

SEQ ID NO: 1531695 - DNA, 25 bp, Homo sapien
taaagcgcagtgtgcgttgcccaga

SEQ ID NO: 1531696 - DNA, 25 bp, Homo sapien
gagttcccgatctctgggcaggcaa

SEQ ID NO: 1531697 - DNA, 25 bp, Homo sapien
tctggaccgaaaacgaagcagttgg

SEQ ID NO: 1531698 - DNA, 25 bp, Homo sapien
tactgcgatcgtcgtggaagctcgg

SEQ ID NO: 1531699 - DNA, 25 bp, Homo sapien
tcctatcaaattaggaccctaccca

SEQ ID NO: 1531700 - DNA, 25 bp, Homo sapien
cgccggttcagtccaagcaggctgc

SEQ ID NO: 1531701 - DNA, 25 bp, Homo sapien
ggctgccatcatagacctaccataa

SEQ ID NO: 1531702 - DNA, 25 bp, Homo sapien
tgaagccctgtctcaccgccggttc

SEQ ID NO: 1531703 - DNA, 25 bp, Homo sapien
ccgtcttggccagagtagattctca

SEQ ID NO: 1531704 - DNA, 25 bp, Homo sapien
taaaatctggaggtcaaaagcctgg

SEQ ID NO: 1531705 - DNA, 25 bp, Homo sapien
ggacacttctatctagggccctaga

SEQ ID NO: 1531706 - DNA, 25 bp, Homo sapien
gatggatcttcgcaactgctccaag

SEQ ID NO: 1531707 - DNA, 25 bp, Homo sapien
ctcagcctcaaacgccaaggttcaa

SEQ ID NO: 1531708 - DNA, 25 bp, Homo sapien
cctcagcctcaaacgccaaggttca

SEQ ID NO: 1531709 - DNA, 25 bp, Homo sapien
acctcagcctcaaacgccaaggttc

SEQ ID NO: 1531710 - DNA, 25 bp, Homo sapien
tcagcctcaaacgccaaggttcaag

SEQ ID NO: 1531711 - DNA, 25 bp, Homo sapien
tctctaagctgcagtcagaattgtc

SEQ ID NO: 1531712 - DNA, 25 bp, Homo sapien
cagaattgtctctctaaagcccaga

SEQ ID NO: 1531713 - DNA, 25 bp, Homo sapien
tcaaatgagcacactgataagcccc

SEQ ID NO: 1531714 - DNA, 25 bp, Homo sapien
gcattactacagcatctcccagaag

SEQ ID NO: 1531715 - DNA, 25 bp, Homo sapien
tcaaacacatgacgcttaaggccaa

SEQ ID NO: 1531716 - DNA, 25 bp, Homo sapien
tactgagtataagagggcttccgta

SEQ ID NO: 1531717 - DNA, 25 bp, Homo sapien
ctttttggccattgaacacatcttg

SEQ ID NO: 1531718 - DNA, 25 bp, Homo sapien
tgcagatcaacagggctcgcttcaa

SEQ ID NO: 1531719 - DNA, 25 bp, Homo sapien
gggcgcagccagataattaattaga

SEQ ID NO: 1531720 - DNA, 25 bp, Homo sapien
aattagatttgaacagcccgtgtgc

SEQ ID NO: 1531721 - DNA, 25 bp, Homo sapien
aaggtgtgacttttgtgggcgcagc

SEQ ID NO: 1531722 - DNA, 25 bp, Homo sapien
cagtgttttgaaggtgtgacttttg

SEQ ID NO: 1531723 - DNA, 25 bp, Homo sapien
cctggctgactaatctgttctttct

SEQ ID NO: 1531724 - DNA, 25 bp, Homo sapien
ctttcttgtgtgatatgatccccat

SEQ ID NO: 1531725 - DNA, 25 bp, Homo sapien
gttctttcttgtgtgatatgatccc

SEQ ID NO: 1531726 - DNA, 25 bp, Homo sapien
gctgactaatctgttctttcttgtg

SEQ ID NO: 1531727 - DNA, 25 bp, Homo sapien
tcgagtcggaggctgaaaagccgtc

SEQ ID NO: 1531728 - DNA, 25 bp, Homo sapien
aaaagccgtcaccttgtggaggcca

SEQ ID NO: 1531729 - DNA, 25 bp, Homo sapien
tggtttcgccgcgtcccttggaagc

SEQ ID NO: 1531730 - DNA, 25 bp, Homo sapien
tggttttgtgaaccaccggcgactg

SEQ ID NO: 1531731 - DNA, 25 bp, Homo sapien
cagtcgaccaatcgtgggcaggctg

SEQ ID NO: 1531732 - DNA, 25 bp, Homo sapien
gttccgcgcggctggctcggcgggt

SEQ ID NO: 1531733 - DNA, 25 bp, Homo sapien
ttgctgcggcgtccgcggtccctag

SEQ ID NO: 1531734 - DNA, 25 bp, Homo sapien
tggctcggcgggtgtggcgggagca

SEQ ID NO: 1531735 - DNA, 25 bp, Homo sapien
gagcgacggttacgaaaccggcagc

SEQ ID NO: 1531736 - DNA, 25 bp, Homo sapien
gccatcccggccaatgggagcgccg

SEQ ID NO: 1531737 - DNA, 25 bp, Homo sapien
tcacagcccgcgagtcagcgaggag

SEQ ID NO: 1531738 - DNA, 25 bp, Homo sapien
gggagcgccggcctgccggaggcac

SEQ ID NO: 1531739 - DNA, 25 bp, Homo sapien
tgctccgctccctccaactatgcct

SEQ ID NO: 1531740 - DNA, 25 bp, Homo sapien
ctccgctccctccaactatgcctgc

SEQ ID NO: 1531741 - DNA, 25 bp, Homo sapien
gctccgctccctccaactatgcctg

SEQ ID NO: 1531742 - DNA, 25 bp, Homo sapien
catgcatttccatccttcgcatctg

SEQ ID NO: 1531743 - DNA, 25 bp, Homo sapien
catttccatccttcgcatctggtca

SEQ ID NO: 1531744 - DNA, 25 bp, Homo sapien
tcctccccccgcgacacatgcattt

SEQ ID NO: 1531745 - DNA, 25 bp, Homo sapien
gcgacacatgcatttccatccttcg

SEQ ID NO: 1531746 - DNA, 25 bp, Homo sapien
ttcccagggatgaaaccatctctcc

SEQ ID NO: 1531747 - DNA, 25 bp, Homo sapien
caagatcagacagccttgcagacag

SEQ ID NO: 1531748 - DNA, 25 bp, Homo sapien
gagaccaaattcagccccacgaggt

SEQ ID NO: 1531749 - DNA, 25 bp, Homo sapien
tgtgaccaagtgaggcaatcttaga

SEQ ID NO: 1531750 - DNA, 25 bp, Homo sapien
cagctggaatcgtggctacctgtat

SEQ ID NO: 1531751 - DNA, 25 bp, Homo sapien
tagaaagccacaaacgcaggaggcc

SEQ ID NO: 1531752 - DNA, 25 bp, Homo sapien
caagaacgcacaatacagctggaat

SEQ ID NO: 1531753 - DNA, 25 bp, Homo sapien
gcaggaggccagtgtacctatcaat

SEQ ID NO: 1531754 - DNA, 25 bp, Homo sapien
aatttgttccctaggtctgtcaact

SEQ ID NO: 1531755 - DNA, 25 bp, Homo sapien
cctgcagatcttcacaagcatctag

SEQ ID NO: 1531756 - DNA, 25 bp, Homo sapien
ttcacaagcatctagcgcagggtcc

SEQ ID NO: 1531757 - DNA, 25 bp, Homo sapien
tgtcaactccagccgcatcgtgtct

SEQ ID NO: 1531758 - DNA, 25 bp, Homo sapien
tcagcaacgttcacgcctgtttccg

SEQ ID NO: 1531759 - DNA, 25 bp, Homo sapien
gcctgtttccgtatccaaagataca

SEQ ID NO: 1531760 - DNA, 25 bp, Homo sapien
tacagggtccacgttcagcaacgtt

SEQ ID NO: 1531761 - DNA, 25 bp, Homo sapien
ttcacgcctgtttccgtatccaaag

SEQ ID NO: 1531762 - DNA, 25 bp, Homo sapien
tccaaagcggtagagaccagtgacc

SEQ ID NO: 1531763 - DNA, 25 bp, Homo sapien
cagagatagcaatgatccaaagcgg

SEQ ID NO: 1531764 - DNA, 25 bp, Homo sapien
gtgaccaggccagttcttgtcttgg

SEQ ID NO: 1531765 - DNA, 25 bp, Homo sapien
gaatagtaagacactttcctacaga

SEQ ID NO: 1531766 - DNA, 25 bp, Homo sapien
ctctgaagcatccctgtgctgctgc

SEQ ID NO: 1531767 - DNA, 25 bp, Homo sapien
gaacaggtagaaatgagagcagggt

SEQ ID NO: 1531768 - DNA, 25 bp, Homo sapien
tccacgctaagctgccaaaaaatct

SEQ ID NO: 1531769 - DNA, 25 bp, Homo sapien
gctaagctgccaaaaaatcttcaca

SEQ ID NO: 1531770 - DNA, 25 bp, Homo sapien
tgatcaatggtttccacgctaagct

SEQ ID NO: 1531771 - DNA, 25 bp, Homo sapien
ctgttttgctgcgatatcttgctca

SEQ ID NO: 1531772 - DNA, 25 bp, Homo sapien
tgttttgctgcgatatcttgctcat

SEQ ID NO: 1531773 - DNA, 25 bp, Homo sapien
gtgctgttttgctgcgatatcttgc

SEQ ID NO: 1531774 - DNA, 25 bp, Homo sapien
tgctgttttgctgcgatatcttgct

SEQ ID NO: 1531775 - DNA, 25 bp, Homo sapien
tgcattgtcgccatctgctgtcgta

SEQ ID NO: 1531776 - DNA, 25 bp, Homo sapien
aatggactgtacgttgtctgcaagg

SEQ ID NO: 1531777 - DNA, 25 bp, Homo sapien
gtcactgtttcgatccatgggcgaa

SEQ ID NO: 1531778 - DNA, 25 bp, Homo sapien
tgctgtaagccgctggcatgtgcct

SEQ ID NO: 1531779 - DNA, 25 bp, Homo sapien
tttattaagaacatcgggatcccag

SEQ ID NO: 1531780 - DNA, 25 bp, Homo sapien
acatgagtggtgtcggtggtcacac

SEQ ID NO: 1531781 - DNA, 25 bp, Homo sapien
tcaagccacaagctctaaagtctgg

SEQ ID NO: 1531782 - DNA, 25 bp, Homo sapien
tgatcccagaaaatagcctccaatg

SEQ ID NO: 1531783 - DNA, 25 bp, Homo sapien
tgttcaggtacaaggtctcaagccc

SEQ ID NO: 1531784 - DNA, 25 bp, Homo sapien
actgggaaacgtgaaaagctgctac

SEQ ID NO: 1531785 - DNA, 25 bp, Homo sapien
agcaatcttccaccaaccggagggt

SEQ ID NO: 1531786 - DNA, 25 bp, Homo sapien
gatttaaatgtctgtagcgcctacc

SEQ ID NO: 1531787 - DNA, 25 bp, Homo sapien
ctttgcgcaagttaaagggcggact

SEQ ID NO: 1531788 - DNA, 25 bp, Homo sapien
tagaatcatgtagcgcttgagctgc

SEQ ID NO: 1531789 - DNA, 25 bp, Homo sapien
gatacggtcactgcctccaaactag

SEQ ID NO: 1531790 - DNA, 25 bp, Homo sapien
gaagatcctaggcactcaggtcaga

SEQ ID NO: 1531791 - DNA, 25 bp, Homo sapien
ccccgtgcaccctgaaaagatggct

SEQ ID NO: 1531792 - DNA, 25 bp, Homo sapien
aaatggtcctttgtgcgtggcttcc

SEQ ID NO: 1531793 - DNA, 25 bp, Homo sapien
gtgtcagtatcaagtcagttccagg

SEQ ID NO: 1531794 - DNA, 25 bp, Homo sapien
tgcagatgagcatttgggaccccgt

SEQ ID NO: 1531795 - DNA, 25 bp, Homo sapien
acagatggaccccatgggaagccca

SEQ ID NO: 1531796 - DNA, 25 bp, Homo sapien
tcaggactcacccagctacagatgg

SEQ ID NO: 1531797 - DNA, 25 bp, Homo sapien
tcagtgtcgtgacttggccatgacc

SEQ ID NO: 1531798 - DNA, 25 bp, Homo sapien
tggttctggaccctgcagacgtggt

SEQ ID NO: 1531799 - DNA, 25 bp, Homo sapien
tctgtccatgtcatgcataaaatgg

SEQ ID NO: 1531800 - DNA, 25 bp, Homo sapien
ttgtgtctcacccacctctggacga

SEQ ID NO: 1531801 - DNA, 25 bp, Homo sapien
aatggcaatgccagttccctccaga

SEQ ID NO: 1531802 - DNA, 25 bp, Homo sapien
atgtgctgcgcgtgtgactctccct

SEQ ID NO: 1531803 - DNA, 25 bp, Homo sapien
tgacagatggtgtctgggcctccct

SEQ ID NO: 1531804 - DNA, 25 bp, Homo sapien
aggctggccctgacagatggtgtct

SEQ ID NO: 1531805 - DNA, 25 bp, Homo sapien
tggatgcttggaagaaccttctcag

SEQ ID NO: 1531806 - DNA, 25 bp, Homo sapien
gagaggagacgtctttcacaggcat

SEQ ID NO: 1531807 - DNA, 25 bp, Homo sapien
tggtggcatccgcactgagaggtcc

SEQ ID NO: 1531808 - DNA, 25 bp, Homo sapien
tagagatgccatgagccacgacagc

SEQ ID NO: 1531809 - DNA, 25 bp, Homo sapien
gctctgtggcacgagagggtgctga

SEQ ID NO: 1531810 - DNA, 25 bp, Homo sapien
caggtgcagaacatgctagagatgc

SEQ ID NO: 1531811 - DNA, 25 bp, Homo sapien
aatgttgatgcccaaagcccagtgc

SEQ ID NO: 1531812 - DNA, 25 bp, Homo sapien
ctgcaaatggaattgctggaaaaat

SEQ ID NO: 1531813 - DNA, 25 bp, Homo sapien
aatggaattgctggaaaaatgttga

SEQ ID NO: 1531814 - DNA, 25 bp, Homo sapien
tggaaaaatgttgatgcccaaagcc

SEQ ID NO: 1531815 - DNA, 25 bp, Homo sapien
tctctcgggtgtcaaactgaccgtg

SEQ ID NO: 1531816 - DNA, 25 bp, Homo sapien
tgtgaacgacacttcgaccgtcaac

SEQ ID NO: 1531817 - DNA, 25 bp, Homo sapien
agactgcccccggaagccaggtggt

SEQ ID NO: 1531818 - DNA, 25 bp, Homo sapien
ggttcccagtgtgaacgacacttcg

SEQ ID NO: 1531819 - DNA, 25 bp, Homo sapien
gtgctgccagatgggtgttaattgg

SEQ ID NO: 1531820 - DNA, 25 bp, Homo sapien
gggagtgtctccgaggatgtccttc

SEQ ID NO: 1531821 - DNA, 25 bp, Homo sapien
gccagatgggtgttaattgggaggg

SEQ ID NO: 1531822 - DNA, 25 bp, Homo sapien
agtgtctccgaggatgtccttccca

SEQ ID NO: 1531823 - DNA, 25 bp, Homo sapien
ggttctgacacccagtcctgtcgtg

SEQ ID NO: 1531824 - DNA, 25 bp, Homo sapien
gaggacaacagccaaagcgtggctg

SEQ ID NO: 1531825 - DNA, 25 bp, Homo sapien
ggccatacgagcatcagcagattct

SEQ ID NO: 1531826 - DNA, 25 bp, Homo sapien
gattgagaactaacggccatacgag

SEQ ID NO: 1531827 - DNA, 25 bp, Homo sapien
ttctcttgatgtcccgcagttggca

SEQ ID NO: 1531828 - DNA, 25 bp, Homo sapien
gcatagagtgccctgacgtaggtct

SEQ ID NO: 1531829 - DNA, 25 bp, Homo sapien
tcttggcatcagacctcataaggca

SEQ ID NO: 1531830 - DNA, 25 bp, Homo sapien
ggcattttctggcaaccacaagagt

SEQ ID NO: 1531831 - DNA, 25 bp, Homo sapien
taaagcaaatgacctgggccccaga

SEQ ID NO: 1531832 - DNA, 25 bp, Homo sapien
agctaaagcaaatgacctgggcccc

SEQ ID NO: 1531833 - DNA, 25 bp, Homo sapien
ttgctgagagctcccaaggagctaa

SEQ ID NO: 1531834 - DNA, 25 bp, Homo sapien
tcccaaggagctaaagcaaatgacc

SEQ ID NO: 1531835 - DNA, 25 bp, Homo sapien
ttccagccaggatcactcgtcttgc

SEQ ID NO: 1531836 - DNA, 25 bp, Homo sapien
aggtcccagtggttgtcatttagaa

SEQ ID NO: 1531837 - DNA, 25 bp, Homo sapien
cccagtggttgtcatttagaaggtt

SEQ ID NO: 1531838 - DNA, 25 bp, Homo sapien
atcactcgtcttgcgcaggtcccag

SEQ ID NO: 1531839 - DNA, 25 bp, Homo sapien
gcgttcattcgagaaagtctccctg

SEQ ID NO: 1531840 - DNA, 25 bp, Homo sapien
ctgtgcagcgtcacggagaccgtgt

SEQ ID NO: 1531841 - DNA, 25 bp, Homo sapien
gggtgcccgcctcgtttcccagtga

SEQ ID NO: 1531842 - DNA, 25 bp, Homo sapien
tgcctccgccgagagaaagggcgtt

SEQ ID NO: 1531843 - DNA, 25 bp, Homo sapien
ccaagactctacttgcaatcagagg

SEQ ID NO: 1531844 - DNA, 25 bp, Homo sapien
agtggtggcctgccatcagtctgat

SEQ ID NO: 1531845 - DNA, 25 bp, Homo sapien
caggtccagatacccccaggaggtt

SEQ ID NO: 1531846 - DNA, 25 bp, Homo sapien
gccacttggtgctcgcctggtgtaa

SEQ ID NO: 1531847 - DNA, 25 bp, Homo sapien
agaccccacgggcatcagtgaaacc

SEQ ID NO: 1531848 - DNA, 25 bp, Homo sapien
cttgtctgtgcggtagaccccacgg

SEQ ID NO: 1531849 - DNA, 25 bp, Homo sapien
tacgtaccattctcggcatcaggtt

SEQ ID NO: 1531850 - DNA, 25 bp, Homo sapien
cagtggctccacattctagtgcaga

SEQ ID NO: 1531851 - DNA, 25 bp, Homo sapien
ccgtgtgcggctgcggtgggggctg

SEQ ID NO: 1531852 - DNA, 25 bp, Homo sapien
ctgcccgcgtctggcggccccaccg

SEQ ID NO: 1531853 - DNA, 25 bp, Homo sapien
ccgcgtctggcggccccaccgtgtg

SEQ ID NO: 1531854 - DNA, 25 bp, Homo sapien
tctggcggccccaccgtgtgcggct

SEQ ID NO: 1531855 - DNA, 25 bp, Homo sapien
ggcagaaccagcatccaggctacct

SEQ ID NO: 1531856 - DNA, 25 bp, Homo sapien
gcctctggtagaccagtgccctcaa

SEQ ID NO: 1531857 - DNA, 25 bp, Homo sapien
ctcaatccacagcagaagatggaca

SEQ ID NO: 1531858 - DNA, 25 bp, Homo sapien
agtgccctcaatccacagcagaaga

SEQ ID NO: 1531859 - DNA, 25 bp, Homo sapien
cccagaccaaagatcctctaggcaa

SEQ ID NO: 1531860 - DNA, 25 bp, Homo sapien
gaccaaagatcctctaggcaagggc

SEQ ID NO: 1531861 - DNA, 25 bp, Homo sapien
aaagatcctctaggcaagggcaggg

SEQ ID NO: 1531862 - DNA, 25 bp, Homo sapien
ccaaagatcctctaggcaagggcag

SEQ ID NO: 1531863 - DNA, 25 bp, Homo sapien
gaaccaggatagagagacggtctcc

SEQ ID NO: 1531864 - DNA, 25 bp, Homo sapien
gcccaaggctgggatctgccagaac

SEQ ID NO: 1531865 - DNA, 25 bp, Homo sapien
tctgccagaaccaggatagagagac

SEQ ID NO: 1531866 - DNA, 25 bp, Homo sapien
gagagacggtctcctgggcattcca

SEQ ID NO: 1531867 - DNA, 25 bp, Homo sapien
ctacaggaagatagatgcccaggtg

SEQ ID NO: 1531868 - DNA, 25 bp, Homo sapien
caggaagatagatgcccaggtgggc

SEQ ID NO: 1531869 - DNA, 25 bp, Homo sapien
aagatagatgcccaggtgggctggg

SEQ ID NO: 1531870 - DNA, 25 bp, Homo sapien
gaagatagatgcccaggtgggctgg

SEQ ID NO: 1531871 - DNA, 25 bp, Homo sapien
atcttgaattgcctcgtagacccca

SEQ ID NO: 1531872 - DNA, 25 bp, Homo sapien
ttgcttttccgaagccaccgttcca

SEQ ID NO: 1531873 - DNA, 25 bp, Homo sapien
gaattgcctcgtagaccccagcaaa

SEQ ID NO: 1531874 - DNA, 25 bp, Homo sapien
tgcttttccgaagccaccgttccat

SEQ ID NO: 1531875 - DNA, 25 bp, Homo sapien
aaacagtcttcgaaacagtgagaaa

SEQ ID NO: 1531876 - DNA, 25 bp, Homo sapien
cagtcttcgaaacagtgagaaacaa

SEQ ID NO: 1531877 - DNA, 25 bp, Homo sapien
tatattgaatgtcgataattggatg

SEQ ID NO: 1531878 - DNA, 25 bp, Homo sapien
tattgaatgtcgataattggatgta

SEQ ID NO: 1531879 - DNA, 25 bp, Homo sapien
ggccctgggtgtagcgaggaagcat

SEQ ID NO: 1531880 - DNA, 25 bp, Homo sapien
agaggccctgggtgtagcgaggaag

SEQ ID NO: 1531881 - DNA, 25 bp, Homo sapien
tgcaaatccatgcgcacaagcagag

SEQ ID NO: 1531882 - DNA, 25 bp, Homo sapien
tgtggctgaagccccggactggacc

SEQ ID NO: 1531883 - DNA, 25 bp, Homo sapien
ggatgggttcccaattctctccaga

SEQ ID NO: 1531884 - DNA, 25 bp, Homo sapien
caaaggatgggttcccaattctctc

SEQ ID NO: 1531885 - DNA, 25 bp, Homo sapien
gttcccaattctctccagagctgag

SEQ ID NO: 1531886 - DNA, 25 bp, Homo sapien
gggttcccaattctctccagagctg

SEQ ID NO: 1531887 - DNA, 25 bp, Homo sapien
tggcctggtccacccagtgctccca

SEQ ID NO: 1531888 - DNA, 25 bp, Homo sapien
gcagcatccaggttcccctttataa

SEQ ID NO: 1531889 - DNA, 25 bp, Homo sapien
caggttcccctttataagatggcaa

SEQ ID NO: 1531890 - DNA, 25 bp, Homo sapien
tctcctgggccttcggctgtggcct

SEQ ID NO: 1531891 - DNA, 25 bp, Homo sapien
catgaatctgagagtaacctcggct

SEQ ID NO: 1531892 - DNA, 25 bp, Homo sapien
gccccgaatctagtatggaagcagc

SEQ ID NO: 1531893 - DNA, 25 bp, Homo sapien
ggccctccgatgaatcctgcggcaa

SEQ ID NO: 1531894 - DNA, 25 bp, Homo sapien
caaaatggccccgaatctagtatgg

SEQ ID NO: 1531895 - DNA, 25 bp, Homo sapien
tccacaatgctcctgacgacggcca

SEQ ID NO: 1531896 - DNA, 25 bp, Homo sapien
ccacaatgctcctgacgacggccat

SEQ ID NO: 1531897 - DNA, 25 bp, Homo sapien
cagctgtggcttccgggtgaaggct

SEQ ID NO: 1531898 - DNA, 25 bp, Homo sapien
ggtcttcagtgcccggtgttggtgt

SEQ ID NO: 1531899 - DNA, 25 bp, Homo sapien
tgggagtttggatccgcttttggtc

SEQ ID NO: 1531900 - DNA, 25 bp, Homo sapien
gaacactgaggcatccaacagctca

SEQ ID NO: 1531901 - DNA, 25 bp, Homo sapien
gaaggtgtcattcccacaaggtaga

SEQ ID NO: 1531902 - DNA, 25 bp, Homo sapien
gctttcttgggtgcagaaccacaag

SEQ ID NO: 1531903 - DNA, 25 bp, Homo sapien
tgaggcccgtgctgctatctaagac

SEQ ID NO: 1531904 - DNA, 25 bp, Homo sapien
ctgaatgtttcagccccagcgctct

SEQ ID NO: 1531905 - DNA, 25 bp, Homo sapien
cagtacatgggatgcgtggatcctg

SEQ ID NO: 1531906 - DNA, 25 bp, Homo sapien
aatctcccggctaacaacactcagt

SEQ ID NO: 1531907 - DNA, 25 bp, Homo sapien
aggactggtgagagcgcagccacac

SEQ ID NO: 1531908 - DNA, 25 bp, Homo sapien
gggcatcgacggacgcacctctgct

SEQ ID NO: 1531909 - DNA, 25 bp, Homo sapien
gtcctctgcaccgtcatgtctgggc

SEQ ID NO: 1531910 - DNA, 25 bp, Homo sapien
tccctgtgaccgtgagggttttatg

SEQ ID NO: 1531911 - DNA, 25 bp, Homo sapien
cctgctggtcctgatgtcctctgca

SEQ ID NO: 1531912 - DNA, 25 bp, Homo sapien
cattgtcatacacatgttgagagca

SEQ ID NO: 1531913 - DNA, 25 bp, Homo sapien
agggggcatgtaacccagacccaga

SEQ ID NO: 1531914 - DNA, 25 bp, Homo sapien
taggcatcccactgggtctggaggc

SEQ ID NO: 1531915 - DNA, 25 bp, Homo sapien
gaaaacggactaatgaagctctctt

SEQ ID NO: 1531916 - DNA, 25 bp, Homo sapien
tcctccacgaaggtttcttggctta

SEQ ID NO: 1531917 - DNA, 25 bp, Homo sapien
tatatccccatgtgtcacaggagag

SEQ ID NO: 1531918 - DNA, 25 bp, Homo sapien
gaagaccttcagacctgatgccccg

SEQ ID NO: 1531919 - DNA, 25 bp, Homo sapien
caaaggccatgtgggacctagcaga

SEQ ID NO: 1531920 - DNA, 25 bp, Homo sapien
tgatgccccgtttttcagatgagaa

SEQ ID NO: 1531921 - DNA, 25 bp, Homo sapien
tttggaggagtcattggctagagcc

SEQ ID NO: 1531922 - DNA, 25 bp, Homo sapien
atcgatgggcttggtggtagggggc

SEQ ID NO: 1531923 - DNA, 25 bp, Homo sapien
ctatcgatgggcttggtggtagggg

SEQ ID NO: 1531924 - DNA, 25 bp, Homo sapien
tatcgatgggcttggtggtaggggg

SEQ ID NO: 1531925 - DNA, 25 bp, Homo sapien
gcctcagcccatcggtaattaaaca

SEQ ID NO: 1531926 - DNA, 25 bp, Homo sapien
ttcatgggttggcatagcctcagcc

SEQ ID NO: 1531927 - DNA, 25 bp, Homo sapien
tcggtaattaaacacggaacagctg

SEQ ID NO: 1531928 - DNA, 25 bp, Homo sapien
taaacacggaacagctgtcactctg

SEQ ID NO: 1531929 - DNA, 25 bp, Homo sapien
gcataaagtttatttcgttgtacca

SEQ ID NO: 1531930 - DNA, 25 bp, Homo sapien
aaccagtaatgaggatgccagcagc

SEQ ID NO: 1531931 - DNA, 25 bp, Homo sapien
ataatcccctgtaatggaaaaccag

SEQ ID NO: 1531932 - DNA, 25 bp, Homo sapien
aaaaccagtaatgaggatgccagca

SEQ ID NO: 1531933 - DNA, 25 bp, Homo sapien
tgtctctttgcatcccaactaaggt

SEQ ID NO: 1531934 - DNA, 25 bp, Homo sapien
tgtgtgtctccaccgaaagattagt

SEQ ID NO: 1531935 - DNA, 25 bp, Homo sapien
gattagtggcaaacttgtctctttg

SEQ ID NO: 1531936 - DNA, 25 bp, Homo sapien
tgcgatttttgatatgtgtgtctcc

SEQ ID NO: 1531937 - DNA, 25 bp, Homo sapien
cagagccactcctggggacggccag

SEQ ID NO: 1531938 - DNA, 25 bp, Homo sapien
gcagagccactcctggggacggcca

SEQ ID NO: 1531939 - DNA, 25 bp, Homo sapien
agcactgccggatccggcttgcgcg

SEQ ID NO: 1531940 - DNA, 25 bp, Homo sapien
acccagtgcgatctgtgggcgagca

SEQ ID NO: 1531941 - DNA, 25 bp, Homo sapien
ggcggagaggacctccgacccagct

SEQ ID NO: 1531942 - DNA, 25 bp, Homo sapien
cgctccaagcggaacccagtgcgat

SEQ ID NO: 1531943 - DNA, 25 bp, Homo sapien
gcagcggacgcacccgaggccgcgg

SEQ ID NO: 1531944 - DNA, 25 bp, Homo sapien
cgcctccagtccgggagcggttctc

SEQ ID NO: 1531945 - DNA, 25 bp, Homo sapien
ctggcgcagcggacgcacccgaggc

SEQ ID NO: 1531946 - DNA, 25 bp, Homo sapien
tccagtccgggagcggttctccgcg

SEQ ID NO: 1531947 - DNA, 25 bp, Homo sapien
gggatggcgagcggtgcagtccggg

SEQ ID NO: 1531948 - DNA, 25 bp, Homo sapien
cggactcccattcgcgtgcggtggc

SEQ ID NO: 1531949 - DNA, 25 bp, Homo sapien
gcttcggactcccattcgcgtgcgg

SEQ ID NO: 1531950 - DNA, 25 bp, Homo sapien
ttcggactcccattcgcgtgcggtg

SEQ ID NO: 1531951 - DNA, 25 bp, Homo sapien
gcgggtcggggacgcgcgcgacgga

SEQ ID NO: 1531952 - DNA, 25 bp, Homo sapien
ttgcgggtcggggacgcgcgcgacg

SEQ ID NO: 1531953 - DNA, 25 bp, Homo sapien
ctggagagttgcgggtcggggacgc

SEQ ID NO: 1531954 - DNA, 25 bp, Homo sapien
agagttgcgggtcggggacgcgcgc

SEQ ID NO: 1531955 - DNA, 25 bp, Homo sapien
gcctccagcactcacaggccggtgc

SEQ ID NO: 1531956 - DNA, 25 bp, Homo sapien
acactcgcctccagcactcacaggc

SEQ ID NO: 1531957 - DNA, 25 bp, Homo sapien
atcgctgacgcacgcacactcgcct

SEQ ID NO: 1531958 - DNA, 25 bp, Homo sapien
ttcacaccatcgctgacgcacgcac

SEQ ID NO: 1531959 - DNA, 25 bp, Homo sapien
ctggagacaagatgtacgcgaaagt

SEQ ID NO: 1531960 - DNA, 25 bp, Homo sapien
gagacaagatgtacgcgaaagttag

SEQ ID NO: 1531961 - DNA, 25 bp, Homo sapien
caagatgtacgcgaaagttagggcg

SEQ ID NO: 1531962 - DNA, 25 bp, Homo sapien
agacaagatgtacgcgaaagttagg

SEQ ID NO: 1531963 - DNA, 25 bp, Homo sapien
gcgcccacagccgagggcgccgcag

SEQ ID NO: 1531964 - DNA, 25 bp, Homo sapien
gcagcgcccacagccgagggcgccg

SEQ ID NO: 1531965 - DNA, 25 bp, Homo sapien
ttaaaacagacagccgggcagcagc

SEQ ID NO: 1531966 - DNA, 25 bp, Homo sapien
agcgcccacagccgagggcgccgca

SEQ ID NO: 1531967 - DNA, 25 bp, Homo sapien
ctgcttgtgtttgctcaacttctcc

SEQ ID NO: 1531968 - DNA, 25 bp, Homo sapien
ctgcaccaacactgtaacctgcttg

SEQ ID NO: 1531969 - DNA, 25 bp, Homo sapien
aacactgtaacctgcttgtgtttgc

SEQ ID NO: 1531970 - DNA, 25 bp, Homo sapien
gcaccaacactgtaacctgcttgtg

SEQ ID NO: 1531971 - DNA, 25 bp, Homo sapien
gacacattaactcgtggaagaggga

SEQ ID NO: 1531972 - DNA, 25 bp, Homo sapien
gatgaggccaaacctcatgaggccc

SEQ ID NO: 1531973 - DNA, 25 bp, Homo sapien
ctttcacagggatgaatggtcatga

SEQ ID NO: 1531974 - DNA, 25 bp, Homo sapien
tgccatggctgtgcgctgacacatt

SEQ ID NO: 1531975 - DNA, 25 bp, Homo sapien
tacctcggcatactcatagaatggc

SEQ ID NO: 1531976 - DNA, 25 bp, Homo sapien
taaaaccacggtgtgatacctcggc

SEQ ID NO: 1531977 - DNA, 25 bp, Homo sapien
gggagattcaaacccgcccagaaga

SEQ ID NO: 1531978 - DNA, 25 bp, Homo sapien
agcactgccagacgtttccacaatg

SEQ ID NO: 1531979 - DNA, 25 bp, Homo sapien
acataaacgagtcttgcattatttc

SEQ ID NO: 1531980 - DNA, 25 bp, Homo sapien
cgtacttgtcaaattaaggtaagat

SEQ ID NO: 1531981 - DNA, 25 bp, Homo sapien
tttcttgcgtacttgtcaaattaag

SEQ ID NO: 1531982 - DNA, 25 bp, Homo sapien
cttgcgtacttgtcaaattaaggta

SEQ ID NO: 1531983 - DNA, 25 bp, Homo sapien
caaaaggtcatgagcacagtgcact

SEQ ID NO: 1531984 - DNA, 25 bp, Homo sapien
ttttcagctacacccaaaagggaca

SEQ ID NO: 1531985 - DNA, 25 bp, Homo sapien
ccaggactgccagggttttgcacag

SEQ ID NO: 1531986 - DNA, 25 bp, Homo sapien
tgcctgtggctgatgggaacgattc

SEQ ID NO: 1531987 - DNA, 25 bp, Homo sapien
ctgctggatcctgccaagagcacct

SEQ ID NO: 1531988 - DNA, 25 bp, Homo sapien
cacctggggatgtaggatgcggcat

SEQ ID NO: 1531989 - DNA, 25 bp, Homo sapien
ccaagagcacctggggatgtaggat

SEQ ID NO: 1531990 - DNA, 25 bp, Homo sapien
ctggatcctgccaagagcacctggg

SEQ ID NO: 1531991 - DNA, 25 bp, Homo sapien
tcacggacacattccagttggagtc

SEQ ID NO: 1531992 - DNA, 25 bp, Homo sapien
cacggacacattccagttggagtct

SEQ ID NO: 1531993 - DNA, 25 bp, Homo sapien
catcacggacacattccagttggag

SEQ ID NO: 1531994 - DNA, 25 bp, Homo sapien
cggacacattccagttggagtctga

SEQ ID NO: 1531995 - DNA, 25 bp, Homo sapien
taaaaccgctctaatggcagcggcg

SEQ ID NO: 1531996 - DNA, 25 bp, Homo sapien
gaaagttctctgtccggtgggtctc

SEQ ID NO: 1531997 - DNA, 25 bp, Homo sapien
gccgatcgatcggtgggagcctaca

SEQ ID NO: 1531998 - DNA, 25 bp, Homo sapien
gagagaggctgctatggcaacttga

SEQ ID NO: 1531999 - DNA, 25 bp, Homo sapien
ctgtggccgtggggacctgtccctg

SEQ ID NO: 1532000 - DNA, 25 bp, Homo sapien
tggccgtggggacctgtccctgtgc

SEQ ID NO: 1532001 - DNA, 25 bp, Homo sapien
ccctgtgcctggctccaggcagcat

SEQ ID NO: 1532002 - DNA, 25 bp, Homo sapien
gccgtggggacctgtccctgtgcct

SEQ ID NO: 1532003 - DNA, 25 bp, Homo sapien
acgcatggacggctccaaggacacg

SEQ ID NO: 1532004 - DNA, 25 bp, Homo sapien
gacggctccaaggacacgcttggct

SEQ ID NO: 1532005 - DNA, 25 bp, Homo sapien
ctccagtggcgaccggcagcaggcg

SEQ ID NO: 1532006 - DNA, 25 bp, Homo sapien
gcggacagacgcatggacggctcca

SEQ ID NO: 1532007 - DNA, 25 bp, Homo sapien
taatgggtccctcaatatcaggctc

SEQ ID NO: 1532008 - DNA, 25 bp, Homo sapien
tgtcgcgagcccctgagtaagctgg

SEQ ID NO: 1532009 - DNA, 25 bp, Homo sapien
ccagtttgacctagggtagcctcca

SEQ ID NO: 1532010 - DNA, 25 bp, Homo sapien
ccagctggaaagcaactgtcgcgag

SEQ ID NO: 1532011 - DNA, 25 bp, Homo sapien
gggcacgttcttccctcatcgtcca

SEQ ID NO: 1532012 - DNA, 25 bp, Homo sapien
ctcatcgtccacaccaggcgtccat

SEQ ID NO: 1532013 - DNA, 25 bp, Homo sapien
ttcttccctcatcgtccacaccagg

SEQ ID NO: 1532014 - DNA, 25 bp, Homo sapien
tcaggggtcacctcttgggtgtggg

SEQ ID NO: 1532015 - DNA, 25 bp, Homo sapien
cgcattgttccaggtcgcagggtca

SEQ ID NO: 1532016 - DNA, 25 bp, Homo sapien
ggcgagctccgtagggtcctgcagg

SEQ ID NO: 1532017 - DNA, 25 bp, Homo sapien
ggaagagaacatgcaggccagccgc

SEQ ID NO: 1532018 - DNA, 25 bp, Homo sapien
gcagctccgaacagcaggatggaag

SEQ ID NO: 1532019 - DNA, 25 bp, Homo sapien
tgggagcggccagacccacttctga

SEQ ID NO: 1532020 - DNA, 25 bp, Homo sapien
tgctgctccagacgcctgggagcgg

SEQ ID NO: 1532021 - DNA, 25 bp, Homo sapien
cctgggagcggccagacccacttct

SEQ ID NO: 1532022 - DNA, 25 bp, Homo sapien
tgctccagacgcctgggagcggcca

SEQ ID NO: 1532023 - DNA, 25 bp, Homo sapien
tgttctgccaatgcagtgtcatgag

SEQ ID NO: 1532024 - DNA, 25 bp, Homo sapien
gctcatgtgaggctgcaaagctccc

SEQ ID NO: 1532025 - DNA, 25 bp, Homo sapien
caatgcagtgtcatgagctgttctg

SEQ ID NO: 1532026 - DNA, 25 bp, Homo sapien
gggctcatgtgaggctgcaaagctc

SEQ ID NO: 1532027 - DNA, 25 bp, Homo sapien
gctccgtgccatctgacatcccctg

SEQ ID NO: 1532028 - DNA, 25 bp, Homo sapien
ctgaggatccgatcttcccagaaat

SEQ ID NO: 1532029 - DNA, 25 bp, Homo sapien
tgcaaagggatgatggcctcggctc

SEQ ID NO: 1532030 - DNA, 25 bp, Homo sapien
cctgaggatccgatcttcccagaaa

SEQ ID NO: 1532031 - DNA, 25 bp, Homo sapien
catggaccatcagaagacccacgtg

SEQ ID NO: 1532032 - DNA, 25 bp, Homo sapien
aagacccacgtgtgctccttgccag

SEQ ID NO: 1532033 - DNA, 25 bp, Homo sapien
tggaccatcagaagacccacgtgtg

SEQ ID NO: 1532034 - DNA, 25 bp, Homo sapien
ctgcatggaccatcagaagacccac

SEQ ID NO: 1532035 - DNA, 25 bp, Homo sapien
gcgcgaggaccggactctctctgag

SEQ ID NO: 1532036 - DNA, 25 bp, Homo sapien
acatatttcccctgcagccaacctg

SEQ ID NO: 1532037 - DNA, 25 bp, Homo sapien
ctctctctgagagggccagtagaca

SEQ ID NO: 1532038 - DNA, 25 bp, Homo sapien
tgagagggccagtagacatatttcc

SEQ ID NO: 1532039 - DNA, 25 bp, Homo sapien
ccggggaaagcagccggctccatgg

SEQ ID NO: 1532040 - DNA, 25 bp, Homo sapien
aagcagccggctccatggaaactgg

SEQ ID NO: 1532041 - DNA, 25 bp, Homo sapien
aaggagtctgggcttagacgcccag

SEQ ID NO: 1532042 - DNA, 25 bp, Homo sapien
cggggaaagcagccggctccatgga

SEQ ID NO: 1532043 - DNA, 25 bp, Homo sapien
ttgtgcataatgatggctggcctgg

SEQ ID NO: 1532044 - DNA, 25 bp, Homo sapien
tgtgcataatgatggctggcctggc

SEQ ID NO: 1532045 - DNA, 25 bp, Homo sapien
ctccaattgtgcataatgatggctg

SEQ ID NO: 1532046 - DNA, 25 bp, Homo sapien
caattgtgcataatgatggctggcc

SEQ ID NO: 1532047 - DNA, 25 bp, Homo sapien
gggagctgacagttgccacaatctg

SEQ ID NO: 1532048 - DNA, 25 bp, Homo sapien
taattcaaccaatggaagagccttg

SEQ ID NO: 1532049 - DNA, 25 bp, Homo sapien
gagacccagttttccagttggactg

SEQ ID NO: 1532050 - DNA, 25 bp, Homo sapien
tcagaaggtgtctttgttgtaggtt

SEQ ID NO: 1532051 - DNA, 25 bp, Homo sapien
tgccccgtttcaacccactggatgt

SEQ ID NO: 1532052 - DNA, 25 bp, Homo sapien
tttcaacccactggatgtctccagg

SEQ ID NO: 1532053 - DNA, 25 bp, Homo sapien
ctggcagtgggtgtgccccgtttca

SEQ ID NO: 1532054 - DNA, 25 bp, Homo sapien
gtgtgccccgtttcaacccactgga

SEQ ID NO: 1532055 - DNA, 25 bp, Homo sapien
ctacagcaacagaagcttgtcagtg

SEQ ID NO: 1532056 - DNA, 25 bp, Homo sapien
gcaacagaagcttgtcagtgggtgc

SEQ ID NO: 1532057 - DNA, 25 bp, Homo sapien
tacagcaacagaagcttgtcagtgg

SEQ ID NO: 1532058 - DNA, 25 bp, Homo sapien
cagcaacagaagcttgtcagtgggt

SEQ ID NO: 1532059 - DNA, 25 bp, Homo sapien
ccactcgcaggaaagctttgcttga

SEQ ID NO: 1532060 - DNA, 25 bp, Homo sapien
gatactggagagagtgcccactcgc

SEQ ID NO: 1532061 - DNA, 25 bp, Homo sapien
tccaggtagatactggagagagtgc

SEQ ID NO: 1532062 - DNA, 25 bp, Homo sapien
aagctttgcttgaattgattcttcc

SEQ ID NO: 1532063 - DNA, 25 bp, Homo sapien
gggaaggcgaatctgcagagtccct

SEQ ID NO: 1532064 - DNA, 25 bp, Homo sapien
tcttgggtccctctcctagtactgg

SEQ ID NO: 1532065 - DNA, 25 bp, Homo sapien
cccctctccaaagggacccttgctg

SEQ ID NO: 1532066 - DNA, 25 bp, Homo sapien
cctccttgaatgctctcaggactct

SEQ ID NO: 1532067 - DNA, 25 bp, Homo sapien
ggtgagcacacatacttgtacacag

SEQ ID NO: 1532068 - DNA, 25 bp, Homo sapien
ctttccacatgaaccgtaaggcatc

SEQ ID NO: 1532069 - DNA, 25 bp, Homo sapien
catctgtccacccatgggtgtatag

SEQ ID NO: 1532070 - DNA, 25 bp, Homo sapien
tatagtaatactgaggtgagcacac

SEQ ID NO: 1532071 - DNA, 25 bp, Homo sapien
ggtggcctaccaggggagccaatcc

SEQ ID NO: 1532072 - DNA, 25 bp, Homo sapien
gggcaccattgcatctcccaggtga

SEQ ID NO: 1532073 - DNA, 25 bp, Homo sapien
tcctccattaggagatcgcagatct

SEQ ID NO: 1532074 - DNA, 25 bp, Homo sapien
caagcatgccattgcataattggct

SEQ ID NO: 1532075 - DNA, 25 bp, Homo sapien
ctccttggctgagcccggatggggg

SEQ ID NO: 1532076 - DNA, 25 bp, Homo sapien
ttggctgagcccggatgggggccgg

SEQ ID NO: 1532077 - DNA, 25 bp, Homo sapien
ccttggctgagcccggatgggggcc

SEQ ID NO: 1532078 - DNA, 25 bp, Homo sapien
ggctccttggctgagcccggatggg

SEQ ID NO: 1532079 - DNA, 25 bp, Homo sapien
agggccttccgaggcagatgcagcc

SEQ ID NO: 1532080 - DNA, 25 bp, Homo sapien
ccaggcaatactgtccaggcttgcg

SEQ ID NO: 1532081 - DNA, 25 bp, Homo sapien
ctcagtgagggagggcgtgtcctcc

SEQ ID NO: 1532082 - DNA, 25 bp, Homo sapien
gcttgcgcccacactcagtgaggga

SEQ ID NO: 1532083 - DNA, 25 bp, Homo sapien
gctcccgggcgactgtggatgaagt

SEQ ID NO: 1532084 - DNA, 25 bp, Homo sapien
tgtggatgaagtgcatctttggcac

SEQ ID NO: 1532085 - DNA, 25 bp, Homo sapien
ccagaagtggctcccgggcgactgt

SEQ ID NO: 1532086 - DNA, 25 bp, Homo sapien
ggagcaggacgcgtggccagaagtg

SEQ ID NO: 1532087 - DNA, 25 bp, Homo sapien
cacagtcggtatgcagctgaactca

SEQ ID NO: 1532088 - DNA, 25 bp, Homo sapien
gaggcagcattgcaacagagcacag

SEQ ID NO: 1532089 - DNA, 25 bp, Homo sapien
tacttgtggcgtctggtgctaactc

SEQ ID NO: 1532090 - DNA, 25 bp, Homo sapien
tctcctgagtgacggccaaatgtgc

SEQ ID NO: 1532091 - DNA, 25 bp, Homo sapien
tgttggggacaaagctgtgggctgc

SEQ ID NO: 1532092 - DNA, 25 bp, Homo sapien
gtgggctgcatcctacatggccgca

SEQ ID NO: 1532093 - DNA, 25 bp, Homo sapien
gctgcatcctacatggccgcagact

SEQ ID NO: 1532094 - DNA, 25 bp, Homo sapien
gctgtgggctgcatcctacatggcc

SEQ ID NO: 1532095 - DNA, 25 bp, Homo sapien
ctggatgtcagagaagagagctctc

SEQ ID NO: 1532096 - DNA, 25 bp, Homo sapien
catcagattctttgaccatctcttt

SEQ ID NO: 1532097 - DNA, 25 bp, Homo sapien
gatgcccagagcctggatgtcagag

SEQ ID NO: 1532098 - DNA, 25 bp, Homo sapien
tctttttgagagatgcccagagcct

SEQ ID NO: 1532099 - DNA, 25 bp, Homo sapien
tggacaaattgacttacaaaatatt

SEQ ID NO: 1532100 - DNA, 25 bp, Homo sapien
ctggacaaattgacttacaaaatat

SEQ ID NO: 1532101 - DNA, 25 bp, Homo sapien
gctcctgtgaactagtttgagtttc

SEQ ID NO: 1532102 - DNA, 25 bp, Homo sapien
gggctcctacagcttgctgaatggc

SEQ ID NO: 1532103 - DNA, 25 bp, Homo sapien
aacccacgagtgatgtagccttgga

SEQ ID NO: 1532104 - DNA, 25 bp, Homo sapien
tggggacttccacaaagaaacacca

SEQ ID NO: 1532105 - DNA, 25 bp, Homo sapien
cctctgcaatacaggctggtggtct

SEQ ID NO: 1532106 - DNA, 25 bp, Homo sapien
tgaagacaccgcagaggtctctgtc

SEQ ID NO: 1532107 - DNA, 25 bp, Homo sapien
tccattaattgaagacaccgcagag

SEQ ID NO: 1532108 - DNA, 25 bp, Homo sapien
ggtcgatgcctgtgaaagtcttgaa

SEQ ID NO: 1532109 - DNA, 25 bp, Homo sapien
ccaaaccgattgctctgcaggtctg

SEQ ID NO: 1532110 - DNA, 25 bp, Homo sapien
ttgacatgcatgtgcccaaaccgat

SEQ ID NO: 1532111 - DNA, 25 bp, Homo sapien
tctgatgtcatgatatatagtccgt

SEQ ID NO: 1532112 - DNA, 25 bp, Homo sapien
tatgacttgacattcagggaggaac

SEQ ID NO: 1532113 - DNA, 25 bp, Homo sapien
tggacagcgcacagcacgtgacata

SEQ ID NO: 1532114 - DNA, 25 bp, Homo sapien
acagcgcacagcacgtgacatacaa

SEQ ID NO: 1532115 - DNA, 25 bp, Homo sapien
gacagcgcacagcacgtgacataca

SEQ ID NO: 1532116 - DNA, 25 bp, Homo sapien
agcgcacagcacgtgacatacaacc

SEQ ID NO: 1532117 - DNA, 25 bp, Homo sapien
gctgcacgatgagggccacgacccg

SEQ ID NO: 1532118 - DNA, 25 bp, Homo sapien
ccacgacccggaccctttcatgagc

SEQ ID NO: 1532119 - DNA, 25 bp, Homo sapien
ggccacgacccggaccctttcatga

SEQ ID NO: 1532120 - DNA, 25 bp, Homo sapien
ctgctgcacgatgagggccacgacc

SEQ ID NO: 1532121 - DNA, 25 bp, Homo sapien
cggaagtccacaggaaggcaccatc

SEQ ID NO: 1532122 - DNA, 25 bp, Homo sapien
gattttggaaatccggaagtccaca

SEQ ID NO: 1532123 - DNA, 25 bp, Homo sapien
tgtggttgcagacagcagggatttt

SEQ ID NO: 1532124 - DNA, 25 bp, Homo sapien
tcaggcggtgggagctttgacaggg

SEQ ID NO: 1532125 - DNA, 25 bp, Homo sapien
aatgtgctattccgggaaacaaaca

SEQ ID NO: 1532126 - DNA, 25 bp, Homo sapien
tgctattccgggaaacaaacaagcc

SEQ ID NO: 1532127 - DNA, 25 bp, Homo sapien
tgtgctattccgggaaacaaacaag

SEQ ID NO: 1532128 - DNA, 25 bp, Homo sapien
gaaatgtgctattccgggaaacaaa

SEQ ID NO: 1532129 - DNA, 25 bp, Homo sapien
ctcgggacgaagagagcccaccacg

SEQ ID NO: 1532130 - DNA, 25 bp, Homo sapien
gaattaaggctccagtctggagcac

SEQ ID NO: 1532131 - DNA, 25 bp, Homo sapien
acgaagagagcccaccacggacaca

SEQ ID NO: 1532132 - DNA, 25 bp, Homo sapien
cctccaggctgcgtgcatttctgga

SEQ ID NO: 1532133 - DNA, 25 bp, Homo sapien
tgaattcccctttcaaggcctcaaa

SEQ ID NO: 1532134 - DNA, 25 bp, Homo sapien
ctttgaagtccaaccagcgcagctg

SEQ ID NO: 1532135 - DNA, 25 bp, Homo sapien
cccatgtaatggctgttggtagggc

SEQ ID NO: 1532136 - DNA, 25 bp, Homo sapien
tagacccgccagctttgcaaacgga

SEQ ID NO: 1532137 - DNA, 25 bp, Homo sapien
gaccgcacttgtttcgtttagtgat

SEQ ID NO: 1532138 - DNA, 25 bp, Homo sapien
gccgatgagcgcctgacggctctga

SEQ ID NO: 1532139 - DNA, 25 bp, Homo sapien
gcctgacggctctgaccgcacttgt

SEQ ID NO: 1532140 - DNA, 25 bp, Homo sapien
ctgtctctggccgatgagcgcctga

SEQ ID NO: 1532141 - DNA, 25 bp, Homo sapien
ccagcgcagcgacactggggtgcat

SEQ ID NO: 1532142 - DNA, 25 bp, Homo sapien
aggggctgaatctcccgcagcgcag

SEQ ID NO: 1532143 - DNA, 25 bp, Homo sapien
cctttgcaggggctgaatctcccgc

SEQ ID NO: 1532144 - DNA, 25 bp, Homo sapien
ctgaatctcccgcagcgcagctcct

SEQ ID NO: 1532145 - DNA, 25 bp, Homo sapien
caggtacgtggggttccaggtggca

SEQ ID NO: 1532146 - DNA, 25 bp, Homo sapien
cagcacaggagccggctgttcctgg

SEQ ID NO: 1532147 - DNA, 25 bp, Homo sapien
cacaggagccggctgttcctgggcc

SEQ ID NO: 1532148 - DNA, 25 bp, Homo sapien
ctaggacacgggacaggtacgtggg

SEQ ID NO: 1532149 - DNA, 25 bp, Homo sapien
gcctggagaccagcctctgtcacag

SEQ ID NO: 1532150 - DNA, 25 bp, Homo sapien
agcctctgtcacagtcacggccacc

SEQ ID NO: 1532151 - DNA, 25 bp, Homo sapien
ctgtcacagtcacggccacctgctg

SEQ ID NO: 1532152 - DNA, 25 bp, Homo sapien
ctctgtcacagtcacggccacctgc

SEQ ID NO: 1532153 - DNA, 25 bp, Homo sapien
tgttcatgggaaaatccaacttctt

SEQ ID NO: 1532154 - DNA, 25 bp, Homo sapien
gacactgtctcctggacctctggac

SEQ ID NO: 1532155 - DNA, 25 bp, Homo sapien
tgctcgctgagctagagcccttggc

SEQ ID NO: 1532156 - DNA, 25 bp, Homo sapien
gtctcctggacctctggactctgag

SEQ ID NO: 1532157 - DNA, 25 bp, Homo sapien
gggctgtcccactctaatgctcgct

SEQ ID NO: 1532158 - DNA, 25 bp, Homo sapien
tggccaccgaggaatcaggggctct

SEQ ID NO: 1532159 - DNA, 25 bp, Homo sapien
ctggccaccgaggaatcaggggctc

SEQ ID NO: 1532160 - DNA, 25 bp, Homo sapien
gccaccgaggaatcaggggctcttt

SEQ ID NO: 1532161 - DNA, 25 bp, Homo sapien
caccgaggaatcaggggctctttct

SEQ ID NO: 1532162 - DNA, 25 bp, Homo sapien
gagagaccagtgcatcaatggccat

SEQ ID NO: 1532163 - DNA, 25 bp, Homo sapien
tgccttggcctgatgttgaacttta

SEQ ID NO: 1532164 - DNA, 25 bp, Homo sapien
cttggcctgatgttgaactttattc

SEQ ID NO: 1532165 - DNA, 25 bp, Homo sapien
ccttggcctgatgttgaactttatt

SEQ ID NO: 1532166 - DNA, 25 bp, Homo sapien
gccttggcctgatgttgaactttat

SEQ ID NO: 1532167 - DNA, 25 bp, Homo sapien
ttagcaccgtgcaaagaagccttct

SEQ ID NO: 1532168 - DNA, 25 bp, Homo sapien
tgcaggcgggctcagatttacggcc

SEQ ID NO: 1532169 - DNA, 25 bp, Homo sapien
gaatggatccaatgtgagctcctaa

SEQ ID NO: 1532170 - DNA, 25 bp, Homo sapien
tgtaagtgtcatttcggccacaaga

SEQ ID NO: 1532171 - DNA, 25 bp, Homo sapien
ctgagggccacacaggtcaggctct

SEQ ID NO: 1532172 - DNA, 25 bp, Homo sapien
gccacacaggtcaggctctcaccac

SEQ ID NO: 1532173 - DNA, 25 bp, Homo sapien
aggtcaggctctcaccacggctggg

SEQ ID NO: 1532174 - DNA, 25 bp, Homo sapien
cacaggtcaggctctcaccacggct

SEQ ID NO: 1532175 - DNA, 25 bp, Homo sapien
ctgtgggttccttcaagtcaccatc

SEQ ID NO: 1532176 - DNA, 25 bp, Homo sapien
caccatcctgggagccgcctggtgg

SEQ ID NO: 1532177 - DNA, 25 bp, Homo sapien
tcaagtcaccatcctgggagccgcc

SEQ ID NO: 1532178 - DNA, 25 bp, Homo sapien
agtcaccatcctgggagccgcctgg

SEQ ID NO: 1532179 - DNA, 25 bp, Homo sapien
agccgcagacgggttcccctctgca

SEQ ID NO: 1532180 - DNA, 25 bp, Homo sapien
ttgaggctggtcaggcgctggcagg

SEQ ID NO: 1532181 - DNA, 25 bp, Homo sapien
ctggcggagccgcagacgggttccc

SEQ ID NO: 1532182 - DNA, 25 bp, Homo sapien
cactggataagtcccgagtgaccct

SEQ ID NO: 1532183 - DNA, 25 bp, Homo sapien
tactggacgaactcgggaaaacgca

SEQ ID NO: 1532184 - DNA, 25 bp, Homo sapien
tgagacggtgcaagataccctggcg

SEQ ID NO: 1532185 - DNA, 25 bp, Homo sapien
tagtagaagtcgtaggtgcgctgcc

SEQ ID NO: 1532186 - DNA, 25 bp, Homo sapien
tgctcaaacttgtcgcggaaggcgg

SEQ ID NO: 1532187 - DNA, 25 bp, Homo sapien
gcgatggctcctcacgtcctcagag

SEQ ID NO: 1532188 - DNA, 25 bp, Homo sapien
gagtgcgggacatcccttaccgctg

SEQ ID NO: 1532189 - DNA, 25 bp, Homo sapien
catcaaaactgtcggctgagctcca

SEQ ID NO: 1532190 - DNA, 25 bp, Homo sapien
ttggtccaaggcaatggctaaggga

SEQ ID NO: 1532191 - DNA, 25 bp, Homo sapien
ctggtgtgaacatgtatgcttttgg

SEQ ID NO: 1532192 - DNA, 25 bp, Homo sapien
gcttttggagaagtttcctctatgg

SEQ ID NO: 1532193 - DNA, 25 bp, Homo sapien
gcaattcctccacttggggatccag

SEQ ID NO: 1532194 - DNA, 25 bp, Homo sapien
agcaattcctccacttggggatcca

SEQ ID NO: 1532195 - DNA, 25 bp, Homo sapien
cctgggggtccacccagggatccag

SEQ ID NO: 1532196 - DNA, 25 bp, Homo sapien
gcacctccacgtggagaatcagcag

SEQ ID NO: 1532197 - DNA, 25 bp, Homo sapien
gctgtgtcagcggagagttcaggtg

SEQ ID NO: 1532198 - DNA, 25 bp, Homo sapien
cccagatgctgtgtcagcggagagt

SEQ ID NO: 1532199 - DNA, 25 bp, Homo sapien
tgagcagatgccataggggcactgc

SEQ ID NO: 1532200 - DNA, 25 bp, Homo sapien
agatgctgtgtcagcggagagttca

SEQ ID NO: 1532201 - DNA, 25 bp, Homo sapien
ccaggggaggggctgtgtcatcctc

SEQ ID NO: 1532202 - DNA, 25 bp, Homo sapien
aggggaggggctgtgtcatcctcac

SEQ ID NO: 1532203 - DNA, 25 bp, Homo sapien
caggggaggggctgtgtcatcctca

SEQ ID NO: 1532204 - DNA, 25 bp, Homo sapien
gcctgactttgtcctgggccccttg

SEQ ID NO: 1532205 - DNA, 25 bp, Homo sapien
tgcctgactttgtcctgggcccctt

SEQ ID NO: 1532206 - DNA, 25 bp, Homo sapien
cttggacaggccctgtatgggccac

SEQ ID NO: 1532207 - DNA, 25 bp, Homo sapien
cctgagagtagggggagatgatggg

SEQ ID NO: 1532208 - DNA, 25 bp, Homo sapien
ttcgctgggttcaccacgagtgctc

SEQ ID NO: 1532209 - DNA, 25 bp, Homo sapien
gatgttcgctgggttcaccacgagt

SEQ ID NO: 1532210 - DNA, 25 bp, Homo sapien
cagcaggatgttcgctgggttcacc

SEQ ID NO: 1532211 - DNA, 25 bp, Homo sapien
tcaacacagcctcttgtgcccagct

SEQ ID NO: 1532212 - DNA, 25 bp, Homo sapien
ctttgcccatttctggatcccgtgg

SEQ ID NO: 1532213 - DNA, 25 bp, Homo sapien
tttgcccatttctggatcccgtggt

SEQ ID NO: 1532214 - DNA, 25 bp, Homo sapien
gctagtgtgataatggcttgggtta

SEQ ID NO: 1532215 - DNA, 25 bp, Homo sapien
ttattactttaggtgccaaggcagg

SEQ ID NO: 1532216 - DNA, 25 bp, Homo sapien
ataatggcttgggttaaatgacagc

SEQ ID NO: 1532217 - DNA, 25 bp, Homo sapien
cttattactttaggtgccaaggcag

SEQ ID NO: 1532218 - DNA, 25 bp, Homo sapien
tgccgcaggccccatcagttaattt

SEQ ID NO: 1532219 - DNA, 25 bp, Homo sapien
gatgccgcaggccccatcagttaat

SEQ ID NO: 1532220 - DNA, 25 bp, Homo sapien
caggccccatcagttaatttcctta

SEQ ID NO: 1532221 - DNA, 25 bp, Homo sapien
ttccttaatttatggattttgagct

SEQ ID NO: 1532222 - DNA, 25 bp, Homo sapien
agttacatccctgcagttagttcaa

SEQ ID NO: 1532223 - DNA, 25 bp, Homo sapien
gagcgtccagacagcgcttccgtaa

SEQ ID NO: 1532224 - DNA, 25 bp, Homo sapien
ctctactagaggacctcgcgcgcgt

SEQ ID NO: 1532225 - DNA, 25 bp, Homo sapien
gtaacttctttacgcgggaatcagc

SEQ ID NO: 1532226 - DNA, 25 bp, Homo sapien
ctagcggccgcactcccggggtggg

SEQ ID NO: 1532227 - DNA, 25 bp, Homo sapien
accgctcgcggctagacgcgccatt

SEQ ID NO: 1532228 - DNA, 25 bp, Homo sapien
tcccgtgacgtctgcggacacgcgg

SEQ ID NO: 1532229 - DNA, 25 bp, Homo sapien
tggagacggcggcagccaagactcc

SEQ ID NO: 1532230 - DNA, 25 bp, Homo sapien
tcctttacgcgcgcggcgcgatgga

SEQ ID NO: 1532231 - DNA, 25 bp, Homo sapien
gcctatgctcgctgcgcgggtcgct

SEQ ID NO: 1532232 - DNA, 25 bp, Homo sapien
cggagccggcagatcgggctcgggc

SEQ ID NO: 1532233 - DNA, 25 bp, Homo sapien
cgggcgcagcttcgccgcctatgct

SEQ ID NO: 1532234 - DNA, 25 bp, Homo sapien
tcgctccggtctcgtcctggagtta

SEQ ID NO: 1532235 - DNA, 25 bp, Homo sapien
ttatctttctgcagtcgcgggtggg

SEQ ID NO: 1532236 - DNA, 25 bp, Homo sapien
ccggaagacagaaaggcgctgcaga

SEQ ID NO: 1532237 - DNA, 25 bp, Homo sapien
tgtttgcgagtgtgtgccgggtgcg

SEQ ID NO: 1532238 - DNA, 25 bp, Homo sapien
aggcggcgatccctcccatcgcggc

SEQ ID NO: 1532239 - DNA, 25 bp, Homo sapien
tgggaagctcgcctaattaaggacg

SEQ ID NO: 1532240 - DNA, 25 bp, Homo sapien
tcactcgtgcagttaaattccttca

SEQ ID NO: 1532241 - DNA, 25 bp, Homo sapien
aactaatgctgttattcactcgtgc

SEQ ID NO: 1532242 - DNA, 25 bp, Homo sapien
aaaggtaaacagaaggcgcctctcg

SEQ ID NO: 1532243 - DNA, 25 bp, Homo sapien
tgagacgatttcactaaatcgcttc

SEQ ID NO: 1532244 - DNA, 25 bp, Homo sapien
gcttcttctgaagtcgcttctttgc

SEQ ID NO: 1532245 - DNA, 25 bp, Homo sapien
gctcgcagttgttcggctctctggg

SEQ ID NO: 1532246 - DNA, 25 bp, Homo sapien
aaatgattttgtgtcccattgcgct

SEQ ID NO: 1532247 - DNA, 25 bp, Homo sapien
gatacaagttcattccaccagcacc

SEQ ID NO: 1532248 - DNA, 25 bp, Homo sapien
tgggtgcagtgagagatacaagttc

SEQ ID NO: 1532249 - DNA, 25 bp, Homo sapien
caaactggcccggtagtgacccgct

SEQ ID NO: 1532250 - DNA, 25 bp, Homo sapien
gggcctcagcgatagcggtcgggag

SEQ ID NO: 1532251 - DNA, 25 bp, Homo sapien
caggctttacgccttgccgtgaatc

SEQ ID NO: 1532252 - DNA, 25 bp, Homo sapien
aggtttctcccaacaagcgcatccg

SEQ ID NO: 1532253 - DNA, 25 bp, Homo sapien
gctttacgccttgccgtgaatctcc

SEQ ID NO: 1532254 - DNA, 25 bp, Homo sapien
caagcgcatccgtgcgggaccacga

SEQ ID NO: 1532255 - DNA, 25 bp, Homo sapien
aggcttccatccctgcccagagtat

SEQ ID NO: 1532256 - DNA, 25 bp, Homo sapien
ctaggcttccatccctgcccagagt

SEQ ID NO: 1532257 - DNA, 25 bp, Homo sapien
taggcttccatccctgcccagagta

SEQ ID NO: 1532258 - DNA, 25 bp, Homo sapien
tgtgtgaagcgaggacccgctcggc

SEQ ID NO: 1532259 - DNA, 25 bp, Homo sapien
cggtgctgccgtgtgtgtgaagcga

SEQ ID NO: 1532260 - DNA, 25 bp, Homo sapien
gtgccggtgctgccgtgtgtgtgaa

SEQ ID NO: 1532261 - DNA, 25 bp, Homo sapien
tgaagcgaggacccgctcggccgct

SEQ ID NO: 1532262 - DNA, 25 bp, Homo sapien
aaggaaggacagccagtaaacaggc

SEQ ID NO: 1532263 - DNA, 25 bp, Homo sapien
aggaaggacagccagtaaacaggca

SEQ ID NO: 1532264 - DNA, 25 bp, Homo sapien
gagagacagccgggacatgtttcct

SEQ ID NO: 1532265 - DNA, 25 bp, Homo sapien
tgtgcacaggtgcattggacttggt

SEQ ID NO: 1532266 - DNA, 25 bp, Homo sapien
ccaggggagacacaggcgaccgggt

SEQ ID NO: 1532267 - DNA, 25 bp, Homo sapien
cgaccgggtgagagacagccgggac

SEQ ID NO: 1532268 - DNA, 25 bp, Homo sapien
tgtccaggacgatgggttcagtgcc

SEQ ID NO: 1532269 - DNA, 25 bp, Homo sapien
taatgttgcttcaaactgtccagga

SEQ ID NO: 1532270 - DNA, 25 bp, Homo sapien
caggacgtagcggaaaatctcccca

SEQ ID NO: 1532271 - DNA, 25 bp, Homo sapien
gtcatccggaagcagcagcttggac

SEQ ID NO: 1532272 - DNA, 25 bp, Homo sapien
caggcagagtgtgataaagtgtcca

SEQ ID NO: 1532273 - DNA, 25 bp, Homo sapien
gccctgggccacatatgcacactat

SEQ ID NO: 1532274 - DNA, 25 bp, Homo sapien
tagattctaaccctgacctctgggc

SEQ ID NO: 1532275 - DNA, 25 bp, Homo sapien
gatgcaagatgtgccaagtgcctgg

SEQ ID NO: 1532276 - DNA, 25 bp, Homo sapien
tgggccggttgcacccattgtacag

SEQ ID NO: 1532277 - DNA, 25 bp, Homo sapien
tattgtgtggactgggccggttgca

SEQ ID NO: 1532278 - DNA, 25 bp, Homo sapien
actgcgactcgcagggtattgtgtg

SEQ ID NO: 1532279 - DNA, 25 bp, Homo sapien
ggcctgccggttccaaccaattctg

SEQ ID NO: 1532280 - DNA, 25 bp, Homo sapien
gctggagctgatagtagcgcgcctc

SEQ ID NO: 1532281 - DNA, 25 bp, Homo sapien
cagccggcgttgacggagttgcaca

SEQ ID NO: 1532282 - DNA, 25 bp, Homo sapien
ttgagccggcagtagccattgagcg

SEQ ID NO: 1532283 - DNA, 25 bp, Homo sapien
gagttgcacatgacgtctccggtct

SEQ ID NO: 1532284 - DNA, 25 bp, Homo sapien
gggcttcaccgtttcagggatcgcg

SEQ ID NO: 1532285 - DNA, 25 bp, Homo sapien
ccccaggcgccatcatttaattatg

SEQ ID NO: 1532286 - DNA, 25 bp, Homo sapien
tgccttttttgtaggatggcacggg

SEQ ID NO: 1532287 - DNA, 25 bp, Homo sapien
aattatgcatcgacacattgttgcc

SEQ ID NO: 1532288 - DNA, 25 bp, Homo sapien
gctgttggaaaataggccctcactc

SEQ ID NO: 1532289 - DNA, 25 bp, Homo sapien
gactctgggtgtcaaatgaagcacg

SEQ ID NO: 1532290 - DNA, 25 bp, Homo sapien
tctgatgactgcgtgtaacacccgt

SEQ ID NO: 1532291 - DNA, 25 bp, Homo sapien
tagcaaacctagttggacgacccca

SEQ ID NO: 1532292 - DNA, 25 bp, Homo sapien
cccctctggaacagccgctccagga

SEQ ID NO: 1532293 - DNA, 25 bp, Homo sapien
aaagcacatactcgctgaactggga

SEQ ID NO: 1532294 - DNA, 25 bp, Homo sapien
tcccggcaaagcacatactcgctga

SEQ ID NO: 1532295 - DNA, 25 bp, Homo sapien
aggacgcagccacgctgaaacccct

SEQ ID NO: 1532296 - DNA, 25 bp, Homo sapien
agtccaggggttcctgcttgattcg

SEQ ID NO: 1532297 - DNA, 25 bp, Homo sapien
ctagtccaggggttcctgcttgatt

SEQ ID NO: 1532298 - DNA, 25 bp, Homo sapien
tccaggggttcctgcttgattcgaa

SEQ ID NO: 1532299 - DNA, 25 bp, Homo sapien
ccaggggttcctgcttgattcgaac

SEQ ID NO: 1532300 - DNA, 25 bp, Homo sapien
gttacagaatcactcagccctcagg

SEQ ID NO: 1532301 - DNA, 25 bp, Homo sapien
tcatcggcaggctagtgtaacaacg

SEQ ID NO: 1532302 - DNA, 25 bp, Homo sapien
caacggcagcaaacgtgaaggtctc

SEQ ID NO: 1532303 - DNA, 25 bp, Homo sapien
tggtccgaacgggaggagacttctc

SEQ ID NO: 1532304 - DNA, 25 bp, Homo sapien
aatcaggggtcaagagcgccaggtc

SEQ ID NO: 1532305 - DNA, 25 bp, Homo sapien
gccagtcctcactggaatcaggggt

SEQ ID NO: 1532306 - DNA, 25 bp, Homo sapien
tggaatcaggggtcaagagcgccag

SEQ ID NO: 1532307 - DNA, 25 bp, Homo sapien
ccagtcctcactggaatcaggggtc

SEQ ID NO: 1532308 - DNA, 25 bp, Homo sapien
tcagatgccaaaacgcagatgtgcc

SEQ ID NO: 1532309 - DNA, 25 bp, Homo sapien
aaataacaccaagctcaggacccag

SEQ ID NO: 1532310 - DNA, 25 bp, Homo sapien
tgcacaacatcgaatgcgggagtct

SEQ ID NO: 1532311 - DNA, 25 bp, Homo sapien
aactataggctcgttgctaagcaga

SEQ ID NO: 1532312 - DNA, 25 bp, Homo sapien
ggttctgtccagttgcttataatca

SEQ ID NO: 1532313 - DNA, 25 bp, Homo sapien
caaaagattgctgataatatactca

SEQ ID NO: 1532314 - DNA, 25 bp, Homo sapien
catttatacggctggcatttgacaa

SEQ ID NO: 1532315 - DNA, 25 bp, Homo sapien
tgctgtggctttgcgagttctctgc

SEQ ID NO: 1532316 - DNA, 25 bp, Homo sapien
ctaaggaacagtcaagcagtagctt

SEQ ID NO: 1532317 - DNA, 25 bp, Homo sapien
taaggaacagtcaagcagtagcttt

SEQ ID NO: 1532318 - DNA, 25 bp, Homo sapien
tctaaggaacagtcaagcagtagct

SEQ ID NO: 1532319 - DNA, 25 bp, Homo sapien
tacaacagctacatcagcccagatg

SEQ ID NO: 1532320 - DNA, 25 bp, Homo sapien
tgtgacatcctacttcctacaacag

SEQ ID NO: 1532321 - DNA, 25 bp, Homo sapien
ccccttgagatggccatcaacctgt

SEQ ID NO: 1532322 - DNA, 25 bp, Homo sapien
tgagatggccatcaacctgtgacat

SEQ ID NO: 1532323 - DNA, 25 bp, Homo sapien
ggccatggctccgggtccaggaaca

SEQ ID NO: 1532324 - DNA, 25 bp, Homo sapien
atggctccgggtccaggaacagcat

SEQ ID NO: 1532325 - DNA, 25 bp, Homo sapien
catggctccgggtccaggaacagca

SEQ ID NO: 1532326 - DNA, 25 bp, Homo sapien
ccatggctccgggtccaggaacagc

SEQ ID NO: 1532327 - DNA, 25 bp, Homo sapien
gaaatgggggtgtgtccgcgtccag

SEQ ID NO: 1532328 - DNA, 25 bp, Homo sapien
ctactcgtaccaatctgccttcccg

SEQ ID NO: 1532329 - DNA, 25 bp, Homo sapien
ggccctgctggtgcaatcggctcgc

SEQ ID NO: 1532330 - DNA, 25 bp, Homo sapien
tgccttcccgctgtttggctgcagg

SEQ ID NO: 1532331 - DNA, 25 bp, Homo sapien
gaggccatcgatgtcacccgaaggt

SEQ ID NO: 1532332 - DNA, 25 bp, Homo sapien
ccagagcgaggccatcgatgtcacc

SEQ ID NO: 1532333 - DNA, 25 bp, Homo sapien
agcgaggccatcgatgtcacccgaa

SEQ ID NO: 1532334 - DNA, 25 bp, Homo sapien
ccatcgatgtcacccgaaggtggcg

SEQ ID NO: 1532335 - DNA, 25 bp, Homo sapien
ctccacctgggcatgggaactgggg

SEQ ID NO: 1532336 - DNA, 25 bp, Homo sapien
ctacacgggttcctccacctgggca

SEQ ID NO: 1532337 - DNA, 25 bp, Homo sapien
acctgggcatgggaactgggggagg

SEQ ID NO: 1532338 - DNA, 25 bp, Homo sapien
ccacctgggcatgggaactggggga

SEQ ID NO: 1532339 - DNA, 25 bp, Homo sapien
cagggctgtggcttctctcgtggcc

SEQ ID NO: 1532340 - DNA, 25 bp, Homo sapien
ccagggctgtggcttctctcgtggc

SEQ ID NO: 1532341 - DNA, 25 bp, Homo sapien
ctgccagggctgtggcttctctcgt

SEQ ID NO: 1532342 - DNA, 25 bp, Homo sapien
gggctgtggcttctctcgtggccat

SEQ ID NO: 1532343 - DNA, 25 bp, Homo sapien
gtggctcagaggtgtgaacagcccc

SEQ ID NO: 1532344 - DNA, 25 bp, Homo sapien
acaggcccacattgggtgccaagaa

SEQ ID NO: 1532345 - DNA, 25 bp, Homo sapien
agacaggcccacattgggtgccaag

SEQ ID NO: 1532346 - DNA, 25 bp, Homo sapien
gtcactgttcttagccagagacagg

SEQ ID NO: 1532347 - DNA, 25 bp, Homo sapien
ctagtcactgttcttagccagagac

SEQ ID NO: 1532348 - DNA, 25 bp, Homo sapien
cccggctaatttttcatggtgtatt

SEQ ID NO: 1532349 - DNA, 25 bp, Homo sapien
acaggtgcctactaccatgcccggc

SEQ ID NO: 1532350 - DNA, 25 bp, Homo sapien
ggtgcctactaccatgcccggctaa

SEQ ID NO: 1532351 - DNA, 25 bp, Homo sapien
gcccggctaatttttcatggtgtat

SEQ ID NO: 1532352 - DNA, 25 bp, Homo sapien
actccacatgcttggataaactgcc

SEQ ID NO: 1532353 - DNA, 25 bp, Homo sapien
tcaggcgagatcgtaggtggtcctg

SEQ ID NO: 1532354 - DNA, 25 bp, Homo sapien
tccacatgcttggataaactgcctt

SEQ ID NO: 1532355 - DNA, 25 bp, Homo sapien
aggcgagatcgtaggtggtcctgtg

SEQ ID NO: 1532356 - DNA, 25 bp, Homo sapien
ttaaccagaaatggagcggcaccgc

SEQ ID NO: 1532357 - DNA, 25 bp, Homo sapien
gagaacagattctccagagcggtgg

SEQ ID NO: 1532358 - DNA, 25 bp, Homo sapien
gcagcgttcgtgctaaggcaagtca

SEQ ID NO: 1532359 - DNA, 25 bp, Homo sapien
tgttgtgccttttgatgacagtcgc

SEQ ID NO: 1532360 - DNA, 25 bp, Homo sapien
gctgagacgtttttgctgtctgcat

SEQ ID NO: 1532361 - DNA, 25 bp, Homo sapien
ttgatcttggcagctgagacgtttt

SEQ ID NO: 1532362 - DNA, 25 bp, Homo sapien
tggcagctgagacgtttttgctgtc

SEQ ID NO: 1532363 - DNA, 25 bp, Homo sapien
tcttggcagctgagacgtttttgct

SEQ ID NO: 1532364 - DNA, 25 bp, Homo sapien
tgtagcagtcatgagttatattttt

SEQ ID NO: 1532365 - DNA, 25 bp, Homo sapien
catgtagcagtcatgagttatattt

SEQ ID NO: 1532366 - DNA, 25 bp, Homo sapien
gcagtcatgagttatatttttcttt

SEQ ID NO: 1532367 - DNA, 25 bp, Homo sapien
tagcagtcatgagttatatttttct

SEQ ID NO: 1532368 - DNA, 25 bp, Homo sapien
cggtgcattctcgatcaagcaattt

SEQ ID NO: 1532369 - DNA, 25 bp, Homo sapien
gatgggatacctgctatgtggagaa

SEQ ID NO: 1532370 - DNA, 25 bp, Homo sapien
ggtctactccaaacaacggtgcatt

SEQ ID NO: 1532371 - DNA, 25 bp, Homo sapien
cacagtgaatctgttctcagatggg

SEQ ID NO: 1532372 - DNA, 25 bp, Homo sapien
aattattctgtgactgtatggtttc

SEQ ID NO: 1532373 - DNA, 25 bp, Homo sapien
tatggtttcttgcacggtgagagtt

SEQ ID NO: 1532374 - DNA, 25 bp, Homo sapien
gaagcagaattattctgtgactgta

SEQ ID NO: 1532375 - DNA, 25 bp, Homo sapien
tgggtccaggcacacaaatcgaggg

SEQ ID NO: 1532376 - DNA, 25 bp, Homo sapien
cagcttgactgaagggcttgtcaga

SEQ ID NO: 1532377 - DNA, 25 bp, Homo sapien
gcagcagtttgacccccacactgtg

SEQ ID NO: 1532378 - DNA, 25 bp, Homo sapien
cctttctcaagagcaaagtgaatgt

SEQ ID NO: 1532379 - DNA, 25 bp, Homo sapien
catctcctaagaaatgagcccctgg

SEQ ID NO: 1532380 - DNA, 25 bp, Homo sapien
cgttcacagggtagcctgcagctgc

SEQ ID NO: 1532381 - DNA, 25 bp, Homo sapien
gaaacgagacatacaataggtgcat

SEQ ID NO: 1532382 - DNA, 25 bp, Homo sapien
catcacatgtcaggccaaggccagt

SEQ ID NO: 1532383 - DNA, 25 bp, Homo sapien
gcccgtttgcggctgcagagctctg

SEQ ID NO: 1532384 - DNA, 25 bp, Homo sapien
gagcacccagggtgcgtgggcctct

SEQ ID NO: 1532385 - DNA, 25 bp, Homo sapien
gatgaaccagggcaccgacctggta

SEQ ID NO: 1532386 - DNA, 25 bp, Homo sapien
cctctggccttcaccaaggttttct

SEQ ID NO: 1532387 - DNA, 25 bp, Homo sapien
aatttgatctgttcacctgcaggaa

SEQ ID NO: 1532388 - DNA, 25 bp, Homo sapien
ccacggctgattgaagtccctgttt

SEQ ID NO: 1532389 - DNA, 25 bp, Homo sapien
ccctgacagcggccggcctgttgag

SEQ ID NO: 1532390 - DNA, 25 bp, Homo sapien
ccggcctgttgaggcgacggccagg

SEQ ID NO: 1532391 - DNA, 25 bp, Homo sapien
tggcggccacggctgattgaagtcc

SEQ ID NO: 1532392 - DNA, 25 bp, Homo sapien
agactcggcaccagcctttcatctc

SEQ ID NO: 1532393 - DNA, 25 bp, Homo sapien
ctgcagactcggcaccagcctttca

SEQ ID NO: 1532394 - DNA, 25 bp, Homo sapien
tgcagactcggcaccagcctttcat

SEQ ID NO: 1532395 - DNA, 25 bp, Homo sapien
gcagactcggcaccagcctttcatc

SEQ ID NO: 1532396 - DNA, 25 bp, Homo sapien
agtgactgctcaaacgcttcttata

SEQ ID NO: 1532397 - DNA, 25 bp, Homo sapien
ctaatttagttagaacaatttatct

SEQ ID NO: 1532398 - DNA, 25 bp, Homo sapien
ccggaaagttaactgggatgtattg

SEQ ID NO: 1532399 - DNA, 25 bp, Homo sapien
tttatgaattcaaagccaataccct

SEQ ID NO: 1532400 - DNA, 25 bp, Homo sapien
gggacctaacaagcatactacaaga

SEQ ID NO: 1532401 - DNA, 25 bp, Homo sapien
ggcccatcttctcggtttttatgga

SEQ ID NO: 1532402 - DNA, 25 bp, Homo sapien
gaggcataaacagagaggcaaacac

SEQ ID NO: 1532403 - DNA, 25 bp, Homo sapien
tgaatgggtttacctgaggcataaa

SEQ ID NO: 1532404 - DNA, 25 bp, Homo sapien
ttcaaaacgtgagtgcctgcagtag

SEQ ID NO: 1532405 - DNA, 25 bp, Homo sapien
tggccttcaggttaactagttcatc

SEQ ID NO: 1532406 - DNA, 25 bp, Homo sapien
ccttttccccatgtggcatgaacaa

SEQ ID NO: 1532407 - DNA, 25 bp, Homo sapien
gtcgaactttgtgctttgaaggccc

SEQ ID NO: 1532408 - DNA, 25 bp, Homo sapien
gttctccaaacgcaaaatcaatcgc

SEQ ID NO: 1532409 - DNA, 25 bp, Homo sapien
tcaagaaacgtggtcagttctccaa

SEQ ID NO: 1532410 - DNA, 25 bp, Homo sapien
gcaatcggcatttgatcaagaaacg

SEQ ID NO: 1532411 - DNA, 25 bp, Homo sapien
caaccttgactcagacttgcaatcg

SEQ ID NO: 1532412 - DNA, 25 bp, Homo sapien
cgtacgcagcagctcggatctgggc

SEQ ID NO: 1532413 - DNA, 25 bp, Homo sapien
agccccgcgcgtacgcagcagctcg

SEQ ID NO: 1532414 - DNA, 25 bp, Homo sapien
ctgggccccgggcgtttttgcagct

SEQ ID NO: 1532415 - DNA, 25 bp, Homo sapien
gacccttccttagagacttggggca

SEQ ID NO: 1532416 - DNA, 25 bp, Homo sapien
tgagtgtcgcatccatgtttcaccg

SEQ ID NO: 1532417 - DNA, 25 bp, Homo sapien
ggctcaggctttgcgttttcgccgg

SEQ ID NO: 1532418 - DNA, 25 bp, Homo sapien
gcagagcttccgagcccatcatggg

SEQ ID NO: 1532419 - DNA, 25 bp, Homo sapien
gtcgcatccatgtttcaccgtggcc

SEQ ID NO: 1532420 - DNA, 25 bp, Homo sapien
tcccaagtgctaggaaaatctttcc

SEQ ID NO: 1532421 - DNA, 25 bp, Homo sapien
gagaacactgcgaggctcacagact

SEQ ID NO: 1532422 - DNA, 25 bp, Homo sapien
tctgttggtgctagtccagcgcgct

SEQ ID NO: 1532423 - DNA, 25 bp, Homo sapien
tctgctcgcggttctcttaactggt

SEQ ID NO: 1532424 - DNA, 25 bp, Homo sapien
tggagcccattgacagcgctatacc

SEQ ID NO: 1532425 - DNA, 25 bp, Homo sapien
agcccattgacagcgctatacctgc

SEQ ID NO: 1532426 - DNA, 25 bp, Homo sapien
attgacagcgctatacctgcccctg

SEQ ID NO: 1532427 - DNA, 25 bp, Homo sapien
cattgacagcgctatacctgcccct

SEQ ID NO: 1532428 - DNA, 25 bp, Homo sapien
gagaaagggcttgtggacttcttcc

SEQ ID NO: 1532429 - DNA, 25 bp, Homo sapien
cttccctgtcccatgaacattccct

SEQ ID NO: 1532430 - DNA, 25 bp, Homo sapien
agggcttgtggacttcttccctgtc

SEQ ID NO: 1532431 - DNA, 25 bp, Homo sapien
ccctgtcccatgaacattccctgca

SEQ ID NO: 1532432 - DNA, 25 bp, Homo sapien
ggatgtaggccaaagatattccagg

SEQ ID NO: 1532433 - DNA, 25 bp, Homo sapien
ttctaactggcatttaatctggatg

SEQ ID NO: 1532434 - DNA, 25 bp, Homo sapien
gctgtctgccccgaaaagtcgggtg

SEQ ID NO: 1532435 - DNA, 25 bp, Homo sapien
attccaggtgaaatccgacaacgag

SEQ ID NO: 1532436 - DNA, 25 bp, Homo sapien
tcctaaggattcgaagggagagatt

SEQ ID NO: 1532437 - DNA, 25 bp, Homo sapien
caagcattgtttttgcctagagcct

SEQ ID NO: 1532438 - DNA, 25 bp, Homo sapien
tgcctagagccttgaaggttcctaa

SEQ ID NO: 1532439 - DNA, 25 bp, Homo sapien
catttgccatccagcaagcattgtt

SEQ ID NO: 1532440 - DNA, 25 bp, Homo sapien
tgctctgttgatcccactggaggcc

SEQ ID NO: 1532441 - DNA, 25 bp, Homo sapien
ttggcatcattcctgagagtgctct

SEQ ID NO: 1532442 - DNA, 25 bp, Homo sapien
gatttaattggcatcattcctgaga

SEQ ID NO: 1532443 - DNA, 25 bp, Homo sapien
tgttggctggttccgtgtagagaaa

SEQ ID NO: 1532444 - DNA, 25 bp, Homo sapien
cggggcagcagagccttcctggtcc

SEQ ID NO: 1532445 - DNA, 25 bp, Homo sapien
cttgcacatgcacggggcagcagag

SEQ ID NO: 1532446 - DNA, 25 bp, Homo sapien
ttcctggtccctcgaggcactggga

SEQ ID NO: 1532447 - DNA, 25 bp, Homo sapien
gggcagcagagccttcctggtccct

SEQ ID NO: 1532448 - DNA, 25 bp, Homo sapien
gcttctgggtgcagaagtacttagc

SEQ ID NO: 1532449 - DNA, 25 bp, Homo sapien
tgcccacgagcacaaattgagcgca

SEQ ID NO: 1532450 - DNA, 25 bp, Homo sapien
gagcatctgatttggtgcccacgag

SEQ ID NO: 1532451 - DNA, 25 bp, Homo sapien
ggaccagagtagctgttttctagaa

SEQ ID NO: 1532452 - DNA, 25 bp, Homo sapien
caaattgagcgcaggctgcatgcag

SEQ ID NO: 1532453 - DNA, 25 bp, Homo sapien
gatttcctaatttactccttgtcag

SEQ ID NO: 1532454 - DNA, 25 bp, Homo sapien
tcctttccatgaatcagtgcccttc

SEQ ID NO: 1532455 - DNA, 25 bp, Homo sapien
ctttccatgaatcagtgcccttcat

SEQ ID NO: 1532456 - DNA, 25 bp, Homo sapien
atgatttcctaatttactccttgtc

SEQ ID NO: 1532457 - DNA, 25 bp, Homo sapien
caaggagctggttacgcatgagagc

SEQ ID NO: 1532458 - DNA, 25 bp, Homo sapien
ggttacgcatgagagcaaataagaa

SEQ ID NO: 1532459 - DNA, 25 bp, Homo sapien
gctggttacgcatgagagcaaataa

SEQ ID NO: 1532460 - DNA, 25 bp, Homo sapien
aggagctggttacgcatgagagcaa

SEQ ID NO: 1532461 - DNA, 25 bp, Homo sapien
ccacgtagccatagcttccctttgg

SEQ ID NO: 1532462 - DNA, 25 bp, Homo sapien
gactggtcctccttttggtgacgct

SEQ ID NO: 1532463 - DNA, 25 bp, Homo sapien
tgggagccgcatggcttgcagcagg

SEQ ID NO: 1532464 - DNA, 25 bp, Homo sapien
tggtgacgcttctcagatctttttc

SEQ ID NO: 1532465 - DNA, 25 bp, Homo sapien
aagactggacagtggaagtcggcca

SEQ ID NO: 1532466 - DNA, 25 bp, Homo sapien
aaggagaagttgctctggcagggag

SEQ ID NO: 1532467 - DNA, 25 bp, Homo sapien
gagttggcaataagggtgaccaggg

SEQ ID NO: 1532468 - DNA, 25 bp, Homo sapien
cagggagttggcaataagggtgacc

SEQ ID NO: 1532469 - DNA, 25 bp, Homo sapien
cttggttggatgagtcccgtctgga

SEQ ID NO: 1532470 - DNA, 25 bp, Homo sapien
ccctgagcttggttggatgagtccc

SEQ ID NO: 1532471 - DNA, 25 bp, Homo sapien
gccttgacccctgagcttggttgga

SEQ ID NO: 1532472 - DNA, 25 bp, Homo sapien
gatgagtcccgtctggataaaccca

SEQ ID NO: 1532473 - DNA, 25 bp, Homo sapien
gttgtcctgggctggtgtgccatca

SEQ ID NO: 1532474 - DNA, 25 bp, Homo sapien
accaagctgagagcgctagctgagg

SEQ ID NO: 1532475 - DNA, 25 bp, Homo sapien
ggaggacagcttgcgtggcaggtct

SEQ ID NO: 1532476 - DNA, 25 bp, Homo sapien
gggcgacttgcatttggcagatact

SEQ ID NO: 1532477 - DNA, 25 bp, Homo sapien
aaacagctggaacaataaaagtgaa

SEQ ID NO: 1532478 - DNA, 25 bp, Homo sapien
taaataggttgtatcaattaacagt

SEQ ID NO: 1532479 - DNA, 25 bp, Homo sapien
ataggttgtatcaattaacagtaaa

SEQ ID NO: 1532480 - DNA, 25 bp, Homo sapien
ataaataggttgtatcaattaacag

SEQ ID NO: 1532481 - DNA, 25 bp, Homo sapien
gaagcctgttgttttgatgctccag

SEQ ID NO: 1532482 - DNA, 25 bp, Homo sapien
ctgttgttttgatgctccaggcagg

SEQ ID NO: 1532483 - DNA, 25 bp, Homo sapien
tctggctgccatacaactgacattt

SEQ ID NO: 1532484 - DNA, 25 bp, Homo sapien
catacaactgacatttggattcctt

SEQ ID NO: 1532485 - DNA, 25 bp, Homo sapien
gagagttcttctcatcttctgtttt

SEQ ID NO: 1532486 - DNA, 25 bp, Homo sapien
aagagagttcttctcatcttctgtt

SEQ ID NO: 1532487 - DNA, 25 bp, Homo sapien
aaacaagagagttcttctcatcttc

SEQ ID NO: 1532488 - DNA, 25 bp, Homo sapien
tcaaacaagagagttcttctcatct

SEQ ID NO: 1532489 - DNA, 25 bp, Homo sapien
aggcaagaagacccggtgccagcaa

SEQ ID NO: 1532490 - DNA, 25 bp, Homo sapien
gcaagaagacccggtgccagcaaga

SEQ ID NO: 1532491 - DNA, 25 bp, Homo sapien
caaggcaagaagacccggtgccagc

SEQ ID NO: 1532492 - DNA, 25 bp, Homo sapien
aaggcaagaagacccggtgccagca

SEQ ID NO: 1532493 - DNA, 25 bp, Homo sapien
ccaggaacggctggaaaatcatctt

SEQ ID NO: 1532494 - DNA, 25 bp, Homo sapien
tccaggaacggctggaaaatcatct

SEQ ID NO: 1532495 - DNA, 25 bp, Homo sapien
gattcactcagcagttctacactca

SEQ ID NO: 1532496 - DNA, 25 bp, Homo sapien
cactcagcagttctacactcaaaat

SEQ ID NO: 1532497 - DNA, 25 bp, Homo sapien
ttagattcactcagcagttctacac

SEQ ID NO: 1532498 - DNA, 25 bp, Homo sapien
ttcactcagcagttctacactcaaa

SEQ ID NO: 1532499 - DNA, 25 bp, Homo sapien
acagatttgccccttggctttccaa

SEQ ID NO: 1532500 - DNA, 25 bp, Homo sapien
cagaaagaagcaccgtggatctttt

SEQ ID NO: 1532501 - DNA, 25 bp, Homo sapien
aatggcaacagatttgccccttggc

SEQ ID NO: 1532502 - DNA, 25 bp, Homo sapien
caacagaaagaagcaccgtggatct

SEQ ID NO: 1532503 - DNA, 25 bp, Homo sapien
gtgtatggtgattggagatactaac

SEQ ID NO: 1532504 - DNA, 25 bp, Homo sapien
cactaccttgactccttcgtcaagg

SEQ ID NO: 1532505 - DNA, 25 bp, Homo sapien
gactccttcgtcaaggtgaatgaca

SEQ ID NO: 1532506 - DNA, 25 bp, Homo sapien
actgtttagactggcaagatcactg

SEQ ID NO: 1532507 - DNA, 25 bp, Homo sapien
cactgtttagactggcaagatcact

SEQ ID NO: 1532508 - DNA, 25 bp, Homo sapien
ctggaggaggccaagtacaagttgt

SEQ ID NO: 1532509 - DNA, 25 bp, Homo sapien
acaagttgtgcaaagtaagaaaaat

SEQ ID NO: 1532510 - DNA, 25 bp, Homo sapien
tacaagttgtgcaaagtaagaaaaa

SEQ ID NO: 1532511 - DNA, 25 bp, Homo sapien
gaggaggccaagtacaagttgtgca

SEQ ID NO: 1532512 - DNA, 25 bp, Homo sapien
cacaagacgggagagaatttctgtc

SEQ ID NO: 1532513 - DNA, 25 bp, Homo sapien
tggcatcaatggtcgctttgctgta

SEQ ID NO: 1532514 - DNA, 25 bp, Homo sapien
ttcacaagacgggagagaatttctg

SEQ ID NO: 1532515 - DNA, 25 bp, Homo sapien
ctgtctcatctgtggcatcaatggt

SEQ ID NO: 1532516 - DNA, 25 bp, Homo sapien
atggatggcaaggtccaaattgata

SEQ ID NO: 1532517 - DNA, 25 bp, Homo sapien
tatgccctcataggagacaaagtaa

SEQ ID NO: 1532518 - DNA, 25 bp, Homo sapien
tggcaaggtccaaattgatataacc

SEQ ID NO: 1532519 - DNA, 25 bp, Homo sapien
cttaagtatgccctcataggagaca

SEQ ID NO: 1532520 - DNA, 25 bp, Homo sapien
ctttgcattcggtgagagctcagga

SEQ ID NO: 1532521 - DNA, 25 bp, Homo sapien
gtgagcacccaataccagcccagca

SEQ ID NO: 1532522 - DNA, 25 bp, Homo sapien
agctcaggagtggccgtgagcaccc

SEQ ID NO: 1532523 - DNA, 25 bp, Homo sapien
cagagcaccatgctttgcattcggt

SEQ ID NO: 1532524 - DNA, 25 bp, Homo sapien
ctttcacgacgttttgattttgaag

SEQ ID NO: 1532525 - DNA, 25 bp, Homo sapien
tagttcctgaaaagagacgtggact

SEQ ID NO: 1532526 - DNA, 25 bp, Homo sapien
ctctagttcctgaaaagagacgtgg

SEQ ID NO: 1532527 - DNA, 25 bp, Homo sapien
ctgaaaagagacgtggacttttgtc

SEQ ID NO: 1532528 - DNA, 25 bp, Homo sapien
ctgtagcactgatgtaatctcctga

SEQ ID NO: 1532529 - DNA, 25 bp, Homo sapien
ccaaagctgatttatctagccatcc

SEQ ID NO: 1532530 - DNA, 25 bp, Homo sapien
gggtctttcgctgatcttgtcctgt

SEQ ID NO: 1532531 - DNA, 25 bp, Homo sapien
ttaggacatgttggactcccatcca

SEQ ID NO: 1532532 - DNA, 25 bp, Homo sapien
aagccagcctttggagtgggcctta

SEQ ID NO: 1532533 - DNA, 25 bp, Homo sapien
agccagcctttggagtgggccttag

SEQ ID NO: 1532534 - DNA, 25 bp, Homo sapien
gaagttctcggattcctttagttca

SEQ ID NO: 1532535 - DNA, 25 bp, Homo sapien
agttctcggattcctttagttcact

SEQ ID NO: 1532536 - DNA, 25 bp, Homo sapien
ttgaaaaccagcaatgcaaagtgtg

SEQ ID NO: 1532537 - DNA, 25 bp, Homo sapien
ctgaagcccccggtgacggcgtggc

SEQ ID NO: 1532538 - DNA, 25 bp, Homo sapien
gtggatgccactgttggcggctgag

SEQ ID NO: 1532539 - DNA, 25 bp, Homo sapien
aactgcagaggtggatgccactgtt

SEQ ID NO: 1532540 - DNA, 25 bp, Homo sapien
cggtgacggcgtggcccagtgtgtg

SEQ ID NO: 1532541 - DNA, 25 bp, Homo sapien
cgctgctgctgtgccgactggattc

SEQ ID NO: 1532542 - DNA, 25 bp, Homo sapien
accctggttctgtgcatcctccaaa

SEQ ID NO: 1532543 - DNA, 25 bp, Homo sapien
gccgctgctgctgtgccgactggat

SEQ ID NO: 1532544 - DNA, 25 bp, Homo sapien
cctccaaaaactggtctcatagaag

SEQ ID NO: 1532545 - DNA, 25 bp, Homo sapien
aattctgcacagtaagagcaccttc

SEQ ID NO: 1532546 - DNA, 25 bp, Homo sapien
ctgcacagtaagagcaccttctttc

SEQ ID NO: 1532547 - DNA, 25 bp, Homo sapien
tgaaattctgcacagtaagagcacc

SEQ ID NO: 1532548 - DNA, 25 bp, Homo sapien
ctacacgaccttaatgaaattctgc

SEQ ID NO: 1532549 - DNA, 25 bp, Homo sapien
agaggcagatcccacgccactgtcg

SEQ ID NO: 1532550 - DNA, 25 bp, Homo sapien
ctgtcgcccgctccgcacgcccgct

SEQ ID NO: 1532551 - DNA, 25 bp, Homo sapien
cgctcgctccgtcggcgcctacagc

SEQ ID NO: 1532552 - DNA, 25 bp, Homo sapien
agccgcttcagacccaacatggcgg

SEQ ID NO: 1532553 - DNA, 25 bp, Homo sapien
ctttggcaagggctacggtggagtt

SEQ ID NO: 1532554 - DNA, 25 bp, Homo sapien
cgatgtaaggggtgcccccgctcat

SEQ ID NO: 1532555 - DNA, 25 bp, Homo sapien
gctgatcttgctgccgatgtaaggg

SEQ ID NO: 1532556 - DNA, 25 bp, Homo sapien
tggcaagggctacggtggagttttc

SEQ ID NO: 1532557 - DNA, 25 bp, Homo sapien
gttctcggacttcagggccgcccgc

SEQ ID NO: 1532558 - DNA, 25 bp, Homo sapien
taagacggcagaagccccgaatttc

SEQ ID NO: 1532559 - DNA, 25 bp, Homo sapien
tctccggcccgttctcggacttcag

SEQ ID NO: 1532560 - DNA, 25 bp, Homo sapien
agacgcgtttctccgtgttctccgg

SEQ ID NO: 1532561 - DNA, 25 bp, Homo sapien
gccagaaaaacactatacagctaag

SEQ ID NO: 1532562 - DNA, 25 bp, Homo sapien
tttatcaagtcatgacacaaagaac

SEQ ID NO: 1532563 - DNA, 25 bp, Homo sapien
tattgagtcactaagctggcaagac

SEQ ID NO: 1532564 - DNA, 25 bp, Homo sapien
tctttgtgaggaataaaggtaacac

SEQ ID NO: 1532565 - DNA, 25 bp, Homo sapien
ggttccgaggatcaaagcccctcaa

SEQ ID NO: 1532566 - DNA, 25 bp, Homo sapien
cttgacatatgcttaggttccgagg

SEQ ID NO: 1532567 - DNA, 25 bp, Homo sapien
tacatagcagattgacatcaaagcc

SEQ ID NO: 1532568 - DNA, 25 bp, Homo sapien
taaggcacatcgaccatttcacagc

SEQ ID NO: 1532569 - DNA, 25 bp, Homo sapien
gaaatatccaaaagacgcttacaaa

SEQ ID NO: 1532570 - DNA, 25 bp, Homo sapien
gaaaaagaaacgagtctgttgaata

SEQ ID NO: 1532571 - DNA, 25 bp, Homo sapien
atttgagagcaacaaatgaaacact

SEQ ID NO: 1532572 - DNA, 25 bp, Homo sapien
tctgttgaataccaaaatttgagag

SEQ ID NO: 1532573 - DNA, 25 bp, Homo sapien
taagaatgatttgcacacaccaaga

SEQ ID NO: 1532574 - DNA, 25 bp, Homo sapien
taaatacagctagccctgagtagtg

SEQ ID NO: 1532575 - DNA, 25 bp, Homo sapien
gggcacacgtggctagaagatactg

SEQ ID NO: 1532576 - DNA, 25 bp, Homo sapien
gaaacatgctctaatgatggaggct

SEQ ID NO: 1532577 - DNA, 25 bp, Homo sapien
gatgatagttatgaagatccaacag

SEQ ID NO: 1532578 - DNA, 25 bp, Homo sapien
caacagttaactgctgcccctgaga

SEQ ID NO: 1532579 - DNA, 25 bp, Homo sapien
gaaatgtcttaacatgaaggcctaa

SEQ ID NO: 1532580 - DNA, 25 bp, Homo sapien
acagtcaatgcagcaaaaccaaatc

SEQ ID NO: 1532581 - DNA, 25 bp, Homo sapien
tcatgcttccaaagtagcagatgag

SEQ ID NO: 1532582 - DNA, 25 bp, Homo sapien
gggactgcggaatgccctacctgaa

SEQ ID NO: 1532583 - DNA, 25 bp, Homo sapien
gatgagatcatcctgaagcagagag

SEQ ID NO: 1532584 - DNA, 25 bp, Homo sapien
gaccaaccccagaatccatacgtaa

SEQ ID NO: 1532585 - DNA, 25 bp, Homo sapien
agaactgatgcagcgcctcatgcct

SEQ ID NO: 1532586 - DNA, 25 bp, Homo sapien
tgcagaactgatgcagcgcctcatg

SEQ ID NO: 1532587 - DNA, 25 bp, Homo sapien
ttttgcagaactgatgcagcgcctc

SEQ ID NO: 1532588 - DNA, 25 bp, Homo sapien
ttttttgcagaactgatgcagcgcc

SEQ ID NO: 1532589 - DNA, 25 bp, Homo sapien
gggaccacctgcaacacagtaaact

SEQ ID NO: 1532590 - DNA, 25 bp, Homo sapien
gggacagcttgaaataccctagtta

SEQ ID NO: 1532591 - DNA, 25 bp, Homo sapien
cagcattactcaaagttaaactggg

SEQ ID NO: 1532592 - DNA, 25 bp, Homo sapien
gcaacacagtaaactggctacgaat

SEQ ID NO: 1532593 - DNA, 25 bp, Homo sapien
gcagctgccagctactcagccccat

SEQ ID NO: 1532594 - DNA, 25 bp, Homo sapien
taagtcctctagaagccaagtcaag

SEQ ID NO: 1532595 - DNA, 25 bp, Homo sapien
tagaagccaagtcaagcagctgcca

SEQ ID NO: 1532596 - DNA, 25 bp, Homo sapien
gagcagtaagtcctctagaagccaa

SEQ ID NO: 1532597 - DNA, 25 bp, Homo sapien
gggagacaaagattcctccagtcta

SEQ ID NO: 1532598 - DNA, 25 bp, Homo sapien
gtattgacctttgggacacagagag

SEQ ID NO: 1532599 - DNA, 25 bp, Homo sapien
ataaaaattagcaacccatgtcttt

SEQ ID NO: 1532600 - DNA, 25 bp, Homo sapien
tgtgcctggctcacggttaacttat

SEQ ID NO: 1532601 - DNA, 25 bp, Homo sapien
aacaatagctgggtcttgaggcaaa

SEQ ID NO: 1532602 - DNA, 25 bp, Homo sapien
ggtggctcacaaacagtaaggtctt

SEQ ID NO: 1532603 - DNA, 25 bp, Homo sapien
gtcactcccacggaatataatgtat

SEQ ID NO: 1532604 - DNA, 25 bp, Homo sapien
ggtattggacgatctgtcggtctgt

SEQ ID NO: 1532605 - DNA, 25 bp, Homo sapien
ttatagttacattaagctgaggaac

SEQ ID NO: 1532606 - DNA, 25 bp, Homo sapien
gacgtagaaacaaacatatcccaca

SEQ ID NO: 1532607 - DNA, 25 bp, Homo sapien
gatgttgatataaatctcacgtatg

SEQ ID NO: 1532608 - DNA, 25 bp, Homo sapien
tcaatcatttgaggcctactattaa

SEQ ID NO: 1532609 - DNA, 25 bp, Homo sapien
ctgccgaaaggtccataagaaccca

SEQ ID NO: 1532610 - DNA, 25 bp, Homo sapien
aggaactcggactgaactgactgta

SEQ ID NO: 1532611 - DNA, 25 bp, Homo sapien
aaggaactcggactgaactgactgt

SEQ ID NO: 1532612 - DNA, 25 bp, Homo sapien
aactaaggaactcggactgaactga

SEQ ID NO: 1532613 - DNA, 25 bp, Homo sapien
catttctaatagttggtgttgagtt

SEQ ID NO: 1532614 - DNA, 25 bp, Homo sapien
caaacaacatttctaatagttggtg

SEQ ID NO: 1532615 - DNA, 25 bp, Homo sapien
ttgagtttctatacctttgtggtaa

SEQ ID NO: 1532616 - DNA, 25 bp, Homo sapien
gttacaaaaggaacatcaaacaaca

SEQ ID NO: 1532617 - DNA, 25 bp, Homo sapien
tatagtttcgtttcaaatccagtgt

SEQ ID NO: 1532618 - DNA, 25 bp, Homo sapien
cataagcaagcctgtcattcgccca

SEQ ID NO: 1532619 - DNA, 25 bp, Homo sapien
caagccctcaatcatgctatgcgta

SEQ ID NO: 1532620 - DNA, 25 bp, Homo sapien
tagcccttgaccctccagtcataag

SEQ ID NO: 1532621 - DNA, 25 bp, Homo sapien
cactttcccatatgattaaccagaa

SEQ ID NO: 1532622 - DNA, 25 bp, Homo sapien
gttaaaattgaaggagtacacagaa

SEQ ID NO: 1532623 - DNA, 25 bp, Homo sapien
cattgatcttactactggatttgga

SEQ ID NO: 1532624 - DNA, 25 bp, Homo sapien
caattagtccatactcaaaagttcc

SEQ ID NO: 1532625 - DNA, 25 bp, Homo sapien
catgctgagatgctgtgtttaccaa

SEQ ID NO: 1532626 - DNA, 25 bp, Homo sapien
aagcaataataagggtgggcatggt

SEQ ID NO: 1532627 - DNA, 25 bp, Homo sapien
caaagtgctaacgtctttgtactcc

SEQ ID NO: 1532628 - DNA, 25 bp, Homo sapien
taaaaagcaataataagggtgggca

SEQ ID NO: 1532629 - DNA, 25 bp, Homo sapien
gaaatggtgtctcagtgtagattta

SEQ ID NO: 1532630 - DNA, 25 bp, Homo sapien
tattcttcacatacttgccaagagt

SEQ ID NO: 1532631 - DNA, 25 bp, Homo sapien
attcttctcaatgtatgagagtata

SEQ ID NO: 1532632 - DNA, 25 bp, Homo sapien
tctacctggtatattattcttctca

SEQ ID NO: 1532633 - DNA, 25 bp, Homo sapien
tgagacttaaacaatcaactggagt

SEQ ID NO: 1532634 - DNA, 25 bp, Homo sapien
caaaacactggagacctaagagaac

SEQ ID NO: 1532635 - DNA, 25 bp, Homo sapien
aaagttcgtaagcatctcttcaagg

SEQ ID NO: 1532636 - DNA, 25 bp, Homo sapien
tacccactgatggtctattcagcca

SEQ ID NO: 1532637 - DNA, 25 bp, Homo sapien
taaattctcctctgatccattagtg

SEQ ID NO: 1532638 - DNA, 25 bp, Homo sapien
cctttacctctggaagaaatcctga

SEQ ID NO: 1532639 - DNA, 25 bp, Homo sapien
gaactgatccttatctttacgaaga

SEQ ID NO: 1532640 - DNA, 25 bp, Homo sapien
ttagctacacccacaaactttctgg

SEQ ID NO: 1532641 - DNA, 25 bp, Homo sapien
tttcctagcttcttaaactggtagc

SEQ ID NO: 1532642 - DNA, 25 bp, Homo sapien
taaactggtagcttaaagcactgat

SEQ ID NO: 1532643 - DNA, 25 bp, Homo sapien
tcctagcttcttaaactggtagctt

SEQ ID NO: 1532644 - DNA, 25 bp, Homo sapien
gcttcttaaactggtagcttaaagc

SEQ ID NO: 1532645 - DNA, 25 bp, Homo sapien
tggcgtcctcaccaacttttcttag

SEQ ID NO: 1532646 - DNA, 25 bp, Homo sapien
cagttaggactaagggcattcacca

SEQ ID NO: 1532647 - DNA, 25 bp, Homo sapien
gcccagctaaccatttttcctagta

SEQ ID NO: 1532648 - DNA, 25 bp, Homo sapien
ccaacttttcttagagacatggtct

SEQ ID NO: 1532649 - DNA, 25 bp, Homo sapien
tggtgcatagctatctgaaagagtt

SEQ ID NO: 1532650 - DNA, 25 bp, Homo sapien
tcctggtattggcaacttgcttggt

SEQ ID NO: 1532651 - DNA, 25 bp, Homo sapien
tcttttaaggtctatactgacgtct

SEQ ID NO: 1532652 - DNA, 25 bp, Homo sapien
ctgacgtctactctttcattcctgg

SEQ ID NO: 1532653 - DNA, 25 bp, Homo sapien
aaatgtggctttagggccgggcgca

SEQ ID NO: 1532654 - DNA, 25 bp, Homo sapien
catggtctttaggacactctcccct

SEQ ID NO: 1532655 - DNA, 25 bp, Homo sapien
ttcaaccattactcacttcacatgg

SEQ ID NO: 1532656 - DNA, 25 bp, Homo sapien
cagtcccttcaaccattactcactt

SEQ ID NO: 1532657 - DNA, 25 bp, Homo sapien
tcagcagacaggtttacgaggagct

SEQ ID NO: 1532658 - DNA, 25 bp, Homo sapien
gcaatatgagtaaaaaggtccctag

SEQ ID NO: 1532659 - DNA, 25 bp, Homo sapien
caaggcaatagacaatggactctgg

SEQ ID NO: 1532660 - DNA, 25 bp, Homo sapien
tccccttaagataggactgtgaggc

SEQ ID NO: 1532661 - DNA, 25 bp, Homo sapien
aaaggcagaaccaaccgcactactt

SEQ ID NO: 1532662 - DNA, 25 bp, Homo sapien
gtaaaggcagaaccaaccgcactac

SEQ ID NO: 1532663 - DNA, 25 bp, Homo sapien
tgtgtaaaggcagaaccaaccgcac

SEQ ID NO: 1532664 - DNA, 25 bp, Homo sapien
tgtaaaggcagaaccaaccgcacta

SEQ ID NO: 1532665 - DNA, 25 bp, Homo sapien
gataactgtgtttttagagatcttg

SEQ ID NO: 1532666 - DNA, 25 bp, Homo sapien
tgagataactgtgtttttagagatc

SEQ ID NO: 1532667 - DNA, 25 bp, Homo sapien
cttgagataactgtgtttttagaga

SEQ ID NO: 1532668 - DNA, 25 bp, Homo sapien
gagataactgtgtttttagagatct

SEQ ID NO: 1532669 - DNA, 25 bp, Homo sapien
gtactacagaagtacaagcaatggg

SEQ ID NO: 1532670 - DNA, 25 bp, Homo sapien
cttttgagaaaagatcctatggctc

SEQ ID NO: 1532671 - DNA, 25 bp, Homo sapien
tatggctcacaagtactacagaagt

SEQ ID NO: 1532672 - DNA, 25 bp, Homo sapien
taattttatggtactacattaaatc

SEQ ID NO: 1532673 - DNA, 25 bp, Homo sapien
tatgaggtcgcctggtcacagcatg

SEQ ID NO: 1532674 - DNA, 25 bp, Homo sapien
aaatatgctgcaaatgttactgtcc

SEQ ID NO: 1532675 - DNA, 25 bp, Homo sapien
caggtgtcaaacaactggtgagtgc

SEQ ID NO: 1532676 - DNA, 25 bp, Homo sapien
tgtaacatcgggtgctcccatcatg

SEQ ID NO: 1532677 - DNA, 25 bp, Homo sapien
aaaggcctggttgatacaggactcc

SEQ ID NO: 1532678 - DNA, 25 bp, Homo sapien
ggcctggttgatacaggactccttc

SEQ ID NO: 1532679 - DNA, 25 bp, Homo sapien
ggcaaaggcctggttgatacaggac

SEQ ID NO: 1532680 - DNA, 25 bp, Homo sapien
atggcaaaggcctggttgatacagg

SEQ ID NO: 1532681 - DNA, 25 bp, Homo sapien
actcagggtacatcatcaaaaactt

SEQ ID NO: 1532682 - DNA, 25 bp, Homo sapien
aagtgccaaatcaactcagggtaca

SEQ ID NO: 1532683 - DNA, 25 bp, Homo sapien
tcaattaaggaacagtaaacagcta

SEQ ID NO: 1532684 - DNA, 25 bp, Homo sapien
ctgggatcattcacatgaagtaaat

SEQ ID NO: 1532685 - DNA, 25 bp, Homo sapien
tacttgtctcttgttatcatttctg

SEQ ID NO: 1532686 - DNA, 25 bp, Homo sapien
cattttctggccttgaaactttgtg

SEQ ID NO: 1532687 - DNA, 25 bp, Homo sapien
atttctgagttgctcattttctggc

SEQ ID NO: 1532688 - DNA, 25 bp, Homo sapien
ggccttgaaactttgtgtacttcag

SEQ ID NO: 1532689 - DNA, 25 bp, Homo sapien
tattctccctgttgagaagcataga

SEQ ID NO: 1532690 - DNA, 25 bp, Homo sapien
tctccctgttgagaagcatagaata

SEQ ID NO: 1532691 - DNA, 25 bp, Homo sapien
cctgttgagaagcatagaatatgac

SEQ ID NO: 1532692 - DNA, 25 bp, Homo sapien
tccctgttgagaagcatagaatatg

SEQ ID NO: 1532693 - DNA, 25 bp, Homo sapien
gaggcttctgcactaaattaatgta

SEQ ID NO: 1532694 - DNA, 25 bp, Homo sapien
tgacagagtatacagccaggcaagt

SEQ ID NO: 1532695 - DNA, 25 bp, Homo sapien
ccaacaccggcaaactgaagtgcca

SEQ ID NO: 1532696 - DNA, 25 bp, Homo sapien
tatggagtccacactcacatgtgtt

SEQ ID NO: 1532697 - DNA, 25 bp, Homo sapien
cccacgccctctccttggagctgaa

SEQ ID NO: 1532698 - DNA, 25 bp, Homo sapien
tctccttggagctgaaggagcacct

SEQ ID NO: 1532699 - DNA, 25 bp, Homo sapien
ctgccaccccgatgacccccacgcc

SEQ ID NO: 1532700 - DNA, 25 bp, Homo sapien
tgccaccccgatgacccccacgccc

SEQ ID NO: 1532701 - DNA, 25 bp, Homo sapien
tggcccatctcgccgaataccaaat

SEQ ID NO: 1532702 - DNA, 25 bp, Homo sapien
gcccatctcgccgaataccaaatct

SEQ ID NO: 1532703 - DNA, 25 bp, Homo sapien
ccatctcgccgaataccaaatcttc

SEQ ID NO: 1532704 - DNA, 25 bp, Homo sapien
atctcgccgaataccaaatcttccc

SEQ ID NO: 1532705 - DNA, 25 bp, Homo sapien
tattatgaaactctctgtcaatctc

SEQ ID NO: 1532706 - DNA, 25 bp, Homo sapien
agtttattatgaaactctctgtcaa

SEQ ID NO: 1532707 - DNA, 25 bp, Homo sapien
gttgaattgtgcatttgcactttca

SEQ ID NO: 1532708 - DNA, 25 bp, Homo sapien
tctcttccttgttgaattgtgcatt

SEQ ID NO: 1532709 - DNA, 25 bp, Homo sapien
cttcactgttttgggtatcaactcc

SEQ ID NO: 1532710 - DNA, 25 bp, Homo sapien
cactgttttgggtatcaactcctga

SEQ ID NO: 1532711 - DNA, 25 bp, Homo sapien
tccttcactgttttgggtatcaact

SEQ ID NO: 1532712 - DNA, 25 bp, Homo sapien
tcactgttttgggtatcaactcctg

SEQ ID NO: 1532713 - DNA, 25 bp, Homo sapien
gaaataagcatcttggctaggcgtg

SEQ ID NO: 1532714 - DNA, 25 bp, Homo sapien
aagctaattagaaataagcatcttg

SEQ ID NO: 1532715 - DNA, 25 bp, Homo sapien
tcaggtttaaaagaatatccctcag

SEQ ID NO: 1532716 - DNA, 25 bp, Homo sapien
ccaaaatatgcagtgctactcccaa

SEQ ID NO: 1532717 - DNA, 25 bp, Homo sapien
aatcttctttcttcagcccaggttg

SEQ ID NO: 1532718 - DNA, 25 bp, Homo sapien
ttaatcttctttcttcagcccaggt

SEQ ID NO: 1532719 - DNA, 25 bp, Homo sapien
tcttctttcttcagcccaggttggt

SEQ ID NO: 1532720 - DNA, 25 bp, Homo sapien
cttctttcttcagcccaggttggtc

SEQ ID NO: 1532721 - DNA, 25 bp, Homo sapien
ccgcgaaatcctcgaggggcagtga

SEQ ID NO: 1532722 - DNA, 25 bp, Homo sapien
atccaccgcgaaatcctcgaggggc

SEQ ID NO: 1532723 - DNA, 25 bp, Homo sapien
caccgcgaaatcctcgaggggcagt

SEQ ID NO: 1532724 - DNA, 25 bp, Homo sapien
tccaccgcgaaatcctcgaggggca

SEQ ID NO: 1532725 - DNA, 25 bp, Homo sapien
catgtcaaccccaaagaatttatta

SEQ ID NO: 1532726 - DNA, 25 bp, Homo sapien
tgcatgtcaaccccaaagaatttat

SEQ ID NO: 1532727 - DNA, 25 bp, Homo sapien
gcatgtcaaccccaaagaatttatt

SEQ ID NO: 1532728 - DNA, 25 bp, Homo sapien
tctctagcagtagctcctgaaggcc

SEQ ID NO: 1532729 - DNA, 25 bp, Homo sapien
cagagagatctcaacaatggccagt

SEQ ID NO: 1532730 - DNA, 25 bp, Homo sapien
cctgaaggccaatatatcgaaacat

SEQ ID NO: 1532731 - DNA, 25 bp, Homo sapien
tgcctgttgctattacaagtggaac

SEQ ID NO: 1532732 - DNA, 25 bp, Homo sapien
tacaggagcgtagacaaagatgcat

SEQ ID NO: 1532733 - DNA, 25 bp, Homo sapien
catgcctgagggttcgctgagtcca

SEQ ID NO: 1532734 - DNA, 25 bp, Homo sapien
caactgagcctcctaaacactgggc

SEQ ID NO: 1532735 - DNA, 25 bp, Homo sapien
actcctggcaacacctaagcagagg

SEQ ID NO: 1532736 - DNA, 25 bp, Homo sapien
gagataaccatgaggcagcttgctt

SEQ ID NO: 1532737 - DNA, 25 bp, Homo sapien
aaagggctgggcctacatcggtcag

SEQ ID NO: 1532738 - DNA, 25 bp, Homo sapien
tacatgtgtacaccattgcactggc

SEQ ID NO: 1532739 - DNA, 25 bp, Homo sapien
gctagctacattgacagacctttgg

SEQ ID NO: 1532740 - DNA, 25 bp, Homo sapien
gaaagcagtacgatcaatccagacc

SEQ ID NO: 1532741 - DNA, 25 bp, Homo sapien
ctttcagaaagcagtacgatcaatc

SEQ ID NO: 1532742 - DNA, 25 bp, Homo sapien
cagaaagcagtacgatcaatccaga

SEQ ID NO: 1532743 - DNA, 25 bp, Homo sapien
aagcagtacgatcaatccagacctt

SEQ ID NO: 1532744 - DNA, 25 bp, Homo sapien
gagagactgaccctaaactaaaggc

SEQ ID NO: 1532745 - DNA, 25 bp, Homo sapien
tccagtcagtagaggttaatgcagt

SEQ ID NO: 1532746 - DNA, 25 bp, Homo sapien
tagaccagctgctaccatatacctg

SEQ ID NO: 1532747 - DNA, 25 bp, Homo sapien
caatgagctacaagatgaacctgct

SEQ ID NO: 1532748 - DNA, 25 bp, Homo sapien
gtatcacggccctatctgcaggcaa

SEQ ID NO: 1532749 - DNA, 25 bp, Homo sapien
tgttaagtcccactgaagtactgct

SEQ ID NO: 1532750 - DNA, 25 bp, Homo sapien
gacaaaattctctaccatccagcac

SEQ ID NO: 1532751 - DNA, 25 bp, Homo sapien
gacaaatgtacagcgaattcacttc

SEQ ID NO: 1532752 - DNA, 25 bp, Homo sapien
gatgctctgaatgcctcggaactgt

SEQ ID NO: 1532753 - DNA, 25 bp, Homo sapien
tcataggcccaaggaccagtgttgc

SEQ ID NO: 1532754 - DNA, 25 bp, Homo sapien
tctttcttgaaattggcccgggaca

SEQ ID NO: 1532755 - DNA, 25 bp, Homo sapien
tcggagggctgggaaaacgcataaa

SEQ ID NO: 1532756 - DNA, 25 bp, Homo sapien
tctgcaacaataactcaatcttaga

SEQ ID NO: 1532757 - DNA, 25 bp, Homo sapien
atgttcctactgaaacagaatgtta

SEQ ID NO: 1532758 - DNA, 25 bp, Homo sapien
tgcaacaataactcaatcttagaaa

SEQ ID NO: 1532759 - DNA, 25 bp, Homo sapien
cctactgaaacagaatgttactatt

SEQ ID NO: 1532760 - DNA, 25 bp, Homo sapien
tgcacacatgcactgttggctgctg

SEQ ID NO: 1532761 - DNA, 25 bp, Homo sapien
gcaccgctccttagagggctgggat

SEQ ID NO: 1532762 - DNA, 25 bp, Homo sapien
taaataggataagaacctttgcacc

SEQ ID NO: 1532763 - DNA, 25 bp, Homo sapien
gcttccaagcctctgctagtcaaag

SEQ ID NO: 1532764 - DNA, 25 bp, Homo sapien
tcagtacaatctcacctgggcccag

SEQ ID NO: 1532765 - DNA, 25 bp, Homo sapien
aatccagcaagggagaactgtcacc

SEQ ID NO: 1532766 - DNA, 25 bp, Homo sapien
tgtttctgtgcgactcaactctgag

SEQ ID NO: 1532767 - DNA, 25 bp, Homo sapien
catcaacaatcctgcgtgaggccag

SEQ ID NO: 1532768 - DNA, 25 bp, Homo sapien
taggagtggtgcactgtatccagac

SEQ ID NO: 1532769 - DNA, 25 bp, Homo sapien
cctgggcaactaagtctgaagcttc

SEQ ID NO: 1532770 - DNA, 25 bp, Homo sapien
tgctgtcatttacaaggcctgcttg

SEQ ID NO: 1532771 - DNA, 25 bp, Homo sapien
tgtcacaggacaaggacggaagcca

SEQ ID NO: 1532772 - DNA, 25 bp, Homo sapien
agtctgtgatttggaggtggttgca

SEQ ID NO: 1532773 - DNA, 25 bp, Homo sapien
caaagggcggggtgtctaagtctgt

SEQ ID NO: 1532774 - DNA, 25 bp, Homo sapien
caagacagctggaaggtcaaagggc

SEQ ID NO: 1532775 - DNA, 25 bp, Homo sapien
tggacaaggtccaggtgtgtctaca

SEQ ID NO: 1532776 - DNA, 25 bp, Homo sapien
tcaaaagggcctaacaactgcccag

SEQ ID NO: 1532777 - DNA, 25 bp, Homo sapien
gacttctagtgaaagtacagggagg

SEQ ID NO: 1532778 - DNA, 25 bp, Homo sapien
tcactgcatgctagatcaagggtca

SEQ ID NO: 1532779 - DNA, 25 bp, Homo sapien
ggccgaatgggcagctcttatatct

SEQ ID NO: 1532780 - DNA, 25 bp, Homo sapien
caccgccttggaccggctgtgtaca

SEQ ID NO: 1532781 - DNA, 25 bp, Homo sapien
accgccttggaccggctgtgtacac

SEQ ID NO: 1532782 - DNA, 25 bp, Homo sapien
cgccttggaccggctgtgtacaccg

SEQ ID NO: 1532783 - DNA, 25 bp, Homo sapien
gccttggaccggctgtgtacaccgg

SEQ ID NO: 1532784 - DNA, 25 bp, Homo sapien
cactaagtgtctatgacgtgccaag

SEQ ID NO: 1532785 - DNA, 25 bp, Homo sapien
cacataagtactccccaaagaaatg

SEQ ID NO: 1532786 - DNA, 25 bp, Homo sapien
aataaataagctagtgaagacatgc

SEQ ID NO: 1532787 - DNA, 25 bp, Homo sapien
cggaggcagtagttagatgctagaa

SEQ ID NO: 1532788 - DNA, 25 bp, Homo sapien
cacagccaggtaacaggattatcca

SEQ ID NO: 1532789 - DNA, 25 bp, Homo sapien
tgcagccaacctgtctaatctaggg

SEQ ID NO: 1532790 - DNA, 25 bp, Homo sapien
gcagtggctgcggtatctgtgacct

SEQ ID NO: 1532791 - DNA, 25 bp, Homo sapien
tgtcgcgcaaactcgagaaactggc

SEQ ID NO: 1532792 - DNA, 25 bp, Homo sapien
tgccatttaagatgcctgctccgct

SEQ ID NO: 1532793 - DNA, 25 bp, Homo sapien
catttaagatgcctgctccgctttg

SEQ ID NO: 1532794 - DNA, 25 bp, Homo sapien
tttaagatgcctgctccgctttgcc

SEQ ID NO: 1532795 - DNA, 25 bp, Homo sapien
gccatttaagatgcctgctccgctt

SEQ ID NO: 1532796 - DNA, 25 bp, Homo sapien
cactctacaggaatgctgaagcggg

SEQ ID NO: 1532797 - DNA, 25 bp, Homo sapien
ttggcaacacaggaattaggtaggt

SEQ ID NO: 1532798 - DNA, 25 bp, Homo sapien
gatctggaagaccaagtgagaccta

SEQ ID NO: 1532799 - DNA, 25 bp, Homo sapien
cccattcctttgacagatctggaag

SEQ ID NO: 1532800 - DNA, 25 bp, Homo sapien
atccaatgtagaggtgagagacaac

SEQ ID NO: 1532801 - DNA, 25 bp, Homo sapien
gctgaggtagcggtttccttgtaac

SEQ ID NO: 1532802 - DNA, 25 bp, Homo sapien
tcaaatccgtttacctgtaaggctg

SEQ ID NO: 1532803 - DNA, 25 bp, Homo sapien
aaatggcgtttgttgtaagtctcct

SEQ ID NO: 1532804 - DNA, 25 bp, Homo sapien
ggaattgtcccagcaaccgtaagtg

SEQ ID NO: 1532805 - DNA, 25 bp, Homo sapien
ttgtcccagcaaccgtaagtgggtc

SEQ ID NO: 1532806 - DNA, 25 bp, Homo sapien
gaattgtcccagcaaccgtaagtgg

SEQ ID NO: 1532807 - DNA, 25 bp, Homo sapien
cccagcaaccgtaagtgggtcaggg

SEQ ID NO: 1532808 - DNA, 25 bp, Homo sapien
tactgtcctgggcactgcagcaata

SEQ ID NO: 1532809 - DNA, 25 bp, Homo sapien
tttactgtcctgggcactgcagcaa

SEQ ID NO: 1532810 - DNA, 25 bp, Homo sapien
tgtcctgggcactgcagcaatacat

SEQ ID NO: 1532811 - DNA, 25 bp, Homo sapien
actgtcctgggcactgcagcaatac

SEQ ID NO: 1532812 - DNA, 25 bp, Homo sapien
tttatggccgaggtcagccgactgg

SEQ ID NO: 1532813 - DNA, 25 bp, Homo sapien
agatacttggagatgccctgctgga

SEQ ID NO: 1532814 - DNA, 25 bp, Homo sapien
tactggcacggcagaagacgttcag

SEQ ID NO: 1532815 - DNA, 25 bp, Homo sapien
tgatccgtaaaatttgcagccccag

SEQ ID NO: 1532816 - DNA, 25 bp, Homo sapien
atattttcctacacaagtatgacac

SEQ ID NO: 1532817 - DNA, 25 bp, Homo sapien
attttcctacacaagtatgacacaa

SEQ ID NO: 1532818 - DNA, 25 bp, Homo sapien
tattttcctacacaagtatgacaca

SEQ ID NO: 1532819 - DNA, 25 bp, Homo sapien
ttttcctacacaagtatgacacaaa

SEQ ID NO: 1532820 - DNA, 25 bp, Homo sapien
gcttgggcaatgtaatggaacccca

SEQ ID NO: 1532821 - DNA, 25 bp, Homo sapien
caatgtaatggaaccccaactctac

SEQ ID NO: 1532822 - DNA, 25 bp, Homo sapien
agcttgggcaatgtaatggaacccc

SEQ ID NO: 1532823 - DNA, 25 bp, Homo sapien
tgggcaatgtaatggaaccccaact

SEQ ID NO: 1532824 - DNA, 25 bp, Homo sapien
agttcccagcaagacacttattatc

SEQ ID NO: 1532825 - DNA, 25 bp, Homo sapien
gacacttattatctccgaatccctc

SEQ ID NO: 1532826 - DNA, 25 bp, Homo sapien
cccagcaagacacttattatctccg

SEQ ID NO: 1532827 - DNA, 25 bp, Homo sapien
gcaagacacttattatctccgaatc

SEQ ID NO: 1532828 - DNA, 25 bp, Homo sapien
gaaatggacttgcaccacagtcagg

SEQ ID NO: 1532829 - DNA, 25 bp, Homo sapien
ggcacgatgacctcagcaaagcaag

SEQ ID NO: 1532830 - DNA, 25 bp, Homo sapien
gtgagccaccggctggaccttctgt

SEQ ID NO: 1532831 - DNA, 25 bp, Homo sapien
tgtaacgcatgagtcaaaaactgga

SEQ ID NO: 1532832 - DNA, 25 bp, Homo sapien
gacaccgagggttgtaaagtcacat

SEQ ID NO: 1532833 - DNA, 25 bp, Homo sapien
gacgtcaagagagaactcggaggcc

SEQ ID NO: 1532834 - DNA, 25 bp, Homo sapien
aaaaggtcaaggtgaagacgtcaag

SEQ ID NO: 1532835 - DNA, 25 bp, Homo sapien
gcctggacagactaaaatggtggca

SEQ ID NO: 1532836 - DNA, 25 bp, Homo sapien
ttcctggagctgagagcctcagggc

SEQ ID NO: 1532837 - DNA, 25 bp, Homo sapien
gaaaacacagaattataaatggaga

SEQ ID NO: 1532838 - DNA, 25 bp, Homo sapien
aagaaaacacagaattataaatgga

SEQ ID NO: 1532839 - DNA, 25 bp, Homo sapien
gagcctcagggccaaaaaggtgaac

SEQ ID NO: 1532840 - DNA, 25 bp, Homo sapien
caaaagagttgttgaacttcaattc

SEQ ID NO: 1532841 - DNA, 25 bp, Homo sapien
aagagttgttgaacttcaattcctg

SEQ ID NO: 1532842 - DNA, 25 bp, Homo sapien
aaagagttgttgaacttcaattcct

SEQ ID NO: 1532843 - DNA, 25 bp, Homo sapien
aacaaaagagttgttgaacttcaat

SEQ ID NO: 1532844 - DNA, 25 bp, Homo sapien
ttgcaaagcactgtcgatttttatg

SEQ ID NO: 1532845 - DNA, 25 bp, Homo sapien
tgcaaagcactgtcgatttttatgt

SEQ ID NO: 1532846 - DNA, 25 bp, Homo sapien
caaagcactgtcgatttttatgttc

SEQ ID NO: 1532847 - DNA, 25 bp, Homo sapien
aagcactgtcgatttttatgttcag

SEQ ID NO: 1532848 - DNA, 25 bp, Homo sapien
agccggctttcattgcatattcaca

SEQ ID NO: 1532849 - DNA, 25 bp, Homo sapien
gcaaacttgcttcaatcgcctttgg

SEQ ID NO: 1532850 - DNA, 25 bp, Homo sapien
ggattcaggtggaagccggctttca

SEQ ID NO: 1532851 - DNA, 25 bp, Homo sapien
taagctttccagagctatcttatat

SEQ ID NO: 1532852 - DNA, 25 bp, Homo sapien
cattaaaggagacgcccttcaggaa

SEQ ID NO: 1532853 - DNA, 25 bp, Homo sapien
tgcgatcctatctgcacagggacgg

SEQ ID NO: 1532854 - DNA, 25 bp, Homo sapien
ttcaggaagtgcgatcctatctgca

SEQ ID NO: 1532855 - DNA, 25 bp, Homo sapien
aagtttcagattgtcggcggccgac

SEQ ID NO: 1532856 - DNA, 25 bp, Homo sapien
caaataatcgttatcactgcagcat

SEQ ID NO: 1532857 - DNA, 25 bp, Homo sapien
taattcatacaagtccactgagaga

SEQ ID NO: 1532858 - DNA, 25 bp, Homo sapien
tatgaataaaactgcctaggcccag

SEQ ID NO: 1532859 - DNA, 25 bp, Homo sapien
atagtgtactttcaaaccctttctg

SEQ ID NO: 1532860 - DNA, 25 bp, Homo sapien
cgtcttgcaggcacctcgccatgtg

SEQ ID NO: 1532861 - DNA, 25 bp, Homo sapien
tgtggaagggcaaacctggttcagc

SEQ ID NO: 1532862 - DNA, 25 bp, Homo sapien
gaaaatcatccctggatgtgattcc

SEQ ID NO: 1532863 - DNA, 25 bp, Homo sapien
ccctggatgtgattccattatagca

SEQ ID NO: 1532864 - DNA, 25 bp, Homo sapien
tactgtgaacaagccctcatctgag

SEQ ID NO: 1532865 - DNA, 25 bp, Homo sapien
tggaggtccctatactgaggaaaag

SEQ ID NO: 1532866 - DNA, 25 bp, Homo sapien
tgggctcttccacgcttcagcaagg

SEQ ID NO: 1532867 - DNA, 25 bp, Homo sapien
gatcgatatactaaagccaatgggc

SEQ ID NO: 1532868 - DNA, 25 bp, Homo sapien
ctagagccttctaaactgatctggg

SEQ ID NO: 1532869 - DNA, 25 bp, Homo sapien
tgtggatgggacttgaaccacgatt

SEQ ID NO: 1532870 - DNA, 25 bp, Homo sapien
caatctgtgctgtgtcaaccaccac

SEQ ID NO: 1532871 - DNA, 25 bp, Homo sapien
ttctcaatctgtgctgtgtcaacca

SEQ ID NO: 1532872 - DNA, 25 bp, Homo sapien
agccctccagcggtttaggtccagc

SEQ ID NO: 1532873 - DNA, 25 bp, Homo sapien
gcacgtccactagacccagggtctt

SEQ ID NO: 1532874 - DNA, 25 bp, Homo sapien
ccagcggtttaggtccagcacagct

SEQ ID NO: 1532875 - DNA, 25 bp, Homo sapien
gcacagctgtgtagagcacgtccac

SEQ ID NO: 1532876 - DNA, 25 bp, Homo sapien
gcctggttgccaaaatcacagatct

SEQ ID NO: 1532877 - DNA, 25 bp, Homo sapien
aaaatcacagatctccctttgcagc

SEQ ID NO: 1532878 - DNA, 25 bp, Homo sapien
cagctggatctgtatgcagggtaaa

SEQ ID NO: 1532879 - DNA, 25 bp, Homo sapien
ctgtatgcagggtaaagcttgctcc

SEQ ID NO: 1532880 - DNA, 25 bp, Homo sapien
ggagctggtacatgaagctttcttg

SEQ ID NO: 1532881 - DNA, 25 bp, Homo sapien
ctgctggagctggtacatgaagctt

SEQ ID NO: 1532882 - DNA, 25 bp, Homo sapien
ctggagctggtacatgaagctttct

SEQ ID NO: 1532883 - DNA, 25 bp, Homo sapien
gctggagctggtacatgaagctttc

SEQ ID NO: 1532884 - DNA, 25 bp, Homo sapien
caacggagagccctgatgtgactgg

SEQ ID NO: 1532885 - DNA, 25 bp, Homo sapien
gaattatgccttgtcaccaacggag

SEQ ID NO: 1532886 - DNA, 25 bp, Homo sapien
tgactggcccatgttaaagcccgag

SEQ ID NO: 1532887 - DNA, 25 bp, Homo sapien
tctccatgagaaagccattggccac

SEQ ID NO: 1532888 - DNA, 25 bp, Homo sapien
gggtgcccgtggtggagggggcaca

SEQ ID NO: 1532889 - DNA, 25 bp, Homo sapien
ggttgcatggctcctgccttctgct

SEQ ID NO: 1532890 - DNA, 25 bp, Homo sapien
gcacaggcagtgacggctgctgtgg

SEQ ID NO: 1532891 - DNA, 25 bp, Homo sapien
cagtgacggctgctgtggttgcatg

SEQ ID NO: 1532892 - DNA, 25 bp, Homo sapien
tggacttgaggttgttgctgctttg

SEQ ID NO: 1532893 - DNA, 25 bp, Homo sapien
ggatgagccatgtacccatttccca

SEQ ID NO: 1532894 - DNA, 25 bp, Homo sapien
ggctgctgcggtccaatgggctgga

SEQ ID NO: 1532895 - DNA, 25 bp, Homo sapien
taggtgttggtagtattggacttga

SEQ ID NO: 1532896 - DNA, 25 bp, Homo sapien
cactgaccaagaggagacagacctg

SEQ ID NO: 1532897 - DNA, 25 bp, Homo sapien
catcactttggtcacggttgggcca

SEQ ID NO: 1532898 - DNA, 25 bp, Homo sapien
tgggccaggtgttatttctaggtcc

SEQ ID NO: 1532899 - DNA, 25 bp, Homo sapien
tgagatcagatatgccaggccactg

SEQ ID NO: 1532900 - DNA, 25 bp, Homo sapien
ggtgtctgtcacctgtcataggtcc

SEQ ID NO: 1532901 - DNA, 25 bp, Homo sapien
gagctgttcaagtaacctctcttag

SEQ ID NO: 1532902 - DNA, 25 bp, Homo sapien
attctatgaaggcaggagggtgtct

SEQ ID NO: 1532903 - DNA, 25 bp, Homo sapien
tggagcctacttgaactatgggact

SEQ ID NO: 1532904 - DNA, 25 bp, Homo sapien
gtctgattcctgatattaactgaaa

SEQ ID NO: 1532905 - DNA, 25 bp, Homo sapien
ggtgataacagtcgcccttgtctga

SEQ ID NO: 1532906 - DNA, 25 bp, Homo sapien
cattttccaaagcttagaccactta

SEQ ID NO: 1532907 - DNA, 25 bp, Homo sapien
ctgtgaagtccaagacaaagttaca

SEQ ID NO: 1532908 - DNA, 25 bp, Homo sapien
tatgctgatcccacttaagctaaag

SEQ ID NO: 1532909 - DNA, 25 bp, Homo sapien
tacagggcagtacaaatgggagaaa

SEQ ID NO: 1532910 - DNA, 25 bp, Homo sapien
ggtcagccagatagaggttatatgc

SEQ ID NO: 1532911 - DNA, 25 bp, Homo sapien
gactttggccaactgataacctgaa

SEQ ID NO: 1532912 - DNA, 25 bp, Homo sapien
catagcgtgcaaactctgggtctga

SEQ ID NO: 1532913 - DNA, 25 bp, Homo sapien
tccgatgcgcgtcatccataggcgg

SEQ ID NO: 1532914 - DNA, 25 bp, Homo sapien
tcactcctgccacatagcgtgcaaa

SEQ ID NO: 1532915 - DNA, 25 bp, Homo sapien
tggccggcgaccgtgctgggcctgc

SEQ ID NO: 1532916 - DNA, 25 bp, Homo sapien
tattaaccatgtagcaatatgggat

SEQ ID NO: 1532917 - DNA, 25 bp, Homo sapien
gggcagtccttaccctgcattcatc

SEQ ID NO: 1532918 - DNA, 25 bp, Homo sapien
tccctttattcctctaagaagccta

SEQ ID NO: 1532919 - DNA, 25 bp, Homo sapien
ttgagctggtctttagtcatccaga

SEQ ID NO: 1532920 - DNA, 25 bp, Homo sapien
cgaggtcaggccctgaaaacatgga

SEQ ID NO: 1532921 - DNA, 25 bp, Homo sapien
cccgttggctgaggatgtctcatca

SEQ ID NO: 1532922 - DNA, 25 bp, Homo sapien
tgcttgacagcagcaacgaggtcag

SEQ ID NO: 1532923 - DNA, 25 bp, Homo sapien
aaaacatggagaacaagctgtcccc

SEQ ID NO: 1532924 - DNA, 25 bp, Homo sapien
cttgtgcctcagcgtcccgagtagc

SEQ ID NO: 1532925 - DNA, 25 bp, Homo sapien
agctcattgcaaactctgcatccca

SEQ ID NO: 1532926 - DNA, 25 bp, Homo sapien
tgggattacaggtgcgtgccaccat

SEQ ID NO: 1532927 - DNA, 25 bp, Homo sapien
ggttcaagcaattcttgtgcctcag

SEQ ID NO: 1532928 - DNA, 25 bp, Homo sapien
gcgtgctggtgtcttgctctccact

SEQ ID NO: 1532929 - DNA, 25 bp, Homo sapien
gtgctggtgtcttgctctccactgc

SEQ ID NO: 1532930 - DNA, 25 bp, Homo sapien
gctggtgtcttgctctccactgctg

SEQ ID NO: 1532931 - DNA, 25 bp, Homo sapien
tgctggtgtcttgctctccactgct

SEQ ID NO: 1532932 - DNA, 25 bp, Homo sapien
actgcagtcgttggttgcggcccac

SEQ ID NO: 1532933 - DNA, 25 bp, Homo sapien
cccttgggtgctgccttgtgtgctg

SEQ ID NO: 1532934 - DNA, 25 bp, Homo sapien
tgactgcatagagtggtgcgctggg

SEQ ID NO: 1532935 - DNA, 25 bp, Homo sapien
gcatggtgtcgttccactggctgcc

SEQ ID NO: 1532936 - DNA, 25 bp, Homo sapien
ggggcagataggctggcctgcgctc

SEQ ID NO: 1532937 - DNA, 25 bp, Homo sapien
ggcagataggctggcctgcgctcac

SEQ ID NO: 1532938 - DNA, 25 bp, Homo sapien
gggcagataggctggcctgcgctca

SEQ ID NO: 1532939 - DNA, 25 bp, Homo sapien
aagtgtggctgtggcgcctgcatca

SEQ ID NO: 1532940 - DNA, 25 bp, Homo sapien
catcagagtcacctgtggcgcttac

SEQ ID NO: 1532941 - DNA, 25 bp, Homo sapien
taggcatgcaggttccctagcaagc

SEQ ID NO: 1532942 - DNA, 25 bp, Homo sapien
tgatgccatcgtttcagaagccagg

SEQ ID NO: 1532943 - DNA, 25 bp, Homo sapien
ctgtcaaactttcataccagaaaat

SEQ ID NO: 1532944 - DNA, 25 bp, Homo sapien
gctggaaaagcttatatggagttag

SEQ ID NO: 1532945 - DNA, 25 bp, Homo sapien
tgtgttattacaatctttgctggaa

SEQ ID NO: 1532946 - DNA, 25 bp, Homo sapien
tatatctgtagaaaaacgagaacat

SEQ ID NO: 1532947 - DNA, 25 bp, Homo sapien
gaggtgaatgctcagaaccacggca

SEQ ID NO: 1532948 - DNA, 25 bp, Homo sapien
tgggaagagcctgacaacacagtac

SEQ ID NO: 1532949 - DNA, 25 bp, Homo sapien
tgtgctggagcatcaaggattgacc

SEQ ID NO: 1532950 - DNA, 25 bp, Homo sapien
taatggaactcgaaatacagggtac

SEQ ID NO: 1532951 - DNA, 25 bp, Homo sapien
cttataggagctttaaaagatacaa

SEQ ID NO: 1532952 - DNA, 25 bp, Homo sapien
ttacttataggagctttaaaagata

SEQ ID NO: 1532953 - DNA, 25 bp, Homo sapien
acttataggagctttaaaagataca

SEQ ID NO: 1532954 - DNA, 25 bp, Homo sapien
tacttataggagctttaaaagatac

SEQ ID NO: 1532955 - DNA, 25 bp, Homo sapien
tggtgttggccctaccctgcgcgat

SEQ ID NO: 1532956 - DNA, 25 bp, Homo sapien
ggcttcattaccagagccccgtgaa

SEQ ID NO: 1532957 - DNA, 25 bp, Homo sapien
gaatcctttgctagatgcttaaaaa

SEQ ID NO: 1532958 - DNA, 25 bp, Homo sapien
cgcgatccagtcttgtcgtttcggg

SEQ ID NO: 1532959 - DNA, 25 bp, Homo sapien
acgtgcccccagcaagatgatgtgg

SEQ ID NO: 1532960 - DNA, 25 bp, Homo sapien
cacgtgcccccagcaagatgatgtg

SEQ ID NO: 1532961 - DNA, 25 bp, Homo sapien
tcacgtgcccccagcaagatgatgt

SEQ ID NO: 1532962 - DNA, 25 bp, Homo sapien
gtgcccccagcaagatgatgtggcc

SEQ ID NO: 1532963 - DNA, 25 bp, Homo sapien
gccacagtcttgtccagtgtcctct

SEQ ID NO: 1532964 - DNA, 25 bp, Homo sapien
tttccactgccacagtcttgtccag

SEQ ID NO: 1532965 - DNA, 25 bp, Homo sapien
ccagtgtcctctcccgaccaccagg

SEQ ID NO: 1532966 - DNA, 25 bp, Homo sapien
cgaccaccaggaaccctagaaacag

SEQ ID NO: 1532967 - DNA, 25 bp, Homo sapien
cattcattcgacaaaactctataga

SEQ ID NO: 1532968 - DNA, 25 bp, Homo sapien
agagagctaccatcgcgccgctgca

SEQ ID NO: 1532969 - DNA, 25 bp, Homo sapien
tccctgtgcactagtcggcttcatt

SEQ ID NO: 1532970 - DNA, 25 bp, Homo sapien
gatcgaacaccttccacgttacagg

SEQ ID NO: 1532971 - DNA, 25 bp, Homo sapien
ctcttgcgccgccgctttgctggcc

SEQ ID NO: 1532972 - DNA, 25 bp, Homo sapien
agccgaggaggaaggagcgccggca

SEQ ID NO: 1532973 - DNA, 25 bp, Homo sapien
tgagtgagacgcgagccgaggagga

SEQ ID NO: 1532974 - DNA, 25 bp, Homo sapien
ggcgcgcggcggcctttatggcgca

SEQ ID NO: 1532975 - DNA, 25 bp, Homo sapien
gcagcgcgcagcaagcgaggcgcgt

SEQ ID NO: 1532976 - DNA, 25 bp, Homo sapien
cggcgcaggttcagctcggagcggt

SEQ ID NO: 1532977 - DNA, 25 bp, Homo sapien
tgttggcatcgaagaggcggcgcag

SEQ ID NO: 1532978 - DNA, 25 bp, Homo sapien
ctgaagtggttgaagcggtccttgt

SEQ ID NO: 1532979 - DNA, 25 bp, Homo sapien
ggtgctcgcggtaccattgctgcag

SEQ ID NO: 1532980 - DNA, 25 bp, Homo sapien
aagccatcctcacagaccgtagatg

SEQ ID NO: 1532981 - DNA, 25 bp, Homo sapien
tcacagaccgtagatgcaggcagac

SEQ ID NO: 1532982 - DNA, 25 bp, Homo sapien
gtctgtcacctgctggcccaccagg

SEQ ID NO: 1532983 - DNA, 25 bp, Homo sapien
acctgctggcccaccaggatgatct

SEQ ID NO: 1532984 - DNA, 25 bp, Homo sapien
ctgcagaaagatggagatgctgctg

SEQ ID NO: 1532985 - DNA, 25 bp, Homo sapien
gatgctgctgaccacaccctggtct

SEQ ID NO: 1532986 - DNA, 25 bp, Homo sapien
agaaagatggagatgctgctgacca

SEQ ID NO: 1532987 - DNA, 25 bp, Homo sapien
tggagatgctgctgaccacaccctg

SEQ ID NO: 1532988 - DNA, 25 bp, Homo sapien
gtcctccgtcaccaggttcttggag

SEQ ID NO: 1532989 - DNA, 25 bp, Homo sapien
tcctccgtcaccaggttcttggagt

SEQ ID NO: 1532990 - DNA, 25 bp, Homo sapien
cattgaacatccgctcccgggcggc

SEQ ID NO: 1532991 - DNA, 25 bp, Homo sapien
atgggtgtgtttgaccggttccgca

SEQ ID NO: 1532992 - DNA, 25 bp, Homo sapien
gaaccttgttgacctctggcatcac

SEQ ID NO: 1532993 - DNA, 25 bp, Homo sapien
aaagacttcatcttgtccagaacct

SEQ ID NO: 1532994 - DNA, 25 bp, Homo sapien
atccttgccgtctaccaggatgggt

SEQ ID NO: 1532995 - DNA, 25 bp, Homo sapien
ttggcaaactttggagagcacagcc

SEQ ID NO: 1532996 - DNA, 25 bp, Homo sapien
ggttttgccactacaatcaaggtca

SEQ ID NO: 1532997 - DNA, 25 bp, Homo sapien
tgagtcaggtactccagtggccagc

SEQ ID NO: 1532998 - DNA, 25 bp, Homo sapien
taatccctattggtgcccaggatga

SEQ ID NO: 1532999 - DNA, 25 bp, Homo sapien
tcccagcaacttagaaggttgaggt

SEQ ID NO: 1533000 - DNA, 25 bp, Homo sapien
ttagaaggttgaggtggggaattgc

SEQ ID NO: 1533001 - DNA, 25 bp, Homo sapien
ccagcaacttagaaggttgaggtgg

SEQ ID NO: 1533002 - DNA, 25 bp, Homo sapien
gcaacttagaaggttgaggtgggga

SEQ ID NO: 1533003 - DNA, 25 bp, Homo sapien
agaacaaaatgctctgctttagcct

SEQ ID NO: 1533004 - DNA, 25 bp, Homo sapien
caccgcgcctcgctatttacttatt

SEQ ID NO: 1533005 - DNA, 25 bp, Homo sapien
actttctgggttctaacaattctca

SEQ ID NO: 1533006 - DNA, 25 bp, Homo sapien
ggcagggtggctcaaggctgagaca

SEQ ID NO: 1533007 - DNA, 25 bp, Homo sapien
ggtcttgcctgtgtaccccttccag

SEQ ID NO: 1533008 - DNA, 25 bp, Homo sapien
gccaatgccaatgttgatgacgtcc

SEQ ID NO: 1533009 - DNA, 25 bp, Homo sapien
caggtcggagccgccaatgccaatg

SEQ ID NO: 1533010 - DNA, 25 bp, Homo sapien
gatgacgtccgtgatggtcttgcct

SEQ ID NO: 1533011 - DNA, 25 bp, Homo sapien
ctcctgaagagtatggcttaagggc

SEQ ID NO: 1533012 - DNA, 25 bp, Homo sapien
ttggagacataccagacgcggggac

SEQ ID NO: 1533013 - DNA, 25 bp, Homo sapien
aagagtatggcttaagggcttcagt

SEQ ID NO: 1533014 - DNA, 25 bp, Homo sapien
ggacctcctgaagagtatggcttaa

SEQ ID NO: 1533015 - DNA, 25 bp, Homo sapien
aggcaatgatgaacagggaggactc

SEQ ID NO: 1533016 - DNA, 25 bp, Homo sapien
caatgatgaacagggaggactcggg

SEQ ID NO: 1533017 - DNA, 25 bp, Homo sapien
ggaggactcggggttcagctgggcc

SEQ ID NO: 1533018 - DNA, 25 bp, Homo sapien
aggactcggggttcagctgggccag

SEQ ID NO: 1533019 - DNA, 25 bp, Homo sapien
ggagaaaccactccttcgccgtctc

SEQ ID NO: 1533020 - DNA, 25 bp, Homo sapien
cgtctctgcattcgtgatggtctcc

SEQ ID NO: 1533021 - DNA, 25 bp, Homo sapien
tccttcgccgtctctgcattcgtga

SEQ ID NO: 1533022 - DNA, 25 bp, Homo sapien
tctgcattcgtgatggtctcctggg

SEQ ID NO: 1533023 - DNA, 25 bp, Homo sapien
tcaagaaagcagacgggtcacaggc

SEQ ID NO: 1533024 - DNA, 25 bp, Homo sapien
catcactagaggaaccaaggccctg

SEQ ID NO: 1533025 - DNA, 25 bp, Homo sapien
gaaggcccacatcgaggtcaaggtc

SEQ ID NO: 1533026 - DNA, 25 bp, Homo sapien
taaaataggtgtggccaagagttcc

SEQ ID NO: 1533027 - DNA, 25 bp, Homo sapien
tgtgttagtagacagggcaacaaag

SEQ ID NO: 1533028 - DNA, 25 bp, Homo sapien
gacagggcaacaaagtgcttcgcca

SEQ ID NO: 1533029 - DNA, 25 bp, Homo sapien
aacaaagtgcttcgccactgcagaa

SEQ ID NO: 1533030 - DNA, 25 bp, Homo sapien
tagtagacagggcaacaaagtgctt

SEQ ID NO: 1533031 - DNA, 25 bp, Homo sapien
ccagaactcgaacatgttttgaggg

SEQ ID NO: 1533032 - DNA, 25 bp, Homo sapien
atcccagaactcgaacatgttttga

SEQ ID NO: 1533033 - DNA, 25 bp, Homo sapien
tgttttgagggtcaattccaaactc

SEQ ID NO: 1533034 - DNA, 25 bp, Homo sapien
atgttttgagggtcaattccaaact

SEQ ID NO: 1533035 - DNA, 25 bp, Homo sapien
ttggcaaaggacacttaattcaccc

SEQ ID NO: 1533036 - DNA, 25 bp, Homo sapien
ccagtgcagaagtgcttgtacttac

SEQ ID NO: 1533037 - DNA, 25 bp, Homo sapien
ctctcaacagccatgacttggcaaa

SEQ ID NO: 1533038 - DNA, 25 bp, Homo sapien
ggcctctcaacagccatgacttggc

SEQ ID NO: 1533039 - DNA, 25 bp, Homo sapien
tgcccttggcctttacagatggtgg

SEQ ID NO: 1533040 - DNA, 25 bp, Homo sapien
cacccaagggagtgtcatgtggccc

SEQ ID NO: 1533041 - DNA, 25 bp, Homo sapien
cctcatcctgcctgggttgctcttg

SEQ ID NO: 1533042 - DNA, 25 bp, Homo sapien
ctcaactctgtgagcgtggcaaggg

SEQ ID NO: 1533043 - DNA, 25 bp, Homo sapien
aggtggtcccatggaccacctgttg

SEQ ID NO: 1533044 - DNA, 25 bp, Homo sapien
tggccctggcggaccaagaattacc

SEQ ID NO: 1533045 - DNA, 25 bp, Homo sapien
gacgggactcttctgatctcacctg

SEQ ID NO: 1533046 - DNA, 25 bp, Homo sapien
gatacactctagtaactcaggcagg

SEQ ID NO: 1533047 - DNA, 25 bp, Homo sapien
atggctgccgcaaaactggccctgg

SEQ ID NO: 1533048 - DNA, 25 bp, Homo sapien
agagcccggctgacatatgcacata

SEQ ID NO: 1533049 - DNA, 25 bp, Homo sapien
gatcctcacttttcggaaccggcca

SEQ ID NO: 1533050 - DNA, 25 bp, Homo sapien
gacgcggctctgaaaggctgcatta

SEQ ID NO: 1533051 - DNA, 25 bp, Homo sapien
taatcctgggttctaaacttgtgca

SEQ ID NO: 1533052 - DNA, 25 bp, Homo sapien
gatagatccgttctacctgtgcctg

SEQ ID NO: 1533053 - DNA, 25 bp, Homo sapien
cctttctgatggatgcggttcgtca

SEQ ID NO: 1533054 - DNA, 25 bp, Homo sapien
gatgagcctaatccggactccttgg

SEQ ID NO: 1533055 - DNA, 25 bp, Homo sapien
tcttgggatacaaaccagagcctga

SEQ ID NO: 1533056 - DNA, 25 bp, Homo sapien
tgggaggccgctctatacacctagg

SEQ ID NO: 1533057 - DNA, 25 bp, Homo sapien
gatgcagaccaacaccatggactgg

SEQ ID NO: 1533058 - DNA, 25 bp, Homo sapien
aatgttctgcctgcctgtagagacc

SEQ ID NO: 1533059 - DNA, 25 bp, Homo sapien
tatacaacctctgtggaactgagcc

SEQ ID NO: 1533060 - DNA, 25 bp, Homo sapien
gacacgaaggagaggtgcccactta

SEQ ID NO: 1533061 - DNA, 25 bp, Homo sapien
tctcaagaacgagcaggcatgaccc

SEQ ID NO: 1533062 - DNA, 25 bp, Homo sapien
gggaaccttacctgacagacgcagt

SEQ ID NO: 1533063 - DNA, 25 bp, Homo sapien
aggtcccgtggccaaagcagtcttt

SEQ ID NO: 1533064 - DNA, 25 bp, Homo sapien
gatcttctcggcctatcacctaggc

SEQ ID NO: 1533065 - DNA, 25 bp, Homo sapien
catttctagcacaggcaacggacac

SEQ ID NO: 1533066 - DNA, 25 bp, Homo sapien
tatctgggcttgaccgatcttctcg

SEQ ID NO: 1533067 - DNA, 25 bp, Homo sapien
gagtcctcagaacttcacggatgtc

SEQ ID NO: 1533068 - DNA, 25 bp, Homo sapien
ctgatggacacagatcctcatactt

SEQ ID NO: 1533069 - DNA, 25 bp, Homo sapien
gaagcccaagggcctcaaacctgag

SEQ ID NO: 1533070 - DNA, 25 bp, Homo sapien
gcccaagggcctcaaacctgagtcc

SEQ ID NO: 1533071 - DNA, 25 bp, Homo sapien
tggaagcccaagggcctcaaacctg

SEQ ID NO: 1533072 - DNA, 25 bp, Homo sapien
cagacatggacagacccggattctc

SEQ ID NO: 1533073 - DNA, 25 bp, Homo sapien
gatgcagatcctcttaccagtgcca

SEQ ID NO: 1533074 - DNA, 25 bp, Homo sapien
ttcagaaattgacagacccggatcc

SEQ ID NO: 1533075 - DNA, 25 bp, Homo sapien
tcagacactagaagacacagaccct

SEQ ID NO: 1533076 - DNA, 25 bp, Homo sapien
gcacacagcttcaactctttagaca

SEQ ID NO: 1533077 - DNA, 25 bp, Homo sapien
tgcacacagcttcaactctttagac

SEQ ID NO: 1533078 - DNA, 25 bp, Homo sapien
cacacagcttcaactctttagacat

SEQ ID NO: 1533079 - DNA, 25 bp, Homo sapien
ctgcacacagcttcaactctttaga

SEQ ID NO: 1533080 - DNA, 25 bp, Homo sapien
gacactggcagacccaaggcctcat

SEQ ID NO: 1533081 - DNA, 25 bp, Homo sapien
ctccccagacactggcagacccaag

SEQ ID NO: 1533082 - DNA, 25 bp, Homo sapien
cagacactggcagacccaaggcctc

SEQ ID NO: 1533083 - DNA, 25 bp, Homo sapien
cccagacactggcagacccaaggcc

SEQ ID NO: 1533084 - DNA, 25 bp, Homo sapien
tcagatatggacagacccagggtct

SEQ ID NO: 1533085 - DNA, 25 bp, Homo sapien
tcctcagatatggacagacccaggg

SEQ ID NO: 1533086 - DNA, 25 bp, Homo sapien
agatatggacagacccagggtctca

SEQ ID NO: 1533087 - DNA, 25 bp, Homo sapien
ctcctcagatatggacagacccagg

SEQ ID NO: 1533088 - DNA, 25 bp, Homo sapien
cctcctcagacacggacagacccca

SEQ ID NO: 1533089 - DNA, 25 bp, Homo sapien
ctcctcagacacggacagaccccag

SEQ ID NO: 1533090 - DNA, 25 bp, Homo sapien
tcctcagacacggacagaccccagg

SEQ ID NO: 1533091 - DNA, 25 bp, Homo sapien
cctcctcagacacggacacacccag

SEQ ID NO: 1533092 - DNA, 25 bp, Homo sapien
gcccacctcctcagacacggacaca

SEQ ID NO: 1533093 - DNA, 25 bp, Homo sapien
acctcctcagacacggacacaccca

SEQ ID NO: 1533094 - DNA, 25 bp, Homo sapien
agggcccacctcctcagacacggac

SEQ ID NO: 1533095 - DNA, 25 bp, Homo sapien
cagacaccagcagacccaggacctc

SEQ ID NO: 1533096 - DNA, 25 bp, Homo sapien
caccagcagacccaggacctcatac

SEQ ID NO: 1533097 - DNA, 25 bp, Homo sapien
tgcagacaccagcagacccaggacc

SEQ ID NO: 1533098 - DNA, 25 bp, Homo sapien
gacaccagcagacccaggacctcat

SEQ ID NO: 1533099 - DNA, 25 bp, Homo sapien
ttccctgagatgtcgggccctgtct

SEQ ID NO: 1533100 - DNA, 25 bp, Homo sapien
gtcttccctgagatgtcgggccctg

SEQ ID NO: 1533101 - DNA, 25 bp, Homo sapien
gtggtcttccctgagatgtcgggcc

SEQ ID NO: 1533102 - DNA, 25 bp, Homo sapien
cgtggtcttccctgagatgtcgggc

SEQ ID NO: 1533103 - DNA, 25 bp, Homo sapien
aggagagacaggacaaggtgctgag

SEQ ID NO: 1533104 - DNA, 25 bp, Homo sapien
cctggtcttgcacaggggcgtctcg

SEQ ID NO: 1533105 - DNA, 25 bp, Homo sapien
agatgactgaccacagccacaagac

SEQ ID NO: 1533106 - DNA, 25 bp, Homo sapien
caacagggcagactacagatgactg

SEQ ID NO: 1533107 - DNA, 25 bp, Homo sapien
gcaatggagagtccgatggccgacc

SEQ ID NO: 1533108 - DNA, 25 bp, Homo sapien
ccacgtgcagggcaatggagagtcc

SEQ ID NO: 1533109 - DNA, 25 bp, Homo sapien
agtccgatggccgaccacagcgagt

SEQ ID NO: 1533110 - DNA, 25 bp, Homo sapien
atggccgaccacagcgagtagcgtc

SEQ ID NO: 1533111 - DNA, 25 bp, Homo sapien
gatacgacatgggaggactcggacc

SEQ ID NO: 1533112 - DNA, 25 bp, Homo sapien
aaagcagagtcaacagaagtggcca

SEQ ID NO: 1533113 - DNA, 25 bp, Homo sapien
gcatggagagccagaagatacgaca

SEQ ID NO: 1533114 - DNA, 25 bp, Homo sapien
tctgcaacgaaggaaggctgcatgg

SEQ ID NO: 1533115 - DNA, 25 bp, Homo sapien
cccgagagcagctgctcgaagttgt

SEQ ID NO: 1533116 - DNA, 25 bp, Homo sapien
gagagcagctgctcgaagttgtcaa

SEQ ID NO: 1533117 - DNA, 25 bp, Homo sapien
agcagctgctcgaagttgtcaaaac

SEQ ID NO: 1533118 - DNA, 25 bp, Homo sapien
atccagtgagcccccgagagcagct

SEQ ID NO: 1533119 - DNA, 25 bp, Homo sapien
ctctggccagcacttggcagagaac

SEQ ID NO: 1533120 - DNA, 25 bp, Homo sapien
cctctggccagcacttggcagagaa

SEQ ID NO: 1533121 - DNA, 25 bp, Homo sapien
ctgagcagctgcacggggaggggag

SEQ ID NO: 1533122 - DNA, 25 bp, Homo sapien
aagtacgcagcaaagcggtgcaggt

SEQ ID NO: 1533123 - DNA, 25 bp, Homo sapien
tcatagggcagcatggcgtgtgtct

SEQ ID NO: 1533124 - DNA, 25 bp, Homo sapien
aagcagttgatgtaccagataccca

SEQ ID NO: 1533125 - DNA, 25 bp, Homo sapien
cgttcttctccaggggcgtcgtgcg

SEQ ID NO: 1533126 - DNA, 25 bp, Homo sapien
atgagctggtaaaaagcatgctggc

SEQ ID NO: 1533127 - DNA, 25 bp, Homo sapien
tatttcccattggactccatgtcgc

SEQ ID NO: 1533128 - DNA, 25 bp, Homo sapien
gcctgtctggtggtccacacgggtt

SEQ ID NO: 1533129 - DNA, 25 bp, Homo sapien
gtccacacgggttccagatttggtg

SEQ ID NO: 1533130 - DNA, 25 bp, Homo sapien
tctggaccgggatgaggaagtcaca

SEQ ID NO: 1533131 - DNA, 25 bp, Homo sapien
cttgtgatgcagacccttccgtatg

SEQ ID NO: 1533132 - DNA, 25 bp, Homo sapien
aagtcacagggtatcatcttggtgc

SEQ ID NO: 1533133 - DNA, 25 bp, Homo sapien
ttgtgatgcagacccttccgtatgg

SEQ ID NO: 1533134 - DNA, 25 bp, Homo sapien
tgtgctaccgtaaccctgtgctgct

SEQ ID NO: 1533135 - DNA, 25 bp, Homo sapien
tctctgaaggagttcgagggcagct

SEQ ID NO: 1533136 - DNA, 25 bp, Homo sapien
ggcatcatcgccctgttctagtaga

SEQ ID NO: 1533137 - DNA, 25 bp, Homo sapien
taagatcctaagaaggtagctgggc

SEQ ID NO: 1533138 - DNA, 25 bp, Homo sapien
gcctcctccgtcgattttcccctca

SEQ ID NO: 1533139 - DNA, 25 bp, Homo sapien
tctgtctgggccaagaagttggcca

SEQ ID NO: 1533140 - DNA, 25 bp, Homo sapien
ctctgtctgggccaagaagttggcc

SEQ ID NO: 1533141 - DNA, 25 bp, Homo sapien
gtcgattttcccctcatcagggcct

SEQ ID NO: 1533142 - DNA, 25 bp, Homo sapien
attctgtaggacaagccaggcacgc

SEQ ID NO: 1533143 - DNA, 25 bp, Homo sapien
taggacaagccaggcacgccccaag

SEQ ID NO: 1533144 - DNA, 25 bp, Homo sapien
cattctgtaggacaagccaggcacg

SEQ ID NO: 1533145 - DNA, 25 bp, Homo sapien
tcccattctgtaggacaagccaggc

SEQ ID NO: 1533146 - DNA, 25 bp, Homo sapien
caagagagtcctgatccctaaaccc

SEQ ID NO: 1533147 - DNA, 25 bp, Homo sapien
aaaacaccaaggaatgtctccaaga

SEQ ID NO: 1533148 - DNA, 25 bp, Homo sapien
aaacaccaaggaatgtctccaagag

SEQ ID NO: 1533149 - DNA, 25 bp, Homo sapien
cttggtgaacacaatagagttggtt

SEQ ID NO: 1533150 - DNA, 25 bp, Homo sapien
ttggtgaacacaatagagttggttg

SEQ ID NO: 1533151 - DNA, 25 bp, Homo sapien
tagagttggttgggcgatttccttc

SEQ ID NO: 1533152 - DNA, 25 bp, Homo sapien
agagttggttgggcgatttccttca

SEQ ID NO: 1533153 - DNA, 25 bp, Homo sapien
gctccacaagcccattccaacctac

SEQ ID NO: 1533154 - DNA, 25 bp, Homo sapien
aagtgacagacagggcacatcaggg

SEQ ID NO: 1533155 - DNA, 25 bp, Homo sapien
tgacagacagggcacatcagggctc

SEQ ID NO: 1533156 - DNA, 25 bp, Homo sapien
agccaggacctttcccctactcact

SEQ ID NO: 1533157 - DNA, 25 bp, Homo sapien
cccactggtcaaagctgttgatgtc

SEQ ID NO: 1533158 - DNA, 25 bp, Homo sapien
gtcccagatgatgccctgaacgaag

SEQ ID NO: 1533159 - DNA, 25 bp, Homo sapien
gatgccctgaacgaagatcttgtgc

SEQ ID NO: 1533160 - DNA, 25 bp, Homo sapien
acgaagatcttgtgctcatacatgg

SEQ ID NO: 1533161 - DNA, 25 bp, Homo sapien
gctctaacgttgctactgaaatccc

SEQ ID NO: 1533162 - DNA, 25 bp, Homo sapien
ggccctcccctaagtgagcaactca

SEQ ID NO: 1533163 - DNA, 25 bp, Homo sapien
tgaaatccctgagccgacacaaagg

SEQ ID NO: 1533164 - DNA, 25 bp, Homo sapien
gtatgaggaaggctctaacgttgct

SEQ ID NO: 1533165 - DNA, 25 bp, Homo sapien
ttattggactctggcctcgcgctgc

SEQ ID NO: 1533166 - DNA, 25 bp, Homo sapien
cccattggtagaagcgtcgtgagag

SEQ ID NO: 1533167 - DNA, 25 bp, Homo sapien
gctctattttcttagccagctgctt

SEQ ID NO: 1533168 - DNA, 25 bp, Homo sapien
tgagaggtcacttgagcactgccat

SEQ ID NO: 1533169 - DNA, 25 bp, Homo sapien
taacacagagggagcatagacatgg

SEQ ID NO: 1533170 - DNA, 25 bp, Homo sapien
tgggtcagaaaagtcagctgcacaa

SEQ ID NO: 1533171 - DNA, 25 bp, Homo sapien
cctgctaagggctcgtggtccaagc

SEQ ID NO: 1533172 - DNA, 25 bp, Homo sapien
tggtgtccaggaacatgcagtgccg

SEQ ID NO: 1533173 - DNA, 25 bp, Homo sapien
ttatttttctacatgggatgtgaac

SEQ ID NO: 1533174 - DNA, 25 bp, Homo sapien
tttatttttctacatgggatgtgaa

SEQ ID NO: 1533175 - DNA, 25 bp, Homo sapien
ttagtgttaagtgtccgcagaggca

SEQ ID NO: 1533176 - DNA, 25 bp, Homo sapien
ggtcttgtccaggaattcacccgaa

SEQ ID NO: 1533177 - DNA, 25 bp, Homo sapien
gaaccatcgagtgaacagagtatcc

SEQ ID NO: 1533178 - DNA, 25 bp, Homo sapien
aaagaactacctgagcgtcttgcca

SEQ ID NO: 1533179 - DNA, 25 bp, Homo sapien
catcctgactaacacagtgagacac

SEQ ID NO: 1533180 - DNA, 25 bp, Homo sapien
aaattagccgggcatggtggcaggt

SEQ ID NO: 1533181 - DNA, 25 bp, Homo sapien
attagccgggcatggtggcaggtgc

SEQ ID NO: 1533182 - DNA, 25 bp, Homo sapien
tgtctctgctaaaaaaatatataaa

SEQ ID NO: 1533183 - DNA, 25 bp, Homo sapien
ctggcatgcatctgcggacccagct

SEQ ID NO: 1533184 - DNA, 25 bp, Homo sapien
ggtgtactggcatgcatctgcggac

SEQ ID NO: 1533185 - DNA, 25 bp, Homo sapien
tttaaatgagctgggtgtactggca

SEQ ID NO: 1533186 - DNA, 25 bp, Homo sapien
taaatgagctgggtgtactggcatg

SEQ ID NO: 1533187 - DNA, 25 bp, Homo sapien
gaggctcaagcaagtgccctgtgta

SEQ ID NO: 1533188 - DNA, 25 bp, Homo sapien
tctggcctcagtgggatcctatcac

SEQ ID NO: 1533189 - DNA, 25 bp, Homo sapien
ggcctgccaccagtcagaggctgaa

SEQ ID NO: 1533190 - DNA, 25 bp, Homo sapien
tccagaaagcgggatgaggctcaag

SEQ ID NO: 1533191 - DNA, 25 bp, Homo sapien
ggctggtttcgagctcctgaaatca

SEQ ID NO: 1533192 - DNA, 25 bp, Homo sapien
gctggtttcgagctcctgaaatcaa

SEQ ID NO: 1533193 - DNA, 25 bp, Homo sapien
atcaagtgatctgcccacctcggcc

SEQ ID NO: 1533194 - DNA, 25 bp, Homo sapien
ggtttcgagctcctgaaatcaagtg

SEQ ID NO: 1533195 - DNA, 25 bp, Homo sapien
ggcgaccaggtgaaaacgcaaacta

SEQ ID NO: 1533196 - DNA, 25 bp, Homo sapien
cgccgggcgaccaggtgaaaacgca

SEQ ID NO: 1533197 - DNA, 25 bp, Homo sapien
gccgggcgaccaggtgaaaacgcaa

SEQ ID NO: 1533198 - DNA, 25 bp, Homo sapien
ccggcgcatctcgaaggcccagcag

SEQ ID NO: 1533199 - DNA, 25 bp, Homo sapien
gcaccggcttcagaacggccgccat

SEQ ID NO: 1533200 - DNA, 25 bp, Homo sapien
tgccgtgcaccggcgcatctcgaag

SEQ ID NO: 1533201 - DNA, 25 bp, Homo sapien
gcccagcttgctagcagtccaggca

SEQ ID NO: 1533202 - DNA, 25 bp, Homo sapien
tgacacacgggcctgggcgcagcca

SEQ ID NO: 1533203 - DNA, 25 bp, Homo sapien
aacacgtgcagcagacggtgaaacg

SEQ ID NO: 1533204 - DNA, 25 bp, Homo sapien
ttccagcgggcaatacacctgcacg

SEQ ID NO: 1533205 - DNA, 25 bp, Homo sapien
ctgcacgaccagagcgagcggctgc

SEQ ID NO: 1533206 - DNA, 25 bp, Homo sapien
gcagctctgggacttccccgcctac

SEQ ID NO: 1533207 - DNA, 25 bp, Homo sapien
ggtgaagacaaagggccgtgagggc

SEQ ID NO: 1533208 - DNA, 25 bp, Homo sapien
gagggctgcaccccgactccagccc

SEQ ID NO: 1533209 - DNA, 25 bp, Homo sapien
cgctggaaaggacacccctggagca

SEQ ID NO: 1533210 - DNA, 25 bp, Homo sapien
tgagcgtcctgcgcctctctctctg

SEQ ID NO: 1533211 - DNA, 25 bp, Homo sapien
agcgtcctgcgcctctctctctggc

SEQ ID NO: 1533212 - DNA, 25 bp, Homo sapien
gagcgtcctgcgcctctctctctgg

SEQ ID NO: 1533213 - DNA, 25 bp, Homo sapien
gcgtcctgcgcctctctctctggca

SEQ ID NO: 1533214 - DNA, 25 bp, Homo sapien
gtgtatctccaaattgctagaggaa

SEQ ID NO: 1533215 - DNA, 25 bp, Homo sapien
aaataagagtattgtgtatctccaa

SEQ ID NO: 1533216 - DNA, 25 bp, Homo sapien
aattattccacatgatattcatgaa

SEQ ID NO: 1533217 - DNA, 25 bp, Homo sapien
ccaaattgctagaggaaatttcaaa

SEQ ID NO: 1533218 - DNA, 25 bp, Homo sapien
atactcagtgaatgaggtccgagca

SEQ ID NO: 1533219 - DNA, 25 bp, Homo sapien
tgaatgaggtccgagcacatttggg

SEQ ID NO: 1533220 - DNA, 25 bp, Homo sapien
ctcagtgaatgaggtccgagcacat

SEQ ID NO: 1533221 - DNA, 25 bp, Homo sapien
cagtgaatgaggtccgagcacattt

SEQ ID NO: 1533222 - DNA, 25 bp, Homo sapien
tttgggaaagcaactgatccatggc

SEQ ID NO: 1533223 - DNA, 25 bp, Homo sapien
gtctacgtctttggcactgctggca

SEQ ID NO: 1533224 - DNA, 25 bp, Homo sapien
ttggagccgagcagtccagtctacg

SEQ ID NO: 1533225 - DNA, 25 bp, Homo sapien
tccaaggtaaactgtggtgaaggcc

SEQ ID NO: 1533226 - DNA, 25 bp, Homo sapien
cttttaattatggtcttctcatatt

SEQ ID NO: 1533227 - DNA, 25 bp, Homo sapien
tatttttcatcaccatcattaggaa

SEQ ID NO: 1533228 - DNA, 25 bp, Homo sapien
tcatatttttcatcaccatcattag

SEQ ID NO: 1533229 - DNA, 25 bp, Homo sapien
tttttcatcaccatcattaggaagg

SEQ ID NO: 1533230 - DNA, 25 bp, Homo sapien
cttcatgaatttgtaaaacgtctga

SEQ ID NO: 1533231 - DNA, 25 bp, Homo sapien
caaaatctgctcctgacaagcagca

SEQ ID NO: 1533232 - DNA, 25 bp, Homo sapien
ctcaaaatctgctcctgacaagcag

SEQ ID NO: 1533233 - DNA, 25 bp, Homo sapien
gaatttgtaaaacgtctgatctcca

SEQ ID NO: 1533234 - DNA, 25 bp, Homo sapien
cacacaagtcgcattctagcatcta

SEQ ID NO: 1533235 - DNA, 25 bp, Homo sapien
caagtcgcattctagcatctaaggc

SEQ ID NO: 1533236 - DNA, 25 bp, Homo sapien
agagccacacaagtcgcattctagc

SEQ ID NO: 1533237 - DNA, 25 bp, Homo sapien
gaaccccgaatcagagccacacaag

SEQ ID NO: 1533238 - DNA, 25 bp, Homo sapien
gggagctcggtgacttctgatgtag

SEQ ID NO: 1533239 - DNA, 25 bp, Homo sapien
tgatgtagggcaggtcaaaaagagt

SEQ ID NO: 1533240 - DNA, 25 bp, Homo sapien
aaaagagtggctctccactccagga

SEQ ID NO: 1533241 - DNA, 25 bp, Homo sapien
gaaactcaaatatcctttggcctcc

SEQ ID NO: 1533242 - DNA, 25 bp, Homo sapien
tcaatgaataaagccattaaaaaaa

SEQ ID NO: 1533243 - DNA, 25 bp, Homo sapien
tgaataaagccattaaaaaaagata

SEQ ID NO: 1533244 - DNA, 25 bp, Homo sapien
caagaaaacataagcaataagaact

SEQ ID NO: 1533245 - DNA, 25 bp, Homo sapien
aaaagataccaagaaaacataagca

SEQ ID NO: 1533246 - DNA, 25 bp, Homo sapien
taactgtctagctatctgatgttga

SEQ ID NO: 1533247 - DNA, 25 bp, Homo sapien
ggaatgattttaccttataagctga

SEQ ID NO: 1533248 - DNA, 25 bp, Homo sapien
gcttccagcaaaaagagttatgaga

SEQ ID NO: 1533249 - DNA, 25 bp, Homo sapien
tttcagctataacagaatcacagtc

SEQ ID NO: 1533250 - DNA, 25 bp, Homo sapien
caactcttctcacatgtgtaaacta

SEQ ID NO: 1533251 - DNA, 25 bp, Homo sapien
gatgatttgggggccagcaactctt

SEQ ID NO: 1533252 - DNA, 25 bp, Homo sapien
gtataatacaaaattcttccatggg

SEQ ID NO: 1533253 - DNA, 25 bp, Homo sapien
actcttctcacatgtgtaaactaga

SEQ ID NO: 1533254 - DNA, 25 bp, Homo sapien
atttatattaataaaaggaaatgct

SEQ ID NO: 1533255 - DNA, 25 bp, Homo sapien
ggacaaccacgagccgcggcggagg

SEQ ID NO: 1533256 - DNA, 25 bp, Homo sapien
ggcgggacaaccacgagccgcggcg

SEQ ID NO: 1533257 - DNA, 25 bp, Homo sapien
acaaccacgagccgcggcggaggcg

SEQ ID NO: 1533258 - DNA, 25 bp, Homo sapien
gcgggacaaccacgagccgcggcgg

SEQ ID NO: 1533259 - DNA, 25 bp, Homo sapien
tcgatgtgggagaaaccggtgagca

SEQ ID NO: 1533260 - DNA, 25 bp, Homo sapien
accggtgagcacgagattcttgagg

SEQ ID NO: 1533261 - DNA, 25 bp, Homo sapien
ttgaggagctcgcagccgatgccgc

SEQ ID NO: 1533262 - DNA, 25 bp, Homo sapien
cacgagattcttgaggagctcgcag

SEQ ID NO: 1533263 - DNA, 25 bp, Homo sapien
ttaaagtcacaacatccgcgaggga

SEQ ID NO: 1533264 - DNA, 25 bp, Homo sapien
tatgaagatggtgcgcgttccgtgt

SEQ ID NO: 1533265 - DNA, 25 bp, Homo sapien
gttccgtgtgtaaacccgctcgtga

SEQ ID NO: 1533266 - DNA, 25 bp, Homo sapien
gaaatagcgtttgcactcctcgggt

SEQ ID NO: 1533267 - DNA, 25 bp, Homo sapien
tgggaggacaaagtgagagaatcgc

SEQ ID NO: 1533268 - DNA, 25 bp, Homo sapien
actttgggaggacaaagtgagagaa

SEQ ID NO: 1533269 - DNA, 25 bp, Homo sapien
aagcaaaatagtgagaccctggtgg

SEQ ID NO: 1533270 - DNA, 25 bp, Homo sapien
cctaagcaaaatagtgagaccctgg

SEQ ID NO: 1533271 - DNA, 25 bp, Homo sapien
aactgtctgttgaggttgcttacat

SEQ ID NO: 1533272 - DNA, 25 bp, Homo sapien
actgtctgttgaggttgcttacatc

SEQ ID NO: 1533273 - DNA, 25 bp, Homo sapien
tgtctgttgaggttgcttacatcaa

SEQ ID NO: 1533274 - DNA, 25 bp, Homo sapien
aaactgtctgttgaggttgcttaca

SEQ ID NO: 1533275 - DNA, 25 bp, Homo sapien
gctttcgggtaaaactgcagtacac

SEQ ID NO: 1533276 - DNA, 25 bp, Homo sapien
atgatgctgtcatggtaggcaacga

SEQ ID NO: 1533277 - DNA, 25 bp, Homo sapien
taggcaacgatattagctttcgggt

SEQ ID NO: 1533278 - DNA, 25 bp, Homo sapien
aaaactgcagtacactttccttggc

SEQ ID NO: 1533279 - DNA, 25 bp, Homo sapien
actttgcaatgtaatcactatagca

SEQ ID NO: 1533280 - DNA, 25 bp, Homo sapien
ttgcaatgtaatcactatagcatac

SEQ ID NO: 1533281 - DNA, 25 bp, Homo sapien
aactttgcaatgtaatcactatagc

SEQ ID NO: 1533282 - DNA, 25 bp, Homo sapien
ctttgcaatgtaatcactatagcat

SEQ ID NO: 1533283 - DNA, 25 bp, Homo sapien
gccttccacatgatctttgcagtat

SEQ ID NO: 1533284 - DNA, 25 bp, Homo sapien
taactagccttccacatgatctttg

SEQ ID NO: 1533285 - DNA, 25 bp, Homo sapien
aaataactagccttccacatgatct

SEQ ID NO: 1533286 - DNA, 25 bp, Homo sapien
tagccttccacatgatctttgcagt

SEQ ID NO: 1533287 - DNA, 25 bp, Homo sapien
tataaactgtcggaaaaattccaca

SEQ ID NO: 1533288 - DNA, 25 bp, Homo sapien
ataaactgtcggaaaaattccacat

SEQ ID NO: 1533289 - DNA, 25 bp, Homo sapien
ttcaataagaggaacatcagctgcc

SEQ ID NO: 1533290 - DNA, 25 bp, Homo sapien
cagctgccaggcacattctattaac

SEQ ID NO: 1533291 - DNA, 25 bp, Homo sapien
attctattaacatggtttcgggcag

SEQ ID NO: 1533292 - DNA, 25 bp, Homo sapien
aagatacccagctgttccactttca

SEQ ID NO: 1533293 - DNA, 25 bp, Homo sapien
ctaagtgggtctggggaatacagcc

SEQ ID NO: 1533294 - DNA, 25 bp, Homo sapien
aactacaagattaatttcaagatat

SEQ ID NO: 1533295 - DNA, 25 bp, Homo sapien
agccatatccttataatctcctgaa

SEQ ID NO: 1533296 - DNA, 25 bp, Homo sapien
gtgttactaaaccaaatactcttca

SEQ ID NO: 1533297 - DNA, 25 bp, Homo sapien
ctgggtcggcttaggatgacactca

SEQ ID NO: 1533298 - DNA, 25 bp, Homo sapien
tgacactcataacactcggtcacac

SEQ ID NO: 1533299 - DNA, 25 bp, Homo sapien
gtgttacgaattgtacagccaggaa

SEQ ID NO: 1533300 - DNA, 25 bp, Homo sapien
ttaggatgacactcataacactcgg

SEQ ID NO: 1533301 - DNA, 25 bp, Homo sapien
taaacatcctgagttcaatctcttc

SEQ ID NO: 1533302 - DNA, 25 bp, Homo sapien
agcatcccttcaccatatttaaaca

SEQ ID NO: 1533303 - DNA, 25 bp, Homo sapien
caatctcttcaaggtaattaaataa

SEQ ID NO: 1533304 - DNA, 25 bp, Homo sapien
cacccggccagctacatttaaccta

SEQ ID NO: 1533305 - DNA, 25 bp, Homo sapien
ttttgccaaccaccacattcaatac

SEQ ID NO: 1533306 - DNA, 25 bp, Homo sapien
ttcaatacattctggtatagcattt

SEQ ID NO: 1533307 - DNA, 25 bp, Homo sapien
ttttcatcattatcagtacagagta

SEQ ID NO: 1533308 - DNA, 25 bp, Homo sapien
tctaacttaaattggattcttagta

SEQ ID NO: 1533309 - DNA, 25 bp, Homo sapien
ctagtttaaaccatgcttgtattcc

SEQ ID NO: 1533310 - DNA, 25 bp, Homo sapien
tgtattcctgaatagacacgtggtc

SEQ ID NO: 1533311 - DNA, 25 bp, Homo sapien
tgaaaggccatttgctaaattttac

SEQ ID NO: 1533312 - DNA, 25 bp, Homo sapien
cctttatcgggttgagaacattctc

SEQ ID NO: 1533313 - DNA, 25 bp, Homo sapien
agtagcatgatctccattcacttca

SEQ ID NO: 1533314 - DNA, 25 bp, Homo sapien
caggttcaagcggctctcatggctc

SEQ ID NO: 1533315 - DNA, 25 bp, Homo sapien
cccaggttcaagcggctctcatggc

SEQ ID NO: 1533316 - DNA, 25 bp, Homo sapien
tgtttgccaaataaataaagcttcc

SEQ ID NO: 1533317 - DNA, 25 bp, Homo sapien
gtcttactgtccccaaggctagtgt

SEQ ID NO: 1533318 - DNA, 25 bp, Homo sapien
tcttactgtccccaaggctagtgtg

SEQ ID NO: 1533319 - DNA, 25 bp, Homo sapien
ttactgtccccaaggctagtgtgca

SEQ ID NO: 1533320 - DNA, 25 bp, Homo sapien
cttactgtccccaaggctagtgtgc

SEQ ID NO: 1533321 - DNA, 25 bp, Homo sapien
ttgtgtttacacctgcagctacctg

SEQ ID NO: 1533322 - DNA, 25 bp, Homo sapien
ccattcctatcagcgaggctctgca

SEQ ID NO: 1533323 - DNA, 25 bp, Homo sapien
tgagtgcaaaatagtagacagccgc

SEQ ID NO: 1533324 - DNA, 25 bp, Homo sapien
gatagtcactcccaacaatggcatg

SEQ ID NO: 1533325 - DNA, 25 bp, Homo sapien
cagggtcagctctgtcaggagatac

SEQ ID NO: 1533326 - DNA, 25 bp, Homo sapien
gggtcagctctgtcaggagatactt

SEQ ID NO: 1533327 - DNA, 25 bp, Homo sapien
tgtcaggagatacttcttgatcagc

SEQ ID NO: 1533328 - DNA, 25 bp, Homo sapien
tcaggagatacttcttgatcagcat

SEQ ID NO: 1533329 - DNA, 25 bp, Homo sapien
tcttcattagatgctctagctctgg

SEQ ID NO: 1533330 - DNA, 25 bp, Homo sapien
tgtcaccatcttcattagatgctct

SEQ ID NO: 1533331 - DNA, 25 bp, Homo sapien
tgctctagctctggcttcggcttcc

SEQ ID NO: 1533332 - DNA, 25 bp, Homo sapien
tagatgctctagctctggcttcggc

SEQ ID NO: 1533333 - DNA, 25 bp, Homo sapien
tctgaaatgggtatgcaggccagga

SEQ ID NO: 1533334 - DNA, 25 bp, Homo sapien
gatcctagggtagtatgtgcatccc

SEQ ID NO: 1533335 - DNA, 25 bp, Homo sapien
tgttgaccatatcgaagtttacggc

SEQ ID NO: 1533336 - DNA, 25 bp, Homo sapien
cttaagaaggcctagaaagtctgcc

SEQ ID NO: 1533337 - DNA, 25 bp, Homo sapien
gactttgtacttcagcccagtccaa

SEQ ID NO: 1533338 - DNA, 25 bp, Homo sapien
tgactttgtacttcagcccagtcca

SEQ ID NO: 1533339 - DNA, 25 bp, Homo sapien
gctctttgaaaaaagacgtgcatag

SEQ ID NO: 1533340 - DNA, 25 bp, Homo sapien
aaatgaactctcaaagtctcgatgc

SEQ ID NO: 1533341 - DNA, 25 bp, Homo sapien
gaactctcaaagtctcgatgctctt

SEQ ID NO: 1533342 - DNA, 25 bp, Homo sapien
tgcatagctctttacatctagaacc

SEQ ID NO: 1533343 - DNA, 25 bp, Homo sapien
catactgaaaatatgcatcctgagg

SEQ ID NO: 1533344 - DNA, 25 bp, Homo sapien
tgatatcaaatctactcttcatatt

SEQ ID NO: 1533345 - DNA, 25 bp, Homo sapien
cagcagaggtgacaaaatccattgc

SEQ ID NO: 1533346 - DNA, 25 bp, Homo sapien
caaaatccattgcagatgggtcatc

SEQ ID NO: 1533347 - DNA, 25 bp, Homo sapien
cattagtagtagcaatagcaggaat

SEQ ID NO: 1533348 - DNA, 25 bp, Homo sapien
actgcattagtagtagcaatagcag

SEQ ID NO: 1533349 - DNA, 25 bp, Homo sapien
gcattagtagtagcaatagcaggaa

SEQ ID NO: 1533350 - DNA, 25 bp, Homo sapien
tgcattagtagtagcaatagcagga

SEQ ID NO: 1533351 - DNA, 25 bp, Homo sapien
gctggtaagaaagcgaagtgtctgc

SEQ ID NO: 1533352 - DNA, 25 bp, Homo sapien
gttagccttaagagatacacctacc

SEQ ID NO: 1533353 - DNA, 25 bp, Homo sapien
tgtctgcagacacaacatcgaagga

SEQ ID NO: 1533354 - DNA, 25 bp, Homo sapien
caggagacccttacacaaagcaagg

SEQ ID NO: 1533355 - DNA, 25 bp, Homo sapien
tgagaacagtcactttatggacatt

SEQ ID NO: 1533356 - DNA, 25 bp, Homo sapien
gaacagtcactttatggacattcag

SEQ ID NO: 1533357 - DNA, 25 bp, Homo sapien
agaacagtcactttatggacattca

SEQ ID NO: 1533358 - DNA, 25 bp, Homo sapien
gagaacagtcactttatggacattc

SEQ ID NO: 1533359 - DNA, 25 bp, Homo sapien
agaatcagcagctagtgtttgtttg

SEQ ID NO: 1533360 - DNA, 25 bp, Homo sapien
cagaatcagcagctagtgtttgttt

SEQ ID NO: 1533361 - DNA, 25 bp, Homo sapien
ttcagaatcagcagctagtgtttgt

SEQ ID NO: 1533362 - DNA, 25 bp, Homo sapien
tcagaatcagcagctagtgtttgtt

SEQ ID NO: 1533363 - DNA, 25 bp, Homo sapien
tcagctccagaggtgaatccaggtg

SEQ ID NO: 1533364 - DNA, 25 bp, Homo sapien
taagctcaaatcaatccgtcctgcc

SEQ ID NO: 1533365 - DNA, 25 bp, Homo sapien
aagtctccccgttccatgcatttag

SEQ ID NO: 1533366 - DNA, 25 bp, Homo sapien
caggcagcactgctatttgagaagg

SEQ ID NO: 1533367 - DNA, 25 bp, Homo sapien
cgtctctccctcttcggaagatatt

SEQ ID NO: 1533368 - DNA, 25 bp, Homo sapien
aaagagctggctacaactaagggac

SEQ ID NO: 1533369 - DNA, 25 bp, Homo sapien
cactggcaaaaactgggacatggaa

SEQ ID NO: 1533370 - DNA, 25 bp, Homo sapien
tattccgtacagaagggtcacgctg

SEQ ID NO: 1533371 - DNA, 25 bp, Homo sapien
tcaatatacagggaaacacagggcc

SEQ ID NO: 1533372 - DNA, 25 bp, Homo sapien
agtcatctgcttgaagccggctgcc

SEQ ID NO: 1533373 - DNA, 25 bp, Homo sapien
agccggctgccatttctaattccaa

SEQ ID NO: 1533374 - DNA, 25 bp, Homo sapien
aagccggctgccatttctaattcca

SEQ ID NO: 1533375 - DNA, 25 bp, Homo sapien
gaagccggctgccatttctaattcc

SEQ ID NO: 1533376 - DNA, 25 bp, Homo sapien
ccacaaaatcacaaacgaaatgatt

SEQ ID NO: 1533377 - DNA, 25 bp, Homo sapien
cacaaaatcacaaacgaaatgattt

SEQ ID NO: 1533378 - DNA, 25 bp, Homo sapien
aatcacaaacgaaatgatttgtttt

SEQ ID NO: 1533379 - DNA, 25 bp, Homo sapien
caaaatcacaaacgaaatgatttgt

SEQ ID NO: 1533380 - DNA, 25 bp, Homo sapien
cctggcctacaatgtgatcttaact

SEQ ID NO: 1533381 - DNA, 25 bp, Homo sapien
taatgtggtgtcttatgggcagaac

SEQ ID NO: 1533382 - DNA, 25 bp, Homo sapien
gctacaccatgcttctgtacatgaa

SEQ ID NO: 1533383 - DNA, 25 bp, Homo sapien
gcctcctcttttagataccttgtgg

SEQ ID NO: 1533384 - DNA, 25 bp, Homo sapien
ctgtaggagaatcacacaggtcact

SEQ ID NO: 1533385 - DNA, 25 bp, Homo sapien
tcactgctatgactatttagaaagc

SEQ ID NO: 1533386 - DNA, 25 bp, Homo sapien
tcacacaggtcactgctatgactat

SEQ ID NO: 1533387 - DNA, 25 bp, Homo sapien
gagaatcacacaggtcactgctatg

SEQ ID NO: 1533388 - DNA, 25 bp, Homo sapien
tggagggctgagctccatcatcact

SEQ ID NO: 1533389 - DNA, 25 bp, Homo sapien
ggtggagggctgagctccatcatca

SEQ ID NO: 1533390 - DNA, 25 bp, Homo sapien
aggtggagggctgagctccatcatc

SEQ ID NO: 1533391 - DNA, 25 bp, Homo sapien
gtggagggctgagctccatcatcac

SEQ ID NO: 1533392 - DNA, 25 bp, Homo sapien
caggtacacgctaccatgcgtggtt

SEQ ID NO: 1533393 - DNA, 25 bp, Homo sapien
ggtatttaacaacctgctggctggg

SEQ ID NO: 1533394 - DNA, 25 bp, Homo sapien
tatggtcaatgttcctaataatcag

SEQ ID NO: 1533395 - DNA, 25 bp, Homo sapien
aattcaaagctccattacaacaatc

SEQ ID NO: 1533396 - DNA, 25 bp, Homo sapien
tctccaatagaaaagcagagggtac

SEQ ID NO: 1533397 - DNA, 25 bp, Homo sapien
ggaaccatccccaatgcagaactga

SEQ ID NO: 1533398 - DNA, 25 bp, Homo sapien
gaaactcagtgaatgacttcccaag

SEQ ID NO: 1533399 - DNA, 25 bp, Homo sapien
tcccaagcttacatagtagcagagg

SEQ ID NO: 1533400 - DNA, 25 bp, Homo sapien
gtaaaagcgtgggagttacctgtgc

SEQ ID NO: 1533401 - DNA, 25 bp, Homo sapien
ttctataattgaaagctgactcttc

SEQ ID NO: 1533402 - DNA, 25 bp, Homo sapien
gtgggagttacctgtgctcacctgt

SEQ ID NO: 1533403 - DNA, 25 bp, Homo sapien
tcttctaatacacaccagacttaag

SEQ ID NO: 1533404 - DNA, 25 bp, Homo sapien
tctgttctatacgtgacctctttgc

SEQ ID NO: 1533405 - DNA, 25 bp, Homo sapien
gttctatacgtgacctctttgcact

SEQ ID NO: 1533406 - DNA, 25 bp, Homo sapien
tcttccttctgttctatacgtgacc

SEQ ID NO: 1533407 - DNA, 25 bp, Homo sapien
ccttctgttctatacgtgacctctt

SEQ ID NO: 1533408 - DNA, 25 bp, Homo sapien
tggttatgcacacactttgttcaaa

SEQ ID NO: 1533409 - DNA, 25 bp, Homo sapien
ctatattcctactttcaatacagca

SEQ ID NO: 1533410 - DNA, 25 bp, Homo sapien
tccctttggaacaaaggacataaca

SEQ ID NO: 1533411 - DNA, 25 bp, Homo sapien
ttttatctcatgactggttatgcac

SEQ ID NO: 1533412 - DNA, 25 bp, Homo sapien
atttggtccataagtatagtcgtta

SEQ ID NO: 1533413 - DNA, 25 bp, Homo sapien
ccataagtatagtcgttatttgagt

SEQ ID NO: 1533414 - DNA, 25 bp, Homo sapien
ggtccataagtatagtcgttatttg

SEQ ID NO: 1533415 - DNA, 25 bp, Homo sapien
gcagatgccatttatttggtccata

SEQ ID NO: 1533416 - DNA, 25 bp, Homo sapien
tgacattcctgcagtagatataagg

SEQ ID NO: 1533417 - DNA, 25 bp, Homo sapien
gacattcctgcagtagatataaggc

SEQ ID NO: 1533418 - DNA, 25 bp, Homo sapien
ttgacattcctgcagtagatataag

SEQ ID NO: 1533419 - DNA, 25 bp, Homo sapien
cctactggcggtctggcactatctg

SEQ ID NO: 1533420 - DNA, 25 bp, Homo sapien
tgttctctgaaaactcaaggcccat

SEQ ID NO: 1533421 - DNA, 25 bp, Homo sapien
attcaaggctccaagttactgggct

SEQ ID NO: 1533422 - DNA, 25 bp, Homo sapien
taagagtaccctaacaggcaaagcc

SEQ ID NO: 1533423 - DNA, 25 bp, Homo sapien
gacctaactggcacttatcatcatg

SEQ ID NO: 1533424 - DNA, 25 bp, Homo sapien
aattagaaacaactccgcagaccta

SEQ ID NO: 1533425 - DNA, 25 bp, Homo sapien
tagtagtcagacctgccttcctaac

SEQ ID NO: 1533426 - DNA, 25 bp, Homo sapien
acaggatccctgcaactagtagtca

SEQ ID NO: 1533427 - DNA, 25 bp, Homo sapien
taggaagcacagaaacatcaggccg

SEQ ID NO: 1533428 - DNA, 25 bp, Homo sapien
gagccctggcagttacggaatatca

SEQ ID NO: 1533429 - DNA, 25 bp, Homo sapien
ggccgtcccataagtgacactaggt

SEQ ID NO: 1533430 - DNA, 25 bp, Homo sapien
tcacttgattatggtggcggcagtc

SEQ ID NO: 1533431 - DNA, 25 bp, Homo sapien
ccaggtattttgggaatctaaggcg

SEQ ID NO: 1533432 - DNA, 25 bp, Homo sapien
tagtcccaggtattttgggaatcta

SEQ ID NO: 1533433 - DNA, 25 bp, Homo sapien
caggtattttgggaatctaaggcgg

SEQ ID NO: 1533434 - DNA, 25 bp, Homo sapien
acacagcctaggtccttcgcatgcg

SEQ ID NO: 1533435 - DNA, 25 bp, Homo sapien
agcacacagcctaggtccttcgcat

SEQ ID NO: 1533436 - DNA, 25 bp, Homo sapien
gaaaagatgctcaaagggagctctc

SEQ ID NO: 1533437 - DNA, 25 bp, Homo sapien
taacaggcggtggtatactggtctg

SEQ ID NO: 1533438 - DNA, 25 bp, Homo sapien
tccccgtgaaatatggggactcctc

SEQ ID NO: 1533439 - DNA, 25 bp, Homo sapien
ctcagagccggtgggcggcgagcct

SEQ ID NO: 1533440 - DNA, 25 bp, Homo sapien
gactagggcttcgtgcccaaggaca

SEQ ID NO: 1533441 - DNA, 25 bp, Homo sapien
tcccctgtggccatcacaggcagtc

SEQ ID NO: 1533442 - DNA, 25 bp, Homo sapien
catcgtccgcccgaagcccggagcc

SEQ ID NO: 1533443 - DNA, 25 bp, Homo sapien
gccggccctggcgcgtcacctccgc

SEQ ID NO: 1533444 - DNA, 25 bp, Homo sapien
gcccgccctggagcgctgcatggcc

SEQ ID NO: 1533445 - DNA, 25 bp, Homo sapien
cggccgggccgccgcatcgtccgcc

SEQ ID NO: 1533446 - DNA, 25 bp, Homo sapien
ctccaggcccaggccgcggcccccg

SEQ ID NO: 1533447 - DNA, 25 bp, Homo sapien
caggcccaggccgcggcccccgccg

SEQ ID NO: 1533448 - DNA, 25 bp, Homo sapien
tccaggcccaggccgcggcccccgc

SEQ ID NO: 1533449 - DNA, 25 bp, Homo sapien
tgcggcccagcgcgggcgccgcctc

SEQ ID NO: 1533450 - DNA, 25 bp, Homo sapien
cggcccagcgcgggcgccgcctcgt

SEQ ID NO: 1533451 - DNA, 25 bp, Homo sapien
ctgcggcccagcgcgggcgccgcct

SEQ ID NO: 1533452 - DNA, 25 bp, Homo sapien
gcggcccagcgcgggcgccgcctcg

SEQ ID NO: 1533453 - DNA, 25 bp, Homo sapien
ccgcggctcagtccgtccgccccgg

SEQ ID NO: 1533454 - DNA, 25 bp, Homo sapien
ctccccgcggctcagtccgtccgcc

SEQ ID NO: 1533455 - DNA, 25 bp, Homo sapien
ggctcagtccgtccgccccggcctc

SEQ ID NO: 1533456 - DNA, 25 bp, Homo sapien
gcggctcagtccgtccgccccggcc

SEQ ID NO: 1533457 - DNA, 25 bp, Homo sapien
ggacgcgggtccgagcgaccggagc

SEQ ID NO: 1533458 - DNA, 25 bp, Homo sapien
ctgatgccgctggatcgggcgctgc

SEQ ID NO: 1533459 - DNA, 25 bp, Homo sapien
tggagcgggcgctgcccaccgaagg

SEQ ID NO: 1533460 - DNA, 25 bp, Homo sapien
gcgcgggctgccgtggcgctggtcg

SEQ ID NO: 1533461 - DNA, 25 bp, Homo sapien
agcgggaagggagccggccccgcag

SEQ ID NO: 1533462 - DNA, 25 bp, Homo sapien
gaagtcagcgtaggcgccggccgag

SEQ ID NO: 1533463 - DNA, 25 bp, Homo sapien
cgggcgggaggaagtcagcgtaggc

SEQ ID NO: 1533464 - DNA, 25 bp, Homo sapien
gcgggaggaagtcagcgtaggcgcc

SEQ ID NO: 1533465 - DNA, 25 bp, Homo sapien
gccgctcggccgcgcttgggccgcc

SEQ ID NO: 1533466 - DNA, 25 bp, Homo sapien
gccgtgcgcgcctcgagcgcccgct

SEQ ID NO: 1533467 - DNA, 25 bp, Homo sapien
tccagctcccgggtgagcgcctcca

SEQ ID NO: 1533468 - DNA, 25 bp, Homo sapien
gctcccgggtgagcgcctccagccg

SEQ ID NO: 1533469 - DNA, 25 bp, Homo sapien
gcctgctgggctccgtagatgccaa

SEQ ID NO: 1533470 - DNA, 25 bp, Homo sapien
gtgataaagactccccattgcctgg

SEQ ID NO: 1533471 - DNA, 25 bp, Homo sapien
cgtagatgccaagcccacacttgat

SEQ ID NO: 1533472 - DNA, 25 bp, Homo sapien
gcagtcagtgtgataaagactcccc

SEQ ID NO: 1533473 - DNA, 25 bp, Homo sapien
agaacgccttcccacggagtcgtct

SEQ ID NO: 1533474 - DNA, 25 bp, Homo sapien
actttctcacccacgttgtagaacg

SEQ ID NO: 1533475 - DNA, 25 bp, Homo sapien
ggaagtcctcctggcagtacacttt

SEQ ID NO: 1533476 - DNA, 25 bp, Homo sapien
cacgttgtagaacgccttcccacgg

SEQ ID NO: 1533477 - DNA, 25 bp, Homo sapien
tttgtcggccgtctgctggaacccg

SEQ ID NO: 1533478 - DNA, 25 bp, Homo sapien
tgcatttgtcggccgtctgctggaa

SEQ ID NO: 1533479 - DNA, 25 bp, Homo sapien
tgtcggccgtctgctggaacccgga

SEQ ID NO: 1533480 - DNA, 25 bp, Homo sapien
cggccgtctgctggaacccggagta

SEQ ID NO: 1533481 - DNA, 25 bp, Homo sapien
catttccatgatgagatgtccacac

SEQ ID NO: 1533482 - DNA, 25 bp, Homo sapien
gggaaccccgtccaggcactcattg

SEQ ID NO: 1533483 - DNA, 25 bp, Homo sapien
actcattgcacacggagcaccggaa

SEQ ID NO: 1533484 - DNA, 25 bp, Homo sapien
tagtctcgcacgcagtagatgttgt

SEQ ID NO: 1533485 - DNA, 25 bp, Homo sapien
tagatgttgttctccacgtccacgg

SEQ ID NO: 1533486 - DNA, 25 bp, Homo sapien
ctgtgcagggaggataggacgggca

SEQ ID NO: 1533487 - DNA, 25 bp, Homo sapien
cacaggaggcgcattttggtgcaaa

SEQ ID NO: 1533488 - DNA, 25 bp, Homo sapien
aggacgggcacaggaggcgcatttt

SEQ ID NO: 1533489 - DNA, 25 bp, Homo sapien
ggaggataggacgggcacaggaggc

SEQ ID NO: 1533490 - DNA, 25 bp, Homo sapien
gcaaactgcgtgagtgtacactccc

SEQ ID NO: 1533491 - DNA, 25 bp, Homo sapien
gagttcacacacgatgagcatgtgg

SEQ ID NO: 1533492 - DNA, 25 bp, Homo sapien
aggcaaactgcgtgagtgtacactc

SEQ ID NO: 1533493 - DNA, 25 bp, Homo sapien
aagagaaggagttcacacacgatga

SEQ ID NO: 1533494 - DNA, 25 bp, Homo sapien
cacagtggtaacatgccacgtggta

SEQ ID NO: 1533495 - DNA, 25 bp, Homo sapien
accacacggatggttgtctcgcagc

SEQ ID NO: 1533496 - DNA, 25 bp, Homo sapien
tccatggacaccacacggatggttg

SEQ ID NO: 1533497 - DNA, 25 bp, Homo sapien
ctcacagtggtaacatgccacgtgg

SEQ ID NO: 1533498 - DNA, 25 bp, Homo sapien
ccttttgctgccctcggtactggac

SEQ ID NO: 1533499 - DNA, 25 bp, Homo sapien
cctcggtactggacaatctgcaggg

SEQ ID NO: 1533500 - DNA, 25 bp, Homo sapien
gggaccgcacagtccacaggacggc

SEQ ID NO: 1533501 - DNA, 25 bp, Homo sapien
tcactctcagcgtcaaccttttgct

SEQ ID NO: 1533502 - DNA, 25 bp, Homo sapien
tcgcagtttttaccgttgcgggctc

SEQ ID NO: 1533503 - DNA, 25 bp, Homo sapien
cctatctcgcagtttttaccgttgc

SEQ ID NO: 1533504 - DNA, 25 bp, Homo sapien
tggcggctttgacccgttacccaga

SEQ ID NO: 1533505 - DNA, 25 bp, Homo sapien
gctggaatgctggcggctttgaccc

SEQ ID NO: 1533506 - DNA, 25 bp, Homo sapien
aaacaggagaccacctcttccaggg

SEQ ID NO: 1533507 - DNA, 25 bp, Homo sapien
gacaaaacaggagaccacctcttcc

SEQ ID NO: 1533508 - DNA, 25 bp, Homo sapien
ccacctcttccagggggtgcagatc

SEQ ID NO: 1533509 - DNA, 25 bp, Homo sapien
taaagacaaaacaggagaccacctc

SEQ ID NO: 1533510 - DNA, 25 bp, Homo sapien
gctggatcatcgcttcggtcaggag

SEQ ID NO: 1533511 - DNA, 25 bp, Homo sapien
aacatgaagactcttccgccgggcg

SEQ ID NO: 1533512 - DNA, 25 bp, Homo sapien
gacaagcgcacatcagaggtcacgg

SEQ ID NO: 1533513 - DNA, 25 bp, Homo sapien
agatctgcagggtgccgcaaaacaa

SEQ ID NO: 1533514 - DNA, 25 bp, Homo sapien
acgacacagtaggtggcccgccagg

SEQ ID NO: 1533515 - DNA, 25 bp, Homo sapien
gccaggggatagcaacggcgtccct

SEQ ID NO: 1533516 - DNA, 25 bp, Homo sapien
cgccgcaggtggcaacgacgacaca

SEQ ID NO: 1533517 - DNA, 25 bp, Homo sapien
agaggcccaggttggaggcgccgca

SEQ ID NO: 1533518 - DNA, 25 bp, Homo sapien
cagcagctcggtgggaaactgattg

SEQ ID NO: 1533519 - DNA, 25 bp, Homo sapien
gacggtgaataaatagaagcttcca

SEQ ID NO: 1533520 - DNA, 25 bp, Homo sapien
ggcagggcccgcagggaagtgactt

SEQ ID NO: 1533521 - DNA, 25 bp, Homo sapien
gaagtgacttgagcaggcacagacg

SEQ ID NO: 1533522 - DNA, 25 bp, Homo sapien
agaccacaccctgcccgggagtgcg

SEQ ID NO: 1533523 - DNA, 25 bp, Homo sapien
gaactgcgctaggagatgcaggaac

SEQ ID NO: 1533524 - DNA, 25 bp, Homo sapien
ccctgcccgggagtgcgctttgcga

SEQ ID NO: 1533525 - DNA, 25 bp, Homo sapien
taggagatgcaggaacacccatgtc

SEQ ID NO: 1533526 - DNA, 25 bp, Homo sapien
tccccaggaccaattcccacagaca

SEQ ID NO: 1533527 - DNA, 25 bp, Homo sapien
cacccatcaaagtccccaggaccaa

SEQ ID NO: 1533528 - DNA, 25 bp, Homo sapien
ctggggccgcaaacacccatcaaag

SEQ ID NO: 1533529 - DNA, 25 bp, Homo sapien
gcagggcggcaactggggccgcaaa

SEQ ID NO: 1533530 - DNA, 25 bp, Homo sapien
tcatcgctcctgagcgtgacccggg

SEQ ID NO: 1533531 - DNA, 25 bp, Homo sapien
gagccgcacggggattttcccgagc

SEQ ID NO: 1533532 - DNA, 25 bp, Homo sapien
gcgcccctctcatcgctcctgagcg

SEQ ID NO: 1533533 - DNA, 25 bp, Homo sapien
tttcccgagctgagcaggggggtcg

SEQ ID NO: 1533534 - DNA, 25 bp, Homo sapien
cgccctaatccaggcacggtggaga

SEQ ID NO: 1533535 - DNA, 25 bp, Homo sapien
tgcaggtggaactaagccaagaccc

SEQ ID NO: 1533536 - DNA, 25 bp, Homo sapien
cctttatgtacccactgtggatcct

SEQ ID NO: 1533537 - DNA, 25 bp, Homo sapien
ggatccttcactaggcaaccaggct

SEQ ID NO: 1533538 - DNA, 25 bp, Homo sapien
tcggcctctgctcacgagctagaga

SEQ ID NO: 1533539 - DNA, 25 bp, Homo sapien
agggctctgttggtctcgctccagt

SEQ ID NO: 1533540 - DNA, 25 bp, Homo sapien
gattgtcatggtacctgcagctcag

SEQ ID NO: 1533541 - DNA, 25 bp, Homo sapien
ccctcccgagtgtggcaccggaagt

SEQ ID NO: 1533542 - DNA, 25 bp, Homo sapien
ggtcccgctgaggatgcctggaaat

SEQ ID NO: 1533543 - DNA, 25 bp, Homo sapien
catcaacccagctggctcaggtgga

SEQ ID NO: 1533544 - DNA, 25 bp, Homo sapien
tcagcagggctgatcactatcaggg

SEQ ID NO: 1533545 - DNA, 25 bp, Homo sapien
gtgagtaaatgccaggcccggtcca

SEQ ID NO: 1533546 - DNA, 25 bp, Homo sapien
aactaggctgggcaagctgatggca

SEQ ID NO: 1533547 - DNA, 25 bp, Homo sapien
gaaggacagccccatagtcacaagg

SEQ ID NO: 1533548 - DNA, 25 bp, Homo sapien
ccatgagcatctgaacacgcggagt

SEQ ID NO: 1533549 - DNA, 25 bp, Homo sapien
cgcagaagagaaagggaactaggct

SEQ ID NO: 1533550 - DNA, 25 bp, Homo sapien
tacgactatgggaacacacctcttg

SEQ ID NO: 1533551 - DNA, 25 bp, Homo sapien
caaccttggcagctaccatgtggtg

SEQ ID NO: 1533552 - DNA, 25 bp, Homo sapien
gacagcttgtacaaggtgcctggaa

SEQ ID NO: 1533553 - DNA, 25 bp, Homo sapien
caaagtccccatgttgtgtgcagcc

SEQ ID NO: 1533554 - DNA, 25 bp, Homo sapien
tatgaatactaaggtccaggctgat

SEQ ID NO: 1533555 - DNA, 25 bp, Homo sapien
tcatggttttatcgagggtttccgc

SEQ ID NO: 1533556 - DNA, 25 bp, Homo sapien
tggtaaataatgaaagccaggccca

SEQ ID NO: 1533557 - DNA, 25 bp, Homo sapien
catgtgcatccaaaggcaggaaccc

SEQ ID NO: 1533558 - DNA, 25 bp, Homo sapien
tctgaagaccctaatccataaagct

SEQ ID NO: 1533559 - DNA, 25 bp, Homo sapien
atggaggaaacgcaccagaccctca

SEQ ID NO: 1533560 - DNA, 25 bp, Homo sapien
actttatcaaagtacaatacgtggg

SEQ ID NO: 1533561 - DNA, 25 bp, Homo sapien
cccattagagccaggagaaaagcag

SEQ ID NO: 1533562 - DNA, 25 bp, Homo sapien
ttcatgagcgacacctgggcgtgca

SEQ ID NO: 1533563 - DNA, 25 bp, Homo sapien
gcatcaaattatgtgagtccatgga

SEQ ID NO: 1533564 - DNA, 25 bp, Homo sapien
agacatctgggttcgtgtgtgtgtt

SEQ ID NO: 1533565 - DNA, 25 bp, Homo sapien
caaagtgggcactcagttaatagta

SEQ ID NO: 1533566 - DNA, 25 bp, Homo sapien
gagcacaggcggtgggtgtcatcct

SEQ ID NO: 1533567 - DNA, 25 bp, Homo sapien
agagcacaggcggtgggtgtcatcc

SEQ ID NO: 1533568 - DNA, 25 bp, Homo sapien
ggttgtattgagcaagctcccgctt

SEQ ID NO: 1533569 - DNA, 25 bp, Homo sapien
gcaactctcccaaacaacttataga

SEQ ID NO: 1533570 - DNA, 25 bp, Homo sapien
gtattgagcaagctcccgcttcagg

SEQ ID NO: 1533571 - DNA, 25 bp, Homo sapien
ggtcctctgggtatgcaaaagcaac

SEQ ID NO: 1533572 - DNA, 25 bp, Homo sapien
ttcagggaagcagcgccctcatctg

SEQ ID NO: 1533573 - DNA, 25 bp, Homo sapien
cttggatgtgaacttcagggaagca

SEQ ID NO: 1533574 - DNA, 25 bp, Homo sapien
gaagcagcgccctcatctgccttgt

SEQ ID NO: 1533575 - DNA, 25 bp, Homo sapien
atgtgaacttcagggaagcagcgcc

SEQ ID NO: 1533576 - DNA, 25 bp, Homo sapien
tggatgaagcccaattccgcagtga

SEQ ID NO: 1533577 - DNA, 25 bp, Homo sapien
catactggtatgagtcaggctcagc

SEQ ID NO: 1533578 - DNA, 25 bp, Homo sapien
cacaccacaggtccacatactggta

SEQ ID NO: 1533579 - DNA, 25 bp, Homo sapien
ggctcggctggaagatccccaatct

SEQ ID NO: 1533580 - DNA, 25 bp, Homo sapien
cccacccaatacacacgtgggccct

SEQ ID NO: 1533581 - DNA, 25 bp, Homo sapien
agccccacccaatacacacgtgggc

SEQ ID NO: 1533582 - DNA, 25 bp, Homo sapien
acccaatacacacgtgggccctcaa

SEQ ID NO: 1533583 - DNA, 25 bp, Homo sapien
caatacacacgtgggccctcaactg

SEQ ID NO: 1533584 - DNA, 25 bp, Homo sapien
ccccttcctgtccggtggtgcagga

SEQ ID NO: 1533585 - DNA, 25 bp, Homo sapien
ccttcctgtccggtggtgcaggatc

SEQ ID NO: 1533586 - DNA, 25 bp, Homo sapien
ccggtggtgcaggatctaggtggct

SEQ ID NO: 1533587 - DNA, 25 bp, Homo sapien
tcctgtccggtggtgcaggatctag

SEQ ID NO: 1533588 - DNA, 25 bp, Homo sapien
tcagggccgactagggtgtgggtta

SEQ ID NO: 1533589 - DNA, 25 bp, Homo sapien
caggcccggtgggcgtggcttggct

SEQ ID NO: 1533590 - DNA, 25 bp, Homo sapien
cggggtcagggccgactagggtgtg

SEQ ID NO: 1533591 - DNA, 25 bp, Homo sapien
gcaggcccggtgggcgtggcttggc

SEQ ID NO: 1533592 - DNA, 25 bp, Homo sapien
cggtcacgagctgcgggcatagttt

SEQ ID NO: 1533593 - DNA, 25 bp, Homo sapien
tgtttctttccagctccgtgggatg

SEQ ID NO: 1533594 - DNA, 25 bp, Homo sapien
tgatatctgttgacagaatccatgt

SEQ ID NO: 1533595 - DNA, 25 bp, Homo sapien
gaaactggttcatgacggtcacgag

SEQ ID NO: 1533596 - DNA, 25 bp, Homo sapien
gggcctgctgcatgacggcctgtcc

SEQ ID NO: 1533597 - DNA, 25 bp, Homo sapien
ctgcatgacggcctgtccctcctcg

SEQ ID NO: 1533598 - DNA, 25 bp, Homo sapien
ggtggccgggcctgctgcatgacgg

SEQ ID NO: 1533599 - DNA, 25 bp, Homo sapien
tcctcgggggtcgtggtgttggtca

SEQ ID NO: 1533600 - DNA, 25 bp, Homo sapien
tgtaggcaccctggttgttgatttc

SEQ ID NO: 1533601 - DNA, 25 bp, Homo sapien
cgtgtaggcaccctggttgttgatt

SEQ ID NO: 1533602 - DNA, 25 bp, Homo sapien
gtaggcaccctggttgttgatttct

SEQ ID NO: 1533603 - DNA, 25 bp, Homo sapien
aggcaccctggttgttgatttcttc

SEQ ID NO: 1533604 - DNA, 25 bp, Homo sapien
gagagaatcataggcataagcaagt

SEQ ID NO: 1533605 - DNA, 25 bp, Homo sapien
atcgagaccccttttccagtgacac

SEQ ID NO: 1533606 - DNA, 25 bp, Homo sapien
aacagtgcagagtccagatgtccca

SEQ ID NO: 1533607 - DNA, 25 bp, Homo sapien
cattgttagcagaaaggttagaggc

SEQ ID NO: 1533608 - DNA, 25 bp, Homo sapien
aagctatcgcgggactgacccagtg

SEQ ID NO: 1533609 - DNA, 25 bp, Homo sapien
cggtacaaatgtcccggaagccgcg

SEQ ID NO: 1533610 - DNA, 25 bp, Homo sapien
gttccttagcttggaagccgccgcc

SEQ ID NO: 1533611 - DNA, 25 bp, Homo sapien
tgacgcgccgcgtagctggtgagcg

SEQ ID NO: 1533612 - DNA, 25 bp, Homo sapien
aggcgccccgagcccgcgcctccgc

SEQ ID NO: 1533613 - DNA, 25 bp, Homo sapien
cgccccgagcccgcgcctccgcgga

SEQ ID NO: 1533614 - DNA, 25 bp, Homo sapien
cgtcccgcaggcgccccgagcccgc

SEQ ID NO: 1533615 - DNA, 25 bp, Homo sapien
gccccgagcccgcgcctccgcggac

SEQ ID NO: 1533616 - DNA, 25 bp, Homo sapien
cagggccttagccccgccgtcgccg

SEQ ID NO: 1533617 - DNA, 25 bp, Homo sapien
gttgcacaactgaaagcgccggctt

SEQ ID NO: 1533618 - DNA, 25 bp, Homo sapien
ggcttcatgacgacataacccaaaa

SEQ ID NO: 1533619 - DNA, 25 bp, Homo sapien
tttacacggctcaacaggaaggcca

SEQ ID NO: 1533620 - DNA, 25 bp, Homo sapien
aggaaggccaggaaatgcccaaggc

SEQ ID NO: 1533621 - DNA, 25 bp, Homo sapien
ccatgttcgttaggctggtgcggtg

SEQ ID NO: 1533622 - DNA, 25 bp, Homo sapien
gaggtcgagttctaaaccagattta

SEQ ID NO: 1533623 - DNA, 25 bp, Homo sapien
gcttgaggtcgagttctaaaccaga

SEQ ID NO: 1533624 - DNA, 25 bp, Homo sapien
atcgcttgaggtcgagttctaaacc

SEQ ID NO: 1533625 - DNA, 25 bp, Homo sapien
aaagcacactggtaatcactcgccg

SEQ ID NO: 1533626 - DNA, 25 bp, Homo sapien
cactggtaatcactcgccggagcgt

SEQ ID NO: 1533627 - DNA, 25 bp, Homo sapien
atcactcgccggagcgtcaatctct

SEQ ID NO: 1533628 - DNA, 25 bp, Homo sapien
gagcgtcaatctctccctgggaagg

SEQ ID NO: 1533629 - DNA, 25 bp, Homo sapien
tttccaatggccaacagagtcccct

SEQ ID NO: 1533630 - DNA, 25 bp, Homo sapien
tccaatggccaacagagtccccttt

SEQ ID NO: 1533631 - DNA, 25 bp, Homo sapien
aatttccaatggccaacagagtccc

SEQ ID NO: 1533632 - DNA, 25 bp, Homo sapien
aatggccaacagagtcccctttcca

SEQ ID NO: 1533633 - DNA, 25 bp, Homo sapien
cttattcactccacaattacttact

SEQ ID NO: 1533634 - DNA, 25 bp, Homo sapien
ttacttactaagcatccatttggtg

SEQ ID NO: 1533635 - DNA, 25 bp, Homo sapien
ccaggtaacactctgggtactgacg

SEQ ID NO: 1533636 - DNA, 25 bp, Homo sapien
tccatttggtgccaggtaacactct

SEQ ID NO: 1533637 - DNA, 25 bp, Homo sapien
ccctcctgtgcaagcttcaccttcc

SEQ ID NO: 1533638 - DNA, 25 bp, Homo sapien
atgccatgattctgccccaccagtt

SEQ ID NO: 1533639 - DNA, 25 bp, Homo sapien
tgccatgattctgccccaccagttc

SEQ ID NO: 1533640 - DNA, 25 bp, Homo sapien
tcagaccttgatgcacttcacaagc

SEQ ID NO: 1533641 - DNA, 25 bp, Homo sapien
gagagttcattcagtattgtattac

SEQ ID NO: 1533642 - DNA, 25 bp, Homo sapien
taaaattcgaatcgccttccaatgg

SEQ ID NO: 1533643 - DNA, 25 bp, Homo sapien
tttgcatgcatgttcaccagtgaca

SEQ ID NO: 1533644 - DNA, 25 bp, Homo sapien
tagatctttaggagactattgggcc

SEQ ID NO: 1533645 - DNA, 25 bp, Homo sapien
tatgagactcctgggtgaaaagact

SEQ ID NO: 1533646 - DNA, 25 bp, Homo sapien
caggcaccaaaaccatgagaagtca

SEQ ID NO: 1533647 - DNA, 25 bp, Homo sapien
gattcttacaggagcgcaatcccta

SEQ ID NO: 1533648 - DNA, 25 bp, Homo sapien
agaatctaggcatgcccactcttca

SEQ ID NO: 1533649 - DNA, 25 bp, Homo sapien
agcagaatctaggcatgcccactct

SEQ ID NO: 1533650 - DNA, 25 bp, Homo sapien
gcagaatctaggcatgcccactctt

SEQ ID NO: 1533651 - DNA, 25 bp, Homo sapien
gaatctaggcatgcccactcttcat

SEQ ID NO: 1533652 - DNA, 25 bp, Homo sapien
gaatggatgaagggtgttcactgaa

SEQ ID NO: 1533653 - DNA, 25 bp, Homo sapien
aagaaaggtgtcccctattggagtg

SEQ ID NO: 1533654 - DNA, 25 bp, Homo sapien
aaatatagaattgtttaagctgtgg

SEQ ID NO: 1533655 - DNA, 25 bp, Homo sapien
gctgcacatttcctcgggagcatgg

SEQ ID NO: 1533656 - DNA, 25 bp, Homo sapien
ggctcttttccatcctccaataaca

SEQ ID NO: 1533657 - DNA, 25 bp, Homo sapien
tttccatcctccaataacatgatca

SEQ ID NO: 1533658 - DNA, 25 bp, Homo sapien
acatatggcttagttacggaaagac

SEQ ID NO: 1533659 - DNA, 25 bp, Homo sapien
gatcacatatggcttagttacggaa

SEQ ID NO: 1533660 - DNA, 25 bp, Homo sapien
ccttgattaggtgacatgagtgata

SEQ ID NO: 1533661 - DNA, 25 bp, Homo sapien
ttgaagacagtatccctaaaatgct

SEQ ID NO: 1533662 - DNA, 25 bp, Homo sapien
tgtctcgttcaccatgactcatgtg

SEQ ID NO: 1533663 - DNA, 25 bp, Homo sapien
tgattttccatctaactgacagctt

SEQ ID NO: 1533664 - DNA, 25 bp, Homo sapien
aaagcttctacagtggaattaggag

SEQ ID NO: 1533665 - DNA, 25 bp, Homo sapien
ataagaaatgaagcacccagaaaac

SEQ ID NO: 1533666 - DNA, 25 bp, Homo sapien
cagagaatccaaagttcacagaagc

SEQ ID NO: 1533667 - DNA, 25 bp, Homo sapien
tctgaacaatgctcaaatagagcag

SEQ ID NO: 1533668 - DNA, 25 bp, Homo sapien
tgaaatatatcaagaaagcaaagca

SEQ ID NO: 1533669 - DNA, 25 bp, Homo sapien
tcaagaaagcaaagcactgcctttt

SEQ ID NO: 1533670 - DNA, 25 bp, Homo sapien
agaaagcaaagcactgccttttttt

SEQ ID NO: 1533671 - DNA, 25 bp, Homo sapien
ctgaaatatatcaagaaagcaaagc

SEQ ID NO: 1533672 - DNA, 25 bp, Homo sapien
ggtgcttctaaatgtgtcgcattct

SEQ ID NO: 1533673 - DNA, 25 bp, Homo sapien
tttgaatgaaaggtgcttctaaatg

SEQ ID NO: 1533674 - DNA, 25 bp, Homo sapien
tccattgttactggttggggtgaat

SEQ ID NO: 1533675 - DNA, 25 bp, Homo sapien
aatgtgtcgcattctgtatattcca

SEQ ID NO: 1533676 - DNA, 25 bp, Homo sapien
ttgtgtgaattcccttcagcagaat

SEQ ID NO: 1533677 - DNA, 25 bp, Homo sapien
tgtgtgaattcccttcagcagaatt

SEQ ID NO: 1533678 - DNA, 25 bp, Homo sapien
tctggggaagggtaagagatttgct

SEQ ID NO: 1533679 - DNA, 25 bp, Homo sapien
gtaagagatttgctctggttgaagg

SEQ ID NO: 1533680 - DNA, 25 bp, Homo sapien
gggaagggtaagagatttgctctgg

SEQ ID NO: 1533681 - DNA, 25 bp, Homo sapien
aagggtaagagatttgctctggttg

SEQ ID NO: 1533682 - DNA, 25 bp, Homo sapien
gaggattgactgtttgccaaaggct

SEQ ID NO: 1533683 - DNA, 25 bp, Homo sapien
tgaggattgactgtttgccaaaggc

SEQ ID NO: 1533684 - DNA, 25 bp, Homo sapien
gctgaatgagaagggacacacgact

SEQ ID NO: 1533685 - DNA, 25 bp, Homo sapien
tgctgaatgagaagggacacacgac

SEQ ID NO: 1533686 - DNA, 25 bp, Homo sapien
ctgaatgagaagggacacacgacta

SEQ ID NO: 1533687 - DNA, 25 bp, Homo sapien
tgaatgagaagggacacacgactaa

SEQ ID NO: 1533688 - DNA, 25 bp, Homo sapien
ttctttgatgttgagtaaggtgtga

SEQ ID NO: 1533689 - DNA, 25 bp, Homo sapien
aattctttgatgttgagtaaggtgt

SEQ ID NO: 1533690 - DNA, 25 bp, Homo sapien
tctttgatgttgagtaaggtgtgag

SEQ ID NO: 1533691 - DNA, 25 bp, Homo sapien
gaattctttgatgttgagtaaggtg

SEQ ID NO: 1533692 - DNA, 25 bp, Homo sapien
gaagctactaaagaccttgagacat

SEQ ID NO: 1533693 - DNA, 25 bp, Homo sapien
aagctactaaagaccttgagacatt

SEQ ID NO: 1533694 - DNA, 25 bp, Homo sapien
atgagaagctactaaagaccttgag

SEQ ID NO: 1533695 - DNA, 25 bp, Homo sapien
gagaagctactaaagaccttgagac

SEQ ID NO: 1533696 - DNA, 25 bp, Homo sapien
agtgattcaagctggttgaaggatt

SEQ ID NO: 1533697 - DNA, 25 bp, Homo sapien
gtgattcaagctggttgaaggattt

SEQ ID NO: 1533698 - DNA, 25 bp, Homo sapien
tcagtgattcaagctggttgaagga

SEQ ID NO: 1533699 - DNA, 25 bp, Homo sapien
cagtgattcaagctggttgaaggat

SEQ ID NO: 1533700 - DNA, 25 bp, Homo sapien
tactgtgatgttgaagcagggacga

SEQ ID NO: 1533701 - DNA, 25 bp, Homo sapien
tgatgttgaagcagggacgacctat

SEQ ID NO: 1533702 - DNA, 25 bp, Homo sapien
tgtgatgttgaagcagggacgacct

SEQ ID NO: 1533703 - DNA, 25 bp, Homo sapien
gaatactgtgatgttgaagcaggga

SEQ ID NO: 1533704 - DNA, 25 bp, Homo sapien
ctctttgatgggcagtaagattcga

SEQ ID NO: 1533705 - DNA, 25 bp, Homo sapien
tgatgggcagtaagattcgagcctt

SEQ ID NO: 1533706 - DNA, 25 bp, Homo sapien
gattcgagcctttgctaaaagcttt

SEQ ID NO: 1533707 - DNA, 25 bp, Homo sapien
tacagtaaggtttgaactacagctg

SEQ ID NO: 1533708 - DNA, 25 bp, Homo sapien
catacaacttttccccagtatacat

SEQ ID NO: 1533709 - DNA, 25 bp, Homo sapien
agtttaccgtgataaacactgcttc

SEQ ID NO: 1533710 - DNA, 25 bp, Homo sapien
tgttcaccaccttcatacaactttt

SEQ ID NO: 1533711 - DNA, 25 bp, Homo sapien
gaggatctatgaatgaagtttaccg

SEQ ID NO: 1533712 - DNA, 25 bp, Homo sapien
taacattataacatttactggctcc

SEQ ID NO: 1533713 - DNA, 25 bp, Homo sapien
cactcttagtgaacactttgctgca

SEQ ID NO: 1533714 - DNA, 25 bp, Homo sapien
cacagatttttcctagtgtgagtat

SEQ ID NO: 1533715 - DNA, 25 bp, Homo sapien
taagggatgcacttggaactgaaaa

SEQ ID NO: 1533716 - DNA, 25 bp, Homo sapien
tatacaaaatgattttattagatgc

SEQ ID NO: 1533717 - DNA, 25 bp, Homo sapien
aaaatgattttattagatgccaaat

SEQ ID NO: 1533718 - DNA, 25 bp, Homo sapien
tacaaaatgattttattagatgcca

SEQ ID NO: 1533719 - DNA, 25 bp, Homo sapien
caaaatgattttattagatgccaaa

SEQ ID NO: 1533720 - DNA, 25 bp, Homo sapien
gagaggcatcgcctgcagaatccag

SEQ ID NO: 1533721 - DNA, 25 bp, Homo sapien
gaggcatcgcctgcagaatccagag

SEQ ID NO: 1533722 - DNA, 25 bp, Homo sapien
cagatcctcaggagaggcatcgcct

SEQ ID NO: 1533723 - DNA, 25 bp, Homo sapien
cctcaggagaggcatcgcctgcaga

SEQ ID NO: 1533724 - DNA, 25 bp, Homo sapien
gcccgaaagtaggagccagcttcat

SEQ ID NO: 1533725 - DNA, 25 bp, Homo sapien
cctggagatcaggagcacggcagtg

SEQ ID NO: 1533726 - DNA, 25 bp, Homo sapien
agcacggcagtgaagagcagcccga

SEQ ID NO: 1533727 - DNA, 25 bp, Homo sapien
aagagcagcccgaaagtaggagcca

SEQ ID NO: 1533728 - DNA, 25 bp, Homo sapien
tcagtattgtgccacatgatcaaca

SEQ ID NO: 1533729 - DNA, 25 bp, Homo sapien
aagagatcaacatcctttgtcacaa

SEQ ID NO: 1533730 - DNA, 25 bp, Homo sapien
caacatattcatcaggggttcccac

SEQ ID NO: 1533731 - DNA, 25 bp, Homo sapien
gtcacaactgggcagatgtcacaat

SEQ ID NO: 1533732 - DNA, 25 bp, Homo sapien
tggcttccggagtgtccaaaccctg

SEQ ID NO: 1533733 - DNA, 25 bp, Homo sapien
gcaaggtcaacgttccctgctccta

SEQ ID NO: 1533734 - DNA, 25 bp, Homo sapien
tagtccacagtttaggacaggaagc

SEQ ID NO: 1533735 - DNA, 25 bp, Homo sapien
caactagagttagggtgatttcgag

SEQ ID NO: 1533736 - DNA, 25 bp, Homo sapien
tcagccagcttccttgtgacagccc

SEQ ID NO: 1533737 - DNA, 25 bp, Homo sapien
tggccttcagccagcttccttgtga

SEQ ID NO: 1533738 - DNA, 25 bp, Homo sapien
gccagcttccttgtgacagccccat

SEQ ID NO: 1533739 - DNA, 25 bp, Homo sapien
ctggccttcagccagcttccttgtg

SEQ ID NO: 1533740 - DNA, 25 bp, Homo sapien
ggtcagggcatttgcaggatttctg

SEQ ID NO: 1533741 - DNA, 25 bp, Homo sapien
gcaggatttctggtttctgttggag

SEQ ID NO: 1533742 - DNA, 25 bp, Homo sapien
tgccctggggttggtgggtgggtca

SEQ ID NO: 1533743 - DNA, 25 bp, Homo sapien
ctggtttctgttggagttgtatgtc

SEQ ID NO: 1533744 - DNA, 25 bp, Homo sapien
ctgcatgacatgaccagatcgtgca

SEQ ID NO: 1533745 - DNA, 25 bp, Homo sapien
tgaccagatcgtgcactttctatgc

SEQ ID NO: 1533746 - DNA, 25 bp, Homo sapien
cagatcgtgcactttctatgccagg

SEQ ID NO: 1533747 - DNA, 25 bp, Homo sapien
gacatgaccagatcgtgcactttct

SEQ ID NO: 1533748 - DNA, 25 bp, Homo sapien
gtacacatgtgggtcgtcagctgcc

SEQ ID NO: 1533749 - DNA, 25 bp, Homo sapien
acacatgtgggtcgtcagctgccat

SEQ ID NO: 1533750 - DNA, 25 bp, Homo sapien
agtacacatgtgggtcgtcagctgc

SEQ ID NO: 1533751 - DNA, 25 bp, Homo sapien
tacacatgtgggtcgtcagctgcca

SEQ ID NO: 1533752 - DNA, 25 bp, Homo sapien
tagttcgcgaaccaaggacatttcc

SEQ ID NO: 1533753 - DNA, 25 bp, Homo sapien
gaaccaaggacatttcctggaaatg

SEQ ID NO: 1533754 - DNA, 25 bp, Homo sapien
tgtgccagctgtagttcgcgaacca

SEQ ID NO: 1533755 - DNA, 25 bp, Homo sapien
ccctgggctggattgtgccagctgt

SEQ ID NO: 1533756 - DNA, 25 bp, Homo sapien
tgaaagatacacctcggaaccaagg

SEQ ID NO: 1533757 - DNA, 25 bp, Homo sapien
cgagctctcgcctttgctagcaaaa

SEQ ID NO: 1533758 - DNA, 25 bp, Homo sapien
cagttaggaccatgcgggaagtgtc

SEQ ID NO: 1533759 - DNA, 25 bp, Homo sapien
acactaatgtttatctcccgggacg

SEQ ID NO: 1533760 - DNA, 25 bp, Homo sapien
gcgccgcgggcaaacagatctcggt

SEQ ID NO: 1533761 - DNA, 25 bp, Homo sapien
ccgcgggcaaacagatctcggtttc

SEQ ID NO: 1533762 - DNA, 25 bp, Homo sapien
gggcgccgcgggcaaacagatctcg

SEQ ID NO: 1533763 - DNA, 25 bp, Homo sapien
gccgcgggcaaacagatctcggttt

SEQ ID NO: 1533764 - DNA, 25 bp, Homo sapien
atttcccagaatcatccgcgcaggg

SEQ ID NO: 1533765 - DNA, 25 bp, Homo sapien
gggacaaaattccaggcgcaacgaa

SEQ ID NO: 1533766 - DNA, 25 bp, Homo sapien
gagtcgccgtcaggcctgaggctac

SEQ ID NO: 1533767 - DNA, 25 bp, Homo sapien
gcaacgaaccgcaggtaccggaaga

SEQ ID NO: 1533768 - DNA, 25 bp, Homo sapien
catcaccccgcgtttacataggagg

SEQ ID NO: 1533769 - DNA, 25 bp, Homo sapien
gttacacaactgtagagcgccggct

SEQ ID NO: 1533770 - DNA, 25 bp, Homo sapien
aaaatcaggcttatcttgcggcacc

SEQ ID NO: 1533771 - DNA, 25 bp, Homo sapien
cagggtgtttctccgcaagggctaa

SEQ ID NO: 1533772 - DNA, 25 bp, Homo sapien
tttccaacagccaacagagtcctct

SEQ ID NO: 1533773 - DNA, 25 bp, Homo sapien
atttccaacagccaacagagtcctc

SEQ ID NO: 1533774 - DNA, 25 bp, Homo sapien
aatttccaacagccaacagagtcct

SEQ ID NO: 1533775 - DNA, 25 bp, Homo sapien
tccctctgagcagaactgagccatc

SEQ ID NO: 1533776 - DNA, 25 bp, Homo sapien
cctctgagcagaactgagccatccc

SEQ ID NO: 1533777 - DNA, 25 bp, Homo sapien
tctgagcagaactgagccatcccca

SEQ ID NO: 1533778 - DNA, 25 bp, Homo sapien
ctgagcagaactgagccatccccac

SEQ ID NO: 1533779 - DNA, 25 bp, Homo sapien
ggccatcacaagagggaccacagga

SEQ ID NO: 1533780 - DNA, 25 bp, Homo sapien
tccagcaattcagggtggcaaaaga

SEQ ID NO: 1533781 - DNA, 25 bp, Homo sapien
acatatggcttagttacagaaagac

SEQ ID NO: 1533782 - DNA, 25 bp, Homo sapien
tcacatatggcttagttacagaaag

SEQ ID NO: 1533783 - DNA, 25 bp, Homo sapien
ggctcttttccatcctccaataacg

SEQ ID NO: 1533784 - DNA, 25 bp, Homo sapien
tcctccaataacgtgatcacatatg

SEQ ID NO: 1533785 - DNA, 25 bp, Homo sapien
tcatcataattatccttctttgttg

SEQ ID NO: 1533786 - DNA, 25 bp, Homo sapien
tcccttccaacttctctatatattc

SEQ ID NO: 1533787 - DNA, 25 bp, Homo sapien
tgacttccatgcttcccttccaact

SEQ ID NO: 1533788 - DNA, 25 bp, Homo sapien
ctattattactgtttggggtgaatc

SEQ ID NO: 1533789 - DNA, 25 bp, Homo sapien
catatttgtgtgaattcccttcagc

SEQ ID NO: 1533790 - DNA, 25 bp, Homo sapien
gaaggctgccccacttttattagaa

SEQ ID NO: 1533791 - DNA, 25 bp, Homo sapien
ctttgaatgaaaggtgcttctaaat

SEQ ID NO: 1533792 - DNA, 25 bp, Homo sapien
tttgtgtgaattcccttcagcagaa

SEQ ID NO: 1533793 - DNA, 25 bp, Homo sapien
atgaattctccagtggcgattgagg

SEQ ID NO: 1533794 - DNA, 25 bp, Homo sapien
tgaattctccagtggcgattgagga

SEQ ID NO: 1533795 - DNA, 25 bp, Homo sapien
gaattctccagtggcgattgaggat

SEQ ID NO: 1533796 - DNA, 25 bp, Homo sapien
ccacatatacgacactcatagagtt

SEQ ID NO: 1533797 - DNA, 25 bp, Homo sapien
tttccacatatacgacactcataga

SEQ ID NO: 1533798 - DNA, 25 bp, Homo sapien
aatgagaggctactaaagactttca

SEQ ID NO: 1533799 - DNA, 25 bp, Homo sapien
gagaggctactaaagactttcagac

SEQ ID NO: 1533800 - DNA, 25 bp, Homo sapien
tgctacatgtacagggttttatcct

SEQ ID NO: 1533801 - DNA, 25 bp, Homo sapien
tatttgctctcctgtagaatccagt

SEQ ID NO: 1533802 - DNA, 25 bp, Homo sapien
cttctgatgtgtaccaagataaaca

SEQ ID NO: 1533803 - DNA, 25 bp, Homo sapien
acaaactggcctgcatctttgctaa

SEQ ID NO: 1533804 - DNA, 25 bp, Homo sapien
tatacaaaatgattttattagatgc

SEQ ID NO: 1533805 - DNA, 25 bp, Homo sapien
aatgattttattagatgccaaaact

SEQ ID NO: 1533806 - DNA, 25 bp, Homo sapien
aaaatgattttattagatgccaaaa

SEQ ID NO: 1533807 - DNA, 25 bp, Homo sapien
acaaaatgattttattagatgccaa

SEQ ID NO: 1533808 - DNA, 25 bp, Homo sapien
cattccaaacctactgtctcttgca

SEQ ID NO: 1533809 - DNA, 25 bp, Homo sapien
tctggcccttccctaattataaatc

SEQ ID NO: 1533810 - DNA, 25 bp, Homo sapien
taaggtagcacatatatcagaggag

SEQ ID NO: 1533811 - DNA, 25 bp, Homo sapien
gcaaattgctattggaatatgcctc

SEQ ID NO: 1533812 - DNA, 25 bp, Homo sapien
cacacctcagggctcttaaagggta

SEQ ID NO: 1533813 - DNA, 25 bp, Homo sapien
gactccaaagtttaatgctgttcac

SEQ ID NO: 1533814 - DNA, 25 bp, Homo sapien
tcctagttctgtattgtgaaggcac

SEQ ID NO: 1533815 - DNA, 25 bp, Homo sapien
taaacccaggtaacatgactccaaa

SEQ ID NO: 1533816 - DNA, 25 bp, Homo sapien
tatctttgatgccagagtgcttaca

SEQ ID NO: 1533817 - DNA, 25 bp, Homo sapien
cacctaggaatttggatccagagca

SEQ ID NO: 1533818 - DNA, 25 bp, Homo sapien
ggcaacaaacttccatgcagaggca

SEQ ID NO: 1533819 - DNA, 25 bp, Homo sapien
tatagagtaagcaagcgacagtccc

SEQ ID NO: 1533820 - DNA, 25 bp, Homo sapien
tactttagaagcaaatcgaggtcct

SEQ ID NO: 1533821 - DNA, 25 bp, Homo sapien
tcgaggtcctgccaacattttaaca

SEQ ID NO: 1533822 - DNA, 25 bp, Homo sapien
gctgggtcctctcaggcgtgtcata

SEQ ID NO: 1533823 - DNA, 25 bp, Homo sapien
tgtgtgagactccagcaagacggat

SEQ ID NO: 1533824 - DNA, 25 bp, Homo sapien
gagagtgggtcattgcctcagataa

SEQ ID NO: 1533825 - DNA, 25 bp, Homo sapien
agaacagaaagtgcgctccaggtac

SEQ ID NO: 1533826 - DNA, 25 bp, Homo sapien
ttgggagccttgagaagccgcctca

SEQ ID NO: 1533827 - DNA, 25 bp, Homo sapien
taatttccacggaactctgtgtgcc

SEQ ID NO: 1533828 - DNA, 25 bp, Homo sapien
agctatttgagtggtttgtaggcca

SEQ ID NO: 1533829 - DNA, 25 bp, Homo sapien
ctggcttctcttacatgtggagcta

SEQ ID NO: 1533830 - DNA, 25 bp, Homo sapien
tcttcatgtgggctacaggtttggg

SEQ ID NO: 1533831 - DNA, 25 bp, Homo sapien
cagtgtccaggattattgccctctt

SEQ ID NO: 1533832 - DNA, 25 bp, Homo sapien
ccaaaaaccattggcagaggaggga

SEQ ID NO: 1533833 - DNA, 25 bp, Homo sapien
agaggagggagttgtagaccccact

SEQ ID NO: 1533834 - DNA, 25 bp, Homo sapien
tgtgtcatcagcaaatacaagtacc

SEQ ID NO: 1533835 - DNA, 25 bp, Homo sapien
aagtaccaaaaaccattggcagagg

SEQ ID NO: 1533836 - DNA, 25 bp, Homo sapien
tgcattatccaggtactattctcag

SEQ ID NO: 1533837 - DNA, 25 bp, Homo sapien
ttcctttagttcttgcattatccag

SEQ ID NO: 1533838 - DNA, 25 bp, Homo sapien
tagtctgttgctccaagtttccctg

SEQ ID NO: 1533839 - DNA, 25 bp, Homo sapien
ctgtagtctgttgctccaagtttcc

SEQ ID NO: 1533840 - DNA, 25 bp, Homo sapien
gagtaggcacaaatgacaccaaggt

SEQ ID NO: 1533841 - DNA, 25 bp, Homo sapien
ccaaggtctgatacatcctctgggt

SEQ ID NO: 1533842 - DNA, 25 bp, Homo sapien
taggagggagtaggcacaaatgaca

SEQ ID NO: 1533843 - DNA, 25 bp, Homo sapien
gagcacagacacagcgattaatggg

SEQ ID NO: 1533844 - DNA, 25 bp, Homo sapien
acaggcacagctgaagggagagaac

SEQ ID NO: 1533845 - DNA, 25 bp, Homo sapien
caggcacagctgaagggagagaact

SEQ ID NO: 1533846 - DNA, 25 bp, Homo sapien
ggaagatatgttgcccataggcagg

SEQ ID NO: 1533847 - DNA, 25 bp, Homo sapien
agggttttgtgcaataccgataaca

SEQ ID NO: 1533848 - DNA, 25 bp, Homo sapien
tgcttgagattttataggatagtgt

SEQ ID NO: 1533849 - DNA, 25 bp, Homo sapien
taccgataacactatggttgcagtg

SEQ ID NO: 1533850 - DNA, 25 bp, Homo sapien
ttcagaaactacagagggctgggtc

SEQ ID NO: 1533851 - DNA, 25 bp, Homo sapien
tcagaaactacagagggctgggtca

SEQ ID NO: 1533852 - DNA, 25 bp, Homo sapien
gttcagaaactacagagggctgggt

SEQ ID NO: 1533853 - DNA, 25 bp, Homo sapien
tggcggtcattttggctgccttgca

SEQ ID NO: 1533854 - DNA, 25 bp, Homo sapien
tttggctgccttgcagctgttttac

SEQ ID NO: 1533855 - DNA, 25 bp, Homo sapien
tttgtggcggtcattttggctgcct

SEQ ID NO: 1533856 - DNA, 25 bp, Homo sapien
ttttggctgccttgcagctgtttta

SEQ ID NO: 1533857 - DNA, 25 bp, Homo sapien
tgaaagcacagaaagatgggagatt

SEQ ID NO: 1533858 - DNA, 25 bp, Homo sapien
ccaggtttaggggtgaagatggtca

SEQ ID NO: 1533859 - DNA, 25 bp, Homo sapien
aagatggtcaggacttcctgtctca

SEQ ID NO: 1533860 - DNA, 25 bp, Homo sapien
ggcagcagtgcttatccaatgaaag

SEQ ID NO: 1533861 - DNA, 25 bp, Homo sapien
aaaactttggtgatcgttgctggac

SEQ ID NO: 1533862 - DNA, 25 bp, Homo sapien
catgctgagcttcaagagtctgaaa

SEQ ID NO: 1533863 - DNA, 25 bp, Homo sapien
gatgtagctacttccccatcccaga

SEQ ID NO: 1533864 - DNA, 25 bp, Homo sapien
ggaacatcagaaatatggcccatgg

SEQ ID NO: 1533865 - DNA, 25 bp, Homo sapien
ttagtttccagctatgcgtggccat

SEQ ID NO: 1533866 - DNA, 25 bp, Homo sapien
tctagatatctcagttatttattac

SEQ ID NO: 1533867 - DNA, 25 bp, Homo sapien
cttgggcactgttttgactgcattc

SEQ ID NO: 1533868 - DNA, 25 bp, Homo sapien
aatactttctaatgctccttgttat

SEQ ID NO: 1533869 - DNA, 25 bp, Homo sapien
tttttgacccagtatgtttgccctc

SEQ ID NO: 1533870 - DNA, 25 bp, Homo sapien
tcaagctgagtggtccaaaggcgtt

SEQ ID NO: 1533871 - DNA, 25 bp, Homo sapien
gacagaagtcatgaacagaagtatc

SEQ ID NO: 1533872 - DNA, 25 bp, Homo sapien
cagtaacaggtttgcccaggccata

SEQ ID NO: 1533873 - DNA, 25 bp, Homo sapien
ccagcagtaacaggtttgcccaggc

SEQ ID NO: 1533874 - DNA, 25 bp, Homo sapien
ttggctcatctgaacccaagtcctt

SEQ ID NO: 1533875 - DNA, 25 bp, Homo sapien
tggctcatctgaacccaagtccttg

SEQ ID NO: 1533876 - DNA, 25 bp, Homo sapien
ccagcaccagcagctccaggatctg

SEQ ID NO: 1533877 - DNA, 25 bp, Homo sapien
tgggaggatggccaggaactgctcc

SEQ ID NO: 1533878 - DNA, 25 bp, Homo sapien
gcaccagcagctccaggatctgcgc

SEQ ID NO: 1533879 - DNA, 25 bp, Homo sapien
ctgggaggatggccaggaactgctc

SEQ ID NO: 1533880 - DNA, 25 bp, Homo sapien
cgggcgtgcgctggctagttggcaa

SEQ ID NO: 1533881 - DNA, 25 bp, Homo sapien
tctctgcaaccgtgtccctccttcg

SEQ ID NO: 1533882 - DNA, 25 bp, Homo sapien
gcaaccgtgtccctccttcgtccaa

SEQ ID NO: 1533883 - DNA, 25 bp, Homo sapien
tcttcacgggcgtgcgctggctagt

SEQ ID NO: 1533884 - DNA, 25 bp, Homo sapien
tgttcgaaacatcgcaatgcagttc

SEQ ID NO: 1533885 - DNA, 25 bp, Homo sapien
tctgggaggcatttataccgaggat

SEQ ID NO: 1533886 - DNA, 25 bp, Homo sapien
ttgggactctgcaatcctatgttca

SEQ ID NO: 1533887 - DNA, 25 bp, Homo sapien
gggactctgcaatcctatgttcata

SEQ ID NO: 1533888 - DNA, 25 bp, Homo sapien
tgcttgcagaagctacggtccgggc

SEQ ID NO: 1533889 - DNA, 25 bp, Homo sapien
tctaaacagccgctaccgggtaggc

SEQ ID NO: 1533890 - DNA, 25 bp, Homo sapien
ggcggaatcccgaagctcgagagtc

SEQ ID NO: 1533891 - DNA, 25 bp, Homo sapien
caacggcggctcaattgcgtaacag

SEQ ID NO: 1533892 - DNA, 25 bp, Homo sapien
gtgcagcattcaggcaggtcaggcc

SEQ ID NO: 1533893 - DNA, 25 bp, Homo sapien
cacagagaaggctcctgacaccggg

SEQ ID NO: 1533894 - DNA, 25 bp, Homo sapien
acagaggagcatgaaggaggtggtg

SEQ ID NO: 1533895 - DNA, 25 bp, Homo sapien
ccagcacgtcacgtcccaggctcaa

SEQ ID NO: 1533896 - DNA, 25 bp, Homo sapien
caagctcaatgagaatagaaatgcc

SEQ ID NO: 1533897 - DNA, 25 bp, Homo sapien
taggccacagggaccttcatggttt

SEQ ID NO: 1533898 - DNA, 25 bp, Homo sapien
tggctttgggagaagataggccaca

SEQ ID NO: 1533899 - DNA, 25 bp, Homo sapien
gatttgcttgtgaacagcagtccca

SEQ ID NO: 1533900 - DNA, 25 bp, Homo sapien
cacagatagccgtgtggttggctgc

SEQ ID NO: 1533901 - DNA, 25 bp, Homo sapien
tgatccgcatctcatgtccttgagc

SEQ ID NO: 1533902 - DNA, 25 bp, Homo sapien
cttggggagagatcccgcacagata

SEQ ID NO: 1533903 - DNA, 25 bp, Homo sapien
tcccgcacagatagccgtgtggttg

SEQ ID NO: 1533904 - DNA, 25 bp, Homo sapien
tgcagtttgcaacccttctcaagaa

SEQ ID NO: 1533905 - DNA, 25 bp, Homo sapien
ctttccaagtttacgggtctcatat

SEQ ID NO: 1533906 - DNA, 25 bp, Homo sapien
ttggtgcttcacatggagaggatag

SEQ ID NO: 1533907 - DNA, 25 bp, Homo sapien
agttgacacccccaagttggtgctt

SEQ ID NO: 1533908 - DNA, 25 bp, Homo sapien
caagctctgggacactttccttcta

SEQ ID NO: 1533909 - DNA, 25 bp, Homo sapien
cccgctgcgggcaagctgttccttt

SEQ ID NO: 1533910 - DNA, 25 bp, Homo sapien
taagcctggaagactcaagctctgg

SEQ ID NO: 1533911 - DNA, 25 bp, Homo sapien
ccttctagtcttgggactggtagca

SEQ ID NO: 1533912 - DNA, 25 bp, Homo sapien
gatatgcctgctccaagacttgaga

SEQ ID NO: 1533913 - DNA, 25 bp, Homo sapien
gctagagcacatcagttggacgggt

SEQ ID NO: 1533914 - DNA, 25 bp, Homo sapien
ggaacatgcagctaggagacctctc

SEQ ID NO: 1533915 - DNA, 25 bp, Homo sapien
cacgggtttgcatggcggttcatca

SEQ ID NO: 1533916 - DNA, 25 bp, Homo sapien
caggctcattgcaagagatatggag

SEQ ID NO: 1533917 - DNA, 25 bp, Homo sapien
gctccatgtcaacactgagaaccag

SEQ ID NO: 1533918 - DNA, 25 bp, Homo sapien
caatgaatgtggtgtctttcggaaa

SEQ ID NO: 1533919 - DNA, 25 bp, Homo sapien
gacaagtgacagaggtacccatgtg

SEQ ID NO: 1533920 - DNA, 25 bp, Homo sapien
gatggaacccatagaagccaggatg

SEQ ID NO: 1533921 - DNA, 25 bp, Homo sapien
gaggctttcgtcatgccacagggcc

SEQ ID NO: 1533922 - DNA, 25 bp, Homo sapien
gaaaagttgctgatcacctccatgc

SEQ ID NO: 1533923 - DNA, 25 bp, Homo sapien
cattcataggcaaaggtgtcccgat

SEQ ID NO: 1533924 - DNA, 25 bp, Homo sapien
agtgcactgacctagtcggattaac

SEQ ID NO: 1533925 - DNA, 25 bp, Homo sapien
cttttcaaggaacgacatgtattaa

SEQ ID NO: 1533926 - DNA, 25 bp, Homo sapien
taattatttaagtgcactgacctag

SEQ ID NO: 1533927 - DNA, 25 bp, Homo sapien
taattcgtgttccagcaatggctgg

SEQ ID NO: 1533928 - DNA, 25 bp, Homo sapien
cactttcaggaggaaacataattag

SEQ ID NO: 1533929 - DNA, 25 bp, Homo sapien
gctgatctgataaagaagtctccac

SEQ ID NO: 1533930 - DNA, 25 bp, Homo sapien
caaatgaattctatctataatcact

SEQ ID NO: 1533931 - DNA, 25 bp, Homo sapien
tatgctgtgtattccctgagaaccc

SEQ ID NO: 1533932 - DNA, 25 bp, Homo sapien
ttccagtccactatcatggtatgca

SEQ ID NO: 1533933 - DNA, 25 bp, Homo sapien
tttttccagtccactatcatggtat

SEQ ID NO: 1533934 - DNA, 25 bp, Homo sapien
tttccagtccactatcatggtatgc

SEQ ID NO: 1533935 - DNA, 25 bp, Homo sapien
tccagtccactatcatggtatgcat

SEQ ID NO: 1533936 - DNA, 25 bp, Homo sapien
ctctcttctctatgcaggtagcatg

SEQ ID NO: 1533937 - DNA, 25 bp, Homo sapien
ggaagctctctagcgcttttccgag

SEQ ID NO: 1533938 - DNA, 25 bp, Homo sapien
aggaagctctctagcgcttttccga

SEQ ID NO: 1533939 - DNA, 25 bp, Homo sapien
tagcatgggaggatgccgcctcctc

SEQ ID NO: 1533940 - DNA, 25 bp, Homo sapien
aaccagtgcgcgtgggtgcgccggc

SEQ ID NO: 1533941 - DNA, 25 bp, Homo sapien
gactctggaggcagaccttgcccaa

SEQ ID NO: 1533942 - DNA, 25 bp, Homo sapien
gtgcgcgtgggtgcgccggcccttg

SEQ ID NO: 1533943 - DNA, 25 bp, Homo sapien
agatttggcaaccagtgcgcgtggg

SEQ ID NO: 1533944 - DNA, 25 bp, Homo sapien
tggcagagaaagcttgcgcgagccc

SEQ ID NO: 1533945 - DNA, 25 bp, Homo sapien
tcactcggttgcaggcgttaggctc

SEQ ID NO: 1533946 - DNA, 25 bp, Homo sapien
aatgttcaggactgtcgaggcgcgc

SEQ ID NO: 1533947 - DNA, 25 bp, Homo sapien
gcttgtgcgctgttggatccttgga

SEQ ID NO: 1533948 - DNA, 25 bp, Homo sapien
taaacgcgctggatcgtgagaagca

SEQ ID NO: 1533949 - DNA, 25 bp, Homo sapien
gagaagcacttgtctagctaggcca

SEQ ID NO: 1533950 - DNA, 25 bp, Homo sapien
tctaggcagtatggatgggaccgac

SEQ ID NO: 1533951 - DNA, 25 bp, Homo sapien
tcttcagagagaactggacctccag

SEQ ID NO: 1533952 - DNA, 25 bp, Homo sapien
tgatctgtatatggggtgaggactg

SEQ ID NO: 1533953 - DNA, 25 bp, Homo sapien
taatgatctgtatatggggtgagga

SEQ ID NO: 1533954 - DNA, 25 bp, Homo sapien
tctgtatatggggtgaggactggta

SEQ ID NO: 1533955 - DNA, 25 bp, Homo sapien
aatgatctgtatatggggtgaggac

SEQ ID NO: 1533956 - DNA, 25 bp, Homo sapien
aaaagggattggtatccatgcagtt

SEQ ID NO: 1533957 - DNA, 25 bp, Homo sapien
tactggctgtgatagtgaaaatgct

SEQ ID NO: 1533958 - DNA, 25 bp, Homo sapien
tataccaaagtacaaagtaggcttg

SEQ ID NO: 1533959 - DNA, 25 bp, Homo sapien
ggttgagtctgcagattactggctg

SEQ ID NO: 1533960 - DNA, 25 bp, Homo sapien
ggtcaaatgggaggatactcatcct

SEQ ID NO: 1533961 - DNA, 25 bp, Homo sapien
ggtagggctgttgaccataaaagca

SEQ ID NO: 1533962 - DNA, 25 bp, Homo sapien
tactgggatggaactggtcaaatgg

SEQ ID NO: 1533963 - DNA, 25 bp, Homo sapien
tgttctttacaagggatatctgctc

SEQ ID NO: 1533964 - DNA, 25 bp, Homo sapien
tgtctggaaccctagatttcaggtg

SEQ ID NO: 1533965 - DNA, 25 bp, Homo sapien
catagcagatgccaaaggtggacat

SEQ ID NO: 1533966 - DNA, 25 bp, Homo sapien
taggtgtttcttgggtcaaaaggca

SEQ ID NO: 1533967 - DNA, 25 bp, Homo sapien
acagctgttaacattgcagggagag

SEQ ID NO: 1533968 - DNA, 25 bp, Homo sapien
tttgctttagtcacagctttagcca

SEQ ID NO: 1533969 - DNA, 25 bp, Homo sapien
ttgctttagtcacagctttagccat

SEQ ID NO: 1533970 - DNA, 25 bp, Homo sapien
ctttgctttagtcacagctttagcc

SEQ ID NO: 1533971 - DNA, 25 bp, Homo sapien
caaagatacaaacttggagtcagcc

SEQ ID NO: 1533972 - DNA, 25 bp, Homo sapien
gatacaaacttggagtcagcctgtt

SEQ ID NO: 1533973 - DNA, 25 bp, Homo sapien
gcaaagatacaaacttggagtcagc

SEQ ID NO: 1533974 - DNA, 25 bp, Homo sapien
aagatacaaacttggagtcagcctg

SEQ ID NO: 1533975 - DNA, 25 bp, Homo sapien
tgggaacaaccaatggagctcacat

SEQ ID NO: 1533976 - DNA, 25 bp, Homo sapien
tctttgggaacaaccaatggagctc

SEQ ID NO: 1533977 - DNA, 25 bp, Homo sapien
gaacaaccaatggagctcacatagc

SEQ ID NO: 1533978 - DNA, 25 bp, Homo sapien
agtagtctttgggaacaaccaatgg

SEQ ID NO: 1533979 - DNA, 25 bp, Homo sapien
cattccttgtggtgagtcctgctaa

SEQ ID NO: 1533980 - DNA, 25 bp, Homo sapien
tgagtcctgctaaaatggcagggca

SEQ ID NO: 1533981 - DNA, 25 bp, Homo sapien
tccaaggacattccttgtggtgagt

SEQ ID NO: 1533982 - DNA, 25 bp, Homo sapien
gtcctgctaaaatggcagggcacat

SEQ ID NO: 1533983 - DNA, 25 bp, Homo sapien
gaggcccgaagtaggtggccagctt

SEQ ID NO: 1533984 - DNA, 25 bp, Homo sapien
ctgaggcccgaagtaggtggccagc

SEQ ID NO: 1533985 - DNA, 25 bp, Homo sapien
tgaggcccgaagtaggtggccagct

SEQ ID NO: 1533986 - DNA, 25 bp, Homo sapien
tcccgtccggctgagaatgcgcagg

SEQ ID NO: 1533987 - DNA, 25 bp, Homo sapien
agcatgcccggcgcagtccacaagg

SEQ ID NO: 1533988 - DNA, 25 bp, Homo sapien
tgggagccatagacctcgaagctgg

SEQ ID NO: 1533989 - DNA, 25 bp, Homo sapien
ggcgctcgagttgctgggagccata

SEQ ID NO: 1533990 - DNA, 25 bp, Homo sapien
ctacattggccggatagctgcagcc

SEQ ID NO: 1533991 - DNA, 25 bp, Homo sapien
gcagagattgaggtcgttccagtgg

SEQ ID NO: 1533992 - DNA, 25 bp, Homo sapien
aaatgtagtttcaggctacattggc

SEQ ID NO: 1533993 - DNA, 25 bp, Homo sapien
acattggccggatagctgcagcctc

SEQ ID NO: 1533994 - DNA, 25 bp, Homo sapien
gcatgtctcagtccgggttccgcgc

SEQ ID NO: 1533995 - DNA, 25 bp, Homo sapien
tgcagaaattcaagttgcccggcgg

SEQ ID NO: 1533996 - DNA, 25 bp, Homo sapien
cccggtgctgtgttcgtttgcagaa

SEQ ID NO: 1533997 - DNA, 25 bp, Homo sapien
gctgccgggtcaacgaccacaatga

SEQ ID NO: 1533998 - DNA, 25 bp, Homo sapien
ttcctctatctgagaagttcaaaag

SEQ ID NO: 1533999 - DNA, 25 bp, Homo sapien
gttcctctatctgagaagttcaaaa

SEQ ID NO: 1534000 - DNA, 25 bp, Homo sapien
taaggaggaaacgatactttgacat

SEQ ID NO: 1534001 - DNA, 25 bp, Homo sapien
gtaaggaggaaacgatactttgaca

SEQ ID NO: 1534002 - DNA, 25 bp, Homo sapien
atgaacaccgattagaaatgaggac

SEQ ID NO: 1534003 - DNA, 25 bp, Homo sapien
ttcatgaacaccgattagaaatgag

SEQ ID NO: 1534004 - DNA, 25 bp, Homo sapien
atgaattcatgaacaccgattagaa

SEQ ID NO: 1534005 - DNA, 25 bp, Homo sapien
gaattcatgaacaccgattagaaat

SEQ ID NO: 1534006 - DNA, 25 bp, Homo sapien
cattgacaccaagttcctgtagttc

SEQ ID NO: 1534007 - DNA, 25 bp, Homo sapien
cctcaaatgtcactgatccgtgata

SEQ ID NO: 1534008 - DNA, 25 bp, Homo sapien
tgtacaagcccctctgggaagagtc

SEQ ID NO: 1534009 - DNA, 25 bp, Homo sapien
ggagaaggctatggccacatcctca

SEQ ID NO: 1534010 - DNA, 25 bp, Homo sapien
caataaggcgatcacatgtggttta

SEQ ID NO: 1534011 - DNA, 25 bp, Homo sapien
ataaggcgatcacatgtggtttaga

SEQ ID NO: 1534012 - DNA, 25 bp, Homo sapien
ttccaataaggcgatcacatgtggt

SEQ ID NO: 1534013 - DNA, 25 bp, Homo sapien
ttgttccaataaggcgatcacatgt

SEQ ID NO: 1534014 - DNA, 25 bp, Homo sapien
ggtggcatcatcgcctaaaaatctt

SEQ ID NO: 1534015 - DNA, 25 bp, Homo sapien
ggcatcatcgcctaaaaatcttctg

SEQ ID NO: 1534016 - DNA, 25 bp, Homo sapien
catcatcgcctaaaaatcttctggc

SEQ ID NO: 1534017 - DNA, 25 bp, Homo sapien
atcatcgcctaaaaatcttctggca

SEQ ID NO: 1534018 - DNA, 25 bp, Homo sapien
ttctttacagccgattgtatcatct

SEQ ID NO: 1534019 - DNA, 25 bp, Homo sapien
tttacagccgattgtatcatcttcc

SEQ ID NO: 1534020 - DNA, 25 bp, Homo sapien
acagccgattgtatcatcttccaac

SEQ ID NO: 1534021 - DNA, 25 bp, Homo sapien
tacagccgattgtatcatcttccaa

SEQ ID NO: 1534022 - DNA, 25 bp, Homo sapien
tatgaggcacgactgaaggttctcc

SEQ ID NO: 1534023 - DNA, 25 bp, Homo sapien
gagatgtacgtgcactctgaaggcc

SEQ ID NO: 1534024 - DNA, 25 bp, Homo sapien
tgttgtacaaggtacgaggctcgac

SEQ ID NO: 1534025 - DNA, 25 bp, Homo sapien
tgatgtacggtaagctgatggcgac

SEQ ID NO: 1534026 - DNA, 25 bp, Homo sapien
aatggtccaccagtataaatattgg

SEQ ID NO: 1534027 - DNA, 25 bp, Homo sapien
ttcctaccagcataaattccccgat

SEQ ID NO: 1534028 - DNA, 25 bp, Homo sapien
gaatagacctgccaatattcttcac

SEQ ID NO: 1534029 - DNA, 25 bp, Homo sapien
caatgtttgagccacacacgaagca

SEQ ID NO: 1534030 - DNA, 25 bp, Homo sapien
ttatcagttgtattgttcttaaggc

SEQ ID NO: 1534031 - DNA, 25 bp, Homo sapien
tatatactctcttctgctcattttg

SEQ ID NO: 1534032 - DNA, 25 bp, Homo sapien
tttgtaacttgataatccttggcta

SEQ ID NO: 1534033 - DNA, 25 bp, Homo sapien
acttgataatccttggctagaggtt

SEQ ID NO: 1534034 - DNA, 25 bp, Homo sapien
gacttgagtctttgaagcacctgga

SEQ ID NO: 1534035 - DNA, 25 bp, Homo sapien
gctatctgagcagttggtgtttgac

SEQ ID NO: 1534036 - DNA, 25 bp, Homo sapien
gaaactgccgtgagccccatcactg

SEQ ID NO: 1534037 - DNA, 25 bp, Homo sapien
gaaaataatatcacacgtccttggt

SEQ ID NO: 1534038 - DNA, 25 bp, Homo sapien
ggccttgaagaagtaggagagttta

SEQ ID NO: 1534039 - DNA, 25 bp, Homo sapien
aattggccccaacttattcagtcag

SEQ ID NO: 1534040 - DNA, 25 bp, Homo sapien
gaaagatttgggctcttacagcctc

SEQ ID NO: 1534041 - DNA, 25 bp, Homo sapien
cacgtgtgatccaagatgagttgaa

SEQ ID NO: 1534042 - DNA, 25 bp, Homo sapien
cagcctggcacgaagttttgtgaat

SEQ ID NO: 1534043 - DNA, 25 bp, Homo sapien
tccagcctggcacgaagttttgtga

SEQ ID NO: 1534044 - DNA, 25 bp, Homo sapien
agcctggcacgaagttttgtgaata

SEQ ID NO: 1534045 - DNA, 25 bp, Homo sapien
catccagcctggcacgaagttttgt

SEQ ID NO: 1534046 - DNA, 25 bp, Homo sapien
tacttcagcaataattctctccaag

SEQ ID NO: 1534047 - DNA, 25 bp, Homo sapien
tgtgttttaacacccagtttagcag

SEQ ID NO: 1534048 - DNA, 25 bp, Homo sapien
ctagcgaacatcaactgtgttttaa

SEQ ID NO: 1534049 - DNA, 25 bp, Homo sapien
acccagtttagcagcaacttccatt

SEQ ID NO: 1534050 - DNA, 25 bp, Homo sapien
gctgagctgctgcactgtaagtggc

SEQ ID NO: 1534051 - DNA, 25 bp, Homo sapien
tggctttccggatgctgttcttggc

SEQ ID NO: 1534052 - DNA, 25 bp, Homo sapien
cactgtaagtggctttccggatgct

SEQ ID NO: 1534053 - DNA, 25 bp, Homo sapien
tgctgcactgtaagtggctttccgg

SEQ ID NO: 1534054 - DNA, 25 bp, Homo sapien
gagagatacagcctggccgttggaa

SEQ ID NO: 1534055 - DNA, 25 bp, Homo sapien
gaaccttcctggcacttgctgccat

SEQ ID NO: 1534056 - DNA, 25 bp, Homo sapien
agcctggccgttggaaccttcctgg

SEQ ID NO: 1534057 - DNA, 25 bp, Homo sapien
ctgtttggaacacaaagagtgagag

SEQ ID NO: 1534058 - DNA, 25 bp, Homo sapien
ccatgtccggctggagtcgtgttac

SEQ ID NO: 1534059 - DNA, 25 bp, Homo sapien
gcaggctgaaatagtcatgaccatg

SEQ ID NO: 1534060 - DNA, 25 bp, Homo sapien
agtcgtgttactctccggccagctg

SEQ ID NO: 1534061 - DNA, 25 bp, Homo sapien
gaaatagtcatgaccatgtccggct

SEQ ID NO: 1534062 - DNA, 25 bp, Homo sapien
cctaggtgggccagagagtcatgac

SEQ ID NO: 1534063 - DNA, 25 bp, Homo sapien
gaagggcggtagaccaggcacttcc

SEQ ID NO: 1534064 - DNA, 25 bp, Homo sapien
caggcacttcctttcccctaggagt

SEQ ID NO: 1534065 - DNA, 25 bp, Homo sapien
tccacacagcattcagacttgcagg

SEQ ID NO: 1534066 - DNA, 25 bp, Homo sapien
ctccccatcactggatggcgttatg

SEQ ID NO: 1534067 - DNA, 25 bp, Homo sapien
tggcgttatgtgaatgatgggcacc

SEQ ID NO: 1534068 - DNA, 25 bp, Homo sapien
cactggatggcgttatgtgaatgat

SEQ ID NO: 1534069 - DNA, 25 bp, Homo sapien
cgttatgtgaatgatgggcacctcc

SEQ ID NO: 1534070 - DNA, 25 bp, Homo sapien
cgcacaaaaggccggagccgccgga

SEQ ID NO: 1534071 - DNA, 25 bp, Homo sapien
aaaagggtccctagcaactactatg

SEQ ID NO: 1534072 - DNA, 25 bp, Homo sapien
aaaccaaacatcgtggaggcagctg

SEQ ID NO: 1534073 - DNA, 25 bp, Homo sapien
tcgaacatggatgcggcgcggtggg

SEQ ID NO: 1534074 - DNA, 25 bp, Homo sapien
ccctccccgccagatgaacccgcgg

SEQ ID NO: 1534075 - DNA, 25 bp, Homo sapien
cgcgggccggcagtggcgacccaga

SEQ ID NO: 1534076 - DNA, 25 bp, Homo sapien
ccggcagtggcgacccagaccccgg

SEQ ID NO: 1534077 - DNA, 25 bp, Homo sapien
ccagccaaaccccgcaacccagtgc

SEQ ID NO: 1534078 - DNA, 25 bp, Homo sapien
cacaatgggacgcacactggtaact

SEQ ID NO: 1534079 - DNA, 25 bp, Homo sapien
tacagcaacgcttggagctacagat

SEQ ID NO: 1534080 - DNA, 25 bp, Homo sapien
tacacacggtaactccagacacatg

SEQ ID NO: 1534081 - DNA, 25 bp, Homo sapien
aatttatatttgcacagggagctac

SEQ ID NO: 1534082 - DNA, 25 bp, Homo sapien
tcaggactttggctcatgcgtgacc

SEQ ID NO: 1534083 - DNA, 25 bp, Homo sapien
tgtctgtccagatcgtagttcttct

SEQ ID NO: 1534084 - DNA, 25 bp, Homo sapien
caggatgcagggtaggcactcatgt

SEQ ID NO: 1534085 - DNA, 25 bp, Homo sapien
tccaagtccttcacgggtctgtggg

SEQ ID NO: 1534086 - DNA, 25 bp, Homo sapien
gcaccccacccttctctgaggagct

SEQ ID NO: 1534087 - DNA, 25 bp, Homo sapien
ctgttgcggatgaagttccggctgc

SEQ ID NO: 1534088 - DNA, 25 bp, Homo sapien
gctgcagccgtttccggagcgatgg

SEQ ID NO: 1534089 - DNA, 25 bp, Homo sapien
tgaagttccggctgcctaggctctg

SEQ ID NO: 1534090 - DNA, 25 bp, Homo sapien
aagtcctcattacgctgcttataag

SEQ ID NO: 1534091 - DNA, 25 bp, Homo sapien
cacaatgaggcgttctgcttcgggg

SEQ ID NO: 1534092 - DNA, 25 bp, Homo sapien
ccggaagtcctcattacgctgctta

SEQ ID NO: 1534093 - DNA, 25 bp, Homo sapien
cctcattacgctgcttataagtggg

SEQ ID NO: 1534094 - DNA, 25 bp, Homo sapien
cggccctggagcaggatctcacgct

SEQ ID NO: 1534095 - DNA, 25 bp, Homo sapien
ggcggccctggagcaggatctcacg

SEQ ID NO: 1534096 - DNA, 25 bp, Homo sapien
aggcggccctggagcaggatctcac

SEQ ID NO: 1534097 - DNA, 25 bp, Homo sapien
gcggccctggagcaggatctcacgc

SEQ ID NO: 1534098 - DNA, 25 bp, Homo sapien
cgttggggatcagcttggccgtctt

SEQ ID NO: 1534099 - DNA, 25 bp, Homo sapien
ttctcgctctccgtgcagatctgga

SEQ ID NO: 1534100 - DNA, 25 bp, Homo sapien
atcagcttggccgtcttttccttct

SEQ ID NO: 1534101 - DNA, 25 bp, Homo sapien
ggggatcagcttggccgtcttttcc

SEQ ID NO: 1534102 - DNA, 25 bp, Homo sapien
aaggggacagctcggagagaactca

SEQ ID NO: 1534103 - DNA, 25 bp, Homo sapien
gaggcggcctgctgagcgggggacc

SEQ ID NO: 1534104 - DNA, 25 bp, Homo sapien
tcagggtgcagaacaaatggggctt

SEQ ID NO: 1534105 - DNA, 25 bp, Homo sapien
cagctcggagagaactcagggtgca

SEQ ID NO: 1534106 - DNA, 25 bp, Homo sapien
ccccttcttgttggaccgctggtga

SEQ ID NO: 1534107 - DNA, 25 bp, Homo sapien
ccgctggtgagaaagccatcttgca

SEQ ID NO: 1534108 - DNA, 25 bp, Homo sapien
caacggacatgaggccacaatgaca

SEQ ID NO: 1534109 - DNA, 25 bp, Homo sapien
ccatcttgcaaccaacggacatgag

SEQ ID NO: 1534110 - DNA, 25 bp, Homo sapien
catctgcgctgacgccacatctttg

SEQ ID NO: 1534111 - DNA, 25 bp, Homo sapien
gccctgccctggacaattccagaat

SEQ ID NO: 1534112 - DNA, 25 bp, Homo sapien
cctgcattagttccacaaaacgtct

SEQ ID NO: 1534113 - DNA, 25 bp, Homo sapien
tgaatccactaattcacccctgcat

SEQ ID NO: 1534114 - DNA, 25 bp, Homo sapien
aagcagcggtcacgggccccaaagg

SEQ ID NO: 1534115 - DNA, 25 bp, Homo sapien
aggaagcagcggtcacgggccccaa

SEQ ID NO: 1534116 - DNA, 25 bp, Homo sapien
aggaggaagcagcggtcacgggccc

SEQ ID NO: 1534117 - DNA, 25 bp, Homo sapien
cagcggtcacgggccccaaaggaag

SEQ ID NO: 1534118 - DNA, 25 bp, Homo sapien
ctgaggtgctgtggaccagccatag

SEQ ID NO: 1534119 - DNA, 25 bp, Homo sapien
ctgtcctccttagggcctgactgtg

SEQ ID NO: 1534120 - DNA, 25 bp, Homo sapien
gacggtttacaccaattcatgtccc

SEQ ID NO: 1534121 - DNA, 25 bp, Homo sapien
ttcagggtgaaaatcattcccagcc

SEQ ID NO: 1534122 - DNA, 25 bp, Homo sapien
tgttcaaggtcaccaagtgacttgg

SEQ ID NO: 1534123 - DNA, 25 bp, Homo sapien
cagagcatacggagtcccaggaagg

SEQ ID NO: 1534124 - DNA, 25 bp, Homo sapien
tagggaaagtcatgtgttcaaggtc

SEQ ID NO: 1534125 - DNA, 25 bp, Homo sapien
cagggctgagtctcccatgcctatg

SEQ ID NO: 1534126 - DNA, 25 bp, Homo sapien
accgttcagctgcaagggggagaca

SEQ ID NO: 1534127 - DNA, 25 bp, Homo sapien
caagggggagacatagtcctcatcc

SEQ ID NO: 1534128 - DNA, 25 bp, Homo sapien
gtagcactgatgcaccaggtgccag

SEQ ID NO: 1534129 - DNA, 25 bp, Homo sapien
gaggcccagctctgagccgtagcac

SEQ ID NO: 1534130 - DNA, 25 bp, Homo sapien
aatcctccagacgtcatacaaccat

SEQ ID NO: 1534131 - DNA, 25 bp, Homo sapien
gtgtccttgagaccccatacaccct

SEQ ID NO: 1534132 - DNA, 25 bp, Homo sapien
aggaactctgcacgccgaccgtcct

SEQ ID NO: 1534133 - DNA, 25 bp, Homo sapien
agacgtcatacaaccatctcaggcc

SEQ ID NO: 1534134 - DNA, 25 bp, Homo sapien
cggcgcgaacccactgggcttggct

SEQ ID NO: 1534135 - DNA, 25 bp, Homo sapien
tctgcgtcgctgctggctcgggaaa

SEQ ID NO: 1534136 - DNA, 25 bp, Homo sapien
ctcgggaaaggttgggcgtgacatg

SEQ ID NO: 1534137 - DNA, 25 bp, Homo sapien
tgatgtcgctcagggcgatcacatc

SEQ ID NO: 1534138 - DNA, 25 bp, Homo sapien
tcagccaccggggtcactgtctggc

SEQ ID NO: 1534139 - DNA, 25 bp, Homo sapien
tgtctgtcaatagctcctcactggg

SEQ ID NO: 1534140 - DNA, 25 bp, Homo sapien
gagttacttgtgtctgtcaatagct

SEQ ID NO: 1534141 - DNA, 25 bp, Homo sapien
cccagggtggtgggcccgtcaggct

SEQ ID NO: 1534142 - DNA, 25 bp, Homo sapien
taatttgcccacgtgacatggtcag

SEQ ID NO: 1534143 - DNA, 25 bp, Homo sapien
gagatttctagcaacagcgcctgaa

SEQ ID NO: 1534144 - DNA, 25 bp, Homo sapien
tgcaagtaccggaggcgaatgaatt

SEQ ID NO: 1534145 - DNA, 25 bp, Homo sapien
ctggattctcagtgctgcgggcgaa

SEQ ID NO: 1534146 - DNA, 25 bp, Homo sapien
tgagactacatagggtgcatgaccc

SEQ ID NO: 1534147 - DNA, 25 bp, Homo sapien
gggtggcccaggtctatccgatcaa

SEQ ID NO: 1534148 - DNA, 25 bp, Homo sapien
aaccctagggtgtccgctgtagaca

SEQ ID NO: 1534149 - DNA, 25 bp, Homo sapien
ccttgtagtgtgcatgggcggaccc

SEQ ID NO: 1534150 - DNA, 25 bp, Homo sapien
tgaacttgcactgctgtaggaagcc

SEQ ID NO: 1534151 - DNA, 25 bp, Homo sapien
aagggcgagtccgagaagagcatct

SEQ ID NO: 1534152 - DNA, 25 bp, Homo sapien
tggagccgctcagcgcccacatgga

SEQ ID NO: 1534153 - DNA, 25 bp, Homo sapien
ctgtgaacttgcactgctgtaggaa

SEQ ID NO: 1534154 - DNA, 25 bp, Homo sapien
ggctggcgtgtcaggctgaggagct

SEQ ID NO: 1534155 - DNA, 25 bp, Homo sapien
aggctgaggagctctgtattaggcc

SEQ ID NO: 1534156 - DNA, 25 bp, Homo sapien
ggccattcttacattactataaata

SEQ ID NO: 1534157 - DNA, 25 bp, Homo sapien
tcctaaaagggctggcgtgtcaggc

SEQ ID NO: 1534158 - DNA, 25 bp, Homo sapien
atggggatggtgtacgtcagcaccc

SEQ ID NO: 1534159 - DNA, 25 bp, Homo sapien
gggatggtgtacgtcagcacccggc

SEQ ID NO: 1534160 - DNA, 25 bp, Homo sapien
tggtgtacgtcagcacccggcgctg

SEQ ID NO: 1534161 - DNA, 25 bp, Homo sapien
tctccaccacggaggcgctcttggg

SEQ ID NO: 1534162 - DNA, 25 bp, Homo sapien
gggcagtgtagaagtagtcctggta

SEQ ID NO: 1534163 - DNA, 25 bp, Homo sapien
gagccgcgccttgttccgggccaga

SEQ ID NO: 1534164 - DNA, 25 bp, Homo sapien
ctcggagtccaccacacacccgccg

SEQ ID NO: 1534165 - DNA, 25 bp, Homo sapien
cccaggatgcagtagcggtgggcag

SEQ ID NO: 1534166 - DNA, 25 bp, Homo sapien
caaggctctgctgctgacttgagga

SEQ ID NO: 1534167 - DNA, 25 bp, Homo sapien
tgttcctccaccagggtgggaacca

SEQ ID NO: 1534168 - DNA, 25 bp, Homo sapien
cttgaggagtggacaggaggccctg

SEQ ID NO: 1534169 - DNA, 25 bp, Homo sapien
ctcaggaaccccacgcttctgttcc

SEQ ID NO: 1534170 - DNA, 25 bp, Homo sapien
gaaatagtcttcaatgccgctccac

SEQ ID NO: 1534171 - DNA, 25 bp, Homo sapien
tccacggctgctttcggtagcggat

SEQ ID NO: 1534172 - DNA, 25 bp, Homo sapien
tctcaatgagcgacttcaccaggct

SEQ ID NO: 1534173 - DNA, 25 bp, Homo sapien
ccacgagttcttctcaatgagcgac

SEQ ID NO: 1534174 - DNA, 25 bp, Homo sapien
gccccagccggccttctgtccctac

SEQ ID NO: 1534175 - DNA, 25 bp, Homo sapien
ttctcagccttggcgagctctcgct

SEQ ID NO: 1534176 - DNA, 25 bp, Homo sapien
aggccggatagcaagccccgggcat

SEQ ID NO: 1534177 - DNA, 25 bp, Homo sapien
ccgtccccgtgagcccgccagctca

SEQ ID NO: 1534178 - DNA, 25 bp, Homo sapien
cgaggtgtgaatgccggcccgggca

SEQ ID NO: 1534179 - DNA, 25 bp, Homo sapien
tggtccacagatggttcggagaagc

SEQ ID NO: 1534180 - DNA, 25 bp, Homo sapien
ggccctggtccacagatggttcgga

SEQ ID NO: 1534181 - DNA, 25 bp, Homo sapien
ccggggccctggtccacagatggtt

SEQ ID NO: 1534182 - DNA, 25 bp, Homo sapien
cctggtccacagatggttcggagaa

SEQ ID NO: 1534183 - DNA, 25 bp, Homo sapien
gggcagctcttggctgagagcacca

SEQ ID NO: 1534184 - DNA, 25 bp, Homo sapien
cggggcagctcttggctgagagcac

SEQ ID NO: 1534185 - DNA, 25 bp, Homo sapien
gacagagagatgagcgccgcctggc

SEQ ID NO: 1534186 - DNA, 25 bp, Homo sapien
ggagacagagagatgagcgccgcct

SEQ ID NO: 1534187 - DNA, 25 bp, Homo sapien
gtcaggattcctggggtctagatgc

SEQ ID NO: 1534188 - DNA, 25 bp, Homo sapien
tcctggggtctagatgctctgaaca

SEQ ID NO: 1534189 - DNA, 25 bp, Homo sapien
gtctagatgctctgaacacccccaa

SEQ ID NO: 1534190 - DNA, 25 bp, Homo sapien
ggattcctggggtctagatgctctg

SEQ ID NO: 1534191 - DNA, 25 bp, Homo sapien
agagcaggacgttgagggcgatgag

SEQ ID NO: 1534192 - DNA, 25 bp, Homo sapien
tcctttccagggaccagaggcggta

SEQ ID NO: 1534193 - DNA, 25 bp, Homo sapien
caggactcaaaggtgtgggctgtcc

SEQ ID NO: 1534194 - DNA, 25 bp, Homo sapien
cgttgagggcgatgaggatgataag

SEQ ID NO: 1534195 - DNA, 25 bp, Homo sapien
tgtgcacctccacgctgtggaattg

SEQ ID NO: 1534196 - DNA, 25 bp, Homo sapien
tccacgctgtggaattgcttctgca

SEQ ID NO: 1534197 - DNA, 25 bp, Homo sapien
cacttgtgcacctccacgctgtgga

SEQ ID NO: 1534198 - DNA, 25 bp, Homo sapien
ctgtggaattgcttctgcagcgcca

SEQ ID NO: 1534199 - DNA, 25 bp, Homo sapien
tactgccattgagtgaccaaacccg

SEQ ID NO: 1534200 - DNA, 25 bp, Homo sapien
cagagtgggcacgagagactgactc

SEQ ID NO: 1534201 - DNA, 25 bp, Homo sapien
aaacccggccgtgcctaatgtgaga

SEQ ID NO: 1534202 - DNA, 25 bp, Homo sapien
ggacgtgagccaatcagttctgtct

SEQ ID NO: 1534203 - DNA, 25 bp, Homo sapien
tgaggacggtctagaggccatactg

SEQ ID NO: 1534204 - DNA, 25 bp, Homo sapien
gctgcaggtaagtgctcagtctaca

SEQ ID NO: 1534205 - DNA, 25 bp, Homo sapien
tacgggtctataacacatctgctcc

SEQ ID NO: 1534206 - DNA, 25 bp, Homo sapien
tgcacccttagcagtttgacagaga

SEQ ID NO: 1534207 - DNA, 25 bp, Homo sapien
tgtgatgccttggtgcagcttctcc

SEQ ID NO: 1534208 - DNA, 25 bp, Homo sapien
gctgggtgtcaaagggagggtctga

SEQ ID NO: 1534209 - DNA, 25 bp, Homo sapien
gtctgagactgtgatgccttggtgc

SEQ ID NO: 1534210 - DNA, 25 bp, Homo sapien
tcaggaaaagctgtcatcgggccgg

SEQ ID NO: 1534211 - DNA, 25 bp, Homo sapien
gcgctcacaccgtgccagcagtggc

SEQ ID NO: 1534212 - DNA, 25 bp, Homo sapien
gggagatgcctggcgctcacaccgt

SEQ ID NO: 1534213 - DNA, 25 bp, Homo sapien
tgtgggggaacagctgcgtggccgg

SEQ ID NO: 1534214 - DNA, 25 bp, Homo sapien
agtggccgccgaggctctgtgtgtc

SEQ ID NO: 1534215 - DNA, 25 bp, Homo sapien
gccagctccctggtctaaagtgcat

SEQ ID NO: 1534216 - DNA, 25 bp, Homo sapien
tctgcacagcccctggttgggccgt

SEQ ID NO: 1534217 - DNA, 25 bp, Homo sapien
cggttccgtggtccccacgtctgca

SEQ ID NO: 1534218 - DNA, 25 bp, Homo sapien
ggtctaaagtgcatctcggttccgt

SEQ ID NO: 1534219 - DNA, 25 bp, Homo sapien
ctgagggaatcgtgcaccccaggag

SEQ ID NO: 1534220 - DNA, 25 bp, Homo sapien
gcactgtcggccccaaataaatata

SEQ ID NO: 1534221 - DNA, 25 bp, Homo sapien
ccagagctgagggaatcgtgcaccc

SEQ ID NO: 1534222 - DNA, 25 bp, Homo sapien
tcagccgggcaaaataagttagtgg

SEQ ID NO: 1534223 - DNA, 25 bp, Homo sapien
gagattcgaatgcagctcaagtttg

SEQ ID NO: 1534224 - DNA, 25 bp, Homo sapien
tctccaggagattcgaatgcagctc

SEQ ID NO: 1534225 - DNA, 25 bp, Homo sapien
gattcgaatgcagctcaagtttgag

SEQ ID NO: 1534226 - DNA, 25 bp, Homo sapien
caggagattcgaatgcagctcaagt

SEQ ID NO: 1534227 - DNA, 25 bp, Homo sapien
gccctgttataagtagccacattta

SEQ ID NO: 1534228 - DNA, 25 bp, Homo sapien
ctgtgccgggccctgttataagtag

SEQ ID NO: 1534229 - DNA, 25 bp, Homo sapien
gaactccttgaacctataatagtgg

SEQ ID NO: 1534230 - DNA, 25 bp, Homo sapien
atttatgaactccttgaacctataa

SEQ ID NO: 1534231 - DNA, 25 bp, Homo sapien
cggttagaatgtccccgggagcgcg

SEQ ID NO: 1534232 - DNA, 25 bp, Homo sapien
gacctggcggcggttagaatgtccc

SEQ ID NO: 1534233 - DNA, 25 bp, Homo sapien
gggcacatccgctaggtgcaccgac

SEQ ID NO: 1534234 - DNA, 25 bp, Homo sapien
gaccgcggtctcctgcgcactgcag

SEQ ID NO: 1534235 - DNA, 25 bp, Homo sapien
gccgaccactaaggccagcagcctc

SEQ ID NO: 1534236 - DNA, 25 bp, Homo sapien
ccgcgccgaccactaaggccagcag

SEQ ID NO: 1534237 - DNA, 25 bp, Homo sapien
cagtgccgcgccgaccactaaggcc

SEQ ID NO: 1534238 - DNA, 25 bp, Homo sapien
gtgccgcgccgaccactaaggccag

SEQ ID NO: 1534239 - DNA, 25 bp, Homo sapien
cgttggtctcgctgcggcgcttgca

SEQ ID NO: 1534240 - DNA, 25 bp, Homo sapien
gaaggtctcagcgttggtctcgctg

SEQ ID NO: 1534241 - DNA, 25 bp, Homo sapien
tttgaaggtcatcccatacacggcc

SEQ ID NO: 1534242 - DNA, 25 bp, Homo sapien
cggaaggtccactcggtgaaggtct

SEQ ID NO: 1534243 - DNA, 25 bp, Homo sapien
ctgcaggtctttggtgccccggctg

SEQ ID NO: 1534244 - DNA, 25 bp, Homo sapien
tcttgacgacgctggtgttgtgctc

SEQ ID NO: 1534245 - DNA, 25 bp, Homo sapien
tcgtagttttcgaagaagagcaggc

SEQ ID NO: 1534246 - DNA, 25 bp, Homo sapien
gtagacgtggcactcgtagtcgccc

SEQ ID NO: 1534247 - DNA, 25 bp, Homo sapien
cagaggtcatacagcacaggtgaca

SEQ ID NO: 1534248 - DNA, 25 bp, Homo sapien
tcggattattatcccgggcaagccc

SEQ ID NO: 1534249 - DNA, 25 bp, Homo sapien
tccatctggctctccggtgggtgac

SEQ ID NO: 1534250 - DNA, 25 bp, Homo sapien
caaccctttggctcagagacagaag

SEQ ID NO: 1534251 - DNA, 25 bp, Homo sapien
cagcagggctgagctactcgaacag

SEQ ID NO: 1534252 - DNA, 25 bp, Homo sapien
tgcctgcagctgctcaatcctcatg

SEQ ID NO: 1534253 - DNA, 25 bp, Homo sapien
catgaaccccatgatggaagaatgg

SEQ ID NO: 1534254 - DNA, 25 bp, Homo sapien
tactcgaacagtaagaaccgccacc

SEQ ID NO: 1534255 - DNA, 25 bp, Homo sapien
aataataaggaatggcaggcagtgc

SEQ ID NO: 1534256 - DNA, 25 bp, Homo sapien
gaacgttaaaaatacgctagtatga

SEQ ID NO: 1534257 - DNA, 25 bp, Homo sapien
tagcatagcatggtgggtaataaaa

SEQ ID NO: 1534258 - DNA, 25 bp, Homo sapien
aatctcggcacttacggcggctaag

SEQ ID NO: 1534259 - DNA, 25 bp, Homo sapien
tgtgtaactcgaggccacatctgtg

SEQ ID NO: 1534260 - DNA, 25 bp, Homo sapien
gatttaggtaacacggcatctcaca

SEQ ID NO: 1534261 - DNA, 25 bp, Homo sapien
tccctgggcctggtgtatgcactgt

SEQ ID NO: 1534262 - DNA, 25 bp, Homo sapien
taaaagccgtagctctgcaaccaga

SEQ ID NO: 1534263 - DNA, 25 bp, Homo sapien
cacgagccatatggtcaacaccaca

SEQ ID NO: 1534264 - DNA, 25 bp, Homo sapien
agcagtaaatcatctctgccacgag

SEQ ID NO: 1534265 - DNA, 25 bp, Homo sapien
tggcggcagcgatcttcttgtagca

SEQ ID NO: 1534266 - DNA, 25 bp, Homo sapien
gatctcagacacgatggatgccatg

SEQ ID NO: 1534267 - DNA, 25 bp, Homo sapien
gggctccggagttcctctctggcaa

SEQ ID NO: 1534268 - DNA, 25 bp, Homo sapien
tacacagggctccttagttagagag

SEQ ID NO: 1534269 - DNA, 25 bp, Homo sapien
tctctggcaagtgtgacggtgccct

SEQ ID NO: 1534270 - DNA, 25 bp, Homo sapien
gaaaggccaggtatacagtgacccc

SEQ ID NO: 1534271 - DNA, 25 bp, Homo sapien
ggacgcccgtgcagttctctttgct

SEQ ID NO: 1534272 - DNA, 25 bp, Homo sapien
ttcagaggtgatggccaggtattcc

SEQ ID NO: 1534273 - DNA, 25 bp, Homo sapien
ctggacgcccgtgcagttctctttg

SEQ ID NO: 1534274 - DNA, 25 bp, Homo sapien
ttgctttcagaggtgatggccaggt

SEQ ID NO: 1534275 - DNA, 25 bp, Homo sapien
caagagagggggaattagggacctg

SEQ ID NO: 1534276 - DNA, 25 bp, Homo sapien
aaagagacgaggctgaatgggcccc

SEQ ID NO: 1534277 - DNA, 25 bp, Homo sapien
gaagtgcgtgtctgaagcggccaat

SEQ ID NO: 1534278 - DNA, 25 bp, Homo sapien
tacccatcatgcatggcggtgcgcg

SEQ ID NO: 1534279 - DNA, 25 bp, Homo sapien
tggagagtccccattacggctggct

SEQ ID NO: 1534280 - DNA, 25 bp, Homo sapien
tgtgggccctcaggtagggtccctg

SEQ ID NO: 1534281 - DNA, 25 bp, Homo sapien
accaggcgggcccagctacggggct

SEQ ID NO: 1534282 - DNA, 25 bp, Homo sapien
ccagctacggggcttgccttggacc

SEQ ID NO: 1534283 - DNA, 25 bp, Homo sapien
tacggggcttgccttggacctccag

SEQ ID NO: 1534284 - DNA, 25 bp, Homo sapien
cgggcccagctacggggcttgcctt

SEQ ID NO: 1534285 - DNA, 25 bp, Homo sapien
gagcatggtggccccgcagcagcgg

SEQ ID NO: 1534286 - DNA, 25 bp, Homo sapien
gcggtggcgtggggcctgctaggcc

SEQ ID NO: 1534287 - DNA, 25 bp, Homo sapien
aggagcatggtggccccgcagcagc

SEQ ID NO: 1534288 - DNA, 25 bp, Homo sapien
gtggcgtggggcctgctaggccagg

SEQ ID NO: 1534289 - DNA, 25 bp, Homo sapien
ggagcctcgaggtagtgccggggtc

SEQ ID NO: 1534290 - DNA, 25 bp, Homo sapien
cggagcctcgaggtagtgccggggt

SEQ ID NO: 1534291 - DNA, 25 bp, Homo sapien
agcctcgaggtagtgccggggtcgg

SEQ ID NO: 1534292 - DNA, 25 bp, Homo sapien
ggcggagcctcgaggtagtgccggg

SEQ ID NO: 1534293 - DNA, 25 bp, Homo sapien
ccaggaacccctctattaggaggtg

SEQ ID NO: 1534294 - DNA, 25 bp, Homo sapien
ggccaggactccctagtatgaggga

SEQ ID NO: 1534295 - DNA, 25 bp, Homo sapien
ggaagagcaggacagaacacctagg

SEQ ID NO: 1534296 - DNA, 25 bp, Homo sapien
tccaacggctgagtctgaaggaaga

SEQ ID NO: 1534297 - DNA, 25 bp, Homo sapien
agtcccaggcgtccatccaggcagg

SEQ ID NO: 1534298 - DNA, 25 bp, Homo sapien
ctgaggatcccggtttgagggagga

SEQ ID NO: 1534299 - DNA, 25 bp, Homo sapien
ttggccagagcacgccgtgatcacg

SEQ ID NO: 1534300 - DNA, 25 bp, Homo sapien
cgtgatcacggacgcagattgggct

SEQ ID NO: 1534301 - DNA, 25 bp, Homo sapien
ttgttaatgattccctggctgacct

SEQ ID NO: 1534302 - DNA, 25 bp, Homo sapien
cttgttaatgattccctggctgacc

SEQ ID NO: 1534303 - DNA, 25 bp, Homo sapien
tcttgttaatgattccctggctgac

SEQ ID NO: 1534304 - DNA, 25 bp, Homo sapien
ctcttgttaatgattccctggctga

SEQ ID NO: 1534305 - DNA, 25 bp, Homo sapien
cttgaggcaagaataagcaggctct

SEQ ID NO: 1534306 - DNA, 25 bp, Homo sapien
ggccatcgagatggccagatggcca

SEQ ID NO: 1534307 - DNA, 25 bp, Homo sapien
ggctctcttatgtcagaggctggag

SEQ ID NO: 1534308 - DNA, 25 bp, Homo sapien
gaataagcaggctctcttatgtcag

SEQ ID NO: 1534309 - DNA, 25 bp, Homo sapien
gacagataaggttacgactctcagg

SEQ ID NO: 1534310 - DNA, 25 bp, Homo sapien
cagtctcaagcgctcaggctcaggt

SEQ ID NO: 1534311 - DNA, 25 bp, Homo sapien
tcctactgaacatccgctgtgtgcc

SEQ ID NO: 1534312 - DNA, 25 bp, Homo sapien
tcacgttctcatgcgtgtaggtggg

SEQ ID NO: 1534313 - DNA, 25 bp, Homo sapien
cccttcctagctggaacctaaggca

SEQ ID NO: 1534314 - DNA, 25 bp, Homo sapien
ggcaggtgccatcatatctttgagc

SEQ ID NO: 1534315 - DNA, 25 bp, Homo sapien
gcaggtgccatcatatctttgagcc

SEQ ID NO: 1534316 - DNA, 25 bp, Homo sapien
ctagctggaacctaaggcaggtgcc

SEQ ID NO: 1534317 - DNA, 25 bp, Homo sapien
ggatgccgccccgatggctgtcaga

SEQ ID NO: 1534318 - DNA, 25 bp, Homo sapien
gctgtcagaagtagcagggtccccg

SEQ ID NO: 1534319 - DNA, 25 bp, Homo sapien
agggtccccgcagtgagagctgcca

SEQ ID NO: 1534320 - DNA, 25 bp, Homo sapien
ccccgatggctgtcagaagtagcag

SEQ ID NO: 1534321 - DNA, 25 bp, Homo sapien
ggaggtcagaggcacaggaaccgct

SEQ ID NO: 1534322 - DNA, 25 bp, Homo sapien
aggtcagaggcacaggaaccgctct

SEQ ID NO: 1534323 - DNA, 25 bp, Homo sapien
tcagaggcacaggaaccgctctcac

SEQ ID NO: 1534324 - DNA, 25 bp, Homo sapien
gtcagaggcacaggaaccgctctca

SEQ ID NO: 1534325 - DNA, 25 bp, Homo sapien
tgggtacagcggctcctggtcactc

SEQ ID NO: 1534326 - DNA, 25 bp, Homo sapien
ttgagctcccgccagatacacgtgt

SEQ ID NO: 1534327 - DNA, 25 bp, Homo sapien
gccagatacacgtgtcctccagggc

SEQ ID NO: 1534328 - DNA, 25 bp, Homo sapien
tcaacaaatacgcttgttgagctcc

SEQ ID NO: 1534329 - DNA, 25 bp, Homo sapien
aatacgcttgttgagctcccgccag

SEQ ID NO: 1534330 - DNA, 25 bp, Homo sapien
catgccacgcagtaagaaacacatt

SEQ ID NO: 1534331 - DNA, 25 bp, Homo sapien
tgtagtctggggcaaactgctgcat

SEQ ID NO: 1534332 - DNA, 25 bp, Homo sapien
tgctgcattgctcaaagcctcagtt

SEQ ID NO: 1534333 - DNA, 25 bp, Homo sapien
ttacatcctgatgtagcccatagct

SEQ ID NO: 1534334 - DNA, 25 bp, Homo sapien
tatctcctcttattcccactgattc

SEQ ID NO: 1534335 - DNA, 25 bp, Homo sapien
tctgcctctgggtgtgagctagaaa

SEQ ID NO: 1534336 - DNA, 25 bp, Homo sapien
gaaattgagtcttggagagagtagg

SEQ ID NO: 1534337 - DNA, 25 bp, Homo sapien
cgcccaagtactacacagattttta

SEQ ID NO: 1534338 - DNA, 25 bp, Homo sapien
gctaaccagcaaaaccgggacttga

SEQ ID NO: 1534339 - DNA, 25 bp, Homo sapien
tgtctccctgcctaatatattcagc

SEQ ID NO: 1534340 - DNA, 25 bp, Homo sapien
tatattcagctacggctggcactga

SEQ ID NO: 1534341 - DNA, 25 bp, Homo sapien
agtagtgaccacttctatgcccatc

SEQ ID NO: 1534342 - DNA, 25 bp, Homo sapien
tcagcacggagacagagggacttgc

SEQ ID NO: 1534343 - DNA, 25 bp, Homo sapien
gacacatactccatgcccagtgagg

SEQ ID NO: 1534344 - DNA, 25 bp, Homo sapien
tcagtcgctgcaaggagagcgtccc

SEQ ID NO: 1534345 - DNA, 25 bp, Homo sapien
cagatgcaaagatcccaaggctggt

SEQ ID NO: 1534346 - DNA, 25 bp, Homo sapien
ggccgcctgggtcccacagccaggc

SEQ ID NO: 1534347 - DNA, 25 bp, Homo sapien
cggggccgcctgggtcccacagcca

SEQ ID NO: 1534348 - DNA, 25 bp, Homo sapien
tgcagggcgacagggcccggggccg

SEQ ID NO: 1534349 - DNA, 25 bp, Homo sapien
ctgcagggcgacagggcccggggcc

SEQ ID NO: 1534350 - DNA, 25 bp, Homo sapien
atctcctcgcagctgagtccggcta

SEQ ID NO: 1534351 - DNA, 25 bp, Homo sapien
agtccggctaccctggcgttggagc

SEQ ID NO: 1534352 - DNA, 25 bp, Homo sapien
ttgtcaaagaccatgagccgagcgt

SEQ ID NO: 1534353 - DNA, 25 bp, Homo sapien
gcgttggagcgcgaggagcacagca

SEQ ID NO: 1534354 - DNA, 25 bp, Homo sapien
gcggggcaggggttaggcctgctcc

SEQ ID NO: 1534355 - DNA, 25 bp, Homo sapien
gggcaggggttaggcctgctcccca

SEQ ID NO: 1534356 - DNA, 25 bp, Homo sapien
ctgggcggggcaggggttaggcctg

SEQ ID NO: 1534357 - DNA, 25 bp, Homo sapien
gcaggggttaggcctgctccccagc

SEQ ID NO: 1534358 - DNA, 25 bp, Homo sapien
cgcacgtccagctcggagtgggtca

SEQ ID NO: 1534359 - DNA, 25 bp, Homo sapien
gccgttcgcacgtccagctcggagt

SEQ ID NO: 1534360 - DNA, 25 bp, Homo sapien
aagaagcccgacgtgccattggcgc

SEQ ID NO: 1534361 - DNA, 25 bp, Homo sapien
tccacacagaagaagcccgacgtgc

SEQ ID NO: 1534362 - DNA, 25 bp, Homo sapien
tagagaccagttaagacaggtggaa

SEQ ID NO: 1534363 - DNA, 25 bp, Homo sapien
gagagggagtgccttgggggtctga

SEQ ID NO: 1534364 - DNA, 25 bp, Homo sapien
gggtctgaggtgttgccccacctgc

SEQ ID NO: 1534365 - DNA, 25 bp, Homo sapien
gaccagttaagacaggtggaaggaa

SEQ ID NO: 1534366 - DNA, 25 bp, Homo sapien
cttggcagatggcggccaagaaacg

SEQ ID NO: 1534367 - DNA, 25 bp, Homo sapien
tggcagatggcggccaagaaacggc

SEQ ID NO: 1534368 - DNA, 25 bp, Homo sapien
gcagatggcggccaagaaacggcct

SEQ ID NO: 1534369 - DNA, 25 bp, Homo sapien
ggcagatggcggccaagaaacggcc

SEQ ID NO: 1534370 - DNA, 25 bp, Homo sapien
gggtctgaaagtacatggccccatc

SEQ ID NO: 1534371 - DNA, 25 bp, Homo sapien
gagggttctgagttttaggatctca

SEQ ID NO: 1534372 - DNA, 25 bp, Homo sapien
gcttgaggggacgtggcctccccaa

SEQ ID NO: 1534373 - DNA, 25 bp, Homo sapien
tggccctgccctagggggtctgaaa

SEQ ID NO: 1534374 - DNA, 25 bp, Homo sapien
cagggatcccccacagaggtgtgct

SEQ ID NO: 1534375 - DNA, 25 bp, Homo sapien
gtgtcccggcctcccacgatgcggt

SEQ ID NO: 1534376 - DNA, 25 bp, Homo sapien
catcatagcgaaggctgacttgcca

SEQ ID NO: 1534377 - DNA, 25 bp, Homo sapien
gatgcggtccacgggcagcttcctg

SEQ ID NO: 1534378 - DNA, 25 bp, Homo sapien
ctgcctgggcacaatccgccctcct

SEQ ID NO: 1534379 - DNA, 25 bp, Homo sapien
gcctgggcacaatccgccctcctcc

SEQ ID NO: 1534380 - DNA, 25 bp, Homo sapien
acctgcctgggcacaatccgccctc

SEQ ID NO: 1534381 - DNA, 25 bp, Homo sapien
ccccactgtctctccgctcctctgc

SEQ ID NO: 1534382 - DNA, 25 bp, Homo sapien
ggcaatatcgttgctgttctcctcg

SEQ ID NO: 1534383 - DNA, 25 bp, Homo sapien
agatagcccccgtggtagaccacag

SEQ ID NO: 1534384 - DNA, 25 bp, Homo sapien
agaggtggaccagggcaatatcgtt

SEQ ID NO: 1534385 - DNA, 25 bp, Homo sapien
gcaaacactcgccatcgggacagga

SEQ ID NO: 1534386 - DNA, 25 bp, Homo sapien
gcactgatcattgatagttaaggcc

SEQ ID NO: 1534387 - DNA, 25 bp, Homo sapien
tttgtgctccctcgagatcattccc

SEQ ID NO: 1534388 - DNA, 25 bp, Homo sapien
tccccttattgccaaggatgcctga

SEQ ID NO: 1534389 - DNA, 25 bp, Homo sapien
cataagttgattgccttgtgcccct

SEQ ID NO: 1534390 - DNA, 25 bp, Homo sapien
ctgggaggcacacaggctggatgta

SEQ ID NO: 1534391 - DNA, 25 bp, Homo sapien
tgggaggcacacaggctggatgtat

SEQ ID NO: 1534392 - DNA, 25 bp, Homo sapien
gggaggcacacaggctggatgtatt

SEQ ID NO: 1534393 - DNA, 25 bp, Homo sapien
catagtactgcgtgttgccccagcc

SEQ ID NO: 1534394 - DNA, 25 bp, Homo sapien
agcccgtcacggtacagatcttgcc

SEQ ID NO: 1534395 - DNA, 25 bp, Homo sapien
tcacggtacagatcttgccatccac

SEQ ID NO: 1534396 - DNA, 25 bp, Homo sapien
agtactgcgtgttgccccagcccgt

SEQ ID NO: 1534397 - DNA, 25 bp, Homo sapien
ggcatcaatgccaccctcggggtag

SEQ ID NO: 1534398 - DNA, 25 bp, Homo sapien
gattatggggactcgagcctcctgg

SEQ ID NO: 1534399 - DNA, 25 bp, Homo sapien
ttccatagaagtcagcgccattgca

SEQ ID NO: 1534400 - DNA, 25 bp, Homo sapien
tcctggagtaccccggcctgttggc

SEQ ID NO: 1534401 - DNA, 25 bp, Homo sapien
tggaagatccactcccggaagtcac

SEQ ID NO: 1534402 - DNA, 25 bp, Homo sapien
tgctgtcctcacacacaaagggacc

SEQ ID NO: 1534403 - DNA, 25 bp, Homo sapien
gccaacgtggcgtccgagagatgct

SEQ ID NO: 1534404 - DNA, 25 bp, Homo sapien
cactgactttggtgtagacgcctgg

SEQ ID NO: 1534405 - DNA, 25 bp, Homo sapien
cctcttctaggcctgagcgtaggtt

SEQ ID NO: 1534406 - DNA, 25 bp, Homo sapien
ttctaggcctgagcgtaggtttcct

SEQ ID NO: 1534407 - DNA, 25 bp, Homo sapien
taggcctgagcgtaggtttcctaaa

SEQ ID NO: 1534408 - DNA, 25 bp, Homo sapien
gcctgagcgtaggtttcctaaaaca

SEQ ID NO: 1534409 - DNA, 25 bp, Homo sapien
ctggggaaagacagctgggggctcc

SEQ ID NO: 1534410 - DNA, 25 bp, Homo sapien
ggaaagacagctgggggctcccgag

SEQ ID NO: 1534411 - DNA, 25 bp, Homo sapien
gggaaagacagctgggggctcccga

SEQ ID NO: 1534412 - DNA, 25 bp, Homo sapien
aaagacagctgggggctcccgaggt

SEQ ID NO: 1534413 - DNA, 25 bp, Homo sapien
agagctgggtcaccatgccgctggc

SEQ ID NO: 1534414 - DNA, 25 bp, Homo sapien
tcagagctgggtcaccatgccgctg

SEQ ID NO: 1534415 - DNA, 25 bp, Homo sapien
ctgggtcaccatgccgctggcttcg

SEQ ID NO: 1534416 - DNA, 25 bp, Homo sapien
gggtcaccatgccgctggcttcgga

SEQ ID NO: 1534417 - DNA, 25 bp, Homo sapien
caccgggatcacctcgggccctgga

SEQ ID NO: 1534418 - DNA, 25 bp, Homo sapien
aaaacgtcccatcctaggcccagcg

SEQ ID NO: 1534419 - DNA, 25 bp, Homo sapien
tcccaccaccgggatcacctcgggc

SEQ ID NO: 1534420 - DNA, 25 bp, Homo sapien
taggcccagcgtggatcccaccacc

SEQ ID NO: 1534421 - DNA, 25 bp, Homo sapien
attatttaaagagcatcccgtcatc

SEQ ID NO: 1534422 - DNA, 25 bp, Homo sapien
caatatttacatgggggtcaggagg

SEQ ID NO: 1534423 - DNA, 25 bp, Homo sapien
tgagtgggcccgccactgtggaaga

SEQ ID NO: 1534424 - DNA, 25 bp, Homo sapien
tttaaagagcatcccgtcatcaggg

SEQ ID NO: 1534425 - DNA, 25 bp, Homo sapien
gttcccatccggtctgcctgaggct

SEQ ID NO: 1534426 - DNA, 25 bp, Homo sapien
tccattgttcgagggtccagggggc

SEQ ID NO: 1534427 - DNA, 25 bp, Homo sapien
gaggaaagaggggatggaaatcttc

SEQ ID NO: 1534428 - DNA, 25 bp, Homo sapien
ggatcctggttcccatccggtctgc

SEQ ID NO: 1534429 - DNA, 25 bp, Homo sapien
ccagcagaagccacagtatccccat

SEQ ID NO: 1534430 - DNA, 25 bp, Homo sapien
accagcagaagccacagtatcccca

SEQ ID NO: 1534431 - DNA, 25 bp, Homo sapien
ccaccagcagaagccacagtatccc

SEQ ID NO: 1534432 - DNA, 25 bp, Homo sapien
caccagcagaagccacagtatcccc

SEQ ID NO: 1534433 - DNA, 25 bp, Homo sapien
tctccttgctccaagtcacttggtt

SEQ ID NO: 1534434 - DNA, 25 bp, Homo sapien
atctccttgctccaagtcacttggt

SEQ ID NO: 1534435 - DNA, 25 bp, Homo sapien
ctctgatctccttgctccaagtcac

SEQ ID NO: 1534436 - DNA, 25 bp, Homo sapien
tgatctccttgctccaagtcacttg

SEQ ID NO: 1534437 - DNA, 25 bp, Homo sapien
gccgtcccgtgtgtggcttcaaaga

SEQ ID NO: 1534438 - DNA, 25 bp, Homo sapien
cactccagcccataggggtacagga

SEQ ID NO: 1534439 - DNA, 25 bp, Homo sapien
ataggccgtcccgtgtgtggcttca

SEQ ID NO: 1534440 - DNA, 25 bp, Homo sapien
tgcagggagggcctgatccccacac

SEQ ID NO: 1534441 - DNA, 25 bp, Homo sapien
aaatgcctccagtgtgaagagagcc

SEQ ID NO: 1534442 - DNA, 25 bp, Homo sapien
aggacaccagcccattggtgcagaa

SEQ ID NO: 1534443 - DNA, 25 bp, Homo sapien
tcagtgtggacccattggcccagaa

SEQ ID NO: 1534444 - DNA, 25 bp, Homo sapien
cccagaacgggactgcgaaggcctg

SEQ ID NO: 1534445 - DNA, 25 bp, Homo sapien
cactggatgtccttgtggtgaaaca

SEQ ID NO: 1534446 - DNA, 25 bp, Homo sapien
tccactggatgtccttgtggtgaaa

SEQ ID NO: 1534447 - DNA, 25 bp, Homo sapien
ggatgtccttgtggtgaaacagcac

SEQ ID NO: 1534448 - DNA, 25 bp, Homo sapien
ccatggtccactggatgtccttgtg

SEQ ID NO: 1534449 - DNA, 25 bp, Homo sapien
tgccacattcaggatgcctgaggtc

SEQ ID NO: 1534450 - DNA, 25 bp, Homo sapien
caggaagggtgaagtagtccctctg

SEQ ID NO: 1534451 - DNA, 25 bp, Homo sapien
agggtgaagtagtccctctgtcggc

SEQ ID NO: 1534452 - DNA, 25 bp, Homo sapien
gaagggtgaagtagtccctctgtcg

SEQ ID NO: 1534453 - DNA, 25 bp, Homo sapien
ccacatcccagccatggatgaccag

SEQ ID NO: 1534454 - DNA, 25 bp, Homo sapien
gttctattgggccatgcgatctcac

SEQ ID NO: 1534455 - DNA, 25 bp, Homo sapien
catggatgaccagccgcaccagggc

SEQ ID NO: 1534456 - DNA, 25 bp, Homo sapien
gggccatgcgatctcactaccacat

SEQ ID NO: 1534457 - DNA, 25 bp, Homo sapien
ctgcggtcccaggtgcagaatgtgg

SEQ ID NO: 1534458 - DNA, 25 bp, Homo sapien
tgcggtcccaggtgcagaatgtggc

SEQ ID NO: 1534459 - DNA, 25 bp, Homo sapien
cggtcccaggtgcagaatgtggccc

SEQ ID NO: 1534460 - DNA, 25 bp, Homo sapien
gtcccaggtgcagaatgtggccctg

SEQ ID NO: 1534461 - DNA, 25 bp, Homo sapien
agggccgtgggacttaggtactcat

SEQ ID NO: 1534462 - DNA, 25 bp, Homo sapien
actgtgaaagcttgtgccctcaggc

SEQ ID NO: 1534463 - DNA, 25 bp, Homo sapien
ggtactcattgtccacccacactgt

SEQ ID NO: 1534464 - DNA, 25 bp, Homo sapien
tcagcacatagtgacaggcaccctg

SEQ ID NO: 1534465 - DNA, 25 bp, Homo sapien
gatctgccgggaaccccttgtggca

SEQ ID NO: 1534466 - DNA, 25 bp, Homo sapien
tgaaatagacgtgcacttggccgcc

SEQ ID NO: 1534467 - DNA, 25 bp, Homo sapien
tcaagctgagtgcaaacacctccgg

SEQ ID NO: 1534468 - DNA, 25 bp, Homo sapien
gcatggccccagaatcgctgaaata

SEQ ID NO: 1534469 - DNA, 25 bp, Homo sapien
aggaacacaagtcattcaatgcaag

SEQ ID NO: 1534470 - DNA, 25 bp, Homo sapien
ctcactgccccacgttcaaattatg

SEQ ID NO: 1534471 - DNA, 25 bp, Homo sapien
tcaatgcaaggatgtcaactcactg

SEQ ID NO: 1534472 - DNA, 25 bp, Homo sapien
gaatgtgtcgaagccttttctatag

SEQ ID NO: 1534473 - DNA, 25 bp, Homo sapien
agaatggctccccggccaggtggta

SEQ ID NO: 1534474 - DNA, 25 bp, Homo sapien
gagaagccacacagctcgtagtggc

SEQ ID NO: 1534475 - DNA, 25 bp, Homo sapien
gccaggtggtatctgccccccatgg

SEQ ID NO: 1534476 - DNA, 25 bp, Homo sapien
gggtcaagcagtccgtgccactgag

SEQ ID NO: 1534477 - DNA, 25 bp, Homo sapien
atgggtggaagcctcgcagtggcag

SEQ ID NO: 1534478 - DNA, 25 bp, Homo sapien
gcatgggtggaagcctcgcagtggc

SEQ ID NO: 1534479 - DNA, 25 bp, Homo sapien
catgggtggaagcctcgcagtggca

SEQ ID NO: 1534480 - DNA, 25 bp, Homo sapien
agcatgggtggaagcctcgcagtgg

SEQ ID NO: 1534481 - DNA, 25 bp, Homo sapien
tgggtggcacccaaagatgcccctt

SEQ ID NO: 1534482 - DNA, 25 bp, Homo sapien
aggtgatgatgtgtgagtgcccggc

SEQ ID NO: 1534483 - DNA, 25 bp, Homo sapien
ggtgatgatgtgtgagtgcccggct

SEQ ID NO: 1534484 - DNA, 25 bp, Homo sapien
gctgtatcctgaagaatggcagtga

SEQ ID NO: 1534485 - DNA, 25 bp, Homo sapien
cacaggattcggcaaagacggacac

SEQ ID NO: 1534486 - DNA, 25 bp, Homo sapien
tatcctgaagaatggcagtgagccg

SEQ ID NO: 1534487 - DNA, 25 bp, Homo sapien
cagtgagccggaagagccacaggat

SEQ ID NO: 1534488 - DNA, 25 bp, Homo sapien
ggctgctggatctgttctcctttca

SEQ ID NO: 1534489 - DNA, 25 bp, Homo sapien
gacctgggtcccattaacctggaca

SEQ ID NO: 1534490 - DNA, 25 bp, Homo sapien
ctgtccctccgcaggtggacctggg

SEQ ID NO: 1534491 - DNA, 25 bp, Homo sapien
gaaacgacacgtcccaaagctggtg

SEQ ID NO: 1534492 - DNA, 25 bp, Homo sapien
gcagaggatgtggtcatcatcccca

SEQ ID NO: 1534493 - DNA, 25 bp, Homo sapien
aagacacaaatcatcgacacagctg

SEQ ID NO: 1534494 - DNA, 25 bp, Homo sapien
gccctggcagatggcggcatatgtc

SEQ ID NO: 1534495 - DNA, 25 bp, Homo sapien
tctgggttgatctcccagtggcagt

SEQ ID NO: 1534496 - DNA, 25 bp, Homo sapien
cgggtccaagcgttgctggtagctg

SEQ ID NO: 1534497 - DNA, 25 bp, Homo sapien
acccggcgcgggtccaagcgttgct

SEQ ID NO: 1534498 - DNA, 25 bp, Homo sapien
ggcgcgggtccaagcgttgctggta

SEQ ID NO: 1534499 - DNA, 25 bp, Homo sapien
tgcacccggcgcgggtccaagcgtt

SEQ ID NO: 1534500 - DNA, 25 bp, Homo sapien
gtgcgcgttatcgttggcgcagccc

SEQ ID NO: 1534501 - DNA, 25 bp, Homo sapien
cgcgttatcgttggcgcagccctcg

SEQ ID NO: 1534502 - DNA, 25 bp, Homo sapien
ctgcccacaggtgcgcgttatcgtt

SEQ ID NO: 1534503 - DNA, 25 bp, Homo sapien
cacaggtgcgcgttatcgttggcgc

SEQ ID NO: 1534504 - DNA, 25 bp, Homo sapien
gccgcactccttcgggtgccggcac

SEQ ID NO: 1534505 - DNA, 25 bp, Homo sapien
gagccgcactccttcgggtgccggc

SEQ ID NO: 1534506 - DNA, 25 bp, Homo sapien
ggccgccgtgcgccgagccgcactc

SEQ ID NO: 1534507 - DNA, 25 bp, Homo sapien
ccgagccgcactccttcgggtgccg

SEQ ID NO: 1534508 - DNA, 25 bp, Homo sapien
agcttgtccaggacgcggaggccaa

SEQ ID NO: 1534509 - DNA, 25 bp, Homo sapien
gctttaaaccccagctgtattctga

SEQ ID NO: 1534510 - DNA, 25 bp, Homo sapien
caaatcatgttggaacctgccctct

SEQ ID NO: 1534511 - DNA, 25 bp, Homo sapien
tgtatgaatctccaagccgagctgt

SEQ ID NO: 1534512 - DNA, 25 bp, Homo sapien
cagtgcaggggaagagctcaggatc

SEQ ID NO: 1534513 - DNA, 25 bp, Homo sapien
ctgcagtgcaggggaagagctcagg

SEQ ID NO: 1534514 - DNA, 25 bp, Homo sapien
agtgcaggggaagagctcaggatcc

SEQ ID NO: 1534515 - DNA, 25 bp, Homo sapien
tgcaggggaagagctcaggatccat

SEQ ID NO: 1534516 - DNA, 25 bp, Homo sapien
caggccctgcttaccgcctggctgt

SEQ ID NO: 1534517 - DNA, 25 bp, Homo sapien
ggccctgcttaccgcctggctgtcc

SEQ ID NO: 1534518 - DNA, 25 bp, Homo sapien
aggccctgcttaccgcctggctgtc

SEQ ID NO: 1534519 - DNA, 25 bp, Homo sapien
tattgtggccattgaactgtacctg

SEQ ID NO: 1534520 - DNA, 25 bp, Homo sapien
gggtcgccactgaagttgccacaga

SEQ ID NO: 1534521 - DNA, 25 bp, Homo sapien
cacagagtccgcagaggtggctcca

SEQ ID NO: 1534522 - DNA, 25 bp, Homo sapien
cacgcacaccaacagcatattgtgg

SEQ ID NO: 1534523 - DNA, 25 bp, Homo sapien
atccaataccgcaggcactagcaac

SEQ ID NO: 1534524 - DNA, 25 bp, Homo sapien
tagttagatcctggattctggaacc

SEQ ID NO: 1534525 - DNA, 25 bp, Homo sapien
ctagcaaccagaggctaccgagtat

SEQ ID NO: 1534526 - DNA, 25 bp, Homo sapien
agctctgctacttggacgaatcccc

SEQ ID NO: 1534527 - DNA, 25 bp, Homo sapien
ctgcgtgtaggacacggggctctca

SEQ ID NO: 1534528 - DNA, 25 bp, Homo sapien
ccaagggcccggagcggtttgccag

SEQ ID NO: 1534529 - DNA, 25 bp, Homo sapien
cccggagcggtttgccagaacactg

SEQ ID NO: 1534530 - DNA, 25 bp, Homo sapien
taggacacggggctctcataccagt

SEQ ID NO: 1534531 - DNA, 25 bp, Homo sapien
agcgcagggcgcagagttggacgta

SEQ ID NO: 1534532 - DNA, 25 bp, Homo sapien
gcgggcaggcaacgcgcagcgcagg

SEQ ID NO: 1534533 - DNA, 25 bp, Homo sapien
acagcatgcggttgcccgtgccata

SEQ ID NO: 1534534 - DNA, 25 bp, Homo sapien
ttgcccgtgccatactggcagaggt

SEQ ID NO: 1534535 - DNA, 25 bp, Homo sapien
actgcatcccaggctggctcgccac

SEQ ID NO: 1534536 - DNA, 25 bp, Homo sapien
taactgcatcccaggctggctcgcc

SEQ ID NO: 1534537 - DNA, 25 bp, Homo sapien
aactgcatcccaggctggctcgcca

SEQ ID NO: 1534538 - DNA, 25 bp, Homo sapien
gtaactgcatcccaggctggctcgc

SEQ ID NO: 1534539 - DNA, 25 bp, Homo sapien
cagggcgcggaggagttgaggctag

SEQ ID NO: 1534540 - DNA, 25 bp, Homo sapien
cggaggagttgaggctagcacaggt

SEQ ID NO: 1534541 - DNA, 25 bp, Homo sapien
agggtggcccacaggagtcatagta

SEQ ID NO: 1534542 - DNA, 25 bp, Homo sapien
agttgaggctagcacaggtggccgg

SEQ ID NO: 1534543 - DNA, 25 bp, Homo sapien
gaagatgcccgcctccagggcaaag

SEQ ID NO: 1534544 - DNA, 25 bp, Homo sapien
gcaaagccctcgaggcagaagcagc

SEQ ID NO: 1534545 - DNA, 25 bp, Homo sapien
agggcaaagccctcgaggcagaagc

SEQ ID NO: 1534546 - DNA, 25 bp, Homo sapien
ccagggcaaagccctcgaggcagaa

SEQ ID NO: 1534547 - DNA, 25 bp, Homo sapien
gcaggtggcagccgcagcaagcgtg

SEQ ID NO: 1534548 - DNA, 25 bp, Homo sapien
caggtggcagccgcagcaagcgtgg

SEQ ID NO: 1534549 - DNA, 25 bp, Homo sapien
ctgcaggtggcagccgcagcaagcg

SEQ ID NO: 1534550 - DNA, 25 bp, Homo sapien
tgcaggtggcagccgcagcaagcgt

SEQ ID NO: 1534551 - DNA, 25 bp, Homo sapien
ggggctgcaggcagcacctcagtac

SEQ ID NO: 1534552 - DNA, 25 bp, Homo sapien
ctctgatcacagggggctgcaggca

SEQ ID NO: 1534553 - DNA, 25 bp, Homo sapien
acagggggctgcaggcagcacctca

SEQ ID NO: 1534554 - DNA, 25 bp, Homo sapien
cagggggctgcaggcagcacctcag

SEQ ID NO: 1534555 - DNA, 25 bp, Homo sapien
agcgggcgtccaggtccatggtaca

SEQ ID NO: 1534556 - DNA, 25 bp, Homo sapien
actcgagcgggcgtccaggtccatg

SEQ ID NO: 1534557 - DNA, 25 bp, Homo sapien
gcgtccaggtccatggtacacgcac

SEQ ID NO: 1534558 - DNA, 25 bp, Homo sapien
cgggcgtccaggtccatggtacacg

SEQ ID NO: 1534559 - DNA, 25 bp, Homo sapien
ttctagccaatatctcccagccagg

SEQ ID NO: 1534560 - DNA, 25 bp, Homo sapien
tgggtcccattgaaagtgtgcaggt

SEQ ID NO: 1534561 - DNA, 25 bp, Homo sapien
cccttgaacctgatggtgggtccca

SEQ ID NO: 1534562 - DNA, 25 bp, Homo sapien
cacccagatggcataggcgctgtgg

SEQ ID NO: 1534563 - DNA, 25 bp, Homo sapien
ccaggaccagagctgggtgacaagt

SEQ ID NO: 1534564 - DNA, 25 bp, Homo sapien
gcccaggaccagagctgggtgacaa

SEQ ID NO: 1534565 - DNA, 25 bp, Homo sapien
tggaggcccaggaccagagctgggt

SEQ ID NO: 1534566 - DNA, 25 bp, Homo sapien
aggaccagagctgggtgacaagtac

SEQ ID NO: 1534567 - DNA, 25 bp, Homo sapien
tacgtcgggcaaccacgtccagaca

SEQ ID NO: 1534568 - DNA, 25 bp, Homo sapien
ggctacgtcgggcaaccacgtccag

SEQ ID NO: 1534569 - DNA, 25 bp, Homo sapien
agacacccaggctacgtcgggcaac

SEQ ID NO: 1534570 - DNA, 25 bp, Homo sapien
acacagacacccaggctacgtcggg

SEQ ID NO: 1534571 - DNA, 25 bp, Homo sapien
ggcacagaggggctgggcccccatt

SEQ ID NO: 1534572 - DNA, 25 bp, Homo sapien
ctggtgggcacagaggggctgggcc

SEQ ID NO: 1534573 - DNA, 25 bp, Homo sapien
tggtgggcacagaggggctgggccc

SEQ ID NO: 1534574 - DNA, 25 bp, Homo sapien
acagaggggctgggcccccattaag

SEQ ID NO: 1534575 - DNA, 25 bp, Homo sapien
atcttgggtgcccagcaagccacag

SEQ ID NO: 1534576 - DNA, 25 bp, Homo sapien
ccccagtatggcacacagagtctct

SEQ ID NO: 1534577 - DNA, 25 bp, Homo sapien
catgggaacgctgcgctgctggctt

SEQ ID NO: 1534578 - DNA, 25 bp, Homo sapien
acgtccttactgcaggccctgtagg

SEQ ID NO: 1534579 - DNA, 25 bp, Homo sapien
gtgattaacggtggcggcgtggtca

SEQ ID NO: 1534580 - DNA, 25 bp, Homo sapien
cggtgattaacggtggcggcgtggt

SEQ ID NO: 1534581 - DNA, 25 bp, Homo sapien
attaacggtggcggcgtggtcacgg

SEQ ID NO: 1534582 - DNA, 25 bp, Homo sapien
taacggtggcggcgtggtcacggtg

SEQ ID NO: 1534583 - DNA, 25 bp, Homo sapien
gagcatttccaaccagaataggacc

SEQ ID NO: 1534584 - DNA, 25 bp, Homo sapien
catcaggatgtagcataatggtggc

SEQ ID NO: 1534585 - DNA, 25 bp, Homo sapien
gagcaagcattactattctggagca

SEQ ID NO: 1534586 - DNA, 25 bp, Homo sapien
gggccaagggtaagtcataaaggca

SEQ ID NO: 1534587 - DNA, 25 bp, Homo sapien
gtaaaagcagaagcgcaagtgcctg

SEQ ID NO: 1534588 - DNA, 25 bp, Homo sapien
tcttccggtcaaaggaggcgacgtg

SEQ ID NO: 1534589 - DNA, 25 bp, Homo sapien
tgggtggcacccaaagatgcccctg

SEQ ID NO: 1534590 - DNA, 25 bp, Homo sapien
tttgaaatgaacacaatgggactgc

SEQ ID NO: 1534591 - DNA, 25 bp, Homo sapien
gtcggggctctctctgcagacaaac

SEQ ID NO: 1534592 - DNA, 25 bp, Homo sapien
ggtcggggctctctctgcagacaaa

SEQ ID NO: 1534593 - DNA, 25 bp, Homo sapien
tcaggtcggggctctctctgcagac

SEQ ID NO: 1534594 - DNA, 25 bp, Homo sapien
aggtcggggctctctctgcagacaa

SEQ ID NO: 1534595 - DNA, 25 bp, Homo sapien
tctagatgccaatgagtgcttacct

SEQ ID NO: 1534596 - DNA, 25 bp, Homo sapien
cagtctgtgactggtttgagttacc

SEQ ID NO: 1534597 - DNA, 25 bp, Homo sapien
gcttcaatcggttcaagagtctcta

SEQ ID NO: 1534598 - DNA, 25 bp, Homo sapien
gaaaaactgagttagcaccctgatc

SEQ ID NO: 1534599 - DNA, 25 bp, Homo sapien
gactgtcctccgcagaacaggaaga

SEQ ID NO: 1534600 - DNA, 25 bp, Homo sapien
gattacagcacagactcgacagatg

SEQ ID NO: 1534601 - DNA, 25 bp, Homo sapien
aacaggaagagagggcgaatccgcc

SEQ ID NO: 1534602 - DNA, 25 bp, Homo sapien
tgtcctgttttgtgatctccctcca

SEQ ID NO: 1534603 - DNA, 25 bp, Homo sapien
gaatgaatgtcttggccagcttccc

SEQ ID NO: 1534604 - DNA, 25 bp, Homo sapien
gaaggattgcaaactggcggtccca

SEQ ID NO: 1534605 - DNA, 25 bp, Homo sapien
catttggagctagacatctgggaca

SEQ ID NO: 1534606 - DNA, 25 bp, Homo sapien
tatctgttaattaccaggctgggca

SEQ ID NO: 1534607 - DNA, 25 bp, Homo sapien
ctgtgctgctctgacgtcatcactc

SEQ ID NO: 1534608 - DNA, 25 bp, Homo sapien
gtgtggctgtggacgtatcactgtc

SEQ ID NO: 1534609 - DNA, 25 bp, Homo sapien
ctgtccgcctggcttccaggagcca

SEQ ID NO: 1534610 - DNA, 25 bp, Homo sapien
gtgctgctctgacgtcatcactcac

SEQ ID NO: 1534611 - DNA, 25 bp, Homo sapien
gagaggccggtggacagggtaatgt

SEQ ID NO: 1534612 - DNA, 25 bp, Homo sapien
tcctgggcaagatggggctagagag

SEQ ID NO: 1534613 - DNA, 25 bp, Homo sapien
gggctagagaggccggtggacaggg

SEQ ID NO: 1534614 - DNA, 25 bp, Homo sapien
acagcgatacgccaaggtcccactt

SEQ ID NO: 1534615 - DNA, 25 bp, Homo sapien
tcttgccgctggtacaatttcagga

SEQ ID NO: 1534616 - DNA, 25 bp, Homo sapien
ggagccagacgcctgggtctacaga

SEQ ID NO: 1534617 - DNA, 25 bp, Homo sapien
tcagcagaagatgctagcgtgacca

SEQ ID NO: 1534618 - DNA, 25 bp, Homo sapien
ctctttccgtgggtgctgggagcca

SEQ ID NO: 1534619 - DNA, 25 bp, Homo sapien
ctggggtctttaaacggcagagcct

SEQ ID NO: 1534620 - DNA, 25 bp, Homo sapien
tggggtctttaaacggcagagcctc

SEQ ID NO: 1534621 - DNA, 25 bp, Homo sapien
tcttaaagagacagcttcaccccct

SEQ ID NO: 1534622 - DNA, 25 bp, Homo sapien
aattggatgggctggaactcggccc

SEQ ID NO: 1534623 - DNA, 25 bp, Homo sapien
gcagcctcaggtgagacggagaatt

SEQ ID NO: 1534624 - DNA, 25 bp, Homo sapien
ctggaattaagggaggagctttctc

SEQ ID NO: 1534625 - DNA, 25 bp, Homo sapien
tagaaaacaagtcagatgccctgag

SEQ ID NO: 1534626 - DNA, 25 bp, Homo sapien
ggtagaaaacaagtcagatgccctg

SEQ ID NO: 1534627 - DNA, 25 bp, Homo sapien
gcaggtagaaaacaagtcagatgcc

SEQ ID NO: 1534628 - DNA, 25 bp, Homo sapien
gaaaacaagtcagatgccctgaggc

SEQ ID NO: 1534629 - DNA, 25 bp, Homo sapien
ttatccgaagctgccacgccctaag

SEQ ID NO: 1534630 - DNA, 25 bp, Homo sapien
caggcggagtcctgcgtttatccga

SEQ ID NO: 1534631 - DNA, 25 bp, Homo sapien
ctgagcagaggttccgggagaaatc

SEQ ID NO: 1534632 - DNA, 25 bp, Homo sapien
aaatcgggctgccaggcggagtcct

SEQ ID NO: 1534633 - DNA, 25 bp, Homo sapien
catccagccaagactgacagatggt

SEQ ID NO: 1534634 - DNA, 25 bp, Homo sapien
acgtccagtcccatgcttccggagg

SEQ ID NO: 1534635 - DNA, 25 bp, Homo sapien
tcttaagcctctttccaggggctcc

SEQ ID NO: 1534636 - DNA, 25 bp, Homo sapien
cagcctctgcaaaacaacgtccagt

SEQ ID NO: 1534637 - DNA, 25 bp, Homo sapien
tgcagttgtaatcctgtaacccctg

SEQ ID NO: 1534638 - DNA, 25 bp, Homo sapien
tattattagcccacattgcagttgt

SEQ ID NO: 1534639 - DNA, 25 bp, Homo sapien
taacagcagatgcttattgagtgtc

SEQ ID NO: 1534640 - DNA, 25 bp, Homo sapien
aagctgtcacccatgaccatacgag

SEQ ID NO: 1534641 - DNA, 25 bp, Homo sapien
gttataattttgatagcgagagctg

SEQ ID NO: 1534642 - DNA, 25 bp, Homo sapien
agttataattttgatagcgagagct

SEQ ID NO: 1534643 - DNA, 25 bp, Homo sapien
gtgacagcaaacactttctctttcc

SEQ ID NO: 1534644 - DNA, 25 bp, Homo sapien
ggtgacagcaaacactttctctttc

SEQ ID NO: 1534645 - DNA, 25 bp, Homo sapien
gcagagttcctggtgacagcaaaca

SEQ ID NO: 1534646 - DNA, 25 bp, Homo sapien
gcccagcagagttcctggtgacagc

SEQ ID NO: 1534647 - DNA, 25 bp, Homo sapien
gacaggaaggctggcatctcgctgg

SEQ ID NO: 1534648 - DNA, 25 bp, Homo sapien
agctgcaccgtggagtggggactgg

SEQ ID NO: 1534649 - DNA, 25 bp, Homo sapien
ctgagagataagccgcagctgcacc

SEQ ID NO: 1534650 - DNA, 25 bp, Homo sapien
atctcgctgggctgagagataagcc

SEQ ID NO: 1534651 - DNA, 25 bp, Homo sapien
gcaggcccagggtcaccttctgcat

SEQ ID NO: 1534652 - DNA, 25 bp, Homo sapien
ctgccaggaacacaagcaggcccag

SEQ ID NO: 1534653 - DNA, 25 bp, Homo sapien
gccaggaacacaagcaggcccaggg

SEQ ID NO: 1534654 - DNA, 25 bp, Homo sapien
aagcaggcccagggtcaccttctgc

SEQ ID NO: 1534655 - DNA, 25 bp, Homo sapien
taagagagtaggatcgcttgacccc

SEQ ID NO: 1534656 - DNA, 25 bp, Homo sapien
agacagaggttggatccccgcatcc

SEQ ID NO: 1534657 - DNA, 25 bp, Homo sapien
tggcattctagctgtgtaggaggct

SEQ ID NO: 1534658 - DNA, 25 bp, Homo sapien
tgtatccccggctatcactagtctg

SEQ ID NO: 1534659 - DNA, 25 bp, Homo sapien
cttctaggtcattggcgtccaggac

SEQ ID NO: 1534660 - DNA, 25 bp, Homo sapien
tcattggcgtccaggacaggaaagc

SEQ ID NO: 1534661 - DNA, 25 bp, Homo sapien
taggtcattggcgtccaggacagga

SEQ ID NO: 1534662 - DNA, 25 bp, Homo sapien
ttctaggtcattggcgtccaggaca

SEQ ID NO: 1534663 - DNA, 25 bp, Homo sapien
tgtccccccattctcttgacaaata

SEQ ID NO: 1534664 - DNA, 25 bp, Homo sapien
ctctccatctgtccccccattctct

SEQ ID NO: 1534665 - DNA, 25 bp, Homo sapien
gacgatgatgatgcccatggcgcac

SEQ ID NO: 1534666 - DNA, 25 bp, Homo sapien
tcatgacgatgatgatgcccatggc

SEQ ID NO: 1534667 - DNA, 25 bp, Homo sapien
tgagcccgccaacctggaggctgtg

SEQ ID NO: 1534668 - DNA, 25 bp, Homo sapien
tggcgcacagaaccccagcgcagat

SEQ ID NO: 1534669 - DNA, 25 bp, Homo sapien
ctgagtggtcaggggaggggagccc

SEQ ID NO: 1534670 - DNA, 25 bp, Homo sapien
cggcccgcctgctcccccgagctcc

SEQ ID NO: 1534671 - DNA, 25 bp, Homo sapien
cccggcccgcctgctcccccgagct

SEQ ID NO: 1534672 - DNA, 25 bp, Homo sapien
tgctcccccgagctcctccactcac

SEQ ID NO: 1534673 - DNA, 25 bp, Homo sapien
acttctggccaaacttgcatttgca

SEQ ID NO: 1534674 - DNA, 25 bp, Homo sapien
tctggccaaacttgcatttgcattt

SEQ ID NO: 1534675 - DNA, 25 bp, Homo sapien
cggacttctggccaaacttgcattt

SEQ ID NO: 1534676 - DNA, 25 bp, Homo sapien
ccggacttctggccaaacttgcatt

SEQ ID NO: 1534677 - DNA, 25 bp, Homo sapien
cctgaaaagcgtccagtcagcctga

SEQ ID NO: 1534678 - DNA, 25 bp, Homo sapien
aagtggtgagattggtgtccgcccc

SEQ ID NO: 1534679 - DNA, 25 bp, Homo sapien
tcctgctgggagagttagccctttc

SEQ ID NO: 1534680 - DNA, 25 bp, Homo sapien
caataaacctggaaatcttagcggc

SEQ ID NO: 1534681 - DNA, 25 bp, Homo sapien
ggggtgatgagaggtggagtctccc

SEQ ID NO: 1534682 - DNA, 25 bp, Homo sapien
tgtgagggtggattgagttcttttc

SEQ ID NO: 1534683 - DNA, 25 bp, Homo sapien
gaagtgatggggtccgtttgtgagg

SEQ ID NO: 1534684 - DNA, 25 bp, Homo sapien
tgagggtggattgagttcttttctt

SEQ ID NO: 1534685 - DNA, 25 bp, Homo sapien
tttgtgagggtggattgagttcttt

SEQ ID NO: 1534686 - DNA, 25 bp, Homo sapien
gaccctcttgcgagaggtgagatga

SEQ ID NO: 1534687 - DNA, 25 bp, Homo sapien
cccaatttcagctggtctgtcctca

SEQ ID NO: 1534688 - DNA, 25 bp, Homo sapien
caagtttctgtgcagagacaggacc

SEQ ID NO: 1534689 - DNA, 25 bp, Homo sapien
gccctgccatgcaaaggagtcccag

SEQ ID NO: 1534690 - DNA, 25 bp, Homo sapien
tatttaacgggcttgcagggacatt

SEQ ID NO: 1534691 - DNA, 25 bp, Homo sapien
caatgcacacataggaagtctccag

SEQ ID NO: 1534692 - DNA, 25 bp, Homo sapien
caagccacaagggaacaggcctgtg

SEQ ID NO: 1534693 - DNA, 25 bp, Homo sapien
tgaacacttccatcatagcgggacg

SEQ ID NO: 1534694 - DNA, 25 bp, Homo sapien
ggggctgagcactttggaccccctg

SEQ ID NO: 1534695 - DNA, 25 bp, Homo sapien
aagaaggcccccaaacgtcctgctg

SEQ ID NO: 1534696 - DNA, 25 bp, Homo sapien
ggctgagcactttggaccccctggc

SEQ ID NO: 1534697 - DNA, 25 bp, Homo sapien
gaaggcccccaaacgtcctgctgtg

SEQ ID NO: 1534698 - DNA, 25 bp, Homo sapien
tggagcaggacgtggggtgtaaaca

SEQ ID NO: 1534699 - DNA, 25 bp, Homo sapien
ggtgtaaacaccgtcaggcatccaa

SEQ ID NO: 1534700 - DNA, 25 bp, Homo sapien
taaacaccgtcaggcatccaatact

SEQ ID NO: 1534701 - DNA, 25 bp, Homo sapien
cgtggggtgtaaacaccgtcaggca

SEQ ID NO: 1534702 - DNA, 25 bp, Homo sapien
cagctgccacatcgccacaggctgc

SEQ ID NO: 1534703 - DNA, 25 bp, Homo sapien
actcagggggtcacgcacagccctg

SEQ ID NO: 1534704 - DNA, 25 bp, Homo sapien
cccactcagggggtcacgcacagcc

SEQ ID NO: 1534705 - DNA, 25 bp, Homo sapien
gtgaggcccagctgccacatcgcca

SEQ ID NO: 1534706 - DNA, 25 bp, Homo sapien
tgccccgcgaaatcccagctccctg

SEQ ID NO: 1534707 - DNA, 25 bp, Homo sapien
actgtgccccgcgaaatcccagctc

SEQ ID NO: 1534708 - DNA, 25 bp, Homo sapien
ctgtgccccgcgaaatcccagctcc

SEQ ID NO: 1534709 - DNA, 25 bp, Homo sapien
cggcctcactgtgccccgcgaaatc

SEQ ID NO: 1534710 - DNA, 25 bp, Homo sapien
tcccacatagggcttgaacccaagg

SEQ ID NO: 1534711 - DNA, 25 bp, Homo sapien
agtgtttgtcctctatcttggtggc

SEQ ID NO: 1534712 - DNA, 25 bp, Homo sapien
gaacccaagggattaagtcagagac

SEQ ID NO: 1534713 - DNA, 25 bp, Homo sapien
caccacggattaggcagtgtgtgcc

SEQ ID NO: 1534714 - DNA, 25 bp, Homo sapien
aaaaccaagatgtggccaagagacg

SEQ ID NO: 1534715 - DNA, 25 bp, Homo sapien
aaccaagatgtggccaagagacgcc

SEQ ID NO: 1534716 - DNA, 25 bp, Homo sapien
ccaagatgtggccaagagacgccat

SEQ ID NO: 1534717 - DNA, 25 bp, Homo sapien
aaaccaagatgtggccaagagacgc

SEQ ID NO: 1534718 - DNA, 25 bp, Homo sapien
taagataattaagggggagcagata

SEQ ID NO: 1534719 - DNA, 25 bp, Homo sapien
taattaagggggagcagatatggga

SEQ ID NO: 1534720 - DNA, 25 bp, Homo sapien
ttaagggggagcagatatgggagga

SEQ ID NO: 1534721 - DNA, 25 bp, Homo sapien
ataattaagggggagcagatatggg

SEQ ID NO: 1534722 - DNA, 25 bp, Homo sapien
atgacgaggcctccgatctgcaggg

SEQ ID NO: 1534723 - DNA, 25 bp, Homo sapien
aggatcccggcgatgacgaggcctc

SEQ ID NO: 1534724 - DNA, 25 bp, Homo sapien
gcctccgatctgcagggactggtag

SEQ ID NO: 1534725 - DNA, 25 bp, Homo sapien
cggcgatgacgaggcctccgatctg

SEQ ID NO: 1534726 - DNA, 25 bp, Homo sapien
aggcggggtagagggcgggagctag

SEQ ID NO: 1534727 - DNA, 25 bp, Homo sapien
gcgggcgccaagcggcgctgtagct

SEQ ID NO: 1534728 - DNA, 25 bp, Homo sapien
ggcgggcgccaagcggcgctgtagc

SEQ ID NO: 1534729 - DNA, 25 bp, Homo sapien
cggcgggcgccaagcggcgctgtag

SEQ ID NO: 1534730 - DNA, 25 bp, Homo sapien
ctggttgaacttgcaccggcatctt

SEQ ID NO: 1534731 - DNA, 25 bp, Homo sapien
tgctggttgaacttgcaccggcatc

SEQ ID NO: 1534732 - DNA, 25 bp, Homo sapien
tggttgaacttgcaccggcatcttc

SEQ ID NO: 1534733 - DNA, 25 bp, Homo sapien
gctggttgaacttgcaccggcatct

SEQ ID NO: 1534734 - DNA, 25 bp, Homo sapien
gatggagctgcggaaagttccctcc

SEQ ID NO: 1534735 - DNA, 25 bp, Homo sapien
tccctcctcttcatcgggttcccca

SEQ ID NO: 1534736 - DNA, 25 bp, Homo sapien
ggcggatggagctgcggaaagttcc

SEQ ID NO: 1534737 - DNA, 25 bp, Homo sapien
gctgcggaaagttccctcctcttca

SEQ ID NO: 1534738 - DNA, 25 bp, Homo sapien
ctggccggattccatcgctccaggt

SEQ ID NO: 1534739 - DNA, 25 bp, Homo sapien
tcccaccgccgtgtcagagctgcag

SEQ ID NO: 1534740 - DNA, 25 bp, Homo sapien
ggtgagaggcgaggggggacgtcca

SEQ ID NO: 1534741 - DNA, 25 bp, Homo sapien
gcccttcaactctggcacttggccc

SEQ ID NO: 1534742 - DNA, 25 bp, Homo sapien
ctcgccgcccttcaactctggcact

SEQ ID NO: 1534743 - DNA, 25 bp, Homo sapien
ttattggaagtcttggcggcagggg

SEQ ID NO: 1534744 - DNA, 25 bp, Homo sapien
ttggaagtcttggcggcagggggag

SEQ ID NO: 1534745 - DNA, 25 bp, Homo sapien
tcttggcggcagggggagtctgcgg

SEQ ID NO: 1534746 - DNA, 25 bp, Homo sapien
cttggcggcagggggagtctgcggg

SEQ ID NO: 1534747 - DNA, 25 bp, Homo sapien
gaagcaggacggaccgatgtggggg

SEQ ID NO: 1534748 - DNA, 25 bp, Homo sapien
aagcaggacggaccgatgtgggggg

SEQ ID NO: 1534749 - DNA, 25 bp, Homo sapien
caggacggaccgatgtgggggggag

SEQ ID NO: 1534750 - DNA, 25 bp, Homo sapien
ctggaagcaggacggaccgatgtgg

SEQ ID NO: 1534751 - DNA, 25 bp, Homo sapien
ctggatgctttggcggcgaaggcgc

SEQ ID NO: 1534752 - DNA, 25 bp, Homo sapien
tggatgctttggcggcgaaggcgcg

SEQ ID NO: 1534753 - DNA, 25 bp, Homo sapien
gctggatgctttggcggcgaaggcg

SEQ ID NO: 1534754 - DNA, 25 bp, Homo sapien
tcagtgctggagacccttgctgggc

SEQ ID NO: 1534755 - DNA, 25 bp, Homo sapien
ggcactggctccctcttgaagcagt

SEQ ID NO: 1534756 - DNA, 25 bp, Homo sapien
ttgaagcagtctgtgccttgctcat

SEQ ID NO: 1534757 - DNA, 25 bp, Homo sapien
ctggagacccttgctgggcactggc

SEQ ID NO: 1534758 - DNA, 25 bp, Homo sapien
tagtaaaatgggtcaggttcctcag

SEQ ID NO: 1534759 - DNA, 25 bp, Homo sapien
agtaaaatgggtcaggttcctcagg

SEQ ID NO: 1534760 - DNA, 25 bp, Homo sapien
catagtaaaatgggtcaggttcctc

SEQ ID NO: 1534761 - DNA, 25 bp, Homo sapien
taaaatgggtcaggttcctcaggag

SEQ ID NO: 1534762 - DNA, 25 bp, Homo sapien
gccagtggcccagcacgtatcgtgt

SEQ ID NO: 1534763 - DNA, 25 bp, Homo sapien
tggcccagcacgtatcgtgtggcca

SEQ ID NO: 1534764 - DNA, 25 bp, Homo sapien
atatatggtcccgtggccagtggcc

SEQ ID NO: 1534765 - DNA, 25 bp, Homo sapien
cagcacgtatcgtgtggccacagct

SEQ ID NO: 1534766 - DNA, 25 bp, Homo sapien
gcccacagtctgcaccgtgttgtag

SEQ ID NO: 1534767 - DNA, 25 bp, Homo sapien
gttgccagagtcatgcccacagtct

SEQ ID NO: 1534768 - DNA, 25 bp, Homo sapien
tgatgacgatgaggatacccagcag

SEQ ID NO: 1534769 - DNA, 25 bp, Homo sapien
aagatggttgccagagtcatgccca

SEQ ID NO: 1534770 - DNA, 25 bp, Homo sapien
tgaggcagcccaggaatgggtcgca

SEQ ID NO: 1534771 - DNA, 25 bp, Homo sapien
aagacaggacatagcgggtaggata

SEQ ID NO: 1534772 - DNA, 25 bp, Homo sapien
cagcccaggaatgggtcgcacttac

SEQ ID NO: 1534773 - DNA, 25 bp, Homo sapien
catagcgggtaggatatggatgaaa

SEQ ID NO: 1534774 - DNA, 25 bp, Homo sapien
agtccgccttcctgcacttcacctt

SEQ ID NO: 1534775 - DNA, 25 bp, Homo sapien
ctggagtccgccttcctgcacttca

SEQ ID NO: 1534776 - DNA, 25 bp, Homo sapien
cgccttcctgcacttcaccttcttg

SEQ ID NO: 1534777 - DNA, 25 bp, Homo sapien
gccttcctgcacttcaccttcttgc

SEQ ID NO: 1534778 - DNA, 25 bp, Homo sapien
cactctaatgtcttgttcccttggg

SEQ ID NO: 1534779 - DNA, 25 bp, Homo sapien
tgccagaaagggagtccccatctcc

SEQ ID NO: 1534780 - DNA, 25 bp, Homo sapien
tgcgtgagccactagaaaggtggaa

SEQ ID NO: 1534781 - DNA, 25 bp, Homo sapien
attccccggcaccatggaagccaga

SEQ ID NO: 1534782 - DNA, 25 bp, Homo sapien
tcggcagcggagtttcctcgggaag

SEQ ID NO: 1534783 - DNA, 25 bp, Homo sapien
tgggggatcgtcattgccaaggcct

SEQ ID NO: 1534784 - DNA, 25 bp, Homo sapien
ttattaagctcaagacatggacact

SEQ ID NO: 1534785 - DNA, 25 bp, Homo sapien
gatggactcccggatcccaggagct

SEQ ID NO: 1534786 - DNA, 25 bp, Homo sapien
tcggagctgggggtcctaagccggc

SEQ ID NO: 1534787 - DNA, 25 bp, Homo sapien
ctgggggtcctaagccggcagcctc

SEQ ID NO: 1534788 - DNA, 25 bp, Homo sapien
cctaagccggcagcctcgtggagag

SEQ ID NO: 1534789 - DNA, 25 bp, Homo sapien
gcagcctcgtggagagagggacgcg

SEQ ID NO: 1534790 - DNA, 25 bp, Homo sapien
agaggggcagcggatggaggtggcg

SEQ ID NO: 1534791 - DNA, 25 bp, Homo sapien
aggggcagcggatggaggtggcgca

SEQ ID NO: 1534792 - DNA, 25 bp, Homo sapien
gaggtggcgcacgagagggacttac

SEQ ID NO: 1534793 - DNA, 25 bp, Homo sapien
gggcagcggatggaggtggcgcacg

SEQ ID NO: 1534794 - DNA, 25 bp, Homo sapien
gcagagagatgtgggcgtggatggg

SEQ ID NO: 1534795 - DNA, 25 bp, Homo sapien
aggcgggcgggagcgaggcagagcg

SEQ ID NO: 1534796 - DNA, 25 bp, Homo sapien
gccaggcgcttatccctcactggga

SEQ ID NO: 1534797 - DNA, 25 bp, Homo sapien
aggaagagtgagtaacgcctcccgc

SEQ ID NO: 1534798 - DNA, 25 bp, Homo sapien
catgagataaatgggtcttccagca

SEQ ID NO: 1534799 - DNA, 25 bp, Homo sapien
ctcccgcgctcagaggaaaaagtga

SEQ ID NO: 1534800 - DNA, 25 bp, Homo sapien
agaatcaggccaacgatggtgagaa

SEQ ID NO: 1534801 - DNA, 25 bp, Homo sapien
gagaatcaggccaacgatggtgaga

SEQ ID NO: 1534802 - DNA, 25 bp, Homo sapien
gaatcaggccaacgatggtgagaag

SEQ ID NO: 1534803 - DNA, 25 bp, Homo sapien
ggagaatcaggccaacgatggtgag

SEQ ID NO: 1534804 - DNA, 25 bp, Homo sapien
cagtgctggataactccactgcccc

SEQ ID NO: 1534805 - DNA, 25 bp, Homo sapien
catgtggtcagtgctggataactcc

SEQ ID NO: 1534806 - DNA, 25 bp, Homo sapien
cccatcctggtcctgcctctgtacc

SEQ ID NO: 1534807 - DNA, 25 bp, Homo sapien
tccagcctggacatcccagcagcct

SEQ ID NO: 1534808 - DNA, 25 bp, Homo sapien
gtccatgatagttgagtctgctgaa

SEQ ID NO: 1534809 - DNA, 25 bp, Homo sapien
tgctgaagaactggacgtggtatct

SEQ ID NO: 1534810 - DNA, 25 bp, Homo sapien
gacgtggtatctttcaacgtctgtc

SEQ ID NO: 1534811 - DNA, 25 bp, Homo sapien
gctcgtgtcgggacctgaatgtcca

SEQ ID NO: 1534812 - DNA, 25 bp, Homo sapien
tgacaggatcttgatagatgtgtcc

SEQ ID NO: 1534813 - DNA, 25 bp, Homo sapien
gcaatgacaggatcttgatagatgt

SEQ ID NO: 1534814 - DNA, 25 bp, Homo sapien
gatcttgatagatgtgtccctttcc

SEQ ID NO: 1534815 - DNA, 25 bp, Homo sapien
ttgatagatgtgtccctttcctcac

SEQ ID NO: 1534816 - DNA, 25 bp, Homo sapien
ggctggagttctgtgtagactgcat

SEQ ID NO: 1534817 - DNA, 25 bp, Homo sapien
tgggctggagttctgtgtagactgc

SEQ ID NO: 1534818 - DNA, 25 bp, Homo sapien
gaggtgggctggagttctgtgtaga

SEQ ID NO: 1534819 - DNA, 25 bp, Homo sapien
gggttggagaggtgggctggagttc

SEQ ID NO: 1534820 - DNA, 25 bp, Homo sapien
gactccataagctgtgatataggcg

SEQ ID NO: 1534821 - DNA, 25 bp, Homo sapien
taagcatgcatgtcctttgccctgt

SEQ ID NO: 1534822 - DNA, 25 bp, Homo sapien
ccctgacttgttgtgagaccttgaa

SEQ ID NO: 1534823 - DNA, 25 bp, Homo sapien
tattccaagtgcgtttgctcaagga

SEQ ID NO: 1534824 - DNA, 25 bp, Homo sapien
agaggcccatccgttccttccagtt

SEQ ID NO: 1534825 - DNA, 25 bp, Homo sapien
ctggatctgtcactagaggcccatc

SEQ ID NO: 1534826 - DNA, 25 bp, Homo sapien
gaggcccatccgttccttccagttg

SEQ ID NO: 1534827 - DNA, 25 bp, Homo sapien
tctgtcactagaggcccatccgttc

SEQ ID NO: 1534828 - DNA, 25 bp, Homo sapien
ctggaagaaacccctctcccacatc

SEQ ID NO: 1534829 - DNA, 25 bp, Homo sapien
aagaaacccctctcccacatctaca

SEQ ID NO: 1534830 - DNA, 25 bp, Homo sapien
tggaagaaacccctctcccacatct

SEQ ID NO: 1534831 - DNA, 25 bp, Homo sapien
aaacccctctcccacatctacacag

SEQ ID NO: 1534832 - DNA, 25 bp, Homo sapien
aaacaagggatattactgagagtct

SEQ ID NO: 1534833 - DNA, 25 bp, Homo sapien
acaagggatattactgagagtctgc

SEQ ID NO: 1534834 - DNA, 25 bp, Homo sapien
aacaagggatattactgagagtctg

SEQ ID NO: 1534835 - DNA, 25 bp, Homo sapien
gtctgtctggacgtctgtgcttggg

SEQ ID NO: 1534836 - DNA, 25 bp, Homo sapien
tctgggggtctgtctggacgtctgt

SEQ ID NO: 1534837 - DNA, 25 bp, Homo sapien
atggtctctcagagagcgtcgtggt

SEQ ID NO: 1534838 - DNA, 25 bp, Homo sapien
cagatggcttgagggtctgggggtc

SEQ ID NO: 1534839 - DNA, 25 bp, Homo sapien
catagaagaaggggtcatcctcatg

SEQ ID NO: 1534840 - DNA, 25 bp, Homo sapien
aagaaggggtcatcctcatgaaaac

SEQ ID NO: 1534841 - DNA, 25 bp, Homo sapien
tagaagaaggggtcatcctcatgaa

SEQ ID NO: 1534842 - DNA, 25 bp, Homo sapien
gaagaaggggtcatcctcatgaaaa

SEQ ID NO: 1534843 - DNA, 25 bp, Homo sapien
gaacagcacagctgcgaccaacagc

SEQ ID NO: 1534844 - DNA, 25 bp, Homo sapien
atgatgcctgtgatgaacagcacag

SEQ ID NO: 1534845 - DNA, 25 bp, Homo sapien
tgatgatgcctgtgatgaacagcac

SEQ ID NO: 1534846 - DNA, 25 bp, Homo sapien
tgtgatgaacagcacagctgcgacc

SEQ ID NO: 1534847 - DNA, 25 bp, Homo sapien
cctccgtcataagtccccctcctgg

SEQ ID NO: 1534848 - DNA, 25 bp, Homo sapien
gagaacccagccctccgtcataagt

SEQ ID NO: 1534849 - DNA, 25 bp, Homo sapien
caaaattgcccagggacctttgaga

SEQ ID NO: 1534850 - DNA, 25 bp, Homo sapien
acaaaattgcccagggacctttgag

SEQ ID NO: 1534851 - DNA, 25 bp, Homo sapien
tctgaaggacgtaagggagacacct

SEQ ID NO: 1534852 - DNA, 25 bp, Homo sapien
gacacagatgggttccagagactca

SEQ ID NO: 1534853 - DNA, 25 bp, Homo sapien
tacatggccccagagctaacgttca

SEQ ID NO: 1534854 - DNA, 25 bp, Homo sapien
cacagatgagccgtttggaaactcc

SEQ ID NO: 1534855 - DNA, 25 bp, Homo sapien
ctgcaacgattccggcataaccggg

SEQ ID NO: 1534856 - DNA, 25 bp, Homo sapien
cggcataaccgggacagctgcctgc

SEQ ID NO: 1534857 - DNA, 25 bp, Homo sapien
caacgattccggcataaccgggaca

SEQ ID NO: 1534858 - DNA, 25 bp, Homo sapien
gattccggcataaccgggacagctg

SEQ ID NO: 1534859 - DNA, 25 bp, Homo sapien
cttggtcttcgggtgcccagcaggt

SEQ ID NO: 1534860 - DNA, 25 bp, Homo sapien
aggagataacttgagggacagcccc

SEQ ID NO: 1534861 - DNA, 25 bp, Homo sapien
ggcaaagaccacagtgctttacttt

SEQ ID NO: 1534862 - DNA, 25 bp, Homo sapien
ccaaggcgccaggtagccttcaggg

SEQ ID NO: 1534863 - DNA, 25 bp, Homo sapien
tctaattcgcagagctgaatccaca

SEQ ID NO: 1534864 - DNA, 25 bp, Homo sapien
ttccaagtcttctgcgagggcctct

SEQ ID NO: 1534865 - DNA, 25 bp, Homo sapien
cacagaaagatggtctcttttggtc

SEQ ID NO: 1534866 - DNA, 25 bp, Homo sapien
atggcacagaaagatggtctctttt

SEQ ID NO: 1534867 - DNA, 25 bp, Homo sapien
tgtcctcttcacagatgcagaggag

SEQ ID NO: 1534868 - DNA, 25 bp, Homo sapien
tcttcacagatgcagaggagaggag

SEQ ID NO: 1534869 - DNA, 25 bp, Homo sapien
tcctcttcacagatgcagaggagag

SEQ ID NO: 1534870 - DNA, 25 bp, Homo sapien
ctcttcacagatgcagaggagagga

SEQ ID NO: 1534871 - DNA, 25 bp, Homo sapien
ttcatgcagcaaagatgacctccag

SEQ ID NO: 1534872 - DNA, 25 bp, Homo sapien
aaatgtagttggctgtgtccgaatc

SEQ ID NO: 1534873 - DNA, 25 bp, Homo sapien
aagtctcggatttcaggtatggctg

SEQ ID NO: 1534874 - DNA, 25 bp, Homo sapien
caggtgcccctgcaatacactcagg

SEQ ID NO: 1534875 - DNA, 25 bp, Homo sapien
cagatgcttcccacaaagagatgag

SEQ ID NO: 1534876 - DNA, 25 bp, Homo sapien
ggtgctcacacaatgtcctcgaaag

SEQ ID NO: 1534877 - DNA, 25 bp, Homo sapien
aagagatgaggtgtccttcagcagc

SEQ ID NO: 1534878 - DNA, 25 bp, Homo sapien
gccaatacattgagagtccagggtt

SEQ ID NO: 1534879 - DNA, 25 bp, Homo sapien
aatacttctttacaggcagggtgcg

SEQ ID NO: 1534880 - DNA, 25 bp, Homo sapien
tgttgacctgagaataatatggact

SEQ ID NO: 1534881 - DNA, 25 bp, Homo sapien
tatcatttccttgttcagacatagg

SEQ ID NO: 1534882 - DNA, 25 bp, Homo sapien
gggattcagaaattgtggccatgtc

SEQ ID NO: 1534883 - DNA, 25 bp, Homo sapien
atgcaaccgagacccacttggagcg

SEQ ID NO: 1534884 - DNA, 25 bp, Homo sapien
taaacgacgtggacaaagggcatgc

SEQ ID NO: 1534885 - DNA, 25 bp, Homo sapien
gagcgagtctaagcaaagtcctggc

SEQ ID NO: 1534886 - DNA, 25 bp, Homo sapien
aatggttcggcccaggtacacaagg

SEQ ID NO: 1534887 - DNA, 25 bp, Homo sapien
tccctactccaagtccgtcctgttg

SEQ ID NO: 1534888 - DNA, 25 bp, Homo sapien
ccctactccaagtccgtcctgttgc

SEQ ID NO: 1534889 - DNA, 25 bp, Homo sapien
cctactccaagtccgtcctgttgca

SEQ ID NO: 1534890 - DNA, 25 bp, Homo sapien
agaagccacacgaagacgaccgcgt

SEQ ID NO: 1534891 - DNA, 25 bp, Homo sapien
ccaggtgctaagcagaagccacacg

SEQ ID NO: 1534892 - DNA, 25 bp, Homo sapien
gtgcaccaggtgctaagcagaagcc

SEQ ID NO: 1534893 - DNA, 25 bp, Homo sapien
gccctctggagagcccgccggccaa

SEQ ID NO: 1534894 - DNA, 25 bp, Homo sapien
cggtcccggcagaaagacttgtact

SEQ ID NO: 1534895 - DNA, 25 bp, Homo sapien
gtgatggtaatcctccggccctggt

SEQ ID NO: 1534896 - DNA, 25 bp, Homo sapien
tacttccagatgacgatgggttgcg

SEQ ID NO: 1534897 - DNA, 25 bp, Homo sapien
attgagctggttgtcgacgctggcc

SEQ ID NO: 1534898 - DNA, 25 bp, Homo sapien
agaacagcacctggtatatgacagg

SEQ ID NO: 1534899 - DNA, 25 bp, Homo sapien
atgattatagaacaaaccctggcct

SEQ ID NO: 1534900 - DNA, 25 bp, Homo sapien
tctcactgcaatgtgggctccacga

SEQ ID NO: 1534901 - DNA, 25 bp, Homo sapien
gaatagaatcgctccctttaggctg

SEQ ID NO: 1534902 - DNA, 25 bp, Homo sapien
ggagtggacagccttctaccttatc

SEQ ID NO: 1534903 - DNA, 25 bp, Homo sapien
ccaccggaccggagggatgcctgga

SEQ ID NO: 1534904 - DNA, 25 bp, Homo sapien
aagcagggaatgagccaccggaccg

SEQ ID NO: 1534905 - DNA, 25 bp, Homo sapien
tggtccatcacccaaagcatggaag

SEQ ID NO: 1534906 - DNA, 25 bp, Homo sapien
cttggaccccaaggagcccgaggag

SEQ ID NO: 1534907 - DNA, 25 bp, Homo sapien
cgaggaggtggaacagggcctcctg

SEQ ID NO: 1534908 - DNA, 25 bp, Homo sapien
aaggagcccgaggaggtggaacagg

SEQ ID NO: 1534909 - DNA, 25 bp, Homo sapien
tggaacagggcctcctgtccaggtg

SEQ ID NO: 1534910 - DNA, 25 bp, Homo sapien
gcagggcgtaccctgttcctggtct

SEQ ID NO: 1534911 - DNA, 25 bp, Homo sapien
tctcatccgggctgagcactgcttt

SEQ ID NO: 1534912 - DNA, 25 bp, Homo sapien
ttgggctggccgtgatctcatccgg

SEQ ID NO: 1534913 - DNA, 25 bp, Homo sapien
tttatacaccgcaaaggtgaccttc

SEQ ID NO: 1534914 - DNA, 25 bp, Homo sapien
aacagtgtctggctacagcattcca

SEQ ID NO: 1534915 - DNA, 25 bp, Homo sapien
taaggtcccatagtcccatggtccc

SEQ ID NO: 1534916 - DNA, 25 bp, Homo sapien
gacgtggtctctagctaccgtgcca

SEQ ID NO: 1534917 - DNA, 25 bp, Homo sapien
gaaaaatcctccttgcaacagtgtc

SEQ ID NO: 1534918 - DNA, 25 bp, Homo sapien
tcgccatgttgaccaagttggtttt

SEQ ID NO: 1534919 - DNA, 25 bp, Homo sapien
gtggtgtaattatagcccactgcaa

SEQ ID NO: 1534920 - DNA, 25 bp, Homo sapien
ggtgcgaactaatctcggctcacta

SEQ ID NO: 1534921 - DNA, 25 bp, Homo sapien
caatggtgcgaactaatctcggctc

SEQ ID NO: 1534922 - DNA, 25 bp, Homo sapien
cgccgtctggtcaaaggtcaggtca

SEQ ID NO: 1534923 - DNA, 25 bp, Homo sapien
tctgcgtaggcctcattgttcccct

SEQ ID NO: 1534924 - DNA, 25 bp, Homo sapien
caaggacgatgagctctgcgtaggc

SEQ ID NO: 1534925 - DNA, 25 bp, Homo sapien
gagaccacggagcagtaatacacac

SEQ ID NO: 1534926 - DNA, 25 bp, Homo sapien
ctaccgcacccggaccccaagtctg

SEQ ID NO: 1534927 - DNA, 25 bp, Homo sapien
tggcttgggtgattggaggcactgt

SEQ ID NO: 1534928 - DNA, 25 bp, Homo sapien
actcttctcttagtttggcttgggt

SEQ ID NO: 1534929 - DNA, 25 bp, Homo sapien
ccactcttctcttagtttggcttgg

SEQ ID NO: 1534930 - DNA, 25 bp, Homo sapien
gtcttccttgtgtatcttgggcttg

SEQ ID NO: 1534931 - DNA, 25 bp, Homo sapien
gttgcccagtcttccttgtgtatct

SEQ ID NO: 1534932 - DNA, 25 bp, Homo sapien
ctccccattttaaggccgggcagtg

SEQ ID NO: 1534933 - DNA, 25 bp, Homo sapien
cttgggcttgaaaaatctccccatt

SEQ ID NO: 1534934 - DNA, 25 bp, Homo sapien
gaaaaccaggtaagagctcagccac

SEQ ID NO: 1534935 - DNA, 25 bp, Homo sapien
accaggtaagagctcagccacccct

SEQ ID NO: 1534936 - DNA, 25 bp, Homo sapien
aaaaccaggtaagagctcagccacc

SEQ ID NO: 1534937 - DNA, 25 bp, Homo sapien
aaaccaggtaagagctcagccaccc

SEQ ID NO: 1534938 - DNA, 25 bp, Homo sapien
gcagcagcacttgtctgggcagcag

SEQ ID NO: 1534939 - DNA, 25 bp, Homo sapien
cagcaggggcacctgacgtagcagc

SEQ ID NO: 1534940 - DNA, 25 bp, Homo sapien
ggaaggcagccaggcataccacaac

SEQ ID NO: 1534941 - DNA, 25 bp, Homo sapien
ctgacgtagcagcagcaagtgtgcg

SEQ ID NO: 1534942 - DNA, 25 bp, Homo sapien
tcctccagggtacccgttgtaggca

SEQ ID NO: 1534943 - DNA, 25 bp, Homo sapien
ctgagctactcctgtcaacgtctcc

SEQ ID NO: 1534944 - DNA, 25 bp, Homo sapien
cagggcccatgggaatcatagctgg

SEQ ID NO: 1534945 - DNA, 25 bp, Homo sapien
aacacctgaggtggctgctttgccg

SEQ ID NO: 1534946 - DNA, 25 bp, Homo sapien
ctgctgtccgtgtcccgaagcaggg

SEQ ID NO: 1534947 - DNA, 25 bp, Homo sapien
ccgaagcaggggtacataggagcct

SEQ ID NO: 1534948 - DNA, 25 bp, Homo sapien
acactgctgtccgtgtcccgaagca

SEQ ID NO: 1534949 - DNA, 25 bp, Homo sapien
gaggccacactgctgtccgtgtccc

SEQ ID NO: 1534950 - DNA, 25 bp, Homo sapien
agaagggtcgaagttggccagctcc

SEQ ID NO: 1534951 - DNA, 25 bp, Homo sapien
tccatgtagtacaggacccgcatgg

SEQ ID NO: 1534952 - DNA, 25 bp, Homo sapien
gcctgaatcctgtagccactgcgga

SEQ ID NO: 1534953 - DNA, 25 bp, Homo sapien
catggagtcgtcctgctggctggcc

SEQ ID NO: 1534954 - DNA, 25 bp, Homo sapien
ccctcagaccccaaggctcctgctt

SEQ ID NO: 1534955 - DNA, 25 bp, Homo sapien
ctcagaccccaaggctcctgcttac

SEQ ID NO: 1534956 - DNA, 25 bp, Homo sapien
agccctcagaccccaaggctcctgc

SEQ ID NO: 1534957 - DNA, 25 bp, Homo sapien
taaaagccctcagaccccaaggctc

SEQ ID NO: 1534958 - DNA, 25 bp, Homo sapien
tcgtggagggaggtgacttcactca

SEQ ID NO: 1534959 - DNA, 25 bp, Homo sapien
cctcgtggagggaggtgacttcact

SEQ ID NO: 1534960 - DNA, 25 bp, Homo sapien
cccgggaaggccgagatcgccagtc

SEQ ID NO: 1534961 - DNA, 25 bp, Homo sapien
gagatcgccagtcgtcctcgtggag

SEQ ID NO: 1534962 - DNA, 25 bp, Homo sapien
ctgctccctggcgggctcctggtcc

SEQ ID NO: 1534963 - DNA, 25 bp, Homo sapien
cagggcgtccacggagcgggcccgg

SEQ ID NO: 1534964 - DNA, 25 bp, Homo sapien
ccagggcgtccacggagcgggcccg

SEQ ID NO: 1534965 - DNA, 25 bp, Homo sapien
accattactcgtgggagacctgctc

SEQ ID NO: 1534966 - DNA, 25 bp, Homo sapien
tctcccaccattactcgtgggagac

SEQ ID NO: 1534967 - DNA, 25 bp, Homo sapien
cgcgggggcatgtaggcccggcttc

SEQ ID NO: 1534968 - DNA, 25 bp, Homo sapien
ccaccattactcgtgggagacctgc

SEQ ID NO: 1534969 - DNA, 25 bp, Homo sapien
cgctcccgagacctgaagtcgtcgt

SEQ ID NO: 1534970 - DNA, 25 bp, Homo sapien
ccgagacctgaagtcgtcgtagtgg

SEQ ID NO: 1534971 - DNA, 25 bp, Homo sapien
gtcttggtcatagaggtcgtcccgg

SEQ ID NO: 1534972 - DNA, 25 bp, Homo sapien
agcgtgggaagtccctcgagtcgtc

SEQ ID NO: 1534973 - DNA, 25 bp, Homo sapien
acagcctcctccagtagccgcccat

SEQ ID NO: 1534974 - DNA, 25 bp, Homo sapien
ccagtagccgcccatcataggggag

SEQ ID NO: 1534975 - DNA, 25 bp, Homo sapien
cctcctccagtagccgcccatcata

SEQ ID NO: 1534976 - DNA, 25 bp, Homo sapien
agtagccgcccatcataggggaggt

SEQ ID NO: 1534977 - DNA, 25 bp, Homo sapien
cctgcgagtcggtctccgagtacgg

SEQ ID NO: 1534978 - DNA, 25 bp, Homo sapien
tctcgggacgcctgcgagtcggtct

SEQ ID NO: 1534979 - DNA, 25 bp, Homo sapien
ttgagcctgcgctctcgggacgcct

SEQ ID NO: 1534980 - DNA, 25 bp, Homo sapien
tgcgctctcgggacgcctgcgagtc

SEQ ID NO: 1534981 - DNA, 25 bp, Homo sapien
agaagggtatgagccgcggggaccg

SEQ ID NO: 1534982 - DNA, 25 bp, Homo sapien
gaaagaagggtatgagccgcgggga

SEQ ID NO: 1534983 - DNA, 25 bp, Homo sapien
tcagacgactaaactttcccgactc

SEQ ID NO: 1534984 - DNA, 25 bp, Homo sapien
agacgactaaactttcccgactcag

SEQ ID NO: 1534985 - DNA, 25 bp, Homo sapien
cagacgactaaactttcccgactca

SEQ ID NO: 1534986 - DNA, 25 bp, Homo sapien
ggtatggcagggcttcatcagtgtt

SEQ ID NO: 1534987 - DNA, 25 bp, Homo sapien
tggcagggcttcatcagtgttcctt

SEQ ID NO: 1534988 - DNA, 25 bp, Homo sapien
caaaagctacgtagaaaacgtcaga

SEQ ID NO: 1534989 - DNA, 25 bp, Homo sapien
gggcttcatcagtgttccttcaaat

SEQ ID NO: 1534990 - DNA, 25 bp, Homo sapien
tcctcctttacttgagctgcgcgcg

SEQ ID NO: 1534991 - DNA, 25 bp, Homo sapien
cgctcgcgctgatcacggggacaaa

SEQ ID NO: 1534992 - DNA, 25 bp, Homo sapien
agtccggcggcggatcgctgctgca

SEQ ID NO: 1534993 - DNA, 25 bp, Homo sapien
acggaggagatacgggagccgctcg

SEQ ID NO: 1534994 - DNA, 25 bp, Homo sapien
ggccccgagcccggcgctcacgccg

SEQ ID NO: 1534995 - DNA, 25 bp, Homo sapien
gccccgagcccggcgctcacgccgc

SEQ ID NO: 1534996 - DNA, 25 bp, Homo sapien
gggccccgagcccggcgctcacgcc

SEQ ID NO: 1534997 - DNA, 25 bp, Homo sapien
ggggccccgagcccggcgctcacgc

SEQ ID NO: 1534998 - DNA, 25 bp, Homo sapien
cgggatccagacccgggtccagcat

SEQ ID NO: 1534999 - DNA, 25 bp, Homo sapien
agcgggatccagacccgggtccagc

SEQ ID NO: 1535000 - DNA, 25 bp, Homo sapien
gcgggatccagacccgggtccagca

SEQ ID NO: 1535001 - DNA, 25 bp, Homo sapien
ctccgcctcgggtcccttgtcgtgg

SEQ ID NO: 1535002 - DNA, 25 bp, Homo sapien
tcctgcagctcgacgccctcctccg

SEQ ID NO: 1535003 - DNA, 25 bp, Homo sapien
cctccgcctcgggtcccttgtcgtg

SEQ ID NO: 1535004 - DNA, 25 bp, Homo sapien
cttcctgcagctcgacgccctcctc

SEQ ID NO: 1535005 - DNA, 25 bp, Homo sapien
ttgtggtcgccgaacgccgcctgct

SEQ ID NO: 1535006 - DNA, 25 bp, Homo sapien
catttgtctctgtgcggaactggta

SEQ ID NO: 1535007 - DNA, 25 bp, Homo sapien
gacgctggtgatggccaccgctgtc

SEQ ID NO: 1535008 - DNA, 25 bp, Homo sapien
gctggtgatggccaccgctgtctgc

SEQ ID NO: 1535009 - DNA, 25 bp, Homo sapien
cagggggcggcagagcggcgaggcc

SEQ ID NO: 1535010 - DNA, 25 bp, Homo sapien
gggggcggcagagcggcgaggccgg

SEQ ID NO: 1535011 - DNA, 25 bp, Homo sapien
tgcagggggcggcagagcggcgagg

SEQ ID NO: 1535012 - DNA, 25 bp, Homo sapien
gggcggcagagcggcgaggccggcg

SEQ ID NO: 1535013 - DNA, 25 bp, Homo sapien
cccgcgaaggcagcggtggacacga

SEQ ID NO: 1535014 - DNA, 25 bp, Homo sapien
tggccgtccagctgaccatcagtca

SEQ ID NO: 1535015 - DNA, 25 bp, Homo sapien
tgacggcgccagctgtgtcgccctg

SEQ ID NO: 1535016 - DNA, 25 bp, Homo sapien
catcagtcacctggactacgcggta

SEQ ID NO: 1535017 - DNA, 25 bp, Homo sapien
cctgggggcacagaggcagcggcgg

SEQ ID NO: 1535018 - DNA, 25 bp, Homo sapien
ggcccgggcgctgggctgccccgtc

SEQ ID NO: 1535019 - DNA, 25 bp, Homo sapien
cagcgggaagggcgctgcaggacct

SEQ ID NO: 1535020 - DNA, 25 bp, Homo sapien
cgggcgctgggctgccccgtccaca

SEQ ID NO: 1535021 - DNA, 25 bp, Homo sapien
gggactccttctgcgtgtagcattc

SEQ ID NO: 1535022 - DNA, 25 bp, Homo sapien
tgcaattaacaggagtggggactcc

SEQ ID NO: 1535023 - DNA, 25 bp, Homo sapien
gcattctgtcctgtgtttcaaacag

SEQ ID NO: 1535024 - DNA, 25 bp, Homo sapien
ccgtcccctcattgctgtgcttggg

SEQ ID NO: 1535025 - DNA, 25 bp, Homo sapien
cggactgccaccattgctgaaggga

SEQ ID NO: 1535026 - DNA, 25 bp, Homo sapien
tctgtggtctgtacggacacagccg

SEQ ID NO: 1535027 - DNA, 25 bp, Homo sapien
tggacgctgggaaataggcaaatcg

SEQ ID NO: 1535028 - DNA, 25 bp, Homo sapien
tagtatctcccacactggacgctgg

SEQ ID NO: 1535029 - DNA, 25 bp, Homo sapien
catcctggggcgtcatcatgacgta

SEQ ID NO: 1535030 - DNA, 25 bp, Homo sapien
ggcgtcatcatgacgtagaactggc

SEQ ID NO: 1535031 - DNA, 25 bp, Homo sapien
gaagcacatcctggggcgtcatcat

SEQ ID NO: 1535032 - DNA, 25 bp, Homo sapien
ctgaagcacatcctggggcgtcatc

SEQ ID NO: 1535033 - DNA, 25 bp, Homo sapien
tgtccggggggcgatcgtcctctgt

SEQ ID NO: 1535034 - DNA, 25 bp, Homo sapien
cggggggcgatcgtcctctgtgttc

SEQ ID NO: 1535035 - DNA, 25 bp, Homo sapien
ggggcgatcgtcctctgtgttcctg

SEQ ID NO: 1535036 - DNA, 25 bp, Homo sapien
gtgtgtccggggggcgatcgtcctc

SEQ ID NO: 1535037 - DNA, 25 bp, Homo sapien
ttccatttcaacaccaggccctcca

SEQ ID NO: 1535038 - DNA, 25 bp, Homo sapien
gcccagcttctactccagaaacccc

SEQ ID NO: 1535039 - DNA, 25 bp, Homo sapien
gcttctactccagaaacccctcttc

SEQ ID NO: 1535040 - DNA, 25 bp, Homo sapien
gccctccaggtgtcccctgcacata

SEQ ID NO: 1535041 - DNA, 25 bp, Homo sapien
tgtattatcgcagagctgtttgccc

SEQ ID NO: 1535042 - DNA, 25 bp, Homo sapien
aaaagggggcatgtattatcgcaga

SEQ ID NO: 1535043 - DNA, 25 bp, Homo sapien
cgcagagctgtttgcccaagcatct

SEQ ID NO: 1535044 - DNA, 25 bp, Homo sapien
gggcatgtattatcgcagagctgtt

SEQ ID NO: 1535045 - DNA, 25 bp, Homo sapien
catctcggggtgttctggttccatc

SEQ ID NO: 1535046 - DNA, 25 bp, Homo sapien
tcctctcatctcggggtgttctggt

SEQ ID NO: 1535047 - DNA, 25 bp, Homo sapien
ctcatctcggggtgttctggttcca

SEQ ID NO: 1535048 - DNA, 25 bp, Homo sapien
ctctcatctcggggtgttctggttc

SEQ ID NO: 1535049 - DNA, 25 bp, Homo sapien
gcacttgtggcctgcccaggagtgg

SEQ ID NO: 1535050 - DNA, 25 bp, Homo sapien
gagcacttgtggcctgcccaggagt

SEQ ID NO: 1535051 - DNA, 25 bp, Homo sapien
agcacttgtggcctgcccaggagtg

SEQ ID NO: 1535052 - DNA, 25 bp, Homo sapien
tcaggaaagcggagacaggacggag

SEQ ID NO: 1535053 - DNA, 25 bp, Homo sapien
ctgcaagtcaggaaagcggagacag

SEQ ID NO: 1535054 - DNA, 25 bp, Homo sapien
caagtcaggaaagcggagacaggac

SEQ ID NO: 1535055 - DNA, 25 bp, Homo sapien
gtcaggaaagcggagacaggacgga

SEQ ID NO: 1535056 - DNA, 25 bp, Homo sapien
tcagatgcttggagcccagacagca

SEQ ID NO: 1535057 - DNA, 25 bp, Homo sapien
tcaccacgggtgaccggaagtggag

SEQ ID NO: 1535058 - DNA, 25 bp, Homo sapien
gctgagggtactgggaggatgagca

SEQ ID NO: 1535059 - DNA, 25 bp, Homo sapien
gaagtggagctgttttggtagagcc

SEQ ID NO: 1535060 - DNA, 25 bp, Homo sapien
agcatgaaacctagcaaattgaatc

SEQ ID NO: 1535061 - DNA, 25 bp, Homo sapien
aaattgaatccaaagtgagtagaag

SEQ ID NO: 1535062 - DNA, 25 bp, Homo sapien
gtgtgccagggaagctaaagcatga

SEQ ID NO: 1535063 - DNA, 25 bp, Homo sapien
attgaatccaaagtgagtagaaggg

SEQ ID NO: 1535064 - DNA, 25 bp, Homo sapien
agcagacacctgtcctcgtcaatgc

SEQ ID NO: 1535065 - DNA, 25 bp, Homo sapien
ggcccgtcgggtaagtctcatcgaa

SEQ ID NO: 1535066 - DNA, 25 bp, Homo sapien
aagctaggacacattcgggcccgtc

SEQ ID NO: 1535067 - DNA, 25 bp, Homo sapien
tgtcctcgtcaatgccccagaagct

SEQ ID NO: 1535068 - DNA, 25 bp, Homo sapien
atgtgccaggccctccgccaggctg

SEQ ID NO: 1535069 - DNA, 25 bp, Homo sapien
tccagggtggaagcagccccggtgc

SEQ ID NO: 1535070 - DNA, 25 bp, Homo sapien
tatgtgccaggccctccgccaggct

SEQ ID NO: 1535071 - DNA, 25 bp, Homo sapien
agggtggaagcagccccggtgcgcc

SEQ ID NO: 1535072 - DNA, 25 bp, Homo sapien
ttttaggacgggcatcaaaggccag

SEQ ID NO: 1535073 - DNA, 25 bp, Homo sapien
gagtgacaaaccctccgatggatgc

SEQ ID NO: 1535074 - DNA, 25 bp, Homo sapien
ccaactgtgtcagctgggtggcagc

SEQ ID NO: 1535075 - DNA, 25 bp, Homo sapien
tatagctagggcacatgtggcagga

SEQ ID NO: 1535076 - DNA, 25 bp, Homo sapien
gttgttgatcttgtccctccgcctc

SEQ ID NO: 1535077 - DNA, 25 bp, Homo sapien
cgaaagctggacgatccagttgttg

SEQ ID NO: 1535078 - DNA, 25 bp, Homo sapien
ctggaatgattttcgaaagctggac

SEQ ID NO: 1535079 - DNA, 25 bp, Homo sapien
gctgttgtctgcgttacagtctgga

SEQ ID NO: 1535080 - DNA, 25 bp, Homo sapien
tggactttctgcatgcaagggtcgg

SEQ ID NO: 1535081 - DNA, 25 bp, Homo sapien
cagacactgagggtccggggtgctc

SEQ ID NO: 1535082 - DNA, 25 bp, Homo sapien
ccagggatgactcccgagccccatg

SEQ ID NO: 1535083 - DNA, 25 bp, Homo sapien
gggccgggaccaccgcagacactga

SEQ ID NO: 1535084 - DNA, 25 bp, Homo sapien
ggggaccaggagccttagggcaggc

SEQ ID NO: 1535085 - DNA, 25 bp, Homo sapien
caggagccttagggcaggcaccgcc

SEQ ID NO: 1535086 - DNA, 25 bp, Homo sapien
gggaccaggagccttagggcaggca

SEQ ID NO: 1535087 - DNA, 25 bp, Homo sapien
ggaccaggagccttagggcaggcac

SEQ ID NO: 1535088 - DNA, 25 bp, Homo sapien
tcctgcatgcgctggttggtctggc

SEQ ID NO: 1535089 - DNA, 25 bp, Homo sapien
gctcggcctctttgaaggtctcctg

SEQ ID NO: 1535090 - DNA, 25 bp, Homo sapien
gcaactcccggatgtaatcgcaggc

SEQ ID NO: 1535091 - DNA, 25 bp, Homo sapien
gtctggcgcaactcccggatgtaat

SEQ ID NO: 1535092 - DNA, 25 bp, Homo sapien
acacgacggaggtcaagggagctga

SEQ ID NO: 1535093 - DNA, 25 bp, Homo sapien
cgacggaggtcaagggagctgaggg

SEQ ID NO: 1535094 - DNA, 25 bp, Homo sapien
gcggacacgacggaggtcaagggag

SEQ ID NO: 1535095 - DNA, 25 bp, Homo sapien
tgggccctgacccgctccaggcccc

SEQ ID NO: 1535096 - DNA, 25 bp, Homo sapien
gggctcgaagcagggcgttctcatt

SEQ ID NO: 1535097 - DNA, 25 bp, Homo sapien
gctgcagctgggctcgaagcagggc

SEQ ID NO: 1535098 - DNA, 25 bp, Homo sapien
gcagctgggctcgaagcagggcgtt

SEQ ID NO: 1535099 - DNA, 25 bp, Homo sapien
tcgaagcagggcgttctcattcttc

SEQ ID NO: 1535100 - DNA, 25 bp, Homo sapien
tgcctccaggtgagaccactagaag

SEQ ID NO: 1535101 - DNA, 25 bp, Homo sapien
ggcggtgggcactgtatccacagaa

SEQ ID NO: 1535102 - DNA, 25 bp, Homo sapien
gccagtttattgcagttaaatacct

SEQ ID NO: 1535103 - DNA, 25 bp, Homo sapien
gaggataccgtttccaagtggagga

SEQ ID NO: 1535104 - DNA, 25 bp, Homo sapien
ccactcaagcacagaaatgcacagg

SEQ ID NO: 1535105 - DNA, 25 bp, Homo sapien
ctttcaaggcccactcaagcacaga

SEQ ID NO: 1535106 - DNA, 25 bp, Homo sapien
actcaagcacagaaatgcacaggcc

SEQ ID NO: 1535107 - DNA, 25 bp, Homo sapien
tcaagcacagaaatgcacaggccct

SEQ ID NO: 1535108 - DNA, 25 bp, Homo sapien
gatgggcccttgcacattttgcctc

SEQ ID NO: 1535109 - DNA, 25 bp, Homo sapien
ggatgttgttgtcgaggaatgaaca

SEQ ID NO: 1535110 - DNA, 25 bp, Homo sapien
cttggttccagatgggcccttgcac

SEQ ID NO: 1535111 - DNA, 25 bp, Homo sapien
gttgttgtcgaggaatgaacacttc

SEQ ID NO: 1535112 - DNA, 25 bp, Homo sapien
gaggcggtggtctgagccccctccc

SEQ ID NO: 1535113 - DNA, 25 bp, Homo sapien
tgccaggggaggcggtggtctgagc

SEQ ID NO: 1535114 - DNA, 25 bp, Homo sapien
caggggaggcggtggtctgagcccc

SEQ ID NO: 1535115 - DNA, 25 bp, Homo sapien
cctcccctttgctctgtctcatttc

SEQ ID NO: 1535116 - DNA, 25 bp, Homo sapien
ctggtgtctgggaccgagtgacagt

SEQ ID NO: 1535117 - DNA, 25 bp, Homo sapien
tgggaccgagtgacagtcgctttta

SEQ ID NO: 1535118 - DNA, 25 bp, Homo sapien
accgagtgacagtcgcttttatggg

SEQ ID NO: 1535119 - DNA, 25 bp, Homo sapien
tgtctgggaccgagtgacagtcgct

SEQ ID NO: 1535120 - DNA, 25 bp, Homo sapien
cagagccactggtcaggctggcgag

SEQ ID NO: 1535121 - DNA, 25 bp, Homo sapien
acagagccactggtcaggctggcga

SEQ ID NO: 1535122 - DNA, 25 bp, Homo sapien
caggaggcaagcggcccagatctgg

SEQ ID NO: 1535123 - DNA, 25 bp, Homo sapien
agagccactggtcaggctggcgagg

SEQ ID NO: 1535124 - DNA, 25 bp, Homo sapien
tggggttgcagctctgcaagttgtc

SEQ ID NO: 1535125 - DNA, 25 bp, Homo sapien
tgtcctggggttgcagctctgcaag

SEQ ID NO: 1535126 - DNA, 25 bp, Homo sapien
gggttgcagctctgcaagttgtccc

SEQ ID NO: 1535127 - DNA, 25 bp, Homo sapien
gttgcagctctgcaagttgtcccgt

SEQ ID NO: 1535128 - DNA, 25 bp, Homo sapien
aagtgggtgtctcgcctccttcgcc

SEQ ID NO: 1535129 - DNA, 25 bp, Homo sapien
tttgatcgatgacagcagccgcagc

SEQ ID NO: 1535130 - DNA, 25 bp, Homo sapien
gcagccgcagcagaaaatgcagatg

SEQ ID NO: 1535131 - DNA, 25 bp, Homo sapien
gggaagtgggtgtctcgcctccttc

SEQ ID NO: 1535132 - DNA, 25 bp, Homo sapien
aaccagccattttattccaagacct

SEQ ID NO: 1535133 - DNA, 25 bp, Homo sapien
gccattttattccaagacctatgtt

SEQ ID NO: 1535134 - DNA, 25 bp, Homo sapien
gcagcaggaataaataaggaaggga

SEQ ID NO: 1535135 - DNA, 25 bp, Homo sapien
caagacctatgttctggggcagcag

SEQ ID NO: 1535136 - DNA, 25 bp, Homo sapien
tgtgggagcgaggcggctggagccc

SEQ ID NO: 1535137 - DNA, 25 bp, Homo sapien
ctgtgggagcgaggcggctggagcc

SEQ ID NO: 1535138 - DNA, 25 bp, Homo sapien
gtgggagcgaggcggctggagccca

SEQ ID NO: 1535139 - DNA, 25 bp, Homo sapien
tgggagcgaggcggctggagcccat

SEQ ID NO: 1535140 - DNA, 25 bp, Homo sapien
acagtgtcccacaggagcactcgca

SEQ ID NO: 1535141 - DNA, 25 bp, Homo sapien
tgacatcagcaactcgggtctccag

SEQ ID NO: 1535142 - DNA, 25 bp, Homo sapien
cactcgcaatagtcgctgacatcag

SEQ ID NO: 1535143 - DNA, 25 bp, Homo sapien
gctggagtcgtgtgctggtgcagtg

SEQ ID NO: 1535144 - DNA, 25 bp, Homo sapien
cagaccagggagagaagcgttgtgg

SEQ ID NO: 1535145 - DNA, 25 bp, Homo sapien
ggggggtcctcgctctcaagggaga

SEQ ID NO: 1535146 - DNA, 25 bp, Homo sapien
ccctcagaccagggagagaagcgtt

SEQ ID NO: 1535147 - DNA, 25 bp, Homo sapien
ctcagaccagggagagaagcgttgt

SEQ ID NO: 1535148 - DNA, 25 bp, Homo sapien
ctgctccgccagcccagctcgcagt

SEQ ID NO: 1535149 - DNA, 25 bp, Homo sapien
ccagctcgcagtcccctgccttcca

SEQ ID NO: 1535150 - DNA, 25 bp, Homo sapien
cagttgcttctgcacctctgctccg

SEQ ID NO: 1535151 - DNA, 25 bp, Homo sapien
ttggactcagttgcttctgcacctc

SEQ ID NO: 1535152 - DNA, 25 bp, Homo sapien
gggattaatgaagaaaagtcgactg

SEQ ID NO: 1535153 - DNA, 25 bp, Homo sapien
ttaatgaagaaaagtcgactgaggc

SEQ ID NO: 1535154 - DNA, 25 bp, Homo sapien
agaaaagtcgactgaggcttacaga

SEQ ID NO: 1535155 - DNA, 25 bp, Homo sapien
atgaagaaaagtcgactgaggctta

SEQ ID NO: 1535156 - DNA, 25 bp, Homo sapien
tgaggatggctatagacgcgtccac

SEQ ID NO: 1535157 - DNA, 25 bp, Homo sapien
gtccactcagacacgcgccgatgga

SEQ ID NO: 1535158 - DNA, 25 bp, Homo sapien
tatagacgcgtccactcagacacgc

SEQ ID NO: 1535159 - DNA, 25 bp, Homo sapien
agacacgcgccgatggacacctggc

SEQ ID NO: 1535160 - DNA, 25 bp, Homo sapien
tctccctgagttggggacgtcttct

SEQ ID NO: 1535161 - DNA, 25 bp, Homo sapien
aatctccctgagttggggacgtctt

SEQ ID NO: 1535162 - DNA, 25 bp, Homo sapien
gaatctccctgagttggggacgtct

SEQ ID NO: 1535163 - DNA, 25 bp, Homo sapien
ctgaatctccctgagttggggacgt

SEQ ID NO: 1535164 - DNA, 25 bp, Homo sapien
tgaaatcataatccagaacagaggc

SEQ ID NO: 1535165 - DNA, 25 bp, Homo sapien
ctgaaatcataatccagaacagagg

SEQ ID NO: 1535166 - DNA, 25 bp, Homo sapien
ggccaaagcctttaggtccccagca

SEQ ID NO: 1535167 - DNA, 25 bp, Homo sapien
cgcacgtgccttcgaaggccgagat

SEQ ID NO: 1535168 - DNA, 25 bp, Homo sapien
cgtgccttcgaaggccgagatggac

SEQ ID NO: 1535169 - DNA, 25 bp, Homo sapien
ggatggagacgcacgtgccttcgaa

SEQ ID NO: 1535170 - DNA, 25 bp, Homo sapien
tcgaaggccgagatggacgagggca

SEQ ID NO: 1535171 - DNA, 25 bp, Homo sapien
ggctattgaagtaccagacaccatg

SEQ ID NO: 1535172 - DNA, 25 bp, Homo sapien
ggggctattgaagtaccagacacca

SEQ ID NO: 1535173 - DNA, 25 bp, Homo sapien
taggggctattgaagtaccagacac

SEQ ID NO: 1535174 - DNA, 25 bp, Homo sapien
ggtaggggctattgaagtaccagac

SEQ ID NO: 1535175 - DNA, 25 bp, Homo sapien
tgtactggttgtagccgcccaggtc

SEQ ID NO: 1535176 - DNA, 25 bp, Homo sapien
gaagtagtacttcccgcccagctcg

SEQ ID NO: 1535177 - DNA, 25 bp, Homo sapien
gacgatatccaggacgctgtgctct

SEQ ID NO: 1535178 - DNA, 25 bp, Homo sapien
tggaagctctcgtggactacttggg

SEQ ID NO: 1535179 - DNA, 25 bp, Homo sapien
ctgggggcaccacgatgttgggggt

SEQ ID NO: 1535180 - DNA, 25 bp, Homo sapien
acctctgggggcaccacgatgttgg

SEQ ID NO: 1535181 - DNA, 25 bp, Homo sapien
ctctgggggcaccacgatgttgggg

SEQ ID NO: 1535182 - DNA, 25 bp, Homo sapien
cacctctgggggcaccacgatgttg

SEQ ID NO: 1535183 - DNA, 25 bp, Homo sapien
agttgtccggcaccatgcagctgac

SEQ ID NO: 1535184 - DNA, 25 bp, Homo sapien
tagccctcgaactgcagggtggtgt

SEQ ID NO: 1535185 - DNA, 25 bp, Homo sapien
ttgacgtccatgctggcgtagccct

SEQ ID NO: 1535186 - DNA, 25 bp, Homo sapien
ggcacgaagtgcagcagtgacacct

SEQ ID NO: 1535187 - DNA, 25 bp, Homo sapien
gcaggctcacgtgggagccctcgat

SEQ ID NO: 1535188 - DNA, 25 bp, Homo sapien
aggagttcatctccacaatcaccgg

SEQ ID NO: 1535189 - DNA, 25 bp, Homo sapien
caggcaggcatagacgccgtcttcg

SEQ ID NO: 1535190 - DNA, 25 bp, Homo sapien
ccacggtgcggttgtcctggccata

SEQ ID NO: 1535191 - DNA, 25 bp, Homo sapien
tgtggagcacaagatagagaccgtc

SEQ ID NO: 1535192 - DNA, 25 bp, Homo sapien
gctcgctctcgtagatgaccgtgga

SEQ ID NO: 1535193 - DNA, 25 bp, Homo sapien
tctccatcatcctcgggtgacacgg

SEQ ID NO: 1535194 - DNA, 25 bp, Homo sapien
ggccctctggccatactggttctca

SEQ ID NO: 1535195 - DNA, 25 bp, Homo sapien
acggaaccgtccatccccagcatag

SEQ ID NO: 1535196 - DNA, 25 bp, Homo sapien
ggaaccgtccatccccagcataggg

SEQ ID NO: 1535197 - DNA, 25 bp, Homo sapien
cagcataggggagcggaaggtactc

SEQ ID NO: 1535198 - DNA, 25 bp, Homo sapien
cccacggaaccgtccatccccagca

SEQ ID NO: 1535199 - DNA, 25 bp, Homo sapien
atggcagctcaaaggccacggacgg

SEQ ID NO: 1535200 - DNA, 25 bp, Homo sapien
gctccaggctcttggcgccatagag

SEQ ID NO: 1535201 - DNA, 25 bp, Homo sapien
ccatagaggttcctcgcggtgcaga

SEQ ID NO: 1535202 - DNA, 25 bp, Homo sapien
tcacggtcacattgcgcgatggcag

SEQ ID NO: 1535203 - DNA, 25 bp, Homo sapien
ggtaatgtagcagacgatggcaatc

SEQ ID NO: 1535204 - DNA, 25 bp, Homo sapien
ccgatcttggcccacatcagtcgat

SEQ ID NO: 1535205 - DNA, 25 bp, Homo sapien
aggcccgatcttggcccacatcagt

SEQ ID NO: 1535206 - DNA, 25 bp, Homo sapien
tcaggatggcaaaggcgaccacggc

SEQ ID NO: 1535207 - DNA, 25 bp, Homo sapien
tgcggaagtcgctgctgaacaggac

SEQ ID NO: 1535208 - DNA, 25 bp, Homo sapien
ctggtgccccagagatgcggaagtc

SEQ ID NO: 1535209 - DNA, 25 bp, Homo sapien
tgctgaacaggacgggagggttgtc

SEQ ID NO: 1535210 - DNA, 25 bp, Homo sapien
gagggttgtcccctgccgagaagct

SEQ ID NO: 1535211 - DNA, 25 bp, Homo sapien
agattccagggtagaaacctctttg

SEQ ID NO: 1535212 - DNA, 25 bp, Homo sapien
tccccaggtccgagtgagaatagct

SEQ ID NO: 1535213 - DNA, 25 bp, Homo sapien
gccgtttccccaggtccgagtgaga

SEQ ID NO: 1535214 - DNA, 25 bp, Homo sapien
ccggatttcagcatactcagctagc

SEQ ID NO: 1535215 - DNA, 25 bp, Homo sapien
tcctccgtcagcgtgtagctgtcct

SEQ ID NO: 1535216 - DNA, 25 bp, Homo sapien
ccagcgagggtcctgaggggggtca

SEQ ID NO: 1535217 - DNA, 25 bp, Homo sapien
tagagaggagccgtaatgagggcgt

SEQ ID NO: 1535218 - DNA, 25 bp, Homo sapien
ctcactgtcacctgcctcactcccc

SEQ ID NO: 1535219 - DNA, 25 bp, Homo sapien
aggggggtcagccacgcaggctgcc

SEQ ID NO: 1535220 - DNA, 25 bp, Homo sapien
aaattagttgggcatggtggtgcgt

SEQ ID NO: 1535221 - DNA, 25 bp, Homo sapien
attagttgggcatggtggtgcgtgc

SEQ ID NO: 1535222 - DNA, 25 bp, Homo sapien
atggtgaaactccgtgtctattaaa

SEQ ID NO: 1535223 - DNA, 25 bp, Homo sapien
ctccgtgtctattaaaaattagttg

SEQ ID NO: 1535224 - DNA, 25 bp, Homo sapien
gccaaccctcatctcagcgtctgcc

SEQ ID NO: 1535225 - DNA, 25 bp, Homo sapien
catcaaggaggataatggagctgcc

SEQ ID NO: 1535226 - DNA, 25 bp, Homo sapien
tcatctccgtcaggagtgactcagg

SEQ ID NO: 1535227 - DNA, 25 bp, Homo sapien
tactggcacgtgaggccatgagacc

SEQ ID NO: 1535228 - DNA, 25 bp, Homo sapien
aaagagacccgtgtcatgaccatgg

SEQ ID NO: 1535229 - DNA, 25 bp, Homo sapien
tagtttagtgacaccatccagttat

SEQ ID NO: 1535230 - DNA, 25 bp, Homo sapien
tttgtagtttagtgacaccatccag

SEQ ID NO: 1535231 - DNA, 25 bp, Homo sapien
catcataggcataaatggtggggaa

SEQ ID NO: 1535232 - DNA, 25 bp, Homo sapien
ggcataaatggtggggaatctgacc

SEQ ID NO: 1535233 - DNA, 25 bp, Homo sapien
ctgagggggaccaagcagcaccgtg

SEQ ID NO: 1535234 - DNA, 25 bp, Homo sapien
tgagggggaccaagcagcaccgtga

SEQ ID NO: 1535235 - DNA, 25 bp, Homo sapien
gagggggaccaagcagcaccgtgat

SEQ ID NO: 1535236 - DNA, 25 bp, Homo sapien
gccacaccccctgcttctctatggc

SEQ ID NO: 1535237 - DNA, 25 bp, Homo sapien
ccacaccccctgcttctctatggct

SEQ ID NO: 1535238 - DNA, 25 bp, Homo sapien
ggccacaccccctgcttctctatgg

SEQ ID NO: 1535239 - DNA, 25 bp, Homo sapien
gcaaaaggagaagtacagtaaagtc

SEQ ID NO: 1535240 - DNA, 25 bp, Homo sapien
caaaaggagaagtacagtaaagtct

SEQ ID NO: 1535241 - DNA, 25 bp, Homo sapien
aaggagaagtacagtaaagtctctg

SEQ ID NO: 1535242 - DNA, 25 bp, Homo sapien
agaagtacagtaaagtctctggtga

SEQ ID NO: 1535243 - DNA, 25 bp, Homo sapien
gtttccgcgtgtcttccctcttcag

SEQ ID NO: 1535244 - DNA, 25 bp, Homo sapien
tccgcgtgtcttccctcttcaggga

SEQ ID NO: 1535245 - DNA, 25 bp, Homo sapien
ctgtttccgcgtgtcttccctcttc

SEQ ID NO: 1535246 - DNA, 25 bp, Homo sapien
ttccgcgtgtcttccctcttcaggg

SEQ ID NO: 1535247 - DNA, 25 bp, Homo sapien
tgtggcaaggactagactccgttcc

SEQ ID NO: 1535248 - DNA, 25 bp, Homo sapien
aacttagcagggttgcagagccaga

SEQ ID NO: 1535249 - DNA, 25 bp, Homo sapien
tgtaacaccggtaagagagagccag

SEQ ID NO: 1535250 - DNA, 25 bp, Homo sapien
gcagttattatgcacagaggctcag

SEQ ID NO: 1535251 - DNA, 25 bp, Homo sapien
tctacaccattaatctctagacatg

SEQ ID NO: 1535252 - DNA, 25 bp, Homo sapien
aacctttcagtaaactctatctaca

SEQ ID NO: 1535253 - DNA, 25 bp, Homo sapien
ccgcacctggcttaagtaagattct

SEQ ID NO: 1535254 - DNA, 25 bp, Homo sapien
tacttctttggccatgggatctatt

SEQ ID NO: 1535255 - DNA, 25 bp, Homo sapien
agctgacatcagccccgcaggtact

SEQ ID NO: 1535256 - DNA, 25 bp, Homo sapien
agagctgacatcagccccgcaggta

SEQ ID NO: 1535257 - DNA, 25 bp, Homo sapien
cccgcaggtactcatcatgtcacat

SEQ ID NO: 1535258 - DNA, 25 bp, Homo sapien
aggtactcatcatgtcacatgcaaa

SEQ ID NO: 1535259 - DNA, 25 bp, Homo sapien
ctgttcatgggtgtgcggaaagcta

SEQ ID NO: 1535260 - DNA, 25 bp, Homo sapien
tgggtgtgcggaaagctaagctgct

SEQ ID NO: 1535261 - DNA, 25 bp, Homo sapien
gctaagctgcttgccgacagcagga

SEQ ID NO: 1535262 - DNA, 25 bp, Homo sapien
aagcatgaatttggggtgcagggtc

SEQ ID NO: 1535263 - DNA, 25 bp, Homo sapien
tctgtttatctcctcgggccacatg

SEQ ID NO: 1535264 - DNA, 25 bp, Homo sapien
tgccaacatttcacacgcatcaatg

SEQ ID NO: 1535265 - DNA, 25 bp, Homo sapien
ggccacatggctcatgccaaaggct

SEQ ID NO: 1535266 - DNA, 25 bp, Homo sapien
ttcacacgcatcaatgttcctctct

SEQ ID NO: 1535267 - DNA, 25 bp, Homo sapien
gagtgtgtctccggtctcagcacca

SEQ ID NO: 1535268 - DNA, 25 bp, Homo sapien
cagagtgtgtctccggtctcagcac

SEQ ID NO: 1535269 - DNA, 25 bp, Homo sapien
agcagagtgtgtctccggtctcagc

SEQ ID NO: 1535270 - DNA, 25 bp, Homo sapien
gtgtgtctccggtctcagcaccaac

SEQ ID NO: 1535271 - DNA, 25 bp, Homo sapien
atggccctccgtgctggcccccggg

SEQ ID NO: 1535272 - DNA, 25 bp, Homo sapien
atgatcatggccctccgtgctggcc

SEQ ID NO: 1535273 - DNA, 25 bp, Homo sapien
acatgatcatggccctccgtgctgg

SEQ ID NO: 1535274 - DNA, 25 bp, Homo sapien
ttacatgatcatggccctccgtgct

SEQ ID NO: 1535275 - DNA, 25 bp, Homo sapien
tacatagagttaaatttaagtccca

SEQ ID NO: 1535276 - DNA, 25 bp, Homo sapien
catagagttaaatttaagtcccaat

SEQ ID NO: 1535277 - DNA, 25 bp, Homo sapien
tgtacagagctggtcaaacaaaacc

SEQ ID NO: 1535278 - DNA, 25 bp, Homo sapien
ctaaaaatgtacagagctggtcaaa

SEQ ID NO: 1535279 - DNA, 25 bp, Homo sapien
cagagctggtcaaacaaaacctatc

SEQ ID NO: 1535280 - DNA, 25 bp, Homo sapien
cctatctgtgggttaggttctgcaa

SEQ ID NO: 1535281 - DNA, 25 bp, Homo sapien
tggcatttgggatgctcacggagtt

SEQ ID NO: 1535282 - DNA, 25 bp, Homo sapien
gatgctcacggagttctttcttttt

SEQ ID NO: 1535283 - DNA, 25 bp, Homo sapien
agctgggtaaaggcaggtgccacca

SEQ ID NO: 1535284 - DNA, 25 bp, Homo sapien
tgcattatggggatgtggcatttgg

SEQ ID NO: 1535285 - DNA, 25 bp, Homo sapien
agcaggagccaggggccgaggagat

SEQ ID NO: 1535286 - DNA, 25 bp, Homo sapien
caggagccaggggccgaggagatgc

SEQ ID NO: 1535287 - DNA, 25 bp, Homo sapien
gagcaggagccaggggccgaggaga

SEQ ID NO: 1535288 - DNA, 25 bp, Homo sapien
ggagccaggggccgaggagatgcat

SEQ ID NO: 1535289 - DNA, 25 bp, Homo sapien
ctatgttgacgcctctctgcctggg

SEQ ID NO: 1535290 - DNA, 25 bp, Homo sapien
ctaaagactaaagaattccctctga

SEQ ID NO: 1535291 - DNA, 25 bp, Homo sapien
gatgcaatgagagaagtgtatgtat

SEQ ID NO: 1535292 - DNA, 25 bp, Homo sapien
tacatttatctatacacaccgctgc

SEQ ID NO: 1535293 - DNA, 25 bp, Homo sapien
cttgagtcagagaaagccaagtatt

SEQ ID NO: 1535294 - DNA, 25 bp, Homo sapien
cccaggcgtagagggtttcagggtg

SEQ ID NO: 1535295 - DNA, 25 bp, Homo sapien
ctcccaggcgtagagggtttcaggg

SEQ ID NO: 1535296 - DNA, 25 bp, Homo sapien
ggtgcaggggatccagacgcaggcc

SEQ ID NO: 1535297 - DNA, 25 bp, Homo sapien
taggtgcaggggatccagacgcagg

SEQ ID NO: 1535298 - DNA, 25 bp, Homo sapien
tgcaggggatccagacgcaggcccc

SEQ ID NO: 1535299 - DNA, 25 bp, Homo sapien
ctgtaggtgcaggggatccagacgc

SEQ ID NO: 1535300 - DNA, 25 bp, Homo sapien
tcttgtcccatcaaacttcgaggtg

SEQ ID NO: 1535301 - DNA, 25 bp, Homo sapien
caccgggtggatactcagtgtgcag

SEQ ID NO: 1535302 - DNA, 25 bp, Homo sapien
caggatgaagctttccaggtcacca

SEQ ID NO: 1535303 - DNA, 25 bp, Homo sapien
cattgaggtgtattcgttccatcca

SEQ ID NO: 1535304 - DNA, 25 bp, Homo sapien
agagcagaggacccgctccccgaag

SEQ ID NO: 1535305 - DNA, 25 bp, Homo sapien
cagaggacccgctccccgaaggcct

SEQ ID NO: 1535306 - DNA, 25 bp, Homo sapien
ccagagcagaggacccgctccccga

SEQ ID NO: 1535307 - DNA, 25 bp, Homo sapien
gagcagaggacccgctccccgaagg

SEQ ID NO: 1535308 - DNA, 25 bp, Homo sapien
tgcttggatggttccagtactaagg

SEQ ID NO: 1535309 - DNA, 25 bp, Homo sapien
gccaaacacgagtttgtcacaaaag

SEQ ID NO: 1535310 - DNA, 25 bp, Homo sapien
ccactaaaggaatgcggtgcttgga

SEQ ID NO: 1535311 - DNA, 25 bp, Homo sapien
ttccagtactaaggccaaacacgag

SEQ ID NO: 1535312 - DNA, 25 bp, Homo sapien
gctcaaacgatcctccgatctcagc

SEQ ID NO: 1535313 - DNA, 25 bp, Homo sapien
ctcaaacgatcctccgatctcagcc

SEQ ID NO: 1535314 - DNA, 25 bp, Homo sapien
ttagatgtcctgtcccaaatcaccc

SEQ ID NO: 1535315 - DNA, 25 bp, Homo sapien
gcaaaagaacagagcccgtgcagga

SEQ ID NO: 1535316 - DNA, 25 bp, Homo sapien
cacctggctttagatgtcctgtccc

SEQ ID NO: 1535317 - DNA, 25 bp, Homo sapien
ggactgaggacgtgagcgtacacct

SEQ ID NO: 1535318 - DNA, 25 bp, Homo sapien
ttcctgggactcttgaatttctgga

SEQ ID NO: 1535319 - DNA, 25 bp, Homo sapien
ttggatcggatacccatagcaggag

SEQ ID NO: 1535320 - DNA, 25 bp, Homo sapien
gtgacttcctgggactcttgaattt

SEQ ID NO: 1535321 - DNA, 25 bp, Homo sapien
agccactgcaattggatcggatacc

SEQ ID NO: 1535322 - DNA, 25 bp, Homo sapien
aacttgagctcgctccgggtgaaga

SEQ ID NO: 1535323 - DNA, 25 bp, Homo sapien
gagaacttgagctcgctccgggtga

SEQ ID NO: 1535324 - DNA, 25 bp, Homo sapien
cttgagctcgctccgggtgaagaca

SEQ ID NO: 1535325 - DNA, 25 bp, Homo sapien
gggagaacttgagctcgctccgggt

SEQ ID NO: 1535326 - DNA, 25 bp, Homo sapien
accgtgtcattggagaggaacttcc

SEQ ID NO: 1535327 - DNA, 25 bp, Homo sapien
ccgtgtcattggagaggaacttccc

SEQ ID NO: 1535328 - DNA, 25 bp, Homo sapien
ccattttattctgttaggctagagc

SEQ ID NO: 1535329 - DNA, 25 bp, Homo sapien
gacctaaccagataatccccaattc

SEQ ID NO: 1535330 - DNA, 25 bp, Homo sapien
aacaccagggctgacaaggcggcgt

SEQ ID NO: 1535331 - DNA, 25 bp, Homo sapien
catggcttgaggatggaccatttta

SEQ ID NO: 1535332 - DNA, 25 bp, Homo sapien
ccctcagaggcggtgaacttcagcc

SEQ ID NO: 1535333 - DNA, 25 bp, Homo sapien
cagcacgcagggttcctaacaccat

SEQ ID NO: 1535334 - DNA, 25 bp, Homo sapien
tctcccaaatatgtgccggcctcag

SEQ ID NO: 1535335 - DNA, 25 bp, Homo sapien
cattggcagccgtaataaggcctgg

SEQ ID NO: 1535336 - DNA, 25 bp, Homo sapien
cactgggagtgaccttgatctccaa

SEQ ID NO: 1535337 - DNA, 25 bp, Homo sapien
tcacttcgcgcaggtttagcgtgaa

SEQ ID NO: 1535338 - DNA, 25 bp, Homo sapien
ccttgagccaggataccgtcgtgta

SEQ ID NO: 1535339 - DNA, 25 bp, Homo sapien
cacgtcattggagacctgacagcag

SEQ ID NO: 1535340 - DNA, 25 bp, Homo sapien
ctctccgggtccacccctgctacct

SEQ ID NO: 1535341 - DNA, 25 bp, Homo sapien
ctgtccccagctccgaggggctcac

SEQ ID NO: 1535342 - DNA, 25 bp, Homo sapien
aggatctgaaccgtggaaggttccg

SEQ ID NO: 1535343 - DNA, 25 bp, Homo sapien
tgcaaagaaactcgacttgacttcc

SEQ ID NO: 1535344 - DNA, 25 bp, Homo sapien
gatctttgggatgtggactttctcc

SEQ ID NO: 1535345 - DNA, 25 bp, Homo sapien
taatttgttggaagaggattggcca

SEQ ID NO: 1535346 - DNA, 25 bp, Homo sapien
cgcaggcgatggttgtgttgtccca

SEQ ID NO: 1535347 - DNA, 25 bp, Homo sapien
caacgttttggatcttcagcacccc

SEQ ID NO: 1535348 - DNA, 25 bp, Homo sapien
caactattacaagctgcgcaggcga

SEQ ID NO: 1535349 - DNA, 25 bp, Homo sapien
aggcccacgagcaccaactattaca

SEQ ID NO: 1535350 - DNA, 25 bp, Homo sapien
aggctcctgtccctcaattctgttg

SEQ ID NO: 1535351 - DNA, 25 bp, Homo sapien
ctgacctctccgctccctgtccctt

SEQ ID NO: 1535352 - DNA, 25 bp, Homo sapien
caggctccggcctcgttgccttcat

SEQ ID NO: 1535353 - DNA, 25 bp, Homo sapien
gggcaagggtcccaagctgacctct

SEQ ID NO: 1535354 - DNA, 25 bp, Homo sapien
tcacattggaggctgaccgagtttc

SEQ ID NO: 1535355 - DNA, 25 bp, Homo sapien
cggaccctcacgtctcggggggcat

SEQ ID NO: 1535356 - DNA, 25 bp, Homo sapien
gtttccagagtgaatctcggaaagg

SEQ ID NO: 1535357 - DNA, 25 bp, Homo sapien
agaactggacttctttggggtggct

SEQ ID NO: 1535358 - DNA, 25 bp, Homo sapien
tggagttgttcacccagcagctgta

SEQ ID NO: 1535359 - DNA, 25 bp, Homo sapien
gcacttcaagtgtccaggccttgga

SEQ ID NO: 1535360 - DNA, 25 bp, Homo sapien
aggccttggacgctgtctgtcctat

SEQ ID NO: 1535361 - DNA, 25 bp, Homo sapien
acagcacttcaagtgtccaggcctt

SEQ ID NO: 1535362 - DNA, 25 bp, Homo sapien
tgcgaagtcactaccaggcaggcca

SEQ ID NO: 1535363 - DNA, 25 bp, Homo sapien
agggggtgcgaagtcactaccaggc

SEQ ID NO: 1535364 - DNA, 25 bp, Homo sapien
gggagggggtgcgaagtcactacca

SEQ ID NO: 1535365 - DNA, 25 bp, Homo sapien
ggtgcgaagtcactaccaggcaggc

SEQ ID NO: 1535366 - DNA, 25 bp, Homo sapien
acaggtcagggttgcactcttcccc

SEQ ID NO: 1535367 - DNA, 25 bp, Homo sapien
taggcacccgagtgctggaccttca

SEQ ID NO: 1535368 - DNA, 25 bp, Homo sapien
gttattccagtcaaaccaggtgtag

SEQ ID NO: 1535369 - DNA, 25 bp, Homo sapien
ctgagaggcgaacggcccttgccca

SEQ ID NO: 1535370 - DNA, 25 bp, Homo sapien
cagtgaggtgtcattatgcgactgc

SEQ ID NO: 1535371 - DNA, 25 bp, Homo sapien
aggtgtcattatgcgactgcactcc

SEQ ID NO: 1535372 - DNA, 25 bp, Homo sapien
tgaggtgtcattatgcgactgcact

SEQ ID NO: 1535373 - DNA, 25 bp, Homo sapien
gctgcagtgaggtgtcattatgcga

SEQ ID NO: 1535374 - DNA, 25 bp, Homo sapien
aaattcccaggcaaagtgtgggctc

SEQ ID NO: 1535375 - DNA, 25 bp, Homo sapien
gaagggtatataggcacagacctct

SEQ ID NO: 1535376 - DNA, 25 bp, Homo sapien
ttctcagggatcaagagtgagccgc

SEQ ID NO: 1535377 - DNA, 25 bp, Homo sapien
tgcgtgtgaaaaatacccctggagg

SEQ ID NO: 1535378 - DNA, 25 bp, Homo sapien
gaaaggagagaccttaatcaactga

SEQ ID NO: 1535379 - DNA, 25 bp, Homo sapien
aggagagaccttaatcaactgaggg

SEQ ID NO: 1535380 - DNA, 25 bp, Homo sapien
accttaatcaactgaggggccagct

SEQ ID NO: 1535381 - DNA, 25 bp, Homo sapien
tctctgcagccagactcgtccttct

SEQ ID NO: 1535382 - DNA, 25 bp, Homo sapien
cgtcgctggagcttgagcccacaga

SEQ ID NO: 1535383 - DNA, 25 bp, Homo sapien
gtcgctggagcttgagcccacagat

SEQ ID NO: 1535384 - DNA, 25 bp, Homo sapien
cacagccactcgcctgccgatggtc

SEQ ID NO: 1535385 - DNA, 25 bp, Homo sapien
agccactcgcctgccgatggtctcc

SEQ ID NO: 1535386 - DNA, 25 bp, Homo sapien
ggaggtggtgggggatggcaggagc

SEQ ID NO: 1535387 - DNA, 25 bp, Homo sapien
gtggtgggggatggcaggagctcac

SEQ ID NO: 1535388 - DNA, 25 bp, Homo sapien
ctgccaagggatagaggaggtggtg

SEQ ID NO: 1535389 - DNA, 25 bp, Homo sapien
aggtggtgggggatggcaggagctc

SEQ ID NO: 1535390 - DNA, 25 bp, Homo sapien
gactccacaggctggaggcttcgag

SEQ ID NO: 1535391 - DNA, 25 bp, Homo sapien
actccacaggctggaggcttcgaga

SEQ ID NO: 1535392 - DNA, 25 bp, Homo sapien
tcctcacaaagaagctctggccgct

SEQ ID NO: 1535393 - DNA, 25 bp, Homo sapien
ctcacaaagaagctctggccgctgg

SEQ ID NO: 1535394 - DNA, 25 bp, Homo sapien
ttcctcacaaagaagctctggccgc

SEQ ID NO: 1535395 - DNA, 25 bp, Homo sapien
cctcacaaagaagctctggccgctg

SEQ ID NO: 1535396 - DNA, 25 bp, Homo sapien
gccatcgtgcccagccccatcctac

SEQ ID NO: 1535397 - DNA, 25 bp, Homo sapien
gagccatcgtgcccagccccatcct

SEQ ID NO: 1535398 - DNA, 25 bp, Homo sapien
agccatcgtgcccagccccatccta

SEQ ID NO: 1535399 - DNA, 25 bp, Homo sapien
cgcagggtggtgtagctaatgccat

SEQ ID NO: 1535400 - DNA, 25 bp, Homo sapien
ttggattgtagcatcccagggagtg

SEQ ID NO: 1535401 - DNA, 25 bp, Homo sapien
tgttcatctcgggaaagcgcagggt

SEQ ID NO: 1535402 - DNA, 25 bp, Homo sapien
ccatcattggattgtagcatcccag

SEQ ID NO: 1535403 - DNA, 25 bp, Homo sapien
aataagtgaccgtgtcatcgcagtc

SEQ ID NO: 1535404 - DNA, 25 bp, Homo sapien
tgctgaataagtgaccgtgtcatcg

SEQ ID NO: 1535405 - DNA, 25 bp, Homo sapien
gtccgggggaggtctctgcatctct

SEQ ID NO: 1535406 - DNA, 25 bp, Homo sapien
gcgcttgtgcaatgctgaataagtg

SEQ ID NO: 1535407 - DNA, 25 bp, Homo sapien
gaaactggctgtggccggcatccag

SEQ ID NO: 1535408 - DNA, 25 bp, Homo sapien
gagaaaaccgcatggtggttagcct

SEQ ID NO: 1535409 - DNA, 25 bp, Homo sapien
tccaaaagcccaggcgggtgtcctc

SEQ ID NO: 1535410 - DNA, 25 bp, Homo sapien
tgtcctcgtgtcaggaaactggctg

SEQ ID NO: 1535411 - DNA, 25 bp, Homo sapien
gaccccaaactggatcagctctgag

SEQ ID NO: 1535412 - DNA, 25 bp, Homo sapien
aatgtttgaggatcacatagtccac

SEQ ID NO: 1535413 - DNA, 25 bp, Homo sapien
taatgaatcccctcatcttctggaa

SEQ ID NO: 1535414 - DNA, 25 bp, Homo sapien
gtttgaggatcacatagtccacatt

SEQ ID NO: 1535415 - DNA, 25 bp, Homo sapien
caggaggaagccatgtggcggtgtc

SEQ ID NO: 1535416 - DNA, 25 bp, Homo sapien
tgcgcacatgcgcgcaggaggaagc

SEQ ID NO: 1535417 - DNA, 25 bp, Homo sapien
catgtggcggtgtctggggaaactc

SEQ ID NO: 1535418 - DNA, 25 bp, Homo sapien
aggaagccatgtggcggtgtctggg

SEQ ID NO: 1535419 - DNA, 25 bp, Homo sapien
ccaggcacaaggttctccgcagtga

SEQ ID NO: 1535420 - DNA, 25 bp, Homo sapien
gtacgtctccctgtgcaatgcctca

SEQ ID NO: 1535421 - DNA, 25 bp, Homo sapien
tggcaggttaatccacaccagtgtg

SEQ ID NO: 1535422 - DNA, 25 bp, Homo sapien
aaatgatgacgagcagatcccagga

SEQ ID NO: 1535423 - DNA, 25 bp, Homo sapien
ttgaagtggcatctgagccattttt

SEQ ID NO: 1535424 - DNA, 25 bp, Homo sapien
agtcagggagcagcggagcctggat

SEQ ID NO: 1535425 - DNA, 25 bp, Homo sapien
agcagcggagcctggatgagaagcc

SEQ ID NO: 1535426 - DNA, 25 bp, Homo sapien
tccagccctgtgtggagaattacaa

SEQ ID NO: 1535427 - DNA, 25 bp, Homo sapien
ggctcctgggatcactcgcgggttc

SEQ ID NO: 1535428 - DNA, 25 bp, Homo sapien
ccgttgaccggtgtgttgatgccca

SEQ ID NO: 1535429 - DNA, 25 bp, Homo sapien
gaatagcacggcctccggaaggctt

SEQ ID NO: 1535430 - DNA, 25 bp, Homo sapien
caggttcagggcgtagaccaggcta

SEQ ID NO: 1535431 - DNA, 25 bp, Homo sapien
ttgtagggtcctacgcagagcagca

SEQ ID NO: 1535432 - DNA, 25 bp, Homo sapien
gttcttgccgcacacactgtcttca

SEQ ID NO: 1535433 - DNA, 25 bp, Homo sapien
tgcgttcttgccgcacacactgtct

SEQ ID NO: 1535434 - DNA, 25 bp, Homo sapien
gcgttcttgccgcacacactgtctt

SEQ ID NO: 1535435 - DNA, 25 bp, Homo sapien
tgggacttgcccccttgcgttcttg

SEQ ID NO: 1535436 - DNA, 25 bp, Homo sapien
gacaaacttcctcgacacgtgcagg

SEQ ID NO: 1535437 - DNA, 25 bp, Homo sapien
tagctgtcctcaagtgcatcaccgg

SEQ ID NO: 1535438 - DNA, 25 bp, Homo sapien
ttgagatctgcagccgcggttactg

SEQ ID NO: 1535439 - DNA, 25 bp, Homo sapien
ggttactgccgcttgagacagacaa

SEQ ID NO: 1535440 - DNA, 25 bp, Homo sapien
tgcgtcccaggctgaaaccatcctt

SEQ ID NO: 1535441 - DNA, 25 bp, Homo sapien
aattggcagggtaccgtggttcacg

SEQ ID NO: 1535442 - DNA, 25 bp, Homo sapien
attggcagggtaccgtggttcacgc

SEQ ID NO: 1535443 - DNA, 25 bp, Homo sapien
gctgttaaaagtgcagcagtaggct

SEQ ID NO: 1535444 - DNA, 25 bp, Homo sapien
tggctcaggtccgtaattttagcac

SEQ ID NO: 1535445 - DNA, 25 bp, Homo sapien
cggtggctcaggtccgtaattttag

SEQ ID NO: 1535446 - DNA, 25 bp, Homo sapien
gctcaggtccgtaattttagcactt

SEQ ID NO: 1535447 - DNA, 25 bp, Homo sapien
aatcctttactagggtcatgaaaat

SEQ ID NO: 1535448 - DNA, 25 bp, Homo sapien
atcctttactagggtcatgaaaatg

SEQ ID NO: 1535449 - DNA, 25 bp, Homo sapien
taaaatcctttactagggtcatgaa

SEQ ID NO: 1535450 - DNA, 25 bp, Homo sapien
gcacatagatgccttgagctccgtt

SEQ ID NO: 1535451 - DNA, 25 bp, Homo sapien
cagtggcacatagatgccttgagct

SEQ ID NO: 1535452 - DNA, 25 bp, Homo sapien
gatgccttgagctccgttgccaggg

SEQ ID NO: 1535453 - DNA, 25 bp, Homo sapien
gttgagcagtggcacatagatgcct

SEQ ID NO: 1535454 - DNA, 25 bp, Homo sapien
aaatgctctgccgcacagcaccttg

SEQ ID NO: 1535455 - DNA, 25 bp, Homo sapien
gaccccaaatgctctgccgcacagc

SEQ ID NO: 1535456 - DNA, 25 bp, Homo sapien
atgctctgccgcacagcaccttgct

SEQ ID NO: 1535457 - DNA, 25 bp, Homo sapien
ttctttgagaccccaaatgctctgc

SEQ ID NO: 1535458 - DNA, 25 bp, Homo sapien
gaattctatgacgtagaccacgctg

SEQ ID NO: 1535459 - DNA, 25 bp, Homo sapien
tttcaccgcagatatagcccacgac

SEQ ID NO: 1535460 - DNA, 25 bp, Homo sapien
cgacatgggacacgttgtagggccc

SEQ ID NO: 1535461 - DNA, 25 bp, Homo sapien
aagacgaaccagtgattgccggaga

SEQ ID NO: 1535462 - DNA, 25 bp, Homo sapien
ttctttcagctggtcggtccgctct

SEQ ID NO: 1535463 - DNA, 25 bp, Homo sapien
tcctcagcagctcatgaaagtcggc

SEQ ID NO: 1535464 - DNA, 25 bp, Homo sapien
ccctgtgagtgttcactggtctttc

SEQ ID NO: 1535465 - DNA, 25 bp, Homo sapien
cagctcatgaaagtcggcttggaac

SEQ ID NO: 1535466 - DNA, 25 bp, Homo sapien
gctttagcgcgcatacccttaggga

SEQ ID NO: 1535467 - DNA, 25 bp, Homo sapien
ccttagggaggctagatgtctactc

SEQ ID NO: 1535468 - DNA, 25 bp, Homo sapien
cccagagcccaatccatagtgtgtg

SEQ ID NO: 1535469 - DNA, 25 bp, Homo sapien
actttctggaaaaggcgctgtggga

SEQ ID NO: 1535470 - DNA, 25 bp, Homo sapien
gcatcaacttctttgcagccaccag

SEQ ID NO: 1535471 - DNA, 25 bp, Homo sapien
gggatggacaggtgagccgtgggac

SEQ ID NO: 1535472 - DNA, 25 bp, Homo sapien
gccgtgggacagagagacagctcat

SEQ ID NO: 1535473 - DNA, 25 bp, Homo sapien
tcaacttctttgcagccaccagggc

SEQ ID NO: 1535474 - DNA, 25 bp, Homo sapien
cagaggaagaaagcttcttgatttc

SEQ ID NO: 1535475 - DNA, 25 bp, Homo sapien
gacttcacgcgtgggtcccagagga

SEQ ID NO: 1535476 - DNA, 25 bp, Homo sapien
ccagaggaagaaagcttcttgattt

SEQ ID NO: 1535477 - DNA, 25 bp, Homo sapien
gagataggacttcacgcgtgggtcc

SEQ ID NO: 1535478 - DNA, 25 bp, Homo sapien
tttcaccgcagatatagcccacgac

SEQ ID NO: 1535479 - DNA, 25 bp, Homo sapien
cgacatgggacacgttgtagggccc

SEQ ID NO: 1535480 - DNA, 25 bp, Homo sapien
aagacgaaccagtgattgccggaga

SEQ ID NO: 1535481 - DNA, 25 bp, Homo sapien
gaattctatgacgtagaccacgctg

SEQ ID NO: 1535482 - DNA, 25 bp, Homo sapien
ttctttcagctggtcggtccgctct

SEQ ID NO: 1535483 - DNA, 25 bp, Homo sapien
tcctcagcagctcatgaaagtcggc

SEQ ID NO: 1535484 - DNA, 25 bp, Homo sapien
ccctgtgagtgttcactggtctttc

SEQ ID NO: 1535485 - DNA, 25 bp, Homo sapien
cagctcatgaaagtcggcttggaac

SEQ ID NO: 1535486 - DNA, 25 bp, Homo sapien
ggtgtctttgagcttttatcgatgc

SEQ ID NO: 1535487 - DNA, 25 bp, Homo sapien
tgagcttttatcgatgctcagcttc

SEQ ID NO: 1535488 - DNA, 25 bp, Homo sapien
tttcttccaggtgtctttgagcttt

SEQ ID NO: 1535489 - DNA, 25 bp, Homo sapien
ccaggtgtctttgagcttttatcga

SEQ ID NO: 1535490 - DNA, 25 bp, Homo sapien
ttccatgacacctgtgttctgttgc

SEQ ID NO: 1535491 - DNA, 25 bp, Homo sapien
tcttaatgcttcttttgttgatgcc

SEQ ID NO: 1535492 - DNA, 25 bp, Homo sapien
ccttcttctcaaatttcttaatgct

SEQ ID NO: 1535493 - DNA, 25 bp, Homo sapien
taatgcttcttttgttgatgccacc

SEQ ID NO: 1535494 - DNA, 25 bp, Homo sapien
aagggcatgctctcaggtctgccag

SEQ ID NO: 1535495 - DNA, 25 bp, Homo sapien
gcatgctctcaggtctgccagttct

SEQ ID NO: 1535496 - DNA, 25 bp, Homo sapien
tgccagttcttggagataccagctt

SEQ ID NO: 1535497 - DNA, 25 bp, Homo sapien
gggcatgctctcaggtctgccagtt

SEQ ID NO: 1535498 - DNA, 25 bp, Homo sapien
gttgtagggtggctcaataaaatcc

SEQ ID NO: 1535499 - DNA, 25 bp, Homo sapien
ttgtagggtggctcaataaaatcca

SEQ ID NO: 1535500 - DNA, 25 bp, Homo sapien
ggcatgttagcacttggctccagca

SEQ ID NO: 1535501 - DNA, 25 bp, Homo sapien
aaggcatgttagcacttggctccag

SEQ ID NO: 1535502 - DNA, 25 bp, Homo sapien
tgaaccaaggcatgttagcacttgg

SEQ ID NO: 1535503 - DNA, 25 bp, Homo sapien
ccaaggcatgttagcacttggctcc

SEQ ID NO: 1535504 - DNA, 25 bp, Homo sapien
cagtccagagcctcaagcagtatgg

SEQ ID NO: 1535505 - DNA, 25 bp, Homo sapien
tccagagcctcaagcagtatggttc

SEQ ID NO: 1535506 - DNA, 25 bp, Homo sapien
cagagcctcaagcagtatggttcca

SEQ ID NO: 1535507 - DNA, 25 bp, Homo sapien
gcagtccagagcctcaagcagtatg

SEQ ID NO: 1535508 - DNA, 25 bp, Homo sapien
gtgatcaccacaccaggtttgagag

SEQ ID NO: 1535509 - DNA, 25 bp, Homo sapien
tcaccacaccaggtttgagagcaac

SEQ ID NO: 1535510 - DNA, 25 bp, Homo sapien
ccacaccaggtttgagagcaacagt

SEQ ID NO: 1535511 - DNA, 25 bp, Homo sapien
gatcaccacaccaggtttgagagca

SEQ ID NO: 1535512 - DNA, 25 bp, Homo sapien
tgttactacaatgaatatccttgac

SEQ ID NO: 1535513 - DNA, 25 bp, Homo sapien
attggtgggtcatttttgcagttac

SEQ ID NO: 1535514 - DNA, 25 bp, Homo sapien
tagatcacctgagcagtgaatccag

SEQ ID NO: 1535515 - DNA, 25 bp, Homo sapien
ccattggtgggtcatttttgcagtt

SEQ ID NO: 1535516 - DNA, 25 bp, Homo sapien
ctggatggttcaggatagatcacct

SEQ ID NO: 1535517 - DNA, 25 bp, Homo sapien
tagtacaggggcatagccagcactg

SEQ ID NO: 1535518 - DNA, 25 bp, Homo sapien
gtacaggggcatagccagcactgac

SEQ ID NO: 1535519 - DNA, 25 bp, Homo sapien
ctagtacaggggcatagccagcact

SEQ ID NO: 1535520 - DNA, 25 bp, Homo sapien
agtacaggggcatagccagcactga

SEQ ID NO: 1535521 - DNA, 25 bp, Homo sapien
gcaaacttgcatgcaatgtgagcca

SEQ ID NO: 1535522 - DNA, 25 bp, Homo sapien
tcagcaaacttgcatgcaatgtgag

SEQ ID NO: 1535523 - DNA, 25 bp, Homo sapien
cagaagagcgatcaatcttttcctt

SEQ ID NO: 1535524 - DNA, 25 bp, Homo sapien
caaacttgcatgcaatgtgagccat

SEQ ID NO: 1535525 - DNA, 25 bp, Homo sapien
caatgatggcaacatcaccagattt

SEQ ID NO: 1535526 - DNA, 25 bp, Homo sapien
atcaatgatggcaacatcaccagat

SEQ ID NO: 1535527 - DNA, 25 bp, Homo sapien
agaatttagggccgtcttccagctt

SEQ ID NO: 1535528 - DNA, 25 bp, Homo sapien
accagatttcaagaatttagggccg

SEQ ID NO: 1535529 - DNA, 25 bp, Homo sapien
tctcatatcacaagcagcaaagcaa

SEQ ID NO: 1535530 - DNA, 25 bp, Homo sapien
tcatatcacaagcagcaaagcaacc

SEQ ID NO: 1535531 - DNA, 25 bp, Homo sapien
tatcacaagcagcaaagcaacccag

SEQ ID NO: 1535532 - DNA, 25 bp, Homo sapien
atcacaagcagcaaagcaacccaga

SEQ ID NO: 1535533 - DNA, 25 bp, Homo sapien
aagttttactatgcattgttatcat

SEQ ID NO: 1535534 - DNA, 25 bp, Homo sapien
gaaagttttactatgcattgttatc

SEQ ID NO: 1535535 - DNA, 25 bp, Homo sapien
aagttgcttccattaaaaagcactg

SEQ ID NO: 1535536 - DNA, 25 bp, Homo sapien
attaaaactgccacatgcaaaagag

SEQ ID NO: 1535537 - DNA, 25 bp, Homo sapien
aggtcagttattcagcatctgcagg

SEQ ID NO: 1535538 - DNA, 25 bp, Homo sapien
gaggtcagttattcagcatctgcag

SEQ ID NO: 1535539 - DNA, 25 bp, Homo sapien
ggtcagttattcagcatctgcagga

SEQ ID NO: 1535540 - DNA, 25 bp, Homo sapien
ctgttacaaagaacgaggcaggtcc

SEQ ID NO: 1535541 - DNA, 25 bp, Homo sapien
caaagaacgaggcaggtccacgtat

SEQ ID NO: 1535542 - DNA, 25 bp, Homo sapien
gcaggtccacgtatgccaatgtaga

SEQ ID NO: 1535543 - DNA, 25 bp, Homo sapien
cgtatgccaatgtagatcaggccct

SEQ ID NO: 1535544 - DNA, 25 bp, Homo sapien
aatccttgtggaatgtaaggatgga

SEQ ID NO: 1535545 - DNA, 25 bp, Homo sapien
tgtaaggatggaggttggatgtgcc

SEQ ID NO: 1535546 - DNA, 25 bp, Homo sapien
gaggttggatgtgcctgtgaatact

SEQ ID NO: 1535547 - DNA, 25 bp, Homo sapien
tataacagacactcaaatccttgtg

SEQ ID NO: 1535548 - DNA, 25 bp, Homo sapien
tcttgtctaactggaccaccttttc

SEQ ID NO: 1535549 - DNA, 25 bp, Homo sapien
tcagaagccggtggcatcttgtcta

SEQ ID NO: 1535550 - DNA, 25 bp, Homo sapien
ttccaccaacggcaggcttttatac

SEQ ID NO: 1535551 - DNA, 25 bp, Homo sapien
gcaggtagatgggtgggttttcaaa

SEQ ID NO: 1535552 - DNA, 25 bp, Homo sapien
tgacagatagcatatcacctgctgg

SEQ ID NO: 1535553 - DNA, 25 bp, Homo sapien
ccagatgaatgggagtggccctgcc

SEQ ID NO: 1535554 - DNA, 25 bp, Homo sapien
taatgaggccttaacctatgacaga

SEQ ID NO: 1535555 - DNA, 25 bp, Homo sapien
tcctccttggagagtagcctgtcct

SEQ ID NO: 1535556 - DNA, 25 bp, Homo sapien
gtgaaccatggtggcaccactgcaa

SEQ ID NO: 1535557 - DNA, 25 bp, Homo sapien
accatggtggcaccactgcaaacca

SEQ ID NO: 1535558 - DNA, 25 bp, Homo sapien
gcccaggggcttcaaggttacagtg

SEQ ID NO: 1535559 - DNA, 25 bp, Homo sapien
ggttacagtgaaccatggtggcacc

SEQ ID NO: 1535560 - DNA, 25 bp, Homo sapien
gagtaagcttaaatctcctcgaagt

SEQ ID NO: 1535561 - DNA, 25 bp, Homo sapien
gaaagagtaagcttaaatctcctcg

SEQ ID NO: 1535562 - DNA, 25 bp, Homo sapien
aatctcctcgaagtgatcattgaaa

SEQ ID NO: 1535563 - DNA, 25 bp, Homo sapien
tcgaagtgatcattgaaaggtaaac

SEQ ID NO: 1535564 - DNA, 25 bp, Homo sapien
ctagacaatgagccaggcatggtgg

SEQ ID NO: 1535565 - DNA, 25 bp, Homo sapien
ctcatgcctcccagcactttgggag

SEQ ID NO: 1535566 - DNA, 25 bp, Homo sapien
aaattagtagggagtggtggcacat

SEQ ID NO: 1535567 - DNA, 25 bp, Homo sapien
gctgaggcaggcagatcactttagg

SEQ ID NO: 1535568 - DNA, 25 bp, Homo sapien
tcatagcagatacggagccctctgg

SEQ ID NO: 1535569 - DNA, 25 bp, Homo sapien
gggacgttctcatagcagatacgga

SEQ ID NO: 1535570 - DNA, 25 bp, Homo sapien
tctgcacaaagtgccagtggcagaa

SEQ ID NO: 1535571 - DNA, 25 bp, Homo sapien
tggcagaaggtggtgaccgccatgg

SEQ ID NO: 1535572 - DNA, 25 bp, Homo sapien
tcacggcagccagtctcttggctct

SEQ ID NO: 1535573 - DNA, 25 bp, Homo sapien
ctcttcagcacctccaggtccccac

SEQ ID NO: 1535574 - DNA, 25 bp, Homo sapien
cttggctcttcagcacctccaggtc

SEQ ID NO: 1535575 - DNA, 25 bp, Homo sapien
cacggcagccagtctcttggctctt

SEQ ID NO: 1535576 - DNA, 25 bp, Homo sapien
tgtcaaaggctttgcgcacggtgga

SEQ ID NO: 1535577 - DNA, 25 bp, Homo sapien
tggcgcctctaatctcctgtgaagg

SEQ ID NO: 1535578 - DNA, 25 bp, Homo sapien
acccaccatgggagacaaagcacag

SEQ ID NO: 1535579 - DNA, 25 bp, Homo sapien
caatgcagcatcgagagcactgaac

SEQ ID NO: 1535580 - DNA, 25 bp, Homo sapien
gcagtaccagccataatgaagaaaa

SEQ ID NO: 1535581 - DNA, 25 bp, Homo sapien
catgaggcagtaccagccataatga

SEQ ID NO: 1535582 - DNA, 25 bp, Homo sapien
aaggcagaagttgttgaacatcctg

SEQ ID NO: 1535583 - DNA, 25 bp, Homo sapien
agaagttgttgaacatcctggccaa

SEQ ID NO: 1535584 - DNA, 25 bp, Homo sapien
gacttgcctgtgctgggttgttcag

SEQ ID NO: 1535585 - DNA, 25 bp, Homo sapien
ggtgccggtcctttgagtccacatg

SEQ ID NO: 1535586 - DNA, 25 bp, Homo sapien
gttcagatccagcatgaggaacccc

SEQ ID NO: 1535587 - DNA, 25 bp, Homo sapien
gactctgctccgaaggacagttgct

SEQ ID NO: 1535588 - DNA, 25 bp, Homo sapien
tctgaaaagacaaattaatgggtct

SEQ ID NO: 1535589 - DNA, 25 bp, Homo sapien
aaagacaaattaatgggtctcttgg

SEQ ID NO: 1535590 - DNA, 25 bp, Homo sapien
tgtaaccactcaaaagtatcatgac

SEQ ID NO: 1535591 - DNA, 25 bp, Homo sapien
aacacagtaggatgtaaccactcaa

SEQ ID NO: 1535592 - DNA, 25 bp, Homo sapien
agatcatgccgttgacttcagcctg

SEQ ID NO: 1535593 - DNA, 25 bp, Homo sapien
agctgagatcatgccgttgacttca

SEQ ID NO: 1535594 - DNA, 25 bp, Homo sapien
cctgggcaacagagtgagactgtgt

SEQ ID NO: 1535595 - DNA, 25 bp, Homo sapien
gcctgggcaacagagtgagactgtg

SEQ ID NO: 1535596 - DNA, 25 bp, Homo sapien
aagagagggaccagccttcaagttc

SEQ ID NO: 1535597 - DNA, 25 bp, Homo sapien
tctcttcacaatggcccccagaaga

SEQ ID NO: 1535598 - DNA, 25 bp, Homo sapien
agcctctcttcacaatggcccccag

SEQ ID NO: 1535599 - DNA, 25 bp, Homo sapien
acaatggcccccagaagagagggac

SEQ ID NO: 1535600 - DNA, 25 bp, Homo sapien
tgtgccaatctgctaggttcctgtg

SEQ ID NO: 1535601 - DNA, 25 bp, Homo sapien
ttacgccatcacgttgaagaggacc

SEQ ID NO: 1535602 - DNA, 25 bp, Homo sapien
tgagggtctcgggtccttctttgaa

SEQ ID NO: 1535603 - DNA, 25 bp, Homo sapien
cctggatacatctggcacttgtgcc

SEQ ID NO: 1535604 - DNA, 25 bp, Homo sapien
ccatatgccgaaatgaaactttcag

SEQ ID NO: 1535605 - DNA, 25 bp, Homo sapien
gaagctccaggattaccttctacct

SEQ ID NO: 1535606 - DNA, 25 bp, Homo sapien
tcaggaatggtgagatccatatgcc

SEQ ID NO: 1535607 - DNA, 25 bp, Homo sapien
ctcctgcgtggtggcgggaagctcc

SEQ ID NO: 1535608 - DNA, 25 bp, Homo sapien
ggccaggaccatggtgcgaggtgca

SEQ ID NO: 1535609 - DNA, 25 bp, Homo sapien
cacagaccacgagccactgtgggag

SEQ ID NO: 1535610 - DNA, 25 bp, Homo sapien
gccagagtccagccggtagccgctg

SEQ ID NO: 1535611 - DNA, 25 bp, Homo sapien
gagaagccagactgacggaggcaca

SEQ ID NO: 1535612 - DNA, 25 bp, Homo sapien
tcaatcctttagtgttcctgtcacc

SEQ ID NO: 1535613 - DNA, 25 bp, Homo sapien
ccaggatcccggcattcaatccttt

SEQ ID NO: 1535614 - DNA, 25 bp, Homo sapien
tcccactgctgtagtgcagaaagtg

SEQ ID NO: 1535615 - DNA, 25 bp, Homo sapien
tgctgtagtgcagaaagtgcacagg

SEQ ID NO: 1535616 - DNA, 25 bp, Homo sapien
acgtggacggagctgccgggcttgt

SEQ ID NO: 1535617 - DNA, 25 bp, Homo sapien
ccattcagcaaaggacgtggacgga

SEQ ID NO: 1535618 - DNA, 25 bp, Homo sapien
gccttcagcttcctcgatagggcag

SEQ ID NO: 1535619 - DNA, 25 bp, Homo sapien
ggccttcagcttcctcgatagggca

SEQ ID NO: 1535620 - DNA, 25 bp, Homo sapien
tccagccaagagccgtgggccacag

SEQ ID NO: 1535621 - DNA, 25 bp, Homo sapien
gccaagagccgtgggccacagatga

SEQ ID NO: 1535622 - DNA, 25 bp, Homo sapien
gtccagccaagagccgtgggccaca

SEQ ID NO: 1535623 - DNA, 25 bp, Homo sapien
cagccaagagccgtgggccacagat

SEQ ID NO: 1535624 - DNA, 25 bp, Homo sapien
attagggaacccatgtccacggctg

SEQ ID NO: 1535625 - DNA, 25 bp, Homo sapien
gggtcctctggctatctgtttcact

SEQ ID NO: 1535626 - DNA, 25 bp, Homo sapien
ccagatcttggctttcgcttcatgg

SEQ ID NO: 1535627 - DNA, 25 bp, Homo sapien
tgggacatgaaggaattagggaacc

SEQ ID NO: 1535628 - DNA, 25 bp, Homo sapien
ttcacaccacccttgataagggcca

SEQ ID NO: 1535629 - DNA, 25 bp, Homo sapien
agaaggcagctggtcgtttccttgg

SEQ ID NO: 1535630 - DNA, 25 bp, Homo sapien
aggcagctggtcgtttccttgggct

SEQ ID NO: 1535631 - DNA, 25 bp, Homo sapien
tagcgcgggttcacaccacccttga

SEQ ID NO: 1535632 - DNA, 25 bp, Homo sapien
tttccacttctgtgaatgtgtcatg

SEQ ID NO: 1535633 - DNA, 25 bp, Homo sapien
gaatgtgtcatgttttccatctgcc

SEQ ID NO: 1535634 - DNA, 25 bp, Homo sapien
tgggcagggccattttccacttctg

SEQ ID NO: 1535635 - DNA, 25 bp, Homo sapien
ctctctctttgctgtctgggcaggg

SEQ ID NO: 1535636 - DNA, 25 bp, Homo sapien
ctgtccaacaccaaactctgggact

SEQ ID NO: 1535637 - DNA, 25 bp, Homo sapien
gtccaacaccaaactctgggactct

SEQ ID NO: 1535638 - DNA, 25 bp, Homo sapien
gtcctctcctgtccaacaccaaact

SEQ ID NO: 1535639 - DNA, 25 bp, Homo sapien
cttgtcctctcctgtccaacaccaa

SEQ ID NO: 1535640 - DNA, 25 bp, Homo sapien
ttttgcagagcacagattctccccc

SEQ ID NO: 1535641 - DNA, 25 bp, Homo sapien
ttgcagagcacagattctcccccac

SEQ ID NO: 1535642 - DNA, 25 bp, Homo sapien
ctgttttgcagagcacagattctcc

SEQ ID NO: 1535643 - DNA, 25 bp, Homo sapien
tgttttgcagagcacagattctccc

SEQ ID NO: 1535644 - DNA, 25 bp, Homo sapien
acaccacctgctcgaactacccaga

SEQ ID NO: 1535645 - DNA, 25 bp, Homo sapien
tcgaactacccagagcaattattga

SEQ ID NO: 1535646 - DNA, 25 bp, Homo sapien
gaactacccagagcaattattgact

SEQ ID NO: 1535647 - DNA, 25 bp, Homo sapien
cccagagcaattattgactttgcct

SEQ ID NO: 1535648 - DNA, 25 bp, Homo sapien
tctccttcaggatgcggacatcctc

SEQ ID NO: 1535649 - DNA, 25 bp, Homo sapien
ctctccttcaggatgcggacatcct

SEQ ID NO: 1535650 - DNA, 25 bp, Homo sapien
gcggggtcagggaggtctcactcac

SEQ ID NO: 1535651 - DNA, 25 bp, Homo sapien
gggcggggtcagggaggtctcactc

SEQ ID NO: 1535652 - DNA, 25 bp, Homo sapien
agggcggggtcagggaggtctcact

SEQ ID NO: 1535653 - DNA, 25 bp, Homo sapien
ggcggggtcagggaggtctcactca

SEQ ID NO: 1535654 - DNA, 25 bp, Homo sapien
gttgagtgaactgaacaccacggct

SEQ ID NO: 1535655 - DNA, 25 bp, Homo sapien
gctgtagaagccaaaactcgtgagg

SEQ ID NO: 1535656 - DNA, 25 bp, Homo sapien
gacacgttgtaaggtccgaagcaca

SEQ ID NO: 1535657 - DNA, 25 bp, Homo sapien
tgcaatcactccatacagaggccgg

SEQ ID NO: 1535658 - DNA, 25 bp, Homo sapien
ctactctgtagtgaagtccgaactt

SEQ ID NO: 1535659 - DNA, 25 bp, Homo sapien
tctgtagtgaagtccgaacttggca

SEQ ID NO: 1535660 - DNA, 25 bp, Homo sapien
tagtgaagtccgaacttggcatccc

SEQ ID NO: 1535661 - DNA, 25 bp, Homo sapien
aagtccgaacttggcatcccttctc

SEQ ID NO: 1535662 - DNA, 25 bp, Homo sapien
cattaaaggtctaagccctgaggcc

SEQ ID NO: 1535663 - DNA, 25 bp, Homo sapien
caggatcaaccgctagagcagtgtc

SEQ ID NO: 1535664 - DNA, 25 bp, Homo sapien
ttttttcaaagtcgcagtcctgggc

SEQ ID NO: 1535665 - DNA, 25 bp, Homo sapien
tgctgggtaccaaaccacatcctgg

SEQ ID NO: 1535666 - DNA, 25 bp, Homo sapien
ccaagtgggttactggatgaccgct

SEQ ID NO: 1535667 - DNA, 25 bp, Homo sapien
tctgaaggcttagagatctttggcc

SEQ ID NO: 1535668 - DNA, 25 bp, Homo sapien
ccagcgtttgcagagttggctcccc

SEQ ID NO: 1535669 - DNA, 25 bp, Homo sapien
cctcctcgggtaagctgctggtggc

SEQ ID NO: 1535670 - DNA, 25 bp, Homo sapien
tcacgtagcctttgcgaatttcacg

SEQ ID NO: 1535671 - DNA, 25 bp, Homo sapien
ttgcgaatttcacgtacatgtgtac

SEQ ID NO: 1535672 - DNA, 25 bp, Homo sapien
tgttgactgtcacgtagcctttgcg

SEQ ID NO: 1535673 - DNA, 25 bp, Homo sapien
atttcctaagtaaccattgttgact

SEQ ID NO: 1535674 - DNA, 25 bp, Homo sapien
tcctgagagcctgatttacttcatt

SEQ ID NO: 1535675 - DNA, 25 bp, Homo sapien
cattacaaaccccaacaatggcggc

SEQ ID NO: 1535676 - DNA, 25 bp, Homo sapien
taaacatagtccctcctgagagcct

SEQ ID NO: 1535677 - DNA, 25 bp, Homo sapien
cttcattacaaaccccaacaatggc

SEQ ID NO: 1535678 - DNA, 25 bp, Homo sapien
cgggctatcccgtaggcgtggaggc

SEQ ID NO: 1535679 - DNA, 25 bp, Homo sapien
cattcagccgggctatcccgtaggc

SEQ ID NO: 1535680 - DNA, 25 bp, Homo sapien
tcattcagccgggctatcccgtagg

SEQ ID NO: 1535681 - DNA, 25 bp, Homo sapien
tcagccgggctatcccgtaggcgtg

SEQ ID NO: 1535682 - DNA, 25 bp, Homo sapien
tgatagcttggctcggcagaaccac

SEQ ID NO: 1535683 - DNA, 25 bp, Homo sapien
gcaaaagaatggtgggtgcccagac

SEQ ID NO: 1535684 - DNA, 25 bp, Homo sapien
cagacgctgggtgaaaagatgcccc

SEQ ID NO: 1535685 - DNA, 25 bp, Homo sapien
cagggaccgggatagagatgttaca

SEQ ID NO: 1535686 - DNA, 25 bp, Homo sapien
ggcaagtcagctaacctctccgagc

SEQ ID NO: 1535687 - DNA, 25 bp, Homo sapien
ccagaccaaggtgttgtggagtcca

SEQ ID NO: 1535688 - DNA, 25 bp, Homo sapien
tgaggacagtgaaacctgactcacg

SEQ ID NO: 1535689 - DNA, 25 bp, Homo sapien
ggttccatgggagcaatccattcta

SEQ ID NO: 1535690 - DNA, 25 bp, Homo sapien
aggcctcggtcaacacgcctttcat

SEQ ID NO: 1535691 - DNA, 25 bp, Homo sapien
tgcaggcctcggtcaacacgccttt

SEQ ID NO: 1535692 - DNA, 25 bp, Homo sapien
tgaattgcaggcctcggtcaacacg

SEQ ID NO: 1535693 - DNA, 25 bp, Homo sapien
ggtcaacacgcctttcatcaacctt

SEQ ID NO: 1535694 - DNA, 25 bp, Homo sapien
tcattgaagggatcaaccgagggct

SEQ ID NO: 1535695 - DNA, 25 bp, Homo sapien
ggcagtttggccagggagttcacca

SEQ ID NO: 1535696 - DNA, 25 bp, Homo sapien
cagacaaagcggtccaagggttcca

SEQ ID NO: 1535697 - DNA, 25 bp, Homo sapien
tcaacagtggaatcacgcatgccgg

SEQ ID NO: 1535698 - DNA, 25 bp, Homo sapien
tgttaccgaggtgcgtgcggagcgc

SEQ ID NO: 1535699 - DNA, 25 bp, Homo sapien
gttatcattggcctggacctgctgt

SEQ ID NO: 1535700 - DNA, 25 bp, Homo sapien
ggcctcttataaggttatcattggc

SEQ ID NO: 1535701 - DNA, 25 bp, Homo sapien
tgctgtgatgttaccgaggtgcgtg

SEQ ID NO: 1535702 - DNA, 25 bp, Homo sapien
acattggtgaggacgatgtcgcgct

SEQ ID NO: 1535703 - DNA, 25 bp, Homo sapien
gcacggctgtcgcagcaactggaca

SEQ ID NO: 1535704 - DNA, 25 bp, Homo sapien
tgaggacgatgtcgcgcttcgacat

SEQ ID NO: 1535705 - DNA, 25 bp, Homo sapien
aactggacaacggtgacattggtga

SEQ ID NO: 1535706 - DNA, 25 bp, Homo sapien
ggatgtttgcatccttgggggttgt

SEQ ID NO: 1535707 - DNA, 25 bp, Homo sapien
gatgtttgcatccttgggggttgtt

SEQ ID NO: 1535708 - DNA, 25 bp, Homo sapien
tgtttgcatccttgggggttgtttc

SEQ ID NO: 1535709 - DNA, 25 bp, Homo sapien
tgaggatgtttgcatccttgggggt

SEQ ID NO: 1535710 - DNA, 25 bp, Homo sapien
caccatcttaggaggaggagtagcg

SEQ ID NO: 1535711 - DNA, 25 bp, Homo sapien
ttgatgcccacagtcagctcccggg

SEQ ID NO: 1535712 - DNA, 25 bp, Homo sapien
cagacaccatcttaggaggaggagt

SEQ ID NO: 1535713 - DNA, 25 bp, Homo sapien
gtggcggtggtggctttatttcctc

SEQ ID NO: 1535714 - DNA, 25 bp, Homo sapien
gaccaggcgaccgatgcgtccaaat

SEQ ID NO: 1535715 - DNA, 25 bp, Homo sapien
catgtattccgggtcaatgaatgga

SEQ ID NO: 1535716 - DNA, 25 bp, Homo sapien
aatgaatggatcattcacagccacc

SEQ ID NO: 1535717 - DNA, 25 bp, Homo sapien
ttctccatgcaggcgcgcaggacca

SEQ ID NO: 1535718 - DNA, 25 bp, Homo sapien
catggttgtccacgaccagttgtcc

SEQ ID NO: 1535719 - DNA, 25 bp, Homo sapien
cactggtagacagagatctcatggt

SEQ ID NO: 1535720 - DNA, 25 bp, Homo sapien
cacacttcccttgtatcggccgtgg

SEQ ID NO: 1535721 - DNA, 25 bp, Homo sapien
acttcccttgtatcggccgtgggtg

SEQ ID NO: 1535722 - DNA, 25 bp, Homo sapien
gatgactccaagtggcggtaatggt

SEQ ID NO: 1535723 - DNA, 25 bp, Homo sapien
gaactgcattgcacaagtgaccaga

SEQ ID NO: 1535724 - DNA, 25 bp, Homo sapien
tctgcgtgataactatggtgctgga

SEQ ID NO: 1535725 - DNA, 25 bp, Homo sapien
ggtcacccagctagctagcggaggt

SEQ ID NO: 1535726 - DNA, 25 bp, Homo sapien
tagttagccattttatacgtgttta

SEQ ID NO: 1535727 - DNA, 25 bp, Homo sapien
ttgttgcccagggtgctttagaacc

SEQ ID NO: 1535728 - DNA, 25 bp, Homo sapien
cgtgcctggcctcatgggttttctt

SEQ ID NO: 1535729 - DNA, 25 bp, Homo sapien
cagggtgctttagaacccctgggct

SEQ ID NO: 1535730 - DNA, 25 bp, Homo sapien
tatggagaggtacacgcctgtggac

SEQ ID NO: 1535731 - DNA, 25 bp, Homo sapien
agaggtacacgcctgtggactccac

SEQ ID NO: 1535732 - DNA, 25 bp, Homo sapien
tgtggactccaccacgtaggggctc

SEQ ID NO: 1535733 - DNA, 25 bp, Homo sapien
cgaagctgcctgtatggagaggtac

SEQ ID NO: 1535734 - DNA, 25 bp, Homo sapien
caatgttcatggagccagggttata

SEQ ID NO: 1535735 - DNA, 25 bp, Homo sapien
cgcggagatgaccacacgttgagca

SEQ ID NO: 1535736 - DNA, 25 bp, Homo sapien
cattttcattgacacccatgacgaa

SEQ ID NO: 1535737 - DNA, 25 bp, Homo sapien
gacgaacattggtgcatccggtgag

SEQ ID NO: 1535738 - DNA, 25 bp, Homo sapien
tttatgaaacgtcaggatgagggtg

SEQ ID NO: 1535739 - DNA, 25 bp, Homo sapien
ttatgaaacgtcaggatgagggtga

SEQ ID NO: 1535740 - DNA, 25 bp, Homo sapien
ccctcttggggtatgcacgcagact

SEQ ID NO: 1535741 - DNA, 25 bp, Homo sapien
gggtatgcacgcagacttggtttta

SEQ ID NO: 1535742 - DNA, 25 bp, Homo sapien
ctgaaacagccaaggtgtgcacgga

SEQ ID NO: 1535743 - DNA, 25 bp, Homo sapien
tgaaacagccaaggtgtgcacggac

SEQ ID NO: 1535744 - DNA, 25 bp, Homo sapien
gaaacagccaaggtgtgcacggaca

SEQ ID NO: 1535745 - DNA, 25 bp, Homo sapien
cacgatcccaaatcgctcgtggatg

SEQ ID NO: 1535746 - DNA, 25 bp, Homo sapien
cgaggggagccaaacagttggtggt

SEQ ID NO: 1535747 - DNA, 25 bp, Homo sapien
tcccaaatcgctcgtggatgacttt

SEQ ID NO: 1535748 - DNA, 25 bp, Homo sapien
ttccacgatcccaaatcgctcgtgg

SEQ ID NO: 1535749 - DNA, 25 bp, Homo sapien
tttggtcacagctttcgcagcccca

SEQ ID NO: 1535750 - DNA, 25 bp, Homo sapien
gatgatgttctggtgggcaccccgc

SEQ ID NO: 1535751 - DNA, 25 bp, Homo sapien
atctcgccaggccttccttgatggc

SEQ ID NO: 1535752 - DNA, 25 bp, Homo sapien
actgtcttctgggtggccgtgtagg

SEQ ID NO: 1535753 - DNA, 25 bp, Homo sapien
ctggttgcagcttcttgtcctcata

SEQ ID NO: 1535754 - DNA, 25 bp, Homo sapien
tggttgcagcttcttgtcctcatac

SEQ ID NO: 1535755 - DNA, 25 bp, Homo sapien
cctggttgcagcttcttgtcctcat

SEQ ID NO: 1535756 - DNA, 25 bp, Homo sapien
ctcggtgtaggcaaggatgccagcc

SEQ ID NO: 1535757 - DNA, 25 bp, Homo sapien
tccacgacagacacatccggggttg

SEQ ID NO: 1535758 - DNA, 25 bp, Homo sapien
gatgccagccatgggccccttggct

SEQ ID NO: 1535759 - DNA, 25 bp, Homo sapien
tggtacccggaacgccatccctgtc

SEQ ID NO: 1535760 - DNA, 25 bp, Homo sapien
gtgggtatcaccgaggaagtccgta

SEQ ID NO: 1535761 - DNA, 25 bp, Homo sapien
tgaaatgagcttcacgaaattgtca

SEQ ID NO: 1535762 - DNA, 25 bp, Homo sapien
tgccggccttagcatcgaagatgga

SEQ ID NO: 1535763 - DNA, 25 bp, Homo sapien
tgtcattgagcgcaatgccggcctt

SEQ ID NO: 1535764 - DNA, 25 bp, Homo sapien
actgtagccatattcgttgtcgtac

SEQ ID NO: 1535765 - DNA, 25 bp, Homo sapien
gaggtcgaccacccggtgactgtag

SEQ ID NO: 1535766 - DNA, 25 bp, Homo sapien
gactgtagccatattcgttgtcgta

SEQ ID NO: 1535767 - DNA, 25 bp, Homo sapien
gaggaggtcgaccacccggtgactg

SEQ ID NO: 1535768 - DNA, 25 bp, Homo sapien
gggaggcacatgttccggccccggc

SEQ ID NO: 1535769 - DNA, 25 bp, Homo sapien
gaggcacatgttccggccccggccc

SEQ ID NO: 1535770 - DNA, 25 bp, Homo sapien
ggaggcacatgttccggccccggcc

SEQ ID NO: 1535771 - DNA, 25 bp, Homo sapien
cgcagccgtgagcactgttttttat

SEQ ID NO: 1535772 - DNA, 25 bp, Homo sapien
agatacgggacgcagccgtgagcac

SEQ ID NO: 1535773 - DNA, 25 bp, Homo sapien
tttcaccatggacccatcggcgtgg

SEQ ID NO: 1535774 - DNA, 25 bp, Homo sapien
tttatttcaccatggacccatcggc

SEQ ID NO: 1535775 - DNA, 25 bp, Homo sapien
gggcctctaccgctgccatcgcggt

SEQ ID NO: 1535776 - DNA, 25 bp, Homo sapien
gcccgcgcgcgaccttctgggagca

SEQ ID NO: 1535777 - DNA, 25 bp, Homo sapien
gtcagagagcccgtggccggccctg

SEQ ID NO: 1535778 - DNA, 25 bp, Homo sapien
tttggggagtgacttccggccatgc

SEQ ID NO: 1535779 - DNA, 25 bp, Homo sapien
tccgccggctctttcgccacggcca

SEQ ID NO: 1535780 - DNA, 25 bp, Homo sapien
gcgtctccgggagcgggtctccggc

SEQ ID NO: 1535781 - DNA, 25 bp, Homo sapien
ggctccgccggctctttcgccacgg

SEQ ID NO: 1535782 - DNA, 25 bp, Homo sapien
cgccggctctttcgccacggccagg

SEQ ID NO: 1535783 - DNA, 25 bp, Homo sapien
gccgctgcacttgtaggtgatgaag

SEQ ID NO: 1535784 - DNA, 25 bp, Homo sapien
gcaagagcgaagcagttcccgaagt

SEQ ID NO: 1535785 - DNA, 25 bp, Homo sapien
agcgaagcagttcccgaagtgaaac

SEQ ID NO: 1535786 - DNA, 25 bp, Homo sapien
aggccgctgcacttgtaggtgatga

SEQ ID NO: 1535787 - DNA, 25 bp, Homo sapien
tccgccccgcgcccttcccgcactc

SEQ ID NO: 1535788 - DNA, 25 bp, Homo sapien
cgccccgcgcccttcccgcactcac

SEQ ID NO: 1535789 - DNA, 25 bp, Homo sapien
ctggagaagcgggaggtgagggtcg

SEQ ID NO: 1535790 - DNA, 25 bp, Homo sapien
gagaagcgggaggtgagggtcggcc

SEQ ID NO: 1535791 - DNA, 25 bp, Homo sapien
ctccagcctggacgcatttccagaa

SEQ ID NO: 1535792 - DNA, 25 bp, Homo sapien
agaggtaggtgactccagcctggac

SEQ ID NO: 1535793 - DNA, 25 bp, Homo sapien
aagaggtaggtgactccagcctgga

SEQ ID NO: 1535794 - DNA, 25 bp, Homo sapien
agcctggacgcatttccagaaggcg

SEQ ID NO: 1535795 - DNA, 25 bp, Homo sapien
tgtgggaagttcgtgggtaggaaga

SEQ ID NO: 1535796 - DNA, 25 bp, Homo sapien
gataaaccacgtgggatttgtggga

SEQ ID NO: 1535797 - DNA, 25 bp, Homo sapien
gggatcaagataaaccacgtgggat

SEQ ID NO: 1535798 - DNA, 25 bp, Homo sapien
caagataaaccacgtgggatttgtg

SEQ ID NO: 1535799 - DNA, 25 bp, Homo sapien
aatgaagtcatagatgccgccttcc

SEQ ID NO: 1535800 - DNA, 25 bp, Homo sapien
cccaatgaagtcatagatgccgcct

SEQ ID NO: 1535801 - DNA, 25 bp, Homo sapien
ccaatgaagtcatagatgccgcctt

SEQ ID NO: 1535802 - DNA, 25 bp, Homo sapien
gaagtcatagatgccgccttcccag

SEQ ID NO: 1535803 - DNA, 25 bp, Homo sapien
cagggcagcaaccatgatcttgtac

SEQ ID NO: 1535804 - DNA, 25 bp, Homo sapien
ggtttagacctatcaggtctgccac

SEQ ID NO: 1535805 - DNA, 25 bp, Homo sapien
tcccttgccggcattccgggacatg

SEQ ID NO: 1535806 - DNA, 25 bp, Homo sapien
taataagctcagcagtggcccagcc

SEQ ID NO: 1535807 - DNA, 25 bp, Homo sapien
cagtactcagacaccttcagcacca

SEQ ID NO: 1535808 - DNA, 25 bp, Homo sapien
ccaggtgtcccttctcaggggtctg

SEQ ID NO: 1535809 - DNA, 25 bp, Homo sapien
cagcacccccgtggaacccaggtgt

SEQ ID NO: 1535810 - DNA, 25 bp, Homo sapien
agtactcagacaccttcagcaccag

SEQ ID NO: 1535811 - DNA, 25 bp, Homo sapien
tccagtcaaactcaatgccccgggc

SEQ ID NO: 1535812 - DNA, 25 bp, Homo sapien
actgatgttggagtctatgctcatc

SEQ ID NO: 1535813 - DNA, 25 bp, Homo sapien
tgctcatctggatgtacttccagtc

SEQ ID NO: 1535814 - DNA, 25 bp, Homo sapien
ggctccgacccataggggaatgcag

SEQ ID NO: 1535815 - DNA, 25 bp, Homo sapien
tatggccgccagcagaaatgtgtat

SEQ ID NO: 1535816 - DNA, 25 bp, Homo sapien
ggccttggggaggagtatggccgcc

SEQ ID NO: 1535817 - DNA, 25 bp, Homo sapien
tatgtgggagagcacgactgcctac

SEQ ID NO: 1535818 - DNA, 25 bp, Homo sapien
tgtgtatgtgggagagcacgactgc

SEQ ID NO: 1535819 - DNA, 25 bp, Homo sapien
caaaggccttgtagacactgaggaa

SEQ ID NO: 1535820 - DNA, 25 bp, Homo sapien
cactgaggaacatcagcaggaggac

SEQ ID NO: 1535821 - DNA, 25 bp, Homo sapien
agacctgagcagacgcgacgatgta

SEQ ID NO: 1535822 - DNA, 25 bp, Homo sapien
tagcgtgttatcatccagacctgag

SEQ ID NO: 1535823 - DNA, 25 bp, Homo sapien
aatgtcacaataaggaagggagact

SEQ ID NO: 1535824 - DNA, 25 bp, Homo sapien
tcacaataaggaagggagactagat

SEQ ID NO: 1535825 - DNA, 25 bp, Homo sapien
taaggaagggagactagataaccca

SEQ ID NO: 1535826 - DNA, 25 bp, Homo sapien
ggaaaatgtcacaataaggaaggga

SEQ ID NO: 1535827 - DNA, 25 bp, Homo sapien
gcccaactgcccagcgagcagaggt

SEQ ID NO: 1535828 - DNA, 25 bp, Homo sapien
gttaccactgctcgggccagtagag

SEQ ID NO: 1535829 - DNA, 25 bp, Homo sapien
attgacaacggcgacatacagggcc

SEQ ID NO: 1535830 - DNA, 25 bp, Homo sapien
cagcgagcagaggtggacgaaggtc

SEQ ID NO: 1535831 - DNA, 25 bp, Homo sapien
ttacttcactaaaacctggagtgag

SEQ ID NO: 1535832 - DNA, 25 bp, Homo sapien
aaggtacatcaatgtctgagacacc

SEQ ID NO: 1535833 - DNA, 25 bp, Homo sapien
agtgaggcagggaaaaggtacatca

SEQ ID NO: 1535834 - DNA, 25 bp, Homo sapien
ttcactaaaacctggagtgaggcag

SEQ ID NO: 1535835 - DNA, 25 bp, Homo sapien
gagacattgggctccacttcggtga

SEQ ID NO: 1535836 - DNA, 25 bp, Homo sapien
gaattttcagaacctcggctgggac

SEQ ID NO: 1535837 - DNA, 25 bp, Homo sapien
gaaggagtcccaaacaaagcactgg

SEQ ID NO: 1535838 - DNA, 25 bp, Homo sapien
tctgctcggacaagacagggactct

SEQ ID NO: 1535839 - DNA, 25 bp, Homo sapien
agcatgtcaccagaccttccacagt

SEQ ID NO: 1535840 - DNA, 25 bp, Homo sapien
tgacgaggccgggtccttaactgga

SEQ ID NO: 1535841 - DNA, 25 bp, Homo sapien
tgtgccacacattgagggcgcagag

SEQ ID NO: 1535842 - DNA, 25 bp, Homo sapien
caagtccttcccgaggcaaccctgg

SEQ ID NO: 1535843 - DNA, 25 bp, Homo sapien
tgcacgcacgagagccctctggaga

SEQ ID NO: 1535844 - DNA, 25 bp, Homo sapien
agagccctctggagacccgcaacat

SEQ ID NO: 1535845 - DNA, 25 bp, Homo sapien
cgagtgcacgcacgagagccctctg

SEQ ID NO: 1535846 - DNA, 25 bp, Homo sapien
gctcacccgagtgcacgcacgagag

SEQ ID NO: 1535847 - DNA, 25 bp, Homo sapien
ggccgggtatgggcctgatgctcca

SEQ ID NO: 1535848 - DNA, 25 bp, Homo sapien
gtatgggcctgatgctccagtgcca

SEQ ID NO: 1535849 - DNA, 25 bp, Homo sapien
gggtatgggcctgatgctccagtgc

SEQ ID NO: 1535850 - DNA, 25 bp, Homo sapien
ccgggtatgggcctgatgctccagt

SEQ ID NO: 1535851 - DNA, 25 bp, Homo sapien
ccagcatggggcacgaatccacaac

SEQ ID NO: 1535852 - DNA, 25 bp, Homo sapien
tggggcacgaatccacaaccctgag

SEQ ID NO: 1535853 - DNA, 25 bp, Homo sapien
atggggcacgaatccacaaccctga

SEQ ID NO: 1535854 - DNA, 25 bp, Homo sapien
gcatggggcacgaatccacaaccct

SEQ ID NO: 1535855 - DNA, 25 bp, Homo sapien
cggactccgagtgtcttgaaaacgg

SEQ ID NO: 1535856 - DNA, 25 bp, Homo sapien
gtcttgaaaacggagcgccagaccc

SEQ ID NO: 1535857 - DNA, 25 bp, Homo sapien
cgagtgtcttgaaaacggagcgcca

SEQ ID NO: 1535858 - DNA, 25 bp, Homo sapien
tcccctcaaagacggactccgagtg

SEQ ID NO: 1535859 - DNA, 25 bp, Homo sapien
gcgtctggggtagctggcgcgttgg

SEQ ID NO: 1535860 - DNA, 25 bp, Homo sapien
gggcgtctggggtagctggcgcgtt

SEQ ID NO: 1535861 - DNA, 25 bp, Homo sapien
tctggggtagctggcgcgttgggag

SEQ ID NO: 1535862 - DNA, 25 bp, Homo sapien
cgtctggggtagctggcgcgttggg

SEQ ID NO: 1535863 - DNA, 25 bp, Homo sapien
ctgtggtagtgggagaacctggggc

SEQ ID NO: 1535864 - DNA, 25 bp, Homo sapien
gtagtgggagaacctggggcagctg

SEQ ID NO: 1535865 - DNA, 25 bp, Homo sapien
ggggcagctgaagcacctggatcac

SEQ ID NO: 1535866 - DNA, 25 bp, Homo sapien
gagaacctggggcagctgaagcacc

SEQ ID NO: 1535867 - DNA, 25 bp, Homo sapien
gggcgtaaaatgctagttcctctgg

SEQ ID NO: 1535868 - DNA, 25 bp, Homo sapien
gtgtctgtgtaggctcttgcggctc

SEQ ID NO: 1535869 - DNA, 25 bp, Homo sapien
caaagatggtcaaacataggtagtt

SEQ ID NO: 1535870 - DNA, 25 bp, Homo sapien
tggagggaataaaagtatagcaaag

SEQ ID NO: 1535871 - DNA, 25 bp, Homo sapien
atagatgtgggtttctgtgtccagg

SEQ ID NO: 1535872 - DNA, 25 bp, Homo sapien
gatgtgggtttctgtgtccaggaac

SEQ ID NO: 1535873 - DNA, 25 bp, Homo sapien
aagcatagatgtgggtttctgtgtc

SEQ ID NO: 1535874 - DNA, 25 bp, Homo sapien
ctgtaggggtggaagcatagatgtg

SEQ ID NO: 1535875 - DNA, 25 bp, Homo sapien
cattcactgttctggttggccttca

SEQ ID NO: 1535876 - DNA, 25 bp, Homo sapien
cacgaatgcaccgaaccaaccagtt

SEQ ID NO: 1535877 - DNA, 25 bp, Homo sapien
tcactgttctggttggccttcatag

SEQ ID NO: 1535878 - DNA, 25 bp, Homo sapien
gcctgagttgatgtaagcctcttcc

SEQ ID NO: 1535879 - DNA, 25 bp, Homo sapien
aaatgatgcctaagccaatcattac

SEQ ID NO: 1535880 - DNA, 25 bp, Homo sapien
gccataaatgatgcctaagccaatc

SEQ ID NO: 1535881 - DNA, 25 bp, Homo sapien
aagccataaatgatgcctaagccaa

SEQ ID NO: 1535882 - DNA, 25 bp, Homo sapien
gaccaagccataaatgatgcctaag

SEQ ID NO: 1535883 - DNA, 25 bp, Homo sapien
gatctagggcatgaagtgtggaccc

SEQ ID NO: 1535884 - DNA, 25 bp, Homo sapien
acccctagggtgaacgaagacagct

SEQ ID NO: 1535885 - DNA, 25 bp, Homo sapien
gatttcttggctagatgtctcagcg

SEQ ID NO: 1535886 - DNA, 25 bp, Homo sapien
tgtctcagcggttgaatttcttgcc

SEQ ID NO: 1535887 - DNA, 25 bp, Homo sapien
tgagctctggaataaagtcaccttc

SEQ ID NO: 1535888 - DNA, 25 bp, Homo sapien
tctggaataaagtcaccttctttct

SEQ ID NO: 1535889 - DNA, 25 bp, Homo sapien
gctctggaataaagtcaccttcttt

SEQ ID NO: 1535890 - DNA, 25 bp, Homo sapien
gagctctggaataaagtcaccttct

SEQ ID NO: 1535891 - DNA, 25 bp, Homo sapien
ccttggcagctatatgatcttcatt

SEQ ID NO: 1535892 - DNA, 25 bp, Homo sapien
tatgatcttcattgaccccatttaa

SEQ ID NO: 1535893 - DNA, 25 bp, Homo sapien
gctatatgatcttcattgaccccat

SEQ ID NO: 1535894 - DNA, 25 bp, Homo sapien
tggcagctatatgatcttcattgac

SEQ ID NO: 1535895 - DNA, 25 bp, Homo sapien
caggcagaggtagtcgctggattca

SEQ ID NO: 1535896 - DNA, 25 bp, Homo sapien
aaaagatcacggctgggatggctag

SEQ ID NO: 1535897 - DNA, 25 bp, Homo sapien
tagtcgctggattcatcctcatcag

SEQ ID NO: 1535898 - DNA, 25 bp, Homo sapien
caggcaagaaaagatcacggctggg

SEQ ID NO: 1535899 - DNA, 25 bp, Homo sapien
ggtacctaagattcccacagtgatg

SEQ ID NO: 1535900 - DNA, 25 bp, Homo sapien
gtgatgctcgcgatggcccagtagt

SEQ ID NO: 1535901 - DNA, 25 bp, Homo sapien
gaagcagtttacaatctaagtaagt

SEQ ID NO: 1535902 - DNA, 25 bp, Homo sapien
tatatcaggtaggtgtacaagatgg

SEQ ID NO: 1535903 - DNA, 25 bp, Homo sapien
gccgcggcggcgacaccgcctccct

SEQ ID NO: 1535904 - DNA, 25 bp, Homo sapien
ggcggcgacaccgcctccctcagcc

SEQ ID NO: 1535905 - DNA, 25 bp, Homo sapien
cgcggcggcgacaccgcctccctca

SEQ ID NO: 1535906 - DNA, 25 bp, Homo sapien
gcggcggcgacaccgcctccctcag

SEQ ID NO: 1535907 - DNA, 25 bp, Homo sapien
ttcgaccgcccagcaacccagttcc

SEQ ID NO: 1535908 - DNA, 25 bp, Homo sapien
tcttcgaccgcccagcaacccagtt

SEQ ID NO: 1535909 - DNA, 25 bp, Homo sapien
gcccagcaacccagttcccgcgctt

SEQ ID NO: 1535910 - DNA, 25 bp, Homo sapien
accgcccagcaacccagttcccgcg

SEQ ID NO: 1535911 - DNA, 25 bp, Homo sapien
cgcagcgtcgattccggggcccggg

SEQ ID NO: 1535912 - DNA, 25 bp, Homo sapien
gcgcagcgtcgattccggggcccgg

SEQ ID NO: 1535913 - DNA, 25 bp, Homo sapien
tgcgcagcgtcgattccggggcccg

SEQ ID NO: 1535914 - DNA, 25 bp, Homo sapien
ctgcgcagcgtcgattccggggccc

SEQ ID NO: 1535915 - DNA, 25 bp, Homo sapien
agctaactcgtggaggatcctcacc

SEQ ID NO: 1535916 - DNA, 25 bp, Homo sapien
cagtaagtcgggtcactctcgatgg

SEQ ID NO: 1535917 - DNA, 25 bp, Homo sapien
tgggttatcccagtcacatccagag

SEQ ID NO: 1535918 - DNA, 25 bp, Homo sapien
cctatttccataaggagcgaggtct

SEQ ID NO: 1535919 - DNA, 25 bp, Homo sapien
acatgctgcaagatgtaggcccaga

SEQ ID NO: 1535920 - DNA, 25 bp, Homo sapien
tgcacatgctgcaagatgtaggccc

SEQ ID NO: 1535921 - DNA, 25 bp, Homo sapien
tgtgcacatgctgcaagatgtaggc

SEQ ID NO: 1535922 - DNA, 25 bp, Homo sapien
actgtgcacatgctgcaagatgtag

SEQ ID NO: 1535923 - DNA, 25 bp, Homo sapien
gaaagaggagttactatgggcctca

SEQ ID NO: 1535924 - DNA, 25 bp, Homo sapien
gaggagttactatgggcctcacctg

SEQ ID NO: 1535925 - DNA, 25 bp, Homo sapien
aggagttactatgggcctcacctgt

SEQ ID NO: 1535926 - DNA, 25 bp, Homo sapien
aagaggagttactatgggcctcacc

SEQ ID NO: 1535927 - DNA, 25 bp, Homo sapien
gtttccccggatcttcttgacagtc

SEQ ID NO: 1535928 - DNA, 25 bp, Homo sapien
cagagtaggtttccccggatcttct

SEQ ID NO: 1535929 - DNA, 25 bp, Homo sapien
taggtttccccggatcttcttgaca

SEQ ID NO: 1535930 - DNA, 25 bp, Homo sapien
cttctaggggggagggcaataggtg

SEQ ID NO: 1535931 - DNA, 25 bp, Homo sapien
caggaggggatagctttaagaagca

SEQ ID NO: 1535932 - DNA, 25 bp, Homo sapien
aagacaggaggggatagctttaaga

SEQ ID NO: 1535933 - DNA, 25 bp, Homo sapien
ggagggcaataggtgtgatgctgtg

SEQ ID NO: 1535934 - DNA, 25 bp, Homo sapien
ctgtggactgtcctggtggccatac

SEQ ID NO: 1535935 - DNA, 25 bp, Homo sapien
aaggctgtcttgtgacccattgtcc

SEQ ID NO: 1535936 - DNA, 25 bp, Homo sapien
cactggactttaagccctatgagga

SEQ ID NO: 1535937 - DNA, 25 bp, Homo sapien
tgagctaatgctgtttccactggac

SEQ ID NO: 1535938 - DNA, 25 bp, Homo sapien
catctttgtcccagtactgatcgct

SEQ ID NO: 1535939 - DNA, 25 bp, Homo sapien
gcattagggtattggctccctccct

SEQ ID NO: 1535940 - DNA, 25 bp, Homo sapien
ttcctcctaggattgtcttacccac

SEQ ID NO: 1535941 - DNA, 25 bp, Homo sapien
catctttgtcccagtactgatctct

SEQ ID NO: 1535942 - DNA, 25 bp, Homo sapien
tcaactggtggcagagggtttttgc

SEQ ID NO: 1535943 - DNA, 25 bp, Homo sapien
agcttccagctctaacttccgacgg

SEQ ID NO: 1535944 - DNA, 25 bp, Homo sapien
caggctctggtcgagttcctggatt

SEQ ID NO: 1535945 - DNA, 25 bp, Homo sapien
gcccgcaggcgggtcacagcagctt

SEQ ID NO: 1535946 - DNA, 25 bp, Homo sapien
ttcctggatttctgcccgcaggcgg

SEQ ID NO: 1535947 - DNA, 25 bp, Homo sapien
ggatctcggagcgtatgctgctgtc

SEQ ID NO: 1535948 - DNA, 25 bp, Homo sapien
ctgtcttcgcatggccccagcttgg

SEQ ID NO: 1535949 - DNA, 25 bp, Homo sapien
cctgcaggcgcctcagttgattctg

SEQ ID NO: 1535950 - DNA, 25 bp, Homo sapien
tgcagccgctgcatgggatctcgga

SEQ ID NO: 1535951 - DNA, 25 bp, Homo sapien
gaaatgatagggtctgtttggttcc

SEQ ID NO: 1535952 - DNA, 25 bp, Homo sapien
acttgagctgacattggcctccggg

SEQ ID NO: 1535953 - DNA, 25 bp, Homo sapien
ggttcctactttactatctgtcttc

SEQ ID NO: 1535954 - DNA, 25 bp, Homo sapien
ggttctcggtcttgcctgagaaact

SEQ ID NO: 1535955 - DNA, 25 bp, Homo sapien
tgagggatccaaaggtcacatctac

SEQ ID NO: 1535956 - DNA, 25 bp, Homo sapien
agctgccgacgtgagggatccaaag

SEQ ID NO: 1535957 - DNA, 25 bp, Homo sapien
cccagagctgccgacgtgagggatc

SEQ ID NO: 1535958 - DNA, 25 bp, Homo sapien
aaaggtcacatctactttggctttc

SEQ ID NO: 1535959 - DNA, 25 bp, Homo sapien
ggaccctagcatctgcctgactcca

SEQ ID NO: 1535960 - DNA, 25 bp, Homo sapien
ggacctgagggggaccctagcatct

SEQ ID NO: 1535961 - DNA, 25 bp, Homo sapien
gggggaccctagcatctgcctgact

SEQ ID NO: 1535962 - DNA, 25 bp, Homo sapien
ctgagggggaccctagcatctgcct

SEQ ID NO: 1535963 - DNA, 25 bp, Homo sapien
gagggtgcaggctgttcggacatca

SEQ ID NO: 1535964 - DNA, 25 bp, Homo sapien
agggtgcaggctgttcggacatcac

SEQ ID NO: 1535965 - DNA, 25 bp, Homo sapien
ggtacgaagtgccaaagtggtcatc

SEQ ID NO: 1535966 - DNA, 25 bp, Homo sapien
cgaagtgccaaagtggtcatcatga

SEQ ID NO: 1535967 - DNA, 25 bp, Homo sapien
ccactgctggtacgaagtgccaaag

SEQ ID NO: 1535968 - DNA, 25 bp, Homo sapien
tcagccactgctggtacgaagtgcc

SEQ ID NO: 1535969 - DNA, 25 bp, Homo sapien
taggtcctggcaccctaagttttga

SEQ ID NO: 1535970 - DNA, 25 bp, Homo sapien
cctggcaccctaagttttgatcaag

SEQ ID NO: 1535971 - DNA, 25 bp, Homo sapien
caaggagcgggagggtgtggctttc

SEQ ID NO: 1535972 - DNA, 25 bp, Homo sapien
cctaagttttgatcaaggagcggga

SEQ ID NO: 1535973 - DNA, 25 bp, Homo sapien
gtgaagtcagggcaggatcggggca

SEQ ID NO: 1535974 - DNA, 25 bp, Homo sapien
ggtgaagtcagggcaggatcggggc

SEQ ID NO: 1535975 - DNA, 25 bp, Homo sapien
ctggatatctctgtgtcgccaagcc

SEQ ID NO: 1535976 - DNA, 25 bp, Homo sapien
agggaccgaatctctgcctcccgct

SEQ ID NO: 1535977 - DNA, 25 bp, Homo sapien
atatctctgtgtcgccaagcccatc

SEQ ID NO: 1535978 - DNA, 25 bp, Homo sapien
ccccactgcacagggaccgaatctc

SEQ ID NO: 1535979 - DNA, 25 bp, Homo sapien
aactgtgagaataccctgccccaca

SEQ ID NO: 1535980 - DNA, 25 bp, Homo sapien
ccccaactgtgagaataccctgccc

SEQ ID NO: 1535981 - DNA, 25 bp, Homo sapien
ccaactgtgagaataccctgcccca

SEQ ID NO: 1535982 - DNA, 25 bp, Homo sapien
actgtgagaataccctgccccacac

SEQ ID NO: 1535983 - DNA, 25 bp, Homo sapien
cttgccttggtactcgagggtggac

SEQ ID NO: 1535984 - DNA, 25 bp, Homo sapien
gagggtggacagtatcagtcctgcc

SEQ ID NO: 1535985 - DNA, 25 bp, Homo sapien
ggcagtgggtttcagttctacccca

SEQ ID NO: 1535986 - DNA, 25 bp, Homo sapien
agttctaccccatcagcaggtggct

SEQ ID NO: 1535987 - DNA, 25 bp, Homo sapien
ctggatgagatgaaccatggacggc

SEQ ID NO: 1535988 - DNA, 25 bp, Homo sapien
ctggctggagtctgactggtccggg

SEQ ID NO: 1535989 - DNA, 25 bp, Homo sapien
agatgaaccatggacggcagggtct

SEQ ID NO: 1535990 - DNA, 25 bp, Homo sapien
tctggctggagtctgactggtccgg

SEQ ID NO: 1535991 - DNA, 25 bp, Homo sapien
gagaccagcacacccacagtccgcc

SEQ ID NO: 1535992 - DNA, 25 bp, Homo sapien
ggagaccagcacacccacagtccgc

SEQ ID NO: 1535993 - DNA, 25 bp, Homo sapien
gagggtgctccgctgggagaccagc

SEQ ID NO: 1535994 - DNA, 25 bp, Homo sapien
aggagggtgctccgctgggagacca

SEQ ID NO: 1535995 - DNA, 25 bp, Homo sapien
ggcgctgggtcaagacttgccgctc

SEQ ID NO: 1535996 - DNA, 25 bp, Homo sapien
tggaggcgctgggtcaagacttgcc

SEQ ID NO: 1535997 - DNA, 25 bp, Homo sapien
cgctgggtcaagacttgccgctcct

SEQ ID NO: 1535998 - DNA, 25 bp, Homo sapien
ggaggcgctgggtcaagacttgccg

SEQ ID NO: 1535999 - DNA, 25 bp, Homo sapien
agaagggtgactgagccacacaagg

SEQ ID NO: 1536000 - DNA, 25 bp, Homo sapien
gggtgactgagccacacaagggacc

SEQ ID NO: 1536001 - DNA, 25 bp, Homo sapien
agagaagggtgactgagccacacaa

SEQ ID NO: 1536002 - DNA, 25 bp, Homo sapien
aagggtgactgagccacacaaggga

SEQ ID NO: 1536003 - DNA, 25 bp, Homo sapien
aggagctgccgatgcccagctgcat

SEQ ID NO: 1536004 - DNA, 25 bp, Homo sapien
ggatccgctgctgtttggcctgtag

SEQ ID NO: 1536005 - DNA, 25 bp, Homo sapien
tggcctgtagctccctcagcaggag

SEQ ID NO: 1536006 - DNA, 25 bp, Homo sapien
tcctggctctgatcgtgcagggcct

SEQ ID NO: 1536007 - DNA, 25 bp, Homo sapien
ttcccttgatgagcaggcggacctg

SEQ ID NO: 1536008 - DNA, 25 bp, Homo sapien
gcgggtcttgctggccgagtttccc

SEQ ID NO: 1536009 - DNA, 25 bp, Homo sapien
ttgctggccgagtttcccttgatga

SEQ ID NO: 1536010 - DNA, 25 bp, Homo sapien
caggcggacctgttcctgggtctcc

SEQ ID NO: 1536011 - DNA, 25 bp, Homo sapien
cagatccagccctacccagacctca

SEQ ID NO: 1536012 - DNA, 25 bp, Homo sapien
gcagatccagccctacccagacctc

SEQ ID NO: 1536013 - DNA, 25 bp, Homo sapien
atcctggcagatccagccctaccca

SEQ ID NO: 1536014 - DNA, 25 bp, Homo sapien
ctggcagatccagccctacccagac

SEQ ID NO: 1536015 - DNA, 25 bp, Homo sapien
tagggaccacctttcgctggaccag

SEQ ID NO: 1536016 - DNA, 25 bp, Homo sapien
cagcagcgtgcccaacagaatgtgg

SEQ ID NO: 1536017 - DNA, 25 bp, Homo sapien
cctttcgctggaccagagctagcac

SEQ ID NO: 1536018 - DNA, 25 bp, Homo sapien
tgtggggcaaatgccggacttcctc

SEQ ID NO: 1536019 - DNA, 25 bp, Homo sapien
acccaagggtgaggtctggcagcct

SEQ ID NO: 1536020 - DNA, 25 bp, Homo sapien
gcccaggaacttcaaggtgggtctg

SEQ ID NO: 1536021 - DNA, 25 bp, Homo sapien
gggtctggggactaggatgccaaga

SEQ ID NO: 1536022 - DNA, 25 bp, Homo sapien
gaggttcagggagtgacagtcaccc

SEQ ID NO: 1536023 - DNA, 25 bp, Homo sapien
gtggatggatgggaggaccgtgggc

SEQ ID NO: 1536024 - DNA, 25 bp, Homo sapien
ctggtggatggatgggaggaccgtg

SEQ ID NO: 1536025 - DNA, 25 bp, Homo sapien
gaggaccgtgggcaggggcttcaac

SEQ ID NO: 1536026 - DNA, 25 bp, Homo sapien
tggatggatgggaggaccgtgggca

SEQ ID NO: 1536027 - DNA, 25 bp, Homo sapien
tggctcagcgctatgaagctggagc

SEQ ID NO: 1536028 - DNA, 25 bp, Homo sapien
ccagcttgtggctcagcgctatgaa

SEQ ID NO: 1536029 - DNA, 25 bp, Homo sapien
tgtggctcagcgctatgaagctgga

SEQ ID NO: 1536030 - DNA, 25 bp, Homo sapien
gcttgtggctcagcgctatgaagct

SEQ ID NO: 1536031 - DNA, 25 bp, Homo sapien
acaagtcacaggagacgggcactca

SEQ ID NO: 1536032 - DNA, 25 bp, Homo sapien
ggagacaagtcacaggagacgggca

SEQ ID NO: 1536033 - DNA, 25 bp, Homo sapien
agacaagtcacaggagacgggcact

SEQ ID NO: 1536034 - DNA, 25 bp, Homo sapien
caagtcacaggagacgggcactcac

SEQ ID NO: 1536035 - DNA, 25 bp, Homo sapien
cttcatgtggagtagatcccagcac

SEQ ID NO: 1536036 - DNA, 25 bp, Homo sapien
agcaccagaggctccgctggtcctg

SEQ ID NO: 1536037 - DNA, 25 bp, Homo sapien
aaggtcctggcgaagagaggcagcc

SEQ ID NO: 1536038 - DNA, 25 bp, Homo sapien
tgtggagtagatcccagcaccagag

SEQ ID NO: 1536039 - DNA, 25 bp, Homo sapien
cagctcagggattcgctccagtgcc

SEQ ID NO: 1536040 - DNA, 25 bp, Homo sapien
gctcagggattcgctccagtgcctg

SEQ ID NO: 1536041 - DNA, 25 bp, Homo sapien
agctcagggattcgctccagtgcct

SEQ ID NO: 1536042 - DNA, 25 bp, Homo sapien
cagagctcctcagagagggcggcct

SEQ ID NO: 1536043 - DNA, 25 bp, Homo sapien
cagcgcagccgccactggggcaggg

SEQ ID NO: 1536044 - DNA, 25 bp, Homo sapien
ctggcagagctcctcagagagggcg

SEQ ID NO: 1536045 - DNA, 25 bp, Homo sapien
cctgggcctgaacccagcgcagccg

SEQ ID NO: 1536046 - DNA, 25 bp, Homo sapien
tgccctagaactcaactgctggaag

SEQ ID NO: 1536047 - DNA, 25 bp, Homo sapien
tggcccttattgcagcacatcctgg

SEQ ID NO: 1536048 - DNA, 25 bp, Homo sapien
ccgaggaatcctggcgctgctttct

SEQ ID NO: 1536049 - DNA, 25 bp, Homo sapien
aacagtgtcaagttctcggcttccg

SEQ ID NO: 1536050 - DNA, 25 bp, Homo sapien
gaggcaactgccactctgactggga

SEQ ID NO: 1536051 - DNA, 25 bp, Homo sapien
cagacacactaaggactacatggga

SEQ ID NO: 1536052 - DNA, 25 bp, Homo sapien
gagtaacccacgcagtgaaatgcac

SEQ ID NO: 1536053 - DNA, 25 bp, Homo sapien
cagatatggcaatgtggtcaggcgc

SEQ ID NO: 1536054 - DNA, 25 bp, Homo sapien
gctcccgaggatgacgtccagcaaa

SEQ ID NO: 1536055 - DNA, 25 bp, Homo sapien
tacagtctctgcttagccgccgccg

SEQ ID NO: 1536056 - DNA, 25 bp, Homo sapien
gaggatgacgtccagcaaaagcgac

SEQ ID NO: 1536057 - DNA, 25 bp, Homo sapien
tgcttagccgccgccgctggttctg

SEQ ID NO: 1536058 - DNA, 25 bp, Homo sapien
ttccttcaagcgttcctcgccgctt

SEQ ID NO: 1536059 - DNA, 25 bp, Homo sapien
ttcctcgccgcttttgcccgggatg

SEQ ID NO: 1536060 - DNA, 25 bp, Homo sapien
cttttgcccgggatgccagcgccag

SEQ ID NO: 1536061 - DNA, 25 bp, Homo sapien
ttcaagcgttcctcgccgcttttgc

SEQ ID NO: 1536062 - DNA, 25 bp, Homo sapien
caggcacagcagttgggattccagg

SEQ ID NO: 1536063 - DNA, 25 bp, Homo sapien
caggtactggagcccccagaacttc

SEQ ID NO: 1536064 - DNA, 25 bp, Homo sapien
gcaccgcaggcacagcagttgggat

SEQ ID NO: 1536065 - DNA, 25 bp, Homo sapien
ggaccgtggggacagtgggcaccgc

SEQ ID NO: 1536066 - DNA, 25 bp, Homo sapien
gccgctgggacctgcatcgcttcta

SEQ ID NO: 1536067 - DNA, 25 bp, Homo sapien
gtcgcgataattgggcggatcacag

SEQ ID NO: 1536068 - DNA, 25 bp, Homo sapien
ttggtcgcgataattgggcggatca

SEQ ID NO: 1536069 - DNA, 25 bp, Homo sapien
ctgctggtatgtgttggtcgcgata

SEQ ID NO: 1536070 - DNA, 25 bp, Homo sapien
ggctctacaagatttggcctcacct

SEQ ID NO: 1536071 - DNA, 25 bp, Homo sapien
taaaatggccataaggctctacaag

SEQ ID NO: 1536072 - DNA, 25 bp, Homo sapien
tcttaaaatggccataaggctctac

SEQ ID NO: 1536073 - DNA, 25 bp, Homo sapien
ttcctctttgctcactccactgtca

SEQ ID NO: 1536074 - DNA, 25 bp, Homo sapien
ggccacccaccatgggaggaactac

SEQ ID NO: 1536075 - DNA, 25 bp, Homo sapien
aaaggagggccacccaccatgggag

SEQ ID NO: 1536076 - DNA, 25 bp, Homo sapien
cccaccatgggaggaactactgtgg

SEQ ID NO: 1536077 - DNA, 25 bp, Homo sapien
cacccaccatgggaggaactactgt

SEQ ID NO: 1536078 - DNA, 25 bp, Homo sapien
aacatggcttctcgagcctctgggc

SEQ ID NO: 1536079 - DNA, 25 bp, Homo sapien
ggaacatggcttctcgagcctctgg

SEQ ID NO: 1536080 - DNA, 25 bp, Homo sapien
gtgactccgatcaccagggccaaag

SEQ ID NO: 1536081 - DNA, 25 bp, Homo sapien
tgtccaggtgactccgatcaccagg

SEQ ID NO: 1536082 - DNA, 25 bp, Homo sapien
gaagaacaaaaggtggaatgtagaa

SEQ ID NO: 1536083 - DNA, 25 bp, Homo sapien
aacaaaaggtggaatgtagaaaatg

SEQ ID NO: 1536084 - DNA, 25 bp, Homo sapien
ctgaagaacaaaaggtggaatgtag

SEQ ID NO: 1536085 - DNA, 25 bp, Homo sapien
caaaaggtggaatgtagaaaatggc

SEQ ID NO: 1536086 - DNA, 25 bp, Homo sapien
tggacgcaggataggggccctctgg

SEQ ID NO: 1536087 - DNA, 25 bp, Homo sapien
aaggctggacgcaggataggggccc

SEQ ID NO: 1536088 - DNA, 25 bp, Homo sapien
gctggacgcaggataggggccctct

SEQ ID NO: 1536089 - DNA, 25 bp, Homo sapien
ggacgcaggataggggccctctggg

SEQ ID NO: 1536090 - DNA, 25 bp, Homo sapien
agttatgtggcagggatgatgaccc

SEQ ID NO: 1536091 - DNA, 25 bp, Homo sapien
gtcagggtgttagtggggagttcca

SEQ ID NO: 1536092 - DNA, 25 bp, Homo sapien
tggcagggatgatgaccctggcccc

SEQ ID NO: 1536093 - DNA, 25 bp, Homo sapien
cagggatgatgaccctggcccctca

SEQ ID NO: 1536094 - DNA, 25 bp, Homo sapien
gtggcagcatcatgggtggtccagg

SEQ ID NO: 1536095 - DNA, 25 bp, Homo sapien
ctggagcccgagccattggtggcag

SEQ ID NO: 1536096 - DNA, 25 bp, Homo sapien
attggtggcagcatcatgggtggtc

SEQ ID NO: 1536097 - DNA, 25 bp, Homo sapien
cctggagcccgagccattggtggca

SEQ ID NO: 1536098 - DNA, 25 bp, Homo sapien
ccattccatccaacaaagaaagggc

SEQ ID NO: 1536099 - DNA, 25 bp, Homo sapien
aggctcagactttactgtcatctcc

SEQ ID NO: 1536100 - DNA, 25 bp, Homo sapien
gactttactgtcatctccattccat

SEQ ID NO: 1536101 - DNA, 25 bp, Homo sapien
ttactgtcatctccattccatccaa

SEQ ID NO: 1536102 - DNA, 25 bp, Homo sapien
aggaggccgcggacgacctccaacg

SEQ ID NO: 1536103 - DNA, 25 bp, Homo sapien
gctgggcccaatgactgcagggcca

SEQ ID NO: 1536104 - DNA, 25 bp, Homo sapien
tcaggctcgggcaatggcatggcca

SEQ ID NO: 1536105 - DNA, 25 bp, Homo sapien
cgaggacgcagggacaggagttcag

SEQ ID NO: 1536106 - DNA, 25 bp, Homo sapien
cttcttgtcttcacccaggggctct

SEQ ID NO: 1536107 - DNA, 25 bp, Homo sapien
gctgtgcgaatgcaccgtttcaatt

SEQ ID NO: 1536108 - DNA, 25 bp, Homo sapien
gaatgcaccgtttcaatttctctgg

SEQ ID NO: 1536109 - DNA, 25 bp, Homo sapien
cctgccgctgtgcgaatgcaccgtt

SEQ ID NO: 1536110 - DNA, 25 bp, Homo sapien
ggtccttgaagctgacgaagccgta

SEQ ID NO: 1536111 - DNA, 25 bp, Homo sapien
aaggcgcgtgccaagatgtcatcgt

SEQ ID NO: 1536112 - DNA, 25 bp, Homo sapien
tccccacagaagatccggaagtcat

SEQ ID NO: 1536113 - DNA, 25 bp, Homo sapien
tgtgcgcttgtcacggatcaccttg

SEQ ID NO: 1536114 - DNA, 25 bp, Homo sapien
acatgctcttgcgaagcttgatggg

SEQ ID NO: 1536115 - DNA, 25 bp, Homo sapien
tgcggaccacgtccagattccggtc

SEQ ID NO: 1536116 - DNA, 25 bp, Homo sapien
tgatggggcgcgagcccacatactt

SEQ ID NO: 1536117 - DNA, 25 bp, Homo sapien
gcttcttgcggaccacgtccagatt

SEQ ID NO: 1536118 - DNA, 25 bp, Homo sapien
atgaacgtaaatttattgaaactgg

SEQ ID NO: 1536119 - DNA, 25 bp, Homo sapien
aatgaacgtaaatttattgaaactg

SEQ ID NO: 1536120 - DNA, 25 bp, Homo sapien
tcgcagccaggctcaagttgcagag

SEQ ID NO: 1536121 - DNA, 25 bp, Homo sapien
ggtggcgtgggcttggagcgaggct

SEQ ID NO: 1536122 - DNA, 25 bp, Homo sapien
tggtgaacgggctgtctgcctcagg

SEQ ID NO: 1536123 - DNA, 25 bp, Homo sapien
ggaattttccgagacgtcagagcag

SEQ ID NO: 1536124 - DNA, 25 bp, Homo sapien
gatgcgatgaaggccttctgaatgt

SEQ ID NO: 1536125 - DNA, 25 bp, Homo sapien
ggatgcgatgaaggccttctgaatg

SEQ ID NO: 1536126 - DNA, 25 bp, Homo sapien
agcttgttccctggaggcacttcct

SEQ ID NO: 1536127 - DNA, 25 bp, Homo sapien
tcctgtggggatgcctcatcccagt

SEQ ID NO: 1536128 - DNA, 25 bp, Homo sapien
gccctgccagcttgttccctggagg

SEQ ID NO: 1536129 - DNA, 25 bp, Homo sapien
tgccagcttgttccctggaggcact

SEQ ID NO: 1536130 - DNA, 25 bp, Homo sapien
cacacacgttgtggcagcctcggca

SEQ ID NO: 1536131 - DNA, 25 bp, Homo sapien
tgcaggcgataaggggttagggtca

SEQ ID NO: 1536132 - DNA, 25 bp, Homo sapien
ccacacacgttgtggcagcctcggc

SEQ ID NO: 1536133 - DNA, 25 bp, Homo sapien
aggcgataaggggttagggtcagca

SEQ ID NO: 1536134 - DNA, 25 bp, Homo sapien
tgccagatcagggaaacagaagcct

SEQ ID NO: 1536135 - DNA, 25 bp, Homo sapien
cccttggagtgccagatcagggaaa

SEQ ID NO: 1536136 - DNA, 25 bp, Homo sapien
gcatgtctctgctgtcgctgtcggc

SEQ ID NO: 1536137 - DNA, 25 bp, Homo sapien
gtcgctgtcggcgtgtccccttgga

SEQ ID NO: 1536138 - DNA, 25 bp, Homo sapien
ccatggaacttctgggtgcagtaac

SEQ ID NO: 1536139 - DNA, 25 bp, Homo sapien
catggaacttctgggtgcagtaacg

SEQ ID NO: 1536140 - DNA, 25 bp, Homo sapien
tgggtgcagtaacgcggagccccag

SEQ ID NO: 1536141 - DNA, 25 bp, Homo sapien
gcagtaacgcggagccccagtccag

SEQ ID NO: 1536142 - DNA, 25 bp, Homo sapien
gtctgtccagtccccggaccacgga

SEQ ID NO: 1536143 - DNA, 25 bp, Homo sapien
cacggaagagcctgagagtcgggct

SEQ ID NO: 1536144 - DNA, 25 bp, Homo sapien
ggaccacggaagagcctgagagtcg

SEQ ID NO: 1536145 - DNA, 25 bp, Homo sapien
tgtccagtccccggaccacggaaga

SEQ ID NO: 1536146 - DNA, 25 bp, Homo sapien
cgcgaccacgaggtggcctctcccg

SEQ ID NO: 1536147 - DNA, 25 bp, Homo sapien
cagctggtgttgctcccggcggcct

SEQ ID NO: 1536148 - DNA, 25 bp, Homo sapien
gcctgggcgcgcgaccacgaggtgg

SEQ ID NO: 1536149 - DNA, 25 bp, Homo sapien
tcccgccacggggacgcagttctgg

SEQ ID NO: 1536150 - DNA, 25 bp, Homo sapien
cagtaggtatcgccgtcgggcccca

SEQ ID NO: 1536151 - DNA, 25 bp, Homo sapien
gccccagtaggtatcgccgtcgggc

SEQ ID NO: 1536152 - DNA, 25 bp, Homo sapien
tgccccagtaggtatcgccgtcggg

SEQ ID NO: 1536153 - DNA, 25 bp, Homo sapien
agtccgtgcgcggctccccgcccag

SEQ ID NO: 1536154 - DNA, 25 bp, Homo sapien
gtgcgcggctccccgcccaggccac

SEQ ID NO: 1536155 - DNA, 25 bp, Homo sapien
gtccgtgcgcggctccccgcccagg

SEQ ID NO: 1536156 - DNA, 25 bp, Homo sapien
ccgtgcgcggctccccgcccaggcc

SEQ ID NO: 1536157 - DNA, 25 bp, Homo sapien
cttcaaagaggtggtgccacccgca

SEQ ID NO: 1536158 - DNA, 25 bp, Homo sapien
tcaaagaggtggtgccacccgcatg

SEQ ID NO: 1536159 - DNA, 25 bp, Homo sapien
aagaggtggtgccacccgcatgcag

SEQ ID NO: 1536160 - DNA, 25 bp, Homo sapien
agaggtggtgccacccgcatgcagc

SEQ ID NO: 1536161 - DNA, 25 bp, Homo sapien
actgcgggctcggttcggagcaaac

SEQ ID NO: 1536162 - DNA, 25 bp, Homo sapien
aaactggcacggtccgactgcgggc

SEQ ID NO: 1536163 - DNA, 25 bp, Homo sapien
cggagcaaacggtgagagctgagct

SEQ ID NO: 1536164 - DNA, 25 bp, Homo sapien
gggcatcgagccaaactggcacggt

SEQ ID NO: 1536165 - DNA, 25 bp, Homo sapien
tgatctagaggtccgggtcctccca

SEQ ID NO: 1536166 - DNA, 25 bp, Homo sapien
aagggaggggcacactcagtcttcc

SEQ ID NO: 1536167 - DNA, 25 bp, Homo sapien
acactcagtcttcccggccctagat

SEQ ID NO: 1536168 - DNA, 25 bp, Homo sapien
tcacaccacttcaatgatctagagg

SEQ ID NO: 1536169 - DNA, 25 bp, Homo sapien
atgcagctgctacgcgccccgtcgt

SEQ ID NO: 1536170 - DNA, 25 bp, Homo sapien
ggtcgcacagctggaactcgcggct

SEQ ID NO: 1536171 - DNA, 25 bp, Homo sapien
ggctgttgccagtccaacggatgca

SEQ ID NO: 1536172 - DNA, 25 bp, Homo sapien
gcgccccgtcgtggagcagctccag

SEQ ID NO: 1536173 - DNA, 25 bp, Homo sapien
gagggctacgcggttgaacctagcc

SEQ ID NO: 1536174 - DNA, 25 bp, Homo sapien
tacaggcgggagattgggtttgaga

SEQ ID NO: 1536175 - DNA, 25 bp, Homo sapien
ccttgggcggagctaaattgaacta

SEQ ID NO: 1536176 - DNA, 25 bp, Homo sapien
aggcccgctcggtcggagtgggaag

SEQ ID NO: 1536177 - DNA, 25 bp, Homo sapien
gctcttgcgcacgatgtcgcggcga

SEQ ID NO: 1536178 - DNA, 25 bp, Homo sapien
tcagcttctcgtaattcatgcccgg

SEQ ID NO: 1536179 - DNA, 25 bp, Homo sapien
cggcgatagtagtagcgaaggcccc

SEQ ID NO: 1536180 - DNA, 25 bp, Homo sapien
atagtagtagcgaaggccccggctc

SEQ ID NO: 1536181 - DNA, 25 bp, Homo sapien
agtccggataggctaggctgggcac

SEQ ID NO: 1536182 - DNA, 25 bp, Homo sapien
tctgctccccgtccgcctcccgcac

SEQ ID NO: 1536183 - DNA, 25 bp, Homo sapien
gtgtctctgctccccgtccgcctcc

SEQ ID NO: 1536184 - DNA, 25 bp, Homo sapien
tcggagagagtgttatagatcccgg

SEQ ID NO: 1536185 - DNA, 25 bp, Homo sapien
gcccgtgggttacccgatctcatca

SEQ ID NO: 1536186 - DNA, 25 bp, Homo sapien
tgtcttcactcggagagagtgttat

SEQ ID NO: 1536187 - DNA, 25 bp, Homo sapien
gcccaatcgtgagcttgcgcggctg

SEQ ID NO: 1536188 - DNA, 25 bp, Homo sapien
tactaccagccggaagctgagagag

SEQ ID NO: 1536189 - DNA, 25 bp, Homo sapien
gggactacgggagtcttgcgagcgg

SEQ ID NO: 1536190 - DNA, 25 bp, Homo sapien
ggagtcttgcgagcggcttcagctc

SEQ ID NO: 1536191 - DNA, 25 bp, Homo sapien
gaggtggggactacgggagtcttgc

SEQ ID NO: 1536192 - DNA, 25 bp, Homo sapien
acaccacagtcggacaggaagcgga

SEQ ID NO: 1536193 - DNA, 25 bp, Homo sapien
aaaggcaccccggattcaacctgca

SEQ ID NO: 1536194 - DNA, 25 bp, Homo sapien
aacctgcagctcaatgtgaccctca

SEQ ID NO: 1536195 - DNA, 25 bp, Homo sapien
gcaaagacaccacagtcggacagga

SEQ ID NO: 1536196 - DNA, 25 bp, Homo sapien
agctaggtcgcttggtatctctgag

SEQ ID NO: 1536197 - DNA, 25 bp, Homo sapien
tatctctgagcctgtttactgacaa

SEQ ID NO: 1536198 - DNA, 25 bp, Homo sapien
cacgcctgtgaattagccatgaaga

SEQ ID NO: 1536199 - DNA, 25 bp, Homo sapien
tgggccaaatcctggtcgctgtgta

SEQ ID NO: 1536200 - DNA, 25 bp, Homo sapien
ccggtatctgaggatgagggtgcat

SEQ ID NO: 1536201 - DNA, 25 bp, Homo sapien
caacgtccaaaagggaggatggact

SEQ ID NO: 1536202 - DNA, 25 bp, Homo sapien
aggatggactggacacccgggagcc

SEQ ID NO: 1536203 - DNA, 25 bp, Homo sapien
tgcatcggagatgacgctgcggccc

SEQ ID NO: 1536204 - DNA, 25 bp, Homo sapien
ttgattttggtctccatgtcttccg

SEQ ID NO: 1536205 - DNA, 25 bp, Homo sapien
tgccagcagtttctagtctggttct

SEQ ID NO: 1536206 - DNA, 25 bp, Homo sapien
cagcagtttctagtctggttctggt

SEQ ID NO: 1536207 - DNA, 25 bp, Homo sapien
ttttggtctccatgtcttccgccat

SEQ ID NO: 1536208 - DNA, 25 bp, Homo sapien
tcgcctcctttagcggtcattgcct

SEQ ID NO: 1536209 - DNA, 25 bp, Homo sapien
gatatcgcctcctttagcggtcatt

SEQ ID NO: 1536210 - DNA, 25 bp, Homo sapien
tatcgcctcctttagcggtcattgc

SEQ ID NO: 1536211 - DNA, 25 bp, Homo sapien
agatatcgcctcctttagcggtcat

SEQ ID NO: 1536212 - DNA, 25 bp, Homo sapien
atgctaccactgcacaccgcactcc

SEQ ID NO: 1536213 - DNA, 25 bp, Homo sapien
tgatgctaccactgcacaccgcact

SEQ ID NO: 1536214 - DNA, 25 bp, Homo sapien
atgatgctaccactgcacaccgcac

SEQ ID NO: 1536215 - DNA, 25 bp, Homo sapien
gatgctaccactgcacaccgcactc

SEQ ID NO: 1536216 - DNA, 25 bp, Homo sapien
ggaaactgaacggatggacttctta

SEQ ID NO: 1536217 - DNA, 25 bp, Homo sapien
acagtgttattccctccgcagtggg

SEQ ID NO: 1536218 - DNA, 25 bp, Homo sapien
tgttcaaccaatatccacaggtacc

SEQ ID NO: 1536219 - DNA, 25 bp, Homo sapien
cactatgctgtttgtccaaacaggg

SEQ ID NO: 1536220 - DNA, 25 bp, Homo sapien
tcttcccgggaaacgtgccttcagc

SEQ ID NO: 1536221 - DNA, 25 bp, Homo sapien
cagatcttcccgggaaacgtgcctt

SEQ ID NO: 1536222 - DNA, 25 bp, Homo sapien
tcagatcttcccgggaaacgtgcct

SEQ ID NO: 1536223 - DNA, 25 bp, Homo sapien
gatcttcccgggaaacgtgccttca

SEQ ID NO: 1536224 - DNA, 25 bp, Homo sapien
cagaggaaagggagatgcagccagt

SEQ ID NO: 1536225 - DNA, 25 bp, Homo sapien
aggacagaggaaagggagatgcagc

SEQ ID NO: 1536226 - DNA, 25 bp, Homo sapien
ctgggagaaggatggaggacagagg

SEQ ID NO: 1536227 - DNA, 25 bp, Homo sapien
aaggatggaggacagaggaaaggga

SEQ ID NO: 1536228 - DNA, 25 bp, Homo sapien
tcactgggtaccaggtcccccttca

SEQ ID NO: 1536229 - DNA, 25 bp, Homo sapien
cagaataatgatattgcccacaact

SEQ ID NO: 1536230 - DNA, 25 bp, Homo sapien
gatattgcccacaactagcaggccc

SEQ ID NO: 1536231 - DNA, 25 bp, Homo sapien
aactagcaggcccaccacaactgga

SEQ ID NO: 1536232 - DNA, 25 bp, Homo sapien
accacaactggagatcccttctcgg

SEQ ID NO: 1536233 - DNA, 25 bp, Homo sapien
ccatatggtctcagcaaacagggac

SEQ ID NO: 1536234 - DNA, 25 bp, Homo sapien
tatacacggtactggtcggctgtca

SEQ ID NO: 1536235 - DNA, 25 bp, Homo sapien
ccaaaactggctaccatgaagaagg

SEQ ID NO: 1536236 - DNA, 25 bp, Homo sapien
ggcaccagcgaagacgtcatccttg

SEQ ID NO: 1536237 - DNA, 25 bp, Homo sapien
tagtcacggtgggtgtaggacgtga

SEQ ID NO: 1536238 - DNA, 25 bp, Homo sapien
ggcgcactcgaagatgtagacgatg

SEQ ID NO: 1536239 - DNA, 25 bp, Homo sapien
atgtagacgatgagcatgagcacca

SEQ ID NO: 1536240 - DNA, 25 bp, Homo sapien
gaggcgcactcgaagatgtagacga

SEQ ID NO: 1536241 - DNA, 25 bp, Homo sapien
tcccagaggcgggtcagctcctggc

SEQ ID NO: 1536242 - DNA, 25 bp, Homo sapien
cctggtcggtgtccgcgctgtagaa

SEQ ID NO: 1536243 - DNA, 25 bp, Homo sapien
tgatcagggatgggttggacaccat

SEQ ID NO: 1536244 - DNA, 25 bp, Homo sapien
aatcatgacgcggtcccagaggcgg

SEQ ID NO: 1536245 - DNA, 25 bp, Homo sapien
tctatcggcctctgtggacggagcc

SEQ ID NO: 1536246 - DNA, 25 bp, Homo sapien
tcctctaaaagctggcacatcggga

SEQ ID NO: 1536247 - DNA, 25 bp, Homo sapien
atcggcctctgtggacggagcccag

SEQ ID NO: 1536248 - DNA, 25 bp, Homo sapien
cacatcgggagctctatcggcctct

SEQ ID NO: 1536249 - DNA, 25 bp, Homo sapien
tgaacaggtagtccatgtgccccag

SEQ ID NO: 1536250 - DNA, 25 bp, Homo sapien
gggaccagatgtgccacagcattct

SEQ ID NO: 1536251 - DNA, 25 bp, Homo sapien
ccgcccggaaggctgacgtgaagtt

SEQ ID NO: 1536252 - DNA, 25 bp, Homo sapien
atgaagtttcccgtccggcgacagc

SEQ ID NO: 1536253 - DNA, 25 bp, Homo sapien
aaccacgagataccccacgtgtagc

SEQ ID NO: 1536254 - DNA, 25 bp, Homo sapien
ccccacgtgtagctgtcgatggcgt

SEQ ID NO: 1536255 - DNA, 25 bp, Homo sapien
gataccccacgtgtagctgtcgatg

SEQ ID NO: 1536256 - DNA, 25 bp, Homo sapien
cacgagataccccacgtgtagctgt

SEQ ID NO: 1536257 - DNA, 25 bp, Homo sapien
gcatggtgtagaaatacatggctat

SEQ ID NO: 1536258 - DNA, 25 bp, Homo sapien
catggtgtagaaatacatggctatc

SEQ ID NO: 1536259 - DNA, 25 bp, Homo sapien
agtccggggtgtgtatgttgccttc

SEQ ID NO: 1536260 - DNA, 25 bp, Homo sapien
gatgcggaggagtccggggtgtgta

SEQ ID NO: 1536261 - DNA, 25 bp, Homo sapien
aggagtccggggtgtgtatgttgcc

SEQ ID NO: 1536262 - DNA, 25 bp, Homo sapien
ggggtgtgtatgttgccttcccctc

SEQ ID NO: 1536263 - DNA, 25 bp, Homo sapien
acctggaaaaagatcttggaagtgg

SEQ ID NO: 1536264 - DNA, 25 bp, Homo sapien
aacctggaaaaagatcttggaagtg

SEQ ID NO: 1536265 - DNA, 25 bp, Homo sapien
ctgagacacagtagggctcaggaac

SEQ ID NO: 1536266 - DNA, 25 bp, Homo sapien
gagacacagtagggctcaggaacct

SEQ ID NO: 1536267 - DNA, 25 bp, Homo sapien
gaggaggtcagagagctacaagaga

SEQ ID NO: 1536268 - DNA, 25 bp, Homo sapien
aaagatgggctaaggatatgtgcac

SEQ ID NO: 1536269 - DNA, 25 bp, Homo sapien
tcatggagaggtcccttgaaagatg

SEQ ID NO: 1536270 - DNA, 25 bp, Homo sapien
gtatctgtgaatgggaggtgggatc

SEQ ID NO: 1536271 - DNA, 25 bp, Homo sapien
caaacggttcagcaagaatggcgat

SEQ ID NO: 1536272 - DNA, 25 bp, Homo sapien
aacggttcagcaagaatggcgatgc

SEQ ID NO: 1536273 - DNA, 25 bp, Homo sapien
acaaacggttcagcaagaatggcga

SEQ ID NO: 1536274 - DNA, 25 bp, Homo sapien
aaacggttcagcaagaatggcgatg

SEQ ID NO: 1536275 - DNA, 25 bp, Homo sapien
tagtatatgcttagccccgtgctgg

SEQ ID NO: 1536276 - DNA, 25 bp, Homo sapien
gactatctagtatatgcttagcccc

SEQ ID NO: 1536277 - DNA, 25 bp, Homo sapien
gtaaagtgaccgtgacagaactctc

SEQ ID NO: 1536278 - DNA, 25 bp, Homo sapien
tctcatggcaatagaggcttccaga

SEQ ID NO: 1536279 - DNA, 25 bp, Homo sapien
ctttccccaagctttgatctctgga

SEQ ID NO: 1536280 - DNA, 25 bp, Homo sapien
tcagagaacaaaggactttccccaa

SEQ ID NO: 1536281 - DNA, 25 bp, Homo sapien
aggactttccccaagctttgatctc

SEQ ID NO: 1536282 - DNA, 25 bp, Homo sapien
ccaagctttgatctctggaaaaacc

SEQ ID NO: 1536283 - DNA, 25 bp, Homo sapien
ttgttgtgcgcgtccttcgcagccg

SEQ ID NO: 1536284 - DNA, 25 bp, Homo sapien
gttcggtaccttcccgctgcgcgga

SEQ ID NO: 1536285 - DNA, 25 bp, Homo sapien
ttagttgagcagtttcaggctgcga

SEQ ID NO: 1536286 - DNA, 25 bp, Homo sapien
tgcgatgcgagttcggtaccttccc

SEQ ID NO: 1536287 - DNA, 25 bp, Homo sapien
acatacacccaggacggcttaaggc

SEQ ID NO: 1536288 - DNA, 25 bp, Homo sapien
cacccaggacggcttaaggccgagt

SEQ ID NO: 1536289 - DNA, 25 bp, Homo sapien
atacacccaggacggcttaaggccg

SEQ ID NO: 1536290 - DNA, 25 bp, Homo sapien
caggacggcttaaggccgagtgacc

SEQ ID NO: 1536291 - DNA, 25 bp, Homo sapien
gagactgctcaaagggcagcattct

SEQ ID NO: 1536292 - DNA, 25 bp, Homo sapien
caaatatagttgacagggagcatca

SEQ ID NO: 1536293 - DNA, 25 bp, Homo sapien
cagcattctgtgtaagccaaatata

SEQ ID NO: 1536294 - DNA, 25 bp, Homo sapien
tgatcgagagagttggagactgctc

SEQ ID NO: 1536295 - DNA, 25 bp, Homo sapien
tatggttgtttcttagagatgacgg

SEQ ID NO: 1536296 - DNA, 25 bp, Homo sapien
taagtacacagtagcattcagtggt

SEQ ID NO: 1536297 - DNA, 25 bp, Homo sapien
tcttagagatgacggcagagcacac

SEQ ID NO: 1536298 - DNA, 25 bp, Homo sapien
gacgtgacgaatatgagtgtggttt

SEQ ID NO: 1536299 - DNA, 25 bp, Homo sapien
tttactatttgagtcaccttgggca

SEQ ID NO: 1536300 - DNA, 25 bp, Homo sapien
gatgtcccaagtatcagtctgccac

SEQ ID NO: 1536301 - DNA, 25 bp, Homo sapien
gcaaggaccttggaataatcagccc

SEQ ID NO: 1536302 - DNA, 25 bp, Homo sapien
caaagaagtgtatctgtggcagcaa

SEQ ID NO: 1536303 - DNA, 25 bp, Homo sapien
gagacagaaagagttgtgatgggaa

SEQ ID NO: 1536304 - DNA, 25 bp, Homo sapien
aggagacagaaagagttgtgatggg

SEQ ID NO: 1536305 - DNA, 25 bp, Homo sapien
agaaagagttgtgatgggaagaagg

SEQ ID NO: 1536306 - DNA, 25 bp, Homo sapien
aagagttgtgatgggaagaaggcct

SEQ ID NO: 1536307 - DNA, 25 bp, Homo sapien
ggatcaccacaaaacccagtcaacg

SEQ ID NO: 1536308 - DNA, 25 bp, Homo sapien
gacgtaaaagatagcagatactgcc

SEQ ID NO: 1536309 - DNA, 25 bp, Homo sapien
tttaagacaggcgtgcgggaagtct

SEQ ID NO: 1536310 - DNA, 25 bp, Homo sapien
tgccagttggcagtctctgacgtaa

SEQ ID NO: 1536311 - DNA, 25 bp, Homo sapien
cttggcttgggtacctaactcagag

SEQ ID NO: 1536312 - DNA, 25 bp, Homo sapien
cacagtgtgaggtccatggttgaaa

SEQ ID NO: 1536313 - DNA, 25 bp, Homo sapien
tgaggtccatggttgaaaggggagg

SEQ ID NO: 1536314 - DNA, 25 bp, Homo sapien
acagtgtgaggtccatggttgaaag

SEQ ID NO: 1536315 - DNA, 25 bp, Homo sapien
gggcagtcttatggggggcagggac

SEQ ID NO: 1536316 - DNA, 25 bp, Homo sapien
gcagtcttatggggggcagggacat

SEQ ID NO: 1536317 - DNA, 25 bp, Homo sapien
ggcagtcttatggggggcagggaca

SEQ ID NO: 1536318 - DNA, 25 bp, Homo sapien
ctgggcagtcttatggggggcaggg

SEQ ID NO: 1536319 - DNA, 25 bp, Homo sapien
gtaccagccgatcagagccataggg

SEQ ID NO: 1536320 - DNA, 25 bp, Homo sapien
gggaactcctggctccctacggtga

SEQ ID NO: 1536321 - DNA, 25 bp, Homo sapien
cggagcctggctgctagctgtacca

SEQ ID NO: 1536322 - DNA, 25 bp, Homo sapien
agtatcacagagtgctggccggagc

SEQ ID NO: 1536323 - DNA, 25 bp, Homo sapien
attccttgagggtttctctggctcc

SEQ ID NO: 1536324 - DNA, 25 bp, Homo sapien
gatctggctttttagccctgtcccc

SEQ ID NO: 1536325 - DNA, 25 bp, Homo sapien
ccagttctctctcaggattccttga

SEQ ID NO: 1536326 - DNA, 25 bp, Homo sapien
gcctggatctggctttttagccctg

SEQ ID NO: 1536327 - DNA, 25 bp, Homo sapien
tggattttccctcaaccacgtgagc

SEQ ID NO: 1536328 - DNA, 25 bp, Homo sapien
gagcttgcgcagactttcctcagag

SEQ ID NO: 1536329 - DNA, 25 bp, Homo sapien
tcttggtggcgagtgcttgtgcaac

SEQ ID NO: 1536330 - DNA, 25 bp, Homo sapien
tggaggcgtttctcctttgacctgg

SEQ ID NO: 1536331 - DNA, 25 bp, Homo sapien
aatgccatatctgggcggcatcagc

SEQ ID NO: 1536332 - DNA, 25 bp, Homo sapien
tgggcggcatcagcaggatgctcca

SEQ ID NO: 1536333 - DNA, 25 bp, Homo sapien
ggcctcagcccacgagggcctaggg

SEQ ID NO: 1536334 - DNA, 25 bp, Homo sapien
aagggaatgccatatctgggcggca

SEQ ID NO: 1536335 - DNA, 25 bp, Homo sapien
tgttcccgccagacctcctgccagg

SEQ ID NO: 1536336 - DNA, 25 bp, Homo sapien
ctgccaggctccagtggtgggggtg

SEQ ID NO: 1536337 - DNA, 25 bp, Homo sapien
ctctgttcccgccagacctcctgcc

SEQ ID NO: 1536338 - DNA, 25 bp, Homo sapien
ttcccgccagacctcctgccaggct

SEQ ID NO: 1536339 - DNA, 25 bp, Homo sapien
gaggaggccaactggttctggctcc

SEQ ID NO: 1536340 - DNA, 25 bp, Homo sapien
aggaggccaactggttctggctcca

SEQ ID NO: 1536341 - DNA, 25 bp, Homo sapien
ctggaggaggccaactggttctggc

SEQ ID NO: 1536342 - DNA, 25 bp, Homo sapien
ctttgggggcatttagggacagtgg

SEQ ID NO: 1536343 - DNA, 25 bp, Homo sapien
tgtgtgcccctgatcagactcttcc

SEQ ID NO: 1536344 - DNA, 25 bp, Homo sapien
ctgtgtgcccctgatcagactcttc

SEQ ID NO: 1536345 - DNA, 25 bp, Homo sapien
cactgtaccattcaggcaggaaatc

SEQ ID NO: 1536346 - DNA, 25 bp, Homo sapien
agcgccaactcactgtaccattcag

SEQ ID NO: 1536347 - DNA, 25 bp, Homo sapien
actcactgtaccattcaggcaggaa

SEQ ID NO: 1536348 - DNA, 25 bp, Homo sapien
aggaatcccagcgccaactcactgt

SEQ ID NO: 1536349 - DNA, 25 bp, Homo sapien
tcatgacccgcacaggttgcaagtg

SEQ ID NO: 1536350 - DNA, 25 bp, Homo sapien
atgacccgcacaggttgcaagtgcg

SEQ ID NO: 1536351 - DNA, 25 bp, Homo sapien
catgacccgcacaggttgcaagtgc

SEQ ID NO: 1536352 - DNA, 25 bp, Homo sapien
tgacccgcacaggttgcaagtgcgc

SEQ ID NO: 1536353 - DNA, 25 bp, Homo sapien
acctctttccacagacagagcacgc

SEQ ID NO: 1536354 - DNA, 25 bp, Homo sapien
catctgatgcttgagtgaaaacctc

SEQ ID NO: 1536355 - DNA, 25 bp, Homo sapien
gtgtggactcggtagtgcgtctcca

SEQ ID NO: 1536356 - DNA, 25 bp, Homo sapien
atagggccgagaccgagcaggaggg

SEQ ID NO: 1536357 - DNA, 25 bp, Homo sapien
ccgcacagggagcagcggtacggag

SEQ ID NO: 1536358 - DNA, 25 bp, Homo sapien
cgcatgtgcgcctgcatggaggcca

SEQ ID NO: 1536359 - DNA, 25 bp, Homo sapien
tgtccgcaggtgcttggtcatggcc

SEQ ID NO: 1536360 - DNA, 25 bp, Homo sapien
gctgaggacaaaggctacaggagaa

SEQ ID NO: 1536361 - DNA, 25 bp, Homo sapien
gaaggtggagcggatggtccatccg

SEQ ID NO: 1536362 - DNA, 25 bp, Homo sapien
ggcgggagttggctgggcgagtgac

SEQ ID NO: 1536363 - DNA, 25 bp, Homo sapien
ccatccgggcgggagttggctgggc

SEQ ID NO: 1536364 - DNA, 25 bp, Homo sapien
cggatggtccatccgggcgggagtt

SEQ ID NO: 1536365 - DNA, 25 bp, Homo sapien
acaacagggagaggtcgagggccga

SEQ ID NO: 1536366 - DNA, 25 bp, Homo sapien
aacagggagaggtcgagggccgaga

SEQ ID NO: 1536367 - DNA, 25 bp, Homo sapien
caacagggagaggtcgagggccgag

SEQ ID NO: 1536368 - DNA, 25 bp, Homo sapien
acagggagaggtcgagggccgagac

SEQ ID NO: 1536369 - DNA, 25 bp, Homo sapien
ctcttggctaagacgctaccgacac

SEQ ID NO: 1536370 - DNA, 25 bp, Homo sapien
tgccaggtcagaagccgagccggcc

SEQ ID NO: 1536371 - DNA, 25 bp, Homo sapien
ttcgttctttaattggactcttggc

SEQ ID NO: 1536372 - DNA, 25 bp, Homo sapien
ctaggccgccgtagcagcggtgcca

SEQ ID NO: 1536373 - DNA, 25 bp, Homo sapien
tgcgacccgcgatcgtccaggagag

SEQ ID NO: 1536374 - DNA, 25 bp, Homo sapien
gagggcactcggcgcccttcctggg

SEQ ID NO: 1536375 - DNA, 25 bp, Homo sapien
tcctggggcgcttctggggcggaat

SEQ ID NO: 1536376 - DNA, 25 bp, Homo sapien
gggcttctgcgacccgcgatcgtcc

SEQ ID NO: 1536377 - DNA, 25 bp, Homo sapien
ctcctgcacacttcagtgtcctcac

SEQ ID NO: 1536378 - DNA, 25 bp, Homo sapien
cttcgctcctgcacacttcagtgtc

SEQ ID NO: 1536379 - DNA, 25 bp, Homo sapien
tcgctcctgcacacttcagtgtcct

SEQ ID NO: 1536380 - DNA, 25 bp, Homo sapien
gctcctgcacacttcagtgtcctca

SEQ ID NO: 1536381 - DNA, 25 bp, Homo sapien
tatggtgatgagatcgacaatctcc

SEQ ID NO: 1536382 - DNA, 25 bp, Homo sapien
tctttattatggtgatgagatcgac

SEQ ID NO: 1536383 - DNA, 25 bp, Homo sapien
gatgagatcgacaatctcccctact

SEQ ID NO: 1536384 - DNA, 25 bp, Homo sapien
gggcacaggaaactctttattatgg

SEQ ID NO: 1536385 - DNA, 25 bp, Homo sapien
ctggacagcggacgcagggccacca

SEQ ID NO: 1536386 - DNA, 25 bp, Homo sapien
gaagaagtgtccatcccgctggaca

SEQ ID NO: 1536387 - DNA, 25 bp, Homo sapien
tgtgcccggacaccgagtcctcggg

SEQ ID NO: 1536388 - DNA, 25 bp, Homo sapien
gtccaggaccggcatgccgcaaggt

SEQ ID NO: 1536389 - DNA, 25 bp, Homo sapien
ggaaatgcagttcgcggctgcagga

SEQ ID NO: 1536390 - DNA, 25 bp, Homo sapien
cgggaaatgtagtccggacgcctcg

SEQ ID NO: 1536391 - DNA, 25 bp, Homo sapien
attgttcttggctaggccggcggcc

SEQ ID NO: 1536392 - DNA, 25 bp, Homo sapien
gcgtggactaccactcccagggtgc

SEQ ID NO: 1536393 - DNA, 25 bp, Homo sapien
cacgggagagggagtccgcggccgg

SEQ ID NO: 1536394 - DNA, 25 bp, Homo sapien
gcaccacgggagagggagtccgcgg

SEQ ID NO: 1536395 - DNA, 25 bp, Homo sapien
gccacgcgcagggcaccacgggaga

SEQ ID NO: 1536396 - DNA, 25 bp, Homo sapien
gcgcagggcaccacgggagagggag

SEQ ID NO: 1536397 - DNA, 25 bp, Homo sapien
ctcctcgtcggattccccgtcactg

SEQ ID NO: 1536398 - DNA, 25 bp, Homo sapien
tcctccggcacgcagcctcgactcg

SEQ ID NO: 1536399 - DNA, 25 bp, Homo sapien
cccagcaaacggagcagggccgtgt

SEQ ID NO: 1536400 - DNA, 25 bp, Homo sapien
agagctacccgcactctttcggccc

SEQ ID NO: 1536401 - DNA, 25 bp, Homo sapien
tgagatgccaagagaaactggggcc

SEQ ID NO: 1536402 - DNA, 25 bp, Homo sapien
ctgagatgccaagagaaactggggc

SEQ ID NO: 1536403 - DNA, 25 bp, Homo sapien
tatcgaggaatatccccagttccca

SEQ ID NO: 1536404 - DNA, 25 bp, Homo sapien
ctgaggtatcgaggaatatccccag

SEQ ID NO: 1536405 - DNA, 25 bp, Homo sapien
gaggtatcgaggaatatccccagtt

SEQ ID NO: 1536406 - DNA, 25 bp, Homo sapien
cagttcccacttagcatacccctgc

SEQ ID NO: 1536407 - DNA, 25 bp, Homo sapien
gtcagtgccaaagccctcgttccat

SEQ ID NO: 1536408 - DNA, 25 bp, Homo sapien
agtcagtgccaaagccctcgttcca

SEQ ID NO: 1536409 - DNA, 25 bp, Homo sapien
cagtcagtgccaaagccctcgttcc

SEQ ID NO: 1536410 - DNA, 25 bp, Homo sapien
cggagcgcagagcgcagggaactgg

SEQ ID NO: 1536411 - DNA, 25 bp, Homo sapien
catctgaatgaaaaccctgaaactc

SEQ ID NO: 1536412 - DNA, 25 bp, Homo sapien
tcatctgaatgaaaaccctgaaact

SEQ ID NO: 1536413 - DNA, 25 bp, Homo sapien
ggtcgtcttatgcttgcgaccccga

SEQ ID NO: 1536414 - DNA, 25 bp, Homo sapien
ccacatctgctaggcgaggaggagg

SEQ ID NO: 1536415 - DNA, 25 bp, Homo sapien
cgccggagaagttcagtcagtgcct

SEQ ID NO: 1536416 - DNA, 25 bp, Homo sapien
ctgggcccgccggagaagttcagtc

SEQ ID NO: 1536417 - DNA, 25 bp, Homo sapien
tctgccaccactactgcttgctgct

SEQ ID NO: 1536418 - DNA, 25 bp, Homo sapien
cttgcatttccagctgccagtctga

SEQ ID NO: 1536419 - DNA, 25 bp, Homo sapien
ctcaggtttggggattgtcacagct

SEQ ID NO: 1536420 - DNA, 25 bp, Homo sapien
cagtctgatgtttcactggaaccac

SEQ ID NO: 1536421 - DNA, 25 bp, Homo sapien
tccacggcttgactgtcctccacgc

SEQ ID NO: 1536422 - DNA, 25 bp, Homo sapien
tgcctccacggcctccacggcttga

SEQ ID NO: 1536423 - DNA, 25 bp, Homo sapien
cggcctccacggcttgactgtcctc

SEQ ID NO: 1536424 - DNA, 25 bp, Homo sapien
ggcttgactgtcctccacgcctggg

SEQ ID NO: 1536425 - DNA, 25 bp, Homo sapien
acaaacttgatcacaaaggggagcc

SEQ ID NO: 1536426 - DNA, 25 bp, Homo sapien
caaacttgatcacaaaggggagccc

SEQ ID NO: 1536427 - DNA, 25 bp, Homo sapien
ttcgagtcccaaggacaattgtccc

SEQ ID NO: 1536428 - DNA, 25 bp, Homo sapien
cttgaccttgacctgattcgagtcc

SEQ ID NO: 1536429 - DNA, 25 bp, Homo sapien
gaccttgacctgattcgagtcccaa

SEQ ID NO: 1536430 - DNA, 25 bp, Homo sapien
gacctgattcgagtcccaaggacaa

SEQ ID NO: 1536431 - DNA, 25 bp, Homo sapien
ttgggggacatcctgccaactttcc

SEQ ID NO: 1536432 - DNA, 25 bp, Homo sapien
tgtccagatccaactcttctttggg

SEQ ID NO: 1536433 - DNA, 25 bp, Homo sapien
tccctgtccagatccaactcttctt

SEQ ID NO: 1536434 - DNA, 25 bp, Homo sapien
ttccttttccgcagctggcatcatc

SEQ ID NO: 1536435 - DNA, 25 bp, Homo sapien
accacaggaggaggggattcctcct

SEQ ID NO: 1536436 - DNA, 25 bp, Homo sapien
acaggaggaggggattcctcctgct

SEQ ID NO: 1536437 - DNA, 25 bp, Homo sapien
ctgggaccacaggaggaggggattc

SEQ ID NO: 1536438 - DNA, 25 bp, Homo sapien
gaccacaggaggaggggattcctcc

SEQ ID NO: 1536439 - DNA, 25 bp, Homo sapien
cgctccgcccgctggctgggagtca

SEQ ID NO: 1536440 - DNA, 25 bp, Homo sapien
gagcagcttcccgctccgcccgctg

SEQ ID NO: 1536441 - DNA, 25 bp, Homo sapien
agcttcccgctccgcccgctggctg

SEQ ID NO: 1536442 - DNA, 25 bp, Homo sapien
agcagcttcccgctccgcccgctgg

SEQ ID NO: 1536443 - DNA, 25 bp, Homo sapien
aataaactgccggatattcttcagg

SEQ ID NO: 1536444 - DNA, 25 bp, Homo sapien
taaactgccggatattcttcaggaa

SEQ ID NO: 1536445 - DNA, 25 bp, Homo sapien
tgggactgtcttccggagggcctcc

SEQ ID NO: 1536446 - DNA, 25 bp, Homo sapien
ctgccggatattcttcaggaaggtg

SEQ ID NO: 1536447 - DNA, 25 bp, Homo sapien
ggtgtcttgatgacacgggaggagc

SEQ ID NO: 1536448 - DNA, 25 bp, Homo sapien
tgtcttgatgacacgggaggagcgg

SEQ ID NO: 1536449 - DNA, 25 bp, Homo sapien
aaatcgccggggtgtcttgatgaca

SEQ ID NO: 1536450 - DNA, 25 bp, Homo sapien
cttcatccataaatcgccggggtgt

SEQ ID NO: 1536451 - DNA, 25 bp, Homo sapien
tcccttaggatggaccgtctcttct

SEQ ID NO: 1536452 - DNA, 25 bp, Homo sapien
ggtggtaatgggaggtcgcaggaca

SEQ ID NO: 1536453 - DNA, 25 bp, Homo sapien
tgaggtccagcgaaatgtgggttcc

SEQ ID NO: 1536454 - DNA, 25 bp, Homo sapien
cagctcccgggtcagtgaggtccag

SEQ ID NO: 1536455 - DNA, 25 bp, Homo sapien
gtaagcaccgattcgtagatcttca

SEQ ID NO: 1536456 - DNA, 25 bp, Homo sapien
tagatcttcaggtgggcttcgcttg

SEQ ID NO: 1536457 - DNA, 25 bp, Homo sapien
gaggaggagtaagcaccgattcgta

SEQ ID NO: 1536458 - DNA, 25 bp, Homo sapien
gcaccgattcgtagatcttcaggtg

SEQ ID NO: 1536459 - DNA, 25 bp, Homo sapien
gctgatcgatcttgaatagctgcac

SEQ ID NO: 1536460 - DNA, 25 bp, Homo sapien
ctgtggcccgttgctcagagctgga

SEQ ID NO: 1536461 - DNA, 25 bp, Homo sapien
tgcactttggctctcttgaggaggc

SEQ ID NO: 1536462 - DNA, 25 bp, Homo sapien
ggccttaacaggagtggtgaccaca

SEQ ID NO: 1536463 - DNA, 25 bp, Homo sapien
ctggcagggaataaacagggtcagg

SEQ ID NO: 1536464 - DNA, 25 bp, Homo sapien
tggcagggaataaacagggtcaggg

SEQ ID NO: 1536465 - DNA, 25 bp, Homo sapien
tagcttccaccgactcatcttcaga

SEQ ID NO: 1536466 - DNA, 25 bp, Homo sapien
atcttcagaccggacagggcctctg

SEQ ID NO: 1536467 - DNA, 25 bp, Homo sapien
tgagggccgctctctcttagcttcc

SEQ ID NO: 1536468 - DNA, 25 bp, Homo sapien
ggagatctgcttgacagccccggcc

SEQ ID NO: 1536469 - DNA, 25 bp, Homo sapien
gacatgtttgatgcggggaccttgc

SEQ ID NO: 1536470 - DNA, 25 bp, Homo sapien
gcagcatgacggcagacatgtttga

SEQ ID NO: 1536471 - DNA, 25 bp, Homo sapien
cctctgtggcgaggtcctgccgatc

SEQ ID NO: 1536472 - DNA, 25 bp, Homo sapien
tgaggcgagggacatcttcaggcac

SEQ ID NO: 1536473 - DNA, 25 bp, Homo sapien
agtgtccacatcgagccatgcgcat

SEQ ID NO: 1536474 - DNA, 25 bp, Homo sapien
catcttcttgccgtgatgggagggc

SEQ ID NO: 1536475 - DNA, 25 bp, Homo sapien
cactgcttcttggtgttagggcccc

SEQ ID NO: 1536476 - DNA, 25 bp, Homo sapien
cccaaacttgggcttgtctaggcag

SEQ ID NO: 1536477 - DNA, 25 bp, Homo sapien
tcttccgagcctctattttgtcaca

SEQ ID NO: 1536478 - DNA, 25 bp, Homo sapien
tagccagtcgttccatcttccgagc

SEQ ID NO: 1536479 - DNA, 25 bp, Homo sapien
cttttttagccagtcgttccatctt

SEQ ID NO: 1536480 - DNA, 25 bp, Homo sapien
cctctattttgtcacacttccggta

SEQ ID NO: 1536481 - DNA, 25 bp, Homo sapien
ggagattcatcggaatcccagggca

SEQ ID NO: 1536482 - DNA, 25 bp, Homo sapien
cctcaggagattcatcggaatccca

SEQ ID NO: 1536483 - DNA, 25 bp, Homo sapien
catcggaatcccagggcaacagcgt

SEQ ID NO: 1536484 - DNA, 25 bp, Homo sapien
gaatcccagggcaacagcgtcttca

SEQ ID NO: 1536485 - DNA, 25 bp, Homo sapien
gtcatccgaatcctcgaagatatca

SEQ ID NO: 1536486 - DNA, 25 bp, Homo sapien
tcataggagggtcgctgtttgacgc

SEQ ID NO: 1536487 - DNA, 25 bp, Homo sapien
gctgtttgacgcagcgccgagctga

SEQ ID NO: 1536488 - DNA, 25 bp, Homo sapien
cgccgagctgacttgcgctgcagga

SEQ ID NO: 1536489 - DNA, 25 bp, Homo sapien
tccaggcgccttcgggccttgagct

SEQ ID NO: 1536490 - DNA, 25 bp, Homo sapien
aacacaggctgcagggtaggtttgc

SEQ ID NO: 1536491 - DNA, 25 bp, Homo sapien
cttgtccaggcgccttcgggccttg

SEQ ID NO: 1536492 - DNA, 25 bp, Homo sapien
tgtccaggcgccttcgggccttgag

SEQ ID NO: 1536493 - DNA, 25 bp, Homo sapien
tctgacttgccaggtagctcctgga

SEQ ID NO: 1536494 - DNA, 25 bp, Homo sapien
cactcaggtgtgtctgtcactctga

SEQ ID NO: 1536495 - DNA, 25 bp, Homo sapien
tctgtcactctgacttgccaggtag

SEQ ID NO: 1536496 - DNA, 25 bp, Homo sapien
cacgacactcaggtgtgtctgtcac

SEQ ID NO: 1536497 - DNA, 25 bp, Homo sapien
acgcggtgcacaccatcgggagact

SEQ ID NO: 1536498 - DNA, 25 bp, Homo sapien
caccatcgggagacttctgctttcc

SEQ ID NO: 1536499 - DNA, 25 bp, Homo sapien
cttaaaatccacacggacgcggtgc

SEQ ID NO: 1536500 - DNA, 25 bp, Homo sapien
ttaaaatccacacggacgcggtgca

SEQ ID NO: 1536501 - DNA, 25 bp, Homo sapien
tcaggccccccatcagccacacgtt

SEQ ID NO: 1536502 - DNA, 25 bp, Homo sapien
ccatcagccacacgttctctaaatc

SEQ ID NO: 1536503 - DNA, 25 bp, Homo sapien
gcacagaggtgagcacactcaggcc

SEQ ID NO: 1536504 - DNA, 25 bp, Homo sapien
acacgttctctaaatcacaatcctc

SEQ ID NO: 1536505 - DNA, 25 bp, Homo sapien
tcgtggagtcctttgctggcacaca

SEQ ID NO: 1536506 - DNA, 25 bp, Homo sapien
ctttgctggcacacagcaagcacac

SEQ ID NO: 1536507 - DNA, 25 bp, Homo sapien
ctcgtggagtcctttgctggcacac

SEQ ID NO: 1536508 - DNA, 25 bp, Homo sapien
agtcctttgctggcacacagcaagc

SEQ ID NO: 1536509 - DNA, 25 bp, Homo sapien
cttggatccacgacctttgcgtcca

SEQ ID NO: 1536510 - DNA, 25 bp, Homo sapien
tggcagaatttgcagcgacggcagc

SEQ ID NO: 1536511 - DNA, 25 bp, Homo sapien
acctttgcgtccacagacgtggcag

SEQ ID NO: 1536512 - DNA, 25 bp, Homo sapien
cagaatgggtggaatgggtcacagc

SEQ ID NO: 1536513 - DNA, 25 bp, Homo sapien
cggcagcgctcgcactccaggaggt

SEQ ID NO: 1536514 - DNA, 25 bp, Homo sapien
ccagtggcgccgtttgcgcgtggcc

SEQ ID NO: 1536515 - DNA, 25 bp, Homo sapien
cgggtggtatgcatggcggcagcgc

SEQ ID NO: 1536516 - DNA, 25 bp, Homo sapien
ttggatagctgggccccagacaggc

SEQ ID NO: 1536517 - DNA, 25 bp, Homo sapien
ggcgatgttaggggaaaaccaggca

SEQ ID NO: 1536518 - DNA, 25 bp, Homo sapien
gagcagggcgatgttaggggaaaac

SEQ ID NO: 1536519 - DNA, 25 bp, Homo sapien
cagggcgatgttaggggaaaaccag

SEQ ID NO: 1536520 - DNA, 25 bp, Homo sapien
gggagcagggcgatgttaggggaaa

SEQ ID NO: 1536521 - DNA, 25 bp, Homo sapien
acgtcccagttcttgcctggagttg

SEQ ID NO: 1536522 - DNA, 25 bp, Homo sapien
tcttacagcgcacacaggctgaaca

SEQ ID NO: 1536523 - DNA, 25 bp, Homo sapien
taatctccagaccactcgacgtccc

SEQ ID NO: 1536524 - DNA, 25 bp, Homo sapien
acagctcttacagcgcacacaggct

SEQ ID NO: 1536525 - DNA, 25 bp, Homo sapien
acttggcatgcacccagtgatcgca

SEQ ID NO: 1536526 - DNA, 25 bp, Homo sapien
catagtcgttgtcttcatagcagcg

SEQ ID NO: 1536527 - DNA, 25 bp, Homo sapien
gcgtgtacagatcgggcagtagttt

SEQ ID NO: 1536528 - DNA, 25 bp, Homo sapien
catcatcttgctctcatagtcgttg

SEQ ID NO: 1536529 - DNA, 25 bp, Homo sapien
gcaggggtccccacagggttgaggc

SEQ ID NO: 1536530 - DNA, 25 bp, Homo sapien
cagtcctcttggggcctgtggtggg

SEQ ID NO: 1536531 - DNA, 25 bp, Homo sapien
ggggtccccacagggttgaggctgc

SEQ ID NO: 1536532 - DNA, 25 bp, Homo sapien
tgcagcccaggtgctccactgactc

SEQ ID NO: 1536533 - DNA, 25 bp, Homo sapien
ccagcacacggtccgcaggtgtaca

SEQ ID NO: 1536534 - DNA, 25 bp, Homo sapien
ggtccgcaggtgtacagcaccgagt

SEQ ID NO: 1536535 - DNA, 25 bp, Homo sapien
agcaccgagtctggcagtcctgaaa

SEQ ID NO: 1536536 - DNA, 25 bp, Homo sapien
tcctgaaaggatctcgtagtcttca

SEQ ID NO: 1536537 - DNA, 25 bp, Homo sapien
tgggtgcagagcagcagtgggccca

SEQ ID NO: 1536538 - DNA, 25 bp, Homo sapien
gggtgcagagcagcagtgggcccac

SEQ ID NO: 1536539 - DNA, 25 bp, Homo sapien
ctgggtgcagagcagcagtgggccc

SEQ ID NO: 1536540 - DNA, 25 bp, Homo sapien
tgcaaagcggggaagttagcagggc

SEQ ID NO: 1536541 - DNA, 25 bp, Homo sapien
gcctagccccggcccatcctgcctc

SEQ ID NO: 1536542 - DNA, 25 bp, Homo sapien
cctagccccggcccatcctgcctcc

SEQ ID NO: 1536543 - DNA, 25 bp, Homo sapien
ctgcaaagcggggaagttagcaggg

SEQ ID NO: 1536544 - DNA, 25 bp, Homo sapien
ggtcctgggtgcagttgcttcccat

SEQ ID NO: 1536545 - DNA, 25 bp, Homo sapien
gccatcctcgaagcgctgactcaca

SEQ ID NO: 1536546 - DNA, 25 bp, Homo sapien
ctcacagcttgcaggccgcagggtc

SEQ ID NO: 1536547 - DNA, 25 bp, Homo sapien
gacttgtagtggccatcctcgaagc

SEQ ID NO: 1536548 - DNA, 25 bp, Homo sapien
ccgagtgccgcatgaggatgcccac

SEQ ID NO: 1536549 - DNA, 25 bp, Homo sapien
ctccgagtgccgcatgaggatgccc

SEQ ID NO: 1536550 - DNA, 25 bp, Homo sapien
tcctccgagtgccgcatgaggatgc

SEQ ID NO: 1536551 - DNA, 25 bp, Homo sapien
cctcctccgagtgccgcatgaggat

SEQ ID NO: 1536552 - DNA, 25 bp, Homo sapien
cgggtactccgtcgccagtacttgg

SEQ ID NO: 1536553 - DNA, 25 bp, Homo sapien
accagccgaacgcagattctagcag

SEQ ID NO: 1536554 - DNA, 25 bp, Homo sapien
tttggcagccgggtactccgtcgcc

SEQ ID NO: 1536555 - DNA, 25 bp, Homo sapien
gtcgtgggcgtcgaaccagccgaac

SEQ ID NO: 1536556 - DNA, 25 bp, Homo sapien
gtctccactgcgcatagacatgatc

SEQ ID NO: 1536557 - DNA, 25 bp, Homo sapien
ctgctgtctccactgcgcatagaca

SEQ ID NO: 1536558 - DNA, 25 bp, Homo sapien
ctccactgcgcatagacatgatcca

SEQ ID NO: 1536559 - DNA, 25 bp, Homo sapien
gatgggggcaacaccgcattgggaa

SEQ ID NO: 1536560 - DNA, 25 bp, Homo sapien
tgcatccccgtatttgaggcagagt

SEQ ID NO: 1536561 - DNA, 25 bp, Homo sapien
agtgcacactgacgggggtcctcca

SEQ ID NO: 1536562 - DNA, 25 bp, Homo sapien
tgtgagaaggcagccggatccttgc

SEQ ID NO: 1536563 - DNA, 25 bp, Homo sapien
ccccgtatttgaggcagagtgcaca

SEQ ID NO: 1536564 - DNA, 25 bp, Homo sapien
acttccgccgaccagatggcacagt

SEQ ID NO: 1536565 - DNA, 25 bp, Homo sapien
tcgttctcctcgaagacttccgccg

SEQ ID NO: 1536566 - DNA, 25 bp, Homo sapien
ggcacagttgacgtgtgtccactcg

SEQ ID NO: 1536567 - DNA, 25 bp, Homo sapien
cattcttgagggagccgtcgttctc

SEQ ID NO: 1536568 - DNA, 25 bp, Homo sapien
gggcacacatgaagtggaagttgct

SEQ ID NO: 1536569 - DNA, 25 bp, Homo sapien
ttgccatccaggagatcagtgtgtt

SEQ ID NO: 1536570 - DNA, 25 bp, Homo sapien
aagatgcagtagctggcccgggcac

SEQ ID NO: 1536571 - DNA, 25 bp, Homo sapien
tctggcagaagactttcttgtcatc

SEQ ID NO: 1536572 - DNA, 25 bp, Homo sapien
ggcggagaacatcaaaaccatcggg

SEQ ID NO: 1536573 - DNA, 25 bp, Homo sapien
caatgagcacgttgatggcatcggg

SEQ ID NO: 1536574 - DNA, 25 bp, Homo sapien
gaacttccgcttgaagttgatgccc

SEQ ID NO: 1536575 - DNA, 25 bp, Homo sapien
tgatggcatcgggttcaagccccgt

SEQ ID NO: 1536576 - DNA, 25 bp, Homo sapien
gggaagagccgtccctcgcagtccg

SEQ ID NO: 1536577 - DNA, 25 bp, Homo sapien
gatcagacagagtacccagggagtc

SEQ ID NO: 1536578 - DNA, 25 bp, Homo sapien
cccagggagtcaatgcggatggaac

SEQ ID NO: 1536579 - DNA, 25 bp, Homo sapien
gtccctcgcagtccgagagatcaga

SEQ ID NO: 1536580 - DNA, 25 bp, Homo sapien
cccatggccgatactccagaattcg

SEQ ID NO: 1536581 - DNA, 25 bp, Homo sapien
ccagaattcggcaccgataccagca

SEQ ID NO: 1536582 - DNA, 25 bp, Homo sapien
aggtgagctggctcttccctcggcc

SEQ ID NO: 1536583 - DNA, 25 bp, Homo sapien
agcgcctccgagcatccactgtgct

SEQ ID NO: 1536584 - DNA, 25 bp, Homo sapien
ctgaggaaggggcggggctgtgcac

SEQ ID NO: 1536585 - DNA, 25 bp, Homo sapien
ctgaatgggcgagtggcgctcagga

SEQ ID NO: 1536586 - DNA, 25 bp, Homo sapien
gctccagggacaagaacatctgtgt

SEQ ID NO: 1536587 - DNA, 25 bp, Homo sapien
tctgtgtccagtggggggtcctcac

SEQ ID NO: 1536588 - DNA, 25 bp, Homo sapien
gggcgagtggcgctcaggagctcca

SEQ ID NO: 1536589 - DNA, 25 bp, Homo sapien
gctgcctgaatctggccgcagtgga

SEQ ID NO: 1536590 - DNA, 25 bp, Homo sapien
tccgggatggcgagtagttgggcac

SEQ ID NO: 1536591 - DNA, 25 bp, Homo sapien
tagttgggcactttgattcgagccc

SEQ ID NO: 1536592 - DNA, 25 bp, Homo sapien
ccccaagggcctccgggatggcgag

SEQ ID NO: 1536593 - DNA, 25 bp, Homo sapien
ggagctgggaagtccgggtctccca

SEQ ID NO: 1536594 - DNA, 25 bp, Homo sapien
agggctgggacgacgggaacgtctg

SEQ ID NO: 1536595 - DNA, 25 bp, Homo sapien
gctgggaagtccgggtctcccactg

SEQ ID NO: 1536596 - DNA, 25 bp, Homo sapien
tgggaagtccgggtctcccactgtg

SEQ ID NO: 1536597 - DNA, 25 bp, Homo sapien
tgaggtaggtgtgagggctgtgacg

SEQ ID NO: 1536598 - DNA, 25 bp, Homo sapien
ctgaggtaggtgtgagggctgtgac

SEQ ID NO: 1536599 - DNA, 25 bp, Homo sapien
gaggtaggtgtgagggctgtgacga

SEQ ID NO: 1536600 - DNA, 25 bp, Homo sapien
cttcagggggtggtggagatggggc

SEQ ID NO: 1536601 - DNA, 25 bp, Homo sapien
ggccgggccagggggagccagctcc

SEQ ID NO: 1536602 - DNA, 25 bp, Homo sapien
gggtggtggagatggggccgggcca

SEQ ID NO: 1536603 - DNA, 25 bp, Homo sapien
gtggtggagatggggccgggccagg

SEQ ID NO: 1536604 - DNA, 25 bp, Homo sapien
atgtcctcgaagtctgggcccaggt

SEQ ID NO: 1536605 - DNA, 25 bp, Homo sapien
cacgccgtccagctgttcaatgcgg

SEQ ID NO: 1536606 - DNA, 25 bp, Homo sapien
cacaatttccgatggcaggtcctca

SEQ ID NO: 1536607 - DNA, 25 bp, Homo sapien
ggagtgactcctctctagggccagc

SEQ ID NO: 1536608 - DNA, 25 bp, Homo sapien
ctcttgacgcggatggcctggcggg

SEQ ID NO: 1536609 - DNA, 25 bp, Homo sapien
accacgggcagcacgccgaggaggg

SEQ ID NO: 1536610 - DNA, 25 bp, Homo sapien
ggcagggcggaccactccgaccacg

SEQ ID NO: 1536611 - DNA, 25 bp, Homo sapien
caagccctggaacctgaggggtatc

SEQ ID NO: 1536612 - DNA, 25 bp, Homo sapien
gcgggctccccaggccgatccaggt

SEQ ID NO: 1536613 - DNA, 25 bp, Homo sapien
cgcactgtgggggttttcatcctca

SEQ ID NO: 1536614 - DNA, 25 bp, Homo sapien
ggtcaaggaccccacgcactgtggg

SEQ ID NO: 1536615 - DNA, 25 bp, Homo sapien
gggttttcatcctcacacggctaaa

SEQ ID NO: 1536616 - DNA, 25 bp, Homo sapien
gacctggggaggaccatcttccgga

SEQ ID NO: 1536617 - DNA, 25 bp, Homo sapien
ctgggactcaagcagcaggtctggg

SEQ ID NO: 1536618 - DNA, 25 bp, Homo sapien
gaggaccatcttccggaagtggcag

SEQ ID NO: 1536619 - DNA, 25 bp, Homo sapien
tggtgccactgggactcaagcagca

SEQ ID NO: 1536620 - DNA, 25 bp, Homo sapien
ggctcacatgcacagagccaagtac

SEQ ID NO: 1536621 - DNA, 25 bp, Homo sapien
tcactgctgatctcgaagcgcagat

SEQ ID NO: 1536622 - DNA, 25 bp, Homo sapien
cagatgtgggccagtccgttttggg

SEQ ID NO: 1536623 - DNA, 25 bp, Homo sapien
agctctctgcctcaacgctgaaccc

SEQ ID NO: 1536624 - DNA, 25 bp, Homo sapien
ttggggcctggttctctttatcatc

SEQ ID NO: 1536625 - DNA, 25 bp, Homo sapien
ctgagtcaggatggtgttttatgga

SEQ ID NO: 1536626 - DNA, 25 bp, Homo sapien
gagctgagtcaggatggtgttttat

SEQ ID NO: 1536627 - DNA, 25 bp, Homo sapien
cagagctgagtcaggatggtgtttt

SEQ ID NO: 1536628 - DNA, 25 bp, Homo sapien
gtcaggatggtgttttatggacact

SEQ ID NO: 1536629 - DNA, 25 bp, Homo sapien
cctcttgcactttctcgatcagagt

SEQ ID NO: 1536630 - DNA, 25 bp, Homo sapien
gcactttctcgatcagagttctcca

SEQ ID NO: 1536631 - DNA, 25 bp, Homo sapien
agagatgtctgagtcgggcatgccc

SEQ ID NO: 1536632 - DNA, 25 bp, Homo sapien
tctgagtcgggcatgccctcgggcc

SEQ ID NO: 1536633 - DNA, 25 bp, Homo sapien
gatgacagcatcatggtggatgccc

SEQ ID NO: 1536634 - DNA, 25 bp, Homo sapien
acttatagtgctggcaacgctgggc

SEQ ID NO: 1536635 - DNA, 25 bp, Homo sapien
tctccctgctggtggtaacggaact

SEQ ID NO: 1536636 - DNA, 25 bp, Homo sapien
cggagatagacctctgcccgagcag

SEQ ID NO: 1536637 - DNA, 25 bp, Homo sapien
ccaggaagttgaacatgtcaaaggt

SEQ ID NO: 1536638 - DNA, 25 bp, Homo sapien
gttgaacatgtcaaaggtgcacttc

SEQ ID NO: 1536639 - DNA, 25 bp, Homo sapien
tcatcacaggtggccccctcaggga

SEQ ID NO: 1536640 - DNA, 25 bp, Homo sapien
cctcagggagcacccggtgctggga

SEQ ID NO: 1536641 - DNA, 25 bp, Homo sapien
catgggcagctccaggctggtggca

SEQ ID NO: 1536642 - DNA, 25 bp, Homo sapien
ccatgggcagctccaggctggtggc

SEQ ID NO: 1536643 - DNA, 25 bp, Homo sapien
tgggcagctccaggctggtggcacg

SEQ ID NO: 1536644 - DNA, 25 bp, Homo sapien
ggccatgggcagctccaggctggtg

SEQ ID NO: 1536645 - DNA, 25 bp, Homo sapien
tttggacgtcttcttaaggtgacga

SEQ ID NO: 1536646 - DNA, 25 bp, Homo sapien
tcgtagaacttctcccgcttgtcag

SEQ ID NO: 1536647 - DNA, 25 bp, Homo sapien
tgttgcgcttacagaacaggcctcg

SEQ ID NO: 1536648 - DNA, 25 bp, Homo sapien
gatgacaatgccagagtactcgatg

SEQ ID NO: 1536649 - DNA, 25 bp, Homo sapien
gcttgtcagtcaacaccgagcggat

SEQ ID NO: 1536650 - DNA, 25 bp, Homo sapien
tggggagatcaggtgctctgtcccc

SEQ ID NO: 1536651 - DNA, 25 bp, Homo sapien
atgaggtggggagatcaggtgctct

SEQ ID NO: 1536652 - DNA, 25 bp, Homo sapien
ggtggggagatcaggtgctctgtcc

SEQ ID NO: 1536653 - DNA, 25 bp, Homo sapien
ctgcagggatgaggtggggagatca

SEQ ID NO: 1536654 - DNA, 25 bp, Homo sapien
tcagttaaggaaccgacggcagcgc

SEQ ID NO: 1536655 - DNA, 25 bp, Homo sapien
cgtggcgtccactacatcaaagtca

SEQ ID NO: 1536656 - DNA, 25 bp, Homo sapien
tgcggaacatatagcacccgatgcc

SEQ ID NO: 1536657 - DNA, 25 bp, Homo sapien
cccgagagaagcagttgggctcaca

SEQ ID NO: 1536658 - DNA, 25 bp, Homo sapien
tagaaacctttgtacaatatctaca

SEQ ID NO: 1536659 - DNA, 25 bp, Homo sapien
agggcccttgtcacctgcatgccca

SEQ ID NO: 1536660 - DNA, 25 bp, Homo sapien
gtgggggtgagatgctctgggaggg

SEQ ID NO: 1536661 - DNA, 25 bp, Homo sapien
aaagggggcgattgctggatgggct

SEQ ID NO: 1536662 - DNA, 25 bp, Homo sapien
ttggcggtgatagcgatcctcctgt

SEQ ID NO: 1536663 - DNA, 25 bp, Homo sapien
ctgctggcccaaggagaaagccgac

SEQ ID NO: 1536664 - DNA, 25 bp, Homo sapien
cttccgctcgtggtgctggtcctgc

SEQ ID NO: 1536665 - DNA, 25 bp, Homo sapien
gcaggcctggccgaatttccttccg

SEQ ID NO: 1536666 - DNA, 25 bp, Homo sapien
gaaaactgcggactcaatgaccacg

SEQ ID NO: 1536667 - DNA, 25 bp, Homo sapien
gctagactatgagttccgggaaaac

SEQ ID NO: 1536668 - DNA, 25 bp, Homo sapien
aatgaccacggcgatttcgtaacgc

SEQ ID NO: 1536669 - DNA, 25 bp, Homo sapien
acggcgcggagctatgtagcccctg

SEQ ID NO: 1536670 - DNA, 25 bp, Homo sapien
cctgtgcagatagtgcgggctaccg

SEQ ID NO: 1536671 - DNA, 25 bp, Homo sapien
taagcggtgggccttatgcagatca

SEQ ID NO: 1536672 - DNA, 25 bp, Homo sapien
accgagccttgcttgggcggagctt

SEQ ID NO: 1536673 - DNA, 25 bp, Homo sapien
gggtgagaatccgagaccgagcctt

SEQ ID NO: 1536674 - DNA, 25 bp, Homo sapien
ttgcaatctagatccgcagccctgt

SEQ ID NO: 1536675 - DNA, 25 bp, Homo sapien
tagattcccggcttccgaagaggcg

SEQ ID NO: 1536676 - DNA, 25 bp, Homo sapien
cagaggcgctgtgtttggaagtccc

SEQ ID NO: 1536677 - DNA, 25 bp, Homo sapien
tgttagtcccctagtggccttgtgg

SEQ ID NO: 1536678 - DNA, 25 bp, Homo sapien
ccttagctactttcagttatggacg

SEQ ID NO: 1536679 - DNA, 25 bp, Homo sapien
tccctggagattgtagtcttctttg

SEQ ID NO: 1536680 - DNA, 25 bp, Homo sapien
ttatggacgtttgcgcgagacgccc

SEQ ID NO: 1536681 - DNA, 25 bp, Homo sapien
gagacgccccaggtttccctggaga

SEQ ID NO: 1536682 - DNA, 25 bp, Homo sapien
gtaacagatgcaaggatcacgaaca

SEQ ID NO: 1536683 - DNA, 25 bp, Homo sapien
atgcaaggatcacgaacaaccacgc

SEQ ID NO: 1536684 - DNA, 25 bp, Homo sapien
taacagatgcaaggatcacgaacaa

SEQ ID NO: 1536685 - DNA, 25 bp, Homo sapien
cagatgcaaggatcacgaacaacca

SEQ ID NO: 1536686 - DNA, 25 bp, Homo sapien
gtctgcggggcaagacccaagcctt

SEQ ID NO: 1536687 - DNA, 25 bp, Homo sapien
gtcgtcccaagggtctgcggggcaa

SEQ ID NO: 1536688 - DNA, 25 bp, Homo sapien
ggtctgcggggcaagacccaagcct

SEQ ID NO: 1536689 - DNA, 25 bp, Homo sapien
tcccaagggtctgcggggcaagacc

SEQ ID NO: 1536690 - DNA, 25 bp, Homo sapien
cctcattggacactcgctccaggtt

SEQ ID NO: 1536691 - DNA, 25 bp, Homo sapien
ctcctcattggacactcgctccagg

SEQ ID NO: 1536692 - DNA, 25 bp, Homo sapien
tcattggacactcgctccaggttca

SEQ ID NO: 1536693 - DNA, 25 bp, Homo sapien
cttccggcacaggttcaatttctcc

SEQ ID NO: 1536694 - DNA, 25 bp, Homo sapien
gatgttgaccaaccagagaaaaggc

SEQ ID NO: 1536695 - DNA, 25 bp, Homo sapien
agaaccagaagatgttgaccaacca

SEQ ID NO: 1536696 - DNA, 25 bp, Homo sapien
ggcctctcggaagaaccagaagatg

SEQ ID NO: 1536697 - DNA, 25 bp, Homo sapien
gggacaaggaaggcctctcggaaga

SEQ ID NO: 1536698 - DNA, 25 bp, Homo sapien
agctggaagggttggcctccggctg

SEQ ID NO: 1536699 - DNA, 25 bp, Homo sapien
gagccccaacattttggatcctcca

SEQ ID NO: 1536700 - DNA, 25 bp, Homo sapien
aagggttggcctccggctgctctcc

SEQ ID NO: 1536701 - DNA, 25 bp, Homo sapien
ggaagggttggcctccggctgctct

SEQ ID NO: 1536702 - DNA, 25 bp, Homo sapien
tgatccaggaggtgagcactatcac

SEQ ID NO: 1536703 - DNA, 25 bp, Homo sapien
tagatctggaagatggtgatccagg

SEQ ID NO: 1536704 - DNA, 25 bp, Homo sapien
aggaggtgagcactatcacccagaa

SEQ ID NO: 1536705 - DNA, 25 bp, Homo sapien
ccggtagatctggaagatggtgatc

SEQ ID NO: 1536706 - DNA, 25 bp, Homo sapien
gggtatggtgaaggagaggtagtcc

SEQ ID NO: 1536707 - DNA, 25 bp, Homo sapien
atggtgaaggagaggtagtccccaa

SEQ ID NO: 1536708 - DNA, 25 bp, Homo sapien
ccaggggtatggtgaaggagaggta

SEQ ID NO: 1536709 - DNA, 25 bp, Homo sapien
gtatggtgaaggagaggtagtcccc

SEQ ID NO: 1536710 - DNA, 25 bp, Homo sapien
gggagaataagcagggccccagtat

SEQ ID NO: 1536711 - DNA, 25 bp, Homo sapien
tgggacatgaaaacaagtcttagga

SEQ ID NO: 1536712 - DNA, 25 bp, Homo sapien
agcctgtcctgggagaataagcagg

SEQ ID NO: 1536713 - DNA, 25 bp, Homo sapien
cagggccccagtatgtgcagaagtt

SEQ ID NO: 1536714 - DNA, 25 bp, Homo sapien
gggtcctttattgggggatgtcagc

SEQ ID NO: 1536715 - DNA, 25 bp, Homo sapien
ggtcctttattgggggatgtcagca

SEQ ID NO: 1536716 - DNA, 25 bp, Homo sapien
tagggtcctttattgggggatgtca

SEQ ID NO: 1536717 - DNA, 25 bp, Homo sapien
agggtcctttattgggggatgtcag

SEQ ID NO: 1536718 - DNA, 25 bp, Homo sapien
taataatcatttatgcctcaacctc

SEQ ID NO: 1536719 - DNA, 25 bp, Homo sapien
tcagaagattatgagtagtatgcac

SEQ ID NO: 1536720 - DNA, 25 bp, Homo sapien
tcatctaatagtttcctgagcagga

SEQ ID NO: 1536721 - DNA, 25 bp, Homo sapien
tcgtacaaagctctcaacagatgtt

SEQ ID NO: 1536722 - DNA, 25 bp, Homo sapien
catttgtcacacgtcttggtccaga

SEQ ID NO: 1536723 - DNA, 25 bp, Homo sapien
tgaattcacgactaccagtacagga

SEQ ID NO: 1536724 - DNA, 25 bp, Homo sapien
tgagaatactgcagcccacagtagg

SEQ ID NO: 1536725 - DNA, 25 bp, Homo sapien
gaaatggaagcactaggccgatcct

SEQ ID NO: 1536726 - DNA, 25 bp, Homo sapien
aatcccagctattcgagagtttgag

SEQ ID NO: 1536727 - DNA, 25 bp, Homo sapien
ccagctattcgagagtttgaggcag

SEQ ID NO: 1536728 - DNA, 25 bp, Homo sapien
agctattcgagagtttgaggcagga

SEQ ID NO: 1536729 - DNA, 25 bp, Homo sapien
tcccagctattcgagagtttgaggc

SEQ ID NO: 1536730 - DNA, 25 bp, Homo sapien
tcaaagatgagcttcgtgggccacg

SEQ ID NO: 1536731 - DNA, 25 bp, Homo sapien
cctagggtcacaagtcaaggcggga

SEQ ID NO: 1536732 - DNA, 25 bp, Homo sapien
ggtcctccgcctttggttgtgtcca

SEQ ID NO: 1536733 - DNA, 25 bp, Homo sapien
tccgggatctggctagctgggtcag

SEQ ID NO: 1536734 - DNA, 25 bp, Homo sapien
ctgatttctccactttcaccttcac

SEQ ID NO: 1536735 - DNA, 25 bp, Homo sapien
tttctccactttcaccttcacaggg

SEQ ID NO: 1536736 - DNA, 25 bp, Homo sapien
ccactttcaccttcacagggaacat

SEQ ID NO: 1536737 - DNA, 25 bp, Homo sapien
tccactttcaccttcacagggaaca

SEQ ID NO: 1536738 - DNA, 25 bp, Homo sapien
cagggaaaagtcgtgcagtcccctt

SEQ ID NO: 1536739 - DNA, 25 bp, Homo sapien
aaggtggcaggcaacgctcgctgcc

SEQ ID NO: 1536740 - DNA, 25 bp, Homo sapien
tgatacagcgattgtcaggtgggct

SEQ ID NO: 1536741 - DNA, 25 bp, Homo sapien
tcaaagcgacttcaagcgcacaccg

SEQ ID NO: 1536742 - DNA, 25 bp, Homo sapien
tccagggacttcctgagaagcccag

SEQ ID NO: 1536743 - DNA, 25 bp, Homo sapien
gaagtgatgatgttacgctgtcctc

SEQ ID NO: 1536744 - DNA, 25 bp, Homo sapien
cctcgggaaatgagatctaggccca

SEQ ID NO: 1536745 - DNA, 25 bp, Homo sapien
ctttctgactggtgggagctctggc

SEQ ID NO: 1536746 - DNA, 25 bp, Homo sapien
gaggctcaacctgagtgcagaatct

SEQ ID NO: 1536747 - DNA, 25 bp, Homo sapien
tcacgatgttgtccggttttgaact

SEQ ID NO: 1536748 - DNA, 25 bp, Homo sapien
gatatcacgatgttgtccggttttg

SEQ ID NO: 1536749 - DNA, 25 bp, Homo sapien
tccaaagctgaagttatgagacaga

SEQ ID NO: 1536750 - DNA, 25 bp, Homo sapien
catccagttggttccgggctttgac

SEQ ID NO: 1536751 - DNA, 25 bp, Homo sapien
ccagttggttccgggctttgaccat

SEQ ID NO: 1536752 - DNA, 25 bp, Homo sapien
cagcagacactgcaagacagcatcc

SEQ ID NO: 1536753 - DNA, 25 bp, Homo sapien
cagcatccagttggttccgggcttt

SEQ ID NO: 1536754 - DNA, 25 bp, Homo sapien
ttattgtgggtgtctgagggtgttt

SEQ ID NO: 1536755 - DNA, 25 bp, Homo sapien
tctgagggtgttttcccagcttcct

SEQ ID NO: 1536756 - DNA, 25 bp, Homo sapien
tgtctgagggtgttttcccagcttc

SEQ ID NO: 1536757 - DNA, 25 bp, Homo sapien
gggtgtctgagggtgttttcccagc

SEQ ID NO: 1536758 - DNA, 25 bp, Homo sapien
tccaaatccaatcagaaaaactcac

SEQ ID NO: 1536759 - DNA, 25 bp, Homo sapien
gaagttaccaaccacgaactctcaa

SEQ ID NO: 1536760 - DNA, 25 bp, Homo sapien
agcggtcagggcttggataaggaaa

SEQ ID NO: 1536761 - DNA, 25 bp, Homo sapien
ctgggctgagcggtcagggcttgga

SEQ ID NO: 1536762 - DNA, 25 bp, Homo sapien
acagttgaccctcagacaaacgcct

SEQ ID NO: 1536763 - DNA, 25 bp, Homo sapien
agacagttgaccctcagacaaacgc

SEQ ID NO: 1536764 - DNA, 25 bp, Homo sapien
gttgaccctcagacaaacgcctgtg

SEQ ID NO: 1536765 - DNA, 25 bp, Homo sapien
gaaagacagttgaccctcagacaaa

SEQ ID NO: 1536766 - DNA, 25 bp, Homo sapien
ttgccagtggctgcgatggagcagt

SEQ ID NO: 1536767 - DNA, 25 bp, Homo sapien
gccagtggctgcgatggagcagtcc

SEQ ID NO: 1536768 - DNA, 25 bp, Homo sapien
ttttgccagtggctgcgatggagca

SEQ ID NO: 1536769 - DNA, 25 bp, Homo sapien
cttttgccagtggctgcgatggagc

SEQ ID NO: 1536770 - DNA, 25 bp, Homo sapien
cgcgtagggagagggagtgtcagga

SEQ ID NO: 1536771 - DNA, 25 bp, Homo sapien
ccgcgtagggagagggagtgtcagg

SEQ ID NO: 1536772 - DNA, 25 bp, Homo sapien
cgtagggagagggagtgtcaggact

SEQ ID NO: 1536773 - DNA, 25 bp, Homo sapien
gcgtagggagagggagtgtcaggac

SEQ ID NO: 1536774 - DNA, 25 bp, Homo sapien
ctggtgggggaagcgggcagatggc

SEQ ID NO: 1536775 - DNA, 25 bp, Homo sapien
tccctcagccagcccatcatccatc

SEQ ID NO: 1536776 - DNA, 25 bp, Homo sapien
tggatcgctgcggccctccctcagc

SEQ ID NO: 1536777 - DNA, 25 bp, Homo sapien
ctcagccagcccatcatccatctcc

SEQ ID NO: 1536778 - DNA, 25 bp, Homo sapien
cctccctcagccagcccatcatcca

SEQ ID NO: 1536779 - DNA, 25 bp, Homo sapien
gctccttaccgaccctctagggcca

SEQ ID NO: 1536780 - DNA, 25 bp, Homo sapien
gcataggcccttggctccttaccga

SEQ ID NO: 1536781 - DNA, 25 bp, Homo sapien
aggtgtgtgagcatccttgcatagg

SEQ ID NO: 1536782 - DNA, 25 bp, Homo sapien
gtgagcatccttgcataggcccttg

SEQ ID NO: 1536783 - DNA, 25 bp, Homo sapien
agagcattcacgctcgcgcacagag

SEQ ID NO: 1536784 - DNA, 25 bp, Homo sapien
ccacgctccggtcgaacagcttgat

SEQ ID NO: 1536785 - DNA, 25 bp, Homo sapien
atccaggcgcggcagattgggtaca

SEQ ID NO: 1536786 - DNA, 25 bp, Homo sapien
gcgtgttctcgctgaactgggccaa

SEQ ID NO: 1536787 - DNA, 25 bp, Homo sapien
ggcatgtatgaagggcagacacctc

SEQ ID NO: 1536788 - DNA, 25 bp, Homo sapien
tctgtgccacctaggaagctctgtc

SEQ ID NO: 1536789 - DNA, 25 bp, Homo sapien
tgatccaggattcacgtgagggacc

SEQ ID NO: 1536790 - DNA, 25 bp, Homo sapien
gaacccctgatcttggaggtccaca

SEQ ID NO: 1536791 - DNA, 25 bp, Homo sapien
tgggtggcggcagcttgtacacatc

SEQ ID NO: 1536792 - DNA, 25 bp, Homo sapien
gcttgtacacatcacgactcttgct

SEQ ID NO: 1536793 - DNA, 25 bp, Homo sapien
tggcggcagcttgtacacatcacga

SEQ ID NO: 1536794 - DNA, 25 bp, Homo sapien
catcacgactcttgctgttggttac

SEQ ID NO: 1536795 - DNA, 25 bp, Homo sapien
ggagatgggatgcgggatctgcagg

SEQ ID NO: 1536796 - DNA, 25 bp, Homo sapien
tggagatgggatgcgggatctgcag

SEQ ID NO: 1536797 - DNA, 25 bp, Homo sapien
agtggagatgggatgcgggatctgc

SEQ ID NO: 1536798 - DNA, 25 bp, Homo sapien
cagtggagatgggatgcgggatctg

SEQ ID NO: 1536799 - DNA, 25 bp, Homo sapien
tctggcggatgcgtttccagcgctg

SEQ ID NO: 1536800 - DNA, 25 bp, Homo sapien
tgtggagggtgagggctcgggctca

SEQ ID NO: 1536801 - DNA, 25 bp, Homo sapien
gcgtttccagcgctgcatgttgcga

SEQ ID NO: 1536802 - DNA, 25 bp, Homo sapien
ctgcatgttgcgatagatgagtgtg

SEQ ID NO: 1536803 - DNA, 25 bp, Homo sapien
ttgcaaagggccctacgaggggcaa

SEQ ID NO: 1536804 - DNA, 25 bp, Homo sapien
caaagggccctacgaggggcaagca

SEQ ID NO: 1536805 - DNA, 25 bp, Homo sapien
ggggagactcagcagttgcaaaggg

SEQ ID NO: 1536806 - DNA, 25 bp, Homo sapien
gggagactcagcagttgcaaagggc

SEQ ID NO: 1536807 - DNA, 25 bp, Homo sapien
tgagtaacgaagctggttccgatga

SEQ ID NO: 1536808 - DNA, 25 bp, Homo sapien
gaagctggttccgatgagaggcctc

SEQ ID NO: 1536809 - DNA, 25 bp, Homo sapien
cgttcgtacatctctcgtaggatct

SEQ ID NO: 1536810 - DNA, 25 bp, Homo sapien
ggatcttcatgctttctgagtaacg

SEQ ID NO: 1536811 - DNA, 25 bp, Homo sapien
gccaggaaggagggaccggagcaga

SEQ ID NO: 1536812 - DNA, 25 bp, Homo sapien
atgtttactggtgtggggggacctg

SEQ ID NO: 1536813 - DNA, 25 bp, Homo sapien
aggaaggagggaccggagcagacac

SEQ ID NO: 1536814 - DNA, 25 bp, Homo sapien
tgtggagctgggggatgtttactgg

SEQ ID NO: 1536815 - DNA, 25 bp, Homo sapien
cccgcggctccctccgcgcttccgg

SEQ ID NO: 1536816 - DNA, 25 bp, Homo sapien
tccgcgcttccggccgctctgctcc

SEQ ID NO: 1536817 - DNA, 25 bp, Homo sapien
ccctccgcgcttccggccgctctgc

SEQ ID NO: 1536818 - DNA, 25 bp, Homo sapien
ccgcggctccctccgcgcttccggc

SEQ ID NO: 1536819 - DNA, 25 bp, Homo sapien
ttcaggttaagaatcgcggctcgcc

SEQ ID NO: 1536820 - DNA, 25 bp, Homo sapien
cttttcaacgttacaggcgcgcggt

SEQ ID NO: 1536821 - DNA, 25 bp, Homo sapien
tgtagtccctggaagagcgatcggc

SEQ ID NO: 1536822 - DNA, 25 bp, Homo sapien
tcttaacagggagcaactcaggaac

SEQ ID NO: 1536823 - DNA, 25 bp, Homo sapien
tggcttcgacccaggggcgcatctc

SEQ ID NO: 1536824 - DNA, 25 bp, Homo sapien
gatggccagtagtggcttcgaccca

SEQ ID NO: 1536825 - DNA, 25 bp, Homo sapien
aagggactatcttgaatggagaaaa

SEQ ID NO: 1536826 - DNA, 25 bp, Homo sapien
caggggcgcatctccaaagggacta

SEQ ID NO: 1536827 - DNA, 25 bp, Homo sapien
cattctcttgctactgggctggcac

SEQ ID NO: 1536828 - DNA, 25 bp, Homo sapien
tatctctcatcacatgtcttcctac

SEQ ID NO: 1536829 - DNA, 25 bp, Homo sapien
taccctctaaaggtcattctcttgc

SEQ ID NO: 1536830 - DNA, 25 bp, Homo sapien
taatgataacaacctagtgtgatgg

SEQ ID NO: 1536831 - DNA, 25 bp, Homo sapien
ggagtccccgctgtcaatcagggtg

SEQ ID NO: 1536832 - DNA, 25 bp, Homo sapien
ttggccaccacggagtccccgctgt

SEQ ID NO: 1536833 - DNA, 25 bp, Homo sapien
tgggagcctggatctctgagacctg

SEQ ID NO: 1536834 - DNA, 25 bp, Homo sapien
agttgggacctgtggctagagcctt

SEQ ID NO: 1536835 - DNA, 25 bp, Homo sapien
cctctcgactggtgggctgagcctg

SEQ ID NO: 1536836 - DNA, 25 bp, Homo sapien
ctgagcctggcggaacctgtttata

SEQ ID NO: 1536837 - DNA, 25 bp, Homo sapien
aggctggcgctcctctcgactggtg

SEQ ID NO: 1536838 - DNA, 25 bp, Homo sapien
gagtcagactgcagccaccaaaagt

SEQ ID NO: 1536839 - DNA, 25 bp, Homo sapien
ctgctgggggcattgatcagcaaag

SEQ ID NO: 1536840 - DNA, 25 bp, Homo sapien
ctgagaagccccagttgaggtatga

SEQ ID NO: 1536841 - DNA, 25 bp, Homo sapien
agccccagttgaggtatgagggcca

SEQ ID NO: 1536842 - DNA, 25 bp, Homo sapien
attgatcagcaaaggtttaggggtg

SEQ ID NO: 1536843 - DNA, 25 bp, Homo sapien
gatgcactggtcacgttgaccgcag

SEQ ID NO: 1536844 - DNA, 25 bp, Homo sapien
gaccgcagtagggacagctgtatgg

SEQ ID NO: 1536845 - DNA, 25 bp, Homo sapien
ggatgcactggtcacgttgaccgca

SEQ ID NO: 1536846 - DNA, 25 bp, Homo sapien
gctggtgttgtcagttcaggcaccc

SEQ ID NO: 1536847 - DNA, 25 bp, Homo sapien
tcctagggctggtgttgtcagttca

SEQ ID NO: 1536848 - DNA, 25 bp, Homo sapien
tgtcctagggctggtgttgtcagtt

SEQ ID NO: 1536849 - DNA, 25 bp, Homo sapien
tgttgtcagttcaggcacccaaggg

SEQ ID NO: 1536850 - DNA, 25 bp, Homo sapien
ccatcctccagcctcaggctctcaa

SEQ ID NO: 1536851 - DNA, 25 bp, Homo sapien
ccaccacacctggttctctctctct

SEQ ID NO: 1536852 - DNA, 25 bp, Homo sapien
gccatcctccagcctcaggctctca

SEQ ID NO: 1536853 - DNA, 25 bp, Homo sapien
ataccaccacacctggttctctctc

SEQ ID NO: 1536854 - DNA, 25 bp, Homo sapien
ggctggagtgcgctggcgctatctt

SEQ ID NO: 1536855 - DNA, 25 bp, Homo sapien
ctggagtgcgctggcgctatcttgg

SEQ ID NO: 1536856 - DNA, 25 bp, Homo sapien
tgagccacggtgcccaggctttttt

SEQ ID NO: 1536857 - DNA, 25 bp, Homo sapien
gcatgagccacggtgcccaggcttt

SEQ ID NO: 1536858 - DNA, 25 bp, Homo sapien
agacgccagccccaacccaaaggct

SEQ ID NO: 1536859 - DNA, 25 bp, Homo sapien
tgcagggtgacagggtcagacgcca

SEQ ID NO: 1536860 - DNA, 25 bp, Homo sapien
tgacagggtcagacgccagccccaa

SEQ ID NO: 1536861 - DNA, 25 bp, Homo sapien
gacgccagccccaacccaaaggctg

SEQ ID NO: 1536862 - DNA, 25 bp, Homo sapien
tccagcagggatgagttccatgtgt

SEQ ID NO: 1536863 - DNA, 25 bp, Homo sapien
ggtccagcagggatgagttccatgt

SEQ ID NO: 1536864 - DNA, 25 bp, Homo sapien
caggtccagcagggatgagttccat

SEQ ID NO: 1536865 - DNA, 25 bp, Homo sapien
cagggatgagttccatgtgtggagg

SEQ ID NO: 1536866 - DNA, 25 bp, Homo sapien
cacgtggagccgcagtaggaagggt

SEQ ID NO: 1536867 - DNA, 25 bp, Homo sapien
cgtggagccgcagtaggaagggtga

SEQ ID NO: 1536868 - DNA, 25 bp, Homo sapien
gggccacgtggagccgcagtaggaa

SEQ ID NO: 1536869 - DNA, 25 bp, Homo sapien
gagccgcagtaggaagggtgatggg

SEQ ID NO: 1536870 - DNA, 25 bp, Homo sapien
ggaggaggaggagatggaggctttg

SEQ ID NO: 1536871 - DNA, 25 bp, Homo sapien
aggaggaggaggagatggaggcttt

SEQ ID NO: 1536872 - DNA, 25 bp, Homo sapien
ccaaggcccttgctggagtcaggga

SEQ ID NO: 1536873 - DNA, 25 bp, Homo sapien
caaggcccttgctggagtcagggat

SEQ ID NO: 1536874 - DNA, 25 bp, Homo sapien
aggccatcagagctggtggggaatg

SEQ ID NO: 1536875 - DNA, 25 bp, Homo sapien
tgaaggtctccgagaagggagagag

SEQ ID NO: 1536876 - DNA, 25 bp, Homo sapien
gggtctgggcctgggctggtgccgg

SEQ ID NO: 1536877 - DNA, 25 bp, Homo sapien
tctgggcctgggctggtgccgggga

SEQ ID NO: 1536878 - DNA, 25 bp, Homo sapien
tgggcctgggctggtgccggggatg

SEQ ID NO: 1536879 - DNA, 25 bp, Homo sapien
gtgggggtctgggcctgggctggtg

SEQ ID NO: 1536880 - DNA, 25 bp, Homo sapien
ctggccgaaggggtgcttgggagga

SEQ ID NO: 1536881 - DNA, 25 bp, Homo sapien
cgccactggtacagaatgtcatcct

SEQ ID NO: 1536882 - DNA, 25 bp, Homo sapien
tgagcctgttcaagcttccgccgct

SEQ ID NO: 1536883 - DNA, 25 bp, Homo sapien
gctctgtcacccttgcttccctgag

SEQ ID NO: 1536884 - DNA, 25 bp, Homo sapien
tgccgccactggtacagaatgtcat

SEQ ID NO: 1536885 - DNA, 25 bp, Homo sapien
ctcctccagctccccccaggctcct

SEQ ID NO: 1536886 - DNA, 25 bp, Homo sapien
tcctccagctccccccaggctcctc

SEQ ID NO: 1536887 - DNA, 25 bp, Homo sapien
caggctcctccctccctcggctcac

SEQ ID NO: 1536888 - DNA, 25 bp, Homo sapien
ccccaggctcctccctccctcggct

SEQ ID NO: 1536889 - DNA, 25 bp, Homo sapien
tgcagggacttgctcggcagcctct

SEQ ID NO: 1536890 - DNA, 25 bp, Homo sapien
tagacagataagagagatctgagac

SEQ ID NO: 1536891 - DNA, 25 bp, Homo sapien
tgtgctagggtggaggcctgctgcg

SEQ ID NO: 1536892 - DNA, 25 bp, Homo sapien
cgcgagggtagagcccagatgtgct

SEQ ID NO: 1536893 - DNA, 25 bp, Homo sapien
gaaggagtggcttcgctcttccgta

SEQ ID NO: 1536894 - DNA, 25 bp, Homo sapien
ccctcgaagtgaggaggcgtgtcct

SEQ ID NO: 1536895 - DNA, 25 bp, Homo sapien
ctttcagagactcggccttggcccg

SEQ ID NO: 1536896 - DNA, 25 bp, Homo sapien
gactttcggagatccagccttgggt

SEQ ID NO: 1536897 - DNA, 25 bp, Homo sapien
agggggcgtggtcagcagcgggcgg

SEQ ID NO: 1536898 - DNA, 25 bp, Homo sapien
gggggcgtggtcagcagcgggcggg

SEQ ID NO: 1536899 - DNA, 25 bp, Homo sapien
ggggcgtggtcagcagcgggcgggg

SEQ ID NO: 1536900 - DNA, 25 bp, Homo sapien
acgggatcgtcctggaactcgctgc

SEQ ID NO: 1536901 - DNA, 25 bp, Homo sapien
gcacgggatcgtcctggaactcgct

SEQ ID NO: 1536902 - DNA, 25 bp, Homo sapien
gcagcacgggatcgtcctggaactc

SEQ ID NO: 1536903 - DNA, 25 bp, Homo sapien
ctgcagcacgggatcgtcctggaac

SEQ ID NO: 1536904 - DNA, 25 bp, Homo sapien
tatgtgctcaggcttagaatctggg

SEQ ID NO: 1536905 - DNA, 25 bp, Homo sapien
ctggatgcctaaccgggtctcagag

SEQ ID NO: 1536906 - DNA, 25 bp, Homo sapien
agggctggatgcctaaccgggtctc

SEQ ID NO: 1536907 - DNA, 25 bp, Homo sapien
cagtgtcatagactctggggatgga

SEQ ID NO: 1536908 - DNA, 25 bp, Homo sapien
caggaacgataatcgggcatccgct

SEQ ID NO: 1536909 - DNA, 25 bp, Homo sapien
ggtccaacaggaacgataatcgggc

SEQ ID NO: 1536910 - DNA, 25 bp, Homo sapien
tcagcctggtccaacaggaacgata

SEQ ID NO: 1536911 - DNA, 25 bp, Homo sapien
caacaggaacgataatcgggcatcc

SEQ ID NO: 1536912 - DNA, 25 bp, Homo sapien
ttcccttcttagcagcctccttggg

SEQ ID NO: 1536913 - DNA, 25 bp, Homo sapien
ctggaggggaccaagatcccaggtc

SEQ ID NO: 1536914 - DNA, 25 bp, Homo sapien
tgtacaattcaaagtcttctggcct

SEQ ID NO: 1536915 - DNA, 25 bp, Homo sapien
cgacccggctggaggggaccaagat

SEQ ID NO: 1536916 - DNA, 25 bp, Homo sapien
tccaaacaacccctttctcacagat

SEQ ID NO: 1536917 - DNA, 25 bp, Homo sapien
aaggagatcttgtttccgtggtcag

SEQ ID NO: 1536918 - DNA, 25 bp, Homo sapien
agaaaggagatcttgtttccgtggt

SEQ ID NO: 1536919 - DNA, 25 bp, Homo sapien
cacagataaccagtaactgtatgaa

SEQ ID NO: 1536920 - DNA, 25 bp, Homo sapien
tgaccctagtagcttcctccgtgga

SEQ ID NO: 1536921 - DNA, 25 bp, Homo sapien
taagctagacaagagcacctatggg

SEQ ID NO: 1536922 - DNA, 25 bp, Homo sapien
gatagagatgtcaacgccatggccc

SEQ ID NO: 1536923 - DNA, 25 bp, Homo sapien
aaggtgggtcccagtcttgccagaa

SEQ ID NO: 1536924 - DNA, 25 bp, Homo sapien
gaaagattggaaactccatttagga

SEQ ID NO: 1536925 - DNA, 25 bp, Homo sapien
tttttggtctgagcggcaaaggaca

SEQ ID NO: 1536926 - DNA, 25 bp, Homo sapien
aaaataaaggcggagatggcaggat

SEQ ID NO: 1536927 - DNA, 25 bp, Homo sapien
gcaaaggacagagccgaagaaagtt

SEQ ID NO: 1536928 - DNA, 25 bp, Homo sapien
tagcttgaacctgcaaggcagaggt

SEQ ID NO: 1536929 - DNA, 25 bp, Homo sapien
aggaggatcacgaggtcatgagttt

SEQ ID NO: 1536930 - DNA, 25 bp, Homo sapien
gcagaagaatagcttgaacctgcaa

SEQ ID NO: 1536931 - DNA, 25 bp, Homo sapien
aagaatagcttgaacctgcaaggca

SEQ ID NO: 1536932 - DNA, 25 bp, Homo sapien
acccaccaccaatgcctggccaatt

SEQ ID NO: 1536933 - DNA, 25 bp, Homo sapien
gagccaccatgcccagctgagaaat

SEQ ID NO: 1536934 - DNA, 25 bp, Homo sapien
gtgagccaccatgcccagctgagaa

SEQ ID NO: 1536935 - DNA, 25 bp, Homo sapien
gccaccatgcccagctgagaaatca

SEQ ID NO: 1536936 - DNA, 25 bp, Homo sapien
tacaatgaaattcacacacttcact

SEQ ID NO: 1536937 - DNA, 25 bp, Homo sapien
attacaggcgtatctttaactggcg

SEQ ID NO: 1536938 - DNA, 25 bp, Homo sapien
tccccagcatggcaactagtttttt

SEQ ID NO: 1536939 - DNA, 25 bp, Homo sapien
tttaatgtagcctctaaagcaagtg

SEQ ID NO: 1536940 - DNA, 25 bp, Homo sapien
taatgggactgcaaatcgtgtgcca

SEQ ID NO: 1536941 - DNA, 25 bp, Homo sapien
cctagtaatgggactgcaaatcgtg

SEQ ID NO: 1536942 - DNA, 25 bp, Homo sapien
atgggactgcaaatcgtgtgccacc

SEQ ID NO: 1536943 - DNA, 25 bp, Homo sapien
ccgcccctagtaatgggactgcaaa

SEQ ID NO: 1536944 - DNA, 25 bp, Homo sapien
tcgtccactggaatgagctgtagaa

SEQ ID NO: 1536945 - DNA, 25 bp, Homo sapien
cagtcagactgggagaagaccacgg

SEQ ID NO: 1536946 - DNA, 25 bp, Homo sapien
tagaaccatggtgcatcatatgcga

SEQ ID NO: 1536947 - DNA, 25 bp, Homo sapien
gacactcttcttatcaagacgcgga

SEQ ID NO: 1536948 - DNA, 25 bp, Homo sapien
ctcgaagtttgacagcgccacgccc

SEQ ID NO: 1536949 - DNA, 25 bp, Homo sapien
cgcccctcgaagtttgacagcgcca

SEQ ID NO: 1536950 - DNA, 25 bp, Homo sapien
ccctcgaagtttgacagcgccacgc

SEQ ID NO: 1536951 - DNA, 25 bp, Homo sapien
gtcccgcccctcgaagtttgacagc

SEQ ID NO: 1536952 - DNA, 25 bp, Homo sapien
tgcagaccccgcccctaacggctgc

SEQ ID NO: 1536953 - DNA, 25 bp, Homo sapien
gggagggcgcgagccgcgcgcgggc

SEQ ID NO: 1536954 - DNA, 25 bp, Homo sapien
catggcgacacaaaggggagggcgc

SEQ ID NO: 1536955 - DNA, 25 bp, Homo sapien
gccgccgccatggcgacacaaaggg

SEQ ID NO: 1536956 - DNA, 25 bp, Homo sapien
ccctcgctcgccgttctcgtcgccg

SEQ ID NO: 1536957 - DNA, 25 bp, Homo sapien
ggtcgcgtagcctcctcaggccccg

SEQ ID NO: 1536958 - DNA, 25 bp, Homo sapien
ccggccgcgctcgacccctcgctcg

SEQ ID NO: 1536959 - DNA, 25 bp, Homo sapien
gtcgcgtagcctcctcaggccccgg

SEQ ID NO: 1536960 - DNA, 25 bp, Homo sapien
gcacagaggcggtctcagtgaatgt

SEQ ID NO: 1536961 - DNA, 25 bp, Homo sapien
agcatgaagcaggatggcaggtcgg

SEQ ID NO: 1536962 - DNA, 25 bp, Homo sapien
gaggacaggactgcttcttcgtgtg

SEQ ID NO: 1536963 - DNA, 25 bp, Homo sapien
gcatgaagcaggatggcaggtcggg

SEQ ID NO: 1536964 - DNA, 25 bp, Homo sapien
gacaggactgcttcttcgtgtgtgg

SEQ ID NO: 1536965 - DNA, 25 bp, Homo sapien
agagcagaaagaatcagaggccccc

SEQ ID NO: 1536966 - DNA, 25 bp, Homo sapien
gtagagcagaaagaatcagaggccc

SEQ ID NO: 1536967 - DNA, 25 bp, Homo sapien
tagagcagaaagaatcagaggcccc

SEQ ID NO: 1536968 - DNA, 25 bp, Homo sapien
catccaggctgtcagtgctgcgtgc

SEQ ID NO: 1536969 - DNA, 25 bp, Homo sapien
tgggtagaggctgcaccgagccctc

SEQ ID NO: 1536970 - DNA, 25 bp, Homo sapien
actgggccccccagcagtgggtaga

SEQ ID NO: 1536971 - DNA, 25 bp, Homo sapien
ccaggcttccccttcacactgggcc

SEQ ID NO: 1536972 - DNA, 25 bp, Homo sapien
gtggccaaagtcaacgttctcgtag

SEQ ID NO: 1536973 - DNA, 25 bp, Homo sapien
caaagtcaacgttctcgtagtggaa

SEQ ID NO: 1536974 - DNA, 25 bp, Homo sapien
tctcgtagtggaaatgggcgcagtc

SEQ ID NO: 1536975 - DNA, 25 bp, Homo sapien
caacgttctcgtagtggaaatgggc

SEQ ID NO: 1536976 - DNA, 25 bp, Homo sapien
tgacaggtcacctgcaccccgaaca

SEQ ID NO: 1536977 - DNA, 25 bp, Homo sapien
ggcccttcacggtctggagacagca

SEQ ID NO: 1536978 - DNA, 25 bp, Homo sapien
cagctcattctctccagagaggctg

SEQ ID NO: 1536979 - DNA, 25 bp, Homo sapien
agaggctgggcccttcacggtctgg

SEQ ID NO: 1536980 - DNA, 25 bp, Homo sapien
ccagggaacgaaagtcatcgtaact

SEQ ID NO: 1536981 - DNA, 25 bp, Homo sapien
ggcaggagaacctccggtcaaatat

SEQ ID NO: 1536982 - DNA, 25 bp, Homo sapien
aacgaaagtcatcgtaactccggag

SEQ ID NO: 1536983 - DNA, 25 bp, Homo sapien
cggtcaaatatgcaccggtggaggt

SEQ ID NO: 1536984 - DNA, 25 bp, Homo sapien
gggggcaggttgtcagagtgggcct

SEQ ID NO: 1536985 - DNA, 25 bp, Homo sapien
tgggggcaggttgtcagagtgggcc

SEQ ID NO: 1536986 - DNA, 25 bp, Homo sapien
gttgaggttactgtccaccagtcct

SEQ ID NO: 1536987 - DNA, 25 bp, Homo sapien
cacaggcccgcagttgaggttactg

SEQ ID NO: 1536988 - DNA, 25 bp, Homo sapien
agttgaggttactgtccaccagtcc

SEQ ID NO: 1536989 - DNA, 25 bp, Homo sapien
caggtgagcacaggcccgcagttga

SEQ ID NO: 1536990 - DNA, 25 bp, Homo sapien
tcggaatctccaagccccctgccca

SEQ ID NO: 1536991 - DNA, 25 bp, Homo sapien
ccactcggaatctccaagccccctg

SEQ ID NO: 1536992 - DNA, 25 bp, Homo sapien
cactcggaatctccaagccccctgc

SEQ ID NO: 1536993 - DNA, 25 bp, Homo sapien
gaatctccaagccccctgcccaggc

SEQ ID NO: 1536994 - DNA, 25 bp, Homo sapien
ccacacggttgccatctaaaatctc

SEQ ID NO: 1536995 - DNA, 25 bp, Homo sapien
cagcagatgccacacggttgccatc

SEQ ID NO: 1536996 - DNA, 25 bp, Homo sapien
caaaggcttccccacctgaaggctt

SEQ ID NO: 1536997 - DNA, 25 bp, Homo sapien
gatgccacacggttgccatctaaaa

SEQ ID NO: 1536998 - DNA, 25 bp, Homo sapien
cactgcagggatattgagtgacgcc

SEQ ID NO: 1536999 - DNA, 25 bp, Homo sapien
taccgtttgatcacatgggcggccg

SEQ ID NO: 1537000 - DNA, 25 bp, Homo sapien
ggcgcctgggctgtataccgtttga

SEQ ID NO: 1537001 - DNA, 25 bp, Homo sapien
tcactgaggagcagtcgccggccgt

SEQ ID NO: 1537002 - DNA, 25 bp, Homo sapien
ctggaagcctcgcttgccccgccac

SEQ ID NO: 1537003 - DNA, 25 bp, Homo sapien
ctctgtgggtggcatgtcgatcacc

SEQ ID NO: 1537004 - DNA, 25 bp, Homo sapien
tgggtggcatgtcgatcaccgagac

SEQ ID NO: 1537005 - DNA, 25 bp, Homo sapien
tgtcgatcaccgagacaatgtctcc

SEQ ID NO: 1537006 - DNA, 25 bp, Homo sapien
tctgtgaagagttccacacactcac

SEQ ID NO: 1537007 - DNA, 25 bp, Homo sapien
cgctctgtgaagagttccacacact

SEQ ID NO: 1537008 - DNA, 25 bp, Homo sapien
cctggccgctctgtgaagagttcca

SEQ ID NO: 1537009 - DNA, 25 bp, Homo sapien
gccgctctgtgaagagttccacaca

SEQ ID NO: 1537010 - DNA, 25 bp, Homo sapien
ctgaggtcagagacgagataccctg

SEQ ID NO: 1537011 - DNA, 25 bp, Homo sapien
tgaggtcagagacgagataccctgg

SEQ ID NO: 1537012 - DNA, 25 bp, Homo sapien
agccgctgccgagaagggcgggagc

SEQ ID NO: 1537013 - DNA, 25 bp, Homo sapien
tgagttgctgaggtgctcgccaaga

SEQ ID NO: 1537014 - DNA, 25 bp, Homo sapien
caaacaccctctgtcgcaggattcc

SEQ ID NO: 1537015 - DNA, 25 bp, Homo sapien
agcgcatgaaggtgcggagcaggcc

SEQ ID NO: 1537016 - DNA, 25 bp, Homo sapien
accccgtgggcctcaatgaactcgg

SEQ ID NO: 1537017 - DNA, 25 bp, Homo sapien
tcaatgaactcggagcagcagcgca

SEQ ID NO: 1537018 - DNA, 25 bp, Homo sapien
ctggatgttggaagacacgcctgag

SEQ ID NO: 1537019 - DNA, 25 bp, Homo sapien
aagacacgcctgagagccggtagat

SEQ ID NO: 1537020 - DNA, 25 bp, Homo sapien
ctctcggaagtagagcttgcagagg

SEQ ID NO: 1537021 - DNA, 25 bp, Homo sapien
gcagagggttcggaagctctcggaa

SEQ ID NO: 1537022 - DNA, 25 bp, Homo sapien
agggccagacagctccgggatcctc

SEQ ID NO: 1537023 - DNA, 25 bp, Homo sapien
gttcggaagctctcggaagtagagc

SEQ ID NO: 1537024 - DNA, 25 bp, Homo sapien
ctggatgacatcgtgcacccgcacc

SEQ ID NO: 1537025 - DNA, 25 bp, Homo sapien
tgcacccgcaccagacgctcctcct

SEQ ID NO: 1537026 - DNA, 25 bp, Homo sapien
gatgacatcgtgcacccgcaccaga

SEQ ID NO: 1537027 - DNA, 25 bp, Homo sapien
cctccccaggcactgacatggcctc

SEQ ID NO: 1537028 - DNA, 25 bp, Homo sapien
gttggcactgtgtctcgccatgcgg

SEQ ID NO: 1537029 - DNA, 25 bp, Homo sapien
caggttgcgggcatgcatgctggtg

SEQ ID NO: 1537030 - DNA, 25 bp, Homo sapien
ctgtgtctcgccatgcgggccaggt

SEQ ID NO: 1537031 - DNA, 25 bp, Homo sapien
tagcaggttgggtgcccagacaatg

SEQ ID NO: 1537032 - DNA, 25 bp, Homo sapien
cgaggccggcggaggtgaaggtgtc

SEQ ID NO: 1537033 - DNA, 25 bp, Homo sapien
gaacaggacgtccacatgggtgagc

SEQ ID NO: 1537034 - DNA, 25 bp, Homo sapien
gcggaggtgaaggtgtcgctgaaca

SEQ ID NO: 1537035 - DNA, 25 bp, Homo sapien
tgtcgctgaacaggacgtccacatg

SEQ ID NO: 1537036 - DNA, 25 bp, Homo sapien
tgatcgtggtgggcagtagccagga

SEQ ID NO: 1537037 - DNA, 25 bp, Homo sapien
atcgtggtgggcagtagccaggacc

SEQ ID NO: 1537038 - DNA, 25 bp, Homo sapien
gatcgtggtgggcagtagccaggac

SEQ ID NO: 1537039 - DNA, 25 bp, Homo sapien
cctgatcgtggtgggcagtagccag

SEQ ID NO: 1537040 - DNA, 25 bp, Homo sapien
gccagagggccctccgacgtgctga

SEQ ID NO: 1537041 - DNA, 25 bp, Homo sapien
agagggccctccgacgtgctgagtc

SEQ ID NO: 1537042 - DNA, 25 bp, Homo sapien
ggccctccgacgtgctgagtcctga

SEQ ID NO: 1537043 - DNA, 25 bp, Homo sapien
agggccctccgacgtgctgagtcct

SEQ ID NO: 1537044 - DNA, 25 bp, Homo sapien
gggacgagctgatgaggaggcagct

SEQ ID NO: 1537045 - DNA, 25 bp, Homo sapien
ggccggggcggatcaggcgggagca

SEQ ID NO: 1537046 - DNA, 25 bp, Homo sapien
atgcccacccgggctggcaaggcag

SEQ ID NO: 1537047 - DNA, 25 bp, Homo sapien
ggcggggcgggacgagctgatgagg

SEQ ID NO: 1537048 - DNA, 25 bp, Homo sapien
ctggggagtgtggaaagggggcagc

SEQ ID NO: 1537049 - DNA, 25 bp, Homo sapien
ctccagcgtcagcaggcgggtggag

SEQ ID NO: 1537050 - DNA, 25 bp, Homo sapien
gggcagctgcccgcaagggacttgg

SEQ ID NO: 1537051 - DNA, 25 bp, Homo sapien
gctccgtgggcgtccccagccggcc

SEQ ID NO: 1537052 - DNA, 25 bp, Homo sapien
agctgcccgcaagggacttgggcct

SEQ ID NO: 1537053 - DNA, 25 bp, Homo sapien
aacaggaggccgtctgaggaaccag

SEQ ID NO: 1537054 - DNA, 25 bp, Homo sapien
gaggccgtctgaggaaccaggcctc

SEQ ID NO: 1537055 - DNA, 25 bp, Homo sapien
ggagaaacaggaggccgtctgagga

SEQ ID NO: 1537056 - DNA, 25 bp, Homo sapien
ctgcggtttgggggagaaacaggag

SEQ ID NO: 1537057 - DNA, 25 bp, Homo sapien
gcaggggcttctttcgagggacact

SEQ ID NO: 1537058 - DNA, 25 bp, Homo sapien
ggcccagtgcaaagaacgtcttcca

SEQ ID NO: 1537059 - DNA, 25 bp, Homo sapien
cccggcccagtgcaaagaacgtctt

SEQ ID NO: 1537060 - DNA, 25 bp, Homo sapien
tgcaaagaacgtcttccagctgctg

SEQ ID NO: 1537061 - DNA, 25 bp, Homo sapien
ccgctggcctgcgatgacagagact

SEQ ID NO: 1537062 - DNA, 25 bp, Homo sapien
gcagatctcagtgtgacggtgtcgg

SEQ ID NO: 1537063 - DNA, 25 bp, Homo sapien
cagatctcagtgtgacggtgtcggg

SEQ ID NO: 1537064 - DNA, 25 bp, Homo sapien
agccccgctggcctgcgatgacaga

SEQ ID NO: 1537065 - DNA, 25 bp, Homo sapien
ctgaggtacggtgtgagggagaccc

SEQ ID NO: 1537066 - DNA, 25 bp, Homo sapien
cccacagggaaagcgtcgctgctgg

SEQ ID NO: 1537067 - DNA, 25 bp, Homo sapien
ggcccacagggaaagcgtcgctgct

SEQ ID NO: 1537068 - DNA, 25 bp, Homo sapien
ggtcgccgcagcctgtgcagcctct

SEQ ID NO: 1537069 - DNA, 25 bp, Homo sapien
gctgcagcggaaggttaagggatca

SEQ ID NO: 1537070 - DNA, 25 bp, Homo sapien
cagcggaaggttaagggatcaaagt

SEQ ID NO: 1537071 - DNA, 25 bp, Homo sapien
tggcgggaggtgcgggatcccctgg

SEQ ID NO: 1537072 - DNA, 25 bp, Homo sapien
tccagcccccggagtccctccaggc

SEQ ID NO: 1537073 - DNA, 25 bp, Homo sapien
ctggtgggcccccggggcgagatgg

SEQ ID NO: 1537074 - DNA, 25 bp, Homo sapien
tgggcccccggggcgagatggcctg

SEQ ID NO: 1537075 - DNA, 25 bp, Homo sapien
gctggtgggcccccggggcgagatg

SEQ ID NO: 1537076 - DNA, 25 bp, Homo sapien
tggtgggcccccggggcgagatggc

SEQ ID NO: 1537077 - DNA, 25 bp, Homo sapien
gacagcgggtggcactgatacagcc

SEQ ID NO: 1537078 - DNA, 25 bp, Homo sapien
gcactgatacagccaggggctctga

SEQ ID NO: 1537079 - DNA, 25 bp, Homo sapien
cagcgggtggcactgatacagccag

SEQ ID NO: 1537080 - DNA, 25 bp, Homo sapien
gcgggtggcactgatacagccaggg

SEQ ID NO: 1537081 - DNA, 25 bp, Homo sapien
gcaggcgtcagtcagcggggcctcg

SEQ ID NO: 1537082 - DNA, 25 bp, Homo sapien
aggggtatgagatgggggcgcaggc

SEQ ID NO: 1537083 - DNA, 25 bp, Homo sapien
gcagcaggggtatgagatgggggcg

SEQ ID NO: 1537084 - DNA, 25 bp, Homo sapien
tggcaggcgtcagtcagcggggcct

SEQ ID NO: 1537085 - DNA, 25 bp, Homo sapien
tgacagctggcggggacaggggtgg

SEQ ID NO: 1537086 - DNA, 25 bp, Homo sapien
tcagtgacagctggcggggacaggg

SEQ ID NO: 1537087 - DNA, 25 bp, Homo sapien
aggggtggggtaggctgaggactca

SEQ ID NO: 1537088 - DNA, 25 bp, Homo sapien
gacaggggtggggtaggctgaggac

SEQ ID NO: 1537089 - DNA, 25 bp, Homo sapien
ggggtggcagtggtgactccatatc

SEQ ID NO: 1537090 - DNA, 25 bp, Homo sapien
cccccagggcgcaggagagacaggg

SEQ ID NO: 1537091 - DNA, 25 bp, Homo sapien
cacccccagggcgcaggagagacag

SEQ ID NO: 1537092 - DNA, 25 bp, Homo sapien
ggtggcagtggtgactccatatcag

SEQ ID NO: 1537093 - DNA, 25 bp, Homo sapien
ctccagagacagcgagcggtggaag

SEQ ID NO: 1537094 - DNA, 25 bp, Homo sapien
gctggctctgttgctcggccacctg

SEQ ID NO: 1537095 - DNA, 25 bp, Homo sapien
ccagagacagcgagcggtggaaggg

SEQ ID NO: 1537096 - DNA, 25 bp, Homo sapien
ggctctgttgctcggccacctgctg

SEQ ID NO: 1537097 - DNA, 25 bp, Homo sapien
cccgggtgtgctagggagttgggag

SEQ ID NO: 1537098 - DNA, 25 bp, Homo sapien
cctcagcaggctcccatcactttgt

SEQ ID NO: 1537099 - DNA, 25 bp, Homo sapien
gggacccaggcacccgggtgtgcta

SEQ ID NO: 1537100 - DNA, 25 bp, Homo sapien
agcaggctcccatcactttgttgcc

SEQ ID NO: 1537101 - DNA, 25 bp, Homo sapien
acagaacatggggactgggctgctg

SEQ ID NO: 1537102 - DNA, 25 bp, Homo sapien
gctgctgcctctggcgcatccctgc

SEQ ID NO: 1537103 - DNA, 25 bp, Homo sapien
tgcctctggcgcatccctgcccccg

SEQ ID NO: 1537104 - DNA, 25 bp, Homo sapien
tctggcgcatccctgcccccgccac

SEQ ID NO: 1537105 - DNA, 25 bp, Homo sapien
atctcatagtacaggttctctcccc

SEQ ID NO: 1537106 - DNA, 25 bp, Homo sapien
gcccagggggtacaagcctggcttg

SEQ ID NO: 1537107 - DNA, 25 bp, Homo sapien
gcgaaagggactccaggagcgggtg

SEQ ID NO: 1537108 - DNA, 25 bp, Homo sapien
gggcatggagcgaaagggactccag

SEQ ID NO: 1537109 - DNA, 25 bp, Homo sapien
tgccgtaggaggcattgagcctgtc

SEQ ID NO: 1537110 - DNA, 25 bp, Homo sapien
gtgattggccaagcatgccgtagga

SEQ ID NO: 1537111 - DNA, 25 bp, Homo sapien
caggcggtgtagggcgccgagcagg

SEQ ID NO: 1537112 - DNA, 25 bp, Homo sapien
ggcggtgtagggcgccgagcagggt

SEQ ID NO: 1537113 - DNA, 25 bp, Homo sapien
tcaggcggtgtagggcgccgagcag

SEQ ID NO: 1537114 - DNA, 25 bp, Homo sapien
gcggtgtagggcgccgagcagggtg

SEQ ID NO: 1537115 - DNA, 25 bp, Homo sapien
acccctgggccctagagctaggttg

SEQ ID NO: 1537116 - DNA, 25 bp, Homo sapien
ccctgggccctagagctaggttgac

SEQ ID NO: 1537117 - DNA, 25 bp, Homo sapien
cgggatctgaacggcttcgggggtg

SEQ ID NO: 1537118 - DNA, 25 bp, Homo sapien
tctgaacggcttcgggggtgggcag

SEQ ID NO: 1537119 - DNA, 25 bp, Homo sapien
cccctctttgccctccatttctgta

SEQ ID NO: 1537120 - DNA, 25 bp, Homo sapien
ctcccctctttgccctccatttctg

SEQ ID NO: 1537121 - DNA, 25 bp, Homo sapien
ccctctttgccctccatttctgtac

SEQ ID NO: 1537122 - DNA, 25 bp, Homo sapien
cctcccctctttgccctccatttct

SEQ ID NO: 1537123 - DNA, 25 bp, Homo sapien
tagcttcgggtctggccctcagagt

SEQ ID NO: 1537124 - DNA, 25 bp, Homo sapien
gtagcttcgggtctggccctcagag

SEQ ID NO: 1537125 - DNA, 25 bp, Homo sapien
agcttcgggtctggccctcagagtg

SEQ ID NO: 1537126 - DNA, 25 bp, Homo sapien
agtagcttcgggtctggccctcaga

SEQ ID NO: 1537127 - DNA, 25 bp, Homo sapien
tcccaccccagatttgtgcgagggc

SEQ ID NO: 1537128 - DNA, 25 bp, Homo sapien
ctgagattataggttagggacccac

SEQ ID NO: 1537129 - DNA, 25 bp, Homo sapien
tttggttgggccaagatccagtgag

SEQ ID NO: 1537130 - DNA, 25 bp, Homo sapien
tataggttagggacccacatcagaa

SEQ ID NO: 1537131 - DNA, 25 bp, Homo sapien
tgttgtcagatggtttagtggggca

SEQ ID NO: 1537132 - DNA, 25 bp, Homo sapien
atccccgtgcacaggtcaggacatg

SEQ ID NO: 1537133 - DNA, 25 bp, Homo sapien
ccccgtgcacaggtcaggacatgct

SEQ ID NO: 1537134 - DNA, 25 bp, Homo sapien
cccatccccgtgcacaggtcaggac

SEQ ID NO: 1537135 - DNA, 25 bp, Homo sapien
gagcgtgcttcagggtgcccgcagg

SEQ ID NO: 1537136 - DNA, 25 bp, Homo sapien
tcagggtgcccgcagggaacaggag

SEQ ID NO: 1537137 - DNA, 25 bp, Homo sapien
atgccgaaggataccccactagcac

SEQ ID NO: 1537138 - DNA, 25 bp, Homo sapien
tgctcagccaagaactgtggcggcg

SEQ ID NO: 1537139 - DNA, 25 bp, Homo sapien
caatgtttgaattactggagccgcc

SEQ ID NO: 1537140 - DNA, 25 bp, Homo sapien
cagtctggactgatgatgtggcctt

SEQ ID NO: 1537141 - DNA, 25 bp, Homo sapien
gtcccagatggacaagacgttgccc

SEQ ID NO: 1537142 - DNA, 25 bp, Homo sapien
gactttaagctgtagatgcagccac

SEQ ID NO: 1537143 - DNA, 25 bp, Homo sapien
aggtggaggattgtttgagaccagc

SEQ ID NO: 1537144 - DNA, 25 bp, Homo sapien
aggcgaaggtggaggattgtttgag

SEQ ID NO: 1537145 - DNA, 25 bp, Homo sapien
cagctattccggaggtggaaggatc

SEQ ID NO: 1537146 - DNA, 25 bp, Homo sapien
gctcaaatgccagagatggacagag

SEQ ID NO: 1537147 - DNA, 25 bp, Homo sapien
tgtcatctgtatcgaccctgttgga

SEQ ID NO: 1537148 - DNA, 25 bp, Homo sapien
ccaggtgggattccatgagcaagcc

SEQ ID NO: 1537149 - DNA, 25 bp, Homo sapien
gactacgccccaagtcaagcaggag

SEQ ID NO: 1537150 - DNA, 25 bp, Homo sapien
tgtctgaaatagctccctgagggcc

SEQ ID NO: 1537151 - DNA, 25 bp, Homo sapien
gaaaatctagatttgtatcctacga

SEQ ID NO: 1537152 - DNA, 25 bp, Homo sapien
catcactgaacacatccctgagtca

SEQ ID NO: 1537153 - DNA, 25 bp, Homo sapien
ttgggtcacatcctcatcactgaac

SEQ ID NO: 1537154 - DNA, 25 bp, Homo sapien
caatgctgacacttaattggtctag

SEQ ID NO: 1537155 - DNA, 25 bp, Homo sapien
tatctggatgtggtggcacacactt

SEQ ID NO: 1537156 - DNA, 25 bp, Homo sapien
aattatctggatgtggtggcacaca

SEQ ID NO: 1537157 - DNA, 25 bp, Homo sapien
aatgcaaaaattatctggatgtggt

SEQ ID NO: 1537158 - DNA, 25 bp, Homo sapien
aaaatgcaaaaattatctggatgtg

SEQ ID NO: 1537159 - DNA, 25 bp, Homo sapien
ttataagggactggtggttcaggcc

SEQ ID NO: 1537160 - DNA, 25 bp, Homo sapien
ctgagacgctgatggcctgatctcc

SEQ ID NO: 1537161 - DNA, 25 bp, Homo sapien
gatggcctgatctcccggttccttg

SEQ ID NO: 1537162 - DNA, 25 bp, Homo sapien
cctttgctggctgagacgctgatgg

SEQ ID NO: 1537163 - DNA, 25 bp, Homo sapien
tcccgttgagaaactcccgcggctg

SEQ ID NO: 1537164 - DNA, 25 bp, Homo sapien
ggaagaaacttgctcagcccaggtc

SEQ ID NO: 1537165 - DNA, 25 bp, Homo sapien
tctgggagaccccaagagggcccga

SEQ ID NO: 1537166 - DNA, 25 bp, Homo sapien
ccaggtcctagagggactgcgctca

SEQ ID NO: 1537167 - DNA, 25 bp, Homo sapien
tcttcgcccagcctagtctctggcc

SEQ ID NO: 1537168 - DNA, 25 bp, Homo sapien
tccaagtctgctcatccgcagcctc

SEQ ID NO: 1537169 - DNA, 25 bp, Homo sapien
cctccaagtctgctcatccgcagcc

SEQ ID NO: 1537170 - DNA, 25 bp, Homo sapien
ccttcacgctcgactcttcgcccag

SEQ ID NO: 1537171 - DNA, 25 bp, Homo sapien
ccccaaggttcacgagatttgccgt

SEQ ID NO: 1537172 - DNA, 25 bp, Homo sapien
tggccttcccgtcaacttcttcctc

SEQ ID NO: 1537173 - DNA, 25 bp, Homo sapien
gagatttgccgtcgcactggccttc

SEQ ID NO: 1537174 - DNA, 25 bp, Homo sapien
ttcacgagatttgccgtcgcactgg

SEQ ID NO: 1537175 - DNA, 25 bp, Homo sapien
ctctccctctgaagcagaagaggag

SEQ ID NO: 1537176 - DNA, 25 bp, Homo sapien
ggagggcggggacccgcatcctgag

SEQ ID NO: 1537177 - DNA, 25 bp, Homo sapien
ctgctctccctctgaagcagaagag

SEQ ID NO: 1537178 - DNA, 25 bp, Homo sapien
gaggagggcggggacccgcatcctg

SEQ ID NO: 1537179 - DNA, 25 bp, Homo sapien
ctaggagagttcggggcagcagggc

SEQ ID NO: 1537180 - DNA, 25 bp, Homo sapien
cagggctgagcttagcaccttcagg

SEQ ID NO: 1537181 - DNA, 25 bp, Homo sapien
ggagagttcggggcagcagggctga

SEQ ID NO: 1537182 - DNA, 25 bp, Homo sapien
cagcagggctgagcttagcaccttc

SEQ ID NO: 1537183 - DNA, 25 bp, Homo sapien
gcaccaccaggtcctctggctgttg

SEQ ID NO: 1537184 - DNA, 25 bp, Homo sapien
tgttgcaggaaatggggcgacgggc

SEQ ID NO: 1537185 - DNA, 25 bp, Homo sapien
ggtcctctggctgttgcaggaaatg

SEQ ID NO: 1537186 - DNA, 25 bp, Homo sapien
tggctgttgcaggaaatggggcgac

SEQ ID NO: 1537187 - DNA, 25 bp, Homo sapien
tagtccactgaactagcccccagta

SEQ ID NO: 1537188 - DNA, 25 bp, Homo sapien
gtccactgaactagcccccagtagg

SEQ ID NO: 1537189 - DNA, 25 bp, Homo sapien
gggccagcccactcttagtccactg

SEQ ID NO: 1537190 - DNA, 25 bp, Homo sapien
gcccactcttagtccactgaactag

SEQ ID NO: 1537191 - DNA, 25 bp, Homo sapien
tcctctagctccacgggcctaatgt

SEQ ID NO: 1537192 - DNA, 25 bp, Homo sapien
ccagcacgtgcagttgggctggtct

SEQ ID NO: 1537193 - DNA, 25 bp, Homo sapien
tggtctggagcggaggcctgcttgt

SEQ ID NO: 1537194 - DNA, 25 bp, Homo sapien
cctaatgtggaggtcatgctggcca

SEQ ID NO: 1537195 - DNA, 25 bp, Homo sapien
atctcggaaccacagcaattcaggg

SEQ ID NO: 1537196 - DNA, 25 bp, Homo sapien
acggctccgacatgtcaggttcgca

SEQ ID NO: 1537197 - DNA, 25 bp, Homo sapien
ggtagggcgggcatccccacggctc

SEQ ID NO: 1537198 - DNA, 25 bp, Homo sapien
gacatgtcaggttcgcaggaactcc

SEQ ID NO: 1537199 - DNA, 25 bp, Homo sapien
caggggtcccttccttcagcagggt

SEQ ID NO: 1537200 - DNA, 25 bp, Homo sapien
aaggtgctctccactgacccagggg

SEQ ID NO: 1537201 - DNA, 25 bp, Homo sapien
ttaaggtgctctccactgacccagg

SEQ ID NO: 1537202 - DNA, 25 bp, Homo sapien
ggtgctctccactgacccaggggtc

SEQ ID NO: 1537203 - DNA, 25 bp, Homo sapien
agacaaaggtggctccatcatcatg

SEQ ID NO: 1537204 - DNA, 25 bp, Homo sapien
aggctcagtgtgatagctgtgtctc

SEQ ID NO: 1537205 - DNA, 25 bp, Homo sapien
ctcagtgtgatagctgtgtctcttc

SEQ ID NO: 1537206 - DNA, 25 bp, Homo sapien
tcagtgtgatagctgtgtctcttcc

SEQ ID NO: 1537207 - DNA, 25 bp, Homo sapien
caggctcagtgtgatagctgtgtct

SEQ ID NO: 1537208 - DNA, 25 bp, Homo sapien
tgcacagtgtgtggcgaagcagaca

SEQ ID NO: 1537209 - DNA, 25 bp, Homo sapien
acaggaaaatgaccttctctccctc

SEQ ID NO: 1537210 - DNA, 25 bp, Homo sapien
tctccctcctgcacagtgtgtggcg

SEQ ID NO: 1537211 - DNA, 25 bp, Homo sapien
gcctggcacaggaaaatgaccttct

SEQ ID NO: 1537212 - DNA, 25 bp, Homo sapien
ttggcgctacccacggcgttgctga

SEQ ID NO: 1537213 - DNA, 25 bp, Homo sapien
gcacatccagcgcagtactgcggtt

SEQ ID NO: 1537214 - DNA, 25 bp, Homo sapien
tgctgacctcgcaggacacgggctc

SEQ ID NO: 1537215 - DNA, 25 bp, Homo sapien
ctcagtcaggaacgaggcgtctgcc

SEQ ID NO: 1537216 - DNA, 25 bp, Homo sapien
ggctccggctttgcctgcagaatcg

SEQ ID NO: 1537217 - DNA, 25 bp, Homo sapien
caggcgcagctgaaggaagcgtctt

SEQ ID NO: 1537218 - DNA, 25 bp, Homo sapien
cacgggctccggctttgcctgcaga

SEQ ID NO: 1537219 - DNA, 25 bp, Homo sapien
ggctttgcctgcagaatcggcccaa

SEQ ID NO: 1537220 - DNA, 25 bp, Homo sapien
gctctgcacacatagtcgcctgcgt

SEQ ID NO: 1537221 - DNA, 25 bp, Homo sapien
gcaggcccgatagcccagcctcagc

SEQ ID NO: 1537222 - DNA, 25 bp, Homo sapien
gccccaccgacggaagacgcagtgt

SEQ ID NO: 1537223 - DNA, 25 bp, Homo sapien
cgacggaagacgcagtgtggctcca

SEQ ID NO: 1537224 - DNA, 25 bp, Homo sapien
gagactgtaggtcactcagaggaga

SEQ ID NO: 1537225 - DNA, 25 bp, Homo sapien
aggctgtaacaaagccgggtctgtc

SEQ ID NO: 1537226 - DNA, 25 bp, Homo sapien
cccgctgggtgtaaagctccttcca

SEQ ID NO: 1537227 - DNA, 25 bp, Homo sapien
aaagcctcgccttcaataggtccgg

SEQ ID NO: 1537228 - DNA, 25 bp, Homo sapien
tctggggcgggagaggcgaaaacca

SEQ ID NO: 1537229 - DNA, 25 bp, Homo sapien
cgggagaggcgaaaaccagacactg

SEQ ID NO: 1537230 - DNA, 25 bp, Homo sapien
cgcagagtgcagggcggtcactact

SEQ ID NO: 1537231 - DNA, 25 bp, Homo sapien
caggaaggcaggcgcagagtgcagg

SEQ ID NO: 1537232 - DNA, 25 bp, Homo sapien
cacgggaggagtgacatttccttac

SEQ ID NO: 1537233 - DNA, 25 bp, Homo sapien
ggtcacgggaggagtgacatttcct

SEQ ID NO: 1537234 - DNA, 25 bp, Homo sapien
tgggtcacgggaggagtgacatttc

SEQ ID NO: 1537235 - DNA, 25 bp, Homo sapien
tcacgggaggagtgacatttcctta

SEQ ID NO: 1537236 - DNA, 25 bp, Homo sapien
tcctgggtccccgaaatgtgtagca

SEQ ID NO: 1537237 - DNA, 25 bp, Homo sapien
ctgggtccccgaaatgtgtagcaca

SEQ ID NO: 1537238 - DNA, 25 bp, Homo sapien
ccaggaagccctcatcccaagacca

SEQ ID NO: 1537239 - DNA, 25 bp, Homo sapien
gtgtagcacagagatcaggcccgga

SEQ ID NO: 1537240 - DNA, 25 bp, Homo sapien
ggctggcctgggcacctccctcgcc

SEQ ID NO: 1537241 - DNA, 25 bp, Homo sapien
caggctggcctgggcacctccctcg

SEQ ID NO: 1537242 - DNA, 25 bp, Homo sapien
ctggcctgggcacctccctcgccca

SEQ ID NO: 1537243 - DNA, 25 bp, Homo sapien
ggcctgggcacctccctcgcccagc

SEQ ID NO: 1537244 - DNA, 25 bp, Homo sapien
actccggccactatccgcacagtgg

SEQ ID NO: 1537245 - DNA, 25 bp, Homo sapien
cccagtgatgaccataaggagagtt

SEQ ID NO: 1537246 - DNA, 25 bp, Homo sapien
cataaggagagttgtggtggcagcg

SEQ ID NO: 1537247 - DNA, 25 bp, Homo sapien
ccactatccgcacagtgggcagcaa

SEQ ID NO: 1537248 - DNA, 25 bp, Homo sapien
accaataagcgggaagagagaggac

SEQ ID NO: 1537249 - DNA, 25 bp, Homo sapien
gaatcattcccaccgaggagtgtga

SEQ ID NO: 1537250 - DNA, 25 bp, Homo sapien
ctgacaaacagcgaccggtggagtt

SEQ ID NO: 1537251 - DNA, 25 bp, Homo sapien
tcacaatgtgtgcagaccaataagc

SEQ ID NO: 1537252 - DNA, 25 bp, Homo sapien
tcgtgaactggagccgtcgctgctg

SEQ ID NO: 1537253 - DNA, 25 bp, Homo sapien
tcttcttcaggacctcgtgaactgg

SEQ ID NO: 1537254 - DNA, 25 bp, Homo sapien
caggttcttttgctcggagaaagag

SEQ ID NO: 1537255 - DNA, 25 bp, Homo sapien
tcgctgctgccagggattcgcatca

SEQ ID NO: 1537256 - DNA, 25 bp, Homo sapien
tcccaaagtggtattaccaacgtca

SEQ ID NO: 1537257 - DNA, 25 bp, Homo sapien
aagtggtattaccaacgtcaggcac

SEQ ID NO: 1537258 - DNA, 25 bp, Homo sapien
gggactgggctattatttaggtctg

SEQ ID NO: 1537259 - DNA, 25 bp, Homo sapien
gactgggctattatttaggtctgga

SEQ ID NO: 1537260 - DNA, 25 bp, Homo sapien
tccagaaccagatcactgtggtcag

SEQ ID NO: 1537261 - DNA, 25 bp, Homo sapien
gaaccagatcactgtggtcagtgtg

SEQ ID NO: 1537262 - DNA, 25 bp, Homo sapien
aaccagatcactgtggtcagtgtgc

SEQ ID NO: 1537263 - DNA, 25 bp, Homo sapien
cagaaccagatcactgtggtcagtg

SEQ ID NO: 1537264 - DNA, 25 bp, Homo sapien
actgactcctcggaccttgtagtaa

SEQ ID NO: 1537265 - DNA, 25 bp, Homo sapien
tgactcctcggaccttgtagtaacc

SEQ ID NO: 1537266 - DNA, 25 bp, Homo sapien
ctgactcctcggaccttgtagtaac

SEQ ID NO: 1537267 - DNA, 25 bp, Homo sapien
cctccaggggcttcgccaaggctca

SEQ ID NO: 1537268 - DNA, 25 bp, Homo sapien
gttgaagtcatagaaggtaggggtc

SEQ ID NO: 1537269 - DNA, 25 bp, Homo sapien
ccaggtgtgggttgaagtcatagaa

SEQ ID NO: 1537270 - DNA, 25 bp, Homo sapien
agtcatagaaggtaggggtccctgg

SEQ ID NO: 1537271 - DNA, 25 bp, Homo sapien
tgaagtcatagaaggtaggggtccc

SEQ ID NO: 1537272 - DNA, 25 bp, Homo sapien
gccctggctctgtaaagtctgcagg

SEQ ID NO: 1537273 - DNA, 25 bp, Homo sapien
gggcccaaaggatgtgggtttgatg

SEQ ID NO: 1537274 - DNA, 25 bp, Homo sapien
ttgatgtagctggtgaaagctcgag

SEQ ID NO: 1537275 - DNA, 25 bp, Homo sapien
tgtgggtttgatgtagctggtgaaa

SEQ ID NO: 1537276 - DNA, 25 bp, Homo sapien
ggagatcccaggactcttccattgg

SEQ ID NO: 1537277 - DNA, 25 bp, Homo sapien
gatcccaggactcttccattggaaa

SEQ ID NO: 1537278 - DNA, 25 bp, Homo sapien
gagatcccaggactcttccattgga

SEQ ID NO: 1537279 - DNA, 25 bp, Homo sapien
agatcccaggactcttccattggaa

SEQ ID NO: 1537280 - DNA, 25 bp, Homo sapien
ttccattggccgagcaaagttcccc

SEQ ID NO: 1537281 - DNA, 25 bp, Homo sapien
tggctgagctgactgtatacaaatg

SEQ ID NO: 1537282 - DNA, 25 bp, Homo sapien
ggttcctagggagtatatggccatc

SEQ ID NO: 1537283 - DNA, 25 bp, Homo sapien
gagtaaggtcgccaacttgtcctgg

SEQ ID NO: 1537284 - DNA, 25 bp, Homo sapien
tagctcaaggatccatgaaccaaag

SEQ ID NO: 1537285 - DNA, 25 bp, Homo sapien
caaggatgcaagcatcagagacccc

SEQ ID NO: 1537286 - DNA, 25 bp, Homo sapien
gcctggacctttaactcctagctca

SEQ ID NO: 1537287 - DNA, 25 bp, Homo sapien
tgttgagggctcaggaatacaggcc

SEQ ID NO: 1537288 - DNA, 25 bp, Homo sapien
gtcccggcccttgcgccctcacgtc

SEQ ID NO: 1537289 - DNA, 25 bp, Homo sapien
tcacgtcccctgcactcccgcccgg

SEQ ID NO: 1537290 - DNA, 25 bp, Homo sapien
gccccagcggtgacaggagctccca

SEQ ID NO: 1537291 - DNA, 25 bp, Homo sapien
cggccccagcggtgacaggagctcc

SEQ ID NO: 1537292 - DNA, 25 bp, Homo sapien
cgatggcgggctgcgcgcgcagaag

SEQ ID NO: 1537293 - DNA, 25 bp, Homo sapien
cggcgacttagaccgcgagcagcgg

SEQ ID NO: 1537294 - DNA, 25 bp, Homo sapien
gcggctggcccgggcggcgacttag

SEQ ID NO: 1537295 - DNA, 25 bp, Homo sapien
cccgggcggcgacttagaccgcgag

SEQ ID NO: 1537296 - DNA, 25 bp, Homo sapien
cctggttctttgctccctaggaccg

SEQ ID NO: 1537297 - DNA, 25 bp, Homo sapien
tggttctttgctccctaggaccgag

SEQ ID NO: 1537298 - DNA, 25 bp, Homo sapien
cccaagcaccgcacaccgcctccat

SEQ ID NO: 1537299 - DNA, 25 bp, Homo sapien
ttctttgctccctaggaccgagacc

SEQ ID NO: 1537300 - DNA, 25 bp, Homo sapien
gcggccggtgcgcaggtcccggtga

SEQ ID NO: 1537301 - DNA, 25 bp, Homo sapien
ccggtgaagggttaggcgcccgcat

SEQ ID NO: 1537302 - DNA, 25 bp, Homo sapien
tgaagggttaggcgcccgcatagtc

SEQ ID NO: 1537303 - DNA, 25 bp, Homo sapien
gttaggcgcccgcatagtccagcca

SEQ ID NO: 1537304 - DNA, 25 bp, Homo sapien
gtcccggagacagcgtcgagagcgc

SEQ ID NO: 1537305 - DNA, 25 bp, Homo sapien
cagtactccagcacgcgctgcgggt

SEQ ID NO: 1537306 - DNA, 25 bp, Homo sapien
agacagcgtcgagagcgctgtgggt

SEQ ID NO: 1537307 - DNA, 25 bp, Homo sapien
gcagtactccagcacgcgctgcggg

SEQ ID NO: 1537308 - DNA, 25 bp, Homo sapien
gtccgttttcaaggctctagtattc

SEQ ID NO: 1537309 - DNA, 25 bp, Homo sapien
caggtccgttttcaaggctctagta

SEQ ID NO: 1537310 - DNA, 25 bp, Homo sapien
cggccaggtccgttttcaaggctct

SEQ ID NO: 1537311 - DNA, 25 bp, Homo sapien
cccctctccagtagtcaggtccctt

SEQ ID NO: 1537312 - DNA, 25 bp, Homo sapien
ggatggcctgcgtagcctgctccac

SEQ ID NO: 1537313 - DNA, 25 bp, Homo sapien
gcgtagcctgctccacacgtgcaat

SEQ ID NO: 1537314 - DNA, 25 bp, Homo sapien
aggcagcggaagggcacaacctggt

SEQ ID NO: 1537315 - DNA, 25 bp, Homo sapien
gctccacacgtgcaatctgcagctc

SEQ ID NO: 1537316 - DNA, 25 bp, Homo sapien
atgcgctcctggtgcaagaaccggc

SEQ ID NO: 1537317 - DNA, 25 bp, Homo sapien
gggttgaactctcacattggtccat

SEQ ID NO: 1537318 - DNA, 25 bp, Homo sapien
ctgtgcctcctgatgcctccgggtt

SEQ ID NO: 1537319 - DNA, 25 bp, Homo sapien
tcctggtgcaagaaccggcagcctt

SEQ ID NO: 1537320 - DNA, 25 bp, Homo sapien
acatactccacaccacggaaccgat

SEQ ID NO: 1537321 - DNA, 25 bp, Homo sapien
gccacagggtaagagcatgcccgag

SEQ ID NO: 1537322 - DNA, 25 bp, Homo sapien
cggaaccgatccgagccacagggta

SEQ ID NO: 1537323 - DNA, 25 bp, Homo sapien
cccgagccgtgcaggatgaggccct

SEQ ID NO: 1537324 - DNA, 25 bp, Homo sapien
gtaatcatctactggctgtgggaag

SEQ ID NO: 1537325 - DNA, 25 bp, Homo sapien
ctttgccgaccactgcaagtgtatg

SEQ ID NO: 1537326 - DNA, 25 bp, Homo sapien
ttcagcctgcggaggctccacgaag

SEQ ID NO: 1537327 - DNA, 25 bp, Homo sapien
ccactgcaagtgtatgggagcttgg

SEQ ID NO: 1537328 - DNA, 25 bp, Homo sapien
gatttccccaggcatgccaaagtaa

SEQ ID NO: 1537329 - DNA, 25 bp, Homo sapien
taaatatccacaccgtctgtgggcc

SEQ ID NO: 1537330 - DNA, 25 bp, Homo sapien
caggaacccctcgtgctcactgatt

SEQ ID NO: 1537331 - DNA, 25 bp, Homo sapien
ttaatctggcgcatcctacgctcct

SEQ ID NO: 1537332 - DNA, 25 bp, Homo sapien
tgtctgtcggctttaggcaggttct

SEQ ID NO: 1537333 - DNA, 25 bp, Homo sapien
taggcaggttcttggactggttgtc

SEQ ID NO: 1537334 - DNA, 25 bp, Homo sapien
ctcattcagggcctgtctgtcggct

SEQ ID NO: 1537335 - DNA, 25 bp, Homo sapien
tctgccatggcccattcacgcatca

SEQ ID NO: 1537336 - DNA, 25 bp, Homo sapien
tgataagggcgatgacgcgggtggc

SEQ ID NO: 1537337 - DNA, 25 bp, Homo sapien
tgggtttccaccaggcgctgtcgct

SEQ ID NO: 1537338 - DNA, 25 bp, Homo sapien
cagcccggcgctggtcgttgataag

SEQ ID NO: 1537339 - DNA, 25 bp, Homo sapien
cgcgggtggcgtgggtttccaccag

SEQ ID NO: 1537340 - DNA, 25 bp, Homo sapien
ctgctgtgccttctcgggatccacg

SEQ ID NO: 1537341 - DNA, 25 bp, Homo sapien
gttccttctgctccgcacgcaggta

SEQ ID NO: 1537342 - DNA, 25 bp, Homo sapien
ccacggcggccacatgctggtagtg

SEQ ID NO: 1537343 - DNA, 25 bp, Homo sapien
ttctcgggatccacggcggccacat

SEQ ID NO: 1537344 - DNA, 25 bp, Homo sapien
ccaagggacagaacataggatcgac

SEQ ID NO: 1537345 - DNA, 25 bp, Homo sapien
tcaatagcgactgaggaaaagcggc

SEQ ID NO: 1537346 - DNA, 25 bp, Homo sapien
tcaaagacacagcatgtgagggtcc

SEQ ID NO: 1537347 - DNA, 25 bp, Homo sapien
aagaaggagattctcgaccgggcgc

SEQ ID NO: 1537348 - DNA, 25 bp, Homo sapien
acatgaaggatgaactgcgcaatgc

SEQ ID NO: 1537349 - DNA, 25 bp, Homo sapien
ggacatgaaggatgaactgcgcaat

SEQ ID NO: 1537350 - DNA, 25 bp, Homo sapien
catgaaggatgaactgcgcaatgca

SEQ ID NO: 1537351 - DNA, 25 bp, Homo sapien
tgaaggatgaactgcgcaatgcagg

SEQ ID NO: 1537352 - DNA, 25 bp, Homo sapien
accctctcctcaatcacttgaaggt

SEQ ID NO: 1537353 - DNA, 25 bp, Homo sapien
tctcctcaatcacttgaaggtgggt

SEQ ID NO: 1537354 - DNA, 25 bp, Homo sapien
tgggggttctggtcaagcaggccca

SEQ ID NO: 1537355 - DNA, 25 bp, Homo sapien
caatcacttgaaggtgggtatgcac

SEQ ID NO: 1537356 - DNA, 25 bp, Homo sapien
taacaaatagaatgtgggcccaagc

SEQ ID NO: 1537357 - DNA, 25 bp, Homo sapien
cctcagagatctgtaatgggagcca

SEQ ID NO: 1537358 - DNA, 25 bp, Homo sapien
gattttcactgctaaggtctgggct

SEQ ID NO: 1537359 - DNA, 25 bp, Homo sapien
gaggccttgcgcttccttggagaga

SEQ ID NO: 1537360 - DNA, 25 bp, Homo sapien
ggacccaggtgttcagagtggagga

SEQ ID NO: 1537361 - DNA, 25 bp, Homo sapien
ggcaggggcttccaattcactggga

SEQ ID NO: 1537362 - DNA, 25 bp, Homo sapien
ctgcagcccacccttgtcctcgctg

SEQ ID NO: 1537363 - DNA, 25 bp, Homo sapien
atccttggaatctggaggctgcagc

SEQ ID NO: 1537364 - DNA, 25 bp, Homo sapien
gagggggctggaaagtacatcaaac

SEQ ID NO: 1537365 - DNA, 25 bp, Homo sapien
agggggctggaaagtacatcaaact

SEQ ID NO: 1537366 - DNA, 25 bp, Homo sapien
gttccagcgggttcatcttctcttt

SEQ ID NO: 1537367 - DNA, 25 bp, Homo sapien
ctttcgctcatactgttccagcggg

SEQ ID NO: 1537368 - DNA, 25 bp, Homo sapien
gctcatactgttccagcgggttcat

SEQ ID NO: 1537369 - DNA, 25 bp, Homo sapien
catactgttccagcgggttcatctt

SEQ ID NO: 1537370 - DNA, 25 bp, Homo sapien
tctaggatctcaattccacgtcctc

SEQ ID NO: 1537371 - DNA, 25 bp, Homo sapien
ttttctaggatctcaattccacgtc

SEQ ID NO: 1537372 - DNA, 25 bp, Homo sapien
ggatctcaattccacgtcctcagct

SEQ ID NO: 1537373 - DNA, 25 bp, Homo sapien
taggatctcaattccacgtcctcag

SEQ ID NO: 1537374 - DNA, 25 bp, Homo sapien
gaaaccccttggaacagacgcattc

SEQ ID NO: 1537375 - DNA, 25 bp, Homo sapien
catccctctgaatctccgatgagtg

SEQ ID NO: 1537376 - DNA, 25 bp, Homo sapien
gaatctccgatgagtggaaagggaa

SEQ ID NO: 1537377 - DNA, 25 bp, Homo sapien
aaccccttggaacagacgcattcac

SEQ ID NO: 1537378 - DNA, 25 bp, Homo sapien
ggaatcacagcctggccgctgacct

SEQ ID NO: 1537379 - DNA, 25 bp, Homo sapien
tggctttgggaatcacagcctggcc

SEQ ID NO: 1537380 - DNA, 25 bp, Homo sapien
ctaggtacccggctgttcctcctct

SEQ ID NO: 1537381 - DNA, 25 bp, Homo sapien
ctttgggaatcacagcctggccgct

SEQ ID NO: 1537382 - DNA, 25 bp, Homo sapien
cacgccatggctgatagccccgtag

SEQ ID NO: 1537383 - DNA, 25 bp, Homo sapien
gatagccccgtagggcttcttcctg

SEQ ID NO: 1537384 - DNA, 25 bp, Homo sapien
gctcccatgatcagcagacccgaca

SEQ ID NO: 1537385 - DNA, 25 bp, Homo sapien
ttcttcctgcgcaggagcagcatgg

SEQ ID NO: 1537386 - DNA, 25 bp, Homo sapien
tgccgctgcagttcgcggagctgct

SEQ ID NO: 1537387 - DNA, 25 bp, Homo sapien
caggaagcggtaagtggggttctca

SEQ ID NO: 1537388 - DNA, 25 bp, Homo sapien
tagccgtgccgctgcagttcgcgga

SEQ ID NO: 1537389 - DNA, 25 bp, Homo sapien
ggggttctcatagccgtgccgctgc

SEQ ID NO: 1537390 - DNA, 25 bp, Homo sapien
tgctgggactatctgggaattctta

SEQ ID NO: 1537391 - DNA, 25 bp, Homo sapien
cactaggaccaaggtggcggtcacc

SEQ ID NO: 1537392 - DNA, 25 bp, Homo sapien
tttccagccgtctcacaaaagggtg

SEQ ID NO: 1537393 - DNA, 25 bp, Homo sapien
aaacatgagagggtgaattccaggg

SEQ ID NO: 1537394 - DNA, 25 bp, Homo sapien
ctatgtttcctaggtcggttcccat

SEQ ID NO: 1537395 - DNA, 25 bp, Homo sapien
cccaagtggcacagtgcactccagt

SEQ ID NO: 1537396 - DNA, 25 bp, Homo sapien
gatcagcatgagagtgttgacctat

SEQ ID NO: 1537397 - DNA, 25 bp, Homo sapien
gactagagcagcgtgccactgtgcc

SEQ ID NO: 1537398 - DNA, 25 bp, Homo sapien
tcatttgggcaatacagagaaggtg

SEQ ID NO: 1537399 - DNA, 25 bp, Homo sapien
aatctaggctcttaatggttgcaaa

SEQ ID NO: 1537400 - DNA, 25 bp, Homo sapien
gacgggcatgactgagtagagacaa

SEQ ID NO: 1537401 - DNA, 25 bp, Homo sapien
catatgatgtagctaccagtgtgct

SEQ ID NO: 1537402 - DNA, 25 bp, Homo sapien
ggactgtggtccagagaagtccaga

SEQ ID NO: 1537403 - DNA, 25 bp, Homo sapien
gaggactgtggtccagagaagtcca

SEQ ID NO: 1537404 - DNA, 25 bp, Homo sapien
gtagcaatagcggatgtcaccctgc

SEQ ID NO: 1537405 - DNA, 25 bp, Homo sapien
cagagaagtagcaatagcggatgtc

SEQ ID NO: 1537406 - DNA, 25 bp, Homo sapien
aggaagaggatgtgacccagatgga

SEQ ID NO: 1537407 - DNA, 25 bp, Homo sapien
gaagaggatgtgacccagatggatc

SEQ ID NO: 1537408 - DNA, 25 bp, Homo sapien
agaggatgtgacccagatggatcat

SEQ ID NO: 1537409 - DNA, 25 bp, Homo sapien
aagaggatgtgacccagatggatca

SEQ ID NO: 1537410 - DNA, 25 bp, Homo sapien
tcctggagtcgtctgagctgcagcc

SEQ ID NO: 1537411 - DNA, 25 bp, Homo sapien
ctctctcctggagtcgtctgagctg

SEQ ID NO: 1537412 - DNA, 25 bp, Homo sapien
ctctcctggagtcgtctgagctgca

SEQ ID NO: 1537413 - DNA, 25 bp, Homo sapien
tctcctggagtcgtctgagctgcag

SEQ ID NO: 1537414 - DNA, 25 bp, Homo sapien
tgggcgtgcgcacaggaacaccgcc

SEQ ID NO: 1537415 - DNA, 25 bp, Homo sapien
accgcccccacgatgagcagcgatg

SEQ ID NO: 1537416 - DNA, 25 bp, Homo sapien
atgccaccgcatcagcagccacgag

SEQ ID NO: 1537417 - DNA, 25 bp, Homo sapien
agggacccacatccggaacaagagc

SEQ ID NO: 1537418 - DNA, 25 bp, Homo sapien
cctgcctggcatgttgatgtagact

SEQ ID NO: 1537419 - DNA, 25 bp, Homo sapien
cctggcatgttgatgtagactttgc

SEQ ID NO: 1537420 - DNA, 25 bp, Homo sapien
ggcatgttgatgtagactttgccat

SEQ ID NO: 1537421 - DNA, 25 bp, Homo sapien
gcccctgcctggcatgttgatgtag

SEQ ID NO: 1537422 - DNA, 25 bp, Homo sapien
gaagtcaaaggtccaagctgcagga

SEQ ID NO: 1537423 - DNA, 25 bp, Homo sapien
cagaagtcaaaggtccaagctgcag

SEQ ID NO: 1537424 - DNA, 25 bp, Homo sapien
gtcaaaggtccaagctgcaggaggg

SEQ ID NO: 1537425 - DNA, 25 bp, Homo sapien
aagtcaaaggtccaagctgcaggag

SEQ ID NO: 1537426 - DNA, 25 bp, Homo sapien
taaaatccggatctctttcatggct

SEQ ID NO: 1537427 - DNA, 25 bp, Homo sapien
tcggatgtctacagcgacctcaaca

SEQ ID NO: 1537428 - DNA, 25 bp, Homo sapien
gaaattgagaaatgcctctctgagg

SEQ ID NO: 1537429 - DNA, 25 bp, Homo sapien
tggtgggtcccttccactgatggcc

SEQ ID NO: 1537430 - DNA, 25 bp, Homo sapien
ggtttccagggcgaccctcagcatc

SEQ ID NO: 1537431 - DNA, 25 bp, Homo sapien
gaggtttccagggcgaccctcagca

SEQ ID NO: 1537432 - DNA, 25 bp, Homo sapien
tccagggcgaccctcagcatcccca

SEQ ID NO: 1537433 - DNA, 25 bp, Homo sapien
tttccagggcgaccctcagcatccc

SEQ ID NO: 1537434 - DNA, 25 bp, Homo sapien
gcaataggcttgatctttcaggcca

SEQ ID NO: 1537435 - DNA, 25 bp, Homo sapien
cagcaataggcttgatctttcaggc

SEQ ID NO: 1537436 - DNA, 25 bp, Homo sapien
aataggcttgatctttcaggccaga

SEQ ID NO: 1537437 - DNA, 25 bp, Homo sapien
cccagcaataggcttgatctttcag

SEQ ID NO: 1537438 - DNA, 25 bp, Homo sapien
gcggagggacggtcagacagactgg

SEQ ID NO: 1537439 - DNA, 25 bp, Homo sapien
gcgaggcctgggagcggagggacgg

SEQ ID NO: 1537440 - DNA, 25 bp, Homo sapien
atgggggcaccgcagcgcaggcggg

SEQ ID NO: 1537441 - DNA, 25 bp, Homo sapien
tgggacacgcgggatgggggcaccg

SEQ ID NO: 1537442 - DNA, 25 bp, Homo sapien
tgcaggcccccgaggtggaggttag

SEQ ID NO: 1537443 - DNA, 25 bp, Homo sapien
gcggcgtcccggctggcttcctggg

SEQ ID NO: 1537444 - DNA, 25 bp, Homo sapien
ctgggggtgcaggcccccgaggtgg

SEQ ID NO: 1537445 - DNA, 25 bp, Homo sapien
tggcttcctgggctgcggcggaggc

SEQ ID NO: 1537446 - DNA, 25 bp, Homo sapien
tccaaatattgaggtcccagtgacc

SEQ ID NO: 1537447 - DNA, 25 bp, Homo sapien
cccagtgaccgatgttgagattcca

SEQ ID NO: 1537448 - DNA, 25 bp, Homo sapien
ggtgctggtcccagatcagggttcc

SEQ ID NO: 1537449 - DNA, 25 bp, Homo sapien
gttgagattccagccccatatactg

SEQ ID NO: 1537450 - DNA, 25 bp, Homo sapien
taaatattgggcctctagggtccag

SEQ ID NO: 1537451 - DNA, 25 bp, Homo sapien
gatttaagcactcaggtctgcagca

SEQ ID NO: 1537452 - DNA, 25 bp, Homo sapien
tcaagattgggaggtctcaagcccc

SEQ ID NO: 1537453 - DNA, 25 bp, Homo sapien
tcaaatctgtggcaacggagtctcc

SEQ ID NO: 1537454 - DNA, 25 bp, Homo sapien
gtgttccgcgacaggctcagatgca

SEQ ID NO: 1537455 - DNA, 25 bp, Homo sapien
cacggaggcgatgaagttgtctgcc

SEQ ID NO: 1537456 - DNA, 25 bp, Homo sapien
tgtagacgaggatgtcatcagccga

SEQ ID NO: 1537457 - DNA, 25 bp, Homo sapien
tggtcgaggcccaacgtgttgacgt

SEQ ID NO: 1537458 - DNA, 25 bp, Homo sapien
tcggtgtagggtattagtaggtgta

SEQ ID NO: 1537459 - DNA, 25 bp, Homo sapien
tagggtattagtaggtgtaccctca

SEQ ID NO: 1537460 - DNA, 25 bp, Homo sapien
tgtagcgcattagcagcacgaagat

SEQ ID NO: 1537461 - DNA, 25 bp, Homo sapien
gcacgaagatgaagaccagtaccga

SEQ ID NO: 1537462 - DNA, 25 bp, Homo sapien
agtaccgaggctacgatgacgccgc

SEQ ID NO: 1537463 - DNA, 25 bp, Homo sapien
gagcacgcacagatcgtaggtccgg

SEQ ID NO: 1537464 - DNA, 25 bp, Homo sapien
gaatcttggccttgccggggggctg

SEQ ID NO: 1537465 - DNA, 25 bp, Homo sapien
atcttggccttgccggggggctggc

SEQ ID NO: 1537466 - DNA, 25 bp, Homo sapien
aatcttggccttgccggggggctgg

SEQ ID NO: 1537467 - DNA, 25 bp, Homo sapien
tggtctgggagcaaacgctgctaac

SEQ ID NO: 1537468 - DNA, 25 bp, Homo sapien
cgccgttggtctgggagcaaacgct

SEQ ID NO: 1537469 - DNA, 25 bp, Homo sapien
ctagggtcccacaggttcgtggccg

SEQ ID NO: 1537470 - DNA, 25 bp, Homo sapien
cagggctcgcagtccagctggacca

SEQ ID NO: 1537471 - DNA, 25 bp, Homo sapien
gtcctgctgtccgtggggccagagg

SEQ ID NO: 1537472 - DNA, 25 bp, Homo sapien
taaaaaccatgagcgatttggtgag

SEQ ID NO: 1537473 - DNA, 25 bp, Homo sapien
accatgagcgatttggtgagtttga

SEQ ID NO: 1537474 - DNA, 25 bp, Homo sapien
aaaaccatgagcgatttggtgagtt

SEQ ID NO: 1537475 - DNA, 25 bp, Homo sapien
ggtattgggtctacagtcacttcaa

SEQ ID NO: 1537476 - DNA, 25 bp, Homo sapien
agtagttgtactccctgagctcagg

SEQ ID NO: 1537477 - DNA, 25 bp, Homo sapien
cacatgggttggatctggcagtaca

SEQ ID NO: 1537478 - DNA, 25 bp, Homo sapien
caagataatgctccagcagccggag

SEQ ID NO: 1537479 - DNA, 25 bp, Homo sapien
gctagtgtgcggtggcaggatctgg

SEQ ID NO: 1537480 - DNA, 25 bp, Homo sapien
gacaccacgtccaggtaattctttg

SEQ ID NO: 1537481 - DNA, 25 bp, Homo sapien
ctgacaccacgtccaggtaattctt

SEQ ID NO: 1537482 - DNA, 25 bp, Homo sapien
acaggttcctgacaccacgtccagg

SEQ ID NO: 1537483 - DNA, 25 bp, Homo sapien
aggaggcataggtccgagaagaagc

SEQ ID NO: 1537484 - DNA, 25 bp, Homo sapien
ctagaaggaggcataggtccgagaa

SEQ ID NO: 1537485 - DNA, 25 bp, Homo sapien
aggcataggtccgagaagaagccga

SEQ ID NO: 1537486 - DNA, 25 bp, Homo sapien
cataggtccgagaagaagccgaggt

SEQ ID NO: 1537487 - DNA, 25 bp, Homo sapien
gcatcggaagaagccctttgaatat

SEQ ID NO: 1537488 - DNA, 25 bp, Homo sapien
gtttctcagacagaataagggattg

SEQ ID NO: 1537489 - DNA, 25 bp, Homo sapien
catcctaagacaagaggggcacagc

SEQ ID NO: 1537490 - DNA, 25 bp, Homo sapien
cctttgaatattgaggaagtggttg

SEQ ID NO: 1537491 - DNA, 25 bp, Homo sapien
aagttgggcttctcagcgcccccgt

SEQ ID NO: 1537492 - DNA, 25 bp, Homo sapien
gacatatatagctggaagttgggct

SEQ ID NO: 1537493 - DNA, 25 bp, Homo sapien
ccctgtgggcggtggcgacatatat

SEQ ID NO: 1537494 - DNA, 25 bp, Homo sapien
ccgttttccgagaaagccgtgatga

SEQ ID NO: 1537495 - DNA, 25 bp, Homo sapien
ggcacacccacaccgtcgtgcctgg

SEQ ID NO: 1537496 - DNA, 25 bp, Homo sapien
tcgggccgcgacgtcgctgcttgca

SEQ ID NO: 1537497 - DNA, 25 bp, Homo sapien
gtcgctgcttgcacagcgccgcctg

SEQ ID NO: 1537498 - DNA, 25 bp, Homo sapien
gagagtggcgcccacgcagggagcg

SEQ ID NO: 1537499 - DNA, 25 bp, Homo sapien
gaatgtatgtgttgtagacagataa

SEQ ID NO: 1537500 - DNA, 25 bp, Homo sapien
gacaacaggccaaacacggtggctc

SEQ ID NO: 1537501 - DNA, 25 bp, Homo sapien
aaaatcattgcccttaaggaatgta

SEQ ID NO: 1537502 - DNA, 25 bp, Homo sapien
cccttaaggaatgtatgtgttgtag

SEQ ID NO: 1537503 - DNA, 25 bp, Homo sapien
tccagtctcgctgagtcttcgccga

SEQ ID NO: 1537504 - DNA, 25 bp, Homo sapien
gttcagaaccatggtcagcgtccag

SEQ ID NO: 1537505 - DNA, 25 bp, Homo sapien
cacacagcttggagcaggatttgca

SEQ ID NO: 1537506 - DNA, 25 bp, Homo sapien
caggtcccgcagcacagtgtgttca

SEQ ID NO: 1537507 - DNA, 25 bp, Homo sapien
caagcatttggccacccctatagtg

SEQ ID NO: 1537508 - DNA, 25 bp, Homo sapien
aaaggaagaagcagcctgtgtcgca

SEQ ID NO: 1537509 - DNA, 25 bp, Homo sapien
tgtgtcgcaggcacaagtatgcccg

SEQ ID NO: 1537510 - DNA, 25 bp, Homo sapien
tagtgcaaatgtccctgctctcagc

SEQ ID NO: 1537511 - DNA, 25 bp, Homo sapien
cctggagcctgtaagtgcagattct

SEQ ID NO: 1537512 - DNA, 25 bp, Homo sapien
gtaagtgcagattcttgcagtcacc

SEQ ID NO: 1537513 - DNA, 25 bp, Homo sapien
gagcctgtaagtgcagattcttgca

SEQ ID NO: 1537514 - DNA, 25 bp, Homo sapien
tggatcccggggtgtaggtcccaca

SEQ ID NO: 1537515 - DNA, 25 bp, Homo sapien
ctcgggcctcggcagctgccaagtc

SEQ ID NO: 1537516 - DNA, 25 bp, Homo sapien
cttgggcaagtatgcggcggggcgc

SEQ ID NO: 1537517 - DNA, 25 bp, Homo sapien
gctcgggcctcggcagctgccaagt

SEQ ID NO: 1537518 - DNA, 25 bp, Homo sapien
tgggcaagtatgcggcggggcgcag

SEQ ID NO: 1537519 - DNA, 25 bp, Homo sapien
agcacactggtaccagccatcagct

SEQ ID NO: 1537520 - DNA, 25 bp, Homo sapien
ccagggatgtggtccacttcggcca

SEQ ID NO: 1537521 - DNA, 25 bp, Homo sapien
caggacagcacactggtaccagcca

SEQ ID NO: 1537522 - DNA, 25 bp, Homo sapien
atgtggtccacttcggccacgcagg

SEQ ID NO: 1537523 - DNA, 25 bp, Homo sapien
tgagctcctccaaatgtgtggaaac

SEQ ID NO: 1537524 - DNA, 25 bp, Homo sapien
gctgtgccagctacctgtggaggcc

SEQ ID NO: 1537525 - DNA, 25 bp, Homo sapien
ttggcacttgtcaggccagcactgg

SEQ ID NO: 1537526 - DNA, 25 bp, Homo sapien
agctcccatggcagtgcagacctgt

SEQ ID NO: 1537527 - DNA, 25 bp, Homo sapien
ttgggctcatgtcctcgggccacag

SEQ ID NO: 1537528 - DNA, 25 bp, Homo sapien
tggttgaggtcttttgggctcatgt

SEQ ID NO: 1537529 - DNA, 25 bp, Homo sapien
gttgaggtcttttgggctcatgtcc

SEQ ID NO: 1537530 - DNA, 25 bp, Homo sapien
ctgtggttgaggtcttttgggctca

SEQ ID NO: 1537531 - DNA, 25 bp, Homo sapien
gtcgactagactgcaaccccgttgt

SEQ ID NO: 1537532 - DNA, 25 bp, Homo sapien
tcccaggagctttaggtggtaggcc

SEQ ID NO: 1537533 - DNA, 25 bp, Homo sapien
gggacaccctgaacagtcgactaga

SEQ ID NO: 1537534 - DNA, 25 bp, Homo sapien
ggccgcaatgccgttgttgtccccg

SEQ ID NO: 1537535 - DNA, 25 bp, Homo sapien
gaagtgggcggagtcgctggtcgcg

SEQ ID NO: 1537536 - DNA, 25 bp, Homo sapien
caccgcctggagggcgttatgtgtt

SEQ ID NO: 1537537 - DNA, 25 bp, Homo sapien
gctggtcgcggcctcccacgtaggg

SEQ ID NO: 1537538 - DNA, 25 bp, Homo sapien
tgttcttgaggggacagcagttctg

SEQ ID NO: 1537539 - DNA, 25 bp, Homo sapien
ccgcggagccgccacacagccagca

SEQ ID NO: 1537540 - DNA, 25 bp, Homo sapien
gcaaaggccaaagggcaaagccaca

SEQ ID NO: 1537541 - DNA, 25 bp, Homo sapien
ccagcaaaggccaaagggcaaagcc

SEQ ID NO: 1537542 - DNA, 25 bp, Homo sapien
ctgcgaaccgcggagccgccacaca

SEQ ID NO: 1537543 - DNA, 25 bp, Homo sapien
accgcggctaagcagagacgctcag

SEQ ID NO: 1537544 - DNA, 25 bp, Homo sapien
gaccgcggctaagcagagacgctca

SEQ ID NO: 1537545 - DNA, 25 bp, Homo sapien
aggcccgcatgctgccggaactctg

SEQ ID NO: 1537546 - DNA, 25 bp, Homo sapien
ggttccttggactgtcgccgtcgtc

SEQ ID NO: 1537547 - DNA, 25 bp, Homo sapien
cgcgcagcagatcgcggtacaggct

SEQ ID NO: 1537548 - DNA, 25 bp, Homo sapien
ggtacaggctcagaacctgcctctg

SEQ ID NO: 1537549 - DNA, 25 bp, Homo sapien
taccttcgggcaagtagctcttggc

SEQ ID NO: 1537550 - DNA, 25 bp, Homo sapien
caagagaagggcgtctcaggctctc

SEQ ID NO: 1537551 - DNA, 25 bp, Homo sapien
cctgcgtcgccaaggaggagtctct

SEQ ID NO: 1537552 - DNA, 25 bp, Homo sapien
tccaagcatcggaaaaggcgggcct

SEQ ID NO: 1537553 - DNA, 25 bp, Homo sapien
tatgcccttacccagattcaaagtg

SEQ ID NO: 1537554 - DNA, 25 bp, Homo sapien
tatcagtgcatatgttttggaacca

SEQ ID NO: 1537555 - DNA, 25 bp, Homo sapien
taagttgcagacacgaggccttttt

SEQ ID NO: 1537556 - DNA, 25 bp, Homo sapien
gtgtatgtcttaagaacaaggccat

SEQ ID NO: 1537557 - DNA, 25 bp, Homo sapien
cagggaggcctgtcgtgacctccaa

SEQ ID NO: 1537558 - DNA, 25 bp, Homo sapien
taacagcactcaccacagcttgact

SEQ ID NO: 1537559 - DNA, 25 bp, Homo sapien
tgccacctcttcagggaggcctgtc

SEQ ID NO: 1537560 - DNA, 25 bp, Homo sapien
tctgtctctgtctacatcctcaagc

SEQ ID NO: 1537561 - DNA, 25 bp, Homo sapien
ctccctgcggcgtgggcaggtgatg

SEQ ID NO: 1537562 - DNA, 25 bp, Homo sapien
tccctgcggcgtgggcaggtgatgg

SEQ ID NO: 1537563 - DNA, 25 bp, Homo sapien
tcctggaaccccgatttcaatctac

SEQ ID NO: 1537564 - DNA, 25 bp, Homo sapien
tggagaatttcaatgccccgagtcc

SEQ ID NO: 1537565 - DNA, 25 bp, Homo sapien
ccaacagctcgagggagaacctgaa

SEQ ID NO: 1537566 - DNA, 25 bp, Homo sapien
cgttctagtcactggcctcaaagga

SEQ ID NO: 1537567 - DNA, 25 bp, Homo sapien
agtccccaggaaacccaatcatgag

SEQ ID NO: 1537568 - DNA, 25 bp, Homo sapien
tcaggatatgcattccaggctccca

SEQ ID NO: 1537569 - DNA, 25 bp, Homo sapien
tcaagtcctacagcccctagaagac

SEQ ID NO: 1537570 - DNA, 25 bp, Homo sapien
caatcatgaggtccttgtgcctggt

SEQ ID NO: 1537571 - DNA, 25 bp, Homo sapien
caacccctcaatcagagacttcctt

SEQ ID NO: 1537572 - DNA, 25 bp, Homo sapien
tgaagcccttagattccaacccctc

SEQ ID NO: 1537573 - DNA, 25 bp, Homo sapien
tgctaattacaggaccccccaagtc

SEQ ID NO: 1537574 - DNA, 25 bp, Homo sapien
tcaagatgtcgtgaccccatggtca

SEQ ID NO: 1537575 - DNA, 25 bp, Homo sapien
ccggaccccaaaggacattgcatca

SEQ ID NO: 1537576 - DNA, 25 bp, Homo sapien
cccaaaggacattgcatcagagaac

SEQ ID NO: 1537577 - DNA, 25 bp, Homo sapien
cataaggcagttggacccagaggtc

SEQ ID NO: 1537578 - DNA, 25 bp, Homo sapien
gagggatccataaggcagttggacc

SEQ ID NO: 1537579 - DNA, 25 bp, Homo sapien
tgggtgggcgtggagctggacgaac

SEQ ID NO: 1537580 - DNA, 25 bp, Homo sapien
ttccttagccatcgcctcccttctc

SEQ ID NO: 1537581 - DNA, 25 bp, Homo sapien
accacggagtttgccagcggccagt

SEQ ID NO: 1537582 - DNA, 25 bp, Homo sapien
cagacgggcacactgcggttctgtg

SEQ ID NO: 1537583 - DNA, 25 bp, Homo sapien
ctgagggcgtgacctacagcactga

SEQ ID NO: 1537584 - DNA, 25 bp, Homo sapien
tgaagtgtggccctcatccctactg

SEQ ID NO: 1537585 - DNA, 25 bp, Homo sapien
ccacatgtcctcattacaggcttgg

SEQ ID NO: 1537586 - DNA, 25 bp, Homo sapien
gagattgcctccctgagggcgtgac

SEQ ID NO: 1537587 - DNA, 25 bp, Homo sapien
tacagctcccctactgaggctggaa

SEQ ID NO: 1537588 - DNA, 25 bp, Homo sapien
ttcttcgatcccaatgacccggcgt

SEQ ID NO: 1537589 - DNA, 25 bp, Homo sapien
cagcttgagaccctgcattagaggc

SEQ ID NO: 1537590 - DNA, 25 bp, Homo sapien
taaaaggcaaagacctacagctccc

SEQ ID NO: 1537591 - DNA, 25 bp, Homo sapien
tgtatttaccataaacaagctgctg

SEQ ID NO: 1537592 - DNA, 25 bp, Homo sapien
tctttgccctgagacaactcacagg

SEQ ID NO: 1537593 - DNA, 25 bp, Homo sapien
cacatttaggtttatatgcaagaaa

SEQ ID NO: 1537594 - DNA, 25 bp, Homo sapien
tggacctggctttatgctaggggct

SEQ ID NO: 1537595 - DNA, 25 bp, Homo sapien
taaggagtcccacgctttttgccaa

SEQ ID NO: 1537596 - DNA, 25 bp, Homo sapien
gccaagcctggtactgagttcatga

SEQ ID NO: 1537597 - DNA, 25 bp, Homo sapien
agacattatacgtgggcttggccca

SEQ ID NO: 1537598 - DNA, 25 bp, Homo sapien
tctttgcaaatcagtacgacagcct

SEQ ID NO: 1537599 - DNA, 25 bp, Homo sapien
tgagcggtcacaacctgaagtccct

SEQ ID NO: 1537600 - DNA, 25 bp, Homo sapien
cagtgctgggagcactgcaacgccg

SEQ ID NO: 1537601 - DNA, 25 bp, Homo sapien
tctctggcccagtgcgcctagtggt

SEQ ID NO: 1537602 - DNA, 25 bp, Homo sapien
cctagtggtgctgggccccacatcg

SEQ ID NO: 1537603 - DNA, 25 bp, Homo sapien
catgctgctctaacaaacttggtgg

SEQ ID NO: 1537604 - DNA, 25 bp, Homo sapien
ggccaggagtccaaatcggctttcc

SEQ ID NO: 1537605 - DNA, 25 bp, Homo sapien
gcctgttccggttcctggtggctgc

SEQ ID NO: 1537606 - DNA, 25 bp, Homo sapien
tctgcctccatggttgcattgccct

SEQ ID NO: 1537607 - DNA, 25 bp, Homo sapien
atgctagtcaagcatggttgtgtgg

SEQ ID NO: 1537608 - DNA, 25 bp, Homo sapien
tgtggggagacaatgttaaatcagc

SEQ ID NO: 1537609 - DNA, 25 bp, Homo sapien
taacccacaacactcggaccagctc

SEQ ID NO: 1537610 - DNA, 25 bp, Homo sapien
caataacccacaacactcggaccag

SEQ ID NO: 1537611 - DNA, 25 bp, Homo sapien
gtcacggatcctttgagggaccctg

SEQ ID NO: 1537612 - DNA, 25 bp, Homo sapien
tcatggataggtgagggatcaaaca

SEQ ID NO: 1537613 - DNA, 25 bp, Homo sapien
gagaagcaagtaagcccctgctgga

SEQ ID NO: 1537614 - DNA, 25 bp, Homo sapien
actgagtacgtgacctgggagttac

SEQ ID NO: 1537615 - DNA, 25 bp, Homo sapien
agggcgccgaactgctccaacactg

SEQ ID NO: 1537616 - DNA, 25 bp, Homo sapien
actgcagggcgccgaactgctccaa

SEQ ID NO: 1537617 - DNA, 25 bp, Homo sapien
caagtactgcagggcgccgaactgc

SEQ ID NO: 1537618 - DNA, 25 bp, Homo sapien
tgctccaacactgcgggccgcctgg

SEQ ID NO: 1537619 - DNA, 25 bp, Homo sapien
gcaaaactcagcgggggctggatag

SEQ ID NO: 1537620 - DNA, 25 bp, Homo sapien
ccggcaaaactcagcgggggctgga

SEQ ID NO: 1537621 - DNA, 25 bp, Homo sapien
aactcagcgggggctggatagccat

SEQ ID NO: 1537622 - DNA, 25 bp, Homo sapien
aaaactcagcgggggctggatagcc

SEQ ID NO: 1537623 - DNA, 25 bp, Homo sapien
gactccacggacgtcacgtgaggca

SEQ ID NO: 1537624 - DNA, 25 bp, Homo sapien
tacgtgacgagactccacggacgtc

SEQ ID NO: 1537625 - DNA, 25 bp, Homo sapien
ggcgctccgcgagaaccaaagtgca

SEQ ID NO: 1537626 - DNA, 25 bp, Homo sapien
gttaggcggcgctccgcgagaacca

SEQ ID NO: 1537627 - DNA, 25 bp, Homo sapien
tttggttggcgcaggctcagaaacg

SEQ ID NO: 1537628 - DNA, 25 bp, Homo sapien
gctttgcgcaggtgcacagtactcg

SEQ ID NO: 1537629 - DNA, 25 bp, Homo sapien
gccgtaagagattgactagccagtt

SEQ ID NO: 1537630 - DNA, 25 bp, Homo sapien
tttttgccgccacctagaggaacta

SEQ ID NO: 1537631 - DNA, 25 bp, Homo sapien
cattattcgctgaaacatacaggtt

SEQ ID NO: 1537632 - DNA, 25 bp, Homo sapien
tttacgaggctaaggccacggccgc

SEQ ID NO: 1537633 - DNA, 25 bp, Homo sapien
tggatgcctgattaagcgtcatggg

SEQ ID NO: 1537634 - DNA, 25 bp, Homo sapien
tgccgggcggcgcttagaaccaatg

SEQ ID NO: 1537635 - DNA, 25 bp, Homo sapien
tcctcggaggccgtcgagagtcgcg

SEQ ID NO: 1537636 - DNA, 25 bp, Homo sapien
cgcgccggaactcccgccatgacag

SEQ ID NO: 1537637 - DNA, 25 bp, Homo sapien
cgtccgccgccgtaggcagattggt

SEQ ID NO: 1537638 - DNA, 25 bp, Homo sapien
atcgttccgcgcatagcctccggac

SEQ ID NO: 1537639 - DNA, 25 bp, Homo sapien
ggtcacaggttaggccactgctgtt

SEQ ID NO: 1537640 - DNA, 25 bp, Homo sapien
cacatggcctgtgccggggtcacag

SEQ ID NO: 1537641 - DNA, 25 bp, Homo sapien
tgccggggtcacaggttaggccact

SEQ ID NO: 1537642 - DNA, 25 bp, Homo sapien
cggggtcacaggttaggccactgct

SEQ ID NO: 1537643 - DNA, 25 bp, Homo sapien
caggaactgttctagacagagaggg

SEQ ID NO: 1537644 - DNA, 25 bp, Homo sapien
ggctatggaatcctctccacagctc

SEQ ID NO: 1537645 - DNA, 25 bp, Homo sapien
gagagggggctatggaatcctctcc

SEQ ID NO: 1537646 - DNA, 25 bp, Homo sapien
agctctcagaggcaggccccattct

SEQ ID NO: 1537647 - DNA, 25 bp, Homo sapien
cttggggtccaaaatcaccaccaca

SEQ ID NO: 1537648 - DNA, 25 bp, Homo sapien
ttctccttggggtccaaaatcacca

SEQ ID NO: 1537649 - DNA, 25 bp, Homo sapien
ttgttctccttggggtccaaaatca

SEQ ID NO: 1537650 - DNA, 25 bp, Homo sapien
ctggcggtgttaaagatgtgctgct

SEQ ID NO: 1537651 - DNA, 25 bp, Homo sapien
agaaggccagagcactgagagactt

SEQ ID NO: 1537652 - DNA, 25 bp, Homo sapien
gaaggccagagcactgagagacttc

SEQ ID NO: 1537653 - DNA, 25 bp, Homo sapien
gagaaggccagagcactgagagact

SEQ ID NO: 1537654 - DNA, 25 bp, Homo sapien
cttcatattgggtgagaaggccaca

SEQ ID NO: 1537655 - DNA, 25 bp, Homo sapien
atgcgcacagcaggcctatgcccat

SEQ ID NO: 1537656 - DNA, 25 bp, Homo sapien
gacgttgagcaccatgtcatgttgg

SEQ ID NO: 1537657 - DNA, 25 bp, Homo sapien
catacttgtggcctagcatctccgc

SEQ ID NO: 1537658 - DNA, 25 bp, Homo sapien
tgttggaggccactacgatgtcttt

SEQ ID NO: 1537659 - DNA, 25 bp, Homo sapien
cacatggcggttcccaacagtgaca

SEQ ID NO: 1537660 - DNA, 25 bp, Homo sapien
aggagagggcaatgactctacaaga

SEQ ID NO: 1537661 - DNA, 25 bp, Homo sapien
tcagtggagacttccaagaaccaga

SEQ ID NO: 1537662 - DNA, 25 bp, Homo sapien
caggatgcccgagcgccctacaagg

SEQ ID NO: 1537663 - DNA, 25 bp, Homo sapien
agaggaggcccgagtaggacacaca

SEQ ID NO: 1537664 - DNA, 25 bp, Homo sapien
gacacacagaaggtactgcccgcca

SEQ ID NO: 1537665 - DNA, 25 bp, Homo sapien
cagaagatgttgttgtgcagctcgc

SEQ ID NO: 1537666 - DNA, 25 bp, Homo sapien
ctggctgacacagaggcaggaagac

SEQ ID NO: 1537667 - DNA, 25 bp, Homo sapien
ctgacacagaggcaggaagacaggg

SEQ ID NO: 1537668 - DNA, 25 bp, Homo sapien
tgacacagaggcaggaagacaggga

SEQ ID NO: 1537669 - DNA, 25 bp, Homo sapien
cacagaggcaggaagacagggagac

SEQ ID NO: 1537670 - DNA, 25 bp, Homo sapien
gcgaggtagtgcaggctatgggcct

SEQ ID NO: 1537671 - DNA, 25 bp, Homo sapien
cttgggcaggttggcgaggtagtgc

SEQ ID NO: 1537672 - DNA, 25 bp, Homo sapien
gaagatgcggactatcccatctgtg

SEQ ID NO: 1537673 - DNA, 25 bp, Homo sapien
ctgtgccacgtctaccccaaggtag

SEQ ID NO: 1537674 - DNA, 25 bp, Homo sapien
ccttatacacgcaggacagccactg

SEQ ID NO: 1537675 - DNA, 25 bp, Homo sapien
ctccacgttccaaacgtaggagctg

SEQ ID NO: 1537676 - DNA, 25 bp, Homo sapien
tgtagatgctgtggtccttatacac

SEQ ID NO: 1537677 - DNA, 25 bp, Homo sapien
ccacgttccaaacgtaggagctgtg

SEQ ID NO: 1537678 - DNA, 25 bp, Homo sapien
ccaaatgtgagcttgttaagggcag

SEQ ID NO: 1537679 - DNA, 25 bp, Homo sapien
tgaaatacataaacgacctccacag

SEQ ID NO: 1537680 - DNA, 25 bp, Homo sapien
agttgcaggtctcactccccgattt

SEQ ID NO: 1537681 - DNA, 25 bp, Homo sapien
tgctgcttggcgtgttattcactga

SEQ ID NO: 1537682 - DNA, 25 bp, Homo sapien
ctgaagaacaagtcagaaaggatcc

SEQ ID NO: 1537683 - DNA, 25 bp, Homo sapien
gcaaacaagctctctggtcttcaaa

SEQ ID NO: 1537684 - DNA, 25 bp, Homo sapien
agttccagaagcgaatggtgttgtc

SEQ ID NO: 1537685 - DNA, 25 bp, Homo sapien
tgctgtccaagttccagaagcgaat

SEQ ID NO: 1537686 - DNA, 25 bp, Homo sapien
tcctgaaagatggttcacaaaggaa

SEQ ID NO: 1537687 - DNA, 25 bp, Homo sapien
tgaaagatggttcacaaaggaagcc

SEQ ID NO: 1537688 - DNA, 25 bp, Homo sapien
aagatggttcacaaaggaagccact

SEQ ID NO: 1537689 - DNA, 25 bp, Homo sapien
gatggttcacaaaggaagccactca

SEQ ID NO: 1537690 - DNA, 25 bp, Homo sapien
tgggtgtgttgggctgccgggagtg

SEQ ID NO: 1537691 - DNA, 25 bp, Homo sapien
catctcaagacttaggaagcaattt

SEQ ID NO: 1537692 - DNA, 25 bp, Homo sapien
ctctcccagggaattccatctcaag

SEQ ID NO: 1537693 - DNA, 25 bp, Homo sapien
tctcccagggaattccatctcaaga

SEQ ID NO: 1537694 - DNA, 25 bp, Homo sapien
ctcaagacttaggaagcaatttcac

SEQ ID NO: 1537695 - DNA, 25 bp, Homo sapien
tgggtgtcccattctcgctcccccg

SEQ ID NO: 1537696 - DNA, 25 bp, Homo sapien
cggctttcacgtccatgggtgtccc

SEQ ID NO: 1537697 - DNA, 25 bp, Homo sapien
accccggctttcacgtccatgggtg

SEQ ID NO: 1537698 - DNA, 25 bp, Homo sapien
tgtcattctccacgtacacgacctt

SEQ ID NO: 1537699 - DNA, 25 bp, Homo sapien
ttcggtcgcctgaagccaaatgctg

SEQ ID NO: 1537700 - DNA, 25 bp, Homo sapien
cctgaagccaaatgctggccgtcag

SEQ ID NO: 1537701 - DNA, 25 bp, Homo sapien
atttccacttcggtcgcctgaagcc

SEQ ID NO: 1537702 - DNA, 25 bp, Homo sapien
tcgcctgaagccaaatgctggccgt

SEQ ID NO: 1537703 - DNA, 25 bp, Homo sapien
ctcattcccaatgggcagcaggagg

SEQ ID NO: 1537704 - DNA, 25 bp, Homo sapien
gcccctcattcccaatgggcagcag

SEQ ID NO: 1537705 - DNA, 25 bp, Homo sapien
ccctcattcccaatgggcagcagga

SEQ ID NO: 1537706 - DNA, 25 bp, Homo sapien
agcccctcattcccaatgggcagca

SEQ ID NO: 1537707 - DNA, 25 bp, Homo sapien
acagttcagcactggtaccatgtgg

SEQ ID NO: 1537708 - DNA, 25 bp, Homo sapien
ccagctggcatcttcggtgacagtt

SEQ ID NO: 1537709 - DNA, 25 bp, Homo sapien
gggcacataagcagcctgaactctc

SEQ ID NO: 1537710 - DNA, 25 bp, Homo sapien
taacatcctgccaaacctcaacagg

SEQ ID NO: 1537711 - DNA, 25 bp, Homo sapien
ccgtctctggcttggagtactccag

SEQ ID NO: 1537712 - DNA, 25 bp, Homo sapien
tgaccagctcgtccatgaagtgcag

SEQ ID NO: 1537713 - DNA, 25 bp, Homo sapien
gcacctcagcatcatgggcctccac

SEQ ID NO: 1537714 - DNA, 25 bp, Homo sapien
gtctctggcttggagtactccaggc

SEQ ID NO: 1537715 - DNA, 25 bp, Homo sapien
agccggtcccgactggctgaggcca

SEQ ID NO: 1537716 - DNA, 25 bp, Homo sapien
cagcgaacttgatggcggtgatgga

SEQ ID NO: 1537717 - DNA, 25 bp, Homo sapien
ccgactggctgaggccagcaaggtc

SEQ ID NO: 1537718 - DNA, 25 bp, Homo sapien
ggaggagtggtcatccagcgtctgc

SEQ ID NO: 1537719 - DNA, 25 bp, Homo sapien
tgggcactgcgaaagtagatgctct

SEQ ID NO: 1537720 - DNA, 25 bp, Homo sapien
ctgatcatctggatgtctctgttgc

SEQ ID NO: 1537721 - DNA, 25 bp, Homo sapien
tgctgggcactgcgaaagtagatgc

SEQ ID NO: 1537722 - DNA, 25 bp, Homo sapien
gctgatcatctggatgtctctgttg

SEQ ID NO: 1537723 - DNA, 25 bp, Homo sapien
ctcacattgcggtcctggcaggcca

SEQ ID NO: 1537724 - DNA, 25 bp, Homo sapien
ctgctacgtggtgggtacggacaaa

SEQ ID NO: 1537725 - DNA, 25 bp, Homo sapien
tacggacaaagtgtagtccatccga

SEQ ID NO: 1537726 - DNA, 25 bp, Homo sapien
aggccacggccacgtacttctgggt

SEQ ID NO: 1537727 - DNA, 25 bp, Homo sapien
ctgcttcccgttcacagtgttgtag

SEQ ID NO: 1537728 - DNA, 25 bp, Homo sapien
tctgcttcccgttcacagtgttgta

SEQ ID NO: 1537729 - DNA, 25 bp, Homo sapien
cttcagcaaggacccttcgtcaccc

SEQ ID NO: 1537730 - DNA, 25 bp, Homo sapien
ccgagtaaaagtcaatcactgagat

SEQ ID NO: 1537731 - DNA, 25 bp, Homo sapien
acatcttggcaatgcactcgcccga

SEQ ID NO: 1537732 - DNA, 25 bp, Homo sapien
cactcgcccgagtaaaagtcaatca

SEQ ID NO: 1537733 - DNA, 25 bp, Homo sapien
tggcaatgcactcgcccgagtaaaa

SEQ ID NO: 1537734 - DNA, 25 bp, Homo sapien
gaggcatcccaagcagagaggcaca

SEQ ID NO: 1537735 - DNA, 25 bp, Homo sapien
gtggggaggcatcccaagcagagag

SEQ ID NO: 1537736 - DNA, 25 bp, Homo sapien
ttcggagtcagagggtgtgggcggg

SEQ ID NO: 1537737 - DNA, 25 bp, Homo sapien
cggagtcagagggtgtgggcgggtg

SEQ ID NO: 1537738 - DNA, 25 bp, Homo sapien
ctgcaaacaaagcagagaggctgca

SEQ ID NO: 1537739 - DNA, 25 bp, Homo sapien
aacaaagcagagaggctgcacttgc

SEQ ID NO: 1537740 - DNA, 25 bp, Homo sapien
gcaaacaaagcagagaggctgcact

SEQ ID NO: 1537741 - DNA, 25 bp, Homo sapien
caaacaaagcagagaggctgcactt

SEQ ID NO: 1537742 - DNA, 25 bp, Homo sapien
gatactgtgatcaagtgatgacagt

SEQ ID NO: 1537743 - DNA, 25 bp, Homo sapien
ctgtctccagatactgtgatcaagt

SEQ ID NO: 1537744 - DNA, 25 bp, Homo sapien
gacagtcataggtgaacttcatgct

SEQ ID NO: 1537745 - DNA, 25 bp, Homo sapien
caagtgatgacagtcataggtgaac

SEQ ID NO: 1537746 - DNA, 25 bp, Homo sapien
caagactcccacaatccaaactggg

SEQ ID NO: 1537747 - DNA, 25 bp, Homo sapien
gggctgggtgtgacaccaagactcc

SEQ ID NO: 1537748 - DNA, 25 bp, Homo sapien
aggctgagtgcagtgctcatggtat

SEQ ID NO: 1537749 - DNA, 25 bp, Homo sapien
gctgagtgcagtgctcatggtatct

SEQ ID NO: 1537750 - DNA, 25 bp, Homo sapien
cagttggtgatctccgggcccaggt

SEQ ID NO: 1537751 - DNA, 25 bp, Homo sapien
tgctgctgccggtggtcaatctcca

SEQ ID NO: 1537752 - DNA, 25 bp, Homo sapien
tggccactccgcttcttgtcatttg

SEQ ID NO: 1537753 - DNA, 25 bp, Homo sapien
gcccaggtgccagatgaacacgcag

SEQ ID NO: 1537754 - DNA, 25 bp, Homo sapien
tcagggagtgaatctcactaggtgt

SEQ ID NO: 1537755 - DNA, 25 bp, Homo sapien
tccaagctatctttggatggtgtct

SEQ ID NO: 1537756 - DNA, 25 bp, Homo sapien
tcatcctctgtttgctctccagggc

SEQ ID NO: 1537757 - DNA, 25 bp, Homo sapien
aggtgtggacacatacgtatcctgc

SEQ ID NO: 1537758 - DNA, 25 bp, Homo sapien
gcagcttgccgttggttagcaggca

SEQ ID NO: 1537759 - DNA, 25 bp, Homo sapien
cacagtggcagcttgccgttggtta

SEQ ID NO: 1537760 - DNA, 25 bp, Homo sapien
cagtggcagcttgccgttggttagc

SEQ ID NO: 1537761 - DNA, 25 bp, Homo sapien
ttgccgttggttagcaggcaacgag

SEQ ID NO: 1537762 - DNA, 25 bp, Homo sapien
ttgaccttggattacacccgccttg

SEQ ID NO: 1537763 - DNA, 25 bp, Homo sapien
cctggcctcgtggcttttacacgta

SEQ ID NO: 1537764 - DNA, 25 bp, Homo sapien
gctcctggcctcgtggcttttacac

SEQ ID NO: 1537765 - DNA, 25 bp, Homo sapien
tcctggcctcgtggcttttacacgt

SEQ ID NO: 1537766 - DNA, 25 bp, Homo sapien
cttggcgtggaaggccaagccatct

SEQ ID NO: 1537767 - DNA, 25 bp, Homo sapien
ggtaaagtagcaatccaggtcctgg

SEQ ID NO: 1537768 - DNA, 25 bp, Homo sapien
ttggccggcccgctctgcccagcgg

SEQ ID NO: 1537769 - DNA, 25 bp, Homo sapien
gggctggtagctgcgcttggcgtgg

SEQ ID NO: 1537770 - DNA, 25 bp, Homo sapien
agttctccagactctcgggcttcat

SEQ ID NO: 1537771 - DNA, 25 bp, Homo sapien
cagtgaatccagaatggagttctcc

SEQ ID NO: 1537772 - DNA, 25 bp, Homo sapien
aatggagttctccagactctcgggc

SEQ ID NO: 1537773 - DNA, 25 bp, Homo sapien
tccagaatggagttctccagactct

SEQ ID NO: 1537774 - DNA, 25 bp, Homo sapien
agctgtatacctaaaatctgtgcat

SEQ ID NO: 1537775 - DNA, 25 bp, Homo sapien
ttacacagatagttcatcaagctgt

SEQ ID NO: 1537776 - DNA, 25 bp, Homo sapien
gctgtatacctaaaatctgtgcatg

SEQ ID NO: 1537777 - DNA, 25 bp, Homo sapien
cgtgaattacacagatagttcatca

SEQ ID NO: 1537778 - DNA, 25 bp, Homo sapien
tgtgactgtcacttctgcctccaga

SEQ ID NO: 1537779 - DNA, 25 bp, Homo sapien
tagaggatgagctcactggcctcag

SEQ ID NO: 1537780 - DNA, 25 bp, Homo sapien
ggcctcagatgattccttctgctgg

SEQ ID NO: 1537781 - DNA, 25 bp, Homo sapien
tctgcctccagagagtagaggatga

SEQ ID NO: 1537782 - DNA, 25 bp, Homo sapien
tggtcctttgggctgtcggaggaca

SEQ ID NO: 1537783 - DNA, 25 bp, Homo sapien
ccctgaggtaggagtcgccctgctg

SEQ ID NO: 1537784 - DNA, 25 bp, Homo sapien
acaccctgaggtaggagtcgccctg

SEQ ID NO: 1537785 - DNA, 25 bp, Homo sapien
aggacaccctgaggtaggagtcgcc

SEQ ID NO: 1537786 - DNA, 25 bp, Homo sapien
acagcctgaccattctggtgagcca

SEQ ID NO: 1537787 - DNA, 25 bp, Homo sapien
tgagcttcagtactgggtcaaagtc

SEQ ID NO: 1537788 - DNA, 25 bp, Homo sapien
tgtgtcttcctcgacagactctgag

SEQ ID NO: 1537789 - DNA, 25 bp, Homo sapien
aagtcaccatcggtgcccagaaagg

SEQ ID NO: 1537790 - DNA, 25 bp, Homo sapien
cgtggcaaaccgaggggcagggtca

SEQ ID NO: 1537791 - DNA, 25 bp, Homo sapien
ctggggagtggatggctgcgaagct

SEQ ID NO: 1537792 - DNA, 25 bp, Homo sapien
tggatggctgcgaagctgcactcca

SEQ ID NO: 1537793 - DNA, 25 bp, Homo sapien
gggaaatggggcagcgacgtggcaa

SEQ ID NO: 1537794 - DNA, 25 bp, Homo sapien
tagacattgtgactggccctaagcc

SEQ ID NO: 1537795 - DNA, 25 bp, Homo sapien
cctgttgcccgcaggctgagaagca

SEQ ID NO: 1537796 - DNA, 25 bp, Homo sapien
gccaacaccatgagtcacagcagac

SEQ ID NO: 1537797 - DNA, 25 bp, Homo sapien
agaagcagggatccccgtcttccag

SEQ ID NO: 1537798 - DNA, 25 bp, Homo sapien
tggggacgctgggtccctcgggcag

SEQ ID NO: 1537799 - DNA, 25 bp, Homo sapien
ctggggacgctgggtccctcgggca

SEQ ID NO: 1537800 - DNA, 25 bp, Homo sapien
gggactcagtcagtgtctcaaagtg

SEQ ID NO: 1537801 - DNA, 25 bp, Homo sapien
tctcaaagtggtggcggaggaactt

SEQ ID NO: 1537802 - DNA, 25 bp, Homo sapien
agggggactcagtcagtgtctcaaa

SEQ ID NO: 1537803 - DNA, 25 bp, Homo sapien
cagtcagtgtctcaaagtggtggcg

SEQ ID NO: 1537804 - DNA, 25 bp, Homo sapien
gtcaagagtgaagcagtgggccggg

SEQ ID NO: 1537805 - DNA, 25 bp, Homo sapien
ggcactccccagaaacccttatgta

SEQ ID NO: 1537806 - DNA, 25 bp, Homo sapien
tgtacagacacagggtacgagcagg

SEQ ID NO: 1537807 - DNA, 25 bp, Homo sapien
gggacgccaatgctgtgcccaggct

SEQ ID NO: 1537808 - DNA, 25 bp, Homo sapien
atactcaggcgtgggttgaagaagt

SEQ ID NO: 1537809 - DNA, 25 bp, Homo sapien
tggagatactcaggcgtgggttgaa

SEQ ID NO: 1537810 - DNA, 25 bp, Homo sapien
ggaggcttgagaggaactgcgtgga

SEQ ID NO: 1537811 - DNA, 25 bp, Homo sapien
ttgagaggaactgcgtggagatact

SEQ ID NO: 1537812 - DNA, 25 bp, Homo sapien
ttcacaaggcactgggttgcccggg

SEQ ID NO: 1537813 - DNA, 25 bp, Homo sapien
tctggagacttcacaaggcactggg

SEQ ID NO: 1537814 - DNA, 25 bp, Homo sapien
catgagcttgacctctggagacttc

SEQ ID NO: 1537815 - DNA, 25 bp, Homo sapien
gctggcttccgcctcggtccatgag

SEQ ID NO: 1537816 - DNA, 25 bp, Homo sapien
gtgggtcctgtctggggaggcgtag

SEQ ID NO: 1537817 - DNA, 25 bp, Homo sapien
cctgtctggggaggcgtagccagta

SEQ ID NO: 1537818 - DNA, 25 bp, Homo sapien
gtcctgtctggggaggcgtagccag

SEQ ID NO: 1537819 - DNA, 25 bp, Homo sapien
gggtcctgtctggggaggcgtagcc

SEQ ID NO: 1537820 - DNA, 25 bp, Homo sapien
agggtctcttcagccttccctgcag

SEQ ID NO: 1537821 - DNA, 25 bp, Homo sapien
cttcagccttccctgcagcgaggac

SEQ ID NO: 1537822 - DNA, 25 bp, Homo sapien
aggcctccagggtctcttcagcctt

SEQ ID NO: 1537823 - DNA, 25 bp, Homo sapien
gtggtgggcgccaggcctccagggt

SEQ ID NO: 1537824 - DNA, 25 bp, Homo sapien
cacagctaggctggacatccggcca

SEQ ID NO: 1537825 - DNA, 25 bp, Homo sapien
tggacatccggccactcgccgagaa

SEQ ID NO: 1537826 - DNA, 25 bp, Homo sapien
gaaacccaggactgtccgtctggga

SEQ ID NO: 1537827 - DNA, 25 bp, Homo sapien
agaactgatggctagggcccccacg

SEQ ID NO: 1537828 - DNA, 25 bp, Homo sapien
tgggcagcacggaggaagcagggac

SEQ ID NO: 1537829 - DNA, 25 bp, Homo sapien
ctgtgggcagcacggaggaagcagg

SEQ ID NO: 1537830 - DNA, 25 bp, Homo sapien
ggaagcagggacacaggacgccagg

SEQ ID NO: 1537831 - DNA, 25 bp, Homo sapien
aggaagcagggacacaggacgccag

SEQ ID NO: 1537832 - DNA, 25 bp, Homo sapien
gggtgggtgcagatgtgggcgttgg

SEQ ID NO: 1537833 - DNA, 25 bp, Homo sapien
tggcctccatgtaggaacaggtgga

SEQ ID NO: 1537834 - DNA, 25 bp, Homo sapien
gatgtgggcgttgggagattcctgt

SEQ ID NO: 1537835 - DNA, 25 bp, Homo sapien
gcagatgtgggcgttgggagattcc

SEQ ID NO: 1537836 - DNA, 25 bp, Homo sapien
cagggcaggctcttggccctcactg

SEQ ID NO: 1537837 - DNA, 25 bp, Homo sapien
ggcctcgtggttgccccaggaacgc

SEQ ID NO: 1537838 - DNA, 25 bp, Homo sapien
caaactgggtgttgtcgcggtggtg

SEQ ID NO: 1537839 - DNA, 25 bp, Homo sapien
cccaacggacgatggcctacggagg

SEQ ID NO: 1537840 - DNA, 25 bp, Homo sapien
gagctgggagacttgggcgaaaggc

SEQ ID NO: 1537841 - DNA, 25 bp, Homo sapien
acggtgacgccaggctgggtatcca

SEQ ID NO: 1537842 - DNA, 25 bp, Homo sapien
agacttgggcgaaaggcagagccgt

SEQ ID NO: 1537843 - DNA, 25 bp, Homo sapien
aagctcactgcagggacggtgacgc

SEQ ID NO: 1537844 - DNA, 25 bp, Homo sapien
agggaggcagtgccgccagggatgc

SEQ ID NO: 1537845 - DNA, 25 bp, Homo sapien
gagggaggcagtgccgccagggatg

SEQ ID NO: 1537846 - DNA, 25 bp, Homo sapien
ggcagggcttcaaccggcacccagg

SEQ ID NO: 1537847 - DNA, 25 bp, Homo sapien
agggcttcaaccggcacccagggct

SEQ ID NO: 1537848 - DNA, 25 bp, Homo sapien
gcagggcttcaaccggcacccaggg

SEQ ID NO: 1537849 - DNA, 25 bp, Homo sapien
gggcagggcttcaaccggcacccag

SEQ ID NO: 1537850 - DNA, 25 bp, Homo sapien
cacacggtaaaggtcgagggcttct

SEQ ID NO: 1537851 - DNA, 25 bp, Homo sapien
cacggtaaaggtcgagggcttcttg

SEQ ID NO: 1537852 - DNA, 25 bp, Homo sapien
cacactagtccccaccaggcattca

SEQ ID NO: 1537853 - DNA, 25 bp, Homo sapien
agaccagctcagtccgtgcctgctg

SEQ ID NO: 1537854 - DNA, 25 bp, Homo sapien
ggctggggccacactagtccccacc

SEQ ID NO: 1537855 - DNA, 25 bp, Homo sapien
gagaccagctcagtccgtgcctgct

SEQ ID NO: 1537856 - DNA, 25 bp, Homo sapien
agcagctccgagtagtgttccagca

SEQ ID NO: 1537857 - DNA, 25 bp, Homo sapien
cagcagctccgagtagtgttccagc

SEQ ID NO: 1537858 - DNA, 25 bp, Homo sapien
gcagctccgagtagtgttccagcag

SEQ ID NO: 1537859 - DNA, 25 bp, Homo sapien
accagcagctccgagtagtgttcca

SEQ ID NO: 1537860 - DNA, 25 bp, Homo sapien
agtgcccccgtgccttcctccgcac

SEQ ID NO: 1537861 - DNA, 25 bp, Homo sapien
tcagtgcccccgtgccttcctccgc

SEQ ID NO: 1537862 - DNA, 25 bp, Homo sapien
cagtgcccccgtgccttcctccgca

SEQ ID NO: 1537863 - DNA, 25 bp, Homo sapien
ttcgcttaaaatacctaagtcctca

SEQ ID NO: 1537864 - DNA, 25 bp, Homo sapien
cgcttaaaatacctaagtcctcaga

SEQ ID NO: 1537865 - DNA, 25 bp, Homo sapien
gctgtcagtttattcgcttaaaata

SEQ ID NO: 1537866 - DNA, 25 bp, Homo sapien
tcagtttattcgcttaaaataccta

SEQ ID NO: 1537867 - DNA, 25 bp, Homo sapien
ctgggagctcgtggaatgtagaact

SEQ ID NO: 1537868 - DNA, 25 bp, Homo sapien
tttttagcagacaccccatgtggcc

SEQ ID NO: 1537869 - DNA, 25 bp, Homo sapien
ccccagccaagagtggcttttttag

SEQ ID NO: 1537870 - DNA, 25 bp, Homo sapien
cacaccccagccaagagtggctttt

SEQ ID NO: 1537871 - DNA, 25 bp, Homo sapien
tgatccaggctacgggtacagggat

SEQ ID NO: 1537872 - DNA, 25 bp, Homo sapien
ctggggacccgaacaggctcctgat

SEQ ID NO: 1537873 - DNA, 25 bp, Homo sapien
gggacccgaacaggctcctgatcca

SEQ ID NO: 1537874 - DNA, 25 bp, Homo sapien
gctcctgatccaggctacgggtaca

SEQ ID NO: 1537875 - DNA, 25 bp, Homo sapien
gccctccggaaggctctccacacac

SEQ ID NO: 1537876 - DNA, 25 bp, Homo sapien
ccctccggaaggctctccacacaca

SEQ ID NO: 1537877 - DNA, 25 bp, Homo sapien
cctccggaaggctctccacacacag

SEQ ID NO: 1537878 - DNA, 25 bp, Homo sapien
ccgactcctgaccaggaaggcgcgg

SEQ ID NO: 1537879 - DNA, 25 bp, Homo sapien
gctgtggacgccgactcctgaccag

SEQ ID NO: 1537880 - DNA, 25 bp, Homo sapien
gatataggcatctccccggagctgg

SEQ ID NO: 1537881 - DNA, 25 bp, Homo sapien
ctgggatataggcatctccccggag

SEQ ID NO: 1537882 - DNA, 25 bp, Homo sapien
cagatggtgacactgcgtctctcct

SEQ ID NO: 1537883 - DNA, 25 bp, Homo sapien
gatggtgacactgcgtctctcctgc

SEQ ID NO: 1537884 - DNA, 25 bp, Homo sapien
gccagatggtgacactgcgtctctc

SEQ ID NO: 1537885 - DNA, 25 bp, Homo sapien
agccagatggtgacactgcgtctct

SEQ ID NO: 1537886 - DNA, 25 bp, Homo sapien
gatccctgacactggacgactgttg

SEQ ID NO: 1537887 - DNA, 25 bp, Homo sapien
tccacggatccctgacactggacga

SEQ ID NO: 1537888 - DNA, 25 bp, Homo sapien
gacactggacgactgttgtgccggt

SEQ ID NO: 1537889 - DNA, 25 bp, Homo sapien
gctgtccacggatccctgacactgg

SEQ ID NO: 1537890 - DNA, 25 bp, Homo sapien
gcagagcgggcagcccagcgtccca

SEQ ID NO: 1537891 - DNA, 25 bp, Homo sapien
ttagggcagagcgggcagcccagcg

SEQ ID NO: 1537892 - DNA, 25 bp, Homo sapien
gggcagagcgggcagcccagcgtcc

SEQ ID NO: 1537893 - DNA, 25 bp, Homo sapien
gagcgggcagcccagcgtcccaggg

SEQ ID NO: 1537894 - DNA, 25 bp, Homo sapien
tggcgcttgagatcgaaggcgtcat

SEQ ID NO: 1537895 - DNA, 25 bp, Homo sapien
gatcgaaggcgtcatgaaagccctt

SEQ ID NO: 1537896 - DNA, 25 bp, Homo sapien
gtggcacttgaggtgccttgtcagc

SEQ ID NO: 1537897 - DNA, 25 bp, Homo sapien
aacagcggcacaggtggcggcgcac

SEQ ID NO: 1537898 - DNA, 25 bp, Homo sapien
ccttgcctttcgatctggagcctga

SEQ ID NO: 1537899 - DNA, 25 bp, Homo sapien
ggtacctattccaagctcttcagac

SEQ ID NO: 1537900 - DNA, 25 bp, Homo sapien
cagtgttgagcatttctggtaccta

SEQ ID NO: 1537901 - DNA, 25 bp, Homo sapien
gcaatgggctctggactaaagcgcc

SEQ ID NO: 1537902 - DNA, 25 bp, Homo sapien
cagggagcagcgctgcgtaaacgct

SEQ ID NO: 1537903 - DNA, 25 bp, Homo sapien
tcacggtaagcgtagctggccggct

SEQ ID NO: 1537904 - DNA, 25 bp, Homo sapien
ggctgtccatgcaccttagcaaggt

SEQ ID NO: 1537905 - DNA, 25 bp, Homo sapien
tcccgcaagcactgcagcggaaggg

SEQ ID NO: 1537906 - DNA, 25 bp, Homo sapien
ttatttgcctcgtggggaggacgct

SEQ ID NO: 1537907 - DNA, 25 bp, Homo sapien
tttatttgcctcgtggggaggacgc

SEQ ID NO: 1537908 - DNA, 25 bp, Homo sapien
tgtttatttgcctcgtggggaggac

SEQ ID NO: 1537909 - DNA, 25 bp, Homo sapien
aagccatgaaacctctgcgcggaga

SEQ ID NO: 1537910 - DNA, 25 bp, Homo sapien
tagttcacggttcttccaatagcgg

SEQ ID NO: 1537911 - DNA, 25 bp, Homo sapien
caacatgctgtaccccaaggaagac

SEQ ID NO: 1537912 - DNA, 25 bp, Homo sapien
gaagggtaaactcgcgcatgcgcac

SEQ ID NO: 1537913 - DNA, 25 bp, Homo sapien
tatcgcttctcggagcggaaggtgt

SEQ ID NO: 1537914 - DNA, 25 bp, Homo sapien
gtgaggctgcggctgtatcgcttct

SEQ ID NO: 1537915 - DNA, 25 bp, Homo sapien
gatgaaaacggtcaccgtgggtgcc

SEQ ID NO: 1537916 - DNA, 25 bp, Homo sapien
tgaaaacggtcaccgtgggtgccga

SEQ ID NO: 1537917 - DNA, 25 bp, Homo sapien
cctctggaccgtcggatttttcgct

SEQ ID NO: 1537918 - DNA, 25 bp, Homo sapien
atttttcgctggacccggccctcat

SEQ ID NO: 1537919 - DNA, 25 bp, Homo sapien
atctctgcactctcgagttctctcc

SEQ ID NO: 1537920 - DNA, 25 bp, Homo sapien
ttgcatcaatgaccatcgccacgtc

SEQ ID NO: 1537921 - DNA, 25 bp, Homo sapien
tgcccaccagcaactccagtttaca

SEQ ID NO: 1537922 - DNA, 25 bp, Homo sapien
gctgcccaccagcaactccagttta

SEQ ID NO: 1537923 - DNA, 25 bp, Homo sapien
gcaggaagcagggctgcccaccagc

SEQ ID NO: 1537924 - DNA, 25 bp, Homo sapien
agggctgcccaccagcaactccagt

SEQ ID NO: 1537925 - DNA, 25 bp, Homo sapien
gtcgtcaactccatacagctccagt

SEQ ID NO: 1537926 - DNA, 25 bp, Homo sapien
agcccaggagcgcatcctcttgatc

SEQ ID NO: 1537927 - DNA, 25 bp, Homo sapien
tcatctacagggtaggagcccagga

SEQ ID NO: 1537928 - DNA, 25 bp, Homo sapien
ccagcttgctgtagaacttgtcgtc

SEQ ID NO: 1537929 - DNA, 25 bp, Homo sapien
gggatttcctgatcccagcccagac

SEQ ID NO: 1537930 - DNA, 25 bp, Homo sapien
tatctcgggtatgactgagggcaaa

SEQ ID NO: 1537931 - DNA, 25 bp, Homo sapien
cacgaaggcaggacctatctcgggt

SEQ ID NO: 1537932 - DNA, 25 bp, Homo sapien
gagtgtcccagatagagagtcctca

SEQ ID NO: 1537933 - DNA, 25 bp, Homo sapien
gccactgcactccattccaggttgg

SEQ ID NO: 1537934 - DNA, 25 bp, Homo sapien
cactgcactccattccaggttgggt

SEQ ID NO: 1537935 - DNA, 25 bp, Homo sapien
actgcactccattccaggttgggtg

SEQ ID NO: 1537936 - DNA, 25 bp, Homo sapien
gtgccactgcactccattccaggtt

SEQ ID NO: 1537937 - DNA, 25 bp, Homo sapien
caaaaaacgattcacggactatcct

SEQ ID NO: 1537938 - DNA, 25 bp, Homo sapien
acgattcacggactatcctccctgt

SEQ ID NO: 1537939 - DNA, 25 bp, Homo sapien
tcacggactatcctccctgtcccag

SEQ ID NO: 1537940 - DNA, 25 bp, Homo sapien
aaacgattcacggactatcctccct

SEQ ID NO: 1537941 - DNA, 25 bp, Homo sapien
gctaggattacaggcatctgccacc

SEQ ID NO: 1537942 - DNA, 25 bp, Homo sapien
tccagctcctgggttcaagtgatcc

SEQ ID NO: 1537943 - DNA, 25 bp, Homo sapien
ggtgtgatctcagctcactgcaact

SEQ ID NO: 1537944 - DNA, 25 bp, Homo sapien
tctatcatccaaactggagtgcagt

SEQ ID NO: 1537945 - DNA, 25 bp, Homo sapien
agacgacattttgccatgctggtca

SEQ ID NO: 1537946 - DNA, 25 bp, Homo sapien
agagacgacattttgccatgctggt

SEQ ID NO: 1537947 - DNA, 25 bp, Homo sapien
cgacattttgccatgctggtcaggc

SEQ ID NO: 1537948 - DNA, 25 bp, Homo sapien
aagtagagacgacattttgccatgc

SEQ ID NO: 1537949 - DNA, 25 bp, Homo sapien
gcctctggtcgtaggcttcttgtga

SEQ ID NO: 1537950 - DNA, 25 bp, Homo sapien
ggacacgtcctcatactcaccaagg

SEQ ID NO: 1537951 - DNA, 25 bp, Homo sapien
ttgtgagatcgtgtacttctccacc

SEQ ID NO: 1537952 - DNA, 25 bp, Homo sapien
caaggcgggcgccactgtggtcaat

SEQ ID NO: 1537953 - DNA, 25 bp, Homo sapien
cgcttcaggaaagagcggaccgtgt

SEQ ID NO: 1537954 - DNA, 25 bp, Homo sapien
ctcctcgttgtaccggccgagcttg

SEQ ID NO: 1537955 - DNA, 25 bp, Homo sapien
cggccgagcttgctgcgcttcagga

SEQ ID NO: 1537956 - DNA, 25 bp, Homo sapien
tgcgcttcaggaaagagcggaccgt

SEQ ID NO: 1537957 - DNA, 25 bp, Homo sapien
cgaggggattgtcccgccgcccgca

SEQ ID NO: 1537958 - DNA, 25 bp, Homo sapien
ctacatacatgacggtgccccggcg

SEQ ID NO: 1537959 - DNA, 25 bp, Homo sapien
acatacatgacggtgccccggcgag

SEQ ID NO: 1537960 - DNA, 25 bp, Homo sapien
tgccccggcgaggggattgtcccgc

SEQ ID NO: 1537961 - DNA, 25 bp, Homo sapien
cgcgcccctaggcagagcgtggtct

SEQ ID NO: 1537962 - DNA, 25 bp, Homo sapien
tgagatcgtttcgagtcccccccaa

SEQ ID NO: 1537963 - DNA, 25 bp, Homo sapien
cgtggtctccgaggctccactgtgc

SEQ ID NO: 1537964 - DNA, 25 bp, Homo sapien
gcagagcgtggtctccgaggctcca

SEQ ID NO: 1537965 - DNA, 25 bp, Homo sapien
tgacactgccccacgcttcgaagcg

SEQ ID NO: 1537966 - DNA, 25 bp, Homo sapien
ctcgctggacagatcactccgcctg

SEQ ID NO: 1537967 - DNA, 25 bp, Homo sapien
gctactccttctggcgggaactctt

SEQ ID NO: 1537968 - DNA, 25 bp, Homo sapien
ctgccttggtcacgccgcccgtttc

SEQ ID NO: 1537969 - DNA, 25 bp, Homo sapien
gcactccagcctgggtgacggagtg

SEQ ID NO: 1537970 - DNA, 25 bp, Homo sapien
gaggatgcagtgagctgagagcacc

SEQ ID NO: 1537971 - DNA, 25 bp, Homo sapien
aggatgcagtgagctgagagcacca

SEQ ID NO: 1537972 - DNA, 25 bp, Homo sapien
ctccagcctgggtgacggagtgaga

SEQ ID NO: 1537973 - DNA, 25 bp, Homo sapien
agccacgatcatggccaaaggacat

SEQ ID NO: 1537974 - DNA, 25 bp, Homo sapien
gagccacgatcatggccaaaggaca

SEQ ID NO: 1537975 - DNA, 25 bp, Homo sapien
ccattacaaagtgggcaacaggaag

SEQ ID NO: 1537976 - DNA, 25 bp, Homo sapien
acaaagtgggcaacaggaagttgag

SEQ ID NO: 1537977 - DNA, 25 bp, Homo sapien
tccccagtggctcatcatagcggac

SEQ ID NO: 1537978 - DNA, 25 bp, Homo sapien
tagccaggcttgaaatctgtgagac

SEQ ID NO: 1537979 - DNA, 25 bp, Homo sapien
gacaccaatccagtagccaggcttg

SEQ ID NO: 1537980 - DNA, 25 bp, Homo sapien
tcatagcggacaccaatccagtagc

SEQ ID NO: 1537981 - DNA, 25 bp, Homo sapien
ggtgtggtcagaggaccctcacatg

SEQ ID NO: 1537982 - DNA, 25 bp, Homo sapien
gtgtggtcagaggaccctcacatgg

SEQ ID NO: 1537983 - DNA, 25 bp, Homo sapien
ttcgaagtagcgtttcccattcaca

SEQ ID NO: 1537984 - DNA, 25 bp, Homo sapien
cccaccgtcacgactgctggcttga

SEQ ID NO: 1537985 - DNA, 25 bp, Homo sapien
tgctggcttgacaaaggcgccatac

SEQ ID NO: 1537986 - DNA, 25 bp, Homo sapien
cttggcctggcattcgaagtagcgt

SEQ ID NO: 1537987 - DNA, 25 bp, Homo sapien
gtcagtggctgagctaggagctgaa

SEQ ID NO: 1537988 - DNA, 25 bp, Homo sapien
agtggctgagctaggagctgaagca

SEQ ID NO: 1537989 - DNA, 25 bp, Homo sapien
cagtggctgagctaggagctgaagc

SEQ ID NO: 1537990 - DNA, 25 bp, Homo sapien
tggctgagctaggagctgaagcagg

SEQ ID NO: 1537991 - DNA, 25 bp, Homo sapien
ttttttagatggaaacgcctcgtgc

SEQ ID NO: 1537992 - DNA, 25 bp, Homo sapien
tccactgcggccagaaagtcagctt

SEQ ID NO: 1537993 - DNA, 25 bp, Homo sapien
cttgaacaggcttgggagcggacca

SEQ ID NO: 1537994 - DNA, 25 bp, Homo sapien
ggttccccgcctcagattaagctcg

SEQ ID NO: 1537995 - DNA, 25 bp, Homo sapien
ctccggagccggacgctgcgggagg

SEQ ID NO: 1537996 - DNA, 25 bp, Homo sapien
agagttgcggcctgagtcaccggcc

SEQ ID NO: 1537997 - DNA, 25 bp, Homo sapien
ggagcggcagtggaaccgactccca

SEQ ID NO: 1537998 - DNA, 25 bp, Homo sapien
gtgcagtgtccgacccgagagttgc

SEQ ID NO: 1537999 - DNA, 25 bp, Homo sapien
agtggaaccgactcccagaactccg

SEQ ID NO: 1538000 - DNA, 25 bp, Homo sapien
cccagaactccggacgtgtgcggcg

SEQ ID NO: 1538001 - DNA, 25 bp, Homo sapien
tctgggagtcggttccactgccgct

SEQ ID NO: 1538002 - DNA, 25 bp, Homo sapien
cacacgtccggagttctgggagtcg

SEQ ID NO: 1538003 - DNA, 25 bp, Homo sapien
tctcgggtcggacactgcaccgcgg

SEQ ID NO: 1538004 - DNA, 25 bp, Homo sapien
cgccgcacacgtccggagttctggg

SEQ ID NO: 1538005 - DNA, 25 bp, Homo sapien
ggccggtgactcaggccgcaactct

SEQ ID NO: 1538006 - DNA, 25 bp, Homo sapien
cgcaactctcgggtcggacactgca

SEQ ID NO: 1538007 - DNA, 25 bp, Homo sapien
accgtgaagtctcggcctcaggagc

SEQ ID NO: 1538008 - DNA, 25 bp, Homo sapien
aaccgtgaagtctcggcctcaggag

SEQ ID NO: 1538009 - DNA, 25 bp, Homo sapien
gcgaaaccgtgaagtctcggcctca

SEQ ID NO: 1538010 - DNA, 25 bp, Homo sapien
gaaaccgtgaagtctcggcctcagg

SEQ ID NO: 1538011 - DNA, 25 bp, Homo sapien
cagacccggcgaaaccgtgaagtct

SEQ ID NO: 1538012 - DNA, 25 bp, Homo sapien
caccccgcaactccgactttggcgg

SEQ ID NO: 1538013 - DNA, 25 bp, Homo sapien
tgaggccgagacttcacggtttcgc

SEQ ID NO: 1538014 - DNA, 25 bp, Homo sapien
aggccgagacttcacggtttcgccg

SEQ ID NO: 1538015 - DNA, 25 bp, Homo sapien
tgggggccgccaaagtcggagttgc

SEQ ID NO: 1538016 - DNA, 25 bp, Homo sapien
agacttcacggtttcgccgggtctg

SEQ ID NO: 1538017 - DNA, 25 bp, Homo sapien
gctcctgaggccgagacttcacggt

SEQ ID NO: 1538018 - DNA, 25 bp, Homo sapien
tcctgaggccgagacttcacggttt

SEQ ID NO: 1538019 - DNA, 25 bp, Homo sapien
gaggttgcaaacctgatcccccata

SEQ ID NO: 1538020 - DNA, 25 bp, Homo sapien
cacgggtgccttttagacctgagga

SEQ ID NO: 1538021 - DNA, 25 bp, Homo sapien
ttcacgcgtgcacccagtccaggct

SEQ ID NO: 1538022 - DNA, 25 bp, Homo sapien
gacctgaggaggttgcaaacctgat

SEQ ID NO: 1538023 - DNA, 25 bp, Homo sapien
cccacccggaggcttcagattcctc

SEQ ID NO: 1538024 - DNA, 25 bp, Homo sapien
ccttttagacctgaggaggttgcaa

SEQ ID NO: 1538025 - DNA, 25 bp, Homo sapien
tggatctcacattctagcgcccaga

SEQ ID NO: 1538026 - DNA, 25 bp, Homo sapien
acatgtcgggaacgccttacgccaa

SEQ ID NO: 1538027 - DNA, 25 bp, Homo sapien
gcccagacatgtcgggaacgcctta

SEQ ID NO: 1538028 - DNA, 25 bp, Homo sapien
cattctagcgcccagacatgtcggg

SEQ ID NO: 1538029 - DNA, 25 bp, Homo sapien
acctctacattcaggctgggctctg

SEQ ID NO: 1538030 - DNA, 25 bp, Homo sapien
tgccaaggacctctacattcaggct

SEQ ID NO: 1538031 - DNA, 25 bp, Homo sapien
cagagcccagcctgaatgtagaggt

SEQ ID NO: 1538032 - DNA, 25 bp, Homo sapien
tcccgacatgtctgggcgctagaat

SEQ ID NO: 1538033 - DNA, 25 bp, Homo sapien
taaggcgttcccgacatgtctgggc

SEQ ID NO: 1538034 - DNA, 25 bp, Homo sapien
cagcctgaatgtagaggtccttggc

SEQ ID NO: 1538035 - DNA, 25 bp, Homo sapien
ttggcgtaaggcgttcccgacatgt

SEQ ID NO: 1538036 - DNA, 25 bp, Homo sapien
tctgggcgctagaatgtgagatcca

SEQ ID NO: 1538037 - DNA, 25 bp, Homo sapien
tgcaacctcctcaggtctaaaaggc

SEQ ID NO: 1538038 - DNA, 25 bp, Homo sapien
agcctggactgggtgcacgcgtgaa

SEQ ID NO: 1538039 - DNA, 25 bp, Homo sapien
ctcaggtctaaaaggcacccgtggg

SEQ ID NO: 1538040 - DNA, 25 bp, Homo sapien
gaggaatctgaagcctccgggtggg

SEQ ID NO: 1538041 - DNA, 25 bp, Homo sapien
ttgcgagggcgggttgtccgcggat

SEQ ID NO: 1538042 - DNA, 25 bp, Homo sapien
atcaggtttgcaacctcctcaggtc

SEQ ID NO: 1538043 - DNA, 25 bp, Homo sapien
aactcgttcttgaagggcggcggcg

SEQ ID NO: 1538044 - DNA, 25 bp, Homo sapien
taggcggagtcatcagcgccatcag

SEQ ID NO: 1538045 - DNA, 25 bp, Homo sapien
aaatgtgcttggaggcctgatcagc

SEQ ID NO: 1538046 - DNA, 25 bp, Homo sapien
gcatcctaggcggagtcatcagcgc

SEQ ID NO: 1538047 - DNA, 25 bp, Homo sapien
ggtggaacggccatgcgcatcctag

SEQ ID NO: 1538048 - DNA, 25 bp, Homo sapien
gccatgcgcatcctaggcggagtca

SEQ ID NO: 1538049 - DNA, 25 bp, Homo sapien
gcctaggatgcgcatggccgttcca

SEQ ID NO: 1538050 - DNA, 25 bp, Homo sapien
tgactccgcctaggatgcgcatggc

SEQ ID NO: 1538051 - DNA, 25 bp, Homo sapien
cgccgccgcccttcaagaacgagtt

SEQ ID NO: 1538052 - DNA, 25 bp, Homo sapien
gcgctgatgactccgcctaggatgc

SEQ ID NO: 1538053 - DNA, 25 bp, Homo sapien
gctgatcaggcctccaagcacattt

SEQ ID NO: 1538054 - DNA, 25 bp, Homo sapien
tgatggcgctgatgactccgcctag

SEQ ID NO: 1538055 - DNA, 25 bp, Homo sapien
gcttgatatgggagtagtctgattg

SEQ ID NO: 1538056 - DNA, 25 bp, Homo sapien
cagtgaggcggatatcagtcattgg

SEQ ID NO: 1538057 - DNA, 25 bp, Homo sapien
taacctgggtacatgaattaggccg

SEQ ID NO: 1538058 - DNA, 25 bp, Homo sapien
ggcctggtttgagagttctgctgta

SEQ ID NO: 1538059 - DNA, 25 bp, Homo sapien
cctgcattggctaacctggagatga

SEQ ID NO: 1538060 - DNA, 25 bp, Homo sapien
tggaccccagtgaggcggatatcag

SEQ ID NO: 1538061 - DNA, 25 bp, Homo sapien
aatgactgatatccgcctcactggg

SEQ ID NO: 1538062 - DNA, 25 bp, Homo sapien
caggttagccaatgcaggctgagcc

SEQ ID NO: 1538063 - DNA, 25 bp, Homo sapien
tacagcagaactctcaaaccaggcc

SEQ ID NO: 1538064 - DNA, 25 bp, Homo sapien
caatcagactactcccatatcaagc

SEQ ID NO: 1538065 - DNA, 25 bp, Homo sapien
ggcctaattcatgtacccaggttag

SEQ ID NO: 1538066 - DNA, 25 bp, Homo sapien
tcatctccaggttagccaatgcagg

SEQ ID NO: 1538067 - DNA, 25 bp, Homo sapien
ctgcgcagtacaacccggagccccc

SEQ ID NO: 1538068 - DNA, 25 bp, Homo sapien
tgcgcagtacaacccggagcccccg

SEQ ID NO: 1538069 - DNA, 25 bp, Homo sapien
cggctgcgcagtacaacccggagcc

SEQ ID NO: 1538070 - DNA, 25 bp, Homo sapien
ggctgcgcagtacaacccggagccc

SEQ ID NO: 1538071 - DNA, 25 bp, Homo sapien
gctgcgcagtacaacccggagcccc

SEQ ID NO: 1538072 - DNA, 25 bp, Homo sapien
cgggggctccgggttgtactgcgca

SEQ ID NO: 1538073 - DNA, 25 bp, Homo sapien
gggctccgggttgtactgcgcagcc

SEQ ID NO: 1538074 - DNA, 25 bp, Homo sapien
ggggctccgggttgtactgcgcagc

SEQ ID NO: 1538075 - DNA, 25 bp, Homo sapien
ggctccgggttgtactgcgcagccg

SEQ ID NO: 1538076 - DNA, 25 bp, Homo sapien
gggggctccgggttgtactgcgcag

SEQ ID NO: 1538077 - DNA, 25 bp, Homo sapien
agttccggagactctttgcccagct

SEQ ID NO: 1538078 - DNA, 25 bp, Homo sapien
cagttccggagactctttgcccagc

SEQ ID NO: 1538079 - DNA, 25 bp, Homo sapien
cggcagttccggagactctttgccc

SEQ ID NO: 1538080 - DNA, 25 bp, Homo sapien
ggcagttccggagactctttgccca

SEQ ID NO: 1538081 - DNA, 25 bp, Homo sapien
gcagttccggagactctttgcccag

SEQ ID NO: 1538082 - DNA, 25 bp, Homo sapien
ctgggcaaagagtctccggaactgc

SEQ ID NO: 1538083 - DNA, 25 bp, Homo sapien
tgggcaaagagtctccggaactgcc

SEQ ID NO: 1538084 - DNA, 25 bp, Homo sapien
agctgggcaaagagtctccggaact

SEQ ID NO: 1538085 - DNA, 25 bp, Homo sapien
gggcaaagagtctccggaactgccg

SEQ ID NO: 1538086 - DNA, 25 bp, Homo sapien
gctgggcaaagagtctccggaactg

SEQ ID NO: 1538087 - DNA, 25 bp, Homo sapien
ctcatgaacattctcaataaggttg

SEQ ID NO: 1538088 - DNA, 25 bp, Homo sapien
catgaacattctcaataaggttgtg

SEQ ID NO: 1538089 - DNA, 25 bp, Homo sapien
gaacattctcaataaggttgtgaca

SEQ ID NO: 1538090 - DNA, 25 bp, Homo sapien
attctcaataaggttgtgacacgac

SEQ ID NO: 1538091 - DNA, 25 bp, Homo sapien
cattctcaataaggttgtgacacga

SEQ ID NO: 1538092 - DNA, 25 bp, Homo sapien
gaactcatgaacattctcaataagg

SEQ ID NO: 1538093 - DNA, 25 bp, Homo sapien
cgtgtcacaaccttattgagaatgt

SEQ ID NO: 1538094 - DNA, 25 bp, Homo sapien
gtcgtgtcacaaccttattgagaat

SEQ ID NO: 1538095 - DNA, 25 bp, Homo sapien
ccttattgagaatgttcatgagttc

SEQ ID NO: 1538096 - DNA, 25 bp, Homo sapien
caaccttattgagaatgttcatgag

SEQ ID NO: 1538097 - DNA, 25 bp, Homo sapien
cacaaccttattgagaatgttcatg

SEQ ID NO: 1538098 - DNA, 25 bp, Homo sapien
gtcacaaccttattgagaatgttca

SEQ ID NO: 1538099 - DNA, 25 bp, Homo sapien
ttggcattgacacatgtcgcagcat

SEQ ID NO: 1538100 - DNA, 25 bp, Homo sapien
ccctgatctgaagactgatggtttt

SEQ ID NO: 1538101 - DNA, 25 bp, Homo sapien
accctgatctgaagactgatggttt

SEQ ID NO: 1538102 - DNA, 25 bp, Homo sapien
tggcattgacacatgtcgcagcatg

SEQ ID NO: 1538103 - DNA, 25 bp, Homo sapien
catgctgcgacatgtgtcaatgcca

SEQ ID NO: 1538104 - DNA, 25 bp, Homo sapien
atgctgcgacatgtgtcaatgccaa

SEQ ID NO: 1538105 - DNA, 25 bp, Homo sapien
aaaccatcagtcttcagatcagggt

SEQ ID NO: 1538106 - DNA, 25 bp, Homo sapien
aaaaccatcagtcttcagatcaggg

SEQ ID NO: 1538107 - DNA, 25 bp, Homo sapien
actggtgtcccaaggatttagtgag

SEQ ID NO: 1538108 - DNA, 25 bp, Homo sapien
agaactggtgtcccaaggatttagt

SEQ ID NO: 1538109 - DNA, 25 bp, Homo sapien
gaactggtgtcccaaggatttagtg

SEQ ID NO: 1538110 - DNA, 25 bp, Homo sapien
tggtgtcccaaggatttagtgagaa

SEQ ID NO: 1538111 - DNA, 25 bp, Homo sapien
ctggtgtcccaaggatttagtgaga

SEQ ID NO: 1538112 - DNA, 25 bp, Homo sapien
aactggtgtcccaaggatttagtga

SEQ ID NO: 1538113 - DNA, 25 bp, Homo sapien
ttctcactaaatccttgggacacca

SEQ ID NO: 1538114 - DNA, 25 bp, Homo sapien
ctcactaaatccttgggacaccagt

SEQ ID NO: 1538115 - DNA, 25 bp, Homo sapien
tctcactaaatccttgggacaccag

SEQ ID NO: 1538116 - DNA, 25 bp, Homo sapien
cactaaatccttgggacaccagttc

SEQ ID NO: 1538117 - DNA, 25 bp, Homo sapien
actaaatccttgggacaccagttct

SEQ ID NO: 1538118 - DNA, 25 bp, Homo sapien
tcactaaatccttgggacaccagtt

SEQ ID NO: 1538119 - DNA, 25 bp, Homo sapien
tcccaaggatttagtgagaaagtga

SEQ ID NO: 1538120 - DNA, 25 bp, Homo sapien
gaactggtgtcccaaggatttagtg

SEQ ID NO: 1538121 - DNA, 25 bp, Homo sapien
ctggtgtcccaaggatttagtgaga

SEQ ID NO: 1538122 - DNA, 25 bp, Homo sapien
gagaaagtgatgttcctgagtggac

SEQ ID NO: 1538123 - DNA, 25 bp, Homo sapien
tcctggtagaactggtgtcccaagg

SEQ ID NO: 1538124 - DNA, 25 bp, Homo sapien
agtgatgttcctgagtggacatcag

SEQ ID NO: 1538125 - DNA, 25 bp, Homo sapien
tgtccactcaggaacatcactttct

SEQ ID NO: 1538126 - DNA, 25 bp, Homo sapien
tctcactaaatccttgggacaccag

SEQ ID NO: 1538127 - DNA, 25 bp, Homo sapien
ccttgggacaccagttctaccagga

SEQ ID NO: 1538128 - DNA, 25 bp, Homo sapien
cactaaatccttgggacaccagttc

SEQ ID NO: 1538129 - DNA, 25 bp, Homo sapien
tcactttctcactaaatccttggga

SEQ ID NO: 1538130 - DNA, 25 bp, Homo sapien
ctgatgtccactcaggaacatcact

SEQ ID NO: 1538131 - DNA, 25 bp, Homo sapien
tgcttgctgtatcaccatcgtgtcc

SEQ ID NO: 1538132 - DNA, 25 bp, Homo sapien
taaagagaatccctatttagaaatg

SEQ ID NO: 1538133 - DNA, 25 bp, Homo sapien
accgtgcgtggcctattaagaattt

SEQ ID NO: 1538134 - DNA, 25 bp, Homo sapien
tgatatgactaggaccaagcgggag

SEQ ID NO: 1538135 - DNA, 25 bp, Homo sapien
taaaaccgcacaccaggtgatatga

SEQ ID NO: 1538136 - DNA, 25 bp, Homo sapien
tcgtgtccacagtgcatgtgatgca

SEQ ID NO: 1538137 - DNA, 25 bp, Homo sapien
tacatttctaaatagggattctctt

SEQ ID NO: 1538138 - DNA, 25 bp, Homo sapien
tcccgcttggtcctagtcatatcac

SEQ ID NO: 1538139 - DNA, 25 bp, Homo sapien
tgcatcacatgcactgtggacacga

SEQ ID NO: 1538140 - DNA, 25 bp, Homo sapien
gacacgatggtgatacagcaagcag

SEQ ID NO: 1538141 - DNA, 25 bp, Homo sapien
tcctagtcatatcacctggtgtgcg

SEQ ID NO: 1538142 - DNA, 25 bp, Homo sapien
aaattcttaataggccacgcacggt

SEQ ID NO: 1538143 - DNA, 25 bp, Homo sapien
tgtcactcttcttaacaccctccca

SEQ ID NO: 1538144 - DNA, 25 bp, Homo sapien
ctgtcactcttcttaacaccctccc

SEQ ID NO: 1538145 - DNA, 25 bp, Homo sapien
tgggagggtgttaagaagagtgaca

SEQ ID NO: 1538146 - DNA, 25 bp, Homo sapien
gggagggtgttaagaagagtgacag

SEQ ID NO: 1538147 - DNA, 25 bp, Homo sapien
actcttcttaacaccctcccaccag

SEQ ID NO: 1538148 - DNA, 25 bp, Homo sapien
tgtcactcttcttaacaccctccca

SEQ ID NO: 1538149 - DNA, 25 bp, Homo sapien
gtcactcttcttaacaccctcccac

SEQ ID NO: 1538150 - DNA, 25 bp, Homo sapien
tcactcttcttaacaccctcccacc

SEQ ID NO: 1538151 - DNA, 25 bp, Homo sapien
cactcttcttaacaccctcccacca

SEQ ID NO: 1538152 - DNA, 25 bp, Homo sapien
ctgtcactcttcttaacaccctccc

SEQ ID NO: 1538153 - DNA, 25 bp, Homo sapien
ctggtgggagggtgttaagaagagt

SEQ ID NO: 1538154 - DNA, 25 bp, Homo sapien
tggtgggagggtgttaagaagagtg

SEQ ID NO: 1538155 - DNA, 25 bp, Homo sapien
tgggagggtgttaagaagagtgaca

SEQ ID NO: 1538156 - DNA, 25 bp, Homo sapien
gggagggtgttaagaagagtgacag

SEQ ID NO: 1538157 - DNA, 25 bp, Homo sapien
gtgggagggtgttaagaagagtgac

SEQ ID NO: 1538158 - DNA, 25 bp, Homo sapien
ggtgggagggtgttaagaagagtga

SEQ ID NO: 1538159 - DNA, 25 bp, Homo sapien
tgggctttgaggaattcaagtactt

SEQ ID NO: 1538160 - DNA, 25 bp, Homo sapien
ctgggctttgaggaattcaagtact

SEQ ID NO: 1538161 - DNA, 25 bp, Homo sapien
aagtacttgaattcctcaaagccca

SEQ ID NO: 1538162 - DNA, 25 bp, Homo sapien
agtacttgaattcctcaaagcccag

SEQ ID NO: 1538163 - DNA, 25 bp, Homo sapien
ttcaagtacttgtggaacaacatca

SEQ ID NO: 1538164 - DNA, 25 bp, Homo sapien
tgggctttgaggaattcaagtactt

SEQ ID NO: 1538165 - DNA, 25 bp, Homo sapien
cgacaccacaggcaagctgggcttt

SEQ ID NO: 1538166 - DNA, 25 bp, Homo sapien
gtggaacaacatcaaaaggtggcag

SEQ ID NO: 1538167 - DNA, 25 bp, Homo sapien
ctttgaggaattcaagtacttgtgg

SEQ ID NO: 1538168 - DNA, 25 bp, Homo sapien
ctgggctttgaggaattcaagtact

SEQ ID NO: 1538169 - DNA, 25 bp, Homo sapien
aagtacttgaattcctcaaagccca

SEQ ID NO: 1538170 - DNA, 25 bp, Homo sapien
agtacttgaattcctcaaagcccag

SEQ ID NO: 1538171 - DNA, 25 bp, Homo sapien
tgatgttgttccacaagtacttgaa

SEQ ID NO: 1538172 - DNA, 25 bp, Homo sapien
ccacaagtacttgaattcctcaaag

SEQ ID NO: 1538173 - DNA, 25 bp, Homo sapien
aaagcccagcttgcctgtggtgtcg

SEQ ID NO: 1538174 - DNA, 25 bp, Homo sapien
ctgccaccttttgatgttgttccac

SEQ ID NO: 1538175 - DNA, 25 bp, Homo sapien
tttgcagtagtgaactcccaggtgc

SEQ ID NO: 1538176 - DNA, 25 bp, Homo sapien
actgaccgatcagggaccatttgca

SEQ ID NO: 1538177 - DNA, 25 bp, Homo sapien
agggaccatttgcagtagtgaactc

SEQ ID NO: 1538178 - DNA, 25 bp, Homo sapien
gaccatttgcagtagtgaactccca

SEQ ID NO: 1538179 - DNA, 25 bp, Homo sapien
tcgacactgaccgatcagggaccat

SEQ ID NO: 1538180 - DNA, 25 bp, Homo sapien
atacaaacagttcgacactgaccga

SEQ ID NO: 1538181 - DNA, 25 bp, Homo sapien
tcggtcagtgtcgaactgtttgtat

SEQ ID NO: 1538182 - DNA, 25 bp, Homo sapien
gagttcactactgcaaatggtccct

SEQ ID NO: 1538183 - DNA, 25 bp, Homo sapien
gcacctgggagttcactactgcaaa

SEQ ID NO: 1538184 - DNA, 25 bp, Homo sapien
tgggagttcactactgcaaatggtc

SEQ ID NO: 1538185 - DNA, 25 bp, Homo sapien
aatggtccctgatcggtcagtgtcg

SEQ ID NO: 1538186 - DNA, 25 bp, Homo sapien
tgcaaatggtccctgatcggtcagt

SEQ ID NO: 1538187 - DNA, 25 bp, Homo sapien
tccacctgaatgagcatctctataa

SEQ ID NO: 1538188 - DNA, 25 bp, Homo sapien
taacatgatcatccgacgctactca

SEQ ID NO: 1538189 - DNA, 25 bp, Homo sapien
ataacatgatcatccgacgctactc

SEQ ID NO: 1538190 - DNA, 25 bp, Homo sapien
aacatgatcatccgacgctactcag

SEQ ID NO: 1538191 - DNA, 25 bp, Homo sapien
ctgagtagcgtcggatgatcatgtt

SEQ ID NO: 1538192 - DNA, 25 bp, Homo sapien
tgagtagcgtcggatgatcatgtta

SEQ ID NO: 1538193 - DNA, 25 bp, Homo sapien
gagtagcgtcggatgatcatgttat

SEQ ID NO: 1538194 - DNA, 25 bp, Homo sapien
ttatagagatgctcattcaggtgga

SEQ ID NO: 1538195 - DNA, 25 bp, Homo sapien
tgcttggtcaggctggacgccatgt

SEQ ID NO: 1538196 - DNA, 25 bp, Homo sapien
tgaaagtgggaacatggattttgac

SEQ ID NO: 1538197 - DNA, 25 bp, Homo sapien
tgggaacatggattttgacaacttc

SEQ ID NO: 1538198 - DNA, 25 bp, Homo sapien
agctgcttggtcaggctggacgcca

SEQ ID NO: 1538199 - DNA, 25 bp, Homo sapien
ttggtcaggctggacgccatgttcc

SEQ ID NO: 1538200 - DNA, 25 bp, Homo sapien
aagtgggaacatggattttgacaac

SEQ ID NO: 1538201 - DNA, 25 bp, Homo sapien
gttgtcaaaatccatgttcccactt

SEQ ID NO: 1538202 - DNA, 25 bp, Homo sapien
gtcaaaatccatgttcccactttca

SEQ ID NO: 1538203 - DNA, 25 bp, Homo sapien
acatggcgtccagcctgaccaagca

SEQ ID NO: 1538204 - DNA, 25 bp, Homo sapien
ggaacatggcgtccagcctgaccaa

SEQ ID NO: 1538205 - DNA, 25 bp, Homo sapien
gaagttgtcaaaatccatgttccca

SEQ ID NO: 1538206 - DNA, 25 bp, Homo sapien
tggcgtccagcctgaccaagcagct

SEQ ID NO: 1538207 - DNA, 25 bp, Homo sapien
ggtgctcaaactctaccagagacat

SEQ ID NO: 1538208 - DNA, 25 bp, Homo sapien
ctcaaactctaccagagacattggg

SEQ ID NO: 1538209 - DNA, 25 bp, Homo sapien
caggattgtgggtgccaagtttggg

SEQ ID NO: 1538210 - DNA, 25 bp, Homo sapien
tcaggtttggctttagaaagatccc

SEQ ID NO: 1538211 - DNA, 25 bp, Homo sapien
gagccatggcaggttctaggcagag

SEQ ID NO: 1538212 - DNA, 25 bp, Homo sapien
ttggctttagaaagatcccttggcc

SEQ ID NO: 1538213 - DNA, 25 bp, Homo sapien
ggccaagggatctttctaaagccaa

SEQ ID NO: 1538214 - DNA, 25 bp, Homo sapien
ccaaacttggcacccacaatcctgc

SEQ ID NO: 1538215 - DNA, 25 bp, Homo sapien
atgtctctggtagagtttgagcacc

SEQ ID NO: 1538216 - DNA, 25 bp, Homo sapien
gatctttctaaagccaaacctgacc

SEQ ID NO: 1538217 - DNA, 25 bp, Homo sapien
ggctccccaatgtctctggtagagt

SEQ ID NO: 1538218 - DNA, 25 bp, Homo sapien
tctgcctagaacctgccatggctcc

SEQ ID NO: 1538219 - DNA, 25 bp, Homo sapien
ttaaatcagccaatacctggaaagc

SEQ ID NO: 1538220 - DNA, 25 bp, Homo sapien
tcagtgaagtgccagctgctatgat

SEQ ID NO: 1538221 - DNA, 25 bp, Homo sapien
gacacttatctcacagagttggatt

SEQ ID NO: 1538222 - DNA, 25 bp, Homo sapien
gattgtcatcccatgtatttgtgta

SEQ ID NO: 1538223 - DNA, 25 bp, Homo sapien
gccagctgctatgattgtcatccca

SEQ ID NO: 1538224 - DNA, 25 bp, Homo sapien
agcactttaccccatgcttggcaca

SEQ ID NO: 1538225 - DNA, 25 bp, Homo sapien
ggatgacaatcatagcagctggcac

SEQ ID NO: 1538226 - DNA, 25 bp, Homo sapien
tacacaaatacatgggatgacaatc

SEQ ID NO: 1538227 - DNA, 25 bp, Homo sapien
aatccaactctgtgagataagtgtc

SEQ ID NO: 1538228 - DNA, 25 bp, Homo sapien
aatcatagcagctggcacttcactg

SEQ ID NO: 1538229 - DNA, 25 bp, Homo sapien
tacatgggatgacaatcatagcagc

SEQ ID NO: 1538230 - DNA, 25 bp, Homo sapien
gctttccaggtattggctgatttaa

SEQ ID NO: 1538231 - DNA, 25 bp, Homo sapien
ggcactggacaaatccaggtgaaca

SEQ ID NO: 1538232 - DNA, 25 bp, Homo sapien
gtgccttcaaatctcttgacaaaga

SEQ ID NO: 1538233 - DNA, 25 bp, Homo sapien
cttgacaaagatggcactggacaaa

SEQ ID NO: 1538234 - DNA, 25 bp, Homo sapien
ggacaaatccaggtgaacatccagg

SEQ ID NO: 1538235 - DNA, 25 bp, Homo sapien
tcaaatctcttgacaaagatggcac

SEQ ID NO: 1538236 - DNA, 25 bp, Homo sapien
tctcttgacaaagatggcactggac

SEQ ID NO: 1538237 - DNA, 25 bp, Homo sapien
tctttgtcaagagatttgaaggcac

SEQ ID NO: 1538238 - DNA, 25 bp, Homo sapien
tttgtccagtgccatctttgtcaag

SEQ ID NO: 1538239 - DNA, 25 bp, Homo sapien
tgtccagtgccatctttgtcaagag

SEQ ID NO: 1538240 - DNA, 25 bp, Homo sapien
catctttgtcaagagatttgaaggc

SEQ ID NO: 1538241 - DNA, 25 bp, Homo sapien
cctggatgttcacctggatttgtcc

SEQ ID NO: 1538242 - DNA, 25 bp, Homo sapien
tgttcacctggatttgtccagtgcc

SEQ ID NO: 1538243 - DNA, 25 bp, Homo sapien
ccccatattggggtatgggtgcctg

SEQ ID NO: 1538244 - DNA, 25 bp, Homo sapien
tcctattttgccagccgtccctggg

SEQ ID NO: 1538245 - DNA, 25 bp, Homo sapien
gggctggtgctcttggggttccctg

SEQ ID NO: 1538246 - DNA, 25 bp, Homo sapien
tgcagtccccttcctcctattttgc

SEQ ID NO: 1538247 - DNA, 25 bp, Homo sapien
ttggggtatgggtgcctgggaggac

SEQ ID NO: 1538248 - DNA, 25 bp, Homo sapien
gccagccgtccctgggtgagggcaa

SEQ ID NO: 1538249 - DNA, 25 bp, Homo sapien
cccagggacggctggcaaaatagga

SEQ ID NO: 1538250 - DNA, 25 bp, Homo sapien
accccaagagcaccagcccctttgc

SEQ ID NO: 1538251 - DNA, 25 bp, Homo sapien
cagggaaccccaagagcaccagccc

SEQ ID NO: 1538252 - DNA, 25 bp, Homo sapien
ccaggcacccataccccaatatggg

SEQ ID NO: 1538253 - DNA, 25 bp, Homo sapien
ttgccctcacccagggacggctggc

SEQ ID NO: 1538254 - DNA, 25 bp, Homo sapien
gcaaaataggaggaaggggactgca

SEQ ID NO: 1538255 - DNA, 25 bp, Homo sapien
gccttgctataggagtcacctggag

SEQ ID NO: 1538256 - DNA, 25 bp, Homo sapien
tgttctctcagtacttgttacccag

SEQ ID NO: 1538257 - DNA, 25 bp, Homo sapien
cctcactgccttgctataggagtca

SEQ ID NO: 1538258 - DNA, 25 bp, Homo sapien
ctggagcctcggtctctcccagggc

SEQ ID NO: 1538259 - DNA, 25 bp, Homo sapien
gttacccagcttctcaacatccagg

SEQ ID NO: 1538260 - DNA, 25 bp, Homo sapien
ccagggccgatcctgtctgcagtca

SEQ ID NO: 1538261 - DNA, 25 bp, Homo sapien
tcagcaggccccacaaagatgtgac

SEQ ID NO: 1538262 - DNA, 25 bp, Homo sapien
cctggatgttgagaagctgggtaac

SEQ ID NO: 1538263 - DNA, 25 bp, Homo sapien
tgactgcagacaggatcggccctgg

SEQ ID NO: 1538264 - DNA, 25 bp, Homo sapien
tccaggtgactcctatagcaaggca

SEQ ID NO: 1538265 - DNA, 25 bp, Homo sapien
tgactcctatagcaaggcagtgagg

SEQ ID NO: 1538266 - DNA, 25 bp, Homo sapien
gctgggtaacaagtactgagagaac

SEQ ID NO: 1538267 - DNA, 25 bp, Homo sapien
gacactctaacaagctctgtccacg

SEQ ID NO: 1538268 - DNA, 25 bp, Homo sapien
cactctaacaagctctgtccacggg

SEQ ID NO: 1538269 - DNA, 25 bp, Homo sapien
taacaagctctgtccacgggtctcc

SEQ ID NO: 1538270 - DNA, 25 bp, Homo sapien
tgtccacgggtctccccattcccac

SEQ ID NO: 1538271 - DNA, 25 bp, Homo sapien
ctaacaagctctgtccacgggtctc

SEQ ID NO: 1538272 - DNA, 25 bp, Homo sapien
tctaacaagctctgtccacgggtct

SEQ ID NO: 1538273 - DNA, 25 bp, Homo sapien
cgtggacagagcttgttagagtgtc

SEQ ID NO: 1538274 - DNA, 25 bp, Homo sapien
cccgtggacagagcttgttagagtg

SEQ ID NO: 1538275 - DNA, 25 bp, Homo sapien
ggagacccgtggacagagcttgtta

SEQ ID NO: 1538276 - DNA, 25 bp, Homo sapien
gacccgtggacagagcttgttagag

SEQ ID NO: 1538277 - DNA, 25 bp, Homo sapien
gagacccgtggacagagcttgttag

SEQ ID NO: 1538278 - DNA, 25 bp, Homo sapien
gggaatggggagacccgtggacaga

SEQ ID NO: 1538279 - DNA, 25 bp, Homo sapien
ggccaagctccagaccgtgccagac

SEQ ID NO: 1538280 - DNA, 25 bp, Homo sapien
tgtacctgtgccaagcctagcactt

SEQ ID NO: 1538281 - DNA, 25 bp, Homo sapien
cctgtgccaagcctagcacttgtga

SEQ ID NO: 1538282 - DNA, 25 bp, Homo sapien
gtgatgcctccatgccccgagggcc

SEQ ID NO: 1538283 - DNA, 25 bp, Homo sapien
ggttgctacccaggcggccaagctc

SEQ ID NO: 1538284 - DNA, 25 bp, Homo sapien
ttcacggttgctacccaggcggcca

SEQ ID NO: 1538285 - DNA, 25 bp, Homo sapien
tggccgcctgggtagcaaccgtgaa

SEQ ID NO: 1538286 - DNA, 25 bp, Homo sapien
ggtctggcacggtctggagcttggc

SEQ ID NO: 1538287 - DNA, 25 bp, Homo sapien
tagcaaccgtgaagggtgtgccagg

SEQ ID NO: 1538288 - DNA, 25 bp, Homo sapien
tcacaagtgctaggcttggcacagg

SEQ ID NO: 1538289 - DNA, 25 bp, Homo sapien
caagtgctaggcttggcacaggtac

SEQ ID NO: 1538290 - DNA, 25 bp, Homo sapien
gagcttggccgcctgggtagcaacc

SEQ ID NO: 1538291 - DNA, 25 bp, Homo sapien
ggtgccccagtgcctttgtctatat

SEQ ID NO: 1538292 - DNA, 25 bp, Homo sapien
atatagacaaaggcactggggcacc

SEQ ID NO: 1538293 - DNA, 25 bp, Homo sapien
agcctgccaggcccaggaggaaata

SEQ ID NO: 1538294 - DNA, 25 bp, Homo sapien
tctgctcccagcctgccaggcccag

SEQ ID NO: 1538295 - DNA, 25 bp, Homo sapien
ctgctcccagcctgccaggcccagg

SEQ ID NO: 1538296 - DNA, 25 bp, Homo sapien
tgctcccagcctgccaggcccagga

SEQ ID NO: 1538297 - DNA, 25 bp, Homo sapien
gctcccagcctgccaggcccaggag

SEQ ID NO: 1538298 - DNA, 25 bp, Homo sapien
cagcctgccaggcccaggaggaaat

SEQ ID NO: 1538299 - DNA, 25 bp, Homo sapien
ctcctgggcctggcaggctgggagc

SEQ ID NO: 1538300 - DNA, 25 bp, Homo sapien
tcctgggcctggcaggctgggagca

SEQ ID NO: 1538301 - DNA, 25 bp, Homo sapien
ctgggcctggcaggctgggagcaga

SEQ ID NO: 1538302 - DNA, 25 bp, Homo sapien
tatttcctcctgggcctggcaggct

SEQ ID NO: 1538303 - DNA, 25 bp, Homo sapien
cctgggcctggcaggctgggagcag

SEQ ID NO: 1538304 - DNA, 25 bp, Homo sapien
cctcctgggcctggcaggctgggag

SEQ ID NO: 1538305 - DNA, 25 bp, Homo sapien
atctgcctcctgatctgacccgaga

SEQ ID NO: 1538306 - DNA, 25 bp, Homo sapien
cctcctgatctgacccgagagagga

SEQ ID NO: 1538307 - DNA, 25 bp, Homo sapien
tgcctcctgatctgacccgagagag

SEQ ID NO: 1538308 - DNA, 25 bp, Homo sapien
ggatctgcctcctgatctgacccga

SEQ ID NO: 1538309 - DNA, 25 bp, Homo sapien
ctcctgatctgacccgagagaggag

SEQ ID NO: 1538310 - DNA, 25 bp, Homo sapien
gatctgcctcctgatctgacccgag

SEQ ID NO: 1538311 - DNA, 25 bp, Homo sapien
tcctctctcgggtcagatcaggagg

SEQ ID NO: 1538312 - DNA, 25 bp, Homo sapien
ctctctcgggtcagatcaggaggca

SEQ ID NO: 1538313 - DNA, 25 bp, Homo sapien
ctcctctctcgggtcagatcaggag

SEQ ID NO: 1538314 - DNA, 25 bp, Homo sapien
tctcgggtcagatcaggaggcagat

SEQ ID NO: 1538315 - DNA, 25 bp, Homo sapien
tctctcgggtcagatcaggaggcag

SEQ ID NO: 1538316 - DNA, 25 bp, Homo sapien
tcgggtcagatcaggaggcagatcc

SEQ ID NO: 1538317 - DNA, 25 bp, Homo sapien
tagccctcatgtctgcgtgtagcgg

SEQ ID NO: 1538318 - DNA, 25 bp, Homo sapien
cctcatgtctgcgtgtagcggctgc

SEQ ID NO: 1538319 - DNA, 25 bp, Homo sapien
gcgtgtagcggctgccactgcttta

SEQ ID NO: 1538320 - DNA, 25 bp, Homo sapien
tgtctgcgtgtagcggctgccactg

SEQ ID NO: 1538321 - DNA, 25 bp, Homo sapien
attcttttacacatcagtcctttcc

SEQ ID NO: 1538322 - DNA, 25 bp, Homo sapien
aaatagctggaaaacggcactttca

SEQ ID NO: 1538323 - DNA, 25 bp, Homo sapien
ctaaataattctagtcgtaaaatgg

SEQ ID NO: 1538324 - DNA, 25 bp, Homo sapien
ttctagtcgtaaaatgggcaaatgg

SEQ ID NO: 1538325 - DNA, 25 bp, Homo sapien
gctacccggtggcaagttgattacc

SEQ ID NO: 1538326 - DNA, 25 bp, Homo sapien
aatgcttgctcaatgggtccatgaa

SEQ ID NO: 1538327 - DNA, 25 bp, Homo sapien
tatgcatgggttcagcaacgtcagc

SEQ ID NO: 1538328 - DNA, 25 bp, Homo sapien
gaatagacagatatcccagacacga

SEQ ID NO: 1538329 - DNA, 25 bp, Homo sapien
agctactggagaggcctgaggcagg

SEQ ID NO: 1538330 - DNA, 25 bp, Homo sapien
ggagacagaatgaaactgtttcaaa

SEQ ID NO: 1538331 - DNA, 25 bp, Homo sapien
aacaaacaaaaacaggcctggcacg

SEQ ID NO: 1538332 - DNA, 25 bp, Homo sapien
aaacaaaaacaggcctggcacggtg

SEQ ID NO: 1538333 - DNA, 25 bp, Homo sapien
gcagaaatgcatgtccctatgtcaa

SEQ ID NO: 1538334 - DNA, 25 bp, Homo sapien
tgcggaaggtccaggcagtttgcca

SEQ ID NO: 1538335 - DNA, 25 bp, Homo sapien
catgccaggccctatccatgagtgg

SEQ ID NO: 1538336 - DNA, 25 bp, Homo sapien
tacaaggaccatgccagaaatagga

SEQ ID NO: 1538337 - DNA, 25 bp, Homo sapien
ttggaattgattttagcacagtgcc

SEQ ID NO: 1538338 - DNA, 25 bp, Homo sapien
tgttcacatatttgttgaccattgg

SEQ ID NO: 1538339 - DNA, 25 bp, Homo sapien
gcattccttcaataatgattaccat

SEQ ID NO: 1538340 - DNA, 25 bp, Homo sapien
ttgaatatagaccattgaataggtg

SEQ ID NO: 1538341 - DNA, 25 bp, Homo sapien
gaatggcctttattcgtagttcaca

SEQ ID NO: 1538342 - DNA, 25 bp, Homo sapien
gataagcctttatgtggagttcaca

SEQ ID NO: 1538343 - DNA, 25 bp, Homo sapien
cacatctggctcagtactaggtaat

SEQ ID NO: 1538344 - DNA, 25 bp, Homo sapien
cttacgaatgtagagagtgtgggca

SEQ ID NO: 1538345 - DNA, 25 bp, Homo sapien
agctagttagctccgcaaggacccg

SEQ ID NO: 1538346 - DNA, 25 bp, Homo sapien
tgtccggagcctcgaatctgtgcgc

SEQ ID NO: 1538347 - DNA, 25 bp, Homo sapien
aactgtgcacgtgtaaccgcctgtc

SEQ ID NO: 1538348 - DNA, 25 bp, Homo sapien
tcgttcttgacgtcgtggcgagcta

SEQ ID NO: 1538349 - DNA, 25 bp, Homo sapien
ccgcggacaaagaccaaaatgtcca

SEQ ID NO: 1538350 - DNA, 25 bp, Homo sapien
tttcgcgccacgtggacccaggggc

SEQ ID NO: 1538351 - DNA, 25 bp, Homo sapien
cacgtggacccaggggccgtactga

SEQ ID NO: 1538352 - DNA, 25 bp, Homo sapien
ccacgtggacccaggggccgtactg

SEQ ID NO: 1538353 - DNA, 25 bp, Homo sapien
gagaacgcctcgactcattaaggaa

SEQ ID NO: 1538354 - DNA, 25 bp, Homo sapien
tgaatagtctgaagtaggcaccccg

SEQ ID NO: 1538355 - DNA, 25 bp, Homo sapien
ctttcgacaagggaagtgcagctca

SEQ ID NO: 1538356 - DNA, 25 bp, Homo sapien
caagtaaaaaagacgctccaggaag

SEQ ID NO: 1538357 - DNA, 25 bp, Homo sapien
aaaaaaaaattagctcatgcctgta

SEQ ID NO: 1538358 - DNA, 25 bp, Homo sapien
atcccagtactttgggaggctgagg

SEQ ID NO: 1538359 - DNA, 25 bp, Homo sapien
aggcaggcagatcacatgaggtcag

SEQ ID NO: 1538360 - DNA, 25 bp, Homo sapien
cagaggaaggagttaacacaggaag

SEQ ID NO: 1538361 - DNA, 25 bp, Homo sapien
ggaaggagttaacacaggaagtctg

SEQ ID NO: 1538362 - DNA, 25 bp, Homo sapien
aaggagttaacacaggaagtctggc

SEQ ID NO: 1538363 - DNA, 25 bp, Homo sapien
gtggcagaggaaggagttaacacag

SEQ ID NO: 1538364 - DNA, 25 bp, Homo sapien
atcgctggaactggggaggcagatg

SEQ ID NO: 1538365 - DNA, 25 bp, Homo sapien
caagatcacaccactgcactctgcc

SEQ ID NO: 1538366 - DNA, 25 bp, Homo sapien
cgctggaactggggaggcagatgtt

SEQ ID NO: 1538367 - DNA, 25 bp, Homo sapien
aggcagatgttgcaagtgagccaag

SEQ ID NO: 1538368 - DNA, 25 bp, Homo sapien
tattcgacactacactcatggtgag

SEQ ID NO: 1538369 - DNA, 25 bp, Homo sapien
tcctgtgtcagtataaaatggcgca

SEQ ID NO: 1538370 - DNA, 25 bp, Homo sapien
gattgtctcttatgtccctagcgaa

SEQ ID NO: 1538371 - DNA, 25 bp, Homo sapien
aagacgctctcgcacatggcttgtg

SEQ ID NO: 1538372 - DNA, 25 bp, Homo sapien
gagcctgaagcaggaggactgctta

SEQ ID NO: 1538373 - DNA, 25 bp, Homo sapien
gactgcttaagcctgggaggtggac

SEQ ID NO: 1538374 - DNA, 25 bp, Homo sapien
ttgcagtgagccgtgatcatgccac

SEQ ID NO: 1538375 - DNA, 25 bp, Homo sapien
gccgtgatcatgccactgtgctcca

SEQ ID NO: 1538376 - DNA, 25 bp, Homo sapien
cgtgggctggacgcagtggctcatg

SEQ ID NO: 1538377 - DNA, 25 bp, Homo sapien
cttgagctcagaagttcaagaccag

SEQ ID NO: 1538378 - DNA, 25 bp, Homo sapien
ccactaatcccagcactttgggaag

SEQ ID NO: 1538379 - DNA, 25 bp, Homo sapien
tgggaagctgaggtgggcaggatca

SEQ ID NO: 1538380 - DNA, 25 bp, Homo sapien
cagttgtcagactattactgctgct

SEQ ID NO: 1538381 - DNA, 25 bp, Homo sapien
gccaccgtgccgtgtcctatttcat

SEQ ID NO: 1538382 - DNA, 25 bp, Homo sapien
tattagagatgtcctggcccaggtg

SEQ ID NO: 1538383 - DNA, 25 bp, Homo sapien
tatttcatattagagatgtcctggc

SEQ ID NO: 1538384 - DNA, 25 bp, Homo sapien
gccgtgtcctatttcatattagaga

SEQ ID NO: 1538385 - DNA, 25 bp, Homo sapien
aatatgatcctctgttgaagcaaga

SEQ ID NO: 1538386 - DNA, 25 bp, Homo sapien
ttaatatgatcctctgttgaagcaa

SEQ ID NO: 1538387 - DNA, 25 bp, Homo sapien
taatatgatcctctgttgaagcaag

SEQ ID NO: 1538388 - DNA, 25 bp, Homo sapien
atatgatcctctgttgaagcaagaa

SEQ ID NO: 1538389 - DNA, 25 bp, Homo sapien
agacaaactgtatggtggagaaaga

SEQ ID NO: 1538390 - DNA, 25 bp, Homo sapien
tctttctccaccatacagtttgtct

SEQ ID NO: 1538391 - DNA, 25 bp, Homo sapien
tcttgcttcaacagaggatcatatt

SEQ ID NO: 1538392 - DNA, 25 bp, Homo sapien
cttgcttcaacagaggatcatatta

SEQ ID NO: 1538393 - DNA, 25 bp, Homo sapien
ttgcttcaacagaggatcatattaa

SEQ ID NO: 1538394 - DNA, 25 bp, Homo sapien
ttcttgcttcaacagaggatcatat

SEQ ID NO: 1538395 - DNA, 25 bp, Homo sapien
tttcagatgctagggaaatgtcagc

SEQ ID NO: 1538396 - DNA, 25 bp, Homo sapien
catttacgtttctaccaagctgata

SEQ ID NO: 1538397 - DNA, 25 bp, Homo sapien
tcctcctagggacggtgttataatg

SEQ ID NO: 1538398 - DNA, 25 bp, Homo sapien
taagtcaggagaagcttgctgtcct

SEQ ID NO: 1538399 - DNA, 25 bp, Homo sapien
cgcgcctggctaacgcataatttaa

SEQ ID NO: 1538400 - DNA, 25 bp, Homo sapien
ttcaggcttctgctattgaagacac

SEQ ID NO: 1538401 - DNA, 25 bp, Homo sapien
tgaacaggacagcaagcttctcctg

SEQ ID NO: 1538402 - DNA, 25 bp, Homo sapien
tcagcttggtagaaacgtaaatggg

SEQ ID NO: 1538403 - DNA, 25 bp, Homo sapien
cattataacaccgtccctaggagga

SEQ ID NO: 1538404 - DNA, 25 bp, Homo sapien
taaattatgcgttagccaggcgcgg

SEQ ID NO: 1538405 - DNA, 25 bp, Homo sapien
gtgtcttcaatagcagaagcctgaa

SEQ ID NO: 1538406 - DNA, 25 bp, Homo sapien
gctgacatttccctagcatctgaaa

SEQ ID NO: 1538407 - DNA, 25 bp, Homo sapien
gacaagcccttagctagatgacaat

SEQ ID NO: 1538408 - DNA, 25 bp, Homo sapien
aggcaccaggacttgagaggcacca

SEQ ID NO: 1538409 - DNA, 25 bp, Homo sapien
gcatttcgtcgaacgtgcaagtcat

SEQ ID NO: 1538410 - DNA, 25 bp, Homo sapien
cacaacctggactgaaatcatgagg

SEQ ID NO: 1538411 - DNA, 25 bp, Homo sapien
gatgcacagatagagaggcaccagg

SEQ ID NO: 1538412 - DNA, 25 bp, Homo sapien
gaggcatgttgatccatctccagga

SEQ ID NO: 1538413 - DNA, 25 bp, Homo sapien
tctggtaacagatgaggtacaaacg

SEQ ID NO: 1538414 - DNA, 25 bp, Homo sapien
tggtgcctctcaagtcctggtgcct

SEQ ID NO: 1538415 - DNA, 25 bp, Homo sapien
gagattgtcatctagctaagggctt

SEQ ID NO: 1538416 - DNA, 25 bp, Homo sapien
tttcctggagatggatcaacatgcc

SEQ ID NO: 1538417 - DNA, 25 bp, Homo sapien
catgacttgcacgttcgacgaaatg

SEQ ID NO: 1538418 - DNA, 25 bp, Homo sapien
aagctgtggtagagaagctcccaac

SEQ ID NO: 1538419 - DNA, 25 bp, Homo sapien
agagaaaccttgtgaatgtgggaaa

SEQ ID NO: 1538420 - DNA, 25 bp, Homo sapien
aaaccttgtgaatgtgggaaagctt

SEQ ID NO: 1538421 - DNA, 25 bp, Homo sapien
gagaaaccttgtgaatgtgggaaag

SEQ ID NO: 1538422 - DNA, 25 bp, Homo sapien
gaaaccttgtgaatgtgggaaagct

SEQ ID NO: 1538423 - DNA, 25 bp, Homo sapien
tgaatgtgggaaagcttccattcag

SEQ ID NO: 1538424 - DNA, 25 bp, Homo sapien
agaaaccttgtgaatgtgggaaagc

SEQ ID NO: 1538425 - DNA, 25 bp, Homo sapien
gctttcccacattcacaaggtttct

SEQ ID NO: 1538426 - DNA, 25 bp, Homo sapien
ctttcccacattcacaaggtttctc

SEQ ID NO: 1538427 - DNA, 25 bp, Homo sapien
agctttcccacattcacaaggtttc

SEQ ID NO: 1538428 - DNA, 25 bp, Homo sapien
tttcccacattcacaaggtttctct

SEQ ID NO: 1538429 - DNA, 25 bp, Homo sapien
ctgaatggaagctttcccacattca

SEQ ID NO: 1538430 - DNA, 25 bp, Homo sapien
aagctttcccacattcacaaggttt

SEQ ID NO: 1538431 - DNA, 25 bp, Homo sapien
ccagcagagaatttacagtggggaa

SEQ ID NO: 1538432 - DNA, 25 bp, Homo sapien
tcagccagcagagaatttacagtgg

SEQ ID NO: 1538433 - DNA, 25 bp, Homo sapien
cacacctcagccagcagagaattta

SEQ ID NO: 1538434 - DNA, 25 bp, Homo sapien
atgtcacacctcagccagcagagaa

SEQ ID NO: 1538435 - DNA, 25 bp, Homo sapien
cagccagcagagaatttacagtggg

SEQ ID NO: 1538436 - DNA, 25 bp, Homo sapien
gcagagaatttacagtggggaaaac

SEQ ID NO: 1538437 - DNA, 25 bp, Homo sapien
gttttccccactgtaaattctctgc

SEQ ID NO: 1538438 - DNA, 25 bp, Homo sapien
tccccactgtaaattctctgctggc

SEQ ID NO: 1538439 - DNA, 25 bp, Homo sapien
ttccccactgtaaattctctgctgg

SEQ ID NO: 1538440 - DNA, 25 bp, Homo sapien
cactgtaaattctctgctggctgag

SEQ ID NO: 1538441 - DNA, 25 bp, Homo sapien
tttccccactgtaaattctctgctg

SEQ ID NO: 1538442 - DNA, 25 bp, Homo sapien
ttctctgctggctgaggtgtgacat

SEQ ID NO: 1538443 - DNA, 25 bp, Homo sapien
gattcattcaggtgataaaccttac

SEQ ID NO: 1538444 - DNA, 25 bp, Homo sapien
tctctcagcgaacatcacttattgt

SEQ ID NO: 1538445 - DNA, 25 bp, Homo sapien
tgaggattcattcaggtgataaacc

SEQ ID NO: 1538446 - DNA, 25 bp, Homo sapien
tactggcgagaagcttttcgaatgt

SEQ ID NO: 1538447 - DNA, 25 bp, Homo sapien
tcattcaggtgataaaccttacgaa

SEQ ID NO: 1538448 - DNA, 25 bp, Homo sapien
agccttctctcagcgaacatcactt

SEQ ID NO: 1538449 - DNA, 25 bp, Homo sapien
aagtgatgttcgctgagagaaggct

SEQ ID NO: 1538450 - DNA, 25 bp, Homo sapien
tacaataagtgatgttcgctgagag

SEQ ID NO: 1538451 - DNA, 25 bp, Homo sapien
tacattcgaaaagcttctcgccagt

SEQ ID NO: 1538452 - DNA, 25 bp, Homo sapien
cattcgaaaagcttctcgccagtat

SEQ ID NO: 1538453 - DNA, 25 bp, Homo sapien
ttcgtaaggtttatcacctgaatga

SEQ ID NO: 1538454 - DNA, 25 bp, Homo sapien
ggtttatcacctgaatgaatcctca

SEQ ID NO: 1538455 - DNA, 25 bp, Homo sapien
tctggagatcttcgccagtaacaag

SEQ ID NO: 1538456 - DNA, 25 bp, Homo sapien
cctgtggtattgattgagcagagca

SEQ ID NO: 1538457 - DNA, 25 bp, Homo sapien
tattgctaccaccatagatctggag

SEQ ID NO: 1538458 - DNA, 25 bp, Homo sapien
gaagcaaagcaccacgaatgaggtt

SEQ ID NO: 1538459 - DNA, 25 bp, Homo sapien
gaatgctcaggaaatacgcactagg

SEQ ID NO: 1538460 - DNA, 25 bp, Homo sapien
gaaacaactgagaaagcccatcacg

SEQ ID NO: 1538461 - DNA, 25 bp, Homo sapien
tatcctagtgcgtatttcctgagca

SEQ ID NO: 1538462 - DNA, 25 bp, Homo sapien
cttgttactggcgaagatctccaga

SEQ ID NO: 1538463 - DNA, 25 bp, Homo sapien
gatctccagatctatggtggtagca

SEQ ID NO: 1538464 - DNA, 25 bp, Homo sapien
ggtagcaataaaaaacaggcctcca

SEQ ID NO: 1538465 - DNA, 25 bp, Homo sapien
tgctctgctcaatcaataccacagg

SEQ ID NO: 1538466 - DNA, 25 bp, Homo sapien
catattgttcgtgatgggctttctc

SEQ ID NO: 1538467 - DNA, 25 bp, Homo sapien
tctggattgtggtatagggatatct

SEQ ID NO: 1538468 - DNA, 25 bp, Homo sapien
tttgaaacggattggaaggatacag

SEQ ID NO: 1538469 - DNA, 25 bp, Homo sapien
gtactatctattggtaatggatgca

SEQ ID NO: 1538470 - DNA, 25 bp, Homo sapien
aactcttgatagtggtcacctgtga

SEQ ID NO: 1538471 - DNA, 25 bp, Homo sapien
gaaggatacagaccaaactcttgat

SEQ ID NO: 1538472 - DNA, 25 bp, Homo sapien
tctgtggaagtcatgttatactgga

SEQ ID NO: 1538473 - DNA, 25 bp, Homo sapien
tccattaccaatagatagtactgag

SEQ ID NO: 1538474 - DNA, 25 bp, Homo sapien
tcaagagtttggtctgtatccttcc

SEQ ID NO: 1538475 - DNA, 25 bp, Homo sapien
tccagtataacatgacttccacaga

SEQ ID NO: 1538476 - DNA, 25 bp, Homo sapien
taagacaagatatccctataccaca

SEQ ID NO: 1538477 - DNA, 25 bp, Homo sapien
tcacaggtgaccactatcaagagtt

SEQ ID NO: 1538478 - DNA, 25 bp, Homo sapien
tataccacaatccagaatcaatcag

SEQ ID NO: 1538479 - DNA, 25 bp, Homo sapien
tggacttgctctctatgtaatatga

SEQ ID NO: 1538480 - DNA, 25 bp, Homo sapien
gacttgctctctatgtaatatgaaa

SEQ ID NO: 1538481 - DNA, 25 bp, Homo sapien
cttgctctctatgtaatatgaaatt

SEQ ID NO: 1538482 - DNA, 25 bp, Homo sapien
aattttatcacggatgaatggatgg

SEQ ID NO: 1538483 - DNA, 25 bp, Homo sapien
attttatcacggatgaatggatgga

SEQ ID NO: 1538484 - DNA, 25 bp, Homo sapien
ctaaaattttatcacggatgaatgg

SEQ ID NO: 1538485 - DNA, 25 bp, Homo sapien
tccatccattcatccgtgataaaat

SEQ ID NO: 1538486 - DNA, 25 bp, Homo sapien
catattacatagagagcaagtccat

SEQ ID NO: 1538487 - DNA, 25 bp, Homo sapien
tcatattacatagagagcaagtcca

SEQ ID NO: 1538488 - DNA, 25 bp, Homo sapien
aatttcatattacatagagagcaag

SEQ ID NO: 1538489 - DNA, 25 bp, Homo sapien
ccattcatccgtgataaaattttag

SEQ ID NO: 1538490 - DNA, 25 bp, Homo sapien
tttcatattacatagagagcaagtc

SEQ ID NO: 1538491 - DNA, 25 bp, Homo sapien
agaactctgtctagggtctgagcca

SEQ ID NO: 1538492 - DNA, 25 bp, Homo sapien
gtaatggcagcacttgaacaggcca

SEQ ID NO: 1538493 - DNA, 25 bp, Homo sapien
cacgcaggtgttggtatctaatgca

SEQ ID NO: 1538494 - DNA, 25 bp, Homo sapien
cagagctcgcaggttaagacagaca

SEQ ID NO: 1538495 - DNA, 25 bp, Homo sapien
ccttcatggccattttaagggtctc

SEQ ID NO: 1538496 - DNA, 25 bp, Homo sapien
tttgggtgggacattcaacccatag

SEQ ID NO: 1538497 - DNA, 25 bp, Homo sapien
catggccattttaagggtctcaacc

SEQ ID NO: 1538498 - DNA, 25 bp, Homo sapien
caacccatagcatttgtggactctc

SEQ ID NO: 1538499 - DNA, 25 bp, Homo sapien
ggattactggcccccgctaccacat

SEQ ID NO: 1538500 - DNA, 25 bp, Homo sapien
attactggcccccgctaccacatct

SEQ ID NO: 1538501 - DNA, 25 bp, Homo sapien
tactggcccccgctaccacatctgg

SEQ ID NO: 1538502 - DNA, 25 bp, Homo sapien
acccaggccggagttcaacggcacg

SEQ ID NO: 1538503 - DNA, 25 bp, Homo sapien
tcccgtgttcagtcattctcttgtc

SEQ ID NO: 1538504 - DNA, 25 bp, Homo sapien
cccgtgttcagtcattctcttgtct

SEQ ID NO: 1538505 - DNA, 25 bp, Homo sapien
ccgtgttcagtcattctcttgtctc

SEQ ID NO: 1538506 - DNA, 25 bp, Homo sapien
tgcctggcccagatagatgatttct

SEQ ID NO: 1538507 - DNA, 25 bp, Homo sapien
aagcatgacgcggaccgccacgagg

SEQ ID NO: 1538508 - DNA, 25 bp, Homo sapien
gaaacaagcatgacgcggaccgcca

SEQ ID NO: 1538509 - DNA, 25 bp, Homo sapien
agagggaaacaagcatgacgcggac

SEQ ID NO: 1538510 - DNA, 25 bp, Homo sapien
gacgcggaccgccacgaggtttctc

SEQ ID NO: 1538511 - DNA, 25 bp, Homo sapien
cacacagacgcaccccccccaacac

SEQ ID NO: 1538512 - DNA, 25 bp, Homo sapien
acccatgacgaacacacacgtacag

SEQ ID NO: 1538513 - DNA, 25 bp, Homo sapien
cacccatgacgaacacacacgtaca

SEQ ID NO: 1538514 - DNA, 25 bp, Homo sapien
acccatgacgaacacacacgtacag

SEQ ID NO: 1538515 - DNA, 25 bp, Homo sapien
cacacagacgcaccccccccaacac

SEQ ID NO: 1538516 - DNA, 25 bp, Homo sapien
cacccatgacgaacacacacgtaca

SEQ ID NO: 1538517 - DNA, 25 bp, Homo sapien
aagcatgacgcggaccgccacgagg

SEQ ID NO: 1538518 - DNA, 25 bp, Homo sapien
gacgcggaccgccacgaggtttctc

SEQ ID NO: 1538519 - DNA, 25 bp, Homo sapien
gaaacaagcatgacgcggaccgcca

SEQ ID NO: 1538520 - DNA, 25 bp, Homo sapien
agagggaaacaagcatgacgcggac

SEQ ID NO: 1538521 - DNA, 25 bp, Homo sapien
cacccatgacgaacacacacgtaca

SEQ ID NO: 1538522 - DNA, 25 bp, Homo sapien
cacacagacgcaccccccccaacac

SEQ ID NO: 1538523 - DNA, 25 bp, Homo sapien
acccatgacgaacacacacgtacag

SEQ ID NO: 1538524 - DNA, 25 bp, Homo sapien
acactgagccacactaagaagccgc

SEQ ID NO: 1538525 - DNA, 25 bp, Homo sapien
gacactgagccacactaagaagccg

SEQ ID NO: 1538526 - DNA, 25 bp, Homo sapien
actgagccacactaagaagccgcca

SEQ ID NO: 1538527 - DNA, 25 bp, Homo sapien
acccatgacgaacacacacgtacag

SEQ ID NO: 1538528 - DNA, 25 bp, Homo sapien
cacacagacgcaccccccccaacac

SEQ ID NO: 1538529 - DNA, 25 bp, Homo sapien
cacccatgacgaacacacacgtaca

SEQ ID NO: 1538530 - DNA, 25 bp, Homo sapien
actgagccacactaagaagccgcca

SEQ ID NO: 1538531 - DNA, 25 bp, Homo sapien
gacactgagccacactaagaagccg

SEQ ID NO: 1538532 - DNA, 25 bp, Homo sapien
acactgagccacactaagaagccgc

SEQ ID NO: 1538533 - DNA, 25 bp, Homo sapien
acccatgacgaacacacacgtacag

SEQ ID NO: 1538534 - DNA, 25 bp, Homo sapien
cacccatgacgaacacacacgtaca

SEQ ID NO: 1538535 - DNA, 25 bp, Homo sapien
cacacagacgcaccccccccaacac

SEQ ID NO: 1538536 - DNA, 25 bp, Homo sapien
acccatgacgaacacacacgtacag

SEQ ID NO: 1538537 - DNA, 25 bp, Homo sapien
cacccatgacgaacacacacgtaca

SEQ ID NO: 1538538 - DNA, 25 bp, Homo sapien
cacacagacgcaccccccccaacac

SEQ ID NO: 1538539 - DNA, 25 bp, Homo sapien
acccatgacgaacacacacgtacag

SEQ ID NO: 1538540 - DNA, 25 bp, Homo sapien
cacccatgacgaacacacacgtaca

SEQ ID NO: 1538541 - DNA, 25 bp, Homo sapien
cacacagacgcaccccccccaacac

SEQ ID NO: 1538542 - DNA, 25 bp, Homo sapien
cacccatgacgaacacacacgtaca

SEQ ID NO: 1538543 - DNA, 25 bp, Homo sapien
cacacagacgcaccccccccaacac

SEQ ID NO: 1538544 - DNA, 25 bp, Homo sapien
acccatgacgaacacacacgtacag

SEQ ID NO: 1538545 - DNA, 25 bp, Homo sapien
acactgagccacactaagaagccgc

SEQ ID NO: 1538546 - DNA, 25 bp, Homo sapien
gacactgagccacactaagaagccg

SEQ ID NO: 1538547 - DNA, 25 bp, Homo sapien
actgagccacactaagaagccgcca

SEQ ID NO: 1538548 - DNA, 25 bp, Homo sapien
acactgagccacactaagaagccgc

SEQ ID NO: 1538549 - DNA, 25 bp, Homo sapien
gacactgagccacactaagaagccg

SEQ ID NO: 1538550 - DNA, 25 bp, Homo sapien
actgagccacactaagaagccgcca

SEQ ID NO: 1538551 - DNA, 25 bp, Homo sapien
tgagacacctcactttgccagtatg

SEQ ID NO: 1538552 - DNA, 25 bp, Homo sapien
tggttaggctggtgtgatcccctga

SEQ ID NO: 1538553 - DNA, 25 bp, Homo sapien
cattgttcttagtgtcagccgctga

SEQ ID NO: 1538554 - DNA, 25 bp, Homo sapien
tacttctgctttacgcgactacgag

SEQ ID NO: 1538555 - DNA, 25 bp, Homo sapien
ccttccggcagttgggacatttcac

SEQ ID NO: 1538556 - DNA, 25 bp, Homo sapien
tcagctgcccctgaccggtttggta

SEQ ID NO: 1538557 - DNA, 25 bp, Homo sapien
cctagtcctggaaaagtggctcatt

SEQ ID NO: 1538558 - DNA, 25 bp, Homo sapien
gaaggcattgcactcggaggcagaa

SEQ ID NO: 1538559 - DNA, 25 bp, Homo sapien
tgcgtgtccctctgttactcatggg

SEQ ID NO: 1538560 - DNA, 25 bp, Homo sapien
agactgcgcttcaccccatgggaag

SEQ ID NO: 1538561 - DNA, 25 bp, Homo sapien
gcagtctgtgagtcccctataggca

SEQ ID NO: 1538562 - DNA, 25 bp, Homo sapien
tagacctgtctcagaactagggcgc

SEQ ID NO: 1538563 - DNA, 25 bp, Homo sapien
gatgtgagaggcacaccgtgtgggc

SEQ ID NO: 1538564 - DNA, 25 bp, Homo sapien
cagaagcacttctgtttggtggccc

SEQ ID NO: 1538565 - DNA, 25 bp, Homo sapien
cctacacaccttctgtgtgtcgcgt

SEQ ID NO: 1538566 - DNA, 25 bp, Homo sapien
ggcctctgcggtcacttccactacc

SEQ ID NO: 1538567 - DNA, 25 bp, Homo sapien
gctctcgtggtcagcagctctcatt

SEQ ID NO: 1538568 - DNA, 25 bp, Homo sapien
ggagaaacttgtccgtgtcactggg

SEQ ID NO: 1538569 - DNA, 25 bp, Homo sapien
gggcatcttaacagtcggctcctaa

SEQ ID NO: 1538570 - DNA, 25 bp, Homo sapien
ccgggaccacattttccagaatcct

SEQ ID NO: 1538571 - DNA, 25 bp, Homo sapien
gcagtcccaggagcgcatcgcttct

SEQ ID NO: 1538572 - DNA, 25 bp, Homo sapien
gaatttctggctcaagcctctgatc

SEQ ID NO: 1538573 - DNA, 25 bp, Homo sapien
tgttcacccaagtccagccttcatc

SEQ ID NO: 1538574 - DNA, 25 bp, Homo sapien
caaacaaacacctcgggaatttctg

SEQ ID NO: 1538575 - DNA, 25 bp, Homo sapien
agaaaacgcccatgttgaacaaaat

SEQ ID NO: 1538576 - DNA, 25 bp, Homo sapien
acaaagaaaacgcccatgttgaaca

SEQ ID NO: 1538577 - DNA, 25 bp, Homo sapien
ttgaacaaaatggtgacaattgtgc

SEQ ID NO: 1538578 - DNA, 25 bp, Homo sapien
tccagaagtttccttcaagccgtac

SEQ ID NO: 1538579 - DNA, 25 bp, Homo sapien
cagagaaagctcctaagggactttc

SEQ ID NO: 1538580 - DNA, 25 bp, Homo sapien
gatggttacgaggaaattgtggata

SEQ ID NO: 1538581 - DNA, 25 bp, Homo sapien
aattgtggatattaaggaagtcagg

SEQ ID NO: 1538582 - DNA, 25 bp, Homo sapien
gctcctaagggactttctggctgct

SEQ ID NO: 1538583 - DNA, 25 bp, Homo sapien
gggtgtgaagatttacaaataatct

SEQ ID NO: 1538584 - DNA, 25 bp, Homo sapien
ttatttctccaggcgaagggatgtt

SEQ ID NO: 1538585 - DNA, 25 bp, Homo sapien
cgaagggatgttggaagacattctg

SEQ ID NO: 1538586 - DNA, 25 bp, Homo sapien
ttctccaggcgaagggatgttggaa

SEQ ID NO: 1538587 - DNA, 25 bp, Homo sapien
ggttcccagtgagcattgtacattt

SEQ ID NO: 1538588 - DNA, 25 bp, Homo sapien
tgatactcaacatgcaaaccttgtg

SEQ ID NO: 1538589 - DNA, 25 bp, Homo sapien
tttacctgggctggaatagggctct

SEQ ID NO: 1538590 - DNA, 25 bp, Homo sapien
taaacacccacccaatgggagaggc

SEQ ID NO: 1538591 - DNA, 25 bp, Homo sapien
gaatgtaccctccaggattgccttc

SEQ ID NO: 1538592 - DNA, 25 bp, Homo sapien
ttttcttatctgctgtcaacccctg

SEQ ID NO: 1538593 - DNA, 25 bp, Homo sapien
gaccttctacatctagctcgatcat

SEQ ID NO: 1538594 - DNA, 25 bp, Homo sapien
taccctccaggattgccttctagac

SEQ ID NO: 1538595 - DNA, 25 bp, Homo sapien
gtggcacatcttggacccctgcaac

SEQ ID NO: 1538596 - DNA, 25 bp, Homo sapien
tgcgcctggatcccgccacagtgag

SEQ ID NO: 1538597 - DNA, 25 bp, Homo sapien
gagctgcgcctggatcccgccacag

SEQ ID NO: 1538598 - DNA, 25 bp, Homo sapien
cgcctggatcccgccacagtgagga

SEQ ID NO: 1538599 - DNA, 25 bp, Homo sapien
ctggatcccgccacagtgaggagac

SEQ ID NO: 1538600 - DNA, 25 bp, Homo sapien
gaaattggccattgccacggcggga

SEQ ID NO: 1538601 - DNA, 25 bp, Homo sapien
tcctggccttttgcgtccacgggtg

SEQ ID NO: 1538602 - DNA, 25 bp, Homo sapien
tcagtcttgggctattcggccacgt

SEQ ID NO: 1538603 - DNA, 25 bp, Homo sapien
cactggcgctgatgtagtttcctga

SEQ ID NO: 1538604 - DNA, 25 bp, Homo sapien
gaatctgcacatatggagggctggc

SEQ ID NO: 1538605 - DNA, 25 bp, Homo sapien
cattacttggacctggtttgaacaa

SEQ ID NO: 1538606 - DNA, 25 bp, Homo sapien
gggaagggcaaccattaacagatta

SEQ ID NO: 1538607 - DNA, 25 bp, Homo sapien
tataaagggcaccacaaggaagaag

SEQ ID NO: 1538608 - DNA, 25 bp, Homo sapien
caaaattgtagggatcttaatagaa

SEQ ID NO: 1538609 - DNA, 25 bp, Homo sapien
ttgtggttgccttagacaataacaa

SEQ ID NO: 1538610 - DNA, 25 bp, Homo sapien
gaatctgaaattagcttctttatat

SEQ ID NO: 1538611 - DNA, 25 bp, Homo sapien
cttagacaataacaagtacattatt

SEQ ID NO: 1538612 - DNA, 25 bp, Homo sapien
gaggggctgggtgaagtctacacag

SEQ ID NO: 1538613 - DNA, 25 bp, Homo sapien
taagatgttaacactgggaggggct

SEQ ID NO: 1538614 - DNA, 25 bp, Homo sapien
gggaggggctgggtgaagtctacac

SEQ ID NO: 1538615 - DNA, 25 bp, Homo sapien
ggctgggtgaagtctacacaggact

SEQ ID NO: 1538616 - DNA, 25 bp, Homo sapien
aattccgaggctttgcagggcatca

SEQ ID NO: 1538617 - DNA, 25 bp, Homo sapien
caaatggcaagtgggctgaacatgc

SEQ ID NO: 1538618 - DNA, 25 bp, Homo sapien
gttgagaagtccagcctcaaagggc

SEQ ID NO: 1538619 - DNA, 25 bp, Homo sapien
gcaaatgtgctagttgaggcctctc

SEQ ID NO: 1538620 - DNA, 25 bp, Homo sapien
aataaaagtcttcctcagcgacaaa

SEQ ID NO: 1538621 - DNA, 25 bp, Homo sapien
taattgtaaacatgtacataggacc

SEQ ID NO: 1538622 - DNA, 25 bp, Homo sapien
tttaatggagtgttgatttccttac

SEQ ID NO: 1538623 - DNA, 25 bp, Homo sapien
tggagtgttgatttccttacataaa

SEQ ID NO: 1538624 - DNA, 25 bp, Homo sapien
cataggaccgtgattttgaattaaa

SEQ ID NO: 1538625 - DNA, 25 bp, Homo sapien
tactaagagaaactgcggatgtctg

SEQ ID NO: 1538626 - DNA, 25 bp, Homo sapien
gttttttacaaaggacactgctctg

SEQ ID NO: 1538627 - DNA, 25 bp, Homo sapien
catggatttaattcctgctgaggca

SEQ ID NO: 1538628 - DNA, 25 bp, Homo sapien
tgatggagcatttgacacgtgggtt

SEQ ID NO: 1538629 - DNA, 25 bp, Homo sapien
tgtttaaaaaaccaagtgtgctgga

SEQ ID NO: 1538630 - DNA, 25 bp, Homo sapien
gaccctcttgcctctagaattccag

SEQ ID NO: 1538631 - DNA, 25 bp, Homo sapien
tacagaggctggaagcctcagcact

SEQ ID NO: 1538632 - DNA, 25 bp, Homo sapien
ccagatgtgatctatgttcttccag

SEQ ID NO: 1538633 - DNA, 25 bp, Homo sapien
tgattctactttggcagatgctgcg

SEQ ID NO: 1538634 - DNA, 25 bp, Homo sapien
taaccaaaaggacttcgaagatgaa

SEQ ID NO: 1538635 - DNA, 25 bp, Homo sapien
gtgaaacatgtatgagagctctgtg

SEQ ID NO: 1538636 - DNA, 25 bp, Homo sapien
cattaacagaggtcttctggagaca

SEQ ID NO: 1538637 - DNA, 25 bp, Homo sapien
aaactgagaagtacaagttagtctc

SEQ ID NO: 1538638 - DNA, 25 bp, Homo sapien
ctgagaagtacaagttagtctccaa

SEQ ID NO: 1538639 - DNA, 25 bp, Homo sapien
caaacaaccaaatgcacaatttggg

SEQ ID NO: 1538640 - DNA, 25 bp, Homo sapien
ccaaatgcacaatttgggaaattct

SEQ ID NO: 1538641 - DNA, 25 bp, Homo sapien
tactgaatttaggaatgtcgcttga

SEQ ID NO: 1538642 - DNA, 25 bp, Homo sapien
tcgcttgattgtgttcattcataga

SEQ ID NO: 1538643 - DNA, 25 bp, Homo sapien
gaatcttgagagtgaaaatagccca

SEQ ID NO: 1538644 - DNA, 25 bp, Homo sapien
gtctgctttggtatacttttactga

SEQ ID NO: 1538645 - DNA, 25 bp, Homo sapien
gcagcggcttcctccgttcgggcat

SEQ ID NO: 1538646 - DNA, 25 bp, Homo sapien
cggcagcggcttcctccgttcgggc

SEQ ID NO: 1538647 - DNA, 25 bp, Homo sapien
ggcagcggcttcctccgttcgggca

SEQ ID NO: 1538648 - DNA, 25 bp, Homo sapien
tagttggcactatagagaggcggtc

SEQ ID NO: 1538649 - DNA, 25 bp, Homo sapien
gcgggcgcccctctttaacgcgcca

SEQ ID NO: 1538650 - DNA, 25 bp, Homo sapien
cacagggctccctagttggcactat

SEQ ID NO: 1538651 - DNA, 25 bp, Homo sapien
gccagggacagactcgcagcgccgt

SEQ ID NO: 1538652 - DNA, 25 bp, Homo sapien
tcgtggcaagtgcgccgattgtcca

SEQ ID NO: 1538653 - DNA, 25 bp, Homo sapien
ttgtccagagggcgtccggcgtccc

SEQ ID NO: 1538654 - DNA, 25 bp, Homo sapien
tgcgccgattgtccagagggcgtcc

SEQ ID NO: 1538655 - DNA, 25 bp, Homo sapien
caagtgcgccgattgtccagagggc

SEQ ID NO: 1538656 - DNA, 25 bp, Homo sapien
caggatcagcgttgctgacatctcg

SEQ ID NO: 1538657 - DNA, 25 bp, Homo sapien
cgggctccaggatcagcgttgctga

SEQ ID NO: 1538658 - DNA, 25 bp, Homo sapien
ccgcgggctccaggatcagcgttgc

SEQ ID NO: 1538659 - DNA, 25 bp, Homo sapien
gctccaggatcagcgttgctgacat

SEQ ID NO: 1538660 - DNA, 25 bp, Homo sapien
gtgtccagcggctccgaagccaggc

SEQ ID NO: 1538661 - DNA, 25 bp, Homo sapien
gcgcagcgtgtccagcggctccgaa

SEQ ID NO: 1538662 - DNA, 25 bp, Homo sapien
gacgcgcgcgcagcgtgtccagcgg

SEQ ID NO: 1538663 - DNA, 25 bp, Homo sapien
cgaagccaggccgcgcatggtgatg

SEQ ID NO: 1538664 - DNA, 25 bp, Homo sapien
ccgcttcagaaagcgccaaaaaggt

SEQ ID NO: 1538665 - DNA, 25 bp, Homo sapien
aggtttcttggattccagggcccag

SEQ ID NO: 1538666 - DNA, 25 bp, Homo sapien
gggaatctgtacgtcccgcttcaga

SEQ ID NO: 1538667 - DNA, 25 bp, Homo sapien
tccaactccacgataaagggaatct

SEQ ID NO: 1538668 - DNA, 25 bp, Homo sapien
gctcggggtcgtggccgtccagcac

SEQ ID NO: 1538669 - DNA, 25 bp, Homo sapien
caggctcggggtcgtggccgtccag

SEQ ID NO: 1538670 - DNA, 25 bp, Homo sapien
aggctcggggtcgtggccgtccagc

SEQ ID NO: 1538671 - DNA, 25 bp, Homo sapien
ggctcggggtcgtggccgtccagca

SEQ ID NO: 1538672 - DNA, 25 bp, Homo sapien
cgcgcgcaccgaatcgctccgcacc

SEQ ID NO: 1538673 - DNA, 25 bp, Homo sapien
gcccgcgcgcaccgaatcgctccgc

SEQ ID NO: 1538674 - DNA, 25 bp, Homo sapien
gcgcgcaccgaatcgctccgcaccc

SEQ ID NO: 1538675 - DNA, 25 bp, Homo sapien
ccgcgcgcaccgaatcgctccgcac

SEQ ID NO: 1538676 - DNA, 25 bp, Homo sapien
gcggcaggaagagcgtggcgcgcac

SEQ ID NO: 1538677 - DNA, 25 bp, Homo sapien
tccctccattaccaaagatgccaat

SEQ ID NO: 1538678 - DNA, 25 bp, Homo sapien
aggctccctccattaccaaagatgc

SEQ ID NO: 1538679 - DNA, 25 bp, Homo sapien
ttaccaaagatgccaatgatcccta

SEQ ID NO: 1538680 - DNA, 25 bp, Homo sapien
ccccaaagcccagtgcctgggcctt

SEQ ID NO: 1538681 - DNA, 25 bp, Homo sapien
ccaaagcccagtgcctgggcctttt

SEQ ID NO: 1538682 - DNA, 25 bp, Homo sapien
atgccccaaagcccagtgcctgggc

SEQ ID NO: 1538683 - DNA, 25 bp, Homo sapien
caaagcccagtgcctgggcctttta

SEQ ID NO: 1538684 - DNA, 25 bp, Homo sapien
gccattgagagacaaatatcagctc

SEQ ID NO: 1538685 - DNA, 25 bp, Homo sapien
gaatgaggccattgagagacaaata

SEQ ID NO: 1538686 - DNA, 25 bp, Homo sapien
cttcaagaatgaggccattgagaga

SEQ ID NO: 1538687 - DNA, 25 bp, Homo sapien
gaggccattgagagacaaatatcag

SEQ ID NO: 1538688 - DNA, 25 bp, Homo sapien
aatggtggaatgctattctgcttac

SEQ ID NO: 1538689 - DNA, 25 bp, Homo sapien
gttcttataccctcctacaagatca

SEQ ID NO: 1538690 - DNA, 25 bp, Homo sapien
attctgcttacagtttatgcctctg

SEQ ID NO: 1538691 - DNA, 25 bp, Homo sapien
tttatatccacgacgtccacgaggc

SEQ ID NO: 1538692 - DNA, 25 bp, Homo sapien
aaggaggctcagtgtaaagcccagt

SEQ ID NO: 1538693 - DNA, 25 bp, Homo sapien
ggctcagtgtaaagcccagtcccag

SEQ ID NO: 1538694 - DNA, 25 bp, Homo sapien
ggaggctcagtgtaaagcccagtcc

SEQ ID NO: 1538695 - DNA, 25 bp, Homo sapien
gaggctcagtgtaaagcccagtccc

SEQ ID NO: 1538696 - DNA, 25 bp, Homo sapien
cagctgattcacatagggttattga

SEQ ID NO: 1538697 - DNA, 25 bp, Homo sapien
gacaaacgcattacaatttagggaa

SEQ ID NO: 1538698 - DNA, 25 bp, Homo sapien
tgggccttagaatgagccctggctc

SEQ ID NO: 1538699 - DNA, 25 bp, Homo sapien
cagaaggcggctagaatttgcttcc

SEQ ID NO: 1538700 - DNA, 25 bp, Homo sapien
gaagacactggttgagtctgacata

SEQ ID NO: 1538701 - DNA, 25 bp, Homo sapien
gcaagaaggcctgctaccatcactg

SEQ ID NO: 1538702 - DNA, 25 bp, Homo sapien
cactgctagtcaacagtgtactggc

SEQ ID NO: 1538703 - DNA, 25 bp, Homo sapien
catagggcgtaacttggtaactact

SEQ ID NO: 1538704 - DNA, 25 bp, Homo sapien
gggaaaaattagcatgtgatcagtt

SEQ ID NO: 1538705 - DNA, 25 bp, Homo sapien
tactaatgaagcaccaaatccagtt

SEQ ID NO: 1538706 - DNA, 25 bp, Homo sapien
tatacatcaatattgactccaagaa

SEQ ID NO: 1538707 - DNA, 25 bp, Homo sapien
tatatagaagtacacatcttggctc

SEQ ID NO: 1538708 - DNA, 25 bp, Homo sapien
catactcactgaatgttagtcatcg

SEQ ID NO: 1538709 - DNA, 25 bp, Homo sapien
ctttgaccatatcccaaaggatagt

SEQ ID NO: 1538710 - DNA, 25 bp, Homo sapien
tatatacatgcgtgtctcagtaaaa

SEQ ID NO: 1538711 - DNA, 25 bp, Homo sapien
tggacattctccctaagcacatctt

SEQ ID NO: 1538712 - DNA, 25 bp, Homo sapien
gacatggctcacagtttgctacaca

SEQ ID NO: 1538713 - DNA, 25 bp, Homo sapien
taatggaaaaactcacaagacgtga

SEQ ID NO: 1538714 - DNA, 25 bp, Homo sapien
tattcactcatgaagatctgcccac

SEQ ID NO: 1538715 - DNA, 25 bp, Homo sapien
tatgaaatagaatcaacccagtggg

SEQ ID NO: 1538716 - DNA, 25 bp, Homo sapien
attgtattgtttcattagtctcctt

SEQ ID NO: 1538717 - DNA, 25 bp, Homo sapien
ttgtattgtttcattagtctccttc

SEQ ID NO: 1538718 - DNA, 25 bp, Homo sapien
tgtattgtttcattagtctccttcc

SEQ ID NO: 1538719 - DNA, 25 bp, Homo sapien
tgtgactgcctcctcggtaagcgtg

SEQ ID NO: 1538720 - DNA, 25 bp, Homo sapien
tgtgaccgatagaggccctgcgtgt

SEQ ID NO: 1538721 - DNA, 25 bp, Homo sapien
cgtgtgcgaccctgttgctttgggc

SEQ ID NO: 1538722 - DNA, 25 bp, Homo sapien
tggattgtctgtagctgaatgtccc

SEQ ID NO: 1538723 - DNA, 25 bp, Homo sapien
ctgctgcttcgaaagctggtaaggc

SEQ ID NO: 1538724 - DNA, 25 bp, Homo sapien
ttaccagcaactaccccagtgccgg

SEQ ID NO: 1538725 - DNA, 25 bp, Homo sapien
gttctgctgcttcgaaagctggtaa

SEQ ID NO: 1538726 - DNA, 25 bp, Homo sapien
cagcaactaccccagtgccggggag

SEQ ID NO: 1538727 - DNA, 25 bp, Homo sapien
gatgactttcggagggtccaaccgc

SEQ ID NO: 1538728 - DNA, 25 bp, Homo sapien
cccagaaggctcagttgtgcgatta

SEQ ID NO: 1538729 - DNA, 25 bp, Homo sapien
agcaccggcttatctgtgagagcaa

SEQ ID NO: 1538730 - DNA, 25 bp, Homo sapien
caaggcgcggacaggaattctgacg

SEQ ID NO: 1538731 - DNA, 25 bp, Homo sapien
agactcccatatctacgtctttcta

SEQ ID NO: 1538732 - DNA, 25 bp, Homo sapien
gactcccatatctacgtctttctac

SEQ ID NO: 1538733 - DNA, 25 bp, Homo sapien
aagactcccatatctacgtctttct

SEQ ID NO: 1538734 - DNA, 25 bp, Homo sapien
actcccatatctacgtctttctaca

SEQ ID NO: 1538735 - DNA, 25 bp, Homo sapien
gtgtcagtacactccataatgatga

SEQ ID NO: 1538736 - DNA, 25 bp, Homo sapien
taagtgttcagtcagctataccatc

SEQ ID NO: 1538737 - DNA, 25 bp, Homo sapien
cagtgttccaactgtattcagtaca

SEQ ID NO: 1538738 - DNA, 25 bp, Homo sapien
gctggtccctacagtgttccaactg

SEQ ID NO: 1538739 - DNA, 25 bp, Homo sapien
ttatctggaggtctaaccgtcttcc

SEQ ID NO: 1538740 - DNA, 25 bp, Homo sapien
ccaagcggattgtggtctagcagta

SEQ ID NO: 1538741 - DNA, 25 bp, Homo sapien
ttcagtggtcacactactggtccgc

SEQ ID NO: 1538742 - DNA, 25 bp, Homo sapien
cttggtctagcggaacgttagcgtc

SEQ ID NO: 1538743 - DNA, 25 bp, Homo sapien
gcggttgcagtttgagccaaggcct

SEQ ID NO: 1538744 - DNA, 25 bp, Homo sapien
tcattcgtggaagacgctaggcctc

SEQ ID NO: 1538745 - DNA, 25 bp, Homo sapien
gagcattccttgtgaacgcagccca

SEQ ID NO: 1538746 - DNA, 25 bp, Homo sapien
cagactccgttgaaagatgcgccaa

SEQ ID NO: 1538747 - DNA, 25 bp, Homo sapien
tttatgaactgtggtgactacaggt

SEQ ID NO: 1538748 - DNA, 25 bp, Homo sapien
taccttattgtactgttctcaacta

SEQ ID NO: 1538749 - DNA, 25 bp, Homo sapien
ataccttattgtactgttctcaact

SEQ ID NO: 1538750 - DNA, 25 bp, Homo sapien
aactatttatgaactgtggtgacta

SEQ ID NO: 1538751 - DNA, 25 bp, Homo sapien
caagctctggcggaggaaaagttcg

SEQ ID NO: 1538752 - DNA, 25 bp, Homo sapien
tgtagtctaccctcaaaagagtggc

SEQ ID NO: 1538753 - DNA, 25 bp, Homo sapien
aagttcgcgcgaaaagctgactcaa

SEQ ID NO: 1538754 - DNA, 25 bp, Homo sapien
ggagacagtcccacaagctctggcg

SEQ ID NO: 1538755 - DNA, 25 bp, Homo sapien
agttcagcgccacgcccgcgatgag

SEQ ID NO: 1538756 - DNA, 25 bp, Homo sapien
cgcccgcgatgagcaagatggcgcc

SEQ ID NO: 1538757 - DNA, 25 bp, Homo sapien
cgatgagcaagatggcgcccggctt

SEQ ID NO: 1538758 - DNA, 25 bp, Homo sapien
aaatgtagttcagcgccacgcccgc

SEQ ID NO: 1538759 - DNA, 25 bp, Homo sapien
ctcctcctgatcctgtagtctccga

SEQ ID NO: 1538760 - DNA, 25 bp, Homo sapien
tcctgatcctgtagtctccgagccg

SEQ ID NO: 1538761 - DNA, 25 bp, Homo sapien
tcctcctgatcctgtagtctccgag

SEQ ID NO: 1538762 - DNA, 25 bp, Homo sapien
tgatcctgtagtctccgagccgacc

SEQ ID NO: 1538763 - DNA, 25 bp, Homo sapien
ttatgctttacagaaacttaataaa

SEQ ID NO: 1538764 - DNA, 25 bp, Homo sapien
taatcaaagcagtgaatatctttcg

SEQ ID NO: 1538765 - DNA, 25 bp, Homo sapien
tttatgctttacagaaacttaataa

SEQ ID NO: 1538766 - DNA, 25 bp, Homo sapien
tccggagagaatctggcaccactta

SEQ ID NO: 1538767 - DNA, 25 bp, Homo sapien
ccatactggtgggagtctggactcc

SEQ ID NO: 1538768 - DNA, 25 bp, Homo sapien
tacataagagggtatcagcagagtc

SEQ ID NO: 1538769 - DNA, 25 bp, Homo sapien
taactatgagacagctacacagtgc

SEQ ID NO: 1538770 - DNA, 25 bp, Homo sapien
catattccttccctcatgcaggtgt

SEQ ID NO: 1538771 - DNA, 25 bp, Homo sapien
cttccctcatgcaggtgtccatctt

SEQ ID NO: 1538772 - DNA, 25 bp, Homo sapien
tctcctgctttagggaggctgaaca

SEQ ID NO: 1538773 - DNA, 25 bp, Homo sapien
gctgaacaatctactgttggaggaa

SEQ ID NO: 1538774 - DNA, 25 bp, Homo sapien
ggatgttctggcaacatgccctccc

SEQ ID NO: 1538775 - DNA, 25 bp, Homo sapien
aaacaggatgttctggcaacatgcc

SEQ ID NO: 1538776 - DNA, 25 bp, Homo sapien
agcaaggtatttgcttagaaacccg

SEQ ID NO: 1538777 - DNA, 25 bp, Homo sapien
gaagatctgcagcaaggtatttgct

SEQ ID NO: 1538778 - DNA, 25 bp, Homo sapien
ccctattttaattagaacagtgaga

SEQ ID NO: 1538779 - DNA, 25 bp, Homo sapien
agaagccaagagagcccttaccagg

SEQ ID NO: 1538780 - DNA, 25 bp, Homo sapien
caagagagcccttaccaggaattaa

SEQ ID NO: 1538781 - DNA, 25 bp, Homo sapien
caaaggaaagtccacatgaggacac

SEQ ID NO: 1538782 - DNA, 25 bp, Homo sapien
tttgggtatagttctccaggagaac

SEQ ID NO: 1538783 - DNA, 25 bp, Homo sapien
agtgctaatgttcctcttttgggta

SEQ ID NO: 1538784 - DNA, 25 bp, Homo sapien
ggagaacttgtcctatatttctttg

SEQ ID NO: 1538785 - DNA, 25 bp, Homo sapien
ctgagttaccatcagtgctaatgtt

SEQ ID NO: 1538786 - DNA, 25 bp, Homo sapien
tttgtggaaagtggacattatagac

SEQ ID NO: 1538787 - DNA, 25 bp, Homo sapien
catgtctactattgagtccttctag

SEQ ID NO: 1538788 - DNA, 25 bp, Homo sapien
gatgcaacattatgatcatacctac

SEQ ID NO: 1538789 - DNA, 25 bp, Homo sapien
ctcctgtttatatcagtgtggttaa

SEQ ID NO: 1538790 - DNA, 25 bp, Homo sapien
ttatgtgttgatggatttaggattc

SEQ ID NO: 1538791 - DNA, 25 bp, Homo sapien
cccatgctgtagaatgtcatttcac

SEQ ID NO: 1538792 - DNA, 25 bp, Homo sapien
ttctgggttgaaggattttgtgtgt

SEQ ID NO: 1538793 - DNA, 25 bp, Homo sapien
agaaatcagcagttaatacttttgt

SEQ ID NO: 1538794 - DNA, 25 bp, Homo sapien
tacggcagccaaggagcactgtgcc

SEQ ID NO: 1538795 - DNA, 25 bp, Homo sapien
aaagttccatgagtgttctacgccc

SEQ ID NO: 1538796 - DNA, 25 bp, Homo sapien
tggaaaccatcctgccttcaaggcc

SEQ ID NO: 1538797 - DNA, 25 bp, Homo sapien
tgcaaaatcagtaccatgtggatgc

SEQ ID NO: 1538798 - DNA, 25 bp, Homo sapien
ggcaaattgctctctagtcctgtac

SEQ ID NO: 1538799 - DNA, 25 bp, Homo sapien
ggcacccataggcaactttcttagt

SEQ ID NO: 1538800 - DNA, 25 bp, Homo sapien
gagaggacatgttacattctgcccc

SEQ ID NO: 1538801 - DNA, 25 bp, Homo sapien
gaaaggacgtgtgtcctcacgtgca

SEQ ID NO: 1538802 - DNA, 25 bp, Homo sapien
ggcactttaagtccttatctgcaag

SEQ ID NO: 1538803 - DNA, 25 bp, Homo sapien
caatgatttgcgagaaggactcaca

SEQ ID NO: 1538804 - DNA, 25 bp, Homo sapien
caataattatatcagtgctttaggg

SEQ ID NO: 1538805 - DNA, 25 bp, Homo sapien
gggtctttatgaggcctggatacat

SEQ ID NO: 1538806 - DNA, 25 bp, Homo sapien
ttaacaacaggaccgtagagatggg

SEQ ID NO: 1538807 - DNA, 25 bp, Homo sapien
caattaacaacaggaccgtagagat

SEQ ID NO: 1538808 - DNA, 25 bp, Homo sapien
acaacaggaccgtagagatgggtcc

SEQ ID NO: 1538809 - DNA, 25 bp, Homo sapien
tcccaattaacaacaggaccgtaga

SEQ ID NO: 1538810 - DNA, 25 bp, Homo sapien
tagtttccctcttcgatctgggtgt

SEQ ID NO: 1538811 - DNA, 25 bp, Homo sapien
agtattctagtttccctcttcgatc

SEQ ID NO: 1538812 - DNA, 25 bp, Homo sapien
gggaggagtcgacagtattctagtt

SEQ ID NO: 1538813 - DNA, 25 bp, Homo sapien
cctcttcgatctgggtgtgtttgtt

SEQ ID NO: 1538814 - DNA, 25 bp, Homo sapien
gtttacgacgtcattgtggtgtgtg

SEQ ID NO: 1538815 - DNA, 25 bp, Homo sapien
gacgatggtggttagtgctattgtt

SEQ ID NO: 1538816 - DNA, 25 bp, Homo sapien
ggttagtgctattgtttacgacgtc

SEQ ID NO: 1538817 - DNA, 25 bp, Homo sapien
ctgcggacgatggtggttagtgcta

SEQ ID NO: 1538818 - DNA, 25 bp, Homo sapien
gtcggtccacgtggagccgggagcc

SEQ ID NO: 1538819 - DNA, 25 bp, Homo sapien
ttaagcctggcgagtcgaggtgacc

SEQ ID NO: 1538820 - DNA, 25 bp, Homo sapien
gcgctgccgggcgaggtcggtccac

SEQ ID NO: 1538821 - DNA, 25 bp, Homo sapien
aggagctcgcggtgaggtggccccg

SEQ ID NO: 1538822 - DNA, 25 bp, Homo sapien
ctcagggccgcggatgaacttcgac

SEQ ID NO: 1538823 - DNA, 25 bp, Homo sapien
cgggctccgcttgagcttcagggct

SEQ ID NO: 1538824 - DNA, 25 bp, Homo sapien
tctgctgatggcaagggtctgcgca

SEQ ID NO: 1538825 - DNA, 25 bp, Homo sapien
gcttcagggctctttcgttgttgga

SEQ ID NO: 1538826 - DNA, 25 bp, Homo sapien
ttgccgtcagggaccaccagccgcc

SEQ ID NO: 1538827 - DNA, 25 bp, Homo sapien
cttgccgtcagggaccaccagccgc

SEQ ID NO: 1538828 - DNA, 25 bp, Homo sapien
agagtctgagtcttttcgtcaacag

SEQ ID NO: 1538829 - DNA, 25 bp, Homo sapien
tttctcatggtgcaaaacggacaaa

SEQ ID NO: 1538830 - DNA, 25 bp, Homo sapien
cagtgtaaaacacgccctaaggcag

SEQ ID NO: 1538831 - DNA, 25 bp, Homo sapien
tacgaccacgggtcacatcctgagg

SEQ ID NO: 1538832 - DNA, 25 bp, Homo sapien
ggaaacgtgccagctttattcgtaa

SEQ ID NO: 1538833 - DNA, 25 bp, Homo sapien
gcccagtcaatgtggcgaaaccttg

SEQ ID NO: 1538834 - DNA, 25 bp, Homo sapien
accagcccagtcaatgtggcgaaac

SEQ ID NO: 1538835 - DNA, 25 bp, Homo sapien
tcaaggagggccggttgcttgagct

SEQ ID NO: 1538836 - DNA, 25 bp, Homo sapien
cagcccagtcaatgtggcgaaacct

SEQ ID NO: 1538837 - DNA, 25 bp, Homo sapien
tctacttcgatagaaagtagggccg

SEQ ID NO: 1538838 - DNA, 25 bp, Homo sapien
ttctacttcgatagaaagtagggcc

SEQ ID NO: 1538839 - DNA, 25 bp, Homo sapien
ctacttcgatagaaagtagggccgg

SEQ ID NO: 1538840 - DNA, 25 bp, Homo sapien
tattctacttcgatagaaagtaggg

SEQ ID NO: 1538841 - DNA, 25 bp, Homo sapien
tcttcccatatactgttaataataa

SEQ ID NO: 1538842 - DNA, 25 bp, Homo sapien
gtggtgcaacatgacccagaaggtg

SEQ ID NO: 1538843 - DNA, 25 bp, Homo sapien
tgtaacatgggaggacctccctctt

SEQ ID NO: 1538844 - DNA, 25 bp, Homo sapien
ggatatgactagaagggaaacagtg

SEQ ID NO: 1538845 - DNA, 25 bp, Homo sapien
gcctggtcaaatggcgaaaccatct

SEQ ID NO: 1538846 - DNA, 25 bp, Homo sapien
agcctggtcaaatggcgaaaccatc

SEQ ID NO: 1538847 - DNA, 25 bp, Homo sapien
ctggtcaaatggcgaaaccatctgt

SEQ ID NO: 1538848 - DNA, 25 bp, Homo sapien
cctggtcaaatggcgaaaccatctg

SEQ ID NO: 1538849 - DNA, 25 bp, Homo sapien
ttaatactacatgtggccgggtgcg

SEQ ID NO: 1538850 - DNA, 25 bp, Homo sapien
tttaatactacatgtggccgggtgc

SEQ ID NO: 1538851 - DNA, 25 bp, Homo sapien
tgtagtaggctaccccattgctgtt

SEQ ID NO: 1538852 - DNA, 25 bp, Homo sapien
gaatgtatccctgtagtgacaaatg

SEQ ID NO: 1538853 - DNA, 25 bp, Homo sapien
tatgactgttacctatctcctgcca

SEQ ID NO: 1538854 - DNA, 25 bp, Homo sapien
gcaagtatcttataccggtgtgcca

SEQ ID NO: 1538855 - DNA, 25 bp, Homo sapien
gacatattgatactctagaccctgt

SEQ ID NO: 1538856 - DNA, 25 bp, Homo sapien
caagatatggcggtaaaagacagac

SEQ ID NO: 1538857 - DNA, 25 bp, Homo sapien
ctgaagacgacattccagttggaca

SEQ ID NO: 1538858 - DNA, 25 bp, Homo sapien
gtgtttgcgttttaagtgaagagtc

SEQ ID NO: 1538859 - DNA, 25 bp, Homo sapien
gacagctccatgcatatttttaatc

SEQ ID NO: 1538860 - DNA, 25 bp, Homo sapien
gaagaaggcattgttttcataggcg

SEQ ID NO: 1538861 - DNA, 25 bp, Homo sapien
actagtttatgtaatttattgtact

SEQ ID NO: 1538862 - DNA, 25 bp, Homo sapien
ttagactgtactccttctacttatt

SEQ ID NO: 1538863 - DNA, 25 bp, Homo sapien
ttgtggtgacgctgctgtaaataaa

SEQ ID NO: 1538864 - DNA, 25 bp, Homo sapien
tcacttgtggacgttgtcatgcaac

SEQ ID NO: 1538865 - DNA, 25 bp, Homo sapien
ggttgaatctgcatatatgaagagc

SEQ ID NO: 1538866 - DNA, 25 bp, Homo sapien
tacaagtgctatcaattactgagat

SEQ ID NO: 1538867 - DNA, 25 bp, Homo sapien
gaactcatatccatgtggaggacac

SEQ ID NO: 1538868 - DNA, 25 bp, Homo sapien
acatgtccgtgtgagattttgaggg

SEQ ID NO: 1538869 - DNA, 25 bp, Homo sapien
aacaactagctataggatgaactca

SEQ ID NO: 1538870 - DNA, 25 bp, Homo sapien
agggagagctagcatatcacatggc

SEQ ID NO: 1538871 - DNA, 25 bp, Homo sapien
gtattagtctgttttgtgttgctat

SEQ ID NO: 1538872 - DNA, 25 bp, Homo sapien
gaggtggactactctagatacttca

SEQ ID NO: 1538873 - DNA, 25 bp, Homo sapien
gaaacctacaaactctcactacaag

SEQ ID NO: 1538874 - DNA, 25 bp, Homo sapien
tcactacaagcgttaatagcctaaa

SEQ ID NO: 1538875 - DNA, 25 bp, Homo sapien
actatttgagtatacagctcagcag

SEQ ID NO: 1538876 - DNA, 25 bp, Homo sapien
cagtggagctgaacctggttctgta

SEQ ID NO: 1538877 - DNA, 25 bp, Homo sapien
ctggttctgtatgtatggattttta

SEQ ID NO: 1538878 - DNA, 25 bp, Homo sapien
ggttctgtatgtatggatttttatt

SEQ ID NO: 1538879 - DNA, 25 bp, Homo sapien
agtggagctgaacctggttctgtat

SEQ ID NO: 1538880 - DNA, 25 bp, Homo sapien
gcattatcactgtgatgtgtctagg

SEQ ID NO: 1538881 - DNA, 25 bp, Homo sapien
ttcattatcctacttgacactcatt

SEQ ID NO: 1538882 - DNA, 25 bp, Homo sapien
tctctgtgctgcattataggtaatc

SEQ ID NO: 1538883 - DNA, 25 bp, Homo sapien
ggtgttagatccactttcattatcc

SEQ ID NO: 1538884 - DNA, 25 bp, Homo sapien
aaaaaagaccttagaatgctgtagg

SEQ ID NO: 1538885 - DNA, 25 bp, Homo sapien
tagtaaacagaatccccaacatatt

SEQ ID NO: 1538886 - DNA, 25 bp, Homo sapien
tcttctgacatcttgtgcccaatca

SEQ ID NO: 1538887 - DNA, 25 bp, Homo sapien
tctatgagatcaattaagtgctcct

SEQ ID NO: 1538888 - DNA, 25 bp, Homo sapien
cgcgcccggcaaccatttaaataga

SEQ ID NO: 1538889 - DNA, 25 bp, Homo sapien
agtactattaggtgggtctgcatcc

SEQ ID NO: 1538890 - DNA, 25 bp, Homo sapien
tgacacagagtggtgtcttttcccc

SEQ ID NO: 1538891 - DNA, 25 bp, Homo sapien
tgtagctccatagggagaagacatc

SEQ ID NO: 1538892 - DNA, 25 bp, Homo sapien
cagctgggcttcaagttggcattcc

SEQ ID NO: 1538893 - DNA, 25 bp, Homo sapien
gctgggcttcaagttggcattccca

SEQ ID NO: 1538894 - DNA, 25 bp, Homo sapien
aaatagcatcagatccctcaggttg

SEQ ID NO: 1538895 - DNA, 25 bp, Homo sapien
gacactatctgcctggaaatagcat

SEQ ID NO: 1538896 - DNA, 25 bp, Homo sapien
gctggaagttttcatagactatcaa

SEQ ID NO: 1538897 - DNA, 25 bp, Homo sapien
cattagtagtcatagataggcattg

SEQ ID NO: 1538898 - DNA, 25 bp, Homo sapien
aatcgctaggacttgcattagtagt

SEQ ID NO: 1538899 - DNA, 25 bp, Homo sapien
tcattggcctacatggaatcctgcc

SEQ ID NO: 1538900 - DNA, 25 bp, Homo sapien
gaaatgtcctatgtaacagagatct

SEQ ID NO: 1538901 - DNA, 25 bp, Homo sapien
tggaccatccaaaagatggtggacg

SEQ ID NO: 1538902 - DNA, 25 bp, Homo sapien
tctaagaagttgtccccagttccag

SEQ ID NO: 1538903 - DNA, 25 bp, Homo sapien
tttagcatccactatcggttcagcc

SEQ ID NO: 1538904 - DNA, 25 bp, Homo sapien
gcacatctcatctcatgggcagttt

SEQ ID NO: 1538905 - DNA, 25 bp, Homo sapien
ggcacatctcatctcatgggcagtt

SEQ ID NO: 1538906 - DNA, 25 bp, Homo sapien
ctagaaagtaaaatggagggagcat

SEQ ID NO: 1538907 - DNA, 25 bp, Homo sapien
tagaaagtaaaatggagggagcatt

SEQ ID NO: 1538908 - DNA, 25 bp, Homo sapien
ggaagagcatgcaggaccagaaatg

SEQ ID NO: 1538909 - DNA, 25 bp, Homo sapien
ggaatttatggtctctgatcattcc

SEQ ID NO: 1538910 - DNA, 25 bp, Homo sapien
gccattcatgcagttctggtgtgga

SEQ ID NO: 1538911 - DNA, 25 bp, Homo sapien
ttattggtctcactggaatttatgg

SEQ ID NO: 1538912 - DNA, 25 bp, Homo sapien
ctgttgtattctgtttatcaaggga

SEQ ID NO: 1538913 - DNA, 25 bp, Homo sapien
ctagccttgttagatacacagtgtc

SEQ ID NO: 1538914 - DNA, 25 bp, Homo sapien
gccttgttagatacacagtgtcatt

SEQ ID NO: 1538915 - DNA, 25 bp, Homo sapien
caaaggcctacccaatttcaagaga

SEQ ID NO: 1538916 - DNA, 25 bp, Homo sapien
cttgagagagattaggatgaagttc

SEQ ID NO: 1538917 - DNA, 25 bp, Homo sapien
cagctggaatatctagttgtggcct

SEQ ID NO: 1538918 - DNA, 25 bp, Homo sapien
tgctctacttggcttcagctgaggt

SEQ ID NO: 1538919 - DNA, 25 bp, Homo sapien
gacagctagtctctgctctacttgg

SEQ ID NO: 1538920 - DNA, 25 bp, Homo sapien
gaaggcttgctcgttttcacgtgtg

SEQ ID NO: 1538921 - DNA, 25 bp, Homo sapien
cagtggctcacaaatatgctctgtc

SEQ ID NO: 1538922 - DNA, 25 bp, Homo sapien
ctgtctagaacagggatacttcacc

SEQ ID NO: 1538923 - DNA, 25 bp, Homo sapien
catgcgtattttttcctcggcaaaa

SEQ ID NO: 1538924 - DNA, 25 bp, Homo sapien
tatggctctgtaggccaaaccctgc

SEQ ID NO: 1538925 - DNA, 25 bp, Homo sapien
catcagatgcccttcctagagttaa

SEQ ID NO: 1538926 - DNA, 25 bp, Homo sapien
tagtgacttatctatttacctggtc

SEQ ID NO: 1538927 - DNA, 25 bp, Homo sapien
gaaatagtctgccttcacacggtga

SEQ ID NO: 1538928 - DNA, 25 bp, Homo sapien
cacggtgatttgttacggaggagac

SEQ ID NO: 1538929 - DNA, 25 bp, Homo sapien
tattgcggctggcactacgcttctg

SEQ ID NO: 1538930 - DNA, 25 bp, Homo sapien
cgttgacctggtgttcgttttccat

SEQ ID NO: 1538931 - DNA, 25 bp, Homo sapien
tctggatgcgagaagagctcacggc

SEQ ID NO: 1538932 - DNA, 25 bp, Homo sapien
tccatgtggtgagttgaggtgaccc

SEQ ID NO: 1538933 - DNA, 25 bp, Homo sapien
gctctcccggaacggagctcccagt

SEQ ID NO: 1538934 - DNA, 25 bp, Homo sapien
tctcccggaacggagctcccagtgc

SEQ ID NO: 1538935 - DNA, 25 bp, Homo sapien
gcgtccttagacagctctcccggaa

SEQ ID NO: 1538936 - DNA, 25 bp, Homo sapien
cccggttccgcgtccttagacagct

SEQ ID NO: 1538937 - DNA, 25 bp, Homo sapien
tttgagctcctcttttggaaaaaga

SEQ ID NO: 1538938 - DNA, 25 bp, Homo sapien
ctgagacatggctttgagatttcta

SEQ ID NO: 1538939 - DNA, 25 bp, Homo sapien
gaactttctcttttgagctcctctt

SEQ ID NO: 1538940 - DNA, 25 bp, Homo sapien
ttgagatttctagatgaactttctc

SEQ ID NO: 1538941 - DNA, 25 bp, Homo sapien
tagattaaggaagtgtcagcgggct

SEQ ID NO: 1538942 - DNA, 25 bp, Homo sapien
tgtaggaatacagggcatcagcttt

SEQ ID NO: 1538943 - DNA, 25 bp, Homo sapien
cattctactgtgaggcatgccctac

SEQ ID NO: 1538944 - DNA, 25 bp, Homo sapien
gaataaaaccctgaccctgctcatg

SEQ ID NO: 1538945 - DNA, 25 bp, Homo sapien
cctgtaaagcgccttctgagcaggg

SEQ ID NO: 1538946 - DNA, 25 bp, Homo sapien
cagatacgaagtggcaatagttttc

SEQ ID NO: 1538947 - DNA, 25 bp, Homo sapien
ccacagatacgaagtggcaatagtt

SEQ ID NO: 1538948 - DNA, 25 bp, Homo sapien
acatccctgtaaagcgccttctgag

SEQ ID NO: 1538949 - DNA, 25 bp, Homo sapien
ccttgttccaacttgcggatcatat

SEQ ID NO: 1538950 - DNA, 25 bp, Homo sapien
aaaaattctctgtgtccatagctct

SEQ ID NO: 1538951 - DNA, 25 bp, Homo sapien
caacttgcggatcatatcaggctta

SEQ ID NO: 1538952 - DNA, 25 bp, Homo sapien
tgcggatcatatcaggcttagccat

SEQ ID NO: 1538953 - DNA, 25 bp, Homo sapien
gagacactttaaaacgctttgtcac

SEQ ID NO: 1538954 - DNA, 25 bp, Homo sapien
gttacaaatagttagcccaccacta

SEQ ID NO: 1538955 - DNA, 25 bp, Homo sapien
gaatgatgcaaactggacctccgga

SEQ ID NO: 1538956 - DNA, 25 bp, Homo sapien
tactcaagataagcatcggaacaag

SEQ ID NO: 1538957 - DNA, 25 bp, Homo sapien
tgtttatggagattcactgcaggat

SEQ ID NO: 1538958 - DNA, 25 bp, Homo sapien
tgaaatacggttcttgcctagagta

SEQ ID NO: 1538959 - DNA, 25 bp, Homo sapien
tatggtcaaatggttgctctggagc

SEQ ID NO: 1538960 - DNA, 25 bp, Homo sapien
cactgaggcttgacttttctatgaa

SEQ ID NO: 1538961 - DNA, 25 bp, Homo sapien
ccccgtatgtgttttgtgatgtcta

SEQ ID NO: 1538962 - DNA, 25 bp, Homo sapien
ttctcatgaagggtgagggctgtct

SEQ ID NO: 1538963 - DNA, 25 bp, Homo sapien
tcttctgtttgaggtctctgaggca

SEQ ID NO: 1538964 - DNA, 25 bp, Homo sapien
aaagttattcccacagtaaggacag

SEQ ID NO: 1538965 - DNA, 25 bp, Homo sapien
attcccgtggtttctaccttgtgag

SEQ ID NO: 1538966 - DNA, 25 bp, Homo sapien
ggtttctaccttgtgagttttctga

SEQ ID NO: 1538967 - DNA, 25 bp, Homo sapien
gaggtttgacttacaactgaagaac

SEQ ID NO: 1538968 - DNA, 25 bp, Homo sapien
tgtgatgaacagtgaggattgcctt

SEQ ID NO: 1538969 - DNA, 25 bp, Homo sapien
taaactgttggatattacgcttgca

SEQ ID NO: 1538970 - DNA, 25 bp, Homo sapien
catggtcaactgtgaggaggtaaca

SEQ ID NO: 1538971 - DNA, 25 bp, Homo sapien
ttagactcacggacatgatgaaggt

SEQ ID NO: 1538972 - DNA, 25 bp, Homo sapien
tactcactgtgtagtccatggacca

SEQ ID NO: 1538973 - DNA, 25 bp, Homo sapien
caattatctcatgtggtgaaagttc

SEQ ID NO: 1538974 - DNA, 25 bp, Homo sapien
ccttcagtgtcaattatctcatgtg

SEQ ID NO: 1538975 - DNA, 25 bp, Homo sapien
atgtcacgtttattacatttgcctg

SEQ ID NO: 1538976 - DNA, 25 bp, Homo sapien
tgaattgtctgccagtatctgactg

SEQ ID NO: 1538977 - DNA, 25 bp, Homo sapien
tcatctatgtagctgcatgtttcag

SEQ ID NO: 1538978 - DNA, 25 bp, Homo sapien
tccatcttgggaatgtaccacagtg

SEQ ID NO: 1538979 - DNA, 25 bp, Homo sapien
tcaaagaattgcctcgtgcaacccc

SEQ ID NO: 1538980 - DNA, 25 bp, Homo sapien
tagcgtaatgcatttgaggttcatc

SEQ ID NO: 1538981 - DNA, 25 bp, Homo sapien
gaatgtatgtccgtattttgggcca

SEQ ID NO: 1538982 - DNA, 25 bp, Homo sapien
catacagacatttgacagcgtcttg

SEQ ID NO: 1538983 - DNA, 25 bp, Homo sapien
tatgctcaaacaacctgtacacaga

SEQ ID NO: 1538984 - DNA, 25 bp, Homo sapien
gggccattacctactacagacattg

SEQ ID NO: 1538985 - DNA, 25 bp, Homo sapien
tgtcattttgagcaacatcagggac

SEQ ID NO: 1538986 - DNA, 25 bp, Homo sapien
catcagggacaagaggagggttatt

SEQ ID NO: 1538987 - DNA, 25 bp, Homo sapien
tcagcgctatctgggaaggcaactg

SEQ ID NO: 1538988 - DNA, 25 bp, Homo sapien
tatcccagtgggttaacatggaaga

SEQ ID NO: 1538989 - DNA, 25 bp, Homo sapien
cacttagtcatggtatattatgctt

SEQ ID NO: 1538990 - DNA, 25 bp, Homo sapien
aattagcttcttatacctagaataa

SEQ ID NO: 1538991 - DNA, 25 bp, Homo sapien
tattaaattagcttcttatacctag

SEQ ID NO: 1538992 - DNA, 25 bp, Homo sapien
cccacttagtcatggtatattatgc

SEQ ID NO: 1538993 - DNA, 25 bp, Homo sapien
tcccttctgaagcttaactggtagt

SEQ ID NO: 1538994 - DNA, 25 bp, Homo sapien
gacaggcattcttctaggtaacgga

SEQ ID NO: 1538995 - DNA, 25 bp, Homo sapien
tcccagatatatgcagagagagtga

SEQ ID NO: 1538996 - DNA, 25 bp, Homo sapien
tgttaatcagctgcttgtggttgtg

SEQ ID NO: 1538997 - DNA, 25 bp, Homo sapien
gtattgggacaatgggctggcctaa

SEQ ID NO: 1538998 - DNA, 25 bp, Homo sapien
ttgggacaatgggctggcctaacta

SEQ ID NO: 1538999 - DNA, 25 bp, Homo sapien
agtattgggacaatgggctggccta

SEQ ID NO: 1539000 - DNA, 25 bp, Homo sapien
tattgggacaatgggctggcctaac

SEQ ID NO: 1539001 - DNA, 25 bp, Homo sapien
tctgtttccctaatcttttctcata

SEQ ID NO: 1539002 - DNA, 25 bp, Homo sapien
gaaatttctgttacacatacactgg

SEQ ID NO: 1539003 - DNA, 25 bp, Homo sapien
tcaggatgtttccaggtatgattct

SEQ ID NO: 1539004 - DNA, 25 bp, Homo sapien
ccaggtatgattcttctttaattct

SEQ ID NO: 1539005 - DNA, 25 bp, Homo sapien
cactagtcctctaatcatgggtgga

SEQ ID NO: 1539006 - DNA, 25 bp, Homo sapien
catacatctaaggttcaggacgccc

SEQ ID NO: 1539007 - DNA, 25 bp, Homo sapien
gcagataacatgtgccagcttccac

SEQ ID NO: 1539008 - DNA, 25 bp, Homo sapien
atgggtggacccagcgcaaaaagcc

SEQ ID NO: 1539009 - DNA, 25 bp, Homo sapien
aagccacaacagtctaatcacatac

SEQ ID NO: 1539010 - DNA, 25 bp, Homo sapien
gagacttgagcatattcgcaaacca

SEQ ID NO: 1539011 - DNA, 25 bp, Homo sapien
tgatctccaactcaatcataatcct

SEQ ID NO: 1539012 - DNA, 25 bp, Homo sapien
aatcacataccccttcactgtcata

SEQ ID NO: 1539013 - DNA, 25 bp, Homo sapien
gctgtagccagtttggctttggtga

SEQ ID NO: 1539014 - DNA, 25 bp, Homo sapien
gagcccatgcataactttcatcact

SEQ ID NO: 1539015 - DNA, 25 bp, Homo sapien
ggaagcaatccaatgtatcagcctg

SEQ ID NO: 1539016 - DNA, 25 bp, Homo sapien
ggctttggtgagcagaagtccatgt

SEQ ID NO: 1539017 - DNA, 25 bp, Homo sapien
gtgcccgcctcaacactgggctaat

SEQ ID NO: 1539018 - DNA, 25 bp, Homo sapien
acaggtgcccgcctcaacactgggc

SEQ ID NO: 1539019 - DNA, 25 bp, Homo sapien
tgcccgcctcaacactgggctaatt

SEQ ID NO: 1539020 - DNA, 25 bp, Homo sapien
caggtgcccgcctcaacactgggct

SEQ ID NO: 1539021 - DNA, 25 bp, Homo sapien
tatgtcttaagtcttatactactag

SEQ ID NO: 1539022 - DNA, 25 bp, Homo sapien
tagcacccaccctttatcatgtaat

SEQ ID NO: 1539023 - DNA, 25 bp, Homo sapien
tctctacatatatctggttgtatgt

SEQ ID NO: 1539024 - DNA, 25 bp, Homo sapien
ggagttaggttgatcagtatataca

SEQ ID NO: 1539025 - DNA, 25 bp, Homo sapien
agccaagatggtgccgctgctcccc

SEQ ID NO: 1539026 - DNA, 25 bp, Homo sapien
tacccatgcacaggtttcattcagt

SEQ ID NO: 1539027 - DNA, 25 bp, Homo sapien
ttattttgagggtgtatagctcacc

SEQ ID NO: 1539028 - DNA, 25 bp, Homo sapien
tgagggtgtatagctcacccctgta

SEQ ID NO: 1539029 - DNA, 25 bp, Homo sapien
acccatgcacaggtttcattcagtg

SEQ ID NO: 1539030 - DNA, 25 bp, Homo sapien
ggtcacaccgtcacccgccttctcc

SEQ ID NO: 1539031 - DNA, 25 bp, Homo sapien
gtcacaccgtcacccgccttctccg

SEQ ID NO: 1539032 - DNA, 25 bp, Homo sapien
cacaccgtcacccgccttctccgcg

SEQ ID NO: 1539033 - DNA, 25 bp, Homo sapien
gggtcacaccgtcacccgccttctc

SEQ ID NO: 1539034 - DNA, 25 bp, Homo sapien
tatcagtcatgttagcctcttcttg

SEQ ID NO: 1539035 - DNA, 25 bp, Homo sapien
ccaatccatgagagctaaagactgc

SEQ ID NO: 1539036 - DNA, 25 bp, Homo sapien
tcccaatccatgagagctaaagact

SEQ ID NO: 1539037 - DNA, 25 bp, Homo sapien
aattatagtggtatcagtcatgtta

SEQ ID NO: 1539038 - DNA, 25 bp, Homo sapien
gttttgagatatgaaagagatgacc

SEQ ID NO: 1539039 - DNA, 25 bp, Homo sapien
ctttggagtcctctttagaaaagag

SEQ ID NO: 1539040 - DNA, 25 bp, Homo sapien
ttggagtcctctttagaaaagaggc

SEQ ID NO: 1539041 - DNA, 25 bp, Homo sapien
tgaaagagatgaccagtccttcctt

SEQ ID NO: 1539042 - DNA, 25 bp, Homo sapien
ctgatttatccacttaatgtgtcaa

SEQ ID NO: 1539043 - DNA, 25 bp, Homo sapien
agtgctgggagcgaagtgctgttaa

SEQ ID NO: 1539044 - DNA, 25 bp, Homo sapien
ggagcgaagtgctgttaaggtgtga

SEQ ID NO: 1539045 - DNA, 25 bp, Homo sapien
aacattggttaaaattgggagcatt

SEQ ID NO: 1539046 - DNA, 25 bp, Homo sapien
cggagggtcctatgcccacggagtc

SEQ ID NO: 1539047 - DNA, 25 bp, Homo sapien
ggtcctatgcccacggagtctcgct

SEQ ID NO: 1539048 - DNA, 25 bp, Homo sapien
gtcctatgcccacggagtctcgctg

SEQ ID NO: 1539049 - DNA, 25 bp, Homo sapien
ctatgcccacggagtctcgctgatt

SEQ ID NO: 1539050 - DNA, 25 bp, Homo sapien
tccttgaaggatagcaactgcaatg

SEQ ID NO: 1539051 - DNA, 25 bp, Homo sapien
cattaacagagtaaaacagtcaggg

SEQ ID NO: 1539052 - DNA, 25 bp, Homo sapien
gcaaccaaagcaggcggaaactgga

SEQ ID NO: 1539053 - DNA, 25 bp, Homo sapien
caactaatagcactggaaagcaacc

SEQ ID NO: 1539054 - DNA, 25 bp, Homo sapien
aatttctcaggcttcactaaggagg

SEQ ID NO: 1539055 - DNA, 25 bp, Homo sapien
ttcactaaggaggaatattgtatgt

SEQ ID NO: 1539056 - DNA, 25 bp, Homo sapien
cttcactaaggaggaatattgtatg

SEQ ID NO: 1539057 - DNA, 25 bp, Homo sapien
gtaatcagaacaggtggacttagcc

SEQ ID NO: 1539058 - DNA, 25 bp, Homo sapien
tccttgtggcagtcatacgaatcct

SEQ ID NO: 1539059 - DNA, 25 bp, Homo sapien
tgaggtcatgagttaaaaaccaccc

SEQ ID NO: 1539060 - DNA, 25 bp, Homo sapien
gctcagaagttaccagaggcatgta

SEQ ID NO: 1539061 - DNA, 25 bp, Homo sapien
tatagagtcttctgagcatgatcca

SEQ ID NO: 1539062 - DNA, 25 bp, Homo sapien
atatagagtcttctgagcatgatcc

SEQ ID NO: 1539063 - DNA, 25 bp, Homo sapien
ccacagagatgaggtggcaatagtt

SEQ ID NO: 1539064 - DNA, 25 bp, Homo sapien
aggtggcaatagttttccaacatca

SEQ ID NO: 1539065 - DNA, 25 bp, Homo sapien
tgaggtggcaatagttttccaacat

SEQ ID NO: 1539066 - DNA, 25 bp, Homo sapien
cagagatgaggtggcaatagttttc

SEQ ID NO: 1539067 - DNA, 25 bp, Homo sapien
cttaagttgattgggctataatacc

SEQ ID NO: 1539068 - DNA, 25 bp, Homo sapien
gacttaagttgattgggctataata

SEQ ID NO: 1539069 - DNA, 25 bp, Homo sapien
aaagacttaagttgattgggctata

SEQ ID NO: 1539070 - DNA, 25 bp, Homo sapien
aagacttaagttgattgggctataa

SEQ ID NO: 1539071 - DNA, 25 bp, Homo sapien
tgacctgcaaatgatgtccatggct

SEQ ID NO: 1539072 - DNA, 25 bp, Homo sapien
cctcgttccaacttgaggatcacat

SEQ ID NO: 1539073 - DNA, 25 bp, Homo sapien
tatgacctgcaaatgatgtccatgg

SEQ ID NO: 1539074 - DNA, 25 bp, Homo sapien
ccaacttgaggatcacatcaggttt

SEQ ID NO: 1539075 - DNA, 25 bp, Homo sapien
ggttgatgcttacaactgatctaga

SEQ ID NO: 1539076 - DNA, 25 bp, Homo sapien
tctagaatacttctcttggtgttcc

SEQ ID NO: 1539077 - DNA, 25 bp, Homo sapien
ttcactaaaaagtcttcagctttcc

SEQ ID NO: 1539078 - DNA, 25 bp, Homo sapien
tttttgtggttgatgcttacaactg

SEQ ID NO: 1539079 - DNA, 25 bp, Homo sapien
tactatgtgtaatcaggcctcccct

SEQ ID NO: 1539080 - DNA, 25 bp, Homo sapien
gaattcacagggtttttgcctagag

SEQ ID NO: 1539081 - DNA, 25 bp, Homo sapien
cattatatccaaatgactgtgctgg

SEQ ID NO: 1539082 - DNA, 25 bp, Homo sapien
cattatgactgaaagctctggcact

SEQ ID NO: 1539083 - DNA, 25 bp, Homo sapien
ggcattcctacattgcagacattca

SEQ ID NO: 1539084 - DNA, 25 bp, Homo sapien
gtgtgacttcaatctgaaggcattc

SEQ ID NO: 1539085 - DNA, 25 bp, Homo sapien
gtgacttcaatctgaaggcattcct

SEQ ID NO: 1539086 - DNA, 25 bp, Homo sapien
tcttgaggcggaaggacttaccaca

SEQ ID NO: 1539087 - DNA, 25 bp, Homo sapien
gatttctggccggtatgtattttct

SEQ ID NO: 1539088 - DNA, 25 bp, Homo sapien
tgagttcggtgatgatcaatgaggt

SEQ ID NO: 1539089 - DNA, 25 bp, Homo sapien
agggttgctttctggcgaaaggact

SEQ ID NO: 1539090 - DNA, 25 bp, Homo sapien
tgctacaagggttgtcttctggcgg

SEQ ID NO: 1539091 - DNA, 25 bp, Homo sapien
atttgtcttctggcggaagcacttt

SEQ ID NO: 1539092 - DNA, 25 bp, Homo sapien
agatttgtcttctggcggaagcact

SEQ ID NO: 1539093 - DNA, 25 bp, Homo sapien
aagatttgtcttctggcggaagcac

SEQ ID NO: 1539094 - DNA, 25 bp, Homo sapien
gatttgtcttctggcggaagcactt

SEQ ID NO: 1539095 - DNA, 25 bp, Homo sapien
tcattacaaacatagggtttctcac

SEQ ID NO: 1539096 - DNA, 25 bp, Homo sapien
ctcattacaaacatagggtttctca

SEQ ID NO: 1539097 - DNA, 25 bp, Homo sapien
cacactcattacaaacatagggttt

SEQ ID NO: 1539098 - DNA, 25 bp, Homo sapien
cactcattacaaacatagggtttct

SEQ ID NO: 1539099 - DNA, 25 bp, Homo sapien
acaatgaggtttctcttataactga

SEQ ID NO: 1539100 - DNA, 25 bp, Homo sapien
gacaatgaggtttctcttataactg

SEQ ID NO: 1539101 - DNA, 25 bp, Homo sapien
ttattgcatttcaatgttttctccc

SEQ ID NO: 1539102 - DNA, 25 bp, Homo sapien
ttgcatttcaatgttttctcccttg

SEQ ID NO: 1539103 - DNA, 25 bp, Homo sapien
gcatttcaatgttttctcccttgtg

SEQ ID NO: 1539104 - DNA, 25 bp, Homo sapien
catttcaatgttttctcccttgtga

SEQ ID NO: 1539105 - DNA, 25 bp, Homo sapien
tataggctacggaagtggtaactct

SEQ ID NO: 1539106 - DNA, 25 bp, Homo sapien
cagagtgcaatgagaaatatagttc

SEQ ID NO: 1539107 - DNA, 25 bp, Homo sapien
tagtaaacagtagacagttattccg

SEQ ID NO: 1539108 - DNA, 25 bp, Homo sapien
gcttcatagctgatagagttcaata

SEQ ID NO: 1539109 - DNA, 25 bp, Homo sapien
gtcccaggtataaattcaacagaaa

SEQ ID NO: 1539110 - DNA, 25 bp, Homo sapien
gatttattaatagccttctcacaat

SEQ ID NO: 1539111 - DNA, 25 bp, Homo sapien
cacaattataaagccgcaaggtttc

SEQ ID NO: 1539112 - DNA, 25 bp, Homo sapien
gaatgaataagtccagtcccaggta

SEQ ID NO: 1539113 - DNA, 25 bp, Homo sapien
tcaaaggggagtagaatgtcccaga

SEQ ID NO: 1539114 - DNA, 25 bp, Homo sapien
tgtgactcacatgttccccaaatct

SEQ ID NO: 1539115 - DNA, 25 bp, Homo sapien
ttattttttgtggtagccactgaaa

SEQ ID NO: 1539116 - DNA, 25 bp, Homo sapien
caaatctttggtgggttgacgctag

SEQ ID NO: 1539117 - DNA, 25 bp, Homo sapien
ctctacttggccaaccgcagtggct

SEQ ID NO: 1539118 - DNA, 25 bp, Homo sapien
tctacttggccaaccgcagtggctc

SEQ ID NO: 1539119 - DNA, 25 bp, Homo sapien
ttgctctacttggccaaccgcagtg

SEQ ID NO: 1539120 - DNA, 25 bp, Homo sapien
gctctacttggccaaccgcagtggc

SEQ ID NO: 1539121 - DNA, 25 bp, Homo sapien
cctctttaggcatgttgcttatgga

SEQ ID NO: 1539122 - DNA, 25 bp, Homo sapien
gacccattctgccattgagagccta

SEQ ID NO: 1539123 - DNA, 25 bp, Homo sapien
catttggtgagatcatggttccctc

SEQ ID NO: 1539124 - DNA, 25 bp, Homo sapien
ttttatcagacagctcacatattgc

SEQ ID NO: 1539125 - DNA, 25 bp, Homo sapien
ctaggattacaggtacatgccaccg

SEQ ID NO: 1539126 - DNA, 25 bp, Homo sapien
caccgtgcccagctaatttttttgt

SEQ ID NO: 1539127 - DNA, 25 bp, Homo sapien
tgcagaggaaagcacatcacgtgct

SEQ ID NO: 1539128 - DNA, 25 bp, Homo sapien
cttctatacccactttgatgagggt

SEQ ID NO: 1539129 - DNA, 25 bp, Homo sapien
gaaacgcagtctccataacctatga

SEQ ID NO: 1539130 - DNA, 25 bp, Homo sapien
gaacataccttattgcgggatctgg

SEQ ID NO: 1539131 - DNA, 25 bp, Homo sapien
taagagaatactaatcccctgtcag

SEQ ID NO: 1539132 - DNA, 25 bp, Homo sapien
gtgtagaccaatgtctgtgagtgtt

SEQ ID NO: 1539133 - DNA, 25 bp, Homo sapien
gatgtaatctcagttgtctgactga

SEQ ID NO: 1539134 - DNA, 25 bp, Homo sapien
cccgtcttgtgggtggtctcttcat

SEQ ID NO: 1539135 - DNA, 25 bp, Homo sapien
tattgacatctttacgacattgagt

SEQ ID NO: 1539136 - DNA, 25 bp, Homo sapien
aatagaggagtttcaatatttctcc

SEQ ID NO: 1539137 - DNA, 25 bp, Homo sapien
ggattgtaacattgatgaactactt

SEQ ID NO: 1539138 - DNA, 25 bp, Homo sapien
tattactatgtactaaactgttggt

SEQ ID NO: 1539139 - DNA, 25 bp, Homo sapien
ttctccatgttgaggctgggcttga

SEQ ID NO: 1539140 - DNA, 25 bp, Homo sapien
tctccatgttgaggctgggcttgaa

SEQ ID NO: 1539141 - DNA, 25 bp, Homo sapien
atgttgaggctgggcttgaactcca

SEQ ID NO: 1539142 - DNA, 25 bp, Homo sapien
ttgaggctgggcttgaactccagac

SEQ ID NO: 1539143 - DNA, 25 bp, Homo sapien
tgagttttctatcatgattcaaagc

SEQ ID NO: 1539144 - DNA, 25 bp, Homo sapien
gaatgtagatgagttttctatcatg

SEQ ID NO: 1539145 - DNA, 25 bp, Homo sapien
gaaagaaattgataatgaatgtaga

SEQ ID NO: 1539146 - DNA, 25 bp, Homo sapien
accaaaattaggacatttaatactg

SEQ ID NO: 1539147 - DNA, 25 bp, Homo sapien
ctcagccgacatcagagtgttcaca

SEQ ID NO: 1539148 - DNA, 25 bp, Homo sapien
caggactcagccgacatcagagtgt

SEQ ID NO: 1539149 - DNA, 25 bp, Homo sapien
cagccgacatcagagtgttcacact

SEQ ID NO: 1539150 - DNA, 25 bp, Homo sapien
gactcagccgacatcagagtgttca

SEQ ID NO: 1539151 - DNA, 25 bp, Homo sapien
gagacagtgtcccaggctgttgccc

SEQ ID NO: 1539152 - DNA, 25 bp, Homo sapien
ctggtaatcttgcagtcttggcatc

SEQ ID NO: 1539153 - DNA, 25 bp, Homo sapien
ctcctgggctctggtaatcttgcag

SEQ ID NO: 1539154 - DNA, 25 bp, Homo sapien
ctgggctctggtaatcttgcagtct

SEQ ID NO: 1539155 - DNA, 25 bp, Homo sapien
cagcctaataaagggtctaaatcat

SEQ ID NO: 1539156 - DNA, 25 bp, Homo sapien
gcctaataaagggtctaaatcattg

SEQ ID NO: 1539157 - DNA, 25 bp, Homo sapien
ccagcctaataaagggtctaaatca

SEQ ID NO: 1539158 - DNA, 25 bp, Homo sapien
ctaataaagggtctaaatcattgta

SEQ ID NO: 1539159 - DNA, 25 bp, Homo sapien
gcatgtaccaccacaactggctact

SEQ ID NO: 1539160 - DNA, 25 bp, Homo sapien
tggctactttttgtattttcagtag

SEQ ID NO: 1539161 - DNA, 25 bp, Homo sapien
cctttggctcgcatcgtggctgggt

SEQ ID NO: 1539162 - DNA, 25 bp, Homo sapien
aattgtccggtcagtgtttcatccc

SEQ ID NO: 1539163 - DNA, 25 bp, Homo sapien
tgagttccaaactaacagccaggac

SEQ ID NO: 1539164 - DNA, 25 bp, Homo sapien
tctgcattctgagggcgagttagca

SEQ ID NO: 1539165 - DNA, 25 bp, Homo sapien
tatcccatccacgattttgattcct

SEQ ID NO: 1539166 - DNA, 25 bp, Homo sapien
acaaggcagcatcttcgggccctcg

SEQ ID NO: 1539167 - DNA, 25 bp, Homo sapien
acgatccgctcccagagagcattcg

SEQ ID NO: 1539168 - DNA, 25 bp, Homo sapien
gagcattcgcgcacaatcttatccc

SEQ ID NO: 1539169 - DNA, 25 bp, Homo sapien
cccaacggtatctggctgcaaatca

SEQ ID NO: 1539170 - DNA, 25 bp, Homo sapien
ttgggctggaggtacgcacgctccc

SEQ ID NO: 1539171 - DNA, 25 bp, Homo sapien
agtaaccacccggatttgagtggcg

SEQ ID NO: 1539172 - DNA, 25 bp, Homo sapien
gcgggtgtttgcacagtaattcagt

SEQ ID NO: 1539173 - DNA, 25 bp, Homo sapien
gaaggccctgaggagaagcctcggg

SEQ ID NO: 1539174 - DNA, 25 bp, Homo sapien
ggccctgaggagaagcctcgggccc

SEQ ID NO: 1539175 - DNA, 25 bp, Homo sapien
ccctgaggagaagcctcgggccctg

SEQ ID NO: 1539176 - DNA, 25 bp, Homo sapien
tgaggagaagcctcgggccctgagg

SEQ ID NO: 1539177 - DNA, 25 bp, Homo sapien
tcgtcgggtaggtgactccttcagc

SEQ ID NO: 1539178 - DNA, 25 bp, Homo sapien
ttagtctcgtcgggtaggtgactcc

SEQ ID NO: 1539179 - DNA, 25 bp, Homo sapien
tagtctcgtcgggtaggtgactcct

SEQ ID NO: 1539180 - DNA, 25 bp, Homo sapien
tctcgtcgggtaggtgactccttca

SEQ ID NO: 1539181 - DNA, 25 bp, Homo sapien
cactgtgtgtctctcgatgggataa

SEQ ID NO: 1539182 - DNA, 25 bp, Homo sapien
tctacaaaataactgtcccggcgcg

SEQ ID NO: 1539183 - DNA, 25 bp, Homo sapien
ctttcttgctcagtacaggtcccgc

SEQ ID NO: 1539184 - DNA, 25 bp, Homo sapien
caaggtcgggaacaggtaggataca

SEQ ID NO: 1539185 - DNA, 25 bp, Homo sapien
cttcggcgtaccatgtccggcgggc

SEQ ID NO: 1539186 - DNA, 25 bp, Homo sapien
ttatgtcagcaccaatgcgggcgcc

SEQ ID NO: 1539187 - DNA, 25 bp, Homo sapien
acactcgccactgtgtacctggacg

SEQ ID NO: 1539188 - DNA, 25 bp, Homo sapien
tcagaggtcaggaaattatgtcagc

SEQ ID NO: 1539189 - DNA, 25 bp, Homo sapien
ctgttcaatctctagagagatttgt

SEQ ID NO: 1539190 - DNA, 25 bp, Homo sapien
aatctctagagagatttgttccaaa

SEQ ID NO: 1539191 - DNA, 25 bp, Homo sapien
gttcaatctctagagagatttgttc

SEQ ID NO: 1539192 - DNA, 25 bp, Homo sapien
tcaatctctagagagatttgttcca

SEQ ID NO: 1539193 - DNA, 25 bp, Homo sapien
tctggtcttcaggtctcctcactgc

SEQ ID NO: 1539194 - DNA, 25 bp, Homo sapien
aggtctcctcactgctgagggatcc

SEQ ID NO: 1539195 - DNA, 25 bp, Homo sapien
tcttcaggtctcctcactgctgagg

SEQ ID NO: 1539196 - DNA, 25 bp, Homo sapien
tggtcttcaggtctcctcactgctg

SEQ ID NO: 1539197 - DNA, 25 bp, Homo sapien
aacctggaaactactcagggaatct

SEQ ID NO: 1539198 - DNA, 25 bp, Homo sapien
cctggaaactactcagggaatctgg

SEQ ID NO: 1539199 - DNA, 25 bp, Homo sapien
taacctggaaactactcagggaatc

SEQ ID NO: 1539200 - DNA, 25 bp, Homo sapien
acctggaaactactcagggaatctg

SEQ ID NO: 1539201 - DNA, 25 bp, Homo sapien
tgaataaagcagagcatccgatctc

SEQ ID NO: 1539202 - DNA, 25 bp, Homo sapien
tatggacaggcctcgatctatgcac

SEQ ID NO: 1539203 - DNA, 25 bp, Homo sapien
tattcgaaagcgctgctctacagag

SEQ ID NO: 1539204 - DNA, 25 bp, Homo sapien
ggaaataccgatgccctcagctgtg

SEQ ID NO: 1539205 - DNA, 25 bp, Homo sapien
caacaacaacaaaaagtctaaatat

SEQ ID NO: 1539206 - DNA, 25 bp, Homo sapien
gtcagcctgaggtcataggatgcaa

SEQ ID NO: 1539207 - DNA, 25 bp, Homo sapien
tttattaaactgtccatgggccaac

SEQ ID NO: 1539208 - DNA, 25 bp, Homo sapien
taaatgcaggttacagagatccaac

SEQ ID NO: 1539209 - DNA, 25 bp, Homo sapien
gatcaataaatacaagacctttggc

SEQ ID NO: 1539210 - DNA, 25 bp, Homo sapien
aggctggctggtttgtgaccagcct

SEQ ID NO: 1539211 - DNA, 25 bp, Homo sapien
gcagatcagctgaggctggctggtt

SEQ ID NO: 1539212 - DNA, 25 bp, Homo sapien
ctgaggctggctggtttgtgaccag

SEQ ID NO: 1539213 - DNA, 25 bp, Homo sapien
cagatcagctgaggctggctggttt

SEQ ID NO: 1539214 - DNA, 25 bp, Homo sapien
gcctataatgttgtagggcctcaaa

SEQ ID NO: 1539215 - DNA, 25 bp, Homo sapien
ccattttatgagaggaggactttta

SEQ ID NO: 1539216 - DNA, 25 bp, Homo sapien
ctcagaaactagcaaatggatagcc

SEQ ID NO: 1539217 - DNA, 25 bp, Homo sapien
tcatgtaagatgaggttgagcacag

SEQ ID NO: 1539218 - DNA, 25 bp, Homo sapien
gaacacctttagtcatgagtcaaac

SEQ ID NO: 1539219 - DNA, 25 bp, Homo sapien
gagtcaaactttgctcaacaccaga

SEQ ID NO: 1539220 - DNA, 25 bp, Homo sapien
tcttgaggaacaccacaaatgtaag

SEQ ID NO: 1539221 - DNA, 25 bp, Homo sapien
tgaatggacagactatgggaacacc

SEQ ID NO: 1539222 - DNA, 25 bp, Homo sapien
gacatgcagtcgaggtgtcagacca

SEQ ID NO: 1539223 - DNA, 25 bp, Homo sapien
tacaccagagacttaatacaggaga

SEQ ID NO: 1539224 - DNA, 25 bp, Homo sapien
aatgcttcaagcaggtgatacgcac

SEQ ID NO: 1539225 - DNA, 25 bp, Homo sapien
tgatacgcacctgtgaaaaaaggcc

SEQ ID NO: 1539226 - DNA, 25 bp, Homo sapien
tagtactttggtaactctggatcag

SEQ ID NO: 1539227 - DNA, 25 bp, Homo sapien
gattacttccctcatattagactga

SEQ ID NO: 1539228 - DNA, 25 bp, Homo sapien
tattctgttattgaggtgatacctg

SEQ ID NO: 1539229 - DNA, 25 bp, Homo sapien
gcataccctgctattgagatcctag

SEQ ID NO: 1539230 - DNA, 25 bp, Homo sapien
tctcttctgtgattggaacatggcc

SEQ ID NO: 1539231 - DNA, 25 bp, Homo sapien
catacagggaacattaagagaagac

SEQ ID NO: 1539232 - DNA, 25 bp, Homo sapien
cagtgtcataaaagacaagcccagc

SEQ ID NO: 1539233 - DNA, 25 bp, Homo sapien
gaagtacaacgagaagaacacagtg

SEQ ID NO: 1539234 - DNA, 25 bp, Homo sapien
tggctgtagatttctctcaggagga

SEQ ID NO: 1539235 - DNA, 25 bp, Homo sapien
tttccaacagttgatgatgttcagg

SEQ ID NO: 1539236 - DNA, 25 bp, Homo sapien
tctttccaacagttgatgatgttca

SEQ ID NO: 1539237 - DNA, 25 bp, Homo sapien
ggctgtagatttctctcaggaggag

SEQ ID NO: 1539238 - DNA, 25 bp, Homo sapien
tgaccaaatctatccaccagggctt

SEQ ID NO: 1539239 - DNA, 25 bp, Homo sapien
cactattgagtgtcataagtaatga

SEQ ID NO: 1539240 - DNA, 25 bp, Homo sapien
cagtccaatgctttccctagatatc

SEQ ID NO: 1539241 - DNA, 25 bp, Homo sapien
agggctttcagttatctcctgtgtc

SEQ ID NO: 1539242 - DNA, 25 bp, Homo sapien
aaaatatctttgcttgattggcgca

SEQ ID NO: 1539243 - DNA, 25 bp, Homo sapien
ggcttttcataacaggatccctgct

SEQ ID NO: 1539244 - DNA, 25 bp, Homo sapien
tacctctgaaatatggcccaaactc

SEQ ID NO: 1539245 - DNA, 25 bp, Homo sapien
ggaccaattcatactacaggcttta

SEQ ID NO: 1539246 - DNA, 25 bp, Homo sapien
taagatcagggaccagacaaggatc

SEQ ID NO: 1539247 - DNA, 25 bp, Homo sapien
tggtaaaagactggatgtcttccct

SEQ ID NO: 1539248 - DNA, 25 bp, Homo sapien
gacaaggatccccacttctgtttaa

SEQ ID NO: 1539249 - DNA, 25 bp, Homo sapien
cattgtactggcaattgggctaggg

SEQ ID NO: 1539250 - DNA, 25 bp, Homo sapien
tataggaggcagctacacagtgttg

SEQ ID NO: 1539251 - DNA, 25 bp, Homo sapien
ggatgctggctaccataattccgct

SEQ ID NO: 1539252 - DNA, 25 bp, Homo sapien
taagtgtccctgtgatacgtcaact

SEQ ID NO: 1539253 - DNA, 25 bp, Homo sapien
tagaggatcaccttccaacgtggct

SEQ ID NO: 1539254 - DNA, 25 bp, Homo sapien
tgcaagatcagtgtctgataggcac

SEQ ID NO: 1539255 - DNA, 25 bp, Homo sapien
cccggatgttgcctattgattgttg

SEQ ID NO: 1539256 - DNA, 25 bp, Homo sapien
tagtgcacaggttcctcccctggtt

SEQ ID NO: 1539257 - DNA, 25 bp, Homo sapien
ctgataggcacacccaacagtttca

SEQ ID NO: 1539258 - DNA, 25 bp, Homo sapien
tgggtagctgatactatgactgtgg

SEQ ID NO: 1539259 - DNA, 25 bp, Homo sapien
gtcactgcgtgggtagctgatacta

SEQ ID NO: 1539260 - DNA, 25 bp, Homo sapien
tgcgtgggtagctgatactatgact

SEQ ID NO: 1539261 - DNA, 25 bp, Homo sapien
gtagctgatactatgactgtggagg

SEQ ID NO: 1539262 - DNA, 25 bp, Homo sapien
gacaaatccgcgatcccagtcatgc

SEQ ID NO: 1539263 - DNA, 25 bp, Homo sapien
gaaggggacaaatccgcgatcccag

SEQ ID NO: 1539264 - DNA, 25 bp, Homo sapien
gggacaaatccgcgatcccagtcat

SEQ ID NO: 1539265 - DNA, 25 bp, Homo sapien
caaatccgcgatcccagtcatgcat

SEQ ID NO: 1539266 - DNA, 25 bp, Homo sapien
cacttaacgctggaagcacgcagac

SEQ ID NO: 1539267 - DNA, 25 bp, Homo sapien
cgggagagcgcaccccaatgtggca

SEQ ID NO: 1539268 - DNA, 25 bp, Homo sapien
cacgcagacgctcttgaggcgggca

SEQ ID NO: 1539269 - DNA, 25 bp, Homo sapien
gccccggaggctgcttggaattcca

SEQ ID NO: 1539270 - DNA, 25 bp, Homo sapien
ttggaagttgactattgcaatagtc

SEQ ID NO: 1539271 - DNA, 25 bp, Homo sapien
cacccagcccgttagctataaatct

SEQ ID NO: 1539272 - DNA, 25 bp, Homo sapien
cctgtttaagtcctctggggcaagc

SEQ ID NO: 1539273 - DNA, 25 bp, Homo sapien
tagtaatttagcatcctttaactcc

SEQ ID NO: 1539274 - DNA, 25 bp, Homo sapien
caagaatccagctaagccagtttag

SEQ ID NO: 1539275 - DNA, 25 bp, Homo sapien
tccatagcctgcgaacagcacttca

SEQ ID NO: 1539276 - DNA, 25 bp, Homo sapien
ggagtccctagaccaagctttagtc

SEQ ID NO: 1539277 - DNA, 25 bp, Homo sapien
gacaaggagtccctagaccaagctt

SEQ ID NO: 1539278 - DNA, 25 bp, Homo sapien
gggtcagctccgttctactagaatc

SEQ ID NO: 1539279 - DNA, 25 bp, Homo sapien
gcctgttcggatagggtcagctccg

SEQ ID NO: 1539280 - DNA, 25 bp, Homo sapien
agtcgaccctagctatctcacaaag

SEQ ID NO: 1539281 - DNA, 25 bp, Homo sapien
tagaatccacacaagtcgaccctag

SEQ ID NO: 1539282 - DNA, 25 bp, Homo sapien
tactacacacagttcggcaaatggt

SEQ ID NO: 1539283 - DNA, 25 bp, Homo sapien
tacctacattggctatacggacaca

SEQ ID NO: 1539284 - DNA, 25 bp, Homo sapien
acagttccatacacggtcgcacaga

SEQ ID NO: 1539285 - DNA, 25 bp, Homo sapien
gggacatacagtcacaaccgcggtc

SEQ ID NO: 1539286 - DNA, 25 bp, Homo sapien
gtctagggcatcctgcttaatccgg

SEQ ID NO: 1539287 - DNA, 25 bp, Homo sapien
ggtcagagaagtctagggcatcctg

SEQ ID NO: 1539288 - DNA, 25 bp, Homo sapien
ggtcaatgccgttctgggcagaacc

SEQ ID NO: 1539289 - DNA, 25 bp, Homo sapien
cttaatccgggcatcacagacaacg

SEQ ID NO: 1539290 - DNA, 25 bp, Homo sapien
tggtttgactatgtcagaagttatc

SEQ ID NO: 1539291 - DNA, 25 bp, Homo sapien
tgactatgtcagaagttatctttgc

SEQ ID NO: 1539292 - DNA, 25 bp, Homo sapien
tgtcagaagttatctttgctcagcc

SEQ ID NO: 1539293 - DNA, 25 bp, Homo sapien
agagggagttggtttgactatgtca

SEQ ID NO: 1539294 - DNA, 25 bp, Homo sapien
tgttcggaggcctctatccaagcag

SEQ ID NO: 1539295 - DNA, 25 bp, Homo sapien
ttcggaggcctctatccaagcaggg

SEQ ID NO: 1539296 - DNA, 25 bp, Homo sapien
ctgttcggaggcctctatccaagca

SEQ ID NO: 1539297 - DNA, 25 bp, Homo sapien
gttcggaggcctctatccaagcagg

SEQ ID NO: 1539298 - DNA, 25 bp, Homo sapien
aggtgccttgtggatgttcaacagc

SEQ ID NO: 1539299 - DNA, 25 bp, Homo sapien
cttgcaggtgccttgtggatgttca

SEQ ID NO: 1539300 - DNA, 25 bp, Homo sapien
gtgccttgtggatgttcaacagcca

SEQ ID NO: 1539301 - DNA, 25 bp, Homo sapien
cttgtggatgttcaacagccattct

SEQ ID NO: 1539302 - DNA, 25 bp, Homo sapien
cagtaacctgcttattggctcaaag

SEQ ID NO: 1539303 - DNA, 25 bp, Homo sapien
tctggagtccaagactgatctgagg

SEQ ID NO: 1539304 - DNA, 25 bp, Homo sapien
tcctcaggcactgttaccagtaacc

SEQ ID NO: 1539305 - DNA, 25 bp, Homo sapien
aaaggcaagccatgtttctgctcaa

SEQ ID NO: 1539306 - DNA, 25 bp, Homo sapien
cacccaggtacccaggcacaatcat

SEQ ID NO: 1539307 - DNA, 25 bp, Homo sapien
tatcaatgtattgcccctaagttcc

SEQ ID NO: 1539308 - DNA, 25 bp, Homo sapien
ccagtagtggatgtctgaaagacac

SEQ ID NO: 1539309 - DNA, 25 bp, Homo sapien
tatatccctatctcacagcaaagtc

SEQ ID NO: 1539310 - DNA, 25 bp, Homo sapien
gaacaatgttaagctttgccagtag

SEQ ID NO: 1539311 - DNA, 25 bp, Homo sapien
taatcttaagtggtaaaacttgatg

SEQ ID NO: 1539312 - DNA, 25 bp, Homo sapien
aatcttaagtggtaaaacttgatgc

SEQ ID NO: 1539313 - DNA, 25 bp, Homo sapien
ttcttggtctcaactttgattcata

SEQ ID NO: 1539314 - DNA, 25 bp, Homo sapien
atttcttggtctcaactttgattca

SEQ ID NO: 1539315 - DNA, 25 bp, Homo sapien
aatttcttggtctcaactttgattc

SEQ ID NO: 1539316 - DNA, 25 bp, Homo sapien
cttggtctcaactttgattcatagt

SEQ ID NO: 1539317 - DNA, 25 bp, Homo sapien
tgaacactcaatgctgtgttttgta

SEQ ID NO: 1539318 - DNA, 25 bp, Homo sapien
aacttgaacactcaatgctgtgttt

SEQ ID NO: 1539319 - DNA, 25 bp, Homo sapien
cttgaacactcaatgctgtgttttg

SEQ ID NO: 1539320 - DNA, 25 bp, Homo sapien
gaacactcaatgctgtgttttgtaa

SEQ ID NO: 1539321 - DNA, 25 bp, Homo sapien
gaaagtgggcatgtcttcaggagta

SEQ ID NO: 1539322 - DNA, 25 bp, Homo sapien
gctgatccaaaactaaaggccttac

SEQ ID NO: 1539323 - DNA, 25 bp, Homo sapien
tctggtgccgattaagagctgaacc

SEQ ID NO: 1539324 - DNA, 25 bp, Homo sapien
ctttgatggtaagcaaggtttgcac

SEQ ID NO: 1539325 - DNA, 25 bp, Homo sapien
tccaattcgcagagtttcttaccat

SEQ ID NO: 1539326 - DNA, 25 bp, Homo sapien
tgaatccctcccataagccttccca

SEQ ID NO: 1539327 - DNA, 25 bp, Homo sapien
tatagtttccaattcgcagagtttc

SEQ ID NO: 1539328 - DNA, 25 bp, Homo sapien
cgcagagtttcttaccattatgact

SEQ ID NO: 1539329 - DNA, 25 bp, Homo sapien
taagtcatatgtttagagtccttcc

SEQ ID NO: 1539330 - DNA, 25 bp, Homo sapien
tagtaggattaacccagaaatgagt

SEQ ID NO: 1539331 - DNA, 25 bp, Homo sapien
aaaacactgacctgatatccaagct

SEQ ID NO: 1539332 - DNA, 25 bp, Homo sapien
gactgactaacctgtgaagcataag

SEQ ID NO: 1539333 - DNA, 25 bp, Homo sapien
aatgaatgggactccttcaaatcaa

SEQ ID NO: 1539334 - DNA, 25 bp, Homo sapien
tgtttgccaatatcaacgaatttga

SEQ ID NO: 1539335 - DNA, 25 bp, Homo sapien
gactgaaaactgaaagccaattctg

SEQ ID NO: 1539336 - DNA, 25 bp, Homo sapien
taaccaagcacatgtactcaacaga

SEQ ID NO: 1539337 - DNA, 25 bp, Homo sapien
cacaagctgtacgacgaggagacac

SEQ ID NO: 1539338 - DNA, 25 bp, Homo sapien
tgatggccttgcagtcggagctcca

SEQ ID NO: 1539339 - DNA, 25 bp, Homo sapien
agcttaacccctgcctgggcatgct

SEQ ID NO: 1539340 - DNA, 25 bp, Homo sapien
gagctgggtctcaggcagcgcctgt

SEQ ID NO: 1539341 - DNA, 25 bp, Homo sapien
cgtgtatataattagaatatctcac

SEQ ID NO: 1539342 - DNA, 25 bp, Homo sapien
aacgtgtatataattagaatatctc

SEQ ID NO: 1539343 - DNA, 25 bp, Homo sapien
tatgaacgtgtatataattagaata

SEQ ID NO: 1539344 - DNA, 25 bp, Homo sapien
tgtttatgaacgtgtatataattag

SEQ ID NO: 1539345 - DNA, 25 bp, Homo sapien
tgatgtcccatatgtcatctaagct

SEQ ID NO: 1539346 - DNA, 25 bp, Homo sapien
ccatgttctattgtttcccactgag

SEQ ID NO: 1539347 - DNA, 25 bp, Homo sapien
tcattgagccttctgtatcaggatg

SEQ ID NO: 1539348 - DNA, 25 bp, Homo sapien
agtttgactgtaatgggccttggaa

SEQ ID NO: 1539349 - DNA, 25 bp, Homo sapien
tatggcctaacgtatggtctcttcc

SEQ ID NO: 1539350 - DNA, 25 bp, Homo sapien
catgtgctgataggaacaatgtgta

SEQ ID NO: 1539351 - DNA, 25 bp, Homo sapien
tggtaggttttcatgtatccaggaa

SEQ ID NO: 1539352 - DNA, 25 bp, Homo sapien
tatagttgcctgtagtagtctttga

SEQ ID NO: 1539353 - DNA, 25 bp, Homo sapien
aagcattttagttcaatatagtcca

SEQ ID NO: 1539354 - DNA, 25 bp, Homo sapien
tatttgcctattcttctgaagtgtt

SEQ ID NO: 1539355 - DNA, 25 bp, Homo sapien
aaatatctttgaggtcttatctaaa

SEQ ID NO: 1539356 - DNA, 25 bp, Homo sapien
gccgctatggcactgctattaagtt

SEQ ID NO: 1539357 - DNA, 25 bp, Homo sapien
ggtatttagatacccatcactttga

SEQ ID NO: 1539358 - DNA, 25 bp, Homo sapien
tttatggagcacaagcaatatattg

SEQ ID NO: 1539359 - DNA, 25 bp, Homo sapien
cctactttcctgacaaatttctagt

SEQ ID NO: 1539360 - DNA, 25 bp, Homo sapien
cattcatacaacgtataaggatcaa

SEQ ID NO: 1539361 - DNA, 25 bp, Homo sapien
gttacaatcttattgtactcttagt

SEQ ID NO: 1539362 - DNA, 25 bp, Homo sapien
ggcaatgcttatatcaggagaaatg

SEQ ID NO: 1539363 - DNA, 25 bp, Homo sapien
tacaggcaggcaatgcttatatcag

SEQ ID NO: 1539364 - DNA, 25 bp, Homo sapien
gaaatgggatatctatcacctgaag

SEQ ID NO: 1539365 - DNA, 25 bp, Homo sapien
cttgtggatggcagaacggcccttt

SEQ ID NO: 1539366 - DNA, 25 bp, Homo sapien
tctcaccacccttctttgtgggagc

SEQ ID NO: 1539367 - DNA, 25 bp, Homo sapien
tttcttctcaccacccttctttgtg

SEQ ID NO: 1539368 - DNA, 25 bp, Homo sapien
tcttctcaccacccttctttgtggg

SEQ ID NO: 1539369 - DNA, 25 bp, Homo sapien
gagcctggtatcagtgcgcacatct

SEQ ID NO: 1539370 - DNA, 25 bp, Homo sapien
atttctgaatctctttgagtgtccg

SEQ ID NO: 1539371 - DNA, 25 bp, Homo sapien
ttctgaatctctttgagtgtccgag

SEQ ID NO: 1539372 - DNA, 25 bp, Homo sapien
ctgaatctctttgagtgtccgaggg

SEQ ID NO: 1539373 - DNA, 25 bp, Homo sapien
ttatgggacattccttattcctttg

SEQ ID NO: 1539374 - DNA, 25 bp, Homo sapien
atgggacattccttattcctttggc

SEQ ID NO: 1539375 - DNA, 25 bp, Homo sapien
tatgggacattccttattcctttgg

SEQ ID NO: 1539376 - DNA, 25 bp, Homo sapien
ggtgaatcttcatccccattacgta

SEQ ID NO: 1539377 - DNA, 25 bp, Homo sapien
gtggtaacagatacatagataacca

SEQ ID NO: 1539378 - DNA, 25 bp, Homo sapien
aagtggtaacagatacatagataac

SEQ ID NO: 1539379 - DNA, 25 bp, Homo sapien
tgaatcttcatccccattacgtatt

SEQ ID NO: 1539380 - DNA, 25 bp, Homo sapien
tataactatttgatgtatttgacaa

SEQ ID NO: 1539381 - DNA, 25 bp, Homo sapien
taactatttgatgtatttgacaatc

SEQ ID NO: 1539382 - DNA, 25 bp, Homo sapien
atttgatgtatttgacaatcagtga

SEQ ID NO: 1539383 - DNA, 25 bp, Homo sapien
tttttgcaattttataactatttga

SEQ ID NO: 1539384 - DNA, 25 bp, Homo sapien
gaaacacccgaatgttcatcccgcg

SEQ ID NO: 1539385 - DNA, 25 bp, Homo sapien
gaaggcgacccgcagataggtctgt

SEQ ID NO: 1539386 - DNA, 25 bp, Homo sapien
ccgaatgttcatcccgcgcgcagtt

SEQ ID NO: 1539387 - DNA, 25 bp, Homo sapien
tgtgacagacgcctaaagcgccgaa

SEQ ID NO: 1539388 - DNA, 25 bp, Homo sapien
actgccgctactcgggacactctgg

SEQ ID NO: 1539389 - DNA, 25 bp, Homo sapien
gatccgtgtcccgtcaaccgcgagt

SEQ ID NO: 1539390 - DNA, 25 bp, Homo sapien
cactctgggccttagaggatccgtg

SEQ ID NO: 1539391 - DNA, 25 bp, Homo sapien
ttagaggatccgtgtcccgtcaacc

SEQ ID NO: 1539392 - DNA, 25 bp, Homo sapien
cagtcaaacaagataaacggatgta

SEQ ID NO: 1539393 - DNA, 25 bp, Homo sapien
ccagcaatatgctctttacaagaca

SEQ ID NO: 1539394 - DNA, 25 bp, Homo sapien
aaacggatgtaagcccagcaatatg

SEQ ID NO: 1539395 - DNA, 25 bp, Homo sapien
caagataaacggatgtaagcccagc

SEQ ID NO: 1539396 - DNA, 25 bp, Homo sapien
tgagatgtcattcagaccctgcctg

SEQ ID NO: 1539397 - DNA, 25 bp, Homo sapien
gacttctatttgcactgcagatgtg

SEQ ID NO: 1539398 - DNA, 25 bp, Homo sapien
gctgatcactgaagattgagatgtc

SEQ ID NO: 1539399 - DNA, 25 bp, Homo sapien
tccagcaactccagggtccactctc

SEQ ID NO: 1539400 - DNA, 25 bp, Homo sapien
ccatcatgtggctcaaacgctccat

SEQ ID NO: 1539401 - DNA, 25 bp, Homo sapien
ttcttcctcggaaagggcagactct

SEQ ID NO: 1539402 - DNA, 25 bp, Homo sapien
cttcctcggaaagggcagactcttg

SEQ ID NO: 1539403 - DNA, 25 bp, Homo sapien
ctcttcttcctcggaaagggcagac

SEQ ID NO: 1539404 - DNA, 25 bp, Homo sapien
tcttcttcctcggaaagggcagact

SEQ ID NO: 1539405 - DNA, 25 bp, Homo sapien
gctaattaatttgaagtcatcaaaa

SEQ ID NO: 1539406 - DNA, 25 bp, Homo sapien
ttaatttgaagtcatcaaaattagg

SEQ ID NO: 1539407 - DNA, 25 bp, Homo sapien
aatgctaattaatttgaagtcatca

SEQ ID NO: 1539408 - DNA, 25 bp, Homo sapien
aacataatgctaattaatttgaagt

SEQ ID NO: 1539409 - DNA, 25 bp, Homo sapien
agccacatccttaaatgtcactgtt

SEQ ID NO: 1539410 - DNA, 25 bp, Homo sapien
gccacatccttaaatgtcactgttt

SEQ ID NO: 1539411 - DNA, 25 bp, Homo sapien
cactcctcctgggtaaggtcaacag

SEQ ID NO: 1539412 - DNA, 25 bp, Homo sapien
tcctcctgggtaaggtcaacagcca

SEQ ID NO: 1539413 - DNA, 25 bp, Homo sapien
tcgatacaagtttctttgagcaggt

SEQ ID NO: 1539414 - DNA, 25 bp, Homo sapien
tcacatctcgatacaagtttctttg

SEQ ID NO: 1539415 - DNA, 25 bp, Homo sapien
catctcgatacaagtttctttgagc

SEQ ID NO: 1539416 - DNA, 25 bp, Homo sapien
tctcgatacaagtttctttgagcag

SEQ ID NO: 1539417 - DNA, 25 bp, Homo sapien
aatgacacaaagtaatcagccttta

SEQ ID NO: 1539418 - DNA, 25 bp, Homo sapien
tgacacaaagtaatcagcctttaac

SEQ ID NO: 1539419 - DNA, 25 bp, Homo sapien
gacacaaagtaatcagcctttaaca

SEQ ID NO: 1539420 - DNA, 25 bp, Homo sapien
acaatgacacaaagtaatcagcctt

SEQ ID NO: 1539421 - DNA, 25 bp, Homo sapien
tgaatatcacatccggtttggtgac

SEQ ID NO: 1539422 - DNA, 25 bp, Homo sapien
atcacatccggtttggtgacttgac

SEQ ID NO: 1539423 - DNA, 25 bp, Homo sapien
acttgaatatcacatccggtttggt

SEQ ID NO: 1539424 - DNA, 25 bp, Homo sapien
ctggacagtgcctcccaaacatttc

SEQ ID NO: 1539425 - DNA, 25 bp, Homo sapien
tattttcgcaacttttttacattca

SEQ ID NO: 1539426 - DNA, 25 bp, Homo sapien
gtcacagtcatagaagctttgtctt

SEQ ID NO: 1539427 - DNA, 25 bp, Homo sapien
tccaaacccttatcaagtgagtcac

SEQ ID NO: 1539428 - DNA, 25 bp, Homo sapien
acccttatcaagtgagtcacagtca

SEQ ID NO: 1539429 - DNA, 25 bp, Homo sapien
gtgagtcacagtcatagaagctttg

SEQ ID NO: 1539430 - DNA, 25 bp, Homo sapien
taaagggggttacaacataggatgc

SEQ ID NO: 1539431 - DNA, 25 bp, Homo sapien
aggatgcacaatggtaaaatggttt

SEQ ID NO: 1539432 - DNA, 25 bp, Homo sapien
cgctcatgtctaatgaggtcaaatt

SEQ ID NO: 1539433 - DNA, 25 bp, Homo sapien
attcgctcatgtctaatgaggtcaa

SEQ ID NO: 1539434 - DNA, 25 bp, Homo sapien
gacattcgagaaaaagctctaccac

SEQ ID NO: 1539435 - DNA, 25 bp, Homo sapien
taaatactgagcattgagagaaagc

SEQ ID NO: 1539436 - DNA, 25 bp, Homo sapien
tgtagcgtaacagatgacattcgag

SEQ ID NO: 1539437 - DNA, 25 bp, Homo sapien
gatttcgcatatgtacggttaggga

SEQ ID NO: 1539438 - DNA, 25 bp, Homo sapien
ttttctgatgtgtaatgagattttc

SEQ ID NO: 1539439 - DNA, 25 bp, Homo sapien
gaattttctgatgtgtaatgagatt

SEQ ID NO: 1539440 - DNA, 25 bp, Homo sapien
ctgatgtgtaatgagattttctttc

SEQ ID NO: 1539441 - DNA, 25 bp, Homo sapien
ttctgatgtgtaatgagattttctt

SEQ ID NO: 1539442 - DNA, 25 bp, Homo sapien
tctggtgtcgaatgaggtttgacat

SEQ ID NO: 1539443 - DNA, 25 bp, Homo sapien
attctctggtgtcgaatgaggtttg

SEQ ID NO: 1539444 - DNA, 25 bp, Homo sapien
tctctggtgtcgaatgaggtttgac

SEQ ID NO: 1539445 - DNA, 25 bp, Homo sapien
gaattctctggtgtcgaatgaggtt

SEQ ID NO: 1539446 - DNA, 25 bp, Homo sapien
ttcagtgaggtttgatttctgacta

SEQ ID NO: 1539447 - DNA, 25 bp, Homo sapien
tcatgttcagtgaggtttgatttct

SEQ ID NO: 1539448 - DNA, 25 bp, Homo sapien
tttctcatgttcagtgaggtttgat

SEQ ID NO: 1539449 - DNA, 25 bp, Homo sapien
attgattacaatgataaggtttctc

SEQ ID NO: 1539450 - DNA, 25 bp, Homo sapien
atgaattttttcatgctcaagaaga

SEQ ID NO: 1539451 - DNA, 25 bp, Homo sapien
tcaagaagattttgtctctgactga

SEQ ID NO: 1539452 - DNA, 25 bp, Homo sapien
tgaattttttcatgctcaagaagat

SEQ ID NO: 1539453 - DNA, 25 bp, Homo sapien
ttttgtctctgactgaaagctttcc

SEQ ID NO: 1539454 - DNA, 25 bp, Homo sapien
gaagagtgagggatgagattcgaga

SEQ ID NO: 1539455 - DNA, 25 bp, Homo sapien
gtgagggatgagattcgagagaagg

SEQ ID NO: 1539456 - DNA, 25 bp, Homo sapien
gagtgagggatgagattcgagagaa

SEQ ID NO: 1539457 - DNA, 25 bp, Homo sapien
tgaagagtgagggatgagattcgag

SEQ ID NO: 1539458 - DNA, 25 bp, Homo sapien
cagtatgacttctcatatgtataat

SEQ ID NO: 1539459 - DNA, 25 bp, Homo sapien
gacttctcatatgtataataagtaa

SEQ ID NO: 1539460 - DNA, 25 bp, Homo sapien
catatgtataataagtaatgagcac

SEQ ID NO: 1539461 - DNA, 25 bp, Homo sapien
taagtaatgagcactgagaaaaggc

SEQ ID NO: 1539462 - DNA, 25 bp, Homo sapien
ctctcttatgtatagaaagggatgc

SEQ ID NO: 1539463 - DNA, 25 bp, Homo sapien
gacctctcttatgtatagaaaggga

SEQ ID NO: 1539464 - DNA, 25 bp, Homo sapien
tatgacctctcttatgtatagaaag

SEQ ID NO: 1539465 - DNA, 25 bp, Homo sapien
tgtatgacctctcttatgtatagaa

SEQ ID NO: 1539466 - DNA, 25 bp, Homo sapien
tacggagagtcaaatattcccagca

SEQ ID NO: 1539467 - DNA, 25 bp, Homo sapien
tccttggcctcaacgtcatagacaa

SEQ ID NO: 1539468 - DNA, 25 bp, Homo sapien
cacaatatggatctggttcactgct

SEQ ID NO: 1539469 - DNA, 25 bp, Homo sapien
aagagggcgatcacttttgaagtca

SEQ ID NO: 1539470 - DNA, 25 bp, Homo sapien
gatttttcataaaatagttgagcat

SEQ ID NO: 1539471 - DNA, 25 bp, Homo sapien
aaaatagttgagcatctgatagggc

SEQ ID NO: 1539472 - DNA, 25 bp, Homo sapien
catctgatagggcatatgaatccat

SEQ ID NO: 1539473 - DNA, 25 bp, Homo sapien
gatagggcatatgaatccattataa

SEQ ID NO: 1539474 - DNA, 25 bp, Homo sapien
gaatctaagatatcatcagttgaaa

SEQ ID NO: 1539475 - DNA, 25 bp, Homo sapien
tatcatcagttgaaaggagtccaat

SEQ ID NO: 1539476 - DNA, 25 bp, Homo sapien
tcatcaagttgctaaaatgtgctaa

SEQ ID NO: 1539477 - DNA, 25 bp, Homo sapien
ttacttgaatctaagatatcatcag

SEQ ID NO: 1539478 - DNA, 25 bp, Homo sapien
caatcccgataaagccgggtggcta

SEQ ID NO: 1539479 - DNA, 25 bp, Homo sapien
ggcatctcaacatttaagtcactaa

SEQ ID NO: 1539480 - DNA, 25 bp, Homo sapien
ggtgtctgggaaacgacctgtccta

SEQ ID NO: 1539481 - DNA, 25 bp, Homo sapien
tcacaggctcaggatgccgaaggga

SEQ ID NO: 1539482 - DNA, 25 bp, Homo sapien
cccgccaaggaaaggtgactagcct

SEQ ID NO: 1539483 - DNA, 25 bp, Homo sapien
tgactagccttcttcggccggaaaa

SEQ ID NO: 1539484 - DNA, 25 bp, Homo sapien
tcaggtctgaacgagtccatcccaa

SEQ ID NO: 1539485 - DNA, 25 bp, Homo sapien
gcagcaatagttggccgctgacggc

SEQ ID NO: 1539486 - DNA, 25 bp, Homo sapien
acatctccgagagccacctgtcttt

SEQ ID NO: 1539487 - DNA, 25 bp, Homo sapien
ccgcacatctccgagagccacctgt

SEQ ID NO: 1539488 - DNA, 25 bp, Homo sapien
gcgtgggcatgcagcccgcacatct

SEQ ID NO: 1539489 - DNA, 25 bp, Homo sapien
tgaagcgtgggcatgcagcccgcac

SEQ ID NO: 1539490 - DNA, 25 bp, Homo sapien
agatcgccaagcacctgtcgctggg

SEQ ID NO: 1539491 - DNA, 25 bp, Homo sapien
tagtccagacaagaggacgcagggc

SEQ ID NO: 1539492 - DNA, 25 bp, Homo sapien
cacagaataccgtgcagacaggact

SEQ ID NO: 1539493 - DNA, 25 bp, Homo sapien
gagaactgcccggacttttagtcca

SEQ ID NO: 1539494 - DNA, 25 bp, Homo sapien
tcacttcagacgcacagcagttctc

SEQ ID NO: 1539495 - DNA, 25 bp, Homo sapien
gccatcacttcagacgcacagcagt

SEQ ID NO: 1539496 - DNA, 25 bp, Homo sapien
acttcagacgcacagcagttctctc

SEQ ID NO: 1539497 - DNA, 25 bp, Homo sapien
ctccgccatcacttcagacgcacag

SEQ ID NO: 1539498 - DNA, 25 bp, Homo sapien
ctgtctaatagggttgttatgtgga

SEQ ID NO: 1539499 - DNA, 25 bp, Homo sapien
caagattcggaataacagatacctc

SEQ ID NO: 1539500 - DNA, 25 bp, Homo sapien
atggatctcttgaacactcgttgga

SEQ ID NO: 1539501 - DNA, 25 bp, Homo sapien
ctcttaacatgggtgttcagtcccc

SEQ ID NO: 1539502 - DNA, 25 bp, Homo sapien
caatggatggctatacagtaggata

SEQ ID NO: 1539503 - DNA, 25 bp, Homo sapien
ggacgacaatccacaatatttaaga

SEQ ID NO: 1539504 - DNA, 25 bp, Homo sapien
atctaccatcatttaaaggttaaag

SEQ ID NO: 1539505 - DNA, 25 bp, Homo sapien
tgccaatgagcatgaaagttgcggg

SEQ ID NO: 1539506 - DNA, 25 bp, Homo sapien
tgcacagcacatataaccggcaagg

SEQ ID NO: 1539507 - DNA, 25 bp, Homo sapien
tacaagacgtcagaataaataagag

SEQ ID NO: 1539508 - DNA, 25 bp, Homo sapien
tgatcaagttggatgaccccacatc

SEQ ID NO: 1539509 - DNA, 25 bp, Homo sapien
tcaaaatcaactgcaataatctgtc

SEQ ID NO: 1539510 - DNA, 25 bp, Homo sapien
tggcaagtctatataccagaaacaa

SEQ ID NO: 1539511 - DNA, 25 bp, Homo sapien
aaatacaccatttgtgaaattcatg

SEQ ID NO: 1539512 - DNA, 25 bp, Homo sapien
aattcaatagggaagttccattagg

SEQ ID NO: 1539513 - DNA, 25 bp, Homo sapien
tcaatagggaagttccattaggaaa

SEQ ID NO: 1539514 - DNA, 25 bp, Homo sapien
caccatttgtgaaattcatggacaa

SEQ ID NO: 1539515 - DNA, 25 bp, Homo sapien
gttgccgtaattttccaacattaca

SEQ ID NO: 1539516 - DNA, 25 bp, Homo sapien
gcagagtgcaagcattcccactcct

SEQ ID NO: 1539517 - DNA, 25 bp, Homo sapien
gtaattttccaacattacatctcgg

SEQ ID NO: 1539518 - DNA, 25 bp, Homo sapien
ttccaacattacatctcggtacaaa

SEQ ID NO: 1539519 - DNA, 25 bp, Homo sapien
caagaaacattaactcatccaggta

SEQ ID NO: 1539520 - DNA, 25 bp, Homo sapien
gagggtcagagcaccacaataaatc

SEQ ID NO: 1539521 - DNA, 25 bp, Homo sapien
ctaattaccaagaaagaggagcagg

SEQ ID NO: 1539522 - DNA, 25 bp, Homo sapien
caaatcacagctccaagaagggagg

SEQ ID NO: 1539523 - DNA, 25 bp, Homo sapien
ggagatcacatttggcttagtatca

SEQ ID NO: 1539524 - DNA, 25 bp, Homo sapien
acatttggcttagtatcagaaagcc

SEQ ID NO: 1539525 - DNA, 25 bp, Homo sapien
tcacatttggcttagtatcagaaag

SEQ ID NO: 1539526 - DNA, 25 bp, Homo sapien
gatcacatttggcttagtatcagaa

SEQ ID NO: 1539527 - DNA, 25 bp, Homo sapien
gttgtggtgatctaatttcataaat

SEQ ID NO: 1539528 - DNA, 25 bp, Homo sapien
ttgtggtgatctaatttcataaatg

SEQ ID NO: 1539529 - DNA, 25 bp, Homo sapien
aatggtattacagctggtctgaaat

SEQ ID NO: 1539530 - DNA, 25 bp, Homo sapien
tgtccctcctgatgaccctgttgtc

SEQ ID NO: 1539531 - DNA, 25 bp, Homo sapien
ggtctgaaatgtccctcctgatgac

SEQ ID NO: 1539532 - DNA, 25 bp, Homo sapien
tacagctggtctgaaatgtccctcc

SEQ ID NO: 1539533 - DNA, 25 bp, Homo sapien
tgttgaataggacatgactggtacc

SEQ ID NO: 1539534 - DNA, 25 bp, Homo sapien
cattcttacatttcctgcattcaca

SEQ ID NO: 1539535 - DNA, 25 bp, Homo sapien
ctccagtatgaagccactgatattc

SEQ ID NO: 1539536 - DNA, 25 bp, Homo sapien
gactggtacctaaaagcattcttac

SEQ ID NO: 1539537 - DNA, 25 bp, Homo sapien
gatgcttaatcaagtctgatccact

SEQ ID NO: 1539538 - DNA, 25 bp, Homo sapien
ctttcatgaagcgtctgatgcttaa

SEQ ID NO: 1539539 - DNA, 25 bp, Homo sapien
ccagtattaatgctctgaggttgag

SEQ ID NO: 1539540 - DNA, 25 bp, Homo sapien
gatccactattaaagattttcctac

SEQ ID NO: 1539541 - DNA, 25 bp, Homo sapien
ctttgatgtagactcagctgtgagg

SEQ ID NO: 1539542 - DNA, 25 bp, Homo sapien
gtgtgtcataacgaaaagcctttcc

SEQ ID NO: 1539543 - DNA, 25 bp, Homo sapien
tgactaatttgtgagctggaacgaa

SEQ ID NO: 1539544 - DNA, 25 bp, Homo sapien
gattatctgatgaaggctcagctgt

SEQ ID NO: 1539545 - DNA, 25 bp, Homo sapien
tctgagccacgacgaaaggacttcc

SEQ ID NO: 1539546 - DNA, 25 bp, Homo sapien
tctgaccttcgaatgaaagccttcc

SEQ ID NO: 1539547 - DNA, 25 bp, Homo sapien
aagatgtgaatcagagataaaggct

SEQ ID NO: 1539548 - DNA, 25 bp, Homo sapien
tgtgctacaagtaaaggccttttca

SEQ ID NO: 1539549 - DNA, 25 bp, Homo sapien
tccttacactcgtagggtttctcac

SEQ ID NO: 1539550 - DNA, 25 bp, Homo sapien
ctccttacactcgtagggtttctca

SEQ ID NO: 1539551 - DNA, 25 bp, Homo sapien
tctgagccaccaccaaagggcttcc

SEQ ID NO: 1539552 - DNA, 25 bp, Homo sapien
gttctgagccaccaccaaagggctt

SEQ ID NO: 1539553 - DNA, 25 bp, Homo sapien
ttctgagccaccaccaaagggcttc

SEQ ID NO: 1539554 - DNA, 25 bp, Homo sapien
agttctgagccaccaccaaagggct

SEQ ID NO: 1539555 - DNA, 25 bp, Homo sapien
ttgatgttgactaaggtgtgaggcc

SEQ ID NO: 1539556 - DNA, 25 bp, Homo sapien
atgttgactaaggtgtgaggcccga

SEQ ID NO: 1539557 - DNA, 25 bp, Homo sapien
tgtgaggcccgaatgaaggcctttc

SEQ ID NO: 1539558 - DNA, 25 bp, Homo sapien
gactaaggtgtgaggcccgaatgaa

SEQ ID NO: 1539559 - DNA, 25 bp, Homo sapien
catggaggtcttcaatttttcacca

SEQ ID NO: 1539560 - DNA, 25 bp, Homo sapien
tgaatcatctgatttcccctaaggg

SEQ ID NO: 1539561 - DNA, 25 bp, Homo sapien
cctaagggctaatgactctgctgct

SEQ ID NO: 1539562 - DNA, 25 bp, Homo sapien
tgaggttgacttcgttctgagccac

SEQ ID NO: 1539563 - DNA, 25 bp, Homo sapien
gtcactgcaaatataagtccttcct

SEQ ID NO: 1539564 - DNA, 25 bp, Homo sapien
tttcaatactagacagacactgctt

SEQ ID NO: 1539565 - DNA, 25 bp, Homo sapien
caatatgttcctatagtcactgcaa

SEQ ID NO: 1539566 - DNA, 25 bp, Homo sapien
ccccacaatgcagctaagaaatatg

SEQ ID NO: 1539567 - DNA, 25 bp, Homo sapien
tggagaaatacattttggctagggc

SEQ ID NO: 1539568 - DNA, 25 bp, Homo sapien
ataaaaattatttatacaggtagct

SEQ ID NO: 1539569 - DNA, 25 bp, Homo sapien
acattttggctagggctgtattatt

SEQ ID NO: 1539570 - DNA, 25 bp, Homo sapien
aaattttctagtggagaaatacatt

SEQ ID NO: 1539571 - DNA, 25 bp, Homo sapien
tatttcgcaccaagtccagggaaag

SEQ ID NO: 1539572 - DNA, 25 bp, Homo sapien
catcatatcaacaatgttggctggg

SEQ ID NO: 1539573 - DNA, 25 bp, Homo sapien
agtttcttatttcgcaccaagtcca

SEQ ID NO: 1539574 - DNA, 25 bp, Homo sapien
gttcttcattgtttcatcatatcaa

SEQ ID NO: 1539575 - DNA, 25 bp, Homo sapien
cacgtgctatctcgcctggctagtt

SEQ ID NO: 1539576 - DNA, 25 bp, Homo sapien
tttccaggcctcagatatattgtaa

SEQ ID NO: 1539577 - DNA, 25 bp, Homo sapien
ggtaatgatagcctcacagccatga

SEQ ID NO: 1539578 - DNA, 25 bp, Homo sapien
aacttacaacatatgcaggtgggca

SEQ ID NO: 1539579 - DNA, 25 bp, Homo sapien
ggtaggactccacctactttattga

SEQ ID NO: 1539580 - DNA, 25 bp, Homo sapien
ggcaaggaattcaactggtaggact

SEQ ID NO: 1539581 - DNA, 25 bp, Homo sapien
aaatgggctgcatatggtttgtcta

SEQ ID NO: 1539582 - DNA, 25 bp, Homo sapien
taaatccactatgttgtaggcaagg

SEQ ID NO: 1539583 - DNA, 25 bp, Homo sapien
gaactcgaatgacccttagacatgg

SEQ ID NO: 1539584 - DNA, 25 bp, Homo sapien
tgtaggacgcttagcaggatccctg

SEQ ID NO: 1539585 - DNA, 25 bp, Homo sapien
cataaacgatggcaaaagatgcagg

SEQ ID NO: 1539586 - DNA, 25 bp, Homo sapien
taggtatgagaaacgaaatggcccc

SEQ ID NO: 1539587 - DNA, 25 bp, Homo sapien
tatgccactgtatctgcaaaagcag

SEQ ID NO: 1539588 - DNA, 25 bp, Homo sapien
caaaaggattgtatgtatgccactg

SEQ ID NO: 1539589 - DNA, 25 bp, Homo sapien
agtctttcaccgagtgtgctgtcca

SEQ ID NO: 1539590 - DNA, 25 bp, Homo sapien
ggtcatggtgtataaccctggttat

SEQ ID NO: 1539591 - DNA, 25 bp, Homo sapien
aatgatggttcccaggtactgggag

SEQ ID NO: 1539592 - DNA, 25 bp, Homo sapien
ggtatcgagcatgtcatattcatag

SEQ ID NO: 1539593 - DNA, 25 bp, Homo sapien
ggatgaaccttgacataagactaag

SEQ ID NO: 1539594 - DNA, 25 bp, Homo sapien
cttatatgaggtatcgagcatgtca

SEQ ID NO: 1539595 - DNA, 25 bp, Homo sapien
gtcatgctactgtgctattgaacac

SEQ ID NO: 1539596 - DNA, 25 bp, Homo sapien
ccattttgaaatacatggtaagtta

SEQ ID NO: 1539597 - DNA, 25 bp, Homo sapien
ggtaagttattgttaacgatcgtca

SEQ ID NO: 1539598 - DNA, 25 bp, Homo sapien
ggcccttgttaaggcaaagataatc

SEQ ID NO: 1539599 - DNA, 25 bp, Homo sapien
caaaaacaggctacttgtactttct

SEQ ID NO: 1539600 - DNA, 25 bp, Homo sapien
tccaatggtcagctacaaaaacagg

SEQ ID NO: 1539601 - DNA, 25 bp, Homo sapien
ccaacaagccacagtcaattcagga

SEQ ID NO: 1539602 - DNA, 25 bp, Homo sapien
taagagcaatttagaggccaggcat

SEQ ID NO: 1539603 - DNA, 25 bp, Homo sapien
ttcaccacttgggacaacacagata

SEQ ID NO: 1539604 - DNA, 25 bp, Homo sapien
ccttcaccacttgggacaacacaga

SEQ ID NO: 1539605 - DNA, 25 bp, Homo sapien
atcttcccttcaccacttgggacaa

SEQ ID NO: 1539606 - DNA, 25 bp, Homo sapien
ccacttgggacaacacagataataa

SEQ ID NO: 1539607 - DNA, 25 bp, Homo sapien
taataacacctgttgacttcatcac

SEQ ID NO: 1539608 - DNA, 25 bp, Homo sapien
gaaaaaacttagcaagcagtatcat

SEQ ID NO: 1539609 - DNA, 25 bp, Homo sapien
ctcagagctttagatgcctatttac

SEQ ID NO: 1539610 - DNA, 25 bp, Homo sapien
tatcatgaaaagaaacctacaaggt

SEQ ID NO: 1539611 - DNA, 25 bp, Homo sapien
ttaggtattgattggacatatctca

SEQ ID NO: 1539612 - DNA, 25 bp, Homo sapien
aaataataagagctatctatgacaa

SEQ ID NO: 1539613 - DNA, 25 bp, Homo sapien
aaattaggtattgattggacatatc

SEQ ID NO: 1539614 - DNA, 25 bp, Homo sapien
gctatctatgacaaacccacaaccc

SEQ ID NO: 1539615 - DNA, 25 bp, Homo sapien
agatacaaccatctcctttgacatc

SEQ ID NO: 1539616 - DNA, 25 bp, Homo sapien
aaccatctcctttgacatcggtctg

SEQ ID NO: 1539617 - DNA, 25 bp, Homo sapien
atctcctttgacatcggtctgctcc

SEQ ID NO: 1539618 - DNA, 25 bp, Homo sapien
tacaaccatctcctttgacatcggt

SEQ ID NO: 1539619 - DNA, 25 bp, Homo sapien
tattgttgtcatctccggttcctgg

SEQ ID NO: 1539620 - DNA, 25 bp, Homo sapien
cagcacagtgtcaccgacagggtta

SEQ ID NO: 1539621 - DNA, 25 bp, Homo sapien
caggatagtcaaaccggccgaatca

SEQ ID NO: 1539622 - DNA, 25 bp, Homo sapien
ctgaaagattcagttctgggaggca

SEQ ID NO: 1539623 - DNA, 25 bp, Homo sapien
tgtggtcatcttgattctagagaat

SEQ ID NO: 1539624 - DNA, 25 bp, Homo sapien
cacacgtggcactggtgtattcaag

SEQ ID NO: 1539625 - DNA, 25 bp, Homo sapien
aagtgcaggacacgtgcaaacaggg

SEQ ID NO: 1539626 - DNA, 25 bp, Homo sapien
ggcaaatccaaagtagagccagtgt

SEQ ID NO: 1539627 - DNA, 25 bp, Homo sapien
tcgatgccaacgaaaatcatagaac

SEQ ID NO: 1539628 - DNA, 25 bp, Homo sapien
tggacacgaagtaaaatactttggc

SEQ ID NO: 1539629 - DNA, 25 bp, Homo sapien
aaaagcctattaatttctcagagga

SEQ ID NO: 1539630 - DNA, 25 bp, Homo sapien
gatggaaaaccctaagtggatcaaa

SEQ ID NO: 1539631 - DNA, 25 bp, Homo sapien
aaatttgaatctggccttcatagga

SEQ ID NO: 1539632 - DNA, 25 bp, Homo sapien
gtttgattacacaccagtttactgc

SEQ ID NO: 1539633 - DNA, 25 bp, Homo sapien
gaagtgattagtgttgaagtatgcc

SEQ ID NO: 1539634 - DNA, 25 bp, Homo sapien
taccacagcaatagcttttaagttg

SEQ ID NO: 1539635 - DNA, 25 bp, Homo sapien
tcctgcccagcaaaataatgatgtt

SEQ ID NO: 1539636 - DNA, 25 bp, Homo sapien
tccattggaggaaattgagtctact

SEQ ID NO: 1539637 - DNA, 25 bp, Homo sapien
tgcagaatcgtgtggaggcaactct

SEQ ID NO: 1539638 - DNA, 25 bp, Homo sapien
tattcgagtatttgccttagaggct

SEQ ID NO: 1539639 - DNA, 25 bp, Homo sapien
tgcagtggccagtgaccttcaagac

SEQ ID NO: 1539640 - DNA, 25 bp, Homo sapien
tttcgggttcgccagcccagcaggt

SEQ ID NO: 1539641 - DNA, 25 bp, Homo sapien
gcccaatttcgggttcgccagccca

SEQ ID NO: 1539642 - DNA, 25 bp, Homo sapien
ctggctcccgggttccaagcccaat

SEQ ID NO: 1539643 - DNA, 25 bp, Homo sapien
gcagttcagggtccaagatctggct

SEQ ID NO: 1539644 - DNA, 25 bp, Homo sapien
gcgacgctttctccgcgcgtgtccg

SEQ ID NO: 1539645 - DNA, 25 bp, Homo sapien
cgagtaaccccagcgacgctttctc

SEQ ID NO: 1539646 - DNA, 25 bp, Homo sapien
aaaccggagacacggccacacgagt

SEQ ID NO: 1539647 - DNA, 25 bp, Homo sapien
tgtagcctgcacacaaaaccggaga

SEQ ID NO: 1539648 - DNA, 25 bp, Homo sapien
tgtatgcacaggcagtcgccaatac

SEQ ID NO: 1539649 - DNA, 25 bp, Homo sapien
gtgtatgcacaggcagtcgccaata

SEQ ID NO: 1539650 - DNA, 25 bp, Homo sapien
aaatgctcatacacaaaaccacagc

SEQ ID NO: 1539651 - DNA, 25 bp, Homo sapien
atgctcatacacaaaaccacagcca

SEQ ID NO: 1539652 - DNA, 25 bp, Homo sapien
actcatacaaatgctcatacacaaa

SEQ ID NO: 1539653 - DNA, 25 bp, Homo sapien
tacaaatgctcatacacaaaaccac

SEQ ID NO: 1539654 - DNA, 25 bp, Homo sapien
ccaggtcacagctgtcttgggcttg

SEQ ID NO: 1539655 - DNA, 25 bp, Homo sapien
tttatttctgtattcaaagctgtac

SEQ ID NO: 1539656 - DNA, 25 bp, Homo sapien
cttctgtatcagaaagaagggccag

SEQ ID NO: 1539657 - DNA, 25 bp, Homo sapien
tctgtattcaaagctgtacactgga

SEQ ID NO: 1539658 - DNA, 25 bp, Homo sapien
tggacattgctactgaaacagccat

SEQ ID NO: 1539659 - DNA, 25 bp, Homo sapien
ttggacattgctactgaaacagcca

SEQ ID NO: 1539660 - DNA, 25 bp, Homo sapien
cttggacattgctactgaaacagcc

SEQ ID NO: 1539661 - DNA, 25 bp, Homo sapien
aaatcaaaatggtgctgtatcagaa

SEQ ID NO: 1539662 - DNA, 25 bp, Homo sapien
tgctctcaatctaccaaaaattgcc

SEQ ID NO: 1539663 - DNA, 25 bp, Homo sapien
ggaagcatctatcccgattaatggc

SEQ ID NO: 1539664 - DNA, 25 bp, Homo sapien
cacctggccgtgatcgtttttaagc

SEQ ID NO: 1539665 - DNA, 25 bp, Homo sapien
gcataaactattcttcaggtaacca

SEQ ID NO: 1539666 - DNA, 25 bp, Homo sapien
gctggctgttaacatcacataaagg

SEQ ID NO: 1539667 - DNA, 25 bp, Homo sapien
gatactatgccctacttcagagaag

SEQ ID NO: 1539668 - DNA, 25 bp, Homo sapien
ggatggctccctttatagatatagt

SEQ ID NO: 1539669 - DNA, 25 bp, Homo sapien
cacacttatcagattctgtgagctg

SEQ ID NO: 1539670 - DNA, 25 bp, Homo sapien
gccgaactgagtgacaatggaaaca

SEQ ID NO: 1539671 - DNA, 25 bp, Homo sapien
aactgagtgacaatggaaacacact

SEQ ID NO: 1539672 - DNA, 25 bp, Homo sapien
cgaactgagtgacaatggaaacaca

SEQ ID NO: 1539673 - DNA, 25 bp, Homo sapien
tcccctctcccctagattaggatgt

SEQ ID NO: 1539674 - DNA, 25 bp, Homo sapien
ctaagagtggggaaagaaagtgtct

SEQ ID NO: 1539675 - DNA, 25 bp, Homo sapien
cagccaggcattgtgatgcaaacct

SEQ ID NO: 1539676 - DNA, 25 bp, Homo sapien
cctctcccctagattaggatgtcct

SEQ ID NO: 1539677 - DNA, 25 bp, Homo sapien
caagaagacagcaatccaaatgtag

SEQ ID NO: 1539678 - DNA, 25 bp, Homo sapien
caaacccacagagttgggaattgta

SEQ ID NO: 1539679 - DNA, 25 bp, Homo sapien
caactacatgctctttacaagaagc

SEQ ID NO: 1539680 - DNA, 25 bp, Homo sapien
gaaatactagcaataaggaggatca

SEQ ID NO: 1539681 - DNA, 25 bp, Homo sapien
tcttctgggttcctatcttaggaaa

SEQ ID NO: 1539682 - DNA, 25 bp, Homo sapien
ggtttttagagctgcaagaaatgat

SEQ ID NO: 1539683 - DNA, 25 bp, Homo sapien
ttttagagctgcaagaaatgatcag

SEQ ID NO: 1539684 - DNA, 25 bp, Homo sapien
tatcttaggaaagcacagagtctgg

SEQ ID NO: 1539685 - DNA, 25 bp, Homo sapien
tatacattcaagaccagcacataat

SEQ ID NO: 1539686 - DNA, 25 bp, Homo sapien
cataaagcatgagcgcttgccacat

SEQ ID NO: 1539687 - DNA, 25 bp, Homo sapien
ccagcacataatgtcgaatttcaaa

SEQ ID NO: 1539688 - DNA, 25 bp, Homo sapien
tattcagtccctaatcatcttccta

SEQ ID NO: 1539689 - DNA, 25 bp, Homo sapien
actatgatcatatttaccattcatc

SEQ ID NO: 1539690 - DNA, 25 bp, Homo sapien
tatgatcatatttaccattcatccg

SEQ ID NO: 1539691 - DNA, 25 bp, Homo sapien
catatttaccattcatccgtaaatg

SEQ ID NO: 1539692 - DNA, 25 bp, Homo sapien
ccattcatccgtaaatgtaactttt

SEQ ID NO: 1539693 - DNA, 25 bp, Homo sapien
gcatacagaacatcttactttacag

SEQ ID NO: 1539694 - DNA, 25 bp, Homo sapien
gaatatgtctgacttaataagtgct

SEQ ID NO: 1539695 - DNA, 25 bp, Homo sapien
taaagaatttattgaagctccagat

SEQ ID NO: 1539696 - DNA, 25 bp, Homo sapien
tggcctgctacacatattttctgca

SEQ ID NO: 1539697 - DNA, 25 bp, Homo sapien
tagtgataccaagttgctatagttc

SEQ ID NO: 1539698 - DNA, 25 bp, Homo sapien
gtcaatggcaacatccctgaacatc

SEQ ID NO: 1539699 - DNA, 25 bp, Homo sapien
aagtcaatggcaacatccctgaaca

SEQ ID NO: 1539700 - DNA, 25 bp, Homo sapien
atacaaatctctctgagcagagtcc

SEQ ID NO: 1539701 - DNA, 25 bp, Homo sapien
taaatctgtgactgggcgtgtgaat

SEQ ID NO: 1539702 - DNA, 25 bp, Homo sapien
gtttcttagacaatcacaggttccc

SEQ ID NO: 1539703 - DNA, 25 bp, Homo sapien
tccacaccacttgggtcctctaggg

SEQ ID NO: 1539704 - DNA, 25 bp, Homo sapien
agagacagtttattccagcacaagg

SEQ ID NO: 1539705 - DNA, 25 bp, Homo sapien
ctgtttttcaacttgctggccttga

SEQ ID NO: 1539706 - DNA, 25 bp, Homo sapien
ttatttatatgtctgtttttcaact

SEQ ID NO: 1539707 - DNA, 25 bp, Homo sapien
gtttttcaacttgctggccttgaaa

SEQ ID NO: 1539708 - DNA, 25 bp, Homo sapien
ttttcaacttgctggccttgaaatc

SEQ ID NO: 1539709 - DNA, 25 bp, Homo sapien
aaacagataaacatactacatcaaa

SEQ ID NO: 1539710 - DNA, 25 bp, Homo sapien
taacagacaggagcctcgcctgcag

SEQ ID NO: 1539711 - DNA, 25 bp, Homo sapien
aagataagagagaataaaaaaattg

SEQ ID NO: 1539712 - DNA, 25 bp, Homo sapien
agataagagagaataaaaaaattga

SEQ ID NO: 1539713 - DNA, 25 bp, Homo sapien
gataagagagaataaaaaaattgag

SEQ ID NO: 1539714 - DNA, 25 bp, Homo sapien
cttttctggagataagtccttactt

SEQ ID NO: 1539715 - DNA, 25 bp, Homo sapien
tctggagataagtccttacttgcac

SEQ ID NO: 1539716 - DNA, 25 bp, Homo sapien
aagtccttacttgcacaccttgaag

SEQ ID NO: 1539717 - DNA, 25 bp, Homo sapien
gataagtccttacttgcacaccttg

SEQ ID NO: 1539718 - DNA, 25 bp, Homo sapien
ggaattggactcttcaagatcacag

SEQ ID NO: 1539719 - DNA, 25 bp, Homo sapien
cacagttttcaagtctgtcactcat

SEQ ID NO: 1539720 - DNA, 25 bp, Homo sapien
agatcacagttttcaagtctgtcac

SEQ ID NO: 1539721 - DNA, 25 bp, Homo sapien
tttggcttccaaataatccctggaa

SEQ ID NO: 1539722 - DNA, 25 bp, Homo sapien
cttgcctgaaatattccttctgatt

SEQ ID NO: 1539723 - DNA, 25 bp, Homo sapien
gaaatattccttctgattttcttgt

SEQ ID NO: 1539724 - DNA, 25 bp, Homo sapien
tccttctgattttcttgttgcttct

SEQ ID NO: 1539725 - DNA, 25 bp, Homo sapien
tctgattttcttgttgcttctccat

SEQ ID NO: 1539726 - DNA, 25 bp, Homo sapien
taagtatgctggttgaaaatggaca

SEQ ID NO: 1539727 - DNA, 25 bp, Homo sapien
tctcagtagaatgacatcttgaatg

SEQ ID NO: 1539728 - DNA, 25 bp, Homo sapien
tgttgtgttaggtgtgaggctcgtc

SEQ ID NO: 1539729 - DNA, 25 bp, Homo sapien
ggacattttgtcatatatgatcatc

SEQ ID NO: 1539730 - DNA, 25 bp, Homo sapien
tcatagggtttttcaccagtatgaa

SEQ ID NO: 1539731 - DNA, 25 bp, Homo sapien
atagggtttttcaccagtatgaata

SEQ ID NO: 1539732 - DNA, 25 bp, Homo sapien
attcatagggtttttcaccagtatg

SEQ ID NO: 1539733 - DNA, 25 bp, Homo sapien
cttcccgcattgcttacattcatag

SEQ ID NO: 1539734 - DNA, 25 bp, Homo sapien
aaaataagttgtgagctttgagtaa

SEQ ID NO: 1539735 - DNA, 25 bp, Homo sapien
tgagttgtgaatcacgactaaaggc

SEQ ID NO: 1539736 - DNA, 25 bp, Homo sapien
gatgtaaaataagttgtgagctttg

SEQ ID NO: 1539737 - DNA, 25 bp, Homo sapien
agtctctgatgaagactgagttgtg

SEQ ID NO: 1539738 - DNA, 25 bp, Homo sapien
tgtcgggtaagttgtgagctacgaa

SEQ ID NO: 1539739 - DNA, 25 bp, Homo sapien
gtctctggtgtagtgtaagttgtga

SEQ ID NO: 1539740 - DNA, 25 bp, Homo sapien
tggtgtagtgtaagttgtgaattct

SEQ ID NO: 1539741 - DNA, 25 bp, Homo sapien
ggtgtagtgtaagttgtgaattctg

SEQ ID NO: 1539742 - DNA, 25 bp, Homo sapien
tgatgttgcatcagtagtgagcccc

SEQ ID NO: 1539743 - DNA, 25 bp, Homo sapien
tgagccccgaataaaggcccttcca

SEQ ID NO: 1539744 - DNA, 25 bp, Homo sapien
taaggagtgagccacgattaaacgc

SEQ ID NO: 1539745 - DNA, 25 bp, Homo sapien
tgatgttgagaaagctgtgagccac

SEQ ID NO: 1539746 - DNA, 25 bp, Homo sapien
tctgagccacgactaaaggtttttc

SEQ ID NO: 1539747 - DNA, 25 bp, Homo sapien
gagtaagttctgagccacgactaaa

SEQ ID NO: 1539748 - DNA, 25 bp, Homo sapien
tgtgtgaattcgctcatgttgagta

SEQ ID NO: 1539749 - DNA, 25 bp, Homo sapien
gaattcgctcatgttgagtaagttc

SEQ ID NO: 1539750 - DNA, 25 bp, Homo sapien
gagtaagctgggaaccacgaataaa

SEQ ID NO: 1539751 - DNA, 25 bp, Homo sapien
tgttgagtaagctgggaaccacgaa

SEQ ID NO: 1539752 - DNA, 25 bp, Homo sapien
ctgatgttgtataagtagtaagcca

SEQ ID NO: 1539753 - DNA, 25 bp, Homo sapien
agtagtaagccacgcgcaaaggcct

SEQ ID NO: 1539754 - DNA, 25 bp, Homo sapien
cattctctgcattcatagggcttct

SEQ ID NO: 1539755 - DNA, 25 bp, Homo sapien
ttctctgcattcatagggcttctca

SEQ ID NO: 1539756 - DNA, 25 bp, Homo sapien
ctacattctctgcattcatagggct

SEQ ID NO: 1539757 - DNA, 25 bp, Homo sapien
tctctgcattcatagggcttctcac

SEQ ID NO: 1539758 - DNA, 25 bp, Homo sapien
ctgatgccgagaaagatgtgaactc

SEQ ID NO: 1539759 - DNA, 25 bp, Homo sapien
ctctgatgccgagaaagatgtgaac

SEQ ID NO: 1539760 - DNA, 25 bp, Homo sapien
tctgatgccgagaaagatgtgaact

SEQ ID NO: 1539761 - DNA, 25 bp, Homo sapien
tctctgatgccgagaaagatgtgaa

SEQ ID NO: 1539762 - DNA, 25 bp, Homo sapien
attccttacattgatatggtttctc

SEQ ID NO: 1539763 - DNA, 25 bp, Homo sapien
ttccttacattgatatggtttctca

SEQ ID NO: 1539764 - DNA, 25 bp, Homo sapien
tgatgttgagttagctgtgaaccac

SEQ ID NO: 1539765 - DNA, 25 bp, Homo sapien
catgtaaacttgtgagccatgacta

SEQ ID NO: 1539766 - DNA, 25 bp, Homo sapien
ttcaaaagatttctcactgatatga

SEQ ID NO: 1539767 - DNA, 25 bp, Homo sapien
ctaaagtcaatcccacattccttat

SEQ ID NO: 1539768 - DNA, 25 bp, Homo sapien
tatctgatgctgtgctttatgaggc

SEQ ID NO: 1539769 - DNA, 25 bp, Homo sapien
tgaggcaaatgtgcgcccatattca

SEQ ID NO: 1539770 - DNA, 25 bp, Homo sapien
tgtggtatgctacgttcaaggcacc

SEQ ID NO: 1539771 - DNA, 25 bp, Homo sapien
gaattctttgctgctaacaaccaga

SEQ ID NO: 1539772 - DNA, 25 bp, Homo sapien
tgtccacattgtaggcacggaaaaa

SEQ ID NO: 1539773 - DNA, 25 bp, Homo sapien
ggatttcgtaaatctcctactcata

SEQ ID NO: 1539774 - DNA, 25 bp, Homo sapien
ctatcttgttgacctgcaaggaagg

SEQ ID NO: 1539775 - DNA, 25 bp, Homo sapien
tcctactcatataaatatcacttct

SEQ ID NO: 1539776 - DNA, 25 bp, Homo sapien
tagtatggctgttccacaaagtcat

SEQ ID NO: 1539777 - DNA, 25 bp, Homo sapien
tgctccatgatccataacacccaga

SEQ ID NO: 1539778 - DNA, 25 bp, Homo sapien
caagcagaccagagctagtatggct

SEQ ID NO: 1539779 - DNA, 25 bp, Homo sapien
catgatccataacacccagatacca

SEQ ID NO: 1539780 - DNA, 25 bp, Homo sapien
ttgtcaataacagaactacaatagc

SEQ ID NO: 1539781 - DNA, 25 bp, Homo sapien
tattgtcaataacagaactacaata

SEQ ID NO: 1539782 - DNA, 25 bp, Homo sapien
caataacagaactacaatagcatca

SEQ ID NO: 1539783 - DNA, 25 bp, Homo sapien
gtcaataacagaactacaatagcat

SEQ ID NO: 1539784 - DNA, 25 bp, Homo sapien
cagagccagtctgaaccgtttgtgg

SEQ ID NO: 1539785 - DNA, 25 bp, Homo sapien
taaaagctggtcaaagctagccata

SEQ ID NO: 1539786 - DNA, 25 bp, Homo sapien
gatgtagcctgttgtgaacccaaag

SEQ ID NO: 1539787 - DNA, 25 bp, Homo sapien
tgtggccagtcaaaaccagtccaag

SEQ ID NO: 1539788 - DNA, 25 bp, Homo sapien
tacttttattacacctctagcagga

SEQ ID NO: 1539789 - DNA, 25 bp, Homo sapien
tgtgtcacacttcatcaattccgga

SEQ ID NO: 1539790 - DNA, 25 bp, Homo sapien
ccctcaggcaatggcggtgacttac

SEQ ID NO: 1539791 - DNA, 25 bp, Homo sapien
tgtgggaatgccctcaatacggtgg

SEQ ID NO: 1539792 - DNA, 25 bp, Homo sapien
tatgtatacagacgtaaacctcaga

SEQ ID NO: 1539793 - DNA, 25 bp, Homo sapien
cagcaccgtgtcttgtgaactccca

SEQ ID NO: 1539794 - DNA, 25 bp, Homo sapien
tcagaatgtatgttgagtccccact

SEQ ID NO: 1539795 - DNA, 25 bp, Homo sapien
tcacgggccctcagcactttgtgtt

SEQ ID NO: 1539796 - DNA, 25 bp, Homo sapien
ctttgggatgagtgattgaggtttg

SEQ ID NO: 1539797 - DNA, 25 bp, Homo sapien
gaggtttgggggtcagtgatgggag

SEQ ID NO: 1539798 - DNA, 25 bp, Homo sapien
ttgggatgagtgattgaggtttggg

SEQ ID NO: 1539799 - DNA, 25 bp, Homo sapien
ttgaggtttgggggtcagtgatggg

SEQ ID NO: 1539800 - DNA, 25 bp, Homo sapien
gattgcggtttcaggcttcggtgat

SEQ ID NO: 1539801 - DNA, 25 bp, Homo sapien
ggttctgtggcgtccgttgttgatt

SEQ ID NO: 1539802 - DNA, 25 bp, Homo sapien
tgattgtgacggatttctcaggtca

SEQ ID NO: 1539803 - DNA, 25 bp, Homo sapien
gagttagtgattgcggtttcaggct

SEQ ID NO: 1539804 - DNA, 25 bp, Homo sapien
gtggagccagtaatagggggtgtcg

SEQ ID NO: 1539805 - DNA, 25 bp, Homo sapien
gagccagtaatagggggtgtcgagg

SEQ ID NO: 1539806 - DNA, 25 bp, Homo sapien
cagtaatagggggtgtcgaggttgc

SEQ ID NO: 1539807 - DNA, 25 bp, Homo sapien
ctgtggagccagtaatagggggtgt

SEQ ID NO: 1539808 - DNA, 25 bp, Homo sapien
ggcttttttgccgctggtgtcagga

SEQ ID NO: 1539809 - DNA, 25 bp, Homo sapien
ccaataccgataaatctttgaggtg

SEQ ID NO: 1539810 - DNA, 25 bp, Homo sapien
gtgtcaggagtattttcatattcca

SEQ ID NO: 1539811 - DNA, 25 bp, Homo sapien
gtgattttggttgatcacgattggg

SEQ ID NO: 1539812 - DNA, 25 bp, Homo sapien
gcttcagtgaggctactgtgcccat

SEQ ID NO: 1539813 - DNA, 25 bp, Homo sapien
agcttcagtgaggctactgtgccca

SEQ ID NO: 1539814 - DNA, 25 bp, Homo sapien
tcggtggaggacagtcgtaagggac

SEQ ID NO: 1539815 - DNA, 25 bp, Homo sapien
accattggcatccaccctagtactt

SEQ ID NO: 1539816 - DNA, 25 bp, Homo sapien
ggcatccaccctagtactttcaatc

SEQ ID NO: 1539817 - DNA, 25 bp, Homo sapien
gaggacagtcgtaagggacccagtg

SEQ ID NO: 1539818 - DNA, 25 bp, Homo sapien
ttccctggcattccacaaggtctcc

SEQ ID NO: 1539819 - DNA, 25 bp, Homo sapien
tggcattccacaaggtctcccaact

SEQ ID NO: 1539820 - DNA, 25 bp, Homo sapien
cagcctcctcttggtcacagtggca

SEQ ID NO: 1539821 - DNA, 25 bp, Homo sapien
cctcctcttggtcacagtggcatac

SEQ ID NO: 1539822 - DNA, 25 bp, Homo sapien
gaaactacattgacactatcggcca

SEQ ID NO: 1539823 - DNA, 25 bp, Homo sapien
tgcctctgaaccataaagtatgcag

SEQ ID NO: 1539824 - DNA, 25 bp, Homo sapien
gataaagagccgtttcactgtccca

SEQ ID NO: 1539825 - DNA, 25 bp, Homo sapien
taatcctctgtgtttcgcctactcc

SEQ ID NO: 1539826 - DNA, 25 bp, Homo sapien
tacttgtgactgagttgaagcccag

SEQ ID NO: 1539827 - DNA, 25 bp, Homo sapien
tgcccgttgcaaagagcacaattct

SEQ ID NO: 1539828 - DNA, 25 bp, Homo sapien
tatgaaaaccaaccccaccatatgt

SEQ ID NO: 1539829 - DNA, 25 bp, Homo sapien
ttatctgtggcttgtccgtcatgtc

SEQ ID NO: 1539830 - DNA, 25 bp, Homo sapien
tgtctcccggtagtgataacctgct

SEQ ID NO: 1539831 - DNA, 25 bp, Homo sapien
cggtagtgataacctgctttattca

SEQ ID NO: 1539832 - DNA, 25 bp, Homo sapien
tcccggtagtgataacctgctttat

SEQ ID NO: 1539833 - DNA, 25 bp, Homo sapien
tgtgtctcccggtagtgataacctg

SEQ ID NO: 1539834 - DNA, 25 bp, Homo sapien
ctgagttgaaagttcagttctttcc

SEQ ID NO: 1539835 - DNA, 25 bp, Homo sapien
tgagttgaaagttcagttctttcca

SEQ ID NO: 1539836 - DNA, 25 bp, Homo sapien
gagttgaaagttcagttctttccat

SEQ ID NO: 1539837 - DNA, 25 bp, Homo sapien
tcacgttttaatgccgagaggtctc

SEQ ID NO: 1539838 - DNA, 25 bp, Homo sapien
cgaaggctatttcgccgctggcgtc

SEQ ID NO: 1539839 - DNA, 25 bp, Homo sapien
gctggcgtcaggactattttcacgt

SEQ ID NO: 1539840 - DNA, 25 bp, Homo sapien
agtggaagtggtccccgaaggctat

SEQ ID NO: 1539841 - DNA, 25 bp, Homo sapien
tggccctgcacgctgaagacaatct

SEQ ID NO: 1539842 - DNA, 25 bp, Homo sapien
aatacagtccggagtaggaccgcgc

SEQ ID NO: 1539843 - DNA, 25 bp, Homo sapien
cagatgttgactagagccgcaagga

SEQ ID NO: 1539844 - DNA, 25 bp, Homo sapien
tcagagtgaaactgccgtaggacgc

SEQ ID NO: 1539845 - DNA, 25 bp, Homo sapien
ggccgctcaccgcgcacttccccta

SEQ ID NO: 1539846 - DNA, 25 bp, Homo sapien
gcctgcaagacccaggccgctcacc

SEQ ID NO: 1539847 - DNA, 25 bp, Homo sapien
cgggccccagccgagcctgcaagac

SEQ ID NO: 1539848 - DNA, 25 bp, Homo sapien
ccagccgagcctgcaagacccaggc

SEQ ID NO: 1539849 - DNA, 25 bp, Homo sapien
atgcccaacactccagaccagcctg

SEQ ID NO: 1539850 - DNA, 25 bp, Homo sapien
aatgtcacgcaaagttacacagcca

SEQ ID NO: 1539851 - DNA, 25 bp, Homo sapien
gaggatatacaatcacacccgcgca

SEQ ID NO: 1539852 - DNA, 25 bp, Homo sapien
gatttactcagtaaggcatccagta

SEQ ID NO: 1539853 - DNA, 25 bp, Homo sapien
ggcacagtcacataaggtcacactc

SEQ ID NO: 1539854 - DNA, 25 bp, Homo sapien
ctgggcaacaacagcgaaactccgc

SEQ ID NO: 1539855 - DNA, 25 bp, Homo sapien
tagcagggcgtggtgacacacgcct

SEQ ID NO: 1539856 - DNA, 25 bp, Homo sapien
gtaatcccagctactaggaaggctg

SEQ ID NO: 1539857 - DNA, 25 bp, Homo sapien
aggcaggagaattgcttgaaccggg

SEQ ID NO: 1539858 - DNA, 25 bp, Homo sapien
taactctcttgacgagagcagagct

SEQ ID NO: 1539859 - DNA, 25 bp, Homo sapien
ctctgggtaactctcttgacgagag

SEQ ID NO: 1539860 - DNA, 25 bp, Homo sapien
gggtaactctcttgacgagagcaga

SEQ ID NO: 1539861 - DNA, 25 bp, Homo sapien
tctcttgacgagagcagagctgaag

SEQ ID NO: 1539862 - DNA, 25 bp, Homo sapien
cttgggcaacagagtgagactccgt

SEQ ID NO: 1539863 - DNA, 25 bp, Homo sapien
gcagtgagctgagatcatgccactg

SEQ ID NO: 1539864 - DNA, 25 bp, Homo sapien
cgcttgaacccggaaagcagaggct

SEQ ID NO: 1539865 - DNA, 25 bp, Homo sapien
cactccagcttgggcaacagagtga

SEQ ID NO: 1539866 - DNA, 25 bp, Homo sapien
tcagggcacagaggccttttagagc

SEQ ID NO: 1539867 - DNA, 25 bp, Homo sapien
gaagtataaaaagggactcagtctc

SEQ ID NO: 1539868 - DNA, 25 bp, Homo sapien
gacagggagggaggatcagtcaggg

SEQ ID NO: 1539869 - DNA, 25 bp, Homo sapien
tctcatgatcaacagcttaggaaac

SEQ ID NO: 1539870 - DNA, 25 bp, Homo sapien
tgcagcaagacaaggactcagattc

SEQ ID NO: 1539871 - DNA, 25 bp, Homo sapien
caaacctcaggctttagctgcagca

SEQ ID NO: 1539872 - DNA, 25 bp, Homo sapien
gattgagctattatggtctgccctg

SEQ ID NO: 1539873 - DNA, 25 bp, Homo sapien
tactatgacccaagactgagctacc

SEQ ID NO: 1539874 - DNA, 25 bp, Homo sapien
gttagtcttccttgaggccgttctc

SEQ ID NO: 1539875 - DNA, 25 bp, Homo sapien
tagtattgcagatggttagtcttcc

SEQ ID NO: 1539876 - DNA, 25 bp, Homo sapien
cttctagtattgcagatggttagtc

SEQ ID NO: 1539877 - DNA, 25 bp, Homo sapien
ggcttctagtattgcagatggttag

SEQ ID NO: 1539878 - DNA, 25 bp, Homo sapien
aaggcaagaaaaagcatcaactcac

SEQ ID NO: 1539879 - DNA, 25 bp, Homo sapien
gaaggcaagaaaaagcatcaactca

SEQ ID NO: 1539880 - DNA, 25 bp, Homo sapien
gtcaggaaggcaagaaaaagcatca

SEQ ID NO: 1539881 - DNA, 25 bp, Homo sapien
aatgtcaggaaggcaagaaaaagca

SEQ ID NO: 1539882 - DNA, 25 bp, Homo sapien
attgaaaccagattgccgtagttct

SEQ ID NO: 1539883 - DNA, 25 bp, Homo sapien
cattgaaaccagattgccgtagttc

SEQ ID NO: 1539884 - DNA, 25 bp, Homo sapien
ccattgaaaccagattgccgtagtt

SEQ ID NO: 1539885 - DNA, 25 bp, Homo sapien
gaatcactggtacagatgcccttac

SEQ ID NO: 1539886 - DNA, 25 bp, Homo sapien
gggaatcactggtacagatgccctt

SEQ ID NO: 1539887 - DNA, 25 bp, Homo sapien
tgggaatcactggtacagatgccct

SEQ ID NO: 1539888 - DNA, 25 bp, Homo sapien
ggaatcactggtacagatgccctta

SEQ ID NO: 1539889 - DNA, 25 bp, Homo sapien
gagatccagtcccttgatgatcaca

SEQ ID NO: 1539890 - DNA, 25 bp, Homo sapien
gcccactggagttgccaatttccca

SEQ ID NO: 1539891 - DNA, 25 bp, Homo sapien
aagagatgccactacaggaacagcc

SEQ ID NO: 1539892 - DNA, 25 bp, Homo sapien
gaagatgaagcttcaaccacagccc

SEQ ID NO: 1539893 - DNA, 25 bp, Homo sapien
tcttgtaagctctctgccaaccatc

SEQ ID NO: 1539894 - DNA, 25 bp, Homo sapien
tgtaagctctctgccaaccatccag

SEQ ID NO: 1539895 - DNA, 25 bp, Homo sapien
cacaggcctcttgtaagctctctgc

SEQ ID NO: 1539896 - DNA, 25 bp, Homo sapien
ggcctcttgtaagctctctgccaac

SEQ ID NO: 1539897 - DNA, 25 bp, Homo sapien
cctctggcataattctatttcataa

SEQ ID NO: 1539898 - DNA, 25 bp, Homo sapien
tctccctctggcataattctatttc

SEQ ID NO: 1539899 - DNA, 25 bp, Homo sapien
atctccctctggcataattctattt

SEQ ID NO: 1539900 - DNA, 25 bp, Homo sapien
tatctccctctggcataattctatt

SEQ ID NO: 1539901 - DNA, 25 bp, Homo sapien
gatatcccagttgttttgcaaggtg

SEQ ID NO: 1539902 - DNA, 25 bp, Homo sapien
caaaactggagtactcaaggccatg

SEQ ID NO: 1539903 - DNA, 25 bp, Homo sapien
caggagtgaatatttcttgactaaa

SEQ ID NO: 1539904 - DNA, 25 bp, Homo sapien
gcaaggtggcttctatattccaaaa

SEQ ID NO: 1539905 - DNA, 25 bp, Homo sapien
tgaattcgtgcatgctgaaaaagtt

SEQ ID NO: 1539906 - DNA, 25 bp, Homo sapien
tgccgagtaacatgtgaaccacaac

SEQ ID NO: 1539907 - DNA, 25 bp, Homo sapien
gaaaggtatgagctacaactgaagg

SEQ ID NO: 1539908 - DNA, 25 bp, Homo sapien
ttgatggagagtaaggaatgtctgt

SEQ ID NO: 1539909 - DNA, 25 bp, Homo sapien
atgttgacgaagctgtgagctctga

SEQ ID NO: 1539910 - DNA, 25 bp, Homo sapien
tgttgaacaagctttgagctctggg

SEQ ID NO: 1539911 - DNA, 25 bp, Homo sapien
ttagtaagtgctgagccactactaa

SEQ ID NO: 1539912 - DNA, 25 bp, Homo sapien
tagtaagtgctgagccactactaaa

SEQ ID NO: 1539913 - DNA, 25 bp, Homo sapien
gctggaaaagttgtgagttctgagt

SEQ ID NO: 1539914 - DNA, 25 bp, Homo sapien
ctggaaaagttgtgagttctgagta

SEQ ID NO: 1539915 - DNA, 25 bp, Homo sapien
tggaaaagttgtgagttctgagtaa

SEQ ID NO: 1539916 - DNA, 25 bp, Homo sapien
cttttcaccagtgtgaattctcaga

SEQ ID NO: 1539917 - DNA, 25 bp, Homo sapien
tttcaccagtgtgaattctcagatg

SEQ ID NO: 1539918 - DNA, 25 bp, Homo sapien
agttatagggcttttcaccagtgtg

SEQ ID NO: 1539919 - DNA, 25 bp, Homo sapien
ggcttttcaccagtgtgaattctca

SEQ ID NO: 1539920 - DNA, 25 bp, Homo sapien
tattagtatgaattccctgatgacg

SEQ ID NO: 1539921 - DNA, 25 bp, Homo sapien
atgaattccctgatgacgaatgaga

SEQ ID NO: 1539922 - DNA, 25 bp, Homo sapien
tgacgaatgagatccgagccactac

SEQ ID NO: 1539923 - DNA, 25 bp, Homo sapien
tccctgatgacgaatgagatccgag

SEQ ID NO: 1539924 - DNA, 25 bp, Homo sapien
tagactccgaatttataacctggaa

SEQ ID NO: 1539925 - DNA, 25 bp, Homo sapien
tataatgtgtcaccaagaaagtaga

SEQ ID NO: 1539926 - DNA, 25 bp, Homo sapien
gagggaatgtcactttagactccga

SEQ ID NO: 1539927 - DNA, 25 bp, Homo sapien
cagctggcatcggtatatgactggg

SEQ ID NO: 1539928 - DNA, 25 bp, Homo sapien
aaataccactaacagccaggggcgg

SEQ ID NO: 1539929 - DNA, 25 bp, Homo sapien
gccttattatagatgcctagacata

SEQ ID NO: 1539930 - DNA, 25 bp, Homo sapien
ttcacagcaatccaatacatacagc

SEQ ID NO: 1539931 - DNA, 25 bp, Homo sapien
aaacctgtattatgtgataacagtt

SEQ ID NO: 1539932 - DNA, 25 bp, Homo sapien
catatatagccatttcaatttctca

SEQ ID NO: 1539933 - DNA, 25 bp, Homo sapien
ttaaagtgtatagttgagtgacctg

SEQ ID NO: 1539934 - DNA, 25 bp, Homo sapien
caaaattgtacaacctttacccatg

SEQ ID NO: 1539935 - DNA, 25 bp, Homo sapien
tggaatcactaaactttgtctcatt

SEQ ID NO: 1539936 - DNA, 25 bp, Homo sapien
gctatctcagtctatgtcctagaag

SEQ ID NO: 1539937 - DNA, 25 bp, Homo sapien
tggttcctgagttcagacactaaga

SEQ ID NO: 1539938 - DNA, 25 bp, Homo sapien
tactgctagaaaaaagggttcatct

SEQ ID NO: 1539939 - DNA, 25 bp, Homo sapien
tcccatcctgtcaaatactgctaga

SEQ ID NO: 1539940 - DNA, 25 bp, Homo sapien
gggaggaattggagcctgatggaag

SEQ ID NO: 1539941 - DNA, 25 bp, Homo sapien
gaggaattggagcctgatggaagcg

SEQ ID NO: 1539942 - DNA, 25 bp, Homo sapien
agggaggaattggagcctgatggaa

SEQ ID NO: 1539943 - DNA, 25 bp, Homo sapien
ggaggaattggagcctgatggaagc

SEQ ID NO: 1539944 - DNA, 25 bp, Homo sapien
ccatgttaggcaggcgctcagccga

SEQ ID NO: 1539945 - DNA, 25 bp, Homo sapien
gggccccagtttctgccgtggcgat

SEQ ID NO: 1539946 - DNA, 25 bp, Homo sapien
tggccgattgaaggccaggactccc

SEQ ID NO: 1539947 - DNA, 25 bp, Homo sapien
catcccaaggttgcggaaccactat

SEQ ID NO: 1539948 - DNA, 25 bp, Homo sapien
gggaaactacatcagccccagtccg

SEQ ID NO: 1539949 - DNA, 25 bp, Homo sapien
taatctccagatcctatgtgtcaga

SEQ ID NO: 1539950 - DNA, 25 bp, Homo sapien
cctatgtgtcagaggtcgggaaact

SEQ ID NO: 1539951 - DNA, 25 bp, Homo sapien
tcgggaaactacatcagccccagtc

SEQ ID NO: 1539952 - DNA, 25 bp, Homo sapien
gaagctcctaatgatcttgagaggt

SEQ ID NO: 1539953 - DNA, 25 bp, Homo sapien
ctgcatttcttcaattaacagggca

SEQ ID NO: 1539954 - DNA, 25 bp, Homo sapien
ggcaaccgatgtaaacctggaaatc

SEQ ID NO: 1539955 - DNA, 25 bp, Homo sapien
aaacctggaaatcagtcaccctcgg

SEQ ID NO: 1539956 - DNA, 25 bp, Homo sapien
catttcttcaattaacagggcaaag

SEQ ID NO: 1539957 - DNA, 25 bp, Homo sapien
caaatgttcaagcttgcagtgggcc

SEQ ID NO: 1539958 - DNA, 25 bp, Homo sapien
tcaaatgttcaagcttgcagtgggc

SEQ ID NO: 1539959 - DNA, 25 bp, Homo sapien
atcaaatgttcaagcttgcagtggg

SEQ ID NO: 1539960 - DNA, 25 bp, Homo sapien
gtgctgcccaaaaccatagcttaag

SEQ ID NO: 1539961 - DNA, 25 bp, Homo sapien
tccgtttgggttacatgtagacttc

SEQ ID NO: 1539962 - DNA, 25 bp, Homo sapien
tggtgtaactattgaaaggtgagcc

SEQ ID NO: 1539963 - DNA, 25 bp, Homo sapien
gagacactgtgggactttgccctga

SEQ ID NO: 1539964 - DNA, 25 bp, Homo sapien
tgtcttctgggagacatagtgggaa

SEQ ID NO: 1539965 - DNA, 25 bp, Homo sapien
aatgaagcaatcacacttccatccc

SEQ ID NO: 1539966 - DNA, 25 bp, Homo sapien
tctgtccacaggcactgtagtctgt

SEQ ID NO: 1539967 - DNA, 25 bp, Homo sapien
gctgcatcagaagagacgcacacgc

SEQ ID NO: 1539968 - DNA, 25 bp, Homo sapien
atgctaggggtgctaagctgacata

SEQ ID NO: 1539969 - DNA, 25 bp, Homo sapien
gatgctaggggtgctaagctgacat

SEQ ID NO: 1539970 - DNA, 25 bp, Homo sapien
tgctaggggtgctaagctgacatac

SEQ ID NO: 1539971 - DNA, 25 bp, Homo sapien
aggaccacactatgatctaatttag

SEQ ID NO: 1539972 - DNA, 25 bp, Homo sapien
ctgggtgatttataagcaagagttc

SEQ ID NO: 1539973 - DNA, 25 bp, Homo sapien
catctggtgaaggtctcactgtgcc

SEQ ID NO: 1539974 - DNA, 25 bp, Homo sapien
tcactgtgccgtcctatggtggaag

SEQ ID NO: 1539975 - DNA, 25 bp, Homo sapien
tgggtctcactcctagagtttcttc

SEQ ID NO: 1539976 - DNA, 25 bp, Homo sapien
ctgaaagacatgcttcaagtaagag

SEQ ID NO: 1539977 - DNA, 25 bp, Homo sapien
tgaaagacatgcttcaagtaagagg

SEQ ID NO: 1539978 - DNA, 25 bp, Homo sapien
tctgaaagacatgcttcaagtaaga

SEQ ID NO: 1539979 - DNA, 25 bp, Homo sapien
ctgaataccatccatagcctgcagt

SEQ ID NO: 1539980 - DNA, 25 bp, Homo sapien
gaataccatccatagcctgcagtag

SEQ ID NO: 1539981 - DNA, 25 bp, Homo sapien
agatgtttacacaaactgcactgac

SEQ ID NO: 1539982 - DNA, 25 bp, Homo sapien
gtttacacaaactgcactgacactg

SEQ ID NO: 1539983 - DNA, 25 bp, Homo sapien
caggtcagtgaagaacagccggctt

SEQ ID NO: 1539984 - DNA, 25 bp, Homo sapien
cagggttcaaggtaagaccaggtca

SEQ ID NO: 1539985 - DNA, 25 bp, Homo sapien
gaaggtatgatatgaggtgaaaaaa

SEQ ID NO: 1539986 - DNA, 25 bp, Homo sapien
aaatggccataatgtgcccttagaa

SEQ ID NO: 1539987 - DNA, 25 bp, Homo sapien
gctttaacgagtcctatttcccata

SEQ ID NO: 1539988 - DNA, 25 bp, Homo sapien
cttagctggcttgagatgtgaaaat

SEQ ID NO: 1539989 - DNA, 25 bp, Homo sapien
cctatttcccatactcttagctggc

SEQ ID NO: 1539990 - DNA, 25 bp, Homo sapien
ctgtgctttaacgagtcctatttcc

SEQ ID NO: 1539991 - DNA, 25 bp, Homo sapien
cgaggatgtgggatcccgagatcat

SEQ ID NO: 1539992 - DNA, 25 bp, Homo sapien
gacatatgtgtataaaggcctttaa

SEQ ID NO: 1539993 - DNA, 25 bp, Homo sapien
tgactttgccaaagatttaatatcc

SEQ ID NO: 1539994 - DNA, 25 bp, Homo sapien
aaatccctatgtgtagacatatgtg

SEQ ID NO: 1539995 - DNA, 25 bp, Homo sapien
aatcagccaagagccctattccagc

SEQ ID NO: 1539996 - DNA, 25 bp, Homo sapien
caaggtttgcatgttgagtatcagc

SEQ ID NO: 1539997 - DNA, 25 bp, Homo sapien
ttaatacgaagtgagggcctggcct

SEQ ID NO: 1539998 - DNA, 25 bp, Homo sapien
tccaacatcccttcgcctggagaaa

SEQ ID NO: 1539999 - DNA, 25 bp, Homo sapien
ccccggatgccggtggtggtggcat

SEQ ID NO: 1540000 - DNA, 25 bp, Homo sapien
ccgtttgacagtcctccccggatgc

SEQ ID NO: 1540001 - DNA, 25 bp, Homo sapien
cagtcctccccggatgccggtggtg

SEQ ID NO: 1540002 - DNA, 25 bp, Homo sapien
tttgacagtcctccccggatgccgg

SEQ ID NO: 1540003 - DNA, 25 bp, Homo sapien
caagttctaggccaggttaagcagc

SEQ ID NO: 1540004 - DNA, 25 bp, Homo sapien
cacagtgtgtaaccaattggaggcc

SEQ ID NO: 1540005 - DNA, 25 bp, Homo sapien
tatcccatccaagtggagccaaagg

SEQ ID NO: 1540006 - DNA, 25 bp, Homo sapien
tagacatgatagcaactgtggtccg

SEQ ID NO: 1540007 - DNA, 25 bp, Homo sapien
caaggctgagtcataagaggcactg

SEQ ID NO: 1540008 - DNA, 25 bp, Homo sapien
cataggtttgcagccctcaggcatc

SEQ ID NO: 1540009 - DNA, 25 bp, Homo sapien
taagaagttccaagtgctgtgagct

SEQ ID NO: 1540010 - DNA, 25 bp, Homo sapien
tagtctccaaaggtgattgctgcag

SEQ ID NO: 1540011 - DNA, 25 bp, Homo sapien
acgtgatgaccacaggtttgctggg

SEQ ID NO: 1540012 - DNA, 25 bp, Homo sapien
caaataatagcaggcagatgtgaag

SEQ ID NO: 1540013 - DNA, 25 bp, Homo sapien
tttacttctgctgggacaaattgca

SEQ ID NO: 1540014 - DNA, 25 bp, Homo sapien
tactggccaagatgagataagcaca

SEQ ID NO: 1540015 - DNA, 25 bp, Homo sapien
aactggcgaggtcctgtccagcgca

SEQ ID NO: 1540016 - DNA, 25 bp, Homo sapien
agcccgggcacagagcctgttactg

SEQ ID NO: 1540017 - DNA, 25 bp, Homo sapien
acaattctttcggtaactggcgagg

SEQ ID NO: 1540018 - DNA, 25 bp, Homo sapien
acagagcctgttactgccagacgct

SEQ ID NO: 1540019 - DNA, 25 bp, Homo sapien
caaggactcctctcgtgaaaggtgg

SEQ ID NO: 1540020 - DNA, 25 bp, Homo sapien
ttgtcacagccggaagaaaagccgc

SEQ ID NO: 1540021 - DNA, 25 bp, Homo sapien
gacggtcgcttttaggtgtccacac

SEQ ID NO: 1540022 - DNA, 25 bp, Homo sapien
tcagcgcggttcagatctagacggt

SEQ ID NO: 1540023 - DNA, 25 bp, Homo sapien
atttcagcgctggaacgtctacccg

SEQ ID NO: 1540024 - DNA, 25 bp, Homo sapien
gctgtttcctgcactttggtggaga

SEQ ID NO: 1540025 - DNA, 25 bp, Homo sapien
tcaaaaaacaggctagtgccaggcg

SEQ ID NO: 1540026 - DNA, 25 bp, Homo sapien
agagacccaactttgtgcaccgcca

SEQ ID NO: 1540027 - DNA, 25 bp, Homo sapien
gaagggacgctctcggttagcctca

SEQ ID NO: 1540028 - DNA, 25 bp, Homo sapien
caatggatgtgcaggttcgctccac

SEQ ID NO: 1540029 - DNA, 25 bp, Homo sapien
gaccaatgggaaacgcgatcagatg

SEQ ID NO: 1540030 - DNA, 25 bp, Homo sapien
caataagaagcgcttgggcctgacc

SEQ ID NO: 1540031 - DNA, 25 bp, Homo sapien
ctgtgcactcggacgccatctgcag

SEQ ID NO: 1540032 - DNA, 25 bp, Homo sapien
cagtcctagttcccgccgtggcgat

SEQ ID NO: 1540033 - DNA, 25 bp, Homo sapien
ggccgggacgcagccagtcctagtt

SEQ ID NO: 1540034 - DNA, 25 bp, Homo sapien
cacgtccggtgggcgcttggccgaa

SEQ ID NO: 1540035 - DNA, 25 bp, Homo sapien
caggaaactacatcacagtcagtgc

SEQ ID NO: 1540036 - DNA, 25 bp, Homo sapien
aactacatcacagtcagtgcgggcg

SEQ ID NO: 1540037 - DNA, 25 bp, Homo sapien
gaaactacatcacagtcagtgcggg

SEQ ID NO: 1540038 - DNA, 25 bp, Homo sapien
ctacatcacagtcagtgcgggcgcc

SEQ ID NO: 1540039 - DNA, 25 bp, Homo sapien
gaacagcaaaagaagctcctgattc

SEQ ID NO: 1540040 - DNA, 25 bp, Homo sapien
ctctagagagacttgttccaaatct

SEQ ID NO: 1540041 - DNA, 25 bp, Homo sapien
caatctctagagagacttgttccaa

SEQ ID NO: 1540042 - DNA, 25 bp, Homo sapien
ttcaatctctagagagacttgttcc

SEQ ID NO: 1540043 - DNA, 25 bp, Homo sapien
tctctagagagacttgttccaaatc

SEQ ID NO: 1540044 - DNA, 25 bp, Homo sapien
tccctgcggcgggttccaggcgcag

SEQ ID NO: 1540045 - DNA, 25 bp, Homo sapien
ctccctgcggcgggttccaggcgca

SEQ ID NO: 1540046 - DNA, 25 bp, Homo sapien
cctgcggcgggttccaggcgcagct

SEQ ID NO: 1540047 - DNA, 25 bp, Homo sapien
tcctccctgcggcgggttccaggcg

SEQ ID NO: 1540048 - DNA, 25 bp, Homo sapien
gtgagcagagatcgccatactacac

SEQ ID NO: 1540049 - DNA, 25 bp, Homo sapien
agcagagatcgccatactacactcc

SEQ ID NO: 1540050 - DNA, 25 bp, Homo sapien
cagcctgggcaacagagcgagactc

SEQ ID NO: 1540051 - DNA, 25 bp, Homo sapien
gcagagatcgccatactacactcca

SEQ ID NO: 1540052 - DNA, 25 bp, Homo sapien
ttctattggaaagcactgctctgga

SEQ ID NO: 1540053 - DNA, 25 bp, Homo sapien
tgcaacctctgcctccgggttcaag

SEQ ID NO: 1540054 - DNA, 25 bp, Homo sapien
gtgaagtggcaagatcacggctcac

SEQ ID NO: 1540055 - DNA, 25 bp, Homo sapien
ggagttttgctctgtgggccaggct

SEQ ID NO: 1540056 - DNA, 25 bp, Homo sapien
tggagtgaagtggcaagatcacggc

SEQ ID NO: 1540057 - DNA, 25 bp, Homo sapien
tcaaaccacagcagtcctcatgtaa

SEQ ID NO: 1540058 - DNA, 25 bp, Homo sapien
gtgtgcctggcactctggaatccct

SEQ ID NO: 1540059 - DNA, 25 bp, Homo sapien
gtgcctggcactctggaatccctct

SEQ ID NO: 1540060 - DNA, 25 bp, Homo sapien
gtaaaccttccagaaaatctgtgtg

SEQ ID NO: 1540061 - DNA, 25 bp, Homo sapien
cagatacccaagctgggtggtgcga

SEQ ID NO: 1540062 - DNA, 25 bp, Homo sapien
tgctagacaccacagatacgtaatg

SEQ ID NO: 1540063 - DNA, 25 bp, Homo sapien
agaatggacctgaaccctgtacggg

SEQ ID NO: 1540064 - DNA, 25 bp, Homo sapien
gcatgcatcacccagtagagacaaa

SEQ ID NO: 1540065 - DNA, 25 bp, Homo sapien
cacaacctggtttatcacctatagc

SEQ ID NO: 1540066 - DNA, 25 bp, Homo sapien
tgggcacaatctgcccttagaaaga

SEQ ID NO: 1540067 - DNA, 25 bp, Homo sapien
ccaggaaaagctggaacctcccaga

SEQ ID NO: 1540068 - DNA, 25 bp, Homo sapien
taatttatggagtacaatctaattc

SEQ ID NO: 1540069 - DNA, 25 bp, Homo sapien
gtgcagaggtgtgggaaagacctta

SEQ ID NO: 1540070 - DNA, 25 bp, Homo sapien
aacgcgggtgcacgctgcggatcct

SEQ ID NO: 1540071 - DNA, 25 bp, Homo sapien
acgctgcggatcctgaagccgaaag

SEQ ID NO: 1540072 - DNA, 25 bp, Homo sapien
cagaggtgtgggaaagaccttaaga

SEQ ID NO: 1540073 - DNA, 25 bp, Homo sapien
tagttctgagatagctctgcggctc

SEQ ID NO: 1540074 - DNA, 25 bp, Homo sapien
taagagtggcctaggtggaaacacc

SEQ ID NO: 1540075 - DNA, 25 bp, Homo sapien
taaccctgtgggctcgaatgaaagg

SEQ ID NO: 1540076 - DNA, 25 bp, Homo sapien
ccaagcaacggagtgagggtttatc

SEQ ID NO: 1540077 - DNA, 25 bp, Homo sapien
gagaagggcaaagtctcagaagaca

SEQ ID NO: 1540078 - DNA, 25 bp, Homo sapien
aagggcaaagtctcagaagacagat

SEQ ID NO: 1540079 - DNA, 25 bp, Homo sapien
gaagggcaaagtctcagaagacaga

SEQ ID NO: 1540080 - DNA, 25 bp, Homo sapien
ctggagaagggcaaagtctcagaag

SEQ ID NO: 1540081 - DNA, 25 bp, Homo sapien
ctgtggccattttcctggtctcctg

SEQ ID NO: 1540082 - DNA, 25 bp, Homo sapien
tttcctggtctcctgagtgctcttc

SEQ ID NO: 1540083 - DNA, 25 bp, Homo sapien
tcttttttggctctcaggagccctg

SEQ ID NO: 1540084 - DNA, 25 bp, Homo sapien
ttttggctctcaggagccctgtggc

SEQ ID NO: 1540085 - DNA, 25 bp, Homo sapien
tgagacagccctacttctaggaggc

SEQ ID NO: 1540086 - DNA, 25 bp, Homo sapien
tctccaacttaacaaaccagtcagg

SEQ ID NO: 1540087 - DNA, 25 bp, Homo sapien
aaactatctatgcttccttgccgcc

SEQ ID NO: 1540088 - DNA, 25 bp, Homo sapien
taagcaagtccactggccaccataa

SEQ ID NO: 1540089 - DNA, 25 bp, Homo sapien
gaagactcctgagtgtgcagactgt

SEQ ID NO: 1540090 - DNA, 25 bp, Homo sapien
ggtccttggcagtaatacctaatgt

SEQ ID NO: 1540091 - DNA, 25 bp, Homo sapien
ggaaattctacccaacgctcctgaa

SEQ ID NO: 1540092 - DNA, 25 bp, Homo sapien
gctcctgaaacatgtgattaaccac

SEQ ID NO: 1540093 - DNA, 25 bp, Homo sapien
ccaaagatgtgaggcctgtctgact

SEQ ID NO: 1540094 - DNA, 25 bp, Homo sapien
ccaaatctggtacatgggaaaccca

SEQ ID NO: 1540095 - DNA, 25 bp, Homo sapien
gagtctccacgctggacaaaaaggc

SEQ ID NO: 1540096 - DNA, 25 bp, Homo sapien
tctgaatgggagcatctactgcagt

SEQ ID NO: 1540097 - DNA, 25 bp, Homo sapien
taagccgctatgttctttaggccac

SEQ ID NO: 1540098 - DNA, 25 bp, Homo sapien
taagttggtacacagaagtgaagtg

SEQ ID NO: 1540099 - DNA, 25 bp, Homo sapien
tgtaccaggcctaagccgctatgtt

SEQ ID NO: 1540100 - DNA, 25 bp, Homo sapien
tttaggccactaagttggtacacag

SEQ ID NO: 1540101 - DNA, 25 bp, Homo sapien
agcgattctcctgctcccgcctcag

SEQ ID NO: 1540102 - DNA, 25 bp, Homo sapien
actctgacacctaggctggagtgca

SEQ ID NO: 1540103 - DNA, 25 bp, Homo sapien
ttctttattttttggagatagtctc

SEQ ID NO: 1540104 - DNA, 25 bp, Homo sapien
aatgacgtggtctcggctcactgca

SEQ ID NO: 1540105 - DNA, 25 bp, Homo sapien
tctcccactgagtagaaacacagct

SEQ ID NO: 1540106 - DNA, 25 bp, Homo sapien
tgagtagaaacacagctagaagctt

SEQ ID NO: 1540107 - DNA, 25 bp, Homo sapien
ccactgagtagaaacacagctagaa

SEQ ID NO: 1540108 - DNA, 25 bp, Homo sapien
caaatctctcccactgagtagaaac

SEQ ID NO: 1540109 - DNA, 25 bp, Homo sapien
caactcatggtttgtctgtgaacca

SEQ ID NO: 1540110 - DNA, 25 bp, Homo sapien
tgtagggagcattgtagacactgtg

SEQ ID NO: 1540111 - DNA, 25 bp, Homo sapien
aaccatgcatgtagggagcattgta

SEQ ID NO: 1540112 - DNA, 25 bp, Homo sapien
aacaactcatggtttgtctgtgaac

SEQ ID NO: 1540113 - DNA, 25 bp, Homo sapien
gttcctacagcagggctcactcctt

SEQ ID NO: 1540114 - DNA, 25 bp, Homo sapien
tgatgaagagcgtggattcaaccca

SEQ ID NO: 1540115 - DNA, 25 bp, Homo sapien
tgtccacaactagtgtaacctcagg

SEQ ID NO: 1540116 - DNA, 25 bp, Homo sapien
gcctgctcaggcctaaggagggaaa

SEQ ID NO: 1540117 - DNA, 25 bp, Homo sapien
cccacactttagaatgagaggtcaa

SEQ ID NO: 1540118 - DNA, 25 bp, Homo sapien
acactttagaatgagaggtcaaggc

SEQ ID NO: 1540119 - DNA, 25 bp, Homo sapien
ctcccacactttagaatgagaggtc

SEQ ID NO: 1540120 - DNA, 25 bp, Homo sapien
tccctcccacactttagaatgagag

SEQ ID NO: 1540121 - DNA, 25 bp, Homo sapien
ctgagcagggctcaacaacctccac

SEQ ID NO: 1540122 - DNA, 25 bp, Homo sapien
agcagggctcaacaacctccactcc

SEQ ID NO: 1540123 - DNA, 25 bp, Homo sapien
cagggctcaacaacctccactcctc

SEQ ID NO: 1540124 - DNA, 25 bp, Homo sapien
gcagggctcaacaacctccactcct

SEQ ID NO: 1540125 - DNA, 25 bp, Homo sapien
gtgagaccagatggttataagtctc

SEQ ID NO: 1540126 - DNA, 25 bp, Homo sapien
tgagaccagatggttataagtctcc

SEQ ID NO: 1540127 - DNA, 25 bp, Homo sapien
cctcgctccagctgagcaatgagtt

SEQ ID NO: 1540128 - DNA, 25 bp, Homo sapien
ctctccagggcgcttcccctcgctc

SEQ ID NO: 1540129 - DNA, 25 bp, Homo sapien
tgagttttggtttagaagatggaat

SEQ ID NO: 1540130 - DNA, 25 bp, Homo sapien
gctccagctgagcaatgagttttgg

SEQ ID NO: 1540131 - DNA, 25 bp, Homo sapien
gaagcagagctacatataccaacat

SEQ ID NO: 1540132 - DNA, 25 bp, Homo sapien
tagtacaaaattagtctcagggaag

SEQ ID NO: 1540133 - DNA, 25 bp, Homo sapien
catgcatgagaattacaaatcccta

SEQ ID NO: 1540134 - DNA, 25 bp, Homo sapien
tcttaagctgggacattggcacatg

SEQ ID NO: 1540135 - DNA, 25 bp, Homo sapien
tgcaaagaggccaaacatcagagga

SEQ ID NO: 1540136 - DNA, 25 bp, Homo sapien
tctgcataagccattcgagagggca

SEQ ID NO: 1540137 - DNA, 25 bp, Homo sapien
gactgaaatggtcacaagaaccctg

SEQ ID NO: 1540138 - DNA, 25 bp, Homo sapien
tgaggaagcccactaacgaaaatgc

SEQ ID NO: 1540139 - DNA, 25 bp, Homo sapien
aaggaggaagggtatgcatgcaaaa

SEQ ID NO: 1540140 - DNA, 25 bp, Homo sapien
tacatatgtactgagaaaggggaag

SEQ ID NO: 1540141 - DNA, 25 bp, Homo sapien
aaatagtaggtcattttatgatgcc

SEQ ID NO: 1540142 - DNA, 25 bp, Homo sapien
tatatgccatatgtcttaatctgtt

SEQ ID NO: 1540143 - DNA, 25 bp, Homo sapien
ttaagcaaaagagcttctgcactgc

SEQ ID NO: 1540144 - DNA, 25 bp, Homo sapien
agaaacaatcaacagagtaaaaaga

SEQ ID NO: 1540145 - DNA, 25 bp, Homo sapien
tctgcactgcaaaagaaacaatcaa

SEQ ID NO: 1540146 - DNA, 25 bp, Homo sapien
cactgcaaaagaaacaatcaacaga

SEQ ID NO: 1540147 - DNA, 25 bp, Homo sapien
gacccttccccctcatatacacaaa

SEQ ID NO: 1540148 - DNA, 25 bp, Homo sapien
acttctctggacattggccaaggca

SEQ ID NO: 1540149 - DNA, 25 bp, Homo sapien
ggccaaggcaaagaacttatgacta

SEQ ID NO: 1540150 - DNA, 25 bp, Homo sapien
tgtccagccacatgcaagagaatga

SEQ ID NO: 1540151 - DNA, 25 bp, Homo sapien
actgaatgggcgaaagctgaaacca

SEQ ID NO: 1540152 - DNA, 25 bp, Homo sapien
tgggcgaaagctgaaaccattcccc

SEQ ID NO: 1540153 - DNA, 25 bp, Homo sapien
taagaagagttatctgtgacagacc

SEQ ID NO: 1540154 - DNA, 25 bp, Homo sapien
gacagacctacagccaacttcatac

SEQ ID NO: 1540155 - DNA, 25 bp, Homo sapien
ggcagagaactgcttgaaaccagga

SEQ ID NO: 1540156 - DNA, 25 bp, Homo sapien
cagtgagccgagatcgcgccactgc

SEQ ID NO: 1540157 - DNA, 25 bp, Homo sapien
accaggaggtggaggttgcagtgag

SEQ ID NO: 1540158 - DNA, 25 bp, Homo sapien
actccagcctaggcaacagagtgag

SEQ ID NO: 1540159 - DNA, 25 bp, Homo sapien
aaagaattgaataggcattttacta

SEQ ID NO: 1540160 - DNA, 25 bp, Homo sapien
aagaaaagaattgaataggcatttt

SEQ ID NO: 1540161 - DNA, 25 bp, Homo sapien
gagccgatataacaccactgtattc

SEQ ID NO: 1540162 - DNA, 25 bp, Homo sapien
gatatgcaaatggttaataaacaat

SEQ ID NO: 1540163 - DNA, 25 bp, Homo sapien
catcacaagctatctcccagttaga

SEQ ID NO: 1540164 - DNA, 25 bp, Homo sapien
tttacatatttacatcacaagctat

SEQ ID NO: 1540165 - DNA, 25 bp, Homo sapien
tttacatcacaagctatctcccagt

SEQ ID NO: 1540166 - DNA, 25 bp, Homo sapien
catccttcccagcatctatttttca

SEQ ID NO: 1540167 - DNA, 25 bp, Homo sapien
gctgtgtaggcaattttgccttgcc

SEQ ID NO: 1540168 - DNA, 25 bp, Homo sapien
ggcaattttgccttgcccactggtc

SEQ ID NO: 1540169 - DNA, 25 bp, Homo sapien
cagaggggccataggtagggctgtg

SEQ ID NO: 1540170 - DNA, 25 bp, Homo sapien
cataggtagggctgtgtaggcaatt

SEQ ID NO: 1540171 - DNA, 25 bp, Homo sapien
tcagccacacatgttggctgagagc

SEQ ID NO: 1540172 - DNA, 25 bp, Homo sapien
ggcaggagggactaagttgaatttc

SEQ ID NO: 1540173 - DNA, 25 bp, Homo sapien
gctgagagagatgactcagccacac

SEQ ID NO: 1540174 - DNA, 25 bp, Homo sapien
ggctgagagcttgctgactggagaa

SEQ ID NO: 1540175 - DNA, 25 bp, Homo sapien
tgttttcccaggtggagaggatttc

SEQ ID NO: 1540176 - DNA, 25 bp, Homo sapien
tggatagtgttttcccaggtggaga

SEQ ID NO: 1540177 - DNA, 25 bp, Homo sapien
atagtgttttcccaggtggagagga

SEQ ID NO: 1540178 - DNA, 25 bp, Homo sapien
ctggatagtgttttcccaggtggag

SEQ ID NO: 1540179 - DNA, 25 bp, Homo sapien
tctcccaaacaggagtctggagtct

SEQ ID NO: 1540180 - DNA, 25 bp, Homo sapien
gaatggatcctgctgttgtttctga

SEQ ID NO: 1540181 - DNA, 25 bp, Homo sapien
tctgctttgccactaaagcagaatg

SEQ ID NO: 1540182 - DNA, 25 bp, Homo sapien
tcccaaacaggagtctggagtcttc

SEQ ID NO: 1540183 - DNA, 25 bp, Homo sapien
tgagtgtgccctcttgtgcctaaac

SEQ ID NO: 1540184 - DNA, 25 bp, Homo sapien
tgatttccagctaaagtgacgccca

SEQ ID NO: 1540185 - DNA, 25 bp, Homo sapien
tccaggcagacataaggtttaaccc

SEQ ID NO: 1540186 - DNA, 25 bp, Homo sapien
ctaaacaggttaggcttctgccgaa

SEQ ID NO: 1540187 - DNA, 25 bp, Homo sapien
tttaatgagagttaacttagcacaa

SEQ ID NO: 1540188 - DNA, 25 bp, Homo sapien
gagttaacttagcacaaaagccttg

SEQ ID NO: 1540189 - DNA, 25 bp, Homo sapien
ttaacttagcacaaaagccttgccc

SEQ ID NO: 1540190 - DNA, 25 bp, Homo sapien
atgaggcttcccccctgcgtgtgct

SEQ ID NO: 1540191 - DNA, 25 bp, Homo sapien
tctaatgaggtgtgactgccggcta

SEQ ID NO: 1540192 - DNA, 25 bp, Homo sapien
ccccgtccacactttctgcaaatat

SEQ ID NO: 1540193 - DNA, 25 bp, Homo sapien
gccccgtccacactttctgcaaata

SEQ ID NO: 1540194 - DNA, 25 bp, Homo sapien
taatgaggtgtgactgccggctaaa

SEQ ID NO: 1540195 - DNA, 25 bp, Homo sapien
cacaccaaatgggaagacaggttct

SEQ ID NO: 1540196 - DNA, 25 bp, Homo sapien
tgaagtatgactcctggctaaaggc

SEQ ID NO: 1540197 - DNA, 25 bp, Homo sapien
tcagctttaaggttgggtttcacca

SEQ ID NO: 1540198 - DNA, 25 bp, Homo sapien
tcagtatgaggatttagccgggact

SEQ ID NO: 1540199 - DNA, 25 bp, Homo sapien
cagaatgaaatacttttgtttttca

SEQ ID NO: 1540200 - DNA, 25 bp, Homo sapien
agttccagaatgaaatacttttgtt

SEQ ID NO: 1540201 - DNA, 25 bp, Homo sapien
tagttccagaatgaaatacttttgt

SEQ ID NO: 1540202 - DNA, 25 bp, Homo sapien
ctagttccagaatgaaatacttttg

SEQ ID NO: 1540203 - DNA, 25 bp, Homo sapien
gttcagttggcttagcaggtgacca

SEQ ID NO: 1540204 - DNA, 25 bp, Homo sapien
caggtgaccaattgtagcaagaatc

SEQ ID NO: 1540205 - DNA, 25 bp, Homo sapien
cccacttagcaagaagttcagttgg

SEQ ID NO: 1540206 - DNA, 25 bp, Homo sapien
tatgtggttgcaaggtagctgcagc

SEQ ID NO: 1540207 - DNA, 25 bp, Homo sapien
tatacagttatatgctcaactgaaa

SEQ ID NO: 1540208 - DNA, 25 bp, Homo sapien
atacagttatatgctcaactgaaag

SEQ ID NO: 1540209 - DNA, 25 bp, Homo sapien
gaaccacgagccccagaacgctttg

SEQ ID NO: 1540210 - DNA, 25 bp, Homo sapien
cgcgaaccacgagccccagaacgct

SEQ ID NO: 1540211 - DNA, 25 bp, Homo sapien
agccccagaacgctttgcgccacgg

SEQ ID NO: 1540212 - DNA, 25 bp, Homo sapien
gaacgctttgcgccacggccgtcat

SEQ ID NO: 1540213 - DNA, 25 bp, Homo sapien
actctgagctctgcgagatctgaac

SEQ ID NO: 1540214 - DNA, 25 bp, Homo sapien
ggactctgagctctgcgagatctga

SEQ ID NO: 1540215 - DNA, 25 bp, Homo sapien
gaggcgaggactgaggcatgcagga

SEQ ID NO: 1540216 - DNA, 25 bp, Homo sapien
cagaatcctccgcgaggaggagcga

SEQ ID NO: 1540217 - DNA, 25 bp, Homo sapien
tctgcaaacgggccccgcgaccgag

SEQ ID NO: 1540218 - DNA, 25 bp, Homo sapien
ctgcaaacgggccccgcgaccgaga

SEQ ID NO: 1540219 - DNA, 25 bp, Homo sapien
tgcaaacgggccccgcgaccgagac

SEQ ID NO: 1540220 - DNA, 25 bp, Homo sapien
ctctgcaaacgggccccgcgaccga

SEQ ID NO: 1540221 - DNA, 25 bp, Homo sapien
atggctttacaaagccccacagcca

SEQ ID NO: 1540222 - DNA, 25 bp, Homo sapien
gacatggctttacaaagccccacag

SEQ ID NO: 1540223 - DNA, 25 bp, Homo sapien
tgggacatggctttacaaagcccca

SEQ ID NO: 1540224 - DNA, 25 bp, Homo sapien
ctgggacatggctttacaaagcccc

SEQ ID NO: 1540225 - DNA, 25 bp, Homo sapien
ttcttgggaaaagtctagcgccaca

SEQ ID NO: 1540226 - DNA, 25 bp, Homo sapien
gtctagcgccacatctctgaaggtc

SEQ ID NO: 1540227 - DNA, 25 bp, Homo sapien
tataaatccttctgagatggcttca

SEQ ID NO: 1540228 - DNA, 25 bp, Homo sapien
aagccataccaagttcctgtagttc

SEQ ID NO: 1540229 - DNA, 25 bp, Homo sapien
ctccaccatccacggttccttccct

SEQ ID NO: 1540230 - DNA, 25 bp, Homo sapien
agatcatgttgggcttagaaatgga

SEQ ID NO: 1540231 - DNA, 25 bp, Homo sapien
gatcatgttgggcttagaaatggag

SEQ ID NO: 1540232 - DNA, 25 bp, Homo sapien
ccaccatccacggttccttcccttg

SEQ ID NO: 1540233 - DNA, 25 bp, Homo sapien
taagacaatatataggattaagccc

SEQ ID NO: 1540234 - DNA, 25 bp, Homo sapien
tattgtatataagccctacacttaa

SEQ ID NO: 1540235 - DNA, 25 bp, Homo sapien
tatataggattaagcccaaatttac

SEQ ID NO: 1540236 - DNA, 25 bp, Homo sapien
caaatctgtattgtatataagccct

SEQ ID NO: 1540237 - DNA, 25 bp, Homo sapien
cttgagttccgtaggtataggctgc

SEQ ID NO: 1540238 - DNA, 25 bp, Homo sapien
catcctgacgacatctggttgaaag

SEQ ID NO: 1540239 - DNA, 25 bp, Homo sapien
tctccaaaagtggaagtatgccagt

SEQ ID NO: 1540240 - DNA, 25 bp, Homo sapien
taaccttgaaaacttgtgtgcggga

SEQ ID NO: 1540241 - DNA, 25 bp, Homo sapien
ttcaacaaggaaggcataacggcta

SEQ ID NO: 1540242 - DNA, 25 bp, Homo sapien
caggtgtgagcgatagccaaaggtc

SEQ ID NO: 1540243 - DNA, 25 bp, Homo sapien
taagggctatgcgtctgctgaaggc

SEQ ID NO: 1540244 - DNA, 25 bp, Homo sapien
gagtaacagctaaaggcatcaccac

SEQ ID NO: 1540245 - DNA, 25 bp, Homo sapien
gacttcattgatccagacagggcca

SEQ ID NO: 1540246 - DNA, 25 bp, Homo sapien
tatgcattgagggtgggctaagcca

SEQ ID NO: 1540247 - DNA, 25 bp, Homo sapien
tatatcagaaggttgctcctcagga

SEQ ID NO: 1540248 - DNA, 25 bp, Homo sapien
tctttacaggcaaatggtgagtcac

SEQ ID NO: 1540249 - DNA, 25 bp, Homo sapien
tataaacagagaatgaaccagtagc

SEQ ID NO: 1540250 - DNA, 25 bp, Homo sapien
cactgaagctaaacacatgggtaca

SEQ ID NO: 1540251 - DNA, 25 bp, Homo sapien
taggtttacgtcactctcgaggatg

SEQ ID NO: 1540252 - DNA, 25 bp, Homo sapien
tcgaggatgaaatcaggtgccatac

SEQ ID NO: 1540253 - DNA, 25 bp, Homo sapien
gaggaaaggattgccctcttgatgg

SEQ ID NO: 1540254 - DNA, 25 bp, Homo sapien
aatggtccaggtcatagtgcttccc

SEQ ID NO: 1540255 - DNA, 25 bp, Homo sapien
gaagggtcagcaaaagggaccaaga

SEQ ID NO: 1540256 - DNA, 25 bp, Homo sapien
gaccaagaacaaatggtccaggtca

SEQ ID NO: 1540257 - DNA, 25 bp, Homo sapien
gcaggaacggcccgcagtggcctct

SEQ ID NO: 1540258 - DNA, 25 bp, Homo sapien
cagctccacggacaggcaggaacgg

SEQ ID NO: 1540259 - DNA, 25 bp, Homo sapien
gttatcccggatacaagcaccaccg

SEQ ID NO: 1540260 - DNA, 25 bp, Homo sapien
cacgtgctcgttcaccctgggaaca

SEQ ID NO: 1540261 - DNA, 25 bp, Homo sapien
aatcaaagcagcagtagggggtgaa

SEQ ID NO: 1540262 - DNA, 25 bp, Homo sapien
gaagtgggaatccattttaggtcta

SEQ ID NO: 1540263 - DNA, 25 bp, Homo sapien
gaagtcagccttgtgatttttgcag

SEQ ID NO: 1540264 - DNA, 25 bp, Homo sapien
gcaggtgtggcccactgtatgtgca

SEQ ID NO: 1540265 - DNA, 25 bp, Homo sapien
tgttgaaaggcacaaaagaacacct

SEQ ID NO: 1540266 - DNA, 25 bp, Homo sapien
tgaaatctgaaacaaggtatcttcc

SEQ ID NO: 1540267 - DNA, 25 bp, Homo sapien
tgagctcctagccaatgtattaagt

SEQ ID NO: 1540268 - DNA, 25 bp, Homo sapien
tcagcataacaacacaacacttgag

SEQ ID NO: 1540269 - DNA, 25 bp, Homo sapien
taaaattcacagtagggagcagtct

SEQ ID NO: 1540270 - DNA, 25 bp, Homo sapien
cagacacaatctctatgagtatgac

SEQ ID NO: 1540271 - DNA, 25 bp, Homo sapien
gccttatgagaaaggagcattgtga

SEQ ID NO: 1540272 - DNA, 25 bp, Homo sapien
caatcagactttggacctcatcaga

SEQ ID NO: 1540273 - DNA, 25 bp, Homo sapien
gttcttaatttgtatgaactcttaa

SEQ ID NO: 1540274 - DNA, 25 bp, Homo sapien
attgagctgattggcacatcatctg

SEQ ID NO: 1540275 - DNA, 25 bp, Homo sapien
tcttaatttgtatgaactcttaaca

SEQ ID NO: 1540276 - DNA, 25 bp, Homo sapien
catattgagctgattggcacatcat

SEQ ID NO: 1540277 - DNA, 25 bp, Homo sapien
gctttgcttgtaatgctttcccact

SEQ ID NO: 1540278 - DNA, 25 bp, Homo sapien
ttgctactgctttgcttgtaatgct

SEQ ID NO: 1540279 - DNA, 25 bp, Homo sapien
tactgctttgcttgtaatgctttcc

SEQ ID NO: 1540280 - DNA, 25 bp, Homo sapien
tgcttgtaatgctttcccactccca

SEQ ID NO: 1540281 - DNA, 25 bp, Homo sapien
gagtgggggcccgcggtcctggtgc

SEQ ID NO: 1540282 - DNA, 25 bp, Homo sapien
agctctgagcgccggactctttgtg

SEQ ID NO: 1540283 - DNA, 25 bp, Homo sapien
gtggtgagtcctcgggaaaccgcta

SEQ ID NO: 1540284 - DNA, 25 bp, Homo sapien
agacttgtggcgctctcagccaccg

SEQ ID NO: 1540285 - DNA, 25 bp, Homo sapien
tttggcagcgttaagtgtggaatcg

SEQ ID NO: 1540286 - DNA, 25 bp, Homo sapien
gagaatataaaacgcgaccatggtc

SEQ ID NO: 1540287 - DNA, 25 bp, Homo sapien
tctagccgctgtcaggaccttaagg

SEQ ID NO: 1540288 - DNA, 25 bp, Homo sapien
ggccgaagtttcacacatacagtca

SEQ ID NO: 1540289 - DNA, 25 bp, Homo sapien
cacgacctcagatgtcactggacag

SEQ ID NO: 1540290 - DNA, 25 bp, Homo sapien
agttggatggaacccagcccttacg

SEQ ID NO: 1540291 - DNA, 25 bp, Homo sapien
ggtctcaccgctacccttagttgga

SEQ ID NO: 1540292 - DNA, 25 bp, Homo sapien
cagctccgcgcagggtttgtaacac

SEQ ID NO: 1540293 - DNA, 25 bp, Homo sapien
tccagagagcccgaaagtccggatt

SEQ ID NO: 1540294 - DNA, 25 bp, Homo sapien
acacagatggcctgcgacgagcttc

SEQ ID NO: 1540295 - DNA, 25 bp, Homo sapien
cactcgcaccggagtcacacagatg

SEQ ID NO: 1540296 - DNA, 25 bp, Homo sapien
tgcgacgagcttccggagacccaca

SEQ ID NO: 1540297 - DNA, 25 bp, Homo sapien
tggcctgcgacgagcttccggagac

SEQ ID NO: 1540298 - DNA, 25 bp, Homo sapien
acagcctcgcactgaacggtaccaa

SEQ ID NO: 1540299 - DNA, 25 bp, Homo sapien
tgacttcctcgcacccagtcacaca

SEQ ID NO: 1540300 - DNA, 25 bp, Homo sapien
agcctcacattccacggtgccattg

SEQ ID NO: 1540301 - DNA, 25 bp, Homo sapien
gggtgacagcctcgcactgaacggt

SEQ ID NO: 1540302 - DNA, 25 bp, Homo sapien
tgggaaatagcagtggcctcagatg

SEQ ID NO: 1540303 - DNA, 25 bp, Homo sapien
cttcctcctggctcttctcttggga

SEQ ID NO: 1540304 - DNA, 25 bp, Homo sapien
cttctcttgggaaatagcagtggcc

SEQ ID NO: 1540305 - DNA, 25 bp, Homo sapien
tcctcctggctcttctcttgggaaa

SEQ ID NO: 1540306 - DNA, 25 bp, Homo sapien
ctggtacatggctttaagaagccca

SEQ ID NO: 1540307 - DNA, 25 bp, Homo sapien
tacatggctttaagaagcccaacag

SEQ ID NO: 1540308 - DNA, 25 bp, Homo sapien
tggctttaagaagcccaacagccat

SEQ ID NO: 1540309 - DNA, 25 bp, Homo sapien
catggctttaagaagcccaacagcc

SEQ ID NO: 1540310 - DNA, 25 bp, Homo sapien
agaatccagacaatcccattcctct

SEQ ID NO: 1540311 - DNA, 25 bp, Homo sapien
taccaagatcctgtagttctctagc

SEQ ID NO: 1540312 - DNA, 25 bp, Homo sapien
agaagaatccagacaatcccattcc

SEQ ID NO: 1540313 - DNA, 25 bp, Homo sapien
aatccagacaatcccattcctcttg

SEQ ID NO: 1540314 - DNA, 25 bp, Homo sapien
gccttttgtcagctctctcttcacc

SEQ ID NO: 1540315 - DNA, 25 bp, Homo sapien
tttgtgtacaaagcagtgggttctg

SEQ ID NO: 1540316 - DNA, 25 bp, Homo sapien
cacgccttctgattacctggttgcc

SEQ ID NO: 1540317 - DNA, 25 bp, Homo sapien
ggttaattcttcagtctcacatata

SEQ ID NO: 1540318 - DNA, 25 bp, Homo sapien
ggttgcctttcaaaatagccctcac

SEQ ID NO: 1540319 - DNA, 25 bp, Homo sapien
ctcgcagatgttgaactaggtgtgc

SEQ ID NO: 1540320 - DNA, 25 bp, Homo sapien
cagatgttgaactaggtgtgcattc

SEQ ID NO: 1540321 - DNA, 25 bp, Homo sapien
tatgaactcgcagatgttgaactag

SEQ ID NO: 1540322 - DNA, 25 bp, Homo sapien
ttgaactaggtgtgcattctgactg

SEQ ID NO: 1540323 - DNA, 25 bp, Homo sapien
taaggtatgcacgaaggctaaatgc

SEQ ID NO: 1540324 - DNA, 25 bp, Homo sapien
ctctctggtgttgagcaatggatga

SEQ ID NO: 1540325 - DNA, 25 bp, Homo sapien
gtacagtaaggtatgcacgaaggct

SEQ ID NO: 1540326 - DNA, 25 bp, Homo sapien
tatgcacgaaggctaaatgctttcc

SEQ ID NO: 1540327 - DNA, 25 bp, Homo sapien
tgttgagtaagggacgagtcattgc

SEQ ID NO: 1540328 - DNA, 25 bp, Homo sapien
gacgagtcattgctaaaagccttcc

SEQ ID NO: 1540329 - DNA, 25 bp, Homo sapien
gagtaagggacgagtcattgctaaa

SEQ ID NO: 1540330 - DNA, 25 bp, Homo sapien
taagggacgagtcattgctaaaagc

SEQ ID NO: 1540331 - DNA, 25 bp, Homo sapien
ttctctgatgttgggcaagggatcc

SEQ ID NO: 1540332 - DNA, 25 bp, Homo sapien
tgatgttgggcaagggatccacagt

SEQ ID NO: 1540333 - DNA, 25 bp, Homo sapien
gatgttgggcaagggatccacagta

SEQ ID NO: 1540334 - DNA, 25 bp, Homo sapien
tctgatgttgggcaagggatccaca

SEQ ID NO: 1540335 - DNA, 25 bp, Homo sapien
cagtgactccccaatgtgaattctc

SEQ ID NO: 1540336 - DNA, 25 bp, Homo sapien
taggacttggtgattgactgggttg

SEQ ID NO: 1540337 - DNA, 25 bp, Homo sapien
gacagtgactccccaatgtgaattc

SEQ ID NO: 1540338 - DNA, 25 bp, Homo sapien
gtgattgactgggttgggtggtgac

SEQ ID NO: 1540339 - DNA, 25 bp, Homo sapien
attctagaaacatttaggactcagg

SEQ ID NO: 1540340 - DNA, 25 bp, Homo sapien
tcagagtgagatgaatcagaccaag

SEQ ID NO: 1540341 - DNA, 25 bp, Homo sapien
agctatattagtaatcagagtgaga

SEQ ID NO: 1540342 - DNA, 25 bp, Homo sapien
gaccaaggtgacaacattaaagata

SEQ ID NO: 1540343 - DNA, 25 bp, Homo sapien
cacgcaatgccatagtagtgttgga

SEQ ID NO: 1540344 - DNA, 25 bp, Homo sapien
taagcaaattgctcaaagtcacgca

SEQ ID NO: 1540345 - DNA, 25 bp, Homo sapien
tagtcctgggaagtgcctagtgccc

SEQ ID NO: 1540346 - DNA, 25 bp, Homo sapien
tagtgttggagctatgattttccag

SEQ ID NO: 1540347 - DNA, 25 bp, Homo sapien
tagaaacttcctaaaactggctgtc

SEQ ID NO: 1540348 - DNA, 25 bp, Homo sapien
ggctgtcagtgttatagttccacta

SEQ ID NO: 1540349 - DNA, 25 bp, Homo sapien
taggttctgcattcttcccagtgaa

SEQ ID NO: 1540350 - DNA, 25 bp, Homo sapien
aagctacagtacaaagactgccatt

SEQ ID NO: 1540351 - DNA, 25 bp, Homo sapien
agaatgtggcctttgtattgctcac

SEQ ID NO: 1540352 - DNA, 25 bp, Homo sapien
gagtctctgcagtctaggctatata

SEQ ID NO: 1540353 - DNA, 25 bp, Homo sapien
attaattacatgtctccacctctgg

SEQ ID NO: 1540354 - DNA, 25 bp, Homo sapien
cagtgtctgacaaacagtaattact

SEQ ID NO: 1540355 - DNA, 25 bp, Homo sapien
taaatttcagaacaaacctgtgaag

SEQ ID NO: 1540356 - DNA, 25 bp, Homo sapien
tcataaatttcagaacaaacctgtg

SEQ ID NO: 1540357 - DNA, 25 bp, Homo sapien
ctcataaatttcagaacaaacctgt

SEQ ID NO: 1540358 - DNA, 25 bp, Homo sapien
cataaatttcagaacaaacctgtga

SEQ ID NO: 1540359 - DNA, 25 bp, Homo sapien
tatgtatctccttgaaacacgagga

SEQ ID NO: 1540360 - DNA, 25 bp, Homo sapien
cccatgttgacagaaatatctctag

SEQ ID NO: 1540361 - DNA, 25 bp, Homo sapien
tgcaggtcaccactgttctgaatct

SEQ ID NO: 1540362 - DNA, 25 bp, Homo sapien
tcacagttctgcaatggaccatcat

SEQ ID NO: 1540363 - DNA, 25 bp, Homo sapien
actgtgccgtaaaacggatgattaa

SEQ ID NO: 1540364 - DNA, 25 bp, Homo sapien
aaaactgtgccgtaaaacggatgat

SEQ ID NO: 1540365 - DNA, 25 bp, Homo sapien
taaaactgtgccgtaaaacggatga

SEQ ID NO: 1540366 - DNA, 25 bp, Homo sapien
tgtgccgtaaaacggatgattaagc

SEQ ID NO: 1540367 - DNA, 25 bp, Homo sapien
gcggtataaggtcgtcccatcctga

SEQ ID NO: 1540368 - DNA, 25 bp, Homo sapien
tcaattgcgactttgaggctgtcag

SEQ ID NO: 1540369 - DNA, 25 bp, Homo sapien
tggccggtgcgcagactcaattgcg

SEQ ID NO: 1540370 - DNA, 25 bp, Homo sapien
ccggcaaccttccagtgaacaggat

SEQ ID NO: 1540371 - DNA, 25 bp, Homo sapien
tctgaaattggtcgtcctgccacgc

SEQ ID NO: 1540372 - DNA, 25 bp, Homo sapien
ttctcaaaccgtgccttcccattta

SEQ ID NO: 1540373 - DNA, 25 bp, Homo sapien
tccgcgccctgaatctgaaattggt

SEQ ID NO: 1540374 - DNA, 25 bp, Homo sapien
catttatgctgcatccgcgccctga

SEQ ID NO: 1540375 - DNA, 25 bp, Homo sapien
cccgcgaggctcagacgccgaatct

SEQ ID NO: 1540376 - DNA, 25 bp, Homo sapien
gcgaggctcagacgccgaatctctt

SEQ ID NO: 1540377 - DNA, 25 bp, Homo sapien
actgaggccccgcgaggctcagacg

SEQ ID NO: 1540378 - DNA, 25 bp, Homo sapien
gccccgcgaggctcagacgccgaat

SEQ ID NO: 1540379 - DNA, 25 bp, Homo sapien
catgcaccctgaaaatcaagacatt

SEQ ID NO: 1540380 - DNA, 25 bp, Homo sapien
catttcacagaactcgcatttattg

SEQ ID NO: 1540381 - DNA, 25 bp, Homo sapien
cccatgcaccctgaaaatcaagaca

SEQ ID NO: 1540382 - DNA, 25 bp, Homo sapien
tttattgattcccacacactcccaa

SEQ ID NO: 1540383 - DNA, 25 bp, Homo sapien
gatgctggcacagatgcgtatgtca

SEQ ID NO: 1540384 - DNA, 25 bp, Homo sapien
atgctggcacagatgcgtatgtcat

SEQ ID NO: 1540385 - DNA, 25 bp, Homo sapien
ggatgctggcacagatgcgtatgtc

SEQ ID NO: 1540386 - DNA, 25 bp, Homo sapien
tgttttctaaccacgggcaaggtca

SEQ ID NO: 1540387 - DNA, 25 bp, Homo sapien
tgtcacagagtcagaatggatttcc

SEQ ID NO: 1540388 - DNA, 25 bp, Homo sapien
cccgctgtcacagagtcagaatgga

SEQ ID NO: 1540389 - DNA, 25 bp, Homo sapien
catccccgctgtcacagagtcagaa

SEQ ID NO: 1540390 - DNA, 25 bp, Homo sapien
cataaagacgtagtgcctgagagag

SEQ ID NO: 1540391 - DNA, 25 bp, Homo sapien
cagtcttgctgcctctcagagacag

SEQ ID NO: 1540392 - DNA, 25 bp, Homo sapien
tgagagagctgaagaactagcacac

SEQ ID NO: 1540393 - DNA, 25 bp, Homo sapien
gcagcagtgagatacagacccgact

SEQ ID NO: 1540394 - DNA, 25 bp, Homo sapien
ccaaggtcctgtggctctaagggct

SEQ ID NO: 1540395 - DNA, 25 bp, Homo sapien
aggtggcaggatccaaaggtctgca

SEQ ID NO: 1540396 - DNA, 25 bp, Homo sapien
cagggccttctgtagatgttgtgac

SEQ ID NO: 1540397 - DNA, 25 bp, Homo sapien
ggcaggagctagagagccctcccgt

SEQ ID NO: 1540398 - DNA, 25 bp, Homo sapien
agagtccctggaaagagtaacgtct

SEQ ID NO: 1540399 - DNA, 25 bp, Homo sapien
gatcttgggccaaccatcctccctt

SEQ ID NO: 1540400 - DNA, 25 bp, Homo sapien
tggagagtccctggaaagagtaacg

SEQ ID NO: 1540401 - DNA, 25 bp, Homo sapien
ttagccatggagagtccctggaaag

SEQ ID NO: 1540402 - DNA, 25 bp, Homo sapien
cgacttcatggaagatgaacactga

SEQ ID NO: 1540403 - DNA, 25 bp, Homo sapien
ggagactaaagggatgtgtcaccta

SEQ ID NO: 1540404 - DNA, 25 bp, Homo sapien
gatgtgtcacctaaaggcagcatat

SEQ ID NO: 1540405 - DNA, 25 bp, Homo sapien
aaaatgtcgacttcatggaagatga

SEQ ID NO: 1540406 - DNA, 25 bp, Homo sapien
gctgttcttgaaaaagatctgacac

SEQ ID NO: 1540407 - DNA, 25 bp, Homo sapien
ctgctgttcttgaaaaagatctgac

SEQ ID NO: 1540408 - DNA, 25 bp, Homo sapien
ctggtattcgatcattttctgctgt

SEQ ID NO: 1540409 - DNA, 25 bp, Homo sapien
ttctgctgttcttgaaaaagatctg

SEQ ID NO: 1540410 - DNA, 25 bp, Homo sapien
tgagcagtagtagcccaggcaaatg

SEQ ID NO: 1540411 - DNA, 25 bp, Homo sapien
ctgagcagtagtagcccaggcaaat

SEQ ID NO: 1540412 - DNA, 25 bp, Homo sapien
gagcagtagtagcccaggcaaatgg

SEQ ID NO: 1540413 - DNA, 25 bp, Homo sapien
gcagtagtagcccaggcaaatgggc

SEQ ID NO: 1540414 - DNA, 25 bp, Homo sapien
tgagcaggactcagccggtgccact

SEQ ID NO: 1540415 - DNA, 25 bp, Homo sapien
gacgaggttgctataggtttccagc

SEQ ID NO: 1540416 - DNA, 25 bp, Homo sapien
ctcttgggtgaagcccacaaccaca

SEQ ID NO: 1540417 - DNA, 25 bp, Homo sapien
cactgagacgaggttgctataggtt

SEQ ID NO: 1540418 - DNA, 25 bp, Homo sapien
ccagtctgaggatcacatctggttt

SEQ ID NO: 1540419 - DNA, 25 bp, Homo sapien
ccaacagtggcagcccgggcatgct

SEQ ID NO: 1540420 - DNA, 25 bp, Homo sapien
acagtggcagcccgggcatgctgcc

SEQ ID NO: 1540421 - DNA, 25 bp, Homo sapien
cccaacagtggcagcccgggcatgc

SEQ ID NO: 1540422 - DNA, 25 bp, Homo sapien
tggcagcccgggcatgctgcctcac

SEQ ID NO: 1540423 - DNA, 25 bp, Homo sapien
cattaacgtggctgaagctctcgga

SEQ ID NO: 1540424 - DNA, 25 bp, Homo sapien
tcaagtagagccgagaaaaacactc

SEQ ID NO: 1540425 - DNA, 25 bp, Homo sapien
gagatggaccaagcacataagggca

SEQ ID NO: 1540426 - DNA, 25 bp, Homo sapien
tacctgcatgggaaagattctggag

SEQ ID NO: 1540427 - DNA, 25 bp, Homo sapien
gatgtgcagaatctaaggcaccgcc

SEQ ID NO: 1540428 - DNA, 25 bp, Homo sapien
ggtatagcagtcatccaagggaata

SEQ ID NO: 1540429 - DNA, 25 bp, Homo sapien
caccttggagcttaacaagcactgg

SEQ ID NO: 1540430 - DNA, 25 bp, Homo sapien
caaagctaactaggacttaagcaag

SEQ ID NO: 1540431 - DNA, 25 bp, Homo sapien
aagcaggtggccaatcggtaggcca

SEQ ID NO: 1540432 - DNA, 25 bp, Homo sapien
gcaggtggccaatcggtaggccaca

SEQ ID NO: 1540433 - DNA, 25 bp, Homo sapien
gtggccaatcggtaggccacagttt

SEQ ID NO: 1540434 - DNA, 25 bp, Homo sapien
caggtggccaatcggtaggccacag

SEQ ID NO: 1540435 - DNA, 25 bp, Homo sapien
gagaacatgaaccataacccaaagc

SEQ ID NO: 1540436 - DNA, 25 bp, Homo sapien
taaagagtgcacagcacacaaatag

SEQ ID NO: 1540437 - DNA, 25 bp, Homo sapien
ggccatatggtctccgtcacaatga

SEQ ID NO: 1540438 - DNA, 25 bp, Homo sapien
agcacaaacgcagggaagagtgttc

SEQ ID NO: 1540439 - DNA, 25 bp, Homo sapien
ctggatattaactcgccagatgtct

SEQ ID NO: 1540440 - DNA, 25 bp, Homo sapien
tggatattaactcgccagatgtctt

SEQ ID NO: 1540441 - DNA, 25 bp, Homo sapien
cttttcctctggatattaactcgcc

SEQ ID NO: 1540442 - DNA, 25 bp, Homo sapien
tcctctggatattaactcgccagat

SEQ ID NO: 1540443 - DNA, 25 bp, Homo sapien
caaattctttccacaagggttccag

SEQ ID NO: 1540444 - DNA, 25 bp, Homo sapien
tcaaattctttccacaagggttcca

SEQ ID NO: 1540445 - DNA, 25 bp, Homo sapien
gttttcttgcttatggctgcgcctg

SEQ ID NO: 1540446 - DNA, 25 bp, Homo sapien
tttcttgcttatggctgcgcctggc

SEQ ID NO: 1540447 - DNA, 25 bp, Homo sapien
cataagtgccgggttctgggtgaaa

SEQ ID NO: 1540448 - DNA, 25 bp, Homo sapien
gatcaggcagtcttacatggaggga

SEQ ID NO: 1540449 - DNA, 25 bp, Homo sapien
taaattccctacataccggccaggc

SEQ ID NO: 1540450 - DNA, 25 bp, Homo sapien
gatacaacactgtcggttgggcgcg

SEQ ID NO: 1540451 - DNA, 25 bp, Homo sapien
gttatcttctggtatctagcatggc

SEQ ID NO: 1540452 - DNA, 25 bp, Homo sapien
tcttgtcagtatggagaacagctct

SEQ ID NO: 1540453 - DNA, 25 bp, Homo sapien
taaatagcttctgagtgtcctgtgt

SEQ ID NO: 1540454 - DNA, 25 bp, Homo sapien
tcctagattgtacacataggctcct

SEQ ID NO: 1540455 - DNA, 25 bp, Homo sapien
tggacaggtccattggccacttaga

SEQ ID NO: 1540456 - DNA, 25 bp, Homo sapien
gatttgctcttctcacaactgtcaa

SEQ ID NO: 1540457 - DNA, 25 bp, Homo sapien
tgctgacaaacacctagagacattt

SEQ ID NO: 1540458 - DNA, 25 bp, Homo sapien
ggaattccactcaagtccactagca

SEQ ID NO: 1540459 - DNA, 25 bp, Homo sapien
ccaagtcaatgcatactcttctata

SEQ ID NO: 1540460 - DNA, 25 bp, Homo sapien
aagtcaatgcatactcttctatact

SEQ ID NO: 1540461 - DNA, 25 bp, Homo sapien
caagtcaatgcatactcttctatac

SEQ ID NO: 1540462 - DNA, 25 bp, Homo sapien
tccaagtcaatgcatactcttctat

SEQ ID NO: 1540463 - DNA, 25 bp, Homo sapien
gaacatccccacaaattagcaaaat

SEQ ID NO: 1540464 - DNA, 25 bp, Homo sapien
tacaatatataccatgaacatcccc

SEQ ID NO: 1540465 - DNA, 25 bp, Homo sapien
tctccaccaaggtaaccaatgaatg

SEQ ID NO: 1540466 - DNA, 25 bp, Homo sapien
gacaatgcaaaggtattcagaaaac

SEQ ID NO: 1540467 - DNA, 25 bp, Homo sapien
agcacatctagaatctgtgcactca

SEQ ID NO: 1540468 - DNA, 25 bp, Homo sapien
gcacatctagaatctgtgcactcat

SEQ ID NO: 1540469 - DNA, 25 bp, Homo sapien
caattaatagggcagatcaagcaat

SEQ ID NO: 1540470 - DNA, 25 bp, Homo sapien
cattagcctaggtacacacagtgcc

SEQ ID NO: 1540471 - DNA, 25 bp, Homo sapien
cattaggcagtataaacttttcagc

SEQ ID NO: 1540472 - DNA, 25 bp, Homo sapien
tccgcttcccaggtaatattattta

SEQ ID NO: 1540473 - DNA, 25 bp, Homo sapien
aatgtgaaggctagggcagtactgt

SEQ ID NO: 1540474 - DNA, 25 bp, Homo sapien
aggctagggcagtactgtatactac

SEQ ID NO: 1540475 - DNA, 25 bp, Homo sapien
tgaaggctagggcagtactgtatac

SEQ ID NO: 1540476 - DNA, 25 bp, Homo sapien
gctagggcagtactgtatactactg

SEQ ID NO: 1540477 - DNA, 25 bp, Homo sapien
tgtcagcagaacattcctcggctcc

SEQ ID NO: 1540478 - DNA, 25 bp, Homo sapien
aacattcctcggctccatgagctga

SEQ ID NO: 1540479 - DNA, 25 bp, Homo sapien
gataccctcggggtgggtgtcagca

SEQ ID NO: 1540480 - DNA, 25 bp, Homo sapien
agggctcttcctgcgtctccaagct

SEQ ID NO: 1540481 - DNA, 25 bp, Homo sapien
cgacgcatctttgggatccttaggg

SEQ ID NO: 1540482 - DNA, 25 bp, Homo sapien
tccttagggatcacgtggtgcttcc

SEQ ID NO: 1540483 - DNA, 25 bp, Homo sapien
ggtgcttccttgaatctccgcttga

SEQ ID NO: 1540484 - DNA, 25 bp, Homo sapien
gactcctaggatcgcaggaccatgg

SEQ ID NO: 1540485 - DNA, 25 bp, Homo sapien
tgagaccccagtggagggtgtgagc

SEQ ID NO: 1540486 - DNA, 25 bp, Homo sapien
tccaagaccagggccttcggcttct

SEQ ID NO: 1540487 - DNA, 25 bp, Homo sapien
tgactggccccctttcgacctgggc

SEQ ID NO: 1540488 - DNA, 25 bp, Homo sapien
gtgtgagcaggacattccctcgccc

SEQ ID NO: 1540489 - DNA, 25 bp, Homo sapien
gacaacgttcaaggagacgcgctcc

SEQ ID NO: 1540490 - DNA, 25 bp, Homo sapien
ctcgcaatcccaggcgggacaacgt

SEQ ID NO: 1540491 - DNA, 25 bp, Homo sapien
tccgatagggatcacgcggtgcatc

SEQ ID NO: 1540492 - DNA, 25 bp, Homo sapien
tgcatccttgaagctacgctggacg

SEQ ID NO: 1540493 - DNA, 25 bp, Homo sapien
gcccgttaatttggacagacacaca

SEQ ID NO: 1540494 - DNA, 25 bp, Homo sapien
caaaaatcttagtggcggctatcca

SEQ ID NO: 1540495 - DNA, 25 bp, Homo sapien
tcagaccttaggaccctggagacgc

SEQ ID NO: 1540496 - DNA, 25 bp, Homo sapien
caagatgtgcccctagagaaggcgg

SEQ ID NO: 1540497 - DNA, 25 bp, Homo sapien
tatgattccaagcatctggtgcaca

SEQ ID NO: 1540498 - DNA, 25 bp, Homo sapien
cagaaattaatgatggtgagaagag

SEQ ID NO: 1540499 - DNA, 25 bp, Homo sapien
cctcaaaattgagttactgtataca

SEQ ID NO: 1540500 - DNA, 25 bp, Homo sapien
ttggagcagcaatcaatcaatgcct

SEQ ID NO: 1540501 - DNA, 25 bp, Homo sapien
tttcctcatttgaatctaacccatt

SEQ ID NO: 1540502 - DNA, 25 bp, Homo sapien
atatattccacgtgtatgtattcca

SEQ ID NO: 1540503 - DNA, 25 bp, Homo sapien
atattccacgtgtatgtattccaca

SEQ ID NO: 1540504 - DNA, 25 bp, Homo sapien
tccacgtgtatgtattccacatgta

SEQ ID NO: 1540505 - DNA, 25 bp, Homo sapien
tggccaaggtagttccatatatata

SEQ ID NO: 1540506 - DNA, 25 bp, Homo sapien
atgatggccaaggtagttccatata

SEQ ID NO: 1540507 - DNA, 25 bp, Homo sapien
gatggccaaggtagttccatatata

SEQ ID NO: 1540508 - DNA, 25 bp, Homo sapien
gccaaggtagttccatatatataca

SEQ ID NO: 1540509 - DNA, 25 bp, Homo sapien
tcttctacttttcatcggataattc

SEQ ID NO: 1540510 - DNA, 25 bp, Homo sapien
aagaaaaggccactgaaagtcattc

SEQ ID NO: 1540511 - DNA, 25 bp, Homo sapien
tgaagaaaaggccactgaaagtcat

SEQ ID NO: 1540512 - DNA, 25 bp, Homo sapien
gtcattcaacctcttctacttttca

SEQ ID NO: 1540513 - DNA, 25 bp, Homo sapien
ctcctttttctttattctctccttg

SEQ ID NO: 1540514 - DNA, 25 bp, Homo sapien
cttctttcctataagctctcctttt

SEQ ID NO: 1540515 - DNA, 25 bp, Homo sapien
gctctcctttttctttattctctcc

SEQ ID NO: 1540516 - DNA, 25 bp, Homo sapien
ctttttctttattctctccttgtgc

SEQ ID NO: 1540517 - DNA, 25 bp, Homo sapien
gagagcattcttggcagatggaaca

SEQ ID NO: 1540518 - DNA, 25 bp, Homo sapien
gatccaggatagtctttctgagcag

SEQ ID NO: 1540519 - DNA, 25 bp, Homo sapien
taggacatttcacacgcaaaggagg

SEQ ID NO: 1540520 - DNA, 25 bp, Homo sapien
tggcatggacctaattaaagtgatc

SEQ ID NO: 1540521 - DNA, 25 bp, Homo sapien
gtgcaatggtacatgaagtttcagg

SEQ ID NO: 1540522 - DNA, 25 bp, Homo sapien
agtggctgtcttacagaagagagat

SEQ ID NO: 1540523 - DNA, 25 bp, Homo sapien
agagagattactggaacagcattgc

SEQ ID NO: 1540524 - DNA, 25 bp, Homo sapien
gaggctttccttgtagactgcagtg

SEQ ID NO: 1540525 - DNA, 25 bp, Homo sapien
gcttctatatagattgacaactgaa

SEQ ID NO: 1540526 - DNA, 25 bp, Homo sapien
tctatatagattgacaactgaatgt

SEQ ID NO: 1540527 - DNA, 25 bp, Homo sapien
tatagattgacaactgaatgtttta

SEQ ID NO: 1540528 - DNA, 25 bp, Homo sapien
gttttaagcttctatatagattgac

SEQ ID NO: 1540529 - DNA, 25 bp, Homo sapien
aagccacattgttatatatggaggc

SEQ ID NO: 1540530 - DNA, 25 bp, Homo sapien
gccacattgttatatatggaggcat

SEQ ID NO: 1540531 - DNA, 25 bp, Homo sapien
cagaaagccacattgttatatatgg

SEQ ID NO: 1540532 - DNA, 25 bp, Homo sapien
cacattgttatatatggaggcatga

SEQ ID NO: 1540533 - DNA, 25 bp, Homo sapien
atttgaagttgcaccaatttttggc

SEQ ID NO: 1540534 - DNA, 25 bp, Homo sapien
ttatttgaagttgcaccaatttttg

SEQ ID NO: 1540535 - DNA, 25 bp, Homo sapien
ggctcctaaggccaacagattactt

SEQ ID NO: 1540536 - DNA, 25 bp, Homo sapien
gccaacagattacttctaaccttta

SEQ ID NO: 1540537 - DNA, 25 bp, Homo sapien
taatgccactagtgacaattaggag

SEQ ID NO: 1540538 - DNA, 25 bp, Homo sapien
cattcagggtacgaataatggatcc

SEQ ID NO: 1540539 - DNA, 25 bp, Homo sapien
gatttaaagggctcaggtgttagca

SEQ ID NO: 1540540 - DNA, 25 bp, Homo sapien
tcttagggaggtgacaataagcatg

SEQ ID NO: 1540541 - DNA, 25 bp, Homo sapien
gatggcaggcatagtttcatccaag

SEQ ID NO: 1540542 - DNA, 25 bp, Homo sapien
ttaagtccgtgaccctgaagtaaga

SEQ ID NO: 1540543 - DNA, 25 bp, Homo sapien
gtttcatgggcccagaacgagaagt

SEQ ID NO: 1540544 - DNA, 25 bp, Homo sapien
ggttagccattagtccaccaagatg

SEQ ID NO: 1540545 - DNA, 25 bp, Homo sapien
ccgtgacagccatgttggatcacaa

SEQ ID NO: 1540546 - DNA, 25 bp, Homo sapien
gctacagtttgctttattgcatcaa

SEQ ID NO: 1540547 - DNA, 25 bp, Homo sapien
caagtccgtgacagccatgttggat

SEQ ID NO: 1540548 - DNA, 25 bp, Homo sapien
gctttattgcatcaagtccgtgaca

SEQ ID NO: 1540549 - DNA, 25 bp, Homo sapien
atatgaactcatttaggcattgtca

SEQ ID NO: 1540550 - DNA, 25 bp, Homo sapien
tatgaactcatttaggcattgtcag

SEQ ID NO: 1540551 - DNA, 25 bp, Homo sapien
gctgtaaatatagcctcatacgata

SEQ ID NO: 1540552 - DNA, 25 bp, Homo sapien
tcaggtatcaatgtctatccgtgct

SEQ ID NO: 1540553 - DNA, 25 bp, Homo sapien
ccatgtagggttgctagtcagttaa

SEQ ID NO: 1540554 - DNA, 25 bp, Homo sapien
tccagaataataggtagcaatatgt

SEQ ID NO: 1540555 - DNA, 25 bp, Homo sapien
cctaaacctgataatatagctggag

SEQ ID NO: 1540556 - DNA, 25 bp, Homo sapien
gctgtagcacagtatatatcatgag

SEQ ID NO: 1540557 - DNA, 25 bp, Homo sapien
aaatcctgtgatggtgaagactgca

SEQ ID NO: 1540558 - DNA, 25 bp, Homo sapien
tgttaggcctccaactgtcagcagg

SEQ ID NO: 1540559 - DNA, 25 bp, Homo sapien
aaaggacggttgcttgaaagtgtgc

SEQ ID NO: 1540560 - DNA, 25 bp, Homo sapien
aattagcagggcattatgtcacatg

SEQ ID NO: 1540561 - DNA, 25 bp, Homo sapien
ggtaaatgatctggtaacttcagtg

SEQ ID NO: 1540562 - DNA, 25 bp, Homo sapien
gacgtgttgctgttattggtaataa

SEQ ID NO: 1540563 - DNA, 25 bp, Homo sapien
gctcaggtgaataaaggctggtcac

SEQ ID NO: 1540564 - DNA, 25 bp, Homo sapien
ctgatccgtaggtggcagcactttg

SEQ ID NO: 1540565 - DNA, 25 bp, Homo sapien
taatacagctgatccgtaggtggca

SEQ ID NO: 1540566 - DNA, 25 bp, Homo sapien
tgctgatgagaaccatgacataaag

SEQ ID NO: 1540567 - DNA, 25 bp, Homo sapien
cccttctttgatgccaatggactag

SEQ ID NO: 1540568 - DNA, 25 bp, Homo sapien
cagtccctaagccaaatatactttc

SEQ ID NO: 1540569 - DNA, 25 bp, Homo sapien
gggaatcccctagcatgaccatgca

SEQ ID NO: 1540570 - DNA, 25 bp, Homo sapien
cttttaagctgtatgtgcagtccct

SEQ ID NO: 1540571 - DNA, 25 bp, Homo sapien
cccggccgagaatttgtctaattca

SEQ ID NO: 1540572 - DNA, 25 bp, Homo sapien
cgcccggccgagaatttgtctaatt

SEQ ID NO: 1540573 - DNA, 25 bp, Homo sapien
gccgagaatttgtctaattcagata

SEQ ID NO: 1540574 - DNA, 25 bp, Homo sapien
agaatttgtctaattcagatactcc

SEQ ID NO: 1540575 - DNA, 25 bp, Homo sapien
cttgggatttcccggaatgtaccag

SEQ ID NO: 1540576 - DNA, 25 bp, Homo sapien
ggatttcccggaatgtaccagttca

SEQ ID NO: 1540577 - DNA, 25 bp, Homo sapien
actggcatccagtaccttgctatag

SEQ ID NO: 1540578 - DNA, 25 bp, Homo sapien
cccggaatgtaccagttcagagtga

SEQ ID NO: 1540579 - DNA, 25 bp, Homo sapien
agaggatgatcatagtcaagttcac

SEQ ID NO: 1540580 - DNA, 25 bp, Homo sapien
tgagagaggatgatcatagtcaagt

SEQ ID NO: 1540581 - DNA, 25 bp, Homo sapien
ctacaaagtcaagcaaagtaattat

SEQ ID NO: 1540582 - DNA, 25 bp, Homo sapien
tattctgccttctacaaccctcttg

SEQ ID NO: 1540583 - DNA, 25 bp, Homo sapien
gaaagtaacagcacctagggtcctg

SEQ ID NO: 1540584 - DNA, 25 bp, Homo sapien
tgggcatgcctctgttctactgtgg

SEQ ID NO: 1540585 - DNA, 25 bp, Homo sapien
gaactagtgttcaaagaccgccgag

SEQ ID NO: 1540586 - DNA, 25 bp, Homo sapien
tctaaaaaaccatgccccacgtgag

SEQ ID NO: 1540587 - DNA, 25 bp, Homo sapien
cacaactatggcaagtaggtggctc

SEQ ID NO: 1540588 - DNA, 25 bp, Homo sapien
tacaatggcttatggtgcttcaaag

SEQ ID NO: 1540589 - DNA, 25 bp, Homo sapien
tgcgtgcagccaacccatgtattct

SEQ ID NO: 1540590 - DNA, 25 bp, Homo sapien
gacgatgatattgcctcaaaggagg

SEQ ID NO: 1540591 - DNA, 25 bp, Homo sapien
tattatgtccagatctgataggtgt

SEQ ID NO: 1540592 - DNA, 25 bp, Homo sapien
tggccagcaccttcagttagttgct

SEQ ID NO: 1540593 - DNA, 25 bp, Homo sapien
ttttacatgttgaatgaccgttgac

SEQ ID NO: 1540594 - DNA, 25 bp, Homo sapien
caaggaacttagtccagtaggatct

SEQ ID NO: 1540595 - DNA, 25 bp, Homo sapien
actacctgatagtaattttcagaca

SEQ ID NO: 1540596 - DNA, 25 bp, Homo sapien
tgagcacaggggactataactatag

SEQ ID NO: 1540597 - DNA, 25 bp, Homo sapien
tgtcctatgtccttacatatttacc

SEQ ID NO: 1540598 - DNA, 25 bp, Homo sapien
acatatatacttctgaactacctga

SEQ ID NO: 1540599 - DNA, 25 bp, Homo sapien
tccgaaacgttttctacctccagca

SEQ ID NO: 1540600 - DNA, 25 bp, Homo sapien
aaacgttttctacctccagcaacat

SEQ ID NO: 1540601 - DNA, 25 bp, Homo sapien
gaaacgttttctacctccagcaaca

SEQ ID NO: 1540602 - DNA, 25 bp, Homo sapien
gatggtgaggctttacccctggaag

SEQ ID NO: 1540603 - DNA, 25 bp, Homo sapien
tgttaatgctcctagcgcttggccc

SEQ ID NO: 1540604 - DNA, 25 bp, Homo sapien
gaatcgtgcggttacagctgctgca

SEQ ID NO: 1540605 - DNA, 25 bp, Homo sapien
tgtgacacggacatcattaagccag

SEQ ID NO: 1540606 - DNA, 25 bp, Homo sapien
tgggaataccggtgtcctggctggg

SEQ ID NO: 1540607 - DNA, 25 bp, Homo sapien
aaagtagttcttgtatggtgctggg

SEQ ID NO: 1540608 - DNA, 25 bp, Homo sapien
tatggtgctgggaataccggtgtcc

SEQ ID NO: 1540609 - DNA, 25 bp, Homo sapien
gttcttgtatggtgctgggaatacc

SEQ ID NO: 1540610 - DNA, 25 bp, Homo sapien
gctcgcagcttttgggttgcttcat

SEQ ID NO: 1540611 - DNA, 25 bp, Homo sapien
ggaaccgctcgcagcttttgggttg

SEQ ID NO: 1540612 - DNA, 25 bp, Homo sapien
aaccgctcgcagcttttgggttgct

SEQ ID NO: 1540613 - DNA, 25 bp, Homo sapien
cgggaaccgctcgcagcttttgggt

SEQ ID NO: 1540614 - DNA, 25 bp, Homo sapien
gctgttatgtcttgacgcacggagc

SEQ ID NO: 1540615 - DNA, 25 bp, Homo sapien
ttgacgcacggagcttgtctgcgcc

SEQ ID NO: 1540616 - DNA, 25 bp, Homo sapien
gtctgcgccggccaggtgagtgggc

SEQ ID NO: 1540617 - DNA, 25 bp, Homo sapien
cacggagcttgtctgcgccggccag

SEQ ID NO: 1540618 - DNA, 25 bp, Homo sapien
taatgaaatagggtaggctcggacc

SEQ ID NO: 1540619 - DNA, 25 bp, Homo sapien
atcgttctgttctggagcgccggac

SEQ ID NO: 1540620 - DNA, 25 bp, Homo sapien
atgacattcccctgaaggcaccacg

SEQ ID NO: 1540621 - DNA, 25 bp, Homo sapien
ggtaagtcccacagttcgagcaagg

SEQ ID NO: 1540622 - DNA, 25 bp, Homo sapien
gaacctggctgtacgaggatggaca

SEQ ID NO: 1540623 - DNA, 25 bp, Homo sapien
tgtacgaggatggacacagtgcaga

SEQ ID NO: 1540624 - DNA, 25 bp, Homo sapien
cctggctgtacgaggatggacacag

SEQ ID NO: 1540625 - DNA, 25 bp, Homo sapien
agggaacctggctgtacgaggatgg

SEQ ID NO: 1540626 - DNA, 25 bp, Homo sapien
cacaagaactgctcagtcttccgca

SEQ ID NO: 1540627 - DNA, 25 bp, Homo sapien
ggttttacactcacaagaactgctc

SEQ ID NO: 1540628 - DNA, 25 bp, Homo sapien
ccgcaggattattctgctggagaag

SEQ ID NO: 1540629 - DNA, 25 bp, Homo sapien
tcagtcttccgcaggattattctgc

SEQ ID NO: 1540630 - DNA, 25 bp, Homo sapien
tctctgtacaatttcctctgggtag

SEQ ID NO: 1540631 - DNA, 25 bp, Homo sapien
cagtgagaccaagttattataattc

SEQ ID NO: 1540632 - DNA, 25 bp, Homo sapien
acaatttcctctgggtagtgtccag

SEQ ID NO: 1540633 - DNA, 25 bp, Homo sapien
tgtacaatttcctctgggtagtgtc

SEQ ID NO: 1540634 - DNA, 25 bp, Homo sapien
aatcacatctggctttgagccagaa

SEQ ID NO: 1540635 - DNA, 25 bp, Homo sapien
acatccctcgccaccacgcagggct

SEQ ID NO: 1540636 - DNA, 25 bp, Homo sapien
cacatctggctttgagccagaatat

SEQ ID NO: 1540637 - DNA, 25 bp, Homo sapien
tgtcacatccctcgccaccacgcag

SEQ ID NO: 1540638 - DNA, 25 bp, Homo sapien
ggccgtgactggcaatgagggcttc

SEQ ID NO: 1540639 - DNA, 25 bp, Homo sapien
ccgtgactggcaatgagggcttcca

SEQ ID NO: 1540640 - DNA, 25 bp, Homo sapien
cgtgactggcaatgagggcttccat

SEQ ID NO: 1540641 - DNA, 25 bp, Homo sapien
tgactggcaatgagggcttccatct

SEQ ID NO: 1540642 - DNA, 25 bp, Homo sapien
caacttagttgcctgtcacgggctg

SEQ ID NO: 1540643 - DNA, 25 bp, Homo sapien
gactgtaaagaaacataatggaaag

SEQ ID NO: 1540644 - DNA, 25 bp, Homo sapien
catgatagacatgttctacatcttg

SEQ ID NO: 1540645 - DNA, 25 bp, Homo sapien
caagactcacgtgtttgtccaaaat

SEQ ID NO: 1540646 - DNA, 25 bp, Homo sapien
taacccgaggtaacaaagcatacat

SEQ ID NO: 1540647 - DNA, 25 bp, Homo sapien
tttattcatgcctgcgaaagactag

SEQ ID NO: 1540648 - DNA, 25 bp, Homo sapien
tatacttatataatccatgaatccc

SEQ ID NO: 1540649 - DNA, 25 bp, Homo sapien
cttgtaaacaagcactcataatagc

SEQ ID NO: 1540650 - DNA, 25 bp, Homo sapien
gacagtaaaatgctcagtggtttct

SEQ ID NO: 1540651 - DNA, 25 bp, Homo sapien
tacatgatagtctgaaaaaggcaaa

SEQ ID NO: 1540652 - DNA, 25 bp, Homo sapien
tactcagcaatcatttctttggtgt

SEQ ID NO: 1540653 - DNA, 25 bp, Homo sapien
agctttattcaaaacttccaatact

SEQ ID NO: 1540654 - DNA, 25 bp, Homo sapien
gaaaggcttgccctaccgactgtaa

SEQ ID NO: 1540655 - DNA, 25 bp, Homo sapien
gctatttagttacacacaagtcaag

SEQ ID NO: 1540656 - DNA, 25 bp, Homo sapien
tcagctcctcgattgtgtcataaca

SEQ ID NO: 1540657 - DNA, 25 bp, Homo sapien
ccgactgtaaggcagtctatgtcct

SEQ ID NO: 1540658 - DNA, 25 bp, Homo sapien
taaggactgaacgaagcataaaggc

SEQ ID NO: 1540659 - DNA, 25 bp, Homo sapien
ttctgatgacgggtaagttgtccgc

SEQ ID NO: 1540660 - DNA, 25 bp, Homo sapien
gagggacgttttctatcagttgaca

SEQ ID NO: 1540661 - DNA, 25 bp, Homo sapien
ttttatgccgattaagctgtccacg

SEQ ID NO: 1540662 - DNA, 25 bp, Homo sapien
aaagatgtgaatattgtctaaaggc

SEQ ID NO: 1540663 - DNA, 25 bp, Homo sapien
taaagatgtgaatattgtctaaagg

SEQ ID NO: 1540664 - DNA, 25 bp, Homo sapien
tgatattctataaatagagcatgac

SEQ ID NO: 1540665 - DNA, 25 bp, Homo sapien
acatcaacacattgacagaacttct

SEQ ID NO: 1540666 - DNA, 25 bp, Homo sapien
gagcatgacatggaaaccttttctt

SEQ ID NO: 1540667 - DNA, 25 bp, Homo sapien
cattgacagaacttctggccataaa

SEQ ID NO: 1540668 - DNA, 25 bp, Homo sapien
ttacagctgaggtaccaagaagcaa

SEQ ID NO: 1540669 - DNA, 25 bp, Homo sapien
tatcacacagatagtagagtagtgg

SEQ ID NO: 1540670 - DNA, 25 bp, Homo sapien
atgttggaaacaaccacacttttag

SEQ ID NO: 1540671 - DNA, 25 bp, Homo sapien
tgctgttgctagaacacttttccac

SEQ ID NO: 1540672 - DNA, 25 bp, Homo sapien
aatttgtcatctccattgcatcttc

SEQ ID NO: 1540673 - DNA, 25 bp, Homo sapien
catgaaatgtaagtgatgagtggtt

SEQ ID NO: 1540674 - DNA, 25 bp, Homo sapien
gaaatgtaagtgatgagtggttttt

SEQ ID NO: 1540675 - DNA, 25 bp, Homo sapien
atgtaagtgatgagtggtttttcca

SEQ ID NO: 1540676 - DNA, 25 bp, Homo sapien
cataggaattgttacgggaacacaa

SEQ ID NO: 1540677 - DNA, 25 bp, Homo sapien
ctcttttgcactgtagactgctgac

SEQ ID NO: 1540678 - DNA, 25 bp, Homo sapien
cctcatgtggttgaaagagctagct

SEQ ID NO: 1540679 - DNA, 25 bp, Homo sapien
tgggattcgtgtttcaacataggaa

SEQ ID NO: 1540680 - DNA, 25 bp, Homo sapien
gccttagttatctgggctgcataac

SEQ ID NO: 1540681 - DNA, 25 bp, Homo sapien
ctaatggagtgccttagttatctgg

SEQ ID NO: 1540682 - DNA, 25 bp, Homo sapien
ccttagttatctgggctgcataaca

SEQ ID NO: 1540683 - DNA, 25 bp, Homo sapien
tttatattctaatggagtgccttag

SEQ ID NO: 1540684 - DNA, 25 bp, Homo sapien
acagcacttaatcctttacattgtc

SEQ ID NO: 1540685 - DNA, 25 bp, Homo sapien
cttaatcctttacattgtctatgat

SEQ ID NO: 1540686 - DNA, 25 bp, Homo sapien
aatcctttacattgtctatgatgca

SEQ ID NO: 1540687 - DNA, 25 bp, Homo sapien
tttacattgtctatgatgcaaagac

SEQ ID NO: 1540688 - DNA, 25 bp, Homo sapien
catgtggctcagaccttcgagtaca

SEQ ID NO: 1540689 - DNA, 25 bp, Homo sapien
cctcatgaggtgtgtttcaggcaag

SEQ ID NO: 1540690 - DNA, 25 bp, Homo sapien
ggaaggcttttagagtacgacaaca

SEQ ID NO: 1540691 - DNA, 25 bp, Homo sapien
aaggcctttaggcagtatgcacacc

SEQ ID NO: 1540692 - DNA, 25 bp, Homo sapien
atgagccacagcaccagccatgcct

SEQ ID NO: 1540693 - DNA, 25 bp, Homo sapien
tccaggctcatctccaacttctggc

SEQ ID NO: 1540694 - DNA, 25 bp, Homo sapien
ggcctcaagttattgtcctgcttca

SEQ ID NO: 1540695 - DNA, 25 bp, Homo sapien
ttccgagtagccgagaccacaggtg

SEQ ID NO: 1540696 - DNA, 25 bp, Homo sapien
tgagctaaacagaaagtggacttta

SEQ ID NO: 1540697 - DNA, 25 bp, Homo sapien
tctgaatgaagccaaacttgaagct

SEQ ID NO: 1540698 - DNA, 25 bp, Homo sapien
tgggagcacctttatattttgcaca

SEQ ID NO: 1540699 - DNA, 25 bp, Homo sapien
ttttggcaggacatagtggagcagt

SEQ ID NO: 1540700 - DNA, 25 bp, Homo sapien
tccagcctctcagttgctgtgggag

SEQ ID NO: 1540701 - DNA, 25 bp, Homo sapien
gatgcaaatctaccaccaagagctg

SEQ ID NO: 1540702 - DNA, 25 bp, Homo sapien
tgtaagggcctaactttggtggctg

SEQ ID NO: 1540703 - DNA, 25 bp, Homo sapien
ggattctgttccctaatgcagtagt

SEQ ID NO: 1540704 - DNA, 25 bp, Homo sapien
tatttactggatggtagtgttcatt

SEQ ID NO: 1540705 - DNA, 25 bp, Homo sapien
taaattatttactggatggtagtgt

SEQ ID NO: 1540706 - DNA, 25 bp, Homo sapien
ctgttttctgaagggcccgaccagc

SEQ ID NO: 1540707 - DNA, 25 bp, Homo sapien
aagcggctgagactataagcgccca

SEQ ID NO: 1540708 - DNA, 25 bp, Homo sapien
gcttggactacatattacaaaggca

SEQ ID NO: 1540709 - DNA, 25 bp, Homo sapien
gtacctgcggtcctgactgttctgg

SEQ ID NO: 1540710 - DNA, 25 bp, Homo sapien
ttctcaccggtacctgcggtcctga

SEQ ID NO: 1540711 - DNA, 25 bp, Homo sapien
gttctggcttggactacatattaca

SEQ ID NO: 1540712 - DNA, 25 bp, Homo sapien
ccagtagtggccgatctgcgcatgc

SEQ ID NO: 1540713 - DNA, 25 bp, Homo sapien
atgcgcactcgaggcaaggcggcca

SEQ ID NO: 1540714 - DNA, 25 bp, Homo sapien
ggtcgctgccgtatttctcgtaggt

SEQ ID NO: 1540715 - DNA, 25 bp, Homo sapien
cgcggtccaagtggtcgctgccgta

SEQ ID NO: 1540716 - DNA, 25 bp, Homo sapien
tattaaaagtcccagtcccatgtgt

SEQ ID NO: 1540717 - DNA, 25 bp, Homo sapien
ccatgtgttaccaaggaggccggct

SEQ ID NO: 1540718 - DNA, 25 bp, Homo sapien
tccatttacttagcgcttgacgaga

SEQ ID NO: 1540719 - DNA, 25 bp, Homo sapien
gtgatcccttccgaggctacctgga

SEQ ID NO: 1540720 - DNA, 25 bp, Homo sapien
gccagcatgaaagcctttagccacc

SEQ ID NO: 1540721 - DNA, 25 bp, Homo sapien
tgtgaaaccttcaacacagttttat

SEQ ID NO: 1540722 - DNA, 25 bp, Homo sapien
cacaaagttgtgaaaccttcaacac

SEQ ID NO: 1540723 - DNA, 25 bp, Homo sapien
acattttcatcacgccagcatgaaa

SEQ ID NO: 1540724 - DNA, 25 bp, Homo sapien
tgaacccggagcataggctgcagtg

SEQ ID NO: 1540725 - DNA, 25 bp, Homo sapien
tctcacaagattgacgtgcactgtg

SEQ ID NO: 1540726 - DNA, 25 bp, Homo sapien
tgtatctaagaattacctcggaact

SEQ ID NO: 1540727 - DNA, 25 bp, Homo sapien
ttacctactaacacttaagtctgag

SEQ ID NO: 1540728 - DNA, 25 bp, Homo sapien
gtagtgtcagcgtgaacattgtgtc

SEQ ID NO: 1540729 - DNA, 25 bp, Homo sapien
agcgtgaacattgtgtctgtagtgt

SEQ ID NO: 1540730 - DNA, 25 bp, Homo sapien
cagccaaagttctgtagtgtcagcg

SEQ ID NO: 1540731 - DNA, 25 bp, Homo sapien
tagtgtcagcgtgatcatttgttgt

SEQ ID NO: 1540732 - DNA, 25 bp, Homo sapien
cgctacactccagtttgagtgacag

SEQ ID NO: 1540733 - DNA, 25 bp, Homo sapien
gtctaaagattttgaccaggtgcag

SEQ ID NO: 1540734 - DNA, 25 bp, Homo sapien
tagatatcgtcattatttgtgttgc

SEQ ID NO: 1540735 - DNA, 25 bp, Homo sapien
taaatatgacctattatagatatcg

SEQ ID NO: 1540736 - DNA, 25 bp, Homo sapien
caatagtgcttttagccatggcaca

SEQ ID NO: 1540737 - DNA, 25 bp, Homo sapien
tcaagagcctacatgaaacccaggc

SEQ ID NO: 1540738 - DNA, 25 bp, Homo sapien
ggcacatgccttacctgtcatcact

SEQ ID NO: 1540739 - DNA, 25 bp, Homo sapien
tttttaaatcgccacacctgacacc

SEQ ID NO: 1540740 - DNA, 25 bp, Homo sapien
cttagacagtgagagtgccaggaga

SEQ ID NO: 1540741 - DNA, 25 bp, Homo sapien
ttcggaagaggcttaactgagtgct

SEQ ID NO: 1540742 - DNA, 25 bp, Homo sapien
tgtactcagaatgccagtcgtggtg

SEQ ID NO: 1540743 - DNA, 25 bp, Homo sapien
cacactggcaggctggcttagacag

SEQ ID NO: 1540744 - DNA, 25 bp, Homo sapien
taagaccgtaaagagtacgagcgcg

SEQ ID NO: 1540745 - DNA, 25 bp, Homo sapien
gagcgcgccattcatcatcagacag

SEQ ID NO: 1540746 - DNA, 25 bp, Homo sapien
cagatatggttcagcccttaaagcc

SEQ ID NO: 1540747 - DNA, 25 bp, Homo sapien
gaaaccctatgtgtgtaagcagtgt

SEQ ID NO: 1540748 - DNA, 25 bp, Homo sapien
tgatgtttaactgctgatgactcct

SEQ ID NO: 1540749 - DNA, 25 bp, Homo sapien
ctgcagctttggccgcctaggctct

SEQ ID NO: 1540750 - DNA, 25 bp, Homo sapien
gatgtttaactgctgatgactcctc

SEQ ID NO: 1540751 - DNA, 25 bp, Homo sapien
tggccgcctaggctctagaaattct

SEQ ID NO: 1540752 - DNA, 25 bp, Homo sapien
tgttccaagatgcatccagttaggg

SEQ ID NO: 1540753 - DNA, 25 bp, Homo sapien
ctaggaaactgacatgagactctcc

SEQ ID NO: 1540754 - DNA, 25 bp, Homo sapien
gagactctccattgggatttcacca

SEQ ID NO: 1540755 - DNA, 25 bp, Homo sapien
gtcttgacagaccatgccagtagtg

SEQ ID NO: 1540756 - DNA, 25 bp, Homo sapien
tgaccaaagagcctgccaagatgag

SEQ ID NO: 1540757 - DNA, 25 bp, Homo sapien
gacattctcccaacttttctaggaa

SEQ ID NO: 1540758 - DNA, 25 bp, Homo sapien
tagtcgctgtatgttcccagttctc

SEQ ID NO: 1540759 - DNA, 25 bp, Homo sapien
tcccggctgttgataatgaccaaag

SEQ ID NO: 1540760 - DNA, 25 bp, Homo sapien
tcttcgccagcgcaataagtctctg

SEQ ID NO: 1540761 - DNA, 25 bp, Homo sapien
tctacactcaaacagcccgaggctt

SEQ ID NO: 1540762 - DNA, 25 bp, Homo sapien
cttcgggcagcctcgagttcggatt

SEQ ID NO: 1540763 - DNA, 25 bp, Homo sapien
tataacaagactggacttcctcagg

SEQ ID NO: 1540764 - DNA, 25 bp, Homo sapien
ttatcgatgcagcaaccttttacat

SEQ ID NO: 1540765 - DNA, 25 bp, Homo sapien
cagaaattgattatcgatgcagcaa

SEQ ID NO: 1540766 - DNA, 25 bp, Homo sapien
gattatcgatgcagcaaccttttac

SEQ ID NO: 1540767 - DNA, 25 bp, Homo sapien
aattgattatcgatgcagcaacctt

SEQ ID NO: 1540768 - DNA, 25 bp, Homo sapien
caaaatgcaggtattgtaggcgtga

SEQ ID NO: 1540769 - DNA, 25 bp, Homo sapien
tcccaaaatgcaggtattgtaggcg

SEQ ID NO: 1540770 - DNA, 25 bp, Homo sapien
aaatgcaggtattgtaggcgtgagc

SEQ ID NO: 1540771 - DNA, 25 bp, Homo sapien
ccaaaatgcaggtattgtaggcgtg

SEQ ID NO: 1540772 - DNA, 25 bp, Homo sapien
accgcacccggccatcttcttcttc

SEQ ID NO: 1540773 - DNA, 25 bp, Homo sapien
caccgcacccggccatcttcttctt

SEQ ID NO: 1540774 - DNA, 25 bp, Homo sapien
ccgcacccggccatcttcttcttct

SEQ ID NO: 1540775 - DNA, 25 bp, Homo sapien
gatgtgaccacgaggaccgcgcgcc

SEQ ID NO: 1540776 - DNA, 25 bp, Homo sapien
atacggatgtgaccacgaggaccgc

SEQ ID NO: 1540777 - DNA, 25 bp, Homo sapien
accgcgcgagcctgggacacctctg

SEQ ID NO: 1540778 - DNA, 25 bp, Homo sapien
gaaatacggatgtgaccacgaggac

SEQ ID NO: 1540779 - DNA, 25 bp, Homo sapien
tgtctccctagagatgagccccttc

SEQ ID NO: 1540780 - DNA, 25 bp, Homo sapien
agccccttccttcgcagctccagca

SEQ ID NO: 1540781 - DNA, 25 bp, Homo sapien
ctcagtctccacgtcacaaaggaga

SEQ ID NO: 1540782 - DNA, 25 bp, Homo sapien
acaaaggagacgttctccacctgtc

SEQ ID NO: 1540783 - DNA, 25 bp, Homo sapien
gctcagctttaaatccagagcccag

SEQ ID NO: 1540784 - DNA, 25 bp, Homo sapien
aaggcgatttatgactaatctcaaa

SEQ ID NO: 1540785 - DNA, 25 bp, Homo sapien
gcagccagatagtcagcaatctcct

SEQ ID NO: 1540786 - DNA, 25 bp, Homo sapien
tagtcttcccggataatgtgctcca

SEQ ID NO: 1540787 - DNA, 25 bp, Homo sapien
gataatgtgctccacacggatccga

SEQ ID NO: 1540788 - DNA, 25 bp, Homo sapien
cgagctcgttcatctttcccagcag

SEQ ID NO: 1540789 - DNA, 25 bp, Homo sapien
gcagcccagatcaatgtagacacag

SEQ ID NO: 1540790 - DNA, 25 bp, Homo sapien
gatcaatgtagacacagattcagcc

SEQ ID NO: 1540791 - DNA, 25 bp, Homo sapien
gagtcgaggagcagcccagatcaat

SEQ ID NO: 1540792 - DNA, 25 bp, Homo sapien
caatgtagacacagattcagccaga

SEQ ID NO: 1540793 - DNA, 25 bp, Homo sapien
tcattcacagttccaatctggttgg

SEQ ID NO: 1540794 - DNA, 25 bp, Homo sapien
cattcacagttccaatctggttggt

SEQ ID NO: 1540795 - DNA, 25 bp, Homo sapien
attcacagttccaatctggttggtc

SEQ ID NO: 1540796 - DNA, 25 bp, Homo sapien
gcaatttcaatcaggtatctctcca

SEQ ID NO: 1540797 - DNA, 25 bp, Homo sapien
aggtatctctccaccaggattttgg

SEQ ID NO: 1540798 - DNA, 25 bp, Homo sapien
tctgtgaatccaacatcaataagat

SEQ ID NO: 1540799 - DNA, 25 bp, Homo sapien
catcaataagatctgtctctacccc

SEQ ID NO: 1540800 - DNA, 25 bp, Homo sapien
taagtccccattggcagtccattga

SEQ ID NO: 1540801 - DNA, 25 bp, Homo sapien
ttccatcaggtccaccaactggtgc

SEQ ID NO: 1540802 - DNA, 25 bp, Homo sapien
gatattcttatcagcattaatgtca

SEQ ID NO: 1540803 - DNA, 25 bp, Homo sapien
tccctttggcagtggatatgagaaa

SEQ ID NO: 1540804 - DNA, 25 bp, Homo sapien
caggaaggaagctttgcagaggctt

SEQ ID NO: 1540805 - DNA, 25 bp, Homo sapien
ggcttctggcttgggtccaggacca

SEQ ID NO: 1540806 - DNA, 25 bp, Homo sapien
cttctggcttgggtccaggaccaac

SEQ ID NO: 1540807 - DNA, 25 bp, Homo sapien
gcagaggcttctggcttgggtccag

SEQ ID NO: 1540808 - DNA, 25 bp, Homo sapien
tggtaggacaaagttgtcatagtta

SEQ ID NO: 1540809 - DNA, 25 bp, Homo sapien
caaagttgtcatagttatccgcagg

SEQ ID NO: 1540810 - DNA, 25 bp, Homo sapien
aggacaaagttgtcatagttatccg

SEQ ID NO: 1540811 - DNA, 25 bp, Homo sapien
gacaaagttgtcatagttatccgca

SEQ ID NO: 1540812 - DNA, 25 bp, Homo sapien
atggagattctttgttacaaggaga

SEQ ID NO: 1540813 - DNA, 25 bp, Homo sapien
gagaaattgctcagtctcaactccc

SEQ ID NO: 1540814 - DNA, 25 bp, Homo sapien
aggagaaattgctcagtctcaactc

SEQ ID NO: 1540815 - DNA, 25 bp, Homo sapien
ggagattctttgttacaaggagaaa

SEQ ID NO: 1540816 - DNA, 25 bp, Homo sapien
tggtctccccatagtgctttcccat

SEQ ID NO: 1540817 - DNA, 25 bp, Homo sapien
tctccccatagtgctttcccatcct

SEQ ID NO: 1540818 - DNA, 25 bp, Homo sapien
ggtggtctccccatagtgctttccc

SEQ ID NO: 1540819 - DNA, 25 bp, Homo sapien
tccccatagtgctttcccatcctct

SEQ ID NO: 1540820 - DNA, 25 bp, Homo sapien
ctggatcccggtgggacagtgccct

SEQ ID NO: 1540821 - DNA, 25 bp, Homo sapien
tccaggaaccgttacaatggcgtcc

SEQ ID NO: 1540822 - DNA, 25 bp, Homo sapien
cccagcttccaggaaccgttacaat

SEQ ID NO: 1540823 - DNA, 25 bp, Homo sapien
tttgcaactggatcccggtgggaca

SEQ ID NO: 1540824 - DNA, 25 bp, Homo sapien
gcagtggacaactacagccacattt

SEQ ID NO: 1540825 - DNA, 25 bp, Homo sapien
tggacaactacagccacatttgcac

SEQ ID NO: 1540826 - DNA, 25 bp, Homo sapien
aaagcagtggacaactacagccaca

SEQ ID NO: 1540827 - DNA, 25 bp, Homo sapien
ggaaagcagtggacaactacagcca

SEQ ID NO: 1540828 - DNA, 25 bp, Homo sapien
gattatttcatacctcgaatccaaa

SEQ ID NO: 1540829 - DNA, 25 bp, Homo sapien
ccgtagttgattatttcatacctcg

SEQ ID NO: 1540830 - DNA, 25 bp, Homo sapien
gttcccgtagttgattatttcatac

SEQ ID NO: 1540831 - DNA, 25 bp, Homo sapien
gttgattatttcatacctcgaatcc

SEQ ID NO: 1540832 - DNA, 25 bp, Homo sapien
aatgaatgttttctataaatgtaca

SEQ ID NO: 1540833 - DNA, 25 bp, Homo sapien
catattgaattatctgatggagagt

SEQ ID NO: 1540834 - DNA, 25 bp, Homo sapien
tctccatattgaattatctgatgga

SEQ ID NO: 1540835 - DNA, 25 bp, Homo sapien
gatggagagtaagaaatgaatgttt

SEQ ID NO: 1540836 - DNA, 25 bp, Homo sapien
taaggtctgtatgacgaccaaaggc

SEQ ID NO: 1540837 - DNA, 25 bp, Homo sapien
gtctgtatgacgaccaaaggccttc

SEQ ID NO: 1540838 - DNA, 25 bp, Homo sapien
gtatgacgaccaaaggccttccaca

SEQ ID NO: 1540839 - DNA, 25 bp, Homo sapien
tgtactctaaggtctgtatgacgac

SEQ ID NO: 1540840 - DNA, 25 bp, Homo sapien
cattcctggcaatcacaggccttcc

SEQ ID NO: 1540841 - DNA, 25 bp, Homo sapien
ttcctggcaatcacaggccttccca

SEQ ID NO: 1540842 - DNA, 25 bp, Homo sapien
tcctggcaatcacaggccttcccac

SEQ ID NO: 1540843 - DNA, 25 bp, Homo sapien
cacattcctggcaatcacaggcctt

SEQ ID NO: 1540844 - DNA, 25 bp, Homo sapien
tgtaagacgactaaaggttgtccca

SEQ ID NO: 1540845 - DNA, 25 bp, Homo sapien
agacgactaaaggttgtcccacagt

SEQ ID NO: 1540846 - DNA, 25 bp, Homo sapien
taagacgactaaaggttgtcccaca

SEQ ID NO: 1540847 - DNA, 25 bp, Homo sapien
aagacgactaaaggttgtcccacag

SEQ ID NO: 1540848 - DNA, 25 bp, Homo sapien
gagcaaggtttgtggcacgactgaa

SEQ ID NO: 1540849 - DNA, 25 bp, Homo sapien
caggtttgaggcttgactgaaggcc

SEQ ID NO: 1540850 - DNA, 25 bp, Homo sapien
gacgtgtgactaaaggcgttcccac

SEQ ID NO: 1540851 - DNA, 25 bp, Homo sapien
taagttgatggttactcctaaaagc

SEQ ID NO: 1540852 - DNA, 25 bp, Homo sapien
gatgtactttgagacttgaactgag

SEQ ID NO: 1540853 - DNA, 25 bp, Homo sapien
ctgatgtactttgagacttgaactg

SEQ ID NO: 1540854 - DNA, 25 bp, Homo sapien
tgatgtactttgagacttgaactga

SEQ ID NO: 1540855 - DNA, 25 bp, Homo sapien
tgatatacttgaaggattgaactaa

SEQ ID NO: 1540856 - DNA, 25 bp, Homo sapien
gccataaagtatttcactggtatga

SEQ ID NO: 1540857 - DNA, 25 bp, Homo sapien
atatgccataaagtatttcactggt

SEQ ID NO: 1540858 - DNA, 25 bp, Homo sapien
tacttgaaggattgaactaaaccta

SEQ ID NO: 1540859 - DNA, 25 bp, Homo sapien
ctgccttttaaccttggctgcacag

SEQ ID NO: 1540860 - DNA, 25 bp, Homo sapien
tgccttttaaccttggctgcacagt

SEQ ID NO: 1540861 - DNA, 25 bp, Homo sapien
tcacagccctgtagggtgccacgtg

SEQ ID NO: 1540862 - DNA, 25 bp, Homo sapien
aggtcacgcgcagcgcggagccaaa

SEQ ID NO: 1540863 - DNA, 25 bp, Homo sapien
cgacggaatatccagacccgcagtc

SEQ ID NO: 1540864 - DNA, 25 bp, Homo sapien
tccgtcgtcagtgggaaacgtagtc

SEQ ID NO: 1540865 - DNA, 25 bp, Homo sapien
ctgtctcccaaagatgagcccccac

SEQ ID NO: 1540866 - DNA, 25 bp, Homo sapien
ggactcaatatctgatttcctggat

SEQ ID NO: 1540867 - DNA, 25 bp, Homo sapien
atttctctgtggcagtcatacttga

SEQ ID NO: 1540868 - DNA, 25 bp, Homo sapien
tcaggtaggactcaatatctgattt

SEQ ID NO: 1540869 - DNA, 25 bp, Homo sapien
ggtaggactcaatatctgatttcct

SEQ ID NO: 1540870 - DNA, 25 bp, Homo sapien
aggcccacatcgtccagaacttctt

SEQ ID NO: 1540871 - DNA, 25 bp, Homo sapien
tggtctgggtagatcctcttctttc

SEQ ID NO: 1540872 - DNA, 25 bp, Homo sapien
agattgaaggcccacatcgtccaga

SEQ ID NO: 1540873 - DNA, 25 bp, Homo sapien
tctattcccatcttagaagattgaa

SEQ ID NO: 1540874 - DNA, 25 bp, Homo sapien
ttattttggtgaggcagatgtagac

SEQ ID NO: 1540875 - DNA, 25 bp, Homo sapien
tcctcagggttcctctaccagagaa

SEQ ID NO: 1540876 - DNA, 25 bp, Homo sapien
tgcaagagtagatcagtcctcaggg

SEQ ID NO: 1540877 - DNA, 25 bp, Homo sapien
cctcagggttcctctaccagagaag

SEQ ID NO: 1540878 - DNA, 25 bp, Homo sapien
agaactgcaagagtagatcagtcct

SEQ ID NO: 1540879 - DNA, 25 bp, Homo sapien
ggcatctgccatcatgctgggctgt

SEQ ID NO: 1540880 - DNA, 25 bp, Homo sapien
catctgccatcatgctgggctgttt

SEQ ID NO: 1540881 - DNA, 25 bp, Homo sapien
tgccatcatgctgggctgtttttgt

SEQ ID NO: 1540882 - DNA, 25 bp, Homo sapien
catcatgctgggctgtttttgtatt

SEQ ID NO: 1540883 - DNA, 25 bp, Homo sapien
aaggtcttctgaacatggtcgagac

SEQ ID NO: 1540884 - DNA, 25 bp, Homo sapien
cattgatgcccgaaatggcaaaccc

SEQ ID NO: 1540885 - DNA, 25 bp, Homo sapien
tccctgaatgtcattgatgcccgaa

SEQ ID NO: 1540886 - DNA, 25 bp, Homo sapien
gaacatggtcgagacattcccactc

SEQ ID NO: 1540887 - DNA, 25 bp, Homo sapien
ccaatgatgtaattacatctggctt

SEQ ID NO: 1540888 - DNA, 25 bp, Homo sapien
tgctccaatgatgtaattacatctg

SEQ ID NO: 1540889 - DNA, 25 bp, Homo sapien
tccaatgatgtaattacatctggct

SEQ ID NO: 1540890 - DNA, 25 bp, Homo sapien
gctccaatgatgtaattacatctgg

SEQ ID NO: 1540891 - DNA, 25 bp, Homo sapien
tacacagatggcttcccacagtcag

SEQ ID NO: 1540892 - DNA, 25 bp, Homo sapien
cagatggcttcccacagtcagactt

SEQ ID NO: 1540893 - DNA, 25 bp, Homo sapien
atggcttcccacagtcagacttatt

SEQ ID NO: 1540894 - DNA, 25 bp, Homo sapien
ttcccacagtcagacttatttttac

SEQ ID NO: 1540895 - DNA, 25 bp, Homo sapien
tatcggagaaatcactctgggccaa

SEQ ID NO: 1540896 - DNA, 25 bp, Homo sapien
tttgtcagaacctgtaaagatcacc

SEQ ID NO: 1540897 - DNA, 25 bp, Homo sapien
gacattttcaagcaaggagcagaaa

SEQ ID NO: 1540898 - DNA, 25 bp, Homo sapien
gcttattcatgtggagcagcagcta

SEQ ID NO: 1540899 - DNA, 25 bp, Homo sapien
tccctagatccatgagaagaactgc

SEQ ID NO: 1540900 - DNA, 25 bp, Homo sapien
taggcttaacagaacgttgtggctg

SEQ ID NO: 1540901 - DNA, 25 bp, Homo sapien
tttccaccacaagtaactgcagcag

SEQ ID NO: 1540902 - DNA, 25 bp, Homo sapien
cattagcccctaacaggagacatgg

SEQ ID NO: 1540903 - DNA, 25 bp, Homo sapien
tcatgtgtcccactgactacaggca

SEQ ID NO: 1540904 - DNA, 25 bp, Homo sapien
gaccactgactagcctgtctttcca

SEQ ID NO: 1540905 - DNA, 25 bp, Homo sapien
tcaagactcatgtccacaaatctcc

SEQ ID NO: 1540906 - DNA, 25 bp, Homo sapien
gttatatttaccctcgactgtagtc

SEQ ID NO: 1540907 - DNA, 25 bp, Homo sapien
aacatcatacacttgacagaggccg

SEQ ID NO: 1540908 - DNA, 25 bp, Homo sapien
cagaggccgtgcttcaggtgaacaa

SEQ ID NO: 1540909 - DNA, 25 bp, Homo sapien
tgaacaaggtagtccttcagcctgt

SEQ ID NO: 1540910 - DNA, 25 bp, Homo sapien
ccctaaaacgtgtgatactcttgcc

SEQ ID NO: 1540911 - DNA, 25 bp, Homo sapien
tgaagttcactcctgtcgccagtgg

SEQ ID NO: 1540912 - DNA, 25 bp, Homo sapien
gatatgtatccatagccggccagag

SEQ ID NO: 1540913 - DNA, 25 bp, Homo sapien
tcacttatgggaacttgctgcggca

SEQ ID NO: 1540914 - DNA, 25 bp, Homo sapien
gctttttggagatcaccgtcgaacg

SEQ ID NO: 1540915 - DNA, 25 bp, Homo sapien
gatgaagaaccaaagaatgatgtgg

SEQ ID NO: 1540916 - DNA, 25 bp, Homo sapien
tctccttaaactggatggaaccctg

SEQ ID NO: 1540917 - DNA, 25 bp, Homo sapien
gactggcctgagactctataccggg

SEQ ID NO: 1540918 - DNA, 25 bp, Homo sapien
aatgatgtggttctactgagtgact

SEQ ID NO: 1540919 - DNA, 25 bp, Homo sapien
gatcctcctgtcttacttagccttc

SEQ ID NO: 1540920 - DNA, 25 bp, Homo sapien
cgatcctcctgtcttacttagcctt

SEQ ID NO: 1540921 - DNA, 25 bp, Homo sapien
tcgtaaggtgggacgagagatttgg

SEQ ID NO: 1540922 - DNA, 25 bp, Homo sapien
taaggtgggacgagagatttggaaa

SEQ ID NO: 1540923 - DNA, 25 bp, Homo sapien
tctcgtaaggtgggacgagagattt

SEQ ID NO: 1540924 - DNA, 25 bp, Homo sapien
cgtaaggtgggacgagagatttgga

SEQ ID NO: 1540925 - DNA, 25 bp, Homo sapien
tcttgatctcatgatctgccctcct

SEQ ID NO: 1540926 - DNA, 25 bp, Homo sapien
ctcttgatctcatgatctgccctcc

SEQ ID NO: 1540927 - DNA, 25 bp, Homo sapien
gtggcccgagtgacttccaggctgc

SEQ ID NO: 1540928 - DNA, 25 bp, Homo sapien
tcgcgggccccacgatcgcggcgtc

SEQ ID NO: 1540929 - DNA, 25 bp, Homo sapien
tccggtggcccgagtgacttccagg

SEQ ID NO: 1540930 - DNA, 25 bp, Homo sapien
agctccggtggcccgagtgacttcc

SEQ ID NO: 1540931 - DNA, 25 bp, Homo sapien
tgctacttagtgagagatggcgctg

SEQ ID NO: 1540932 - DNA, 25 bp, Homo sapien
gatggcgctggactagaaatacaat

SEQ ID NO: 1540933 - DNA, 25 bp, Homo sapien
caatcctggcacaaaagtcctatga

SEQ ID NO: 1540934 - DNA, 25 bp, Homo sapien
acagtcaggcagtctctgggccaga

SEQ ID NO: 1540935 - DNA, 25 bp, Homo sapien
tctgacaataaactcaacctaaggg

SEQ ID NO: 1540936 - DNA, 25 bp, Homo sapien
cacacgggatattctaagccgctga

SEQ ID NO: 1540937 - DNA, 25 bp, Homo sapien
cacaaatgtgattgaggccaccggt

SEQ ID NO: 1540938 - DNA, 25 bp, Homo sapien
aactgggtcccctgaaagccaggct

SEQ ID NO: 1540939 - DNA, 25 bp, Homo sapien
gtttattgtgtgtcttcccgggcta

SEQ ID NO: 1540940 - DNA, 25 bp, Homo sapien
gaaatgatcctgtttattgtgtgtc

SEQ ID NO: 1540941 - DNA, 25 bp, Homo sapien
tattgtgtgtcttcccgggctagaa

SEQ ID NO: 1540942 - DNA, 25 bp, Homo sapien
tcttcccgggctagaatggctagaa

SEQ ID NO: 1540943 - DNA, 25 bp, Homo sapien
gtcaccacacctggctaatttttgt

SEQ ID NO: 1540944 - DNA, 25 bp, Homo sapien
cctaggttcacgtgattctcctgcc

SEQ ID NO: 1540945 - DNA, 25 bp, Homo sapien
gcctcctaggttcacgtgattctcc

SEQ ID NO: 1540946 - DNA, 25 bp, Homo sapien
gctcactgtaaactccgcctcctcc

SEQ ID NO: 1540947 - DNA, 25 bp, Homo sapien
gggcccttacaggtccaagaatcat

SEQ ID NO: 1540948 - DNA, 25 bp, Homo sapien
cacacaggtcatgatgccggagcag

SEQ ID NO: 1540949 - DNA, 25 bp, Homo sapien
caccatttccagctgggtgcatggc

SEQ ID NO: 1540950 - DNA, 25 bp, Homo sapien
tagtatgatactttaacagcccaca

SEQ ID NO: 1540951 - DNA, 25 bp, Homo sapien
taatatgttaatagcagaggccacg

SEQ ID NO: 1540952 - DNA, 25 bp, Homo sapien
ctttcatccaagaacagccctcaga

SEQ ID NO: 1540953 - DNA, 25 bp, Homo sapien
gaaacagcctttgcaaggaagggta

SEQ ID NO: 1540954 - DNA, 25 bp, Homo sapien
ttaagtacttaccatgcgctggccc

SEQ ID NO: 1540955 - DNA, 25 bp, Homo sapien
ctgatcacaaagtgggcaggtggct

SEQ ID NO: 1540956 - DNA, 25 bp, Homo sapien
gacttattcaacagccgcaggaaca

SEQ ID NO: 1540957 - DNA, 25 bp, Homo sapien
cctggaatgcggaaacgggaacctg

SEQ ID NO: 1540958 - DNA, 25 bp, Homo sapien
gaacaggcgcgttcccaaagaaagc

SEQ ID NO: 1540959 - DNA, 25 bp, Homo sapien
aactgtagatgtccttgcagcaagg

SEQ ID NO: 1540960 - DNA, 25 bp, Homo sapien
gagtggccatgtcacaaagttctag

SEQ ID NO: 1540961 - DNA, 25 bp, Homo sapien
aaggtaagcccttaatgagactggc

SEQ ID NO: 1540962 - DNA, 25 bp, Homo sapien
caaatagtcacaagcagacgtctgc

SEQ ID NO: 1540963 - DNA, 25 bp, Homo sapien
attcaagttcttgggcaaacagtgg

SEQ ID NO: 1540964 - DNA, 25 bp, Homo sapien
aaatgccagtgtatcatgcaccacg

SEQ ID NO: 1540965 - DNA, 25 bp, Homo sapien
gcaggaaagtgaatgggaagtacca

SEQ ID NO: 1540966 - DNA, 25 bp, Homo sapien
ggctaacggctgttcattatgatag

SEQ ID NO: 1540967 - DNA, 25 bp, Homo sapien
ctcaatctcttaagctcatgatctg

SEQ ID NO: 1540968 - DNA, 25 bp, Homo sapien
tgcccacctcagcctcccaaagtgc

SEQ ID NO: 1540969 - DNA, 25 bp, Homo sapien
tctcaatctcttaagctcatgatct

SEQ ID NO: 1540970 - DNA, 25 bp, Homo sapien
cttttaaaatacgagctctgcaagg

SEQ ID NO: 1540971 - DNA, 25 bp, Homo sapien
tctctgacgcactaagtaactgact

SEQ ID NO: 1540972 - DNA, 25 bp, Homo sapien
gacttgcttactatctagctgctct

SEQ ID NO: 1540973 - DNA, 25 bp, Homo sapien
cagttgagagcctctatgcccagcc

SEQ ID NO: 1540974 - DNA, 25 bp, Homo sapien
attgcaactctaggactttgtccca

SEQ ID NO: 1540975 - DNA, 25 bp, Homo sapien
aaaaatagacactctgtttcaggaa

SEQ ID NO: 1540976 - DNA, 25 bp, Homo sapien
gcaactctaggactttgtcccaaga

SEQ ID NO: 1540977 - DNA, 25 bp, Homo sapien
tgcaactctaggactttgtcccaag

SEQ ID NO: 1540978 - DNA, 25 bp, Homo sapien
taaaacatagaactccagcataggg

SEQ ID NO: 1540979 - DNA, 25 bp, Homo sapien
ccccaggatgaattaatagccccag

SEQ ID NO: 1540980 - DNA, 25 bp, Homo sapien
gcttcattgagttacggcaggagac

SEQ ID NO: 1540981 - DNA, 25 bp, Homo sapien
gatgtcagcgtcttccctggtttgg

SEQ ID NO: 1540982 - DNA, 25 bp, Homo sapien
tggagacagaaaatcgcctaggcct

SEQ ID NO: 1540983 - DNA, 25 bp, Homo sapien
tctgtggttgcgacctggaaatccc

SEQ ID NO: 1540984 - DNA, 25 bp, Homo sapien
taaaagaaggagcaatgaggtggcc

SEQ ID NO: 1540985 - DNA, 25 bp, Homo sapien
gacagtgcaagtcctaggcctcagg

SEQ ID NO: 1540986 - DNA, 25 bp, Homo sapien
gggaaatgtaccctaggccaggaca

SEQ ID NO: 1540987 - DNA, 25 bp, Homo sapien
cccggccaatgtggccatgttctta

SEQ ID NO: 1540988 - DNA, 25 bp, Homo sapien
gttcttaaccatgatatgatgttgc

SEQ ID NO: 1540989 - DNA, 25 bp, Homo sapien
tttcaggcttcctagagtcccctct

SEQ ID NO: 1540990 - DNA, 25 bp, Homo sapien
atctgtaatcatcctaccaactaaa

SEQ ID NO: 1540991 - DNA, 25 bp, Homo sapien
taatctgtaatcatcctaccaacta

SEQ ID NO: 1540992 - DNA, 25 bp, Homo sapien
aatctgtaatcatcctaccaactaa

SEQ ID NO: 1540993 - DNA, 25 bp, Homo sapien
aataatctgtaatcatcctaccaac

SEQ ID NO: 1540994 - DNA, 25 bp, Homo sapien
gtaagctgagaatgcgggttcacgc

SEQ ID NO: 1540995 - DNA, 25 bp, Homo sapien
ctatggataggattgtaagctgaga

SEQ ID NO: 1540996 - DNA, 25 bp, Homo sapien
taagctgagaatgcgggttcacgcc

SEQ ID NO: 1540997 - DNA, 25 bp, Homo sapien
ccctctatggataggattgtaagct

SEQ ID NO: 1540998 - DNA, 25 bp, Homo sapien
gacccaggtctaactaagccaatcg

SEQ ID NO: 1540999 - DNA, 25 bp, Homo sapien
tgaatgctagaaatgggaaaccact

SEQ ID NO: 1541000 - DNA, 25 bp, Homo sapien
tgacccaagccaactcacagtgagc

SEQ ID NO: 1541001 - DNA, 25 bp, Homo sapien
tacctgagactcaaagaccctgaat

SEQ ID NO: 1541002 - DNA, 25 bp, Homo sapien
taactgctatgaagctttgccaagc

SEQ ID NO: 1541003 - DNA, 25 bp, Homo sapien
tgccaagcaggaataacaagcggcc

SEQ ID NO: 1541004 - DNA, 25 bp, Homo sapien
ggcctagtttacattcaggacagtc

SEQ ID NO: 1541005 - DNA, 25 bp, Homo sapien
ttttgcacacctagtatgtactggg

SEQ ID NO: 1541006 - DNA, 25 bp, Homo sapien
gatcttgaggaggtcgatgagtccc

SEQ ID NO: 1541007 - DNA, 25 bp, Homo sapien
tctgttgctgatcttcctgggactc

SEQ ID NO: 1541008 - DNA, 25 bp, Homo sapien
gatgagtccctacacatcaggaaag

SEQ ID NO: 1541009 - DNA, 25 bp, Homo sapien
cagcctttacaaccaggacaatggg

SEQ ID NO: 1541010 - DNA, 25 bp, Homo sapien
tgctgaaccttcatgcctcgacggg

SEQ ID NO: 1541011 - DNA, 25 bp, Homo sapien
gcacggttcctccattgaccatcag

SEQ ID NO: 1541012 - DNA, 25 bp, Homo sapien
ctccccggaacctggaagcatgctg

SEQ ID NO: 1541013 - DNA, 25 bp, Homo sapien
cacacccgggtgagctcagaattaa

SEQ ID NO: 1541014 - DNA, 25 bp, Homo sapien
ggcactacgactgtgtctactgaaa

SEQ ID NO: 1541015 - DNA, 25 bp, Homo sapien
tactaacaaagtatgagcccaaacc

SEQ ID NO: 1541016 - DNA, 25 bp, Homo sapien
tggccaacttggaactgagcacggt

SEQ ID NO: 1541017 - DNA, 25 bp, Homo sapien
tgagcacggtgtatgcattaccctc

SEQ ID NO: 1541018 - DNA, 25 bp, Homo sapien
caccatgccaggtctgagcaatctt

SEQ ID NO: 1541019 - DNA, 25 bp, Homo sapien
caggtctgagcaatcttttttggat

SEQ ID NO: 1541020 - DNA, 25 bp, Homo sapien
gccaggtctgagcaatcttttttgg

SEQ ID NO: 1541021 - DNA, 25 bp, Homo sapien
gtctgagcaatcttttttggatgaa

SEQ ID NO: 1541022 - DNA, 25 bp, Homo sapien
aagtgagaggtgcaagctgcttcca

SEQ ID NO: 1541023 - DNA, 25 bp, Homo sapien
tgcccacagccggaatcattcagaa

SEQ ID NO: 1541024 - DNA, 25 bp, Homo sapien
tgcttccatagcaacgcccatctgg

SEQ ID NO: 1541025 - DNA, 25 bp, Homo sapien
tcagagcacgcagaacacagtactt

SEQ ID NO: 1541026 - DNA, 25 bp, Homo sapien
taaataatgaagagtgctccagggc

SEQ ID NO: 1541027 - DNA, 25 bp, Homo sapien
ttcacaaaacctatattctcctcac

SEQ ID NO: 1541028 - DNA, 25 bp, Homo sapien
ccagggctgactggcattggaatct

SEQ ID NO: 1541029 - DNA, 25 bp, Homo sapien
ataaataatgaagagtgctccaggg

SEQ ID NO: 1541030 - DNA, 25 bp, Homo sapien
gcctgactccagagtgtgtacattc

SEQ ID NO: 1541031 - DNA, 25 bp, Homo sapien
tacccctatattacaggggagaaca

SEQ ID NO: 1541032 - DNA, 25 bp, Homo sapien
cacacagtgggtaacagtagaggtg

SEQ ID NO: 1541033 - DNA, 25 bp, Homo sapien
gaggctcagagtcacttactcaagg

SEQ ID NO: 1541034 - DNA, 25 bp, Homo sapien
tggagagctgtgacctgatcacagc

SEQ ID NO: 1541035 - DNA, 25 bp, Homo sapien
gagagctgtgacctgatcacagctc

SEQ ID NO: 1541036 - DNA, 25 bp, Homo sapien
ggagagctgtgacctgatcacagct

SEQ ID NO: 1541037 - DNA, 25 bp, Homo sapien
agagctgtgacctgatcacagctca

SEQ ID NO: 1541038 - DNA, 25 bp, Homo sapien
agacacgaagttgggcaaggtggct

SEQ ID NO: 1541039 - DNA, 25 bp, Homo sapien
aggtgtgatcgtgtgcccctgtaat

SEQ ID NO: 1541040 - DNA, 25 bp, Homo sapien
ataaagacacgaagttgggcaaggt

SEQ ID NO: 1541041 - DNA, 25 bp, Homo sapien
caggtgtgatcgtgtgcccctgtaa

SEQ ID NO: 1541042 - DNA, 25 bp, Homo sapien
gagagctgatgtcagagactgtgca

SEQ ID NO: 1541043 - DNA, 25 bp, Homo sapien
ccttagtgccttctagacactagtg

SEQ ID NO: 1541044 - DNA, 25 bp, Homo sapien
ctagtgctcttggagggtcccagga

SEQ ID NO: 1541045 - DNA, 25 bp, Homo sapien
ccttctagacactagtgctcttgga

SEQ ID NO: 1541046 - DNA, 25 bp, Homo sapien
taacctccaacatgcagtaagggct

SEQ ID NO: 1541047 - DNA, 25 bp, Homo sapien
caaggctgcatgaaaggtctgggct

SEQ ID NO: 1541048 - DNA, 25 bp, Homo sapien
gacacacgctccttagggatcacag

SEQ ID NO: 1541049 - DNA, 25 bp, Homo sapien
gcatccatgcgttctggccacagag

SEQ ID NO: 1541050 - DNA, 25 bp, Homo sapien
tgcagtatcttcacccctcagctgg

SEQ ID NO: 1541051 - DNA, 25 bp, Homo sapien
catctcacgcagctgtctgacgggc

SEQ ID NO: 1541052 - DNA, 25 bp, Homo sapien
tatcgtagccactgaagcaggtgtg

SEQ ID NO: 1541053 - DNA, 25 bp, Homo sapien
tcaacttcaggtatgcgtatccaac

SEQ ID NO: 1541054 - DNA, 25 bp, Homo sapien
cgctgtgccagatgctggccgcaga

SEQ ID NO: 1541055 - DNA, 25 bp, Homo sapien
ggtgggtgctgggcgctgtgccaga

SEQ ID NO: 1541056 - DNA, 25 bp, Homo sapien
gtgccagatgctggccgcagagccg

SEQ ID NO: 1541057 - DNA, 25 bp, Homo sapien
atgctggccgcagagccgcagccat

SEQ ID NO: 1541058 - DNA, 25 bp, Homo sapien
gatggcgagggcctgctgttctgtt

SEQ ID NO: 1541059 - DNA, 25 bp, Homo sapien
cataatcaaacatcctgctccggga

SEQ ID NO: 1541060 - DNA, 25 bp, Homo sapien
cagctggcagatggcgagggcctgc

SEQ ID NO: 1541061 - DNA, 25 bp, Homo sapien
ctgtttgctcaacaccataatcaaa

SEQ ID NO: 1541062 - DNA, 25 bp, Homo sapien
gttaagggaagctgtcgtgacctcc

SEQ ID NO: 1541063 - DNA, 25 bp, Homo sapien
ccctgaagcacatgtggatgaagca

SEQ ID NO: 1541064 - DNA, 25 bp, Homo sapien
tctgggcacagtcctattcgctcta

SEQ ID NO: 1541065 - DNA, 25 bp, Homo sapien
ctgaaagcgcaggtgagaggcctct

SEQ ID NO: 1541066 - DNA, 25 bp, Homo sapien
tgctgtgggaatacgtgaatgacgc

SEQ ID NO: 1541067 - DNA, 25 bp, Homo sapien
aaaattccagcaagtcagcaacagc

SEQ ID NO: 1541068 - DNA, 25 bp, Homo sapien
caagtagggacttccatcatgacca

SEQ ID NO: 1541069 - DNA, 25 bp, Homo sapien
gattcaaacctcaacagtctgcctg

SEQ ID NO: 1541070 - DNA, 25 bp, Homo sapien
tctcctgccatcttgacatttttta

SEQ ID NO: 1541071 - DNA, 25 bp, Homo sapien
aatgactttctcactggcatctggg

SEQ ID NO: 1541072 - DNA, 25 bp, Homo sapien
gcctcctcaatgactttctcactgg

SEQ ID NO: 1541073 - DNA, 25 bp, Homo sapien
ttaagccatactctttctaaaatta

SEQ ID NO: 1541074 - DNA, 25 bp, Homo sapien
tgaacttctagaagatgaaaatcct

SEQ ID NO: 1541075 - DNA, 25 bp, Homo sapien
ctccaccttgaacttctagaagatg

SEQ ID NO: 1541076 - DNA, 25 bp, Homo sapien
caccttgaacttctagaagatgaaa

SEQ ID NO: 1541077 - DNA, 25 bp, Homo sapien
tttgtctccaccttgaacttctaga

SEQ ID NO: 1541078 - DNA, 25 bp, Homo sapien
ggctccagaccgagtggctcagtag

SEQ ID NO: 1541079 - DNA, 25 bp, Homo sapien
cagcaaggatgttgtcctcgccatg

SEQ ID NO: 1541080 - DNA, 25 bp, Homo sapien
aggcagtagctgtggtcgcccgcca

SEQ ID NO: 1541081 - DNA, 25 bp, Homo sapien
accgagtggctcagtagcgcagagc

SEQ ID NO: 1541082 - DNA, 25 bp, Homo sapien
gacaggaaggttgtgagcctgtgga

SEQ ID NO: 1541083 - DNA, 25 bp, Homo sapien
acaggaaggttgtgagcctgtggag

SEQ ID NO: 1541084 - DNA, 25 bp, Homo sapien
tgacaggaaggttgtgagcctgtgg

SEQ ID NO: 1541085 - DNA, 25 bp, Homo sapien
ctgacaggaaggttgtgagcctgtg

SEQ ID NO: 1541086 - DNA, 25 bp, Homo sapien
cagccattgttcagggcagccaggc

SEQ ID NO: 1541087 - DNA, 25 bp, Homo sapien
tcagccattgttcagggcagccagg

SEQ ID NO: 1541088 - DNA, 25 bp, Homo sapien
agccattgttcagggcagccaggcc

SEQ ID NO: 1541089 - DNA, 25 bp, Homo sapien
ccattgttcagggcagccaggccca

SEQ ID NO: 1541090 - DNA, 25 bp, Homo sapien
ccccgtacgctgtggtgtcactcta

SEQ ID NO: 1541091 - DNA, 25 bp, Homo sapien
ctgctggccccgtacgctgtggtgt

SEQ ID NO: 1541092 - DNA, 25 bp, Homo sapien
tggagtgctgctggccccgtacgct

SEQ ID NO: 1541093 - DNA, 25 bp, Homo sapien
tgtggtgtcactctatggggtcccc

SEQ ID NO: 1541094 - DNA, 25 bp, Homo sapien
tggggatggcccgataggtggtcat

SEQ ID NO: 1541095 - DNA, 25 bp, Homo sapien
gggacatgctgccattctgggccca

SEQ ID NO: 1541096 - DNA, 25 bp, Homo sapien
gtggccgggctctcgccaagaggct

SEQ ID NO: 1541097 - DNA, 25 bp, Homo sapien
ctctcgccaagaggctgggacatgc

SEQ ID NO: 1541098 - DNA, 25 bp, Homo sapien
gcgtagtcccctgtgtgtggcccag

SEQ ID NO: 1541099 - DNA, 25 bp, Homo sapien
tctgcacgtcgaagtgggcgaagct

SEQ ID NO: 1541100 - DNA, 25 bp, Homo sapien
tagcttccgaaagatggacgagtcc

SEQ ID NO: 1541101 - DNA, 25 bp, Homo sapien
tgaggtcgaacagcatgctctgcac

SEQ ID NO: 1541102 - DNA, 25 bp, Homo sapien
tatgctcctcatggaatgggccatc

SEQ ID NO: 1541103 - DNA, 25 bp, Homo sapien
aagtaatcctggtagtagcgggcgc

SEQ ID NO: 1541104 - DNA, 25 bp, Homo sapien
gagaagctcacgttgcgctcacact

SEQ ID NO: 1541105 - DNA, 25 bp, Homo sapien
tctcattgcggaagtgcgggcagct

SEQ ID NO: 1541106 - DNA, 25 bp, Homo sapien
ggaacttccaacaccgagatgctgg

SEQ ID NO: 1541107 - DNA, 25 bp, Homo sapien
aattcagaccctggcaatgtccttg

SEQ ID NO: 1541108 - DNA, 25 bp, Homo sapien
tcatgccatgcactaaggctgacca

SEQ ID NO: 1541109 - DNA, 25 bp, Homo sapien
gaaacactaggcataagggcataag

SEQ ID NO: 1541110 - DNA, 25 bp, Homo sapien
taagtgcaagtagttggaccgggct

SEQ ID NO: 1541111 - DNA, 25 bp, Homo sapien
ctaagaaggaagagcaggcgagttc

SEQ ID NO: 1541112 - DNA, 25 bp, Homo sapien
gaaggaggggccctgatgcccagca

SEQ ID NO: 1541113 - DNA, 25 bp, Homo sapien
caggcgagttcaggctcagctgtct

SEQ ID NO: 1541114 - DNA, 25 bp, Homo sapien
agagcaggcgagttcaggctcagct

SEQ ID NO: 1541115 - DNA, 25 bp, Homo sapien
tgtactggtactgaggtccgtgctc

SEQ ID NO: 1541116 - DNA, 25 bp, Homo sapien
ctcatccacgccgaagtaattggca

SEQ ID NO: 1541117 - DNA, 25 bp, Homo sapien
agcttctcccgcttaatgctcacag

SEQ ID NO: 1541118 - DNA, 25 bp, Homo sapien
ctcgcgggtccggaagatgatcctg

SEQ ID NO: 1541119 - DNA, 25 bp, Homo sapien
catttaaattctgcgtcttagtttc

SEQ ID NO: 1541120 - DNA, 25 bp, Homo sapien
aattctgcgtcttagtttcttcctc

SEQ ID NO: 1541121 - DNA, 25 bp, Homo sapien
agtcatttaaattctgcgtcttagt

SEQ ID NO: 1541122 - DNA, 25 bp, Homo sapien
aacaggattgctctcccggggttgt

SEQ ID NO: 1541123 - DNA, 25 bp, Homo sapien
ctaaagcctgtcaaaaatcacgtgt

SEQ ID NO: 1541124 - DNA, 25 bp, Homo sapien
tgagacagtgccaaagggacctgag

SEQ ID NO: 1541125 - DNA, 25 bp, Homo sapien
cacacacagtcagatgtacctattg

SEQ ID NO: 1541126 - DNA, 25 bp, Homo sapien
aatcacgtgttctaggccaatgaga

SEQ ID NO: 1541127 - DNA, 25 bp, Homo sapien
ccaggttggtctcaaattcctgggc

SEQ ID NO: 1541128 - DNA, 25 bp, Homo sapien
gagctaccacgcctggcaattaatt

SEQ ID NO: 1541129 - DNA, 25 bp, Homo sapien
taatagagatggggtctcgctacgt

SEQ ID NO: 1541130 - DNA, 25 bp, Homo sapien
tggggtctcgctacgttgtccaggt

SEQ ID NO: 1541131 - DNA, 25 bp, Homo sapien
tgctcatcgagcttcagcagttgct

SEQ ID NO: 1541132 - DNA, 25 bp, Homo sapien
gcccggtcccatgcttggtggctgt

SEQ ID NO: 1541133 - DNA, 25 bp, Homo sapien
ccgcaggcagtggatgttgagctcg

SEQ ID NO: 1541134 - DNA, 25 bp, Homo sapien
gctgtgggcgtagcatcttccagga

SEQ ID NO: 1541135 - DNA, 25 bp, Homo sapien
gccttgcaatagaggatgcccacct

SEQ ID NO: 1541136 - DNA, 25 bp, Homo sapien
ttctcgccgatgagggagaggaact

SEQ ID NO: 1541137 - DNA, 25 bp, Homo sapien
tgcaatagaggatgcccaccttgtg

SEQ ID NO: 1541138 - DNA, 25 bp, Homo sapien
agggagaggaactcctcaaaggcgg

SEQ ID NO: 1541139 - DNA, 25 bp, Homo sapien
cttgacgtccagctgggcagcgtac

SEQ ID NO: 1541140 - DNA, 25 bp, Homo sapien
tcttgacgtccagctgggcagcgta

SEQ ID NO: 1541141 - DNA, 25 bp, Homo sapien
cgaagcatgtggctctcttccacgc

SEQ ID NO: 1541142 - DNA, 25 bp, Homo sapien
ttccacgctgatgcctgtggtgcca

SEQ ID NO: 1541143 - DNA, 25 bp, Homo sapien
ggcttgctgtctttgcgcagcacga

SEQ ID NO: 1541144 - DNA, 25 bp, Homo sapien
ttgcgcagcacgaagcatgtggctc

SEQ ID NO: 1541145 - DNA, 25 bp, Homo sapien
caccacacctggttacatttttgta

SEQ ID NO: 1541146 - DNA, 25 bp, Homo sapien
accacacctggttacatttttgtat

SEQ ID NO: 1541147 - DNA, 25 bp, Homo sapien
acaggcgctcgcctgtattttagta

SEQ ID NO: 1541148 - DNA, 25 bp, Homo sapien
aggcgctcgcctgtattttagtaga

SEQ ID NO: 1541149 - DNA, 25 bp, Homo sapien
ctacaggcgctcgcctgtattttag

SEQ ID NO: 1541150 - DNA, 25 bp, Homo sapien
ttggcctcccaagtgctaagattac

SEQ ID NO: 1541151 - DNA, 25 bp, Homo sapien
cttcctccacgccaggtgagcccag

SEQ ID NO: 1541152 - DNA, 25 bp, Homo sapien
tgccagcttcctccacgccaggtga

SEQ ID NO: 1541153 - DNA, 25 bp, Homo sapien
cctgccagcttcctccacgccaggt

SEQ ID NO: 1541154 - DNA, 25 bp, Homo sapien
tccacgccaggtgagcccagggagg

SEQ ID NO: 1541155 - DNA, 25 bp, Homo sapien
gcccagagaaatcatgcacacgtgt

SEQ ID NO: 1541156 - DNA, 25 bp, Homo sapien
gcaggtcagattataccagtcaggg

SEQ ID NO: 1541157 - DNA, 25 bp, Homo sapien
tactgagtggtagcgtctggaccag

SEQ ID NO: 1541158 - DNA, 25 bp, Homo sapien
cacgtgtcctgggatatgggtacaa

SEQ ID NO: 1541159 - DNA, 25 bp, Homo sapien
ctgaaacagaaatgccagttaggac

SEQ ID NO: 1541160 - DNA, 25 bp, Homo sapien
tgaaacagaaatgccagttaggacc

SEQ ID NO: 1541161 - DNA, 25 bp, Homo sapien
aaacagaaatgccagttaggaccat

SEQ ID NO: 1541162 - DNA, 25 bp, Homo sapien
gaaacagaaatgccagttaggacca

SEQ ID NO: 1541163 - DNA, 25 bp, Homo sapien
agtcctggtacatcgtgtagaggga

SEQ ID NO: 1541164 - DNA, 25 bp, Homo sapien
cgtagtcctggtacatcgtgtagag

SEQ ID NO: 1541165 - DNA, 25 bp, Homo sapien
tagtcctggtacatcgtgtagaggg

SEQ ID NO: 1541166 - DNA, 25 bp, Homo sapien
ctcgtagtcctggtacatcgtgtag

SEQ ID NO: 1541167 - DNA, 25 bp, Homo sapien
ccagcctgcaaggtgggtccaagag

SEQ ID NO: 1541168 - DNA, 25 bp, Homo sapien
cctctctagggttgggcatgagcct

SEQ ID NO: 1541169 - DNA, 25 bp, Homo sapien
tacaaagtcacttgtgccaactggg

SEQ ID NO: 1541170 - DNA, 25 bp, Homo sapien
caggccccaagactggcatgtgaat

SEQ ID NO: 1541171 - DNA, 25 bp, Homo sapien
caggctcctggaagatgatcgtcac

SEQ ID NO: 1541172 - DNA, 25 bp, Homo sapien
tgtaacagacgttatcagtgcaggg

SEQ ID NO: 1541173 - DNA, 25 bp, Homo sapien
tgtggactcggacaatgatgaagac

SEQ ID NO: 1541174 - DNA, 25 bp, Homo sapien
ttcctatgtgcctcttccgtagcag

SEQ ID NO: 1541175 - DNA, 25 bp, Homo sapien
tcaggtctgtccagagaggagctgc

SEQ ID NO: 1541176 - DNA, 25 bp, Homo sapien
ggatgaaaactcacgaaacaaccag

SEQ ID NO: 1541177 - DNA, 25 bp, Homo sapien
ggccattcggaaattgcacacttga

SEQ ID NO: 1541178 - DNA, 25 bp, Homo sapien
agctggtcccttacttcccagcagg

SEQ ID NO: 1541179 - DNA, 25 bp, Homo sapien
gggatgatgcgggtggccattcgga

SEQ ID NO: 1541180 - DNA, 25 bp, Homo sapien
catgcttcaaagaatgccacacaca

SEQ ID NO: 1541181 - DNA, 25 bp, Homo sapien
tgtggacatggccttaccccaggca

SEQ ID NO: 1541182 - DNA, 25 bp, Homo sapien
aaaaaggcattttccagagcggaca

SEQ ID NO: 1541183 - DNA, 25 bp, Homo sapien
tctaccaaggtatggtgggcatagt

SEQ ID NO: 1541184 - DNA, 25 bp, Homo sapien
ctgtggagggagagattatttagat

SEQ ID NO: 1541185 - DNA, 25 bp, Homo sapien
gtggagggagagattatttagatgg

SEQ ID NO: 1541186 - DNA, 25 bp, Homo sapien
tgtggagggagagattatttagatg

SEQ ID NO: 1541187 - DNA, 25 bp, Homo sapien
cagaaccctctgtcgcctgtaggaa

SEQ ID NO: 1541188 - DNA, 25 bp, Homo sapien
gatgtggtctcctcgtccatagaag

SEQ ID NO: 1541189 - DNA, 25 bp, Homo sapien
tgacatccccgcagtagcagttgaa

SEQ ID NO: 1541190 - DNA, 25 bp, Homo sapien
tcagcgttaatcaccttggccagca

SEQ ID NO: 1541191 - DNA, 25 bp, Homo sapien
gcctaactgactgggctagggaagt

SEQ ID NO: 1541192 - DNA, 25 bp, Homo sapien
gaggccgaaaccatacaaatcgccg

SEQ ID NO: 1541193 - DNA, 25 bp, Homo sapien
tgacaactgtgattctctccgggcc

SEQ ID NO: 1541194 - DNA, 25 bp, Homo sapien
cgggccagtgcgtgtcttagcctaa

SEQ ID NO: 1541195 - DNA, 25 bp, Homo sapien
aggactccgccaacagtaggcacgg

SEQ ID NO: 1541196 - DNA, 25 bp, Homo sapien
gatggcttatgtcaccattccctgg

SEQ ID NO: 1541197 - DNA, 25 bp, Homo sapien
gtatggctgtggaaatatgctccaa

SEQ ID NO: 1541198 - DNA, 25 bp, Homo sapien
cctccacgggagatggcttatgtca

SEQ ID NO: 1541199 - DNA, 25 bp, Homo sapien
cgtacttcacgtggaagcccagctg

SEQ ID NO: 1541200 - DNA, 25 bp, Homo sapien
caccgtgccgtcgtacttcacgtgg

SEQ ID NO: 1541201 - DNA, 25 bp, Homo sapien
gccgaagcgtcatgtccaccgtctc

SEQ ID NO: 1541202 - DNA, 25 bp, Homo sapien
agcccgttccgccgaagcgtcatgt

SEQ ID NO: 1541203 - DNA, 25 bp, Homo sapien
ctgccaggcgaacccatagtcctca

SEQ ID NO: 1541204 - DNA, 25 bp, Homo sapien
tgccaggcgaacccatagtcctcaa

SEQ ID NO: 1541205 - DNA, 25 bp, Homo sapien
gccaggcgaacccatagtcctcaac

SEQ ID NO: 1541206 - DNA, 25 bp, Homo sapien
cttgcagatctccactagtcggctg

SEQ ID NO: 1541207 - DNA, 25 bp, Homo sapien
tcaaaaggcgggatgatgaccacct

SEQ ID NO: 1541208 - DNA, 25 bp, Homo sapien
ttcacagtgacagaggtgcgcagca

SEQ ID NO: 1541209 - DNA, 25 bp, Homo sapien
tcgtgggtcagtgtgaccacggcca

SEQ ID NO: 1541210 - DNA, 25 bp, Homo sapien
taagcgctctgtagatgtgccctcc

SEQ ID NO: 1541211 - DNA, 25 bp, Homo sapien
tgtagaacacaaaccgcaagggagc

SEQ ID NO: 1541212 - DNA, 25 bp, Homo sapien
tgtaagcagctctcccatcgtgctg

SEQ ID NO: 1541213 - DNA, 25 bp, Homo sapien
catgcacgtatgaagggctaaacca

SEQ ID NO: 1541214 - DNA, 25 bp, Homo sapien
cctacgtgctttacaagttggatct

SEQ ID NO: 1541215 - DNA, 25 bp, Homo sapien
tccttcaacttcacaaacgctcttg

SEQ ID NO: 1541216 - DNA, 25 bp, Homo sapien
ctgggtctggcctgtcctacgtgct

SEQ ID NO: 1541217 - DNA, 25 bp, Homo sapien
tcttgtggaaaggacgttattgtcc

SEQ ID NO: 1541218 - DNA, 25 bp, Homo sapien
agtctcaacctcctatctcaccctg

SEQ ID NO: 1541219 - DNA, 25 bp, Homo sapien
gcagtctcaacctcctatctcaccc

SEQ ID NO: 1541220 - DNA, 25 bp, Homo sapien
tctcaacctcctatctcaccctgag

SEQ ID NO: 1541221 - DNA, 25 bp, Homo sapien
tgcagtctcaacctcctatctcacc

SEQ ID NO: 1541222 - DNA, 25 bp, Homo sapien
caggttcagggtttaggcctgccca

SEQ ID NO: 1541223 - DNA, 25 bp, Homo sapien
gcatgcccgtgtattaatagctcgt

SEQ ID NO: 1541224 - DNA, 25 bp, Homo sapien
gagtataatggagacaggccgacct

SEQ ID NO: 1541225 - DNA, 25 bp, Homo sapien
gaatatggcactcatcgtcacccca

SEQ ID NO: 1541226 - DNA, 25 bp, Homo sapien
tgcatgtccttcctcgaggagcgta

SEQ ID NO: 1541227 - DNA, 25 bp, Homo sapien
aggagcgtagccaccagggcacttg

SEQ ID NO: 1541228 - DNA, 25 bp, Homo sapien
aagctggcttatcgtgtgcacccgt

SEQ ID NO: 1541229 - DNA, 25 bp, Homo sapien
tgagagtcatgcgatgcgcaagctg

SEQ ID NO: 1541230 - DNA, 25 bp, Homo sapien
cagcagctgccttataaagggaaca

SEQ ID NO: 1541231 - DNA, 25 bp, Homo sapien
gtaggaggaagaccccatgcattct

SEQ ID NO: 1541232 - DNA, 25 bp, Homo sapien
tctgcaaatgaggtcagctacacac

SEQ ID NO: 1541233 - DNA, 25 bp, Homo sapien
tggtggcagcgagggcacttctatc

SEQ ID NO: 1541234 - DNA, 25 bp, Homo sapien
ggtgtgtagtgacgcagtcttggct

SEQ ID NO: 1541235 - DNA, 25 bp, Homo sapien
tggtgtgtagtgacgcagtcttggc

SEQ ID NO: 1541236 - DNA, 25 bp, Homo sapien
tggggaaaggtactatcactgtctc

SEQ ID NO: 1541237 - DNA, 25 bp, Homo sapien
gaggtggggaaaggtactatcactg

SEQ ID NO: 1541238 - DNA, 25 bp, Homo sapien
ggtggggaaaggtactatcactgtc

SEQ ID NO: 1541239 - DNA, 25 bp, Homo sapien
ctgtagacatgccaggcccgggcag

SEQ ID NO: 1541240 - DNA, 25 bp, Homo sapien
tgtccctttggactggcagctgcca

SEQ ID NO: 1541241 - DNA, 25 bp, Homo sapien
gcagctgccaatgtctcaccaggca

SEQ ID NO: 1541242 - DNA, 25 bp, Homo sapien
cctcggtagcgccatggctggaact

SEQ ID NO: 1541243 - DNA, 25 bp, Homo sapien
taacaatatgaacgtctatcagagc

SEQ ID NO: 1541244 - DNA, 25 bp, Homo sapien
tgccactatagaaagggcttgcggg

SEQ ID NO: 1541245 - DNA, 25 bp, Homo sapien
tctgctgtatttggacgtggcgttc

SEQ ID NO: 1541246 - DNA, 25 bp, Homo sapien
acagaggtggatgcgctctggcacc

SEQ ID NO: 1541247 - DNA, 25 bp, Homo sapien
tcatggaagtagaaagaccaggccc

SEQ ID NO: 1541248 - DNA, 25 bp, Homo sapien
agagagttatgggatgcgggcccgc

SEQ ID NO: 1541249 - DNA, 25 bp, Homo sapien
gccgggagtggttggagtggcccac

SEQ ID NO: 1541250 - DNA, 25 bp, Homo sapien
actgccagggagcattgctgcggta

SEQ ID NO: 1541251 - DNA, 25 bp, Homo sapien
ctgctccgtcttgggctccgaggta

SEQ ID NO: 1541252 - DNA, 25 bp, Homo sapien
gcccctgctggtgatactgtgtaag

SEQ ID NO: 1541253 - DNA, 25 bp, Homo sapien
ccagaaggctgtcggtagggaggga

SEQ ID NO: 1541254 - DNA, 25 bp, Homo sapien
gtatctcacgtaggtggccgaaccg

SEQ ID NO: 1541255 - DNA, 25 bp, Homo sapien
ggatggcttgtatctcacgtaggtg

SEQ ID NO: 1541256 - DNA, 25 bp, Homo sapien
gttttagacacacgggaggctccgc

SEQ ID NO: 1541257 - DNA, 25 bp, Homo sapien
acgtgcccagggttaaagatcagcc

SEQ ID NO: 1541258 - DNA, 25 bp, Homo sapien
tatgtcgaaaaccacctgagcctga

SEQ ID NO: 1541259 - DNA, 25 bp, Homo sapien
ccttgctcgccagtgggttttagac

SEQ ID NO: 1541260 - DNA, 25 bp, Homo sapien
tggacgtcccatcgtggctgaagtg

SEQ ID NO: 1541261 - DNA, 25 bp, Homo sapien
gtcaggccgccggaagaggagtcgc

SEQ ID NO: 1541262 - DNA, 25 bp, Homo sapien
gaggagtcgccgctggacgtcccat

SEQ ID NO: 1541263 - DNA, 25 bp, Homo sapien
ctggcttctggcgttccatggtgct

SEQ ID NO: 1541264 - DNA, 25 bp, Homo sapien
tggacgggtgcttgttcccgctgct

SEQ ID NO: 1541265 - DNA, 25 bp, Homo sapien
gcttccggctatggctgagagcctg

SEQ ID NO: 1541266 - DNA, 25 bp, Homo sapien
gcatcctgcctggacgggtgcttgt

SEQ ID NO: 1541267 - DNA, 25 bp, Homo sapien
tgcttgttcccgctgcttccggcta

SEQ ID NO: 1541268 - DNA, 25 bp, Homo sapien
ggagtacagcttcggtcggtagccc

SEQ ID NO: 1541269 - DNA, 25 bp, Homo sapien
tgtcactagagccacccttggagag

SEQ ID NO: 1541270 - DNA, 25 bp, Homo sapien
gccacaaaggcccatacttccaggg

SEQ ID NO: 1541271 - DNA, 25 bp, Homo sapien
ccgcctgtctgcgtggtgggacctc

SEQ ID NO: 1541272 - DNA, 25 bp, Homo sapien
cccaccatcaggaccgtaaaagtag

SEQ ID NO: 1541273 - DNA, 25 bp, Homo sapien
gagaaccccaccatcaggaccgtaa

SEQ ID NO: 1541274 - DNA, 25 bp, Homo sapien
ctaggcgcattcatccgtgagtgtg

SEQ ID NO: 1541275 - DNA, 25 bp, Homo sapien
ggcgcattcatccgtgagtgtgttt

SEQ ID NO: 1541276 - DNA, 25 bp, Homo sapien
taggcgcattcatccgtgagtgtgt

SEQ ID NO: 1541277 - DNA, 25 bp, Homo sapien
aggcgcattcatccgtgagtgtgtt

SEQ ID NO: 1541278 - DNA, 25 bp, Homo sapien
taaggcagagatccacgagctcctc

SEQ ID NO: 1541279 - DNA, 25 bp, Homo sapien
gagctcctcaattctgtcagcaaac

SEQ ID NO: 1541280 - DNA, 25 bp, Homo sapien
cacgagctcctcaattctgtcagca

SEQ ID NO: 1541281 - DNA, 25 bp, Homo sapien
gctgatggatgggcaataaggcaga

SEQ ID NO: 1541282 - DNA, 25 bp, Homo sapien
gatccctgcgccaaccaggttctga

SEQ ID NO: 1541283 - DNA, 25 bp, Homo sapien
gaaaaggctttagggcgccacagga

SEQ ID NO: 1541284 - DNA, 25 bp, Homo sapien
tgcctccatccgaacgtcagtgtgt

SEQ ID NO: 1541285 - DNA, 25 bp, Homo sapien
tggaaggtggctcattgcctccatc

SEQ ID NO: 1541286 - DNA, 25 bp, Homo sapien
agaggccccggtgcacagcaggcgc

SEQ ID NO: 1541287 - DNA, 25 bp, Homo sapien
gtgaataaataccaagttctatgcc

SEQ ID NO: 1541288 - DNA, 25 bp, Homo sapien
agcaggcgctcgctgtgtgaataaa

SEQ ID NO: 1541289 - DNA, 25 bp, Homo sapien
ctgcagaggccccggtgcacagcag

SEQ ID NO: 1541290 - DNA, 25 bp, Homo sapien
atgggcctccgtccgtaccaggacg

SEQ ID NO: 1541291 - DNA, 25 bp, Homo sapien
attcatgacttttggcattattcac

SEQ ID NO: 1541292 - DNA, 25 bp, Homo sapien
gtggggatctggtctgcctgttcca

SEQ ID NO: 1541293 - DNA, 25 bp, Homo sapien
attattcactagctgtttcccatgg

SEQ ID NO: 1541294 - DNA, 25 bp, Homo sapien
ccccctcagagactttgcctcctgt

SEQ ID NO: 1541295 - DNA, 25 bp, Homo sapien
agccccctcagagactttgcctcct

SEQ ID NO: 1541296 - DNA, 25 bp, Homo sapien
ccctcagagactttgcctcctgtct

SEQ ID NO: 1541297 - DNA, 25 bp, Homo sapien
gccccctcagagactttgcctcctg

SEQ ID NO: 1541298 - DNA, 25 bp, Homo sapien
catccacagttgctttgtcctccag

SEQ ID NO: 1541299 - DNA, 25 bp, Homo sapien
tccacagttgctttgtcctccagct

SEQ ID NO: 1541300 - DNA, 25 bp, Homo sapien
tggcaatgccgcctgctgccacatc

SEQ ID NO: 1541301 - DNA, 25 bp, Homo sapien
ccacatccacagttgctttgtcctc

SEQ ID NO: 1541302 - DNA, 25 bp, Homo sapien
tccccagaagggcatcccagggact

SEQ ID NO: 1541303 - DNA, 25 bp, Homo sapien
gtgtccccagaagggcatcccaggg

SEQ ID NO: 1541304 - DNA, 25 bp, Homo sapien
ggctgtgtccccagaagggcatccc

SEQ ID NO: 1541305 - DNA, 25 bp, Homo sapien
ctgtgtccccagaagggcatcccag

SEQ ID NO: 1541306 - DNA, 25 bp, Homo sapien
gtaagcagccacattgcccctgtgg

SEQ ID NO: 1541307 - DNA, 25 bp, Homo sapien
agaaccaattcatccctgcatgcgg

SEQ ID NO: 1541308 - DNA, 25 bp, Homo sapien
ccctgcatgcggctggaattgtgct

SEQ ID NO: 1541309 - DNA, 25 bp, Homo sapien
tccagtgtaggagccgtaagcagcc

SEQ ID NO: 1541310 - DNA, 25 bp, Homo sapien
gagaaatcataccagctgcataagt

SEQ ID NO: 1541311 - DNA, 25 bp, Homo sapien
tataggcgtcacctcacttagccgc

SEQ ID NO: 1541312 - DNA, 25 bp, Homo sapien
cagtgacagtgctgaccactctgag

SEQ ID NO: 1541313 - DNA, 25 bp, Homo sapien
gcaggcaacgtgctctgtgcttcca

SEQ ID NO: 1541314 - DNA, 25 bp, Homo sapien
ttattgcgtacaggctgcttggaga

SEQ ID NO: 1541315 - DNA, 25 bp, Homo sapien
caccctgttgggtgcttattgcgta

SEQ ID NO: 1541316 - DNA, 25 bp, Homo sapien
tttgtaaacctgagcggggtagcca

SEQ ID NO: 1541317 - DNA, 25 bp, Homo sapien
gggccgaggagtctctgcactggca

SEQ ID NO: 1541318 - DNA, 25 bp, Homo sapien
ccttgtgactaagacggtggcacct

SEQ ID NO: 1541319 - DNA, 25 bp, Homo sapien
gagcctgcatcattaatcccgggag

SEQ ID NO: 1541320 - DNA, 25 bp, Homo sapien
gaaaggcgtgtctgtgttgataccc

SEQ ID NO: 1541321 - DNA, 25 bp, Homo sapien
tttcggcaaagaacatggcgcctgg

SEQ ID NO: 1541322 - DNA, 25 bp, Homo sapien
tcctccaggttctgactgacaggac

SEQ ID NO: 1541323 - DNA, 25 bp, Homo sapien
cctccaggttctgactgacaggact

SEQ ID NO: 1541324 - DNA, 25 bp, Homo sapien
ggccccaggttgtccatgatgatga

SEQ ID NO: 1541325 - DNA, 25 bp, Homo sapien
gagggatgccctcaacctcggttgc

SEQ ID NO: 1541326 - DNA, 25 bp, Homo sapien
gatttgtagttcttccgtggtgacc

SEQ ID NO: 1541327 - DNA, 25 bp, Homo sapien
gacatttttggtgttcgtgtccacc

SEQ ID NO: 1541328 - DNA, 25 bp, Homo sapien
tgctggcggcgtgcaggcagcgtgc

SEQ ID NO: 1541329 - DNA, 25 bp, Homo sapien
tgctggacgggaaggcgcaggtgct

SEQ ID NO: 1541330 - DNA, 25 bp, Homo sapien
tttcttctcgggaaagccgctgccg

SEQ ID NO: 1541331 - DNA, 25 bp, Homo sapien
tgcacaggctctcgtccgacagcgt

SEQ ID NO: 1541332 - DNA, 25 bp, Homo sapien
tggggtaactaccgcgccagtccca

SEQ ID NO: 1541333 - DNA, 25 bp, Homo sapien
tgggtgcttctgactcctaggtgac

SEQ ID NO: 1541334 - DNA, 25 bp, Homo sapien
tggtctcaggtgactccaatccttg

SEQ ID NO: 1541335 - DNA, 25 bp, Homo sapien
aacatgggagcagtcaggaaagcaa

SEQ ID NO: 1541336 - DNA, 25 bp, Homo sapien
tcaggaagcaaaccgcttagagctg

SEQ ID NO: 1541337 - DNA, 25 bp, Homo sapien
cttggctgcgttcaccaggctggac

SEQ ID NO: 1541338 - DNA, 25 bp, Homo sapien
gctggaccactcgaggccagcagct

SEQ ID NO: 1541339 - DNA, 25 bp, Homo sapien
cttcgtatgccttggctgcgttcac

SEQ ID NO: 1541340 - DNA, 25 bp, Homo sapien
agccagcgagagctccgaggctgag

SEQ ID NO: 1541341 - DNA, 25 bp, Homo sapien
tgtagaaacttcactaagtagctct

SEQ ID NO: 1541342 - DNA, 25 bp, Homo sapien
tgtagtgacagggtgtcgctacgat

SEQ ID NO: 1541343 - DNA, 25 bp, Homo sapien
taagtagctctagtggataaaatat

SEQ ID NO: 1541344 - DNA, 25 bp, Homo sapien
gtgacagggtgtcgctacgatgccc

SEQ ID NO: 1541345 - DNA, 25 bp, Homo sapien
catactccagcctagaactactggg

SEQ ID NO: 1541346 - DNA, 25 bp, Homo sapien
tttagtgaagacaccgcatcagaac

SEQ ID NO: 1541347 - DNA, 25 bp, Homo sapien
gtggctattcacaaacccgagtcca

SEQ ID NO: 1541348 - DNA, 25 bp, Homo sapien
gggccagtacacctgtccttaggaa

SEQ ID NO: 1541349 - DNA, 25 bp, Homo sapien
ctgaataataccctttatagctatt

SEQ ID NO: 1541350 - DNA, 25 bp, Homo sapien
aatgttctccgattctctgaataat

SEQ ID NO: 1541351 - DNA, 25 bp, Homo sapien
aaatgttctccgattctctgaataa

SEQ ID NO: 1541352 - DNA, 25 bp, Homo sapien
atgttctccgattctctgaataata

SEQ ID NO: 1541353 - DNA, 25 bp, Homo sapien
caggtggctgtggacaggactgtgt

SEQ ID NO: 1541354 - DNA, 25 bp, Homo sapien
tgtgcaggcgggatgtccgggctca

SEQ ID NO: 1541355 - DNA, 25 bp, Homo sapien
gagaagagtgagacggctctttgca

SEQ ID NO: 1541356 - DNA, 25 bp, Homo sapien
gccgggtcgttcagagagaagagtg

SEQ ID NO: 1541357 - DNA, 25 bp, Homo sapien
caggtcagtgtgcagctgtttcagc

SEQ ID NO: 1541358 - DNA, 25 bp, Homo sapien
gcaggtcagtgtgcagctgtttcag

SEQ ID NO: 1541359 - DNA, 25 bp, Homo sapien
ccagctggtacaccttgcctgtcag

SEQ ID NO: 1541360 - DNA, 25 bp, Homo sapien
tacaccttgcctgtcagatccaggg

SEQ ID NO: 1541361 - DNA, 25 bp, Homo sapien
ctctgactggagcaccaccttgtcc

SEQ ID NO: 1541362 - DNA, 25 bp, Homo sapien
caaacttgcgcagctgctcgctggc

SEQ ID NO: 1541363 - DNA, 25 bp, Homo sapien
tgcagaagatctccgcaaacttgcg

SEQ ID NO: 1541364 - DNA, 25 bp, Homo sapien
tggttgttctgccgcaggctggcca

SEQ ID NO: 1541365 - DNA, 25 bp, Homo sapien
gatgggtcatcttggtcacaccggc

SEQ ID NO: 1541366 - DNA, 25 bp, Homo sapien
cagaggctgatcacaggagacgcga

SEQ ID NO: 1541367 - DNA, 25 bp, Homo sapien
aaataaatcggctctggaggctagc

SEQ ID NO: 1541368 - DNA, 25 bp, Homo sapien
cctagtgaggccatcggagtttccg

SEQ ID NO: 1541369 - DNA, 25 bp, Homo sapien
tatgcagtgggttagagctaccttc

SEQ ID NO: 1541370 - DNA, 25 bp, Homo sapien
tgacctcattgaatccccagagcgg

SEQ ID NO: 1541371 - DNA, 25 bp, Homo sapien
cttggagaggttcaaggccccacag

SEQ ID NO: 1541372 - DNA, 25 bp, Homo sapien
ggaaaggtatcaccccaagcttctc

SEQ ID NO: 1541373 - DNA, 25 bp, Homo sapien
ccggtggctgggaatccggaagcct

SEQ ID NO: 1541374 - DNA, 25 bp, Homo sapien
cgccgtcagtctggaccgcggcatc

SEQ ID NO: 1541375 - DNA, 25 bp, Homo sapien
tctgatccctttggggaccggctgc

SEQ ID NO: 1541376 - DNA, 25 bp, Homo sapien
tacacatcaaacgggagcatctctg

SEQ ID NO: 1541377 - DNA, 25 bp, Homo sapien
atcacccgctctccgctcatcaaag

SEQ ID NO: 1541378 - DNA, 25 bp, Homo sapien
ctaagtccggacctcggtctccagg

SEQ ID NO: 1541379 - DNA, 25 bp, Homo sapien
gctcatcaaagcgcctttctctctt

SEQ ID NO: 1541380 - DNA, 25 bp, Homo sapien
gagctgagacgtcgggggtccccag

SEQ ID NO: 1541381 - DNA, 25 bp, Homo sapien
gctacatccggtgcaacactggctc

SEQ ID NO: 1541382 - DNA, 25 bp, Homo sapien
aatttctcacaagagacgttctcag

SEQ ID NO: 1541383 - DNA, 25 bp, Homo sapien
cctactctggaaatgctcttgtcgg

SEQ ID NO: 1541384 - DNA, 25 bp, Homo sapien
gttgggtccaacatcacacctcctg

SEQ ID NO: 1541385 - DNA, 25 bp, Homo sapien
actgggctcatgctccagggcttaa

SEQ ID NO: 1541386 - DNA, 25 bp, Homo sapien
gacacgcgtttcttggaagcctgtg

SEQ ID NO: 1541387 - DNA, 25 bp, Homo sapien
gagggccttcgctctaggactggcc

SEQ ID NO: 1541388 - DNA, 25 bp, Homo sapien
tgccacccttcccttgggcttggtg

SEQ ID NO: 1541389 - DNA, 25 bp, Homo sapien
acgcgcggaggtcgccagagccaat

SEQ ID NO: 1541390 - DNA, 25 bp, Homo sapien
acgcctattggaagcggctcccgaa

SEQ ID NO: 1541391 - DNA, 25 bp, Homo sapien
ttctcggcgcgcgatgcctgggtct

SEQ ID NO: 1541392 - DNA, 25 bp, Homo sapien
tcaacggccctcagcgcgttcagag

SEQ ID NO: 1541393 - DNA, 25 bp, Homo sapien
tcgcgttcaggtgccgacgctccgg

SEQ ID NO: 1541394 - DNA, 25 bp, Homo sapien
tctcgcgatcaggtgcgggaagccc

SEQ ID NO: 1541395 - DNA, 25 bp, Homo sapien
cagctcagccgagacgcgcaggcga

SEQ ID NO: 1541396 - DNA, 25 bp, Homo sapien
cacgcgcaatggagcgcctcgcgtt

SEQ ID NO: 1541397 - DNA, 25 bp, Homo sapien
agcagggcgagaaacgcccggctcc

SEQ ID NO: 1541398 - DNA, 25 bp, Homo sapien
cgtggatgctgcgttctcggtcggc

SEQ ID NO: 1541399 - DNA, 25 bp, Homo sapien
agcagcgatcccagcagggcgagaa

SEQ ID NO: 1541400 - DNA, 25 bp, Homo sapien
tgcgttctcggtcggccgccaggac

SEQ ID NO: 1541401 - DNA, 25 bp, Homo sapien
aacgcgaagcacaacccggttagct

SEQ ID NO: 1541402 - DNA, 25 bp, Homo sapien
acccggttagcttggcagggcaatc

SEQ ID NO: 1541403 - DNA, 25 bp, Homo sapien
aagcacaacccggttagcttggcag

SEQ ID NO: 1541404 - DNA, 25 bp, Homo sapien
ctgaaacgcgaagcacaacccggtt

SEQ ID NO: 1541405 - DNA, 25 bp, Homo sapien
cagctggcaggatccgtcagtgaca

SEQ ID NO: 1541406 - DNA, 25 bp, Homo sapien
gacagtggcacatttcttgaggcac

SEQ ID NO: 1541407 - DNA, 25 bp, Homo sapien
tgacattgtaccaccacctaggcat

SEQ ID NO: 1541408 - DNA, 25 bp, Homo sapien
taattattgctgtttccgtcacagc

SEQ ID NO: 1541409 - DNA, 25 bp, Homo sapien
gtctctaaagagcaaaatctggctg

SEQ ID NO: 1541410 - DNA, 25 bp, Homo sapien
ttgtctctaaagagcaaaatctggc

SEQ ID NO: 1541411 - DNA, 25 bp, Homo sapien
aattgtctctaaagagcaaaatctg

SEQ ID NO: 1541412 - DNA, 25 bp, Homo sapien
taaattgtctctaaagagcaaaatc

SEQ ID NO: 1541413 - DNA, 25 bp, Homo sapien
aggaatccgctgcattcctgctggt

SEQ ID NO: 1541414 - DNA, 25 bp, Homo sapien
gaatccgctgcattcctgctggtgg

SEQ ID NO: 1541415 - DNA, 25 bp, Homo sapien
ggaatccgctgcattcctgctggtg

SEQ ID NO: 1541416 - DNA, 25 bp, Homo sapien
gaggaatccgctgcattcctgctgg

SEQ ID NO: 1541417 - DNA, 25 bp, Homo sapien
cagagtccttaaaccataaaggagg

SEQ ID NO: 1541418 - DNA, 25 bp, Homo sapien
aaagcaagctaacacacatcttgag

SEQ ID NO: 1541419 - DNA, 25 bp, Homo sapien
gcagccgccagcactacaaagcaag

SEQ ID NO: 1541420 - DNA, 25 bp, Homo sapien
caggcgcccgatgcagagtccttaa

SEQ ID NO: 1541421 - DNA, 25 bp, Homo sapien
taatgggctctacgcacacactgag

SEQ ID NO: 1541422 - DNA, 25 bp, Homo sapien
tagcaaagctggaaagtgaccaccc

SEQ ID NO: 1541423 - DNA, 25 bp, Homo sapien
tgctacctggtagtgcatcgggacc

SEQ ID NO: 1541424 - DNA, 25 bp, Homo sapien
ctagcagaggataaacagggagcca

SEQ ID NO: 1541425 - DNA, 25 bp, Homo sapien
aggacacaggcctagctgggtctgg

SEQ ID NO: 1541426 - DNA, 25 bp, Homo sapien
caggacacaggcctagctgggtctg

SEQ ID NO: 1541427 - DNA, 25 bp, Homo sapien
acaggacacaggcctagctgggtct

SEQ ID NO: 1541428 - DNA, 25 bp, Homo sapien
tgaacatatcgctggagtggtcttc

SEQ ID NO: 1541429 - DNA, 25 bp, Homo sapien
aacatatcgctggagtggtcttcag

SEQ ID NO: 1541430 - DNA, 25 bp, Homo sapien
cttcatagttgaacatatcgctgga

SEQ ID NO: 1541431 - DNA, 25 bp, Homo sapien
tagttgaacatatcgctggagtggt

SEQ ID NO: 1541432 - DNA, 25 bp, Homo sapien
ccaggtgacggcttcggagctttga

SEQ ID NO: 1541433 - DNA, 25 bp, Homo sapien
tatgagacctatctgggacccttca

SEQ ID NO: 1541434 - DNA, 25 bp, Homo sapien
gaaaatccgcaagtgtctctcaata

SEQ ID NO: 1541435 - DNA, 25 bp, Homo sapien
tacaaattagtagggcccgcaagga

SEQ ID NO: 1541436 - DNA, 25 bp, Homo sapien
tgggaaggatgcacggcaaggccca

SEQ ID NO: 1541437 - DNA, 25 bp, Homo sapien
cagtgactgcgttggcggtgcagta

SEQ ID NO: 1541438 - DNA, 25 bp, Homo sapien
acggcaaggcccagtgactgcgttg

SEQ ID NO: 1541439 - DNA, 25 bp, Homo sapien
aggatgcacggcaaggcccagtgac

SEQ ID NO: 1541440 - DNA, 25 bp, Homo sapien
ctcagagcggtagctgttcttattg

SEQ ID NO: 1541441 - DNA, 25 bp, Homo sapien
gttcttattgccccggcagcctcca

SEQ ID NO: 1541442 - DNA, 25 bp, Homo sapien
tcctcagagcggtagctgttcttat

SEQ ID NO: 1541443 - DNA, 25 bp, Homo sapien
ggcagcctccatagatgaagttatt

SEQ ID NO: 1541444 - DNA, 25 bp, Homo sapien
ggggcaggggaggattctcctgctg

SEQ ID NO: 1541445 - DNA, 25 bp, Homo sapien
aaggggcaggggaggattctcctgc

SEQ ID NO: 1541446 - DNA, 25 bp, Homo sapien
cctttgagccaaggggcaggggagg

SEQ ID NO: 1541447 - DNA, 25 bp, Homo sapien
ggcaggggaggattctcctgctggc

SEQ ID NO: 1541448 - DNA, 25 bp, Homo sapien
gccgtgtcgccagcagagtagtcat

SEQ ID NO: 1541449 - DNA, 25 bp, Homo sapien
tacactgaacggtgggacaaaccac

SEQ ID NO: 1541450 - DNA, 25 bp, Homo sapien
cacgctgaccggcaatagagaaaga

SEQ ID NO: 1541451 - DNA, 25 bp, Homo sapien
taaggagtgtgacctgtggcagcct

SEQ ID NO: 1541452 - DNA, 25 bp, Homo sapien
agggcacgctcctggttcctccgtg

SEQ ID NO: 1541453 - DNA, 25 bp, Homo sapien
ttgtcatctccggagctccagacgg

SEQ ID NO: 1541454 - DNA, 25 bp, Homo sapien
caggacatatgtgttcttcaccagc

SEQ ID NO: 1541455 - DNA, 25 bp, Homo sapien
tcaggtagaccatggaggctcccag

SEQ ID NO: 1541456 - DNA, 25 bp, Homo sapien
tccgagtcaatccctctatttaaaa

SEQ ID NO: 1541457 - DNA, 25 bp, Homo sapien
tttaaaaaaagctcacacatagtct

SEQ ID NO: 1541458 - DNA, 25 bp, Homo sapien
tcacacatagtctcccctcccttcc

SEQ ID NO: 1541459 - DNA, 25 bp, Homo sapien
gagaaacagacctcagccctaatga

SEQ ID NO: 1541460 - DNA, 25 bp, Homo sapien
agaaacgattccaacatcacttctg

SEQ ID NO: 1541461 - DNA, 25 bp, Homo sapien
aggccatgcgaggaggagcctccta

SEQ ID NO: 1541462 - DNA, 25 bp, Homo sapien
tcgatcagcgaggaaacaactcggg

SEQ ID NO: 1541463 - DNA, 25 bp, Homo sapien
cacctcagatagtgtcttgtgatca

SEQ ID NO: 1541464 - DNA, 25 bp, Homo sapien
aaagatctgaaagacgctattttga

SEQ ID NO: 1541465 - DNA, 25 bp, Homo sapien
cttgtgatcattttggtagggttga

SEQ ID NO: 1541466 - DNA, 25 bp, Homo sapien
ctatttctagaatgggacacctcag

SEQ ID NO: 1541467 - DNA, 25 bp, Homo sapien
tgatcaattacttgttacactactg

SEQ ID NO: 1541468 - DNA, 25 bp, Homo sapien
caattacttgttacactactgcact

SEQ ID NO: 1541469 - DNA, 25 bp, Homo sapien
aggctggtcaaggaaagcagcagaa

SEQ ID NO: 1541470 - DNA, 25 bp, Homo sapien
attacttgttacactactgcacttg

SEQ ID NO: 1541471 - DNA, 25 bp, Homo sapien
taagagaagttgggtcctaaggcca

SEQ ID NO: 1541472 - DNA, 25 bp, Homo sapien
tcctaaggccaagggcgcctgggcc

SEQ ID NO: 1541473 - DNA, 25 bp, Homo sapien
gctgagacctgcccgttggaggaat

SEQ ID NO: 1541474 - DNA, 25 bp, Homo sapien
gagcgctgagacctgcccgttggag

SEQ ID NO: 1541475 - DNA, 25 bp, Homo sapien
cctgcacctccagtccacactcccc

SEQ ID NO: 1541476 - DNA, 25 bp, Homo sapien
ccctgcacctccagtccacactccc

SEQ ID NO: 1541477 - DNA, 25 bp, Homo sapien
ggcttgagtccggccccctgcacct

SEQ ID NO: 1541478 - DNA, 25 bp, Homo sapien
gggcttgagtccggccccctgcacc

SEQ ID NO: 1541479 - DNA, 25 bp, Homo sapien
ccggccctgaactttgtggggactg

SEQ ID NO: 1541480 - DNA, 25 bp, Homo sapien
cctccgaccggccctgaactttgtg

SEQ ID NO: 1541481 - DNA, 25 bp, Homo sapien
ctgcctccgaccggccctgaacttt

SEQ ID NO: 1541482 - DNA, 25 bp, Homo sapien
ctccgaccggccctgaactttgtgg

SEQ ID NO: 1541483 - DNA, 25 bp, Homo sapien
atggaggtgcggcagtgaggcggcg

SEQ ID NO: 1541484 - DNA, 25 bp, Homo sapien
gatggaggtgcggcagtgaggcggc

SEQ ID NO: 1541485 - DNA, 25 bp, Homo sapien
gcagtgaggcggcgccccttaccca

SEQ ID NO: 1541486 - DNA, 25 bp, Homo sapien
tggatggaggtgcggcagtgaggcg

SEQ ID NO: 1541487 - DNA, 25 bp, Homo sapien
ctgctgctggagtcggaagagctgt

SEQ ID NO: 1541488 - DNA, 25 bp, Homo sapien
ctgctggagtcggaagagctgtggt

SEQ ID NO: 1541489 - DNA, 25 bp, Homo sapien
agtcggaagagctgtggtgtccttg

SEQ ID NO: 1541490 - DNA, 25 bp, Homo sapien
tggagtcggaagagctgtggtgtcc

SEQ ID NO: 1541491 - DNA, 25 bp, Homo sapien
cacatccgtgtccgaatcgctggag

SEQ ID NO: 1541492 - DNA, 25 bp, Homo sapien
tcacatccgtgtccgaatcgctgga

SEQ ID NO: 1541493 - DNA, 25 bp, Homo sapien
atgctctcgtgctgcttggagccag

SEQ ID NO: 1541494 - DNA, 25 bp, Homo sapien
gcccgggatgctctcgtgctgcttg

SEQ ID NO: 1541495 - DNA, 25 bp, Homo sapien
ggatgctctcgtgctgcttggagcc

SEQ ID NO: 1541496 - DNA, 25 bp, Homo sapien
ccgggatgctctcgtgctgcttgga

SEQ ID NO: 1541497 - DNA, 25 bp, Homo sapien
tcagtggggagcctccttcttcttg

SEQ ID NO: 1541498 - DNA, 25 bp, Homo sapien
tcttcttgcccttctccttcttgcc

SEQ ID NO: 1541499 - DNA, 25 bp, Homo sapien
tcttgcccttctccttcttgccctt

SEQ ID NO: 1541500 - DNA, 25 bp, Homo sapien
ttgcccttctccttcttgcccttct

SEQ ID NO: 1541501 - DNA, 25 bp, Homo sapien
gagaggaaggtttaatgagccctgt

SEQ ID NO: 1541502 - DNA, 25 bp, Homo sapien
ggaaggtttaatgagccctgtccag

SEQ ID NO: 1541503 - DNA, 25 bp, Homo sapien
gcagagaggaaggtttaatgagccc

SEQ ID NO: 1541504 - DNA, 25 bp, Homo sapien
gaggaaggtttaatgagccctgtcc

SEQ ID NO: 1541505 - DNA, 25 bp, Homo sapien
tgtcttcagaaattgccgtgtggcc

SEQ ID NO: 1541506 - DNA, 25 bp, Homo sapien
tcagattttgcccacagggcccggg

SEQ ID NO: 1541507 - DNA, 25 bp, Homo sapien
taaagatagcatttctggcgtgtct

SEQ ID NO: 1541508 - DNA, 25 bp, Homo sapien
tgcctggcatttgagtatggaacct

SEQ ID NO: 1541509 - DNA, 25 bp, Homo sapien
agttccagttccgggagtgctacag

SEQ ID NO: 1541510 - DNA, 25 bp, Homo sapien
ttccagttccgggagtgctacaggc

SEQ ID NO: 1541511 - DNA, 25 bp, Homo sapien
ccagttccgggagtgctacaggcgc

SEQ ID NO: 1541512 - DNA, 25 bp, Homo sapien
gaccgtctggcacctagttccagtt

SEQ ID NO: 1541513 - DNA, 25 bp, Homo sapien
gtctccagctcggctcggagcctgg

SEQ ID NO: 1541514 - DNA, 25 bp, Homo sapien
ttggcggaccccgaagcgttagcaa

SEQ ID NO: 1541515 - DNA, 25 bp, Homo sapien
cagcaccaggtacgcggcgtacgcg

SEQ ID NO: 1541516 - DNA, 25 bp, Homo sapien
cacacacgggctgcgctgaagcagc

SEQ ID NO: 1541517 - DNA, 25 bp, Homo sapien
ggaaaagaaatgatcccagccaggc

SEQ ID NO: 1541518 - DNA, 25 bp, Homo sapien
catggcatggccagcctcgtatcta

SEQ ID NO: 1541519 - DNA, 25 bp, Homo sapien
taaccccagccctctaggaggctaa

SEQ ID NO: 1541520 - DNA, 25 bp, Homo sapien
ttgagttgagcaataactccatctc

SEQ ID NO: 1541521 - DNA, 25 bp, Homo sapien
ttctcataggctgccagttcagcaa

SEQ ID NO: 1541522 - DNA, 25 bp, Homo sapien
taggctgccagttcagcaaagcagg

SEQ ID NO: 1541523 - DNA, 25 bp, Homo sapien
cgtcttctcataggctgccagttca

SEQ ID NO: 1541524 - DNA, 25 bp, Homo sapien
cagttcagcaaagcaggaggttctg

SEQ ID NO: 1541525 - DNA, 25 bp, Homo sapien
gttggagttacagatctgatcccca

SEQ ID NO: 1541526 - DNA, 25 bp, Homo sapien
tcaacacctgcagcgagaggtctgc

SEQ ID NO: 1541527 - DNA, 25 bp, Homo sapien
cagagcctgccaacacctgagttca

SEQ ID NO: 1541528 - DNA, 25 bp, Homo sapien
ccagcacgccccgttgattttaaat

SEQ ID NO: 1541529 - DNA, 25 bp, Homo sapien
caggagcgcaaaggcgatggagaag

SEQ ID NO: 1541530 - DNA, 25 bp, Homo sapien
tggtcggcacgcccaggagcgcaaa

SEQ ID NO: 1541531 - DNA, 25 bp, Homo sapien
gcatcagtcagtggcgttgtgtacc

SEQ ID NO: 1541532 - DNA, 25 bp, Homo sapien
ggccttgcccgcatcagtcagtggc

SEQ ID NO: 1541533 - DNA, 25 bp, Homo sapien
cgggcacgtagtcgcccaggccgat

SEQ ID NO: 1541534 - DNA, 25 bp, Homo sapien
aagctccaggcctcctcgaggtggg

SEQ ID NO: 1541535 - DNA, 25 bp, Homo sapien
gcagcagtgacaggcgctgggctga

SEQ ID NO: 1541536 - DNA, 25 bp, Homo sapien
tgaccagcaccttgtagagggcccg

SEQ ID NO: 1541537 - DNA, 25 bp, Homo sapien
gagagttgctggtgcgactccggct

SEQ ID NO: 1541538 - DNA, 25 bp, Homo sapien
ccgatcgtcctcatccgcattgaaa

SEQ ID NO: 1541539 - DNA, 25 bp, Homo sapien
tccgtgaggccgtggaggtcggaca

SEQ ID NO: 1541540 - DNA, 25 bp, Homo sapien
cgcattgaaactggcagggcacgga

SEQ ID NO: 1541541 - DNA, 25 bp, Homo sapien
caggctgctgaggaagagtctatcg

SEQ ID NO: 1541542 - DNA, 25 bp, Homo sapien
tgcctgaaatgaggtctgagcccac

SEQ ID NO: 1541543 - DNA, 25 bp, Homo sapien
caatggtgtcatggttaagggcagc

SEQ ID NO: 1541544 - DNA, 25 bp, Homo sapien
cacttgtccagggtgtagcgaccaa

SEQ ID NO: 1541545 - DNA, 25 bp, Homo sapien
cactgtgcctggcccttttttttct

SEQ ID NO: 1541546 - DNA, 25 bp, Homo sapien
tgccacacactgctagctctaaggg

SEQ ID NO: 1541547 - DNA, 25 bp, Homo sapien
tctcaagtccatgaggtaggtgcta

SEQ ID NO: 1541548 - DNA, 25 bp, Homo sapien
catggaggtgaaatcacttgcccaa

SEQ ID NO: 1541549 - DNA, 25 bp, Homo sapien
ttgtacagactagcaaactgaggca

SEQ ID NO: 1541550 - DNA, 25 bp, Homo sapien
tgactagctggtgttccaccacacc

SEQ ID NO: 1541551 - DNA, 25 bp, Homo sapien
caagctagtcccaaacacctgggtt

SEQ ID NO: 1541552 - DNA, 25 bp, Homo sapien
gatgaggtctcacatgatgtccaag

SEQ ID NO: 1541553 - DNA, 25 bp, Homo sapien
gtgcttcattgcacccgacctttat

SEQ ID NO: 1541554 - DNA, 25 bp, Homo sapien
gacttccgcctttgcagaggcacgc

SEQ ID NO: 1541555 - DNA, 25 bp, Homo sapien
tcttgcccggtctcaaaatggccgc

SEQ ID NO: 1541556 - DNA, 25 bp, Homo sapien
taaaaccggtcaactgtcactcggc

SEQ ID NO: 1541557 - DNA, 25 bp, Homo sapien
aaaatggccgcccacacttccacag

SEQ ID NO: 1541558 - DNA, 25 bp, Homo sapien
cgcccttcgcccttcacgttcggct

SEQ ID NO: 1541559 - DNA, 25 bp, Homo sapien
gcccttcgcccttcacgttcggctc

SEQ ID NO: 1541560 - DNA, 25 bp, Homo sapien
gccattaacacctgcctgctctata

SEQ ID NO: 1541561 - DNA, 25 bp, Homo sapien
aacacctgcctgctctataccccga

SEQ ID NO: 1541562 - DNA, 25 bp, Homo sapien
ttaacacctgcctgctctatacccc

SEQ ID NO: 1541563 - DNA, 25 bp, Homo sapien
cattaacacctgcctgctctatacc

SEQ ID NO: 1541564 - DNA, 25 bp, Homo sapien
tctcaccttcccctcgtaccgcgac

SEQ ID NO: 1541565 - DNA, 25 bp, Homo sapien
accagcttcttagccggcaccttct

SEQ ID NO: 1541566 - DNA, 25 bp, Homo sapien
cctcgtaccgcgacaccttcttgcc

SEQ ID NO: 1541567 - DNA, 25 bp, Homo sapien
gcaccagcttcttagccggcacctt

SEQ ID NO: 1541568 - DNA, 25 bp, Homo sapien
cctccacttggtctttatggacccg

SEQ ID NO: 1541569 - DNA, 25 bp, Homo sapien
cccttctcgatgaaaactgtctctt

SEQ ID NO: 1541570 - DNA, 25 bp, Homo sapien
gtctcttcgcctcgggatctttcct

SEQ ID NO: 1541571 - DNA, 25 bp, Homo sapien
tctcggcgattggttcttcccgcgc

SEQ ID NO: 1541572 - DNA, 25 bp, Homo sapien
ctctgcttccgctcctgaccgcgcc

SEQ ID NO: 1541573 - DNA, 25 bp, Homo sapien
ttctcttggtatcgccgctttctcc

SEQ ID NO: 1541574 - DNA, 25 bp, Homo sapien
gtactgtacctggtctcgcccgtct

SEQ ID NO: 1541575 - DNA, 25 bp, Homo sapien
tttctcctcgctcggggtctgccca

SEQ ID NO: 1541576 - DNA, 25 bp, Homo sapien
tctctggagcccacttttaagattc

SEQ ID NO: 1541577 - DNA, 25 bp, Homo sapien
ctggagaacgcaggagtcaacaccc

SEQ ID NO: 1541578 - DNA, 25 bp, Homo sapien
aagattccacctcgcttctgcgcct

SEQ ID NO: 1541579 - DNA, 25 bp, Homo sapien
cccacgcgccggacagctctctgga

SEQ ID NO: 1541580 - DNA, 25 bp, Homo sapien
gctgggccgcacataacgtggctag

SEQ ID NO: 1541581 - DNA, 25 bp, Homo sapien
ggctgggccgcacataacgtggcta

SEQ ID NO: 1541582 - DNA, 25 bp, Homo sapien
gggccgcacataacgtggctagaac

SEQ ID NO: 1541583 - DNA, 25 bp, Homo sapien
tgggccgcacataacgtggctagaa

SEQ ID NO: 1541584 - DNA, 25 bp, Homo sapien
ctgggccacggaggaccggcaggga

SEQ ID NO: 1541585 - DNA, 25 bp, Homo sapien
ggccacggaggaccggcagggaaca

SEQ ID NO: 1541586 - DNA, 25 bp, Homo sapien
tgggccacggaggaccggcagggaa

SEQ ID NO: 1541587 - DNA, 25 bp, Homo sapien
gccacggaggaccggcagggaacat

SEQ ID NO: 1541588 - DNA, 25 bp, Homo sapien
cctggaaatccttgatcgcccacag

SEQ ID NO: 1541589 - DNA, 25 bp, Homo sapien
tcactgtgtccacgggctcttgctc

SEQ ID NO: 1541590 - DNA, 25 bp, Homo sapien
cttaaactcgttcaggacaacctgc

SEQ ID NO: 1541591 - DNA, 25 bp, Homo sapien
tcttgctcaaagaagctgtcgctca

SEQ ID NO: 1541592 - DNA, 25 bp, Homo sapien
ctcgcaggagtagttgatcttcagg

SEQ ID NO: 1541593 - DNA, 25 bp, Homo sapien
agttgatcttcaggtagtaagggaa

SEQ ID NO: 1541594 - DNA, 25 bp, Homo sapien
gtctgggcaacagcgcaagactccg

SEQ ID NO: 1541595 - DNA, 25 bp, Homo sapien
cagtgagccgagatcgcgccactgc

SEQ ID NO: 1541596 - DNA, 25 bp, Homo sapien
cgaggcaggagcatcgcttgaacac

SEQ ID NO: 1541597 - DNA, 25 bp, Homo sapien
cacgggaggcggaggttgcagtgag

SEQ ID NO: 1541598 - DNA, 25 bp, Homo sapien
tttagcagcctccatacactagcaa

SEQ ID NO: 1541599 - DNA, 25 bp, Homo sapien
tcatggcctcgatagaatccagggc

SEQ ID NO: 1541600 - DNA, 25 bp, Homo sapien
tccatacactagcaatggccctctg

SEQ ID NO: 1541601 - DNA, 25 bp, Homo sapien
taaagggtggaagcctaccatcatg

SEQ ID NO: 1541602 - DNA, 25 bp, Homo sapien
gaatctcaccaaacggcattgggac

SEQ ID NO: 1541603 - DNA, 25 bp, Homo sapien
ctggatatgcacgtgtaaaagcttg

SEQ ID NO: 1541604 - DNA, 25 bp, Homo sapien
aaagaagaatctcaccaaacggcat

SEQ ID NO: 1541605 - DNA, 25 bp, Homo sapien
atatgcacgtgtaaaagcttggacc

SEQ ID NO: 1541606 - DNA, 25 bp, Homo sapien
ctatgcccggcccaattttttgatt

SEQ ID NO: 1541607 - DNA, 25 bp, Homo sapien
gtccaggctggtcttgaattcttgg

SEQ ID NO: 1541608 - DNA, 25 bp, Homo sapien
tgattttttttgtagagacagggtc

SEQ ID NO: 1541609 - DNA, 25 bp, Homo sapien
agggtctccctatgttgtccaggct

SEQ ID NO: 1541610 - DNA, 25 bp, Homo sapien
tcccagacttcagcaatcctcttac

SEQ ID NO: 1541611 - DNA, 25 bp, Homo sapien
cctctcccagacttcagcaatcctc

SEQ ID NO: 1541612 - DNA, 25 bp, Homo sapien
ccacctctcccagacttcagcaatc

SEQ ID NO: 1541613 - DNA, 25 bp, Homo sapien
tctcccagacttcagcaatcctctt

SEQ ID NO: 1541614 - DNA, 25 bp, Homo sapien
cctcaactgatctgcgcgcttcggc

SEQ ID NO: 1541615 - DNA, 25 bp, Homo sapien
acctcaactgatctgcgcgcttcgg

SEQ ID NO: 1541616 - DNA, 25 bp, Homo sapien
tcaactgatctgcgcgcttcggcct

SEQ ID NO: 1541617 - DNA, 25 bp, Homo sapien
gacctcaactgatctgcgcgcttcg

SEQ ID NO: 1541618 - DNA, 25 bp, Homo sapien
ccaggggctttagccccgtcaggtg

SEQ ID NO: 1541619 - DNA, 25 bp, Homo sapien
gcaccaggggctttagccccgtcag

SEQ ID NO: 1541620 - DNA, 25 bp, Homo sapien
tcaggtggcccatgcgcaccaggtc

SEQ ID NO: 1541621 - DNA, 25 bp, Homo sapien
ctttagccccgtcaggtggcccatg

SEQ ID NO: 1541622 - DNA, 25 bp, Homo sapien
cagctgctctatcttccagcggtag

SEQ ID NO: 1541623 - DNA, 25 bp, Homo sapien
gctgctctatcttccagcggtagaa

SEQ ID NO: 1541624 - DNA, 25 bp, Homo sapien
tctatcttccagcggtagaagttga

SEQ ID NO: 1541625 - DNA, 25 bp, Homo sapien
gctctatcttccagcggtagaagtt

SEQ ID NO: 1541626 - DNA, 25 bp, Homo sapien
gccaggttgcgatccctcccgcctc

SEQ ID NO: 1541627 - DNA, 25 bp, Homo sapien
ccctgccaggttgcgatccctcccg

SEQ ID NO: 1541628 - DNA, 25 bp, Homo sapien
tgccaggttgcgatccctcccgcct

SEQ ID NO: 1541629 - DNA, 25 bp, Homo sapien
ctgccaggttgcgatccctcccgcc

SEQ ID NO: 1541630 - DNA, 25 bp, Homo sapien
ccatacctgcctccacgccatgggt

SEQ ID NO: 1541631 - DNA, 25 bp, Homo sapien
taccctcctcagatcatggccccac

SEQ ID NO: 1541632 - DNA, 25 bp, Homo sapien
ccctctaggccatggaatgtgctga

SEQ ID NO: 1541633 - DNA, 25 bp, Homo sapien
tggggcctcccaatggccggttcca

SEQ ID NO: 1541634 - DNA, 25 bp, Homo sapien
acgcatgaccacactgcctttcttg

SEQ ID NO: 1541635 - DNA, 25 bp, Homo sapien
ggcatgggcgtgtaccagctcatgc

SEQ ID NO: 1541636 - DNA, 25 bp, Homo sapien
ttatctggaatgaaggtccccaggc

SEQ ID NO: 1541637 - DNA, 25 bp, Homo sapien
agctcatgctacacacttcttctgc

SEQ ID NO: 1541638 - DNA, 25 bp, Homo sapien
cgcaggtgaggtcccagtgtcaggg

SEQ ID NO: 1541639 - DNA, 25 bp, Homo sapien
tagcagcaggtgcagaataggcgca

SEQ ID NO: 1541640 - DNA, 25 bp, Homo sapien
ttggatctcccactggctcctctgg

SEQ ID NO: 1541641 - DNA, 25 bp, Homo sapien
ggttccacagctcgtagctgcctct

SEQ ID NO: 1541642 - DNA, 25 bp, Homo sapien
tgtcccggtctctcttcaggaagcc

SEQ ID NO: 1541643 - DNA, 25 bp, Homo sapien
gttattgtcccggtctctcttcagg

SEQ ID NO: 1541644 - DNA, 25 bp, Homo sapien
gaattggatgttattgtcccggtct

SEQ ID NO: 1541645 - DNA, 25 bp, Homo sapien
gtctctcttcaggaagccgttgata

SEQ ID NO: 1541646 - DNA, 25 bp, Homo sapien
caggtgactggtccacagtgtgcca

SEQ ID NO: 1541647 - DNA, 25 bp, Homo sapien
cagtgtgccacaagggcctcgatga

SEQ ID NO: 1541648 - DNA, 25 bp, Homo sapien
gaatgcctcccaggataagcacagg

SEQ ID NO: 1541649 - DNA, 25 bp, Homo sapien
catcaggacgtacttctcattggga

SEQ ID NO: 1541650 - DNA, 25 bp, Homo sapien
tatgtctttggggacttctagagcc

SEQ ID NO: 1541651 - DNA, 25 bp, Homo sapien
gaaactattaacttatatcatcctc

SEQ ID NO: 1541652 - DNA, 25 bp, Homo sapien
cgggtcgttgaactgccaggtccag

SEQ ID NO: 1541653 - DNA, 25 bp, Homo sapien
cccatgttacaaatgggaatctgaa

SEQ ID NO: 1541654 - DNA, 25 bp, Homo sapien
ttctctatgaccaggtgcgatggct

SEQ ID NO: 1541655 - DNA, 25 bp, Homo sapien
tgtgaatataaacaccttctctatg

SEQ ID NO: 1541656 - DNA, 25 bp, Homo sapien
gcctgaattcacattgaacttgttt

SEQ ID NO: 1541657 - DNA, 25 bp, Homo sapien
ggaacaagaatttggatgcctgaat

SEQ ID NO: 1541658 - DNA, 25 bp, Homo sapien
caagccttgttatggtgtcggccca

SEQ ID NO: 1541659 - DNA, 25 bp, Homo sapien
gaaatctccttggttagagaacaag

SEQ ID NO: 1541660 - DNA, 25 bp, Homo sapien
tacagcatctatacctggaccccaa

SEQ ID NO: 1541661 - DNA, 25 bp, Homo sapien
tacgtgtggcgattgggttttcacc

SEQ ID NO: 1541662 - DNA, 25 bp, Homo sapien
gcaatagtgtcatagatggtggctg

SEQ ID NO: 1541663 - DNA, 25 bp, Homo sapien
ccagctggttctgccgaatgaagag

SEQ ID NO: 1541664 - DNA, 25 bp, Homo sapien
aatgaagagggtgctctcggtggca

SEQ ID NO: 1541665 - DNA, 25 bp, Homo sapien
taaaatagtagaccagctggttctg

SEQ ID NO: 1541666 - DNA, 25 bp, Homo sapien
tctctcatagagtgtggtataggtg

SEQ ID NO: 1541667 - DNA, 25 bp, Homo sapien
ctgccgcggtttctctcatagagtg

SEQ ID NO: 1541668 - DNA, 25 bp, Homo sapien
gcggtttctctcatagagtgtggta

SEQ ID NO: 1541669 - DNA, 25 bp, Homo sapien
cactgccgcggtttctctcatagag

SEQ ID NO: 1541670 - DNA, 25 bp, Homo sapien
ggcgtgggtccagccacagcacact

SEQ ID NO: 1541671 - DNA, 25 bp, Homo sapien
tggaggggttcaccagggtgccctc

SEQ ID NO: 1541672 - DNA, 25 bp, Homo sapien
gtgccctccccaggcgtgggtccag

SEQ ID NO: 1541673 - DNA, 25 bp, Homo sapien
cccaggcgtgggtccagccacagca

SEQ ID NO: 1541674 - DNA, 25 bp, Homo sapien
cgtgatccgccctcccaaagcgctg

SEQ ID NO: 1541675 - DNA, 25 bp, Homo sapien
cgcccagctaattttgctaattttc

SEQ ID NO: 1541676 - DNA, 25 bp, Homo sapien
cccagctaattttgctaattttctg

SEQ ID NO: 1541677 - DNA, 25 bp, Homo sapien
cagctaattttgctaattttctgta

SEQ ID NO: 1541678 - DNA, 25 bp, Homo sapien
ctcagagccattgctatggaaatac

SEQ ID NO: 1541679 - DNA, 25 bp, Homo sapien
gcactcgctggccaggacacgaatc

SEQ ID NO: 1541680 - DNA, 25 bp, Homo sapien
gctggccaggacacgaatccaactg

SEQ ID NO: 1541681 - DNA, 25 bp, Homo sapien
tgatgcactcgctggccaggacacg

SEQ ID NO: 1541682 - DNA, 25 bp, Homo sapien
tctgatggtcccgaagtgtacataa

SEQ ID NO: 1541683 - DNA, 25 bp, Homo sapien
taaccctcatgcttgcccgtggtga

SEQ ID NO: 1541684 - DNA, 25 bp, Homo sapien
tcccgaagtgtacataaccctcatg

SEQ ID NO: 1541685 - DNA, 25 bp, Homo sapien
tacataaccctcatgcttgcccgtg

SEQ ID NO: 1541686 - DNA, 25 bp, Homo sapien
tgctcgcacacagaccactgcctgg

SEQ ID NO: 1541687 - DNA, 25 bp, Homo sapien
ctgctcgcacacagaccactgcctg

SEQ ID NO: 1541688 - DNA, 25 bp, Homo sapien
tctgctcgcacacagaccactgcct

SEQ ID NO: 1541689 - DNA, 25 bp, Homo sapien
tcacccctccctaagacactgccca

SEQ ID NO: 1541690 - DNA, 25 bp, Homo sapien
ccctccctaagacactgcccattct

SEQ ID NO: 1541691 - DNA, 25 bp, Homo sapien
agcctcccaccgcagacccatcggg

SEQ ID NO: 1541692 - DNA, 25 bp, Homo sapien
ccgcagacccatcggggtaatgagt

SEQ ID NO: 1541693 - DNA, 25 bp, Homo sapien
ctgagagggaaaggggcagtccaga

SEQ ID NO: 1541694 - DNA, 25 bp, Homo sapien
agagggaaaggggcagtccagagcc

SEQ ID NO: 1541695 - DNA, 25 bp, Homo sapien
agggaaaggggcagtccagagccgc

SEQ ID NO: 1541696 - DNA, 25 bp, Homo sapien
ggaaaggggcagtccagagccgccc

SEQ ID NO: 1541697 - DNA, 25 bp, Homo sapien
agcagcagtagagtatactcacccg

SEQ ID NO: 1541698 - DNA, 25 bp, Homo sapien
agctgaccacctggaaacgtttact

SEQ ID NO: 1541699 - DNA, 25 bp, Homo sapien
ctcacccgcgatgtattcagaccaa

SEQ ID NO: 1541700 - DNA, 25 bp, Homo sapien
cacctggaaacgtttacttgcatta

SEQ ID NO: 1541701 - DNA, 25 bp, Homo sapien
gatgtggtagagaagttccaggtca

SEQ ID NO: 1541702 - DNA, 25 bp, Homo sapien
tagagaagttccaggtcatcactag

SEQ ID NO: 1541703 - DNA, 25 bp, Homo sapien
attctgggatgtggtagagaagttc

SEQ ID NO: 1541704 - DNA, 25 bp, Homo sapien
cttcagggatgaattctgggatgtg

SEQ ID NO: 1541705 - DNA, 25 bp, Homo sapien
gaagtggagtcacctgggcccctcc

SEQ ID NO: 1541706 - DNA, 25 bp, Homo sapien
agcagtgaagtggagtcacctgggc

SEQ ID NO: 1541707 - DNA, 25 bp, Homo sapien
ccaccctgaggccacgtctgccttc

SEQ ID NO: 1541708 - DNA, 25 bp, Homo sapien
gacacagcagtgaagtggagtcacc

SEQ ID NO: 1541709 - DNA, 25 bp, Homo sapien
tgtacgggttacagaagatgccctt

SEQ ID NO: 1541710 - DNA, 25 bp, Homo sapien
tgtccctaggatcatcaggaactcc

SEQ ID NO: 1541711 - DNA, 25 bp, Homo sapien
tggtgtaggactctgtccctaggat

SEQ ID NO: 1541712 - DNA, 25 bp, Homo sapien
tgccccagatgaagatcagattgtt

SEQ ID NO: 1541713 - DNA, 25 bp, Homo sapien
gaacgatctggccatgtatttgatg

SEQ ID NO: 1541714 - DNA, 25 bp, Homo sapien
cacggaacgatctggccatgtattt

SEQ ID NO: 1541715 - DNA, 25 bp, Homo sapien
agccccacggaacgatctggccatg

SEQ ID NO: 1541716 - DNA, 25 bp, Homo sapien
tctggccatgtatttgatggacagt

SEQ ID NO: 1541717 - DNA, 25 bp, Homo sapien
gagttccaggagtttcagttataaa

SEQ ID NO: 1541718 - DNA, 25 bp, Homo sapien
tagctccggtctgcgtgactttgga

SEQ ID NO: 1541719 - DNA, 25 bp, Homo sapien
cccttggctcctttactgtgacggg

SEQ ID NO: 1541720 - DNA, 25 bp, Homo sapien
agagggccgcctctgaacatcggat

SEQ ID NO: 1541721 - DNA, 25 bp, Homo sapien
tcattggatgcgtagagagaggact

SEQ ID NO: 1541722 - DNA, 25 bp, Homo sapien
tacagtttgctgtcttcgtagaaga

SEQ ID NO: 1541723 - DNA, 25 bp, Homo sapien
ggaacagctggtagacccggtagct

SEQ ID NO: 1541724 - DNA, 25 bp, Homo sapien
gaggactgttgcatcagctttaagc

SEQ ID NO: 1541725 - DNA, 25 bp, Homo sapien
gctgttgatacatcagaagctgctc

SEQ ID NO: 1541726 - DNA, 25 bp, Homo sapien
tgctccacgggcacgagcctcttga

SEQ ID NO: 1541727 - DNA, 25 bp, Homo sapien
agctggcccttctggttgttcataa

SEQ ID NO: 1541728 - DNA, 25 bp, Homo sapien
tccaagtcatagtggctggtgtgct

SEQ ID NO: 1541729 - DNA, 25 bp, Homo sapien
gggcagaagtcgatgaaggagagca

SEQ ID NO: 1541730 - DNA, 25 bp, Homo sapien
ggcagaagtcgatgaaggagagcat

SEQ ID NO: 1541731 - DNA, 25 bp, Homo sapien
catcaccgagaaggggcagaagtcg

SEQ ID NO: 1541732 - DNA, 25 bp, Homo sapien
aggcgcatcaccgagaaggggcaga

SEQ ID NO: 1541733 - DNA, 25 bp, Homo sapien
ttgtcgtacacggagtgcagccaca

SEQ ID NO: 1541734 - DNA, 25 bp, Homo sapien
cgagcgagttctcgttgtggaagcc

SEQ ID NO: 1541735 - DNA, 25 bp, Homo sapien
tggaagcccgagcgctccaggacgc

SEQ ID NO: 1541736 - DNA, 25 bp, Homo sapien
ggtagcgctcctggcgcgtgtatct

SEQ ID NO: 1541737 - DNA, 25 bp, Homo sapien
tggggtcgtgcaccgggtccgcgta

SEQ ID NO: 1541738 - DNA, 25 bp, Homo sapien
caggtggggtcgtgcaccgggtccg

SEQ ID NO: 1541739 - DNA, 25 bp, Homo sapien
gccaggtggggtcgtgcaccgggtc

SEQ ID NO: 1541740 - DNA, 25 bp, Homo sapien
agcgccaggtggggtcgtgcaccgg

SEQ ID NO: 1541741 - DNA, 25 bp, Homo sapien
tttcccggctcccaatccgctccgc

SEQ ID NO: 1541742 - DNA, 25 bp, Homo sapien
ccggctcccaatccgctccgcctac

SEQ ID NO: 1541743 - DNA, 25 bp, Homo sapien
ggtaccggatgcgcggggcagagtc

SEQ ID NO: 1541744 - DNA, 25 bp, Homo sapien
tgcgcggggcagagtcagcgccggg

SEQ ID NO: 1541745 - DNA, 25 bp, Homo sapien
ccttgtccaggaaaatgcgctccgg

SEQ ID NO: 1541746 - DNA, 25 bp, Homo sapien
tgctcgccaagaagaagtagtaatc

SEQ ID NO: 1541747 - DNA, 25 bp, Homo sapien
gaagatggcgaagctgtactcagtg

SEQ ID NO: 1541748 - DNA, 25 bp, Homo sapien
tacgcggactcgaggttgtagatct

SEQ ID NO: 1541749 - DNA, 25 bp, Homo sapien
cccaggctcccagattctggtagcc

SEQ ID NO: 1541750 - DNA, 25 bp, Homo sapien
caccgagttgcgattaatcaggacc

SEQ ID NO: 1541751 - DNA, 25 bp, Homo sapien
gaaaatagcaccgagttgcgattaa

SEQ ID NO: 1541752 - DNA, 25 bp, Homo sapien
gggtcggccagcaccacgcccacgt

SEQ ID NO: 1541753 - DNA, 25 bp, Homo sapien
gttgcgattaatcaggacctcctgc

SEQ ID NO: 1541754 - DNA, 25 bp, Homo sapien
tgccttggtcatagcaaagcttttt

SEQ ID NO: 1541755 - DNA, 25 bp, Homo sapien
cataaggtgatgtccactaatgcct

SEQ ID NO: 1541756 - DNA, 25 bp, Homo sapien
ccttggtcatagcaaagctttttat

SEQ ID NO: 1541757 - DNA, 25 bp, Homo sapien
catggaagtctccataaggtgatgt

SEQ ID NO: 1541758 - DNA, 25 bp, Homo sapien
cctcccctccaggcttggacctcac

SEQ ID NO: 1541759 - DNA, 25 bp, Homo sapien
aagcagagcccggatgaacccacca

SEQ ID NO: 1541760 - DNA, 25 bp, Homo sapien
gaagcagagcccggatgaacccacc

SEQ ID NO: 1541761 - DNA, 25 bp, Homo sapien
agcagagcccggatgaacccaccac

SEQ ID NO: 1541762 - DNA, 25 bp, Homo sapien
taatatcattaacacggcctggtgc

SEQ ID NO: 1541763 - DNA, 25 bp, Homo sapien
aaaaaagaccgagagcctgcctgtt

SEQ ID NO: 1541764 - DNA, 25 bp, Homo sapien
taagcaagtgaagcaccaagcaccc

SEQ ID NO: 1541765 - DNA, 25 bp, Homo sapien
gggattagccctgttgagacccgac

SEQ ID NO: 1541766 - DNA, 25 bp, Homo sapien
aggggtggccagggtctcctcaggc

SEQ ID NO: 1541767 - DNA, 25 bp, Homo sapien
ggggtggccagggtctcctcaggcc

SEQ ID NO: 1541768 - DNA, 25 bp, Homo sapien
gggtggccagggtctcctcaggccc

SEQ ID NO: 1541769 - DNA, 25 bp, Homo sapien
tgaacactggcaccatcaggttgcc

SEQ ID NO: 1541770 - DNA, 25 bp, Homo sapien
ggcagccaatgaacactggcaccat

SEQ ID NO: 1541771 - DNA, 25 bp, Homo sapien
tggggggcagccaatgaacactggc

SEQ ID NO: 1541772 - DNA, 25 bp, Homo sapien
caatgaacactggcaccatcaggtt

SEQ ID NO: 1541773 - DNA, 25 bp, Homo sapien
cgttaacgcagtcaaagtagtgttt

SEQ ID NO: 1541774 - DNA, 25 bp, Homo sapien
agaaagcagggcatctccgggttca

SEQ ID NO: 1541775 - DNA, 25 bp, Homo sapien
tattccagcgtgtaggtgatgtcga

SEQ ID NO: 1541776 - DNA, 25 bp, Homo sapien
ttcttcaggcggctgtattccagcg

SEQ ID NO: 1541777 - DNA, 25 bp, Homo sapien
gaaattagcttggcccgagaagctg

SEQ ID NO: 1541778 - DNA, 25 bp, Homo sapien
tgagatgccgcaggaaaaagggtgg

SEQ ID NO: 1541779 - DNA, 25 bp, Homo sapien
gttggaggggattgagaccagaaga

SEQ ID NO: 1541780 - DNA, 25 bp, Homo sapien
tgaggaccgagacgggggaaagtga

SEQ ID NO: 1541781 - DNA, 25 bp, Homo sapien
tggaaactgccggagtctcctgtca

SEQ ID NO: 1541782 - DNA, 25 bp, Homo sapien
ggaaactgccggagtctcctgtcac

SEQ ID NO: 1541783 - DNA, 25 bp, Homo sapien
acagactggcctccgggtctcgagt

SEQ ID NO: 1541784 - DNA, 25 bp, Homo sapien
ctaccagggacagaagtgcacacag

SEQ ID NO: 1541785 - DNA, 25 bp, Homo sapien
tagctgcaagctggccacgccttta

SEQ ID NO: 1541786 - DNA, 25 bp, Homo sapien
tccacctgccctagctgcaagctgg

SEQ ID NO: 1541787 - DNA, 25 bp, Homo sapien
ggtagatttcgtcctcactgtagtc

SEQ ID NO: 1541788 - DNA, 25 bp, Homo sapien
gtagatttcgtcctcactgtagtcc

SEQ ID NO: 1541789 - DNA, 25 bp, Homo sapien
ggctgttgaagcggtagatttcgtc

SEQ ID NO: 1541790 - DNA, 25 bp, Homo sapien
cggtagatttcgtcctcactgtagt

SEQ ID NO: 1541791 - DNA, 25 bp, Homo sapien
gaggtatgacctcagtggtcagtgt

SEQ ID NO: 1541792 - DNA, 25 bp, Homo sapien
gcaaggtggattacacgtgggaccc

SEQ ID NO: 1541793 - DNA, 25 bp, Homo sapien
gagtttgcctgtgagatcctaagag

SEQ ID NO: 1541794 - DNA, 25 bp, Homo sapien
gacatggtgttaggggcgggcagga

SEQ ID NO: 1541795 - DNA, 25 bp, Homo sapien
cctcgtggtccagataaggctgttg

SEQ ID NO: 1541796 - DNA, 25 bp, Homo sapien
gatgtgaaaggctgagtctttggtg

SEQ ID NO: 1541797 - DNA, 25 bp, Homo sapien
ttgtggtcctcgtggtccagataag

SEQ ID NO: 1541798 - DNA, 25 bp, Homo sapien
cgtggtccagataaggctgttggtc

SEQ ID NO: 1541799 - DNA, 25 bp, Homo sapien
cgatgcctgggctctcgtgggacat

SEQ ID NO: 1541800 - DNA, 25 bp, Homo sapien
tcgatgcctgggctctcgtgggaca

SEQ ID NO: 1541801 - DNA, 25 bp, Homo sapien
ttggggaacattgtcatagcatggg

SEQ ID NO: 1541802 - DNA, 25 bp, Homo sapien
tagcatggggcattctccagacaga

SEQ ID NO: 1541803 - DNA, 25 bp, Homo sapien
caccaacaccttgaagaagaattca

SEQ ID NO: 1541804 - DNA, 25 bp, Homo sapien
caaagatgccttggggaacattgtc

SEQ ID NO: 1541805 - DNA, 25 bp, Homo sapien
cccgcttgggactgagtggcagccc

SEQ ID NO: 1541806 - DNA, 25 bp, Homo sapien
gcagtaggtgctcgtgtccactcct

SEQ ID NO: 1541807 - DNA, 25 bp, Homo sapien
aaaagggcccgcttgggactgagtg

SEQ ID NO: 1541808 - DNA, 25 bp, Homo sapien
aggaaggtgagctggtagttgcagt

SEQ ID NO: 1541809 - DNA, 25 bp, Homo sapien
gcgatgtagaagatcaccaggccca

SEQ ID NO: 1541810 - DNA, 25 bp, Homo sapien
tatcttccaccggatcatcgtgcag

SEQ ID NO: 1541811 - DNA, 25 bp, Homo sapien
catgctcgagattccggaaatggag

SEQ ID NO: 1541812 - DNA, 25 bp, Homo sapien
aatgtctcagagacggcatgctcga

SEQ ID NO: 1541813 - DNA, 25 bp, Homo sapien
tatttgagtctgaacgagaagtaaa

SEQ ID NO: 1541814 - DNA, 25 bp, Homo sapien
cctcataagagaggcgtgacagtaa

SEQ ID NO: 1541815 - DNA, 25 bp, Homo sapien
catcttcaagatgggcctcataaga

SEQ ID NO: 1541816 - DNA, 25 bp, Homo sapien
gagtctgaacgagaagtaaacatca

SEQ ID NO: 1541817 - DNA, 25 bp, Homo sapien
tctgaactcgagcttttaagagagc

SEQ ID NO: 1541818 - DNA, 25 bp, Homo sapien
tttaatgtgcagctatgctggtaca

SEQ ID NO: 1541819 - DNA, 25 bp, Homo sapien
ggtacaaaccttctgaactcgagct

SEQ ID NO: 1541820 - DNA, 25 bp, Homo sapien
gctatgctggtacaaaccttctgaa

SEQ ID NO: 1541821 - DNA, 25 bp, Homo sapien
tcaagatggtgaccggaagttggct

SEQ ID NO: 1541822 - DNA, 25 bp, Homo sapien
gacgctacgtagctgtcctggaggt

SEQ ID NO: 1541823 - DNA, 25 bp, Homo sapien
ccaagccaaaaggtagcgggtgtcg

SEQ ID NO: 1541824 - DNA, 25 bp, Homo sapien
tcagtctgagtgctcgggacgctac

SEQ ID NO: 1541825 - DNA, 25 bp, Homo sapien
gccatcttgcgtgatgcggcaagca

SEQ ID NO: 1541826 - DNA, 25 bp, Homo sapien
caagcagaccgcctgatttacggca

SEQ ID NO: 1541827 - DNA, 25 bp, Homo sapien
ggcctgcagaacagcgcccgaggtt

SEQ ID NO: 1541828 - DNA, 25 bp, Homo sapien
ctacaaacgcttgcccggcggaagt

SEQ ID NO: 1541829 - DNA, 25 bp, Homo sapien
tacggttccactcgcccttgagttg

SEQ ID NO: 1541830 - DNA, 25 bp, Homo sapien
cttgctaagattggggcttttacgg

SEQ ID NO: 1541831 - DNA, 25 bp, Homo sapien
gcacttgctaagattggggctttta

SEQ ID NO: 1541832 - DNA, 25 bp, Homo sapien
cacttgctaagattggggcttttac

SEQ ID NO: 1541833 - DNA, 25 bp, Homo sapien
cctccgagcccccactttggctgtt

SEQ ID NO: 1541834 - DNA, 25 bp, Homo sapien
ctctctcgcttcttgacgccctccg

SEQ ID NO: 1541835 - DNA, 25 bp, Homo sapien
aggcgtgaccatcaacgctccctgt

SEQ ID NO: 1541836 - DNA, 25 bp, Homo sapien
tctcgcttcttgacgccctccgagc

SEQ ID NO: 1541837 - DNA, 25 bp, Homo sapien
tcagttctgccataagtcttccaat

SEQ ID NO: 1541838 - DNA, 25 bp, Homo sapien
ttttatcactccgggcagtcctcac

SEQ ID NO: 1541839 - DNA, 25 bp, Homo sapien
taagcctccacgcaccaaaaatcta

SEQ ID NO: 1541840 - DNA, 25 bp, Homo sapien
aatcctgccactccgaccagttaag

SEQ ID NO: 1541841 - DNA, 25 bp, Homo sapien
tggcaagaagttgagctccagaaga

SEQ ID NO: 1541842 - DNA, 25 bp, Homo sapien
caagaagttgagctccagaagaact

SEQ ID NO: 1541843 - DNA, 25 bp, Homo sapien
ggcaagaagttgagctccagaagaa

SEQ ID NO: 1541844 - DNA, 25 bp, Homo sapien
agaagttgagctccagaagaactag

SEQ ID NO: 1541845 - DNA, 25 bp, Homo sapien
gctgggccatgtagcgctcgaagga

SEQ ID NO: 1541846 - DNA, 25 bp, Homo sapien
tgcgtaggatgctccattgggcccc

SEQ ID NO: 1541847 - DNA, 25 bp, Homo sapien
atgtccttgcgtaggatgctccatt

SEQ ID NO: 1541848 - DNA, 25 bp, Homo sapien
tccttgcgtaggatgctccattggg

SEQ ID NO: 1541849 - DNA, 25 bp, Homo sapien
cccaagagctggtgcatataggctg

SEQ ID NO: 1541850 - DNA, 25 bp, Homo sapien
ggacactgggtgcttgatgtagaca

SEQ ID NO: 1541851 - DNA, 25 bp, Homo sapien
tataggctgactcggggagctgctc

SEQ ID NO: 1541852 - DNA, 25 bp, Homo sapien
gctccaactccgtgtggaactcagc

SEQ ID NO: 1541853 - DNA, 25 bp, Homo sapien
ttattttctaaatagagacagaatc

SEQ ID NO: 1541854 - DNA, 25 bp, Homo sapien
tgtgcacggccacccttttctttaa

SEQ ID NO: 1541855 - DNA, 25 bp, Homo sapien
cactgtgcacggccacccttttctt

SEQ ID NO: 1541856 - DNA, 25 bp, Homo sapien
tattttctaaatagagacagaatct

SEQ ID NO: 1541857 - DNA, 25 bp, Homo sapien
tcgagcaggatgtcaatgaagaagg

SEQ ID NO: 1541858 - DNA, 25 bp, Homo sapien
gtcgagcaggatgtcaatgaagaag

SEQ ID NO: 1541859 - DNA, 25 bp, Homo sapien
tgtcgagcaggatgtcaatgaagaa

SEQ ID NO: 1541860 - DNA, 25 bp, Homo sapien
gagcaggatgtcaatgaagaaggtg

SEQ ID NO: 1541861 - DNA, 25 bp, Homo sapien
taagaaacacacctagcctacccag

SEQ ID NO: 1541862 - DNA, 25 bp, Homo sapien
aaaaggagagctgaggtgctaggag

SEQ ID NO: 1541863 - DNA, 25 bp, Homo sapien
gagctgtccgactcaagcccaagtt

SEQ ID NO: 1541864 - DNA, 25 bp, Homo sapien
aaccaatggctggaatgagattcag

SEQ ID NO: 1541865 - DNA, 25 bp, Homo sapien
ctcaggtttgacacacgtggccaca

SEQ ID NO: 1541866 - DNA, 25 bp, Homo sapien
tatctaggacggaagatgggctaag

SEQ ID NO: 1541867 - DNA, 25 bp, Homo sapien
ctgctgaaccaattccatgctcagg

SEQ ID NO: 1541868 - DNA, 25 bp, Homo sapien
tgagagccgttatccacaatcccat

SEQ ID NO: 1541869 - DNA, 25 bp, Homo sapien
tggagttcagcactgatggcaggaa

SEQ ID NO: 1541870 - DNA, 25 bp, Homo sapien
gggagaaacttgaccagactcgcaa

SEQ ID NO: 1541871 - DNA, 25 bp, Homo sapien
gaagggccctgttttattcatcaag

SEQ ID NO: 1541872 - DNA, 25 bp, Homo sapien
ggtgctgcaccccacttcatagatc

SEQ ID NO: 1541873 - DNA, 25 bp, Homo sapien
gtaggccttctcgatgcacccagcg

SEQ ID NO: 1541874 - DNA, 25 bp, Homo sapien
gggaccctaattacacacctctctg

SEQ ID NO: 1541875 - DNA, 25 bp, Homo sapien
cacctctctgggtcaactgtgagga

SEQ ID NO: 1541876 - DNA, 25 bp, Homo sapien
tgcccaacgacccttgacaagtaac

SEQ ID NO: 1541877 - DNA, 25 bp, Homo sapien
tctctgtgttgagactgggacccta

SEQ ID NO: 1541878 - DNA, 25 bp, Homo sapien
actgtagtagttgttggggcccagg

SEQ ID NO: 1541879 - DNA, 25 bp, Homo sapien
aatggtggtgtcttccggcttctgc

SEQ ID NO: 1541880 - DNA, 25 bp, Homo sapien
ccctgcagtgtaactgttttaaata

SEQ ID NO: 1541881 - DNA, 25 bp, Homo sapien
taaataactcgtgccctgccccacc

SEQ ID NO: 1541882 - DNA, 25 bp, Homo sapien
accctgcagtgtaactgttttaaat

SEQ ID NO: 1541883 - DNA, 25 bp, Homo sapien
tgttttaaataactcgtgccctgcc

SEQ ID NO: 1541884 - DNA, 25 bp, Homo sapien
gcaatgcccaccagacagaggctga

SEQ ID NO: 1541885 - DNA, 25 bp, Homo sapien
gctgacccagttggaggctatctcc

SEQ ID NO: 1541886 - DNA, 25 bp, Homo sapien
ggtccagcattcctatgtgtccaca

SEQ ID NO: 1541887 - DNA, 25 bp, Homo sapien
cgtccatgtttgagaccctgagcaa

SEQ ID NO: 1541888 - DNA, 25 bp, Homo sapien
gacccgtaaggatggcttgcatgga

SEQ ID NO: 1541889 - DNA, 25 bp, Homo sapien
caggaacaagggttcccgtgcagcc

SEQ ID NO: 1541890 - DNA, 25 bp, Homo sapien
gagctacagctaccgtgcctgacag

SEQ ID NO: 1541891 - DNA, 25 bp, Homo sapien
atggagatggtcctcgcgaacgagc

SEQ ID NO: 1541892 - DNA, 25 bp, Homo sapien
ccaaattcgactgggttagcgctcc

SEQ ID NO: 1541893 - DNA, 25 bp, Homo sapien
tcgactgggttagcgctcccgacgg

SEQ ID NO: 1541894 - DNA, 25 bp, Homo sapien
tgaacgccacttccgcttcaacggg

SEQ ID NO: 1541895 - DNA, 25 bp, Homo sapien
tgggttagcgctcccgacggccctg

SEQ ID NO: 1541896 - DNA, 25 bp, Homo sapien
accattaccttctgaacggcagccg

SEQ ID NO: 1541897 - DNA, 25 bp, Homo sapien
ggcagccggcggaccgcagaatcac

SEQ ID NO: 1541898 - DNA, 25 bp, Homo sapien
attaccttctgaacggcagccggcg

SEQ ID NO: 1541899 - DNA, 25 bp, Homo sapien
gcagccggcggaccgcagaatcact

SEQ ID NO: 1541900 - DNA, 25 bp, Homo sapien
ggccaccgtcttccacacagctcct

SEQ ID NO: 1541901 - DNA, 25 bp, Homo sapien
gggccatcaccacagctcggacccg

SEQ ID NO: 1541902 - DNA, 25 bp, Homo sapien
atcaccacagctcggacccgcacca

SEQ ID NO: 1541903 - DNA, 25 bp, Homo sapien
ctggagtcatctcgggccatcacca

SEQ ID NO: 1541904 - DNA, 25 bp, Homo sapien
ccccactggagtcatctcgggccat

SEQ ID NO: 1541905 - DNA, 25 bp, Homo sapien
ccgtggatgacgtagtgcccctggc

SEQ ID NO: 1541906 - DNA, 25 bp, Homo sapien
tggcccctcggacccgacacacgct

SEQ ID NO: 1541907 - DNA, 25 bp, Homo sapien
aggcgttccccgtggatgacgtagt

SEQ ID NO: 1541908 - DNA, 25 bp, Homo sapien
tcccggaggcgttccccgtggatga

SEQ ID NO: 1541909 - DNA, 25 bp, Homo sapien
ccagacatgcctgtgacgtctcgtc

SEQ ID NO: 1541910 - DNA, 25 bp, Homo sapien
gatcagggctcactacggaatcaac

SEQ ID NO: 1541911 - DNA, 25 bp, Homo sapien
gaactctgatcaacactgatacgac

SEQ ID NO: 1541912 - DNA, 25 bp, Homo sapien
cactgatacgactccccagttttac

SEQ ID NO: 1541913 - DNA, 25 bp, Homo sapien
cttgttgtaaaccaagcctggcttc

SEQ ID NO: 1541914 - DNA, 25 bp, Homo sapien
ccagtggtgaaagatgggattcacc

SEQ ID NO: 1541915 - DNA, 25 bp, Homo sapien
agtccaaacttgcagtcacccaggc

SEQ ID NO: 1541916 - DNA, 25 bp, Homo sapien
gggctctgaaacgtcagtccaaact

SEQ ID NO: 1541917 - DNA, 25 bp, Homo sapien
tgcagtatcctgggaaggagaggag

SEQ ID NO: 1541918 - DNA, 25 bp, Homo sapien
gcagtatcctgggaaggagaggagg

SEQ ID NO: 1541919 - DNA, 25 bp, Homo sapien
ctgcagtatcctgggaaggagagga

SEQ ID NO: 1541920 - DNA, 25 bp, Homo sapien
tcatgacagggcagaaagactagaa

SEQ ID NO: 1541921 - DNA, 25 bp, Homo sapien
caattttgtgtacccggtgtgtggc

SEQ ID NO: 1541922 - DNA, 25 bp, Homo sapien
taaggacccttgaatgaacgtgtga

SEQ ID NO: 1541923 - DNA, 25 bp, Homo sapien
gaattgacactcatagttccggccc

SEQ ID NO: 1541924 - DNA, 25 bp, Homo sapien
gcatatgcctgaagtactgggagag

SEQ ID NO: 1541925 - DNA, 25 bp, Homo sapien
gggatcctaagagtacctattcata

SEQ ID NO: 1541926 - DNA, 25 bp, Homo sapien
cggttagggccactgtcaagggcac

SEQ ID NO: 1541927 - DNA, 25 bp, Homo sapien
tattcataaggatgcggttagggcc

SEQ ID NO: 1541928 - DNA, 25 bp, Homo sapien
acagccgatgccctcacatagaccc

SEQ ID NO: 1541929 - DNA, 25 bp, Homo sapien
ttggcggcctcagcgcggggacacg

SEQ ID NO: 1541930 - DNA, 25 bp, Homo sapien
ccccgcacagccgatgccctcacat

SEQ ID NO: 1541931 - DNA, 25 bp, Homo sapien
ctggaggagattggcggcctcagcg

SEQ ID NO: 1541932 - DNA, 25 bp, Homo sapien
tggtcggcccgaagcctgaagctga

SEQ ID NO: 1541933 - DNA, 25 bp, Homo sapien
tgaagctgactccatcgtgatgatg

SEQ ID NO: 1541934 - DNA, 25 bp, Homo sapien
cagcggcgctgggaggagtctcctg

SEQ ID NO: 1541935 - DNA, 25 bp, Homo sapien
aagctgactccatcgtgatgatggg

SEQ ID NO: 1541936 - DNA, 25 bp, Homo sapien
gtggcccggagcgccggtaatcctc

SEQ ID NO: 1541937 - DNA, 25 bp, Homo sapien
tgaacggtagaagcggagggtagct

SEQ ID NO: 1541938 - DNA, 25 bp, Homo sapien
cggtaatcctcgtagccgcggccgc

SEQ ID NO: 1541939 - DNA, 25 bp, Homo sapien
tctgagggttccggaatccccgtga

SEQ ID NO: 1541940 - DNA, 25 bp, Homo sapien
tcaaaggggcaggtagtgccgctgg

SEQ ID NO: 1541941 - DNA, 25 bp, Homo sapien
cggtcaaaggggcaggtagtgccgc

SEQ ID NO: 1541942 - DNA, 25 bp, Homo sapien
gcctcggtcaaaggggcaggtagtg

SEQ ID NO: 1541943 - DNA, 25 bp, Homo sapien
cagcctcggtcaaaggggcaggtag

SEQ ID NO: 1541944 - DNA, 25 bp, Homo sapien
gcgcggcaatgcacgcagcgcgctg

SEQ ID NO: 1541945 - DNA, 25 bp, Homo sapien
ctgcgacggaagagcgcgcggcaat

SEQ ID NO: 1541946 - DNA, 25 bp, Homo sapien
aagagcgcgcggcaatgcacgcagc

SEQ ID NO: 1541947 - DNA, 25 bp, Homo sapien
ggcaatgcacgcagcgcgctgcctc

SEQ ID NO: 1541948 - DNA, 25 bp, Homo sapien
cgtccgacaggcagtggtagagcaa

SEQ ID NO: 1541949 - DNA, 25 bp, Homo sapien
agaagtcgccctcggcgtccgacag

SEQ ID NO: 1541950 - DNA, 25 bp, Homo sapien
accacaggcagcttagacggcgcac

SEQ ID NO: 1541951 - DNA, 25 bp, Homo sapien
ggtagagcaagctctcggcgcacca

SEQ ID NO: 1541952 - DNA, 25 bp, Homo sapien
gcaggggcgcgtagcagcagaggca

SEQ ID NO: 1541953 - DNA, 25 bp, Homo sapien
gccgcatcgcgctgcgacccagtgg

SEQ ID NO: 1541954 - DNA, 25 bp, Homo sapien
atcgcgctgcgacccagtggcacgc

SEQ ID NO: 1541955 - DNA, 25 bp, Homo sapien
gcgacccagtggcacgcgcgcaggg

SEQ ID NO: 1541956 - DNA, 25 bp, Homo sapien
taggggacccaccaggccgtcctca

SEQ ID NO: 1541957 - DNA, 25 bp, Homo sapien
ctggaccctcaattttgggtcctcg

SEQ ID NO: 1541958 - DNA, 25 bp, Homo sapien
caggtctgagatctctcaatccaaa

SEQ ID NO: 1541959 - DNA, 25 bp, Homo sapien
caagttccggatgtgcctaggtttg

SEQ ID NO: 1541960 - DNA, 25 bp, Homo sapien
caagctccaagttccggatgtgcct

SEQ ID NO: 1541961 - DNA, 25 bp, Homo sapien
ccagaactcaggacgcctgggactt

SEQ ID NO: 1541962 - DNA, 25 bp, Homo sapien
gcagagccagttatgggcaagtcct

SEQ ID NO: 1541963 - DNA, 25 bp, Homo sapien
gctgtaatctgagggacatggtgcc

SEQ ID NO: 1541964 - DNA, 25 bp, Homo sapien
ggacctgcccttttcgggatctatg

SEQ ID NO: 1541965 - DNA, 25 bp, Homo sapien
cagtatatccgagcactcagtgcat

SEQ ID NO: 1541966 - DNA, 25 bp, Homo sapien
gaatctgaacgcctctggtatggag

SEQ ID NO: 1541967 - DNA, 25 bp, Homo sapien
tagacttcagtgttcccggactgga

SEQ ID NO: 1541968 - DNA, 25 bp, Homo sapien
gggtctcaaaatccaggtccaggag

SEQ ID NO: 1541969 - DNA, 25 bp, Homo sapien
tgagttccaaatggtagggatccca

SEQ ID NO: 1541970 - DNA, 25 bp, Homo sapien
tttaggggcctatggatgacaggat

SEQ ID NO: 1541971 - DNA, 25 bp, Homo sapien
tggtagggatcccaccctaagataa

SEQ ID NO: 1541972 - DNA, 25 bp, Homo sapien
ggatccttgggaccagaattccaga

SEQ ID NO: 1541973 - DNA, 25 bp, Homo sapien
caatgctgggtcctagacgtgacag

SEQ ID NO: 1541974 - DNA, 25 bp, Homo sapien
gacagcagagccataactagcctga

SEQ ID NO: 1541975 - DNA, 25 bp, Homo sapien
cattgcacacacttcttctgagggc

SEQ ID NO: 1541976 - DNA, 25 bp, Homo sapien
cctggactaggaattaaggttgtgc

SEQ ID NO: 1541977 - DNA, 25 bp, Homo sapien
gagtgctgaatctcacaggttccgg

SEQ ID NO: 1541978 - DNA, 25 bp, Homo sapien
tcagtgggccatgaaacaggctttc

SEQ ID NO: 1541979 - DNA, 25 bp, Homo sapien
aatcatggatcagaggtgggtctca

SEQ ID NO: 1541980 - DNA, 25 bp, Homo sapien
gagacagaggacctatcccttgaac

SEQ ID NO: 1541981 - DNA, 25 bp, Homo sapien
tcagacttaccggacacactcctgt

SEQ ID NO: 1541982 - DNA, 25 bp, Homo sapien
tcacttgggagatttccacctggaa

SEQ ID NO: 1541983 - DNA, 25 bp, Homo sapien
tctcaacactctagctccctgaagc

SEQ ID NO: 1541984 - DNA, 25 bp, Homo sapien
tccgtcagggctttgttcaaatgcc

SEQ ID NO: 1541985 - DNA, 25 bp, Homo sapien
taagggcagatacgagtaaccccat

SEQ ID NO: 1541986 - DNA, 25 bp, Homo sapien
gttccttaagggcagatacgagtaa

SEQ ID NO: 1541987 - DNA, 25 bp, Homo sapien
ggcagatacgagtaaccccataacc

SEQ ID NO: 1541988 - DNA, 25 bp, Homo sapien
agatacgagtaaccccataaccctg

SEQ ID NO: 1541989 - DNA, 25 bp, Homo sapien
tcttccttactgtatcctggtatcc

SEQ ID NO: 1541990 - DNA, 25 bp, Homo sapien
ttccttactgtatcctggtatccag

SEQ ID NO: 1541991 - DNA, 25 bp, Homo sapien
cctggtatccagtagttcctagaca

SEQ ID NO: 1541992 - DNA, 25 bp, Homo sapien
ggtatccagtagttcctagacaatt

SEQ ID NO: 1541993 - DNA, 25 bp, Homo sapien
actattgggcgaagtatcttatctc

SEQ ID NO: 1541994 - DNA, 25 bp, Homo sapien
ttgaagatgaaattccagactctat

SEQ ID NO: 1541995 - DNA, 25 bp, Homo sapien
gactctatactcttaaaccacggaa

SEQ ID NO: 1541996 - DNA, 25 bp, Homo sapien
cacggaacctatttccactgttact

SEQ ID NO: 1541997 - DNA, 25 bp, Homo sapien
tcccgcgcaggggcttgggtgctcc

SEQ ID NO: 1541998 - DNA, 25 bp, Homo sapien
cttcccgcgcaggggcttgggtgct

SEQ ID NO: 1541999 - DNA, 25 bp, Homo sapien
ccgcgcaggggcttgggtgctccca

SEQ ID NO: 1542000 - DNA, 25 bp, Homo sapien
cgcgcaggggcttgggtgctcccat

SEQ ID NO: 1542001 - DNA, 25 bp, Homo sapien
acgagctccccgcagcgtccggcgg

SEQ ID NO: 1542002 - DNA, 25 bp, Homo sapien
aagcgccgcgcgcacgagctccccg

SEQ ID NO: 1542003 - DNA, 25 bp, Homo sapien
ggtggcaggctccgccccaaaagcg

SEQ ID NO: 1542004 - DNA, 25 bp, Homo sapien
tccggcggcactgaccaatcggcat

SEQ ID NO: 1542005 - DNA, 25 bp, Homo sapien
acgcttccgccttcaccgcctccat

SEQ ID NO: 1542006 - DNA, 25 bp, Homo sapien
gcaggtcctgggccaccgcggcccc

SEQ ID NO: 1542007 - DNA, 25 bp, Homo sapien
gccccctcccacgcttccgccttca

SEQ ID NO: 1542008 - DNA, 25 bp, Homo sapien
cctcccacgcttccgccttcaccgc

SEQ ID NO: 1542009 - DNA, 25 bp, Homo sapien
ccagcctcaccgcacacccttttac

SEQ ID NO: 1542010 - DNA, 25 bp, Homo sapien
gcggggatgtcactgggaatccctt

SEQ ID NO: 1542011 - DNA, 25 bp, Homo sapien
ttttcgtccgcgtccagggggcaga

SEQ ID NO: 1542012 - DNA, 25 bp, Homo sapien
cactgggaatcccttttcgtccgcg

SEQ ID NO: 1542013 - DNA, 25 bp, Homo sapien
ctcgagggcgcccagcgtcgccagc

SEQ ID NO: 1542014 - DNA, 25 bp, Homo sapien
ctgctgctcgagggcgcccagcgtc

SEQ ID NO: 1542015 - DNA, 25 bp, Homo sapien
tgctcgagggcgcccagcgtcgcca

SEQ ID NO: 1542016 - DNA, 25 bp, Homo sapien
tctgggcatgaggcgccccgcgacg

SEQ ID NO: 1542017 - DNA, 25 bp, Homo sapien
gcaggctgccgagctgccgcagaaa

SEQ ID NO: 1542018 - DNA, 25 bp, Homo sapien
agagcgcgcgatccgggcagtgcag

SEQ ID NO: 1542019 - DNA, 25 bp, Homo sapien
agcaggcgcagtccggcaccgggtt

SEQ ID NO: 1542020 - DNA, 25 bp, Homo sapien
tgccgcagaaagtcctcctccgcgc

SEQ ID NO: 1542021 - DNA, 25 bp, Homo sapien
gagacctgcctggctaacatggtga

SEQ ID NO: 1542022 - DNA, 25 bp, Homo sapien
aggagttcgagacctgcctggctaa

SEQ ID NO: 1542023 - DNA, 25 bp, Homo sapien
acctgcctggctaacatggtgaaac

SEQ ID NO: 1542024 - DNA, 25 bp, Homo sapien
cgaggtggacagatcacctggggtc

SEQ ID NO: 1542025 - DNA, 25 bp, Homo sapien
ttcaccaaggggtggcctaggactc

SEQ ID NO: 1542026 - DNA, 25 bp, Homo sapien
tcaccaaggggtggcctaggactcg

SEQ ID NO: 1542027 - DNA, 25 bp, Homo sapien
cttcaccaaggggtggcctaggact

SEQ ID NO: 1542028 - DNA, 25 bp, Homo sapien
cttagcatgcaactcctgcagcagc

SEQ ID NO: 1542029 - DNA, 25 bp, Homo sapien
cttggagggtaaggtccagttcttg

SEQ ID NO: 1542030 - DNA, 25 bp, Homo sapien
acccctgaggacctaggccacagat

SEQ ID NO: 1542031 - DNA, 25 bp, Homo sapien
cagtggttggaatactccttccaga

SEQ ID NO: 1542032 - DNA, 25 bp, Homo sapien
atgtgagaatgccagtcacagctcc

SEQ ID NO: 1542033 - DNA, 25 bp, Homo sapien
aacaggccagtggttggaatactcc

SEQ ID NO: 1542034 - DNA, 25 bp, Homo sapien
tctgggtgcatctagcgagcagctg

SEQ ID NO: 1542035 - DNA, 25 bp, Homo sapien
ctgggtgcatctagcgagcagctga

SEQ ID NO: 1542036 - DNA, 25 bp, Homo sapien
tgggtgcatctagcgagcagctgag

SEQ ID NO: 1542037 - DNA, 25 bp, Homo sapien
tcaaggtcaggctaggggtccctct

SEQ ID NO: 1542038 - DNA, 25 bp, Homo sapien
acctctgatgaggacacagttcaca

SEQ ID NO: 1542039 - DNA, 25 bp, Homo sapien
ttcagtcagtcgcacacagtcttac

SEQ ID NO: 1542040 - DNA, 25 bp, Homo sapien
gaggacacagttcacattcagtcag

SEQ ID NO: 1542041 - DNA, 25 bp, Homo sapien
cggcggcagcggtactgatctctga

SEQ ID NO: 1542042 - DNA, 25 bp, Homo sapien
cagatgtagtgaggtcaaggcgctt

SEQ ID NO: 1542043 - DNA, 25 bp, Homo sapien
ctgaggctttgggacagagactcca

SEQ ID NO: 1542044 - DNA, 25 bp, Homo sapien
tttgggacagagactccaacgcttc

SEQ ID NO: 1542045 - DNA, 25 bp, Homo sapien
ggtatgcctctgaatatactgccag

SEQ ID NO: 1542046 - DNA, 25 bp, Homo sapien
tgcaagagggtgatactcctggccc

SEQ ID NO: 1542047 - DNA, 25 bp, Homo sapien
tataaaatgtccatggcctgagaac

SEQ ID NO: 1542048 - DNA, 25 bp, Homo sapien
cagctcagagctgggaattcaacaa

SEQ ID NO: 1542049 - DNA, 25 bp, Homo sapien
tgtgcaatggagatgtccgattctg

SEQ ID NO: 1542050 - DNA, 25 bp, Homo sapien
gcagccagaacgtgtgcaatggaga

SEQ ID NO: 1542051 - DNA, 25 bp, Homo sapien
gggtcagaacctctcgaattgggat

SEQ ID NO: 1542052 - DNA, 25 bp, Homo sapien
cgaattgggatcagcactgccctca

SEQ ID NO: 1542053 - DNA, 25 bp, Homo sapien
cttgttgatggcacagcaggtccct

SEQ ID NO: 1542054 - DNA, 25 bp, Homo sapien
tggcacagcaggtccctctgcggac

SEQ ID NO: 1542055 - DNA, 25 bp, Homo sapien
tgttgatggcacagcaggtccctct

SEQ ID NO: 1542056 - DNA, 25 bp, Homo sapien
gcacagcaggtccctctgcggacag

SEQ ID NO: 1542057 - DNA, 25 bp, Homo sapien
ttaagcccaagctggagaagtagcc

SEQ ID NO: 1542058 - DNA, 25 bp, Homo sapien
ccagagagcgaagggaacagcatga

SEQ ID NO: 1542059 - DNA, 25 bp, Homo sapien
ttacagaggcatgcggctagatacc

SEQ ID NO: 1542060 - DNA, 25 bp, Homo sapien
ttttcagatcattagggagccacgg

SEQ ID NO: 1542061 - DNA, 25 bp, Homo sapien
ttcttcttgcgaccccaacactggg

SEQ ID NO: 1542062 - DNA, 25 bp, Homo sapien
cccggtctggaacgttgcccataag

SEQ ID NO: 1542063 - DNA, 25 bp, Homo sapien
ggtctggaacgttgcccataagcac

SEQ ID NO: 1542064 - DNA, 25 bp, Homo sapien
ctccagctcatttgggcggcccccc

SEQ ID NO: 1542065 - DNA, 25 bp, Homo sapien
catctcatggaggaccccccgcccc

SEQ ID NO: 1542066 - DNA, 25 bp, Homo sapien
tcttggtattgacgtgaatgggagc

SEQ ID NO: 1542067 - DNA, 25 bp, Homo sapien
agccttaaacggactccccagagat

SEQ ID NO: 1542068 - DNA, 25 bp, Homo sapien
gactccccagagattaccgatagca

SEQ ID NO: 1542069 - DNA, 25 bp, Homo sapien
tgggtgccaaataccaaggaaagcc

SEQ ID NO: 1542070 - DNA, 25 bp, Homo sapien
gatgcctgaatgtctccttacccat

SEQ ID NO: 1542071 - DNA, 25 bp, Homo sapien
aaagaactttgagggtcgagcagca

SEQ ID NO: 1542072 - DNA, 25 bp, Homo sapien
catcaactccaggagaacagggatt

SEQ ID NO: 1542073 - DNA, 25 bp, Homo sapien
cacaggatagatgtgctatagggca

SEQ ID NO: 1542074 - DNA, 25 bp, Homo sapien
tggagacaccagaggcacccgcgag

SEQ ID NO: 1542075 - DNA, 25 bp, Homo sapien
agggtctgaggtcggggaacagagg

SEQ ID NO: 1542076 - DNA, 25 bp, Homo sapien
gacctctggagacaccagaggcacc

SEQ ID NO: 1542077 - DNA, 25 bp, Homo sapien
gatgtcgaggtcggaagcccagggt

SEQ ID NO: 1542078 - DNA, 25 bp, Homo sapien
cctcgtcttcgccttctgcgtcacc

SEQ ID NO: 1542079 - DNA, 25 bp, Homo sapien
gacctcgtcttcgccttctgcgtca

SEQ ID NO: 1542080 - DNA, 25 bp, Homo sapien
cgtcttcgccttctgcgtcacccat

SEQ ID NO: 1542081 - DNA, 25 bp, Homo sapien
cgtccgcaggaactggacctcgtct

SEQ ID NO: 1542082 - DNA, 25 bp, Homo sapien
ccaggaagcacaggcggttgccgaa

SEQ ID NO: 1542083 - DNA, 25 bp, Homo sapien
gcgcgttgctagtgggctccaggaa

SEQ ID NO: 1542084 - DNA, 25 bp, Homo sapien
gtagcgctgcactgcaggaccacct

SEQ ID NO: 1542085 - DNA, 25 bp, Homo sapien
cttgagcacggtagcgctgcactgc

SEQ ID NO: 1542086 - DNA, 25 bp, Homo sapien
agggctcgcacagacagggactgct

SEQ ID NO: 1542087 - DNA, 25 bp, Homo sapien
tctcctgcagggctcgcacagacag

SEQ ID NO: 1542088 - DNA, 25 bp, Homo sapien
agggactgctccaggacgaagcaac

SEQ ID NO: 1542089 - DNA, 25 bp, Homo sapien
tccaggacgaagcaacagatggcca

SEQ ID NO: 1542090 - DNA, 25 bp, Homo sapien
catggccatacaggagcgtcctgtg

SEQ ID NO: 1542091 - DNA, 25 bp, Homo sapien
tgtgtgcatgccggagcaggatggc

SEQ ID NO: 1542092 - DNA, 25 bp, Homo sapien
ggccatacaggagcgtcctgtgtcc

SEQ ID NO: 1542093 - DNA, 25 bp, Homo sapien
tggcatggccatacaggagcgtcct

SEQ ID NO: 1542094 - DNA, 25 bp, Homo sapien
tcctcctgcagtcccacatcgaagg

SEQ ID NO: 1542095 - DNA, 25 bp, Homo sapien
gtcatggagcgggaggtggtgaggc

SEQ ID NO: 1542096 - DNA, 25 bp, Homo sapien
ctcctgcagtcccacatcgaaggcc

SEQ ID NO: 1542097 - DNA, 25 bp, Homo sapien
gccagcttgtcagtcatggagcggg

SEQ ID NO: 1542098 - DNA, 25 bp, Homo sapien
gaatccctgctgcggggccccttca

SEQ ID NO: 1542099 - DNA, 25 bp, Homo sapien
tccctgctgcggggccccttcacac

SEQ ID NO: 1542100 - DNA, 25 bp, Homo sapien
aatccctgctgcggggccccttcac

SEQ ID NO: 1542101 - DNA, 25 bp, Homo sapien
atccctgctgcggggccccttcaca

SEQ ID NO: 1542102 - DNA, 25 bp, Homo sapien
gtagcgctcggaggagacactgaca

SEQ ID NO: 1542103 - DNA, 25 bp, Homo sapien
cggaggagacactgacaaggatgat

SEQ ID NO: 1542104 - DNA, 25 bp, Homo sapien
ggctgggtgcatggtccaccagcaa

SEQ ID NO: 1542105 - DNA, 25 bp, Homo sapien
caaggatgatgtcatccccaacgcg

SEQ ID NO: 1542106 - DNA, 25 bp, Homo sapien
tggggttcatgttccatagtgtctg

SEQ ID NO: 1542107 - DNA, 25 bp, Homo sapien
tggagctccccactggcggtcgaca

SEQ ID NO: 1542108 - DNA, 25 bp, Homo sapien
agtgtctgcatgaaggaagcgtcaa

SEQ ID NO: 1542109 - DNA, 25 bp, Homo sapien
aaggaagcgtcaacctggagctccc

SEQ ID NO: 1542110 - DNA, 25 bp, Homo sapien
tcagctggagatctaagtgtgagag

SEQ ID NO: 1542111 - DNA, 25 bp, Homo sapien
tgcctgaagggcaacattaagggtc

SEQ ID NO: 1542112 - DNA, 25 bp, Homo sapien
aaggctccatttgggtatgcctgaa

SEQ ID NO: 1542113 - DNA, 25 bp, Homo sapien
aatttggagatctaggtttgaggtc

SEQ ID NO: 1542114 - DNA, 25 bp, Homo sapien
ggaggacgtgacctcccgtcacgaa

SEQ ID NO: 1542115 - DNA, 25 bp, Homo sapien
gggaaatggtcagacactcatccat

SEQ ID NO: 1542116 - DNA, 25 bp, Homo sapien
catatgtccatgaaagaggcggagg

SEQ ID NO: 1542117 - DNA, 25 bp, Homo sapien
aggcggaggacgtgacctcccgtca

SEQ ID NO: 1542118 - DNA, 25 bp, Homo sapien
agctcccccctcatagtagacaagt

SEQ ID NO: 1542119 - DNA, 25 bp, Homo sapien
agcgggcatgagtgcacacagctcc

SEQ ID NO: 1542120 - DNA, 25 bp, Homo sapien
acagctcccccctcatagtagacaa

SEQ ID NO: 1542121 - DNA, 25 bp, Homo sapien
tccagcctccagagggagcgggcat

SEQ ID NO: 1542122 - DNA, 25 bp, Homo sapien
tgtgagccttgctggcgtcaaccac

SEQ ID NO: 1542123 - DNA, 25 bp, Homo sapien
cctggtcctcggtgagcgctaggta

SEQ ID NO: 1542124 - DNA, 25 bp, Homo sapien
ccggtagtgacatgccggactcgga

SEQ ID NO: 1542125 - DNA, 25 bp, Homo sapien
cttggtgtgagccttgctggcgtca

SEQ ID NO: 1542126 - DNA, 25 bp, Homo sapien
gcataggtgagccacagtcctgagg

SEQ ID NO: 1542127 - DNA, 25 bp, Homo sapien
tgactccccgtacttgatctcaggg

SEQ ID NO: 1542128 - DNA, 25 bp, Homo sapien
ttcttcttgagcacgccgagccgca

SEQ ID NO: 1542129 - DNA, 25 bp, Homo sapien
catgctgcacgaagcacagtgactc

SEQ ID NO: 1542130 - DNA, 25 bp, Homo sapien
actggttgtataggccattggtgct

SEQ ID NO: 1542131 - DNA, 25 bp, Homo sapien
cgggtcagcgacagtgcgtcgtcca

SEQ ID NO: 1542132 - DNA, 25 bp, Homo sapien
gtgctgtggatcatgcgggcggcct

SEQ ID NO: 1542133 - DNA, 25 bp, Homo sapien
gacagtgcgtcgtccatgtggccct

SEQ ID NO: 1542134 - DNA, 25 bp, Homo sapien
gttgcgcaggcttcgcagcttgctc

SEQ ID NO: 1542135 - DNA, 25 bp, Homo sapien
gcaggctcaggataacgccctcgat

SEQ ID NO: 1542136 - DNA, 25 bp, Homo sapien
ctcgtgctgcaagtcctcggaggga

SEQ ID NO: 1542137 - DNA, 25 bp, Homo sapien
tcgaagtagatgatgaggtcctgca

SEQ ID NO: 1542138 - DNA, 25 bp, Homo sapien
cccctggtcggccatacgccctgcc

SEQ ID NO: 1542139 - DNA, 25 bp, Homo sapien
atacctgagcttcacataggccccg

SEQ ID NO: 1542140 - DNA, 25 bp, Homo sapien
ctatacctgagcttcacataggccc

SEQ ID NO: 1542141 - DNA, 25 bp, Homo sapien
tggtcggccatacgccctgcccctt

SEQ ID NO: 1542142 - DNA, 25 bp, Homo sapien
agcactacacttgggagacattata

SEQ ID NO: 1542143 - DNA, 25 bp, Homo sapien
tccctgagagtctgtgacagtattt

SEQ ID NO: 1542144 - DNA, 25 bp, Homo sapien
tcaaccacttattacataaccttgt

SEQ ID NO: 1542145 - DNA, 25 bp, Homo sapien
gaaatacagggagtccctgagagtc

SEQ ID NO: 1542146 - DNA, 25 bp, Homo sapien
cagtggtgtagacatttaggcggtc

SEQ ID NO: 1542147 - DNA, 25 bp, Homo sapien
gttcatagagaagattcacaatctc

SEQ ID NO: 1542148 - DNA, 25 bp, Homo sapien
taggcggtctatgcaattcaggacc

SEQ ID NO: 1542149 - DNA, 25 bp, Homo sapien
gacatttaggcggtctatgcaattc

SEQ ID NO: 1542150 - DNA, 25 bp, Homo sapien
ctacgattgccacggattagagaag

SEQ ID NO: 1542151 - DNA, 25 bp, Homo sapien
gagaagagggcacagttgctacgat

SEQ ID NO: 1542152 - DNA, 25 bp, Homo sapien
tgaccagccagtccaagtttgtgga

SEQ ID NO: 1542153 - DNA, 25 bp, Homo sapien
ttgctgaccagccagtccaagtttg

SEQ ID NO: 1542154 - DNA, 25 bp, Homo sapien
aatgaggacacagtacaggacctcc

SEQ ID NO: 1542155 - DNA, 25 bp, Homo sapien
tcagaacctctggactctcaatgag

SEQ ID NO: 1542156 - DNA, 25 bp, Homo sapien
tctggactctcaatgaggacacagt

SEQ ID NO: 1542157 - DNA, 25 bp, Homo sapien
ctggatgatgttcagaacctctgga

SEQ ID NO: 1542158 - DNA, 25 bp, Homo sapien
cttgtggttcctcccatgcttgtcc

SEQ ID NO: 1542159 - DNA, 25 bp, Homo sapien
catgcttgtccaggagggagatgat

SEQ ID NO: 1542160 - DNA, 25 bp, Homo sapien
tcccatgcttgtccaggagggagat

SEQ ID NO: 1542161 - DNA, 25 bp, Homo sapien
tcctcccatgcttgtccaggaggga

SEQ ID NO: 1542162 - DNA, 25 bp, Homo sapien
caggcagcaagttctcagtaataag

SEQ ID NO: 1542163 - DNA, 25 bp, Homo sapien
gttggagcgtacagccacaccatta

SEQ ID NO: 1542164 - DNA, 25 bp, Homo sapien
tcagtaataagatcttggttggagc

SEQ ID NO: 1542165 - DNA, 25 bp, Homo sapien
acacacagggagcatagcacgtcca

SEQ ID NO: 1542166 - DNA, 25 bp, Homo sapien
aatagaggtcatcgccgaccccgtt

SEQ ID NO: 1542167 - DNA, 25 bp, Homo sapien
catttgctgtactgcgtggtgcctt

SEQ ID NO: 1542168 - DNA, 25 bp, Homo sapien
gcccacccgcaagtgggtggcctga

SEQ ID NO: 1542169 - DNA, 25 bp, Homo sapien
tgcagtccatcaaagccgtaggaat

SEQ ID NO: 1542170 - DNA, 25 bp, Homo sapien
cacagaaccaatgataacaagagaa

SEQ ID NO: 1542171 - DNA, 25 bp, Homo sapien
tcacaggtcccacagaaccaatgat

SEQ ID NO: 1542172 - DNA, 25 bp, Homo sapien
gatgggtcagacgtcacaggtccca

SEQ ID NO: 1542173 - DNA, 25 bp, Homo sapien
caccagagatgggtcagacgtcaca

SEQ ID NO: 1542174 - DNA, 25 bp, Homo sapien
gagatggacggcacgctgaggtcca

SEQ ID NO: 1542175 - DNA, 25 bp, Homo sapien
aagaagagcccgtccaggttgaagg

SEQ ID NO: 1542176 - DNA, 25 bp, Homo sapien
tgaaggactcaaagacaccctgcac

SEQ ID NO: 1542177 - DNA, 25 bp, Homo sapien
gccgagaagctgacaacagggaaga

SEQ ID NO: 1542178 - DNA, 25 bp, Homo sapien
atggagtcgctctcgagggagcaca

SEQ ID NO: 1542179 - DNA, 25 bp, Homo sapien
acagggcagggcacgaagtcggtgt

SEQ ID NO: 1542180 - DNA, 25 bp, Homo sapien
cctcccgtcgatactccttgatggg

SEQ ID NO: 1542181 - DNA, 25 bp, Homo sapien
gcacagcctcatggcatggagcata

SEQ ID NO: 1542182 - DNA, 25 bp, Homo sapien
ggactacagtcgtggaccatcacct

SEQ ID NO: 1542183 - DNA, 25 bp, Homo sapien
gagactgcgattctgctctgacaga

SEQ ID NO: 1542184 - DNA, 25 bp, Homo sapien
tctcagagttctaggatcgcaggtg

SEQ ID NO: 1542185 - DNA, 25 bp, Homo sapien
tctgttaaacaacgaggttcccagc

SEQ ID NO: 1542186 - DNA, 25 bp, Homo sapien
cttctcccgaatgcgctccagatgg

SEQ ID NO: 1542187 - DNA, 25 bp, Homo sapien
tcgatgcgggttagcgcccagagct

SEQ ID NO: 1542188 - DNA, 25 bp, Homo sapien
gctcgtggatgttctccgccagctt

SEQ ID NO: 1542189 - DNA, 25 bp, Homo sapien
agccctgctcgatgcgggttagcgc

SEQ ID NO: 1542190 - DNA, 25 bp, Homo sapien
gcagcctcttgttgtcatcccgaac

SEQ ID NO: 1542191 - DNA, 25 bp, Homo sapien
tgcagcctcttgttgtcatcccgaa

SEQ ID NO: 1542192 - DNA, 25 bp, Homo sapien
caggttgtagttcctctcaggctct

SEQ ID NO: 1542193 - DNA, 25 bp, Homo sapien
ctgcaggttgtagttcctctcaggc

SEQ ID NO: 1542194 - DNA, 25 bp, Homo sapien
ctccgccttctcatccgccatgccc

SEQ ID NO: 1542195 - DNA, 25 bp, Homo sapien
ttctcatccgccatgcccacgtggc

SEQ ID NO: 1542196 - DNA, 25 bp, Homo sapien
gccttctcatccgccatgcccacgt

SEQ ID NO: 1542197 - DNA, 25 bp, Homo sapien
tccgccttctcatccgccatgccca

SEQ ID NO: 1542198 - DNA, 25 bp, Homo sapien
gcggagccggcttgtacccattgct

SEQ ID NO: 1542199 - DNA, 25 bp, Homo sapien
ttttctgccagacggtccaccagtg

SEQ ID NO: 1542200 - DNA, 25 bp, Homo sapien
gctcgatgttgtagccgtagcccag

SEQ ID NO: 1542201 - DNA, 25 bp, Homo sapien
gcttcatccagcaggcggtagggca

SEQ ID NO: 1542202 - DNA, 25 bp, Homo sapien
caacgagactggttctccacctgac

SEQ ID NO: 1542203 - DNA, 25 bp, Homo sapien
ccggaagatgcgcacccggtcacaa

SEQ ID NO: 1542204 - DNA, 25 bp, Homo sapien
tgcttcaaactcgaagtaccagcgg

SEQ ID NO: 1542205 - DNA, 25 bp, Homo sapien
agcggccgctctgcactgtatagga

SEQ ID NO: 1542206 - DNA, 25 bp, Homo sapien
ccacgcgcatctcgcctgtggtgac

SEQ ID NO: 1542207 - DNA, 25 bp, Homo sapien
ccagcccacgcgcatctcgcctgtg

SEQ ID NO: 1542208 - DNA, 25 bp, Homo sapien
cccacgcgcatctcgcctgtggtga

SEQ ID NO: 1542209 - DNA, 25 bp, Homo sapien
agcccacgcgcatctcgcctgtggt

SEQ ID NO: 1542210 - DNA, 25 bp, Homo sapien
tgcccattgaagacataggccagct

SEQ ID NO: 1542211 - DNA, 25 bp, Homo sapien
cattgaagacataggccagctcgtc

SEQ ID NO: 1542212 - DNA, 25 bp, Homo sapien
gcggtgcccattgaagacataggcc

SEQ ID NO: 1542213 - DNA, 25 bp, Homo sapien
gaagacataggccagctcgtcagct

SEQ ID NO: 1542214 - DNA, 25 bp, Homo sapien
gggagagaccacaggacctggcaga

SEQ ID NO: 1542215 - DNA, 25 bp, Homo sapien
gctagcattatgcagaccaccaaag

SEQ ID NO: 1542216 - DNA, 25 bp, Homo sapien
tgctgttgccatggctagcattatg

SEQ ID NO: 1542217 - DNA, 25 bp, Homo sapien
tatgcagaccaccaaagtggtagtg

SEQ ID NO: 1542218 - DNA, 25 bp, Homo sapien
atttttctccccactaatctctgtg

SEQ ID NO: 1542219 - DNA, 25 bp, Homo sapien
cccggaaggctgtttcggagcctga

SEQ ID NO: 1542220 - DNA, 25 bp, Homo sapien
gagcctgagtcagacatgaggacct

SEQ ID NO: 1542221 - DNA, 25 bp, Homo sapien
tctgtgaggtcgatcatacagccaa

SEQ ID NO: 1542222 - DNA, 25 bp, Homo sapien
ttcactgcccaagtgccagcgctgg

SEQ ID NO: 1542223 - DNA, 25 bp, Homo sapien
gcaggcctttgctgaaccaggtggt

SEQ ID NO: 1542224 - DNA, 25 bp, Homo sapien
aggttcagatgacccacctggccag

SEQ ID NO: 1542225 - DNA, 25 bp, Homo sapien
gtgactgggcgctgcatgttgatgg

SEQ ID NO: 1542226 - DNA, 25 bp, Homo sapien
tcagagagctcacgtcctggcccag

SEQ ID NO: 1542227 - DNA, 25 bp, Homo sapien
gctggtggaactggactgggaggct

SEQ ID NO: 1542228 - DNA, 25 bp, Homo sapien
cccctgcagtgcagcggaagtgctg

SEQ ID NO: 1542229 - DNA, 25 bp, Homo sapien
gctcagccgcaggaaaagcatctcc

SEQ ID NO: 1542230 - DNA, 25 bp, Homo sapien
tgagcggcgcaggttttcgtagtca

SEQ ID NO: 1542231 - DNA, 25 bp, Homo sapien
gatctcggggtcatcgcggttgtct

SEQ ID NO: 1542232 - DNA, 25 bp, Homo sapien
tcatcatggcgaccttcttggcctt

SEQ ID NO: 1542233 - DNA, 25 bp, Homo sapien
tctgcaggcaccacgtcgtgaggga

SEQ ID NO: 1542234 - DNA, 25 bp, Homo sapien
tggtggtgttgaggatgatctcggg

SEQ ID NO: 1542235 - DNA, 25 bp, Homo sapien
caaagaccctcacggagtaatagta

SEQ ID NO: 1542236 - DNA, 25 bp, Homo sapien
tgctgtggacgttgccttgttcatc

SEQ ID NO: 1542237 - DNA, 25 bp, Homo sapien
tcatgtcgtgctgatggtagtcagg

SEQ ID NO: 1542238 - DNA, 25 bp, Homo sapien
gtcacgacccggaccttgctgaggt

SEQ ID NO: 1542239 - DNA, 25 bp, Homo sapien
ctgcacctcccacctccccccagcc

SEQ ID NO: 1542240 - DNA, 25 bp, Homo sapien
cctgcacctcccacctccccccagc

SEQ ID NO: 1542241 - DNA, 25 bp, Homo sapien
tgcacctcccacctccccccagccc

SEQ ID NO: 1542242 - DNA, 25 bp, Homo sapien
tgctgcccgggactcacaaagtctc

SEQ ID NO: 1542243 - DNA, 25 bp, Homo sapien
gttgctctctttgccattggctgta

SEQ ID NO: 1542244 - DNA, 25 bp, Homo sapien
acaaggtccgtgtggctgatccggc

SEQ ID NO: 1542245 - DNA, 25 bp, Homo sapien
tgtaaaggtcattaagccagtggcc

SEQ ID NO: 1542246 - DNA, 25 bp, Homo sapien
gtgggtgggcaggacgaagacggca

SEQ ID NO: 1542247 - DNA, 25 bp, Homo sapien
acgaagacggcaggaaatagcttag

SEQ ID NO: 1542248 - DNA, 25 bp, Homo sapien
tggatgacgttctggtgggtgggca

SEQ ID NO: 1542249 - DNA, 25 bp, Homo sapien
ggcaggacgaagacggcaggaaata

SEQ ID NO: 1542250 - DNA, 25 bp, Homo sapien
tggcggctgacaacggcatgatgtt

SEQ ID NO: 1542251 - DNA, 25 bp, Homo sapien
gggttcttgcgctcgctttggaaca

SEQ ID NO: 1542252 - DNA, 25 bp, Homo sapien
gatgtgcagcgccatcatggtcagc

SEQ ID NO: 1542253 - DNA, 25 bp, Homo sapien
atctccagccgcggtgggcactgcg

SEQ ID NO: 1542254 - DNA, 25 bp, Homo sapien
tgcacagagcgtgcgccacgcgatt

SEQ ID NO: 1542255 - DNA, 25 bp, Homo sapien
ttgcccagggcgcacacagcgcggt

SEQ ID NO: 1542256 - DNA, 25 bp, Homo sapien
cacagcgcggtagaggcgcagggtg

SEQ ID NO: 1542257 - DNA, 25 bp, Homo sapien
gtgtgcgagtggaagcgctgcaggt

SEQ ID NO: 1542258 - DNA, 25 bp, Homo sapien
gaggtcatagtagcctgcgcgcagt

SEQ ID NO: 1542259 - DNA, 25 bp, Homo sapien
caggcactttcgaggtggatgctga

SEQ ID NO: 1542260 - DNA, 25 bp, Homo sapien
gcacgatgtattcagagagcatgga

SEQ ID NO: 1542261 - DNA, 25 bp, Homo sapien
tggacacgagcttgagcacaggcac

SEQ ID NO: 1542262 - DNA, 25 bp, Homo sapien
tcctcagtgaagacctcaggctcaa

SEQ ID NO: 1542263 - DNA, 25 bp, Homo sapien
tcacatcctcatcgccaaagatgcc

SEQ ID NO: 1542264 - DNA, 25 bp, Homo sapien
tttcacatcctcatcgccaaagatg

SEQ ID NO: 1542265 - DNA, 25 bp, Homo sapien
acatcctcatcgccaaagatgccca

SEQ ID NO: 1542266 - DNA, 25 bp, Homo sapien
gtccacatagcgctccgcaaaggct

SEQ ID NO: 1542267 - DNA, 25 bp, Homo sapien
tcacagaaatactccagcaggtggc

SEQ ID NO: 1542268 - DNA, 25 bp, Homo sapien
gctgcggtcatgctgaaggctttta

SEQ ID NO: 1542269 - DNA, 25 bp, Homo sapien
ggaactcgcgggtacgtcttgcagt

SEQ ID NO: 1542270 - DNA, 25 bp, Homo sapien
gcaggtcttgatgaaagtcaagcaa

SEQ ID NO: 1542271 - DNA, 25 bp, Homo sapien
agtcaagcaaatcctgtcgaatctc

SEQ ID NO: 1542272 - DNA, 25 bp, Homo sapien
aatcctgtcgaatctcttcagggag

SEQ ID NO: 1542273 - DNA, 25 bp, Homo sapien
gtaccatctttgaattgcaatagca

SEQ ID NO: 1542274 - DNA, 25 bp, Homo sapien
tctccaacaggctcatgaggcggct

SEQ ID NO: 1542275 - DNA, 25 bp, Homo sapien
tccaacaggctcatgaggcggctgc

SEQ ID NO: 1542276 - DNA, 25 bp, Homo sapien
ttctccaacaggctcatgaggcggc

SEQ ID NO: 1542277 - DNA, 25 bp, Homo sapien
aacaggctcatgaggcggctgccca

SEQ ID NO: 1542278 - DNA, 25 bp, Homo sapien
ctgctgaccgctcctcctcaggttt

SEQ ID NO: 1542279 - DNA, 25 bp, Homo sapien
tctgctgaccgctcctcctcaggtt

SEQ ID NO: 1542280 - DNA, 25 bp, Homo sapien
tcatggtgtcttccacggaggacgg

SEQ ID NO: 1542281 - DNA, 25 bp, Homo sapien
gatgctctggatcatgaggttctcc

SEQ ID NO: 1542282 - DNA, 25 bp, Homo sapien
tgcacgatgagcagcgagcggatct

SEQ ID NO: 1542283 - DNA, 25 bp, Homo sapien
gggctctgcacgaagtcctcttggg

SEQ ID NO: 1542284 - DNA, 25 bp, Homo sapien
tcgtgcatgcccagcgccctcatca

SEQ ID NO: 1542285 - DNA, 25 bp, Homo sapien
cgggtgttggtagaagactttgttg

SEQ ID NO: 1542286 - DNA, 25 bp, Homo sapien
ccccgaggacgttgaccatgacctc

SEQ ID NO: 1542287 - DNA, 25 bp, Homo sapien
cctcatcaggttcgggtgttggtag

SEQ ID NO: 1542288 - DNA, 25 bp, Homo sapien
gaagcggcagcagcttgtcaccatc

SEQ ID NO: 1542289 - DNA, 25 bp, Homo sapien
gcggcagcagcttgtcaccatcttg

SEQ ID NO: 1542290 - DNA, 25 bp, Homo sapien
gctgattcggcagaaatagcagagg

SEQ ID NO: 1542291 - DNA, 25 bp, Homo sapien
gagcgctggttctgccggctgattc

SEQ ID NO: 1542292 - DNA, 25 bp, Homo sapien
ccaggccgatgccactgttctccag

SEQ ID NO: 1542293 - DNA, 25 bp, Homo sapien
ctgttctccagcaggtagctcaggt

SEQ ID NO: 1542294 - DNA, 25 bp, Homo sapien
ccactgttctccagcaggtagctca

SEQ ID NO: 1542295 - DNA, 25 bp, Homo sapien
ctccagcaggtagctcaggtggtca

SEQ ID NO: 1542296 - DNA, 25 bp, Homo sapien
tgttgtcaatgacggaggcagcagc

SEQ ID NO: 1542297 - DNA, 25 bp, Homo sapien
tccaggggcgtggagccctgcatgc

SEQ ID NO: 1542298 - DNA, 25 bp, Homo sapien
ctcattgttgtcaatgacggaggca

SEQ ID NO: 1542299 - DNA, 25 bp, Homo sapien
tgtcaatgacggaggcagcagccac

SEQ ID NO: 1542300 - DNA, 25 bp, Homo sapien
tgggtaccctttggccacaagcatg

SEQ ID NO: 1542301 - DNA, 25 bp, Homo sapien
cacagcctgccaggtaggacacaac

SEQ ID NO: 1542302 - DNA, 25 bp, Homo sapien
cagccaatgtctgggtaccctttgg

SEQ ID NO: 1542303 - DNA, 25 bp, Homo sapien
aatgtctgggtaccctttggccaca

SEQ ID NO: 1542304 - DNA, 25 bp, Homo sapien
gaagtccaggtagcgctctccacca

SEQ ID NO: 1542305 - DNA, 25 bp, Homo sapien
cgaagacagcaaagcgcaggaagtc

SEQ ID NO: 1542306 - DNA, 25 bp, Homo sapien
caggaagtccaggtagcgctctcca

SEQ ID NO: 1542307 - DNA, 25 bp, Homo sapien
gaagacagcaaagcgcaggaagtcc

SEQ ID NO: 1542308 - DNA, 25 bp, Homo sapien
gatgcggatggcctcttcgatggca

SEQ ID NO: 1542309 - DNA, 25 bp, Homo sapien
ggtccctgcggatgcctgggccatc

SEQ ID NO: 1542310 - DNA, 25 bp, Homo sapien
ccgcagggcgggtccgaagcactca

SEQ ID NO: 1542311 - DNA, 25 bp, Homo sapien
gaagcactcaggcttccggatgagc

SEQ ID NO: 1542312 - DNA, 25 bp, Homo sapien
gacatgatggcgtgtcccaggtgca

SEQ ID NO: 1542313 - DNA, 25 bp, Homo sapien
tcaaggcggcatagaaggacatgat

SEQ ID NO: 1542314 - DNA, 25 bp, Homo sapien
ttcttcaggcggttcctcaccaaag

SEQ ID NO: 1542315 - DNA, 25 bp, Homo sapien
acagcgtccgagcaggtcgatcaag

SEQ ID NO: 1542316 - DNA, 25 bp, Homo sapien
cctcacccttgccggcttggattag

SEQ ID NO: 1542317 - DNA, 25 bp, Homo sapien
aggatggcgcggatccgcagggcct

SEQ ID NO: 1542318 - DNA, 25 bp, Homo sapien
gaggctgatgatgcccacaaggtcc

SEQ ID NO: 1542319 - DNA, 25 bp, Homo sapien
agggcacaagggagcggaggatggc

SEQ ID NO: 1542320 - DNA, 25 bp, Homo sapien
cagcatcactccttcgccaagttcc

SEQ ID NO: 1542321 - DNA, 25 bp, Homo sapien
ccccagcatcactccttcgccaagt

SEQ ID NO: 1542322 - DNA, 25 bp, Homo sapien
gcatcactccttcgccaagttccat

SEQ ID NO: 1542323 - DNA, 25 bp, Homo sapien
tcgccaagttccatcccctctgcac

SEQ ID NO: 1542324 - DNA, 25 bp, Homo sapien
gcacgtgcagcaagaagtcctggtt

SEQ ID NO: 1542325 - DNA, 25 bp, Homo sapien
caggaagagcaccatggacgccttg

SEQ ID NO: 1542326 - DNA, 25 bp, Homo sapien
tccggcacgaaggatgctgacatct

SEQ ID NO: 1542327 - DNA, 25 bp, Homo sapien
ctcatgtcgggcaggaaccccacgt

SEQ ID NO: 1542328 - DNA, 25 bp, Homo sapien
ccagcgccatctcggtggtgctgaa

SEQ ID NO: 1542329 - DNA, 25 bp, Homo sapien
ggtgatgagcggcagcacggccagg

SEQ ID NO: 1542330 - DNA, 25 bp, Homo sapien
ggttcagcgccagcgccatctcggt

SEQ ID NO: 1542331 - DNA, 25 bp, Homo sapien
gcacaggtagcggttcagcgccagc

SEQ ID NO: 1542332 - DNA, 25 bp, Homo sapien
ttggtgagcgaacgaccccgagaca

SEQ ID NO: 1542333 - DNA, 25 bp, Homo sapien
ggcggtacacggtatgcagcataga

SEQ ID NO: 1542334 - DNA, 25 bp, Homo sapien
ctgcagagcgacatgaggcagtcct

SEQ ID NO: 1542335 - DNA, 25 bp, Homo sapien
gatgacgtcacgctgcgccttggtg

SEQ ID NO: 1542336 - DNA, 25 bp, Homo sapien
gcgaactcgttgaggatgggcacgt

SEQ ID NO: 1542337 - DNA, 25 bp, Homo sapien
acgtcgaacaccaggcggcgcaaca

SEQ ID NO: 1542338 - DNA, 25 bp, Homo sapien
ctgcagcatcgacgggcggatgtac

SEQ ID NO: 1542339 - DNA, 25 bp, Homo sapien
accaggcggcgcaacaggtgctgca

SEQ ID NO: 1542340 - DNA, 25 bp, Homo sapien
gcagtagtacttccaacagcgctca

SEQ ID NO: 1542341 - DNA, 25 bp, Homo sapien
tcctctgaggtgaccccgaagttgg

SEQ ID NO: 1542342 - DNA, 25 bp, Homo sapien
gagagtcaaagatgccccagaagag

SEQ ID NO: 1542343 - DNA, 25 bp, Homo sapien
gagtttccgtgtgaggtgcagctcc

SEQ ID NO: 1542344 - DNA, 25 bp, Homo sapien
tccacataggccattttggggctcc

SEQ ID NO: 1542345 - DNA, 25 bp, Homo sapien
cctccacataggccattttggggct

SEQ ID NO: 1542346 - DNA, 25 bp, Homo sapien
acataggccattttggggctccctg

SEQ ID NO: 1542347 - DNA, 25 bp, Homo sapien
cacataggccattttggggctccct

SEQ ID NO: 1542348 - DNA, 25 bp, Homo sapien
gaagcaggggtaggaggtcgctata

SEQ ID NO: 1542349 - DNA, 25 bp, Homo sapien
gggtaggaggtcgctataagcctta

SEQ ID NO: 1542350 - DNA, 25 bp, Homo sapien
ggtgaagcaggggtaggaggtcgct

SEQ ID NO: 1542351 - DNA, 25 bp, Homo sapien
caggggtaggaggtcgctataagcc

SEQ ID NO: 1542352 - DNA, 25 bp, Homo sapien
tctctgccttagatgagtatgaggc

SEQ ID NO: 1542353 - DNA, 25 bp, Homo sapien
gcaatggcgcacagacaaggcatgg

SEQ ID NO: 1542354 - DNA, 25 bp, Homo sapien
caaggcatggccatgcggtacagct

SEQ ID NO: 1542355 - DNA, 25 bp, Homo sapien
gggatcaaagttgccttcagcatcc

SEQ ID NO: 1542356 - DNA, 25 bp, Homo sapien
tcgtgtgtgtactccgcaaacttgt

SEQ ID NO: 1542357 - DNA, 25 bp, Homo sapien
cacttctcgtgtgtgtactccgcaa

SEQ ID NO: 1542358 - DNA, 25 bp, Homo sapien
ttgtcgaaggcccacttctcgtgtg

SEQ ID NO: 1542359 - DNA, 25 bp, Homo sapien
tactccgcaaacttgttaatgaagg

SEQ ID NO: 1542360 - DNA, 25 bp, Homo sapien
cttcagctcctcgtctatgttctct

SEQ ID NO: 1542361 - DNA, 25 bp, Homo sapien
ctgaaaaggtcttgtagggcctcag

SEQ ID NO: 1542362 - DNA, 25 bp, Homo sapien
gaaaaggtcttgtagggcctcagca

SEQ ID NO: 1542363 - DNA, 25 bp, Homo sapien
tatgttctctccataggaccagttg

SEQ ID NO: 1542364 - DNA, 25 bp, Homo sapien
ggcactttgtgatatcttccgcgtt

SEQ ID NO: 1542365 - DNA, 25 bp, Homo sapien
gatgggccagcggtaaatctctttg

SEQ ID NO: 1542366 - DNA, 25 bp, Homo sapien
ctgggcactttgtgatatcttccgc

SEQ ID NO: 1542367 - DNA, 25 bp, Homo sapien
tctatcgtccattcccaggcaatca

SEQ ID NO: 1542368 - DNA, 25 bp, Homo sapien
gggctgagggttgtagccttctcga

SEQ ID NO: 1542369 - DNA, 25 bp, Homo sapien
gggttgtagccttctcgaggatcat

SEQ ID NO: 1542370 - DNA, 25 bp, Homo sapien
ctgagggttgtagccttctcgagga

SEQ ID NO: 1542371 - DNA, 25 bp, Homo sapien
tgtagccttctcgaggatcataggt

SEQ ID NO: 1542372 - DNA, 25 bp, Homo sapien
ttgtggtaattttctgccagttgtt

SEQ ID NO: 1542373 - DNA, 25 bp, Homo sapien
gtgttgtggtaattttctgccagtt

SEQ ID NO: 1542374 - DNA, 25 bp, Homo sapien
tgttgtggtaattttctgccagttg

SEQ ID NO: 1542375 - DNA, 25 bp, Homo sapien
gttgtggtaattttctgccagttgt

SEQ ID NO: 1542376 - DNA, 25 bp, Homo sapien
ctcctgcttcttcttccgtccccac

SEQ ID NO: 1542377 - DNA, 25 bp, Homo sapien
ccagctcctgcttcttcttccgtcc

SEQ ID NO: 1542378 - DNA, 25 bp, Homo sapien
ctttggcttccagctcctgcttctt

SEQ ID NO: 1542379 - DNA, 25 bp, Homo sapien
agctcctgcttcttcttccgtcccc

SEQ ID NO: 1542380 - DNA, 25 bp, Homo sapien
gtgagcgtgtcgtaggggaccagca

SEQ ID NO: 1542381 - DNA, 25 bp, Homo sapien
cttgtaaccgcgtagccattcatct

SEQ ID NO: 1542382 - DNA, 25 bp, Homo sapien
gggccttctctcgatctcgtgcctt

SEQ ID NO: 1542383 - DNA, 25 bp, Homo sapien
gccgtgagcgtgtcgtaggggacca

SEQ ID NO: 1542384 - DNA, 25 bp, Homo sapien
cccttccagcctttgccgggtgtgt

SEQ ID NO: 1542385 - DNA, 25 bp, Homo sapien
gctgctcttccgcgggagccccaac

SEQ ID NO: 1542386 - DNA, 25 bp, Homo sapien
cttccagcctttgccgggtgtgttc

SEQ ID NO: 1542387 - DNA, 25 bp, Homo sapien
ttccagcctttgccgggtgtgttct

SEQ ID NO: 1542388 - DNA, 25 bp, Homo sapien
aggtgggcaatgaactcctgagaaa

SEQ ID NO: 1542389 - DNA, 25 bp, Homo sapien
gccaaaggcaaaccgcttttcaatg

SEQ ID NO: 1542390 - DNA, 25 bp, Homo sapien
ggtgggcaatgaactcctgagaaat

SEQ ID NO: 1542391 - DNA, 25 bp, Homo sapien
tcaatggaagacgagtccagttcca

SEQ ID NO: 1542392 - DNA, 25 bp, Homo sapien
tgtggggacttttccactcgcccac

SEQ ID NO: 1542393 - DNA, 25 bp, Homo sapien
agaatttaatctcctgttcatgtgg

SEQ ID NO: 1542394 - DNA, 25 bp, Homo sapien
gacttttccactcgcccactgctga

SEQ ID NO: 1542395 - DNA, 25 bp, Homo sapien
gaatttaatctcctgttcatgtggg

SEQ ID NO: 1542396 - DNA, 25 bp, Homo sapien
tgcccagcactttagccggagtgga

SEQ ID NO: 1542397 - DNA, 25 bp, Homo sapien
ccggagtggacaagaaatagaggca

SEQ ID NO: 1542398 - DNA, 25 bp, Homo sapien
tactggttgatcaaagggagcagga

SEQ ID NO: 1542399 - DNA, 25 bp, Homo sapien
ctccttgttagaggcgtggccaccg

SEQ ID NO: 1542400 - DNA, 25 bp, Homo sapien
caaagagagagactcggtggcggac

SEQ ID NO: 1542401 - DNA, 25 bp, Homo sapien
aagagagagactcggtggcggacga

SEQ ID NO: 1542402 - DNA, 25 bp, Homo sapien
actcggtggcggacgagagcagcaa

SEQ ID NO: 1542403 - DNA, 25 bp, Homo sapien
gagagactcggtggcggacgagagc

SEQ ID NO: 1542404 - DNA, 25 bp, Homo sapien
ggatgtgaagacagttgaccacagc

SEQ ID NO: 1542405 - DNA, 25 bp, Homo sapien
caggatgtgaagacagttgaccaca

SEQ ID NO: 1542406 - DNA, 25 bp, Homo sapien
aggatgtgaagacagttgaccacag

SEQ ID NO: 1542407 - DNA, 25 bp, Homo sapien
gagcggaggccagccttcacgatct

SEQ ID NO: 1542408 - DNA, 25 bp, Homo sapien
tccgaggcactctcgaagaaggagc

SEQ ID NO: 1542409 - DNA, 25 bp, Homo sapien
gatgacgtcatctccgaactggtgc

SEQ ID NO: 1542410 - DNA, 25 bp, Homo sapien
catcttctcgatgtcctccgaggca

SEQ ID NO: 1542411 - DNA, 25 bp, Homo sapien
tggttcccagggagtagatactgca

SEQ ID NO: 1542412 - DNA, 25 bp, Homo sapien
ttttccacataagtgttcttggtgg

SEQ ID NO: 1542413 - DNA, 25 bp, Homo sapien
cagcgttcggtagcaagagacctgg

SEQ ID NO: 1542414 - DNA, 25 bp, Homo sapien
gagtagatactgcacagcgttcggt

SEQ ID NO: 1542415 - DNA, 25 bp, Homo sapien
cacggagcaggcgttgtactcgttc

SEQ ID NO: 1542416 - DNA, 25 bp, Homo sapien
cccgcggagacttggtggtgtacac

SEQ ID NO: 1542417 - DNA, 25 bp, Homo sapien
tccaggaacgccaccggcatggctg

SEQ ID NO: 1542418 - DNA, 25 bp, Homo sapien
atggctgctgccagacgggccaggc

SEQ ID NO: 1542419 - DNA, 25 bp, Homo sapien
catagcatgggcagcgtgatctcga

SEQ ID NO: 1542420 - DNA, 25 bp, Homo sapien
cccaggttgttgacgatgattctca

SEQ ID NO: 1542421 - DNA, 25 bp, Homo sapien
gatgtcgggacacatctcctccaca

SEQ ID NO: 1542422 - DNA, 25 bp, Homo sapien
tctcaggatattccccagcagggag

SEQ ID NO: 1542423 - DNA, 25 bp, Homo sapien
gcagccgcccgatagttgggatgaa

SEQ ID NO: 1542424 - DNA, 25 bp, Homo sapien
ggccgtgcacggctcacaatgggct

SEQ ID NO: 1542425 - DNA, 25 bp, Homo sapien
tccacgtagcggatgagcagcggat

SEQ ID NO: 1542426 - DNA, 25 bp, Homo sapien
tagaggtcccggcagagcacagaga

SEQ ID NO: 1542427 - DNA, 25 bp, Homo sapien
tgaacagctcctccgcgctgggatt

SEQ ID NO: 1542428 - DNA, 25 bp, Homo sapien
ggacttggaccagtagatgaagatc

SEQ ID NO: 1542429 - DNA, 25 bp, Homo sapien
cagtagatgaagatctcgcccacca

SEQ ID NO: 1542430 - DNA, 25 bp, Homo sapien
ggattcggctccgtcagccactgcg

SEQ ID NO: 1542431 - DNA, 25 bp, Homo sapien
gaaggcaggcgcctgtgggctgcgg

SEQ ID NO: 1542432 - DNA, 25 bp, Homo sapien
caggtgaaggcaggcgcctgtgggc

SEQ ID NO: 1542433 - DNA, 25 bp, Homo sapien
cggacaggtgaaggcaggcgcctgt

SEQ ID NO: 1542434 - DNA, 25 bp, Homo sapien
aggcaggcgcctgtgggctgcggct

SEQ ID NO: 1542435 - DNA, 25 bp, Homo sapien
gaaggacatgttgttgatctcattc

SEQ ID NO: 1542436 - DNA, 25 bp, Homo sapien
ggaaggacatgttgttgatctcatt

SEQ ID NO: 1542437 - DNA, 25 bp, Homo sapien
aggactgcagggattgcgcccagga

SEQ ID NO: 1542438 - DNA, 25 bp, Homo sapien
aggccaggtaggaagtcctagaggg

SEQ ID NO: 1542439 - DNA, 25 bp, Homo sapien
gattgcgcccaggacgggctggctg

SEQ ID NO: 1542440 - DNA, 25 bp, Homo sapien
aggaagtcctagagggtgctcccgc

SEQ ID NO: 1542441 - DNA, 25 bp, Homo sapien
cagtgtggccacgatcagtgacgtc

SEQ ID NO: 1542442 - DNA, 25 bp, Homo sapien
tgacgtctgcacagagtaccggtcc

SEQ ID NO: 1542443 - DNA, 25 bp, Homo sapien
tcttggccagcgtgatgaggtcttg

SEQ ID NO: 1542444 - DNA, 25 bp, Homo sapien
gcacacatattcaggccgatgggca

SEQ ID NO: 1542445 - DNA, 25 bp, Homo sapien
ttccctgaaggtgaaggttgttgtg

SEQ ID NO: 1542446 - DNA, 25 bp, Homo sapien
agaaattcccggacctcctcatctg

SEQ ID NO: 1542447 - DNA, 25 bp, Homo sapien
aaggttgttgtgcagaaattcccgg

SEQ ID NO: 1542448 - DNA, 25 bp, Homo sapien
gttgtgcagaaattcccggacctcc

SEQ ID NO: 1542449 - DNA, 25 bp, Homo sapien
gggacgccccggtacagagccatct

SEQ ID NO: 1542450 - DNA, 25 bp, Homo sapien
cttcctggactctgcgcacgatttt

SEQ ID NO: 1542451 - DNA, 25 bp, Homo sapien
gattttctcggggtcatcggcgtcc

SEQ ID NO: 1542452 - DNA, 25 bp, Homo sapien
agtagagcacggctgacacttcctg

SEQ ID NO: 1542453 - DNA, 25 bp, Homo sapien
gtcatacggaaacaggccacgactg

SEQ ID NO: 1542454 - DNA, 25 bp, Homo sapien
gccacacggccttcttagacttgta

SEQ ID NO: 1542455 - DNA, 25 bp, Homo sapien
actgcccgccggcgctgtttggaca

SEQ ID NO: 1542456 - DNA, 25 bp, Homo sapien
tgtacaggggcgtcatacggaaaca

SEQ ID NO: 1542457 - DNA, 25 bp, Homo sapien
ccatgcagccttgtagctctccagg

SEQ ID NO: 1542458 - DNA, 25 bp, Homo sapien
tatcatgcggtcctcaaaactgtgg

SEQ ID NO: 1542459 - DNA, 25 bp, Homo sapien
caggaacatgttacatgcccggtgc

SEQ ID NO: 1542460 - DNA, 25 bp, Homo sapien
tcttcagtcaggatccatgcagcct

SEQ ID NO: 1542461 - DNA, 25 bp, Homo sapien
tggtgcagggggtctggcttcttct

SEQ ID NO: 1542462 - DNA, 25 bp, Homo sapien
ctggtgcagggggtctggcttcttc

SEQ ID NO: 1542463 - DNA, 25 bp, Homo sapien
ctggggccctggcaagagtcttcac

SEQ ID NO: 1542464 - DNA, 25 bp, Homo sapien
cttgggggcatttctggggccctgg

SEQ ID NO: 1542465 - DNA, 25 bp, Homo sapien
gggggcatttctggggccctggcaa

SEQ ID NO: 1542466 - DNA, 25 bp, Homo sapien
gcatttctggggccctggcaagagt

SEQ ID NO: 1542467 - DNA, 25 bp, Homo sapien
agcataggccatgtacaggtaatcc

SEQ ID NO: 1542468 - DNA, 25 bp, Homo sapien
atcagcataggccatgtacaggtaa

SEQ ID NO: 1542469 - DNA, 25 bp, Homo sapien
taggccatgtacaggtaatcctcat

SEQ ID NO: 1542470 - DNA, 25 bp, Homo sapien
gccatgtacaggtaatcctcatcca

SEQ ID NO: 1542471 - DNA, 25 bp, Homo sapien
tcttcagcttcaccgttctcccctc

SEQ ID NO: 1542472 - DNA, 25 bp, Homo sapien
tcaaaggagacctcaacctcctctt

SEQ ID NO: 1542473 - DNA, 25 bp, Homo sapien
ctcaaaggagacctcaacctcctct

SEQ ID NO: 1542474 - DNA, 25 bp, Homo sapien
cagcttcaccgttctcccctccctc

SEQ ID NO: 1542475 - DNA, 25 bp, Homo sapien
ccgtgcttgctggtacaagagcctc

SEQ ID NO: 1542476 - DNA, 25 bp, Homo sapien
tgtgcagccgtgcttgctggtacaa

SEQ ID NO: 1542477 - DNA, 25 bp, Homo sapien
cttgctggtacaagagcctctgctt

SEQ ID NO: 1542478 - DNA, 25 bp, Homo sapien
ccccgggtgtgcagccgtgcttgct

SEQ ID NO: 1542479 - DNA, 25 bp, Homo sapien
ggaggacaccatggcacctgtctct

SEQ ID NO: 1542480 - DNA, 25 bp, Homo sapien
tggaggacaccatggcacctgtctc

SEQ ID NO: 1542481 - DNA, 25 bp, Homo sapien
gaggacaccatggcacctgtctctc

SEQ ID NO: 1542482 - DNA, 25 bp, Homo sapien
tcttgtccttaagataatccagcat

SEQ ID NO: 1542483 - DNA, 25 bp, Homo sapien
ttcttgtccttaagataatccagca

SEQ ID NO: 1542484 - DNA, 25 bp, Homo sapien
cttgtccttaagataatccagcatt

SEQ ID NO: 1542485 - DNA, 25 bp, Homo sapien
gcatgtttgcatcagtgcctggata

SEQ ID NO: 1542486 - DNA, 25 bp, Homo sapien
tgcatgtttgcatcagtgcctggat

SEQ ID NO: 1542487 - DNA, 25 bp, Homo sapien
catgtttgcatcagtgcctggatac

SEQ ID NO: 1542488 - DNA, 25 bp, Homo sapien
atgtttgcatcagtgcctggatact

SEQ ID NO: 1542489 - DNA, 25 bp, Homo sapien
tctgtctctcaaaggcattgagatc

SEQ ID NO: 1542490 - DNA, 25 bp, Homo sapien
gtctctcaaaggcattgagatccag

SEQ ID NO: 1542491 - DNA, 25 bp, Homo sapien
gttctgtctctcaaaggcattgaga

SEQ ID NO: 1542492 - DNA, 25 bp, Homo sapien
ctcaaaggcattgagatccaggacg

SEQ ID NO: 1542493 - DNA, 25 bp, Homo sapien
tattgtgcccctcacagagcaattg

SEQ ID NO: 1542494 - DNA, 25 bp, Homo sapien
aacaggtcttgtgtgaattcatcat

SEQ ID NO: 1542495 - DNA, 25 bp, Homo sapien
caattgtaggaatcggaacaggtct

SEQ ID NO: 1542496 - DNA, 25 bp, Homo sapien
tgtgaattcatcatccgccatgacc

SEQ ID NO: 1542497 - DNA, 25 bp, Homo sapien
ctccaccccacacccctcctcctca

SEQ ID NO: 1542498 - DNA, 25 bp, Homo sapien
tccaccccacacccctcctcctcac

SEQ ID NO: 1542499 - DNA, 25 bp, Homo sapien
gaaatccaccacgtgtatagaactt

SEQ ID NO: 1542500 - DNA, 25 bp, Homo sapien
acagaaatccaccacgtgtatagaa

SEQ ID NO: 1542501 - DNA, 25 bp, Homo sapien
cacgtgtatagaactttggcagcca

SEQ ID NO: 1542502 - DNA, 25 bp, Homo sapien
tccaccacgtgtatagaactttggc

SEQ ID NO: 1542503 - DNA, 25 bp, Homo sapien
gatgttaatagtggtcgtgttccct

SEQ ID NO: 1542504 - DNA, 25 bp, Homo sapien
ggtagtccacagtgcaaatgatgat

SEQ ID NO: 1542505 - DNA, 25 bp, Homo sapien
tctgtgtccgtaggtagttctggaa

SEQ ID NO: 1542506 - DNA, 25 bp, Homo sapien
tccctgtctgtgtccgtaggtagtt

SEQ ID NO: 1542507 - DNA, 25 bp, Homo sapien
gatgtactcagtgaggctgttgaac

SEQ ID NO: 1542508 - DNA, 25 bp, Homo sapien
tcaatgacatccttgcccgagtagt

SEQ ID NO: 1542509 - DNA, 25 bp, Homo sapien
gttgaacacctgcttagccaccgac

SEQ ID NO: 1542510 - DNA, 25 bp, Homo sapien
gcccgagtagtaccagtagaagtcg

SEQ ID NO: 1542511 - DNA, 25 bp, Homo sapien
ccataggcgactgtgcgccaggctc

SEQ ID NO: 1542512 - DNA, 25 bp, Homo sapien
gggcgaacacgtgcaggaatcccac

SEQ ID NO: 1542513 - DNA, 25 bp, Homo sapien
agcttcatcatcatgtgggcgaaca

SEQ ID NO: 1542514 - DNA, 25 bp, Homo sapien
accactgcgtcccataggcgactgt

SEQ ID NO: 1542515 - DNA, 25 bp, Homo sapien
tgggggacgcccggaagcaggtgga

SEQ ID NO: 1542516 - DNA, 25 bp, Homo sapien
ggacgcccggaagcaggtggatgga

SEQ ID NO: 1542517 - DNA, 25 bp, Homo sapien
ggtggatggagaccagaggggctcg

SEQ ID NO: 1542518 - DNA, 25 bp, Homo sapien
ggatggagaccagaggggctcgaac

SEQ ID NO: 1542519 - DNA, 25 bp, Homo sapien
tgctctcagagatcgtgcctttgtg

SEQ ID NO: 1542520 - DNA, 25 bp, Homo sapien
gcagccttgaatatagttaccagac

SEQ ID NO: 1542521 - DNA, 25 bp, Homo sapien
cacgacctgcggaacagtatatggc

SEQ ID NO: 1542522 - DNA, 25 bp, Homo sapien
taacatgctggatgctttactgcca

SEQ ID NO: 1542523 - DNA, 25 bp, Homo sapien
gctgtgacacggaggaattgcattc

SEQ ID NO: 1542524 - DNA, 25 bp, Homo sapien
caacctagactagatggtggcggat

SEQ ID NO: 1542525 - DNA, 25 bp, Homo sapien
tccctctagggctgttaagaagtag

SEQ ID NO: 1542526 - DNA, 25 bp, Homo sapien
gccctggatctgtaatatgaactga

SEQ ID NO: 1542527 - DNA, 25 bp, Homo sapien
ctggcagacaaggaggactgagagg

SEQ ID NO: 1542528 - DNA, 25 bp, Homo sapien
ccagacatgttcctcggaagcaggg

SEQ ID NO: 1542529 - DNA, 25 bp, Homo sapien
gggacccgagtccagacatgttcct

SEQ ID NO: 1542530 - DNA, 25 bp, Homo sapien
gacgggctcgataggtgatgggtag

SEQ ID NO: 1542531 - DNA, 25 bp, Homo sapien
gagtccagacatgttcctcggaagc

SEQ ID NO: 1542532 - DNA, 25 bp, Homo sapien
tctagtagcgacagcaacatcacca

SEQ ID NO: 1542533 - DNA, 25 bp, Homo sapien
cttctagtagcgacagcaacatcac

SEQ ID NO: 1542534 - DNA, 25 bp, Homo sapien
tagtagcgacagcaacatcaccacc

SEQ ID NO: 1542535 - DNA, 25 bp, Homo sapien
agcgacagcaacatcaccaccatgt

SEQ ID NO: 1542536 - DNA, 25 bp, Homo sapien
gatccgttacgtagtcctggaaggc

SEQ ID NO: 1542537 - DNA, 25 bp, Homo sapien
gcttcagagcccacaatgtccttga

SEQ ID NO: 1542538 - DNA, 25 bp, Homo sapien
ggcgatcatgccgttcaccacgttc

SEQ ID NO: 1542539 - DNA, 25 bp, Homo sapien
tgtcgaagaacttgaggatcatctc

SEQ ID NO: 1542540 - DNA, 25 bp, Homo sapien
ttctggaccgctgaactgcttctgg

SEQ ID NO: 1542541 - DNA, 25 bp, Homo sapien
gaagtactcaaggatgctctcggcc

SEQ ID NO: 1542542 - DNA, 25 bp, Homo sapien
ctcctggaagcggttggcgaactct

SEQ ID NO: 1542543 - DNA, 25 bp, Homo sapien
ttcggagcacgaaagcaggaactgg

SEQ ID NO: 1542544 - DNA, 25 bp, Homo sapien
cccaggaggcgagcttgcacgcgcg

SEQ ID NO: 1542545 - DNA, 25 bp, Homo sapien
gcttgcacgcgcgcgggttccctga

SEQ ID NO: 1542546 - DNA, 25 bp, Homo sapien
ccgcatgcccgaagccccaggaggc

SEQ ID NO: 1542547 - DNA, 25 bp, Homo sapien
catgcccgaagccccaggaggcgag

SEQ ID NO: 1542548 - DNA, 25 bp, Homo sapien
tgtgcacggtggacgtgggcacacg

SEQ ID NO: 1542549 - DNA, 25 bp, Homo sapien
ccagggagggatcaggagtaaggag

SEQ ID NO: 1542550 - DNA, 25 bp, Homo sapien
gatgccaaaagtgtgcaaccacgag

SEQ ID NO: 1542551 - DNA, 25 bp, Homo sapien
ccacgagaggctcagtgtgcacggt

SEQ ID NO: 1542552 - DNA, 25 bp, Homo sapien
gacagcagcgacagcgcagtggcag

SEQ ID NO: 1542553 - DNA, 25 bp, Homo sapien
agcgaggggcggcagacaggatagg

SEQ ID NO: 1542554 - DNA, 25 bp, Homo sapien
tcagcgggggctcggacagcagcga

SEQ ID NO: 1542555 - DNA, 25 bp, Homo sapien
gcagacaggatagggcgccgtcagc

SEQ ID NO: 1542556 - DNA, 25 bp, Homo sapien
gatgaactggcgcttggactccttc

SEQ ID NO: 1542557 - DNA, 25 bp, Homo sapien
tcgaagatgaactggcgcttggact

SEQ ID NO: 1542558 - DNA, 25 bp, Homo sapien
tcaccacgtcgaagatgaactggcg

SEQ ID NO: 1542559 - DNA, 25 bp, Homo sapien
gccctcgttcaccacgtcgaagatg

SEQ ID NO: 1542560 - DNA, 25 bp, Homo sapien
tctgcatctcgaagatggtgtcctc

SEQ ID NO: 1542561 - DNA, 25 bp, Homo sapien
ggctccgagatctgcgcggcgatct

SEQ ID NO: 1542562 - DNA, 25 bp, Homo sapien
gatctgcgcggcgatctgcatctcg

SEQ ID NO: 1542563 - DNA, 25 bp, Homo sapien
gccgaacagcgagccccagagcagg

SEQ ID NO: 1542564 - DNA, 25 bp, Homo sapien
atgcctgccaggagctcggtcaccg

SEQ ID NO: 1542565 - DNA, 25 bp, Homo sapien
tgggcggttccgcaggcgtcgtgtc

SEQ ID NO: 1542566 - DNA, 25 bp, Homo sapien
tcgctggcaccctcgccgtctgcgt

SEQ ID NO: 1542567 - DNA, 25 bp, Homo sapien
tcgccgtgcacctcgtcgctggtgg

SEQ ID NO: 1542568 - DNA, 25 bp, Homo sapien
tggctctggcgggagctcctcctcc

SEQ ID NO: 1542569 - DNA, 25 bp, Homo sapien
ctggctctggcgggagctcctcctc

SEQ ID NO: 1542570 - DNA, 25 bp, Homo sapien
agctctggttccggctcgggctctg

SEQ ID NO: 1542571 - DNA, 25 bp, Homo sapien
gctccagctctggttccggctcggg

SEQ ID NO: 1542572 - DNA, 25 bp, Homo sapien
ctctggtgtgggctcgggaacttct

SEQ ID NO: 1542573 - DNA, 25 bp, Homo sapien
gctctggtgtgggctcgggaacttc

SEQ ID NO: 1542574 - DNA, 25 bp, Homo sapien
tggtgtgggctcgggaacttcttcc

SEQ ID NO: 1542575 - DNA, 25 bp, Homo sapien
tctggtgtgggctcgggaacttctt

SEQ ID NO: 1542576 - DNA, 25 bp, Homo sapien
ccaagaagagggcaaggaaccgcag

SEQ ID NO: 1542577 - DNA, 25 bp, Homo sapien
aatgccaagaagagggcaaggaacc

SEQ ID NO: 1542578 - DNA, 25 bp, Homo sapien
taaaacagcaagatgaagttgatgg

SEQ ID NO: 1542579 - DNA, 25 bp, Homo sapien
gaagttgatggcaaatgccaagaag

SEQ ID NO: 1542580 - DNA, 25 bp, Homo sapien
cgtcctcccctggtggagagtctga

SEQ ID NO: 1542581 - DNA, 25 bp, Homo sapien
aggccaccagtgtatgcaggaggct

SEQ ID NO: 1542582 - DNA, 25 bp, Homo sapien
ggaagtagtacaccatgttctcatc

SEQ ID NO: 1542583 - DNA, 25 bp, Homo sapien
aggaggctcagacaccgcagggcgg

SEQ ID NO: 1542584 - DNA, 25 bp, Homo sapien
ccgtgatgtacaggccatcaaactc

SEQ ID NO: 1542585 - DNA, 25 bp, Homo sapien
ttcacgtcatcgtcctcaggctgct

SEQ ID NO: 1542586 - DNA, 25 bp, Homo sapien
cttctcccgcttaaagattaccagg

SEQ ID NO: 1542587 - DNA, 25 bp, Homo sapien
ctgctccgtgatgtacaggccatca

SEQ ID NO: 1542588 - DNA, 25 bp, Homo sapien
gtcccagtagttgctagggaaagac

SEQ ID NO: 1542589 - DNA, 25 bp, Homo sapien
ttgtcccagtagttgctagggaaag

SEQ ID NO: 1542590 - DNA, 25 bp, Homo sapien
cttgtcccagtagttgctagggaaa

SEQ ID NO: 1542591 - DNA, 25 bp, Homo sapien
tgtcccagtagttgctagggaaaga

SEQ ID NO: 1542592 - DNA, 25 bp, Homo sapien
tgggctgtgatctctagtgtggcca

SEQ ID NO: 1542593 - DNA, 25 bp, Homo sapien
atgcccagtagctcagcaatccgct

SEQ ID NO: 1542594 - DNA, 25 bp, Homo sapien
gtagatgtccccatgtttgtccagg

SEQ ID NO: 1542595 - DNA, 25 bp, Homo sapien
gcttgcgctcattgtgggctgtgat

SEQ ID NO: 1542596 - DNA, 25 bp, Homo sapien
tccagatctggtacttgacatcgat

SEQ ID NO: 1542597 - DNA, 25 bp, Homo sapien
aagatgaccccgaacttccagatct

SEQ ID NO: 1542598 - DNA, 25 bp, Homo sapien
ccagatctggtacttgacatcgatg

SEQ ID NO: 1542599 - DNA, 25 bp, Homo sapien
gatgaccccgaacttccagatctgg

SEQ ID NO: 1542600 - DNA, 25 bp, Homo sapien
gacatcaccatataccagcccaggt

SEQ ID NO: 1542601 - DNA, 25 bp, Homo sapien
caggatggtgcgcagcgtcttgacc

SEQ ID NO: 1542602 - DNA, 25 bp, Homo sapien
agaagttgttgtagtgtcccaagag

SEQ ID NO: 1542603 - DNA, 25 bp, Homo sapien
gtttcccattgtgggtgacagagga

SEQ ID NO: 1542604 - DNA, 25 bp, Homo sapien
aggtagacgaccaccgccagaaggc

SEQ ID NO: 1542605 - DNA, 25 bp, Homo sapien
cctcatcctcgctcttgttgtagaa

SEQ ID NO: 1542606 - DNA, 25 bp, Homo sapien
tcatcctcgctcttgttgtagaact

SEQ ID NO: 1542607 - DNA, 25 bp, Homo sapien
aaggccaccacggtgtacaggtaga

SEQ ID NO: 1542608 - DNA, 25 bp, Homo sapien
gacacccacgtacatgtgaaacagg

SEQ ID NO: 1542609 - DNA, 25 bp, Homo sapien
tggccaacaggatgacgatgacgaa

SEQ ID NO: 1542610 - DNA, 25 bp, Homo sapien
agaagaaggtgatgtcgaagaccac

SEQ ID NO: 1542611 - DNA, 25 bp, Homo sapien
gtagagctcgtattcgtcacccgcg

SEQ ID NO: 1542612 - DNA, 25 bp, Homo sapien
ccttcacttgctcttgttggtctcg

SEQ ID NO: 1542613 - DNA, 25 bp, Homo sapien
tcaccaaaagcgtcgatgatcagac

SEQ ID NO: 1542614 - DNA, 25 bp, Homo sapien
tcggagctcaccaaaagcgtcgatg

SEQ ID NO: 1542615 - DNA, 25 bp, Homo sapien
tcttgttggtctcggagctcaccaa

SEQ ID NO: 1542616 - DNA, 25 bp, Homo sapien
tgtgagtctcgaagccatgcggtgt

SEQ ID NO: 1542617 - DNA, 25 bp, Homo sapien
taattggccaggttgtgctcctcca

SEQ ID NO: 1542618 - DNA, 25 bp, Homo sapien
aaagtagtcactgccgattccacag

SEQ ID NO: 1542619 - DNA, 25 bp, Homo sapien
catgcggtgtcgtatcaaagtagtc

SEQ ID NO: 1542620 - DNA, 25 bp, Homo sapien
tgtctcatccttgtttatcaaatac

SEQ ID NO: 1542621 - DNA, 25 bp, Homo sapien
ctgtctcatccttgtttatcaaata

SEQ ID NO: 1542622 - DNA, 25 bp, Homo sapien
ctcatccttgtttatcaaatacatc

SEQ ID NO: 1542623 - DNA, 25 bp, Homo sapien
gtctcatccttgtttatcaaataca

SEQ ID NO: 1542624 - DNA, 25 bp, Homo sapien
cttacggaaacaatcaccagctggg

SEQ ID NO: 1542625 - DNA, 25 bp, Homo sapien
gcttacggaaacaatcaccagctgg

SEQ ID NO: 1542626 - DNA, 25 bp, Homo sapien
tgcttacggaaacaatcaccagctg

SEQ ID NO: 1542627 - DNA, 25 bp, Homo sapien
ctggggggcgtagcacagatttatt

SEQ ID NO: 1542628 - DNA, 25 bp, Homo sapien
ttattttccagtactaggtcacctc

SEQ ID NO: 1542629 - DNA, 25 bp, Homo sapien
gggcttgctgtgagaataaggcact

SEQ ID NO: 1542630 - DNA, 25 bp, Homo sapien
ctgtgagaataaggcacttgaggtg

SEQ ID NO: 1542631 - DNA, 25 bp, Homo sapien
tcccatggcctcaagataaagactc

SEQ ID NO: 1542632 - DNA, 25 bp, Homo sapien
tggatgatcctactgctcccagcaa

SEQ ID NO: 1542633 - DNA, 25 bp, Homo sapien
cacactagtggtcatggcatgtcct

SEQ ID NO: 1542634 - DNA, 25 bp, Homo sapien
ctgtagtggtggagacacgcccagt

SEQ ID NO: 1542635 - DNA, 25 bp, Homo sapien
tttgaggcacaaatggtcttaaatt

SEQ ID NO: 1542636 - DNA, 25 bp, Homo sapien
ttttgaggcacaaatggtcttaaat

SEQ ID NO: 1542637 - DNA, 25 bp, Homo sapien
tgggaatgaattgcagacgtgatgc

SEQ ID NO: 1542638 - DNA, 25 bp, Homo sapien
ttctctttcttatgcgcacacacca

SEQ ID NO: 1542639 - DNA, 25 bp, Homo sapien
aggacataatgttacaaaccacagc

SEQ ID NO: 1542640 - DNA, 25 bp, Homo sapien
gacgtgatgcccatttacccctaaa

SEQ ID NO: 1542641 - DNA, 25 bp, Homo sapien
gcaaccatagctagctgtagccttg

SEQ ID NO: 1542642 - DNA, 25 bp, Homo sapien
aaaatggggaccactatagagatat

SEQ ID NO: 1542643 - DNA, 25 bp, Homo sapien
gtaaaatggggaccactatagagat

SEQ ID NO: 1542644 - DNA, 25 bp, Homo sapien
tgaccttgggctggcaacgttgctt

SEQ ID NO: 1542645 - DNA, 25 bp, Homo sapien
ctgagctgcccgctgtgtgcatcgg

SEQ ID NO: 1542646 - DNA, 25 bp, Homo sapien
aggctctgagctgcccgctgtgtgc

SEQ ID NO: 1542647 - DNA, 25 bp, Homo sapien
cgctgtgtgcatcggcgtgagcccc

SEQ ID NO: 1542648 - DNA, 25 bp, Homo sapien
ctgcccgctgtgtgcatcggcgtga

SEQ ID NO: 1542649 - DNA, 25 bp, Homo sapien
gctgccgggcgtgctgtgtgggtga

SEQ ID NO: 1542650 - DNA, 25 bp, Homo sapien
ttccaccaagatccaggacaccaaa

SEQ ID NO: 1542651 - DNA, 25 bp, Homo sapien
tgagagagagcttcacgggtgtgca

SEQ ID NO: 1542652 - DNA, 25 bp, Homo sapien
ccaagatccaggacaccaaaggctg

SEQ ID NO: 1542653 - DNA, 25 bp, Homo sapien
ttgcaccaaggtaagaggcaggatt

SEQ ID NO: 1542654 - DNA, 25 bp, Homo sapien
ggatttgaaccttggcactctcgct

SEQ ID NO: 1542655 - DNA, 25 bp, Homo sapien
tctcgctccaaagtcgtaaccactg

SEQ ID NO: 1542656 - DNA, 25 bp, Homo sapien
gggatgtgcccttctcgtaaagttg

SEQ ID NO: 1542657 - DNA, 25 bp, Homo sapien
caacctcagggtcggattcaaaata

SEQ ID NO: 1542658 - DNA, 25 bp, Homo sapien
tagatgctgggatactgggctctcc

SEQ ID NO: 1542659 - DNA, 25 bp, Homo sapien
acttgagttgcaaaagggtgccctc

SEQ ID NO: 1542660 - DNA, 25 bp, Homo sapien
ggaagcccctgctatatatccagca

SEQ ID NO: 1542661 - DNA, 25 bp, Homo sapien
tgcgcgcgcgttgtattgcgcgcgg

SEQ ID NO: 1542662 - DNA, 25 bp, Homo sapien
cgcgcgttgtattgcgcgcggccat

SEQ ID NO: 1542663 - DNA, 25 bp, Homo sapien
gcgtgcgcgcgcgttgtattgcgcg

SEQ ID NO: 1542664 - DNA, 25 bp, Homo sapien
agctctggcggcgtgcgcgcgcgtt

SEQ ID NO: 1542665 - DNA, 25 bp, Homo sapien
aaacgacgtcgttgttgtcgctcca

SEQ ID NO: 1542666 - DNA, 25 bp, Homo sapien
gcgcattcgcgccactcaagctgga

SEQ ID NO: 1542667 - DNA, 25 bp, Homo sapien
gcacggcgtcctcaaggacgggaac

SEQ ID NO: 1542668 - DNA, 25 bp, Homo sapien
tcctcgcaggcgcaattggcgcgtg

SEQ ID NO: 1542669 - DNA, 25 bp, Homo sapien
gacttctgtcgccttccacaaccag

SEQ ID NO: 1542670 - DNA, 25 bp, Homo sapien
ctgtcgccttccacaaccagggctg

SEQ ID NO: 1542671 - DNA, 25 bp, Homo sapien
cttctgtcgccttccacaaccaggg

SEQ ID NO: 1542672 - DNA, 25 bp, Homo sapien
ttctgtcgccttccacaaccagggc

SEQ ID NO: 1542673 - DNA, 25 bp, Homo sapien
ttggctctcatctgctcaaacatcg

SEQ ID NO: 1542674 - DNA, 25 bp, Homo sapien
cgttggctctcatctgctcaaacat

SEQ ID NO: 1542675 - DNA, 25 bp, Homo sapien
tggctctcatctgctcaaacatcgc

SEQ ID NO: 1542676 - DNA, 25 bp, Homo sapien
cacgttggctctcatctgctcaaac

SEQ ID NO: 1542677 - DNA, 25 bp, Homo sapien
ttggcctgcgtctctacatagcgct

SEQ ID NO: 1542678 - DNA, 25 bp, Homo sapien
cgtctctacatagcgctccagggtg

SEQ ID NO: 1542679 - DNA, 25 bp, Homo sapien
tggcctgcgtctctacatagcgctc

SEQ ID NO: 1542680 - DNA, 25 bp, Homo sapien
ctgcgtctctacatagcgctccagg

SEQ ID NO: 1542681 - DNA, 25 bp, Homo sapien
ggtgaagtctgtgtgcggcaagttg

SEQ ID NO: 1542682 - DNA, 25 bp, Homo sapien
atgtgcctggtcgatcatgcacttg

SEQ ID NO: 1542683 - DNA, 25 bp, Homo sapien
gtgcctggtcgatcatgcacttgca

SEQ ID NO: 1542684 - DNA, 25 bp, Homo sapien
tgtgcggcaagttggtgagggcctt

SEQ ID NO: 1542685 - DNA, 25 bp, Homo sapien
ccccggccccagtgctggaaggata

SEQ ID NO: 1542686 - DNA, 25 bp, Homo sapien
cccccggccccagtgctggaaggat

SEQ ID NO: 1542687 - DNA, 25 bp, Homo sapien
cccggccccagtgctggaaggatac

SEQ ID NO: 1542688 - DNA, 25 bp, Homo sapien
gaggtacaaaatctgtcggattggc

SEQ ID NO: 1542689 - DNA, 25 bp, Homo sapien
tacaaaatctgtcggattggccgtt

SEQ ID NO: 1542690 - DNA, 25 bp, Homo sapien
caaaatctgtcggattggccgttct

SEQ ID NO: 1542691 - DNA, 25 bp, Homo sapien
ccccgaggtacaaaatctgtcggat

SEQ ID NO: 1542692 - DNA, 25 bp, Homo sapien
ctgctccgcgagaggatgataattc

SEQ ID NO: 1542693 - DNA, 25 bp, Homo sapien
gttacttttagcactcagctccaca

SEQ ID NO: 1542694 - DNA, 25 bp, Homo sapien
cagtgtgcaccgttgttacttttag

SEQ ID NO: 1542695 - DNA, 25 bp, Homo sapien
tacctgctccgcgagaggatgataa

SEQ ID NO: 1542696 - DNA, 25 bp, Homo sapien
gcaggaagtgacgacacacacactt

SEQ ID NO: 1542697 - DNA, 25 bp, Homo sapien
aggaagtgacgacacacacacttca

SEQ ID NO: 1542698 - DNA, 25 bp, Homo sapien
cacacttcaaaactgggggtttctg

SEQ ID NO: 1542699 - DNA, 25 bp, Homo sapien
caccagagggactgataccgggcag

SEQ ID NO: 1542700 - DNA, 25 bp, Homo sapien
agagaaggaagcggaacagagaagc

SEQ ID NO: 1542701 - DNA, 25 bp, Homo sapien
ttaagagaaggaagcggaacagaga

SEQ ID NO: 1542702 - DNA, 25 bp, Homo sapien
taagagaaggaagcggaacagagaa

SEQ ID NO: 1542703 - DNA, 25 bp, Homo sapien
aagagaaggaagcggaacagagaag

SEQ ID NO: 1542704 - DNA, 25 bp, Homo sapien
tgagacgggcgatcgtgaggtcagg

SEQ ID NO: 1542705 - DNA, 25 bp, Homo sapien
aggctgagacgggcgatcgtgaggt

SEQ ID NO: 1542706 - DNA, 25 bp, Homo sapien
aaacagaaattaggctggctgggcg

SEQ ID NO: 1542707 - DNA, 25 bp, Homo sapien
aacagaaattaggctggctgggcgt

SEQ ID NO: 1542708 - DNA, 25 bp, Homo sapien
cttcagtaatgttaacaagaatagc

SEQ ID NO: 1542709 - DNA, 25 bp, Homo sapien
cagtaatgttaacaagaatagcagc

SEQ ID NO: 1542710 - DNA, 25 bp, Homo sapien
gaatagcagctaccaggccatgtgt

SEQ ID NO: 1542711 - DNA, 25 bp, Homo sapien
ccgtgtgctgaacgcggtcccctgg

SEQ ID NO: 1542712 - DNA, 25 bp, Homo sapien
acaacgttcttatcagtaatgtgtg

SEQ ID NO: 1542713 - DNA, 25 bp, Homo sapien
gctgctgttgttacatagacgaggt

SEQ ID NO: 1542714 - DNA, 25 bp, Homo sapien
gctgttgttacatagacgaggtctc

SEQ ID NO: 1542715 - DNA, 25 bp, Homo sapien
tggtaatcttacctatcaacaacgt

SEQ ID NO: 1542716 - DNA, 25 bp, Homo sapien
ctgtgatgggaattgatgttcacaa

SEQ ID NO: 1542717 - DNA, 25 bp, Homo sapien
tgatgggaattgatgttcacaatgt

SEQ ID NO: 1542718 - DNA, 25 bp, Homo sapien
atgggaattgatgttcacaatgttt

SEQ ID NO: 1542719 - DNA, 25 bp, Homo sapien
gtgatgggaattgatgttcacaatg

SEQ ID NO: 1542720 - DNA, 25 bp, Homo sapien
ccagttataccttccaagaggtcca

SEQ ID NO: 1542721 - DNA, 25 bp, Homo sapien
agccagttataccttccaagaggtc

SEQ ID NO: 1542722 - DNA, 25 bp, Homo sapien
gccagttataccttccaagaggtcc

SEQ ID NO: 1542723 - DNA, 25 bp, Homo sapien
aagccagttataccttccaagaggt

SEQ ID NO: 1542724 - DNA, 25 bp, Homo sapien
gagacaaaaccggtgagcagctgtc

SEQ ID NO: 1542725 - DNA, 25 bp, Homo sapien
tcagagacaaaaccggtgagcagct

SEQ ID NO: 1542726 - DNA, 25 bp, Homo sapien
ggtcagagacaaaaccggtgagcag

SEQ ID NO: 1542727 - DNA, 25 bp, Homo sapien
agagacaaaaccggtgagcagctgt

SEQ ID NO: 1542728 - DNA, 25 bp, Homo sapien
gtgatacccacaacatggcagataa

SEQ ID NO: 1542729 - DNA, 25 bp, Homo sapien
cgacagatccccgagcatctcggcc

SEQ ID NO: 1542730 - DNA, 25 bp, Homo sapien
gacagatccccgagcatctcggcca

SEQ ID NO: 1542731 - DNA, 25 bp, Homo sapien
acagatccccgagcatctcggccag

SEQ ID NO: 1542732 - DNA, 25 bp, Homo sapien
cctcccagatgtgcaccaggaccca

SEQ ID NO: 1542733 - DNA, 25 bp, Homo sapien
ctcccagatgtgcaccaggacccag

SEQ ID NO: 1542734 - DNA, 25 bp, Homo sapien
catgaacgttacaagtcagggccct

SEQ ID NO: 1542735 - DNA, 25 bp, Homo sapien
aaatggcataggatctccctcaagg

SEQ ID NO: 1542736 - DNA, 25 bp, Homo sapien
tccatgctgacctgatgagacccag

SEQ ID NO: 1542737 - DNA, 25 bp, Homo sapien
ctctctctacggaggtaagggctca

SEQ ID NO: 1542738 - DNA, 25 bp, Homo sapien
gtctccttgcttccgcccctgccct

SEQ ID NO: 1542739 - DNA, 25 bp, Homo sapien
cagcaaggggcttcagtcagcctga

SEQ ID NO: 1542740 - DNA, 25 bp, Homo sapien
tctttcagcctcatcgtggggcttc

SEQ ID NO: 1542741 - DNA, 25 bp, Homo sapien
cccctgcccttccacgggtcattct

SEQ ID NO: 1542742 - DNA, 25 bp, Homo sapien
gtcggcactccagccgtatttgctc

SEQ ID NO: 1542743 - DNA, 25 bp, Homo sapien
tcttctccacaatgttcttgggttt

SEQ ID NO: 1542744 - DNA, 25 bp, Homo sapien
gactcgtcggcactccagccgtatt

SEQ ID NO: 1542745 - DNA, 25 bp, Homo sapien
atgaagatctgccccgactcgtcgg

SEQ ID NO: 1542746 - DNA, 25 bp, Homo sapien
cctgaatcacactcaagcgggtggg

SEQ ID NO: 1542747 - DNA, 25 bp, Homo sapien
ggattccaagtctgcacatgaggct

SEQ ID NO: 1542748 - DNA, 25 bp, Homo sapien
taaaagatggccaacgagacaggcc

SEQ ID NO: 1542749 - DNA, 25 bp, Homo sapien
gaagttccagggaagatcacccagc

SEQ ID NO: 1542750 - DNA, 25 bp, Homo sapien
gattgtaggaccaaacgaggtgctt

SEQ ID NO: 1542751 - DNA, 25 bp, Homo sapien
gaggtgcttagaacaaagtgccaag

SEQ ID NO: 1542752 - DNA, 25 bp, Homo sapien
taccatcacaaaggcagtttggtgc

SEQ ID NO: 1542753 - DNA, 25 bp, Homo sapien
aaaggaggccctttcctcactacag

SEQ ID NO: 1542754 - DNA, 25 bp, Homo sapien
gggaggaggccatgatgctggacac

SEQ ID NO: 1542755 - DNA, 25 bp, Homo sapien
ggaggaggccatgatgctggacaca

SEQ ID NO: 1542756 - DNA, 25 bp, Homo sapien
gaggaggccatgatgctggacacac

SEQ ID NO: 1542757 - DNA, 25 bp, Homo sapien
acacatctttattaaacacctgaag

SEQ ID NO: 1542758 - DNA, 25 bp, Homo sapien
gctcgcccaccagcctgtccgctcc

SEQ ID NO: 1542759 - DNA, 25 bp, Homo sapien
accagcctgtccgctcccgcctcag

SEQ ID NO: 1542760 - DNA, 25 bp, Homo sapien
tcgcccaccagcctgtccgctcccg

SEQ ID NO: 1542761 - DNA, 25 bp, Homo sapien
ccaccagcctgtccgctcccgcctc

SEQ ID NO: 1542762 - DNA, 25 bp, Homo sapien
ggccgtactggtacgactggttcgc

SEQ ID NO: 1542763 - DNA, 25 bp, Homo sapien
gccagcgccattgcccgcgctgctg

SEQ ID NO: 1542764 - DNA, 25 bp, Homo sapien
ggttcgccgcgtggtagtccaccat

SEQ ID NO: 1542765 - DNA, 25 bp, Homo sapien
tactggtacgactggttcgccgcgt

SEQ ID NO: 1542766 - DNA, 25 bp, Homo sapien
tgctgcttctcccaggccgggtcca

SEQ ID NO: 1542767 - DNA, 25 bp, Homo sapien
agcagcaggtcccggtcccagtcgt

SEQ ID NO: 1542768 - DNA, 25 bp, Homo sapien
gcaggtcccggtcccagtcgtcctc

SEQ ID NO: 1542769 - DNA, 25 bp, Homo sapien
tgcttctcccaggccgggtccagca

SEQ ID NO: 1542770 - DNA, 25 bp, Homo sapien
tcaattcctcttattattcctccta

SEQ ID NO: 1542771 - DNA, 25 bp, Homo sapien
ttattcctcctatctcttaatcttc

SEQ ID NO: 1542772 - DNA, 25 bp, Homo sapien
tcctcctatctcttaatcttctccc

SEQ ID NO: 1542773 - DNA, 25 bp, Homo sapien
attcctcctatctcttaatcttctc

SEQ ID NO: 1542774 - DNA, 25 bp, Homo sapien
ttcaggatcccttcacctacctccg

SEQ ID NO: 1542775 - DNA, 25 bp, Homo sapien
agacactgacacctcgctcggggat

SEQ ID NO: 1542776 - DNA, 25 bp, Homo sapien
tgctgtggggccctaccaagttgcc

SEQ ID NO: 1542777 - DNA, 25 bp, Homo sapien
ttcctggacactctcaacgcttcct

SEQ ID NO: 1542778 - DNA, 25 bp, Homo sapien
gcctccctgttggtcttagaagccg

SEQ ID NO: 1542779 - DNA, 25 bp, Homo sapien
tccaactggagggtgagtcagctcc

SEQ ID NO: 1542780 - DNA, 25 bp, Homo sapien
acagagtgctagcagctgagtggcc

SEQ ID NO: 1542781 - DNA, 25 bp, Homo sapien
tgagtgtaagtgaccctgcagtccc

SEQ ID NO: 1542782 - DNA, 25 bp, Homo sapien
ggtcaaaggcttgtacaattcccag

SEQ ID NO: 1542783 - DNA, 25 bp, Homo sapien
cactctgaaaaagggcgctgtctgg

SEQ ID NO: 1542784 - DNA, 25 bp, Homo sapien
tcagtgtagcaaaaacggaaagtgt

SEQ ID NO: 1542785 - DNA, 25 bp, Homo sapien
ggcagataacttgtgctacactcag

SEQ ID NO: 1542786 - DNA, 25 bp, Homo sapien
gaaaacctgaacgagcaagtgatac

SEQ ID NO: 1542787 - DNA, 25 bp, Homo sapien
caagtgatactagagcaaacagctg

SEQ ID NO: 1542788 - DNA, 25 bp, Homo sapien
taggatatactaaggcaagggaaga

SEQ ID NO: 1542789 - DNA, 25 bp, Homo sapien
tgtgagtgatgaaaacacggagttc

SEQ ID NO: 1542790 - DNA, 25 bp, Homo sapien
aaagtaacacgagtgcttttgttat

SEQ ID NO: 1542791 - DNA, 25 bp, Homo sapien
cacgagtgcttttgttattctgtaa

SEQ ID NO: 1542792 - DNA, 25 bp, Homo sapien
cttgtttaaaagtaacacgagtgct

SEQ ID NO: 1542793 - DNA, 25 bp, Homo sapien
ctaaatacataaatgaaggcaaagg

SEQ ID NO: 1542794 - DNA, 25 bp, Homo sapien
tctcttgtaacaggtcagtgcttca

SEQ ID NO: 1542795 - DNA, 25 bp, Homo sapien
tctccacggatgacagtatttgtat

SEQ ID NO: 1542796 - DNA, 25 bp, Homo sapien
gagctctcaaactacccagtgatag

SEQ ID NO: 1542797 - DNA, 25 bp, Homo sapien
tctgctcaagtagaagcttccgtct

SEQ ID NO: 1542798 - DNA, 25 bp, Homo sapien
cacacccggcgatttcactttctgg

SEQ ID NO: 1542799 - DNA, 25 bp, Homo sapien
tccttgatgcctgggataccgagta

SEQ ID NO: 1542800 - DNA, 25 bp, Homo sapien
gattcattgaaagttacactccttg

SEQ ID NO: 1542801 - DNA, 25 bp, Homo sapien
aaatgtaactcatagaccttcttga

SEQ ID NO: 1542802 - DNA, 25 bp, Homo sapien
tcttccagagtaaacgctgttcaaa

SEQ ID NO: 1542803 - DNA, 25 bp, Homo sapien
gctggtgttctagcatcccattcaa

SEQ ID NO: 1542804 - DNA, 25 bp, Homo sapien
tgttctgcagggtagtaactgccgc

SEQ ID NO: 1542805 - DNA, 25 bp, Homo sapien
tcaatcattgcaacaccatccacga

SEQ ID NO: 1542806 - DNA, 25 bp, Homo sapien
taactgccgcttccaactacttctg

SEQ ID NO: 1542807 - DNA, 25 bp, Homo sapien
tttcataggccagaactggaagatc

SEQ ID NO: 1542808 - DNA, 25 bp, Homo sapien
gactgcccttgaaccggcctggcaa

SEQ ID NO: 1542809 - DNA, 25 bp, Homo sapien
ttgaaccggcctggcaagttggctc

SEQ ID NO: 1542810 - DNA, 25 bp, Homo sapien
ctgtaagaagggtcgattcatctga

SEQ ID NO: 1542811 - DNA, 25 bp, Homo sapien
agaagggtcgattcatctgactgcc

SEQ ID NO: 1542812 - DNA, 25 bp, Homo sapien
tctgaatcatgactggttcgtagac

SEQ ID NO: 1542813 - DNA, 25 bp, Homo sapien
gaatcatgactggttcgtagacagc

SEQ ID NO: 1542814 - DNA, 25 bp, Homo sapien
ctgaatcatgactggttcgtagaca

SEQ ID NO: 1542815 - DNA, 25 bp, Homo sapien
tgaatcatgactggttcgtagacag

SEQ ID NO: 1542816 - DNA, 25 bp, Homo sapien
gctgattcatgttctgccgtcttgg

SEQ ID NO: 1542817 - DNA, 25 bp, Homo sapien
taatcaaatacacgtgccgactgcc

SEQ ID NO: 1542818 - DNA, 25 bp, Homo sapien
gccgactgccgaaatcatcacagag

SEQ ID NO: 1542819 - DNA, 25 bp, Homo sapien
gagataactgcagcttttgtttggc

SEQ ID NO: 1542820 - DNA, 25 bp, Homo sapien
cacagtgccataaaactccagattc

SEQ ID NO: 1542821 - DNA, 25 bp, Homo sapien
cagtgccataaaactccagattcaa

SEQ ID NO: 1542822 - DNA, 25 bp, Homo sapien
acagtgccataaaactccagattca

SEQ ID NO: 1542823 - DNA, 25 bp, Homo sapien
gacagactttcctatctgcagcagc

SEQ ID NO: 1542824 - DNA, 25 bp, Homo sapien
tgttacccaagtggtgactgctgga

SEQ ID NO: 1542825 - DNA, 25 bp, Homo sapien
caccatggaaacttacagctgtgtc

SEQ ID NO: 1542826 - DNA, 25 bp, Homo sapien
caggttcagctcagcataaatgcat

SEQ ID NO: 1542827 - DNA, 25 bp, Homo sapien
cttacttgcacgaactgagctatat

SEQ ID NO: 1542828 - DNA, 25 bp, Homo sapien
tctgagctgcctcctatcttggtgg

SEQ ID NO: 1542829 - DNA, 25 bp, Homo sapien
taggaaccggctgtgctaatatccc

SEQ ID NO: 1542830 - DNA, 25 bp, Homo sapien
gacagcctgtggtactgcgaatccc

SEQ ID NO: 1542831 - DNA, 25 bp, Homo sapien
aagtgggagtgaagcaatacatgcc

SEQ ID NO: 1542832 - DNA, 25 bp, Homo sapien
catcggttgtcactccgttgtaaca

SEQ ID NO: 1542833 - DNA, 25 bp, Homo sapien
gcttcaggcctgcaccctgttaggg

SEQ ID NO: 1542834 - DNA, 25 bp, Homo sapien
gaagggtgtcaacagcctgatcagg

SEQ ID NO: 1542835 - DNA, 25 bp, Homo sapien
ctgatcaggaaagcgcaaaccgggt

SEQ ID NO: 1542836 - DNA, 25 bp, Homo sapien
taacttaccacgctgcctttgggcc

SEQ ID NO: 1542837 - DNA, 25 bp, Homo sapien
gcggtgacagcttcgaacaatgaca

SEQ ID NO: 1542838 - DNA, 25 bp, Homo sapien
ggcagggtcaccaatactgtttgca

SEQ ID NO: 1542839 - DNA, 25 bp, Homo sapien
tgagccatcgtgtcaggtcaaaaca

SEQ ID NO: 1542840 - DNA, 25 bp, Homo sapien
tgcgtatcctctatctttctctaga

SEQ ID NO: 1542841 - DNA, 25 bp, Homo sapien
gcacagatgacgacaagagccaacg

SEQ ID NO: 1542842 - DNA, 25 bp, Homo sapien
ccttgaaaggagagcgcgattgcga

SEQ ID NO: 1542843 - DNA, 25 bp, Homo sapien
tagggagcctcaatccaaaccagga

SEQ ID NO: 1542844 - DNA, 25 bp, Homo sapien
cacagctcggtcagagagggacact

SEQ ID NO: 1542845 - DNA, 25 bp, Homo sapien
cacaaaggtgcagcccaactgccat

SEQ ID NO: 1542846 - DNA, 25 bp, Homo sapien
aatcggttcccggactgcacaggca

SEQ ID NO: 1542847 - DNA, 25 bp, Homo sapien
tatgatgggctatcaccggtgactc

SEQ ID NO: 1542848 - DNA, 25 bp, Homo sapien
gcaacgcccgataaagctgctctgg

SEQ ID NO: 1542849 - DNA, 25 bp, Homo sapien
caagcactaggatggtgtagggtac

SEQ ID NO: 1542850 - DNA, 25 bp, Homo sapien
caatttgggtgggttggccaagcac

SEQ ID NO: 1542851 - DNA, 25 bp, Homo sapien
ggaggtgactccaaccagaaatttc

SEQ ID NO: 1542852 - DNA, 25 bp, Homo sapien
tttgccagcaggcaactaattcgtg

SEQ ID NO: 1542853 - DNA, 25 bp, Homo sapien
gaattccccagtagatcttgccagg

SEQ ID NO: 1542854 - DNA, 25 bp, Homo sapien
tatttaggcaagtgctacacacccg

SEQ ID NO: 1542855 - DNA, 25 bp, Homo sapien
ttagtctggacaaatccgcccaggg

SEQ ID NO: 1542856 - DNA, 25 bp, Homo sapien
tacacacccgtcctgagctagtggg

SEQ ID NO: 1542857 - DNA, 25 bp, Homo sapien
tctccaattcgtggccccaagccat

SEQ ID NO: 1542858 - DNA, 25 bp, Homo sapien
caccaggcccaaccacgttatggtt

SEQ ID NO: 1542859 - DNA, 25 bp, Homo sapien
cctaattagtaatgacatcgaacac

SEQ ID NO: 1542860 - DNA, 25 bp, Homo sapien
cctaattagtaatgacattgaacac

SEQ ID NO: 1542861 - DNA, 25 bp, Homo sapien
acaggcagagatgctcgccctggca

SEQ ID NO: 1542862 - DNA, 25 bp, Homo sapien
aggcagagatgctcgccctggcaag

SEQ ID NO: 1542863 - DNA, 25 bp, Homo sapien
gcctgtgagactgcacacctgagca

SEQ ID NO: 1542864 - DNA, 25 bp, Homo sapien
tttttgaagatccactgccaccaga

SEQ ID NO: 1542865 - DNA, 25 bp, Homo sapien
cagttgctttgagggggagggcgcc

SEQ ID NO: 1542866 - DNA, 25 bp, Homo sapien
ttggctctgaaataccgtgtagggt

SEQ ID NO: 1542867 - DNA, 25 bp, Homo sapien
ctccgctggggcatcagttgctttg

SEQ ID NO: 1542868 - DNA, 25 bp, Homo sapien
ccgtgtagggtttgtcgctccgctg

SEQ ID NO: 1542869 - DNA, 25 bp, Homo sapien
tgtgaacaaacctcgccgcttgggt

SEQ ID NO: 1542870 - DNA, 25 bp, Homo sapien
gaccacccactggtatgcagggaaa

SEQ ID NO: 1542871 - DNA, 25 bp, Homo sapien
tctggcttgggcatcacacaggtgc

SEQ ID NO: 1542872 - DNA, 25 bp, Homo sapien
tgggtttgaatacctgccccttggc

SEQ ID NO: 1542873 - DNA, 25 bp, Homo sapien
actgctgggcagcaaagtagccaag

SEQ ID NO: 1542874 - DNA, 25 bp, Homo sapien
gctgggcagcaaagtagccaagaca

SEQ ID NO: 1542875 - DNA, 25 bp, Homo sapien
tgctgggcagcaaagtagccaagac

SEQ ID NO: 1542876 - DNA, 25 bp, Homo sapien
gcactgctgggcagcaaagtagcca

SEQ ID NO: 1542877 - DNA, 25 bp, Homo sapien
ttacagccccagagcactgccagcc

SEQ ID NO: 1542878 - DNA, 25 bp, Homo sapien
tacagccccagagcactgccagcct

SEQ ID NO: 1542879 - DNA, 25 bp, Homo sapien
gggttgggaagtacggcgcctgcac

SEQ ID NO: 1542880 - DNA, 25 bp, Homo sapien
ggggttgggaagtacggcgcctgca

SEQ ID NO: 1542881 - DNA, 25 bp, Homo sapien
gcccaggcgccttcagggaaaccag

SEQ ID NO: 1542882 - DNA, 25 bp, Homo sapien
taacagaccaacgatgctgacaggg

SEQ ID NO: 1542883 - DNA, 25 bp, Homo sapien
gcatgctcatagacatcagggccac

SEQ ID NO: 1542884 - DNA, 25 bp, Homo sapien
ggcatgggtacacccaagcacaggg

SEQ ID NO: 1542885 - DNA, 25 bp, Homo sapien
ggatggagggtactaaacaagaagc

SEQ ID NO: 1542886 - DNA, 25 bp, Homo sapien
tctgatgatcaactggaagggatgg

SEQ ID NO: 1542887 - DNA, 25 bp, Homo sapien
actaaacaagaagccgaagtccctg

SEQ ID NO: 1542888 - DNA, 25 bp, Homo sapien
gtcaggcagccgcatctaaggagaa

SEQ ID NO: 1542889 - DNA, 25 bp, Homo sapien
tacgggtgtatgccaacatgcccat

SEQ ID NO: 1542890 - DNA, 25 bp, Homo sapien
cacccagccctatccttcctatttt

SEQ ID NO: 1542891 - DNA, 25 bp, Homo sapien
cgggtgtatgccaacatgcccatct

SEQ ID NO: 1542892 - DNA, 25 bp, Homo sapien
acgggtgtatgccaacatgcccatc

SEQ ID NO: 1542893 - DNA, 25 bp, Homo sapien
gacctcaggagaaccgcagctgcca

SEQ ID NO: 1542894 - DNA, 25 bp, Homo sapien
agctgccacggagcactcgccgaca

SEQ ID NO: 1542895 - DNA, 25 bp, Homo sapien
agctctgacctcaggagaaccgcag

SEQ ID NO: 1542896 - DNA, 25 bp, Homo sapien
ggagcactcgccgacacacaccgta

SEQ ID NO: 1542897 - DNA, 25 bp, Homo sapien
gcttgagcccgtctcggaagtcctc

SEQ ID NO: 1542898 - DNA, 25 bp, Homo sapien
cgtctcggaagtcctcatcaatgtt

SEQ ID NO: 1542899 - DNA, 25 bp, Homo sapien
gcccgtctcggaagtcctcatcaat

SEQ ID NO: 1542900 - DNA, 25 bp, Homo sapien
gagcccgtctcggaagtcctcatca

SEQ ID NO: 1542901 - DNA, 25 bp, Homo sapien
gacgcctttgctggcaataaagtcc

SEQ ID NO: 1542902 - DNA, 25 bp, Homo sapien
ttctgccccgatggagaccagcttg

SEQ ID NO: 1542903 - DNA, 25 bp, Homo sapien
aagtccagcgctttgttcacattgt

SEQ ID NO: 1542904 - DNA, 25 bp, Homo sapien
aataaagtccagcgctttgttcaca

SEQ ID NO: 1542905 - DNA, 25 bp, Homo sapien
cagggtcatctttgcgttgccgtcc

SEQ ID NO: 1542906 - DNA, 25 bp, Homo sapien
agggtcatctttgcgttgccgtcca

SEQ ID NO: 1542907 - DNA, 25 bp, Homo sapien
ggtcatctttgcgttgccgtccaca

SEQ ID NO: 1542908 - DNA, 25 bp, Homo sapien
catctttgcgttgccgtccacaatc

SEQ ID NO: 1542909 - DNA, 25 bp, Homo sapien
tgacgttcttatacggggctgtctt

SEQ ID NO: 1542910 - DNA, 25 bp, Homo sapien
ctggcaccagagaaggagcccttcc

SEQ ID NO: 1542911 - DNA, 25 bp, Homo sapien
tctgcacattgacgttcttatacgg

SEQ ID NO: 1542912 - DNA, 25 bp, Homo sapien
ggcaccagagaaggagcccttcctt

SEQ ID NO: 1542913 - DNA, 25 bp, Homo sapien
ttcctcagagaggaccaggtgacct

SEQ ID NO: 1542914 - DNA, 25 bp, Homo sapien
gagaggaccaggtgaccttcccatg

SEQ ID NO: 1542915 - DNA, 25 bp, Homo sapien
gaccacgacaaaaacacagcaaaca

SEQ ID NO: 1542916 - DNA, 25 bp, Homo sapien
atctcacagaccacgacaaaaacac

SEQ ID NO: 1542917 - DNA, 25 bp, Homo sapien
attgaaggcaagaccatccttccag

SEQ ID NO: 1542918 - DNA, 25 bp, Homo sapien
ggtggatcagggcattgaaggcaag

SEQ ID NO: 1542919 - DNA, 25 bp, Homo sapien
agctctggtctgtgccggtggatca

SEQ ID NO: 1542920 - DNA, 25 bp, Homo sapien
gtcatactcaatcagctctggtctg

SEQ ID NO: 1542921 - DNA, 25 bp, Homo sapien
tttctcagccacttcgaaggcattg

SEQ ID NO: 1542922 - DNA, 25 bp, Homo sapien
cagccacttcgaaggcattgttcag

SEQ ID NO: 1542923 - DNA, 25 bp, Homo sapien
gatgtcgaggtatttctcagccact

SEQ ID NO: 1542924 - DNA, 25 bp, Homo sapien
acttcgaaggcattgttcaggttgg

SEQ ID NO: 1542925 - DNA, 25 bp, Homo sapien
cttctgcgctcctgaaaaggcatgg

SEQ ID NO: 1542926 - DNA, 25 bp, Homo sapien
gcgctcctgaaaaggcatggtagaa

SEQ ID NO: 1542927 - DNA, 25 bp, Homo sapien
tctgcgctcctgaaaaggcatggta

SEQ ID NO: 1542928 - DNA, 25 bp, Homo sapien
tgcgctcctgaaaaggcatggtaga

SEQ ID NO: 1542929 - DNA, 25 bp, Homo sapien
agcccccgagaaagcgtggtagaag

SEQ ID NO: 1542930 - DNA, 25 bp, Homo sapien
tctgagcccccgagaaagcgtggta

SEQ ID NO: 1542931 - DNA, 25 bp, Homo sapien
tgagcccccgagaaagcgtggtaga

SEQ ID NO: 1542932 - DNA, 25 bp, Homo sapien
ttctgagcccccgagaaagcgtggt

SEQ ID NO: 1542933 - DNA, 25 bp, Homo sapien
tcaaagcaggcatcgggaatgctgc

SEQ ID NO: 1542934 - DNA, 25 bp, Homo sapien
ttcagagaccacaaggcaagcgggg

SEQ ID NO: 1542935 - DNA, 25 bp, Homo sapien
cctctgcgtgaacgctgagggcccg

SEQ ID NO: 1542936 - DNA, 25 bp, Homo sapien
tgcttgggcctctgcgtgaacgctg

SEQ ID NO: 1542937 - DNA, 25 bp, Homo sapien
gcttctcgtagtcctccatcaggtg

SEQ ID NO: 1542938 - DNA, 25 bp, Homo sapien
tggttgacagccagcaccttacaga

SEQ ID NO: 1542939 - DNA, 25 bp, Homo sapien
gctcgttctcttggttgacagccag

SEQ ID NO: 1542940 - DNA, 25 bp, Homo sapien
acagatccggttggcggcagtttca

SEQ ID NO: 1542941 - DNA, 25 bp, Homo sapien
agccaggggatggtgcgccggatcc

SEQ ID NO: 1542942 - DNA, 25 bp, Homo sapien
tggtgcgccggatccactccaggag

SEQ ID NO: 1542943 - DNA, 25 bp, Homo sapien
ggcacacggtcctccagccagggga

SEQ ID NO: 1542944 - DNA, 25 bp, Homo sapien
tggatagtcttttggggcacacggt

SEQ ID NO: 1542945 - DNA, 25 bp, Homo sapien
gaaggcgggccggttgctgaggcgc

SEQ ID NO: 1542946 - DNA, 25 bp, Homo sapien
cttgccctcggagggcatgaaggcg

SEQ ID NO: 1542947 - DNA, 25 bp, Homo sapien
gccggttgctgaggcgcagcttggt

SEQ ID NO: 1542948 - DNA, 25 bp, Homo sapien
ggcgggccggttgctgaggcgcagc

SEQ ID NO: 1542949 - DNA, 25 bp, Homo sapien
agctgctcccatgtgaatcctggtg

SEQ ID NO: 1542950 - DNA, 25 bp, Homo sapien
gctgctcccatgtgaatcctggtgc

SEQ ID NO: 1542951 - DNA, 25 bp, Homo sapien
ctcccatgtgaatcctggtgctcac

SEQ ID NO: 1542952 - DNA, 25 bp, Homo sapien
tgctcccatgtgaatcctggtgctc

SEQ ID NO: 1542953 - DNA, 25 bp, Homo sapien
agccactcctcgtagcccttctcag

SEQ ID NO: 1542954 - DNA, 25 bp, Homo sapien
ctgcggatctcattcagcagccact

SEQ ID NO: 1542955 - DNA, 25 bp, Homo sapien
tggatggaggccttctgccggaact

SEQ ID NO: 1542956 - DNA, 25 bp, Homo sapien
ggtcgagccgctccagcctgcggat

SEQ ID NO: 1542957 - DNA, 25 bp, Homo sapien
gtgctaacacgctctcctcacatgg

SEQ ID NO: 1542958 - DNA, 25 bp, Homo sapien
caccaaccacacaagatggcatcgg

SEQ ID NO: 1542959 - DNA, 25 bp, Homo sapien
gaatccgggaatggatggaggccac

SEQ ID NO: 1542960 - DNA, 25 bp, Homo sapien
gaacgaatgagtgaatccgggaatg

SEQ ID NO: 1542961 - DNA, 25 bp, Homo sapien
tgtccgatagtgtggccgtctcgta

SEQ ID NO: 1542962 - DNA, 25 bp, Homo sapien
tcgtagtcccggtgcttcagcatgg

SEQ ID NO: 1542963 - DNA, 25 bp, Homo sapien
ccgtctcgtagtcccggtgcttcag

SEQ ID NO: 1542964 - DNA, 25 bp, Homo sapien
gctttgatgtccgatagtgtggccg

SEQ ID NO: 1542965 - DNA, 25 bp, Homo sapien
tgagagccaggtgatgatagtgtcc

SEQ ID NO: 1542966 - DNA, 25 bp, Homo sapien
agccaggtgatgatagtgtcctgag

SEQ ID NO: 1542967 - DNA, 25 bp, Homo sapien
tggtgagagccaggtgatgatagtg

SEQ ID NO: 1542968 - DNA, 25 bp, Homo sapien
gagagccaggtgatgatagtgtcct

SEQ ID NO: 1542969 - DNA, 25 bp, Homo sapien
agcaatgagactcggcaagggcaag

SEQ ID NO: 1542970 - DNA, 25 bp, Homo sapien
agagcaatgagactcggcaagggca

SEQ ID NO: 1542971 - DNA, 25 bp, Homo sapien
agagagcaatgagactcggcaaggg

SEQ ID NO: 1542972 - DNA, 25 bp, Homo sapien
actcggcaagggcaagtggctagat

SEQ ID NO: 1542973 - DNA, 25 bp, Homo sapien
ggcttccctgcgactatgtgtcaga

SEQ ID NO: 1542974 - DNA, 25 bp, Homo sapien
gcgactatgtgtcagagagccgagg

SEQ ID NO: 1542975 - DNA, 25 bp, Homo sapien
tccctgcgactatgtgtcagagagc

SEQ ID NO: 1542976 - DNA, 25 bp, Homo sapien
tgcgactatgtgtcagagagccgag

SEQ ID NO: 1542977 - DNA, 25 bp, Homo sapien
caatctcctcgatggtatggacgat

SEQ ID NO: 1542978 - DNA, 25 bp, Homo sapien
tcctcgatggtatggacgatgaaca

SEQ ID NO: 1542979 - DNA, 25 bp, Homo sapien
tggtatggacgatgaacatgtcctg

SEQ ID NO: 1542980 - DNA, 25 bp, Homo sapien
ctcaatctcctcgatggtatggacg

SEQ ID NO: 1542981 - DNA, 25 bp, Homo sapien
agaggctcttgggaagatggggggc

SEQ ID NO: 1542982 - DNA, 25 bp, Homo sapien
aggctcttgggaagatggggggccg

SEQ ID NO: 1542983 - DNA, 25 bp, Homo sapien
gaggctcttgggaagatggggggcc

SEQ ID NO: 1542984 - DNA, 25 bp, Homo sapien
ggaggagctggagtgagggggcggc

SEQ ID NO: 1542985 - DNA, 25 bp, Homo sapien
ggagctggagtgagggggcggccca

SEQ ID NO: 1542986 - DNA, 25 bp, Homo sapien
gagctggagtgagggggcggcccag

SEQ ID NO: 1542987 - DNA, 25 bp, Homo sapien
ctaggggaggagctggagtgagggg

SEQ ID NO: 1542988 - DNA, 25 bp, Homo sapien
tgtggttgctctcagcgatcctctg

SEQ ID NO: 1542989 - DNA, 25 bp, Homo sapien
cgcgctccctatcggcgtccggcag

SEQ ID NO: 1542990 - DNA, 25 bp, Homo sapien
tgcccgacagcttgatgtggttgct

SEQ ID NO: 1542991 - DNA, 25 bp, Homo sapien
cccacttggagttgatgatttgcgg

SEQ ID NO: 1542992 - DNA, 25 bp, Homo sapien
gagggcatggtcccgttttggcacc

SEQ ID NO: 1542993 - DNA, 25 bp, Homo sapien
caggtgctcgttggactgctgcttg

SEQ ID NO: 1542994 - DNA, 25 bp, Homo sapien
ggcctggctggcgaactggcggcgc

SEQ ID NO: 1542995 - DNA, 25 bp, Homo sapien
tggtcccgttttggcaccagctgct

SEQ ID NO: 1542996 - DNA, 25 bp, Homo sapien
ctgcgttcatactgcttcaggtggc

SEQ ID NO: 1542997 - DNA, 25 bp, Homo sapien
agtccacgatgctgcgttcatactg

SEQ ID NO: 1542998 - DNA, 25 bp, Homo sapien
ccacgatgctgcgttcatactgctt

SEQ ID NO: 1542999 - DNA, 25 bp, Homo sapien
gatgctgcgttcatactgcttcagg

SEQ ID NO: 1543000 - DNA, 25 bp, Homo sapien
tggcccgaaccatttccagtgagga

SEQ ID NO: 1543001 - DNA, 25 bp, Homo sapien
aagtgctggtctcttcaataatttt

SEQ ID NO: 1543002 - DNA, 25 bp, Homo sapien
agtgctggtctcttcaataattttt

SEQ ID NO: 1543003 - DNA, 25 bp, Homo sapien
cttgtcgaagtggttgaaggacgcc

SEQ ID NO: 1543004 - DNA, 25 bp, Homo sapien
ttgtcgaagtggttgaaggacgccc

SEQ ID NO: 1543005 - DNA, 25 bp, Homo sapien
gggagaggccgaggaggtggcaggc

SEQ ID NO: 1543006 - DNA, 25 bp, Homo sapien
gagaggccgaggaggtggcaggctg

SEQ ID NO: 1543007 - DNA, 25 bp, Homo sapien
gccgaggaggtggcaggctgctcac

SEQ ID NO: 1543008 - DNA, 25 bp, Homo sapien
aggccgaggaggtggcaggctgctc

SEQ ID NO: 1543009 - DNA, 25 bp, Homo sapien
gagggatcggggtcacatgcagagg

SEQ ID NO: 1543010 - DNA, 25 bp, Homo sapien
gcggcgtggagaccaggatgaggga

SEQ ID NO: 1543011 - DNA, 25 bp, Homo sapien
cgtggagaccaggatgagggatcgg

SEQ ID NO: 1543012 - DNA, 25 bp, Homo sapien
cacagagttagaggcaacatggaca

SEQ ID NO: 1543013 - DNA, 25 bp, Homo sapien
ccttgaactcctcgggccccagcgc

SEQ ID NO: 1543014 - DNA, 25 bp, Homo sapien
cggtcgttctccacgtcgtagccca

SEQ ID NO: 1543015 - DNA, 25 bp, Homo sapien
gtcgttctccacgtcgtagcccagg

SEQ ID NO: 1543016 - DNA, 25 bp, Homo sapien
tgccggtcgttctccacgtcgtagc

SEQ ID NO: 1543017 - DNA, 25 bp, Homo sapien
gccgggcccagagtaggcaagaggg

SEQ ID NO: 1543018 - DNA, 25 bp, Homo sapien
gaggggccgccccatgtgcacagca

SEQ ID NO: 1543019 - DNA, 25 bp, Homo sapien
ctgctccgaggacgcaggcatagca

SEQ ID NO: 1543020 - DNA, 25 bp, Homo sapien
agacaggacagtggcggggagcagg

SEQ ID NO: 1543021 - DNA, 25 bp, Homo sapien
ccctgaagtcatcggagtccatgct

SEQ ID NO: 1543022 - DNA, 25 bp, Homo sapien
ctgtatcctgtggagataagcagag

SEQ ID NO: 1543023 - DNA, 25 bp, Homo sapien
caggctgtatcctgtggagataagc

SEQ ID NO: 1543024 - DNA, 25 bp, Homo sapien
gtcatcggagtccatgctgcctgtc

SEQ ID NO: 1543025 - DNA, 25 bp, Homo sapien
ggtggctggggagacagagctgcat

SEQ ID NO: 1543026 - DNA, 25 bp, Homo sapien
tggctggggagacagagctgcatac

SEQ ID NO: 1543027 - DNA, 25 bp, Homo sapien
cgggtggctggggagacagagctgc

SEQ ID NO: 1543028 - DNA, 25 bp, Homo sapien
gtggctggggagacagagctgcata

SEQ ID NO: 1543029 - DNA, 25 bp, Homo sapien
tcagcccaggctcacgagtaagctc

SEQ ID NO: 1543030 - DNA, 25 bp, Homo sapien
gtgtccccgaggacgaggaagctct

SEQ ID NO: 1543031 - DNA, 25 bp, Homo sapien
aaacagccgagagagtagggcccaa

SEQ ID NO: 1543032 - DNA, 25 bp, Homo sapien
tagggcccaacccacgtgtgcgtgc

SEQ ID NO: 1543033 - DNA, 25 bp, Homo sapien
cccctgctaagaccttgaaggaagc

SEQ ID NO: 1543034 - DNA, 25 bp, Homo sapien
agcgatgacctggtcagccgtgtcc

SEQ ID NO: 1543035 - DNA, 25 bp, Homo sapien
gctaagaccttgaaggaagcgatga

SEQ ID NO: 1543036 - DNA, 25 bp, Homo sapien
aaggaagcgatgacctggtcagccg

SEQ ID NO: 1543037 - DNA, 25 bp, Homo sapien
ccatgcgggcgatgcagtactcggc

SEQ ID NO: 1543038 - DNA, 25 bp, Homo sapien
ctggtatggcgccatgcgggcgatg

SEQ ID NO: 1543039 - DNA, 25 bp, Homo sapien
aaggacttgtagtcgagggcaccgg

SEQ ID NO: 1543040 - DNA, 25 bp, Homo sapien
gaaggacttgtagtcgagggcaccg

SEQ ID NO: 1543041 - DNA, 25 bp, Homo sapien
gaccggttgtgctgtgggaatccac

SEQ ID NO: 1543042 - DNA, 25 bp, Homo sapien
tatttaccagaccagaagcgctggc

SEQ ID NO: 1543043 - DNA, 25 bp, Homo sapien
cccaccccggaggactgcagagagt

SEQ ID NO: 1543044 - DNA, 25 bp, Homo sapien
gaagggacctcagagcaaaggaaga

SEQ ID NO: 1543045 - DNA, 25 bp, Homo sapien
aatctgagacacgtgaggccagaca

SEQ ID NO: 1543046 - DNA, 25 bp, Homo sapien
tgagacacgtgaggccagacaaagc

SEQ ID NO: 1543047 - DNA, 25 bp, Homo sapien
aaatctgagacacgtgaggccagac

SEQ ID NO: 1543048 - DNA, 25 bp, Homo sapien
tctgagacacgtgaggccagacaaa

SEQ ID NO: 1543049 - DNA, 25 bp, Homo sapien
gcccgggcagagaatcggctatgtc

SEQ ID NO: 1543050 - DNA, 25 bp, Homo sapien
cagagggtggtttatccagaaacca

SEQ ID NO: 1543051 - DNA, 25 bp, Homo sapien
agcaaaaccatcaaccaccaggcag

SEQ ID NO: 1543052 - DNA, 25 bp, Homo sapien
cggcagagatatgttgctaggtgaa

SEQ ID NO: 1543053 - DNA, 25 bp, Homo sapien
tgcaatgccaaggtgggttccctgt

SEQ ID NO: 1543054 - DNA, 25 bp, Homo sapien
gagaaagccccacaggatttaagga

SEQ ID NO: 1543055 - DNA, 25 bp, Homo sapien
tagccgtctgcgtgtggacttcgag

SEQ ID NO: 1543056 - DNA, 25 bp, Homo sapien
ggagtaacagtacccacacatcgag

SEQ ID NO: 1543057 - DNA, 25 bp, Homo sapien
actacctggtggtgccgagcaccgc

SEQ ID NO: 1543058 - DNA, 25 bp, Homo sapien
ctggtccgtggtcatgccgccccgt

SEQ ID NO: 1543059 - DNA, 25 bp, Homo sapien
tgcctgcgtccaggccactacctgg

SEQ ID NO: 1543060 - DNA, 25 bp, Homo sapien
ccggcgacgaggctgacttcactct

SEQ ID NO: 1543061 - DNA, 25 bp, Homo sapien
ctgggagtcatttccgggatcttgg

SEQ ID NO: 1543062 - DNA, 25 bp, Homo sapien
ggagctgcgggacttcctcctccat

SEQ ID NO: 1543063 - DNA, 25 bp, Homo sapien
gacaccgtgcagatctgctcgctga

SEQ ID NO: 1543064 - DNA, 25 bp, Homo sapien
gggccaccgtgcaggatggagctgc

SEQ ID NO: 1543065 - DNA, 25 bp, Homo sapien
gttcctgggcttcaccaaggtgcgg

SEQ ID NO: 1543066 - DNA, 25 bp, Homo sapien
aagggacacgcgtattccatcacgg

SEQ ID NO: 1543067 - DNA, 25 bp, Homo sapien
tggtctctgagctgcgtgccattca

SEQ ID NO: 1543068 - DNA, 25 bp, Homo sapien
caggattgattctcgtgggcttagc

SEQ ID NO: 1543069 - DNA, 25 bp, Homo sapien
cctgtccctgtttgtggaaaacata

SEQ ID NO: 1543070 - DNA, 25 bp, Homo sapien
ccttacagtgtgcacgtgggaacct

SEQ ID NO: 1543071 - DNA, 25 bp, Homo sapien
taatgtcccgattttcaccgtgcct

SEQ ID NO: 1543072 - DNA, 25 bp, Homo sapien
gattagatggtagcgattcagccgt

SEQ ID NO: 1543073 - DNA, 25 bp, Homo sapien
cgcagcctctgctgagcgctcctca

SEQ ID NO: 1543074 - DNA, 25 bp, Homo sapien
gcgcagcctctgctgagcgctcctc

SEQ ID NO: 1543075 - DNA, 25 bp, Homo sapien
catcccaccccaatcagcccattca

SEQ ID NO: 1543076 - DNA, 25 bp, Homo sapien
ccaaggacatcccaccccaatcagc

SEQ ID NO: 1543077 - DNA, 25 bp, Homo sapien
gctgggaccgggttgggcagccgtg

SEQ ID NO: 1543078 - DNA, 25 bp, Homo sapien
cgtggtggtggggcctgctggggac

SEQ ID NO: 1543079 - DNA, 25 bp, Homo sapien
gcagccgtggtggtggggcctgctg

SEQ ID NO: 1543080 - DNA, 25 bp, Homo sapien
ctgggaccgggttgggcagccgtgg

SEQ ID NO: 1543081 - DNA, 25 bp, Homo sapien
cttgctcctttgaaagaggagcccc

SEQ ID NO: 1543082 - DNA, 25 bp, Homo sapien
ctgcaagagtggggtgcaggggcca

SEQ ID NO: 1543083 - DNA, 25 bp, Homo sapien
agcaccgtgccagggcggatgccct

SEQ ID NO: 1543084 - DNA, 25 bp, Homo sapien
gcattgggaggaaccaagccgcgaa

SEQ ID NO: 1543085 - DNA, 25 bp, Homo sapien
tgggaggaaccaagccgcgaattct

SEQ ID NO: 1543086 - DNA, 25 bp, Homo sapien
aagccgcgaattctcagcaccgtgc

SEQ ID NO: 1543087 - DNA, 25 bp, Homo sapien
ctcagaatccagaaggcccgaagtt

SEQ ID NO: 1543088 - DNA, 25 bp, Homo sapien
tcagacatggaagtcataggactat

SEQ ID NO: 1543089 - DNA, 25 bp, Homo sapien
cagggtgtctccaggacttggagta

SEQ ID NO: 1543090 - DNA, 25 bp, Homo sapien
aggatggcttggcaaggactcccag

SEQ ID NO: 1543091 - DNA, 25 bp, Homo sapien
ccccgcacagcaggtttacatggaa

SEQ ID NO: 1543092 - DNA, 25 bp, Homo sapien
gctgcccgcgctggaaaggaacgcc

SEQ ID NO: 1543093 - DNA, 25 bp, Homo sapien
tgttgaagaccacctccgacgtgtc

SEQ ID NO: 1543094 - DNA, 25 bp, Homo sapien
cgtctgacgcgatgatgagcacctc

SEQ ID NO: 1543095 - DNA, 25 bp, Homo sapien
acggagtccagctgcacgtccccgc

SEQ ID NO: 1543096 - DNA, 25 bp, Homo sapien
cggagtccagctgcacgtccccgcc

SEQ ID NO: 1543097 - DNA, 25 bp, Homo sapien
gagtccagctgcacgtccccgccca

SEQ ID NO: 1543098 - DNA, 25 bp, Homo sapien
tcacggagtccagctgcacgtcccc

SEQ ID NO: 1543099 - DNA, 25 bp, Homo sapien
gggctaacgctttatttgccagcca

SEQ ID NO: 1543100 - DNA, 25 bp, Homo sapien
ctaacgctttatttgccagccaagg

SEQ ID NO: 1543101 - DNA, 25 bp, Homo sapien
cagccaaggccccgggcccgcctgg

SEQ ID NO: 1543102 - DNA, 25 bp, Homo sapien
ccagccaaggccccgggcccgcctg

SEQ ID NO: 1543103 - DNA, 25 bp, Homo sapien
cggtgcgtccagagtggttcgttcc

SEQ ID NO: 1543104 - DNA, 25 bp, Homo sapien
tcagcgataggcagtggtctcaccg

SEQ ID NO: 1543105 - DNA, 25 bp, Homo sapien
gtctcaccgctcagcgataggcagt

SEQ ID NO: 1543106 - DNA, 25 bp, Homo sapien
ttaaggcggtgcgtccagagtggtt

SEQ ID NO: 1543107 - DNA, 25 bp, Homo sapien
cggccatgctagtcacttttaactg

SEQ ID NO: 1543108 - DNA, 25 bp, Homo sapien
catgctagtcacttttaactggcag

SEQ ID NO: 1543109 - DNA, 25 bp, Homo sapien
cagcggccatgctagtcacttttaa

SEQ ID NO: 1543110 - DNA, 25 bp, Homo sapien
ccagcggccatgctagtcactttta

SEQ ID NO: 1543111 - DNA, 25 bp, Homo sapien
aattcgggactcctcgctctggctc

SEQ ID NO: 1543112 - DNA, 25 bp, Homo sapien
cattttcaaaaacaccgagagagtg

SEQ ID NO: 1543113 - DNA, 25 bp, Homo sapien
tgtggctcttcaagcacaatttcag

SEQ ID NO: 1543114 - DNA, 25 bp, Homo sapien
tccagccagcgtatgtagttgtccg

SEQ ID NO: 1543115 - DNA, 25 bp, Homo sapien
gctaggtttgtagaggcttacttaa

SEQ ID NO: 1543116 - DNA, 25 bp, Homo sapien
ttaatggaaacgctggaaatctgca

SEQ ID NO: 1543117 - DNA, 25 bp, Homo sapien
gggaactgttatctcccaagattaa

SEQ ID NO: 1543118 - DNA, 25 bp, Homo sapien
ttgtgctgcccatgtactcttggca

SEQ ID NO: 1543119 - DNA, 25 bp, Homo sapien
tagtggtcccgattaactgtgagga

SEQ ID NO: 1543120 - DNA, 25 bp, Homo sapien
tgatggctacgctgtagaccgggcc

SEQ ID NO: 1543121 - DNA, 25 bp, Homo sapien
cacagtgaggccgaggtgttgactc

SEQ ID NO: 1543122 - DNA, 25 bp, Homo sapien
aataacgcgcccaggttcacatagc

SEQ ID NO: 1543123 - DNA, 25 bp, Homo sapien
cattgctcaccaacacacagggtag

SEQ ID NO: 1543124 - DNA, 25 bp, Homo sapien
caagcaaacttgaacccgagaatgt

SEQ ID NO: 1543125 - DNA, 25 bp, Homo sapien
ggaagtagattccatgggcctccaa

SEQ ID NO: 1543126 - DNA, 25 bp, Homo sapien
gagaaagagacgcaacatggcagca

SEQ ID NO: 1543127 - DNA, 25 bp, Homo sapien
gtgaaaggcccgctcagcccggaag

SEQ ID NO: 1543128 - DNA, 25 bp, Homo sapien
gaaaggcccgctcagcccggaagtg

SEQ ID NO: 1543129 - DNA, 25 bp, Homo sapien
tcctgggtgaaaggcccgctcagcc

SEQ ID NO: 1543130 - DNA, 25 bp, Homo sapien
gggtgaaaggcccgctcagcccgga

SEQ ID NO: 1543131 - DNA, 25 bp, Homo sapien
gaaagtctccgggatccagagtgag

SEQ ID NO: 1543132 - DNA, 25 bp, Homo sapien
aacaactaacaatccggtctggcct

SEQ ID NO: 1543133 - DNA, 25 bp, Homo sapien
tgggtgtgggcctctgaatataacc

SEQ ID NO: 1543134 - DNA, 25 bp, Homo sapien
tcttgggccactaaggaaccagaaa

SEQ ID NO: 1543135 - DNA, 25 bp, Homo sapien
gtctctaaccactcctgggctaagg

SEQ ID NO: 1543136 - DNA, 25 bp, Homo sapien
cctcttaaccagcagttcttgtctg

SEQ ID NO: 1543137 - DNA, 25 bp, Homo sapien
tgggctaaggagtaacctccctcat

SEQ ID NO: 1543138 - DNA, 25 bp, Homo sapien
tcctagaggccaaggcttaaacagg

SEQ ID NO: 1543139 - DNA, 25 bp, Homo sapien
tagttctgtgccctatcacggccac

SEQ ID NO: 1543140 - DNA, 25 bp, Homo sapien
tgcggccgcaatgtctgctgagagt

SEQ ID NO: 1543141 - DNA, 25 bp, Homo sapien
cagtcggtgacaggacagagcagtc

SEQ ID NO: 1543142 - DNA, 25 bp, Homo sapien
tgttgtacgaaagcgcgtctgcggc

SEQ ID NO: 1543143 - DNA, 25 bp, Homo sapien
tgggactcgtagtccggtcctcgcg

SEQ ID NO: 1543144 - DNA, 25 bp, Homo sapien
gctgctgacgccacgccttctggga

SEQ ID NO: 1543145 - DNA, 25 bp, Homo sapien
acatggctgctgacgccacgccttc

SEQ ID NO: 1543146 - DNA, 25 bp, Homo sapien
tagtccggtcctcgcgcgctttctt

SEQ ID NO: 1543147 - DNA, 25 bp, Homo sapien
tcgcccgcctgtagctgggctttgc

SEQ ID NO: 1543148 - DNA, 25 bp, Homo sapien
gcagtcgcccgcctgtagctgggct

SEQ ID NO: 1543149 - DNA, 25 bp, Homo sapien
agtcgcccgcctgtagctgggcttt

SEQ ID NO: 1543150 - DNA, 25 bp, Homo sapien
gcccgcctgtagctgggctttgccg

SEQ ID NO: 1543151 - DNA, 25 bp, Homo sapien
tcggcagcttttcccaagcacgcga

SEQ ID NO: 1543152 - DNA, 25 bp, Homo sapien
ctgcgtcggcagcttttcccaagca

SEQ ID NO: 1543153 - DNA, 25 bp, Homo sapien
cattcatctgcgtcggcagcttttc

SEQ ID NO: 1543154 - DNA, 25 bp, Homo sapien
gcgtcggcagcttttcccaagcacg

SEQ ID NO: 1543155 - DNA, 25 bp, Homo sapien
gggccgctgcgtccggacccaggga

SEQ ID NO: 1543156 - DNA, 25 bp, Homo sapien
aagacgaggggagcccacgacagcc

SEQ ID NO: 1543157 - DNA, 25 bp, Homo sapien
agtgacgtagccgaagacgagggga

SEQ ID NO: 1543158 - DNA, 25 bp, Homo sapien
caactccgcgcccaacccaggtcct

SEQ ID NO: 1543159 - DNA, 25 bp, Homo sapien
ggaagttcagcatcggaagtcagat

SEQ ID NO: 1543160 - DNA, 25 bp, Homo sapien
tctagggctcaaatcgggaactaag

SEQ ID NO: 1543161 - DNA, 25 bp, Homo sapien
tgaagaacactgctcagaagacagg

SEQ ID NO: 1543162 - DNA, 25 bp, Homo sapien
taatgaggaatgtgacgccgggtcc

SEQ ID NO: 1543163 - DNA, 25 bp, Homo sapien
caggaagggttcatgctgatgaatc

SEQ ID NO: 1543164 - DNA, 25 bp, Homo sapien
aaatccaggaagggttcatgctgat

SEQ ID NO: 1543165 - DNA, 25 bp, Homo sapien
aaaatccaggaagggttcatgctga

SEQ ID NO: 1543166 - DNA, 25 bp, Homo sapien
ccaggaagggttcatgctgatgaat

SEQ ID NO: 1543167 - DNA, 25 bp, Homo sapien
ccatgtactcagtgccggccgagaa

SEQ ID NO: 1543168 - DNA, 25 bp, Homo sapien
catgtactcagtgccggccgagaag

SEQ ID NO: 1543169 - DNA, 25 bp, Homo sapien
ctggcctaggtcattctgcaggtcc

SEQ ID NO: 1543170 - DNA, 25 bp, Homo sapien
atgtactcagtgccggccgagaagc

SEQ ID NO: 1543171 - DNA, 25 bp, Homo sapien
tatggttggtgtcgggagtacggtc

SEQ ID NO: 1543172 - DNA, 25 bp, Homo sapien
tacagcttctccaccgtggatgtct

SEQ ID NO: 1543173 - DNA, 25 bp, Homo sapien
aggtgcagcgccgtgtggcccctac

SEQ ID NO: 1543174 - DNA, 25 bp, Homo sapien
ctccaagtcggaatcggggtacaag

SEQ ID NO: 1543175 - DNA, 25 bp, Homo sapien
caaggtcagctccagcatctcggag

SEQ ID NO: 1543176 - DNA, 25 bp, Homo sapien
ctttgtggataacggccacgtggag

SEQ ID NO: 1543177 - DNA, 25 bp, Homo sapien
ggtcagctccagcatctcggagcag

SEQ ID NO: 1543178 - DNA, 25 bp, Homo sapien
cacatctttgtggataacggccacg

SEQ ID NO: 1543179 - DNA, 25 bp, Homo sapien
tgtcgctgtcgctactgctgctgca

SEQ ID NO: 1543180 - DNA, 25 bp, Homo sapien
tgcggccaccgtacatgcgggcagc

SEQ ID NO: 1543181 - DNA, 25 bp, Homo sapien
tgggcctccactgccaaatgaaggg

SEQ ID NO: 1543182 - DNA, 25 bp, Homo sapien
gttgggccggagcatggcactgccg

SEQ ID NO: 1543183 - DNA, 25 bp, Homo sapien
ttaggtctcgcctcaaagcccaagt

SEQ ID NO: 1543184 - DNA, 25 bp, Homo sapien
gccactccagagtttcggcaactga

SEQ ID NO: 1543185 - DNA, 25 bp, Homo sapien
gcagcccaaggtcggtgcctaatta

SEQ ID NO: 1543186 - DNA, 25 bp, Homo sapien
gccttgcccaaggacggatctgtat

SEQ ID NO: 1543187 - DNA, 25 bp, Homo sapien
gctgtgaaccacaatgtcgtcgtat

SEQ ID NO: 1543188 - DNA, 25 bp, Homo sapien
aggcagccgggtttggctgcggctg

SEQ ID NO: 1543189 - DNA, 25 bp, Homo sapien
gaaccacaatgtcgtcgtattcatc

SEQ ID NO: 1543190 - DNA, 25 bp, Homo sapien
gctgctgtgaaccacaatgtcgtcg

SEQ ID NO: 1543191 - DNA, 25 bp, Homo sapien
tggaaattatattaacaatgaaaca

SEQ ID NO: 1543192 - DNA, 25 bp, Homo sapien
tattaaactggaaattatattaaca

SEQ ID NO: 1543193 - DNA, 25 bp, Homo sapien
aaactggaaattatattaacaatga

SEQ ID NO: 1543194 - DNA, 25 bp, Homo sapien
gaaattatattaacaatgaaacaaa

SEQ ID NO: 1543195 - DNA, 25 bp, Homo sapien
gggttatacaaccaacagtgtctgc

SEQ ID NO: 1543196 - DNA, 25 bp, Homo sapien
gccacagacggcttaaaaacaatca

SEQ ID NO: 1543197 - DNA, 25 bp, Homo sapien
aagtcgctacacaccataccaggtg

SEQ ID NO: 1543198 - DNA, 25 bp, Homo sapien
taaaaacaacagcagacctttatgt

SEQ ID NO: 1543199 - DNA, 25 bp, Homo sapien
gacgattgggcgacgaaggactcta

SEQ ID NO: 1543200 - DNA, 25 bp, Homo sapien
caattggtctaaacgcggagtgggc

SEQ ID NO: 1543201 - DNA, 25 bp, Homo sapien
tccaagatggctgcgtccatggcgc

SEQ ID NO: 1543202 - DNA, 25 bp, Homo sapien
ggatctgattggctcgtcacggtca

SEQ ID NO: 1543203 - DNA, 25 bp, Homo sapien
tataggtctaaccacaggccctcat

SEQ ID NO: 1543204 - DNA, 25 bp, Homo sapien
cctccgtaaatttagcctcgctctg

SEQ ID NO: 1543205 - DNA, 25 bp, Homo sapien
aggccctcatgctgctaacagaaag

SEQ ID NO: 1543206 - DNA, 25 bp, Homo sapien
taaatttagcctcgctctgagtggg

SEQ ID NO: 1543207 - DNA, 25 bp, Homo sapien
gactttctggcttaaatcaaaggaa

SEQ ID NO: 1543208 - DNA, 25 bp, Homo sapien
aggaggaaaaagtgaccgatccgca

SEQ ID NO: 1543209 - DNA, 25 bp, Homo sapien
cgatccgctctcaggactttctggc

SEQ ID NO: 1543210 - DNA, 25 bp, Homo sapien
aaagtgaccgatccgcaaatgctcc

SEQ ID NO: 1543211 - DNA, 25 bp, Homo sapien
acaagttagggacgtgttgaggcca

SEQ ID NO: 1543212 - DNA, 25 bp, Homo sapien
agttagggacgtgttgaggccatgg

SEQ ID NO: 1543213 - DNA, 25 bp, Homo sapien
cacaagttagggacgtgttgaggcc

SEQ ID NO: 1543214 - DNA, 25 bp, Homo sapien
caagttagggacgtgttgaggccat

SEQ ID NO: 1543215 - DNA, 25 bp, Homo sapien
tacttgccacgcacaacggtgagct

SEQ ID NO: 1543216 - DNA, 25 bp, Homo sapien
cgccctccacaaggacaatctggtg

SEQ ID NO: 1543217 - DNA, 25 bp, Homo sapien
cactcgacagcacttgcgattggct

SEQ ID NO: 1543218 - DNA, 25 bp, Homo sapien
tcggcttgcgggtaaacgtgcacag

SEQ ID NO: 1543219 - DNA, 25 bp, Homo sapien
caggagcggaaggttcatgttctgc

SEQ ID NO: 1543220 - DNA, 25 bp, Homo sapien
tgtcccagcagaaaaggtccttcag

SEQ ID NO: 1543221 - DNA, 25 bp, Homo sapien
ccccaggactcctatggcttaatag

SEQ ID NO: 1543222 - DNA, 25 bp, Homo sapien
taatagtggtcctgatggaagaggc

SEQ ID NO: 1543223 - DNA, 25 bp, Homo sapien
gataccaccaatggagctattttct

SEQ ID NO: 1543224 - DNA, 25 bp, Homo sapien
aaggagataccaccaatggagctat

SEQ ID NO: 1543225 - DNA, 25 bp, Homo sapien
ggagataccaccaatggagctattt

SEQ ID NO: 1543226 - DNA, 25 bp, Homo sapien
caaaggagataccaccaatggagct

SEQ ID NO: 1543227 - DNA, 25 bp, Homo sapien
gcatctcctgttcaggtcaggctag

SEQ ID NO: 1543228 - DNA, 25 bp, Homo sapien
taaccagccatctctgtgcaacatg

SEQ ID NO: 1543229 - DNA, 25 bp, Homo sapien
cctctctcatcagaattccagaatt

SEQ ID NO: 1543230 - DNA, 25 bp, Homo sapien
gggcaacttcctgcaaggtaacact

SEQ ID NO: 1543231 - DNA, 25 bp, Homo sapien
cagggagcagaggtccgctgaggca

SEQ ID NO: 1543232 - DNA, 25 bp, Homo sapien
gagcagagacttgccggcatgtttt

SEQ ID NO: 1543233 - DNA, 25 bp, Homo sapien
gcagaggtccgctgaggcagtctgt

SEQ ID NO: 1543234 - DNA, 25 bp, Homo sapien
ggtaatgatcgtgggcagggagcag

SEQ ID NO: 1543235 - DNA, 25 bp, Homo sapien
gcaaggatctcggtggactcagtca

SEQ ID NO: 1543236 - DNA, 25 bp, Homo sapien
ggctggttctcagcacaccttccat

SEQ ID NO: 1543237 - DNA, 25 bp, Homo sapien
cagtgtggtggccatcatgctgtgt

SEQ ID NO: 1543238 - DNA, 25 bp, Homo sapien
tgtcaggaagagacatttagttcat

SEQ ID NO: 1543239 - DNA, 25 bp, Homo sapien
cttggttgatgggaatgacagttga

SEQ ID NO: 1543240 - DNA, 25 bp, Homo sapien
gccttgctcagcagaaagagctgca

SEQ ID NO: 1543241 - DNA, 25 bp, Homo sapien
gcaaagtaggcacatcagcctgcac

SEQ ID NO: 1543242 - DNA, 25 bp, Homo sapien
cagttcttcttggttgatgggaatg

SEQ ID NO: 1543243 - DNA, 25 bp, Homo sapien
catgaagcccatttgttatggtaac

SEQ ID NO: 1543244 - DNA, 25 bp, Homo sapien
tgaagcccatttgttatggtaacaa

SEQ ID NO: 1543245 - DNA, 25 bp, Homo sapien
atggtaacaattttagaagggctca

SEQ ID NO: 1543246 - DNA, 25 bp, Homo sapien
acaattttagaagggctcagcagca

SEQ ID NO: 1543247 - DNA, 25 bp, Homo sapien
aattctcttggaggtccgccagctc

SEQ ID NO: 1543248 - DNA, 25 bp, Homo sapien
caattctcttggaggtccgccagct

SEQ ID NO: 1543249 - DNA, 25 bp, Homo sapien
cctactgtggcagattctgttactt

SEQ ID NO: 1543250 - DNA, 25 bp, Homo sapien
actgtggcagattctgttacttgca

SEQ ID NO: 1543251 - DNA, 25 bp, Homo sapien
tgttcctactgtggcagattctgtt

SEQ ID NO: 1543252 - DNA, 25 bp, Homo sapien
ttacttgcaggccatcccccacttc

SEQ ID NO: 1543253 - DNA, 25 bp, Homo sapien
tgacaccatttgcacgaaacagtag

SEQ ID NO: 1543254 - DNA, 25 bp, Homo sapien
tcttcatgaccaggcgaggtgtggc

SEQ ID NO: 1543255 - DNA, 25 bp, Homo sapien
caaggacaaagcgtcggtggaacca

SEQ ID NO: 1543256 - DNA, 25 bp, Homo sapien
gcagttttctgtgtaagggcagcct

SEQ ID NO: 1543257 - DNA, 25 bp, Homo sapien
gaagatgagatccagtacagagacc

SEQ ID NO: 1543258 - DNA, 25 bp, Homo sapien
atgtggattggaagacagaagatga

SEQ ID NO: 1543259 - DNA, 25 bp, Homo sapien
gtacagagacctttggcccagctca

SEQ ID NO: 1543260 - DNA, 25 bp, Homo sapien
tctgctcatgcccaaaaggatgtgg

SEQ ID NO: 1543261 - DNA, 25 bp, Homo sapien
cagacgtgcttcgtgacttcattca

SEQ ID NO: 1543262 - DNA, 25 bp, Homo sapien
ggtgaatgcccctgctatccaaagg

SEQ ID NO: 1543263 - DNA, 25 bp, Homo sapien
tatgggtgacttaatttaggcctcc

SEQ ID NO: 1543264 - DNA, 25 bp, Homo sapien
tgtgacgattaaaatagccccttgc

SEQ ID NO: 1543265 - DNA, 25 bp, Homo sapien
atatcggggctatcaaggacgggct

SEQ ID NO: 1543266 - DNA, 25 bp, Homo sapien
ctggtggacggccaggccctgtggc

SEQ ID NO: 1543267 - DNA, 25 bp, Homo sapien
gaccatgggcgcctcggtctccagg

SEQ ID NO: 1543268 - DNA, 25 bp, Homo sapien
agccggaacccgaagaggcgctgga

SEQ ID NO: 1543269 - DNA, 25 bp, Homo sapien
aaaggaaatgcattatctgaccatt

SEQ ID NO: 1543270 - DNA, 25 bp, Homo sapien
taaaggaaatgcattatctgaccat

SEQ ID NO: 1543271 - DNA, 25 bp, Homo sapien
tctaccacgtttaatcctctttcaa

SEQ ID NO: 1543272 - DNA, 25 bp, Homo sapien
ctttcaaacacaagcttctgactgt

SEQ ID NO: 1543273 - DNA, 25 bp, Homo sapien
tctgactgtcagtcttctcggataa

SEQ ID NO: 1543274 - DNA, 25 bp, Homo sapien
gactgtcagtcttctcggataaaat

SEQ ID NO: 1543275 - DNA, 25 bp, Homo sapien
tggtccatggcaggtctcgcaggga

SEQ ID NO: 1543276 - DNA, 25 bp, Homo sapien
atggtccatggcaggtctcgcaggg

SEQ ID NO: 1543277 - DNA, 25 bp, Homo sapien
gctgaagcgtgggtcacgctgtgca

SEQ ID NO: 1543278 - DNA, 25 bp, Homo sapien
gcgtgggtcacgctgtgcatggtca

SEQ ID NO: 1543279 - DNA, 25 bp, Homo sapien
gtgggtcacgctgtgcatggtcagc

SEQ ID NO: 1543280 - DNA, 25 bp, Homo sapien
ctgtcagggctgaagcgtgggtcac

SEQ ID NO: 1543281 - DNA, 25 bp, Homo sapien
ccccaacctttccagcctcgctgca

SEQ ID NO: 1543282 - DNA, 25 bp, Homo sapien
caggtgtgcaggaccgggggatccc

SEQ ID NO: 1543283 - DNA, 25 bp, Homo sapien
ctggccctgcccgatccccaggtac

SEQ ID NO: 1543284 - DNA, 25 bp, Homo sapien
caaaaccagaatcccggaattgcag

SEQ ID NO: 1543285 - DNA, 25 bp, Homo sapien
cacccccagatcctttagagcccat

SEQ ID NO: 1543286 - DNA, 25 bp, Homo sapien
ccccagatcctttagagcccatcat

SEQ ID NO: 1543287 - DNA, 25 bp, Homo sapien
cccccagatcctttagagcccatca

SEQ ID NO: 1543288 - DNA, 25 bp, Homo sapien
acccccagatcctttagagcccatc

SEQ ID NO: 1543289 - DNA, 25 bp, Homo sapien
ccaaggagaatagcaggagtagaca

SEQ ID NO: 1543290 - DNA, 25 bp, Homo sapien
ctgggtaagacagatggacttgctc

SEQ ID NO: 1543291 - DNA, 25 bp, Homo sapien
taacaggaccagtagccaggaaggg

SEQ ID NO: 1543292 - DNA, 25 bp, Homo sapien
gtaagacagatggacttgctctggg

SEQ ID NO: 1543293 - DNA, 25 bp, Homo sapien
atgaacaaggacagcagcggtcccc

SEQ ID NO: 1543294 - DNA, 25 bp, Homo sapien
caacagagatgcaatgaacaaggac

SEQ ID NO: 1543295 - DNA, 25 bp, Homo sapien
agcagcggtccccttttgagagcag

SEQ ID NO: 1543296 - DNA, 25 bp, Homo sapien
tgccaggtcccggaaacacaacaga

SEQ ID NO: 1543297 - DNA, 25 bp, Homo sapien
gggacccatgtggtccaagttacag

SEQ ID NO: 1543298 - DNA, 25 bp, Homo sapien
cgacggctgcaacccgaattgcact

SEQ ID NO: 1543299 - DNA, 25 bp, Homo sapien
caagttacagtcatggagcctggct

SEQ ID NO: 1543300 - DNA, 25 bp, Homo sapien
acttcagagcgggttgggacccatg

SEQ ID NO: 1543301 - DNA, 25 bp, Homo sapien
actcggtgtatgtagagcttccgcc

SEQ ID NO: 1543302 - DNA, 25 bp, Homo sapien
tagagcttccgccggagaatgcccc

SEQ ID NO: 1543303 - DNA, 25 bp, Homo sapien
gcttgcgaagcgtgactcggtgtat

SEQ ID NO: 1543304 - DNA, 25 bp, Homo sapien
cccctggcagcagcttgcgaagcgt

SEQ ID NO: 1543305 - DNA, 25 bp, Homo sapien
cctgaagcggaaccgacggctccag

SEQ ID NO: 1543306 - DNA, 25 bp, Homo sapien
gccctgcgcactgccacagcgataa

SEQ ID NO: 1543307 - DNA, 25 bp, Homo sapien
tgggccccattcttgagggccctga

SEQ ID NO: 1543308 - DNA, 25 bp, Homo sapien
gagaacggcgtcatacatgccctgc

SEQ ID NO: 1543309 - DNA, 25 bp, Homo sapien
aggctggcagccacgggttcaatga

SEQ ID NO: 1543310 - DNA, 25 bp, Homo sapien
tcaatgagccgcatgaacctatccc

SEQ ID NO: 1543311 - DNA, 25 bp, Homo sapien
ccaacacgggcgttgtcctgatcca

SEQ ID NO: 1543312 - DNA, 25 bp, Homo sapien
tgattcccagggcatgtcatgtacg

SEQ ID NO: 1543313 - DNA, 25 bp, Homo sapien
catgctgaagcgagccttgtagtta

SEQ ID NO: 1543314 - DNA, 25 bp, Homo sapien
cccggcatgctgaagcgagccttgt

SEQ ID NO: 1543315 - DNA, 25 bp, Homo sapien
gcgagccttgtagttagagaagttg

SEQ ID NO: 1543316 - DNA, 25 bp, Homo sapien
attatcccccggcatgctgaagcga

SEQ ID NO: 1543317 - DNA, 25 bp, Homo sapien
aaagaaatagacctcggtggagaag

SEQ ID NO: 1543318 - DNA, 25 bp, Homo sapien
cctctgtaccaagtggcggccataa

SEQ ID NO: 1543319 - DNA, 25 bp, Homo sapien
tccagccagcgaaactgcctctgta

SEQ ID NO: 1543320 - DNA, 25 bp, Homo sapien
aaggagatgatgtgggcgggaccca

SEQ ID NO: 1543321 - DNA, 25 bp, Homo sapien
atagtgatgatccacggccgggctg

SEQ ID NO: 1543322 - DNA, 25 bp, Homo sapien
tgtcgtgtgcagtcgtccagatctg

SEQ ID NO: 1543323 - DNA, 25 bp, Homo sapien
tacatgggccggtgccccatagtga

SEQ ID NO: 1543324 - DNA, 25 bp, Homo sapien
ccgggctgcccggttcttattggct

SEQ ID NO: 1543325 - DNA, 25 bp, Homo sapien
tagaaaagatcctccaacccgtaca

SEQ ID NO: 1543326 - DNA, 25 bp, Homo sapien
ccaacccgtacagcttgccttggag

SEQ ID NO: 1543327 - DNA, 25 bp, Homo sapien
aagatcctccaacccgtacagcttg

SEQ ID NO: 1543328 - DNA, 25 bp, Homo sapien
gcttgccttggaggcctttgcggac

SEQ ID NO: 1543329 - DNA, 25 bp, Homo sapien
cagtcgttcatacgagtgctcatga

SEQ ID NO: 1543330 - DNA, 25 bp, Homo sapien
ctggtagttgtaaattggccacagt

SEQ ID NO: 1543331 - DNA, 25 bp, Homo sapien
tcgttcatacgagtgctcatgagcc

SEQ ID NO: 1543332 - DNA, 25 bp, Homo sapien
aattggccacagtcgttcatacgag

SEQ ID NO: 1543333 - DNA, 25 bp, Homo sapien
tgtgatgatgtggacaggccctcgc

SEQ ID NO: 1543334 - DNA, 25 bp, Homo sapien
cctcgcgggttggtgtagggcatct

SEQ ID NO: 1543335 - DNA, 25 bp, Homo sapien
tagggcatctctcggctgccgttaa

SEQ ID NO: 1543336 - DNA, 25 bp, Homo sapien
ttggtgtagggcatctctcggctgc

SEQ ID NO: 1543337 - DNA, 25 bp, Homo sapien
gatgtgggtcccgttgaggatgtgc

SEQ ID NO: 1543338 - DNA, 25 bp, Homo sapien
tccttcacacgcacggcactccagg

SEQ ID NO: 1543339 - DNA, 25 bp, Homo sapien
gcgtatacccgtactccttcacacg

SEQ ID NO: 1543340 - DNA, 25 bp, Homo sapien
aaagggcgtcagccgctcctcacag

SEQ ID NO: 1543341 - DNA, 25 bp, Homo sapien
tcgcccgatcagagctatgcaggag

SEQ ID NO: 1543342 - DNA, 25 bp, Homo sapien
ggtttgtcatctgtcctagctagga

SEQ ID NO: 1543343 - DNA, 25 bp, Homo sapien
tgtcatgacggttgtgcccacctgg

SEQ ID NO: 1543344 - DNA, 25 bp, Homo sapien
ttcccgaataagatggtgccaggct

SEQ ID NO: 1543345 - DNA, 25 bp, Homo sapien
cgtccctgcgttttctactcacaaa

SEQ ID NO: 1543346 - DNA, 25 bp, Homo sapien
ctctctggttaggatgtcagctctg

SEQ ID NO: 1543347 - DNA, 25 bp, Homo sapien
caaatgttgccctctcagtgagatc

SEQ ID NO: 1543348 - DNA, 25 bp, Homo sapien
tctgtgagggccgagatctctgtct

SEQ ID NO: 1543349 - DNA, 25 bp, Homo sapien
ccaggaacggcaaggagtcctgcgt

SEQ ID NO: 1543350 - DNA, 25 bp, Homo sapien
ggaatgaaatctgtggaggcagaaa

SEQ ID NO: 1543351 - DNA, 25 bp, Homo sapien
tcctgcgtgccttgggccaagtgag

SEQ ID NO: 1543352 - DNA, 25 bp, Homo sapien
aggagtcctgcgtgccttgggccaa

SEQ ID NO: 1543353 - DNA, 25 bp, Homo sapien
gccgcagtcgctcgcggcctaactg

SEQ ID NO: 1543354 - DNA, 25 bp, Homo sapien
gccgccatgttgaatccccaacgaa

SEQ ID NO: 1543355 - DNA, 25 bp, Homo sapien
taactgctcgacctggaactccgcg

SEQ ID NO: 1543356 - DNA, 25 bp, Homo sapien
tgttgaatccccaacgaacatccgg

SEQ ID NO: 1543357 - DNA, 25 bp, Homo sapien
tctgcagtcgaggtctgtgttccca

SEQ ID NO: 1543358 - DNA, 25 bp, Homo sapien
aagcctaatcccgaaacaagacgag

SEQ ID NO: 1543359 - DNA, 25 bp, Homo sapien
gagcccgcagcaccaggttacattg

SEQ ID NO: 1543360 - DNA, 25 bp, Homo sapien
gctgcctgttgtttgggttcaccct

SEQ ID NO: 1543361 - DNA, 25 bp, Homo sapien
agggcagtacccagaaggccctctc

SEQ ID NO: 1543362 - DNA, 25 bp, Homo sapien
agagagactgagacagactgatgga

SEQ ID NO: 1543363 - DNA, 25 bp, Homo sapien
caaactcccatgaggtgttcctggt

SEQ ID NO: 1543364 - DNA, 25 bp, Homo sapien
ggaatgcaaggaatgaagtcaggcc

SEQ ID NO: 1543365 - DNA, 25 bp, Homo sapien
tccaagcaaccacctaagaaagcgt

SEQ ID NO: 1543366 - DNA, 25 bp, Homo sapien
gaagccatgcagagtaccagggaac

SEQ ID NO: 1543367 - DNA, 25 bp, Homo sapien
tgggtaccagccttactaggagtga

SEQ ID NO: 1543368 - DNA, 25 bp, Homo sapien
tgccactggtttacttgaagccggg

SEQ ID NO: 1543369 - DNA, 25 bp, Homo sapien
tactctaggtccttcgtacaagtgg

SEQ ID NO: 1543370 - DNA, 25 bp, Homo sapien
tccaggctgaactcaacctcttagg

SEQ ID NO: 1543371 - DNA, 25 bp, Homo sapien
tcttttggacgaacagttgggagcg

SEQ ID NO: 1543372 - DNA, 25 bp, Homo sapien
taattctatgccgaacagcgacagc

SEQ ID NO: 1543373 - DNA, 25 bp, Homo sapien
gcgctgggagtttggcttcccgtcc

SEQ ID NO: 1543374 - DNA, 25 bp, Homo sapien
ggcgctgggagtttggcttcccgtc

SEQ ID NO: 1543375 - DNA, 25 bp, Homo sapien
gagtttggcttcccgtcccggcaca

SEQ ID NO: 1543376 - DNA, 25 bp, Homo sapien
agtttggcttcccgtcccggcacag

SEQ ID NO: 1543377 - DNA, 25 bp, Homo sapien
ttaccaaaatgaaactcgaatcagg

SEQ ID NO: 1543378 - DNA, 25 bp, Homo sapien
ttcatcgttaccaaaatgaaactcg

SEQ ID NO: 1543379 - DNA, 25 bp, Homo sapien
aaaatgaaactcgaatcaggaaggg

SEQ ID NO: 1543380 - DNA, 25 bp, Homo sapien
gccttccaccattgggtcccactca

SEQ ID NO: 1543381 - DNA, 25 bp, Homo sapien
ccagaacacaggggcccaggggcag

SEQ ID NO: 1543382 - DNA, 25 bp, Homo sapien
ggggcagagcaggggaggtggccag

SEQ ID NO: 1543383 - DNA, 25 bp, Homo sapien
agcaggggaggtggccaggaccaca

SEQ ID NO: 1543384 - DNA, 25 bp, Homo sapien
cagaacacaggggcccaggggcaga

SEQ ID NO: 1543385 - DNA, 25 bp, Homo sapien
gacgtgagcgtgcaaaaacccttac

SEQ ID NO: 1543386 - DNA, 25 bp, Homo sapien
tggaatgatcgtccctgtccgctgc

SEQ ID NO: 1543387 - DNA, 25 bp, Homo sapien
gaattctttaacatgcgggacaggc

SEQ ID NO: 1543388 - DNA, 25 bp, Homo sapien
gatccaccgtgcgacaaagctgtca

SEQ ID NO: 1543389 - DNA, 25 bp, Homo sapien
gggagcacgggacccagtctggagg

SEQ ID NO: 1543390 - DNA, 25 bp, Homo sapien
acgggagcacgggacccagtctgga

SEQ ID NO: 1543391 - DNA, 25 bp, Homo sapien
ggacgggagcacgggacccagtctg

SEQ ID NO: 1543392 - DNA, 25 bp, Homo sapien
cgggagcacgggacccagtctggag

SEQ ID NO: 1543393 - DNA, 25 bp, Homo sapien
cctctaggggcttcgggttactcat

SEQ ID NO: 1543394 - DNA, 25 bp, Homo sapien
ctggtctgatgctggtgggacagaa

SEQ ID NO: 1543395 - DNA, 25 bp, Homo sapien
tgatgctggtgggacagaagtgccc

SEQ ID NO: 1543396 - DNA, 25 bp, Homo sapien
aggcaggtgaccactcctctagggg

SEQ ID NO: 1543397 - DNA, 25 bp, Homo sapien
tctgtggtcttcaatcgggcccttg

SEQ ID NO: 1543398 - DNA, 25 bp, Homo sapien
gagacattctgatggcggcatccca

SEQ ID NO: 1543399 - DNA, 25 bp, Homo sapien
gagcaaatggtcgaccaaagccact

SEQ ID NO: 1543400 - DNA, 25 bp, Homo sapien
gatattgactcagcacagggttact

SEQ ID NO: 1543401 - DNA, 25 bp, Homo sapien
ctcgtgctggtcgaagcccgtgtgc

SEQ ID NO: 1543402 - DNA, 25 bp, Homo sapien
gagccgactcctcgatcaggctctg

SEQ ID NO: 1543403 - DNA, 25 bp, Homo sapien
cgtgaacttctgctcgtgctggtcg

SEQ ID NO: 1543404 - DNA, 25 bp, Homo sapien
tgcacgcggtgctcgaagttggacg

SEQ ID NO: 1543405 - DNA, 25 bp, Homo sapien
agacaggagtgtggtccggggtaca

SEQ ID NO: 1543406 - DNA, 25 bp, Homo sapien
tgtggtccggggtacagcagcatgg

SEQ ID NO: 1543407 - DNA, 25 bp, Homo sapien
tcaaggttgggtgagacaggagtgt

SEQ ID NO: 1543408 - DNA, 25 bp, Homo sapien
caggagtgtggtccggggtacagca

SEQ ID NO: 1543409 - DNA, 25 bp, Homo sapien
gggcacacaggacgtgcatccgaca

SEQ ID NO: 1543410 - DNA, 25 bp, Homo sapien
gacaagacagagacgcaatgaagag

SEQ ID NO: 1543411 - DNA, 25 bp, Homo sapien
gagacgcaatgaagagatgccatgg

SEQ ID NO: 1543412 - DNA, 25 bp, Homo sapien
catccgacacgcagggacaggacag

SEQ ID NO: 1543413 - DNA, 25 bp, Homo sapien
tgtcaccgacatgttctcaaactcg

SEQ ID NO: 1543414 - DNA, 25 bp, Homo sapien
gttggagcgtgtcaccgacatgttc

SEQ ID NO: 1543415 - DNA, 25 bp, Homo sapien
ccgcagggagttggagcgtgtcacc

SEQ ID NO: 1543416 - DNA, 25 bp, Homo sapien
gacatgttctcaaactcgtccagca

SEQ ID NO: 1543417 - DNA, 25 bp, Homo sapien
ccctctggccgtggtggccggctcc

SEQ ID NO: 1543418 - DNA, 25 bp, Homo sapien
ccctgggccccctctggccgtggtg

SEQ ID NO: 1543419 - DNA, 25 bp, Homo sapien
gccccctctggccgtggtggccggc

SEQ ID NO: 1543420 - DNA, 25 bp, Homo sapien
tgggccccctctggccgtggtggcc

SEQ ID NO: 1543421 - DNA, 25 bp, Homo sapien
cgcctcgctgtgaccggcgaaccgg

SEQ ID NO: 1543422 - DNA, 25 bp, Homo sapien
cccgcccgtcgcctgtcaccactgc

SEQ ID NO: 1543423 - DNA, 25 bp, Homo sapien
tgtgaccggcgaaccggcctcggct

SEQ ID NO: 1543424 - DNA, 25 bp, Homo sapien
gccgccacccgcctcgctgtgaccg

SEQ ID NO: 1543425 - DNA, 25 bp, Homo sapien
ccagctgccagtttcgccccactgg

SEQ ID NO: 1543426 - DNA, 25 bp, Homo sapien
cgtgtcagccctcgggtaggtgtta

SEQ ID NO: 1543427 - DNA, 25 bp, Homo sapien
ggtggtccgtgtcagccctcgggta

SEQ ID NO: 1543428 - DNA, 25 bp, Homo sapien
ggggtgccgacatcaggcccggaga

SEQ ID NO: 1543429 - DNA, 25 bp, Homo sapien
ttaggggccacgtcatgaggctccc

SEQ ID NO: 1543430 - DNA, 25 bp, Homo sapien
gcacctcgggctcgggtgggaggcc

SEQ ID NO: 1543431 - DNA, 25 bp, Homo sapien
aggccccccgctgatggcccgttag

SEQ ID NO: 1543432 - DNA, 25 bp, Homo sapien
ctgggggcacctcgggctcgggtgg

SEQ ID NO: 1543433 - DNA, 25 bp, Homo sapien
ctgtggtgagcgggggccagggggc

SEQ ID NO: 1543434 - DNA, 25 bp, Homo sapien
tggcgatgcacacgatgcccgtgga

SEQ ID NO: 1543435 - DNA, 25 bp, Homo sapien
gctcatgggatactcgctgtggctc

SEQ ID NO: 1543436 - DNA, 25 bp, Homo sapien
agctgcgcacggtggcgatgcacac

SEQ ID NO: 1543437 - DNA, 25 bp, Homo sapien
ctgcttgcgcaggtccatcttcttg

SEQ ID NO: 1543438 - DNA, 25 bp, Homo sapien
gcagggcggcagggcagcagcgccc

SEQ ID NO: 1543439 - DNA, 25 bp, Homo sapien
agggcggcagggcagcagcgcccgc

SEQ ID NO: 1543440 - DNA, 25 bp, Homo sapien
cagcagggcggcagggcagcagcgc

SEQ ID NO: 1543441 - DNA, 25 bp, Homo sapien
gggcggcagggcagcagcgcccgca

SEQ ID NO: 1543442 - DNA, 25 bp, Homo sapien
ggcttcctatcgtcagggtgctacg

SEQ ID NO: 1543443 - DNA, 25 bp, Homo sapien
tgggcttcctatcgtcagggtgcta

SEQ ID NO: 1543444 - DNA, 25 bp, Homo sapien
cttcctatcgtcagggtgctacggg

SEQ ID NO: 1543445 - DNA, 25 bp, Homo sapien
ctgggcttcctatcgtcagggtgct

SEQ ID NO: 1543446 - DNA, 25 bp, Homo sapien
tccccctgcagttccacattaagct

SEQ ID NO: 1543447 - DNA, 25 bp, Homo sapien
agcttgaagcccacgcctcccttct

SEQ ID NO: 1543448 - DNA, 25 bp, Homo sapien
gttccacattaagcttgtgctcact

SEQ ID NO: 1543449 - DNA, 25 bp, Homo sapien
ctggactgccctcccctactgccac

SEQ ID NO: 1543450 - DNA, 25 bp, Homo sapien
cgtgctggtagtccctcatgattac

SEQ ID NO: 1543451 - DNA, 25 bp, Homo sapien
tctcgtgctggtagtccctcatgat

SEQ ID NO: 1543452 - DNA, 25 bp, Homo sapien
cgatgtcggtgagggcgcctccttc

SEQ ID NO: 1543453 - DNA, 25 bp, Homo sapien
ctggtgtgggtgacgatgtcggtga

SEQ ID NO: 1543454 - DNA, 25 bp, Homo sapien
tgccatcatgggtcagcaggatcga

SEQ ID NO: 1543455 - DNA, 25 bp, Homo sapien
acgccctgggcgtggagcaccgaca

SEQ ID NO: 1543456 - DNA, 25 bp, Homo sapien
ctgcaaggcacacggccgcgatctg

SEQ ID NO: 1543457 - DNA, 25 bp, Homo sapien
tgggtcagcaggatcgagtcgctct

SEQ ID NO: 1543458 - DNA, 25 bp, Homo sapien
ttccttcggggcacttccttgctca

SEQ ID NO: 1543459 - DNA, 25 bp, Homo sapien
atccagtagggcgtgccgaccagcg

SEQ ID NO: 1543460 - DNA, 25 bp, Homo sapien
ctcacctgggcgcagaacccaaagt

SEQ ID NO: 1543461 - DNA, 25 bp, Homo sapien
gtgccgaccagcgacttccttcggg

SEQ ID NO: 1543462 - DNA, 25 bp, Homo sapien
ggttgtcccgaatcatcttcatggc

SEQ ID NO: 1543463 - DNA, 25 bp, Homo sapien
cttgtgcaggttcttcagtcggggt

SEQ ID NO: 1543464 - DNA, 25 bp, Homo sapien
tcttcatggctttgaggggtggctc

SEQ ID NO: 1543465 - DNA, 25 bp, Homo sapien
agtaggggggctctccgtccaccat

SEQ ID NO: 1543466 - DNA, 25 bp, Homo sapien
gcagggtctcgcaccagcaggcggt

SEQ ID NO: 1543467 - DNA, 25 bp, Homo sapien
ccttggccaggaatgggtgcttcag

SEQ ID NO: 1543468 - DNA, 25 bp, Homo sapien
tgccgtggcccgctgggcagggtct

SEQ ID NO: 1543469 - DNA, 25 bp, Homo sapien
gggcacgatgctggcaggcggccct

SEQ ID NO: 1543470 - DNA, 25 bp, Homo sapien
gcttgctcccacgagtccctgtgtt

SEQ ID NO: 1543471 - DNA, 25 bp, Homo sapien
agtcacgagatcaaaactggagttc

SEQ ID NO: 1543472 - DNA, 25 bp, Homo sapien
tggtgccacgcggagcatctcccgg

SEQ ID NO: 1543473 - DNA, 25 bp, Homo sapien
tcagtagtagggtctcatctacccc

SEQ ID NO: 1543474 - DNA, 25 bp, Homo sapien
gggtgtcaggcaaggcgccagacac

SEQ ID NO: 1543475 - DNA, 25 bp, Homo sapien
gatcgacccccacaatggctcaggg

SEQ ID NO: 1543476 - DNA, 25 bp, Homo sapien
aggcaaggcgccagacaccccttgc

SEQ ID NO: 1543477 - DNA, 25 bp, Homo sapien
attcatgatcgacccccacaatggc

SEQ ID NO: 1543478 - DNA, 25 bp, Homo sapien
caggcagtggttctgccagggccac

SEQ ID NO: 1543479 - DNA, 25 bp, Homo sapien
cagggctacgggaaaaggccactct

SEQ ID NO: 1543480 - DNA, 25 bp, Homo sapien
gctgaccgggcaggaacctggttct

SEQ ID NO: 1543481 - DNA, 25 bp, Homo sapien
attgtaaaactaactcgaggcaggg

SEQ ID NO: 1543482 - DNA, 25 bp, Homo sapien
caatggcaaaacctctgggtcggtc

SEQ ID NO: 1543483 - DNA, 25 bp, Homo sapien
ttctcaaacgtgagtgggcaccggc

SEQ ID NO: 1543484 - DNA, 25 bp, Homo sapien
tcagctggtcaactaaatgtgggca

SEQ ID NO: 1543485 - DNA, 25 bp, Homo sapien
tatttgcgtgtccagtaagctccca

SEQ ID NO: 1543486 - DNA, 25 bp, Homo sapien
tgggggtgcaccccttctgtttagc

SEQ ID NO: 1543487 - DNA, 25 bp, Homo sapien
ttctgtttagccacccactcccctg

SEQ ID NO: 1543488 - DNA, 25 bp, Homo sapien
caccgagcgcgtgtccctcacgcac

SEQ ID NO: 1543489 - DNA, 25 bp, Homo sapien
gccaccgagcgcgtgtccctcacgc

SEQ ID NO: 1543490 - DNA, 25 bp, Homo sapien
ggaggctcgcgggcccatcggcttc

SEQ ID NO: 1543491 - DNA, 25 bp, Homo sapien
catcggcttccatcccgccaccgag

SEQ ID NO: 1543492 - DNA, 25 bp, Homo sapien
cggcggtgaaggcgaccgtggcgag

SEQ ID NO: 1543493 - DNA, 25 bp, Homo sapien
gcggcggtgaaggcgaccgtggcga

SEQ ID NO: 1543494 - DNA, 25 bp, Homo sapien
ggcggtgaaggcgaccgtggcgagg

SEQ ID NO: 1543495 - DNA, 25 bp, Homo sapien
gggcgtgagcctcggacggctgcgc

SEQ ID NO: 1543496 - DNA, 25 bp, Homo sapien
ccgggcgtgagcctcggacggctgc

SEQ ID NO: 1543497 - DNA, 25 bp, Homo sapien
ctgccgggcgtgagcctcggacggc

SEQ ID NO: 1543498 - DNA, 25 bp, Homo sapien
gtgagcctcggacggctgcgccggc

SEQ ID NO: 1543499 - DNA, 25 bp, Homo sapien
agcgcagcaggttgcggtagagcgg

SEQ ID NO: 1543500 - DNA, 25 bp, Homo sapien
cagcaggttgcggtagagcggccgc

SEQ ID NO: 1543501 - DNA, 25 bp, Homo sapien
ggttgcggtagagcggccgccgcaa

SEQ ID NO: 1543502 - DNA, 25 bp, Homo sapien
gcggccgccgcaacaggagcagctt

SEQ ID NO: 1543503 - DNA, 25 bp, Homo sapien
aaatggacaggtgagtggagcctct

SEQ ID NO: 1543504 - DNA, 25 bp, Homo sapien
ctgaaatggacaggtgagtggagcc

SEQ ID NO: 1543505 - DNA, 25 bp, Homo sapien
tggagcctctgggcagcccctccat

SEQ ID NO: 1543506 - DNA, 25 bp, Homo sapien
gtggagcctctgggcagcccctcca

SEQ ID NO: 1543507 - DNA, 25 bp, Homo sapien
gggtgctggctcataaatgttgatg

SEQ ID NO: 1543508 - DNA, 25 bp, Homo sapien
ggtgctggctcataaatgttgatgc

SEQ ID NO: 1543509 - DNA, 25 bp, Homo sapien
ggggtgctggctcataaatgttgat

SEQ ID NO: 1543510 - DNA, 25 bp, Homo sapien
agggggtgctggctcataaatgttg

SEQ ID NO: 1543511 - DNA, 25 bp, Homo sapien
tttcagttctaatgtaccagccacg

SEQ ID NO: 1543512 - DNA, 25 bp, Homo sapien
tctaatgtaccagccacggaaattg

SEQ ID NO: 1543513 - DNA, 25 bp, Homo sapien
tcagttctaatgtaccagccacgga

SEQ ID NO: 1543514 - DNA, 25 bp, Homo sapien
gttctaatgtaccagccacggaaat

SEQ ID NO: 1543515 - DNA, 25 bp, Homo sapien
catgaccgtaatggctggttgttcg

SEQ ID NO: 1543516 - DNA, 25 bp, Homo sapien
cagtccatgaccgtaatggctggtt

SEQ ID NO: 1543517 - DNA, 25 bp, Homo sapien
gaccgtaatggctggttgttcgtca

SEQ ID NO: 1543518 - DNA, 25 bp, Homo sapien
gtaatggctggttgttcgtcatcca

SEQ ID NO: 1543519 - DNA, 25 bp, Homo sapien
ttcggggggccacgtggtgctgagc

SEQ ID NO: 1543520 - DNA, 25 bp, Homo sapien
tgctgagcaatgaccgtgcggcggt

SEQ ID NO: 1543521 - DNA, 25 bp, Homo sapien
cagacatgcagctcatagacgcacg

SEQ ID NO: 1543522 - DNA, 25 bp, Homo sapien
tagacgcacgcatccagccggctgt

SEQ ID NO: 1543523 - DNA, 25 bp, Homo sapien
caccaggctccatgcggttcttggc

SEQ ID NO: 1543524 - DNA, 25 bp, Homo sapien
ctcccggagctgcacagacacggag

SEQ ID NO: 1543525 - DNA, 25 bp, Homo sapien
gaagtggataaagcgcacaccggga

SEQ ID NO: 1543526 - DNA, 25 bp, Homo sapien
agacacggaggagtcggtcacccgt

SEQ ID NO: 1543527 - DNA, 25 bp, Homo sapien
gatacacaaagggtcctcggaggag

SEQ ID NO: 1543528 - DNA, 25 bp, Homo sapien
tcagttcagaaggaccccgggatgt

SEQ ID NO: 1543529 - DNA, 25 bp, Homo sapien
tctgcggtagctggaggagatacac

SEQ ID NO: 1543530 - DNA, 25 bp, Homo sapien
gaatttacaaggagtggctccgccc

SEQ ID NO: 1543531 - DNA, 25 bp, Homo sapien
gatgagtccttatctcgcagcttgt

SEQ ID NO: 1543532 - DNA, 25 bp, Homo sapien
tactcagggttgtgggcttccgacc

SEQ ID NO: 1543533 - DNA, 25 bp, Homo sapien
taagttgtatacacagcgtccacct

SEQ ID NO: 1543534 - DNA, 25 bp, Homo sapien
gacccctactatgagaactgctgcg

SEQ ID NO: 1543535 - DNA, 25 bp, Homo sapien
taggaggaaacattacccatttcac

SEQ ID NO: 1543536 - DNA, 25 bp, Homo sapien
atttattccttataccagcactctg

SEQ ID NO: 1543537 - DNA, 25 bp, Homo sapien
ttcaacattcgtatggcgtaggagg

SEQ ID NO: 1543538 - DNA, 25 bp, Homo sapien
ggtaggtaccatcagcgtgtccctg

SEQ ID NO: 1543539 - DNA, 25 bp, Homo sapien
ctgagtgactgtggataacagcaaa

SEQ ID NO: 1543540 - DNA, 25 bp, Homo sapien
gcaggtggcagagtaaacatccgaa

SEQ ID NO: 1543541 - DNA, 25 bp, Homo sapien
ggaccagcagggcataggtttagct

SEQ ID NO: 1543542 - DNA, 25 bp, Homo sapien
cccattgaaggtaggaggaaactga

SEQ ID NO: 1543543 - DNA, 25 bp, Homo sapien
ctgggccctaactgatacgctataa

SEQ ID NO: 1543544 - DNA, 25 bp, Homo sapien
tacagcatggttccaatttgggtga

SEQ ID NO: 1543545 - DNA, 25 bp, Homo sapien
tatcctaaattgacgggccatctgt

SEQ ID NO: 1543546 - DNA, 25 bp, Homo sapien
gccagctaccaaactgtatacagca

SEQ ID NO: 1543547 - DNA, 25 bp, Homo sapien
aaatttacaattatgatggaaggga

SEQ ID NO: 1543548 - DNA, 25 bp, Homo sapien
aatttacaattatgatggaagggaa

SEQ ID NO: 1543549 - DNA, 25 bp, Homo sapien
atatcacattgatacagacaagata

SEQ ID NO: 1543550 - DNA, 25 bp, Homo sapien
ccatatcacattgatacagacaaga

SEQ ID NO: 1543551 - DNA, 25 bp, Homo sapien
gcgagcggtagtgcgagagcaggca

SEQ ID NO: 1543552 - DNA, 25 bp, Homo sapien
ccagcgagcggtagtgcgagagcag

SEQ ID NO: 1543553 - DNA, 25 bp, Homo sapien
agcgagcggtagtgcgagagcaggc

SEQ ID NO: 1543554 - DNA, 25 bp, Homo sapien
ctccagcgagcggtagtgcgagagc

SEQ ID NO: 1543555 - DNA, 25 bp, Homo sapien
tcgtgtactgaaccagggagctccc

SEQ ID NO: 1543556 - DNA, 25 bp, Homo sapien
ctgacgtacaagaggcgcctgctgg

SEQ ID NO: 1543557 - DNA, 25 bp, Homo sapien
cagggttgaattgcatcccgctctc

SEQ ID NO: 1543558 - DNA, 25 bp, Homo sapien
ccgaaggcgtgaaccagggttgaat

SEQ ID NO: 1543559 - DNA, 25 bp, Homo sapien
gagcagttgcgcgacctccaactca

SEQ ID NO: 1543560 - DNA, 25 bp, Homo sapien
gacggagcagttgcgcgacctccaa

SEQ ID NO: 1543561 - DNA, 25 bp, Homo sapien
gggcggacggagcagttgcgcgacc

SEQ ID NO: 1543562 - DNA, 25 bp, Homo sapien
agcagttgcgcgacctccaactcag

SEQ ID NO: 1543563 - DNA, 25 bp, Homo sapien
cggtgcaggccgctgagcactgcct

SEQ ID NO: 1543564 - DNA, 25 bp, Homo sapien
gcggtgcaggccgctgagcactgcc

SEQ ID NO: 1543565 - DNA, 25 bp, Homo sapien
ggtttttccgctaagcaggacagat

SEQ ID NO: 1543566 - DNA, 25 bp, Homo sapien
taagcaggacagattggcaaagcgc

SEQ ID NO: 1543567 - DNA, 25 bp, Homo sapien
agcaggacagattggcaaagcgctg

SEQ ID NO: 1543568 - DNA, 25 bp, Homo sapien
aagcaggacagattggcaaagcgct

SEQ ID NO: 1543569 - DNA, 25 bp, Homo sapien
gacccgagcccggatttgaggacac

SEQ ID NO: 1543570 - DNA, 25 bp, Homo sapien
aggcgaaggacggagcccctctctg

SEQ ID NO: 1543571 - DNA, 25 bp, Homo sapien
ggtgggacgcgaggcaaatggaaaa

SEQ ID NO: 1543572 - DNA, 25 bp, Homo sapien
cgcggtttgtgacgcctcctctggg

SEQ ID NO: 1543573 - DNA, 25 bp, Homo sapien
gaagatcacgctggcttcgcgacac

SEQ ID NO: 1543574 - DNA, 25 bp, Homo sapien
agatcacgctggcttcgcgacaccg

SEQ ID NO: 1543575 - DNA, 25 bp, Homo sapien
ttgaagatcacgctggcttcgcgac

SEQ ID NO: 1543576 - DNA, 25 bp, Homo sapien
tcacgctggcttcgcgacaccgagg

SEQ ID NO: 1543577 - DNA, 25 bp, Homo sapien
cctgagtgtgcagccagccggagct

SEQ ID NO: 1543578 - DNA, 25 bp, Homo sapien
gccctgagtgtgcagccagccggag

SEQ ID NO: 1543579 - DNA, 25 bp, Homo sapien
aaggccctgagtgtgcagccagccg

SEQ ID NO: 1543580 - DNA, 25 bp, Homo sapien
aggcaaggccctgagtgtgcagcca

SEQ ID NO: 1543581 - DNA, 25 bp, Homo sapien
acagggacctctttcggcagccaat

SEQ ID NO: 1543582 - DNA, 25 bp, Homo sapien
acccactggctgagatcctcgcctg

SEQ ID NO: 1543583 - DNA, 25 bp, Homo sapien
tggctgagatcctcgcctggccggc

SEQ ID NO: 1543584 - DNA, 25 bp, Homo sapien
tggccggcccaatgggcgacaggga

SEQ ID NO: 1543585 - DNA, 25 bp, Homo sapien
tttcctgccatagcaaccgttggag

SEQ ID NO: 1543586 - DNA, 25 bp, Homo sapien
ttagatgccggatccaagagtcacg

SEQ ID NO: 1543587 - DNA, 25 bp, Homo sapien
ccgttggagggtcgtacaatgcacc

SEQ ID NO: 1543588 - DNA, 25 bp, Homo sapien
tgcaccccgaggaaatatcgtggct

SEQ ID NO: 1543589 - DNA, 25 bp, Homo sapien
ctgatctctggtctttgtcagcaga

SEQ ID NO: 1543590 - DNA, 25 bp, Homo sapien
cctgatctctggtctttgtcagcag

SEQ ID NO: 1543591 - DNA, 25 bp, Homo sapien
tgatctctggtctttgtcagcagaa

SEQ ID NO: 1543592 - DNA, 25 bp, Homo sapien
atgtggcagccccttgcatccggga

SEQ ID NO: 1543593 - DNA, 25 bp, Homo sapien
gacagggacttgaactgggctatgt

SEQ ID NO: 1543594 - DNA, 25 bp, Homo sapien
ggaactgctccagtcacggtcagca

SEQ ID NO: 1543595 - DNA, 25 bp, Homo sapien
taaggcatctttggccctcttaaag

SEQ ID NO: 1543596 - DNA, 25 bp, Homo sapien
agaggcgggagtggcacctgcagtc

SEQ ID NO: 1543597 - DNA, 25 bp, Homo sapien
tggcacctgcagtccttcagcagaa

SEQ ID NO: 1543598 - DNA, 25 bp, Homo sapien
gctgcctcaggtcccaggtcctggg

SEQ ID NO: 1543599 - DNA, 25 bp, Homo sapien
gggaagaggcgggagtggcacctgc

SEQ ID NO: 1543600 - DNA, 25 bp, Homo sapien
tcagtgtcagcggtggcctccagaa

SEQ ID NO: 1543601 - DNA, 25 bp, Homo sapien
tccagaaccttcagcgtcagggcca

SEQ ID NO: 1543602 - DNA, 25 bp, Homo sapien
tccaccagggctgggtcagtgtcag

SEQ ID NO: 1543603 - DNA, 25 bp, Homo sapien
ggctggtccaagacgtccaccaggg

SEQ ID NO: 1543604 - DNA, 25 bp, Homo sapien
ctgggtgcccaggccccaacgactc

SEQ ID NO: 1543605 - DNA, 25 bp, Homo sapien
gggtgcccaggccccaacgactcac

SEQ ID NO: 1543606 - DNA, 25 bp, Homo sapien
tgggtgcccaggccccaacgactca

SEQ ID NO: 1543607 - DNA, 25 bp, Homo sapien
cctggagccggtacagccaatggtg

SEQ ID NO: 1543608 - DNA, 25 bp, Homo sapien
gccggtacagccaatggtggaggcg

SEQ ID NO: 1543609 - DNA, 25 bp, Homo sapien
gggcctcctggagccggtacagcca

SEQ ID NO: 1543610 - DNA, 25 bp, Homo sapien
ccggtacagccaatggtggaggcgg

SEQ ID NO: 1543611 - DNA, 25 bp, Homo sapien
ggcaacacaattcaggtctcgcgtg

SEQ ID NO: 1543612 - DNA, 25 bp, Homo sapien
aacacaattcaggtctcgcgtgagg

SEQ ID NO: 1543613 - DNA, 25 bp, Homo sapien
gcaacacaattcaggtctcgcgtga

SEQ ID NO: 1543614 - DNA, 25 bp, Homo sapien
caacacaattcaggtctcgcgtgag

SEQ ID NO: 1543615 - DNA, 25 bp, Homo sapien
cagacacacagtccaacgtcatgag

SEQ ID NO: 1543616 - DNA, 25 bp, Homo sapien
aaatctcaggttgcatgactggtgg

SEQ ID NO: 1543617 - DNA, 25 bp, Homo sapien
gaggtgagttggatttacacacaca

SEQ ID NO: 1543618 - DNA, 25 bp, Homo sapien
taaatagcgactgggtggcaataaa

SEQ ID NO: 1543619 - DNA, 25 bp, Homo sapien
tgggcaatccaagatgatgtgtgta

SEQ ID NO: 1543620 - DNA, 25 bp, Homo sapien
ggctaaatcgcaactgcttccccag

SEQ ID NO: 1543621 - DNA, 25 bp, Homo sapien
tccccagcggcatggctctgctttt

SEQ ID NO: 1543622 - DNA, 25 bp, Homo sapien
tgctttttagccacgcaaaatgggc

SEQ ID NO: 1543623 - DNA, 25 bp, Homo sapien
caaggcgtccctggccttcttgaag

SEQ ID NO: 1543624 - DNA, 25 bp, Homo sapien
gagatttgaacctgccaatgtggca

SEQ ID NO: 1543625 - DNA, 25 bp, Homo sapien
ccttcccagttgtggtgggcttgga

SEQ ID NO: 1543626 - DNA, 25 bp, Homo sapien
tcttgaagctcgctagctcctgtgg

SEQ ID NO: 1543627 - DNA, 25 bp, Homo sapien
caggagagctgcaactccagttttt

SEQ ID NO: 1543628 - DNA, 25 bp, Homo sapien
aagacaggagagctgcaactccagt

SEQ ID NO: 1543629 - DNA, 25 bp, Homo sapien
agaagcctcaggtcccaattcccgg

SEQ ID NO: 1543630 - DNA, 25 bp, Homo sapien
tggagaagcctcaggtcccaattcc

SEQ ID NO: 1543631 - DNA, 25 bp, Homo sapien
gcctccaggaccttcagcgtcaggg

SEQ ID NO: 1543632 - DNA, 25 bp, Homo sapien
ccaggaccttcagcgtcagggccag

SEQ ID NO: 1543633 - DNA, 25 bp, Homo sapien
gggctggtctaggacgtcctccagg

SEQ ID NO: 1543634 - DNA, 25 bp, Homo sapien
tgaaggggctggtctaggacgtcct

SEQ ID NO: 1543635 - DNA, 25 bp, Homo sapien
tgggtgcccgggccccaaggactca

SEQ ID NO: 1543636 - DNA, 25 bp, Homo sapien
agccggtgcagccagtggtggaggc

SEQ ID NO: 1543637 - DNA, 25 bp, Homo sapien
cggtgcagccagtggtggaggcggc

SEQ ID NO: 1543638 - DNA, 25 bp, Homo sapien
cctggagccggtgcagccagtggtg

SEQ ID NO: 1543639 - DNA, 25 bp, Homo sapien
gggcctcctggagccggtgcagcca

SEQ ID NO: 1543640 - DNA, 25 bp, Homo sapien
aggtctcgcgtgaggaggcggaaga

SEQ ID NO: 1543641 - DNA, 25 bp, Homo sapien
aggaggcggaagaggttgaaggtga

SEQ ID NO: 1543642 - DNA, 25 bp, Homo sapien
gaggcggaagaggttgaaggtgaca

SEQ ID NO: 1543643 - DNA, 25 bp, Homo sapien
ggcggaagaggttgaaggtgacaga

SEQ ID NO: 1543644 - DNA, 25 bp, Homo sapien
actcagggtgggttgacgttctcag

SEQ ID NO: 1543645 - DNA, 25 bp, Homo sapien
cagggtgggttgacgttctcagaca

SEQ ID NO: 1543646 - DNA, 25 bp, Homo sapien
tcagggtgggttgacgttctcagac

SEQ ID NO: 1543647 - DNA, 25 bp, Homo sapien
ctcagggtgggttgacgttctcaga

SEQ ID NO: 1543648 - DNA, 25 bp, Homo sapien
tagggctcagcgcataaataaggtg

SEQ ID NO: 1543649 - DNA, 25 bp, Homo sapien
caataaactcagccctatgtctcag

SEQ ID NO: 1543650 - DNA, 25 bp, Homo sapien
ggctcagcgcataaataaggtgtgg

SEQ ID NO: 1543651 - DNA, 25 bp, Homo sapien
acaataaactcagccctatgtctca

SEQ ID NO: 1543652 - DNA, 25 bp, Homo sapien
ttggatgtccatccccgggtctgtg

SEQ ID NO: 1543653 - DNA, 25 bp, Homo sapien
ccaagcccatgtgcgtgcgcgacta

SEQ ID NO: 1543654 - DNA, 25 bp, Homo sapien
gtttgtgtccgggttggatgtccat

SEQ ID NO: 1543655 - DNA, 25 bp, Homo sapien
tgtgcgtgcgcgactagctgctctg

SEQ ID NO: 1543656 - DNA, 25 bp, Homo sapien
tctcgggcccgcaagctcccctccc

SEQ ID NO: 1543657 - DNA, 25 bp, Homo sapien
ctctcgggcccgcaagctcccctcc

SEQ ID NO: 1543658 - DNA, 25 bp, Homo sapien
ccctctcgggcccgcaagctcccct

SEQ ID NO: 1543659 - DNA, 25 bp, Homo sapien
ctcgggcccgcaagctcccctccct

SEQ ID NO: 1543660 - DNA, 25 bp, Homo sapien
cattgcaattatgggcaagacattg

SEQ ID NO: 1543661 - DNA, 25 bp, Homo sapien
tttgacccaaggcactaccatcttg

SEQ ID NO: 1543662 - DNA, 25 bp, Homo sapien
taatgtgggatacaaatcctgtcca

SEQ ID NO: 1543663 - DNA, 25 bp, Homo sapien
gggtctgcatacctaacaactactg

SEQ ID NO: 1543664 - DNA, 25 bp, Homo sapien
ggaaggagtctatgatatcatcatc

SEQ ID NO: 1543665 - DNA, 25 bp, Homo sapien
gcctcatctgcccagtaggaaggag

SEQ ID NO: 1543666 - DNA, 25 bp, Homo sapien
tctgcccagtaggaaggagtctatg

SEQ ID NO: 1543667 - DNA, 25 bp, Homo sapien
tcatctgcccagtaggaaggagtct

SEQ ID NO: 1543668 - DNA, 25 bp, Homo sapien
cacactggtccttgcgattccctga

SEQ ID NO: 1543669 - DNA, 25 bp, Homo sapien
taatcagatcatgtcgctgtcttgc

SEQ ID NO: 1543670 - DNA, 25 bp, Homo sapien
tgaaatgctcttccccggaccgtca

SEQ ID NO: 1543671 - DNA, 25 bp, Homo sapien
ggcccttaggctgcaagtaatctgg

SEQ ID NO: 1543672 - DNA, 25 bp, Homo sapien
aaaacagaatgcactactggtctgg

SEQ ID NO: 1543673 - DNA, 25 bp, Homo sapien
gagccttgacaattcccatgcaaaa

SEQ ID NO: 1543674 - DNA, 25 bp, Homo sapien
tagatgcagctagcctgaagcctcc

SEQ ID NO: 1543675 - DNA, 25 bp, Homo sapien
tgatcttcttgggaagcccctacca

SEQ ID NO: 1543676 - DNA, 25 bp, Homo sapien
gaacatgactggtggagaagatcta

SEQ ID NO: 1543677 - DNA, 25 bp, Homo sapien
tggatggccctcttccattaaaggg

SEQ ID NO: 1543678 - DNA, 25 bp, Homo sapien
gcctggccaaggatagtcctctctg

SEQ ID NO: 1543679 - DNA, 25 bp, Homo sapien
catcttctagtatcaacaccctggg

SEQ ID NO: 1543680 - DNA, 25 bp, Homo sapien
atcacattgaaacaatagtgaacaa

SEQ ID NO: 1543681 - DNA, 25 bp, Homo sapien
ctattttcaaatgtgggaaacgaat

SEQ ID NO: 1543682 - DNA, 25 bp, Homo sapien
attttcaaatgtgggaaacgaatca

SEQ ID NO: 1543683 - DNA, 25 bp, Homo sapien
cacattgaaacaatagtgaacaact

SEQ ID NO: 1543684 - DNA, 25 bp, Homo sapien
tatagaagaatacaccctcggctgc

SEQ ID NO: 1543685 - DNA, 25 bp, Homo sapien
gggtgtccataagctacacagtaat

SEQ ID NO: 1543686 - DNA, 25 bp, Homo sapien
ggctgctaacactatcttggagaaa

SEQ ID NO: 1543687 - DNA, 25 bp, Homo sapien
actttgtactacttcactagttgca

SEQ ID NO: 1543688 - DNA, 25 bp, Homo sapien
tgggaatatccattaatggggaatg

SEQ ID NO: 1543689 - DNA, 25 bp, Homo sapien
taataaactggggcagatcccacat

SEQ ID NO: 1543690 - DNA, 25 bp, Homo sapien
atgggaatatccattaatggggaat

SEQ ID NO: 1543691 - DNA, 25 bp, Homo sapien
atgattaataaactggggcagatcc

SEQ ID NO: 1543692 - DNA, 25 bp, Homo sapien
ctcacaggctaactccaatcgattg

SEQ ID NO: 1543693 - DNA, 25 bp, Homo sapien
caggctaactccaatcgattggtag

SEQ ID NO: 1543694 - DNA, 25 bp, Homo sapien
actccaatcgattggtagtggctgc

SEQ ID NO: 1543695 - DNA, 25 bp, Homo sapien
taactccaatcgattggtagtggct

SEQ ID NO: 1543696 - DNA, 25 bp, Homo sapien
aatgtaggataaggagcgggactgg

SEQ ID NO: 1543697 - DNA, 25 bp, Homo sapien
tgatcacggagctagtctgttctct

SEQ ID NO: 1543698 - DNA, 25 bp, Homo sapien
gcccaagccactgattcactttgat

SEQ ID NO: 1543699 - DNA, 25 bp, Homo sapien
cgggactgggtgagacatgacaaat

SEQ ID NO: 1543700 - DNA, 25 bp, Homo sapien
gaggtcttggtccagccacgcctct

SEQ ID NO: 1543701 - DNA, 25 bp, Homo sapien
aggaagcctgctcacatggggggag

SEQ ID NO: 1543702 - DNA, 25 bp, Homo sapien
ctcacatggggggaggtcttggtcc

SEQ ID NO: 1543703 - DNA, 25 bp, Homo sapien
tgggcgtggtggcaacggttgttgg

SEQ ID NO: 1543704 - DNA, 25 bp, Homo sapien
ccagcgccgtcacatggtcccggct

SEQ ID NO: 1543705 - DNA, 25 bp, Homo sapien
gagggccagcgccgtcacatggtcc

SEQ ID NO: 1543706 - DNA, 25 bp, Homo sapien
gcgccgtcacatggtcccggctctg

SEQ ID NO: 1543707 - DNA, 25 bp, Homo sapien
ggtggcgagggccagcgccgtcaca

SEQ ID NO: 1543708 - DNA, 25 bp, Homo sapien
caggtggatgtcattgcagtccgcc

SEQ ID NO: 1543709 - DNA, 25 bp, Homo sapien
ctgttggcctccgactccagcaggt

SEQ ID NO: 1543710 - DNA, 25 bp, Homo sapien
cctggtctcggaacatcatggtgcc

SEQ ID NO: 1543711 - DNA, 25 bp, Homo sapien
cgggtgacccgtttcagaagtgaca

SEQ ID NO: 1543712 - DNA, 25 bp, Homo sapien
tcccatctctaagggtggaaactca

SEQ ID NO: 1543713 - DNA, 25 bp, Homo sapien
ctgctgtgctcccatctctaagggt

SEQ ID NO: 1543714 - DNA, 25 bp, Homo sapien
tgctcccatctctaagggtggaaac

SEQ ID NO: 1543715 - DNA, 25 bp, Homo sapien
tgtgctcccatctctaagggtggaa

SEQ ID NO: 1543716 - DNA, 25 bp, Homo sapien
gaaatggctgagctccgagcctgct

SEQ ID NO: 1543717 - DNA, 25 bp, Homo sapien
gaggtaatccaactgcctgctcagg

SEQ ID NO: 1543718 - DNA, 25 bp, Homo sapien
tgtgacgaagctgtgtaagacactg

SEQ ID NO: 1543719 - DNA, 25 bp, Homo sapien
tatacagctaagagtggcacccaga

SEQ ID NO: 1543720 - DNA, 25 bp, Homo sapien
cttttgtactatctgattttactgc

SEQ ID NO: 1543721 - DNA, 25 bp, Homo sapien
tttgtactatctgattttactgcaa

SEQ ID NO: 1543722 - DNA, 25 bp, Homo sapien
tgtactatctgattttactgcaagt

SEQ ID NO: 1543723 - DNA, 25 bp, Homo sapien
gtactatctgattttactgcaagtt

SEQ ID NO: 1543724 - DNA, 25 bp, Homo sapien
tgagaacgtgaagtctggaagaaaa

SEQ ID NO: 1543725 - DNA, 25 bp, Homo sapien
gctgaatacggaatgatcttcaaat

SEQ ID NO: 1543726 - DNA, 25 bp, Homo sapien
tgcagggaatttatctcataaaaca

SEQ ID NO: 1543727 - DNA, 25 bp, Homo sapien
tacttaacgagaaacagacgtatgt

SEQ ID NO: 1543728 - DNA, 25 bp, Homo sapien
tgagacaatcatgcaaagcgtctgg

SEQ ID NO: 1543729 - DNA, 25 bp, Homo sapien
gattccttggagctagaagtacaac

SEQ ID NO: 1543730 - DNA, 25 bp, Homo sapien
tcgttgaatctagagcccatgctgt

SEQ ID NO: 1543731 - DNA, 25 bp, Homo sapien
ggaactggcccaagtaatttgtgca

SEQ ID NO: 1543732 - DNA, 25 bp, Homo sapien
ttacccacaaccttttatctctcca

SEQ ID NO: 1543733 - DNA, 25 bp, Homo sapien
agtatcaagcttctaaactcaggtg

SEQ ID NO: 1543734 - DNA, 25 bp, Homo sapien
aaggtgaggtcacacaccctaagtg

SEQ ID NO: 1543735 - DNA, 25 bp, Homo sapien
tgacagagcccattaagcgacacag

SEQ ID NO: 1543736 - DNA, 25 bp, Homo sapien
catattggccatgctagtatcaagc

SEQ ID NO: 1543737 - DNA, 25 bp, Homo sapien
gaggtcaccatactggggccacact

SEQ ID NO: 1543738 - DNA, 25 bp, Homo sapien
ccatactggggccacacttagtgca

SEQ ID NO: 1543739 - DNA, 25 bp, Homo sapien
cagtcatgtgcccaccacagctggt

SEQ ID NO: 1543740 - DNA, 25 bp, Homo sapien
ctacagtcatgtgcccaccacagct

SEQ ID NO: 1543741 - DNA, 25 bp, Homo sapien
gtggggtactcctattcacctgaga

SEQ ID NO: 1543742 - DNA, 25 bp, Homo sapien
tcctattcacctgagagcactgcct

SEQ ID NO: 1543743 - DNA, 25 bp, Homo sapien
gggtactcctattcacctgagagca

SEQ ID NO: 1543744 - DNA, 25 bp, Homo sapien
agccagggtggggtactcctattca

SEQ ID NO: 1543745 - DNA, 25 bp, Homo sapien
gactctcctcgatgaaagcattgct

SEQ ID NO: 1543746 - DNA, 25 bp, Homo sapien
agtagcctcatgtactccgacttgg

SEQ ID NO: 1543747 - DNA, 25 bp, Homo sapien
tctcgattgagtaggccagcacttt

SEQ ID NO: 1543748 - DNA, 25 bp, Homo sapien
caatactgttgatggctggcggcac

SEQ ID NO: 1543749 - DNA, 25 bp, Homo sapien
tgaggcctacagcttatgtgacttg

SEQ ID NO: 1543750 - DNA, 25 bp, Homo sapien
gcgagagagctctcactgagcctag

SEQ ID NO: 1543751 - DNA, 25 bp, Homo sapien
ctgggaaagccagttcacagcctct

SEQ ID NO: 1543752 - DNA, 25 bp, Homo sapien
tgagcctagtccaacctttttcaag

SEQ ID NO: 1543753 - DNA, 25 bp, Homo sapien
cagatggaccagaatagccacacta

SEQ ID NO: 1543754 - DNA, 25 bp, Homo sapien
agatggaccagaatagccacactaa

SEQ ID NO: 1543755 - DNA, 25 bp, Homo sapien
tctggactcggccactcaccaggga

SEQ ID NO: 1543756 - DNA, 25 bp, Homo sapien
tgatcgggcgtggtaaaagcagccc

SEQ ID NO: 1543757 - DNA, 25 bp, Homo sapien
ggcgagagaggtgcgtgatcgggcg

SEQ ID NO: 1543758 - DNA, 25 bp, Homo sapien
atgagtgacatggagcgcttcagtg

SEQ ID NO: 1543759 - DNA, 25 bp, Homo sapien
aggtgttccggctggagccctgctc

SEQ ID NO: 1543760 - DNA, 25 bp, Homo sapien
gctcactgccagaggaggccacgct

SEQ ID NO: 1543761 - DNA, 25 bp, Homo sapien
cctctgtctgctcactgccagagga

SEQ ID NO: 1543762 - DNA, 25 bp, Homo sapien
ccatcctcctggaaggtgttccggc

SEQ ID NO: 1543763 - DNA, 25 bp, Homo sapien
tgcatacttgtgcaaacggaggctc

SEQ ID NO: 1543764 - DNA, 25 bp, Homo sapien
catacttgtgcaaacggaggctctt

SEQ ID NO: 1543765 - DNA, 25 bp, Homo sapien
gggctgcatacttgtgcaaacggag

SEQ ID NO: 1543766 - DNA, 25 bp, Homo sapien
tccaggtgctgctcagtcagtgtca

SEQ ID NO: 1543767 - DNA, 25 bp, Homo sapien
gctctgtctctcacgcagcttctgg

SEQ ID NO: 1543768 - DNA, 25 bp, Homo sapien
tgctcagggctatcttgtggcgggc

SEQ ID NO: 1543769 - DNA, 25 bp, Homo sapien
tcttgtggcgggcacctttggtgac

SEQ ID NO: 1543770 - DNA, 25 bp, Homo sapien
gacttgaggacgctctgtctctcac

SEQ ID NO: 1543771 - DNA, 25 bp, Homo sapien
ccccatccttggcagtaggggtggt

SEQ ID NO: 1543772 - DNA, 25 bp, Homo sapien
gcagagcgtttcgtaggttcccgcc

SEQ ID NO: 1543773 - DNA, 25 bp, Homo sapien
tgcagctcctgcagagcgtttcgta

SEQ ID NO: 1543774 - DNA, 25 bp, Homo sapien
cctggaggacactgtaggccttgat

SEQ ID NO: 1543775 - DNA, 25 bp, Homo sapien
tgggtagttctccacagctggaggg

SEQ ID NO: 1543776 - DNA, 25 bp, Homo sapien
ctttgcccatcacccgtgtaaactg

SEQ ID NO: 1543777 - DNA, 25 bp, Homo sapien
ccatcacccgtgtaaactggctggg

SEQ ID NO: 1543778 - DNA, 25 bp, Homo sapien
ggatgtctccgtcggcgacgggagc

SEQ ID NO: 1543779 - DNA, 25 bp, Homo sapien
cacttttcgatgagctggaggtaac

SEQ ID NO: 1543780 - DNA, 25 bp, Homo sapien
gttctcctcgtctggtcgggacacc

SEQ ID NO: 1543781 - DNA, 25 bp, Homo sapien
aggtaactggtgatgttctcctcgt

SEQ ID NO: 1543782 - DNA, 25 bp, Homo sapien
tgagtcaggcacttttcgatgagct

SEQ ID NO: 1543783 - DNA, 25 bp, Homo sapien
gaatgtccggaggagcttcagcact

SEQ ID NO: 1543784 - DNA, 25 bp, Homo sapien
tctgctgccggtagttctgcatctc

SEQ ID NO: 1543785 - DNA, 25 bp, Homo sapien
tgcatctctagtgcggctttgcgcg

SEQ ID NO: 1543786 - DNA, 25 bp, Homo sapien
acttgctgtttccaggatagcagcc

SEQ ID NO: 1543787 - DNA, 25 bp, Homo sapien
tgagggcatgtcgaggggagacacc

SEQ ID NO: 1543788 - DNA, 25 bp, Homo sapien
ccacagagccagctatggggagcga

SEQ ID NO: 1543789 - DNA, 25 bp, Homo sapien
attgggaactgccgctgggtacgcc

SEQ ID NO: 1543790 - DNA, 25 bp, Homo sapien
tcaggaggcccatccggccgggtgg

SEQ ID NO: 1543791 - DNA, 25 bp, Homo sapien
agtggaccgggagcgagtgggtgcg

SEQ ID NO: 1543792 - DNA, 25 bp, Homo sapien
cgagtgggtgcgctgcacagagctg

SEQ ID NO: 1543793 - DNA, 25 bp, Homo sapien
aatggcctggggtgacgagtggacc

SEQ ID NO: 1543794 - DNA, 25 bp, Homo sapien
ggctctgactgggcatgctgttgct

SEQ ID NO: 1543795 - DNA, 25 bp, Homo sapien
gagaggtgccaatgcagtctagaag

SEQ ID NO: 1543796 - DNA, 25 bp, Homo sapien
gattatgacatagggtgggaaacat

SEQ ID NO: 1543797 - DNA, 25 bp, Homo sapien
gatgggtgcagagtggtgtgaggta

SEQ ID NO: 1543798 - DNA, 25 bp, Homo sapien
caagacctgagagataaaattgaag

SEQ ID NO: 1543799 - DNA, 25 bp, Homo sapien
gcgtgttctgtcatgctcagacaca

SEQ ID NO: 1543800 - DNA, 25 bp, Homo sapien
cacagagactccagagtgggattga

SEQ ID NO: 1543801 - DNA, 25 bp, Homo sapien
cagagtgggattgatctccaggtca

SEQ ID NO: 1543802 - DNA, 25 bp, Homo sapien
cacccaaggcgtgttctgtcatgct

SEQ ID NO: 1543803 - DNA, 25 bp, Homo sapien
ggcactcaggtagcctgtcatccca

SEQ ID NO: 1543804 - DNA, 25 bp, Homo sapien
tgactctgagttgctcagttcagag

SEQ ID NO: 1543805 - DNA, 25 bp, Homo sapien
tcagaggcagagacgctgggtaggt

SEQ ID NO: 1543806 - DNA, 25 bp, Homo sapien
ggtagcctgtcatcccagtcaggcc

SEQ ID NO: 1543807 - DNA, 25 bp, Homo sapien
gaaagggaggaagggaggaagatca

SEQ ID NO: 1543808 - DNA, 25 bp, Homo sapien
aagggaggaagggaggaagatcagg

SEQ ID NO: 1543809 - DNA, 25 bp, Homo sapien
agggaggaagggaggaagatcagga

SEQ ID NO: 1543810 - DNA, 25 bp, Homo sapien
gggaggaagggaggaagatcaggag

SEQ ID NO: 1543811 - DNA, 25 bp, Homo sapien
gcatgtgccaatgttaaacaaaagt

SEQ ID NO: 1543812 - DNA, 25 bp, Homo sapien
cgcccagggagcctatgggtgcgct

SEQ ID NO: 1543813 - DNA, 25 bp, Homo sapien
ctcgctgtcgcggagaagcccgttg

SEQ ID NO: 1543814 - DNA, 25 bp, Homo sapien
tattagaatatatagctgagccagc

SEQ ID NO: 1543815 - DNA, 25 bp, Homo sapien
tgatcagagaaaaaccgttaagaac

SEQ ID NO: 1543816 - DNA, 25 bp, Homo sapien
tctcccctcataaagttcaggctct

SEQ ID NO: 1543817 - DNA, 25 bp, Homo sapien
gctccacaaggtagtggtcagtttg

SEQ ID NO: 1543818 - DNA, 25 bp, Homo sapien
catagagaacctctggtgaacaggg

SEQ ID NO: 1543819 - DNA, 25 bp, Homo sapien
aacctcttcatccgggtagccaggg

SEQ ID NO: 1543820 - DNA, 25 bp, Homo sapien
caacctcttcatccgggtagccagg

SEQ ID NO: 1543821 - DNA, 25 bp, Homo sapien
ccaacctcttcatccgggtagccag

SEQ ID NO: 1543822 - DNA, 25 bp, Homo sapien
ttaggaatagggaccagacagtctg

SEQ ID NO: 1543823 - DNA, 25 bp, Homo sapien
gacgttaaggcaacagacttcctga

SEQ ID NO: 1543824 - DNA, 25 bp, Homo sapien
gctgggacgaatctctgggttatga

SEQ ID NO: 1543825 - DNA, 25 bp, Homo sapien
caagtctcaccaaccagacctggga

SEQ ID NO: 1543826 - DNA, 25 bp, Homo sapien
caccctgatggagagtgaacaagac

SEQ ID NO: 1543827 - DNA, 25 bp, Homo sapien
caaataagtcttctccaacagcgag

SEQ ID NO: 1543828 - DNA, 25 bp, Homo sapien
cccatgagagggacaccctgctgat

SEQ ID NO: 1543829 - DNA, 25 bp, Homo sapien
tgctgattccaaacgaggtggccca

SEQ ID NO: 1543830 - DNA, 25 bp, Homo sapien
cgccggaagtgcgttacgactgcgt

SEQ ID NO: 1543831 - DNA, 25 bp, Homo sapien
ttcctcgcgtagaccgccggaagtg

SEQ ID NO: 1543832 - DNA, 25 bp, Homo sapien
agtgcgttacgactgcgtctctccc

SEQ ID NO: 1543833 - DNA, 25 bp, Homo sapien
cttcctcgcgtagaccgccggaagt

SEQ ID NO: 1543834 - DNA, 25 bp, Homo sapien
cccaccagttgtgctggcggttgcg

SEQ ID NO: 1543835 - DNA, 25 bp, Homo sapien
gaactaggacccgatacaccagcag

SEQ ID NO: 1543836 - DNA, 25 bp, Homo sapien
gccagccgaactaggacccgataca

SEQ ID NO: 1543837 - DNA, 25 bp, Homo sapien
ggacccgatacaccagcagctgagg

SEQ ID NO: 1543838 - DNA, 25 bp, Homo sapien
gcacaggatcgaagtcctgttgctg

SEQ ID NO: 1543839 - DNA, 25 bp, Homo sapien
ctgcacaggatcgaagtcctgttgc

SEQ ID NO: 1543840 - DNA, 25 bp, Homo sapien
tgcacaggatcgaagtcctgttgct

SEQ ID NO: 1543841 - DNA, 25 bp, Homo sapien
cttcagctgcgggatgagcatctta

SEQ ID NO: 1543842 - DNA, 25 bp, Homo sapien
cagctgcgggatgagcatcttataa

SEQ ID NO: 1543843 - DNA, 25 bp, Homo sapien
gctgcgggatgagcatcttataacg

SEQ ID NO: 1543844 - DNA, 25 bp, Homo sapien
tctccttcagctgcgggatgagcat

SEQ ID NO: 1543845 - DNA, 25 bp, Homo sapien
ttttgggccgcaaccttcatcaagg

SEQ ID NO: 1543846 - DNA, 25 bp, Homo sapien
ctgaatcaagttttgggccgcaacc

SEQ ID NO: 1543847 - DNA, 25 bp, Homo sapien
tcgatgttagtgttctgaatcaagt

SEQ ID NO: 1543848 - DNA, 25 bp, Homo sapien
tgtcgatgttagtgttctgaatcaa

SEQ ID NO: 1543849 - DNA, 25 bp, Homo sapien
acagagtgcatagaactcttccagg

SEQ ID NO: 1543850 - DNA, 25 bp, Homo sapien
cagagtgcatagaactcttccaggc

SEQ ID NO: 1543851 - DNA, 25 bp, Homo sapien
gtcacagagtgcatagaactcttcc

SEQ ID NO: 1543852 - DNA, 25 bp, Homo sapien
cacagagtgcatagaactcttccag

SEQ ID NO: 1543853 - DNA, 25 bp, Homo sapien
tgtgacaggcactcatgcgccaggc

SEQ ID NO: 1543854 - DNA, 25 bp, Homo sapien
tggagagtgcttggcactgtcacaa

SEQ ID NO: 1543855 - DNA, 25 bp, Homo sapien
gtgacaggcactcatgcgccaggcg

SEQ ID NO: 1543856 - DNA, 25 bp, Homo sapien
ggtgtgaatgtccttggcacaggaa

SEQ ID NO: 1543857 - DNA, 25 bp, Homo sapien
tttgatgaccgccaggtactgtggg

SEQ ID NO: 1543858 - DNA, 25 bp, Homo sapien
tgtcaggctgcactgcgtcgggctt

SEQ ID NO: 1543859 - DNA, 25 bp, Homo sapien
cacagtccagcagggcggtgtgaat

SEQ ID NO: 1543860 - DNA, 25 bp, Homo sapien
ggtggtgcgggtgtcttgcccgtga

SEQ ID NO: 1543861 - DNA, 25 bp, Homo sapien
gtggtgcgggtgtcttgcccgtgac

SEQ ID NO: 1543862 - DNA, 25 bp, Homo sapien
ggacgctcttcattccctttgcaca

SEQ ID NO: 1543863 - DNA, 25 bp, Homo sapien
ttcattccctttgcacaccacccac

SEQ ID NO: 1543864 - DNA, 25 bp, Homo sapien
ccaggacgctcttcattccctttgc

SEQ ID NO: 1543865 - DNA, 25 bp, Homo sapien
tttaggcccaggacgctcttcattc

SEQ ID NO: 1543866 - DNA, 25 bp, Homo sapien
gagaaattcctcctagggacagcgc

SEQ ID NO: 1543867 - DNA, 25 bp, Homo sapien
tagacacagagtcccagttaggagc

SEQ ID NO: 1543868 - DNA, 25 bp, Homo sapien
taatagagacacagaggagtggcac

SEQ ID NO: 1543869 - DNA, 25 bp, Homo sapien
tgaatcacagaggtatccatggtcc

SEQ ID NO: 1543870 - DNA, 25 bp, Homo sapien
taactgcatcatgttgggtgggact

SEQ ID NO: 1543871 - DNA, 25 bp, Homo sapien
tgtgtgcgctcatggaccgacatct

SEQ ID NO: 1543872 - DNA, 25 bp, Homo sapien
tacccaatgtgtttgctgagtgcaa

SEQ ID NO: 1543873 - DNA, 25 bp, Homo sapien
tggttttaagcattggtaggccctg

SEQ ID NO: 1543874 - DNA, 25 bp, Homo sapien
catggaacatatataaaccataatg

SEQ ID NO: 1543875 - DNA, 25 bp, Homo sapien
gaatgctcacgaaaccacaatccaa

SEQ ID NO: 1543876 - DNA, 25 bp, Homo sapien
taatgaatgctcacgaaaccacaat

SEQ ID NO: 1543877 - DNA, 25 bp, Homo sapien
accataatgaatgctcacgaaacca

SEQ ID NO: 1543878 - DNA, 25 bp, Homo sapien
catgaggggtgtcggccgagagtgg

SEQ ID NO: 1543879 - DNA, 25 bp, Homo sapien
gtgtcggccgagagtgggagcgctg

SEQ ID NO: 1543880 - DNA, 25 bp, Homo sapien
ggccatgaggggtgtcggccgagag

SEQ ID NO: 1543881 - DNA, 25 bp, Homo sapien
gggtgtcggccgagagtgggagcgc

SEQ ID NO: 1543882 - DNA, 25 bp, Homo sapien
gtgtcgcgggttccattttcacctc

SEQ ID NO: 1543883 - DNA, 25 bp, Homo sapien
caaatcaccaagctggtctgagcgg

SEQ ID NO: 1543884 - DNA, 25 bp, Homo sapien
cacccatgtttgagcgaagagccgg

SEQ ID NO: 1543885 - DNA, 25 bp, Homo sapien
caggcagcctcggtctgagaaaagt

SEQ ID NO: 1543886 - DNA, 25 bp, Homo sapien
ggttctctgtctctacggtcaggga

SEQ ID NO: 1543887 - DNA, 25 bp, Homo sapien
tgacctggaagtccggattgcttcg

SEQ ID NO: 1543888 - DNA, 25 bp, Homo sapien
ggatatgacccacgcgtcgggatct

SEQ ID NO: 1543889 - DNA, 25 bp, Homo sapien
ggtctcttgtcctccccggatatga

SEQ ID NO: 1543890 - DNA, 25 bp, Homo sapien
ccaccaccgaggccttatcccgagg

SEQ ID NO: 1543891 - DNA, 25 bp, Homo sapien
caccaccgaggccttatcccgaggg

SEQ ID NO: 1543892 - DNA, 25 bp, Homo sapien
ttccggatgccaggaacccagagtt

SEQ ID NO: 1543893 - DNA, 25 bp, Homo sapien
gcagaaacccctgggttccggatgc

SEQ ID NO: 1543894 - DNA, 25 bp, Homo sapien
cggatgccaggaacccagagttgga

SEQ ID NO: 1543895 - DNA, 25 bp, Homo sapien
cgcagaaacccctgggttccggatg

SEQ ID NO: 1543896 - DNA, 25 bp, Homo sapien
ctagagcttgccaggccggtttgtg

SEQ ID NO: 1543897 - DNA, 25 bp, Homo sapien
agctgcagggaactagagcttgcca

SEQ ID NO: 1543898 - DNA, 25 bp, Homo sapien
ttgccaggccggtttgtgggctccc

SEQ ID NO: 1543899 - DNA, 25 bp, Homo sapien
ctgaaaatgcagggcgacgccccac

SEQ ID NO: 1543900 - DNA, 25 bp, Homo sapien
ctgcggaaatgggtcggttaaggca

SEQ ID NO: 1543901 - DNA, 25 bp, Homo sapien
tgcggaaatgggtcggttaaggcac

SEQ ID NO: 1543902 - DNA, 25 bp, Homo sapien
tcagtccctccatggtcggatggca

SEQ ID NO: 1543903 - DNA, 25 bp, Homo sapien
ctccatggtcggatggcacgggcac

SEQ ID NO: 1543904 - DNA, 25 bp, Homo sapien
gggctggactcagtccctccatggt

SEQ ID NO: 1543905 - DNA, 25 bp, Homo sapien
ccccagacgggctggagtcggaggg

SEQ ID NO: 1543906 - DNA, 25 bp, Homo sapien
cctcgaagacgggagagtcagagcc

SEQ ID NO: 1543907 - DNA, 25 bp, Homo sapien
gcatattcatcagggtcggatccca

SEQ ID NO: 1543908 - DNA, 25 bp, Homo sapien
tctctgagaaggtccgacatagctc

SEQ ID NO: 1543909 - DNA, 25 bp, Homo sapien
catagctcagtcttgtagcgcgagg

SEQ ID NO: 1543910 - DNA, 25 bp, Homo sapien
tacaagggaagcagacgacccaata

SEQ ID NO: 1543911 - DNA, 25 bp, Homo sapien
gtcgtcataaataaagggcccattg

SEQ ID NO: 1543912 - DNA, 25 bp, Homo sapien
gagatccagctgatctgaccgggca

SEQ ID NO: 1543913 - DNA, 25 bp, Homo sapien
ccacagtgcaagagacgtggctccc

SEQ ID NO: 1543914 - DNA, 25 bp, Homo sapien
cgcttccccaacatccagaaggtgt

SEQ ID NO: 1543915 - DNA, 25 bp, Homo sapien
caccctttcaggtgaacggccaggc

SEQ ID NO: 1543916 - DNA, 25 bp, Homo sapien
ggctcggagaggaagagttaactgc

SEQ ID NO: 1543917 - DNA, 25 bp, Homo sapien
tcctgtctctagaccgcgaagaagc

SEQ ID NO: 1543918 - DNA, 25 bp, Homo sapien
tatgacagtgcgagcggagcaatgc

SEQ ID NO: 1543919 - DNA, 25 bp, Homo sapien
ttagcgcgcggtacttatatgacag

SEQ ID NO: 1543920 - DNA, 25 bp, Homo sapien
atgaaccactgaagaagaccccggc

SEQ ID NO: 1543921 - DNA, 25 bp, Homo sapien
ttgggctcaaaagactcctagggct

SEQ ID NO: 1543922 - DNA, 25 bp, Homo sapien
ggatctcaagttcctccaacgcggg

SEQ ID NO: 1543923 - DNA, 25 bp, Homo sapien
ccgctgcagcccgaaactggttggg

SEQ ID NO: 1543924 - DNA, 25 bp, Homo sapien
gggcgcttagaagtccggatctcaa

SEQ ID NO: 1543925 - DNA, 25 bp, Homo sapien
gatgcggtgcagaaattccggacgc

SEQ ID NO: 1543926 - DNA, 25 bp, Homo sapien
tgagacaaagaagagtgagcggagc

SEQ ID NO: 1543927 - DNA, 25 bp, Homo sapien
gaagctgcgagtcccgtttgtctgg

SEQ ID NO: 1543928 - DNA, 25 bp, Homo sapien
aggaggcgcagaagctgcgagtccc

SEQ ID NO: 1543929 - DNA, 25 bp, Homo sapien
cgcagaagctgcgagtcccgtttgt

SEQ ID NO: 1543930 - DNA, 25 bp, Homo sapien
cccttcttggatatcaggaccccat

SEQ ID NO: 1543931 - DNA, 25 bp, Homo sapien
tccgccgcccagactcacagatggg

SEQ ID NO: 1543932 - DNA, 25 bp, Homo sapien
attaggagcgtggtgtaaatccagg

SEQ ID NO: 1543933 - DNA, 25 bp, Homo sapien
agagccccttcttggatatcaggac

SEQ ID NO: 1543934 - DNA, 25 bp, Homo sapien
cacacccgaggcttgggctaggttt

SEQ ID NO: 1543935 - DNA, 25 bp, Homo sapien
ggctaggtttggagaggctcagtcc

SEQ ID NO: 1543936 - DNA, 25 bp, Homo sapien
tcttcggccacacccgaggcttggg

SEQ ID NO: 1543937 - DNA, 25 bp, Homo sapien
ctgtccgagtctcacacacggtgcc

SEQ ID NO: 1543938 - DNA, 25 bp, Homo sapien
agaggatccacgatcacagccctga

SEQ ID NO: 1543939 - DNA, 25 bp, Homo sapien
gctcagaggatccacgatcacagcc

SEQ ID NO: 1543940 - DNA, 25 bp, Homo sapien
agctcagaggatccacgatcacagc

SEQ ID NO: 1543941 - DNA, 25 bp, Homo sapien
gaggatccacgatcacagccctgac

SEQ ID NO: 1543942 - DNA, 25 bp, Homo sapien
tcagagaaatctccccatgcacgga

SEQ ID NO: 1543943 - DNA, 25 bp, Homo sapien
gaatactcttccttgtctttgcgca

SEQ ID NO: 1543944 - DNA, 25 bp, Homo sapien
gatccacagggcactgggcaatgtg

SEQ ID NO: 1543945 - DNA, 25 bp, Homo sapien
tactcccgtgagtgtaaccccttca

SEQ ID NO: 1543946 - DNA, 25 bp, Homo sapien
ggctggatccccctcagagcccact

SEQ ID NO: 1543947 - DNA, 25 bp, Homo sapien
ctggatccccctcagagcccactgt

SEQ ID NO: 1543948 - DNA, 25 bp, Homo sapien
gctggatccccctcagagcccactg

SEQ ID NO: 1543949 - DNA, 25 bp, Homo sapien
gggctggatccccctcagagcccac

SEQ ID NO: 1543950 - DNA, 25 bp, Homo sapien
ggctctggcctggaggctgagcagg

SEQ ID NO: 1543951 - DNA, 25 bp, Homo sapien
ctggaaggggctctggcctggaggc

SEQ ID NO: 1543952 - DNA, 25 bp, Homo sapien
ggggctctggcctggaggctgagca

SEQ ID NO: 1543953 - DNA, 25 bp, Homo sapien
ggaaggggctctggcctggaggctg

SEQ ID NO: 1543954 - DNA, 25 bp, Homo sapien
ggagagagatgtaggcggatgggag

SEQ ID NO: 1543955 - DNA, 25 bp, Homo sapien
tccccaccggagagagatgtaggcg

SEQ ID NO: 1543956 - DNA, 25 bp, Homo sapien
ctgggatccccaccggagagagatg

SEQ ID NO: 1543957 - DNA, 25 bp, Homo sapien
ggatccccaccggagagagatgtag

SEQ ID NO: 1543958 - DNA, 25 bp, Homo sapien
gaggtccctgacataggcccgttct

SEQ ID NO: 1543959 - DNA, 25 bp, Homo sapien
gtccctgacataggcccgttctgtc

SEQ ID NO: 1543960 - DNA, 25 bp, Homo sapien
ctccacgatgctgcggaggtccctg

SEQ ID NO: 1543961 - DNA, 25 bp, Homo sapien
cctgacataggcccgttctgtctcc

SEQ ID NO: 1543962 - DNA, 25 bp, Homo sapien
ctgctgaactcgtagatgtcctcaa

SEQ ID NO: 1543963 - DNA, 25 bp, Homo sapien
aatgttggcaaacagcgtgcccacc

SEQ ID NO: 1543964 - DNA, 25 bp, Homo sapien
ctgaactcgtagatgtcctcaatgt

SEQ ID NO: 1543965 - DNA, 25 bp, Homo sapien
tgttggcaaacagcgtgcccacctg

SEQ ID NO: 1543966 - DNA, 25 bp, Homo sapien
gctgctgctgttctccaagtcctcc

SEQ ID NO: 1543967 - DNA, 25 bp, Homo sapien
cctctgcacgaagcactcggcaata

SEQ ID NO: 1543968 - DNA, 25 bp, Homo sapien
tcggcaatacccccggcgctgctgc

SEQ ID NO: 1543969 - DNA, 25 bp, Homo sapien
gcgctgctgctgttctccaagtcct

SEQ ID NO: 1543970 - DNA, 25 bp, Homo sapien
tagttcatgcagtacaatgtgtaga

SEQ ID NO: 1543971 - DNA, 25 bp, Homo sapien
gttcatgcagtacaatgtgtagatg

SEQ ID NO: 1543972 - DNA, 25 bp, Homo sapien
ctcgggtagttcatgcagtacaatg

SEQ ID NO: 1543973 - DNA, 25 bp, Homo sapien
cgggtagttcatgcagtacaatgtg

SEQ ID NO: 1543974 - DNA, 25 bp, Homo sapien
atggtacttgagaatgcgctggaca

SEQ ID NO: 1543975 - DNA, 25 bp, Homo sapien
ggagacaacgacagctcccggagca

SEQ ID NO: 1543976 - DNA, 25 bp, Homo sapien
tgcgctggacaggtttcagcaggaa

SEQ ID NO: 1543977 - DNA, 25 bp, Homo sapien
gctgctggcggagacaacgacagct

SEQ ID NO: 1543978 - DNA, 25 bp, Homo sapien
tcctgcttgcgcttcatgtcgttga

SEQ ID NO: 1543979 - DNA, 25 bp, Homo sapien
gcaaccgctgtcatggacacaatag

SEQ ID NO: 1543980 - DNA, 25 bp, Homo sapien
gttgatgtaccaggcaaccgctgtc

SEQ ID NO: 1543981 - DNA, 25 bp, Homo sapien
tgcctgggccctccgcccagtgctt

SEQ ID NO: 1543982 - DNA, 25 bp, Homo sapien
tgccgggaccccgccaggtgcgccg

SEQ ID NO: 1543983 - DNA, 25 bp, Homo sapien
cccgccaggtgcgccggggcgcaga

SEQ ID NO: 1543984 - DNA, 25 bp, Homo sapien
gaccccgccaggtgcgccggggcgc

SEQ ID NO: 1543985 - DNA, 25 bp, Homo sapien
ctgccgggaccccgccaggtgcgcc

SEQ ID NO: 1543986 - DNA, 25 bp, Homo sapien
gcctttgtaggtgtactccagcccc

SEQ ID NO: 1543987 - DNA, 25 bp, Homo sapien
agcactgagctctggtccggtccag

SEQ ID NO: 1543988 - DNA, 25 bp, Homo sapien
agatgtggcctttgtaggtgtactc

SEQ ID NO: 1543989 - DNA, 25 bp, Homo sapien
ggaacgcgccctccaacaccagttc

SEQ ID NO: 1543990 - DNA, 25 bp, Homo sapien
agggtctcggggactctcgctcacg

SEQ ID NO: 1543991 - DNA, 25 bp, Homo sapien
caccttgaaccctagagggtctcgg

SEQ ID NO: 1543992 - DNA, 25 bp, Homo sapien
ttgggaatggtcagatcagacacct

SEQ ID NO: 1543993 - DNA, 25 bp, Homo sapien
tcagacaccttgaaccctagagggt

SEQ ID NO: 1543994 - DNA, 25 bp, Homo sapien
aggcgctggagacagtgaatccaca

SEQ ID NO: 1543995 - DNA, 25 bp, Homo sapien
ggagacagtgaatccacagcctctt

SEQ ID NO: 1543996 - DNA, 25 bp, Homo sapien
ggcgctggagacagtgaatccacag

SEQ ID NO: 1543997 - DNA, 25 bp, Homo sapien
gctggagacagtgaatccacagcct

SEQ ID NO: 1543998 - DNA, 25 bp, Homo sapien
atgcaggctgttttcaaggagaact

SEQ ID NO: 1543999 - DNA, 25 bp, Homo sapien
gctgttttcaaggagaacttgcttt

SEQ ID NO: 1544000 - DNA, 25 bp, Homo sapien
caggctgttttcaaggagaacttgc

SEQ ID NO: 1544001 - DNA, 25 bp, Homo sapien
tgttttcaaggagaacttgctttgc

SEQ ID NO: 1544002 - DNA, 25 bp, Homo sapien
aaacttctagcatctcgaggtcgag

SEQ ID NO: 1544003 - DNA, 25 bp, Homo sapien
tgtcaggggctctaggacaggctta

SEQ ID NO: 1544004 - DNA, 25 bp, Homo sapien
ctagcatctcgaggtcgaggagacc

SEQ ID NO: 1544005 - DNA, 25 bp, Homo sapien
tcaggggctctaggacaggcttact

SEQ ID NO: 1544006 - DNA, 25 bp, Homo sapien
cggcctcggcgaatcacagagggcc

SEQ ID NO: 1544007 - DNA, 25 bp, Homo sapien
cctcggcgaatcacagagggcccag

SEQ ID NO: 1544008 - DNA, 25 bp, Homo sapien
tgcggcctcggcgaatcacagaggg

SEQ ID NO: 1544009 - DNA, 25 bp, Homo sapien
tgcctgcggcctcggcgaatcacag

SEQ ID NO: 1544010 - DNA, 25 bp, Homo sapien
cccgatgcctggatcacccttaggg

SEQ ID NO: 1544011 - DNA, 25 bp, Homo sapien
accccgatgcctggatcacccttag

SEQ ID NO: 1544012 - DNA, 25 bp, Homo sapien
ccaccccgatgcctggatcaccctt

SEQ ID NO: 1544013 - DNA, 25 bp, Homo sapien
agctcccaccccgatgcctggatca

SEQ ID NO: 1544014 - DNA, 25 bp, Homo sapien
cagggatggaccaggctgaaccggg

SEQ ID NO: 1544015 - DNA, 25 bp, Homo sapien
atcccaccgggcgacagacagggat

SEQ ID NO: 1544016 - DNA, 25 bp, Homo sapien
gatgagctgaagcaaccacccctcc

SEQ ID NO: 1544017 - DNA, 25 bp, Homo sapien
tgattcccccataactgatgagctg

SEQ ID NO: 1544018 - DNA, 25 bp, Homo sapien
gaccctatctcgagatatctcttac

SEQ ID NO: 1544019 - DNA, 25 bp, Homo sapien
agaagtcaaggtgcccagaccctat

SEQ ID NO: 1544020 - DNA, 25 bp, Homo sapien
catgagttactctgtctggccccaa

SEQ ID NO: 1544021 - DNA, 25 bp, Homo sapien
gacccaggattttggaactcaagct

SEQ ID NO: 1544022 - DNA, 25 bp, Homo sapien
tcttcagtgattgaggtcccagagg

SEQ ID NO: 1544023 - DNA, 25 bp, Homo sapien
tcgaaggcctcgctgattcagcagt

SEQ ID NO: 1544024 - DNA, 25 bp, Homo sapien
cctggatctcgaaggcctcgctgat

SEQ ID NO: 1544025 - DNA, 25 bp, Homo sapien
gagggtagagttccccttcgctgcc

SEQ ID NO: 1544026 - DNA, 25 bp, Homo sapien
tttctgagcaagagcggaatgccag

SEQ ID NO: 1544027 - DNA, 25 bp, Homo sapien
tggatccgctcgctgtaaagccggg

SEQ ID NO: 1544028 - DNA, 25 bp, Homo sapien
aatttcaggaaggttgggcacgtca

SEQ ID NO: 1544029 - DNA, 25 bp, Homo sapien
ttcgggaatttcacagcggctggga

SEQ ID NO: 1544030 - DNA, 25 bp, Homo sapien
ctcctggggcagacagggggatggc

SEQ ID NO: 1544031 - DNA, 25 bp, Homo sapien
ctgctcctggggcagacagggggat

SEQ ID NO: 1544032 - DNA, 25 bp, Homo sapien
gcctgctcctggggcagacaggggg

SEQ ID NO: 1544033 - DNA, 25 bp, Homo sapien
cctggggcagacagggggatggctg

SEQ ID NO: 1544034 - DNA, 25 bp, Homo sapien
gatcgagtcaggaccactactccag

SEQ ID NO: 1544035 - DNA, 25 bp, Homo sapien
gagtcaggaccactactccagcggg

SEQ ID NO: 1544036 - DNA, 25 bp, Homo sapien
ctctgccaaccacgtacccggacct

SEQ ID NO: 1544037 - DNA, 25 bp, Homo sapien
ctgaatgcgaaaagaggatcgagtc

SEQ ID NO: 1544038 - DNA, 25 bp, Homo sapien
cacgtgtccaaaggcaggcaggagc

SEQ ID NO: 1544039 - DNA, 25 bp, Homo sapien
cagcacgtgtccaaaggcaggcagg

SEQ ID NO: 1544040 - DNA, 25 bp, Homo sapien
acgtgtccaaaggcaggcaggagcc

SEQ ID NO: 1544041 - DNA, 25 bp, Homo sapien
agcacgtgtccaaaggcaggcagga

SEQ ID NO: 1544042 - DNA, 25 bp, Homo sapien
tgcttccatgccaagacaaaggctg

SEQ ID NO: 1544043 - DNA, 25 bp, Homo sapien
aattggaaacatgtagaccctggcc

SEQ ID NO: 1544044 - DNA, 25 bp, Homo sapien
tagcagctgaaacgtggatgcccgg

SEQ ID NO: 1544045 - DNA, 25 bp, Homo sapien
cagagaaagttgtaagagccggcac

SEQ ID NO: 1544046 - DNA, 25 bp, Homo sapien
aggtgtggtagctggaacctgagtg

SEQ ID NO: 1544047 - DNA, 25 bp, Homo sapien
gcgttggctgggatccgatggtcca

SEQ ID NO: 1544048 - DNA, 25 bp, Homo sapien
gtggcttccatgtgcaggcaaaggt

SEQ ID NO: 1544049 - DNA, 25 bp, Homo sapien
agatgtctgtgaggacttgtggcag

SEQ ID NO: 1544050 - DNA, 25 bp, Homo sapien
tatctgtaaggcttggctccggaag

SEQ ID NO: 1544051 - DNA, 25 bp, Homo sapien
ggaacatgggcatctatgaggctct

SEQ ID NO: 1544052 - DNA, 25 bp, Homo sapien
ctgaatgtctagagagcctcctctc

SEQ ID NO: 1544053 - DNA, 25 bp, Homo sapien
tcttctgctccaacgaaggtgtgag

SEQ ID NO: 1544054 - DNA, 25 bp, Homo sapien
ccaggctctggctgatatatgaggc

SEQ ID NO: 1544055 - DNA, 25 bp, Homo sapien
gctgatatatgaggctgccaggtat

SEQ ID NO: 1544056 - DNA, 25 bp, Homo sapien
cgaagatgcccgtgacgtgggagca

SEQ ID NO: 1544057 - DNA, 25 bp, Homo sapien
tatgaggtggcgtcaagtctgaaga

SEQ ID NO: 1544058 - DNA, 25 bp, Homo sapien
agagcagggtggttcaaccggacct

SEQ ID NO: 1544059 - DNA, 25 bp, Homo sapien
taaccgtcgtggcatagctgagccg

SEQ ID NO: 1544060 - DNA, 25 bp, Homo sapien
tggatgttaaccgtcgtggcatagc

SEQ ID NO: 1544061 - DNA, 25 bp, Homo sapien
ccgcccacgtggatgttaaccgtcg

SEQ ID NO: 1544062 - DNA, 25 bp, Homo sapien
tgggccctgtgaaggcccatagatt

SEQ ID NO: 1544063 - DNA, 25 bp, Homo sapien
gggccctgtgaaggcccatagattc

SEQ ID NO: 1544064 - DNA, 25 bp, Homo sapien
ggatgggcatcaagcagttcacaca

SEQ ID NO: 1544065 - DNA, 25 bp, Homo sapien
cctgtggatcaaggcaagaagggcc

SEQ ID NO: 1544066 - DNA, 25 bp, Homo sapien
cacacgccaagttatagtgggtcca

SEQ ID NO: 1544067 - DNA, 25 bp, Homo sapien
tcgccgatgcagataccaggagttg

SEQ ID NO: 1544068 - DNA, 25 bp, Homo sapien
catagtactaagaccccggagagtc

SEQ ID NO: 1544069 - DNA, 25 bp, Homo sapien
cccggcacaggataggcacatttat

SEQ ID NO: 1544070 - DNA, 25 bp, Homo sapien
tagctgtgcgactaggcaaatccct

SEQ ID NO: 1544071 - DNA, 25 bp, Homo sapien
gacaccagggtgcttcagagaatcc

SEQ ID NO: 1544072 - DNA, 25 bp, Homo sapien
taccagaaatcctaccgataagccc

SEQ ID NO: 1544073 - DNA, 25 bp, Homo sapien
cagtatgaccggaccctgctggtag

SEQ ID NO: 1544074 - DNA, 25 bp, Homo sapien
cgtcgctgcgagtccaaaaagtttg

SEQ ID NO: 1544075 - DNA, 25 bp, Homo sapien
gataagcccatcgtgactcaaaact

SEQ ID NO: 1544076 - DNA, 25 bp, Homo sapien
caaagccctggtggcctattaccag

SEQ ID NO: 1544077 - DNA, 25 bp, Homo sapien
tccaaagccctggtggcctattacc

SEQ ID NO: 1544078 - DNA, 25 bp, Homo sapien
atctccaaagccctggtggcctatt

SEQ ID NO: 1544079 - DNA, 25 bp, Homo sapien
agccctggtggcctattaccagaaa

SEQ ID NO: 1544080 - DNA, 25 bp, Homo sapien
gctgcccagcatgtaacttaaatcc

SEQ ID NO: 1544081 - DNA, 25 bp, Homo sapien
tgtagagggccttggagtgacaccc

SEQ ID NO: 1544082 - DNA, 25 bp, Homo sapien
cagtgagatggctaagctgcccagc

SEQ ID NO: 1544083 - DNA, 25 bp, Homo sapien
ccatccactagtacttgaaggccag

SEQ ID NO: 1544084 - DNA, 25 bp, Homo sapien
caaagaagagctgcggtagtcgact

SEQ ID NO: 1544085 - DNA, 25 bp, Homo sapien
gccagatttcttgcagtagattcca

SEQ ID NO: 1544086 - DNA, 25 bp, Homo sapien
taagttgagcactcttaagagggac

SEQ ID NO: 1544087 - DNA, 25 bp, Homo sapien
tagtcgactacagaggacgcgaagc

SEQ ID NO: 1544088 - DNA, 25 bp, Homo sapien
aagcaggaggatgatccacagaagc

SEQ ID NO: 1544089 - DNA, 25 bp, Homo sapien
acaagcaggaggatgatccacagaa

SEQ ID NO: 1544090 - DNA, 25 bp, Homo sapien
cactcgctggtatcttcagagggct

SEQ ID NO: 1544091 - DNA, 25 bp, Homo sapien
tctgctccccactcgctggtatctt

SEQ ID NO: 1544092 - DNA, 25 bp, Homo sapien
atcacaggcataacctgccgcgccc

SEQ ID NO: 1544093 - DNA, 25 bp, Homo sapien
gcttcctaagttcatttaaaggcga

SEQ ID NO: 1544094 - DNA, 25 bp, Homo sapien
tcaaactcctctaactcaaactaaa

SEQ ID NO: 1544095 - DNA, 25 bp, Homo sapien
gagatcacaggcataacctgccgcg

SEQ ID NO: 1544096 - DNA, 25 bp, Homo sapien
ccgttttggagagaacgctgaagct

SEQ ID NO: 1544097 - DNA, 25 bp, Homo sapien
gcggcgaaatcagcgaatagcaaat

SEQ ID NO: 1544098 - DNA, 25 bp, Homo sapien
tcgttagtccggaacactagcgcgg

SEQ ID NO: 1544099 - DNA, 25 bp, Homo sapien
caggagatccgtatccccgttttgg

SEQ ID NO: 1544100 - DNA, 25 bp, Homo sapien
gccggctcggcgaccaggctgaaac

SEQ ID NO: 1544101 - DNA, 25 bp, Homo sapien
ccgccggctcggcgaccaggctgaa

SEQ ID NO: 1544102 - DNA, 25 bp, Homo sapien
cggctcggcgaccaggctgaaactc

SEQ ID NO: 1544103 - DNA, 25 bp, Homo sapien
ccggctcggcgaccaggctgaaact

SEQ ID NO: 1544104 - DNA, 25 bp, Homo sapien
tgacgggtcctctcgcgagaaccta

SEQ ID NO: 1544105 - DNA, 25 bp, Homo sapien
gctgttcgcacgacgcctgactggg

SEQ ID NO: 1544106 - DNA, 25 bp, Homo sapien
cgttgacctcgcctaacacgagatt

SEQ ID NO: 1544107 - DNA, 25 bp, Homo sapien
tccgccttcggtaccagctgctgtt

SEQ ID NO: 1544108 - DNA, 25 bp, Homo sapien
aatcgcgaagcggagtgaggacccc

SEQ ID NO: 1544109 - DNA, 25 bp, Homo sapien
ccagtttccgaatctgttctctaca

SEQ ID NO: 1544110 - DNA, 25 bp, Homo sapien
cttagggcgcttccggcaggctcgt

SEQ ID NO: 1544111 - DNA, 25 bp, Homo sapien
tcgttttggcaatcgcgaagcggag

SEQ ID NO: 1544112 - DNA, 25 bp, Homo sapien
atcctgcgctccaccccgagcctca

SEQ ID NO: 1544113 - DNA, 25 bp, Homo sapien
agccttggcgcgtcccacaatcctg

SEQ ID NO: 1544114 - DNA, 25 bp, Homo sapien
aagacagcagccttggcgcgtccca

SEQ ID NO: 1544115 - DNA, 25 bp, Homo sapien
ttggcgcgtcccacaatcctgcgct

SEQ ID NO: 1544116 - DNA, 25 bp, Homo sapien
cctcggaaaagttgctgtcctcgct

SEQ ID NO: 1544117 - DNA, 25 bp, Homo sapien
ctgtcctcctcctcggaaaagttgc

SEQ ID NO: 1544118 - DNA, 25 bp, Homo sapien
ctcctcgccgtcactgctgcgctcg

SEQ ID NO: 1544119 - DNA, 25 bp, Homo sapien
tcctcctcggaaaagttgctgtcct

SEQ ID NO: 1544120 - DNA, 25 bp, Homo sapien
gcttctgccgtatcatgctctcctg

SEQ ID NO: 1544121 - DNA, 25 bp, Homo sapien
acatcaattaccagggctcagtcca

SEQ ID NO: 1544122 - DNA, 25 bp, Homo sapien
tgtctctagagatgacacgtgtcct

SEQ ID NO: 1544123 - DNA, 25 bp, Homo sapien
actgctcacgaagatcactggccac

SEQ ID NO: 1544124 - DNA, 25 bp, Homo sapien
tgcccgctgcactccgccgctcttc

SEQ ID NO: 1544125 - DNA, 25 bp, Homo sapien
ctgcactccgccgctcttcgtctac

SEQ ID NO: 1544126 - DNA, 25 bp, Homo sapien
gcccgctgcactccgccgctcttcg

SEQ ID NO: 1544127 - DNA, 25 bp, Homo sapien
ccgctgcactccgccgctcttcgtc

SEQ ID NO: 1544128 - DNA, 25 bp, Homo sapien
cttggggggtcggtcatcatcttct

SEQ ID NO: 1544129 - DNA, 25 bp, Homo sapien
tcgtcctcaggctcttcttctttct

SEQ ID NO: 1544130 - DNA, 25 bp, Homo sapien
tcttcctcatcgtattcctcctcct

SEQ ID NO: 1544131 - DNA, 25 bp, Homo sapien
cctcttcgtcctcaggctcttcttc

SEQ ID NO: 1544132 - DNA, 25 bp, Homo sapien
gaatgaagcctccatggcggggttt

SEQ ID NO: 1544133 - DNA, 25 bp, Homo sapien
cagcctcgtccagaatgaagcctcc

SEQ ID NO: 1544134 - DNA, 25 bp, Homo sapien
tccagaatgaagcctccatggcggg

SEQ ID NO: 1544135 - DNA, 25 bp, Homo sapien
gcctcgtccagaatgaagcctccat

SEQ ID NO: 1544136 - DNA, 25 bp, Homo sapien
ctcccactggtcctcgtcctcatac

SEQ ID NO: 1544137 - DNA, 25 bp, Homo sapien
tcgtcctcatactcatcgtcaacat

SEQ ID NO: 1544138 - DNA, 25 bp, Homo sapien
cccactggtcctcgtcctcatactc

SEQ ID NO: 1544139 - DNA, 25 bp, Homo sapien
tcccactggtcctcgtcctcatact

SEQ ID NO: 1544140 - DNA, 25 bp, Homo sapien
cttcccagtagtcttgtggaggcag

SEQ ID NO: 1544141 - DNA, 25 bp, Homo sapien
gggaatgggctctgaagaccctctc

SEQ ID NO: 1544142 - DNA, 25 bp, Homo sapien
caccctcttcccagtagtcttgtgg

SEQ ID NO: 1544143 - DNA, 25 bp, Homo sapien
aagcaaggtgaggacggtgggagtt

SEQ ID NO: 1544144 - DNA, 25 bp, Homo sapien
tgggcgagggcagacaaagtatgag

SEQ ID NO: 1544145 - DNA, 25 bp, Homo sapien
ggtgggcgagggcagacaaagtatg

SEQ ID NO: 1544146 - DNA, 25 bp, Homo sapien
gcgagggcagacaaagtatgagcca

SEQ ID NO: 1544147 - DNA, 25 bp, Homo sapien
agggcagacaaagtatgagccaaat

SEQ ID NO: 1544148 - DNA, 25 bp, Homo sapien
aaaataggagcgtgcagctaagagg

SEQ ID NO: 1544149 - DNA, 25 bp, Homo sapien
aaaaataatgggcagagggcgtgag

SEQ ID NO: 1544150 - DNA, 25 bp, Homo sapien
ctggagaaaataggagcgtgcagct

SEQ ID NO: 1544151 - DNA, 25 bp, Homo sapien
ggcctggagaaaataggagcgtgca

SEQ ID NO: 1544152 - DNA, 25 bp, Homo sapien
catccaggacaacattatcgatatt

SEQ ID NO: 1544153 - DNA, 25 bp, Homo sapien
ctccagaggttttgcaggcggcgag

SEQ ID NO: 1544154 - DNA, 25 bp, Homo sapien
gccccagaacgatcttcatccagga

SEQ ID NO: 1544155 - DNA, 25 bp, Homo sapien
tccaggacaacattatcgatattgg

SEQ ID NO: 1544156 - DNA, 25 bp, Homo sapien
tcatgtaatactcgcccagttcttc

SEQ ID NO: 1544157 - DNA, 25 bp, Homo sapien
atttcttcatgtaatactcgcccag

SEQ ID NO: 1544158 - DNA, 25 bp, Homo sapien
aatactcgcccagttcttcttctcg

SEQ ID NO: 1544159 - DNA, 25 bp, Homo sapien
ccacagatgacttggcgtatttctt

SEQ ID NO: 1544160 - DNA, 25 bp, Homo sapien
gagagctcatcagatcctccataca

SEQ ID NO: 1544161 - DNA, 25 bp, Homo sapien
tgatgtcgtctgagagctcatcaga

SEQ ID NO: 1544162 - DNA, 25 bp, Homo sapien
gtctgagagctcatcagatcctcca

SEQ ID NO: 1544163 - DNA, 25 bp, Homo sapien
ctgctgggtgatgtcgtctgagagc

SEQ ID NO: 1544164 - DNA, 25 bp, Homo sapien
cttacatttgacagtccacagattg

SEQ ID NO: 1544165 - DNA, 25 bp, Homo sapien
catttgacagtccacagattgggat

SEQ ID NO: 1544166 - DNA, 25 bp, Homo sapien
tttgacagtccacagattgggatcc

SEQ ID NO: 1544167 - DNA, 25 bp, Homo sapien
tacatttgacagtccacagattggg

SEQ ID NO: 1544168 - DNA, 25 bp, Homo sapien
gaactggtaggcaatgaacttgcgc

SEQ ID NO: 1544169 - DNA, 25 bp, Homo sapien
cgtgtctgtgaactggtaggcaatg

SEQ ID NO: 1544170 - DNA, 25 bp, Homo sapien
ggcaatgaacttgcgcatcaaggaa

SEQ ID NO: 1544171 - DNA, 25 bp, Homo sapien
catcaaggaaatggccgtggcccgt

SEQ ID NO: 1544172 - DNA, 25 bp, Homo sapien
agaggcacctggtacccctgaagtt

SEQ ID NO: 1544173 - DNA, 25 bp, Homo sapien
agctcaagcagctcactcagcaggc

SEQ ID NO: 1544174 - DNA, 25 bp, Homo sapien
gaagttgacaatgttcttccctctg

SEQ ID NO: 1544175 - DNA, 25 bp, Homo sapien
cagtggtcttattccagctcaagca

SEQ ID NO: 1544176 - DNA, 25 bp, Homo sapien
caggcagggacacttattactataa

SEQ ID NO: 1544177 - DNA, 25 bp, Homo sapien
gggaatcataccccacaaatcccaa

SEQ ID NO: 1544178 - DNA, 25 bp, Homo sapien
tactataataatgaggaagacattc

SEQ ID NO: 1544179 - DNA, 25 bp, Homo sapien
tttcaacctccctgttggggaatca

SEQ ID NO: 1544180 - DNA, 25 bp, Homo sapien
gaaagctatccaacatatgttctgt

SEQ ID NO: 1544181 - DNA, 25 bp, Homo sapien
gattaacctgtatgtactaatatag

SEQ ID NO: 1544182 - DNA, 25 bp, Homo sapien
aaaggagtgcttacatcagacaaaa

SEQ ID NO: 1544183 - DNA, 25 bp, Homo sapien
aaaaaagcaactagagccgggcacg

SEQ ID NO: 1544184 - DNA, 25 bp, Homo sapien
catccttgtagatgccccgcttgag

SEQ ID NO: 1544185 - DNA, 25 bp, Homo sapien
tcacgtgggtctgcttgtaggcctc

SEQ ID NO: 1544186 - DNA, 25 bp, Homo sapien
tggtgccactactgacttgatctgc

SEQ ID NO: 1544187 - DNA, 25 bp, Homo sapien
tgtaggcctccacgtagatgtagcc

SEQ ID NO: 1544188 - DNA, 25 bp, Homo sapien
gctcatgcgggccttgatgcgatcg

SEQ ID NO: 1544189 - DNA, 25 bp, Homo sapien
cgatcgtagtcgatgcgtgggatca

SEQ ID NO: 1544190 - DNA, 25 bp, Homo sapien
tgcgtgggatcatcttcagggagat

SEQ ID NO: 1544191 - DNA, 25 bp, Homo sapien
cttgatgcgatcgtagtcgatgcgt

SEQ ID NO: 1544192 - DNA, 25 bp, Homo sapien
catcaaacagcctctgtggaggccg

SEQ ID NO: 1544193 - DNA, 25 bp, Homo sapien
tcaaacagcctctgtggaggccgct

SEQ ID NO: 1544194 - DNA, 25 bp, Homo sapien
tgtggaggccgcttaaacttcttcc

SEQ ID NO: 1544195 - DNA, 25 bp, Homo sapien
cagcctctgtggaggccgcttaaac

SEQ ID NO: 1544196 - DNA, 25 bp, Homo sapien
gcctcatcaatctttatagcagaag

SEQ ID NO: 1544197 - DNA, 25 bp, Homo sapien
gcctgaggctatactgccaagctaa

SEQ ID NO: 1544198 - DNA, 25 bp, Homo sapien
gcaaaaggcacattctacacaccgg

SEQ ID NO: 1544199 - DNA, 25 bp, Homo sapien
aattcacaggctaaacctgtggcgg

SEQ ID NO: 1544200 - DNA, 25 bp, Homo sapien
taccagtgaatattcgcagagcgct

SEQ ID NO: 1544201 - DNA, 25 bp, Homo sapien
ataaatgggtccgaactcaggcagg

SEQ ID NO: 1544202 - DNA, 25 bp, Homo sapien
tgcaatcgccttctcccatggtgaa

SEQ ID NO: 1544203 - DNA, 25 bp, Homo sapien
ttagtgcctgttccgagtctccggg

SEQ ID NO: 1544204 - DNA, 25 bp, Homo sapien
taacggttcccctcaaagatgagga

SEQ ID NO: 1544205 - DNA, 25 bp, Homo sapien
cagaaagcccttccggctgtaacgg

SEQ ID NO: 1544206 - DNA, 25 bp, Homo sapien
gctgtaacggttcccctcaaagatg

SEQ ID NO: 1544207 - DNA, 25 bp, Homo sapien
gcagacatggcgaagctcttgaaca

SEQ ID NO: 1544208 - DNA, 25 bp, Homo sapien
tttccagctcagagagtgttggctt

SEQ ID NO: 1544209 - DNA, 25 bp, Homo sapien
ccagctcagagagtgttggcttcac

SEQ ID NO: 1544210 - DNA, 25 bp, Homo sapien
tcaaacttttccagctcagagagtg

SEQ ID NO: 1544211 - DNA, 25 bp, Homo sapien
caaacttttccagctcagagagtgt

SEQ ID NO: 1544212 - DNA, 25 bp, Homo sapien
ccaggttggaagttgtgctcccgct

SEQ ID NO: 1544213 - DNA, 25 bp, Homo sapien
tgttgccatccacgctgaggatctt

SEQ ID NO: 1544214 - DNA, 25 bp, Homo sapien
tgccatccacgctgaggatcttgcc

SEQ ID NO: 1544215 - DNA, 25 bp, Homo sapien
catccacgctgaggatcttgccctg

SEQ ID NO: 1544216 - DNA, 25 bp, Homo sapien
gaatctacgcatgttctcaaaaacc

SEQ ID NO: 1544217 - DNA, 25 bp, Homo sapien
agactaccttagtccacctggacga

SEQ ID NO: 1544218 - DNA, 25 bp, Homo sapien
caaacaaagtcaagcctcagattac

SEQ ID NO: 1544219 - DNA, 25 bp, Homo sapien
ggtgaagggagaccaccacaacctg

SEQ ID NO: 1544220 - DNA, 25 bp, Homo sapien
gaacaggataacgaaattctcctcc

SEQ ID NO: 1544221 - DNA, 25 bp, Homo sapien
tgtcgccctcgaatcggccagcaat

SEQ ID NO: 1544222 - DNA, 25 bp, Homo sapien
cacccgcacaatgaggcctgtgtcg

SEQ ID NO: 1544223 - DNA, 25 bp, Homo sapien
cagcaatcaccttcacgtggtcccc

SEQ ID NO: 1544224 - DNA, 25 bp, Homo sapien
aacatccacacctgatgctgtctct

SEQ ID NO: 1544225 - DNA, 25 bp, Homo sapien
ctagtcgcacgatgacacccacagt

SEQ ID NO: 1544226 - DNA, 25 bp, Homo sapien
agctgcaccagctcgccccattcat

SEQ ID NO: 1544227 - DNA, 25 bp, Homo sapien
gaaggtctcccgttctagtcgcacg

SEQ ID NO: 1544228 - DNA, 25 bp, Homo sapien
gatgtctttcacatggatgttgttc

SEQ ID NO: 1544229 - DNA, 25 bp, Homo sapien
caatgaccttaacgatgtctttcac

SEQ ID NO: 1544230 - DNA, 25 bp, Homo sapien
cttaacgatgtctttcacatggatg

SEQ ID NO: 1544231 - DNA, 25 bp, Homo sapien
ggccatcaatgaccttaacgatgtc

SEQ ID NO: 1544232 - DNA, 25 bp, Homo sapien
gcttcggaagagatggcgaatctcc

SEQ ID NO: 1544233 - DNA, 25 bp, Homo sapien
ttgcagacaaacatgcccccgttct

SEQ ID NO: 1544234 - DNA, 25 bp, Homo sapien
tgcaatgtaggaaggcgaagcttcg

SEQ ID NO: 1544235 - DNA, 25 bp, Homo sapien
ccagcaccaggtggcgggtcttgca

SEQ ID NO: 1544236 - DNA, 25 bp, Homo sapien
taatccctcacaagcccaatcttat

SEQ ID NO: 1544237 - DNA, 25 bp, Homo sapien
caagcccaatcttatcacttctggg

SEQ ID NO: 1544238 - DNA, 25 bp, Homo sapien
aggtacccaacgcacagggtcctgc

SEQ ID NO: 1544239 - DNA, 25 bp, Homo sapien
gagctgagccaggtacccaacgcac

SEQ ID NO: 1544240 - DNA, 25 bp, Homo sapien
atccggggactcataggcgcaaagc

SEQ ID NO: 1544241 - DNA, 25 bp, Homo sapien
tgctgatccggggactcataggcgc

SEQ ID NO: 1544242 - DNA, 25 bp, Homo sapien
cgcaaagccacccacggtgaagttg

SEQ ID NO: 1544243 - DNA, 25 bp, Homo sapien
tcataggcgcaaagccacccacggt

SEQ ID NO: 1544244 - DNA, 25 bp, Homo sapien
cccctgggagatgcgcacggtctgg

SEQ ID NO: 1544245 - DNA, 25 bp, Homo sapien
cacggtctggccgatgagttcgttg

SEQ ID NO: 1544246 - DNA, 25 bp, Homo sapien
tgggctaccaaagccgccacgctga

SEQ ID NO: 1544247 - DNA, 25 bp, Homo sapien
cgatgagttcgttgtccctccggcc

SEQ ID NO: 1544248 - DNA, 25 bp, Homo sapien
gtgagccgctgacggtccacagaga

SEQ ID NO: 1544249 - DNA, 25 bp, Homo sapien
agtgcagctccacacgggccgtgga

SEQ ID NO: 1544250 - DNA, 25 bp, Homo sapien
cgtggtgagccgctgacggtccaca

SEQ ID NO: 1544251 - DNA, 25 bp, Homo sapien
cacacgggccgtggactctgtggca

SEQ ID NO: 1544252 - DNA, 25 bp, Homo sapien
ctagcaagccccaccctggccctcc

SEQ ID NO: 1544253 - DNA, 25 bp, Homo sapien
gcaagccccaccctggccctcccca

SEQ ID NO: 1544254 - DNA, 25 bp, Homo sapien
caagccccaccctggccctccccag

SEQ ID NO: 1544255 - DNA, 25 bp, Homo sapien
ttcgggagccagagccatacatggg

SEQ ID NO: 1544256 - DNA, 25 bp, Homo sapien
tctgtgagccgtacatgggtgttcg

SEQ ID NO: 1544257 - DNA, 25 bp, Homo sapien
tctgggagccatacatgggcgtcct

SEQ ID NO: 1544258 - DNA, 25 bp, Homo sapien
ctcccataggtcgaggtcatgccgc

SEQ ID NO: 1544259 - DNA, 25 bp, Homo sapien
ggagtgcggctgccatcatgcaggg

SEQ ID NO: 1544260 - DNA, 25 bp, Homo sapien
cgtgacggcgtgttggggttgttgg

SEQ ID NO: 1544261 - DNA, 25 bp, Homo sapien
gggcgtctgtgagccgtagtgtggg

SEQ ID NO: 1544262 - DNA, 25 bp, Homo sapien
ccccactctgggcaggagtgcggct

SEQ ID NO: 1544263 - DNA, 25 bp, Homo sapien
ctgcgggttgtattgtgggttgacc

SEQ ID NO: 1544264 - DNA, 25 bp, Homo sapien
catcgaaagcatactcatattcttc

SEQ ID NO: 1544265 - DNA, 25 bp, Homo sapien
tggcgtctgcgggttgtattgtggg

SEQ ID NO: 1544266 - DNA, 25 bp, Homo sapien
gggtgggctcatcatcgaaagcata

SEQ ID NO: 1544267 - DNA, 25 bp, Homo sapien
ctgataggccatgggcgacggtgta

SEQ ID NO: 1544268 - DNA, 25 bp, Homo sapien
cgacggtgtagggtggtagctggct

SEQ ID NO: 1544269 - DNA, 25 bp, Homo sapien
tgggtattctggtagcctgctgggc

SEQ ID NO: 1544270 - DNA, 25 bp, Homo sapien
gggagtgggtattctggtagcctgc

SEQ ID NO: 1544271 - DNA, 25 bp, Homo sapien
tgtcagtggttacccagtcgctgga

SEQ ID NO: 1544272 - DNA, 25 bp, Homo sapien
tgacactgcggatgacacctgtctg

SEQ ID NO: 1544273 - DNA, 25 bp, Homo sapien
ccaggtgtcataggactgtagccaa

SEQ ID NO: 1544274 - DNA, 25 bp, Homo sapien
tgtgtatccaggtaggtgtcccgca

SEQ ID NO: 1544275 - DNA, 25 bp, Homo sapien
caggtaagatgcctcctttgggttc

SEQ ID NO: 1544276 - DNA, 25 bp, Homo sapien
gattccccgctaaatcaggtaagat

SEQ ID NO: 1544277 - DNA, 25 bp, Homo sapien
tctgcacatgcagttccctccattt

SEQ ID NO: 1544278 - DNA, 25 bp, Homo sapien
tttgggttcacatagctccccttgc

SEQ ID NO: 1544279 - DNA, 25 bp, Homo sapien
tgggactgaggcccatactccaggg

SEQ ID NO: 1544280 - DNA, 25 bp, Homo sapien
ttctgagaactcaaggtgaaatggg

SEQ ID NO: 1544281 - DNA, 25 bp, Homo sapien
gggcctgtggtgcatgtcagggtgg

SEQ ID NO: 1544282 - DNA, 25 bp, Homo sapien
atggggacagcctggtcagcctgtc

SEQ ID NO: 1544283 - DNA, 25 bp, Homo sapien
cactgtccttcaggtacacagagca

SEQ ID NO: 1544284 - DNA, 25 bp, Homo sapien
gggggtgataggctccaggtgctca

SEQ ID NO: 1544285 - DNA, 25 bp, Homo sapien
ttcttggtgggggtgataggctcca

SEQ ID NO: 1544286 - DNA, 25 bp, Homo sapien
ctgtccttcaggtacacagagcaca

SEQ ID NO: 1544287 - DNA, 25 bp, Homo sapien
gtggcttcccgatcctcgcccagga

SEQ ID NO: 1544288 - DNA, 25 bp, Homo sapien
tcagtaggacgcccgtggcttcccg

SEQ ID NO: 1544289 - DNA, 25 bp, Homo sapien
gcttcccgatcctcgcccaggatca

SEQ ID NO: 1544290 - DNA, 25 bp, Homo sapien
gtaggacgcccgtggcttcccgatc

SEQ ID NO: 1544291 - DNA, 25 bp, Homo sapien
gctgctcatcaaggtccatacggac

SEQ ID NO: 1544292 - DNA, 25 bp, Homo sapien
gaagcggaggttgaggatcttgagc

SEQ ID NO: 1544293 - DNA, 25 bp, Homo sapien
gaggttgaggatcttgagctgctca

SEQ ID NO: 1544294 - DNA, 25 bp, Homo sapien
gtccatacggacaatgccatcctca

SEQ ID NO: 1544295 - DNA, 25 bp, Homo sapien
gaggatcactcttcatccgacgaag

SEQ ID NO: 1544296 - DNA, 25 bp, Homo sapien
tactcagattccaatgagcaccagg

SEQ ID NO: 1544297 - DNA, 25 bp, Homo sapien
tagccctgcaggaggatcttgtgtc

SEQ ID NO: 1544298 - DNA, 25 bp, Homo sapien
ggaaatccagaacaatccgcctagc

SEQ ID NO: 1544299 - DNA, 25 bp, Homo sapien
cataatgaagggagtcagtggctgc

SEQ ID NO: 1544300 - DNA, 25 bp, Homo sapien
aaaaaatagtcacgagtcaggccgc

SEQ ID NO: 1544301 - DNA, 25 bp, Homo sapien
gagctacagccaatggaaacgcggg

SEQ ID NO: 1544302 - DNA, 25 bp, Homo sapien
cgcagcgaaggaagggatcacactt

SEQ ID NO: 1544303 - DNA, 25 bp, Homo sapien
cttgcgctgacgccacgcggccccg

SEQ ID NO: 1544304 - DNA, 25 bp, Homo sapien
ccacgcggccccgcccactcgctcc

SEQ ID NO: 1544305 - DNA, 25 bp, Homo sapien
cgccacgcggccccgcccactcgct

SEQ ID NO: 1544306 - DNA, 25 bp, Homo sapien
acgcggccccgcccactcgctccct

SEQ ID NO: 1544307 - DNA, 25 bp, Homo sapien
ctcgtgcacagtccccgcgagccga

SEQ ID NO: 1544308 - DNA, 25 bp, Homo sapien
cggcgtcgccaacctcgtgcacagt

SEQ ID NO: 1544309 - DNA, 25 bp, Homo sapien
ttcgcaagcgcgagaacaccgctgc

SEQ ID NO: 1544310 - DNA, 25 bp, Homo sapien
cggagcccgcttcgcaagcgcgaga

SEQ ID NO: 1544311 - DNA, 25 bp, Homo sapien
accaccaacgccacagagaaaataa

SEQ ID NO: 1544312 - DNA, 25 bp, Homo sapien
cacggccagactgggactccagcgt

SEQ ID NO: 1544313 - DNA, 25 bp, Homo sapien
agactgggactccagcgtcccaggc

SEQ ID NO: 1544314 - DNA, 25 bp, Homo sapien
gagaaaataactcccacggccagac

SEQ ID NO: 1544315 - DNA, 25 bp, Homo sapien
caaagatatagacgacgctcacagt

SEQ ID NO: 1544316 - DNA, 25 bp, Homo sapien
ccagcaagccagagcgcaacttttt

SEQ ID NO: 1544317 - DNA, 25 bp, Homo sapien
tttggcatagctgggaccctctgag

SEQ ID NO: 1544318 - DNA, 25 bp, Homo sapien
tggcccttgcgccttagtgctcccg

SEQ ID NO: 1544319 - DNA, 25 bp, Homo sapien
cttggcaccattttcgtccaccggg

SEQ ID NO: 1544320 - DNA, 25 bp, Homo sapien
gcccactttgaatcactaggcttcc

SEQ ID NO: 1544321 - DNA, 25 bp, Homo sapien
cccactttgaatcactaggcttcca

SEQ ID NO: 1544322 - DNA, 25 bp, Homo sapien
tgcccactttgaatcactaggcttc

SEQ ID NO: 1544323 - DNA, 25 bp, Homo sapien
caaagagattccacaataagccgct

SEQ ID NO: 1544324 - DNA, 25 bp, Homo sapien
ttatctaccagatacaaacaggtct

SEQ ID NO: 1544325 - DNA, 25 bp, Homo sapien
tctaggtccaaagatagaaggcaat

SEQ ID NO: 1544326 - DNA, 25 bp, Homo sapien
tctgcctggtttgaaccaactcatt

SEQ ID NO: 1544327 - DNA, 25 bp, Homo sapien
atgtccggcgcaactgctgtaccag

SEQ ID NO: 1544328 - DNA, 25 bp, Homo sapien
tgaaatatttgtatgtccggcgcaa

SEQ ID NO: 1544329 - DNA, 25 bp, Homo sapien
atatttgtatgtccggcgcaactgc

SEQ ID NO: 1544330 - DNA, 25 bp, Homo sapien
gtatgtccggcgcaactgctgtacc

SEQ ID NO: 1544331 - DNA, 25 bp, Homo sapien
gggggcgctcagacaaggaggccag

SEQ ID NO: 1544332 - DNA, 25 bp, Homo sapien
tgggggcgctcagacaaggaggcca

SEQ ID NO: 1544333 - DNA, 25 bp, Homo sapien
gatgggggcgctcagacaaggaggc

SEQ ID NO: 1544334 - DNA, 25 bp, Homo sapien
ggggcgctcagacaaggaggccagg

SEQ ID NO: 1544335 - DNA, 25 bp, Homo sapien
gcaagggctggtgggctcgatgatc

SEQ ID NO: 1544336 - DNA, 25 bp, Homo sapien
aaggcaagggctggtgggctcgatg

SEQ ID NO: 1544337 - DNA, 25 bp, Homo sapien
ggcaagggctggtgggctcgatgat

SEQ ID NO: 1544338 - DNA, 25 bp, Homo sapien
agaaggcaagggctggtgggctcga

SEQ ID NO: 1544339 - DNA, 25 bp, Homo sapien
tccaaaacgagcgtgtagggtggct

SEQ ID NO: 1544340 - DNA, 25 bp, Homo sapien
aagaggacgccggtgagctccaaaa

SEQ ID NO: 1544341 - DNA, 25 bp, Homo sapien
tggctggtagtacggttcctgcaga

SEQ ID NO: 1544342 - DNA, 25 bp, Homo sapien
actcaggatgcaagaggacgccggt

SEQ ID NO: 1544343 - DNA, 25 bp, Homo sapien
gcacttatagcgtgcctgggcacac

SEQ ID NO: 1544344 - DNA, 25 bp, Homo sapien
gaaagcgaggcaatgacaggtgaca

SEQ ID NO: 1544345 - DNA, 25 bp, Homo sapien
cctacagagtgggtgttagcatgac

SEQ ID NO: 1544346 - DNA, 25 bp, Homo sapien
tgaggacagtgaaacaccaagaccc

SEQ ID NO: 1544347 - DNA, 25 bp, Homo sapien
ggtctcgatgcctgggcgcttctta

SEQ ID NO: 1544348 - DNA, 25 bp, Homo sapien
gatgcctgggcgcttcttaaacctc

SEQ ID NO: 1544349 - DNA, 25 bp, Homo sapien
aacaaggtctcgatgcctgggcgct

SEQ ID NO: 1544350 - DNA, 25 bp, Homo sapien
ctgctggaacaaggtctcgatgcct

SEQ ID NO: 1544351 - DNA, 25 bp, Homo sapien
tatcttgtggcgtcccggaataggc

SEQ ID NO: 1544352 - DNA, 25 bp, Homo sapien
cactatcaatgagtggaaacgcagt

SEQ ID NO: 1544353 - DNA, 25 bp, Homo sapien
tggtgtccatccatgtatcttgtgg

SEQ ID NO: 1544354 - DNA, 25 bp, Homo sapien
taggcggtaggagatgaagccatgg

SEQ ID NO: 1544355 - DNA, 25 bp, Homo sapien
gaagtgagtgacagatcaggtcaac

SEQ ID NO: 1544356 - DNA, 25 bp, Homo sapien
gagtgacagatcaggtcaacatctg

SEQ ID NO: 1544357 - DNA, 25 bp, Homo sapien
gtgagtgacagatcaggtcaacatc

SEQ ID NO: 1544358 - DNA, 25 bp, Homo sapien
ctggaagtgagtgacagatcaggtc

SEQ ID NO: 1544359 - DNA, 25 bp, Homo sapien
gcaacgccgttatagggctgcaggc

SEQ ID NO: 1544360 - DNA, 25 bp, Homo sapien
cacaactactactcgagctgggtcc

SEQ ID NO: 1544361 - DNA, 25 bp, Homo sapien
caagacccggtcatcagagttgccg

SEQ ID NO: 1544362 - DNA, 25 bp, Homo sapien
gctgggtcccgattcagacatgaaa

SEQ ID NO: 1544363 - DNA, 25 bp, Homo sapien
tgctctagccggctttgccgctgtt

SEQ ID NO: 1544364 - DNA, 25 bp, Homo sapien
ttgaaagccgccagcgggtcatcct

SEQ ID NO: 1544365 - DNA, 25 bp, Homo sapien
gtcctccacaccattcagtgcaatg

SEQ ID NO: 1544366 - DNA, 25 bp, Homo sapien
tagtgctccagcacggttcgcacgt

SEQ ID NO: 1544367 - DNA, 25 bp, Homo sapien
ggctgtttggagcgaggccacaagc

SEQ ID NO: 1544368 - DNA, 25 bp, Homo sapien
gggctgtttggagcgaggccacaag

SEQ ID NO: 1544369 - DNA, 25 bp, Homo sapien
ctttattggacaagtggtggcccaa

SEQ ID NO: 1544370 - DNA, 25 bp, Homo sapien
tttattggacaagtggtggcccaag

SEQ ID NO: 1544371 - DNA, 25 bp, Homo sapien
ctgggatgtactttattggacaagt

SEQ ID NO: 1544372 - DNA, 25 bp, Homo sapien
cattctctccacagtagcctggcag

SEQ ID NO: 1544373 - DNA, 25 bp, Homo sapien
gaacaactggcgtgtcaagcaactc

SEQ ID NO: 1544374 - DNA, 25 bp, Homo sapien
tccgagaccagggtgaaaaatctgc

SEQ ID NO: 1544375 - DNA, 25 bp, Homo sapien
tttcacagatcacgcaacacacagg

SEQ ID NO: 1544376 - DNA, 25 bp, Homo sapien
caggtatgcataacctcgctgggct

SEQ ID NO: 1544377 - DNA, 25 bp, Homo sapien
gagaacactgctacatatctgcctg

SEQ ID NO: 1544378 - DNA, 25 bp, Homo sapien
tagtccccaggagggtactcaggag

SEQ ID NO: 1544379 - DNA, 25 bp, Homo sapien
aacaaaggtttatgtggccactggc

SEQ ID NO: 1544380 - DNA, 25 bp, Homo sapien
tataacccacatacggactgtcccg

SEQ ID NO: 1544381 - DNA, 25 bp, Homo sapien
tggcctggtaacagcaagcacctgg

SEQ ID NO: 1544382 - DNA, 25 bp, Homo sapien
catttgagtgcctacatgggagtgc

SEQ ID NO: 1544383 - DNA, 25 bp, Homo sapien
gatcacaagccagccgagaagtggt

SEQ ID NO: 1544384 - DNA, 25 bp, Homo sapien
gaggcagggcgagggagataaagtc

SEQ ID NO: 1544385 - DNA, 25 bp, Homo sapien
cttagaatatttaatcagttagcac

SEQ ID NO: 1544386 - DNA, 25 bp, Homo sapien
actagatgaaggctggagtaggaga

SEQ ID NO: 1544387 - DNA, 25 bp, Homo sapien
ctggagtaggagagactgggatagt

SEQ ID NO: 1544388 - DNA, 25 bp, Homo sapien
tgggaaataactccaccggcttaca

SEQ ID NO: 1544389 - DNA, 25 bp, Homo sapien
ttacagacagtgcaccccaggacaa

SEQ ID NO: 1544390 - DNA, 25 bp, Homo sapien
gtgcagaggttcagtctggtccaca

SEQ ID NO: 1544391 - DNA, 25 bp, Homo sapien
cctgcagacttcctcaagctgggaa

SEQ ID NO: 1544392 - DNA, 25 bp, Homo sapien
tcagaggcctgacagtggcacacgc

SEQ ID NO: 1544393 - DNA, 25 bp, Homo sapien
atctgggtgtatatgtgcaaggcac

SEQ ID NO: 1544394 - DNA, 25 bp, Homo sapien
ctgggtgtatatgtgcaaggcacag

SEQ ID NO: 1544395 - DNA, 25 bp, Homo sapien
attacagtcaaagggcgggcaggag

SEQ ID NO: 1544396 - DNA, 25 bp, Homo sapien
cagggcgaggagctcggcctcaaga

SEQ ID NO: 1544397 - DNA, 25 bp, Homo sapien
gggcgaggagctcggcctcaagagg

SEQ ID NO: 1544398 - DNA, 25 bp, Homo sapien
agacgccagggcgaggagctcggcc

SEQ ID NO: 1544399 - DNA, 25 bp, Homo sapien
gccagggcgaggagctcggcctcaa

SEQ ID NO: 1544400 - DNA, 25 bp, Homo sapien
aatgagcgctaggatcacagtctgg

SEQ ID NO: 1544401 - DNA, 25 bp, Homo sapien
gcccggacatccgtggggagaccat

SEQ ID NO: 1544402 - DNA, 25 bp, Homo sapien
ggaggaaaatgagcgctaggatcac

SEQ ID NO: 1544403 - DNA, 25 bp, Homo sapien
gaaaatgagcgctaggatcacagtc

SEQ ID NO: 1544404 - DNA, 25 bp, Homo sapien
cctcccctccgcattcatccctttc

SEQ ID NO: 1544405 - DNA, 25 bp, Homo sapien
ctccgcattcatccctttccacgcc

SEQ ID NO: 1544406 - DNA, 25 bp, Homo sapien
ccctccgcattcatccctttccacg

SEQ ID NO: 1544407 - DNA, 25 bp, Homo sapien
gcattcatccctttccacgccacct

SEQ ID NO: 1544408 - DNA, 25 bp, Homo sapien
atctgcagctcgaagacgccagcgg

SEQ ID NO: 1544409 - DNA, 25 bp, Homo sapien
agtggatctgcagctcgaagacgcc

SEQ ID NO: 1544410 - DNA, 25 bp, Homo sapien
cggcccgaaagagtggatctgcagc

SEQ ID NO: 1544411 - DNA, 25 bp, Homo sapien
tggacccggcccgaaagagtggatc

SEQ ID NO: 1544412 - DNA, 25 bp, Homo sapien
cacctgcaagaggccgtcgggcagt

SEQ ID NO: 1544413 - DNA, 25 bp, Homo sapien
gtgtagaccggtccgcgcgcactca

SEQ ID NO: 1544414 - DNA, 25 bp, Homo sapien
gctccgggctgctcggtgtagaccg

SEQ ID NO: 1544415 - DNA, 25 bp, Homo sapien
agtgggagatcaggcgcgggcgctc

SEQ ID NO: 1544416 - DNA, 25 bp, Homo sapien
caagcattgcaatacaggtctgttc

SEQ ID NO: 1544417 - DNA, 25 bp, Homo sapien
gatattagtggtccccaagacaagg

SEQ ID NO: 1544418 - DNA, 25 bp, Homo sapien
tgaatcgctcaaaagggacccttgt

SEQ ID NO: 1544419 - DNA, 25 bp, Homo sapien
cccttgtgaggtaccaggatgatcc

SEQ ID NO: 1544420 - DNA, 25 bp, Homo sapien
tctccaggtttcgatgatgaaagag

SEQ ID NO: 1544421 - DNA, 25 bp, Homo sapien
ctccaggtttcgatgatgaaagaga

SEQ ID NO: 1544422 - DNA, 25 bp, Homo sapien
cggcagaggcgcgtgcacgcggtcc

SEQ ID NO: 1544423 - DNA, 25 bp, Homo sapien
cgcgcgcggtacgagaagcgcagct

SEQ ID NO: 1544424 - DNA, 25 bp, Homo sapien
ctgcgcgctgaatgtcccgggccca

SEQ ID NO: 1544425 - DNA, 25 bp, Homo sapien
acattcgtcctcgagcggtgcgcag

SEQ ID NO: 1544426 - DNA, 25 bp, Homo sapien
tgaccagcccacctaggaagtggag

SEQ ID NO: 1544427 - DNA, 25 bp, Homo sapien
tgaacccaggccatcgggctggagt

SEQ ID NO: 1544428 - DNA, 25 bp, Homo sapien
gagccaccttgcttcatctttgtga

SEQ ID NO: 1544429 - DNA, 25 bp, Homo sapien
tgtgacagataatcatcgggactag

SEQ ID NO: 1544430 - DNA, 25 bp, Homo sapien
tccattggcacacgggttcccgtca

SEQ ID NO: 1544431 - DNA, 25 bp, Homo sapien
cattcaccgggctgttcacagaagc

SEQ ID NO: 1544432 - DNA, 25 bp, Homo sapien
agtccagccctctaggcatcggcat

SEQ ID NO: 1544433 - DNA, 25 bp, Homo sapien
caaggcatccggtggtagcagagga

SEQ ID NO: 1544434 - DNA, 25 bp, Homo sapien
tctctgatgtctccaccccctgtgc

SEQ ID NO: 1544435 - DNA, 25 bp, Homo sapien
ctctctaatcacgtcccagaagccc

SEQ ID NO: 1544436 - DNA, 25 bp, Homo sapien
accctctctaatcacgtcccagaag

SEQ ID NO: 1544437 - DNA, 25 bp, Homo sapien
caccctctctaatcacgtcccagaa

SEQ ID NO: 1544438 - DNA, 25 bp, Homo sapien
caagagtacttgagaagggtgtttc

SEQ ID NO: 1544439 - DNA, 25 bp, Homo sapien
acaagagtacttgagaagggtgttt

SEQ ID NO: 1544440 - DNA, 25 bp, Homo sapien
tgcattcaaaggacctgggtgtctc

SEQ ID NO: 1544441 - DNA, 25 bp, Homo sapien
aacccacgcgggcaggtgcattcaa

SEQ ID NO: 1544442 - DNA, 25 bp, Homo sapien
cacagttggagccttggaaaccggg

SEQ ID NO: 1544443 - DNA, 25 bp, Homo sapien
ccgccgttgaagcagggtccatctg

SEQ ID NO: 1544444 - DNA, 25 bp, Homo sapien
tccaggtcgtgctcgcagcgaggac

SEQ ID NO: 1544445 - DNA, 25 bp, Homo sapien
caaaaggtagcgctgagggtccccg

SEQ ID NO: 1544446 - DNA, 25 bp, Homo sapien
cttaggttgttgagtgcatccggga

SEQ ID NO: 1544447 - DNA, 25 bp, Homo sapien
tcccagagccggaggcaaaaggtag

SEQ ID NO: 1544448 - DNA, 25 bp, Homo sapien
caaggcgttcgtctgtggcgcagcc

SEQ ID NO: 1544449 - DNA, 25 bp, Homo sapien
aaggcgttcgtctgtggcgcagccc

SEQ ID NO: 1544450 - DNA, 25 bp, Homo sapien
aggcgttcgtctgtggcgcagcccc

SEQ ID NO: 1544451 - DNA, 25 bp, Homo sapien
gcgttcgtctgtggcgcagcccctc

SEQ ID NO: 1544452 - DNA, 25 bp, Homo sapien
tagatggaaggagcagatatgacat

SEQ ID NO: 1544453 - DNA, 25 bp, Homo sapien
ctacatcttcagggcgattccaatc

SEQ ID NO: 1544454 - DNA, 25 bp, Homo sapien
agggcgattccaatctacggacgag

SEQ ID NO: 1544455 - DNA, 25 bp, Homo sapien
tcttcagggcgattccaatctacgg

SEQ ID NO: 1544456 - DNA, 25 bp, Homo sapien
ccagcgcgcccagtgtgtagcgggg

SEQ ID NO: 1544457 - DNA, 25 bp, Homo sapien
tttcacggacagaatcgaggaaggg

SEQ ID NO: 1544458 - DNA, 25 bp, Homo sapien
gcgcccagtgtgtagcggggggaaa

SEQ ID NO: 1544459 - DNA, 25 bp, Homo sapien
tcatttcacggacagaatcgaggaa

SEQ ID NO: 1544460 - DNA, 25 bp, Homo sapien
taggaagcattagagaggctgcccc

SEQ ID NO: 1544461 - DNA, 25 bp, Homo sapien
tttcaaagagaagatggcaggtagc

SEQ ID NO: 1544462 - DNA, 25 bp, Homo sapien
ggagtcggcatcgtgacctcctcaa

SEQ ID NO: 1544463 - DNA, 25 bp, Homo sapien
tacaatcagtggaaaagctctggcg

SEQ ID NO: 1544464 - DNA, 25 bp, Homo sapien
tacaacttgcaacagtaaagttccc

SEQ ID NO: 1544465 - DNA, 25 bp, Homo sapien
tacaaaaatccacgctctgactcca

SEQ ID NO: 1544466 - DNA, 25 bp, Homo sapien
caataatagcctttataggtgtttc

SEQ ID NO: 1544467 - DNA, 25 bp, Homo sapien
agagactgggcaccaccgagcaaat

SEQ ID NO: 1544468 - DNA, 25 bp, Homo sapien
tcccgcaccgggttctgagacgcgg

SEQ ID NO: 1544469 - DNA, 25 bp, Homo sapien
tccctctttgggcggggagagcgtc

SEQ ID NO: 1544470 - DNA, 25 bp, Homo sapien
cggggagagcgtctcccgcaccggg

SEQ ID NO: 1544471 - DNA, 25 bp, Homo sapien
agcgtctcccgcaccgggttctgag

SEQ ID NO: 1544472 - DNA, 25 bp, Homo sapien
tggagacggagtcaggactggagtc

SEQ ID NO: 1544473 - DNA, 25 bp, Homo sapien
gctggggtccgcgcctggttattca

SEQ ID NO: 1544474 - DNA, 25 bp, Homo sapien
tgaggttgaagtccgcgccgaggag

SEQ ID NO: 1544475 - DNA, 25 bp, Homo sapien
tagaagcccggactgaggttgaagt

SEQ ID NO: 1544476 - DNA, 25 bp, Homo sapien
gctgggacccggactggaggagtca

SEQ ID NO: 1544477 - DNA, 25 bp, Homo sapien
cgggagtcggcaccggagtagggat

SEQ ID NO: 1544478 - DNA, 25 bp, Homo sapien
gtcagggtccgagccggagtcggga

SEQ ID NO: 1544479 - DNA, 25 bp, Homo sapien
agtagggatccaggccggagcagga

SEQ ID NO: 1544480 - DNA, 25 bp, Homo sapien
agcgcggcccgaatccctgccagga

SEQ ID NO: 1544481 - DNA, 25 bp, Homo sapien
agcttcaggctcggcgccggctcag

SEQ ID NO: 1544482 - DNA, 25 bp, Homo sapien
gccggggccaggtaggagtccaaga

SEQ ID NO: 1544483 - DNA, 25 bp, Homo sapien
tcgggcaacaaaggcagctccggag

SEQ ID NO: 1544484 - DNA, 25 bp, Homo sapien
agttcgcggccagcggggtgcgcgt

SEQ ID NO: 1544485 - DNA, 25 bp, Homo sapien
gtgggcccgggtgagttcgcggcca

SEQ ID NO: 1544486 - DNA, 25 bp, Homo sapien
cccgggtgagttcgcggccagcggg

SEQ ID NO: 1544487 - DNA, 25 bp, Homo sapien
cgggcccggcctcgctggagaccga

SEQ ID NO: 1544488 - DNA, 25 bp, Homo sapien
gccagcccgatggccgacgggtctg

SEQ ID NO: 1544489 - DNA, 25 bp, Homo sapien
ggatggtccccaggatgggcgaggg

SEQ ID NO: 1544490 - DNA, 25 bp, Homo sapien
ctgtaaggagatggccgacgggatg

SEQ ID NO: 1544491 - DNA, 25 bp, Homo sapien
tgggaatggggggatccgccagccc

SEQ ID NO: 1544492 - DNA, 25 bp, Homo sapien
gtcactcgaatcaggaccctcttgt

SEQ ID NO: 1544493 - DNA, 25 bp, Homo sapien
gaccctcttgtccagcgcgaagttc

SEQ ID NO: 1544494 - DNA, 25 bp, Homo sapien
cagtaggtcactcgaatcaggaccc

SEQ ID NO: 1544495 - DNA, 25 bp, Homo sapien
tcaggaccctcttgtccagcgcgaa

SEQ ID NO: 1544496 - DNA, 25 bp, Homo sapien
ggagacccagcccccactgccggcc

SEQ ID NO: 1544497 - DNA, 25 bp, Homo sapien
ccggagacccagcccccactgccgg

SEQ ID NO: 1544498 - DNA, 25 bp, Homo sapien
tccccggagacccagcccccactgc

SEQ ID NO: 1544499 - DNA, 25 bp, Homo sapien
cccggagacccagcccccactgccg

SEQ ID NO: 1544500 - DNA, 25 bp, Homo sapien
taggtgattcggaaattgctgctcc

SEQ ID NO: 1544501 - DNA, 25 bp, Homo sapien
aaagagtaggtgattcggaaattgc

SEQ ID NO: 1544502 - DNA, 25 bp, Homo sapien
gagtaggtgattcggaaattgctgc

SEQ ID NO: 1544503 - DNA, 25 bp, Homo sapien
gtaggtgattcggaaattgctgctc

SEQ ID NO: 1544504 - DNA, 25 bp, Homo sapien
tcaaactcccctgtagcctgggcag

SEQ ID NO: 1544505 - DNA, 25 bp, Homo sapien
aatggaccagtctcccgttcacaaa

SEQ ID NO: 1544506 - DNA, 25 bp, Homo sapien
cttggaatggaccagtctcccgttc

SEQ ID NO: 1544507 - DNA, 25 bp, Homo sapien
ggaatggaccagtctcccgttcaca

SEQ ID NO: 1544508 - DNA, 25 bp, Homo sapien
tcctcatcgataacgctcacaattt

SEQ ID NO: 1544509 - DNA, 25 bp, Homo sapien
tctgcagcctggactcgttcacaaa

SEQ ID NO: 1544510 - DNA, 25 bp, Homo sapien
tggactcgttcacaaagccatcacc

SEQ ID NO: 1544511 - DNA, 25 bp, Homo sapien
gataacgctcacaattttctgcagc

SEQ ID NO: 1544512 - DNA, 25 bp, Homo sapien
tgcgcaggctggaacatagatctta

SEQ ID NO: 1544513 - DNA, 25 bp, Homo sapien
tatctggaaccagggcatgggaaat

SEQ ID NO: 1544514 - DNA, 25 bp, Homo sapien
cataatcgagtttggagtgtcacgg

SEQ ID NO: 1544515 - DNA, 25 bp, Homo sapien
tttgagtctgactgccatccccgtt

SEQ ID NO: 1544516 - DNA, 25 bp, Homo sapien
cagacggtggtagttctggagtcct

SEQ ID NO: 1544517 - DNA, 25 bp, Homo sapien
gccccatgaagaagcccaccttcat

SEQ ID NO: 1544518 - DNA, 25 bp, Homo sapien
agccccatgaagaagcccaccttca

SEQ ID NO: 1544519 - DNA, 25 bp, Homo sapien
cggtgtggaaatccacctgcagctg

SEQ ID NO: 1544520 - DNA, 25 bp, Homo sapien
gtgtggaaatccacctgcagctgtg

SEQ ID NO: 1544521 - DNA, 25 bp, Homo sapien
cccggtgtggaaatccacctgcagc

SEQ ID NO: 1544522 - DNA, 25 bp, Homo sapien
ggtgtggaaatccacctgcagctgt

SEQ ID NO: 1544523 - DNA, 25 bp, Homo sapien
cgcaggtcaaatgattggccaccct

SEQ ID NO: 1544524 - DNA, 25 bp, Homo sapien
atattgtcagatttcacctcacact

SEQ ID NO: 1544525 - DNA, 25 bp, Homo sapien
gtcagatttcacctcacacttccag

SEQ ID NO: 1544526 - DNA, 25 bp, Homo sapien
tcagatgcgcaggtcaaatgattgg

SEQ ID NO: 1544527 - DNA, 25 bp, Homo sapien
ggaagatgcacagctgcttcatcag

SEQ ID NO: 1544528 - DNA, 25 bp, Homo sapien
gaaccttcacatggacagaaagcca

SEQ ID NO: 1544529 - DNA, 25 bp, Homo sapien
cctgctgtgtgaggaggaaccttca

SEQ ID NO: 1544530 - DNA, 25 bp, Homo sapien
aggaggaaccttcacatggacagaa

SEQ ID NO: 1544531 - DNA, 25 bp, Homo sapien
tcagaactccatattcctaaagaca

SEQ ID NO: 1544532 - DNA, 25 bp, Homo sapien
cagtcagaactccatattcctaaag

SEQ ID NO: 1544533 - DNA, 25 bp, Homo sapien
cagaactccatattcctaaagacat

SEQ ID NO: 1544534 - DNA, 25 bp, Homo sapien
agtcagaactccatattcctaaaga

SEQ ID NO: 1544535 - DNA, 25 bp, Homo sapien
tgaaagggatgatcgatgtccctct

SEQ ID NO: 1544536 - DNA, 25 bp, Homo sapien
ttgaaagggatgatcgatgtccctc

SEQ ID NO: 1544537 - DNA, 25 bp, Homo sapien
tgggcctatgttcattctctgaaaa

SEQ ID NO: 1544538 - DNA, 25 bp, Homo sapien
gcctatgttcattctctgaaaattc

SEQ ID NO: 1544539 - DNA, 25 bp, Homo sapien
ctgggcctatgttcattctctgaaa

SEQ ID NO: 1544540 - DNA, 25 bp, Homo sapien
tatgttcattctctgaaaattccat

SEQ ID NO: 1544541 - DNA, 25 bp, Homo sapien
gttgcagctcctctcatacgtccag

SEQ ID NO: 1544542 - DNA, 25 bp, Homo sapien
caccaagatgctcagatcaaatggt

SEQ ID NO: 1544543 - DNA, 25 bp, Homo sapien
tgccattctcaaagaacccattgtt

SEQ ID NO: 1544544 - DNA, 25 bp, Homo sapien
gatcaaatggtttgccattctcaaa

SEQ ID NO: 1544545 - DNA, 25 bp, Homo sapien
gaagtagatgggcaaagatgtaaca

SEQ ID NO: 1544546 - DNA, 25 bp, Homo sapien
agaatatggttgaagtagatgggca

SEQ ID NO: 1544547 - DNA, 25 bp, Homo sapien
gcattatcttcacagaatatggttg

SEQ ID NO: 1544548 - DNA, 25 bp, Homo sapien
cattatcttcacagaatatggttga

SEQ ID NO: 1544549 - DNA, 25 bp, Homo sapien
tttgtgtcatgaaataggtgacaac

SEQ ID NO: 1544550 - DNA, 25 bp, Homo sapien
cttgtagcaggaaaagggttttcat

SEQ ID NO: 1544551 - DNA, 25 bp, Homo sapien
cactgacagtagaaggtggagacaa

SEQ ID NO: 1544552 - DNA, 25 bp, Homo sapien
ggagctctaagacactgacagtaga

SEQ ID NO: 1544553 - DNA, 25 bp, Homo sapien
gaaacagctttaggggacttgggca

SEQ ID NO: 1544554 - DNA, 25 bp, Homo sapien
gtgcccagtaccacggacagcacct

SEQ ID NO: 1544555 - DNA, 25 bp, Homo sapien
agcaccttagaggaaacagctttag

SEQ ID NO: 1544556 - DNA, 25 bp, Homo sapien
ttgcaaatacaggcccagaagcacc

SEQ ID NO: 1544557 - DNA, 25 bp, Homo sapien
cacatccagagcatattcacagatg

SEQ ID NO: 1544558 - DNA, 25 bp, Homo sapien
tccacatccagagcatattcacaga

SEQ ID NO: 1544559 - DNA, 25 bp, Homo sapien
tatgtaacagtgttggccatttacc

SEQ ID NO: 1544560 - DNA, 25 bp, Homo sapien
gagttgatgggcaaatatgtaacag

SEQ ID NO: 1544561 - DNA, 25 bp, Homo sapien
tcctcaacaacaaggattgtggtca

SEQ ID NO: 1544562 - DNA, 25 bp, Homo sapien
gggattcctcaacaacaaggattgt

SEQ ID NO: 1544563 - DNA, 25 bp, Homo sapien
agagggattcctcaacaacaaggat

SEQ ID NO: 1544564 - DNA, 25 bp, Homo sapien
tttcaactgcacatagatgttgagc

SEQ ID NO: 1544565 - DNA, 25 bp, Homo sapien
tagagtccaagtacgactttctgtg

SEQ ID NO: 1544566 - DNA, 25 bp, Homo sapien
ttagagtccaagtacgactttctgt

SEQ ID NO: 1544567 - DNA, 25 bp, Homo sapien
agagtccaagtacgactttctgtgt

SEQ ID NO: 1544568 - DNA, 25 bp, Homo sapien
agtccaagtacgactttctgtgttt

SEQ ID NO: 1544569 - DNA, 25 bp, Homo sapien
ccttcttggcgaccttcagaattga

SEQ ID NO: 1544570 - DNA, 25 bp, Homo sapien
tcttggcgaccttcagaattgagtc

SEQ ID NO: 1544571 - DNA, 25 bp, Homo sapien
tggcgaccttcagaattgagtccag

SEQ ID NO: 1544572 - DNA, 25 bp, Homo sapien
ttggcgaccttcagaattgagtcca

SEQ ID NO: 1544573 - DNA, 25 bp, Homo sapien
tattccacacctcaatagctctaag

SEQ ID NO: 1544574 - DNA, 25 bp, Homo sapien
ctcagggtttctattccacacctca

SEQ ID NO: 1544575 - DNA, 25 bp, Homo sapien
gggtttctattccacacctcaatag

SEQ ID NO: 1544576 - DNA, 25 bp, Homo sapien
cacacctcaatagctctaagtaaag

SEQ ID NO: 1544577 - DNA, 25 bp, Homo sapien
ccagggtccacaccgcaatccccac

SEQ ID NO: 1544578 - DNA, 25 bp, Homo sapien
tccagggtccacaccgcaatcccca

SEQ ID NO: 1544579 - DNA, 25 bp, Homo sapien
ggtccagggtccacaccgcaatccc

SEQ ID NO: 1544580 - DNA, 25 bp, Homo sapien
gtccagggtccacaccgcaatcccc

SEQ ID NO: 1544581 - DNA, 25 bp, Homo sapien
gattatcacgcaggaaccaacagac

SEQ ID NO: 1544582 - DNA, 25 bp, Homo sapien
aagacacaggcagtttgtatggcac

SEQ ID NO: 1544583 - DNA, 25 bp, Homo sapien
gtgtccctttgattatcacgcagga

SEQ ID NO: 1544584 - DNA, 25 bp, Homo sapien
aaagacacaggcagtttgtatggca

SEQ ID NO: 1544585 - DNA, 25 bp, Homo sapien
tcctcaaagggcacgtagtctgttg

SEQ ID NO: 1544586 - DNA, 25 bp, Homo sapien
cactcggaaacggaaggcaatatct

SEQ ID NO: 1544587 - DNA, 25 bp, Homo sapien
cacatgattgccaaagtgcactcgg

SEQ ID NO: 1544588 - DNA, 25 bp, Homo sapien
tgtaatgtacgtagatgcacagctc

SEQ ID NO: 1544589 - DNA, 25 bp, Homo sapien
aaagccgtaaatgcgtatgccattg

SEQ ID NO: 1544590 - DNA, 25 bp, Homo sapien
atggcgggattcgatggacaaagcc

SEQ ID NO: 1544591 - DNA, 25 bp, Homo sapien
tggacaaagccgtaaatgcgtatgc

SEQ ID NO: 1544592 - DNA, 25 bp, Homo sapien
cgtaaatgcgtatgccattgacctt

SEQ ID NO: 1544593 - DNA, 25 bp, Homo sapien
gagttttcgtgctgttttaatgaca

SEQ ID NO: 1544594 - DNA, 25 bp, Homo sapien
tgtccaacagtccaagtatatcatg

SEQ ID NO: 1544595 - DNA, 25 bp, Homo sapien
gaaaagtcccctatctgttcctgtc

SEQ ID NO: 1544596 - DNA, 25 bp, Homo sapien
ccagtgtcctgaagagggataggtt

SEQ ID NO: 1544597 - DNA, 25 bp, Homo sapien
tagatgatctgtcttgggaccagtg

SEQ ID NO: 1544598 - DNA, 25 bp, Homo sapien
gagggttacactggtccatgggcca

SEQ ID NO: 1544599 - DNA, 25 bp, Homo sapien
tcacatggacagaaggccacgtgca

SEQ ID NO: 1544600 - DNA, 25 bp, Homo sapien
ttcacatggacagaaggccacgtgc

SEQ ID NO: 1544601 - DNA, 25 bp, Homo sapien
cacatggacagaaggccacgtgcat

SEQ ID NO: 1544602 - DNA, 25 bp, Homo sapien
cagttctgccacccgggatccacac

SEQ ID NO: 1544603 - DNA, 25 bp, Homo sapien
gttctgccacccgggatccacactg

SEQ ID NO: 1544604 - DNA, 25 bp, Homo sapien
gccacccgggatccacactgacaca

SEQ ID NO: 1544605 - DNA, 25 bp, Homo sapien
tctgccacccgggatccacactgac

SEQ ID NO: 1544606 - DNA, 25 bp, Homo sapien
caagacttgaggatctatcagtgga

SEQ ID NO: 1544607 - DNA, 25 bp, Homo sapien
tttggtgaaagatgcccgccaaggc

SEQ ID NO: 1544608 - DNA, 25 bp, Homo sapien
taaaaattgttgagagcacagctgc

SEQ ID NO: 1544609 - DNA, 25 bp, Homo sapien
tcactatcgtcaagggccatgggca

SEQ ID NO: 1544610 - DNA, 25 bp, Homo sapien
caagaaccaatggacgaggacacgc

SEQ ID NO: 1544611 - DNA, 25 bp, Homo sapien
acgaggacacgccttctgtgtggca

SEQ ID NO: 1544612 - DNA, 25 bp, Homo sapien
aagggaggatccgtgtccctctgat

SEQ ID NO: 1544613 - DNA, 25 bp, Homo sapien
ggaggatccgtgtccctctgattgt

SEQ ID NO: 1544614 - DNA, 25 bp, Homo sapien
gttctcattcatcccagtgtagaat

SEQ ID NO: 1544615 - DNA, 25 bp, Homo sapien
cagtgtagaattccacccgcagctc

SEQ ID NO: 1544616 - DNA, 25 bp, Homo sapien
ggaaggcgatgtctgagttctcatt

SEQ ID NO: 1544617 - DNA, 25 bp, Homo sapien
ttccacccgcagctctgggtcattg

SEQ ID NO: 1544618 - DNA, 25 bp, Homo sapien
tgaccaaacaatggccaaagtgcac

SEQ ID NO: 1544619 - DNA, 25 bp, Homo sapien
ctgtcaatgaccaaacaatggccaa

SEQ ID NO: 1544620 - DNA, 25 bp, Homo sapien
atgaccaaacaatggccaaagtgca

SEQ ID NO: 1544621 - DNA, 25 bp, Homo sapien
tcaatgaccaaacaatggccaaagt

SEQ ID NO: 1544622 - DNA, 25 bp, Homo sapien
tgaagaacacattgtggcatctccc

SEQ ID NO: 1544623 - DNA, 25 bp, Homo sapien
acacttccaggccccacacacatgg

SEQ ID NO: 1544624 - DNA, 25 bp, Homo sapien
aacacattgtggcatctcccctcac

SEQ ID NO: 1544625 - DNA, 25 bp, Homo sapien
cttgaagaacacattgtggcatctc

SEQ ID NO: 1544626 - DNA, 25 bp, Homo sapien
tgctcagatcaaattgtttgccgtc

SEQ ID NO: 1544627 - DNA, 25 bp, Homo sapien
tggtattcattgtctagcaccaaga

SEQ ID NO: 1544628 - DNA, 25 bp, Homo sapien
ctggtattcattgtctagcaccaag

SEQ ID NO: 1544629 - DNA, 25 bp, Homo sapien
tagcaccaagatgctcagatcaaat

SEQ ID NO: 1544630 - DNA, 25 bp, Homo sapien
attttggaaacgagctgaggatagc

SEQ ID NO: 1544631 - DNA, 25 bp, Homo sapien
gaaatgccagatgagctgatactga

SEQ ID NO: 1544632 - DNA, 25 bp, Homo sapien
gatagcggtgcaaccagagggtgct

SEQ ID NO: 1544633 - DNA, 25 bp, Homo sapien
tactgatcacggtcagattttggaa

SEQ ID NO: 1544634 - DNA, 25 bp, Homo sapien
gggtgtggtcatctccataaattgc

SEQ ID NO: 1544635 - DNA, 25 bp, Homo sapien
aaaatcttcatagaacatggtggaa

SEQ ID NO: 1544636 - DNA, 25 bp, Homo sapien
tgaccaagtgtagggaaaagggtga

SEQ ID NO: 1544637 - DNA, 25 bp, Homo sapien
gctctggggatcctatggtcacatg

SEQ ID NO: 1544638 - DNA, 25 bp, Homo sapien
ggatgaagatgatcaaattgacacc

SEQ ID NO: 1544639 - DNA, 25 bp, Homo sapien
caagttgtggcaatgaacatggaaa

SEQ ID NO: 1544640 - DNA, 25 bp, Homo sapien
ccatgagtaaggttggagctgaaca

SEQ ID NO: 1544641 - DNA, 25 bp, Homo sapien
gaagatgatcaaattgacacctgtg

SEQ ID NO: 1544642 - DNA, 25 bp, Homo sapien
gagtaagtctccagaggcaaacaaa

SEQ ID NO: 1544643 - DNA, 25 bp, Homo sapien
tgaacttgggttgacaagcatgaaa

SEQ ID NO: 1544644 - DNA, 25 bp, Homo sapien
tcaacattggttccttggctctatg

SEQ ID NO: 1544645 - DNA, 25 bp, Homo sapien
caagcatgaaagagatgttgagtaa

SEQ ID NO: 1544646 - DNA, 25 bp, Homo sapien
ttcaaaaggtaaggctttagactgc

SEQ ID NO: 1544647 - DNA, 25 bp, Homo sapien
taaggctttagactgcggaaataac

SEQ ID NO: 1544648 - DNA, 25 bp, Homo sapien
gactgcggaaataacctactgtgtt

SEQ ID NO: 1544649 - DNA, 25 bp, Homo sapien
ctttagactgcggaaataacctact

SEQ ID NO: 1544650 - DNA, 25 bp, Homo sapien
atctctgagttgcagcacttaaatg

SEQ ID NO: 1544651 - DNA, 25 bp, Homo sapien
cttaaatgacccctttcagctttgc

SEQ ID NO: 1544652 - DNA, 25 bp, Homo sapien
gcagcacttaaatgacccctttcag

SEQ ID NO: 1544653 - DNA, 25 bp, Homo sapien
tctgggcgaccttcggaattgtgtc

SEQ ID NO: 1544654 - DNA, 25 bp, Homo sapien
tattgagaataagtgagaggtgcag

SEQ ID NO: 1544655 - DNA, 25 bp, Homo sapien
aataagtgagaggtgcagggtcagg

SEQ ID NO: 1544656 - DNA, 25 bp, Homo sapien
gcagggtcaggtgcagtctcccttc

SEQ ID NO: 1544657 - DNA, 25 bp, Homo sapien
ctgccagggtattgagaataagtga

SEQ ID NO: 1544658 - DNA, 25 bp, Homo sapien
agaagagtcgatcagtgtccctttg

SEQ ID NO: 1544659 - DNA, 25 bp, Homo sapien
atagaagagtcgatcagtgtccctt

SEQ ID NO: 1544660 - DNA, 25 bp, Homo sapien
tagaagagtcgatcagtgtcccttt

SEQ ID NO: 1544661 - DNA, 25 bp, Homo sapien
cacataaggtcaaactcttagcaaa

SEQ ID NO: 1544662 - DNA, 25 bp, Homo sapien
tgccaattagacatttccacatcac

SEQ ID NO: 1544663 - DNA, 25 bp, Homo sapien
cacatcacccacacataaggtcaaa

SEQ ID NO: 1544664 - DNA, 25 bp, Homo sapien
catggggcctccatcctgccaatta

SEQ ID NO: 1544665 - DNA, 25 bp, Homo sapien
ggcaaagcacacagcatattggaca

SEQ ID NO: 1544666 - DNA, 25 bp, Homo sapien
agcacacagcatattggacaggttc

SEQ ID NO: 1544667 - DNA, 25 bp, Homo sapien
caaagcacacagcatattggacagg

SEQ ID NO: 1544668 - DNA, 25 bp, Homo sapien
aaagcacacagcatattggacaggt

SEQ ID NO: 1544669 - DNA, 25 bp, Homo sapien
catatcccaaactcacgactgttca

SEQ ID NO: 1544670 - DNA, 25 bp, Homo sapien
tcattgagacacacgtagatgcgca

SEQ ID NO: 1544671 - DNA, 25 bp, Homo sapien
ggcctaagtgcactcgcaaatggaa

SEQ ID NO: 1544672 - DNA, 25 bp, Homo sapien
tagatgcgcaagtcaaatggtttgc

SEQ ID NO: 1544673 - DNA, 25 bp, Homo sapien
atggcgggattcgatggacaaaggc

SEQ ID NO: 1544674 - DNA, 25 bp, Homo sapien
tcccatggtcaggtagaaagagggt

SEQ ID NO: 1544675 - DNA, 25 bp, Homo sapien
cattgttgacaagcactgagtccag

SEQ ID NO: 1544676 - DNA, 25 bp, Homo sapien
gagtgtgatcatctccgtccattgt

SEQ ID NO: 1544677 - DNA, 25 bp, Homo sapien
gggtttgccttgcatccatctctga

SEQ ID NO: 1544678 - DNA, 25 bp, Homo sapien
gcaaagtactgactgccttgtccac

SEQ ID NO: 1544679 - DNA, 25 bp, Homo sapien
atctctgaccaagattgacactctg

SEQ ID NO: 1544680 - DNA, 25 bp, Homo sapien
tgtccactatttgagcccacagctc

SEQ ID NO: 1544681 - DNA, 25 bp, Homo sapien
gttgtctccctctgtgtagttcttc

SEQ ID NO: 1544682 - DNA, 25 bp, Homo sapien
gacggttacactggttcagagtcca

SEQ ID NO: 1544683 - DNA, 25 bp, Homo sapien
ttacactggttcagagtccacaccc

SEQ ID NO: 1544684 - DNA, 25 bp, Homo sapien
agacggttacactggttcagagtcc

SEQ ID NO: 1544685 - DNA, 25 bp, Homo sapien
cggttacactggttcagagtccaca

SEQ ID NO: 1544686 - DNA, 25 bp, Homo sapien
acgaaagggatgatcggtgtccctg

SEQ ID NO: 1544687 - DNA, 25 bp, Homo sapien
gattatcacacaagaaccagtagac

SEQ ID NO: 1544688 - DNA, 25 bp, Homo sapien
cctgtgattatcacacaagaaccag

SEQ ID NO: 1544689 - DNA, 25 bp, Homo sapien
cgaaagggatgatcggtgtccctgt

SEQ ID NO: 1544690 - DNA, 25 bp, Homo sapien
cacggagatgcacaggttaaatggt

SEQ ID NO: 1544691 - DNA, 25 bp, Homo sapien
aagccccattcacgcggctgttcat

SEQ ID NO: 1544692 - DNA, 25 bp, Homo sapien
gaaagggcatattgtggcatgtcac

SEQ ID NO: 1544693 - DNA, 25 bp, Homo sapien
gtactcatcggccagcacggagatg

SEQ ID NO: 1544694 - DNA, 25 bp, Homo sapien
cttggagttgcccagagatgtaatg

SEQ ID NO: 1544695 - DNA, 25 bp, Homo sapien
aacaggtgttgcaaaacgtaggata

SEQ ID NO: 1544696 - DNA, 25 bp, Homo sapien
caaaacgtaggatattattctgaac

SEQ ID NO: 1544697 - DNA, 25 bp, Homo sapien
attcactatgactgctgatggccca

SEQ ID NO: 1544698 - DNA, 25 bp, Homo sapien
gggttagtgctggacagtgttcatt

SEQ ID NO: 1544699 - DNA, 25 bp, Homo sapien
ttagtgctggacagtgttcattgaa

SEQ ID NO: 1544700 - DNA, 25 bp, Homo sapien
tgaatgcatacatttcagttccatg

SEQ ID NO: 1544701 - DNA, 25 bp, Homo sapien
gttcattgaatgcatacatttcagt

SEQ ID NO: 1544702 - DNA, 25 bp, Homo sapien
aatccttgcgtcttgcacagggcct

SEQ ID NO: 1544703 - DNA, 25 bp, Homo sapien
ggaagatccctatggcctgggactg

SEQ ID NO: 1544704 - DNA, 25 bp, Homo sapien
tctctcatgaacttcaatccttgcg

SEQ ID NO: 1544705 - DNA, 25 bp, Homo sapien
catgaacttcaatccttgcgtcttg

SEQ ID NO: 1544706 - DNA, 25 bp, Homo sapien
tctctctgcagattacccttgtgcc

SEQ ID NO: 1544707 - DNA, 25 bp, Homo sapien
aattatacatcagaacccagtagac

SEQ ID NO: 1544708 - DNA, 25 bp, Homo sapien
cccttgtgcctacttcagacagttg

SEQ ID NO: 1544709 - DNA, 25 bp, Homo sapien
tcaaacaagttttcagcatcatctc

SEQ ID NO: 1544710 - DNA, 25 bp, Homo sapien
gagtcggtggggaaagctgtaagca

SEQ ID NO: 1544711 - DNA, 25 bp, Homo sapien
tcggtggggaaagctgtaagcattt

SEQ ID NO: 1544712 - DNA, 25 bp, Homo sapien
tggggaaagctgtaagcattttggc

SEQ ID NO: 1544713 - DNA, 25 bp, Homo sapien
ggaaagctgtaagcattttggccat

SEQ ID NO: 1544714 - DNA, 25 bp, Homo sapien
taagtgaagaatcctctgggatccc

SEQ ID NO: 1544715 - DNA, 25 bp, Homo sapien
catggtcgcacagaaacagggattc

SEQ ID NO: 1544716 - DNA, 25 bp, Homo sapien
ggtccttcagaaaacgtgactccca

SEQ ID NO: 1544717 - DNA, 25 bp, Homo sapien
gagtccagtaaacctgcaaagcagg

SEQ ID NO: 1544718 - DNA, 25 bp, Homo sapien
agtgacactctccaattttcaaagc

SEQ ID NO: 1544719 - DNA, 25 bp, Homo sapien
agtggagggtgaagccgattgttgc

SEQ ID NO: 1544720 - DNA, 25 bp, Homo sapien
gaagagtggagggtgaagccgattg

SEQ ID NO: 1544721 - DNA, 25 bp, Homo sapien
agaagggaagagtggagggtgaagc

SEQ ID NO: 1544722 - DNA, 25 bp, Homo sapien
gggtgaagccgattgttgctgagaa

SEQ ID NO: 1544723 - DNA, 25 bp, Homo sapien
ccttcattagtttgtaggtaacatg

SEQ ID NO: 1544724 - DNA, 25 bp, Homo sapien
tgtttctgctaagtggttctccagg

SEQ ID NO: 1544725 - DNA, 25 bp, Homo sapien
cagctcttatagagggaaaaggact

SEQ ID NO: 1544726 - DNA, 25 bp, Homo sapien
tctccaggtttgctatgaagcaggt

SEQ ID NO: 1544727 - DNA, 25 bp, Homo sapien
acccagtcatatcccagcactcaca

SEQ ID NO: 1544728 - DNA, 25 bp, Homo sapien
ccagtcatatcccagcactcacaca

SEQ ID NO: 1544729 - DNA, 25 bp, Homo sapien
caacacccagtcatatcccagcact

SEQ ID NO: 1544730 - DNA, 25 bp, Homo sapien
acacccagtcatatcccagcactca

SEQ ID NO: 1544731 - DNA, 25 bp, Homo sapien
attgacacacatgggaagatgcaca

SEQ ID NO: 1544732 - DNA, 25 bp, Homo sapien
gccctgctgtgtgaggaggaaactt

SEQ ID NO: 1544733 - DNA, 25 bp, Homo sapien
cttgacatgcacagaaggccacatg

SEQ ID NO: 1544734 - DNA, 25 bp, Homo sapien
ctggcatccacattgacacacatgg

SEQ ID NO: 1544735 - DNA, 25 bp, Homo sapien
cacaaatgagtcattgataactcac

SEQ ID NO: 1544736 - DNA, 25 bp, Homo sapien
gcatctagagagcatgctttctgct

SEQ ID NO: 1544737 - DNA, 25 bp, Homo sapien
gaaacatcactcctatgatctgcat

SEQ ID NO: 1544738 - DNA, 25 bp, Homo sapien
tgtgtgcagaacctacctgaggaaa

SEQ ID NO: 1544739 - DNA, 25 bp, Homo sapien
ctgagtagctgtgatgaaagaggcc

SEQ ID NO: 1544740 - DNA, 25 bp, Homo sapien
gccacaatgcctgtctgatacttaa

SEQ ID NO: 1544741 - DNA, 25 bp, Homo sapien
tgagccagtgaacccagctactctg

SEQ ID NO: 1544742 - DNA, 25 bp, Homo sapien
tctgtctgaactgaggctacacttg

SEQ ID NO: 1544743 - DNA, 25 bp, Homo sapien
tcccagtgtagaattccacccgcag

SEQ ID NO: 1544744 - DNA, 25 bp, Homo sapien
ttccacccgcagctctgggtcattg

SEQ ID NO: 1544745 - DNA, 25 bp, Homo sapien
gtcctcatttgtcccagtgtagaat

SEQ ID NO: 1544746 - DNA, 25 bp, Homo sapien
gaaatggaaggcgatgtctgagtcc

SEQ ID NO: 1544747 - DNA, 25 bp, Homo sapien
gatgctcagatcaaatggcttgcca

SEQ ID NO: 1544748 - DNA, 25 bp, Homo sapien
ccaagatgctcagatcaaatggctt

SEQ ID NO: 1544749 - DNA, 25 bp, Homo sapien
caccaagatgctcagatcaaatggc

SEQ ID NO: 1544750 - DNA, 25 bp, Homo sapien
aagatgctcagatcaaatggcttgc

SEQ ID NO: 1544751 - DNA, 25 bp, Homo sapien
gagagatcatgctgttagtaggctc

SEQ ID NO: 1544752 - DNA, 25 bp, Homo sapien
gaaatcctatggtcacatagaaaga

SEQ ID NO: 1544753 - DNA, 25 bp, Homo sapien
tcttcacagaacatggtgggagtta

SEQ ID NO: 1544754 - DNA, 25 bp, Homo sapien
aatgcattagaaagacagtatgcca

SEQ ID NO: 1544755 - DNA, 25 bp, Homo sapien
gatgctgtacctaatgtcttctcag

SEQ ID NO: 1544756 - DNA, 25 bp, Homo sapien
gggaccttgtcactcactcctgaag

SEQ ID NO: 1544757 - DNA, 25 bp, Homo sapien
tcttgatgcctctcatagaattcct

SEQ ID NO: 1544758 - DNA, 25 bp, Homo sapien
tgaagtcacacgaaggcttatcctt

SEQ ID NO: 1544759 - DNA, 25 bp, Homo sapien
gaattttcgtgggtagctccagtag

SEQ ID NO: 1544760 - DNA, 25 bp, Homo sapien
ggctgaattttcgtgggtagctcca

SEQ ID NO: 1544761 - DNA, 25 bp, Homo sapien
ctgaattttcgtgggtagctccagt

SEQ ID NO: 1544762 - DNA, 25 bp, Homo sapien
ctggctgaattttcgtgggtagctc

SEQ ID NO: 1544763 - DNA, 25 bp, Homo sapien
gacagtatttttggataaggccatg

SEQ ID NO: 1544764 - DNA, 25 bp, Homo sapien
tatcctttaagtacttatggaaaca

SEQ ID NO: 1544765 - DNA, 25 bp, Homo sapien
cacacatcaagacagtatttttgga

SEQ ID NO: 1544766 - DNA, 25 bp, Homo sapien
acttatggaaacacaagcggcacac

SEQ ID NO: 1544767 - DNA, 25 bp, Homo sapien
ccagcaagctttccgtgcagcagga

SEQ ID NO: 1544768 - DNA, 25 bp, Homo sapien
aaatgctgcaactcagagatgccct

SEQ ID NO: 1544769 - DNA, 25 bp, Homo sapien
tgcaggtctgtgtctgtaatgcagc

SEQ ID NO: 1544770 - DNA, 25 bp, Homo sapien
gactcaggtgtcagaaagaaactct

SEQ ID NO: 1544771 - DNA, 25 bp, Homo sapien
tctacgacgactgcaagtggttgat

SEQ ID NO: 1544772 - DNA, 25 bp, Homo sapien
gcaagtggttgatgatttttctgta

SEQ ID NO: 1544773 - DNA, 25 bp, Homo sapien
tggactgcagtgatcctcacacatc

SEQ ID NO: 1544774 - DNA, 25 bp, Homo sapien
gagggaatgattgatttctacgacg

SEQ ID NO: 1544775 - DNA, 25 bp, Homo sapien
aatggacgtccttcccagaagcggc

SEQ ID NO: 1544776 - DNA, 25 bp, Homo sapien
gcacagccccagtacttgcacaaat

SEQ ID NO: 1544777 - DNA, 25 bp, Homo sapien
gcggcacacattactgacagcacag

SEQ ID NO: 1544778 - DNA, 25 bp, Homo sapien
atcaagggcaatggacgtccttccc

SEQ ID NO: 1544779 - DNA, 25 bp, Homo sapien
cacgcacgaaccaacaggcaaggaa

SEQ ID NO: 1544780 - DNA, 25 bp, Homo sapien
tatcacgcacgaaccaacaggcaag

SEQ ID NO: 1544781 - DNA, 25 bp, Homo sapien
atcacgcacgaaccaacaggcaagg

SEQ ID NO: 1544782 - DNA, 25 bp, Homo sapien
tcacgcacgaaccaacaggcaagga

SEQ ID NO: 1544783 - DNA, 25 bp, Homo sapien
aggtcaaagcacacagcatgttggg

SEQ ID NO: 1544784 - DNA, 25 bp, Homo sapien
cagcatgttgggcaggtccccccat

SEQ ID NO: 1544785 - DNA, 25 bp, Homo sapien
aagcacacagcatgttgggcaggtc

SEQ ID NO: 1544786 - DNA, 25 bp, Homo sapien
cacacagcatgttgggcaggtcccc

SEQ ID NO: 1544787 - DNA, 25 bp, Homo sapien
cacatagatgcacagctcaaatggt

SEQ ID NO: 1544788 - DNA, 25 bp, Homo sapien
caggatgaccaaagtgcagtcggaa

SEQ ID NO: 1544789 - DNA, 25 bp, Homo sapien
cacacaactgttcatgattgcagga

SEQ ID NO: 1544790 - DNA, 25 bp, Homo sapien
tctccatatgccaaacacacaactg

SEQ ID NO: 1544791 - DNA, 25 bp, Homo sapien
gatgctggcgggaatcgatgggcaa

SEQ ID NO: 1544792 - DNA, 25 bp, Homo sapien
gatatctctgaagacttgcagcatc

SEQ ID NO: 1544793 - DNA, 25 bp, Homo sapien
caaagttgtaaatgcgttggccatt

SEQ ID NO: 1544794 - DNA, 25 bp, Homo sapien
cagggagatatctctgaagacttgc

SEQ ID NO: 1544795 - DNA, 25 bp, Homo sapien
tcctcaacaatgaggagtctgatca

SEQ ID NO: 1544796 - DNA, 25 bp, Homo sapien
cctcaacaatgaggagtctgatcat

SEQ ID NO: 1544797 - DNA, 25 bp, Homo sapien
ttcctcaacaatgaggagtctgatc

SEQ ID NO: 1544798 - DNA, 25 bp, Homo sapien
catcataaggctagatctgcagagg

SEQ ID NO: 1544799 - DNA, 25 bp, Homo sapien
tagactccccagaattggtatcagt

SEQ ID NO: 1544800 - DNA, 25 bp, Homo sapien
cattttatggatctgcaactggaag

SEQ ID NO: 1544801 - DNA, 25 bp, Homo sapien
ccaatgacggtttgctgataaagga

SEQ ID NO: 1544802 - DNA, 25 bp, Homo sapien
tcactgttacccatgagttgaaaag

SEQ ID NO: 1544803 - DNA, 25 bp, Homo sapien
gttacccatgagttgaaaaggcaca

SEQ ID NO: 1544804 - DNA, 25 bp, Homo sapien
cacagccttcaataatctcaggtca

SEQ ID NO: 1544805 - DNA, 25 bp, Homo sapien
caacaatatcactgttacccatgag

SEQ ID NO: 1544806 - DNA, 25 bp, Homo sapien
ctgggtgtcgctgctggtcaccttg

SEQ ID NO: 1544807 - DNA, 25 bp, Homo sapien
tcgctgctggtcaccttgacatcaa

SEQ ID NO: 1544808 - DNA, 25 bp, Homo sapien
ggtgtcgctgctggtcaccttgaca

SEQ ID NO: 1544809 - DNA, 25 bp, Homo sapien
gctgctggtcaccttgacatcaact

SEQ ID NO: 1544810 - DNA, 25 bp, Homo sapien
tattctcttttgcactataggccag

SEQ ID NO: 1544811 - DNA, 25 bp, Homo sapien
tataggccagtatgtgtgtaaccaa

SEQ ID NO: 1544812 - DNA, 25 bp, Homo sapien
tgcccctgacaaggagatattaatc

SEQ ID NO: 1544813 - DNA, 25 bp, Homo sapien
aaccaaatctaggttcagctgctcg

SEQ ID NO: 1544814 - DNA, 25 bp, Homo sapien
cacattgctcgagtacactgggaag

SEQ ID NO: 1544815 - DNA, 25 bp, Homo sapien
acattgctcgagtacactgggaagt

SEQ ID NO: 1544816 - DNA, 25 bp, Homo sapien
gtgaaagggagtgggcaaacatata

SEQ ID NO: 1544817 - DNA, 25 bp, Homo sapien
catataggtggacttcccattcaca

SEQ ID NO: 1544818 - DNA, 25 bp, Homo sapien
gagtgggcaaacatataggtggact

SEQ ID NO: 1544819 - DNA, 25 bp, Homo sapien
cattttcacagactgtggtgaaagg

SEQ ID NO: 1544820 - DNA, 25 bp, Homo sapien
actgaagtcaggaaagtatctccct

SEQ ID NO: 1544821 - DNA, 25 bp, Homo sapien
ctgaagtcaggaaagtatctccctt

SEQ ID NO: 1544822 - DNA, 25 bp, Homo sapien
aagtcaggaaagtatctcccttcac

SEQ ID NO: 1544823 - DNA, 25 bp, Homo sapien
gaagtcaggaaagtatctcccttca

SEQ ID NO: 1544824 - DNA, 25 bp, Homo sapien
aggatcatttcctggtcctctcagc

SEQ ID NO: 1544825 - DNA, 25 bp, Homo sapien
cagtatcgagttccttttgccaata

SEQ ID NO: 1544826 - DNA, 25 bp, Homo sapien
ctaactcatcagtatcgagttcctt

SEQ ID NO: 1544827 - DNA, 25 bp, Homo sapien
ccttttgccaataggatcatttcct

SEQ ID NO: 1544828 - DNA, 25 bp, Homo sapien
caatcggcgtgtctgtagaaacaag

SEQ ID NO: 1544829 - DNA, 25 bp, Homo sapien
tcctgaattcctaatttaactctgc

SEQ ID NO: 1544830 - DNA, 25 bp, Homo sapien
gatgaccaagagatacatgggtctt

SEQ ID NO: 1544831 - DNA, 25 bp, Homo sapien
tttattgaccccaaggcatctagca

SEQ ID NO: 1544832 - DNA, 25 bp, Homo sapien
ctttttcagtaagttccgattcttg

SEQ ID NO: 1544833 - DNA, 25 bp, Homo sapien
agttttcattacactgcagtgcatg

SEQ ID NO: 1544834 - DNA, 25 bp, Homo sapien
aagttccgattcttggtgagaatga

SEQ ID NO: 1544835 - DNA, 25 bp, Homo sapien
cccacgaactcagaaattctttcac

SEQ ID NO: 1544836 - DNA, 25 bp, Homo sapien
gacaggcaggttccacggaggcatg

SEQ ID NO: 1544837 - DNA, 25 bp, Homo sapien
aggtgcccgcctgacaggcaggttc

SEQ ID NO: 1544838 - DNA, 25 bp, Homo sapien
actctcttgctgggagtgttctgca

SEQ ID NO: 1544839 - DNA, 25 bp, Homo sapien
tactacggatagatcaagttgtagc

SEQ ID NO: 1544840 - DNA, 25 bp, Homo sapien
tgcgtggccgacgataacgccttgg

SEQ ID NO: 1544841 - DNA, 25 bp, Homo sapien
agctttgaagccagtttccccattg

SEQ ID NO: 1544842 - DNA, 25 bp, Homo sapien
caaacttgggtgcatggtcttttca

SEQ ID NO: 1544843 - DNA, 25 bp, Homo sapien
tttggcacgctggttcttgaaccag

SEQ ID NO: 1544844 - DNA, 25 bp, Homo sapien
catttggcacgctggttcttgaacc

SEQ ID NO: 1544845 - DNA, 25 bp, Homo sapien
tggcacgctggttcttgaaccagat

SEQ ID NO: 1544846 - DNA, 25 bp, Homo sapien
ccatttggcacgctggttcttgaac

SEQ ID NO: 1544847 - DNA, 25 bp, Homo sapien
ctggccctagtgatggccgtgtctg

SEQ ID NO: 1544848 - DNA, 25 bp, Homo sapien
tcttcactgaagttgtctggtttgc

SEQ ID NO: 1544849 - DNA, 25 bp, Homo sapien
gacgaatgtttgcagtagttatggc

SEQ ID NO: 1544850 - DNA, 25 bp, Homo sapien
tggccgtgtctgcatttgctgccgc

SEQ ID NO: 1544851 - DNA, 25 bp, Homo sapien
tcttgataccagaaggctcacgtag

SEQ ID NO: 1544852 - DNA, 25 bp, Homo sapien
caggatgaaaccctcgcagaggcgc

SEQ ID NO: 1544853 - DNA, 25 bp, Homo sapien
gctggtgtcatcttcccctggcaag

SEQ ID NO: 1544854 - DNA, 25 bp, Homo sapien
tactcaaggcatactggaaaaagat

SEQ ID NO: 1544855 - DNA, 25 bp, Homo sapien
gtcctctgcaataggacatttaatc

SEQ ID NO: 1544856 - DNA, 25 bp, Homo sapien
taatgaccatgaatgggctggagtt

SEQ ID NO: 1544857 - DNA, 25 bp, Homo sapien
ttaatgaccatgaatgggctggagt

SEQ ID NO: 1544858 - DNA, 25 bp, Homo sapien
aggacatttaatctgcttgtggcct

SEQ ID NO: 1544859 - DNA, 25 bp, Homo sapien
ggaggcttccattctggtggcaacc

SEQ ID NO: 1544860 - DNA, 25 bp, Homo sapien
agaggaaaccagtcggggaagaatg

SEQ ID NO: 1544861 - DNA, 25 bp, Homo sapien
ggcttccattctggtggcaaccggg

SEQ ID NO: 1544862 - DNA, 25 bp, Homo sapien
aaaccagtcggggaagaatgtgatg

SEQ ID NO: 1544863 - DNA, 25 bp, Homo sapien
tcgaggcggaggctttagaggtcgt

SEQ ID NO: 1544864 - DNA, 25 bp, Homo sapien
ggccgaggtcgaggcggaggcttta

SEQ ID NO: 1544865 - DNA, 25 bp, Homo sapien
ctttagaggtcgtggacgaggagga

SEQ ID NO: 1544866 - DNA, 25 bp, Homo sapien
ctttggtgaccgtggtggtcgtgga

SEQ ID NO: 1544867 - DNA, 25 bp, Homo sapien
caaaccagggctcgccatgaagcca

SEQ ID NO: 1544868 - DNA, 25 bp, Homo sapien
tccggagccgcacaaaccagggctc

SEQ ID NO: 1544869 - DNA, 25 bp, Homo sapien
gactccggagccgcacaaaccaggg

SEQ ID NO: 1544870 - DNA, 25 bp, Homo sapien
agccgcacaaaccagggctcgccat

SEQ ID NO: 1544871 - DNA, 25 bp, Homo sapien
gtgctcctaccctgctctaccgctt

SEQ ID NO: 1544872 - DNA, 25 bp, Homo sapien
tgcatcatgtgctcctaccctgctc

SEQ ID NO: 1544873 - DNA, 25 bp, Homo sapien
catgtgctcctaccctgctctaccg

SEQ ID NO: 1544874 - DNA, 25 bp, Homo sapien
tgctctaccgcttttctgggtcaca

SEQ ID NO: 1544875 - DNA, 25 bp, Homo sapien
tgttccacagtcctgggtgccagaa

SEQ ID NO: 1544876 - DNA, 25 bp, Homo sapien
gggcttgtgacaacaccattctaat

SEQ ID NO: 1544877 - DNA, 25 bp, Homo sapien
taaggcccaatttaatccaggataa

SEQ ID NO: 1544878 - DNA, 25 bp, Homo sapien
tgcaccccctccaaagacactggtt

SEQ ID NO: 1544879 - DNA, 25 bp, Homo sapien
tgttccacagtcctgggtgccagaa

SEQ ID NO: 1544880 - DNA, 25 bp, Homo sapien
gggcttgtgacaacaccattctaat

SEQ ID NO: 1544881 - DNA, 25 bp, Homo sapien
taaggcccaatttaatccaggataa

SEQ ID NO: 1544882 - DNA, 25 bp, Homo sapien
tgcaccccctccaaagacactggtt

SEQ ID NO: 1544883 - DNA, 25 bp, Homo sapien
ccaccacagctagtccactcagtct

SEQ ID NO: 1544884 - DNA, 25 bp, Homo sapien
tctgaagctttaaaccctcccctga

SEQ ID NO: 1544885 - DNA, 25 bp, Homo sapien
gaccacgggctctgaagctttaaac

SEQ ID NO: 1544886 - DNA, 25 bp, Homo sapien
tttctaaatatgaccacgggctctg

SEQ ID NO: 1544887 - DNA, 25 bp, Homo sapien
cttagctctttttgaccctggaggg

SEQ ID NO: 1544888 - DNA, 25 bp, Homo sapien
tgagccaggattcctacctaggcgg

SEQ ID NO: 1544889 - DNA, 25 bp, Homo sapien
taggctgccctgtgttaaactggag

SEQ ID NO: 1544890 - DNA, 25 bp, Homo sapien
cagtgtctcagagccagttggttga

SEQ ID NO: 1544891 - DNA, 25 bp, Homo sapien
ggctggaggacacacctaaacatgt

SEQ ID NO: 1544892 - DNA, 25 bp, Homo sapien
gattctgactgaatacaggccctgg

SEQ ID NO: 1544893 - DNA, 25 bp, Homo sapien
aacatgtggaatcccaatgccgggc

SEQ ID NO: 1544894 - DNA, 25 bp, Homo sapien
gcttcagatgccacgttgtactggg

SEQ ID NO: 1544895 - DNA, 25 bp, Homo sapien
tggcctgggatgatctgtcaccgct

SEQ ID NO: 1544896 - DNA, 25 bp, Homo sapien
tccgctgacgacaacggaagtccct

SEQ ID NO: 1544897 - DNA, 25 bp, Homo sapien
tttaagttacggctgagaggtgctg

SEQ ID NO: 1544898 - DNA, 25 bp, Homo sapien
gcaggataggacgaagggctggtct

SEQ ID NO: 1544899 - DNA, 25 bp, Homo sapien
gccttctccaccaagatgcctatct

SEQ ID NO: 1544900 - DNA, 25 bp, Homo sapien
ccaccaagatgcctatctcctccat

SEQ ID NO: 1544901 - DNA, 25 bp, Homo sapien
tgagccttctccaccaagatgccta

SEQ ID NO: 1544902 - DNA, 25 bp, Homo sapien
tctccaccaagatgcctatctcctc

SEQ ID NO: 1544903 - DNA, 25 bp, Homo sapien
gggacacggacagtgctgggatctc

SEQ ID NO: 1544904 - DNA, 25 bp, Homo sapien
ctggggccgggacacggacagtgct

SEQ ID NO: 1544905 - DNA, 25 bp, Homo sapien
ccgggacacggacagtgctgggatc

SEQ ID NO: 1544906 - DNA, 25 bp, Homo sapien
acacggacagtgctgggatctcatc

SEQ ID NO: 1544907 - DNA, 25 bp, Homo sapien
tgtagcggctgtacaggtcctccag

SEQ ID NO: 1544908 - DNA, 25 bp, Homo sapien
tagcggctgtacaggtcctccaggt

SEQ ID NO: 1544909 - DNA, 25 bp, Homo sapien
ttgtagcggctgtacaggtcctcca

SEQ ID NO: 1544910 - DNA, 25 bp, Homo sapien
cttgtagcggctgtacaggtcctcc

SEQ ID NO: 1544911 - DNA, 25 bp, Homo sapien
ttgctcatctttgatgtattcctcc

SEQ ID NO: 1544912 - DNA, 25 bp, Homo sapien
tttgctcatctttgatgtattcctc

SEQ ID NO: 1544913 - DNA, 25 bp, Homo sapien
agcgggatgctttggattcgcttca

SEQ ID NO: 1544914 - DNA, 25 bp, Homo sapien
cagaaattgtccgatgaccagcggg

SEQ ID NO: 1544915 - DNA, 25 bp, Homo sapien
gatgctttggattcgcttcacctcc

SEQ ID NO: 1544916 - DNA, 25 bp, Homo sapien
cccacgatggctgtattctgatcca

SEQ ID NO: 1544917 - DNA, 25 bp, Homo sapien
gcttgagcagctcccgatcgatggt

SEQ ID NO: 1544918 - DNA, 25 bp, Homo sapien
caccagtgcattgctgtgcttgtgg

SEQ ID NO: 1544919 - DNA, 25 bp, Homo sapien
catcatgatgctgctgtcggcttcg

SEQ ID NO: 1544920 - DNA, 25 bp, Homo sapien
tcaggatgcgcacataatagttgga

SEQ ID NO: 1544921 - DNA, 25 bp, Homo sapien
ctggccaggtcctcaaggtccccat

SEQ ID NO: 1544922 - DNA, 25 bp, Homo sapien
gccaggtcctcaaggtccccatggg

SEQ ID NO: 1544923 - DNA, 25 bp, Homo sapien
ctcctggccaggtcctcaaggtccc

SEQ ID NO: 1544924 - DNA, 25 bp, Homo sapien
gggctcctggccaggtcctcaaggt

SEQ ID NO: 1544925 - DNA, 25 bp, Homo sapien
cgatgtccgcgtacatcacatctgg

SEQ ID NO: 1544926 - DNA, 25 bp, Homo sapien
cgaaatgcgtgagcgggagctccac

SEQ ID NO: 1544927 - DNA, 25 bp, Homo sapien
tgcttctggatgtccatgcctccga

SEQ ID NO: 1544928 - DNA, 25 bp, Homo sapien
tgcttgtagagctcgaaatgcgtga

SEQ ID NO: 1544929 - DNA, 25 bp, Homo sapien
ctttgccaacatggtcttcccacag

SEQ ID NO: 1544930 - DNA, 25 bp, Homo sapien
tgggccatacatgaggacgcctcgg

SEQ ID NO: 1544931 - DNA, 25 bp, Homo sapien
tttgccaacatggtcttcccacagc

SEQ ID NO: 1544932 - DNA, 25 bp, Homo sapien
ccaggtgggccatacatgaggacgc

SEQ ID NO: 1544933 - DNA, 25 bp, Homo sapien
ccacctgactttggccatttacttg

SEQ ID NO: 1544934 - DNA, 25 bp, Homo sapien
catccctggaattgccttatctgac

SEQ ID NO: 1544935 - DNA, 25 bp, Homo sapien
gttctgcaaatgtccaaccagttcc

SEQ ID NO: 1544936 - DNA, 25 bp, Homo sapien
ggctgttctgcaaatgtccaaccag

SEQ ID NO: 1544937 - DNA, 25 bp, Homo sapien
tgacaacagttaggcgggaatgagc

SEQ ID NO: 1544938 - DNA, 25 bp, Homo sapien
aagacatcatactgcctcgccaaga

SEQ ID NO: 1544939 - DNA, 25 bp, Homo sapien
cagaaactgcgaattccttgaagac

SEQ ID NO: 1544940 - DNA, 25 bp, Homo sapien
tggatacccatacctagtagttgtg

SEQ ID NO: 1544941 - DNA, 25 bp, Homo sapien
ttctgtacaaactccgagcccacga

SEQ ID NO: 1544942 - DNA, 25 bp, Homo sapien
tctgagcatcgaatctcttggtggc

SEQ ID NO: 1544943 - DNA, 25 bp, Homo sapien
tgatggcaggtgcattctccttggc

SEQ ID NO: 1544944 - DNA, 25 bp, Homo sapien
tggtggcgatggcatcaatctcgtc

SEQ ID NO: 1544945 - DNA, 25 bp, Homo sapien
aagaccccgggccttgtttcagcat

SEQ ID NO: 1544946 - DNA, 25 bp, Homo sapien
tcccatgcgacaagcctgtccaaga

SEQ ID NO: 1544947 - DNA, 25 bp, Homo sapien
ctgagagtgcacagcacagtcagtc

SEQ ID NO: 1544948 - DNA, 25 bp, Homo sapien
caggcatcccatgcgacaagcctgt

SEQ ID NO: 1544949 - DNA, 25 bp, Homo sapien
gctccagcaggatcctctgaacctc

SEQ ID NO: 1544950 - DNA, 25 bp, Homo sapien
tccagcaggatcctctgaacctccc

SEQ ID NO: 1544951 - DNA, 25 bp, Homo sapien
ctccagcaggatcctctgaacctcc

SEQ ID NO: 1544952 - DNA, 25 bp, Homo sapien
tacctccttcctgtcacgataacca

SEQ ID NO: 1544953 - DNA, 25 bp, Homo sapien
cacacctccccttgtccatcccaaa

SEQ ID NO: 1544954 - DNA, 25 bp, Homo sapien
cagttcctacaccacacctcccctt

SEQ ID NO: 1544955 - DNA, 25 bp, Homo sapien
gataaccaccccttaggtgccagcc

SEQ ID NO: 1544956 - DNA, 25 bp, Homo sapien
gccggatccagggtgtctgctctgt

SEQ ID NO: 1544957 - DNA, 25 bp, Homo sapien
tcaatctcttctggcggcggtcagg

SEQ ID NO: 1544958 - DNA, 25 bp, Homo sapien
caattttacggtccagccgtcctgg

SEQ ID NO: 1544959 - DNA, 25 bp, Homo sapien
ttccaagtcaacctcctcagagagg

SEQ ID NO: 1544960 - DNA, 25 bp, Homo sapien
ctccctgacttctggagcaggatac

SEQ ID NO: 1544961 - DNA, 25 bp, Homo sapien
agttgagctgaagatctaatccccg

SEQ ID NO: 1544962 - DNA, 25 bp, Homo sapien
agatctaatccccgttcccaactag

SEQ ID NO: 1544963 - DNA, 25 bp, Homo sapien
aagttgagctgaagatctaatcccc

SEQ ID NO: 1544964 - DNA, 25 bp, Homo sapien
ctcctgacagatggagttaatatca

SEQ ID NO: 1544965 - DNA, 25 bp, Homo sapien
agctcctgaaatcttatctggccgg

SEQ ID NO: 1544966 - DNA, 25 bp, Homo sapien
gctcctgaaatcttatctggccggg

SEQ ID NO: 1544967 - DNA, 25 bp, Homo sapien
ggagttaatatcagctcctgaaatc

SEQ ID NO: 1544968 - DNA, 25 bp, Homo sapien
ttcttgatgacagtcttgtatgctt

SEQ ID NO: 1544969 - DNA, 25 bp, Homo sapien
tatgctttctcgaagtccttggcca

SEQ ID NO: 1544970 - DNA, 25 bp, Homo sapien
caatgtagcggttttcacggacagc

SEQ ID NO: 1544971 - DNA, 25 bp, Homo sapien
gacaatgtagcggttttcacggaca

SEQ ID NO: 1544972 - DNA, 25 bp, Homo sapien
cagcccctgagtggtgtggtggagg

SEQ ID NO: 1544973 - DNA, 25 bp, Homo sapien
aagggaatgaggttttgggacagag

SEQ ID NO: 1544974 - DNA, 25 bp, Homo sapien
tgctgggggtgcgagagaagcccca

SEQ ID NO: 1544975 - DNA, 25 bp, Homo sapien
gaatgaggttttgggacagaggtgc

SEQ ID NO: 1544976 - DNA, 25 bp, Homo sapien
cctagaagtggctaaatcatctgat

SEQ ID NO: 1544977 - DNA, 25 bp, Homo sapien
tactgagtggtgttatattgcatac

SEQ ID NO: 1544978 - DNA, 25 bp, Homo sapien
ctgttttccgaagtggcttaccatt

SEQ ID NO: 1544979 - DNA, 25 bp, Homo sapien
tcacgtttttgcatacatcagtagt

SEQ ID NO: 1544980 - DNA, 25 bp, Homo sapien
catactccagtgtaccacaggatta

SEQ ID NO: 1544981 - DNA, 25 bp, Homo sapien
tggcgctgcgttgtttatagatcaa

SEQ ID NO: 1544982 - DNA, 25 bp, Homo sapien
tatctacatagagttgacaaggcaa

SEQ ID NO: 1544983 - DNA, 25 bp, Homo sapien
tacaacagctttaccatcagtctgg

SEQ ID NO: 1544984 - DNA, 25 bp, Homo sapien
caatacaacactggaacttttgggc

SEQ ID NO: 1544985 - DNA, 25 bp, Homo sapien
tgaaaggctgtttgatcagggaacc

SEQ ID NO: 1544986 - DNA, 25 bp, Homo sapien
gggtttgctgcaacttggcctggtt

SEQ ID NO: 1544987 - DNA, 25 bp, Homo sapien
ggcaaaggccatagtgcaaattaaa

SEQ ID NO: 1544988 - DNA, 25 bp, Homo sapien
tatgcatatccaatattcctagcac

SEQ ID NO: 1544989 - DNA, 25 bp, Homo sapien
tgttcaggattgctttcctattggt

SEQ ID NO: 1544990 - DNA, 25 bp, Homo sapien
caccatgtattcaggagggtatcct

SEQ ID NO: 1544991 - DNA, 25 bp, Homo sapien
atagtttgggtctgccatttaagtt

SEQ ID NO: 1544992 - DNA, 25 bp, Homo sapien
tcttctgctgggtggaaagttatag

SEQ ID NO: 1544993 - DNA, 25 bp, Homo sapien
cacatggtctgaggagataattggt

SEQ ID NO: 1544994 - DNA, 25 bp, Homo sapien
taggctagagtgcacaagtcgggtt

SEQ ID NO: 1544995 - DNA, 25 bp, Homo sapien
cacccaactggtgttcaaaagtgtg

SEQ ID NO: 1544996 - DNA, 25 bp, Homo sapien
tctccccttgttcagaatatgccat

SEQ ID NO: 1544997 - DNA, 25 bp, Homo sapien
cagtgttctgtattgggccagtaat

SEQ ID NO: 1544998 - DNA, 25 bp, Homo sapien
gagtcattccaggtggtttctcctc

SEQ ID NO: 1544999 - DNA, 25 bp, Homo sapien
agtaatagcctctactccagatgcc

SEQ ID NO: 1545000 - DNA, 25 bp, Homo sapien
cgaagggtgcatgggggtgggagca

SEQ ID NO: 1545001 - DNA, 25 bp, Homo sapien
ccgaagggtgcatgggggtgggagc

SEQ ID NO: 1545002 - DNA, 25 bp, Homo sapien
ctccgaagggtgcatgggggtggga

SEQ ID NO: 1545003 - DNA, 25 bp, Homo sapien
agggtgcatgggggtgggagcatac

SEQ ID NO: 1545004 - DNA, 25 bp, Homo sapien
tggccgggccacttgagcgtgggac

SEQ ID NO: 1545005 - DNA, 25 bp, Homo sapien
ccacttgagcgtgggaccgccgagt

SEQ ID NO: 1545006 - DNA, 25 bp, Homo sapien
tgaggaggagaacagacgcctctgg

SEQ ID NO: 1545007 - DNA, 25 bp, Homo sapien
gccactggccgggccacttgagcgt

SEQ ID NO: 1545008 - DNA, 25 bp, Homo sapien
cttctcgcccgcaagtgaataataa

SEQ ID NO: 1545009 - DNA, 25 bp, Homo sapien
tgaataataacggttaaggtgactg

SEQ ID NO: 1545010 - DNA, 25 bp, Homo sapien
ggtgactgaaccgttaagaacgcaa

SEQ ID NO: 1545011 - DNA, 25 bp, Homo sapien
tagctcggacttctcgcccgcaagt

SEQ ID NO: 1545012 - DNA, 25 bp, Homo sapien
tgaacttttagacctgctacaacaa

SEQ ID NO: 1545013 - DNA, 25 bp, Homo sapien
gacctgctacaacaattgttccctc

SEQ ID NO: 1545014 - DNA, 25 bp, Homo sapien
ctggacctgaacttttagacctgct

SEQ ID NO: 1545015 - DNA, 25 bp, Homo sapien
tttagacctgctacaacaattgttc

SEQ ID NO: 1545016 - DNA, 25 bp, Homo sapien
aggtcactggacaattcaggaaaag

SEQ ID NO: 1545017 - DNA, 25 bp, Homo sapien
aaggcctgggataggtcactggaca

SEQ ID NO: 1545018 - DNA, 25 bp, Homo sapien
gataggtcactggacaattcaggaa

SEQ ID NO: 1545019 - DNA, 25 bp, Homo sapien
cctgggataggtcactggacaattc

SEQ ID NO: 1545020 - DNA, 25 bp, Homo sapien
gtgagtgcagaggaatgatttgaaa

SEQ ID NO: 1545021 - DNA, 25 bp, Homo sapien
gaaagtcatttggaggcccgtgaag

SEQ ID NO: 1545022 - DNA, 25 bp, Homo sapien
gagaaagtcatttggaggcccgtga

SEQ ID NO: 1545023 - DNA, 25 bp, Homo sapien
agaaagtgagtgcagaggaatgatt

SEQ ID NO: 1545024 - DNA, 25 bp, Homo sapien
gatgatgtgattctacctaaacatt

SEQ ID NO: 1545025 - DNA, 25 bp, Homo sapien
gatggatgatgtgattctacctaaa

SEQ ID NO: 1545026 - DNA, 25 bp, Homo sapien
ggagaagatggatgatgtgattcta

SEQ ID NO: 1545027 - DNA, 25 bp, Homo sapien
tgattctacctaaacattaatctca

SEQ ID NO: 1545028 - DNA, 25 bp, Homo sapien
ttggccatggttttagaaccacaag

SEQ ID NO: 1545029 - DNA, 25 bp, Homo sapien
ccatggttttagaaccacaagaact

SEQ ID NO: 1545030 - DNA, 25 bp, Homo sapien
cacaagaacttgtcagttctccttg

SEQ ID NO: 1545031 - DNA, 25 bp, Homo sapien
ctccttgagtttcctccatggagaa

SEQ ID NO: 1545032 - DNA, 25 bp, Homo sapien
tgggagaggtctatggacacatccc

SEQ ID NO: 1545033 - DNA, 25 bp, Homo sapien
ctcttgggagaggtctatggacaca

SEQ ID NO: 1545034 - DNA, 25 bp, Homo sapien
gagaggtctatggacacatccctaa

SEQ ID NO: 1545035 - DNA, 25 bp, Homo sapien
cttgggagaggtctatggacacatc

SEQ ID NO: 1545036 - DNA, 25 bp, Homo sapien
gattgtaaacgatttcgaaagatac

SEQ ID NO: 1545037 - DNA, 25 bp, Homo sapien
gaaaacagattgtaaacgatttcga

SEQ ID NO: 1545038 - DNA, 25 bp, Homo sapien
actccagaaaacagattgtaaacga

SEQ ID NO: 1545039 - DNA, 25 bp, Homo sapien
aacagattgtaaacgatttcgaaag

SEQ ID NO: 1545040 - DNA, 25 bp, Homo sapien
gtcccttccctcattactatccagg

SEQ ID NO: 1545041 - DNA, 25 bp, Homo sapien
cttccctcattactatccagggctc

SEQ ID NO: 1545042 - DNA, 25 bp, Homo sapien
ctcttgctccaataaagtaatcaca

SEQ ID NO: 1545043 - DNA, 25 bp, Homo sapien
ctttctcttgctccaataaagtaat

SEQ ID NO: 1545044 - DNA, 25 bp, Homo sapien
aattcttggtaatatacttgtattc

SEQ ID NO: 1545045 - DNA, 25 bp, Homo sapien
caaattcttggtaatatacttgtat

SEQ ID NO: 1545046 - DNA, 25 bp, Homo sapien
cttggtaatatacttgtattccaaa

SEQ ID NO: 1545047 - DNA, 25 bp, Homo sapien
ttcttggtaatatacttgtattcca

SEQ ID NO: 1545048 - DNA, 25 bp, Homo sapien
caattgagataaatagattttgcaa

SEQ ID NO: 1545049 - DNA, 25 bp, Homo sapien
ttgagataaatagattttgcaaaca

SEQ ID NO: 1545050 - DNA, 25 bp, Homo sapien
tgagataaatagattttgcaaacat

SEQ ID NO: 1545051 - DNA, 25 bp, Homo sapien
ctgcaattgagataaatagattttg

SEQ ID NO: 1545052 - DNA, 25 bp, Homo sapien
caaattcatgtttacactgcaaacc

SEQ ID NO: 1545053 - DNA, 25 bp, Homo sapien
aattcatgtttacactgcaaaccat

SEQ ID NO: 1545054 - DNA, 25 bp, Homo sapien
atggtgtcctcatggatggtgtttt

SEQ ID NO: 1545055 - DNA, 25 bp, Homo sapien
ctctcaaattcatgtttacactgca

SEQ ID NO: 1545056 - DNA, 25 bp, Homo sapien
tgtagaggatgagatatttgttttt

SEQ ID NO: 1545057 - DNA, 25 bp, Homo sapien
tagaggatgagatatttgtttttgg

SEQ ID NO: 1545058 - DNA, 25 bp, Homo sapien
gtagaggatgagatatttgtttttg

SEQ ID NO: 1545059 - DNA, 25 bp, Homo sapien
agatgttgaataaggtatgactgtt

SEQ ID NO: 1545060 - DNA, 25 bp, Homo sapien
aggtatgactgttgtctaaaggcct

SEQ ID NO: 1545061 - DNA, 25 bp, Homo sapien
gaataaggtatgactgttgtctaaa

SEQ ID NO: 1545062 - DNA, 25 bp, Homo sapien
tgttgaataaggtatgactgttgtc

SEQ ID NO: 1545063 - DNA, 25 bp, Homo sapien
taaggtctcccactcgacaaaaggc

SEQ ID NO: 1545064 - DNA, 25 bp, Homo sapien
tctcccactcgacaaaaggcctttc

SEQ ID NO: 1545065 - DNA, 25 bp, Homo sapien
ctaaggtctcccactcgacaaaagg

SEQ ID NO: 1545066 - DNA, 25 bp, Homo sapien
aggtctcccactcgacaaaaggcct

SEQ ID NO: 1545067 - DNA, 25 bp, Homo sapien
ccccagcatggattgtgtgatgtac

SEQ ID NO: 1545068 - DNA, 25 bp, Homo sapien
tccccagcatggattgtgtgatgta

SEQ ID NO: 1545069 - DNA, 25 bp, Homo sapien
cccagcatggattgtgtgatgtact

SEQ ID NO: 1545070 - DNA, 25 bp, Homo sapien
tcagtaaggtgataatgaagtctaa

SEQ ID NO: 1545071 - DNA, 25 bp, Homo sapien
tgttcagtaaggtgataatgaagtc

SEQ ID NO: 1545072 - DNA, 25 bp, Homo sapien
aggtctctaacacgactaaaggctt

SEQ ID NO: 1545073 - DNA, 25 bp, Homo sapien
ctctaaggtctctaacacgactaaa

SEQ ID NO: 1545074 - DNA, 25 bp, Homo sapien
ttctgcttgaagacgaaaggcattc

SEQ ID NO: 1545075 - DNA, 25 bp, Homo sapien
gagatgagtgctacgaataaaggcc

SEQ ID NO: 1545076 - DNA, 25 bp, Homo sapien
tctacgatgtcgagcaagttctgca

SEQ ID NO: 1545077 - DNA, 25 bp, Homo sapien
tctatgatgccgagtaagttccgtt

SEQ ID NO: 1545078 - DNA, 25 bp, Homo sapien
tctaacagggactgagtgatgctat

SEQ ID NO: 1545079 - DNA, 25 bp, Homo sapien
gcattttagagaagcactgttcaac

SEQ ID NO: 1545080 - DNA, 25 bp, Homo sapien
aaggcccttgatggtttgggatgca

SEQ ID NO: 1545081 - DNA, 25 bp, Homo sapien
taaagggcattttctaaaggccatc

SEQ ID NO: 1545082 - DNA, 25 bp, Homo sapien
ctgctcacctgggcctcccatagtg

SEQ ID NO: 1545083 - DNA, 25 bp, Homo sapien
cccacaatgcctagctaatttgtgt

SEQ ID NO: 1545084 - DNA, 25 bp, Homo sapien
gcaccccccacaatgcctagctaat

SEQ ID NO: 1545085 - DNA, 25 bp, Homo sapien
tctgctcacctgggcctcccatagt

SEQ ID NO: 1545086 - DNA, 25 bp, Homo sapien
ccatgtgttgacactggcccacaaa

SEQ ID NO: 1545087 - DNA, 25 bp, Homo sapien
caaattgtttgcttctggtctctgc

SEQ ID NO: 1545088 - DNA, 25 bp, Homo sapien
gaaatgtttgcagcaatctgacaga

SEQ ID NO: 1545089 - DNA, 25 bp, Homo sapien
tacagtgctatataaagtgtggtcc

SEQ ID NO: 1545090 - DNA, 25 bp, Homo sapien
cacagacaggttggacaattgttat

SEQ ID NO: 1545091 - DNA, 25 bp, Homo sapien
tatagcaattaagtaggaggcagcc

SEQ ID NO: 1545092 - DNA, 25 bp, Homo sapien
gaaaaaagcattacagctatccctg

SEQ ID NO: 1545093 - DNA, 25 bp, Homo sapien
tgggcagaaaaagcgactgacatac

SEQ ID NO: 1545094 - DNA, 25 bp, Homo sapien
tgacttagtcgtggaaatcacagtg

SEQ ID NO: 1545095 - DNA, 25 bp, Homo sapien
tagcaccagctaggatagcctgaag

SEQ ID NO: 1545096 - DNA, 25 bp, Homo sapien
tacctatcgctgtgtggcaaactac

SEQ ID NO: 1545097 - DNA, 25 bp, Homo sapien
atacacttggtgctggatcccggct

SEQ ID NO: 1545098 - DNA, 25 bp, Homo sapien
tgcttgatgactgccacctggttgg

SEQ ID NO: 1545099 - DNA, 25 bp, Homo sapien
tataaaaactaaactgggccagcaa

SEQ ID NO: 1545100 - DNA, 25 bp, Homo sapien
taaaatggacctggagttgcaaatc

SEQ ID NO: 1545101 - DNA, 25 bp, Homo sapien
cactggtactttggaggaacaatcc

SEQ ID NO: 1545102 - DNA, 25 bp, Homo sapien
cagagtcaggatttttcgggagagt

SEQ ID NO: 1545103 - DNA, 25 bp, Homo sapien
gattagtttgtggaatcacacgcca

SEQ ID NO: 1545104 - DNA, 25 bp, Homo sapien
ctgtgaggctttcaggaatcggaaa

SEQ ID NO: 1545105 - DNA, 25 bp, Homo sapien
gatctctgtgagattcggcagttcc

SEQ ID NO: 1545106 - DNA, 25 bp, Homo sapien
tagtctctggcagggtattattgtc

SEQ ID NO: 1545107 - DNA, 25 bp, Homo sapien
tattgacttgacctattttcaagtt

SEQ ID NO: 1545108 - DNA, 25 bp, Homo sapien
ttcaggttaaatctgctatgagttc

SEQ ID NO: 1545109 - DNA, 25 bp, Homo sapien
tccatctctctgtcgatagtctctg

SEQ ID NO: 1545110 - DNA, 25 bp, Homo sapien
gggaggttggccaacaactgctcta

SEQ ID NO: 1545111 - DNA, 25 bp, Homo sapien
gaggttggccaacaactgctctaat

SEQ ID NO: 1545112 - DNA, 25 bp, Homo sapien
tttcttacctgatgggtcgggtgtg

SEQ ID NO: 1545113 - DNA, 25 bp, Homo sapien
tttagcgggctctctttcttacctg

SEQ ID NO: 1545114 - DNA, 25 bp, Homo sapien
ggttcaaacgttattcagcatcaga

SEQ ID NO: 1545115 - DNA, 25 bp, Homo sapien
gacttcaggtcattcatactggcga

SEQ ID NO: 1545116 - DNA, 25 bp, Homo sapien
gatttagtttggtcctgactgcaca

SEQ ID NO: 1545117 - DNA, 25 bp, Homo sapien
tatgcaaggagtggaggacgacctt

SEQ ID NO: 1545118 - DNA, 25 bp, Homo sapien
agaaaattggagctacaatacacag

SEQ ID NO: 1545119 - DNA, 25 bp, Homo sapien
caatacacagaggagaactcttaac

SEQ ID NO: 1545120 - DNA, 25 bp, Homo sapien
acaaatgtaatcatattatctatcc

SEQ ID NO: 1545121 - DNA, 25 bp, Homo sapien
gtgcccggccatgaaatgctcttaa

SEQ ID NO: 1545122 - DNA, 25 bp, Homo sapien
cttttcaaaacagggaagaatggag

SEQ ID NO: 1545123 - DNA, 25 bp, Homo sapien
ctccttttcaaaacagggaagaatg

SEQ ID NO: 1545124 - DNA, 25 bp, Homo sapien
ggaagaatggagatggttggatgat

SEQ ID NO: 1545125 - DNA, 25 bp, Homo sapien
agaatggagatggttggatgatctc

SEQ ID NO: 1545126 - DNA, 25 bp, Homo sapien
gggtaaggtcttcacgtctgaggaa

SEQ ID NO: 1545127 - DNA, 25 bp, Homo sapien
cagcctgactgacccgacagtgcgg

SEQ ID NO: 1545128 - DNA, 25 bp, Homo sapien
tctgaggctttttctgttcgggact

SEQ ID NO: 1545129 - DNA, 25 bp, Homo sapien
tgcagacgggatctgccggatcccc

SEQ ID NO: 1545130 - DNA, 25 bp, Homo sapien
tacctgtaggtagcacccatttggg

SEQ ID NO: 1545131 - DNA, 25 bp, Homo sapien
tctgagacaaaggagttaaagcacc

SEQ ID NO: 1545132 - DNA, 25 bp, Homo sapien
gaacattgtctcgaagaatccagga

SEQ ID NO: 1545133 - DNA, 25 bp, Homo sapien
taaattatactgacgctccgagagg

SEQ ID NO: 1545134 - DNA, 25 bp, Homo sapien
tctcacatgagcaactggattggtc

SEQ ID NO: 1545135 - DNA, 25 bp, Homo sapien
tctctcacatgagcaactggattgg

SEQ ID NO: 1545136 - DNA, 25 bp, Homo sapien
tcacatgagcaactggattggtcat

SEQ ID NO: 1545137 - DNA, 25 bp, Homo sapien
aagtctctcacatgagcaactggat

SEQ ID NO: 1545138 - DNA, 25 bp, Homo sapien
gaaggagagcgttgtacttgcacaa

SEQ ID NO: 1545139 - DNA, 25 bp, Homo sapien
tgatgaaaatcagcatgaaggagag

SEQ ID NO: 1545140 - DNA, 25 bp, Homo sapien
tgaagtaaactaggtgagacgggat

SEQ ID NO: 1545141 - DNA, 25 bp, Homo sapien
tagtttacttcaaacatcttcaaaa

SEQ ID NO: 1545142 - DNA, 25 bp, Homo sapien
ttactgagttaggatgccgtgacca

SEQ ID NO: 1545143 - DNA, 25 bp, Homo sapien
tgaattgagtaagcgtaaacatggg

SEQ ID NO: 1545144 - DNA, 25 bp, Homo sapien
ggaaattctgtgtgctatgccttgt

SEQ ID NO: 1545145 - DNA, 25 bp, Homo sapien
ggttaaccagccatagcaggcactt

SEQ ID NO: 1545146 - DNA, 25 bp, Homo sapien
actgtggtccatgttactgctagat

SEQ ID NO: 1545147 - DNA, 25 bp, Homo sapien
gttactgctagatccctgggagtcc

SEQ ID NO: 1545148 - DNA, 25 bp, Homo sapien
tactgctagatccctgggagtcctg

SEQ ID NO: 1545149 - DNA, 25 bp, Homo sapien
tgttactgctagatccctgggagtc

SEQ ID NO: 1545150 - DNA, 25 bp, Homo sapien
ccccaaacggcagagggctaagagg

SEQ ID NO: 1545151 - DNA, 25 bp, Homo sapien
gttggactgcaacggacgcgattag

SEQ ID NO: 1545152 - DNA, 25 bp, Homo sapien
gagctgcgtgcatgactgtgactgc

SEQ ID NO: 1545153 - DNA, 25 bp, Homo sapien
tagcaacgcgaaaaataggagctgc

SEQ ID NO: 1545154 - DNA, 25 bp, Homo sapien
gctgcccgcgggatgcagagggcgg

SEQ ID NO: 1545155 - DNA, 25 bp, Homo sapien
acaggctgcccgcgggatgcagagg

SEQ ID NO: 1545156 - DNA, 25 bp, Homo sapien
gcgggatgcagagggcgggccccgg

SEQ ID NO: 1545157 - DNA, 25 bp, Homo sapien
cccgcgggatgcagagggcgggccc

SEQ ID NO: 1545158 - DNA, 25 bp, Homo sapien
cggacaccgcacagtcttgggaaag

SEQ ID NO: 1545159 - DNA, 25 bp, Homo sapien
tactccatcactaggcagaggtgtg

SEQ ID NO: 1545160 - DNA, 25 bp, Homo sapien
acagggcccgatagaccttgccaaa

SEQ ID NO: 1545161 - DNA, 25 bp, Homo sapien
attgtgtaggtagttcatgccccgg

SEQ ID NO: 1545162 - DNA, 25 bp, Homo sapien
gcaggcaaggcctacctcaccttca

SEQ ID NO: 1545163 - DNA, 25 bp, Homo sapien
gccttgagaggttctgtggaaggaa

SEQ ID NO: 1545164 - DNA, 25 bp, Homo sapien
ggtatcatactgctgccccttctca

SEQ ID NO: 1545165 - DNA, 25 bp, Homo sapien
ggtaagtccttcaacctttctgagc

SEQ ID NO: 1545166 - DNA, 25 bp, Homo sapien
ctttggagaacctatcaggcagcct

SEQ ID NO: 1545167 - DNA, 25 bp, Homo sapien
gaatgctaatgacatctagtgggaa

SEQ ID NO: 1545168 - DNA, 25 bp, Homo sapien
gaggctaaagatgccgctaagcaac

SEQ ID NO: 1545169 - DNA, 25 bp, Homo sapien
ctatgaagactccaggaaatggttc

SEQ ID NO: 1545170 - DNA, 25 bp, Homo sapien
tcttggtggtcttgtgccactcgcg

SEQ ID NO: 1545171 - DNA, 25 bp, Homo sapien
gtaggtccccgcagcgctcatcttg

SEQ ID NO: 1545172 - DNA, 25 bp, Homo sapien
agagacggataacctccggcgccat

SEQ ID NO: 1545173 - DNA, 25 bp, Homo sapien
ggccgaagtccgtgatcttgagcac

SEQ ID NO: 1545174 - DNA, 25 bp, Homo sapien
cccagaggccatcccggccgcgcct

SEQ ID NO: 1545175 - DNA, 25 bp, Homo sapien
cttgccagcaggtccctttgtcaga

SEQ ID NO: 1545176 - DNA, 25 bp, Homo sapien
ctttgtcagactgagatcctggctt

SEQ ID NO: 1545177 - DNA, 25 bp, Homo sapien
cagactgagatcctggcttcagcag

SEQ ID NO: 1545178 - DNA, 25 bp, Homo sapien
tgtgccccctagttgccatttgtgc

SEQ ID NO: 1545179 - DNA, 25 bp, Homo sapien
taatccagtgtgccccctagttgcc

SEQ ID NO: 1545180 - DNA, 25 bp, Homo sapien
ccctagttgccatttgtgctagctg

SEQ ID NO: 1545181 - DNA, 25 bp, Homo sapien
tttgtgctagctgaacaggtaactg

SEQ ID NO: 1545182 - DNA, 25 bp, Homo sapien
ccacccccggccaatgaggtcacaa

SEQ ID NO: 1545183 - DNA, 25 bp, Homo sapien
ggtcacaagaacttgctttgacctc

SEQ ID NO: 1545184 - DNA, 25 bp, Homo sapien
acccccggccaatgaggtcacaaga

SEQ ID NO: 1545185 - DNA, 25 bp, Homo sapien
gtcacaagaacttgctttgacctcc

SEQ ID NO: 1545186 - DNA, 25 bp, Homo sapien
acggccaaggcgtcgatctcacggt

SEQ ID NO: 1545187 - DNA, 25 bp, Homo sapien
agggaatgggcagcgtcagcttatt

SEQ ID NO: 1545188 - DNA, 25 bp, Homo sapien
ccaaggcgtcgatctcacggtaggg

SEQ ID NO: 1545189 - DNA, 25 bp, Homo sapien
ttattcatagccacgccatacgcca

SEQ ID NO: 1545190 - DNA, 25 bp, Homo sapien
gaatcccagggccaaggaatcctaa

SEQ ID NO: 1545191 - DNA, 25 bp, Homo sapien
gcccactggtatggataggtgtgaa

SEQ ID NO: 1545192 - DNA, 25 bp, Homo sapien
ttccactcagtgaaacgctgggaga

SEQ ID NO: 1545193 - DNA, 25 bp, Homo sapien
gcagacaaacagctgctatggagct

SEQ ID NO: 1545194 - DNA, 25 bp, Homo sapien
ttcctgcagcgagtggaaggactcc

SEQ ID NO: 1545195 - DNA, 25 bp, Homo sapien
aagatgctaccgaaatctggccgcc

SEQ ID NO: 1545196 - DNA, 25 bp, Homo sapien
cttggtccgaaggtcatcaaacatg

SEQ ID NO: 1545197 - DNA, 25 bp, Homo sapien
tcgatgacttcaagccgcttcaaga

SEQ ID NO: 1545198 - DNA, 25 bp, Homo sapien
cagagggcaggctgatgtggctgcc

SEQ ID NO: 1545199 - DNA, 25 bp, Homo sapien
gatgtccatctcacgttctgccagc

SEQ ID NO: 1545200 - DNA, 25 bp, Homo sapien
ggcggctgcgcttgaagttgccctt

SEQ ID NO: 1545201 - DNA, 25 bp, Homo sapien
gccttcccgcagcttgagcaggcgg

SEQ ID NO: 1545202 - DNA, 25 bp, Homo sapien
ataaatcctaggtcggggctgctcc

SEQ ID NO: 1545203 - DNA, 25 bp, Homo sapien
gagataaatcctaggtcggggctgc

SEQ ID NO: 1545204 - DNA, 25 bp, Homo sapien
gactatgtgcgatatatttagcaat

SEQ ID NO: 1545205 - DNA, 25 bp, Homo sapien
gcactgggctgatcactgactatgt

SEQ ID NO: 1545206 - DNA, 25 bp, Homo sapien
ggatcctttccgcttatccagagtt

SEQ ID NO: 1545207 - DNA, 25 bp, Homo sapien
ggggctggccccatcggatcctttc

SEQ ID NO: 1545208 - DNA, 25 bp, Homo sapien
catcggatcctttccgcttatccag

SEQ ID NO: 1545209 - DNA, 25 bp, Homo sapien
ttccgcttatccagagttggagagg

SEQ ID NO: 1545210 - DNA, 25 bp, Homo sapien
ttgctgccatggtatgggtatttgt

SEQ ID NO: 1545211 - DNA, 25 bp, Homo sapien
ctgcaatgctctggacctatctggt

SEQ ID NO: 1545212 - DNA, 25 bp, Homo sapien
caatgctctggacctatctggtgcc

SEQ ID NO: 1545213 - DNA, 25 bp, Homo sapien
catggtatgggtatttgtctctgtg

SEQ ID NO: 1545214 - DNA, 25 bp, Homo sapien
ctgctgccaccacagtccacgggag

SEQ ID NO: 1545215 - DNA, 25 bp, Homo sapien
tgctgctgccaccacagtccacggg

SEQ ID NO: 1545216 - DNA, 25 bp, Homo sapien
tgctgccaccacagtccacgggagt

SEQ ID NO: 1545217 - DNA, 25 bp, Homo sapien
gctgccaccacagtccacgggagtc

SEQ ID NO: 1545218 - DNA, 25 bp, Homo sapien
ccgctccttctgcagggtggagctg

SEQ ID NO: 1545219 - DNA, 25 bp, Homo sapien
tcccacccgctccttctgcagggtg

SEQ ID NO: 1545220 - DNA, 25 bp, Homo sapien
ggcccaccgcggctccatgtcccac

SEQ ID NO: 1545221 - DNA, 25 bp, Homo sapien
tcttcttgcccccgaccagttcttc

SEQ ID NO: 1545222 - DNA, 25 bp, Homo sapien
ggtgggcatgaccacaccacacctc

SEQ ID NO: 1545223 - DNA, 25 bp, Homo sapien
gagatggagacctcagtcctgtggc

SEQ ID NO: 1545224 - DNA, 25 bp, Homo sapien
agccaggggcgatgggtgtgtgttt

SEQ ID NO: 1545225 - DNA, 25 bp, Homo sapien
cacttgatgaccactgtttgcttcc

SEQ ID NO: 1545226 - DNA, 25 bp, Homo sapien
gggggcacttgatgaccactgtttg

SEQ ID NO: 1545227 - DNA, 25 bp, Homo sapien
gggcacttgatgaccactgtttgct

SEQ ID NO: 1545228 - DNA, 25 bp, Homo sapien
ctgcaaccggagagggccatcactc

SEQ ID NO: 1545229 - DNA, 25 bp, Homo sapien
agggccatcactccgctgcagggct

SEQ ID NO: 1545230 - DNA, 25 bp, Homo sapien
ccacggggacttgtgccaagggaca

SEQ ID NO: 1545231 - DNA, 25 bp, Homo sapien
gggacttgtgccaagggacagcccc

SEQ ID NO: 1545232 - DNA, 25 bp, Homo sapien
gaagggggcacgctgctgcctccat

SEQ ID NO: 1545233 - DNA, 25 bp, Homo sapien
gcactgagaggtaggacggggtcga

SEQ ID NO: 1545234 - DNA, 25 bp, Homo sapien
cccggggagggctcggcaggcagtg

SEQ ID NO: 1545235 - DNA, 25 bp, Homo sapien
ctagcagcgccaggtcgcagcgccg

SEQ ID NO: 1545236 - DNA, 25 bp, Homo sapien
gcgcgcgcctcggccacgtcggcgc

SEQ ID NO: 1545237 - DNA, 25 bp, Homo sapien
cgcgcgcctcggccacgtcggcgcc

SEQ ID NO: 1545238 - DNA, 25 bp, Homo sapien
aagaggccgtcgagccagcgccgct

SEQ ID NO: 1545239 - DNA, 25 bp, Homo sapien
ttcgcggcggccgtggggacgcgcg

SEQ ID NO: 1545240 - DNA, 25 bp, Homo sapien
aagaagaggccgtcgagccagcgcc

SEQ ID NO: 1545241 - DNA, 25 bp, Homo sapien
cgcgggtgggctgaggccccgcggg

SEQ ID NO: 1545242 - DNA, 25 bp, Homo sapien
gacagcgacacgagggtggccgagg

SEQ ID NO: 1545243 - DNA, 25 bp, Homo sapien
gcgacacgagggtggccgagggcgc

SEQ ID NO: 1545244 - DNA, 25 bp, Homo sapien
acagcgacacgagggtggccgaggg

SEQ ID NO: 1545245 - DNA, 25 bp, Homo sapien
cgccaggcccaggccggggcccacg

SEQ ID NO: 1545246 - DNA, 25 bp, Homo sapien
tgaacgcgtggagttgcagtcggac

SEQ ID NO: 1545247 - DNA, 25 bp, Homo sapien
gcagtgaacgcgtggagttgcagtc

SEQ ID NO: 1545248 - DNA, 25 bp, Homo sapien
cgcagcagtgaacgcgtggagttgc

SEQ ID NO: 1545249 - DNA, 25 bp, Homo sapien
cagagcgcagcagtgaacgcgtgga

SEQ ID NO: 1545250 - DNA, 25 bp, Homo sapien
gcgtgggtgtgggcgcgggcgggga

SEQ ID NO: 1545251 - DNA, 25 bp, Homo sapien
agggcgtgggtgtgggcgcgggcgg

SEQ ID NO: 1545252 - DNA, 25 bp, Homo sapien
gggagggcgcggccggtgcggcctc

SEQ ID NO: 1545253 - DNA, 25 bp, Homo sapien
cgtgacgtgggtgggcgtgagcgac

SEQ ID NO: 1545254 - DNA, 25 bp, Homo sapien
tcacagcgcatgcagccgtgacgtg

SEQ ID NO: 1545255 - DNA, 25 bp, Homo sapien
ctggcgggggtccttcttgaagctc

SEQ ID NO: 1545256 - DNA, 25 bp, Homo sapien
cgtccgatggcgtccgccggtgccc

SEQ ID NO: 1545257 - DNA, 25 bp, Homo sapien
gggaagtccagaaggtcacgagggc

SEQ ID NO: 1545258 - DNA, 25 bp, Homo sapien
gtcgggcaggcgggggaagtccaga

SEQ ID NO: 1545259 - DNA, 25 bp, Homo sapien
gcaggcgggggaagtccagaaggtc

SEQ ID NO: 1545260 - DNA, 25 bp, Homo sapien
cgggggaagtccagaaggtcacgag

SEQ ID NO: 1545261 - DNA, 25 bp, Homo sapien
agtgtccggccgaaggagaccagtt

SEQ ID NO: 1545262 - DNA, 25 bp, Homo sapien
ggaggcgagatggtgagtgtccggc

SEQ ID NO: 1545263 - DNA, 25 bp, Homo sapien
gggcgactggcagccggccgaggtc

SEQ ID NO: 1545264 - DNA, 25 bp, Homo sapien
ggcccagggctctccggagtgtctg

SEQ ID NO: 1545265 - DNA, 25 bp, Homo sapien
ccaccttgtggcatggcgggctggg

SEQ ID NO: 1545266 - DNA, 25 bp, Homo sapien
aataaatagagtgaacatcctgccc

SEQ ID NO: 1545267 - DNA, 25 bp, Homo sapien
ctacattcatggctgcccaggcggg

SEQ ID NO: 1545268 - DNA, 25 bp, Homo sapien
cctttaatgctccattttgtgccaa

SEQ ID NO: 1545269 - DNA, 25 bp, Homo sapien
ttaagtggctcggagagaacagact

SEQ ID NO: 1545270 - DNA, 25 bp, Homo sapien
caaatacaggcgcacagaggtgtgc

SEQ ID NO: 1545271 - DNA, 25 bp, Homo sapien
gcgagctgctggatacttcggagaa

SEQ ID NO: 1545272 - DNA, 25 bp, Homo sapien
cctggcagagggtgccgcaaataca

SEQ ID NO: 1545273 - DNA, 25 bp, Homo sapien
cacatagaacaactagggaaaggcc

SEQ ID NO: 1545274 - DNA, 25 bp, Homo sapien
agtttgttgaacgtcttgcctgcga

SEQ ID NO: 1545275 - DNA, 25 bp, Homo sapien
gccttcagatatccctatgagaggg

SEQ ID NO: 1545276 - DNA, 25 bp, Homo sapien
tgttaggacctgagagacacttgtg

SEQ ID NO: 1545277 - DNA, 25 bp, Homo sapien
tggtggtcataaaataggcaggcct

SEQ ID NO: 1545278 - DNA, 25 bp, Homo sapien
tacagctaggactcgtttggttggg

SEQ ID NO: 1545279 - DNA, 25 bp, Homo sapien
gctggccccgtagttgagcatgtgt

SEQ ID NO: 1545280 - DNA, 25 bp, Homo sapien
atgcaggtctcgtagtgtgggcaca

SEQ ID NO: 1545281 - DNA, 25 bp, Homo sapien
cagcgtgtcctccagtgtgcatggt

SEQ ID NO: 1545282 - DNA, 25 bp, Homo sapien
ggactcctgtgcgtgcctcggactg

SEQ ID NO: 1545283 - DNA, 25 bp, Homo sapien
ccttaaggttgaacatgagtgcacg

SEQ ID NO: 1545284 - DNA, 25 bp, Homo sapien
tgagtgcacgtccatgtcagtgctg

SEQ ID NO: 1545285 - DNA, 25 bp, Homo sapien
agctggccttacctcccgctggacc

SEQ ID NO: 1545286 - DNA, 25 bp, Homo sapien
cagccccgtgccttactagggcttc

SEQ ID NO: 1545287 - DNA, 25 bp, Homo sapien
aacatttggggccaaacctgcctgc

SEQ ID NO: 1545288 - DNA, 25 bp, Homo sapien
gcaggaggaacatttggggccaaac

SEQ ID NO: 1545289 - DNA, 25 bp, Homo sapien
tgcacaggagaagtggggacacaca

SEQ ID NO: 1545290 - DNA, 25 bp, Homo sapien
tttggcagtgtccaccaaagctgag

SEQ ID NO: 1545291 - DNA, 25 bp, Homo sapien
tagtttggcagtgtccaccaaagct

SEQ ID NO: 1545292 - DNA, 25 bp, Homo sapien
agatagtttggcagtgtccaccaaa

SEQ ID NO: 1545293 - DNA, 25 bp, Homo sapien
gcattctagggtttcagcagcaccc

SEQ ID NO: 1545294 - DNA, 25 bp, Homo sapien
ggacagatgattctgcgctgtcggg

SEQ ID NO: 1545295 - DNA, 25 bp, Homo sapien
ccaatactagctccccaagttgtga

SEQ ID NO: 1545296 - DNA, 25 bp, Homo sapien
tcagcactgttaacgttttgggaca

SEQ ID NO: 1545297 - DNA, 25 bp, Homo sapien
gagctaggtgacagcgtaccacgct

SEQ ID NO: 1545298 - DNA, 25 bp, Homo sapien
tccacaagcgtggtaagaggccgct

SEQ ID NO: 1545299 - DNA, 25 bp, Homo sapien
tgccctgagctgtcccgagctaggt

SEQ ID NO: 1545300 - DNA, 25 bp, Homo sapien
gtaccacgctgccaccatgaatgag

SEQ ID NO: 1545301 - DNA, 25 bp, Homo sapien
aagatcccggattgtctgagacctg

SEQ ID NO: 1545302 - DNA, 25 bp, Homo sapien
cccagaccgtgcatacgcagtaggt

SEQ ID NO: 1545303 - DNA, 25 bp, Homo sapien
aggactggcttctaggccccagacc

SEQ ID NO: 1545304 - DNA, 25 bp, Homo sapien
agggatcagggcctcggtcaagccc

SEQ ID NO: 1545305 - DNA, 25 bp, Homo sapien
cacgagagaaagctgatgcccatgg

SEQ ID NO: 1545306 - DNA, 25 bp, Homo sapien
tcggcgtccctcagtctgttggttg

SEQ ID NO: 1545307 - DNA, 25 bp, Homo sapien
tgctgtccgcaaataaccccaggct

SEQ ID NO: 1545308 - DNA, 25 bp, Homo sapien
ttctgggaacctgagacgaagcagt

SEQ ID NO: 1545309 - DNA, 25 bp, Homo sapien
tgccaggcagtagcgtgtccggccc

SEQ ID NO: 1545310 - DNA, 25 bp, Homo sapien
ccttctttctgccgggacctgggca

SEQ ID NO: 1545311 - DNA, 25 bp, Homo sapien
catgccaggcagtagcgtgtccggc

SEQ ID NO: 1545312 - DNA, 25 bp, Homo sapien
cacatgccaggcagtagcgtgtccg

SEQ ID NO: 1545313 - DNA, 25 bp, Homo sapien
gatcctcctgtctcgaatagctgac

SEQ ID NO: 1545314 - DNA, 25 bp, Homo sapien
agagatggtcacgttagaggttgac

SEQ ID NO: 1545315 - DNA, 25 bp, Homo sapien
gaggttgacacacagaacagtggga

SEQ ID NO: 1545316 - DNA, 25 bp, Homo sapien
caagagtggagcgtaggaactcggg

SEQ ID NO: 1545317 - DNA, 25 bp, Homo sapien
tgctgcattacaagggccctgagag

SEQ ID NO: 1545318 - DNA, 25 bp, Homo sapien
ccctgagaggcgatgtccctgggcc

SEQ ID NO: 1545319 - DNA, 25 bp, Homo sapien
ttagtgctgctgcattacaagggcc

SEQ ID NO: 1545320 - DNA, 25 bp, Homo sapien
tacaagggccctgagaggcgatgtc

SEQ ID NO: 1545321 - DNA, 25 bp, Homo sapien
gcgccaggcagtaggccgagccctg

SEQ ID NO: 1545322 - DNA, 25 bp, Homo sapien
ctctggaataatggcagccatgtgt

SEQ ID NO: 1545323 - DNA, 25 bp, Homo sapien
tgtgtttggctgttcactgggcgcc

SEQ ID NO: 1545324 - DNA, 25 bp, Homo sapien
ggaataatggcagccatgtgtttgg

SEQ ID NO: 1545325 - DNA, 25 bp, Homo sapien
gagtgagtgtgggaggggcgctggg

SEQ ID NO: 1545326 - DNA, 25 bp, Homo sapien
gaggggcgctgggtgggagctcagc

SEQ ID NO: 1545327 - DNA, 25 bp, Homo sapien
tgggagctcagcctggcccccttgg

SEQ ID NO: 1545328 - DNA, 25 bp, Homo sapien
gcccccttggggcaggacccactgc

SEQ ID NO: 1545329 - DNA, 25 bp, Homo sapien
tcagcggaaggccctcaaccacagg

SEQ ID NO: 1545330 - DNA, 25 bp, Homo sapien
ggctcttctggacagccagccaagc

SEQ ID NO: 1545331 - DNA, 25 bp, Homo sapien
tggacagccagccaagcagcgagag

SEQ ID NO: 1545332 - DNA, 25 bp, Homo sapien
cacggtggggtggttccatggcagg

SEQ ID NO: 1545333 - DNA, 25 bp, Homo sapien
ctttcagacttgagctccaagcccc

SEQ ID NO: 1545334 - DNA, 25 bp, Homo sapien
cactggaatatgtacgatgagagca

SEQ ID NO: 1545335 - DNA, 25 bp, Homo sapien
caaccatgacgagcacactgaaaag

SEQ ID NO: 1545336 - DNA, 25 bp, Homo sapien
gccagcgacacagcgatgattgttt

SEQ ID NO: 1545337 - DNA, 25 bp, Homo sapien
taaaatggttcaaaagccagcgaca

SEQ ID NO: 1545338 - DNA, 25 bp, Homo sapien
gtctctctttttcgaggtgagaaac

SEQ ID NO: 1545339 - DNA, 25 bp, Homo sapien
gggctcaactggcaaattccaaagt

SEQ ID NO: 1545340 - DNA, 25 bp, Homo sapien
tttcgaggtgagaaacacatctttt

SEQ ID NO: 1545341 - DNA, 25 bp, Homo sapien
atcttttgagctttcccaggggctc

SEQ ID NO: 1545342 - DNA, 25 bp, Homo sapien
tttttaaccatctgaagaactgcca

SEQ ID NO: 1545343 - DNA, 25 bp, Homo sapien
tgtcaccaggcatgtatcagagttt

SEQ ID NO: 1545344 - DNA, 25 bp, Homo sapien
tataccctagcagtagaattgttgg

SEQ ID NO: 1545345 - DNA, 25 bp, Homo sapien
ccagcagtatatgagggtcccattt

SEQ ID NO: 1545346 - DNA, 25 bp, Homo sapien
gacctcaggcgatttgctcacttcg

SEQ ID NO: 1545347 - DNA, 25 bp, Homo sapien
taggttcctcttggctagggcagtt

SEQ ID NO: 1545348 - DNA, 25 bp, Homo sapien
gcagagagctgctgtataccccacg

SEQ ID NO: 1545349 - DNA, 25 bp, Homo sapien
aatttgataacattctggctccaga

SEQ ID NO: 1545350 - DNA, 25 bp, Homo sapien
ccttacacatgggatcaattcaggg

SEQ ID NO: 1545351 - DNA, 25 bp, Homo sapien
gagctaacgttgactaccacctgtg

SEQ ID NO: 1545352 - DNA, 25 bp, Homo sapien
tgtgccaggaagtactaaatcaacg

SEQ ID NO: 1545353 - DNA, 25 bp, Homo sapien
ttggacttgtcgaatcctgagggca

SEQ ID NO: 1545354 - DNA, 25 bp, Homo sapien
taggatgctgctcgccttgagagcc

SEQ ID NO: 1545355 - DNA, 25 bp, Homo sapien
cacccgttatacatttgacttggca

SEQ ID NO: 1545356 - DNA, 25 bp, Homo sapien
atccttgtgacctgagccgatgccg

SEQ ID NO: 1545357 - DNA, 25 bp, Homo sapien
cagagtcacagtggcccacccgtta

SEQ ID NO: 1545358 - DNA, 25 bp, Homo sapien
ccctcctgtacctccggcctcccag

SEQ ID NO: 1545359 - DNA, 25 bp, Homo sapien
tcctgtacctccggcctcccagcgg

SEQ ID NO: 1545360 - DNA, 25 bp, Homo sapien
tgcccgaccctcctgtacctccggc

SEQ ID NO: 1545361 - DNA, 25 bp, Homo sapien
tgtccgctgcgtcctgcccgaccct

SEQ ID NO: 1545362 - DNA, 25 bp, Homo sapien
tcaactgcagtagtgagaaaaggag

SEQ ID NO: 1545363 - DNA, 25 bp, Homo sapien
gtcaactgcagtagtgagaaaagga

SEQ ID NO: 1545364 - DNA, 25 bp, Homo sapien
ctgtaaaggactatgaacagtcaat

SEQ ID NO: 1545365 - DNA, 25 bp, Homo sapien
aataaggagttccatctgtaaagga

SEQ ID NO: 1545366 - DNA, 25 bp, Homo sapien
ttatggccgcactctcgctggtggc

SEQ ID NO: 1545367 - DNA, 25 bp, Homo sapien
actgcactctcgctggtgtcggtgg

SEQ ID NO: 1545368 - DNA, 25 bp, Homo sapien
cacgtgacggttacgactgcactct

SEQ ID NO: 1545369 - DNA, 25 bp, Homo sapien
aggcatgcgcctttctcattggccg

SEQ ID NO: 1545370 - DNA, 25 bp, Homo sapien
actccgagacccagccccacacgca

SEQ ID NO: 1545371 - DNA, 25 bp, Homo sapien
ctgcactccacgtctcccactccga

SEQ ID NO: 1545372 - DNA, 25 bp, Homo sapien
ctccacgtctcccactccgagaccc

SEQ ID NO: 1545373 - DNA, 25 bp, Homo sapien
cactccgagacccagccccacacgc

SEQ ID NO: 1545374 - DNA, 25 bp, Homo sapien
aagacaacacgaggagggtagccga

SEQ ID NO: 1545375 - DNA, 25 bp, Homo sapien
gcaaagagggcttacagggaacgaa

SEQ ID NO: 1545376 - DNA, 25 bp, Homo sapien
gagcgattacgacctatggtggcaa

SEQ ID NO: 1545377 - DNA, 25 bp, Homo sapien
tgacataaagagaccgaggacgaca

SEQ ID NO: 1545378 - DNA, 25 bp, Homo sapien
ggccgagggtgacatggttaataac

SEQ ID NO: 1545379 - DNA, 25 bp, Homo sapien
ccgagggtgacatggttaataacaa

SEQ ID NO: 1545380 - DNA, 25 bp, Homo sapien
cacccggccgagggtgacatggtta

SEQ ID NO: 1545381 - DNA, 25 bp, Homo sapien
cccggccgagggtgacatggttaat

SEQ ID NO: 1545382 - DNA, 25 bp, Homo sapien
aatattccaagcttgctcctaccgc

SEQ ID NO: 1545383 - DNA, 25 bp, Homo sapien
ggtgatggcttcatgtcacactgga

SEQ ID NO: 1545384 - DNA, 25 bp, Homo sapien
aaggctgcctctcactagtcgatcc

SEQ ID NO: 1545385 - DNA, 25 bp, Homo sapien
cataaaggatatgtgagtgcggact

SEQ ID NO: 1545386 - DNA, 25 bp, Homo sapien
caccacgcccggtctcgatctttga

SEQ ID NO: 1545387 - DNA, 25 bp, Homo sapien
cacgcccggtctcgatctttgacag

SEQ ID NO: 1545388 - DNA, 25 bp, Homo sapien
tcgatctttgacagggatatttgaa

SEQ ID NO: 1545389 - DNA, 25 bp, Homo sapien
cggtctcgatctttgacagggatat

SEQ ID NO: 1545390 - DNA, 25 bp, Homo sapien
ccacttagggaattaaggatccaga

SEQ ID NO: 1545391 - DNA, 25 bp, Homo sapien
gagaaataggatatgtggtaagcct

SEQ ID NO: 1545392 - DNA, 25 bp, Homo sapien
gatatgtggtaagcctggaactgga

SEQ ID NO: 1545393 - DNA, 25 bp, Homo sapien
gaattaaggatccagagaggtgaag

SEQ ID NO: 1545394 - DNA, 25 bp, Homo sapien
catggtaagtttagggcaaagcagt

SEQ ID NO: 1545395 - DNA, 25 bp, Homo sapien
taagtttagggcaaagcagtgttac

SEQ ID NO: 1545396 - DNA, 25 bp, Homo sapien
taataacatggtaagtttagggcaa

SEQ ID NO: 1545397 - DNA, 25 bp, Homo sapien
tttagggcaaagcagtgttaccatc

SEQ ID NO: 1545398 - DNA, 25 bp, Homo sapien
tctaagcccagagcatatagggtgg

SEQ ID NO: 1545399 - DNA, 25 bp, Homo sapien
taaattataaagaggctcaggctcc

SEQ ID NO: 1545400 - DNA, 25 bp, Homo sapien
tacagcagccctttaaattggagag

SEQ ID NO: 1545401 - DNA, 25 bp, Homo sapien
tatgacaccatagcccgcaaaaagg

SEQ ID NO: 1545402 - DNA, 25 bp, Homo sapien
caggaggctctcagcaaaggtgact

SEQ ID NO: 1545403 - DNA, 25 bp, Homo sapien
taatgtgcatagaagagcccctgac

SEQ ID NO: 1545404 - DNA, 25 bp, Homo sapien
ggatgactgagttttggccgcagca

SEQ ID NO: 1545405 - DNA, 25 bp, Homo sapien
tgtggtcagccaagtgtcgaagaaa

SEQ ID NO: 1545406 - DNA, 25 bp, Homo sapien
catcagtcttagaggcggttgacca

SEQ ID NO: 1545407 - DNA, 25 bp, Homo sapien
ggttatttgaaactccagaggtcac

SEQ ID NO: 1545408 - DNA, 25 bp, Homo sapien
aaactaatattggagggccaggcac

SEQ ID NO: 1545409 - DNA, 25 bp, Homo sapien
cagaggtcactaggagaagcagaag

SEQ ID NO: 1545410 - DNA, 25 bp, Homo sapien
taaaattgtgaaacataagctattt

SEQ ID NO: 1545411 - DNA, 25 bp, Homo sapien
tgaaacataagctattttcagagaa

SEQ ID NO: 1545412 - DNA, 25 bp, Homo sapien
tgtgaaacataagctattttcagag

SEQ ID NO: 1545413 - DNA, 25 bp, Homo sapien
aattgtgaaacataagctattttca

SEQ ID NO: 1545414 - DNA, 25 bp, Homo sapien
caagagggatttaaggccccggctg

SEQ ID NO: 1545415 - DNA, 25 bp, Homo sapien
gccccggctggagaaatacactgga

SEQ ID NO: 1545416 - DNA, 25 bp, Homo sapien
tcttttcacggcagggtggcacctc

SEQ ID NO: 1545417 - DNA, 25 bp, Homo sapien
cctaattgacagagggtggcacctc

SEQ ID NO: 1545418 - DNA, 25 bp, Homo sapien
cttgtgaatttgtgtaccatggaca

SEQ ID NO: 1545419 - DNA, 25 bp, Homo sapien
tttgtgtaccatggacatgcattac

SEQ ID NO: 1545420 - DNA, 25 bp, Homo sapien
gaatttgtgtaccatggacatgcat

SEQ ID NO: 1545421 - DNA, 25 bp, Homo sapien
tgtgaatttgtgtaccatggacatg

SEQ ID NO: 1545422 - DNA, 25 bp, Homo sapien
gctttgctacattccaccctagagt

SEQ ID NO: 1545423 - DNA, 25 bp, Homo sapien
tggggggtagtacatggctggtgga

SEQ ID NO: 1545424 - DNA, 25 bp, Homo sapien
tagagtccccgtgtagggcagggag

SEQ ID NO: 1545425 - DNA, 25 bp, Homo sapien
ctggtggatgggctttgctacattc

SEQ ID NO: 1545426 - DNA, 25 bp, Homo sapien
gagtctgcgcagtgcgtgccccagt

SEQ ID NO: 1545427 - DNA, 25 bp, Homo sapien
gcgtctgcagctacctccggtgggc

SEQ ID NO: 1545428 - DNA, 25 bp, Homo sapien
ttctgtctggacaggctgaacgagg

SEQ ID NO: 1545429 - DNA, 25 bp, Homo sapien
agtccgggctcaccgcagcgagaag

SEQ ID NO: 1545430 - DNA, 25 bp, Homo sapien
acagaagagtgattagtcttggggc

SEQ ID NO: 1545431 - DNA, 25 bp, Homo sapien
gagtgattagtcttggggctattca

SEQ ID NO: 1545432 - DNA, 25 bp, Homo sapien
agtcttggggctattcataatcatg

SEQ ID NO: 1545433 - DNA, 25 bp, Homo sapien
ttagtcttggggctattcataatca

SEQ ID NO: 1545434 - DNA, 25 bp, Homo sapien
tggcagaacaaaagtgggcactgtg

SEQ ID NO: 1545435 - DNA, 25 bp, Homo sapien
ggcagaacaaaagtgggcactgtgt

SEQ ID NO: 1545436 - DNA, 25 bp, Homo sapien
gcagaacaaaagtgggcactgtgtg

SEQ ID NO: 1545437 - DNA, 25 bp, Homo sapien
ctggcagaacaaaagtgggcactgt

SEQ ID NO: 1545438 - DNA, 25 bp, Homo sapien
gggggatacgcagagcccaggtgag

SEQ ID NO: 1545439 - DNA, 25 bp, Homo sapien
cctggtacatcagtttaggcttcat

SEQ ID NO: 1545440 - DNA, 25 bp, Homo sapien
tcctggtacatcagtttaggcttca

SEQ ID NO: 1545441 - DNA, 25 bp, Homo sapien
ctcctggtacatcagtttaggcttc

SEQ ID NO: 1545442 - DNA, 25 bp, Homo sapien
ctcaatctcattcatgggcagctca

SEQ ID NO: 1545443 - DNA, 25 bp, Homo sapien
tcatgggcagctcattggcgggctc

SEQ ID NO: 1545444 - DNA, 25 bp, Homo sapien
ctcattggcgggctcctctgcaggc

SEQ ID NO: 1545445 - DNA, 25 bp, Homo sapien
ttttccgcagccttccacgcctcaa

SEQ ID NO: 1545446 - DNA, 25 bp, Homo sapien
cccacaaccgccagaatgaggacca

SEQ ID NO: 1545447 - DNA, 25 bp, Homo sapien
agcccacaaccgccagaatgaggac

SEQ ID NO: 1545448 - DNA, 25 bp, Homo sapien
cgaagcccacaaccgccagaatgag

SEQ ID NO: 1545449 - DNA, 25 bp, Homo sapien
ggctccgaagcccacaaccgccaga

SEQ ID NO: 1545450 - DNA, 25 bp, Homo sapien
agagatgcaagtcgccgtattccca

SEQ ID NO: 1545451 - DNA, 25 bp, Homo sapien
gcaagtcgccgtattcccatagaaa

SEQ ID NO: 1545452 - DNA, 25 bp, Homo sapien
gcccaaagagatgcaagtcgccgta

SEQ ID NO: 1545453 - DNA, 25 bp, Homo sapien
tgggcgctggttgggcccaaagaga

SEQ ID NO: 1545454 - DNA, 25 bp, Homo sapien
tagtgtgtgcttaagtgtacctggt

SEQ ID NO: 1545455 - DNA, 25 bp, Homo sapien
gcttaagtgtacctggtctggcagg

SEQ ID NO: 1545456 - DNA, 25 bp, Homo sapien
tgtttagtgtgtgcttaagtgtacc

SEQ ID NO: 1545457 - DNA, 25 bp, Homo sapien
ggccctgtttagtgtgtgcttaagt

SEQ ID NO: 1545458 - DNA, 25 bp, Homo sapien
tgtgtatttgaatgcgtgcctggac

SEQ ID NO: 1545459 - DNA, 25 bp, Homo sapien
ctctgcgtgtctgtctagaggtgtg

SEQ ID NO: 1545460 - DNA, 25 bp, Homo sapien
gaaggaaggtcgtgtattgagatgt

SEQ ID NO: 1545461 - DNA, 25 bp, Homo sapien
gactcatgatcctctgcgtgtctgt

SEQ ID NO: 1545462 - DNA, 25 bp, Homo sapien
tcagctgtccgtccatgggtgtgtt

SEQ ID NO: 1545463 - DNA, 25 bp, Homo sapien
gggatgctatcagccatacggtgcc

SEQ ID NO: 1545464 - DNA, 25 bp, Homo sapien
agtgctcagctgtccgtccatgggt

SEQ ID NO: 1545465 - DNA, 25 bp, Homo sapien
cggtgccggagagcaagggctggga

SEQ ID NO: 1545466 - DNA, 25 bp, Homo sapien
ctgctgtgcgcaccggcgagcaggc

SEQ ID NO: 1545467 - DNA, 25 bp, Homo sapien
caggctgctgtgcgcaccggcgagc

SEQ ID NO: 1545468 - DNA, 25 bp, Homo sapien
ggaggcattggggaagtccaggccc

SEQ ID NO: 1545469 - DNA, 25 bp, Homo sapien
cctgcgtgtgggtgtcattgttggt

SEQ ID NO: 1545470 - DNA, 25 bp, Homo sapien
tatagtaacagcagactcacaaagg

SEQ ID NO: 1545471 - DNA, 25 bp, Homo sapien
gaagcaggtgctataaattggcccc

SEQ ID NO: 1545472 - DNA, 25 bp, Homo sapien
aagtttgtctgcagaccataccagg

SEQ ID NO: 1545473 - DNA, 25 bp, Homo sapien
tcacaagagccctaagaagcaggtg

SEQ ID NO: 1545474 - DNA, 25 bp, Homo sapien
gttcacgccctttggtgccagggtc

SEQ ID NO: 1545475 - DNA, 25 bp, Homo sapien
ctgggcttgctcacagcgatgcgga

SEQ ID NO: 1545476 - DNA, 25 bp, Homo sapien
cccgctgggcttgctcacagcgatg

SEQ ID NO: 1545477 - DNA, 25 bp, Homo sapien
cgctgggcttgctcacagcgatgcg

SEQ ID NO: 1545478 - DNA, 25 bp, Homo sapien
tgggcttgctcacagcgatgcggac

SEQ ID NO: 1545479 - DNA, 25 bp, Homo sapien
ccagaacttggtatgcaggacgcca

SEQ ID NO: 1545480 - DNA, 25 bp, Homo sapien
tatgcaggacgccatgggtcagctt

SEQ ID NO: 1545481 - DNA, 25 bp, Homo sapien
ggtccaccacccagaacttggtatg

SEQ ID NO: 1545482 - DNA, 25 bp, Homo sapien
tgggtcagtgaacgccagtccatgt

SEQ ID NO: 1545483 - DNA, 25 bp, Homo sapien
gatcaaatgggtgcgcaggttcttg

SEQ ID NO: 1545484 - DNA, 25 bp, Homo sapien
caacattacccaggatagggctgga

SEQ ID NO: 1545485 - DNA, 25 bp, Homo sapien
caccgtgcatggcttggattaggga

SEQ ID NO: 1545486 - DNA, 25 bp, Homo sapien
cagtagagggctccatttagggatt

SEQ ID NO: 1545487 - DNA, 25 bp, Homo sapien
tgtctcttggttgtagcgggtgtca

SEQ ID NO: 1545488 - DNA, 25 bp, Homo sapien
aaagatcttggtcaggtctcgagcc

SEQ ID NO: 1545489 - DNA, 25 bp, Homo sapien
ccattgaggcagatctccattggtg

SEQ ID NO: 1545490 - DNA, 25 bp, Homo sapien
gaaccagtaggcctcaaagatcttg

SEQ ID NO: 1545491 - DNA, 25 bp, Homo sapien
tccttaatgctcaagagacaaggaa

SEQ ID NO: 1545492 - DNA, 25 bp, Homo sapien
tcttccttaatgctcaagagacaag

SEQ ID NO: 1545493 - DNA, 25 bp, Homo sapien
cccatcttccttaatgctcaagaga

SEQ ID NO: 1545494 - DNA, 25 bp, Homo sapien
cttaatgctcaagagacaaggaaac

SEQ ID NO: 1545495 - DNA, 25 bp, Homo sapien
tgacagcgacgtagatgaaactccg

SEQ ID NO: 1545496 - DNA, 25 bp, Homo sapien
tgtccaccacgttgagtagagcctt

SEQ ID NO: 1545497 - DNA, 25 bp, Homo sapien
gccttcaggtctggagtgcggccac

SEQ ID NO: 1545498 - DNA, 25 bp, Homo sapien
tgggcaggtagttcatgacagcgac

SEQ ID NO: 1545499 - DNA, 25 bp, Homo sapien
ctgggccctgctttagctattgaga

SEQ ID NO: 1545500 - DNA, 25 bp, Homo sapien
tgtgtccacaggctttgccctcagc

SEQ ID NO: 1545501 - DNA, 25 bp, Homo sapien
agaggacttcctcatcgctggctcc

SEQ ID NO: 1545502 - DNA, 25 bp, Homo sapien
gttcctgtctccataaatcccacat

SEQ ID NO: 1545503 - DNA, 25 bp, Homo sapien
cagagtgggtatggttgtcacgcag

SEQ ID NO: 1545504 - DNA, 25 bp, Homo sapien
aaggcccgcatggatggctccgagt

SEQ ID NO: 1545505 - DNA, 25 bp, Homo sapien
accttgacgccacgctcgtaggtgg

SEQ ID NO: 1545506 - DNA, 25 bp, Homo sapien
gcccatcgtcaatggcaggccagaa

SEQ ID NO: 1545507 - DNA, 25 bp, Homo sapien
catatgggattcgagcctgggcctc

SEQ ID NO: 1545508 - DNA, 25 bp, Homo sapien
ggcgcgttcagtcaccatgtacttg

SEQ ID NO: 1545509 - DNA, 25 bp, Homo sapien
gtacttgttgtggttgacacgggca

SEQ ID NO: 1545510 - DNA, 25 bp, Homo sapien
tgtaggtggcgcgttcagtcaccat

SEQ ID NO: 1545511 - DNA, 25 bp, Homo sapien
ccattctgcgtcaccagcagcgagg

SEQ ID NO: 1545512 - DNA, 25 bp, Homo sapien
gaggtgcccgccgtctccgtgaagt

SEQ ID NO: 1545513 - DNA, 25 bp, Homo sapien
tagttgccagaccagttggaggttc

SEQ ID NO: 1545514 - DNA, 25 bp, Homo sapien
ccgtctccgtgaagtagttgccaga

SEQ ID NO: 1545515 - DNA, 25 bp, Homo sapien
cagctgaggtgtcaaggtcatggct

SEQ ID NO: 1545516 - DNA, 25 bp, Homo sapien
gctgtaaggggagtcccagtccctc

SEQ ID NO: 1545517 - DNA, 25 bp, Homo sapien
tcatggctgtaaggggagtcccagt

SEQ ID NO: 1545518 - DNA, 25 bp, Homo sapien
gcggcaggcgttgcccacgctgtca

SEQ ID NO: 1545519 - DNA, 25 bp, Homo sapien
gccttggcctgcccactggatcggg

SEQ ID NO: 1545520 - DNA, 25 bp, Homo sapien
ccttggcctgcccactggatcgggc

SEQ ID NO: 1545521 - DNA, 25 bp, Homo sapien
cttggcctgcccactggatcgggcc

SEQ ID NO: 1545522 - DNA, 25 bp, Homo sapien
cggggccacagcgtcaggccggtgg

SEQ ID NO: 1545523 - DNA, 25 bp, Homo sapien
cggggacagggaccgtgacccagag

SEQ ID NO: 1545524 - DNA, 25 bp, Homo sapien
tgccctggaaagtgggggtgggcca

SEQ ID NO: 1545525 - DNA, 25 bp, Homo sapien
acagacaagttatttacttattata

SEQ ID NO: 1545526 - DNA, 25 bp, Homo sapien
aggagagcatctcggggcctctgct

SEQ ID NO: 1545527 - DNA, 25 bp, Homo sapien
ggcctctgctgagccactggccatc

SEQ ID NO: 1545528 - DNA, 25 bp, Homo sapien
gaaggagagcatctcggggcctctg

SEQ ID NO: 1545529 - DNA, 25 bp, Homo sapien
atctcggggcctctgctgagccact

SEQ ID NO: 1545530 - DNA, 25 bp, Homo sapien
ggactagagattccgggcagccctt

SEQ ID NO: 1545531 - DNA, 25 bp, Homo sapien
gaggcctgggatcaagtgtggagct

SEQ ID NO: 1545532 - DNA, 25 bp, Homo sapien
tggagctgtggcagtaagagggacc

SEQ ID NO: 1545533 - DNA, 25 bp, Homo sapien
aactactatagcaagaagggtctgg

SEQ ID NO: 1545534 - DNA, 25 bp, Homo sapien
ccttcagtggagctagacctgccag

SEQ ID NO: 1545535 - DNA, 25 bp, Homo sapien
tgggcgagctaccaagctgaaggta

SEQ ID NO: 1545536 - DNA, 25 bp, Homo sapien
aagttcaaggtgatcgtgccagccc

SEQ ID NO: 1545537 - DNA, 25 bp, Homo sapien
tgtgcagcttaagatccccgaggtg

SEQ ID NO: 1545538 - DNA, 25 bp, Homo sapien
tgaaaactgcgggtgcgcatggaga

SEQ ID NO: 1545539 - DNA, 25 bp, Homo sapien
ccttgagtgagggaaacgccgccat

SEQ ID NO: 1545540 - DNA, 25 bp, Homo sapien
gcagggggctggacggtgacccgag

SEQ ID NO: 1545541 - DNA, 25 bp, Homo sapien
actgcgggtgcgcatggagagaggc

SEQ ID NO: 1545542 - DNA, 25 bp, Homo sapien
cggtccagccgcattccaggcctgg

SEQ ID NO: 1545543 - DNA, 25 bp, Homo sapien
actcagcggcctggcacgggaccca

SEQ ID NO: 1545544 - DNA, 25 bp, Homo sapien
ccttcctgacggccgcagggacagg

SEQ ID NO: 1545545 - DNA, 25 bp, Homo sapien
acccaggctgcgtccttcctgacgg

SEQ ID NO: 1545546 - DNA, 25 bp, Homo sapien
acacagctgcttagggaatggagcc

SEQ ID NO: 1545547 - DNA, 25 bp, Homo sapien
tatctgtagtgtagacccctgtcgg

SEQ ID NO: 1545548 - DNA, 25 bp, Homo sapien
gggattaaaacacttgccgcaggtc

SEQ ID NO: 1545549 - DNA, 25 bp, Homo sapien
tgtcaagaggtaggcaagacgatcc

SEQ ID NO: 1545550 - DNA, 25 bp, Homo sapien
ggccaaattggggcgttcctggatg

SEQ ID NO: 1545551 - DNA, 25 bp, Homo sapien
cctgggccaaattggggcgttcctg

SEQ ID NO: 1545552 - DNA, 25 bp, Homo sapien
tgggccaaattggggcgttcctgga

SEQ ID NO: 1545553 - DNA, 25 bp, Homo sapien
ccaaattggggcgttcctggatgct

SEQ ID NO: 1545554 - DNA, 25 bp, Homo sapien
acagcgagtttggaggtgaagtcca

SEQ ID NO: 1545555 - DNA, 25 bp, Homo sapien
ggttgccgggaagagttcaatgttc

SEQ ID NO: 1545556 - DNA, 25 bp, Homo sapien
caatgttcgggtcttggagccggac

SEQ ID NO: 1545557 - DNA, 25 bp, Homo sapien
aagtccaggggcgtttgaaagtcag

SEQ ID NO: 1545558 - DNA, 25 bp, Homo sapien
cgatcttggagcgaggactgtagct

SEQ ID NO: 1545559 - DNA, 25 bp, Homo sapien
cccctgccagttgcacttctttaaa

SEQ ID NO: 1545560 - DNA, 25 bp, Homo sapien
taaaggaaccgcagggagcaatggt

SEQ ID NO: 1545561 - DNA, 25 bp, Homo sapien
gccagttgcacttctttaaatggcc

SEQ ID NO: 1545562 - DNA, 25 bp, Homo sapien
gacgctgtcatcgtgctgctgggca

SEQ ID NO: 1545563 - DNA, 25 bp, Homo sapien
tgcaggcagccgatgtggacaagac

SEQ ID NO: 1545564 - DNA, 25 bp, Homo sapien
tacgaagtgacagtgctggtgcggg

SEQ ID NO: 1545565 - DNA, 25 bp, Homo sapien
tggacaagaccgtggctgggcagga

SEQ ID NO: 1545566 - DNA, 25 bp, Homo sapien
tatgaaaggtggtcacatagcacgg

SEQ ID NO: 1545567 - DNA, 25 bp, Homo sapien
gaatgcccatattggcccatgcaag

SEQ ID NO: 1545568 - DNA, 25 bp, Homo sapien
gctgaggtccaatcacggaagaggt

SEQ ID NO: 1545569 - DNA, 25 bp, Homo sapien
tttacaaaggttcagggagatggca

SEQ ID NO: 1545570 - DNA, 25 bp, Homo sapien
ctggcgcaggcggtgcaagcaggca

SEQ ID NO: 1545571 - DNA, 25 bp, Homo sapien
accctggcgcaggcggtgcaagcag

SEQ ID NO: 1545572 - DNA, 25 bp, Homo sapien
aggcggtgcaagcaggcatgagccg

SEQ ID NO: 1545573 - DNA, 25 bp, Homo sapien
gcgcaggcggtgcaagcaggcatga

SEQ ID NO: 1545574 - DNA, 25 bp, Homo sapien
cacgatcccgtacgatggccgtcaa

SEQ ID NO: 1545575 - DNA, 25 bp, Homo sapien
agatcgcgatcttcggcgccactgg

SEQ ID NO: 1545576 - DNA, 25 bp, Homo sapien
tggccgtcaagaagatcgcgatctt

SEQ ID NO: 1545577 - DNA, 25 bp, Homo sapien
tacgatggccgtcaagaagatcgcg

SEQ ID NO: 1545578 - DNA, 25 bp, Homo sapien
cgtgccgagactctgaggccttgca

SEQ ID NO: 1545579 - DNA, 25 bp, Homo sapien
gcagccagtgggttcccgcgcgtgc

SEQ ID NO: 1545580 - DNA, 25 bp, Homo sapien
tcccgcgcgtgccgagactctgagg

SEQ ID NO: 1545581 - DNA, 25 bp, Homo sapien
cgcgcgtgccgagactctgaggcct

SEQ ID NO: 1545582 - DNA, 25 bp, Homo sapien
gcggagagtctgaggcgtggccctt

SEQ ID NO: 1545583 - DNA, 25 bp, Homo sapien
ttcgagccagctccgccccgttgtt

SEQ ID NO: 1545584 - DNA, 25 bp, Homo sapien
gcgtggcccttcgagccagctccgc

SEQ ID NO: 1545585 - DNA, 25 bp, Homo sapien
cgccccgttgttcctggcttgagta

SEQ ID NO: 1545586 - DNA, 25 bp, Homo sapien
acacaaggtgtcacccacagtcctg

SEQ ID NO: 1545587 - DNA, 25 bp, Homo sapien
tcagaggatgacacaaggtgtcacc

SEQ ID NO: 1545588 - DNA, 25 bp, Homo sapien
gaggatgacacaaggtgtcacccac

SEQ ID NO: 1545589 - DNA, 25 bp, Homo sapien
gatgacacaaggtgtcacccacagt

SEQ ID NO: 1545590 - DNA, 25 bp, Homo sapien
acaccctatcgtacaggctgacgca

SEQ ID NO: 1545591 - DNA, 25 bp, Homo sapien
tgtcacccacggtgtcaccacaagg

SEQ ID NO: 1545592 - DNA, 25 bp, Homo sapien
gtctaattagtctcacgcttccatg

SEQ ID NO: 1545593 - DNA, 25 bp, Homo sapien
ttccatgtagcacacctcacacgtc

SEQ ID NO: 1545594 - DNA, 25 bp, Homo sapien
cactcgaatggggtcccggtgtcac

SEQ ID NO: 1545595 - DNA, 25 bp, Homo sapien
agccacacactcgaatggggtcccg

SEQ ID NO: 1545596 - DNA, 25 bp, Homo sapien
gggggtcacaatgagcagctcaaca

SEQ ID NO: 1545597 - DNA, 25 bp, Homo sapien
catcatagtcacagggggtcacaat

SEQ ID NO: 1545598 - DNA, 25 bp, Homo sapien
cacaaatccaatagggtaaccaccg

SEQ ID NO: 1545599 - DNA, 25 bp, Homo sapien
gtccacactggaacggtgtcaccca

SEQ ID NO: 1545600 - DNA, 25 bp, Homo sapien
cacactcgaaccttcatagcagtcg

SEQ ID NO: 1545601 - DNA, 25 bp, Homo sapien
tcacaaacagtgtcataggcccaca

SEQ ID NO: 1545602 - DNA, 25 bp, Homo sapien
atccacgcgcttgcgcgccgtcact

SEQ ID NO: 1545603 - DNA, 25 bp, Homo sapien
gcatccacgcgcttgcgcgccgtca

SEQ ID NO: 1545604 - DNA, 25 bp, Homo sapien
acgcgcttgcgcgccgtcactccct

SEQ ID NO: 1545605 - DNA, 25 bp, Homo sapien
ccgcatccacgcgcttgcgcgccgt

SEQ ID NO: 1545606 - DNA, 25 bp, Homo sapien
ggccgccagcgtcgctgtctccgct

SEQ ID NO: 1545607 - DNA, 25 bp, Homo sapien
cgaccgaccgccctccctgtcggcg

SEQ ID NO: 1545608 - DNA, 25 bp, Homo sapien
gctgctcgccgcgaccgaccgccct

SEQ ID NO: 1545609 - DNA, 25 bp, Homo sapien
ggctcagccagatccgcatgcgccg

SEQ ID NO: 1545610 - DNA, 25 bp, Homo sapien
gccaaggccttgatccgggagcact

SEQ ID NO: 1545611 - DNA, 25 bp, Homo sapien
ctgcggtggacgcagccggctgctc

SEQ ID NO: 1545612 - DNA, 25 bp, Homo sapien
gcagggttgttgttaggagcaggca

SEQ ID NO: 1545613 - DNA, 25 bp, Homo sapien
tccgggagcactcaaagagcgaggc

SEQ ID NO: 1545614 - DNA, 25 bp, Homo sapien
agcacgaagccgtcccggaggtcca

SEQ ID NO: 1545615 - DNA, 25 bp, Homo sapien
atagaggtccccgatgtggcagccc

SEQ ID NO: 1545616 - DNA, 25 bp, Homo sapien
tccaggagccgcgtgagcacgaagc

SEQ ID NO: 1545617 - DNA, 25 bp, Homo sapien
cacgcgggcgaggtgcgagttcacc

SEQ ID NO: 1545618 - DNA, 25 bp, Homo sapien
ccgcagcttccaaagaagcccgcct

SEQ ID NO: 1545619 - DNA, 25 bp, Homo sapien
tctggacagacaggagtatggcgcc

SEQ ID NO: 1545620 - DNA, 25 bp, Homo sapien
tgtcctcctctcgttttatccaaga

SEQ ID NO: 1545621 - DNA, 25 bp, Homo sapien
caagacacaggactcaatccttcta

SEQ ID NO: 1545622 - DNA, 25 bp, Homo sapien
agcgtcagccggtgattcccatcca

SEQ ID NO: 1545623 - DNA, 25 bp, Homo sapien
ttcagaaactgcagcgccttgtcca

SEQ ID NO: 1545624 - DNA, 25 bp, Homo sapien
atccacgatgtcatgcgaacccacg

SEQ ID NO: 1545625 - DNA, 25 bp, Homo sapien
acgttctccaggtgcacgcgctgct

SEQ ID NO: 1545626 - DNA, 25 bp, Homo sapien
tctctgttgtcctcagtctcaattt

SEQ ID NO: 1545627 - DNA, 25 bp, Homo sapien
ctgagcgtgtctctctgttgtcctc

SEQ ID NO: 1545628 - DNA, 25 bp, Homo sapien
tctgttgtcctcagtctcaattttg

SEQ ID NO: 1545629 - DNA, 25 bp, Homo sapien
gcgtgtctctctgttgtcctcagtc

SEQ ID NO: 1545630 - DNA, 25 bp, Homo sapien
tgaagcgaccaaggactttgaactt

SEQ ID NO: 1545631 - DNA, 25 bp, Homo sapien
cacactgaagcgaccaaggactttg

SEQ ID NO: 1545632 - DNA, 25 bp, Homo sapien
ccacactgaagcgaccaaggacttt

SEQ ID NO: 1545633 - DNA, 25 bp, Homo sapien
cactgaagcgaccaaggactttgaa

SEQ ID NO: 1545634 - DNA, 25 bp, Homo sapien
tgaatgagggcattgaaggccaagc

SEQ ID NO: 1545635 - DNA, 25 bp, Homo sapien
gccatcccgccagctggtggtgaaa

SEQ ID NO: 1545636 - DNA, 25 bp, Homo sapien
cagctggtggtgaaattctggatgt

SEQ ID NO: 1545637 - DNA, 25 bp, Homo sapien
attgaaggccaagccatcccgccag

SEQ ID NO: 1545638 - DNA, 25 bp, Homo sapien
aggggcacagagcaggcaggcagca

SEQ ID NO: 1545639 - DNA, 25 bp, Homo sapien
gcaggggcacagagcaggcaggcag

SEQ ID NO: 1545640 - DNA, 25 bp, Homo sapien
gggcaggggcacagagcaggcaggc

SEQ ID NO: 1545641 - DNA, 25 bp, Homo sapien
ggggcacagagcaggcaggcagcag

SEQ ID NO: 1545642 - DNA, 25 bp, Homo sapien
gctgctcagctgtgcggaaggctct

SEQ ID NO: 1545643 - DNA, 25 bp, Homo sapien
tttgctgaagtccacgagatcaggc

SEQ ID NO: 1545644 - DNA, 25 bp, Homo sapien
attggacttggtgagtttgctgaag

SEQ ID NO: 1545645 - DNA, 25 bp, Homo sapien
ttggtgagtttgctgaagtccacga

SEQ ID NO: 1545646 - DNA, 25 bp, Homo sapien
ggtagaaagagaccacgtaggtgat

SEQ ID NO: 1545647 - DNA, 25 bp, Homo sapien
cttggagaaatagtggtagaaagag

SEQ ID NO: 1545648 - DNA, 25 bp, Homo sapien
ttcccgatacgcttcccctccacag

SEQ ID NO: 1545649 - DNA, 25 bp, Homo sapien
gaaagagaccacgtaggtgatgatg

SEQ ID NO: 1545650 - DNA, 25 bp, Homo sapien
ccccacctccaatacctggtccaag

SEQ ID NO: 1545651 - DNA, 25 bp, Homo sapien
tcttccccacctccaatacctggtc

SEQ ID NO: 1545652 - DNA, 25 bp, Homo sapien
gatcttccccacctccaatacctgg

SEQ ID NO: 1545653 - DNA, 25 bp, Homo sapien
ccacctccaatacctggtccaagac

SEQ ID NO: 1545654 - DNA, 25 bp, Homo sapien
gcccacggtgcggtggatccaggcc

SEQ ID NO: 1545655 - DNA, 25 bp, Homo sapien
tccagcgtgcaataggccgtgaaag

SEQ ID NO: 1545656 - DNA, 25 bp, Homo sapien
gagttggcaaatttctgattgctga

SEQ ID NO: 1545657 - DNA, 25 bp, Homo sapien
tgcaccccacttaaggagttggcaa

SEQ ID NO: 1545658 - DNA, 25 bp, Homo sapien
aggcacgcagtttgctctggatgct

SEQ ID NO: 1545659 - DNA, 25 bp, Homo sapien
acaaagaggcgacggttgcaggcac

SEQ ID NO: 1545660 - DNA, 25 bp, Homo sapien
gccctcccgaggcacaaagaggcga

SEQ ID NO: 1545661 - DNA, 25 bp, Homo sapien
gcacgcagtttgctctggatgctga

SEQ ID NO: 1545662 - DNA, 25 bp, Homo sapien
tctccctcatagccaccttgtggtc

SEQ ID NO: 1545663 - DNA, 25 bp, Homo sapien
gaatcagctcagcccgtagggcagc

SEQ ID NO: 1545664 - DNA, 25 bp, Homo sapien
gtagggcagcctcccgctcatgctc

SEQ ID NO: 1545665 - DNA, 25 bp, Homo sapien
cagacgctggttctcattcagccag

SEQ ID NO: 1545666 - DNA, 25 bp, Homo sapien
cctggagccaagccctacaccttgt

SEQ ID NO: 1545667 - DNA, 25 bp, Homo sapien
ctggagccaagccctacaccttgta

SEQ ID NO: 1545668 - DNA, 25 bp, Homo sapien
tggagccaagccctacaccttgtac

SEQ ID NO: 1545669 - DNA, 25 bp, Homo sapien
gccacccgccggatatcgtagtagc

SEQ ID NO: 1545670 - DNA, 25 bp, Homo sapien
aaggttctgctcaagtcgtgtccgc

SEQ ID NO: 1545671 - DNA, 25 bp, Homo sapien
tcgtagtagccttcggctgccaatg

SEQ ID NO: 1545672 - DNA, 25 bp, Homo sapien
gcaatgtctgcctcgatcgcttcgt

SEQ ID NO: 1545673 - DNA, 25 bp, Homo sapien
tctgggcggcaatgtctccctccag

SEQ ID NO: 1545674 - DNA, 25 bp, Homo sapien
cagcagtccatgcttctgcaacagg

SEQ ID NO: 1545675 - DNA, 25 bp, Homo sapien
tgggcggcaatgtctccctccagca

SEQ ID NO: 1545676 - DNA, 25 bp, Homo sapien
ttctgcaacaggtcgtctgcctcca

SEQ ID NO: 1545677 - DNA, 25 bp, Homo sapien
gcagggcagcggcattgagagcctc

SEQ ID NO: 1545678 - DNA, 25 bp, Homo sapien
gcgcagggcagcggcattgagagcc

SEQ ID NO: 1545679 - DNA, 25 bp, Homo sapien
cgcagggcagcggcattgagagcct

SEQ ID NO: 1545680 - DNA, 25 bp, Homo sapien
gcactacaggcttgtatcaccgtgc

SEQ ID NO: 1545681 - DNA, 25 bp, Homo sapien
ggcactacaggcttgtatcaccgtg

SEQ ID NO: 1545682 - DNA, 25 bp, Homo sapien
agccatgcctgaggtaaaacccacc

SEQ ID NO: 1545683 - DNA, 25 bp, Homo sapien
acccttgagccatacctggatccag

SEQ ID NO: 1545684 - DNA, 25 bp, Homo sapien
tccagccatgcctgaggtaaaaccc

SEQ ID NO: 1545685 - DNA, 25 bp, Homo sapien
gtcctaaaagcacccttgagccata

SEQ ID NO: 1545686 - DNA, 25 bp, Homo sapien
cagccgtgcacgtggttcacgcggt

SEQ ID NO: 1545687 - DNA, 25 bp, Homo sapien
ttgcagatgacctgcgggtcgcagg

SEQ ID NO: 1545688 - DNA, 25 bp, Homo sapien
cgccaggcagccgtgcacgtggttc

SEQ ID NO: 1545689 - DNA, 25 bp, Homo sapien
tggttcacgcggttgcagatgacct

SEQ ID NO: 1545690 - DNA, 25 bp, Homo sapien
gctccttgtcgcgcgcccagctctc

SEQ ID NO: 1545691 - DNA, 25 bp, Homo sapien
gcccgctgttcccgctgcgcccgct

SEQ ID NO: 1545692 - DNA, 25 bp, Homo sapien
tggacaggtcatgcgcgccgcccgc

SEQ ID NO: 1545693 - DNA, 25 bp, Homo sapien
ggacaggtcatgcgcgccgcccgct

SEQ ID NO: 1545694 - DNA, 25 bp, Homo sapien
ctggacaggtcatgcgcgccgcccg

SEQ ID NO: 1545695 - DNA, 25 bp, Homo sapien
ggtcacctcagcgaacaactgctct

SEQ ID NO: 1545696 - DNA, 25 bp, Homo sapien
gacgtcgtcgagtgaatccggcaca

SEQ ID NO: 1545697 - DNA, 25 bp, Homo sapien
gtgcacctcgccaaacatgcggtag

SEQ ID NO: 1545698 - DNA, 25 bp, Homo sapien
atccggcacacgcatggagagcagc

SEQ ID NO: 1545699 - DNA, 25 bp, Homo sapien
tgtgtggttcacgtccagaacgcgg

SEQ ID NO: 1545700 - DNA, 25 bp, Homo sapien
tcaggctgttcatctcttggtccag

SEQ ID NO: 1545701 - DNA, 25 bp, Homo sapien
gtcctggcaggaacgcacctcatct

SEQ ID NO: 1545702 - DNA, 25 bp, Homo sapien
cctggactgtgtggttcacgtccag

SEQ ID NO: 1545703 - DNA, 25 bp, Homo sapien
tgcgctgttccactagctccacgat

SEQ ID NO: 1545704 - DNA, 25 bp, Homo sapien
ttcctctttgcgctgttccactagc

SEQ ID NO: 1545705 - DNA, 25 bp, Homo sapien
cagcaccgcgctcatttcctctttg

SEQ ID NO: 1545706 - DNA, 25 bp, Homo sapien
gttccactagctccacgatgcggtt

SEQ ID NO: 1545707 - DNA, 25 bp, Homo sapien
cccggggcgcgctctccacagctct

SEQ ID NO: 1545708 - DNA, 25 bp, Homo sapien
ccacagctctccgcttctcacgcac

SEQ ID NO: 1545709 - DNA, 25 bp, Homo sapien
ctccacagctctccgcttctcacgc

SEQ ID NO: 1545710 - DNA, 25 bp, Homo sapien
ctctccacagctctccgcttctcac

SEQ ID NO: 1545711 - DNA, 25 bp, Homo sapien
cagagcggcctctaggccgctaaga

SEQ ID NO: 1545712 - DNA, 25 bp, Homo sapien
agagcggcctctaggccgctaagac

SEQ ID NO: 1545713 - DNA, 25 bp, Homo sapien
tgggcgcgcacgagccagtccagga

SEQ ID NO: 1545714 - DNA, 25 bp, Homo sapien
tcgaggtcatgtaggaagcgctgca

SEQ ID NO: 1545715 - DNA, 25 bp, Homo sapien
gccagtccaggaaagcgtcgaggtc

SEQ ID NO: 1545716 - DNA, 25 bp, Homo sapien
aggcctgagccgcgctagctagcgc

SEQ ID NO: 1545717 - DNA, 25 bp, Homo sapien
ctcttctaggctgttgggcaggggc

SEQ ID NO: 1545718 - DNA, 25 bp, Homo sapien
gcaggggcccctcgctgccgcccgc

SEQ ID NO: 1545719 - DNA, 25 bp, Homo sapien
gggcaggggcccctcgctgccgccc

SEQ ID NO: 1545720 - DNA, 25 bp, Homo sapien
aggggcccctcgctgccgcccgccg

SEQ ID NO: 1545721 - DNA, 25 bp, Homo sapien
cgtagatcccgcaggaagagctggt

SEQ ID NO: 1545722 - DNA, 25 bp, Homo sapien
tggccgccacgatgcgagcatagtc

SEQ ID NO: 1545723 - DNA, 25 bp, Homo sapien
gagcatagtcttcctcgcgctggtc

SEQ ID NO: 1545724 - DNA, 25 bp, Homo sapien
cagtttatgccagccaagttcgagg

SEQ ID NO: 1545725 - DNA, 25 bp, Homo sapien
gcctcctccaccgattccactgtgc

SEQ ID NO: 1545726 - DNA, 25 bp, Homo sapien
ggagctccgcaccagacagcgccat

SEQ ID NO: 1545727 - DNA, 25 bp, Homo sapien
aagtcacggtgctgtttcaaggcct

SEQ ID NO: 1545728 - DNA, 25 bp, Homo sapien
tgagcctgctccccgtagatgttgc

SEQ ID NO: 1545729 - DNA, 25 bp, Homo sapien
aagagcaggatggataatgaggcat

SEQ ID NO: 1545730 - DNA, 25 bp, Homo sapien
gtgcctggcctctagctgctggatc

SEQ ID NO: 1545731 - DNA, 25 bp, Homo sapien
tagctgctggatctggggaggtctg

SEQ ID NO: 1545732 - DNA, 25 bp, Homo sapien
ttcccaaggagggtgcagaagagca

SEQ ID NO: 1545733 - DNA, 25 bp, Homo sapien
ctcgtggcagtctcggaggaagtgc

SEQ ID NO: 1545734 - DNA, 25 bp, Homo sapien
ggtcatgtagcttttgcatccattg

SEQ ID NO: 1545735 - DNA, 25 bp, Homo sapien
tcatgtagcttttgcatccattgct

SEQ ID NO: 1545736 - DNA, 25 bp, Homo sapien
ggcagtctcggaggaagtgctgcag

SEQ ID NO: 1545737 - DNA, 25 bp, Homo sapien
cggcagtggcgttggcggggcgtcc

SEQ ID NO: 1545738 - DNA, 25 bp, Homo sapien
gcgggtgctcgcccctcaactgcga

SEQ ID NO: 1545739 - DNA, 25 bp, Homo sapien
gcgttggcggggcgtccctgcagcg

SEQ ID NO: 1545740 - DNA, 25 bp, Homo sapien
gggcgggtgctcgcccctcaactgc

SEQ ID NO: 1545741 - DNA, 25 bp, Homo sapien
tcttagaagtccccccgcttcgctc

SEQ ID NO: 1545742 - DNA, 25 bp, Homo sapien
ttgtggttgtcctcccgcgtgccat

SEQ ID NO: 1545743 - DNA, 25 bp, Homo sapien
ggagccatctcttatgcagcttgtg

SEQ ID NO: 1545744 - DNA, 25 bp, Homo sapien
gtgccggagccatctcttatgcagc

SEQ ID NO: 1545745 - DNA, 25 bp, Homo sapien
atgaatgcctggtgccggagccatc

SEQ ID NO: 1545746 - DNA, 25 bp, Homo sapien
tggtctgctttgctggcctcaaaga

SEQ ID NO: 1545747 - DNA, 25 bp, Homo sapien
tccagggtccacgtcttgcagctgg

SEQ ID NO: 1545748 - DNA, 25 bp, Homo sapien
ttctcctgcatcagttgctggccct

SEQ ID NO: 1545749 - DNA, 25 bp, Homo sapien
gcctcaaagagctgccgtgccttgg

SEQ ID NO: 1545750 - DNA, 25 bp, Homo sapien
ctcatctgggccaggaagaccatac

SEQ ID NO: 1545751 - DNA, 25 bp, Homo sapien
gagccctcatctgggccaggaagac

SEQ ID NO: 1545752 - DNA, 25 bp, Homo sapien
gccctcatctgggccaggaagacca

SEQ ID NO: 1545753 - DNA, 25 bp, Homo sapien
cctcatctgggccaggaagaccata

SEQ ID NO: 1545754 - DNA, 25 bp, Homo sapien
gagttcagtgagtgcttggcccaga

SEQ ID NO: 1545755 - DNA, 25 bp, Homo sapien
tcagggtcctgtgaaacctttagca

SEQ ID NO: 1545756 - DNA, 25 bp, Homo sapien
tgttattccatgcaaagccattccc

SEQ ID NO: 1545757 - DNA, 25 bp, Homo sapien
cctactgctttgtggctctagatcc

SEQ ID NO: 1545758 - DNA, 25 bp, Homo sapien
tatccagacgtggtggtatgcgctt

SEQ ID NO: 1545759 - DNA, 25 bp, Homo sapien
aagattatccagacgtggtggtatg

SEQ ID NO: 1545760 - DNA, 25 bp, Homo sapien
atttaaaaagattatccagacgtgg

SEQ ID NO: 1545761 - DNA, 25 bp, Homo sapien
agacgtggtggtatgcgcttgtggt

SEQ ID NO: 1545762 - DNA, 25 bp, Homo sapien
ggcgctcctgcaacggctcgagcag

SEQ ID NO: 1545763 - DNA, 25 bp, Homo sapien
tggtgcaactccttggaagccagca

SEQ ID NO: 1545764 - DNA, 25 bp, Homo sapien
tcgtccaggtcgtgcgccacctggt

SEQ ID NO: 1545765 - DNA, 25 bp, Homo sapien
tcctgcaacggctcgagcaggcgca

SEQ ID NO: 1545766 - DNA, 25 bp, Homo sapien
ctctgtctgcatggccagtggcagc

SEQ ID NO: 1545767 - DNA, 25 bp, Homo sapien
gatgtgctgctggaccgcctgcaaa

SEQ ID NO: 1545768 - DNA, 25 bp, Homo sapien
gcaaaccgttgcctcgctctgtctg

SEQ ID NO: 1545769 - DNA, 25 bp, Homo sapien
tgctggaccgcctgcaaaccgttgc

SEQ ID NO: 1545770 - DNA, 25 bp, Homo sapien
aggccccggcgcactgcctctgcct

SEQ ID NO: 1545771 - DNA, 25 bp, Homo sapien
aggcgcggcccatgcgcctggatct

SEQ ID NO: 1545772 - DNA, 25 bp, Homo sapien
acctcagccacgtcgaagtagtact

SEQ ID NO: 1545773 - DNA, 25 bp, Homo sapien
ctccgggctgcgcagcgacgccagc

SEQ ID NO: 1545774 - DNA, 25 bp, Homo sapien
ctgggggcacaaagcgcccacgatg

SEQ ID NO: 1545775 - DNA, 25 bp, Homo sapien
acaaagcgcccacgatgaggcggca

SEQ ID NO: 1545776 - DNA, 25 bp, Homo sapien
aaagcgcccacgatgaggcggcagc

SEQ ID NO: 1545777 - DNA, 25 bp, Homo sapien
gggcacaaagcgcccacgatgaggc

SEQ ID NO: 1545778 - DNA, 25 bp, Homo sapien
agcgcccggcactggcgcgacagct

SEQ ID NO: 1545779 - DNA, 25 bp, Homo sapien
gcgcgatgctttcctcgtagttctc

SEQ ID NO: 1545780 - DNA, 25 bp, Homo sapien
tggcgcgacagctgcgcgatgcttt

SEQ ID NO: 1545781 - DNA, 25 bp, Homo sapien
cgtagttctccacgccttgctccag

SEQ ID NO: 1545782 - DNA, 25 bp, Homo sapien
gtacaggcggtccacctgagactgc

SEQ ID NO: 1545783 - DNA, 25 bp, Homo sapien
tccttgagcgccacgtacaggcggt

SEQ ID NO: 1545784 - DNA, 25 bp, Homo sapien
gcaatccagtgctcaagctcgctca

SEQ ID NO: 1545785 - DNA, 25 bp, Homo sapien
gagacatgctcaaagtcctggccga

SEQ ID NO: 1545786 - DNA, 25 bp, Homo sapien
catctggttcacagctgccagccgt

SEQ ID NO: 1545787 - DNA, 25 bp, Homo sapien
tgtatggccacactcgatcagctca

SEQ ID NO: 1545788 - DNA, 25 bp, Homo sapien
gaacttatgaagctcccgagaggcg

SEQ ID NO: 1545789 - DNA, 25 bp, Homo sapien
aatctgtccctgaagctctcgggcg

SEQ ID NO: 1545790 - DNA, 25 bp, Homo sapien
ctgccctgatggccaccggcgcccc

SEQ ID NO: 1545791 - DNA, 25 bp, Homo sapien
gccctgatggccaccggcgccccac

SEQ ID NO: 1545792 - DNA, 25 bp, Homo sapien
tgccctgatggccaccggcgcccca

SEQ ID NO: 1545793 - DNA, 25 bp, Homo sapien
agctgacatgcaggcgggcatcctc

SEQ ID NO: 1545794 - DNA, 25 bp, Homo sapien
gcaggtcgcggacttggctgtggaa

SEQ ID NO: 1545795 - DNA, 25 bp, Homo sapien
cggctgccccaatctggctggcgat

SEQ ID NO: 1545796 - DNA, 25 bp, Homo sapien
ccggctagcgatggcctcggcatgt

SEQ ID NO: 1545797 - DNA, 25 bp, Homo sapien
tcattccattgagaagggggctgtc

SEQ ID NO: 1545798 - DNA, 25 bp, Homo sapien
gaagggggctgtcaatgggctgggg

SEQ ID NO: 1545799 - DNA, 25 bp, Homo sapien
cagggggaggcaggaagcccgagga

SEQ ID NO: 1545800 - DNA, 25 bp, Homo sapien
aagcccgaggagggatgaggggcac

SEQ ID NO: 1545801 - DNA, 25 bp, Homo sapien
gtctgaatacacacgaagcacctag

SEQ ID NO: 1545802 - DNA, 25 bp, Homo sapien
cacagaggcgccacacagatattgg

SEQ ID NO: 1545803 - DNA, 25 bp, Homo sapien
taataataggcaactgggaaggaca

SEQ ID NO: 1545804 - DNA, 25 bp, Homo sapien
tgtttcatgctgtgacatcccatgg

SEQ ID NO: 1545805 - DNA, 25 bp, Homo sapien
ctcatcagccatggcacttttgttg

SEQ ID NO: 1545806 - DNA, 25 bp, Homo sapien
atgagcacctccactgatgacacgt

SEQ ID NO: 1545807 - DNA, 25 bp, Homo sapien
ttcaggccctggtggtagttcatga

SEQ ID NO: 1545808 - DNA, 25 bp, Homo sapien
aggtggtcagctcaggcacccgcgc

SEQ ID NO: 1545809 - DNA, 25 bp, Homo sapien
caatggcggtcccacttttccgaca

SEQ ID NO: 1545810 - DNA, 25 bp, Homo sapien
gctgcagccactcccaatggcggtc

SEQ ID NO: 1545811 - DNA, 25 bp, Homo sapien
cttttccgacacctcctccttcctg

SEQ ID NO: 1545812 - DNA, 25 bp, Homo sapien
gccactcccaatggcggtcccactt

SEQ ID NO: 1545813 - DNA, 25 bp, Homo sapien
gaaggcctcatgtcgccggataagc

SEQ ID NO: 1545814 - DNA, 25 bp, Homo sapien
tgtcgccggataagctgctccacct

SEQ ID NO: 1545815 - DNA, 25 bp, Homo sapien
agctcccggctctgcaggagcggct

SEQ ID NO: 1545816 - DNA, 25 bp, Homo sapien
tttgcggaaggcctcatgtcgccgg

SEQ ID NO: 1545817 - DNA, 25 bp, Homo sapien
tggtcaggcgccgcagagagctgaa

SEQ ID NO: 1545818 - DNA, 25 bp, Homo sapien
cgtggtcaggcgccgcagagagctg

SEQ ID NO: 1545819 - DNA, 25 bp, Homo sapien
ggtcaggcgccgcagagagctgaac

SEQ ID NO: 1545820 - DNA, 25 bp, Homo sapien
gtcaggcgccgcagagagctgaacc

SEQ ID NO: 1545821 - DNA, 25 bp, Homo sapien
agacggcttctcagtatgttgccaa

SEQ ID NO: 1545822 - DNA, 25 bp, Homo sapien
tggtagagacggcttctcagtatgt

SEQ ID NO: 1545823 - DNA, 25 bp, Homo sapien
ggttttggtagagacggcttctcag

SEQ ID NO: 1545824 - DNA, 25 bp, Homo sapien
gagacggcttctcagtatgttgcca

SEQ ID NO: 1545825 - DNA, 25 bp, Homo sapien
ctggagtgcaagcagcaagatcata

SEQ ID NO: 1545826 - DNA, 25 bp, Homo sapien
agtgatcctcgagtctcagtcaccc

SEQ ID NO: 1545827 - DNA, 25 bp, Homo sapien
gagtctcagtcacccctctgagtag

SEQ ID NO: 1545828 - DNA, 25 bp, Homo sapien
gatcctcgagtctcagtcacccctc

SEQ ID NO: 1545829 - DNA, 25 bp, Homo sapien
aaagaacttgcgccccagcagtggg

SEQ ID NO: 1545830 - DNA, 25 bp, Homo sapien
tggggtaggcggctgcttgctctgt

SEQ ID NO: 1545831 - DNA, 25 bp, Homo sapien
agagcgtgtccgaggctcggcgggc

SEQ ID NO: 1545832 - DNA, 25 bp, Homo sapien
tctgttccgctttgattttctcgat

SEQ ID NO: 1545833 - DNA, 25 bp, Homo sapien
gattgatcgactgactcttgccgct

SEQ ID NO: 1545834 - DNA, 25 bp, Homo sapien
tcatagcggcccagggtaaggctgt

SEQ ID NO: 1545835 - DNA, 25 bp, Homo sapien
ttgaccaggtctcctctgatgggca

SEQ ID NO: 1545836 - DNA, 25 bp, Homo sapien
gatgggcatctcctgttcgctggac

SEQ ID NO: 1545837 - DNA, 25 bp, Homo sapien
gttccacaatgtcagccagggtggc

SEQ ID NO: 1545838 - DNA, 25 bp, Homo sapien
tgttccacaatgtcagccagggtgg

SEQ ID NO: 1545839 - DNA, 25 bp, Homo sapien
tccacaatgtcagccagggtggcct

SEQ ID NO: 1545840 - DNA, 25 bp, Homo sapien
ttccacaatgtcagccagggtggcc

SEQ ID NO: 1545841 - DNA, 25 bp, Homo sapien
ctcaagcccgttgggcaggcgacct

SEQ ID NO: 1545842 - DNA, 25 bp, Homo sapien
cggtccggccgaggtgtccgctcgg

SEQ ID NO: 1545843 - DNA, 25 bp, Homo sapien
cgaggtgtccgctcgggcagctcaa

SEQ ID NO: 1545844 - DNA, 25 bp, Homo sapien
aagctcgcgtggctgaggcagcgac

SEQ ID NO: 1545845 - DNA, 25 bp, Homo sapien
cgcttgcgcagtaggaagccctcgt

SEQ ID NO: 1545846 - DNA, 25 bp, Homo sapien
ttagcgtcgagctcgcgcttgcgca

SEQ ID NO: 1545847 - DNA, 25 bp, Homo sapien
cggttggacgacttgcggttagcgt

SEQ ID NO: 1545848 - DNA, 25 bp, Homo sapien
gcttgcgcagtaggaagccctcgtg

SEQ ID NO: 1545849 - DNA, 25 bp, Homo sapien
tttcagaacattttccttctgttcc

SEQ ID NO: 1545850 - DNA, 25 bp, Homo sapien
tcagaacattttccttctgttccca

SEQ ID NO: 1545851 - DNA, 25 bp, Homo sapien
cattttccttctgttcccacctaag

SEQ ID NO: 1545852 - DNA, 25 bp, Homo sapien
cagaacattttccttctgttcccac

SEQ ID NO: 1545853 - DNA, 25 bp, Homo sapien
tcagttggacaaaaagagggtggac

SEQ ID NO: 1545854 - DNA, 25 bp, Homo sapien
caagagcaggcacatcatggctaga

SEQ ID NO: 1545855 - DNA, 25 bp, Homo sapien
catggctagaccctcatttggaaac

SEQ ID NO: 1545856 - DNA, 25 bp, Homo sapien
tagttgcgccctagttggacctaaa

SEQ ID NO: 1545857 - DNA, 25 bp, Homo sapien
gagtccttgtagaagcccagttccc

SEQ ID NO: 1545858 - DNA, 25 bp, Homo sapien
gctgagcagcggttccccaccgtgt

SEQ ID NO: 1545859 - DNA, 25 bp, Homo sapien
tgtgctcccggatgccgggcccttg

SEQ ID NO: 1545860 - DNA, 25 bp, Homo sapien
ttgtagtcactagccacctcgctgg

SEQ ID NO: 1545861 - DNA, 25 bp, Homo sapien
ccagggtcccactgggagttgaagc

SEQ ID NO: 1545862 - DNA, 25 bp, Homo sapien
gagccttggatccctccctcctgcc

SEQ ID NO: 1545863 - DNA, 25 bp, Homo sapien
atcttttgcctggagcaaaaactca

SEQ ID NO: 1545864 - DNA, 25 bp, Homo sapien
gcctggagcaaaaactcactgccat

SEQ ID NO: 1545865 - DNA, 25 bp, Homo sapien
ctggagcaaaaactcactgccatcc

SEQ ID NO: 1545866 - DNA, 25 bp, Homo sapien
tttgcctggagcaaaaactcactgc

SEQ ID NO: 1545867 - DNA, 25 bp, Homo sapien
gtcattactgaggtccacacagagg

SEQ ID NO: 1545868 - DNA, 25 bp, Homo sapien
gacagccaggtcattactgaggtcc

SEQ ID NO: 1545869 - DNA, 25 bp, Homo sapien
ggtcattactgaggtccacacagag

SEQ ID NO: 1545870 - DNA, 25 bp, Homo sapien
gccaggtcattactgaggtccacac

SEQ ID NO: 1545871 - DNA, 25 bp, Homo sapien
acggcaaagatgttggactttgtca

SEQ ID NO: 1545872 - DNA, 25 bp, Homo sapien
ggactttgtcatcaggatctgcagg

SEQ ID NO: 1545873 - DNA, 25 bp, Homo sapien
tggactttgtcatcaggatctgcag

SEQ ID NO: 1545874 - DNA, 25 bp, Homo sapien
accacggcaaagatgttggactttg

SEQ ID NO: 1545875 - DNA, 25 bp, Homo sapien
aagtagtgggtagtgtctggcccca

SEQ ID NO: 1545876 - DNA, 25 bp, Homo sapien
atctctgcgtgttccgccaccgagg

SEQ ID NO: 1545877 - DNA, 25 bp, Homo sapien
cctcttagggttgccctcatctgtg

SEQ ID NO: 1545878 - DNA, 25 bp, Homo sapien
ccaccgaggaagctacagcctccag

SEQ ID NO: 1545879 - DNA, 25 bp, Homo sapien
catgtcacgcgtcctcagtgttgga

SEQ ID NO: 1545880 - DNA, 25 bp, Homo sapien
gaaaaagtgtctttgtgcccacagt

SEQ ID NO: 1545881 - DNA, 25 bp, Homo sapien
ggagacgagatgtgtcaggtcctgg

SEQ ID NO: 1545882 - DNA, 25 bp, Homo sapien
ccgagatatggctataggggcagca

SEQ ID NO: 1545883 - DNA, 25 bp, Homo sapien
gttttgagctttgacgcccctccca

SEQ ID NO: 1545884 - DNA, 25 bp, Homo sapien
tcccctcatgaagtggcatttacaa

SEQ ID NO: 1545885 - DNA, 25 bp, Homo sapien
gaattaaccgcatggctctgaggcg

SEQ ID NO: 1545886 - DNA, 25 bp, Homo sapien
cattaaaagccttcgcggatgcggg

SEQ ID NO: 1545887 - DNA, 25 bp, Homo sapien
gctggcccgcacccacttccgggtg

SEQ ID NO: 1545888 - DNA, 25 bp, Homo sapien
gcccgcacccacttccgggtgtgca

SEQ ID NO: 1545889 - DNA, 25 bp, Homo sapien
ccggaccccgcctccataggctgct

SEQ ID NO: 1545890 - DNA, 25 bp, Homo sapien
tggcccgcacccacttccgggtgtg

SEQ ID NO: 1545891 - DNA, 25 bp, Homo sapien
ccctcggctgcagtagccgctgctg

SEQ ID NO: 1545892 - DNA, 25 bp, Homo sapien
agatgaatgacttccccgggaggcc

SEQ ID NO: 1545893 - DNA, 25 bp, Homo sapien
cattcagatgaatgacttccccggg

SEQ ID NO: 1545894 - DNA, 25 bp, Homo sapien
tcccacattcagatgaatgacttcc

SEQ ID NO: 1545895 - DNA, 25 bp, Homo sapien
gcgggtgaggaatgcgtccccctcc

SEQ ID NO: 1545896 - DNA, 25 bp, Homo sapien
aggagcgggtgaggaatgcgtcccc

SEQ ID NO: 1545897 - DNA, 25 bp, Homo sapien
caagagatgaagaggagcgggtgag

SEQ ID NO: 1545898 - DNA, 25 bp, Homo sapien
gaaggtaaacggacgcaagagatga

SEQ ID NO: 1545899 - DNA, 25 bp, Homo sapien
aggtgagagtctggcgagaggtact

SEQ ID NO: 1545900 - DNA, 25 bp, Homo sapien
ccaggtgagagtctggcgagaggta

SEQ ID NO: 1545901 - DNA, 25 bp, Homo sapien
gtgagagtctggcgagaggtactga

SEQ ID NO: 1545902 - DNA, 25 bp, Homo sapien
gagagtctggcgagaggtactgaat

SEQ ID NO: 1545903 - DNA, 25 bp, Homo sapien
ctcgccccaaactcgctctcccgat

SEQ ID NO: 1545904 - DNA, 25 bp, Homo sapien
gccccaaactcgctctcccgatcac

SEQ ID NO: 1545905 - DNA, 25 bp, Homo sapien
tcgccccaaactcgctctcccgatc

SEQ ID NO: 1545906 - DNA, 25 bp, Homo sapien
cctcgccccaaactcgctctcccga

SEQ ID NO: 1545907 - DNA, 25 bp, Homo sapien
caccgagcaggcgtcacgggccggg

SEQ ID NO: 1545908 - DNA, 25 bp, Homo sapien
ggatattaggtctcccacgccctct

SEQ ID NO: 1545909 - DNA, 25 bp, Homo sapien
gagtggatattaggtctcccacgcc

SEQ ID NO: 1545910 - DNA, 25 bp, Homo sapien
gggagtggatattaggtctcccacg

SEQ ID NO: 1545911 - DNA, 25 bp, Homo sapien
tcatctttcagcgtcgagatgcgtc

SEQ ID NO: 1545912 - DNA, 25 bp, Homo sapien
tctttcagcgtcgagatgcgtccgc

SEQ ID NO: 1545913 - DNA, 25 bp, Homo sapien
tcagcgtcgagatgcgtccgctcag

SEQ ID NO: 1545914 - DNA, 25 bp, Homo sapien
cgtcgagatgcgtccgctcagaaga

SEQ ID NO: 1545915 - DNA, 25 bp, Homo sapien
ccccatcccatttcagttcttgtcc

SEQ ID NO: 1545916 - DNA, 25 bp, Homo sapien
ctgagtggggtcctgcccctcttcc

SEQ ID NO: 1545917 - DNA, 25 bp, Homo sapien
catcccatttcagttcttgtccgac

SEQ ID NO: 1545918 - DNA, 25 bp, Homo sapien
ccatcccatttcagttcttgtccga

SEQ ID NO: 1545919 - DNA, 25 bp, Homo sapien
gatccaactctttggtgcgcaggaa

SEQ ID NO: 1545920 - DNA, 25 bp, Homo sapien
ctgtagggtccctgtcgatgaagat

SEQ ID NO: 1545921 - DNA, 25 bp, Homo sapien
tgggatccaactctttggtgcgcag

SEQ ID NO: 1545922 - DNA, 25 bp, Homo sapien
aagactgtagggtccctgtcgatga

SEQ ID NO: 1545923 - DNA, 25 bp, Homo sapien
agacagtgagggactccctcccctt

SEQ ID NO: 1545924 - DNA, 25 bp, Homo sapien
gactccctcccctttttccatgcca

SEQ ID NO: 1545925 - DNA, 25 bp, Homo sapien
aagacagtgagggactccctcccct

SEQ ID NO: 1545926 - DNA, 25 bp, Homo sapien
ctgggtagtagaattgactagaggt

SEQ ID NO: 1545927 - DNA, 25 bp, Homo sapien
gggtagtagaattgactagaggtca

SEQ ID NO: 1545928 - DNA, 25 bp, Homo sapien
gtagtagaattgactagaggtcagg

SEQ ID NO: 1545929 - DNA, 25 bp, Homo sapien
tagtagaattgactagaggtcaggg

SEQ ID NO: 1545930 - DNA, 25 bp, Homo sapien
agtgagcccatagaactgggcttca

SEQ ID NO: 1545931 - DNA, 25 bp, Homo sapien
ccagaggagtgagcccatagaactg

SEQ ID NO: 1545932 - DNA, 25 bp, Homo sapien
catggaggaggctggaaccgtggac

SEQ ID NO: 1545933 - DNA, 25 bp, Homo sapien
gaggaggctggaaccgtggacaccc

SEQ ID NO: 1545934 - DNA, 25 bp, Homo sapien
aagaagatcgatccaactcctctcg

SEQ ID NO: 1545935 - DNA, 25 bp, Homo sapien
tcctctcgaagctgcaggcgacgaa

SEQ ID NO: 1545936 - DNA, 25 bp, Homo sapien
gaggacgtttccacaagaagatcga

SEQ ID NO: 1545937 - DNA, 25 bp, Homo sapien
gcggcaggtaaccattgaagaggac

SEQ ID NO: 1545938 - DNA, 25 bp, Homo sapien
gagtaacagtcattgtaatcgtggc

SEQ ID NO: 1545939 - DNA, 25 bp, Homo sapien
gtaatcgtggctgtcacacagcaag

SEQ ID NO: 1545940 - DNA, 25 bp, Homo sapien
gcacttaaaatatgacggtgattga

SEQ ID NO: 1545941 - DNA, 25 bp, Homo sapien
gagaataagaggtagagtaacagtc

SEQ ID NO: 1545942 - DNA, 25 bp, Homo sapien
gggcatcgtgttgctccgtcggaca

SEQ ID NO: 1545943 - DNA, 25 bp, Homo sapien
cggttccgccgcttcactgggaaca

SEQ ID NO: 1545944 - DNA, 25 bp, Homo sapien
tctcatccagcattcggcccagcag

SEQ ID NO: 1545945 - DNA, 25 bp, Homo sapien
gccccactaggctgtgccggttccg

SEQ ID NO: 1545946 - DNA, 25 bp, Homo sapien
tgccccaaccttccacgagatagaa

SEQ ID NO: 1545947 - DNA, 25 bp, Homo sapien
caaccttccacgagatagaaacgta

SEQ ID NO: 1545948 - DNA, 25 bp, Homo sapien
gaagagtagggatcagaagagggtc

SEQ ID NO: 1545949 - DNA, 25 bp, Homo sapien
gagtagggatcagaagagggtcaca

SEQ ID NO: 1545950 - DNA, 25 bp, Homo sapien
gatccaattatggtgtccacacacc

SEQ ID NO: 1545951 - DNA, 25 bp, Homo sapien
gggtataggccacagcgatccaatt

SEQ ID NO: 1545952 - DNA, 25 bp, Homo sapien
gaaactgggtataggccacagcgat

SEQ ID NO: 1545953 - DNA, 25 bp, Homo sapien
ctgtagcagactagaaactgggtat

SEQ ID NO: 1545954 - DNA, 25 bp, Homo sapien
cagtcgttcgatgggccagtccagg

SEQ ID NO: 1545955 - DNA, 25 bp, Homo sapien
acccgggctgtgagcgccagtcgtt

SEQ ID NO: 1545956 - DNA, 25 bp, Homo sapien
atcttgtcatgttcacccaaagccc

SEQ ID NO: 1545957 - DNA, 25 bp, Homo sapien
catagcaggatctcgctgccggtgg

SEQ ID NO: 1545958 - DNA, 25 bp, Homo sapien
gctggttcccgacgaagaacaaggc

SEQ ID NO: 1545959 - DNA, 25 bp, Homo sapien
tgagctggttcccgacgaagaacaa

SEQ ID NO: 1545960 - DNA, 25 bp, Homo sapien
aatgagctggttcccgacgaagaac

SEQ ID NO: 1545961 - DNA, 25 bp, Homo sapien
gagctggttcccgacgaagaacaag

SEQ ID NO: 1545962 - DNA, 25 bp, Homo sapien
ctgccagtgcttggtgacggcattc

SEQ ID NO: 1545963 - DNA, 25 bp, Homo sapien
ttggtgacggcattccacaccccga

SEQ ID NO: 1545964 - DNA, 25 bp, Homo sapien
acggcattccacaccccgatgcgcc

SEQ ID NO: 1545965 - DNA, 25 bp, Homo sapien
gccagtgcttggtgacggcattcca

SEQ ID NO: 1545966 - DNA, 25 bp, Homo sapien
cagccaggctggccagaactctgac

SEQ ID NO: 1545967 - DNA, 25 bp, Homo sapien
ggcagccaggctggccagaactctg

SEQ ID NO: 1545968 - DNA, 25 bp, Homo sapien
ggggcagccaggctggccagaactc

SEQ ID NO: 1545969 - DNA, 25 bp, Homo sapien
gggcagccaggctggccagaactct

SEQ ID NO: 1545970 - DNA, 25 bp, Homo sapien
aatggagccgttgttgcagcccagg

SEQ ID NO: 1545971 - DNA, 25 bp, Homo sapien
gaggaaggagcctgccgcgtcataa

SEQ ID NO: 1545972 - DNA, 25 bp, Homo sapien
gcctgccgcgtcataactggtgatg

SEQ ID NO: 1545973 - DNA, 25 bp, Homo sapien
ccacgtagtaaatggagccgttgtt

SEQ ID NO: 1545974 - DNA, 25 bp, Homo sapien
gcggtgaccccatcctccgctgggt

SEQ ID NO: 1545975 - DNA, 25 bp, Homo sapien
tagagctcgctgacaaggaggtcgt

SEQ ID NO: 1545976 - DNA, 25 bp, Homo sapien
ggtcgttgtctttcatgcgcaaggg

SEQ ID NO: 1545977 - DNA, 25 bp, Homo sapien
tgggtcccgatagagctcgctgaca

SEQ ID NO: 1545978 - DNA, 25 bp, Homo sapien
cacagagacagaaaccagggcaggg

SEQ ID NO: 1545979 - DNA, 25 bp, Homo sapien
ggccacagagacagaaaccagggca

SEQ ID NO: 1545980 - DNA, 25 bp, Homo sapien
ctggtgaggggccaaggatgaggag

SEQ ID NO: 1545981 - DNA, 25 bp, Homo sapien
gtgaggggccaaggatgaggagagg

SEQ ID NO: 1545982 - DNA, 25 bp, Homo sapien
gatgaggtgcttctccgacagcatg

SEQ ID NO: 1545983 - DNA, 25 bp, Homo sapien
tgagctggtgccataggcgatctcg

SEQ ID NO: 1545984 - DNA, 25 bp, Homo sapien
gctgcggtgcacagtgaaggtctgg

SEQ ID NO: 1545985 - DNA, 25 bp, Homo sapien
cagtctccgggtgctgcacgatgac

SEQ ID NO: 1545986 - DNA, 25 bp, Homo sapien
cacctgcctggaccgtatcagcacg

SEQ ID NO: 1545987 - DNA, 25 bp, Homo sapien
ctgcctggaccgtatcagcacgccc

SEQ ID NO: 1545988 - DNA, 25 bp, Homo sapien
gaccgtatcagcacgcccctcccag

SEQ ID NO: 1545989 - DNA, 25 bp, Homo sapien
gcctggaccgtatcagcacgcccct

SEQ ID NO: 1545990 - DNA, 25 bp, Homo sapien
agagcctgatctcaccttgccctat

SEQ ID NO: 1545991 - DNA, 25 bp, Homo sapien
caaaactgttccagagcctgatctc

SEQ ID NO: 1545992 - DNA, 25 bp, Homo sapien
ctccaaaactgttccagagcctgat

SEQ ID NO: 1545993 - DNA, 25 bp, Homo sapien
tgttaaaaaccctgttgcctctgcc

SEQ ID NO: 1545994 - DNA, 25 bp, Homo sapien
tccagagccaggatcttaaaggaag

SEQ ID NO: 1545995 - DNA, 25 bp, Homo sapien
cgcacgtggttgttgtcggcacaga

SEQ ID NO: 1545996 - DNA, 25 bp, Homo sapien
gtcacagaccatgtccgcacgtggt

SEQ ID NO: 1545997 - DNA, 25 bp, Homo sapien
gctgggtggaaatcatgccgcggaa

SEQ ID NO: 1545998 - DNA, 25 bp, Homo sapien
tggcactgggcaccaccttctggat

SEQ ID NO: 1545999 - DNA, 25 bp, Homo sapien
cccagtagatgagagacgcacgaag

SEQ ID NO: 1546000 - DNA, 25 bp, Homo sapien
acgcacgaagagctggctggcactg

SEQ ID NO: 1546001 - DNA, 25 bp, Homo sapien
atgagagacgcacgaagagctggct

SEQ ID NO: 1546002 - DNA, 25 bp, Homo sapien
tgggtgagccgtccacggagcgcac

SEQ ID NO: 1546003 - DNA, 25 bp, Homo sapien
gaaggctgtcgtgggtgagccgtcc

SEQ ID NO: 1546004 - DNA, 25 bp, Homo sapien
tccagcactgtgaaggctgtcgtgg

SEQ ID NO: 1546005 - DNA, 25 bp, Homo sapien
ctccagcactgtgaaggctgtcgtg

SEQ ID NO: 1546006 - DNA, 25 bp, Homo sapien
tggccagtgagcaggtagcgccggg

SEQ ID NO: 1546007 - DNA, 25 bp, Homo sapien
gggccgagagccgagccgccgggag

SEQ ID NO: 1546008 - DNA, 25 bp, Homo sapien
ctgccgttggcctggccagtgagca

SEQ ID NO: 1546009 - DNA, 25 bp, Homo sapien
ggccaagctgccgttggcctggcca

SEQ ID NO: 1546010 - DNA, 25 bp, Homo sapien
gaggccgtccatggcggtggttagg

SEQ ID NO: 1546011 - DNA, 25 bp, Homo sapien
ctggccgaggccgtccatggcggtg

SEQ ID NO: 1546012 - DNA, 25 bp, Homo sapien
ggccgaggccgtccatggcggtggt

SEQ ID NO: 1546013 - DNA, 25 bp, Homo sapien
ccgaggccgtccatggcggtggtta

SEQ ID NO: 1546014 - DNA, 25 bp, Homo sapien
gggccagctcacagtgttccagctg

SEQ ID NO: 1546015 - DNA, 25 bp, Homo sapien
atcagctcttgctccgtcaggccac

SEQ ID NO: 1546016 - DNA, 25 bp, Homo sapien
tccagctgttccatcagctcttgct

SEQ ID NO: 1546017 - DNA, 25 bp, Homo sapien
gagacagccccatgagggagctgaa

SEQ ID NO: 1546018 - DNA, 25 bp, Homo sapien
cagttcctggcagcgttccacaaag

SEQ ID NO: 1546019 - DNA, 25 bp, Homo sapien
tcctggcagcgttccacaaagctgc

SEQ ID NO: 1546020 - DNA, 25 bp, Homo sapien
gcttgggctcccacggtggccagac

SEQ ID NO: 1546021 - DNA, 25 bp, Homo sapien
tcccacggtggccagacaaggaggt

SEQ ID NO: 1546022 - DNA, 25 bp, Homo sapien
ggggagtgccgagaccgctggaggg

SEQ ID NO: 1546023 - DNA, 25 bp, Homo sapien
gtgtgaggggagtgccgagaccgct

SEQ ID NO: 1546024 - DNA, 25 bp, Homo sapien
tggccgtcggaggtctggcccactc

SEQ ID NO: 1546025 - DNA, 25 bp, Homo sapien
gctggtgtgggtggccgtcggaggt

SEQ ID NO: 1546026 - DNA, 25 bp, Homo sapien
agggcatcccaaggcatcatggcag

SEQ ID NO: 1546027 - DNA, 25 bp, Homo sapien
cccacaggaatcagggaggcacctg

SEQ ID NO: 1546028 - DNA, 25 bp, Homo sapien
accagggcatcccaaggcatcatgg

SEQ ID NO: 1546029 - DNA, 25 bp, Homo sapien
ccacaggaatcagggaggcacctga

SEQ ID NO: 1546030 - DNA, 25 bp, Homo sapien
tagatttcctagtaatccaggttcc

SEQ ID NO: 1546031 - DNA, 25 bp, Homo sapien
gaagggcggatagtccaggatctct

SEQ ID NO: 1546032 - DNA, 25 bp, Homo sapien
tggcatgcaagatattcctaccggt

SEQ ID NO: 1546033 - DNA, 25 bp, Homo sapien
gattcatgggtatgaactccccttg

SEQ ID NO: 1546034 - DNA, 25 bp, Homo sapien
tccggaatctcctgccattatggat

SEQ ID NO: 1546035 - DNA, 25 bp, Homo sapien
gccattatggatttcttggaacgca

SEQ ID NO: 1546036 - DNA, 25 bp, Homo sapien
gaacgcaaacaaaccttccagtgct

SEQ ID NO: 1546037 - DNA, 25 bp, Homo sapien
gttccagattctctgataatccgga

SEQ ID NO: 1546038 - DNA, 25 bp, Homo sapien
cagaaatctgggtccagcaccgtcc

SEQ ID NO: 1546039 - DNA, 25 bp, Homo sapien
tgccacctacagcaatccatgcctc

SEQ ID NO: 1546040 - DNA, 25 bp, Homo sapien
tccatcccacactgacacccagaaa

SEQ ID NO: 1546041 - DNA, 25 bp, Homo sapien
ttactgccacctacagcaatccatg

SEQ ID NO: 1546042 - DNA, 25 bp, Homo sapien
gatactggctccgtgaaccttctcg

SEQ ID NO: 1546043 - DNA, 25 bp, Homo sapien
accttctcgtggaacagaggtccca

SEQ ID NO: 1546044 - DNA, 25 bp, Homo sapien
gggaaattaggactcggatactggc

SEQ ID NO: 1546045 - DNA, 25 bp, Homo sapien
agcagggacaggtgccggactaggg

SEQ ID NO: 1546046 - DNA, 25 bp, Homo sapien
atcgtgtcgggcgccgagtcccgct

SEQ ID NO: 1546047 - DNA, 25 bp, Homo sapien
gtccagcgggtcaggctagccccgg

SEQ ID NO: 1546048 - DNA, 25 bp, Homo sapien
tccgggcgggcggtctgtccagcgg

SEQ ID NO: 1546049 - DNA, 25 bp, Homo sapien
ccgctggtgccaggcctcggcatcg

SEQ ID NO: 1546050 - DNA, 25 bp, Homo sapien
ggacctcgacgacctggctggggct

SEQ ID NO: 1546051 - DNA, 25 bp, Homo sapien
ccccgggacctcgacgacctggctg

SEQ ID NO: 1546052 - DNA, 25 bp, Homo sapien
ccgggacctcgacgacctggctggg

SEQ ID NO: 1546053 - DNA, 25 bp, Homo sapien
cgggacctcgacgacctggctgggg

SEQ ID NO: 1546054 - DNA, 25 bp, Homo sapien
gcagtgggttcgagtttcccctgaa

SEQ ID NO: 1546055 - DNA, 25 bp, Homo sapien
tgcatctccacatcgaagcagtggg

SEQ ID NO: 1546056 - DNA, 25 bp, Homo sapien
tgagggcgcctaataaatccaaggg

SEQ ID NO: 1546057 - DNA, 25 bp, Homo sapien
aattgagggcgcctaataaatccaa

SEQ ID NO: 1546058 - DNA, 25 bp, Homo sapien
agtttcccgcctgaccaggagaaag

SEQ ID NO: 1546059 - DNA, 25 bp, Homo sapien
gaagccagcgtttcttggtctttgg

SEQ ID NO: 1546060 - DNA, 25 bp, Homo sapien
tcagtttcccgcctgaccaggagaa

SEQ ID NO: 1546061 - DNA, 25 bp, Homo sapien
gtgtgtccagaagccagcgtttctt

SEQ ID NO: 1546062 - DNA, 25 bp, Homo sapien
tggcccgggcagcagcgacaaacag

SEQ ID NO: 1546063 - DNA, 25 bp, Homo sapien
cggatgcagcggctcctcctagacg

SEQ ID NO: 1546064 - DNA, 25 bp, Homo sapien
cgggcagcagcgacaaacagcaacg

SEQ ID NO: 1546065 - DNA, 25 bp, Homo sapien
gcagcggctcctcctagacgtctgg

SEQ ID NO: 1546066 - DNA, 25 bp, Homo sapien
tcagtggctgccagttgagggacac

SEQ ID NO: 1546067 - DNA, 25 bp, Homo sapien
gctgccagttgagggacacctgtct

SEQ ID NO: 1546068 - DNA, 25 bp, Homo sapien
tggctgccagttgagggacacctgt

SEQ ID NO: 1546069 - DNA, 25 bp, Homo sapien
ggcactgggttcaggcaccgctggg

SEQ ID NO: 1546070 - DNA, 25 bp, Homo sapien
gctgtcaccgggttaaactgacctc

SEQ ID NO: 1546071 - DNA, 25 bp, Homo sapien
ggtgggagaggacggaaaagctgct

SEQ ID NO: 1546072 - DNA, 25 bp, Homo sapien
tgctgtcaccgggttaaactgacct

SEQ ID NO: 1546073 - DNA, 25 bp, Homo sapien
ctgctgtcaccgggttaaactgacc

SEQ ID NO: 1546074 - DNA, 25 bp, Homo sapien
ggcctccttctcagtagtccccggc

SEQ ID NO: 1546075 - DNA, 25 bp, Homo sapien
cttctcagtagtccccggccccctg

SEQ ID NO: 1546076 - DNA, 25 bp, Homo sapien
cgccgccgcttcagtagagctctgg

SEQ ID NO: 1546077 - DNA, 25 bp, Homo sapien
cggggccttgccagcgggggcacgc

SEQ ID NO: 1546078 - DNA, 25 bp, Homo sapien
cacacgaccggggtgaagcgcacgc

SEQ ID NO: 1546079 - DNA, 25 bp, Homo sapien
agcgcacgcggagacgctctccgag

SEQ ID NO: 1546080 - DNA, 25 bp, Homo sapien
agtccaggctgcggccctagctgcg

SEQ ID NO: 1546081 - DNA, 25 bp, Homo sapien
agcagcaccaatagcgacacccaga

SEQ ID NO: 1546082 - DNA, 25 bp, Homo sapien
ggtacagcgggagccggtcggccca

SEQ ID NO: 1546083 - DNA, 25 bp, Homo sapien
tgcggggcgcgcaggtcggggtaca

SEQ ID NO: 1546084 - DNA, 25 bp, Homo sapien
gctggtggcgttgcggggcgcgcag

SEQ ID NO: 1546085 - DNA, 25 bp, Homo sapien
caggtcggggtacagcgggagccgg

SEQ ID NO: 1546086 - DNA, 25 bp, Homo sapien
ccccgccgggagcgccgctgtccac

SEQ ID NO: 1546087 - DNA, 25 bp, Homo sapien
ggccgccccgccgggagcgccgctg

SEQ ID NO: 1546088 - DNA, 25 bp, Homo sapien
ccgccccgccgggagcgccgctgtc

SEQ ID NO: 1546089 - DNA, 25 bp, Homo sapien
gccccgccgggagcgccgctgtcca

SEQ ID NO: 1546090 - DNA, 25 bp, Homo sapien
tccacattccggacccttggggagc

SEQ ID NO: 1546091 - DNA, 25 bp, Homo sapien
ggtaaacaaagagagaggtgcggcg

SEQ ID NO: 1546092 - DNA, 25 bp, Homo sapien
ccagctgtgcggcggggtaaacaaa

SEQ ID NO: 1546093 - DNA, 25 bp, Homo sapien
gggcggagccacgagcgggaacgcg

SEQ ID NO: 1546094 - DNA, 25 bp, Homo sapien
gggaggagaacgaggacactcaggg

SEQ ID NO: 1546095 - DNA, 25 bp, Homo sapien
ctgggaggagaacgaggacactcag

SEQ ID NO: 1546096 - DNA, 25 bp, Homo sapien
cgaggacactcaggggcgccaccat

SEQ ID NO: 1546097 - DNA, 25 bp, Homo sapien
aacgaggacactcaggggcgccacc

SEQ ID NO: 1546098 - DNA, 25 bp, Homo sapien
ttgtgacagatcaagggacacagga

SEQ ID NO: 1546099 - DNA, 25 bp, Homo sapien
gccattgtgacagatcaagggacac

SEQ ID NO: 1546100 - DNA, 25 bp, Homo sapien
cgccattgtgacagatcaagggaca

SEQ ID NO: 1546101 - DNA, 25 bp, Homo sapien
cattgtgacagatcaagggacacag

SEQ ID NO: 1546102 - DNA, 25 bp, Homo sapien
gaggcagcggtcaggcttcacgcac

SEQ ID NO: 1546103 - DNA, 25 bp, Homo sapien
acagaggcagcggtcaggcttcacg

SEQ ID NO: 1546104 - DNA, 25 bp, Homo sapien
cgcccgaggagtgcaactggcagaa

SEQ ID NO: 1546105 - DNA, 25 bp, Homo sapien
ctggcagaacttgccagcgaagtcc

SEQ ID NO: 1546106 - DNA, 25 bp, Homo sapien
cgtcgtcgcggtggttggccagtgg

SEQ ID NO: 1546107 - DNA, 25 bp, Homo sapien
ctcgtcgtcgcggtggttggccagt

SEQ ID NO: 1546108 - DNA, 25 bp, Homo sapien
cgtgctcgtcgtcgcggtggttggc

SEQ ID NO: 1546109 - DNA, 25 bp, Homo sapien
cgtcgcggtggttggccagtggcat

SEQ ID NO: 1546110 - DNA, 25 bp, Homo sapien
tggacgctcaccatagatgccacgc

SEQ ID NO: 1546111 - DNA, 25 bp, Homo sapien
acgtggacgctcaccatagatgcca

SEQ ID NO: 1546112 - DNA, 25 bp, Homo sapien
tcctgcgggtgctccacgtggacgc

SEQ ID NO: 1546113 - DNA, 25 bp, Homo sapien
caccaccaccgacgcctcctgcggg

SEQ ID NO: 1546114 - DNA, 25 bp, Homo sapien
aacaccgtgtagggcgctgccgcct

SEQ ID NO: 1546115 - DNA, 25 bp, Homo sapien
tgtgccaacaccgtgtagggcgctg

SEQ ID NO: 1546116 - DNA, 25 bp, Homo sapien
gccaacaccgtgtagggcgctgccg

SEQ ID NO: 1546117 - DNA, 25 bp, Homo sapien
gtgccaacaccgtgtagggcgctgc

SEQ ID NO: 1546118 - DNA, 25 bp, Homo sapien
gcgcagctcccgaaagcagtaaccg

SEQ ID NO: 1546119 - DNA, 25 bp, Homo sapien
gaagcccgaggcatctgagtagccg

SEQ ID NO: 1546120 - DNA, 25 bp, Homo sapien
gaggcatctgagtagccgtcctccc

SEQ ID NO: 1546121 - DNA, 25 bp, Homo sapien
aagcagtaaccgaagcccgaggcat

SEQ ID NO: 1546122 - DNA, 25 bp, Homo sapien
gcacagctgacagtcgtgaacgccc

SEQ ID NO: 1546123 - DNA, 25 bp, Homo sapien
gacagtcgtgaacgccccaggccaa

SEQ ID NO: 1546124 - DNA, 25 bp, Homo sapien
gagcacagctgacagtcgtgaacgc

SEQ ID NO: 1546125 - DNA, 25 bp, Homo sapien
agctgacagtcgtgaacgccccagg

SEQ ID NO: 1546126 - DNA, 25 bp, Homo sapien
cttcgcaggacccattaactctttc

SEQ ID NO: 1546127 - DNA, 25 bp, Homo sapien
agccggttggacaaggtccatctgg

SEQ ID NO: 1546128 - DNA, 25 bp, Homo sapien
taactctttcaaagccggttggaca

SEQ ID NO: 1546129 - DNA, 25 bp, Homo sapien
catctggggcgctcactctttcgga

SEQ ID NO: 1546130 - DNA, 25 bp, Homo sapien
tgcaaatcccgcccccagaaccaag

SEQ ID NO: 1546131 - DNA, 25 bp, Homo sapien
ctgcaaatcccgcccccagaaccaa

SEQ ID NO: 1546132 - DNA, 25 bp, Homo sapien
gtcaggaacttgatccctgcaaatc

SEQ ID NO: 1546133 - DNA, 25 bp, Homo sapien
ggaacttgatccctgcaaatcccgc

SEQ ID NO: 1546134 - DNA, 25 bp, Homo sapien
agcgcccgccagtcgcgcactcatc

SEQ ID NO: 1546135 - DNA, 25 bp, Homo sapien
acacgtgtacccgccgcgcgtgttt

SEQ ID NO: 1546136 - DNA, 25 bp, Homo sapien
acgagtcgagcagaaagccgtcggg

SEQ ID NO: 1546137 - DNA, 25 bp, Homo sapien
tgtttgcacactcgccgtgctggca

SEQ ID NO: 1546138 - DNA, 25 bp, Homo sapien
cccaggccttgcctacgcggctgca

SEQ ID NO: 1546139 - DNA, 25 bp, Homo sapien
cggagcacgcggaagcagggccctt

SEQ ID NO: 1546140 - DNA, 25 bp, Homo sapien
aatgggcagcgaacagccgccgtcg

SEQ ID NO: 1546141 - DNA, 25 bp, Homo sapien
gccgtcgcggagcacgcggaagcag

SEQ ID NO: 1546142 - DNA, 25 bp, Homo sapien
tgagggcagggtccggttgggtcta

SEQ ID NO: 1546143 - DNA, 25 bp, Homo sapien
gtcctggccaaagagtagaatgtct

SEQ ID NO: 1546144 - DNA, 25 bp, Homo sapien
tacaggtggggccaagagcgttttc

SEQ ID NO: 1546145 - DNA, 25 bp, Homo sapien
tagaatgtcttagaggctacaggtg

SEQ ID NO: 1546146 - DNA, 25 bp, Homo sapien
ggccgagtagtggtaaccaggacca

SEQ ID NO: 1546147 - DNA, 25 bp, Homo sapien
accagccgggcagatctcccggaaa

SEQ ID NO: 1546148 - DNA, 25 bp, Homo sapien
ctgagtgacactcggggtggctcct

SEQ ID NO: 1546149 - DNA, 25 bp, Homo sapien
tgtagcggaggtcggaggccgagta

SEQ ID NO: 1546150 - DNA, 25 bp, Homo sapien
gggcaagggaagctcagggccgggc

SEQ ID NO: 1546151 - DNA, 25 bp, Homo sapien
agggatgctgggcaagggaagctca

SEQ ID NO: 1546152 - DNA, 25 bp, Homo sapien
tccaggcgatgggtgggcagaaagc

SEQ ID NO: 1546153 - DNA, 25 bp, Homo sapien
gggctccaggcgatgggtgggcaga

SEQ ID NO: 1546154 - DNA, 25 bp, Homo sapien
ctgattcaggaatctcaggaccagt

SEQ ID NO: 1546155 - DNA, 25 bp, Homo sapien
gatggagtgtcgctcaagctggagt

SEQ ID NO: 1546156 - DNA, 25 bp, Homo sapien
actgctgcaggcccaatgccctcag

SEQ ID NO: 1546157 - DNA, 25 bp, Homo sapien
agccactgctgcaggcccaatgccc

SEQ ID NO: 1546158 - DNA, 25 bp, Homo sapien
tgcaggcccaatgccctcagttctt

SEQ ID NO: 1546159 - DNA, 25 bp, Homo sapien
ctggggggtccagtcagccagggtt

SEQ ID NO: 1546160 - DNA, 25 bp, Homo sapien
gctgggccgggaaatgcagcgtcct

SEQ ID NO: 1546161 - DNA, 25 bp, Homo sapien
gttgcgctgacacatgccggaggag

SEQ ID NO: 1546162 - DNA, 25 bp, Homo sapien
agtcgcaagcgcaggtgtagccgct

SEQ ID NO: 1546163 - DNA, 25 bp, Homo sapien
ccggaagccagagtcgcaagcgcag

SEQ ID NO: 1546164 - DNA, 25 bp, Homo sapien
cagcccgtgggccggctcggaagcc

SEQ ID NO: 1546165 - DNA, 25 bp, Homo sapien
ggggcacgcggcgacattcgtccac

SEQ ID NO: 1546166 - DNA, 25 bp, Homo sapien
ggcacgcggcgacattcgtccacat

SEQ ID NO: 1546167 - DNA, 25 bp, Homo sapien
acagggcgggggcacgcggcgacat

SEQ ID NO: 1546168 - DNA, 25 bp, Homo sapien
gcagggtttggtagcgcaagggcag

SEQ ID NO: 1546169 - DNA, 25 bp, Homo sapien
gagaagcgacgcaaggaggcagggg

SEQ ID NO: 1546170 - DNA, 25 bp, Homo sapien
tgagagaggcaattgtggagggcag

SEQ ID NO: 1546171 - DNA, 25 bp, Homo sapien
aggacagccggagaggggcacagtg

SEQ ID NO: 1546172 - DNA, 25 bp, Homo sapien
gtaggcacagaccaggcggctggga

SEQ ID NO: 1546173 - DNA, 25 bp, Homo sapien
ctgtaggcacagaccaggcggctgg

SEQ ID NO: 1546174 - DNA, 25 bp, Homo sapien
tgtaggcacagaccaggcggctggg

SEQ ID NO: 1546175 - DNA, 25 bp, Homo sapien
ttctcgcagcgcccgaggtcacacg

SEQ ID NO: 1546176 - DNA, 25 bp, Homo sapien
gcggcacgcggtggcactcgtccac

SEQ ID NO: 1546177 - DNA, 25 bp, Homo sapien
tcgcagcgcccgaggtcacacggcg

SEQ ID NO: 1546178 - DNA, 25 bp, Homo sapien
acacggcggcggcacgcggtggcac

SEQ ID NO: 1546179 - DNA, 25 bp, Homo sapien
ggaagccagccgggcaaacacagcg

SEQ ID NO: 1546180 - DNA, 25 bp, Homo sapien
aggagcctgccgtgttgtcacagcg

SEQ ID NO: 1546181 - DNA, 25 bp, Homo sapien
aaacacagcggaaagagccaggcag

SEQ ID NO: 1546182 - DNA, 25 bp, Homo sapien
gggccctcgggagcggaagccagca

SEQ ID NO: 1546183 - DNA, 25 bp, Homo sapien
cagcagtgttgggttggaagcccat

SEQ ID NO: 1546184 - DNA, 25 bp, Homo sapien
ggggggcttcgggcacactcatcca

SEQ ID NO: 1546185 - DNA, 25 bp, Homo sapien
ttctgtgttctcacaccggccgtag

SEQ ID NO: 1546186 - DNA, 25 bp, Homo sapien
ctcacaccggccgtaggtgcagggt

SEQ ID NO: 1546187 - DNA, 25 bp, Homo sapien
aaggacaggtcctgcactggaagga

SEQ ID NO: 1546188 - DNA, 25 bp, Homo sapien
tggtggccagaaggacaggtcctgc

SEQ ID NO: 1546189 - DNA, 25 bp, Homo sapien
cccagggcatgcgaggtggttctca

SEQ ID NO: 1546190 - DNA, 25 bp, Homo sapien
aaggagccgggcgagttcacacact

SEQ ID NO: 1546191 - DNA, 25 bp, Homo sapien
cgacccgacggcgcccggtagcctg

SEQ ID NO: 1546192 - DNA, 25 bp, Homo sapien
ccttcggtgttagtgcagtggccgt

SEQ ID NO: 1546193 - DNA, 25 bp, Homo sapien
ggcacccgaactgcattcgtccaca

SEQ ID NO: 1546194 - DNA, 25 bp, Homo sapien
acagggaggggcacccgaactgcat

SEQ ID NO: 1546195 - DNA, 25 bp, Homo sapien
agccaggggcacaagtacaggcaaa

SEQ ID NO: 1546196 - DNA, 25 bp, Homo sapien
gcactcgccgtgagggaagcagaaa

SEQ ID NO: 1546197 - DNA, 25 bp, Homo sapien
ggaagcagaaatcgccctccaggca

SEQ ID NO: 1546198 - DNA, 25 bp, Homo sapien
acaagtacaggcaaaggagccgtca

SEQ ID NO: 1546199 - DNA, 25 bp, Homo sapien
aaatacccagactcggccctttcat

SEQ ID NO: 1546200 - DNA, 25 bp, Homo sapien
tgatcctgctggaataccccggcta

SEQ ID NO: 1546201 - DNA, 25 bp, Homo sapien
aacagcttctttacaatcacggtcc

SEQ ID NO: 1546202 - DNA, 25 bp, Homo sapien
ggccaggatcagcccgggtacgaac

SEQ ID NO: 1546203 - DNA, 25 bp, Homo sapien
agatgcactcgaaggagccgtcggt

SEQ ID NO: 1546204 - DNA, 25 bp, Homo sapien
agatgccgctctggcaaaggtcctc

SEQ ID NO: 1546205 - DNA, 25 bp, Homo sapien
cggtgtcccggaggacagatgcact

SEQ ID NO: 1546206 - DNA, 25 bp, Homo sapien
gtgttggtacagatgccgctctggc

SEQ ID NO: 1546207 - DNA, 25 bp, Homo sapien
tgaggagagaggtcgggtggtcgga

SEQ ID NO: 1546208 - DNA, 25 bp, Homo sapien
gagagaggtcgggtggtcggatgtg

SEQ ID NO: 1546209 - DNA, 25 bp, Homo sapien
gaggtcgggtggtcggatgtgggaa

SEQ ID NO: 1546210 - DNA, 25 bp, Homo sapien
gtcgggtggtcggatgtgggaagca

SEQ ID NO: 1546211 - DNA, 25 bp, Homo sapien
gctgggcctcgctcgcgacattcgt

SEQ ID NO: 1546212 - DNA, 25 bp, Homo sapien
ggcccgcgtggtacccaggatcgca

SEQ ID NO: 1546213 - DNA, 25 bp, Homo sapien
gagccgggagagttctcacagcgct

SEQ ID NO: 1546214 - DNA, 25 bp, Homo sapien
tggtacccaggatcgcagtcccgga

SEQ ID NO: 1546215 - DNA, 25 bp, Homo sapien
cttctgaagatcaacaatgttgaaa

SEQ ID NO: 1546216 - DNA, 25 bp, Homo sapien
tggtattctaggagcctgagcttct

SEQ ID NO: 1546217 - DNA, 25 bp, Homo sapien
aattctacctcagcttctagagcag

SEQ ID NO: 1546218 - DNA, 25 bp, Homo sapien
ctttagcaatctggtattctaggag

SEQ ID NO: 1546219 - DNA, 25 bp, Homo sapien
gaccatattcttggcactcatccac

SEQ ID NO: 1546220 - DNA, 25 bp, Homo sapien
aacgctgggctccacaaatctcggg

SEQ ID NO: 1546221 - DNA, 25 bp, Homo sapien
gggctccacaaatctcgggaccata

SEQ ID NO: 1546222 - DNA, 25 bp, Homo sapien
aatctcgggaccatattcttggcac

SEQ ID NO: 1546223 - DNA, 25 bp, Homo sapien
ctggtgtgcagcggtaggagccagg

SEQ ID NO: 1546224 - DNA, 25 bp, Homo sapien
gtgtgcagcggtaggagccaggggt

SEQ ID NO: 1546225 - DNA, 25 bp, Homo sapien
cggtaggagccaggggtgttctcac

SEQ ID NO: 1546226 - DNA, 25 bp, Homo sapien
gtgcagcggtaggagccaggggtgt

SEQ ID NO: 1546227 - DNA, 25 bp, Homo sapien
atccgccccctggcgtgggctgata

SEQ ID NO: 1546228 - DNA, 25 bp, Homo sapien
ccgccccctggcgtgggctgatagc

SEQ ID NO: 1546229 - DNA, 25 bp, Homo sapien
gcatccgccccctggcgtgggctga

SEQ ID NO: 1546230 - DNA, 25 bp, Homo sapien
tggcatccgccccctggcgtgggct

SEQ ID NO: 1546231 - DNA, 25 bp, Homo sapien
aggttctggcacacggcgtgggcac

SEQ ID NO: 1546232 - DNA, 25 bp, Homo sapien
gcgtgggcaccgcagaaggaccggt

SEQ ID NO: 1546233 - DNA, 25 bp, Homo sapien
agccgggcaggttctggcacacggc

SEQ ID NO: 1546234 - DNA, 25 bp, Homo sapien
cagaaggaccggttccggcattcgt

SEQ ID NO: 1546235 - DNA, 25 bp, Homo sapien
gacgcccatcccgtgccccctcgta

SEQ ID NO: 1546236 - DNA, 25 bp, Homo sapien
cgcagtgacgcccatcccgtgcccc

SEQ ID NO: 1546237 - DNA, 25 bp, Homo sapien
agtgacgcccatcccgtgccccctc

SEQ ID NO: 1546238 - DNA, 25 bp, Homo sapien
ccacgcagtgacgcccatcccgtgc

SEQ ID NO: 1546239 - DNA, 25 bp, Homo sapien
gtcccatccacctcctgaagtcccg

SEQ ID NO: 1546240 - DNA, 25 bp, Homo sapien
cccctttggtcccatccacctcctg

SEQ ID NO: 1546241 - DNA, 25 bp, Homo sapien
ccctttggtcccatccacctcctga

SEQ ID NO: 1546242 - DNA, 25 bp, Homo sapien
ccatccacctcctgaagtcccgtac

SEQ ID NO: 1546243 - DNA, 25 bp, Homo sapien
tacaccctgtagtgtttcacactcg

SEQ ID NO: 1546244 - DNA, 25 bp, Homo sapien
cagcagaagttcgtgggggaacaca

SEQ ID NO: 1546245 - DNA, 25 bp, Homo sapien
ggcagctccacatacaccctgtagt

SEQ ID NO: 1546246 - DNA, 25 bp, Homo sapien
gcgtccagtcatggggtcaaactct

SEQ ID NO: 1546247 - DNA, 25 bp, Homo sapien
tgggctttccccgtcacagtcttgt

SEQ ID NO: 1546248 - DNA, 25 bp, Homo sapien
tctggtagagtcaggaccagggtct

SEQ ID NO: 1546249 - DNA, 25 bp, Homo sapien
tatctggtgatatctctgtctgccc

SEQ ID NO: 1546250 - DNA, 25 bp, Homo sapien
cccattggcttgtgagccccttgag

SEQ ID NO: 1546251 - DNA, 25 bp, Homo sapien
acctacaatttgtcgccaggtgcag

SEQ ID NO: 1546252 - DNA, 25 bp, Homo sapien
cagctaacagcttgggtgggtggtg

SEQ ID NO: 1546253 - DNA, 25 bp, Homo sapien
tcaggaggccgacgcggttggatta

SEQ ID NO: 1546254 - DNA, 25 bp, Homo sapien
ggtctcttatccagtgtgtggcaaa

SEQ ID NO: 1546255 - DNA, 25 bp, Homo sapien
ctgtgtcaaagtagcactcccggcg

SEQ ID NO: 1546256 - DNA, 25 bp, Homo sapien
tgcctaggtgtgctgggtcggcggg

SEQ ID NO: 1546257 - DNA, 25 bp, Homo sapien
agaacggggctagcaggtgcctggg

SEQ ID NO: 1546258 - DNA, 25 bp, Homo sapien
cctggggctgcgagcctgggaacgt

SEQ ID NO: 1546259 - DNA, 25 bp, Homo sapien
gtcacattccgagccaggatgttgt

SEQ ID NO: 1546260 - DNA, 25 bp, Homo sapien
atgtcacattccgagccaggatgtt

SEQ ID NO: 1546261 - DNA, 25 bp, Homo sapien
gccaggatgttgtcacatgcatccg

SEQ ID NO: 1546262 - DNA, 25 bp, Homo sapien
caggatgttgtcacatgcatccggg

SEQ ID NO: 1546263 - DNA, 25 bp, Homo sapien
acacagagacaagcctgagccagga

SEQ ID NO: 1546264 - DNA, 25 bp, Homo sapien
acacacagagacaagcctgagccag

SEQ ID NO: 1546265 - DNA, 25 bp, Homo sapien
tacacacagagacaagcctgagcca

SEQ ID NO: 1546266 - DNA, 25 bp, Homo sapien
ctacacacagagacaagcctgagcc

SEQ ID NO: 1546267 - DNA, 25 bp, Homo sapien
gccccggccgtgagggcacaatgac

SEQ ID NO: 1546268 - DNA, 25 bp, Homo sapien
tagtagccgttgctgcaatagcatg

SEQ ID NO: 1546269 - DNA, 25 bp, Homo sapien
gcactccagccgctgtgtgtggtag

SEQ ID NO: 1546270 - DNA, 25 bp, Homo sapien
cttgcacacctggtctcggaagagc

SEQ ID NO: 1546271 - DNA, 25 bp, Homo sapien
cactcttgcacacctggtctcggaa

SEQ ID NO: 1546272 - DNA, 25 bp, Homo sapien
gcagtgtgatggatggagtctagac

SEQ ID NO: 1546273 - DNA, 25 bp, Homo sapien
tgtgatggatggagtctagactcca

SEQ ID NO: 1546274 - DNA, 25 bp, Homo sapien
agctggcaaggctaggggttggaga

SEQ ID NO: 1546275 - DNA, 25 bp, Homo sapien
tggatggagtctagactccaggaaa

SEQ ID NO: 1546276 - DNA, 25 bp, Homo sapien
ctctcgttggagacgcagcggcgct

SEQ ID NO: 1546277 - DNA, 25 bp, Homo sapien
gttcctcatcggcgcactcgtcatt

SEQ ID NO: 1546278 - DNA, 25 bp, Homo sapien
tcgcaggtacagtgataagagccca

SEQ ID NO: 1546279 - DNA, 25 bp, Homo sapien
cgaggctctggctctcgttggagac

SEQ ID NO: 1546280 - DNA, 25 bp, Homo sapien
gcagcactctgtgtaggtggcctga

SEQ ID NO: 1546281 - DNA, 25 bp, Homo sapien
tgccagcacactcccagattgtcat

SEQ ID NO: 1546282 - DNA, 25 bp, Homo sapien
ggtggctgcacacgaggtcagcccc

SEQ ID NO: 1546283 - DNA, 25 bp, Homo sapien
gtggcctgacggtccagccgagggt

SEQ ID NO: 1546284 - DNA, 25 bp, Homo sapien
tgagttcagcctaggccagtgccag

SEQ ID NO: 1546285 - DNA, 25 bp, Homo sapien
agttcagcctaggccagtgccagca

SEQ ID NO: 1546286 - DNA, 25 bp, Homo sapien
gagttcagcctaggccagtgccagc

SEQ ID NO: 1546287 - DNA, 25 bp, Homo sapien
tggctgagacttggaagtctttgga

SEQ ID NO: 1546288 - DNA, 25 bp, Homo sapien
agattttgggatgggctgcgacata

SEQ ID NO: 1546289 - DNA, 25 bp, Homo sapien
cctgtgggtctggtactatgggatc

SEQ ID NO: 1546290 - DNA, 25 bp, Homo sapien
tctttggagtgtgaatcggggacca

SEQ ID NO: 1546291 - DNA, 25 bp, Homo sapien
tgggtacaactcaggcccatatggg

SEQ ID NO: 1546292 - DNA, 25 bp, Homo sapien
tcaaagtctggcatgtcgaagcggg

SEQ ID NO: 1546293 - DNA, 25 bp, Homo sapien
gtagcacattgcacagggcctcgaa

SEQ ID NO: 1546294 - DNA, 25 bp, Homo sapien
tggacctaagtctgggccgtactcg

SEQ ID NO: 1546295 - DNA, 25 bp, Homo sapien
gtgtcccgggaccgatagggccagc

SEQ ID NO: 1546296 - DNA, 25 bp, Homo sapien
accgatagggccagcgggtgcccgg

SEQ ID NO: 1546297 - DNA, 25 bp, Homo sapien
tgtcccgggaccgatagggccagcg

SEQ ID NO: 1546298 - DNA, 25 bp, Homo sapien
ccgggaccgatagggccagcgggtg

SEQ ID NO: 1546299 - DNA, 25 bp, Homo sapien
tcctcgtagggctcagccagggaac

SEQ ID NO: 1546300 - DNA, 25 bp, Homo sapien
agctcctcgtagggctcagccaggg

SEQ ID NO: 1546301 - DNA, 25 bp, Homo sapien
ccagctcctcgtagggctcagccag

SEQ ID NO: 1546302 - DNA, 25 bp, Homo sapien
ctccagctcctcgtagggctcagcc

SEQ ID NO: 1546303 - DNA, 25 bp, Homo sapien
atgtccaggcggtagccgtcgaagc

SEQ ID NO: 1546304 - DNA, 25 bp, Homo sapien
cagcggccgttggtgcagccgtcca

SEQ ID NO: 1546305 - DNA, 25 bp, Homo sapien
tcgaagcaacggcaggtgaagcctt

SEQ ID NO: 1546306 - DNA, 25 bp, Homo sapien
caacgcaggccatgcgggtcatgtc

SEQ ID NO: 1546307 - DNA, 25 bp, Homo sapien
ctccctggacaagcctcgcctctcc

SEQ ID NO: 1546308 - DNA, 25 bp, Homo sapien
gggagacaacgatcgctgctgaagg

SEQ ID NO: 1546309 - DNA, 25 bp, Homo sapien
tgcggaggggagacaacgatcgctg

SEQ ID NO: 1546310 - DNA, 25 bp, Homo sapien
cggaggggagacaacgatcgctgct

SEQ ID NO: 1546311 - DNA, 25 bp, Homo sapien
aggggagacaacgatcgctgctgaa

SEQ ID NO: 1546312 - DNA, 25 bp, Homo sapien
tgcggctggtgcgtgggtgcgaatc

SEQ ID NO: 1546313 - DNA, 25 bp, Homo sapien
aggcaacgcgcgttgacgcacagcg

SEQ ID NO: 1546314 - DNA, 25 bp, Homo sapien
gagccatccgtgttgaggcaacgcg

SEQ ID NO: 1546315 - DNA, 25 bp, Homo sapien
ctcggcctcatcacactcgttgatg

SEQ ID NO: 1546316 - DNA, 25 bp, Homo sapien
gcagtgcagggcgtcgcagcttcca

SEQ ID NO: 1546317 - DNA, 25 bp, Homo sapien
gaccacgacatcagtgggaggcgct

SEQ ID NO: 1546318 - DNA, 25 bp, Homo sapien
aggcgtccgtaggtcccttctccag

SEQ ID NO: 1546319 - DNA, 25 bp, Homo sapien
acatacgcataagcgggctgcagga

SEQ ID NO: 1546320 - DNA, 25 bp, Homo sapien
gtccttccccggattacaattctga

SEQ ID NO: 1546321 - DNA, 25 bp, Homo sapien
tccttccccggattacaattctgat

SEQ ID NO: 1546322 - DNA, 25 bp, Homo sapien
ccttccccggattacaattctgatt

SEQ ID NO: 1546323 - DNA, 25 bp, Homo sapien
caaggccttgtgttaggtgtttctc

SEQ ID NO: 1546324 - DNA, 25 bp, Homo sapien
gaaaaagacctagccaggccaggtg

SEQ ID NO: 1546325 - DNA, 25 bp, Homo sapien
cttgtgcaacacagtaaggtcccct

SEQ ID NO: 1546326 - DNA, 25 bp, Homo sapien
cacccatgtgtagtgtataattcaa

SEQ ID NO: 1546327 - DNA, 25 bp, Homo sapien
actttacgagcatcggccactaggg

SEQ ID NO: 1546328 - DNA, 25 bp, Homo sapien
tgcaggcaggataacaattagatcc

SEQ ID NO: 1546329 - DNA, 25 bp, Homo sapien
cgagcgcggtgaccgcctggactac

SEQ ID NO: 1546330 - DNA, 25 bp, Homo sapien
attccagaggagaacgcgtcggtcc

SEQ ID NO: 1546331 - DNA, 25 bp, Homo sapien
tctgtgcccgatattgaccctttac

SEQ ID NO: 1546332 - DNA, 25 bp, Homo sapien
tgcccgatattgaccctttacttcc

SEQ ID NO: 1546333 - DNA, 25 bp, Homo sapien
acttctgtgcccgatattgaccctt

SEQ ID NO: 1546334 - DNA, 25 bp, Homo sapien
ccgatattgaccctttacttcctgc

SEQ ID NO: 1546335 - DNA, 25 bp, Homo sapien
ggttgctgtgtctgtgtaggaagag

SEQ ID NO: 1546336 - DNA, 25 bp, Homo sapien
tggggaaaggtggagaaaagattga

SEQ ID NO: 1546337 - DNA, 25 bp, Homo sapien
atggggaaaggtggagaaaagattg

SEQ ID NO: 1546338 - DNA, 25 bp, Homo sapien
gctgtgtctgtgtaggaagaggtag

SEQ ID NO: 1546339 - DNA, 25 bp, Homo sapien
agagttggacccctttgaggcccag

SEQ ID NO: 1546340 - DNA, 25 bp, Homo sapien
tgcacctgcccaagtggccgtgttc

SEQ ID NO: 1546341 - DNA, 25 bp, Homo sapien
caccttcagaggctgagcgatggct

SEQ ID NO: 1546342 - DNA, 25 bp, Homo sapien
agcctgggcacaagcggacaccttc

SEQ ID NO: 1546343 - DNA, 25 bp, Homo sapien
cttgtagatccctcagatgcactct

SEQ ID NO: 1546344 - DNA, 25 bp, Homo sapien
tgcactcttggacacagacagtctt

SEQ ID NO: 1546345 - DNA, 25 bp, Homo sapien
catcacagacaatagccacaccttc

SEQ ID NO: 1546346 - DNA, 25 bp, Homo sapien
tgcactctccgaggcaatgtcatca

SEQ ID NO: 1546347 - DNA, 25 bp, Homo sapien
taggactctcatcagggagcccaag

SEQ ID NO: 1546348 - DNA, 25 bp, Homo sapien
ctggtaacagttgctaggacaacta

SEQ ID NO: 1546349 - DNA, 25 bp, Homo sapien
taggacaactaggactctcatcagg

SEQ ID NO: 1546350 - DNA, 25 bp, Homo sapien
gttgctaggacaactaggactctca

SEQ ID NO: 1546351 - DNA, 25 bp, Homo sapien
ggcccttggaaccaggtggctgatc

SEQ ID NO: 1546352 - DNA, 25 bp, Homo sapien
ctccttcctgggcccttggaaccag

SEQ ID NO: 1546353 - DNA, 25 bp, Homo sapien
tcctgggcccttggaaccaggtggc

SEQ ID NO: 1546354 - DNA, 25 bp, Homo sapien
ccttggaaccaggtggctgatctcc

SEQ ID NO: 1546355 - DNA, 25 bp, Homo sapien
gtgcagaatcctgtactttttagtc

SEQ ID NO: 1546356 - DNA, 25 bp, Homo sapien
tctgtctgtgtttggaggtgtgcat

SEQ ID NO: 1546357 - DNA, 25 bp, Homo sapien
ttttagtctgtctgtgtttggaggt

SEQ ID NO: 1546358 - DNA, 25 bp, Homo sapien
gcagaatcctgtactttttagtctg

SEQ ID NO: 1546359 - DNA, 25 bp, Homo sapien
gtgacggcggctttgtgtgtggtac

SEQ ID NO: 1546360 - DNA, 25 bp, Homo sapien
cccagggaccgggtgcagccctgtc

SEQ ID NO: 1546361 - DNA, 25 bp, Homo sapien
ggaccgggtgcagccctgtctgtct

SEQ ID NO: 1546362 - DNA, 25 bp, Homo sapien
cggtgacggcggctttgtgtgtggt

SEQ ID NO: 1546363 - DNA, 25 bp, Homo sapien
cgccgctgctgatgtggcggagggt

SEQ ID NO: 1546364 - DNA, 25 bp, Homo sapien
cggcgcccggatggagagagggtgc

SEQ ID NO: 1546365 - DNA, 25 bp, Homo sapien
gcagcagcagtcggggagccaggcc

SEQ ID NO: 1546366 - DNA, 25 bp, Homo sapien
gcggcgccgctgctgatgtggcgga

SEQ ID NO: 1546367 - DNA, 25 bp, Homo sapien
cctcccgtggaaggcgagatggtcc

SEQ ID NO: 1546368 - DNA, 25 bp, Homo sapien
gggggagctgaatcttcaatcggaa

SEQ ID NO: 1546369 - DNA, 25 bp, Homo sapien
gcctcaagcctcccgtggaaggcga

SEQ ID NO: 1546370 - DNA, 25 bp, Homo sapien
caagcctcccgtggaaggcgagatg

SEQ ID NO: 1546371 - DNA, 25 bp, Homo sapien
tcagtgaggcgacagtgaggaccta

SEQ ID NO: 1546372 - DNA, 25 bp, Homo sapien
tcatagtcagtgaggcgacagtgag

SEQ ID NO: 1546373 - DNA, 25 bp, Homo sapien
gacagtgaggacctagcatggacag

SEQ ID NO: 1546374 - DNA, 25 bp, Homo sapien
tcacagaactcatagtcagtgaggc

SEQ ID NO: 1546375 - DNA, 25 bp, Homo sapien
ctctgggccactctgaataggacct

SEQ ID NO: 1546376 - DNA, 25 bp, Homo sapien
gacatgagctgttctaataactggg

SEQ ID NO: 1546377 - DNA, 25 bp, Homo sapien
tctgtaataggttggcacggcgcct

SEQ ID NO: 1546378 - DNA, 25 bp, Homo sapien
aataactgggtaaggcatggaatcc

SEQ ID NO: 1546379 - DNA, 25 bp, Homo sapien
cacatgccaccacgcttggttaatt

SEQ ID NO: 1546380 - DNA, 25 bp, Homo sapien
gcacatgccaccacgcttggttaat

SEQ ID NO: 1546381 - DNA, 25 bp, Homo sapien
cctacacggttgaatgacaagttca

SEQ ID NO: 1546382 - DNA, 25 bp, Homo sapien
gaatgacaagttcaaccttccctaa

SEQ ID NO: 1546383 - DNA, 25 bp, Homo sapien
gttgaatgacaagttcaaccttccc

SEQ ID NO: 1546384 - DNA, 25 bp, Homo sapien
accctccctacacggttgaatgaca

SEQ ID NO: 1546385 - DNA, 25 bp, Homo sapien
ctctgagcatccgaagcgcggccag

SEQ ID NO: 1546386 - DNA, 25 bp, Homo sapien
ccaggtatgcatctagggcaccggg

SEQ ID NO: 1546387 - DNA, 25 bp, Homo sapien
gaacggaacgagacggagccttgtc

SEQ ID NO: 1546388 - DNA, 25 bp, Homo sapien
gagacggagccttgtccgactccgc

SEQ ID NO: 1546389 - DNA, 25 bp, Homo sapien
taaatcccgcgaggggtgtggctgg

SEQ ID NO: 1546390 - DNA, 25 bp, Homo sapien
ttaaatcccgcgaggggtgtggctg

SEQ ID NO: 1546391 - DNA, 25 bp, Homo sapien
gccgcgcaagggttaaccgatactc

SEQ ID NO: 1546392 - DNA, 25 bp, Homo sapien
cgccgcgcaagggttaaccgatact

SEQ ID NO: 1546393 - DNA, 25 bp, Homo sapien
tgcgccgggcccaggtcgctgctgt

SEQ ID NO: 1546394 - DNA, 25 bp, Homo sapien
tccagtcccatgcgggccgccgcgg

SEQ ID NO: 1546395 - DNA, 25 bp, Homo sapien
cctcgttcaggctcccacggcacgg

SEQ ID NO: 1546396 - DNA, 25 bp, Homo sapien
cccggcctccgcctcgttcaggctc

SEQ ID NO: 1546397 - DNA, 25 bp, Homo sapien
ccctctcaggctcgctgtggaggct

SEQ ID NO: 1546398 - DNA, 25 bp, Homo sapien
cgaggccggccctctcaggctcgct

SEQ ID NO: 1546399 - DNA, 25 bp, Homo sapien
gccggccctctcaggctcgctgtgg

SEQ ID NO: 1546400 - DNA, 25 bp, Homo sapien
cggccctctcaggctcgctgtggag

SEQ ID NO: 1546401 - DNA, 25 bp, Homo sapien
aggccagctgccgcgggctcagtct

SEQ ID NO: 1546402 - DNA, 25 bp, Homo sapien
ggcctctcggtctctactccaaggc

SEQ ID NO: 1546403 - DNA, 25 bp, Homo sapien
gctgccgcgggctcagtctgtccgt

SEQ ID NO: 1546404 - DNA, 25 bp, Homo sapien
tccgtcttttgcttgggcctctcgg

SEQ ID NO: 1546405 - DNA, 25 bp, Homo sapien
ttctagatgcgtccggaggctggac

SEQ ID NO: 1546406 - DNA, 25 bp, Homo sapien
tccaaagacaagtcgtctccagctc

SEQ ID NO: 1546407 - DNA, 25 bp, Homo sapien
gctctgaccagctccattctagatg

SEQ ID NO: 1546408 - DNA, 25 bp, Homo sapien
ccggtctccgtccaaagacaagtcg

SEQ ID NO: 1546409 - DNA, 25 bp, Homo sapien
ctgtgcggatcagtccaaaggccat

SEQ ID NO: 1546410 - DNA, 25 bp, Homo sapien
ttatcagcccaggacttgaccctct

SEQ ID NO: 1546411 - DNA, 25 bp, Homo sapien
tctggtgggtccagaggttatcagc

SEQ ID NO: 1546412 - DNA, 25 bp, Homo sapien
ggctgagtctgtgacccatgcgttt

SEQ ID NO: 1546413 - DNA, 25 bp, Homo sapien
ccatgcgtttccagctctgtccagg

SEQ ID NO: 1546414 - DNA, 25 bp, Homo sapien
cagtatcctgttttttctgggagcc

SEQ ID NO: 1546415 - DNA, 25 bp, Homo sapien
caatatcctgttgtgtcctggagcc

SEQ ID NO: 1546416 - DNA, 25 bp, Homo sapien
tgctgtctgggaaccgtcagtgcta

SEQ ID NO: 1546417 - DNA, 25 bp, Homo sapien
tctgtccagggaccttcaatatcct

SEQ ID NO: 1546418 - DNA, 25 bp, Homo sapien
ctggttcctctaatgggccatcctc

SEQ ID NO: 1546419 - DNA, 25 bp, Homo sapien
tggttcctctaatgggccatcctca

SEQ ID NO: 1546420 - DNA, 25 bp, Homo sapien
ggttcctctaatgggccatcctcag

SEQ ID NO: 1546421 - DNA, 25 bp, Homo sapien
gttcctctaatgggccatcctcagg

SEQ ID NO: 1546422 - DNA, 25 bp, Homo sapien
acttcaggtgagagtacaggtgagt

SEQ ID NO: 1546423 - DNA, 25 bp, Homo sapien
tcagactcgtcgaaagaagaggcag

SEQ ID NO: 1546424 - DNA, 25 bp, Homo sapien
ccagacctgtcctcgggatcgctgg

SEQ ID NO: 1546425 - DNA, 25 bp, Homo sapien
cacagggggctacacttcaggtgag

SEQ ID NO: 1546426 - DNA, 25 bp, Homo sapien
tgtcactttcgggtaggagccttaa

SEQ ID NO: 1546427 - DNA, 25 bp, Homo sapien
gacagagaccgtggcagtcatgaca

SEQ ID NO: 1546428 - DNA, 25 bp, Homo sapien
gactcgccacgtttgttccccagtg

SEQ ID NO: 1546429 - DNA, 25 bp, Homo sapien
taagagccagtttatgactcgccac

SEQ ID NO: 1546430 - DNA, 25 bp, Homo sapien
tagggagcagagcagggtggggtca

SEQ ID NO: 1546431 - DNA, 25 bp, Homo sapien
agggagcagagcagggtggggtcag

SEQ ID NO: 1546432 - DNA, 25 bp, Homo sapien
tgtagggagcagagcagggtggggt

SEQ ID NO: 1546433 - DNA, 25 bp, Homo sapien
ctgtagggagcagagcagggtgggg

SEQ ID NO: 1546434 - DNA, 25 bp, Homo sapien
tagtgttttcggaaggagaccacaa

SEQ ID NO: 1546435 - DNA, 25 bp, Homo sapien
aagggtgaatacttcagaactgtct

SEQ ID NO: 1546436 - DNA, 25 bp, Homo sapien
gtagtgttttcggaaggagaccaca

SEQ ID NO: 1546437 - DNA, 25 bp, Homo sapien
accacaaagggtgaatacttcagaa

SEQ ID NO: 1546438 - DNA, 25 bp, Homo sapien
taactcttcggttaatcctgcaagg

SEQ ID NO: 1546439 - DNA, 25 bp, Homo sapien
tcctgcaagggaggtaaggttatct

SEQ ID NO: 1546440 - DNA, 25 bp, Homo sapien
catgaatacagagcagaactagggt

SEQ ID NO: 1546441 - DNA, 25 bp, Homo sapien
cagctgaggcccagtaaaggaaagt

SEQ ID NO: 1546442 - DNA, 25 bp, Homo sapien
ttccatctggttgaaggtctggcca

SEQ ID NO: 1546443 - DNA, 25 bp, Homo sapien
aggtcgcagcgggtctttcatcagc

SEQ ID NO: 1546444 - DNA, 25 bp, Homo sapien
ccatagtaggcaggcacgaaaggtc

SEQ ID NO: 1546445 - DNA, 25 bp, Homo sapien
gaaacgtttcagaatccgaccatcc

SEQ ID NO: 1546446 - DNA, 25 bp, Homo sapien
tagggttcgccctccagagaatctc

SEQ ID NO: 1546447 - DNA, 25 bp, Homo sapien
gacatgggaactccaacttggagcc

SEQ ID NO: 1546448 - DNA, 25 bp, Homo sapien
agagaatctcctgcccgctagtctg

SEQ ID NO: 1546449 - DNA, 25 bp, Homo sapien
tagacttgaattggaggacatccag

SEQ ID NO: 1546450 - DNA, 25 bp, Homo sapien
tggaatggtggtgatctcgggtcac

SEQ ID NO: 1546451 - DNA, 25 bp, Homo sapien
gcaatggaatggtggtgatctcggg

SEQ ID NO: 1546452 - DNA, 25 bp, Homo sapien
ctggaattacaagagtataccacca

SEQ ID NO: 1546453 - DNA, 25 bp, Homo sapien
aatggaatggtggtgatctcgggtc

SEQ ID NO: 1546454 - DNA, 25 bp, Homo sapien
catgtagcggggcttggtgactgca

SEQ ID NO: 1546455 - DNA, 25 bp, Homo sapien
ttctcatacatgtccttccggggac

SEQ ID NO: 1546456 - DNA, 25 bp, Homo sapien
catacatgtccttccggggacgggg

SEQ ID NO: 1546457 - DNA, 25 bp, Homo sapien
gcccagggtagaggtggagctcatg

SEQ ID NO: 1546458 - DNA, 25 bp, Homo sapien
ccacagaagggtttcgaacaggaga

SEQ ID NO: 1546459 - DNA, 25 bp, Homo sapien
cttcacttcaaggtactagggagcc

SEQ ID NO: 1546460 - DNA, 25 bp, Homo sapien
tgtgcagtggcataacaccgagagt

SEQ ID NO: 1546461 - DNA, 25 bp, Homo sapien
tcctagagggccctacaggctatgg

SEQ ID NO: 1546462 - DNA, 25 bp, Homo sapien
gacgtggtctccatccacgaagtcc

SEQ ID NO: 1546463 - DNA, 25 bp, Homo sapien
caggatgacgtggtctccatccacg

SEQ ID NO: 1546464 - DNA, 25 bp, Homo sapien
agtcctccagcacttttgtcacctg

SEQ ID NO: 1546465 - DNA, 25 bp, Homo sapien
gctccagtgcctgcgtcttcttgaa

SEQ ID NO: 1546466 - DNA, 25 bp, Homo sapien
cttcacgaagttcttctaggcatgc

SEQ ID NO: 1546467 - DNA, 25 bp, Homo sapien
gaagttcttctaggcatgccacgta

SEQ ID NO: 1546468 - DNA, 25 bp, Homo sapien
cacgaagttcttctaggcatgccac

SEQ ID NO: 1546469 - DNA, 25 bp, Homo sapien
gaagggggagatctccagagcttca

SEQ ID NO: 1546470 - DNA, 25 bp, Homo sapien
tggaccccgacacccatacatccac

SEQ ID NO: 1546471 - DNA, 25 bp, Homo sapien
ctggaccccgacacccatacatcca

SEQ ID NO: 1546472 - DNA, 25 bp, Homo sapien
cacccatacatccacccatggaagc

SEQ ID NO: 1546473 - DNA, 25 bp, Homo sapien
ccgacacccatacatccacccatgg

SEQ ID NO: 1546474 - DNA, 25 bp, Homo sapien
actcatcaatggtttcccctccatg

SEQ ID NO: 1546475 - DNA, 25 bp, Homo sapien
ggttctgcgtcctcatatacaaagt

SEQ ID NO: 1546476 - DNA, 25 bp, Homo sapien
gattgacagcatgaaccctggagcc

SEQ ID NO: 1546477 - DNA, 25 bp, Homo sapien
aagtctatgctgtatccgcaaccca

SEQ ID NO: 1546478 - DNA, 25 bp, Homo sapien
tctcagtcaagtgcgatccaaaaat

SEQ ID NO: 1546479 - DNA, 25 bp, Homo sapien
aggtagccgtcctcacggttgccct

SEQ ID NO: 1546480 - DNA, 25 bp, Homo sapien
ggtgtggtcgtgcacgaagaggagg

SEQ ID NO: 1546481 - DNA, 25 bp, Homo sapien
tggtggtcgggcaaggccaccgtct

SEQ ID NO: 1546482 - DNA, 25 bp, Homo sapien
ccgtcttgccgaagtctatcatcca

SEQ ID NO: 1546483 - DNA, 25 bp, Homo sapien
caccccagggttctacagtctttgg

SEQ ID NO: 1546484 - DNA, 25 bp, Homo sapien
ctttggtttggatcaggctgcaggc

SEQ ID NO: 1546485 - DNA, 25 bp, Homo sapien
tccctggtgaagacatggactgtca

SEQ ID NO: 1546486 - DNA, 25 bp, Homo sapien
gactggcgccatccaattaacctga

SEQ ID NO: 1546487 - DNA, 25 bp, Homo sapien
tgacggccgggtgtacgtggtgccc

SEQ ID NO: 1546488 - DNA, 25 bp, Homo sapien
tgggtggggtacgggctggcctctg

SEQ ID NO: 1546489 - DNA, 25 bp, Homo sapien
cgggtgtacgtggtgcccgtgggtg

SEQ ID NO: 1546490 - DNA, 25 bp, Homo sapien
ccactgacggccgggtgtacgtggt

SEQ ID NO: 1546491 - DNA, 25 bp, Homo sapien
gcaattcctgctcccgtggtttcaa

SEQ ID NO: 1546492 - DNA, 25 bp, Homo sapien
tggtttcaaatattagccctggtcc

SEQ ID NO: 1546493 - DNA, 25 bp, Homo sapien
cggtaccacagatccggttccggat

SEQ ID NO: 1546494 - DNA, 25 bp, Homo sapien
tcaggtgccttatgacttgagtcag

SEQ ID NO: 1546495 - DNA, 25 bp, Homo sapien
cacgtgatcgcaaaatgggcgggaa

SEQ ID NO: 1546496 - DNA, 25 bp, Homo sapien
cccgccagagctgcgttttctgtca

SEQ ID NO: 1546497 - DNA, 25 bp, Homo sapien
gcgggaactgttgcgtgtaatacca

SEQ ID NO: 1546498 - DNA, 25 bp, Homo sapien
taataccacgtgatatgggaaaggc

SEQ ID NO: 1546499 - DNA, 25 bp, Homo sapien
ccgggtctacggaccaatcagtgaa

SEQ ID NO: 1546500 - DNA, 25 bp, Homo sapien
tggcgcccgggtctacggaccaatc

SEQ ID NO: 1546501 - DNA, 25 bp, Homo sapien
ggcgcccgggtctacggaccaatca

SEQ ID NO: 1546502 - DNA, 25 bp, Homo sapien
aaccggcgcctgctacttccctgag

SEQ ID NO: 1546503 - DNA, 25 bp, Homo sapien
cttccgacagggccgtagttctctc

SEQ ID NO: 1546504 - DNA, 25 bp, Homo sapien
gacagggccgtagttctctcaaccg

SEQ ID NO: 1546505 - DNA, 25 bp, Homo sapien
gctacttccctgagaccaaaccaca

SEQ ID NO: 1546506 - DNA, 25 bp, Homo sapien
cgatggtcgtttgcaccggaggtta

SEQ ID NO: 1546507 - DNA, 25 bp, Homo sapien
gagatttactacgacttccaggatg

SEQ ID NO: 1546508 - DNA, 25 bp, Homo sapien
acaacaaagcgtgcgtaggacccgc

SEQ ID NO: 1546509 - DNA, 25 bp, Homo sapien
caaatcctttgtcccaacgtcggct

SEQ ID NO: 1546510 - DNA, 25 bp, Homo sapien
ggttgttgatataaatagtgtggtt

SEQ ID NO: 1546511 - DNA, 25 bp, Homo sapien
tgatataaatagtgtggttagggcg

SEQ ID NO: 1546512 - DNA, 25 bp, Homo sapien
tcattgaggttgttgatataaatag

SEQ ID NO: 1546513 - DNA, 25 bp, Homo sapien
aatagtgtggttagggcgggtctcg

SEQ ID NO: 1546514 - DNA, 25 bp, Homo sapien
gactccggactatcccgagaactca

SEQ ID NO: 1546515 - DNA, 25 bp, Homo sapien
caaggagttaactcgaagtttggct

SEQ ID NO: 1546516 - DNA, 25 bp, Homo sapien
ggctggacaaacacttagaaagaga

SEQ ID NO: 1546517 - DNA, 25 bp, Homo sapien
cagcccgtgcgggacagtctggact

SEQ ID NO: 1546518 - DNA, 25 bp, Homo sapien
tagccttcttcctacaagattgttg

SEQ ID NO: 1546519 - DNA, 25 bp, Homo sapien
gagcgttagccaccattatggtaca

SEQ ID NO: 1546520 - DNA, 25 bp, Homo sapien
tatggtacatgttcattgtgggctg

SEQ ID NO: 1546521 - DNA, 25 bp, Homo sapien
cacagaccagcccatgatacagagc

SEQ ID NO: 1546522 - DNA, 25 bp, Homo sapien
ggtggcctcaaccactttacttgct

SEQ ID NO: 1546523 - DNA, 25 bp, Homo sapien
aagtcacatcacccctgtctcagtt

SEQ ID NO: 1546524 - DNA, 25 bp, Homo sapien
caaaaattgggttcctaagcagaat

SEQ ID NO: 1546525 - DNA, 25 bp, Homo sapien
cagaattctatacgggtggcctcaa

SEQ ID NO: 1546526 - DNA, 25 bp, Homo sapien
caggtctgcaaagggcaccaatgtc

SEQ ID NO: 1546527 - DNA, 25 bp, Homo sapien
ggcaccaatgtcttatgcaaagaag

SEQ ID NO: 1546528 - DNA, 25 bp, Homo sapien
gattcaagctcaacaaggatggact

SEQ ID NO: 1546529 - DNA, 25 bp, Homo sapien
cacttgacagcaagtgagattcaag

SEQ ID NO: 1546530 - DNA, 25 bp, Homo sapien
cagggcatcaatctggagggcataa

SEQ ID NO: 1546531 - DNA, 25 bp, Homo sapien
cataaggaagcgtatggcagagccc

SEQ ID NO: 1546532 - DNA, 25 bp, Homo sapien
tcagaggattcctcactggcccagg

SEQ ID NO: 1546533 - DNA, 25 bp, Homo sapien
taggtggcaactatgactgtcccaa

SEQ ID NO: 1546534 - DNA, 25 bp, Homo sapien
gctcccctttttagaagaagcgcag

SEQ ID NO: 1546535 - DNA, 25 bp, Homo sapien
gacagcatccggcacgtagtaaaca

SEQ ID NO: 1546536 - DNA, 25 bp, Homo sapien
gcctcgggtccataatctctcaaga

SEQ ID NO: 1546537 - DNA, 25 bp, Homo sapien
agaagcgcagcccaaatagaagacc

SEQ ID NO: 1546538 - DNA, 25 bp, Homo sapien
cgtgataccaggatatccaggatct

SEQ ID NO: 1546539 - DNA, 25 bp, Homo sapien
tcaggctccgtgataccaggatatc

SEQ ID NO: 1546540 - DNA, 25 bp, Homo sapien
tcatcttcaggctccgtgataccag

SEQ ID NO: 1546541 - DNA, 25 bp, Homo sapien
taccaggatatccaggatctggcca

SEQ ID NO: 1546542 - DNA, 25 bp, Homo sapien
gcagggcgttggtggcgctgctgac

SEQ ID NO: 1546543 - DNA, 25 bp, Homo sapien
catggagcgcagggcgttggtggcg

SEQ ID NO: 1546544 - DNA, 25 bp, Homo sapien
gagcgcagggcgttggtggcgctgc

SEQ ID NO: 1546545 - DNA, 25 bp, Homo sapien
tttgtcatagaaagggaaaccctgc

SEQ ID NO: 1546546 - DNA, 25 bp, Homo sapien
acagcctccgtacccgcaatgctca

SEQ ID NO: 1546547 - DNA, 25 bp, Homo sapien
cagcctccgtacccgcaatgctcac

SEQ ID NO: 1546548 - DNA, 25 bp, Homo sapien
ccacacagcctccgtacccgcaatg

SEQ ID NO: 1546549 - DNA, 25 bp, Homo sapien
acacagcctccgtacccgcaatgct

SEQ ID NO: 1546550 - DNA, 25 bp, Homo sapien
aggcgaaggttgcagtcagctgaga

SEQ ID NO: 1546551 - DNA, 25 bp, Homo sapien
gcgaaggttgcagtcagctgagatg

SEQ ID NO: 1546552 - DNA, 25 bp, Homo sapien
ggaggcgaaggttgcagtcagctga

SEQ ID NO: 1546553 - DNA, 25 bp, Homo sapien
aggaggcgaaggttgcagtcagctg

SEQ ID NO: 1546554 - DNA, 25 bp, Homo sapien
agtcggtcttggcatactggatacg

SEQ ID NO: 1546555 - DNA, 25 bp, Homo sapien
cttgcggtcccgctccacgaaggtg

SEQ ID NO: 1546556 - DNA, 25 bp, Homo sapien
tatctgagtcggtcttggcatactg

SEQ ID NO: 1546557 - DNA, 25 bp, Homo sapien
tggcaatgatatctgagtcggtctt

SEQ ID NO: 1546558 - DNA, 25 bp, Homo sapien
caagacacaggcgacaaaatcaagg

SEQ ID NO: 1546559 - DNA, 25 bp, Homo sapien
catgcacaatgagttacaagacaca

SEQ ID NO: 1546560 - DNA, 25 bp, Homo sapien
agtttcgaaaggagatagcatcatc

SEQ ID NO: 1546561 - DNA, 25 bp, Homo sapien
aaaatcaaggccacggagagagcga

SEQ ID NO: 1546562 - DNA, 25 bp, Homo sapien
tctgtcctggcataagctgctgcgg

SEQ ID NO: 1546563 - DNA, 25 bp, Homo sapien
gcgcctgagtcatcggcggcatgcc

SEQ ID NO: 1546564 - DNA, 25 bp, Homo sapien
gggcggcatgtagggcggctggccc

SEQ ID NO: 1546565 - DNA, 25 bp, Homo sapien
gctggcccggcatgtggtgcataat

SEQ ID NO: 1546566 - DNA, 25 bp, Homo sapien
cctggtgggtgggactagatactca

SEQ ID NO: 1546567 - DNA, 25 bp, Homo sapien
gtcctgtattctcactatttatatg

SEQ ID NO: 1546568 - DNA, 25 bp, Homo sapien
cctggcacgtaaggaggcgctcaat

SEQ ID NO: 1546569 - DNA, 25 bp, Homo sapien
gctcaatagctcatggaatcaatct

SEQ ID NO: 1546570 - DNA, 25 bp, Homo sapien
tgcgggggtataggggagtcggtga

SEQ ID NO: 1546571 - DNA, 25 bp, Homo sapien
ctgcgggggtataggggagtcggtg

SEQ ID NO: 1546572 - DNA, 25 bp, Homo sapien
gttggtgaggaacaagatgtgattc

SEQ ID NO: 1546573 - DNA, 25 bp, Homo sapien
catggacagcatgagctcgttggtc

SEQ ID NO: 1546574 - DNA, 25 bp, Homo sapien
tgtgattcggtggattctcagaaag

SEQ ID NO: 1546575 - DNA, 25 bp, Homo sapien
tgattgaaaagcatggacagcatga

SEQ ID NO: 1546576 - DNA, 25 bp, Homo sapien
ctaggtatccttttttccatcggca

SEQ ID NO: 1546577 - DNA, 25 bp, Homo sapien
tctcggcactattataaagttgcgc

SEQ ID NO: 1546578 - DNA, 25 bp, Homo sapien
tttgtggacaggctgcacatgtggt

SEQ ID NO: 1546579 - DNA, 25 bp, Homo sapien
taagtgccacgcagtgcagcatggt

SEQ ID NO: 1546580 - DNA, 25 bp, Homo sapien
ggcagggccccattactcagaatta

SEQ ID NO: 1546581 - DNA, 25 bp, Homo sapien
gagaacgacagacctcagggactca

SEQ ID NO: 1546582 - DNA, 25 bp, Homo sapien
aaatagcctccaatgcacagggcag

SEQ ID NO: 1546583 - DNA, 25 bp, Homo sapien
ccaaaatgcagatagtactaagttg

SEQ ID NO: 1546584 - DNA, 25 bp, Homo sapien
acctcattgtcaaactccacgaagg

SEQ ID NO: 1546585 - DNA, 25 bp, Homo sapien
cttcatggcgttgttctgcgtgatc

SEQ ID NO: 1546586 - DNA, 25 bp, Homo sapien
tccacgaaggcgatgtcatgccgcc

SEQ ID NO: 1546587 - DNA, 25 bp, Homo sapien
cgtgatcttaaagccctgcagggca

SEQ ID NO: 1546588 - DNA, 25 bp, Homo sapien
gcctaacagcgccaggtgcaatgtc

SEQ ID NO: 1546589 - DNA, 25 bp, Homo sapien
tgtctggggacagactctgggtaca

SEQ ID NO: 1546590 - DNA, 25 bp, Homo sapien
agccactttaattccggcctaacag

SEQ ID NO: 1546591 - DNA, 25 bp, Homo sapien
tctgggtacaatgctgtgtggcgac

SEQ ID NO: 1546592 - DNA, 25 bp, Homo sapien
tcccgctgaactctagctaggagct

SEQ ID NO: 1546593 - DNA, 25 bp, Homo sapien
tcaagtcagtagcttcccaggagtg

SEQ ID NO: 1546594 - DNA, 25 bp, Homo sapien
caggagtgaccaaatgagtccaggc

SEQ ID NO: 1546595 - DNA, 25 bp, Homo sapien
gggctgcaaactcgaactcaagagt

SEQ ID NO: 1546596 - DNA, 25 bp, Homo sapien
actgcagcctccccgtcctgggatc

SEQ ID NO: 1546597 - DNA, 25 bp, Homo sapien
ttacaggcacgcacccctatgccca

SEQ ID NO: 1546598 - DNA, 25 bp, Homo sapien
cagcctccccgtcctgggatcaagc

SEQ ID NO: 1546599 - DNA, 25 bp, Homo sapien
gcctccccgtcctgggatcaagcag

SEQ ID NO: 1546600 - DNA, 25 bp, Homo sapien
tttctagagccaatgtcttactgtg

SEQ ID NO: 1546601 - DNA, 25 bp, Homo sapien
tctcgagtagaatagtaggcaagtc

SEQ ID NO: 1546602 - DNA, 25 bp, Homo sapien
tgcctggcctataaccccttgttac

SEQ ID NO: 1546603 - DNA, 25 bp, Homo sapien
tctaaggcttacagagccaggaagt

SEQ ID NO: 1546604 - DNA, 25 bp, Homo sapien
gcggaggagcctgtaaagaaaacca

SEQ ID NO: 1546605 - DNA, 25 bp, Homo sapien
ccacagaagcggaggagcctgtaaa

SEQ ID NO: 1546606 - DNA, 25 bp, Homo sapien
ccctctggccacagaagcggaggag

SEQ ID NO: 1546607 - DNA, 25 bp, Homo sapien
tgggctcctccgctgtcccctctgg

SEQ ID NO: 1546608 - DNA, 25 bp, Homo sapien
ctcccgtagtacaaggaaacttgtg

SEQ ID NO: 1546609 - DNA, 25 bp, Homo sapien
ccaaacttcgcccacaccacctaga

SEQ ID NO: 1546610 - DNA, 25 bp, Homo sapien
cgtagtacaaggaaacttgtgttct

SEQ ID NO: 1546611 - DNA, 25 bp, Homo sapien
tccctctctcccgtagtacaaggaa

SEQ ID NO: 1546612 - DNA, 25 bp, Homo sapien
agatgatgacaccaaggcacaccag

SEQ ID NO: 1546613 - DNA, 25 bp, Homo sapien
atgacaccaaggcacaccagggacc

SEQ ID NO: 1546614 - DNA, 25 bp, Homo sapien
cagacagcaagatgatgacaccaag

SEQ ID NO: 1546615 - DNA, 25 bp, Homo sapien
cagcaagatgatgacaccaaggcac

SEQ ID NO: 1546616 - DNA, 25 bp, Homo sapien
cacagcttccggtcagccagcttgg

SEQ ID NO: 1546617 - DNA, 25 bp, Homo sapien
ggctgcactcctggtccgcacacag

SEQ ID NO: 1546618 - DNA, 25 bp, Homo sapien
agcttccggtcagccagcttgggca

SEQ ID NO: 1546619 - DNA, 25 bp, Homo sapien
tgcactcctggtccgcacacagctt

SEQ ID NO: 1546620 - DNA, 25 bp, Homo sapien
gaatggtcaggaatcggcagtcggg

SEQ ID NO: 1546621 - DNA, 25 bp, Homo sapien
accacttggccccggtgaatggtca

SEQ ID NO: 1546622 - DNA, 25 bp, Homo sapien
acttggccccggtgaatggtcagga

SEQ ID NO: 1546623 - DNA, 25 bp, Homo sapien
cagtcgggggccatgtagtcctgaa

SEQ ID NO: 1546624 - DNA, 25 bp, Homo sapien
cctccccagaagagccgcccacggc

SEQ ID NO: 1546625 - DNA, 25 bp, Homo sapien
ccttgtcatatgaatctcagcttaa

SEQ ID NO: 1546626 - DNA, 25 bp, Homo sapien
tgtcatatgaatctcagcttaaatg

SEQ ID NO: 1546627 - DNA, 25 bp, Homo sapien
cttgtcatatgaatctcagcttaaa

SEQ ID NO: 1546628 - DNA, 25 bp, Homo sapien
ctggggaagaggagttaaaagctag

SEQ ID NO: 1546629 - DNA, 25 bp, Homo sapien
gatctccatagtaatctccctgaac

SEQ ID NO: 1546630 - DNA, 25 bp, Homo sapien
agccagatctccatagtaatctccc

SEQ ID NO: 1546631 - DNA, 25 bp, Homo sapien
gggtctggtcctctcggacaatgct

SEQ ID NO: 1546632 - DNA, 25 bp, Homo sapien
ggtcctctcggacaatgctactggg

SEQ ID NO: 1546633 - DNA, 25 bp, Homo sapien
ctagtggttttagcaaaggctgcag

SEQ ID NO: 1546634 - DNA, 25 bp, Homo sapien
tagtggttttagcaaaggctgcagc

SEQ ID NO: 1546635 - DNA, 25 bp, Homo sapien
agaaaaccagcggtcacaccacaaa

SEQ ID NO: 1546636 - DNA, 25 bp, Homo sapien
ggtcacaccacaaaggatctagtgg

SEQ ID NO: 1546637 - DNA, 25 bp, Homo sapien
ccaaagaccacggagacgagccgtt

SEQ ID NO: 1546638 - DNA, 25 bp, Homo sapien
agacgagccgtttgcactgggctga

SEQ ID NO: 1546639 - DNA, 25 bp, Homo sapien
ttgcactgggctgattgtatttgca

SEQ ID NO: 1546640 - DNA, 25 bp, Homo sapien
ccacggagacgagccgtttgcactg

SEQ ID NO: 1546641 - DNA, 25 bp, Homo sapien
gagctgcttagctgagccgaggaac

SEQ ID NO: 1546642 - DNA, 25 bp, Homo sapien
cagagtcgagtctccggattggatc

SEQ ID NO: 1546643 - DNA, 25 bp, Homo sapien
gctggcgggagcgattactgttctc

SEQ ID NO: 1546644 - DNA, 25 bp, Homo sapien
gataccaggcgacgctttccgaagg

SEQ ID NO: 1546645 - DNA, 25 bp, Homo sapien
cgctgagggccgcaatatggcgccg

SEQ ID NO: 1546646 - DNA, 25 bp, Homo sapien
tcgcggccgctgagggccgcaatat

SEQ ID NO: 1546647 - DNA, 25 bp, Homo sapien
gactcggtcgcggccgctgagggcc

SEQ ID NO: 1546648 - DNA, 25 bp, Homo sapien
gagggccgcaatatggcgccgcggc

SEQ ID NO: 1546649 - DNA, 25 bp, Homo sapien
taaacaaggactacgatatagccct

SEQ ID NO: 1546650 - DNA, 25 bp, Homo sapien
cattttccggatgaggtaacaggcc

SEQ ID NO: 1546651 - DNA, 25 bp, Homo sapien
tattccctgaaaatgacaagctggt

SEQ ID NO: 1546652 - DNA, 25 bp, Homo sapien
cacagctgggcagaagtgagattca

SEQ ID NO: 1546653 - DNA, 25 bp, Homo sapien
catcacagttagagggagagaaaca

SEQ ID NO: 1546654 - DNA, 25 bp, Homo sapien
tctctctctaaccatcacagttaga

SEQ ID NO: 1546655 - DNA, 25 bp, Homo sapien
atggagccaaaatcagggataccca

SEQ ID NO: 1546656 - DNA, 25 bp, Homo sapien
gggaaaaaagatggattccaatcca

SEQ ID NO: 1546657 - DNA, 25 bp, Homo sapien
aatgaactgatgaaggagacatgat

SEQ ID NO: 1546658 - DNA, 25 bp, Homo sapien
gatgaaggagacatgatttgccagt

SEQ ID NO: 1546659 - DNA, 25 bp, Homo sapien
actgatgaaggagacatgatttgcc

SEQ ID NO: 1546660 - DNA, 25 bp, Homo sapien
tgaactgatgaaggagacatgattt

SEQ ID NO: 1546661 - DNA, 25 bp, Homo sapien
ttcccaggaccactgcgggaaactc

SEQ ID NO: 1546662 - DNA, 25 bp, Homo sapien
cccaggaccactgcgggaaactcac

SEQ ID NO: 1546663 - DNA, 25 bp, Homo sapien
tcccaggaccactgcgggaaactca

SEQ ID NO: 1546664 - DNA, 25 bp, Homo sapien
aagcaaggaccaaaaagccagcact

SEQ ID NO: 1546665 - DNA, 25 bp, Homo sapien
tcaaggagaacctagtaaaggacat

SEQ ID NO: 1546666 - DNA, 25 bp, Homo sapien
agccagcactggacttgtacctatg

SEQ ID NO: 1546667 - DNA, 25 bp, Homo sapien
taaaggacatacgacaaagcaagga

SEQ ID NO: 1546668 - DNA, 25 bp, Homo sapien
cgggatccaaactccacgccgattg

SEQ ID NO: 1546669 - DNA, 25 bp, Homo sapien
ttgaccacccgggatccaaactcca

SEQ ID NO: 1546670 - DNA, 25 bp, Homo sapien
actccacgccgattgtgtggttgga

SEQ ID NO: 1546671 - DNA, 25 bp, Homo sapien
cgtgtcccaaatctgtagcttcaca

SEQ ID NO: 1546672 - DNA, 25 bp, Homo sapien
ctctcagtgtctccaagtgactcta

SEQ ID NO: 1546673 - DNA, 25 bp, Homo sapien
tatatatacctgctaactacggtgt

SEQ ID NO: 1546674 - DNA, 25 bp, Homo sapien
tctcagtgtctccaagtgactctac

SEQ ID NO: 1546675 - DNA, 25 bp, Homo sapien
gctaactacggtgtctcatctctct

SEQ ID NO: 1546676 - DNA, 25 bp, Homo sapien
caggcctccttacctcccttatcat

SEQ ID NO: 1546677 - DNA, 25 bp, Homo sapien
tctttctgtttcggtgtctctcagt

SEQ ID NO: 1546678 - DNA, 25 bp, Homo sapien
ctctttctgtttcggtgtctctcag

SEQ ID NO: 1546679 - DNA, 25 bp, Homo sapien
cttacctcccttatcattctcttca

SEQ ID NO: 1546680 - DNA, 25 bp, Homo sapien
ctgcccaagcactatacaacatctg

SEQ ID NO: 1546681 - DNA, 25 bp, Homo sapien
gaactcatgcaatcattccacagca

SEQ ID NO: 1546682 - DNA, 25 bp, Homo sapien
ccagtgtagccaattctgcattctc

SEQ ID NO: 1546683 - DNA, 25 bp, Homo sapien
ggtggagtctccttcccagtgtagc

SEQ ID NO: 1546684 - DNA, 25 bp, Homo sapien
tgtggggccagggggacccagtcac

SEQ ID NO: 1546685 - DNA, 25 bp, Homo sapien
ctgtggggccagggggacccagtca

SEQ ID NO: 1546686 - DNA, 25 bp, Homo sapien
tcggtaataactccgcgtcactgac

SEQ ID NO: 1546687 - DNA, 25 bp, Homo sapien
cagccgcccctcggtaataactccg

SEQ ID NO: 1546688 - DNA, 25 bp, Homo sapien
gcccctcggtaataactccgcgtca

SEQ ID NO: 1546689 - DNA, 25 bp, Homo sapien
ccctcggtaataactccgcgtcact

SEQ ID NO: 1546690 - DNA, 25 bp, Homo sapien
gtgcgggcatccgtcagccaggcag

SEQ ID NO: 1546691 - DNA, 25 bp, Homo sapien
ccagggtgcgggcatccgtcagcca

SEQ ID NO: 1546692 - DNA, 25 bp, Homo sapien
gccagggtgcgggcatccgtcagcc

SEQ ID NO: 1546693 - DNA, 25 bp, Homo sapien
agggtgcgggcatccgtcagccagg

SEQ ID NO: 1546694 - DNA, 25 bp, Homo sapien
cattctcctgggcaaagcgggaggc

SEQ ID NO: 1546695 - DNA, 25 bp, Homo sapien
tccaggaaagtgacctcccgctcag

SEQ ID NO: 1546696 - DNA, 25 bp, Homo sapien
cctgggcaaagcgggaggcctccag

SEQ ID NO: 1546697 - DNA, 25 bp, Homo sapien
gtgacctcccgctcagggtccaggt

SEQ ID NO: 1546698 - DNA, 25 bp, Homo sapien
cagagtctacccatcagcagcatga

SEQ ID NO: 1546699 - DNA, 25 bp, Homo sapien
tcactgtctggaagtgggtctgtcc

SEQ ID NO: 1546700 - DNA, 25 bp, Homo sapien
gagtcaggtaccgacttagggctcc

SEQ ID NO: 1546701 - DNA, 25 bp, Homo sapien
aaggttgggcctagggctgtctcca

SEQ ID NO: 1546702 - DNA, 25 bp, Homo sapien
aatcttgttgaggatagtgcgggca

SEQ ID NO: 1546703 - DNA, 25 bp, Homo sapien
gggcacacttgaggaacgcctcctc

SEQ ID NO: 1546704 - DNA, 25 bp, Homo sapien
acgttctcgcctgtgagagcgctgg

SEQ ID NO: 1546705 - DNA, 25 bp, Homo sapien
cttgttgaggatagtgcgggcacac

SEQ ID NO: 1546706 - DNA, 25 bp, Homo sapien
gacgcatccccgtactgaatgccag

SEQ ID NO: 1546707 - DNA, 25 bp, Homo sapien
gagcccatcctctccgggtctagct

SEQ ID NO: 1546708 - DNA, 25 bp, Homo sapien
tgggcactccgaggctgccgaagct

SEQ ID NO: 1546709 - DNA, 25 bp, Homo sapien
gctgccgaagctggcggagggacgc

SEQ ID NO: 1546710 - DNA, 25 bp, Homo sapien
actttgccaggcgttggtggcccat

SEQ ID NO: 1546711 - DNA, 25 bp, Homo sapien
tttgtgagcagctggccaacgtggt

SEQ ID NO: 1546712 - DNA, 25 bp, Homo sapien
catcaggaaatcacgttggctctgc

SEQ ID NO: 1546713 - DNA, 25 bp, Homo sapien
gaactggcaagacatacacatcccc

SEQ ID NO: 1546714 - DNA, 25 bp, Homo sapien
gatcaagtcttgaccatcaggcccc

SEQ ID NO: 1546715 - DNA, 25 bp, Homo sapien
taatgaaaacgttctgaggccgggc

SEQ ID NO: 1546716 - DNA, 25 bp, Homo sapien
taaaaacagccctcatcgatcaagt

SEQ ID NO: 1546717 - DNA, 25 bp, Homo sapien
tctcaacatctatagaagcaggtgc

SEQ ID NO: 1546718 - DNA, 25 bp, Homo sapien
tcagtttggtgggtcttgaccaatt

SEQ ID NO: 1546719 - DNA, 25 bp, Homo sapien
ccagagtgcatcatatataataaga

SEQ ID NO: 1546720 - DNA, 25 bp, Homo sapien
cagaatagcacagaacggcaaatac

SEQ ID NO: 1546721 - DNA, 25 bp, Homo sapien
ggtcattctaatgtgtgtcactgcc

SEQ ID NO: 1546722 - DNA, 25 bp, Homo sapien
tctgtccagccggtctctatctcat

SEQ ID NO: 1546723 - DNA, 25 bp, Homo sapien
tgagtctgtaaagccacatttcaac

SEQ ID NO: 1546724 - DNA, 25 bp, Homo sapien
ttgtgctgagggtacctgcatctcc

SEQ ID NO: 1546725 - DNA, 25 bp, Homo sapien
tcatgaatctggatggacgcagtgg

SEQ ID NO: 1546726 - DNA, 25 bp, Homo sapien
tgaccctggtctcaggctttgggag

SEQ ID NO: 1546727 - DNA, 25 bp, Homo sapien
gacaggtggcaacgtagcttctccg

SEQ ID NO: 1546728 - DNA, 25 bp, Homo sapien
taacaggtactagcaacagcagggc

SEQ ID NO: 1546729 - DNA, 25 bp, Homo sapien
ggacaggcctccaggtaataaataa

SEQ ID NO: 1546730 - DNA, 25 bp, Homo sapien
caaggagaaaggaaacagcggtccg

SEQ ID NO: 1546731 - DNA, 25 bp, Homo sapien
gagaaaggaaacagcggtccgtggc

SEQ ID NO: 1546732 - DNA, 25 bp, Homo sapien
aggagaaaggaaacagcggtccgtg

SEQ ID NO: 1546733 - DNA, 25 bp, Homo sapien
ggcgccgccgtttgtgccagccgcc

SEQ ID NO: 1546734 - DNA, 25 bp, Homo sapien
agccgccctgcgccgcacagcgcgc

SEQ ID NO: 1546735 - DNA, 25 bp, Homo sapien
cggcgccgccgtttgtgccagccgc

SEQ ID NO: 1546736 - DNA, 25 bp, Homo sapien
gtgccagccgccctgcgccgcacag

SEQ ID NO: 1546737 - DNA, 25 bp, Homo sapien
acaggacgagagataaaggtgcccc

SEQ ID NO: 1546738 - DNA, 25 bp, Homo sapien
ccttctgagcgcagtaggcgacagg

SEQ ID NO: 1546739 - DNA, 25 bp, Homo sapien
ctgaggccccttctgagcgcagtag

SEQ ID NO: 1546740 - DNA, 25 bp, Homo sapien
agacaggacgagagataaaggtgcc

SEQ ID NO: 1546741 - DNA, 25 bp, Homo sapien
ggtccgcggcgacagaggaaaggac

SEQ ID NO: 1546742 - DNA, 25 bp, Homo sapien
ggtagatgaccctaagacagaggac

SEQ ID NO: 1546743 - DNA, 25 bp, Homo sapien
ccaggacagacttgactatagaggc

SEQ ID NO: 1546744 - DNA, 25 bp, Homo sapien
tgcctcggcgttccagaaagacaac

SEQ ID NO: 1546745 - DNA, 25 bp, Homo sapien
tgtgggacgcggtaaccaaagacag

SEQ ID NO: 1546746 - DNA, 25 bp, Homo sapien
tctgcggtccctaagggcttgggaa

SEQ ID NO: 1546747 - DNA, 25 bp, Homo sapien
gggcagacagcaagagctcttctcg

SEQ ID NO: 1546748 - DNA, 25 bp, Homo sapien
tccgcctccacttgatgcagctggg

SEQ ID NO: 1546749 - DNA, 25 bp, Homo sapien
gcaagagctcttctcgtgccctggg

SEQ ID NO: 1546750 - DNA, 25 bp, Homo sapien
ctgagggagagcctgacttaggggc

SEQ ID NO: 1546751 - DNA, 25 bp, Homo sapien
tgagggagagcctgacttaggggct

SEQ ID NO: 1546752 - DNA, 25 bp, Homo sapien
tccaagggctctgacgaagaccctg

SEQ ID NO: 1546753 - DNA, 25 bp, Homo sapien
gctccaagggctctgacgaagaccc

SEQ ID NO: 1546754 - DNA, 25 bp, Homo sapien
ggctccaagggctctgacgaagacc

SEQ ID NO: 1546755 - DNA, 25 bp, Homo sapien
ccaagggctctgacgaagaccctgg

SEQ ID NO: 1546756 - DNA, 25 bp, Homo sapien
tcctggttctcttgcctggcccagg

SEQ ID NO: 1546757 - DNA, 25 bp, Homo sapien
tggtgaccagcgctgcagcgccttc

SEQ ID NO: 1546758 - DNA, 25 bp, Homo sapien
taggcactcctggacagtggtagga

SEQ ID NO: 1546759 - DNA, 25 bp, Homo sapien
catcctcggcccatttccgtttggg

SEQ ID NO: 1546760 - DNA, 25 bp, Homo sapien
ctgccactgctgcagctgcagctca

SEQ ID NO: 1546761 - DNA, 25 bp, Homo sapien
gccactgctgcagctgcagctcatg

SEQ ID NO: 1546762 - DNA, 25 bp, Homo sapien
ctgctgcagctgcagctcatgccac

SEQ ID NO: 1546763 - DNA, 25 bp, Homo sapien
cactgctgcagctgcagctcatgcc

SEQ ID NO: 1546764 - DNA, 25 bp, Homo sapien
tggtgcgcccgttgatgacatagct

SEQ ID NO: 1546765 - DNA, 25 bp, Homo sapien
ccatgagggcaccaatgcttcgaca

SEQ ID NO: 1546766 - DNA, 25 bp, Homo sapien
gaagctgtccttgacgcagatgccg

SEQ ID NO: 1546767 - DNA, 25 bp, Homo sapien
catgcagggcacgatatagtccagg

SEQ ID NO: 1546768 - DNA, 25 bp, Homo sapien
tctggctcagctatcaagtaacggg

SEQ ID NO: 1546769 - DNA, 25 bp, Homo sapien
tccgtggatcagcaaattgaggctc

SEQ ID NO: 1546770 - DNA, 25 bp, Homo sapien
tgacgaggacgacagccaacctggg

SEQ ID NO: 1546771 - DNA, 25 bp, Homo sapien
gagagggaagtagaacaagttccag

SEQ ID NO: 1546772 - DNA, 25 bp, Homo sapien
tctcccctccccaaactgccagact

SEQ ID NO: 1546773 - DNA, 25 bp, Homo sapien
actctcccctccccaaactgccaga

SEQ ID NO: 1546774 - DNA, 25 bp, Homo sapien
cccctccccaaactgccagactcac

SEQ ID NO: 1546775 - DNA, 25 bp, Homo sapien
ctactctcccctccccaaactgcca

SEQ ID NO: 1546776 - DNA, 25 bp, Homo sapien
tactgactagagatgggcaagacct

SEQ ID NO: 1546777 - DNA, 25 bp, Homo sapien
gaatgctcagctacacctatgggcc

SEQ ID NO: 1546778 - DNA, 25 bp, Homo sapien
agagtacaattagtgagaaggcccc

SEQ ID NO: 1546779 - DNA, 25 bp, Homo sapien
tggccactgccacaacaggatgctt

SEQ ID NO: 1546780 - DNA, 25 bp, Homo sapien
gaggtaggtttactggggctaggca

SEQ ID NO: 1546781 - DNA, 25 bp, Homo sapien
aggtaggtttactggggctaggcag

SEQ ID NO: 1546782 - DNA, 25 bp, Homo sapien
ccgttgcctgggtaacacgccacca

SEQ ID NO: 1546783 - DNA, 25 bp, Homo sapien
cgttgcctgggtaacacgccaccat

SEQ ID NO: 1546784 - DNA, 25 bp, Homo sapien
agcccgttgcctgggtaacacgcca

SEQ ID NO: 1546785 - DNA, 25 bp, Homo sapien
ccgagcccgttgcctgggtaacacg

SEQ ID NO: 1546786 - DNA, 25 bp, Homo sapien
ccgtggggattgtcaacgtgcctta

SEQ ID NO: 1546787 - DNA, 25 bp, Homo sapien
atacaggtgatgcagcgcccatcgc

SEQ ID NO: 1546788 - DNA, 25 bp, Homo sapien
tctgattcaggtaatagatacaggt

SEQ ID NO: 1546789 - DNA, 25 bp, Homo sapien
gtcccagttctgattcaggtaatag

SEQ ID NO: 1546790 - DNA, 25 bp, Homo sapien
aggaagagccggcagatcgcactgc

SEQ ID NO: 1546791 - DNA, 25 bp, Homo sapien
ggcaggaagctactaaagacaggaa

SEQ ID NO: 1546792 - DNA, 25 bp, Homo sapien
tggaaaatggagtggacgcacgcca

SEQ ID NO: 1546793 - DNA, 25 bp, Homo sapien
atttcccaggaagagccggcagatc

SEQ ID NO: 1546794 - DNA, 25 bp, Homo sapien
gggagcccactaggaggcgcagcgt

SEQ ID NO: 1546795 - DNA, 25 bp, Homo sapien
gcaggccaaaggatgaggctagctg

SEQ ID NO: 1546796 - DNA, 25 bp, Homo sapien
ctgcctcccacggtgccccgggagc

SEQ ID NO: 1546797 - DNA, 25 bp, Homo sapien
ctagctggtacggccaggagccgct

SEQ ID NO: 1546798 - DNA, 25 bp, Homo sapien
gctcgatgttggctaccacgggccg

SEQ ID NO: 1546799 - DNA, 25 bp, Homo sapien
gctggcttcacctcgtgggggttcc

SEQ ID NO: 1546800 - DNA, 25 bp, Homo sapien
aatgagcaaccggtcaaagagtggc

SEQ ID NO: 1546801 - DNA, 25 bp, Homo sapien
ggtcagaccagaaaatgagcaaccg

SEQ ID NO: 1546802 - DNA, 25 bp, Homo sapien
ctgggtgcgtctccagaagtacagg

SEQ ID NO: 1546803 - DNA, 25 bp, Homo sapien
tgcgtctccagaagtacaggtcata

SEQ ID NO: 1546804 - DNA, 25 bp, Homo sapien
gcgtctccagaagtacaggtcatac

SEQ ID NO: 1546805 - DNA, 25 bp, Homo sapien
ggtgcgtctccagaagtacaggtca

SEQ ID NO: 1546806 - DNA, 25 bp, Homo sapien
tgcaattccagctaccatatccaca

SEQ ID NO: 1546807 - DNA, 25 bp, Homo sapien
gctccctagtcactctgaggctctg

SEQ ID NO: 1546808 - DNA, 25 bp, Homo sapien
tgaggctctgacaggacattgtcac

SEQ ID NO: 1546809 - DNA, 25 bp, Homo sapien
cactaggcggccatccttttgagcc

SEQ ID NO: 1546810 - DNA, 25 bp, Homo sapien
tgctgcccgctccttggcatcaaaa

SEQ ID NO: 1546811 - DNA, 25 bp, Homo sapien
ggctgctgcccgctccttggcatca

SEQ ID NO: 1546812 - DNA, 25 bp, Homo sapien
tgcccgctccttggcatcaaaatac

SEQ ID NO: 1546813 - DNA, 25 bp, Homo sapien
gctgcccgctccttggcatcaaaat

SEQ ID NO: 1546814 - DNA, 25 bp, Homo sapien
acaggagacagtgagtcatcagaag

SEQ ID NO: 1546815 - DNA, 25 bp, Homo sapien
ggacaggagacagtgagtcatcaga

SEQ ID NO: 1546816 - DNA, 25 bp, Homo sapien
gacaggagacagtgagtcatcagaa

SEQ ID NO: 1546817 - DNA, 25 bp, Homo sapien
cgtaggcggctgtgatacaggtact

SEQ ID NO: 1546818 - DNA, 25 bp, Homo sapien
ctgtgatacaggtacttggacacct

SEQ ID NO: 1546819 - DNA, 25 bp, Homo sapien
tgatacaggtacttggacacctttc

SEQ ID NO: 1546820 - DNA, 25 bp, Homo sapien
ctaggtgggcgtaggcggctgtgat

SEQ ID NO: 1546821 - DNA, 25 bp, Homo sapien
tcatgaccagacagggtaggaccca

SEQ ID NO: 1546822 - DNA, 25 bp, Homo sapien
tctgccatgcggctctgggactggc

SEQ ID NO: 1546823 - DNA, 25 bp, Homo sapien
gcttcagttggtaacggtggcctcc

SEQ ID NO: 1546824 - DNA, 25 bp, Homo sapien
ttgccagcaagaggccatgactcac

SEQ ID NO: 1546825 - DNA, 25 bp, Homo sapien
cagtgctgctcgagatccagtgctt

SEQ ID NO: 1546826 - DNA, 25 bp, Homo sapien
tacgccaacgcagtgctgctcgaga

SEQ ID NO: 1546827 - DNA, 25 bp, Homo sapien
tgcttcatcagcgtggtgcccctgg

SEQ ID NO: 1546828 - DNA, 25 bp, Homo sapien
tcgagatccagtgcttcatcagcgt

SEQ ID NO: 1546829 - DNA, 25 bp, Homo sapien
ttcacacgcggaaacagtgaggccc

SEQ ID NO: 1546830 - DNA, 25 bp, Homo sapien
taaagggatgtagccagtgacccgg

SEQ ID NO: 1546831 - DNA, 25 bp, Homo sapien
gagcctaagagtcaaagcccgagag

SEQ ID NO: 1546832 - DNA, 25 bp, Homo sapien
ggtccatggcagtcttcgaacgctt

SEQ ID NO: 1546833 - DNA, 25 bp, Homo sapien
gaggaatacacacttacaggccaag

SEQ ID NO: 1546834 - DNA, 25 bp, Homo sapien
gaaaatgctggtgcacgaaagttgc

SEQ ID NO: 1546835 - DNA, 25 bp, Homo sapien
cgaaagttgctaagtaagacaggct

SEQ ID NO: 1546836 - DNA, 25 bp, Homo sapien
ggaatccacggaatgagcagcccgg

SEQ ID NO: 1546837 - DNA, 25 bp, Homo sapien
gaaactgggacatgctctgctgagc

SEQ ID NO: 1546838 - DNA, 25 bp, Homo sapien
ggtaaacatgcggaaaggcacgctg

SEQ ID NO: 1546839 - DNA, 25 bp, Homo sapien
tggagaaaaacacgtgaagacactg

SEQ ID NO: 1546840 - DNA, 25 bp, Homo sapien
tgggcgcgctggttcacaactatac

SEQ ID NO: 1546841 - DNA, 25 bp, Homo sapien
taatgcttagagtagggcatggccc

SEQ ID NO: 1546842 - DNA, 25 bp, Homo sapien
tggagataatactaaggcctgcctc

SEQ ID NO: 1546843 - DNA, 25 bp, Homo sapien
tggcccatggtgagctacttacagc

SEQ ID NO: 1546844 - DNA, 25 bp, Homo sapien
ggcctgcctcttggagttgttagaa

SEQ ID NO: 1546845 - DNA, 25 bp, Homo sapien
cattatccgccttatcaatgacaac

SEQ ID NO: 1546846 - DNA, 25 bp, Homo sapien
gacaactttcaaatcatgagcagcc

SEQ ID NO: 1546847 - DNA, 25 bp, Homo sapien
tgagcgtctgctcaccattatccgc

SEQ ID NO: 1546848 - DNA, 25 bp, Homo sapien
gccgcttcgactatgatgatgagcg

SEQ ID NO: 1546849 - DNA, 25 bp, Homo sapien
tgattgccttgtgctatgtcgcgtg

SEQ ID NO: 1546850 - DNA, 25 bp, Homo sapien
gctggctattaggtcactgcgtgtc

SEQ ID NO: 1546851 - DNA, 25 bp, Homo sapien
gttccgtgatgcctgatgattgcct

SEQ ID NO: 1546852 - DNA, 25 bp, Homo sapien
ccttgactgtatgtgttgtgatgcc

SEQ ID NO: 1546853 - DNA, 25 bp, Homo sapien
cgagatttcatctcgaaaaaaggaa

SEQ ID NO: 1546854 - DNA, 25 bp, Homo sapien
tttactatggtctgttcagctgttg

SEQ ID NO: 1546855 - DNA, 25 bp, Homo sapien
tgttcagctgttggacggccagatg

SEQ ID NO: 1546856 - DNA, 25 bp, Homo sapien
ccagatgctacgtgttgtgttgaga

SEQ ID NO: 1546857 - DNA, 25 bp, Homo sapien
tagacttggtccatcagaaccccag

SEQ ID NO: 1546858 - DNA, 25 bp, Homo sapien
gttttgtaacaagcacgtgagtcca

SEQ ID NO: 1546859 - DNA, 25 bp, Homo sapien
tcggtagttcgagaccaagcctgtc

SEQ ID NO: 1546860 - DNA, 25 bp, Homo sapien
tggtacagtttatagaggccaccct

SEQ ID NO: 1546861 - DNA, 25 bp, Homo sapien
caaatcattggctgaatacagagct

SEQ ID NO: 1546862 - DNA, 25 bp, Homo sapien
gctgagggaaagactccacaaagct

SEQ ID NO: 1546863 - DNA, 25 bp, Homo sapien
aaagagctgcttacagtggcctcaa

SEQ ID NO: 1546864 - DNA, 25 bp, Homo sapien
tcaaggaacggcatattttacgact

SEQ ID NO: 1546865 - DNA, 25 bp, Homo sapien
accacatccagcatccagctaactt

SEQ ID NO: 1546866 - DNA, 25 bp, Homo sapien
ccacatccagcatccagctaacttt

SEQ ID NO: 1546867 - DNA, 25 bp, Homo sapien
agcgcaatggccggatcatggatca

SEQ ID NO: 1546868 - DNA, 25 bp, Homo sapien
ggagcgcaatggccggatcatggat

SEQ ID NO: 1546869 - DNA, 25 bp, Homo sapien
tgcacgtctgtgtctgtttctggga

SEQ ID NO: 1546870 - DNA, 25 bp, Homo sapien
tgtgcacgtctgtgtctgtttctgg

SEQ ID NO: 1546871 - DNA, 25 bp, Homo sapien
cacgtctgtgtctgtttctgggatc

SEQ ID NO: 1546872 - DNA, 25 bp, Homo sapien
cgtctgtgtctgtttctgggatcct

SEQ ID NO: 1546873 - DNA, 25 bp, Homo sapien
cccagccacagcttagaattttaaa

SEQ ID NO: 1546874 - DNA, 25 bp, Homo sapien
ctgttgatcaatttcagaagaactg

SEQ ID NO: 1546875 - DNA, 25 bp, Homo sapien
gcgtgagataccttgcccagccaca

SEQ ID NO: 1546876 - DNA, 25 bp, Homo sapien
aaaacagcctgctgaaatttttatt

SEQ ID NO: 1546877 - DNA, 25 bp, Homo sapien
tgtctaccccaagttcacaaagatt

SEQ ID NO: 1546878 - DNA, 25 bp, Homo sapien
cacagcaatgtttagcgggttttac

SEQ ID NO: 1546879 - DNA, 25 bp, Homo sapien
cccattgaatagctttggcacctta

SEQ ID NO: 1546880 - DNA, 25 bp, Homo sapien
cgggttttactgtgtagatcttaca

SEQ ID NO: 1546881 - DNA, 25 bp, Homo sapien
gctgtacgcttttgaataaccaaat

SEQ ID NO: 1546882 - DNA, 25 bp, Homo sapien
gcaccaagaggacagtatgaaacta

SEQ ID NO: 1546883 - DNA, 25 bp, Homo sapien
taaggcatcttagacggcggaagca

SEQ ID NO: 1546884 - DNA, 25 bp, Homo sapien
gggaggtgctgtacgcttttgaata

SEQ ID NO: 1546885 - DNA, 25 bp, Homo sapien
taacaagttacgtagaccgatggaa

SEQ ID NO: 1546886 - DNA, 25 bp, Homo sapien
cgagtaatacccaacaagcacaggg

SEQ ID NO: 1546887 - DNA, 25 bp, Homo sapien
taaagaaatacctgatggcacggtg

SEQ ID NO: 1546888 - DNA, 25 bp, Homo sapien
catacaatgaaatacggcagggctt

SEQ ID NO: 1546889 - DNA, 25 bp, Homo sapien
caagttttccgggtttgagtgtcat

SEQ ID NO: 1546890 - DNA, 25 bp, Homo sapien
tttaggatccagacaatctgggtac

SEQ ID NO: 1546891 - DNA, 25 bp, Homo sapien
tgcctaagtaggtcctgggagatca

SEQ ID NO: 1546892 - DNA, 25 bp, Homo sapien
ggtgccaggtcaacaggttctgtcc

SEQ ID NO: 1546893 - DNA, 25 bp, Homo sapien
tcatgaaagactgaaacgtagcatc

SEQ ID NO: 1546894 - DNA, 25 bp, Homo sapien
gcatcagttcgaacttgcagcaggt

SEQ ID NO: 1546895 - DNA, 25 bp, Homo sapien
caagacaagcggagtgccagaaaga

SEQ ID NO: 1546896 - DNA, 25 bp, Homo sapien
tgccccaggaaaagaattggtgtag

SEQ ID NO: 1546897 - DNA, 25 bp, Homo sapien
tgtcattctcggcaaaagctcatcc

SEQ ID NO: 1546898 - DNA, 25 bp, Homo sapien
tagccctattaaaggagacagacag

SEQ ID NO: 1546899 - DNA, 25 bp, Homo sapien
gggacctggattcgataaattccaa

SEQ ID NO: 1546900 - DNA, 25 bp, Homo sapien
tgcatctccaaaataagggacctgg

SEQ ID NO: 1546901 - DNA, 25 bp, Homo sapien
ctgcttcgtgtccacataaaaccac

SEQ ID NO: 1546902 - DNA, 25 bp, Homo sapien
tcactgcttcgtgtccacataaaac

SEQ ID NO: 1546903 - DNA, 25 bp, Homo sapien
gccgggacccatgtacacagtgaac

SEQ ID NO: 1546904 - DNA, 25 bp, Homo sapien
ctggccgggacccatgtacacagtg

SEQ ID NO: 1546905 - DNA, 25 bp, Homo sapien
ccactgaactcatccgcttggtcta

SEQ ID NO: 1546906 - DNA, 25 bp, Homo sapien
tgaccttggaagttttgctttattg

SEQ ID NO: 1546907 - DNA, 25 bp, Homo sapien
catgaccttggaagttttgctttat

SEQ ID NO: 1546908 - DNA, 25 bp, Homo sapien
tccacggccactgaactcatccgct

SEQ ID NO: 1546909 - DNA, 25 bp, Homo sapien
caatcaagagagtaaggttccctct

SEQ ID NO: 1546910 - DNA, 25 bp, Homo sapien
agattatgaaagctctagactctgc

SEQ ID NO: 1546911 - DNA, 25 bp, Homo sapien
tgatggggaaagattatgaaagctc

SEQ ID NO: 1546912 - DNA, 25 bp, Homo sapien
ttatgaaagctctagactctgctgt

SEQ ID NO: 1546913 - DNA, 25 bp, Homo sapien
gggaaagattatgaaagctctagac

SEQ ID NO: 1546914 - DNA, 25 bp, Homo sapien
ctccctccccttgctgtgttcaact

SEQ ID NO: 1546915 - DNA, 25 bp, Homo sapien
cccgaagtcccgaaggatggtcagg

SEQ ID NO: 1546916 - DNA, 25 bp, Homo sapien
gaatcctccatcgttctccattggc

SEQ ID NO: 1546917 - DNA, 25 bp, Homo sapien
cctccatcgttctccattggccaga

SEQ ID NO: 1546918 - DNA, 25 bp, Homo sapien
gagaatcctccatcgttctccattg

SEQ ID NO: 1546919 - DNA, 25 bp, Homo sapien
gaattcgctccttaatgctctgctt

SEQ ID NO: 1546920 - DNA, 25 bp, Homo sapien
tcctcctgaattcgctccttaatgc

SEQ ID NO: 1546921 - DNA, 25 bp, Homo sapien
tcctgaattcgctccttaatgctct

SEQ ID NO: 1546922 - DNA, 25 bp, Homo sapien
ggcctcctcctgaattcgctcctta

SEQ ID NO: 1546923 - DNA, 25 bp, Homo sapien
tcacctggttaatctcttcgtgaat

SEQ ID NO: 1546924 - DNA, 25 bp, Homo sapien
catggataacgacatctgtgtaggg

SEQ ID NO: 1546925 - DNA, 25 bp, Homo sapien
aatcacctggttaatctcttcgtga

SEQ ID NO: 1546926 - DNA, 25 bp, Homo sapien
tctctgtatttcatggataacgaca

SEQ ID NO: 1546927 - DNA, 25 bp, Homo sapien
attcttcttgaagcggccctgctca

SEQ ID NO: 1546928 - DNA, 25 bp, Homo sapien
ttcattcttcttgaagcggccctgc

SEQ ID NO: 1546929 - DNA, 25 bp, Homo sapien
aaggcatctgggtagcggaagtatt

SEQ ID NO: 1546930 - DNA, 25 bp, Homo sapien
aaagtgctggggatagaaggcatct

SEQ ID NO: 1546931 - DNA, 25 bp, Homo sapien
caagtggcaccagcgagcatagaga

SEQ ID NO: 1546932 - DNA, 25 bp, Homo sapien
ttctacgggagaggaagacacgcag

SEQ ID NO: 1546933 - DNA, 25 bp, Homo sapien
gtccacaagtggcaccagcgagcat

SEQ ID NO: 1546934 - DNA, 25 bp, Homo sapien
gtgcaaatcttgcacagggcgttgc

SEQ ID NO: 1546935 - DNA, 25 bp, Homo sapien
cccccaccccacatgatgagttcat

SEQ ID NO: 1546936 - DNA, 25 bp, Homo sapien
cttcacccacttttcgactgggttg

SEQ ID NO: 1546937 - DNA, 25 bp, Homo sapien
cccaccccacatgatgagttcatgt

SEQ ID NO: 1546938 - DNA, 25 bp, Homo sapien
catatcttcacccactttttttatt

SEQ ID NO: 1546939 - DNA, 25 bp, Homo sapien
tgggagggtgccatgggagttaggg

SEQ ID NO: 1546940 - DNA, 25 bp, Homo sapien
ctgaaccaggagtagcaagaggcct

SEQ ID NO: 1546941 - DNA, 25 bp, Homo sapien
gtgggagggtgccatgggagttagg

SEQ ID NO: 1546942 - DNA, 25 bp, Homo sapien
cgctgaaccaggagtagcaagaggc

SEQ ID NO: 1546943 - DNA, 25 bp, Homo sapien
aggatttgagtaggcctcttctgtc

SEQ ID NO: 1546944 - DNA, 25 bp, Homo sapien
aaaggatttgagtaggcctcttctg

SEQ ID NO: 1546945 - DNA, 25 bp, Homo sapien
aaggatttgagtaggcctcttctgt

SEQ ID NO: 1546946 - DNA, 25 bp, Homo sapien
ggatttgagtaggcctcttctgtcc

SEQ ID NO: 1546947 - DNA, 25 bp, Homo sapien
aaaggcattaggcaaagcatgctga

SEQ ID NO: 1546948 - DNA, 25 bp, Homo sapien
tggagtcccttggtcaaaggtatta

SEQ ID NO: 1546949 - DNA, 25 bp, Homo sapien
agcatgctgaattgattggagtccc

SEQ ID NO: 1546950 - DNA, 25 bp, Homo sapien
gattgtcccgcaacagtattacaaa

SEQ ID NO: 1546951 - DNA, 25 bp, Homo sapien
taaagtttattacaggcccagtgag

SEQ ID NO: 1546952 - DNA, 25 bp, Homo sapien
gggacttggtagatcatttgaacac

SEQ ID NO: 1546953 - DNA, 25 bp, Homo sapien
gtagaggtacttgcttcactagaga

SEQ ID NO: 1546954 - DNA, 25 bp, Homo sapien
taagtttaggttgcaacacatgtct

SEQ ID NO: 1546955 - DNA, 25 bp, Homo sapien
tgccaatcacatccacaccaggggt

SEQ ID NO: 1546956 - DNA, 25 bp, Homo sapien
gccaatcacatccacaccaggggtg

SEQ ID NO: 1546957 - DNA, 25 bp, Homo sapien
ctgccaatcacatccacaccagggg

SEQ ID NO: 1546958 - DNA, 25 bp, Homo sapien
gcctcggtcccaggtgtaccgtgaa

SEQ ID NO: 1546959 - DNA, 25 bp, Homo sapien
acacagcatgaccacgggcctcggt

SEQ ID NO: 1546960 - DNA, 25 bp, Homo sapien
ggtgtaccgtgaagacgtccccata

SEQ ID NO: 1546961 - DNA, 25 bp, Homo sapien
aagacgtccccatatttctctcgga

SEQ ID NO: 1546962 - DNA, 25 bp, Homo sapien
tccatgatgacgatttttccccggc

SEQ ID NO: 1546963 - DNA, 25 bp, Homo sapien
catatccctggtagactgggtccat

SEQ ID NO: 1546964 - DNA, 25 bp, Homo sapien
gtccatgatgacgatttttccccgg

SEQ ID NO: 1546965 - DNA, 25 bp, Homo sapien
ggtccatgatgacgatttttccccg

SEQ ID NO: 1546966 - DNA, 25 bp, Homo sapien
cggtttccattggcaaagagcatgc

SEQ ID NO: 1546967 - DNA, 25 bp, Homo sapien
gcggtttccattggcaaagagcatg

SEQ ID NO: 1546968 - DNA, 25 bp, Homo sapien
cagcggtttccattggcaaagagca

SEQ ID NO: 1546969 - DNA, 25 bp, Homo sapien
ccagcggtttccattggcaaagagc

SEQ ID NO: 1546970 - DNA, 25 bp, Homo sapien
tctttctacatctagggctctccag

SEQ ID NO: 1546971 - DNA, 25 bp, Homo sapien
gagcacccaagaatgtcaggttagt

SEQ ID NO: 1546972 - DNA, 25 bp, Homo sapien
ggctctccagtcatccgggcattat

SEQ ID NO: 1546973 - DNA, 25 bp, Homo sapien
taagtgatacctgtatacaccaggc

SEQ ID NO: 1546974 - DNA, 25 bp, Homo sapien
tatagagctgatgagtaagaaactc

SEQ ID NO: 1546975 - DNA, 25 bp, Homo sapien
ctctggcagaacaagttcagcgtct

SEQ ID NO: 1546976 - DNA, 25 bp, Homo sapien
ggctggatatagagctgatgagtaa

SEQ ID NO: 1546977 - DNA, 25 bp, Homo sapien
gcagatgatgttggcggtaatggaa

SEQ ID NO: 1546978 - DNA, 25 bp, Homo sapien
ccctccctctccttctccctctcct

SEQ ID NO: 1546979 - DNA, 25 bp, Homo sapien
ccctctccttctccctctcctggac

SEQ ID NO: 1546980 - DNA, 25 bp, Homo sapien
ccaccctccctctccttctccctct

SEQ ID NO: 1546981 - DNA, 25 bp, Homo sapien
ctccctctccttctccctctcctgg

SEQ ID NO: 1546982 - DNA, 25 bp, Homo sapien
ccagggataagctgcatttctgagc

SEQ ID NO: 1546983 - DNA, 25 bp, Homo sapien
gagcccccaagtcaggtcatccttt

SEQ ID NO: 1546984 - DNA, 25 bp, Homo sapien
tttctcgtgtgtcctggatgttcac

SEQ ID NO: 1546985 - DNA, 25 bp, Homo sapien
cagggataagctgcatttctgagcc

SEQ ID NO: 1546986 - DNA, 25 bp, Homo sapien
gtgtgccccaggaaagtatttcaag

SEQ ID NO: 1546987 - DNA, 25 bp, Homo sapien
agaagccagagaagagctcaaacag

SEQ ID NO: 1546988 - DNA, 25 bp, Homo sapien
acactgtggccaatgtaagcattga

SEQ ID NO: 1546989 - DNA, 25 bp, Homo sapien
cacactgtggccaatgtaagcattg

SEQ ID NO: 1546990 - DNA, 25 bp, Homo sapien
agggtttcacggtgcttctccacac

SEQ ID NO: 1546991 - DNA, 25 bp, Homo sapien
ggtccagggtttcacggtgcttctc

SEQ ID NO: 1546992 - DNA, 25 bp, Homo sapien
ttctggtggctgaattcactgtgtg

SEQ ID NO: 1546993 - DNA, 25 bp, Homo sapien
ggttctggtggctgaattcactgtg

SEQ ID NO: 1546994 - DNA, 25 bp, Homo sapien
gttctggtggctgaattcactgtgt

SEQ ID NO: 1546995 - DNA, 25 bp, Homo sapien
aggttctggtggctgaattcactgt

SEQ ID NO: 1546996 - DNA, 25 bp, Homo sapien
gtccatgcatccaccaacagaattg

SEQ ID NO: 1546997 - DNA, 25 bp, Homo sapien
ggtggtacccatagccccatttctg

SEQ ID NO: 1546998 - DNA, 25 bp, Homo sapien
ggcttgattggaagctagtccagag

SEQ ID NO: 1546999 - DNA, 25 bp, Homo sapien
gatcccggaataggaagccagcatc

SEQ ID NO: 1547000 - DNA, 25 bp, Homo sapien
tacactgttcgggtgataaataccc

SEQ ID NO: 1547001 - DNA, 25 bp, Homo sapien
tttaagtcatggcacagaaagtcaa

SEQ ID NO: 1547002 - DNA, 25 bp, Homo sapien
gaccattacaaaacctacgcacata

SEQ ID NO: 1547003 - DNA, 25 bp, Homo sapien
taacggccctaacttgaccattaca

SEQ ID NO: 1547004 - DNA, 25 bp, Homo sapien
gaaagactgactgatggaaggataa

SEQ ID NO: 1547005 - DNA, 25 bp, Homo sapien
cctagttcatagaaggatggaagaa

SEQ ID NO: 1547006 - DNA, 25 bp, Homo sapien
caatagatcaattcatggaaggaaa

SEQ ID NO: 1547007 - DNA, 25 bp, Homo sapien
gaatggctagatttatggaagaaca

SEQ ID NO: 1547008 - DNA, 25 bp, Homo sapien
aatgaatctcattttaaagaggcat

SEQ ID NO: 1547009 - DNA, 25 bp, Homo sapien
gaatgaatctcattttaaagaggca

SEQ ID NO: 1547010 - DNA, 25 bp, Homo sapien
gagaagaagatgaatgaatctcatt

SEQ ID NO: 1547011 - DNA, 25 bp, Homo sapien
gcacagagaagaagatgaatgaatc

SEQ ID NO: 1547012 - DNA, 25 bp, Homo sapien
ctggagggcgatgtgggccaaccac

SEQ ID NO: 1547013 - DNA, 25 bp, Homo sapien
caaatctctgaatctcacggatgac

SEQ ID NO: 1547014 - DNA, 25 bp, Homo sapien
tggcattttggctcggtcatcaagc

SEQ ID NO: 1547015 - DNA, 25 bp, Homo sapien
ggtcagcaaatctctgaatctcacg

SEQ ID NO: 1547016 - DNA, 25 bp, Homo sapien
tgaggaaggatcacaagatcaaaag

SEQ ID NO: 1547017 - DNA, 25 bp, Homo sapien
tcaggatgagaaatacttccgtgtc

SEQ ID NO: 1547018 - DNA, 25 bp, Homo sapien
ctcaggatgagaaatacttccgtgt

SEQ ID NO: 1547019 - DNA, 25 bp, Homo sapien
tttcaaagtagtgtgggtcacggag

SEQ ID NO: 1547020 - DNA, 25 bp, Homo sapien
caaagtagtgtgggtcacggagagc

SEQ ID NO: 1547021 - DNA, 25 bp, Homo sapien
agtgccccattggcatccagaaagt

SEQ ID NO: 1547022 - DNA, 25 bp, Homo sapien
gtgccccattggcatccagaaagtg

SEQ ID NO: 1547023 - DNA, 25 bp, Homo sapien
aggataggacctgccctctggtgtc

SEQ ID NO: 1547024 - DNA, 25 bp, Homo sapien
tctcaagttgaggataggacctgcc

SEQ ID NO: 1547025 - DNA, 25 bp, Homo sapien
tgggaaagaaactgtgggtccagct

SEQ ID NO: 1547026 - DNA, 25 bp, Homo sapien
tgtctgggaaagaaactgtgggtcc

SEQ ID NO: 1547027 - DNA, 25 bp, Homo sapien
agtcacaggctacaagctgcccaga

SEQ ID NO: 1547028 - DNA, 25 bp, Homo sapien
aactgggacaagtcagagcacgtca

SEQ ID NO: 1547029 - DNA, 25 bp, Homo sapien
gatcacattgctgggtggagctctc

SEQ ID NO: 1547030 - DNA, 25 bp, Homo sapien
caagtaaccttggacaatcagggca

SEQ ID NO: 1547031 - DNA, 25 bp, Homo sapien
ctgggtgatagaacgagacggtgtc

SEQ ID NO: 1547032 - DNA, 25 bp, Homo sapien
tgatagaacgagacggtgtctcaaa

SEQ ID NO: 1547033 - DNA, 25 bp, Homo sapien
cctgggtgatagaacgagacggtgt

SEQ ID NO: 1547034 - DNA, 25 bp, Homo sapien
ggtgatagaacgagacggtgtctca

SEQ ID NO: 1547035 - DNA, 25 bp, Homo sapien
taacctcctatctccatctatttga

SEQ ID NO: 1547036 - DNA, 25 bp, Homo sapien
tccgtatactgcctgatgttcacct

SEQ ID NO: 1547037 - DNA, 25 bp, Homo sapien
tcttctccttatgtggctctctctg

SEQ ID NO: 1547038 - DNA, 25 bp, Homo sapien
ctatttgaatctgattgctccccaa

SEQ ID NO: 1547039 - DNA, 25 bp, Homo sapien
ctggggtgtcagatcgatgtcttca

SEQ ID NO: 1547040 - DNA, 25 bp, Homo sapien
agaggaacaattccgcacgggcaat

SEQ ID NO: 1547041 - DNA, 25 bp, Homo sapien
gaacaattccgcacgggcaatgcct

SEQ ID NO: 1547042 - DNA, 25 bp, Homo sapien
gaagaggaacaattccgcacgggca

SEQ ID NO: 1547043 - DNA, 25 bp, Homo sapien
acctcagacaactggtgccatggaa

SEQ ID NO: 1547044 - DNA, 25 bp, Homo sapien
tagcgttcaacgtgaaaggaaccag

SEQ ID NO: 1547045 - DNA, 25 bp, Homo sapien
cactcatttgcactgcgacctcaga

SEQ ID NO: 1547046 - DNA, 25 bp, Homo sapien
tgtggtctacaacaggcacgaacct

SEQ ID NO: 1547047 - DNA, 25 bp, Homo sapien
catgactgagttctccataaccaca

SEQ ID NO: 1547048 - DNA, 25 bp, Homo sapien
aaccacatagtcacctagtagccct

SEQ ID NO: 1547049 - DNA, 25 bp, Homo sapien
taaggcccatcttctcatgactgag

SEQ ID NO: 1547050 - DNA, 25 bp, Homo sapien
cccagtaaggcccatcttctcatga

SEQ ID NO: 1547051 - DNA, 25 bp, Homo sapien
tcatgggtgttagggtggcgctgaa

SEQ ID NO: 1547052 - DNA, 25 bp, Homo sapien
aggcggtcatgggtgttagggtggc

SEQ ID NO: 1547053 - DNA, 25 bp, Homo sapien
cggtcatgggtgttagggtggcgct

SEQ ID NO: 1547054 - DNA, 25 bp, Homo sapien
ggtgggaggcggtcatgggtgttag

SEQ ID NO: 1547055 - DNA, 25 bp, Homo sapien
atttgagtaggcctcttctatccat

SEQ ID NO: 1547056 - DNA, 25 bp, Homo sapien
aaaggatttgagtaggcctcttcta

SEQ ID NO: 1547057 - DNA, 25 bp, Homo sapien
ttgagtaggcctcttctatccatct

SEQ ID NO: 1547058 - DNA, 25 bp, Homo sapien
aggatttgagtaggcctcttctatc

SEQ ID NO: 1547059 - DNA, 25 bp, Homo sapien
tatgcccagctaatatttgtatttt

SEQ ID NO: 1547060 - DNA, 25 bp, Homo sapien
ccaccacctcggcctccaaaagcac

SEQ ID NO: 1547061 - DNA, 25 bp, Homo sapien
atccaccacctcggcctccaaaagc

SEQ ID NO: 1547062 - DNA, 25 bp, Homo sapien
gagattacaggcacgcatcactatg

SEQ ID NO: 1547063 - DNA, 25 bp, Homo sapien
catatccccggaagaatgggtcgac

SEQ ID NO: 1547064 - DNA, 25 bp, Homo sapien
tcgaccatggcgatttttccccggc

SEQ ID NO: 1547065 - DNA, 25 bp, Homo sapien
tccccggaagaatgggtcgaccatg

SEQ ID NO: 1547066 - DNA, 25 bp, Homo sapien
gaagaatgggtcgaccatggcgatt

SEQ ID NO: 1547067 - DNA, 25 bp, Homo sapien
atcccgaagtccctcatagtggtca

SEQ ID NO: 1547068 - DNA, 25 bp, Homo sapien
cagcggtttccattggcaaagatca

SEQ ID NO: 1547069 - DNA, 25 bp, Homo sapien
ccagcggtttccattggcaaagatc

SEQ ID NO: 1547070 - DNA, 25 bp, Homo sapien
ccatcccgaagtccctcatagtggt

SEQ ID NO: 1547071 - DNA, 25 bp, Homo sapien
tgaaaaagtctggtagaacaagttc

SEQ ID NO: 1547072 - DNA, 25 bp, Homo sapien
tgatcttggtagtggaatcgttttc

SEQ ID NO: 1547073 - DNA, 25 bp, Homo sapien
cagatgatgttggcggtaatggact

SEQ ID NO: 1547074 - DNA, 25 bp, Homo sapien
gccgaatacagagctgatgagtgaa

SEQ ID NO: 1547075 - DNA, 25 bp, Homo sapien
ccacaccccctgtccctctccgtct

SEQ ID NO: 1547076 - DNA, 25 bp, Homo sapien
ccccctgtccctctccgtctccctg

SEQ ID NO: 1547077 - DNA, 25 bp, Homo sapien
ccctgtccctctccgtctccctgac

SEQ ID NO: 1547078 - DNA, 25 bp, Homo sapien
cccctgtccctctccgtctccctga

SEQ ID NO: 1547079 - DNA, 25 bp, Homo sapien
cacactgtggccaatgtaagcattg

SEQ ID NO: 1547080 - DNA, 25 bp, Homo sapien
gtgtgccccaggaaagtatttcaag

SEQ ID NO: 1547081 - DNA, 25 bp, Homo sapien
cagggtttcacggtgcttctccaca

SEQ ID NO: 1547082 - DNA, 25 bp, Homo sapien
agaagccagagaagagctcaaacag

SEQ ID NO: 1547083 - DNA, 25 bp, Homo sapien
gtatctctaactcatctctctcagc

SEQ ID NO: 1547084 - DNA, 25 bp, Homo sapien
ggcctaaaggtctttgacactatct

SEQ ID NO: 1547085 - DNA, 25 bp, Homo sapien
tatctggcccagtttgcttttctct

SEQ ID NO: 1547086 - DNA, 25 bp, Homo sapien
tggctgccctccgttggcctaaagg

SEQ ID NO: 1547087 - DNA, 25 bp, Homo sapien
tggctgaattcactgtgtgcgttgg

SEQ ID NO: 1547088 - DNA, 25 bp, Homo sapien
tctggtggctgaattcactgtgtgc

SEQ ID NO: 1547089 - DNA, 25 bp, Homo sapien
gctgaattcactgtgtgcgttggat

SEQ ID NO: 1547090 - DNA, 25 bp, Homo sapien
tggtggctgaattcactgtgtgcgt

SEQ ID NO: 1547091 - DNA, 25 bp, Homo sapien
acccccttgactggctgtccctggc

SEQ ID NO: 1547092 - DNA, 25 bp, Homo sapien
gaatggctagatttatggaagagca

SEQ ID NO: 1547093 - DNA, 25 bp, Homo sapien
tcaaaacaccctctctaagatgagt

SEQ ID NO: 1547094 - DNA, 25 bp, Homo sapien
cacacacaccacgattttgcatgga

SEQ ID NO: 1547095 - DNA, 25 bp, Homo sapien
tcagattaagaactccaggctacaa

SEQ ID NO: 1547096 - DNA, 25 bp, Homo sapien
ctgtacagaaaagaagaccaatgaa

SEQ ID NO: 1547097 - DNA, 25 bp, Homo sapien
cagaaaagaagaccaatgaatctca

SEQ ID NO: 1547098 - DNA, 25 bp, Homo sapien
tgtacagaaaagaagaccaatgaat

SEQ ID NO: 1547099 - DNA, 25 bp, Homo sapien
tacagaaaagaagaccaatgaatct

SEQ ID NO: 1547100 - DNA, 25 bp, Homo sapien
ctgttcaatctccctgtagactctc

SEQ ID NO: 1547101 - DNA, 25 bp, Homo sapien
tgttcaatctccctgtagactctct

SEQ ID NO: 1547102 - DNA, 25 bp, Homo sapien
aggtcggaaaatctctgaatctcat

SEQ ID NO: 1547103 - DNA, 25 bp, Homo sapien
tgtatggcattttggctcggtcatg

SEQ ID NO: 1547104 - DNA, 25 bp, Homo sapien
tggcattttggctcggtcatgaagc

SEQ ID NO: 1547105 - DNA, 25 bp, Homo sapien
ggtcggaaaatctctgaatctcata

SEQ ID NO: 1547106 - DNA, 25 bp, Homo sapien
tcaaagtagtgtgggtcatggagag

SEQ ID NO: 1547107 - DNA, 25 bp, Homo sapien
ttcaaagtagtgtgggtcatggaga

SEQ ID NO: 1547108 - DNA, 25 bp, Homo sapien
tttcaaagtagtgtgggtcatggag

SEQ ID NO: 1547109 - DNA, 25 bp, Homo sapien
caaagtagtgtgggtcatggagagc

SEQ ID NO: 1547110 - DNA, 25 bp, Homo sapien
gaagaggaacaattccgcacgggcg

SEQ ID NO: 1547111 - DNA, 25 bp, Homo sapien
agaggaacaattccgcacgggcgat

SEQ ID NO: 1547112 - DNA, 25 bp, Homo sapien
aacaattccgcacgggcgatgcctt

SEQ ID NO: 1547113 - DNA, 25 bp, Homo sapien
ctggggtgtcagatcgatgtcttct

SEQ ID NO: 1547114 - DNA, 25 bp, Homo sapien
gtatgttgggggtattttgcccaca

SEQ ID NO: 1547115 - DNA, 25 bp, Homo sapien
gatctggtatgttgggggtattttg

SEQ ID NO: 1547116 - DNA, 25 bp, Homo sapien
tggtatgttgggggtattttgccca

SEQ ID NO: 1547117 - DNA, 25 bp, Homo sapien
tgttgggggtattttgcccacacca

SEQ ID NO: 1547118 - DNA, 25 bp, Homo sapien
tacagctttgtgaatgaaccacacg

SEQ ID NO: 1547119 - DNA, 25 bp, Homo sapien
acctcagacaactggtgccatggag

SEQ ID NO: 1547120 - DNA, 25 bp, Homo sapien
gcattcaacatgaaagcaaccagac

SEQ ID NO: 1547121 - DNA, 25 bp, Homo sapien
tgtggtctacaacaggcatgaacct

SEQ ID NO: 1547122 - DNA, 25 bp, Homo sapien
gctctgatgtttggaccttccactg

SEQ ID NO: 1547123 - DNA, 25 bp, Homo sapien
tctgatgtttggaccttccactgtt

SEQ ID NO: 1547124 - DNA, 25 bp, Homo sapien
gatgtttggaccttccactgttgca

SEQ ID NO: 1547125 - DNA, 25 bp, Homo sapien
aggctctgatgtttggaccttccac

SEQ ID NO: 1547126 - DNA, 25 bp, Homo sapien
ggtagtttccaatgaagggcaatgg

SEQ ID NO: 1547127 - DNA, 25 bp, Homo sapien
tgacatcaagaccatcacagtcagg

SEQ ID NO: 1547128 - DNA, 25 bp, Homo sapien
gactgacatcaagaccatcacagtc

SEQ ID NO: 1547129 - DNA, 25 bp, Homo sapien
gtagtttccaatgaagggcaatggg

SEQ ID NO: 1547130 - DNA, 25 bp, Homo sapien
tgacggcatcatgtccgcacagcac

SEQ ID NO: 1547131 - DNA, 25 bp, Homo sapien
ccagagcctccttgacggcatcatg

SEQ ID NO: 1547132 - DNA, 25 bp, Homo sapien
cggggccccaagtgaatggtgaaca

SEQ ID NO: 1547133 - DNA, 25 bp, Homo sapien
tggtccaccagagcctccttgacgg

SEQ ID NO: 1547134 - DNA, 25 bp, Homo sapien
ttgaagagccagtcgaaggtggcct

SEQ ID NO: 1547135 - DNA, 25 bp, Homo sapien
aagagccagtcgaaggtggcctgct

SEQ ID NO: 1547136 - DNA, 25 bp, Homo sapien
agccagtcgaaggtggcctgctcgc

SEQ ID NO: 1547137 - DNA, 25 bp, Homo sapien
ctttgaagagccagtcgaaggtggc

SEQ ID NO: 1547138 - DNA, 25 bp, Homo sapien
gtgccccggagggcgtcgatgagga

SEQ ID NO: 1547139 - DNA, 25 bp, Homo sapien
tgcttggcgcgctccccgttgctga

SEQ ID NO: 1547140 - DNA, 25 bp, Homo sapien
gcgctccccgttgctgaacgccacg

SEQ ID NO: 1547141 - DNA, 25 bp, Homo sapien
tgccccggagggcgtcgatgaggaa

SEQ ID NO: 1547142 - DNA, 25 bp, Homo sapien
aaagcggtccccaaagacaatggag

SEQ ID NO: 1547143 - DNA, 25 bp, Homo sapien
aagaaggtgggatcgatattggcgc

SEQ ID NO: 1547144 - DNA, 25 bp, Homo sapien
ttgtcctcatagtcaaagcggtccc

SEQ ID NO: 1547145 - DNA, 25 bp, Homo sapien
atgacattggagactgtgcggctca

SEQ ID NO: 1547146 - DNA, 25 bp, Homo sapien
gcttcccagcatcatgcgcaacagt

SEQ ID NO: 1547147 - DNA, 25 bp, Homo sapien
gaggttgccgtgaactggaagcttc

SEQ ID NO: 1547148 - DNA, 25 bp, Homo sapien
ggaagcttcccagcatcatgcgcaa

SEQ ID NO: 1547149 - DNA, 25 bp, Homo sapien
tcccagcatcatgcgcaacagtgac

SEQ ID NO: 1547150 - DNA, 25 bp, Homo sapien
tcaccgaagagaacatctcatagag

SEQ ID NO: 1547151 - DNA, 25 bp, Homo sapien
cgtgcgctggttgtgctccaccttc

SEQ ID NO: 1547152 - DNA, 25 bp, Homo sapien
cctgcatgcggatgagaaaggagtc

SEQ ID NO: 1547153 - DNA, 25 bp, Homo sapien
aattgggatccagcgtgcgctggtt

SEQ ID NO: 1547154 - DNA, 25 bp, Homo sapien
tccttaaaggcctgttgctgtggtc

SEQ ID NO: 1547155 - DNA, 25 bp, Homo sapien
tgcctgcactggctgctgggatgta

SEQ ID NO: 1547156 - DNA, 25 bp, Homo sapien
gcctgcactggctgctgggatgtac

SEQ ID NO: 1547157 - DNA, 25 bp, Homo sapien
ctgcctgcactggctgctgggatgt

SEQ ID NO: 1547158 - DNA, 25 bp, Homo sapien
ttcaagtagaactctgtgttggggt

SEQ ID NO: 1547159 - DNA, 25 bp, Homo sapien
caagtagaactctgtgttggggttc

SEQ ID NO: 1547160 - DNA, 25 bp, Homo sapien
tcaagtagaactctgtgttggggtt

SEQ ID NO: 1547161 - DNA, 25 bp, Homo sapien
cttcaagtagaactctgtgttgggg

SEQ ID NO: 1547162 - DNA, 25 bp, Homo sapien
aaagaagaggttcagggtggtcatc

SEQ ID NO: 1547163 - DNA, 25 bp, Homo sapien
aagaagaggttcagggtggtcatca

SEQ ID NO: 1547164 - DNA, 25 bp, Homo sapien
agaagaggttcagggtggtcatcac

SEQ ID NO: 1547165 - DNA, 25 bp, Homo sapien
gtagggcatcttggcccggtcctca

SEQ ID NO: 1547166 - DNA, 25 bp, Homo sapien
tttggatctcgtggatcactgcctc

SEQ ID NO: 1547167 - DNA, 25 bp, Homo sapien
tctgtcaatctcctcatggaccttg

SEQ ID NO: 1547168 - DNA, 25 bp, Homo sapien
ggttcttgccgatcactctgtcaat

SEQ ID NO: 1547169 - DNA, 25 bp, Homo sapien
agcacggagcccagcatagggaaca

SEQ ID NO: 1547170 - DNA, 25 bp, Homo sapien
tcagcacggagcccagcatagggaa

SEQ ID NO: 1547171 - DNA, 25 bp, Homo sapien
cacggagcccagcatagggaacact

SEQ ID NO: 1547172 - DNA, 25 bp, Homo sapien
cggagcccagcatagggaacacttc

SEQ ID NO: 1547173 - DNA, 25 bp, Homo sapien
aggggacttgaagcgaaagttctgc

SEQ ID NO: 1547174 - DNA, 25 bp, Homo sapien
acgtcgatatccttaggcgactgag

SEQ ID NO: 1547175 - DNA, 25 bp, Homo sapien
tgaggggacttgaagcgaaagttct

SEQ ID NO: 1547176 - DNA, 25 bp, Homo sapien
ccttaggcgactgaggggacttgaa

SEQ ID NO: 1547177 - DNA, 25 bp, Homo sapien
tttcgtgggatcgtggcaaagccca

SEQ ID NO: 1547178 - DNA, 25 bp, Homo sapien
tagtttcgtgggatcgtggcaaagc

SEQ ID NO: 1547179 - DNA, 25 bp, Homo sapien
tcatggtgtagtttcgtgggatcgt

SEQ ID NO: 1547180 - DNA, 25 bp, Homo sapien
aggaagctcatggtgtagtttcgtg

SEQ ID NO: 1547181 - DNA, 25 bp, Homo sapien
aggaaataagagctgctattattac

SEQ ID NO: 1547182 - DNA, 25 bp, Homo sapien
ggaaataagagctgctattattact

SEQ ID NO: 1547183 - DNA, 25 bp, Homo sapien
caaagcgtgccgagtaggaaagtgt

SEQ ID NO: 1547184 - DNA, 25 bp, Homo sapien
tgttcaaagcgtgccgagtaggaaa

SEQ ID NO: 1547185 - DNA, 25 bp, Homo sapien
tcaaagcgtgccgagtaggaaagtg

SEQ ID NO: 1547186 - DNA, 25 bp, Homo sapien
ctggtgttcaaagcgtgccgagtag

SEQ ID NO: 1547187 - DNA, 25 bp, Homo sapien
actggctgggatgcgctagagcctg

SEQ ID NO: 1547188 - DNA, 25 bp, Homo sapien
ctggctgggatgcgctagagcctgc

SEQ ID NO: 1547189 - DNA, 25 bp, Homo sapien
agtcagcatgtcttgggagcaaagc

SEQ ID NO: 1547190 - DNA, 25 bp, Homo sapien
gagtaagatggctgtgcttatgctg

SEQ ID NO: 1547191 - DNA, 25 bp, Homo sapien
gctttcccttatctcttgagcttag

SEQ ID NO: 1547192 - DNA, 25 bp, Homo sapien
agcttagggtcaggagcagacagac

SEQ ID NO: 1547193 - DNA, 25 bp, Homo sapien
agggcctccttcacagcttggtacc

SEQ ID NO: 1547194 - DNA, 25 bp, Homo sapien
gggtcccaggtgcactgtgtacatg

SEQ ID NO: 1547195 - DNA, 25 bp, Homo sapien
tgtgtacatggagccatactccttg

SEQ ID NO: 1547196 - DNA, 25 bp, Homo sapien
ttgaaaaaggcagggtagtcaccgc

SEQ ID NO: 1547197 - DNA, 25 bp, Homo sapien
ccgtagaatctggatagagaactgt

SEQ ID NO: 1547198 - DNA, 25 bp, Homo sapien
aagctgccctcctctaggattcgct

SEQ ID NO: 1547199 - DNA, 25 bp, Homo sapien
gaactgtctcaggaccttccatcga

SEQ ID NO: 1547200 - DNA, 25 bp, Homo sapien
catcccgaaattccgtagaatctgg

SEQ ID NO: 1547201 - DNA, 25 bp, Homo sapien
gctgccgaagagcacggaacagata

SEQ ID NO: 1547202 - DNA, 25 bp, Homo sapien
cacaaacgtggggtcaaagggctcg

SEQ ID NO: 1547203 - DNA, 25 bp, Homo sapien
ggtgagcagacgctcatcatcatag

SEQ ID NO: 1547204 - DNA, 25 bp, Homo sapien
aagttgtcattgataaggcggataa

SEQ ID NO: 1547205 - DNA, 25 bp, Homo sapien
caggaggctcgggaagatgtcgtac
